United States Patent Application Publication US 2008/0318210 A1 - sequence listing, part 8

SEQ ID NO: 281908 - RNA, 21 nt, Human adenovirus B (HAdV-B)
ccgcgcaauguuuugcauuac

SEQ ID NO: 281909 - RNA, 19 nt, Human adenovirus B (HAdV-B)
ccgcguuuugcuauacaaa

SEQ ID NO: 281910 - RNA, 16 nt, Human adenovirus B (HAdV-B)
ccgcuuucgcugcuuu

SEQ ID NO: 281911 - RNA, 18 nt, Human adenovirus B (HAdV-B)
ccggauugcagcacugaa

SEQ ID NO: 281912 - RNA, 15 nt, Human adenovirus B (HAdV-B)
ccggcaucaauggag

SEQ ID NO: 281913 - RNA, 16 nt, Human adenovirus B (HAdV-B)
ccggcauuaacuccuc

SEQ ID NO: 281914 - RNA, 20 nt, Human adenovirus B (HAdV-B)
ccgggaccuguuuguaaugu

SEQ ID NO: 281915 - RNA, 17 nt, Human adenovirus B (HAdV-B)
ccgucaccuccacagcc

SEQ ID NO: 281916 - RNA, 15 nt, Human adenovirus B (HAdV-B)
ccgugcgacugcugu

SEQ ID NO: 281917 - RNA, 23 nt, Human adenovirus B (HAdV-B)
ccguguccuuugggcgccacuac

SEQ ID NO: 281918 - RNA, 15 nt, Human adenovirus B (HAdV-B)
ccuaagagaccugcu

SEQ ID NO: 281919 - RNA, 16 nt, Human adenovirus B (HAdV-B)
ccuaagagaccugcua

SEQ ID NO: 281920 - RNA, 18 nt, Human adenovirus B (HAdV-B)
ccuacaaaacaugcaaca

SEQ ID NO: 281921 - RNA, 18 nt, Human adenovirus B (HAdV-B)
ccuacagagucucugaca

SEQ ID NO: 281922 - RNA, 21 nt, Human adenovirus B (HAdV-B)
ccuacagagucucugacaaag

SEQ ID NO: 281923 - RNA, 21 nt, Human adenovirus B (HAdV-B)
ccuaccgaaaccaaauacuuu

SEQ ID NO: 281924 - RNA, 18 nt, Human adenovirus B (HAdV-B)
ccuacgagaucaccgcua

SEQ ID NO: 281925 - RNA, 18 nt, Human adenovirus B (HAdV-B)
ccuacuauagccagcaaa

SEQ ID NO: 281926 - RNA, 18 nt, Human adenovirus B (HAdV-B)
ccuaguguaccaggaaag

SEQ ID NO: 281927 - RNA, 14 nt, Human adenovirus B (HAdV-B)
ccuauaguacucca

SEQ ID NO: 281928 - RNA, 21 nt, Human adenovirus B (HAdV-B)
ccuauugcauuugcaucccag

SEQ ID NO: 281929 - RNA, 19 nt, Human adenovirus B (HAdV-B)
ccucacuucccucuuccca

SEQ ID NO: 281930 - RNA, 23 nt, Human adenovirus B (HAdV-B)
ccucuaggacauaauuacacucu

SEQ ID NO: 281931 - RNA, 14 nt, Human adenovirus B (HAdV-B)
ccucugauacuugc

SEQ ID NO: 281932 - RNA, 21 nt, Human adenovirus B (HAdV-B)
ccucuuucuguuuacagacau

SEQ ID NO: 281933 - RNA, 16 nt, Human adenovirus B (HAdV-B)
ccugauuauauuucca

SEQ ID NO: 281934 - RNA, 17 nt, Human adenovirus B (HAdV-B)
ccugauuauauuuccag

SEQ ID NO: 281935 - RNA, 14 nt, Human adenovirus B (HAdV-B)
ccugauuuaugauu

SEQ ID NO: 281936 - RNA, 19 nt, Human adenovirus B (HAdV-B)
ccugcacggucuggguaga

SEQ ID NO: 281937 - RNA, 23 nt, Human adenovirus B (HAdV-B)
ccugcgccgcagcgcucuugcua

SEQ ID NO: 281938 - RNA, 14 nt, Human adenovirus B (HAdV-B)
ccugcuugcaugag

SEQ ID NO: 281939 - RNA, 18 nt, Human adenovirus B (HAdV-B)
ccuggagcgacaucggca

SEQ ID NO: 281940 - RNA, 17 nt, Human adenovirus B (HAdV-B)
ccuggccaucgugaacg

SEQ ID NO: 281941 - RNA, 16 nt, Human adenovirus B (HAdV-B)
ccugggaaacguccag

SEQ ID NO: 281942 - RNA, 16 nt, Human adenovirus B (HAdV-B)
ccugggauauguuucu

SEQ ID NO: 281943 - RNA, 18 nt, Human adenovirus B (HAdV-B)
ccuguagcgaauugagaa

SEQ ID NO: 281944 - RNA, 15 nt, Human adenovirus B (HAdV-B)
ccuuagaaaaugcaa

SEQ ID NO: 281945 - RNA, 21 nt, Human adenovirus B (HAdV-B)
ccuuagaaaaugcaaauucca

SEQ ID NO: 281946 - RNA, 22 nt, Human adenovirus B (HAdV-B)
cugcacacuaaaaggaccucaa

SEQ ID NO: 281947 - RNA, 20 nt, Human adenovirus B (HAdV-B)
cugccgcucauggacaaaca

SEQ ID NO: 281948 - RNA, 15 nt, Human adenovirus B (HAdV-B)
cugccgcuucuucaa

SEQ ID NO: 281949 - RNA, 19 nt, Human adenovirus B (HAdV-B)
cugcgacaucuagaccacu

SEQ ID NO: 281950 - RNA, 13 nt, Human adenovirus B (HAdV-B)
cugcgccuacauc

SEQ ID NO: 281951 - RNA, 18 nt, Human adenovirus B (HAdV-B)
cugcucgcucacaccuca

SEQ ID NO: 281952 - RNA, 12 nt, Human adenovirus B (HAdV-B)
cugcucuuguuc

SEQ ID NO: 281953 - RNA, 21 nt, Human adenovirus B (HAdV-B)
cuggaaaaaucuacccagacc

SEQ ID NO: 281954 - RNA, 15 nt, Human adenovirus B (HAdV-B)
cuggaaugcucccaa

SEQ ID NO: 281955 - RNA, 22 nt, Human adenovirus B (HAdV-B)
cuggaaugcucccaaugcacau

SEQ ID NO: 281956 - RNA, 18 nt, Human adenovirus B (HAdV-B)
cuggagcgggcuuaaaaa

SEQ ID NO: 281957 - RNA, 20 nt, Human adenovirus B (HAdV-B)
cuggaucuacguccacugga

SEQ ID NO: 281958 - RNA, 21 nt, Human adenovirus B (HAdV-B)
cuggaucuacguccacuggac

SEQ ID NO: 281959 - RNA, 17 nt, Human adenovirus B (HAdV-B)
cuggcaccucaguacga

SEQ ID NO: 281960 - RNA, 22 nt, Human adenovirus B (HAdV-B)
cuggcgaaagauggcgugagaa

SEQ ID NO: 281961 - RNA, 15 nt, Human adenovirus B (HAdV-B)
cugggaaacguccag

SEQ ID NO: 281962 - RNA, 18 nt, Human adenovirus B (HAdV-B)
cugggaugcaaaugcaau

SEQ ID NO: 281963 - RNA, 19 nt, Human adenovirus B (HAdV-B)
cugggaugcaaaugcaaua

SEQ ID NO: 281964 - RNA, 17 nt, Human adenovirus B (HAdV-B)
cugggaugggugcauuc

SEQ ID NO: 281965 - RNA, 18 nt, Human adenovirus B (HAdV-B)
cugguagauuuuucugca

SEQ ID NO: 281966 - RNA, 17 nt, Human adenovirus B (HAdV-B)
cugguucgcuagugaau

SEQ ID NO: 281967 - RNA, 16 nt, Human adenovirus B (HAdV-B)
cugucccuaccuacua

SEQ ID NO: 281968 - RNA, 20 nt, Human adenovirus B (HAdV-B)
cugucguccaggacucuguu

SEQ ID NO: 281969 - RNA, 22 nt, Human adenovirus B (HAdV-B)
cugucucaaccccagcugccua

SEQ ID NO: 281970 - RNA, 24 nt, Human adenovirus B (HAdV-B)
cugucucaaccccagcugccuaua

SEQ ID NO: 281971 - RNA, 14 nt, Human adenovirus B (HAdV-B)
cugucuugcagcug

SEQ ID NO: 281972 - RNA, 17 nt, Human adenovirus B (HAdV-B)
cugucuugcagcuguca

SEQ ID NO: 281973 - RNA, 23 nt, Human adenovirus B (HAdV-B)
cuguggaaaucaaguaccaucug

SEQ ID NO: 281974 - RNA, 14 nt, Human adenovirus B (HAdV-B)
cuguguaguaacaa

SEQ ID NO: 281975 - RNA, 17 nt, Human adenovirus B (HAdV-B)
cugugugguuagcucau

SEQ ID NO: 281976 - RNA, 17 nt, Human adenovirus B (HAdV-B)
cuguguuccaggaccaa

SEQ ID NO: 281977 - RNA, 18 nt, Human adenovirus B (HAdV-B)
cuguuaacuucaccuuuc

SEQ ID NO: 281978 - RNA, 15 nt, Human adenovirus B (HAdV-B)
cuguuuggaaugugg

SEQ ID NO: 281979 - RNA, 18 nt, Human adenovirus B (HAdV-B)
cuuaaaaauuuuggcuca

SEQ ID NO: 281980 - RNA, 12 nt, Human adenovirus B (HAdV-B)
cuuaaagaccag

SEQ ID NO: 281981 - RNA, 14 nt, Human adenovirus B (HAdV-B)
cuuaaaguagcaua

SEQ ID NO: 281982 - RNA, 17 nt, Human adenovirus B (HAdV-B)
cuuaaggugacgucaau

SEQ ID NO: 281983 - RNA, 15 nt, Human adenovirus B (HAdV-B)
cuuacgaacuuggcc

SEQ ID NO: 281984 - RNA, 11 nt, Human adenovirus B (HAdV-B)
cuuacuuuaaa

SEQ ID NO: 281985 - RNA, 20 nt, Human adenovirus B (HAdV-B)
cuuagaaaaugcaaauucca

SEQ ID NO: 281986 - RNA, 15 nt, Human adenovirus B (HAdV-B)
cuucaaucugggaaa

SEQ ID NO: 281987 - RNA, 15 nt, Human adenovirus B (HAdV-B)
cuucaccauacucau

SEQ ID NO: 281988 - RNA, 19 nt, Human adenovirus B (HAdV-B)
cuucaccauacucauuugu

SEQ ID NO: 281989 - RNA, 20 nt, Human adenovirus B (HAdV-B)
cuucaccuuuccuacucaca

SEQ ID NO: 281990 - RNA, 19 nt, Human adenovirus B (HAdV-B)
cuucaugucuuucuuccca

SEQ ID NO: 281991 - RNA, 24 nt, Human adenovirus B (HAdV-B)
cuucaugucuuucuucccagauga

SEQ ID NO: 281992 - RNA, 15 nt, Human adenovirus B (HAdV-B)
cuucccucuucccaa

SEQ ID NO: 281993 - RNA, 15 nt, Human adenovirus B (HAdV-B)
cuucuauugcuuccc

SEQ ID NO: 281994 - RNA, 14 nt, Human adenovirus B (HAdV-B)
cuucucuuacaucu

SEQ ID NO: 281995 - RNA, 21 nt, Human adenovirus B (HAdV-B)
cuucugcucgcucacaccuca

SEQ ID NO: 281996 - RNA, 15 nt, Human adenovirus B (HAdV-B)
cuucuggcuaagcag

SEQ ID NO: 281997 - RNA, 20 nt, Human adenovirus B (HAdV-B)
cuucuugaccacgguggugc

SEQ ID NO: 281998 - RNA, 16 nt, Human adenovirus B (HAdV-B)
cuugaaacacaaucca

SEQ ID NO: 281999 - RNA, 14 nt, Human adenovirus B (HAdV-B)
cuugaaaucacaau

SEQ ID NO: 282000 - RNA, 16 nt, Human adenovirus B (HAdV-B)
cuugaaaucacaauua

SEQ ID NO: 282001 - RNA, 14 nt, Human adenovirus B (HAdV-B)
cuugaacuaucaca

SEQ ID NO: 282002 - RNA, 21 nt, Human adenovirus B (HAdV-B)
cuugaauucgggaaucaccaa

SEQ ID NO: 282003 - RNA, 24 nt, Human adenovirus B (HAdV-B)
cuugaauucgggaaucaccaacuu

SEQ ID NO: 282004 - RNA, 23 nt, Human adenovirus B (HAdV-B)
cuugaguacacggaaacguccaa

SEQ ID NO: 282005 - RNA, 13 nt, Human adenovirus B (HAdV-B)
cuugauacaugua

SEQ ID NO: 282006 - RNA, 13 nt, Human adenovirus B (HAdV-B)
cuugcagcuguca

SEQ ID NO: 282007 - RNA, 13 nt, Human adenovirus B (HAdV-B)
cuugcuucuugca

SEQ ID NO: 282008 - RNA, 12 nt, Human adenovirus B (HAdV-B)
cuugcuugcuau

SEQ ID NO: 282009 - RNA, 19 nt, Human adenovirus B (HAdV-B)
cuuguaucugacgucucug

SEQ ID NO: 282010 - RNA, 20 nt, Human adenovirus B (HAdV-B)
cuuguuuauuugaaaaucaa

SEQ ID NO: 282011 - RNA, 15 nt, Human adenovirus B (HAdV-B)
cuuuagcauuaguaa

SEQ ID NO: 282012 - RNA, 19 nt, Human adenovirus B (HAdV-B)
cuuuaggagaaugaagcau

SEQ ID NO: 282013 - RNA, 22 nt, Human adenovirus B (HAdV-B)
cuuucacagcaguagccacagc

SEQ ID NO: 282014 - RNA, 18 nt, Human adenovirus B (HAdV-B)
cuuucauuuuuucugaaa

SEQ ID NO: 282015 - RNA, 16 nt, Human adenovirus B (HAdV-B)
cuuucgguuggaaccc

SEQ ID NO: 282016 - RNA, 17 nt, Human adenovirus B (HAdV-B)
cuuucuccauacuuuaa

SEQ ID NO: 282017 - RNA, 18 nt, Human adenovirus B (HAdV-B)
cuuucuccauacuuuaaa

SEQ ID NO: 282018 - RNA, 22 nt, Human adenovirus B (HAdV-B)
cuuucuuagugguguuguggua

SEQ ID NO: 282019 - RNA, 17 nt, Human adenovirus B (HAdV-B)
cuuuggacgcagcugca

SEQ ID NO: 282020 - RNA, 21 nt, Human adenovirus B (HAdV-B)
cuuuuaaggggggagucuuca

SEQ ID NO: 282021 - RNA, 21 nt, Human adenovirus B (HAdV-B)
cuuuuggaaccggguucugcc

SEQ ID NO: 282022 - RNA, 22 nt, Human adenovirus B (HAdV-B)
cuuuuggaaccggguucugcca

SEQ ID NO: 282023 - RNA, 12 nt, Human adenovirus B (HAdV-B)
cuuuuguuacuu

SEQ ID NO: 282024 - RNA, 19 nt, Human adenovirus B (HAdV-B)
cuuuuguuacuugcaucug

SEQ ID NO: 282025 - RNA, 15 nt, Human adenovirus B (HAdV-B)
cuuuuugaagcucuu

SEQ ID NO: 282026 - RNA, 16 nt, Human adenovirus B (HAdV-B)
gaaaaacuuuuccuca

SEQ ID NO: 282027 - RNA, 24 nt, Human adenovirus B (HAdV-B)
gaaaacugcacacuuacuuuugca

SEQ ID NO: 282028 - RNA, 20 nt, Human adenovirus B (HAdV-B)
gaaaauacacaacaagugca

SEQ ID NO: 282029 - RNA, 22 nt, Human adenovirus B (HAdV-B)
gaaaaucaauucacaaaauccg

SEQ ID NO: 282030 - RNA, 14 nt, Human adenovirus B (HAdV-B)
gaaaaugccaaaua

SEQ ID NO: 282031 - RNA, 13 nt, Human adenovirus B (HAdV-B)
gaaacaccaucag

SEQ ID NO: 282032 - RNA, 12 nt, Human adenovirus B (HAdV-B)
gaaaccaaauac

SEQ ID NO: 282033 - RNA, 20 nt, Human adenovirus B (HAdV-B)
gaaaccgcugaaaaacuuuu

SEQ ID NO: 282034 - RNA, 17 nt, Human adenovirus B (HAdV-B)
gaaacguccaagacaau

SEQ ID NO: 282035 - RNA, 19 nt, Human adenovirus B (HAdV-B)
gaaagccuuugcugucuua

SEQ ID NO: 282036 - RNA, 19 nt, Human adenovirus B (HAdV-B)
gaaaugugcgaucuggcca

SEQ ID NO: 282037 - RNA, 13 nt, Human adenovirus B (HAdV-B)
gaacaaagcuauu

SEQ ID NO: 282038 - RNA, 12 nt, Human adenovirus B (HAdV-B)
gaacaccaauca

SEQ ID NO: 282039 - RNA, 21 nt, Human adenovirus B (HAdV-B)
gaacaccuuagaaaaugcaaa

SEQ ID NO: 282040 - RNA, 16 nt, Human adenovirus B (HAdV-B)
gaacacguuguuuaca

SEQ ID NO: 282041 - RNA, 12 nt, Human adenovirus B (HAdV-B)
gaacagcaguac

SEQ ID NO: 282042 - RNA, 14 nt, Human adenovirus B (HAdV-B)
gaacccaaccagcg

SEQ ID NO: 282043 - RNA, 21 nt, Human adenovirus B (HAdV-B)
gaacccaaccagcgcuuccaa

SEQ ID NO: 282044 - RNA, 16 nt, Human adenovirus B (HAdV-B)
gaaccggguucugcca

SEQ ID NO: 282045 - RNA, 17 nt, Human adenovirus B (HAdV-B)
gaacucauugaguucau

SEQ ID NO: 282046 - RNA, 16 nt, Human adenovirus B (HAdV-B)
gaacugacacgaauaa

SEQ ID NO: 282047 - RNA, 15 nt, Human adenovirus B (HAdV-B)
gaacuuccaacaaaa

SEQ ID NO: 282048 - RNA, 14 nt, Human adenovirus B (HAdV-B)
gaagagcacgagau

SEQ ID NO: 282049 - RNA, 19 nt, Human adenovirus B (HAdV-B)
gcaugaucuuuuccagggc

SEQ ID NO: 282050 - RNA, 17 nt, Human adenovirus B (HAdV-B)
gcauugcuugguuggga

SEQ ID NO: 282051 - RNA, 14 nt, Human adenovirus B (HAdV-B)
gcauuugcauccca

SEQ ID NO: 282052 - RNA, 14 nt, Human adenovirus B (HAdV-B)
gcauuuucccuacu

SEQ ID NO: 282053 - RNA, 18 nt, Human adenovirus B (HAdV-B)
gccaagggcaugucaauu

SEQ ID NO: 282054 - RNA, 20 nt, Human adenovirus B (HAdV-B)
aaugaaacccgagcuucuau

SEQ ID NO: 282055 - RNA, 15 nt, Human adenovirus B (HAdV-B)
aaugacuuuaccccu

SEQ ID NO: 282056 - RNA, 22 nt, Human adenovirus B (HAdV-B)
aaugagucgcagacguccugaa

SEQ ID NO: 282057 - RNA, 18 nt, Human adenovirus B (HAdV-B)
aaugcucccaaugcacau

SEQ ID NO: 282058 - RNA, 21 nt, Human adenovirus B (HAdV-B)
aaugcucccaaugcacaugau

SEQ ID NO: 282059 - RNA, 23 nt, Human adenovirus B (HAdV-B)
aaugcuuguuacauaucuggaaa

SEQ ID NO: 282060 - RNA, 14 nt, Human adenovirus B (HAdV-B)
aauggcaacaucaa

SEQ ID NO: 282061 - RNA, 16 nt, Human adenovirus B (HAdV-B)
aaugggcauacaugca

SEQ ID NO: 282062 - RNA, 17 nt, Human adenovirus B (HAdV-B)
aaugguagagugcuuuu

SEQ ID NO: 282063 - RNA, 21 nt, Human adenovirus B (HAdV-B)
aauguuuagauacaugggcau

SEQ ID NO: 282064 - RNA, 12 nt, Human adenovirus B (HAdV-B)
aauuaagacucu

SEQ ID NO: 282065 - RNA, 22 nt, Human adenovirus B (HAdV-B)
aauuaugagaagaugcaugcau

SEQ ID NO: 282066 - RNA, 12 nt, Human adenovirus B (HAdV-B)
aauuaugccaag

SEQ ID NO: 282067 - RNA, 14 nt, Human adenovirus B (HAdV-B)
aauucaccaaugca

SEQ ID NO: 282068 - RNA, 14 nt, Human adenovirus B (HAdV-B)
aauucgggaaucac

SEQ ID NO: 282069 - RNA, 21 nt, Human adenovirus B (HAdV-B)
aauugacaugcccuuggcucu

SEQ ID NO: 282070 - RNA, 21 nt, Human adenovirus B (HAdV-B)
aauugauguugccauucucaa

SEQ ID NO: 282071 - RNA, 21 nt, Human adenovirus B (HAdV-B)
aauuggguucuucauugucau

SEQ ID NO: 282072 - RNA, 14 nt, Human adenovirus B (HAdV-B)
aauuuaauaaugau

SEQ ID NO: 282073 - RNA, 13 nt, Human adenovirus B (HAdV-B)
aauuugggccauc

SEQ ID NO: 282074 - RNA, 21 nt, Human adenovirus B (HAdV-B)
aauuuucucccagcagcaccu

SEQ ID NO: 282075 - RNA, 15 nt, Human adenovirus B (HAdV-B)
acaaaacaaaaccaa

SEQ ID NO: 282076 - RNA, 21 nt, Human adenovirus B (HAdV-B)
acaaaaccaugugaccaaccu

SEQ ID NO: 282077 - RNA, 23 nt, Human adenovirus B (HAdV-B)
acaaaaccuggaacaauaccuua

SEQ ID NO: 282078 - RNA, 18 nt, Human adenovirus B (HAdV-B)
acaaacagucgucucuau

SEQ ID NO: 282079 - RNA, 12 nt, Human adenovirus B (HAdV-B)
acaacacuuuca

SEQ ID NO: 282080 - RNA, 20 nt, Human adenovirus B (HAdV-B)
acaacaguagcaaugugcaa

SEQ ID NO: 282081 - RNA, 17 nt, Human adenovirus B (HAdV-B)
acaacguguucaauaaa

SEQ ID NO: 282082 - RNA, 21 nt, Human adenovirus B (HAdV-B)
acaacugaagccagcauucuu

SEQ ID NO: 282083 - RNA, 17 nt, Human adenovirus B (HAdV-B)
acaaggucgcagugcau

SEQ ID NO: 282084 - RNA, 22 nt, Human adenovirus B (HAdV-B)
acaaggucgcagugcauggugu

SEQ ID NO: 282085 - RNA, 15 nt, Human adenovirus B (HAdV-B)
acaauacaauuucca

SEQ ID NO: 282086 - RNA, 21 nt, Human adenovirus B (HAdV-B)
acaauacaauuuccaauccaa

SEQ ID NO: 282087 - RNA, 21 nt, Human adenovirus B (HAdV-B)
acaauaccuuauccaccacau

SEQ ID NO: 282088 - RNA, 20 nt, Human adenovirus B (HAdV-B)
acacauuccccuacaaaaca

SEQ ID NO: 282089 - RNA, 23 nt, Human adenovirus B (HAdV-B)
acaccgcuuuuccagaagcauuu

SEQ ID NO: 282090 - RNA, 22 nt, Human adenovirus B (HAdV-B)
acaccggauugcagcacugaaa

SEQ ID NO: 282091 - RNA, 13 nt, Human adenovirus B (HAdV-B)
acaccugcuaccu

SEQ ID NO: 282092 - RNA, 21 nt, Human adenovirus B (HAdV-B)
acacggaacccugcaagccau

SEQ ID NO: 282093 - RNA, 17 nt, Human adenovirus B (HAdV-B)
acacuccugguccugug

SEQ ID NO: 282094 - RNA, 13 nt, Human adenovirus B (HAdV-B)
acacucucauagg

SEQ ID NO: 282095 - RNA, 14 nt, Human adenovirus B (HAdV-B)
acagaaaaccagca

SEQ ID NO: 282096 - RNA, 22 nt, Human adenovirus B (HAdV-B)
acagacauggcuucucuuacau

SEQ ID NO: 282097 - RNA, 16 nt, Human adenovirus B (HAdV-B)
acagacuagaacuuuu

SEQ ID NO: 282098 - RNA, 19 nt, Human adenovirus B (HAdV-B)
acagauaagcccuuggugu

SEQ ID NO: 282099 - RNA, 18 nt, Human adenovirus B (HAdV-B)
acagcaaccccaggccaa

SEQ ID NO: 282100 - RNA, 15 nt, Human adenovirus B (HAdV-B)
acagcaguacaggac

SEQ ID NO: 282101 - RNA, 15 nt, Human adenovirus B (HAdV-B)
acaggcggaucucua

SEQ ID NO: 282102 - RNA, 15 nt, Human adenovirus B (HAdV-B)
acagggcgucuccca

SEQ ID NO: 282103 - RNA, 17 nt, Human adenovirus B (HAdV-B)
acaguauaagauuacua

SEQ ID NO: 282104 - RNA, 22 nt, Human adenovirus B (HAdV-B)
acauaauuacacucucauagga

SEQ ID NO: 282105 - RNA, 13 nt, Human adenovirus B (HAdV-B)
acaucuagaccac

SEQ ID NO: 282106 - RNA, 19 nt, Human adenovirus B (HAdV-B)
acaugagucauuauugaac

SEQ ID NO: 282107 - RNA, 13 nt, Human adenovirus B (HAdV-B)
acaugaucaucca

SEQ ID NO: 282108 - RNA, 14 nt, Human adenovirus B (HAdV-B)
acaugcaacaucca

SEQ ID NO: 282109 - RNA, 16 nt, Human adenovirus B (HAdV-B)
acaugcaacauccaau

SEQ ID NO: 282110 - RNA, 13 nt, Human adenovirus B (HAdV-B)
acaugcagcagaa

SEQ ID NO: 282111 - RNA, 17 nt, Human adenovirus B (HAdV-B)
acaugccacagauguca

SEQ ID NO: 282112 - RNA, 18 nt, Human adenovirus B (HAdV-B)
acaugccacagaugucau

SEQ ID NO: 282113 - RNA, 17 nt, Human adenovirus B (HAdV-B)
acaugcccuuggcucua

SEQ ID NO: 282114 - RNA, 17 nt, Human adenovirus B (HAdV-B)
acauggcuucucuuaca

SEQ ID NO: 282115 - RNA, 22 nt, Human adenovirus B (HAdV-B)
acauggcuucucuuacaucucu

SEQ ID NO: 282116 - RNA, 21 nt, Human adenovirus B (HAdV-B)
acaugguuuuagauuccacau

SEQ ID NO: 282117 - RNA, 23 nt, Human adenovirus B (HAdV-B)
acauguaucaaggcucugcauua

SEQ ID NO: 282118 - RNA, 18 nt, Human adenovirus B (HAdV-B)
acauuccccuacaaaaca

SEQ ID NO: 282119 - RNA, 23 nt, Human adenovirus B (HAdV-B)
acauugauuaauguuagcaaagu

SEQ ID NO: 282120 - RNA, 22 nt, Human adenovirus B (HAdV-B)
accaaguuauacgaauacaaua

SEQ ID NO: 282121 - RNA, 20 nt, Human adenovirus B (HAdV-B)
accaauaauaguaacuugca

SEQ ID NO: 282122 - RNA, 17 nt, Human adenovirus B (HAdV-B)
accacaggcggaucucu

SEQ ID NO: 282123 - RNA, 20 nt, Human adenovirus B (HAdV-B)
accaccaucgaaacagaaga

SEQ ID NO: 282124 - RNA, 17 nt, Human adenovirus B (HAdV-B)
accaccgaucucuauca

SEQ ID NO: 282125 - RNA, 21 nt, Human adenovirus B (HAdV-B)
accacgccccgccaacaccuu

SEQ ID NO: 282126 - RNA, 14 nt, Human adenovirus B (HAdV-B)
accacgguggugca

SEQ ID NO: 282127 - RNA, 15 nt, Human adenovirus B (HAdV-B)
accagaacaccuuag

SEQ ID NO: 282128 - RNA, 16 nt, Human adenovirus B (HAdV-B)
accagaacaccuuaga

SEQ ID NO: 282129 - RNA, 21 nt, Human adenovirus B (HAdV-B)
accaggcugugcagaaaaaga

SEQ ID NO: 282130 - RNA, 17 nt, Human adenovirus B (HAdV-B)
accaugugaccaaccug

SEQ ID NO: 282131 - RNA, 21 nt, Human adenovirus B (HAdV-B)
accauuugguggcaugagguu

SEQ ID NO: 282132 - RNA, 19 nt, Human adenovirus B (HAdV-B)
acccaaguuggugcgauug

SEQ ID NO: 282133 - RNA, 22 nt, Human adenovirus B (HAdV-B)
acccagcaaaguggagauacua

SEQ ID NO: 282134 - RNA, 15 nt, Human adenovirus B (HAdV-B)
accccagacuguaua

SEQ ID NO: 282135 - RNA, 18 nt, Human adenovirus B (HAdV-B)
accccuuuauaaacccag

SEQ ID NO: 282136 - RNA, 19 nt, Human adenovirus B (HAdV-B)
acccuaugcggccuaagag

SEQ ID NO: 282137 - RNA, 19 nt, Human adenovirus B (HAdV-B)
acccucaagguccggccca

SEQ ID NO: 282138 - RNA, 23 nt, Human adenovirus B (HAdV-B)
acccugcaagccauugacgucuc

SEQ ID NO: 282139 - RNA, 17 nt, Human adenovirus B (HAdV-B)
accgaaaccaaauacuu

SEQ ID NO: 282140 - RNA, 16 nt, Human adenovirus B (HAdV-B)
accgagcuaccacugc

SEQ ID NO: 282141 - RNA, 18 nt, Human adenovirus B (HAdV-B)
accggauugcagcacuga

SEQ ID NO: 282142 - RNA, 15 nt, Human adenovirus B (HAdV-B)
accuaaccauuauca

SEQ ID NO: 282143 - RNA, 18 nt, Human adenovirus B (HAdV-B)
accuacgauaagcgcuuc

SEQ ID NO: 282144 - RNA, 18 nt, Human adenovirus B (HAdV-B)
accuauacacaccuugcu

SEQ ID NO: 282145 - RNA, 19 nt, Human adenovirus B (HAdV-B)
accucacuucccucuuccc

SEQ ID NO: 282146 - RNA, 20 nt, Human adenovirus B (HAdV-B)
accucacuucccucuuccca

SEQ ID NO: 282147 - RNA, 20 nt, Human adenovirus B (HAdV-B)
accuccaacagaaaaccagc

SEQ ID NO: 282148 - RNA, 16 nt, Human adenovirus B (HAdV-B)
accuuaaucccagaaa

SEQ ID NO: 282149 - RNA, 16 nt, Human adenovirus B (HAdV-B)
accuuagaaaaugcaa

SEQ ID NO: 282150 - RNA, 17 nt, Human adenovirus B (HAdV-B)
accuuagaaaaugcaaa

SEQ ID NO: 282151 - RNA, 15 nt, Human adenovirus B (HAdV-B)
accuuuccuacucac

SEQ ID NO: 282152 - RNA, 16 nt, Human adenovirus B (HAdV-B)
accuuuggacuugagu

SEQ ID NO: 282153 - RNA, 14 nt, Human adenovirus B (HAdV-B)
acgaaaaugccaaa

SEQ ID NO: 282154 - RNA, 16 nt, Human adenovirus B (HAdV-B)
acgagagcgugaugca

SEQ ID NO: 282155 - RNA, 13 nt, Human adenovirus B (HAdV-B)
acgauaagcgcuu

SEQ ID NO: 282156 - RNA, 16 nt, Human adenovirus B (HAdV-B)
agcauuaguaauggca

SEQ ID NO: 282157 - RNA, 14 nt, Human adenovirus B (HAdV-B)
agcauuugcuuccu

SEQ ID NO: 282158 - RNA, 17 nt, Human adenovirus B (HAdV-B)
agccagcgcaaacccga

SEQ ID NO: 282159 - RNA, 16 nt, Human adenovirus B (HAdV-B)
agccaugaugcuucca

SEQ ID NO: 282160 - RNA, 21 nt, Human adenovirus B (HAdV-B)
agccaugguuuccacuaccac

SEQ ID NO: 282161 - RNA, 22 nt, Human adenovirus B (HAdV-B)
agccauguuuuguccugauuua

SEQ ID NO: 282162 - RNA, 17 nt, Human adenovirus B (HAdV-B)
agccccccagguggaca

SEQ ID NO: 282163 - RNA, 21 nt, Human adenovirus B (HAdV-B)
agccccccagguggacaugau

SEQ ID NO: 282164 - RNA, 21 nt, Human adenovirus B (HAdV-B)
agcgcucuugcuaccaaggac

SEQ ID NO: 282165 - RNA, 18 nt, Human adenovirus B (HAdV-B)
agcguugauuacuuugau

SEQ ID NO: 282166 - RNA, 17 nt, Human adenovirus B (HAdV-B)
agcuaccacugccaugc

SEQ ID NO: 282167 - RNA, 19 nt, Human adenovirus B (HAdV-B)
agcuccucuccuguaccca

SEQ ID NO: 282168 - RNA, 15 nt, Human adenovirus B (HAdV-B)
agcugaaaauuaucu

SEQ ID NO: 282169 - RNA, 12 nt, Human adenovirus B (HAdV-B)
agcugcaaccau

SEQ ID NO: 282170 - RNA, 16 nt, Human adenovirus B (HAdV-B)
agcugggaugggugca

SEQ ID NO: 282171 - RNA, 19 nt, Human adenovirus B (HAdV-B)
agcuuccggcaucaaugga

SEQ ID NO: 282172 - RNA, 13 nt, Human adenovirus B (HAdV-B)
agcuucuaugacu

SEQ ID NO: 282173 - RNA, 15 nt, Human adenovirus B (HAdV-B)
agcuucuaugacuga

SEQ ID NO: 282174 - RNA, 18 nt, Human adenovirus B (HAdV-B)
agcuucuugcuucuugca

SEQ ID NO: 282175 - RNA, 14 nt, Human adenovirus B (HAdV-B)
aggaacacauuccc

SEQ ID NO: 282176 - RNA, 19 nt, Human adenovirus B (HAdV-B)
aggaacgcgcggccaaaga

SEQ ID NO: 282177 - RNA, 14 nt, Human adenovirus B (HAdV-B)
aggacaaguaacuu

SEQ ID NO: 282178 - RNA, 16 nt, Human adenovirus B (HAdV-B)
aggacaauacauacuc

SEQ ID NO: 282179 - RNA, 20 nt, Human adenovirus B (HAdV-B)
aggagaaauauucacuggaa

SEQ ID NO: 282180 - RNA, 22 nt, Human adenovirus B (HAdV-B)
aggagaaauauucacuggaaca

SEQ ID NO: 282181 - RNA, 17 nt, Human adenovirus B (HAdV-B)
aggagcauuugcuuccu

SEQ ID NO: 282182 - RNA, 22 nt, Human adenovirus B (HAdV-B)
aggagcauuugcuuccuaugca

SEQ ID NO: 282183 - RNA, 12 nt, Human adenovirus B (HAdV-B)
aggauaggcagu

SEQ ID NO: 282184 - RNA, 22 nt, Human adenovirus B (HAdV-B)
aggauccuauagaggugggauu

SEQ ID NO: 282185 - RNA, 14 nt, Human adenovirus B (HAdV-B)
aggaucugcucgau

SEQ ID NO: 282186 - RNA, 17 nt, Human adenovirus B (HAdV-B)
aggauuaaagauuacag

SEQ ID NO: 282187 - RNA, 14 nt, Human adenovirus B (HAdV-B)
aggccagugcacaa

SEQ ID NO: 282188 - RNA, 16 nt, Human adenovirus B (HAdV-B)
aggccucggcuuccca

SEQ ID NO: 282189 - RNA, 23 nt, Human adenovirus B (HAdV-B)
aggcgagucgugcuaggcggagc

SEQ ID NO: 282190 - RNA, 14 nt, Human adenovirus B (HAdV-B)
aggcgcauugccag

SEQ ID NO: 282191 - RNA, 15 nt, Human adenovirus B (HAdV-B)
aggcucaaacugcac

SEQ ID NO: 282192 - RNA, 21 nt, Human adenovirus B (HAdV-B)
agggcaucuagugguacugau

SEQ ID NO: 282193 - RNA, 20 nt, Human adenovirus B (HAdV-B)
aggggacugccccauggcau

SEQ ID NO: 282194 - RNA, 23 nt, Human adenovirus B (HAdV-B)
aggguuauuagaggaaguggaau

SEQ ID NO: 282195 - RNA, 19 nt, Human adenovirus B (HAdV-B)
aggguugcauucacugcuc

SEQ ID NO: 282196 - RNA, 18 nt, Human adenovirus B (HAdV-B)
agguagaccuacagaguc

SEQ ID NO: 282197 - RNA, 14 nt, Human adenovirus B (HAdV-B)
aggucgcagugcau

SEQ ID NO: 282198 - RNA, 19 nt, Human adenovirus B (HAdV-B)
aggugguaauagauacuca

SEQ ID NO: 282199 - RNA, 20 nt, Human adenovirus B (HAdV-B)
aguaaaagguaaauggggag

SEQ ID NO: 282200 - RNA, 14 nt, Human adenovirus B (HAdV-B)
aguaacuugcaaca

SEQ ID NO: 282201 - RNA, 19 nt, Human adenovirus B (HAdV-B)
aguaccaucugaaccuccc

SEQ ID NO: 282202 - RNA, 15 nt, Human adenovirus B (HAdV-B)
aguacgauaccacca

SEQ ID NO: 282203 - RNA, 14 nt, Human adenovirus B (HAdV-B)
agucauaacaaggu

SEQ ID NO: 282204 - RNA, 13 nt, Human adenovirus B (HAdV-B)
agucauuauugaa

SEQ ID NO: 282205 - RNA, 15 nt, Human adenovirus B (HAdV-B)
agucauuauugaaca

SEQ ID NO: 282206 - RNA, 17 nt, Human adenovirus B (HAdV-B)
agucgucuucucugaug

SEQ ID NO: 282207 - RNA, 22 nt, Human adenovirus B (HAdV-B)
agucuugcuuguuuuacuuucg

SEQ ID NO: 282208 - RNA, 15 nt, Human adenovirus B (HAdV-B)
agugaaccacaaccc

SEQ ID NO: 282209 - RNA, 16 nt, Human adenovirus B (HAdV-B)
agugauguuuauugaa

SEQ ID NO: 282210 - RNA, 22 nt, Human adenovirus B (HAdV-B)
agugcaccuacacccugcugaa

SEQ ID NO: 282211 - RNA, 14 nt, Human adenovirus B (HAdV-B)
agugguacacuguc

SEQ ID NO: 282212 - RNA, 18 nt, Human adenovirus B (HAdV-B)
aguguuagcggcaacaga

SEQ ID NO: 282213 - RNA, 23 nt, Human adenovirus B (HAdV-B)
aguuaagaaaucggaucuuucca

SEQ ID NO: 282214 - RNA, 22 nt, Human adenovirus B (HAdV-B)
aguuauacgaauacaauaugau

SEQ ID NO: 282215 - RNA, 14 nt, Human adenovirus B (HAdV-B)
aguucuuacuuuaa

SEQ ID NO: 282216 - RNA, 22 nt, Human adenovirus B (HAdV-B)
aguucuucaccuuuggacgcag

SEQ ID NO: 282217 - RNA, 13 nt, Human adenovirus B (HAdV-B)
aguugaaaaccac

SEQ ID NO: 282218 - RNA, 21 nt, Human adenovirus B (HAdV-B)
aguuucagagcgagccaaucu

SEQ ID NO: 282219 - RNA, 22 nt, Human adenovirus B (HAdV-B)
aguuuuuaggauaaaacaggac

SEQ ID NO: 282220 - RNA, 12 nt, Human adenovirus B (HAdV-B)
auaaaacaggac

SEQ ID NO: 282221 - RNA, 15 nt, Human adenovirus B (HAdV-B)
auaaaacaggacuau

SEQ ID NO: 282222 - RNA, 13 nt, Human adenovirus B (HAdV-B)
auaaacaucacuu

SEQ ID NO: 282223 - RNA, 20 nt, Human adenovirus B (HAdV-B)
auaacauuauuguacugcca

SEQ ID NO: 282224 - RNA, 13 nt, Human adenovirus B (HAdV-B)
auaaguguuccau

SEQ ID NO: 282225 - RNA, 18 nt, Human adenovirus B (HAdV-B)
auaauaguaacuugcaac

SEQ ID NO: 282226 - RNA, 14 nt, Human adenovirus B (HAdV-B)
auaaucugcaacaa

SEQ ID NO: 282227 - RNA, 17 nt, Human adenovirus B (HAdV-B)
auaaucugcaacaaaac

SEQ ID NO: 282228 - RNA, 16 nt, Human adenovirus B (HAdV-B)
auacaauaugaugucu

SEQ ID NO: 282229 - RNA, 18 nt, Human adenovirus B (HAdV-B)
auacaauggacucugaca

SEQ ID NO: 282230 - RNA, 21 nt, Human adenovirus B (HAdV-B)
auacaauuuccaauccaaccu

SEQ ID NO: 282231 - RNA, 15 nt, Human adenovirus B (HAdV-B)
auacagccaugguuu

SEQ ID NO: 282232 - RNA, 18 nt, Human adenovirus B (HAdV-B)
auacagccaugguuucca

SEQ ID NO: 282233 - RNA, 16 nt, Human adenovirus B (HAdV-B)
auacauacucuuacaa

SEQ ID NO: 282234 - RNA, 13 nt, Human adenovirus B (HAdV-B)
auacaugccacag

SEQ ID NO: 282235 - RNA, 20 nt, Human adenovirus B (HAdV-B)
auaccauuagauauagacau

SEQ ID NO: 282236 - RNA, 13 nt, Human adenovirus B (HAdV-B)
auacuaccaauau

SEQ ID NO: 282237 - RNA, 14 nt, Human adenovirus B (HAdV-B)
auacuccuacugcg

SEQ ID NO: 282238 - RNA, 18 nt, Human adenovirus B (HAdV-B)
auacuugcucgcacauag

SEQ ID NO: 282239 - RNA, 17 nt, Human adenovirus B (HAdV-B)
auacuuggguugccacu

SEQ ID NO: 282240 - RNA, 17 nt, Human adenovirus B (HAdV-B)
auagacguagaugggau

SEQ ID NO: 282241 - RNA, 17 nt, Human adenovirus B (HAdV-B)
auagauaaaaauccauc

SEQ ID NO: 282242 - RNA, 22 nt, Human adenovirus B (HAdV-B)
auagauauuuuucauucucaag

SEQ ID NO: 282243 - RNA, 19 nt, Human adenovirus B (HAdV-B)
auaguaacuugcaacauac

SEQ ID NO: 282244 - RNA, 12 nt, Human adenovirus B (HAdV-B)
auaguacuccac

SEQ ID NO: 282245 - RNA, 22 nt, Human adenovirus B (HAdV-B)
auagucauauaguucaugugau

SEQ ID NO: 282246 - RNA, 20 nt, Human adenovirus B (HAdV-B)
auaguuaucacccagcaaag

SEQ ID NO: 282247 - RNA, 14 nt, Human adenovirus B (HAdV-B)
auaguucaugugau

SEQ ID NO: 282248 - RNA, 18 nt, Human adenovirus B (HAdV-B)
auauaaucugcaacaaaa

SEQ ID NO: 282249 - RNA, 21 nt, Human adenovirus B (HAdV-B)
auauaaucuguugcaccauaa

SEQ ID NO: 282250 - RNA, 16 nt, Human adenovirus B (HAdV-B)
auauaguucaugugau

SEQ ID NO: 282251 - RNA, 12 nt, Human adenovirus B (HAdV-B)
auauaugacaau

SEQ ID NO: 282252 - RNA, 16 nt, Human adenovirus B (HAdV-B)
auaucgcggcacuucu

SEQ ID NO: 282253 - RNA, 13 nt, Human adenovirus B (HAdV-B)
auauucacuggaa

SEQ ID NO: 282254 - RNA, 21 nt, Human adenovirus B (HAdV-B)
aaaucagcaauaaggucucug

SEQ ID NO: 282255 - RNA, 16 nt, Human adenovirus B (HAdV-B)
aaaucucaauugcuca

SEQ ID NO: 282256 - RNA, 22 nt, Human adenovirus B (HAdV-B)
aaaugauuaauaaaaaaucacu

SEQ ID NO: 282257 - RNA, 15 nt, Human adenovirus B (HAdV-B)
aaaugcaaauuccaa

SEQ ID NO: 282258 - RNA, 21 nt, Human adenovirus B (HAdV-B)
aaauggggcugaggugguaau

SEQ ID NO: 282259 - RNA, 19 nt, Human adenovirus B (HAdV-B)
aaaugugcgaucuggccau

SEQ ID NO: 282260 - RNA, 21 nt, Human adenovirus B (HAdV-B)
aaauuaugagaagaugcaugc

SEQ ID NO: 282261 - RNA, 17 nt, Human adenovirus B (HAdV-B)
aaauuaugugcauuuug

SEQ ID NO: 282262 - RNA, 14 nt, Human adenovirus B (HAdV-B)
aaauucaccaaugc

SEQ ID NO: 282263 - RNA, 18 nt, Human adenovirus B (HAdV-B)
aaauuuuagcuccucucc

SEQ ID NO: 282264 - RNA, 16 nt, Human adenovirus B (HAdV-B)
aacaaaacaaaaccaa

SEQ ID NO: 282265 - RNA, 16 nt, Human adenovirus B (HAdV-B)
aacaaaaccaauaaua

SEQ ID NO: 282266 - RNA, 12 nt, Human adenovirus B (HAdV-B)
aacaaagcuauu

SEQ ID NO: 282267 - RNA, 19 nt, Human adenovirus B (HAdV-B)
aacaauaccuuauccacca

SEQ ID NO: 282268 - RNA, 21 nt, Human adenovirus B (HAdV-B)
aacacucaccaccuccaauuc

SEQ ID NO: 282269 - RNA, 14 nt, Human adenovirus B (HAdV-B)
aacagaaaaccagc

SEQ ID NO: 282270 - RNA, 15 nt, Human adenovirus B (HAdV-B)
aacagaaaaccagca

SEQ ID NO: 282271 - RNA, 18 nt, Human adenovirus B (HAdV-B)
aacagucagcucuuacca

SEQ ID NO: 282272 - RNA, 14 nt, Human adenovirus B (HAdV-B)
aacauauccuucac

SEQ ID NO: 282273 - RNA, 19 nt, Human adenovirus B (HAdV-B)
aacaucguaacguucucca

SEQ ID NO: 282274 - RNA, 14 nt, Human adenovirus B (HAdV-B)
aacaugcaacaucc

SEQ ID NO: 282275 - RNA, 15 nt, Human adenovirus B (HAdV-B)
aacaugcaacaucca

SEQ ID NO: 282276 - RNA, 16 nt, Human adenovirus B (HAdV-B)
aacaugcaacauccaa

SEQ ID NO: 282277 - RNA, 21 nt, Human adenovirus B (HAdV-B)
aaccacaacccccacuacucc

SEQ ID NO: 282278 - RNA, 18 nt, Human adenovirus B (HAdV-B)
aaccaccgucgaugaugu

SEQ ID NO: 282279 - RNA, 21 nt, Human adenovirus B (HAdV-B)
aaccacgaaaaugccaaauau

SEQ ID NO: 282280 - RNA, 18 nt, Human adenovirus B (HAdV-B)
aaccagcagcggcaguua

SEQ ID NO: 282281 - RNA, 15 nt, Human adenovirus B (HAdV-B)
aaccagcgcuuccaa

SEQ ID NO: 282282 - RNA, 14 nt, Human adenovirus B (HAdV-B)
aaccaggcugugca

SEQ ID NO: 282283 - RNA, 12 nt, Human adenovirus B (HAdV-B)
aacccaaccagc

SEQ ID NO: 282284 - RNA, 13 nt, Human adenovirus B (HAdV-B)
aacccaaccagcg

SEQ ID NO: 282285 - RNA, 12 nt, Human adenovirus B (HAdV-B)
aaccccagcugc

SEQ ID NO: 282286 - RNA, 17 nt, Human adenovirus B (HAdV-B)
aaccccagcugccuaua

SEQ ID NO: 282287 - RNA, 15 nt, Human adenovirus B (HAdV-B)
aacccggauuuuaca

SEQ ID NO: 282288 - RNA, 22 nt, Human adenovirus B (HAdV-B)
aacccggauuuuacaaccagaa

SEQ ID NO: 282289 - RNA, 15 nt, Human adenovirus B (HAdV-B)
aacccugucuacccc

SEQ ID NO: 282290 - RNA, 21 nt, Human adenovirus B (HAdV-B)
aacccuucuacccugacucag

SEQ ID NO: 282291 - RNA, 12 nt, Human adenovirus B (HAdV-B)
aaccgccaguaa

SEQ ID NO: 282292 - RNA, 20 nt, Human adenovirus B (HAdV-B)
aaccgguugagcugggaugg

SEQ ID NO: 282293 - RNA, 24 nt, Human adenovirus B (HAdV-B)
aaccguggucauuucuugcuugcu

SEQ ID NO: 282294 - RNA, 16 nt, Human adenovirus B (HAdV-B)
aaccugaaagagaguu

SEQ ID NO: 282295 - RNA, 22 nt, Human adenovirus B (HAdV-B)
aaccuguggaaaucaaguacca

SEQ ID NO: 282296 - RNA, 14 nt, Human adenovirus B (HAdV-B)
aaccuuuagcauua

SEQ ID NO: 282297 - RNA, 23 nt, Human adenovirus B (HAdV-B)
aacgacaaaaauuuaccugcaug

SEQ ID NO: 282298 - RNA, 22 nt, Human adenovirus B (HAdV-B)
aacgacuacaccgcuuuuccag

SEQ ID NO: 282299 - RNA, 16 nt, Human adenovirus B (HAdV-B)
aacgcgcggccaaaga

SEQ ID NO: 282300 - RNA, 18 nt, Human adenovirus B (HAdV-B)
aacguccagcaguggaaa

SEQ ID NO: 282301 - RNA, 21 nt, Human adenovirus B (HAdV-B)
aacgugacagcaaaugacaaa

SEQ ID NO: 282302 - RNA, 13 nt, Human adenovirus B (HAdV-B)
aacuacucggauu

SEQ ID NO: 282303 - RNA, 19 nt, Human adenovirus B (HAdV-B)
aacuauaggcucaaacugc

SEQ ID NO: 282304 - RNA, 16 nt, Human adenovirus B (HAdV-B)
aacucauugaguucau

SEQ ID NO: 282305 - RNA, 23 nt, Human adenovirus B (HAdV-B)
aacucugguauucuaaaccccgu

SEQ ID NO: 282306 - RNA, 22 nt, Human adenovirus B (HAdV-B)
aacugcacacuuacuuuugcac

SEQ ID NO: 282307 - RNA, 18 nt, Human adenovirus B (HAdV-B)
aacugcugcggauggacu

SEQ ID NO: 282308 - RNA, 11 nt, Human adenovirus B (HAdV-B)
aacuguucacu

SEQ ID NO: 282309 - RNA, 18 nt, Human adenovirus B (HAdV-B)
aacuguuuggaaugugga

SEQ ID NO: 282310 - RNA, 23 nt, Human adenovirus B (HAdV-B)
aacuuaaagaccagaacuuccaa

SEQ ID NO: 282311 - RNA, 17 nt, Human adenovirus B (HAdV-B)
aacuuaaaguagcauag

SEQ ID NO: 282312 - RNA, 19 nt, Human adenovirus B (HAdV-B)
aacuugaggacuuguuaca

SEQ ID NO: 282313 - RNA, 18 nt, Human adenovirus B (HAdV-B)
aacuuggcccccaacgac

SEQ ID NO: 282314 - RNA, 21 nt, Human adenovirus B (HAdV-B)
aacuuuuccucacuacaagaa

SEQ ID NO: 282315 - RNA, 16 nt, Human adenovirus B (HAdV-B)
aagaaacucugccuga

SEQ ID NO: 282316 - RNA, 13 nt, Human adenovirus B (HAdV-B)
aagaagagugugu

SEQ ID NO: 282317 - RNA, 17 nt, Human adenovirus B (HAdV-B)
aagaagcaagagagcca

SEQ ID NO: 282318 - RNA, 18 nt, Human adenovirus B (HAdV-B)
aagacaauaaguguucca

SEQ ID NO: 282319 - RNA, 20 nt, Human adenovirus B (HAdV-B)
aagagaccugcuaccaauga

SEQ ID NO: 282320 - RNA, 16 nt, Human adenovirus B (HAdV-B)
aagagcucagagccau

SEQ ID NO: 282321 - RNA, 20 nt, Human adenovirus B (HAdV-B)
aagauauccuacgagaucac

SEQ ID NO: 282322 - RNA, 15 nt, Human adenovirus B (HAdV-B)
aagaugaaagcaccu

SEQ ID NO: 282323 - RNA, 16 nt, Human adenovirus B (HAdV-B)
aagcaguuuggugaua

SEQ ID NO: 282324 - RNA, 18 nt, Human adenovirus B (HAdV-B)
aagcauuuucccuacuaa

SEQ ID NO: 282325 - RNA, 21 nt, Human adenovirus B (HAdV-B)
aagcauuuucccuacuaauac

SEQ ID NO: 282326 - RNA, 18 nt, Human adenovirus B (HAdV-B)
aagcguuccuaugaugag

SEQ ID NO: 282327 - RNA, 16 nt, Human adenovirus B (HAdV-B)
aagcguugauuacuuu

SEQ ID NO: 282328 - RNA, 17 nt, Human adenovirus B (HAdV-B)
aagcguugauuacuuug

SEQ ID NO: 282329 - RNA, 19 nt, Human adenovirus B (HAdV-B)
aagcguugauuacuuugau

SEQ ID NO: 282330 - RNA, 14 nt, Human adenovirus B (HAdV-B)
aagcuguagugccu

SEQ ID NO: 282331 - RNA, 15 nt, Human adenovirus B (HAdV-B)
aaggaacaugcagca

SEQ ID NO: 282332 - RNA, 20 nt, Human adenovirus B (HAdV-B)
aaggaucggcagggauacaa

SEQ ID NO: 282333 - RNA, 19 nt, Human adenovirus B (HAdV-B)
aaggcaaaauagacucucg

SEQ ID NO: 282334 - RNA, 16 nt, Human adenovirus B (HAdV-B)
aagguccuggccaucg

SEQ ID NO: 282335 - RNA, 14 nt, Human adenovirus B (HAdV-B)
aaggucucuguuga

SEQ ID NO: 282336 - RNA, 12 nt, Human adenovirus B (HAdV-B)
aaguaaugcaga

SEQ ID NO: 282337 - RNA, 16 nt, Human adenovirus B (HAdV-B)
aaguagcauaggucag

SEQ ID NO: 282338 - RNA, 22 nt, Human adenovirus B (HAdV-B)
aaguuguguucguggucuuccu

SEQ ID NO: 282339 - RNA, 13 nt, Human adenovirus B (HAdV-B)
aauaaacaagcuu

SEQ ID NO: 282340 - RNA, 14 nt, Human adenovirus B (HAdV-B)
aauacaauuuccaa

SEQ ID NO: 282341 - RNA, 14 nt, Human adenovirus B (HAdV-B)
aauacacaacaagu

SEQ ID NO: 282342 - RNA, 17 nt, Human adenovirus B (HAdV-B)
aauaguaacuugcaaca

SEQ ID NO: 282343 - RNA, 22 nt, Human adenovirus B (HAdV-B)
aauauccggaaugcuuguuaca

SEQ ID NO: 282344 - RNA, 17 nt, Human adenovirus B (HAdV-B)
aauaucgcggcacuucu

SEQ ID NO: 282345 - RNA, 14 nt, Human adenovirus B (HAdV-B)
aauauucacuggaa

SEQ ID NO: 282346 - RNA, 22 nt, Human adenovirus B (HAdV-B)
aauauuugugugacagugcaau

SEQ ID NO: 282347 - RNA, 13 nt, Human adenovirus B (HAdV-B)
ugaguacacggaa

SEQ ID NO: 282348 - RNA, 21 nt, Human adenovirus B (HAdV-B)
ugagucauuauugaacaucca

SEQ ID NO: 282349 - RNA, 23 nt, Human adenovirus B (HAdV-B)
ugaguccgggucuggugcaguuc

SEQ ID NO: 282350 - RNA, 22 nt, Human adenovirus B (HAdV-B)
ugaguuacuuucaagauggcca

SEQ ID NO: 282351 - RNA, 15 nt, Human adenovirus B (HAdV-B)
ugaguucaucuacuu

SEQ ID NO: 282352 - RNA, 14 nt, Human adenovirus B (HAdV-B)
ugauaacagaugua

SEQ ID NO: 282353 - RNA, 22 nt, Human adenovirus B (HAdV-B)
ugauacuugcucgcacauaguc

SEQ ID NO: 282354 - RNA, 12 nt, Human adenovirus B (HAdV-B)
ugauauaaucug

SEQ ID NO: 282355 - RNA, 21 nt, Human adenovirus B (HAdV-B)
ugauauuacuggcgguuccca

SEQ ID NO: 282356 - RNA, 15 nt, Human adenovirus B (HAdV-B)
ugaugcuagaucuga

SEQ ID NO: 282357 - RNA, 14 nt, Human adenovirus B (HAdV-B)
ugauguuuauugaa

SEQ ID NO: 282358 - RNA, 13 nt, Human adenovirus B (HAdV-B)
ugauuacuuugau

SEQ ID NO: 282359 - RNA, 21 nt, Human adenovirus B (HAdV-B)
ugauuauauuuccagcaacuu

SEQ ID NO: 282360 - RNA, 14 nt, Human adenovirus B (HAdV-B)
ugauuauucuuugc

SEQ ID NO: 282361 - RNA, 17 nt, Human adenovirus B (HAdV-B)
ugauuccacccucggaa

SEQ ID NO: 282362 - RNA, 21 nt, Human adenovirus B (HAdV-B)
ugauugggagguggccauuaa

SEQ ID NO: 282363 - RNA, 14 nt, Human adenovirus B (HAdV-B)
ugcaaaacaaugac

SEQ ID NO: 282364 - RNA, 21 nt, Human adenovirus B (HAdV-B)
ugcaacaaaacaaaaccaaua

SEQ ID NO: 282365 - RNA, 15 nt, Human adenovirus B (HAdV-B)
ugcaacgggugcuua

SEQ ID NO: 282366 - RNA, 17 nt, Human adenovirus B (HAdV-B)
ugcaacguaucauggcg

SEQ ID NO: 282367 - RNA, 14 nt, Human adenovirus B (HAdV-B)
ugcaagagcuuccu

SEQ ID NO: 282368 - RNA, 23 nt, Human adenovirus B (HAdV-B)
ugcaagccauugacgucucuaca

SEQ ID NO: 282369 - RNA, 18 nt, Human adenovirus B (HAdV-B)
ugcagaaaaagauaaaca

SEQ ID NO: 282370 - RNA, 15 nt, Human adenovirus B (HAdV-B)
ugcagaggcauacau

SEQ ID NO: 282371 - RNA, 23 nt, Human adenovirus B (HAdV-B)
ugcagaggcauacaugccacaga

SEQ ID NO: 282372 - RNA, 20 nt, Human adenovirus B (HAdV-B)
ugcagcugucaugaguggaa

SEQ ID NO: 282373 - RNA, 18 nt, Human adenovirus B (HAdV-B)
ugcaggcuauacuaccaa

SEQ ID NO: 282374 - RNA, 12 nt, Human adenovirus B (HAdV-B)
ugcauaugcuac

SEQ ID NO: 282375 - RNA, 20 nt, Human adenovirus B (HAdV-B)
ugcaucugcguauguagcau

SEQ ID NO: 282376 - RNA, 21 nt, Human adenovirus B (HAdV-B)
ugcauuuaauguuugcgcuac

SEQ ID NO: 282377 - RNA, 15 nt, Human adenovirus B (HAdV-B)
ugcauuugcauccca

SEQ ID NO: 282378 - RNA, 14 nt, Human adenovirus B (HAdV-B)
ugccaaauauggca

SEQ ID NO: 282379 - RNA, 16 nt, Human adenovirus B (HAdV-B)
ugccacagaugucaua

SEQ ID NO: 282380 - RNA, 16 nt, Human adenovirus B (HAdV-B)
ugccagauugugauac

SEQ ID NO: 282381 - RNA, 21 nt, Human adenovirus B (HAdV-B)
ugccagugcgcgcucauaugg

SEQ ID NO: 282382 - RNA, 22 nt, Human adenovirus B (HAdV-B)
ugccaucaucuccugcuugcau

SEQ ID NO: 282383 - RNA, 16 nt, Human adenovirus B (HAdV-B)
ugccuauaguacucca

SEQ ID NO: 282384 - RNA, 13 nt, Human adenovirus B (HAdV-B)
ugcgacaucuaga

SEQ ID NO: 282385 - RNA, 12 nt, Human adenovirus B (HAdV-B)
ugcgacugcugu

SEQ ID NO: 282386 - RNA, 15 nt, Human adenovirus B (HAdV-B)
ugcgccuacaucuac

SEQ ID NO: 282387 - RNA, 23 nt, Human adenovirus B (HAdV-B)
ugcgcguggaggcuuugcuggaa

SEQ ID NO: 282388 - RNA, 19 nt, Human adenovirus B (HAdV-B)
ugcgguacaccggauugca

SEQ ID NO: 282389 - RNA, 14 nt, Human adenovirus B (HAdV-B)
ugcuacgaagagcu

SEQ ID NO: 282390 - RNA, 18 nt, Human adenovirus B (HAdV-B)
ugcuagauggaacagcaa

SEQ ID NO: 282391 - RNA, 17 nt, Human adenovirus B (HAdV-B)
ugcuauuaguuacuuca

SEQ ID NO: 282392 - RNA, 14 nt, Human adenovirus B (HAdV-B)
ugcugggcaugaaa

SEQ ID NO: 282393 - RNA, 17 nt, Human adenovirus B (HAdV-B)
ugcuuccuaugcacuuu

SEQ ID NO: 282394 - RNA, 14 nt, Human adenovirus B (HAdV-B)
ugcuucuauugcuu

SEQ ID NO: 282395 - RNA, 18 nt, Human adenovirus B (HAdV-B)
ugcuugaaacacaaucca

SEQ ID NO: 282396 - RNA, 19 nt, Human adenovirus B (HAdV-B)
ugcuuuuugauugucacac

SEQ ID NO: 282397 - RNA, 20 nt, Human adenovirus B (HAdV-B)
uggaacaauaccuuauccac

SEQ ID NO: 282398 - RNA, 23 nt, Human adenovirus B (HAdV-B)
uggaacccacguucuaacaccug

SEQ ID NO: 282399 - RNA, 18 nt, Human adenovirus B (HAdV-B)
uggaaccggguucugcca

SEQ ID NO: 282400 - RNA, 14 nt, Human adenovirus B (HAdV-B)
uggaaugcucccaa

SEQ ID NO: 282401 - RNA, 21 nt, Human adenovirus B (HAdV-B)
uggaaugcucccaaugcacau

SEQ ID NO: 282402 - RNA, 22 nt, Human adenovirus B (HAdV-B)
uggaauggguuacuauggaagc

SEQ ID NO: 282403 - RNA, 13 nt, Human adenovirus B (HAdV-B)
uggacccaggcca

SEQ ID NO: 282404 - RNA, 15 nt, Human adenovirus B (HAdV-B)
uggacgggucuucca

SEQ ID NO: 282405 - RNA, 12 nt, Human adenovirus B (HAdV-B)
uggacugugaaa

SEQ ID NO: 282406 - RNA, 16 nt, Human adenovirus B (HAdV-B)
uggagcgacaucggca

SEQ ID NO: 282407 - RNA, 18 nt, Human adenovirus B (HAdV-B)
uggaggcuuugcuggaag

SEQ ID NO: 282408 - RNA, 20 nt, Human adenovirus B (HAdV-B)
uggaucuacguccacuggac

SEQ ID NO: 282409 - RNA, 22 nt, Human adenovirus B (HAdV-B)
ugggaaacguccagcaguggaa

SEQ ID NO: 282410 - RNA, 17 nt, Human adenovirus B (HAdV-B)
ugggaugcaaaugcaau

SEQ ID NO: 282411 - RNA, 15 nt, Human adenovirus B (HAdV-B)
ugggaugggugcauu

SEQ ID NO: 282412 - RNA, 16 nt, Human adenovirus B (HAdV-B)
ugggaugggugcauuc

SEQ ID NO: 282413 - RNA, 23 nt, Human adenovirus B (HAdV-B)
ugggcaugagguagaccuacaga

SEQ ID NO: 282414 - RNA, 14 nt, Human adenovirus B (HAdV-B)
ugggccauuuugga

SEQ ID NO: 282415 - RNA, 15 nt, Human adenovirus B (HAdV-B)
ugggccauuuuggaa

SEQ ID NO: 282416 - RNA, 19 nt, Human adenovirus B (HAdV-B)
ugguacacugucucugucc

SEQ ID NO: 282417 - RNA, 17 nt, Human adenovirus B (HAdV-B)
ugguacugcgcucugag

SEQ ID NO: 282418 - RNA, 21 nt, Human adenovirus B (HAdV-B)
uggucauuucuugcuugcuau

SEQ ID NO: 282419 - RNA, 13 nt, Human adenovirus B (HAdV-B)
ugguccugugacu

SEQ ID NO: 282420 - RNA, 14 nt, Human adenovirus B (HAdV-B)
uggugauaauauga

SEQ ID NO: 282421 - RNA, 17 nt, Human adenovirus B (HAdV-B)
ugguguauucuguuaaa

SEQ ID NO: 282422 - RNA, 13 nt, Human adenovirus B (HAdV-B)
ugguguugcacaa

SEQ ID NO: 282423 - RNA, 18 nt, Human adenovirus B (HAdV-B)
ugguugggauuugcauau

SEQ ID NO: 282424 - RNA, 15 nt, Human adenovirus B (HAdV-B)
ugguuuaaaaaaugg

SEQ ID NO: 282425 - RNA, 22 nt, Human adenovirus B (HAdV-B)
ugguuuuagauuccacauucca

SEQ ID NO: 282426 - RNA, 14 nt, Human adenovirus B (HAdV-B)
uguaaaaacucucu

SEQ ID NO: 282427 - RNA, 20 nt, Human adenovirus B (HAdV-B)
uguacugccaucuaccacuc

SEQ ID NO: 282428 - RNA, 13 nt, Human adenovirus B (HAdV-B)
uguauauguguca

SEQ ID NO: 282429 - RNA, 18 nt, Human adenovirus B (HAdV-B)
ugucaaauuuuagcuccu

SEQ ID NO: 282430 - RNA, 19 nt, Human adenovirus B (HAdV-B)
ugucacugccgcucaugga

SEQ ID NO: 282431 - RNA, 22 nt, Human adenovirus B (HAdV-B)
ugucauagacguagaugggauc

SEQ ID NO: 282432 - RNA, 18 nt, Human adenovirus B (HAdV-B)
ugucauccaaauucacca

SEQ ID NO: 282433 - RNA, 13 nt, Human adenovirus B (HAdV-B)
ucucuuacaucuc

SEQ ID NO: 282434 - RNA, 16 nt, Human adenovirus B (HAdV-B)
ucugaguuggcuuuaa

SEQ ID NO: 282435 - RNA, 21 nt, Human adenovirus B (HAdV-B)
ucuggaaauggggcugaggug

SEQ ID NO: 282436 - RNA, 15 nt, Human adenovirus B (HAdV-B)
ucuguugaaauuuuc

SEQ ID NO: 282437 - RNA, 13 nt, Human adenovirus B (HAdV-B)
ucuuaccaccacg

SEQ ID NO: 282438 - RNA, 19 nt, Human adenovirus B (HAdV-B)
ucuucaacccggauuuuac

SEQ ID NO: 282439 - RNA, 22 nt, Human adenovirus B (HAdV-B)
ucuucaacgcugaccuaugcua

SEQ ID NO: 282440 - RNA, 16 nt, Human adenovirus B (HAdV-B)
ucuucaccauacucau

SEQ ID NO: 282441 - RNA, 14 nt, Human adenovirus B (HAdV-B)
ucuucccagaugac

SEQ ID NO: 282442 - RNA, 18 nt, Human adenovirus B (HAdV-B)
ucuuccuuguucugccag

SEQ ID NO: 282443 - RNA, 15 nt, Human adenovirus B (HAdV-B)
ucuucugucccuacc

SEQ ID NO: 282444 - RNA, 18 nt, Human adenovirus B (HAdV-B)
ucuugcgggugggcuugu

SEQ ID NO: 282445 - RNA, 11 nt, Human adenovirus B (HAdV-B)
ucuuguaaaaa

SEQ ID NO: 282446 - RNA, 17 nt, Human adenovirus B (HAdV-B)
ucuuguaaaaauugaau

SEQ ID NO: 282447 - RNA, 20 nt, Human adenovirus B (HAdV-B)
ucuuuuaaagcgcuuucaca

SEQ ID NO: 282448 - RNA, 14 nt, Human adenovirus B (HAdV-B)
ugaaaaucaauuca

SEQ ID NO: 282449 - RNA, 16 nt, Human adenovirus B (HAdV-B)
ugaaaauuaucuggga

SEQ ID NO: 282450 - RNA, 16 nt, Human adenovirus B (HAdV-B)
ugaaacccgagcuucu

SEQ ID NO: 282451 - RNA, 15 nt, Human adenovirus B (HAdV-B)
ugaaacuguuuggaa

SEQ ID NO: 282452 - RNA, 23 nt, Human adenovirus B (HAdV-B)
ugaaaugugcgaucuggccaugu

SEQ ID NO: 282453 - RNA, 13 nt, Human adenovirus B (HAdV-B)
ugaaauuacacac

SEQ ID NO: 282454 - RNA, 16 nt, Human adenovirus B (HAdV-B)
ugaaauuaugugcauu

SEQ ID NO: 282455 - RNA, 21 nt, Human adenovirus B (HAdV-B)
ugaaauuuucucccagcagca

SEQ ID NO: 282456 - RNA, 16 nt, Human adenovirus B (HAdV-B)
ugaacuaucagaauga

SEQ ID NO: 282457 - RNA, 22 nt, Human adenovirus B (HAdV-B)
ugaagcucuuaauuugggccau

SEQ ID NO: 282458 - RNA, 14 nt, Human adenovirus B (HAdV-B)
ugaaggaacaugca

SEQ ID NO: 282459 - RNA, 12 nt, Human adenovirus B (HAdV-B)
ugaaggaugaaa

SEQ ID NO: 282460 - RNA, 19 nt, Human adenovirus B (HAdV-B)
ugaauaaauaaacaagcuu

SEQ ID NO: 282461 - RNA, 18 nt, Human adenovirus B (HAdV-B)
ugaauuaagacucuccua

SEQ ID NO: 282462 - RNA, 17 nt, Human adenovirus B (HAdV-B)
ugaauucgggaaucacc

SEQ ID NO: 282463 - RNA, 15 nt, Human adenovirus B (HAdV-B)
ugacaaagugggcau

SEQ ID NO: 282464 - RNA, 19 nt, Human adenovirus B (HAdV-B)
ugacaauggaugguuuaca

SEQ ID NO: 282465 - RNA, 21 nt, Human adenovirus B (HAdV-B)
ugacacuccugguccugugac

SEQ ID NO: 282466 - RNA, 16 nt, Human adenovirus B (HAdV-B)
ugacagcaaaugacaa

SEQ ID NO: 282467 - RNA, 17 nt, Human adenovirus B (HAdV-B)
ugacagcaaaugacaaa

SEQ ID NO: 282468 - RNA, 15 nt, Human adenovirus B (HAdV-B)
ugaccacgguggugc

SEQ ID NO: 282469 - RNA, 15 nt, Human adenovirus B (HAdV-B)
ugacgguuccauccg

SEQ ID NO: 282470 - RNA, 13 nt, Human adenovirus B (HAdV-B)
ugacuaugcauag

SEQ ID NO: 282471 - RNA, 12 nt, Human adenovirus B (HAdV-B)
ugacuucugcuc

SEQ ID NO: 282472 - RNA, 18 nt, Human adenovirus B (HAdV-B)
ugagaacucgguggauuu

SEQ ID NO: 282473 - RNA, 14 nt, Human adenovirus B (HAdV-B)
ugagaagacuugcg

SEQ ID NO: 282474 - RNA, 17 nt, Human adenovirus B (HAdV-B)
ugagaagaugcaugcau

SEQ ID NO: 282475 - RNA, 22 nt, Human adenovirus B (HAdV-B)
ugagcuccaaggucuuccuaca

SEQ ID NO: 282476 - RNA, 21 nt, Human adenovirus B (HAdV-B)
ugagcugggaugggugcauuc

SEQ ID NO: 282477 - RNA, 15 nt, Human adenovirus B (HAdV-B)
ugagucauuauugaa

SEQ ID NO: 282478 - RNA, 18 nt, Human adenovirus B (HAdV-B)
ugagucauuauugaacau

SEQ ID NO: 282479 - RNA, 20 nt, Human adenovirus B (HAdV-B)
ugaguccgcagcgucucagg

SEQ ID NO: 282480 - RNA, 21 nt, Human adenovirus B (HAdV-B)
ugagugcgggggcaacauauc

SEQ ID NO: 282481 - RNA, 19 nt, Human adenovirus B (HAdV-B)
ugauacguugcggaacuga

SEQ ID NO: 282482 - RNA, 18 nt, Human adenovirus B (HAdV-B)
ugauacuaugacuaugca

SEQ ID NO: 282483 - RNA, 18 nt, Human adenovirus B (HAdV-B)
ugauacuuggguugccac

SEQ ID NO: 282484 - RNA, 23 nt, Human adenovirus B (HAdV-B)
ugauauuacuggcgguucccaau

SEQ ID NO: 282485 - RNA, 18 nt, Human adenovirus B (HAdV-B)
ugaugagguguacgggga

SEQ ID NO: 282486 - RNA, 16 nt, Human adenovirus B (HAdV-B)
ugauguuuauugaaca

SEQ ID NO: 282487 - RNA, 13 nt, Human adenovirus B (HAdV-B)
ugauuauauuucc

SEQ ID NO: 282488 - RNA, 15 nt, Human adenovirus B (HAdV-B)
ugauugccacagaua

SEQ ID NO: 282489 - RNA, 16 nt, Human adenovirus B (HAdV-B)
ugauuuuggcuggaau

SEQ ID NO: 282490 - RNA, 15 nt, Human adenovirus B (HAdV-B)
ugcaaauagcagcug

SEQ ID NO: 282491 - RNA, 13 nt, Human adenovirus B (HAdV-B)
ugcaacauacaaa

SEQ ID NO: 282492 - RNA, 21 nt, Human adenovirus B (HAdV-B)
ugcaacauacaaaaucuuaca

SEQ ID NO: 282493 - RNA, 20 nt, Human adenovirus B (HAdV-B)
ugcaccuacacccugcugaa

SEQ ID NO: 282494 - RNA, 19 nt, Human adenovirus B (HAdV-B)
ugcagaggcauacaugcca

SEQ ID NO: 282495 - RNA, 23 nt, Human adenovirus B (HAdV-B)
ugcaggagaaauauucacuggaa

SEQ ID NO: 282496 - RNA, 18 nt, Human adenovirus B (HAdV-B)
ugcaguacaagcgcagac

SEQ ID NO: 282497 - RNA, 21 nt, Human adenovirus B (HAdV-B)
ugcauaguguaaguuguguuc

SEQ ID NO: 282498 - RNA, 22 nt, Human adenovirus B (HAdV-B)
ugcaucugcguauguagcauag

SEQ ID NO: 282499 - RNA, 16 nt, Human adenovirus B (HAdV-B)
ugcaugaucuuuucca

SEQ ID NO: 282500 - RNA, 19 nt, Human adenovirus B (HAdV-B)
ugcaugcauuuaugucuau

SEQ ID NO: 282501 - RNA, 13 nt, Human adenovirus B (HAdV-B)
ugcaugcucagaa

SEQ ID NO: 282502 - RNA, 22 nt, Human adenovirus B (HAdV-B)
ugcauuacuaccgucaccucca

SEQ ID NO: 282503 - RNA, 18 nt, Human adenovirus B (HAdV-B)
ugcauuuaugucuauguu

SEQ ID NO: 282504 - RNA, 17 nt, Human adenovirus B (HAdV-B)
ugccaaaaaaacauuca

SEQ ID NO: 282505 - RNA, 18 nt, Human adenovirus B (HAdV-B)
ugccaaaaaaacauucaa

SEQ ID NO: 282506 - RNA, 23 nt, Human adenovirus B (HAdV-B)
ugccagauugugauacuaugacu

SEQ ID NO: 282507 - RNA, 22 nt, Human adenovirus B (HAdV-B)
ugccagggccgcguuuugcuau

SEQ ID NO: 282508 - RNA, 14 nt, Human adenovirus B (HAdV-B)
ugccaucuaccacu

SEQ ID NO: 282509 - RNA, 22 nt, Human adenovirus B (HAdV-B)
ugccaugcgagccgcaagagcu

SEQ ID NO: 282510 - RNA, 17 nt, Human adenovirus B (HAdV-B)
ugcccaggacuuuuuga

SEQ ID NO: 282511 - RNA, 21 nt, Human adenovirus B (HAdV-B)
ugcccauggcugacggucuga

SEQ ID NO: 282512 - RNA, 15 nt, Human adenovirus B (HAdV-B)
ugccccaaugggcau

SEQ ID NO: 282513 - RNA, 19 nt, Human adenovirus B (HAdV-B)
ugccccauggcaugggaug

SEQ ID NO: 282514 - RNA, 18 nt, Human adenovirus B (HAdV-B)
ugcccuagaccaccgauc

SEQ ID NO: 282515 - RNA, 13 nt, Human adenovirus B (HAdV-B)
ugccgcuucuuca

SEQ ID NO: 282516 - RNA, 22 nt, Human adenovirus B (HAdV-B)
ugccuauaguacuccaccagaa

SEQ ID NO: 282517 - RNA, 16 nt, Human adenovirus B (HAdV-B)
ugcgacugcuguuuau

SEQ ID NO: 282518 - RNA, 14 nt, Human adenovirus B (HAdV-B)
ugcgccagacauca

SEQ ID NO: 282519 - RNA, 20 nt, Human adenovirus B (HAdV-B)
ugcgcgcacgcucgacauca

SEQ ID NO: 282520 - RNA, 20 nt, Human adenovirus B (HAdV-B)
ugcgcgcucauauggguuaa

SEQ ID NO: 282521 - RNA, 23 nt, Human adenovirus B (HAdV-B)
ugcgcgcuccaagcaagauguac

SEQ ID NO: 282522 - RNA, 15 nt, Human adenovirus B (HAdV-B)
ugcgcuacuuucaca

SEQ ID NO: 282523 - RNA, 16 nt, Human adenovirus B (HAdV-B)
ugcguauguagcauag

SEQ ID NO: 282524 - RNA, 18 nt, Human adenovirus B (HAdV-B)
ugcuaccaaggaccgcug

SEQ ID NO: 282525 - RNA, 16 nt, Human adenovirus B (HAdV-B)
ugcuaggaauucuugc

SEQ ID NO: 282526 - RNA, 16 nt, Human adenovirus B (HAdV-B)
ugcuauccgcaagcaa

SEQ ID NO: 282527 - RNA, 21 nt, Human adenovirus B (HAdV-B)
ugcucagaaauuugcuaucau

SEQ ID NO: 282528 - RNA, 23 nt, Human adenovirus B (HAdV-B)
ugcucagaaauuugcuaucauca

SEQ ID NO: 282529 - RNA, 16 nt, Human adenovirus B (HAdV-B)
ugcucccaaugcacau

SEQ ID NO: 282530 - RNA, 17 nt, Human adenovirus B (HAdV-B)
ugcucgcucacaccuca

SEQ ID NO: 282531 - RNA, 12 nt, Human adenovirus B (HAdV-B)
ugcuuacuggau

SEQ ID NO: 282532 - RNA, 13 nt, Human adenovirus B (HAdV-B)
ugcuuagccagaa

SEQ ID NO: 282533 - RNA, 18 nt, Human adenovirus B (HAdV-B)
ugcuucuauugcuucccu

SEQ ID NO: 282534 - RNA, 22 nt, Human adenovirus B (HAdV-B)
ugcuucuugcaaauagcagcug

SEQ ID NO: 282535 - RNA, 15 nt, Human adenovirus B (HAdV-B)
ugcuucuugcaugcu

SEQ ID NO: 282536 - RNA, 17 nt, Human adenovirus B (HAdV-B)
ugcuugaaacacaaucc

SEQ ID NO: 282537 - RNA, 15 nt, Human adenovirus B (HAdV-B)
acuuuuccucacuac

SEQ ID NO: 282538 - RNA, 21 nt, Human adenovirus B (HAdV-B)
acuuuugcagcaaacucucuc

SEQ ID NO: 282539 - RNA, 12 nt, Human adenovirus B (HAdV-B)
agaaaaccagca

SEQ ID NO: 282540 - RNA, 17 nt, Human adenovirus B (HAdV-B)
agaaaacugcacacuua

SEQ ID NO: 282541 - RNA, 17 nt, Human adenovirus B (HAdV-B)
agaaaucggaucuuucc

SEQ ID NO: 282542 - RNA, 19 nt, Human adenovirus B (HAdV-B)
agaaaucggaucuuuccaa

SEQ ID NO: 282543 - RNA, 12 nt, Human adenovirus B (HAdV-B)
agaaauuacuug

SEQ ID NO: 282544 - RNA, 23 nt, Human adenovirus B (HAdV-B)
agaagacuugcgugcgccaccac

SEQ ID NO: 282545 - RNA, 13 nt, Human adenovirus B (HAdV-B)
agaagaugcaugc

SEQ ID NO: 282546 - RNA, 23 nt, Human adenovirus B (HAdV-B)
agaagcaagagagccaccaccga

SEQ ID NO: 282547 - RNA, 14 nt, Human adenovirus B (HAdV-B)
agaagcauuuuccc

SEQ ID NO: 282548 - RNA, 17 nt, Human adenovirus B (HAdV-B)
agaaugacccgcaggca

SEQ ID NO: 282549 - RNA, 16 nt, Human adenovirus B (HAdV-B)
agaauguuaugggauc

SEQ ID NO: 282550 - RNA, 13 nt, Human adenovirus B (HAdV-B)
agacaauaagugu

SEQ ID NO: 282551 - RNA, 14 nt, Human adenovirus B (HAdV-B)
agacagauuguuaa

SEQ ID NO: 282552 - RNA, 21 nt, Human adenovirus B (HAdV-B)
agacagcggcggcgaccucca

SEQ ID NO: 282553 - RNA, 20 nt, Human adenovirus B (HAdV-B)
agaccagggaaacaccacgg

SEQ ID NO: 282554 - RNA, 21 nt, Human adenovirus B (HAdV-B)
agaccuccccaauuggcucca

SEQ ID NO: 282555 - RNA, 13 nt, Human adenovirus B (HAdV-B)
agaccugcuacca

SEQ ID NO: 282556 - RNA, 17 nt, Human adenovirus B (HAdV-B)
agaccugcuaccaauga

SEQ ID NO: 282557 - RNA, 19 nt, Human adenovirus B (HAdV-B)
agaccugcuaccaaugaau

SEQ ID NO: 282558 - RNA, 13 nt, Human adenovirus B (HAdV-B)
agacuagaacuuu

SEQ ID NO: 282559 - RNA, 17 nt, Human adenovirus B (HAdV-B)
agacuaggcaacuguua

SEQ ID NO: 282560 - RNA, 18 nt, Human adenovirus B (HAdV-B)
agacuaggcaacuguuag

SEQ ID NO: 282561 - RNA, 16 nt, Human adenovirus B (HAdV-B)
agagaccugcuaccaa

SEQ ID NO: 282562 - RNA, 15 nt, Human adenovirus B (HAdV-B)
agagagccaccaccg

SEQ ID NO: 282563 - RNA, 19 nt, Human adenovirus B (HAdV-B)
agagccaccaccgaucaaa

SEQ ID NO: 282564 - RNA, 17 nt, Human adenovirus B (HAdV-B)
agaguccggcucaguga

SEQ ID NO: 282565 - RNA, 16 nt, Human adenovirus B (HAdV-B)
agagucucugacaaag

SEQ ID NO: 282566 - RNA, 16 nt, Human adenovirus B (HAdV-B)
agauacaguagucaau

SEQ ID NO: 282567 - RNA, 13 nt, Human adenovirus B (HAdV-B)
acauguggaguua

SEQ ID NO: 282568 - RNA, 14 nt, Human adenovirus B (HAdV-B)
acauguggaguuau

SEQ ID NO: 282569 - RNA, 17 nt, Human adenovirus B (HAdV-B)
acauuccaaacaguuuc

SEQ ID NO: 282570 - RNA, 21 nt, Human adenovirus B (HAdV-B)
acauugauuaauguuagcaaa

SEQ ID NO: 282571 - RNA, 23 nt, Human adenovirus B (HAdV-B)
accaagagaguccggcucaguga

SEQ ID NO: 282572 - RNA, 18 nt, Human adenovirus B (HAdV-B)
accaauauuuuugcuucu

SEQ ID NO: 282573 - RNA, 18 nt, Human adenovirus B (HAdV-B)
accacaggcggaucucua

SEQ ID NO: 282574 - RNA, 17 nt, Human adenovirus B (HAdV-B)
accacccgcuguugcca

SEQ ID NO: 282575 - RNA, 13 nt, Human adenovirus B (HAdV-B)
accagcgcuucca

SEQ ID NO: 282576 - RNA, 14 nt, Human adenovirus B (HAdV-B)
accagcgcuuccaa

SEQ ID NO: 282577 - RNA, 19 nt, Human adenovirus B (HAdV-B)
accagggaaacaccacggu

SEQ ID NO: 282578 - RNA, 20 nt, Human adenovirus B (HAdV-B)
accaucugaaccucccgcac

SEQ ID NO: 282579 - RNA, 23 nt, Human adenovirus B (HAdV-B)
accaugcaggcuauacuaccaau

SEQ ID NO: 282580 - RNA, 20 nt, Human adenovirus B (HAdV-B)
accauggggugaacuuuccg

SEQ ID NO: 282581 - RNA, 14 nt, Human adenovirus B (HAdV-B)
acccagaaaacugc

SEQ ID NO: 282582 - RNA, 23 nt, Human adenovirus B (HAdV-B)
acccagaaaacugcacacuuacu

SEQ ID NO: 282583 - RNA, 14 nt, Human adenovirus B (HAdV-B)
acccagucauaaca

SEQ ID NO: 282584 - RNA, 20 nt, Human adenovirus B (HAdV-B)
accccacuaacaaccacagg

SEQ ID NO: 282585 - RNA, 14 nt, Human adenovirus B (HAdV-B)
acccgcuguugcca

SEQ ID NO: 282586 - RNA, 21 nt, Human adenovirus B (HAdV-B)
accgcuacugaccaucgccuc

SEQ ID NO: 282587 - RNA, 22 nt, Human adenovirus B (HAdV-B)
accggacgcuucccgaacccaa

SEQ ID NO: 282588 - RNA, 14 nt, Human adenovirus B (HAdV-B)
accggauguggcaa

SEQ ID NO: 282589 - RNA, 14 nt, Human adenovirus B (HAdV-B)
accggauugcagca

SEQ ID NO: 282590 - RNA, 20 nt, Human adenovirus B (HAdV-B)
accggccccgugagcuugaa

SEQ ID NO: 282591 - RNA, 14 nt, Human adenovirus B (HAdV-B)
accuacacccugcu

SEQ ID NO: 282592 - RNA, 16 nt, Human adenovirus B (HAdV-B)
accuauugcauuugca

SEQ ID NO: 282593 - RNA, 12 nt, Human adenovirus B (HAdV-B)
accucacuuccc

SEQ ID NO: 282594 - RNA, 15 nt, Human adenovirus B (HAdV-B)
aguaacaacacuuuc

SEQ ID NO: 282595 - RNA, 14 nt, Human adenovirus B (HAdV-B)
aguacgauaccacc

SEQ ID NO: 282596 - RNA, 14 nt, Human adenovirus B (HAdV-B)
aguacuccaccaga

SEQ ID NO: 282597 - RNA, 14 nt, Human adenovirus B (HAdV-B)
aguccaacugcugc

SEQ ID NO: 282598 - RNA, 23 nt, Human adenovirus B (HAdV-B)
agucuacggccaaccguugaagg

SEQ ID NO: 282599 - RNA, 14 nt, Human adenovirus B (HAdV-B)
agucucugacaaag

SEQ ID NO: 282600 - RNA, 19 nt, Human adenovirus B (HAdV-B)
agucuggaucacggucauc

SEQ ID NO: 282601 - RNA, 18 nt, Human adenovirus B (HAdV-B)
agucuuuuaaagcgcuuu

SEQ ID NO: 282602 - RNA, 22 nt, Human adenovirus B (HAdV-B)
agucuuuuaaagcgcuuucaca

SEQ ID NO: 282603 - RNA, 20 nt, Human adenovirus B (HAdV-B)
agugauagauaaaaauccau

SEQ ID NO: 282604 - RNA, 18 nt, Human adenovirus B (HAdV-B)
agugauguuuauugaaca

SEQ ID NO: 282605 - RNA, 19 nt, Human adenovirus B (HAdV-B)
agugauguuuauugaacac

SEQ ID NO: 282606 - RNA, 13 nt, Human adenovirus B (HAdV-B)
agugcagaggcau

SEQ ID NO: 282607 - RNA, 16 nt, Human adenovirus B (HAdV-B)
agugcaugguguugca

SEQ ID NO: 282608 - RNA, 17 nt, Human adenovirus B (HAdV-B)
aguggaaaaacuugagg

SEQ ID NO: 282609 - RNA, 12 nt, Human adenovirus B (HAdV-B)
agugguacugau

SEQ ID NO: 282610 - RNA, 17 nt, Human adenovirus B (HAdV-B)
aguguaccaggaaaguc

SEQ ID NO: 282611 - RNA, 24 nt, Human adenovirus B (HAdV-B)
agugucgcuaacaauacaauuucc

SEQ ID NO: 282612 - RNA, 14 nt, Human adenovirus B (HAdV-B)
aguucacccagacg

SEQ ID NO: 282613 - RNA, 17 nt, Human adenovirus B (HAdV-B)
aguucacccagacguug

SEQ ID NO: 282614 - RNA, 22 nt, Human adenovirus B (HAdV-B)
aguucccgagugguacacuguc

SEQ ID NO: 282615 - RNA, 15 nt, Human adenovirus B (HAdV-B)
aguuggacugugaaa

SEQ ID NO: 282616 - RNA, 16 nt, Human adenovirus B (HAdV-B)
aguuggacugugaaag

SEQ ID NO: 282617 - RNA, 15 nt, Human adenovirus B (HAdV-B)
aguuuugauuacaac

SEQ ID NO: 282618 - RNA, 13 nt, Human adenovirus B (HAdV-B)
auaaaaacauacg

SEQ ID NO: 282619 - RNA, 12 nt, Human adenovirus B (HAdV-B)
auaaacaaguua

SEQ ID NO: 282620 - RNA, 20 nt, Human adenovirus B (HAdV-B)
auaaaguuuaacuuguuuau

SEQ ID NO: 282621 - RNA, 22 nt, Human adenovirus B (HAdV-B)
auaagcccuugguguagguguu

SEQ ID NO: 282622 - RNA, 19 nt, Human adenovirus B (HAdV-B)
auaagcucgccugugccau

SEQ ID NO: 282623 - RNA, 16 nt, Human adenovirus B (HAdV-B)
auaauaguaacuugca

SEQ ID NO: 282624 - RNA, 20 nt, Human adenovirus B (HAdV-B)
auaauaguaacuugcaacau

SEQ ID NO: 282625 - RNA, 23 nt, Human adenovirus B (HAdV-B)
auaauaugagagaguuuuuacaa

SEQ ID NO: 282626 - RNA, 13 nt, Human adenovirus B (HAdV-B)
auaaucugcaaca

SEQ ID NO: 282627 - RNA, 17 nt, Human adenovirus B (HAdV-B)
auaaucuguugcaccau

SEQ ID NO: 282628 - RNA, 15 nt, Human adenovirus B (HAdV-B)
auaauuacacucuca

SEQ ID NO: 282629 - RNA, 17 nt, Human adenovirus B (HAdV-B)
auaauuacacucucaua

SEQ ID NO: 282630 - RNA, 15 nt, Human adenovirus B (HAdV-B)
auacaaaaucuuaca

SEQ ID NO: 282631 - RNA, 18 nt, Human adenovirus B (HAdV-B)
caaggucuuccuacagaa

SEQ ID NO: 282632 - RNA, 21 nt, Human adenovirus B (HAdV-B)
caagugcagcaacaggaggau

SEQ ID NO: 282633 - RNA, 16 nt, Human adenovirus B (HAdV-B)
caauaaacaucacuuu

SEQ ID NO: 282634 - RNA, 13 nt, Human adenovirus B (HAdV-B)
caauaaggucucu

SEQ ID NO: 282635 - RNA, 21 nt, Human adenovirus B (HAdV-B)
caauacaauuuccaauccaac

SEQ ID NO: 282636 - RNA, 19 nt, Human adenovirus B (HAdV-B)
caauacauacucuuacaaa

SEQ ID NO: 282637 - RNA, 17 nt, Human adenovirus B (HAdV-B)
caaugcacaugaucauc

SEQ ID NO: 282638 - RNA, 16 nt, Human adenovirus B (HAdV-B)
caauggcuugcagggu

SEQ ID NO: 282639 - RNA, 17 nt, Human adenovirus B (HAdV-B)
caaugggcauacaugca

SEQ ID NO: 282640 - RNA, 15 nt, Human adenovirus B (HAdV-B)
caauuaaucaccccc

SEQ ID NO: 282641 - RNA, 18 nt, Human adenovirus B (HAdV-B)
caauuacgauccaugucu

SEQ ID NO: 282642 - RNA, 21 nt, Human adenovirus B (HAdV-B)
caauucucuagaaacuuuuac

SEQ ID NO: 282643 - RNA, 22 nt, Human adenovirus B (HAdV-B)
caauugacaugcccuuggcucu

SEQ ID NO: 282644 - RNA, 11 nt, Human adenovirus B (HAdV-B)
caauugauguu

SEQ ID NO: 282645 - RNA, 15 nt, Human adenovirus B (HAdV-B)
caauugauguugcca

SEQ ID NO: 282646 - RNA, 21 nt, Human adenovirus B (HAdV-B)
caauugauguugccauucuca

SEQ ID NO: 282647 - RNA, 14 nt, Human adenovirus B (HAdV-B)
caauuggagcagua

SEQ ID NO: 282648 - RNA, 15 nt, Human adenovirus B (HAdV-B)
caauuuccaauccaa

SEQ ID NO: 282649 - RNA, 23 nt, Human adenovirus B (HAdV-B)
cacaacaagugcagcaacaggag

SEQ ID NO: 282650 - RNA, 21 nt, Human adenovirus B (HAdV-B)
cacaauccaguugcauugcuu

SEQ ID NO: 282651 - RNA, 14 nt, Human adenovirus B (HAdV-B)
cacaaucuucaugu

SEQ ID NO: 282652 - RNA, 17 nt, Human adenovirus B (HAdV-B)
cacagacaccuacuuca

SEQ ID NO: 282653 - RNA, 13 nt, Human adenovirus B (HAdV-B)
cacagaugucaua

SEQ ID NO: 282654 - RNA, 14 nt, Human adenovirus B (HAdV-B)
cacaugaucaucca

SEQ ID NO: 282655 - RNA, 22 nt, Human adenovirus B (HAdV-B)
cacauuccccuacaaaacaugc

SEQ ID NO: 282656 - RNA, 21 nt, Human adenovirus B (HAdV-B)
caccaaacugcuuagccagaa

SEQ ID NO: 282657 - RNA, 19 nt, Human adenovirus B (HAdV-B)
caccacuguauuacuuccu

SEQ ID NO: 282658 - RNA, 20 nt, Human adenovirus B (HAdV-B)
caccagagcccaguuaccac

SEQ ID NO: 282659 - RNA, 23 nt, Human adenovirus B (HAdV-B)
caccauaauuucauuuuugauau

SEQ ID NO: 282660 - RNA, 18 nt, Human adenovirus B (HAdV-B)
caccaucgaaacagaaga

SEQ ID NO: 282661 - RNA, 20 nt, Human adenovirus B (HAdV-B)
caccgagcuaccacugccau

SEQ ID NO: 282662 - RNA, 21 nt, Human adenovirus B (HAdV-B)
caccggauugcagcacugaaa

SEQ ID NO: 282663 - RNA, 12 nt, Human adenovirus B (HAdV-B)
caccuacuucaa

SEQ ID NO: 282664 - RNA, 20 nt, Human adenovirus B (HAdV-B)
caccuguagcgaauugagaa

SEQ ID NO: 282665 - RNA, 18 nt, Human adenovirus B (HAdV-B)
caccuuagaaaaugcaaa

SEQ ID NO: 282666 - RNA, 20 nt, Human adenovirus B (HAdV-B)
caccuuagaaaaugcaaauu

SEQ ID NO: 282667 - RNA, 17 nt, Human adenovirus B (HAdV-B)
cacgaaaaugccaaaua

SEQ ID NO: 282668 - RNA, 17 nt, Human adenovirus B (HAdV-B)
cacgcuugccagcacgg

SEQ ID NO: 282669 - RNA, 17 nt, Human adenovirus B (HAdV-B)
cacggugggaucugcaa

SEQ ID NO: 282670 - RNA, 22 nt, Human adenovirus B (HAdV-B)
cacgguggugcaaaacaaugac

SEQ ID NO: 282671 - RNA, 16 nt, Human adenovirus B (HAdV-B)
cacguuguuuacauga

SEQ ID NO: 282672 - RNA, 15 nt, Human adenovirus B (HAdV-B)
cacuacaagaacuuc

SEQ ID NO: 282673 - RNA, 16 nt, Human adenovirus B (HAdV-B)
cacuacucccugcuau

SEQ ID NO: 282674 - RNA, 12 nt, Human adenovirus B (HAdV-B)
uuaugugcauuu

SEQ ID NO: 282675 - RNA, 19 nt, Human adenovirus B (HAdV-B)
uuauguguacugaguuuaa

SEQ ID NO: 282676 - RNA, 23 nt, Human adenovirus B (HAdV-B)
uuauuuccccaaauggcuucaca

SEQ ID NO: 282677 - RNA, 12 nt, Human adenovirus B (HAdV-B)
uucaaaaccucu

SEQ ID NO: 282678 - RNA, 14 nt, Human adenovirus B (HAdV-B)
uucaauaaacauca

SEQ ID NO: 282679 - RNA, 17 nt, Human adenovirus B (HAdV-B)
uucaauuggagcaguau

SEQ ID NO: 282680 - RNA, 22 nt, Human adenovirus B (HAdV-B)
uucacgcggcgcuacuugcuau

SEQ ID NO: 282681 - RNA, 11 nt, Human adenovirus B (HAdV-B)
uucacuggaac

SEQ ID NO: 282682 - RNA, 14 nt, Human adenovirus B (HAdV-B)
uucacuucaaugca

SEQ ID NO: 282683 - RNA, 20 nt, Human adenovirus B (HAdV-B)
uucagaaagagggaagggau

SEQ ID NO: 282684 - RNA, 20 nt, Human adenovirus B (HAdV-B)
uucaggccucgcaacgacau

SEQ ID NO: 282685 - RNA, 11 nt, Human adenovirus B (HAdV-B)
uucauccaugg

SEQ ID NO: 282686 - RNA, 20 nt, Human adenovirus B (HAdV-B)
uucauccuuggcuccgcgac

SEQ ID NO: 282687 - RNA, 12 nt, Human adenovirus B (HAdV-B)
uucauucucaag

SEQ ID NO: 282688 - RNA, 15 nt, Human adenovirus B (HAdV-B)
uuccaaacaguuuca

SEQ ID NO: 282689 - RNA, 15 nt, Human adenovirus B (HAdV-B)
uuccaauccaaccuu

SEQ ID NO: 282690 - RNA, 16 nt, Human adenovirus B (HAdV-B)
uuccauaguaacccau

SEQ ID NO: 282691 - RNA, 14 nt, Human adenovirus B (HAdV-B)
uuccauauccgugu

SEQ ID NO: 282692 - RNA, 13 nt, Human adenovirus B (HAdV-B)
uuccaucuacugc

SEQ ID NO: 282693 - RNA, 22 nt, Human adenovirus B (HAdV-B)
uucccacgccuuacauguggag

SEQ ID NO: 282694 - RNA, 19 nt, Human adenovirus B (HAdV-B)
uucccgaacccaaccagcg

SEQ ID NO: 282695 - RNA, 20 nt, Human adenovirus B (HAdV-B)
aaacaagcuuguuguugauu

SEQ ID NO: 282696 - RNA, 19 nt, Human adenovirus B (HAdV-B)
aaacagucgucucuauccc

SEQ ID NO: 282697 - RNA, 18 nt, Human adenovirus B (HAdV-B)
aaaccaauaauaguaacu

SEQ ID NO: 282698 - RNA, 16 nt, Human adenovirus B (HAdV-B)
aaaccaugcaggcuau

SEQ ID NO: 282699 - RNA, 19 nt, Human adenovirus B (HAdV-B)
aaaccgcugaaaaacuuuu

SEQ ID NO: 282700 - RNA, 19 nt, Human adenovirus B (HAdV-B)
aaacggaguucuuacuuua

SEQ ID NO: 282701 - RNA, 13 nt, Human adenovirus B (HAdV-B)
aaacucaccaagg

SEQ ID NO: 282702 - RNA, 19 nt, Human adenovirus B (HAdV-B)
aaacuugaggacuuguuac

SEQ ID NO: 282703 - RNA, 21 nt, Human adenovirus B (HAdV-B)
aaacuugaggacuuguuacag

SEQ ID NO: 282704 - RNA, 15 nt, Human adenovirus B (HAdV-B)
aaagauuacagccaa

SEQ ID NO: 282705 - RNA, 20 nt, Human adenovirus B (HAdV-B)
aaagauuacagccaacgagc

SEQ ID NO: 282706 - RNA, 21 nt, Human adenovirus B (HAdV-B)
aaagauucgauccgaugacaa

SEQ ID NO: 282707 - RNA, 13 nt, Human adenovirus B (HAdV-B)
aaagcgcuuuaaa

SEQ ID NO: 282708 - RNA, 12 nt, Human adenovirus B (HAdV-B)
aaagcgcuuuca

SEQ ID NO: 282709 - RNA, 18 nt, Human adenovirus B (HAdV-B)
aaagcgcuuucacagucc

SEQ ID NO: 282710 - RNA, 19 nt, Human adenovirus B (HAdV-B)
aaagcgcuuucacagucca

SEQ ID NO: 282711 - RNA, 14 nt, Human adenovirus B (HAdV-B)
aaaggggaugucaa

SEQ ID NO: 282712 - RNA, 14 nt, Human adenovirus B (HAdV-B)
aaagugauguuuau

SEQ ID NO: 282713 - RNA, 23 nt, Human adenovirus B (HAdV-B)
aaauaaagugauguuuauugaac

SEQ ID NO: 282714 - RNA, 21 nt, Human adenovirus B (HAdV-B)
aaauacuuuuggaacagucag

SEQ ID NO: 282715 - RNA, 12 nt, Human adenovirus B (HAdV-B)
aaauagacucuc

SEQ ID NO: 282716 - RNA, 18 nt, Human adenovirus B (HAdV-B)
aaaucaaguaccaucuga

SEQ ID NO: 282717 - RNA, 14 nt, Human adenovirus B (HAdV-B)
aaaucaauucacaa

SEQ ID NO: 282718 - RNA, 14 nt, Human adenovirus B (HAdV-B)
aaaucagaaauucc

SEQ ID NO: 282719 - RNA, 22 nt, Human adenovirus B (HAdV-B)
aaaucagcaauaaggucucugu

SEQ ID NO: 282720 - RNA, 18 nt, Human adenovirus B (HAdV-B)
aaauguugaaaugggcau

SEQ ID NO: 282721 - RNA, 13 nt, Human adenovirus B (HAdV-B)
aaauuaugugcau

SEQ ID NO: 282722 - RNA, 13 nt, Human adenovirus B (HAdV-B)
aaauucaccaaug

SEQ ID NO: 282723 - RNA, 19 nt, Human adenovirus B (HAdV-B)
aaauuuguuuuuucugucu

SEQ ID NO: 282724 - RNA, 20 nt, Human adenovirus B (HAdV-B)
aaauuuuggcucaaccauaa

SEQ ID NO: 282725 - RNA, 19 nt, Human adenovirus B (HAdV-B)
aacaaccguggucauuucu

SEQ ID NO: 282726 - RNA, 13 nt, Human adenovirus B (HAdV-B)
aacaagauuggaa

SEQ ID NO: 282727 - RNA, 17 nt, Human adenovirus B (HAdV-B)
aacaauaccuuauccac

SEQ ID NO: 282728 - RNA, 12 nt, Human adenovirus B (HAdV-B)
aacacauucccc

SEQ ID NO: 282729 - RNA, 20 nt, Human adenovirus B (HAdV-B)
aacaccuuagaaaaugcaaa

SEQ ID NO: 282730 - RNA, 22 nt, Human adenovirus B (HAdV-B)
aacacugugcuuggaauggguu

SEQ ID NO: 282731 - RNA, 16 nt, Human adenovirus B (HAdV-B)
aacagaaaaccagcag

SEQ ID NO: 282732 - RNA, 11 nt, Human adenovirus B (HAdV-B)
aacagcaguac

SEQ ID NO: 282733 - RNA, 15 nt, Human adenovirus B (HAdV-B)
aacagcaguacagga

SEQ ID NO: 282734 - RNA, 22 nt, Human adenovirus B (HAdV-B)
aacaggugaaaacauguugguu

SEQ ID NO: 282735 - RNA, 23 nt, Human adenovirus B (HAdV-B)
aacauacaaaaucuuacauugau

SEQ ID NO: 282736 - RNA, 13 nt, Human adenovirus B (HAdV-B)
aacauuauuguac

SEQ ID NO: 282737 - RNA, 13 nt, Human adenovirus B (HAdV-B)
aaccaauuuggac

SEQ ID NO: 282738 - RNA, 20 nt, Human adenovirus B (HAdV-B)
aaccacgaaaaugccaaaua

SEQ ID NO: 282739 - RNA, 12 nt, Human adenovirus B (HAdV-B)
aaccaggcugug

SEQ ID NO: 282740 - RNA, 22 nt, Human adenovirus B (HAdV-B)
aaccaugcaggcuauacuacca

SEQ ID NO: 282741 - RNA, 18 nt, Human adenovirus B (HAdV-B)
aacccauuccaagcacag

SEQ ID NO: 282742 - RNA, 19 nt, Human adenovirus B (HAdV-B)
aacccguaaucggaaucau

SEQ ID NO: 282743 - RNA, 22 nt, Human adenovirus B (HAdV-B)
aaccugaguccgcagcgucuca

SEQ ID NO: 282744 - RNA, 12 nt, Human adenovirus B (HAdV-B)
aacgacauugac

SEQ ID NO: 282745 - RNA, 17 nt, Human adenovirus B (HAdV-B)
aacgcgcggccaaagag

SEQ ID NO: 282746 - RNA, 23 nt, Human adenovirus B (HAdV-B)
aacuauaggcucaaacugcacac

SEQ ID NO: 282747 - RNA, 15 nt, Human adenovirus B (HAdV-B)
aacuaucagaaugac

SEQ ID NO: 282748 - RNA, 19 nt, Human adenovirus B (HAdV-B)
aacuaucagaaugaccaca

SEQ ID NO: 282749 - RNA, 16 nt, Human adenovirus B (HAdV-B)
aacugcuuagccagaa

SEQ ID NO: 282750 - RNA, 18 nt, Human adenovirus B (HAdV-B)
aacuuaaaguagcauagg

SEQ ID NO: 282751 - RNA, 15 nt, Human adenovirus B (HAdV-B)
aacuuaagagugugg

SEQ ID NO: 282752 - RNA, 16 nt, Human adenovirus B (HAdV-B)
aacuuauagacuggau

SEQ ID NO: 282753 - RNA, 20 nt, Human adenovirus B (HAdV-B)
aacuucaccuuuccuacuca

SEQ ID NO: 282754 - RNA, 16 nt, Human adenovirus B (HAdV-B)
aacuugcaacauacaa

SEQ ID NO: 282755 - RNA, 17 nt, Human adenovirus B (HAdV-B)
aacuuguccugagucag

SEQ ID NO: 282756 - RNA, 23 nt, Human adenovirus B (HAdV-B)
aacuuguuuauuugaaaaucaau

SEQ ID NO: 282757 - RNA, 21 nt, Human adenovirus B (HAdV-B)
aagaaacucugccugauuaua

SEQ ID NO: 282758 - RNA, 19 nt, Human adenovirus B (HAdV-B)
aagaacgaugggaaucaua

SEQ ID NO: 282759 - RNA, 16 nt, Human adenovirus B (HAdV-B)
aagaacuuaaaguagc

SEQ ID NO: 282760 - RNA, 13 nt, Human adenovirus B (HAdV-B)
aagagaccugcua

SEQ ID NO: 282761 - RNA, 21 nt, Human adenovirus B (HAdV-B)
aagagaccugcuaccaaugaa

SEQ ID NO: 282762 - RNA, 22 nt, Human adenovirus B (HAdV-B)
aagagaguccggcucagugacu

SEQ ID NO: 282763 - RNA, 16 nt, Human adenovirus B (HAdV-B)
aagagcacgagauaca

SEQ ID NO: 282764 - RNA, 12 nt, Human adenovirus B (HAdV-B)
aagcauuuuccc

SEQ ID NO: 282765 - RNA, 13 nt, Human adenovirus B (HAdV-B)
aagccaagauauc

SEQ ID NO: 282766 - RNA, 16 nt, Human adenovirus B (HAdV-B)
aagccaagauauccua

SEQ ID NO: 282767 - RNA, 18 nt, Human adenovirus B (HAdV-B)
aagccauugacgucucua

SEQ ID NO: 282768 - RNA, 14 nt, Human adenovirus B (HAdV-B)
aagccguacauggg

SEQ ID NO: 282769 - RNA, 16 nt, Human adenovirus B (HAdV-B)
aagccguacaugggca

SEQ ID NO: 282770 - RNA, 13 nt, Human adenovirus B (HAdV-B)
aagcgcuuucaca

SEQ ID NO: 282771 - RNA, 20 nt, Human adenovirus B (HAdV-B)
aagcgcuuucacaguccaac

SEQ ID NO: 282772 - RNA, 20 nt, Human adenovirus B (HAdV-B)
aagcucuuaauuugggccau

SEQ ID NO: 282773 - RNA, 16 nt, Human adenovirus B (HAdV-B)
aaggacacggaacccu

SEQ ID NO: 282774 - RNA, 13 nt, Human adenovirus B (HAdV-B)
aaggguugcauuc

SEQ ID NO: 282775 - RNA, 20 nt, Human adenovirus B (HAdV-B)
aagguccggcccacggagug

SEQ ID NO: 282776 - RNA, 13 nt, Human adenovirus B (HAdV-B)
aaggucuuccuac

SEQ ID NO: 282777 - RNA, 13 nt, Human adenovirus B (HAdV-B)
gccaauucuucaa

SEQ ID NO: 282778 - RNA, 17 nt, Human adenovirus B (HAdV-B)
gccacagacaccuacuu

SEQ ID NO: 282779 - RNA, 16 nt, Human adenovirus B (HAdV-B)
gccacagcaaccccag

SEQ ID NO: 282780 - RNA, 17 nt, Human adenovirus B (HAdV-B)
gccacagcaaccccaga

SEQ ID NO: 282781 - RNA, 17 nt, Human adenovirus B (HAdV-B)
gccagauugugauacua

SEQ ID NO: 282782 - RNA, 11 nt, Human adenovirus B (HAdV-B)
gccagcuuuac

SEQ ID NO: 282783 - RNA, 19 nt, Human adenovirus B (HAdV-B)
gccaucagguucacuuuaa

SEQ ID NO: 282784 - RNA, 13 nt, Human adenovirus B (HAdV-B)
gccaucuaccacu

SEQ ID NO: 282785 - RNA, 21 nt, Human adenovirus B (HAdV-B)
gccaugaugcuuccauaguaa

SEQ ID NO: 282786 - RNA, 14 nt, Human adenovirus B (HAdV-B)
gccaugcaacguau

SEQ ID NO: 282787 - RNA, 22 nt, Human adenovirus B (HAdV-B)
gccaugcgagccgcaagagcuc

SEQ ID NO: 282788 - RNA, 14 nt, Human adenovirus B (HAdV-B)
gccaugguuuccac

SEQ ID NO: 282789 - RNA, 22 nt, Human adenovirus B (HAdV-B)
gccaugguuuccacuaccacau

SEQ ID NO: 282790 - RNA, 17 nt, Human adenovirus B (HAdV-B)
gcccacggagugcggau

SEQ ID NO: 282791 - RNA, 17 nt, Human adenovirus B (HAdV-B)
gcccccaacgacaaaaa

SEQ ID NO: 282792 - RNA, 17 nt, Human adenovirus B (HAdV-B)
gccccuacuauagccag

SEQ ID NO: 282793 - RNA, 18 nt, Human adenovirus B (HAdV-B)
gcccuaguguaccaggaa

SEQ ID NO: 282794 - RNA, 21 nt, Human adenovirus B (HAdV-B)
gcccuccgggaccuguuugua

SEQ ID NO: 282795 - RNA, 17 nt, Human adenovirus B (HAdV-B)
gccgcaagagcucugcu

SEQ ID NO: 282796 - RNA, 22 nt, Human adenovirus B (HAdV-B)
gccggacugguauacaacgcuc

SEQ ID NO: 282797 - RNA, 22 nt, Human adenovirus B (HAdV-B)
gccuccuugcagauauggcccu

SEQ ID NO: 282798 - RNA, 13 nt, Human adenovirus B (HAdV-B)
gccugugccauug

SEQ ID NO: 282799 - RNA, 18 nt, Human adenovirus B (HAdV-B)
gcgaaggcgcauugccag

SEQ ID NO: 282800 - RNA, 19 nt, Human adenovirus B (HAdV-B)
gcgacaucuagaccacugc

SEQ ID NO: 282801 - RNA, 18 nt, Human adenovirus B (HAdV-B)
gcgcaauguuuugcauua

SEQ ID NO: 282802 - RNA, 15 nt, Human adenovirus B (HAdV-B)
gcgcugcagagccag

SEQ ID NO: 282803 - RNA, 20 nt, Human adenovirus B (HAdV-B)
gcggccaaagagcucagaga

SEQ ID NO: 282804 - RNA, 14 nt, Human adenovirus B (HAdV-B)
gcggcgaccuccaa

SEQ ID NO: 282805 - RNA, 18 nt, Human adenovirus B (HAdV-B)
gcgguucaggccucgcaa

SEQ ID NO: 282806 - RNA, 13 nt, Human adenovirus B (HAdV-B)
gcuacaacaguag

SEQ ID NO: 282807 - RNA, 23 nt, Human adenovirus B (HAdV-B)
gcuacaacaguagcaaugugcaa

SEQ ID NO: 282808 - RNA, 22 nt, Human adenovirus B (HAdV-B)
gcuacaggcgacggcgugcuau

SEQ ID NO: 282809 - RNA, 14 nt, Human adenovirus B (HAdV-B)
gcuacgaagagcua

SEQ ID NO: 282810 - RNA, 21 nt, Human adenovirus B (HAdV-B)
gcuaggcggagcgguggugua

SEQ ID NO: 282811 - RNA, 13 nt, Human adenovirus B (HAdV-B)
gcuaucaucacaa

SEQ ID NO: 282812 - RNA, 17 nt, Human adenovirus B (HAdV-B)
gcucaaccauaaaaaca

SEQ ID NO: 282813 - RNA, 22 nt, Human adenovirus B (HAdV-B)
gcuccaaggucuuccuacagaa

SEQ ID NO: 282814 - RNA, 15 nt, Human adenovirus B (HAdV-B)
gcuccgcgacacggc

SEQ ID NO: 282815 - RNA, 17 nt, Human adenovirus B (HAdV-B)
gcucgcacauagucaua

SEQ ID NO: 282816 - RNA, 21 nt, Human adenovirus B (HAdV-B)
gcucuucgguuaagcaugaca

SEQ ID NO: 282817 - RNA, 20 nt, Human adenovirus B (HAdV-B)
gcugacgcucgcaacuaugc

SEQ ID NO: 282818 - RNA, 20 nt, Human adenovirus B (HAdV-B)
gcugagaaaguucacccaga

SEQ ID NO: 282819 - RNA, 13 nt, Human adenovirus B (HAdV-B)
gcugcguccaaag

SEQ ID NO: 282820 - RNA, 15 nt, Human adenovirus B (HAdV-B)
gcugggaugggugca

SEQ ID NO: 282821 - RNA, 22 nt, Human adenovirus B (HAdV-B)
gcuuaagccugggaaacgucca

SEQ ID NO: 282822 - RNA, 21 nt, Human adenovirus B (HAdV-B)
gcuucccgaacccaaccagcg

SEQ ID NO: 282823 - RNA, 14 nt, Human adenovirus B (HAdV-B)
gcuuguuacauauc

SEQ ID NO: 282824 - RNA, 19 nt, Human adenovirus B (HAdV-B)
gcuuguuacauaucuggaa

SEQ ID NO: 282825 - RNA, 14 nt, Human adenovirus B (HAdV-B)
gcuuucacagucca

SEQ ID NO: 282826 - RNA, 18 nt, Human adenovirus B (HAdV-B)
gcuuucgguuggaaccca

SEQ ID NO: 282827 - RNA, 18 nt, Human adenovirus B (HAdV-B)
ggaacgcgcggccaaaga

SEQ ID NO: 282828 - RNA, 23 nt, Human adenovirus B (HAdV-B)
ggaacucauugaguucaucuacu

SEQ ID NO: 282829 - RNA, 15 nt, Human adenovirus B (HAdV-B)
ggaacugauacuugg

SEQ ID NO: 282830 - RNA, 16 nt, Human adenovirus B (HAdV-B)
ggaacugauacuuggg

SEQ ID NO: 282831 - RNA, 11 nt, Human adenovirus B (HAdV-B)
ggaacuggcac

SEQ ID NO: 282832 - RNA, 18 nt, Human adenovirus B (HAdV-B)
ggaagcguugauuacuuu

SEQ ID NO: 282833 - RNA, 23 nt, Human adenovirus B (HAdV-B)
ggaaucaaccccauaguuaucac

SEQ ID NO: 282834 - RNA, 19 nt, Human adenovirus B (HAdV-B)
ggaaucuaaaaccaugucu

SEQ ID NO: 282835 - RNA, 20 nt, Human adenovirus B (HAdV-B)
ggaaugcucccaaugcacau

SEQ ID NO: 282836 - RNA, 18 nt, Human adenovirus B (HAdV-B)
ggaauggguuacuaugga

SEQ ID NO: 282837 - RNA, 20 nt, Human adenovirus B (HAdV-B)
ggaauggugcaggaauguaa

SEQ ID NO: 282838 - RNA, 15 nt, Human adenovirus B (HAdV-B)
ggacaaguuacuugu

SEQ ID NO: 282839 - RNA, 13 nt, Human adenovirus B (HAdV-B)
ggaccuuuggacu

SEQ ID NO: 282840 - RNA, 17 nt, Human adenovirus B (HAdV-B)
ggacgcagcugcagcug

SEQ ID NO: 282841 - RNA, 18 nt, Human adenovirus B (HAdV-B)
ggacgcuacagugcagua

SEQ ID NO: 282842 - RNA, 16 nt, Human adenovirus B (HAdV-B)
ggacuuuuugaagcuc

SEQ ID NO: 282843 - RNA, 19 nt, Human adenovirus B (HAdV-B)
ggacuuuuugaagcucuua

SEQ ID NO: 282844 - RNA, 22 nt, Human adenovirus B (HAdV-B)
ggaggugacuaggguuguagca

SEQ ID NO: 282845 - RNA, 13 nt, Human adenovirus B (HAdV-B)
ggaguucuuauua

SEQ ID NO: 282846 - RNA, 23 nt, Human adenovirus B (HAdV-B)
ggauagcaucgccccccucugau

SEQ ID NO: 282847 - RNA, 16 nt, Human adenovirus B (HAdV-B)
ggaucccgcaaugcgg

SEQ ID NO: 282848 - RNA, 14 nt, Human adenovirus B (HAdV-B)
ggaugagagucuag

SEQ ID NO: 282849 - RNA, 22 nt, Human adenovirus B (HAdV-B)
ggaugggugagugcagaggcau

SEQ ID NO: 282850 - RNA, 20 nt, Human adenovirus B (HAdV-B)
ggaugucucacgcuugccag

SEQ ID NO: 282851 - RNA, 14 nt, Human adenovirus B (HAdV-B)
ggauugaauguuua

SEQ ID NO: 282852 - RNA, 16 nt, Human adenovirus B (HAdV-B)
ggauuuugugaauuga

SEQ ID NO: 282853 - RNA, 23 nt, Human adenovirus B (HAdV-B)
ggcaaagauucgauccgaugaca

SEQ ID NO: 282854 - RNA, 17 nt, Human adenovirus B (HAdV-B)
ggcagguucugguacug

SEQ ID NO: 282855 - RNA, 13 nt, Human adenovirus B (HAdV-B)
ggcauacaugcca

SEQ ID NO: 282856 - RNA, 23 nt, Human adenovirus B (HAdV-B)
ggcauacaugccacagaugucau

SEQ ID NO: 282857 - RNA, 23 nt, Human adenovirus B (HAdV-B)
ggcauacuuucuccauacuuuaa

SEQ ID NO: 282858 - RNA, 18 nt, Human adenovirus B (HAdV-B)
ggcaugucaauugauguu

SEQ ID NO: 282859 - RNA, 16 nt, Human adenovirus B (HAdV-B)
ggccaaagagcucaga

SEQ ID NO: 282860 - RNA, 21 nt, Human adenovirus B (HAdV-B)
ggccaaccgucuaucggccau

SEQ ID NO: 282861 - RNA, 22 nt, Human adenovirus B (HAdV-B)
ggccaugcaacguaucauggcg

SEQ ID NO: 282862 - RNA, 14 nt, Human adenovirus B (HAdV-B)
ggcccauacuaguc

SEQ ID NO: 282863 - RNA, 14 nt, Human adenovirus B (HAdV-B)
ggccggacgugaga

SEQ ID NO: 282864 - RNA, 15 nt, Human adenovirus B (HAdV-B)
ggcgaaagauggcgu

SEQ ID NO: 282865 - RNA, 23 nt, Human adenovirus B (HAdV-B)
ggcgaccuccaacagaaaaccag

SEQ ID NO: 282866 - RNA, 14 nt, Human adenovirus B (HAdV-B)
ggcgaugaugggcu

SEQ ID NO: 282867 - RNA, 17 nt, Human adenovirus B (HAdV-B)
ggcggagcgguggugua

SEQ ID NO: 282868 - RNA, 14 nt, Human adenovirus B (HAdV-B)
ggcuaagcaguuug

SEQ ID NO: 282869 - RNA, 20 nt, Human adenovirus B (HAdV-B)
ggcucucuugcuucuugcau

SEQ ID NO: 282870 - RNA, 18 nt, Human adenovirus B (HAdV-B)
ggcugaggugguaauaga

SEQ ID NO: 282871 - RNA, 17 nt, Human adenovirus B (HAdV-B)
ggcugugcagaaaaaga

SEQ ID NO: 282872 - RNA, 16 nt, Human adenovirus B (HAdV-B)
ggcuucuauuauggaa

SEQ ID NO: 282873 - RNA, 17 nt, Human adenovirus B (HAdV-B)
gggacugccccauggca

SEQ ID NO: 282874 - RNA, 20 nt, Human adenovirus B (HAdV-B)
ggggacugccccauggcaug

SEQ ID NO: 282875 - RNA, 12 nt, Human adenovirus B (HAdV-B)
ggggagucuuca

SEQ ID NO: 282876 - RNA, 15 nt, Human adenovirus B (HAdV-B)
ggggcaucuccugug

SEQ ID NO: 282877 - RNA, 19 nt, Human adenovirus B (HAdV-B)
gggucuuccauccacagua

SEQ ID NO: 282878 - RNA, 17 nt, Human adenovirus B (HAdV-B)
ggguugcauucacugcu

SEQ ID NO: 282879 - RNA, 15 nt, Human adenovirus B (HAdV-B)
ggucagugauagaua

SEQ ID NO: 282880 - RNA, 16 nt, Human adenovirus B (HAdV-B)
ggugaaauuaugugca

SEQ ID NO: 282881 - RNA, 17 nt, Human adenovirus B (HAdV-B)
ggugagugcagaggcau

SEQ ID NO: 282882 - RNA, 16 nt, Human adenovirus B (HAdV-B)
gguuaugacagauaca

SEQ ID NO: 282883 - RNA, 18 nt, Human adenovirus B (HAdV-B)
gguucacuucaaugcaug

SEQ ID NO: 282884 - RNA, 16 nt, Human adenovirus B (HAdV-B)
gguucagaugguacuu

SEQ ID NO: 282885 - RNA, 23 nt, Human adenovirus B (HAdV-B)
gguucauggcccccgauaagcuc

SEQ ID NO: 282886 - RNA, 19 nt, Human adenovirus B (HAdV-B)
gguuccauccgcauuagua

SEQ ID NO: 282887 - RNA, 16 nt, Human adenovirus B (HAdV-B)
gguucccaauaugcuu

SEQ ID NO: 282888 - RNA, 13 nt, Human adenovirus B (HAdV-B)
gguucugguacug

SEQ ID NO: 282889 - RNA, 14 nt, Human adenovirus B (HAdV-B)
gguucuucauuguc

SEQ ID NO: 282890 - RNA, 17 nt, Human adenovirus B (HAdV-B)
gguucuucauugucauu

SEQ ID NO: 282891 - RNA, 15 nt, Human adenovirus B (HAdV-B)
gguugggauuugcau

SEQ ID NO: 282892 - RNA, 14 nt, Human adenovirus B (HAdV-B)
guaaaacaagccaa

SEQ ID NO: 282893 - RNA, 21 nt, Human adenovirus B (HAdV-B)
guaaaacaagccaagauaucc

SEQ ID NO: 282894 - RNA, 20 nt, Human adenovirus B (HAdV-B)
guaacccauuccaagcacag

SEQ ID NO: 282895 - RNA, 16 nt, Human adenovirus B (HAdV-B)
guaaccuauugcauuu

SEQ ID NO: 282896 - RNA, 20 nt, Human adenovirus B (HAdV-B)
guaaucagcaggguucacuu

SEQ ID NO: 282897 - RNA, 16 nt, Human adenovirus B (HAdV-B)
guacuccaccagaaca

SEQ ID NO: 282898 - RNA, 15 nt, Human adenovirus B (HAdV-B)
guagauuuuucugca

SEQ ID NO: 282899 - RNA, 15 nt, Human adenovirus B (HAdV-B)
guagcagagguuugc

SEQ ID NO: 282900 - RNA, 17 nt, Human adenovirus B (HAdV-B)
guagcagagguuugcac

SEQ ID NO: 282901 - RNA, 16 nt, Human adenovirus B (HAdV-B)
guagccauguuuuguc

SEQ ID NO: 282902 - RNA, 21 nt, Human adenovirus B (HAdV-B)
guagccauguuuuguccugau

SEQ ID NO: 282903 - RNA, 16 nt, Human adenovirus B (HAdV-B)
guaggcugauugccac

SEQ ID NO: 282904 - RNA, 22 nt, Human adenovirus B (HAdV-B)
guaguuuucuuuuucucuagaa

SEQ ID NO: 282905 - RNA, 18 nt, Human adenovirus B (HAdV-B)
guaucaaggcucugcauu

SEQ ID NO: 282906 - RNA, 23 nt, Human adenovirus B (HAdV-B)
guaucaaggcucugcauuacuua

SEQ ID NO: 282907 - RNA, 18 nt, Human adenovirus B (HAdV-B)
gucaauauagaaauuacu

SEQ ID NO: 282908 - RNA, 19 nt, Human adenovirus B (HAdV-B)
gucagucgucuucucugau

SEQ ID NO: 282909 - RNA, 19 nt, Human adenovirus B (HAdV-B)
gucauccaaauucaccaau

SEQ ID NO: 282910 - RNA, 18 nt, Human adenovirus B (HAdV-B)
gucauuauugaacaucca

SEQ ID NO: 282911 - RNA, 11 nt, Human adenovirus B (HAdV-B)
guccacuggac

SEQ ID NO: 282912 - RNA, 21 nt, Human adenovirus B (HAdV-B)
guccaugguacagacagauug

SEQ ID NO: 282913 - RNA, 16 nt, Human adenovirus B (HAdV-B)
guccuggccaucguga

SEQ ID NO: 282914 - RNA, 21 nt, Human adenovirus B (HAdV-B)
gucgcuccgugcgacugcugu

SEQ ID NO: 282915 - RNA, 22 nt, Human adenovirus B (HAdV-B)
gucuccugcgccgcagcgcucu

SEQ ID NO: 282916 - RNA, 15 nt, Human adenovirus B (HAdV-B)
gucucgcaacucuga

SEQ ID NO: 282917 - RNA, 17 nt, Human adenovirus B (HAdV-B)
gucucugggugaaagcu

SEQ ID NO: 282918 - RNA, 18 nt, Human adenovirus B (HAdV-B)
gucucuguccgagguccu

SEQ ID NO: 282919 - RNA, 20 nt, Human adenovirus B (HAdV-B)
gucucuguccgagguccuga

SEQ ID NO: 282920 - RNA, 17 nt, Human adenovirus B (HAdV-B)
gucuuauguguacugag

SEQ ID NO: 282921 - RNA, 15 nt, Human adenovirus B (HAdV-B)
gucuucucugaugua

SEQ ID NO: 282922 - RNA, 12 nt, Human adenovirus B (HAdV-B)
gucuugcagcug

SEQ ID NO: 282923 - RNA, 13 nt, Human adenovirus B (HAdV-B)
gugacagugcaau

SEQ ID NO: 282924 - RNA, 10 nt, Human adenovirus B (HAdV-B)
gugacuaugu

SEQ ID NO: 282925 - RNA, 14 nt, Human adenovirus B (HAdV-B)
gugauacuaugacu

SEQ ID NO: 282926 - RNA, 22 nt, Human adenovirus B (HAdV-B)
gugauacuaugacuaugcauag

SEQ ID NO: 282927 - RNA, 11 nt, Human adenovirus B (HAdV-B)
gugauggcgcu

SEQ ID NO: 282928 - RNA, 17 nt, Human adenovirus B (HAdV-B)
gugauguuuauugaaca

SEQ ID NO: 282929 - RNA, 20 nt, Human adenovirus B (HAdV-B)
gugcagaggcauacaugcca

SEQ ID NO: 282930 - RNA, 13 nt, Human adenovirus B (HAdV-B)
gugcgacugcugu

SEQ ID NO: 282931 - RNA, 16 nt, Human adenovirus B (HAdV-B)
guggaauuagccauga

SEQ ID NO: 282932 - RNA, 21 nt, Human adenovirus B (HAdV-B)
guggacaacaagucggcggac

SEQ ID NO: 282933 - RNA, 18 nt, Human adenovirus B (HAdV-B)
gugguagauuuggcuaac

SEQ ID NO: 282934 - RNA, 19 nt, Human adenovirus B (HAdV-B)
guguauaugugucauuaca

SEQ ID NO: 282935 - RNA, 20 nt, Human adenovirus B (HAdV-B)
guguggauuggauuuaccac

SEQ ID NO: 282936 - RNA, 13 nt, Human adenovirus B (HAdV-B)
guuaacuguucac

SEQ ID NO: 282937 - RNA, 14 nt, Human adenovirus B (HAdV-B)
guuaacuguucacu

SEQ ID NO: 282938 - RNA, 22 nt, Human adenovirus B (HAdV-B)
guuagcucauaggagcuggcuu

SEQ ID NO: 282939 - RNA, 21 nt, Human adenovirus B (HAdV-B)
guuaucaaccccaaaugggau

SEQ ID NO: 282940 - RNA, 20 nt, Human adenovirus B (HAdV-B)
guuaugggaucuacugugga

SEQ ID NO: 282941 - RNA, 15 nt, Human adenovirus B (HAdV-B)
guucagaugguacuu

SEQ ID NO: 282942 - RNA, 21 nt, Human adenovirus B (HAdV-B)
guucauggcccccgauaagcu

SEQ ID NO: 282943 - RNA, 19 nt, Human adenovirus B (HAdV-B)
guucaugugauggcgcuag

SEQ ID NO: 282944 - RNA, 20 nt, Human adenovirus B (HAdV-B)
guucugcaagagcuuccuau

SEQ ID NO: 282945 - RNA, 14 nt, Human adenovirus B (HAdV-B)
guucuuacuuuaaa

SEQ ID NO: 282946 - RNA, 14 nt, Human adenovirus B (HAdV-B)
guugaaaugggcau

SEQ ID NO: 282947 - RNA, 23 nt, Human adenovirus B (HAdV-B)
guugauuuaaaaucaaguguuuu

SEQ ID NO: 282948 - RNA, 15 nt, Human adenovirus B (HAdV-B)
guugccacuugaauu

SEQ ID NO: 282949 - RNA, 20 nt, Human adenovirus B (HAdV-B)
guugccagauugugauacua

SEQ ID NO: 282950 - RNA, 20 nt, Human adenovirus B (HAdV-B)
guugccgcuaacacugugcu

SEQ ID NO: 282951 - RNA, 13 nt, Human adenovirus B (HAdV-B)
guuggacugugaa

SEQ ID NO: 282952 - RNA, 15 nt, Human adenovirus B (HAdV-B)
guuggagccugagga

SEQ ID NO: 282953 - RNA, 15 nt, Human adenovirus B (HAdV-B)
guuuccacuaccaca

SEQ ID NO: 282954 - RNA, 11 nt, Human adenovirus B (HAdV-B)
guuucuuguaa

SEQ ID NO: 282955 - RNA, 16 nt, Human adenovirus B (HAdV-B)
uaaaaacauacgggaa

SEQ ID NO: 282956 - RNA, 19 nt, Human adenovirus B (HAdV-B)
uaaaaacauacgggaacaa

SEQ ID NO: 282957 - RNA, 21 nt, Human adenovirus B (HAdV-B)
uaaaaauauguuaacuguuca

SEQ ID NO: 282958 - RNA, 16 nt, Human adenovirus B (HAdV-B)
uaaaacaagccaagau

SEQ ID NO: 282959 - RNA, 15 nt, Human adenovirus B (HAdV-B)
uaaacaucacuuuau

SEQ ID NO: 282960 - RNA, 18 nt, Human adenovirus B (HAdV-B)
uaaacauuuggauaccau

SEQ ID NO: 282961 - RNA, 22 nt, Human adenovirus B (HAdV-B)
uaaagugauguuuauugaacac

SEQ ID NO: 282962 - RNA, 14 nt, Human adenovirus B (HAdV-B)
uaaauaaacaagcu

SEQ ID NO: 282963 - RNA, 13 nt, Human adenovirus B (HAdV-B)
uaacaaccacagg

SEQ ID NO: 282964 - RNA, 20 nt, Human adenovirus B (HAdV-B)
uaaccauuaucaacgugaca

SEQ ID NO: 282965 - RNA, 16 nt, Human adenovirus B (HAdV-B)
uaaccccacuaacaac

SEQ ID NO: 282966 - RNA, 21 nt, Human adenovirus B (HAdV-B)
uaacuauaggcucaaacugca

SEQ ID NO: 282967 - RNA, 12 nt, Human adenovirus B (HAdV-B)
uaacuguucacu

SEQ ID NO: 282968 - RNA, 13 nt, Human adenovirus B (HAdV-B)
uaacuugcaacau

SEQ ID NO: 282969 - RNA, 15 nt, Human adenovirus B (HAdV-B)
uaacuugcaacauac

SEQ ID NO: 282970 - RNA, 17 nt, Human adenovirus B (HAdV-B)
uaacuugcaacauacaa

SEQ ID NO: 282971 - RNA, 11 nt, Human adenovirus B (HAdV-B)
uaagacucucc

SEQ ID NO: 282972 - RNA, 14 nt, Human adenovirus B (HAdV-B)
uaagagaccugcua

SEQ ID NO: 282973 - RNA, 18 nt, Human adenovirus B (HAdV-B)
uaagagaccugcuaccaa

SEQ ID NO: 282974 - RNA, 21 nt, Human adenovirus B (HAdV-B)
uaagagaccugcuaccaauga

SEQ ID NO: 282975 - RNA, 14 nt, Human adenovirus B (HAdV-B)
uaugcuuauuccaa

SEQ ID NO: 282976 - RNA, 11 nt, Human adenovirus B (HAdV-B)
uaugugcauuu

SEQ ID NO: 282977 - RNA, 23 nt, Human adenovirus B (HAdV-B)
uauuaugguuaugacagauacag

SEQ ID NO: 282978 - RNA, 21 nt, Human adenovirus B (HAdV-B)
uauucggaacuggcaccucag

SEQ ID NO: 282979 - RNA, 14 nt, Human adenovirus B (HAdV-B)
uauugcauuugcau

SEQ ID NO: 282980 - RNA, 14 nt, Human adenovirus B (HAdV-B)
uauuugaaaaucaa

SEQ ID NO: 282981 - RNA, 21 nt, Human adenovirus B (HAdV-B)
uauuugaaaaucaauucacaa

SEQ ID NO: 282982 - RNA, 19 nt, Human adenovirus B (HAdV-B)
uauuugauuuuggcuggaa

SEQ ID NO: 282983 - RNA, 22 nt, Human adenovirus B (HAdV-B)
uauuuugccucccccuucccau

SEQ ID NO: 282984 - RNA, 17 nt, Human adenovirus B (HAdV-B)
uauuuuuuuacauguau

SEQ ID NO: 282985 - RNA, 15 nt, Human adenovirus B (HAdV-B)
aaucaaguaccaucu

SEQ ID NO: 282986 - RNA, 12 nt, Human adenovirus B (HAdV-B)
aaucaauucaca

SEQ ID NO: 282987 - RNA, 15 nt, Human adenovirus B (HAdV-B)
aaucagaaauucccc

SEQ ID NO: 282988 - RNA, 21 nt, Human adenovirus B (HAdV-B)
aaucagcaauaaggucucugu

SEQ ID NO: 282989 - RNA, 15 nt, Human adenovirus B (HAdV-B)
aaucagcaggguuca

SEQ ID NO: 282990 - RNA, 16 nt, Human adenovirus B (HAdV-B)
aaucggaucuuuccaa

SEQ ID NO: 282991 - RNA, 17 nt, Human adenovirus B (HAdV-B)
aaucugcaacaaaacaa

SEQ ID NO: 282992 - RNA, 14 nt, Human adenovirus B (HAdV-B)
aaucuuacauugau

SEQ ID NO: 282993 - RNA, 21 nt, Human adenovirus B (HAdV-B)
acgcacagcuuuaaacauuug

SEQ ID NO: 282994 - RNA, 15 nt, Human adenovirus B (HAdV-B)
acgcagcugcagcug

SEQ ID NO: 282995 - RNA, 16 nt, Human adenovirus B (HAdV-B)
acgcgcggccaaagag

SEQ ID NO: 282996 - RNA, 22 nt, Human adenovirus B (HAdV-B)
acgcguggcucgcuacaacagu

SEQ ID NO: 282997 - RNA, 14 nt, Human adenovirus B (HAdV-B)
acgcucgacaucau

SEQ ID NO: 282998 - RNA, 23 nt, Human adenovirus B (HAdV-B)
acgcuucccgaacccaaccagcg

SEQ ID NO: 282999 - RNA, 17 nt, Human adenovirus B (HAdV-B)
acgcuugccagcacggu

SEQ ID NO: 283000 - RNA, 22 nt, Human adenovirus B (HAdV-B)
acggaacccugcaagccauuga

SEQ ID NO: 283001 - RNA, 24 nt, Human adenovirus B (HAdV-B)
acggaugucucacgcuugccagca

SEQ ID NO: 283002 - RNA, 14 nt, Human adenovirus B (HAdV-B)
acggggaugaugau

SEQ ID NO: 283003 - RNA, 18 nt, Human adenovirus B (HAdV-B)
acggucaggccagugcac

SEQ ID NO: 283004 - RNA, 20 nt, Human adenovirus B (HAdV-B)
acgugacagcaaaugacaaa

SEQ ID NO: 283005 - RNA, 23 nt, Human adenovirus B (HAdV-B)
acguguucaauaaacaucacuuu

SEQ ID NO: 283006 - RNA, 21 nt, Human adenovirus B (HAdV-B)
acuaaggguugcauucacugc

SEQ ID NO: 283007 - RNA, 14 nt, Human adenovirus B (HAdV-B)
acuagaagcucaac

SEQ ID NO: 283008 - RNA, 15 nt, Human adenovirus B (HAdV-B)
acuaggguuguagca

SEQ ID NO: 283009 - RNA, 13 nt, Human adenovirus B (HAdV-B)
acuauagccagca

SEQ ID NO: 283010 - RNA, 18 nt, Human adenovirus B (HAdV-B)
acuaucagaaugaccaca

SEQ ID NO: 283011 - RNA, 15 nt, Human adenovirus B (HAdV-B)
acucacaaacuagaa

SEQ ID NO: 283012 - RNA, 17 nt, Human adenovirus B (HAdV-B)
acucaugagaagguccu

SEQ ID NO: 283013 - RNA, 18 nt, Human adenovirus B (HAdV-B)
acucauuugugcauuuaa

SEQ ID NO: 283014 - RNA, 23 nt, Human adenovirus B (HAdV-B)
acuccagcaccccgcacaacuac

SEQ ID NO: 283015 - RNA, 19 nt, Human adenovirus B (HAdV-B)
acucggauuuugugaauug

SEQ ID NO: 283016 - RNA, 22 nt, Human adenovirus B (HAdV-B)
acucuccuacggacugccgcuu

SEQ ID NO: 283017 - RNA, 19 nt, Human adenovirus B (HAdV-B)
acucucgccugcaacgaau

SEQ ID NO: 283018 - RNA, 22 nt, Human adenovirus B (HAdV-B)
acucucucauauuaucaccaaa

SEQ ID NO: 283019 - RNA, 14 nt, Human adenovirus B (HAdV-B)
acucuggacagcuc

SEQ ID NO: 283020 - RNA, 17 nt, Human adenovirus B (HAdV-B)
acugaaacaccaucagc

SEQ ID NO: 283021 - RNA, 17 nt, Human adenovirus B (HAdV-B)
acugaauuaagacucuc

SEQ ID NO: 283022 - RNA, 16 nt, Human adenovirus B (HAdV-B)
acugaugcuagaucug

SEQ ID NO: 283023 - RNA, 23 nt, Human adenovirus B (HAdV-B)
acugcacacuaaaaggaccucaa

SEQ ID NO: 283024 - RNA, 21 nt, Human adenovirus B (HAdV-B)
acugcacacuuacuuuugcac

SEQ ID NO: 283025 - RNA, 15 nt, Human adenovirus B (HAdV-B)
acugcgcucugagaa

SEQ ID NO: 283026 - RNA, 13 nt, Human adenovirus B (HAdV-B)
acugugcuuggaa

SEQ ID NO: 283027 - RNA, 13 nt, Human adenovirus B (HAdV-B)
acuguucugcaag

SEQ ID NO: 283028 - RNA, 17 nt, Human adenovirus B (HAdV-B)
acuguuuggaaugugga

SEQ ID NO: 283029 - RNA, 21 nt, Human adenovirus B (HAdV-B)
acuuaaggugacgucaauauu

SEQ ID NO: 283030 - RNA, 11 nt, Human adenovirus B (HAdV-B)
acuuacuugaa

SEQ ID NO: 283031 - RNA, 14 nt, Human adenovirus B (HAdV-B)
acuucaaugcaugg

SEQ ID NO: 283032 - RNA, 13 nt, Human adenovirus B (HAdV-B)
acuucaccuuucc

SEQ ID NO: 283033 - RNA, 19 nt, Human adenovirus B (HAdV-B)
acuucaccuuuccuacuca

SEQ ID NO: 283034 - RNA, 15 nt, Human adenovirus B (HAdV-B)
acuucccucuuccca

SEQ ID NO: 283035 - RNA, 16 nt, Human adenovirus B (HAdV-B)
acuucccucuucccaa

SEQ ID NO: 283036 - RNA, 15 nt, Human adenovirus B (HAdV-B)
acuucuuagacucau

SEQ ID NO: 283037 - RNA, 18 nt, Human adenovirus B (HAdV-B)
acuugauuuccacagguu

SEQ ID NO: 283038 - RNA, 21 nt, Human adenovirus B (HAdV-B)
acuugcaugaucuuuuccagg

SEQ ID NO: 283039 - RNA, 20 nt, Human adenovirus B (HAdV-B)
acuugcucgcacauagucau

SEQ ID NO: 283040 - RNA, 16 nt, Human adenovirus B (HAdV-B)
acuuggguugccacuu

SEQ ID NO: 283041 - RNA, 20 nt, Human adenovirus B (HAdV-B)
acuuggguugccacuugaau

SEQ ID NO: 283042 - RNA, 18 nt, Human adenovirus B (HAdV-B)
acuuuaaaggggauguca

SEQ ID NO: 283043 - RNA, 19 nt, Human adenovirus B (HAdV-B)
acuuuaggagaaugaagca

SEQ ID NO: 283044 - RNA, 13 nt, Human adenovirus B (HAdV-B)
acuuucuccauac

SEQ ID NO: 283045 - RNA, 17 nt, Human adenovirus B (HAdV-B)
acuuuuccucacuacaa

SEQ ID NO: 283046 - RNA, 15 nt, Human adenovirus B (HAdV-B)
agaaaaauuugccaa

SEQ ID NO: 283047 - RNA, 14 nt, Human adenovirus B (HAdV-B)
agaaaaccagcagc

SEQ ID NO: 283048 - RNA, 17 nt, Human adenovirus B (HAdV-B)
agaaaaugcaaauucca

SEQ ID NO: 283049 - RNA, 22 nt, Human adenovirus B (HAdV-B)
agaaaaugcaaauuccaacaac

SEQ ID NO: 283050 - RNA, 15 nt, Human adenovirus B (HAdV-B)
agaaacuuuuacauc

SEQ ID NO: 283051 - RNA, 13 nt, Human adenovirus B (HAdV-B)
agaaauaaacuua

SEQ ID NO: 283052 - RNA, 18 nt, Human adenovirus B (HAdV-B)
agaaaucggaucuuucca

SEQ ID NO: 283053 - RNA, 23 nt, Human adenovirus B (HAdV-B)
agaaauuucuucuucaccauacu

SEQ ID NO: 283054 - RNA, 14 nt, Human adenovirus B (HAdV-B)
agaacucgguggau

SEQ ID NO: 283055 - RNA, 17 nt, Human adenovirus B (HAdV-B)
agaacuuaaaguagcau

SEQ ID NO: 283056 - RNA, 12 nt, Human adenovirus B (HAdV-B)
agaagaugcaug

SEQ ID NO: 283057 - RNA, 17 nt, Human adenovirus B (HAdV-B)
agaagauuaacuugcau

SEQ ID NO: 283058 - RNA, 19 nt, Human adenovirus B (HAdV-B)
agaagcauuuucccuacua

SEQ ID NO: 283059 - RNA, 22 nt, Human adenovirus B (HAdV-B)
agaagcauuuucccuacuaaua

SEQ ID NO: 283060 - RNA, 13 nt, Human adenovirus B (HAdV-B)
agaauauaugaca

SEQ ID NO: 283061 - RNA, 14 nt, Human adenovirus B (HAdV-B)
agaaugaagcaugu

SEQ ID NO: 283062 - RNA, 16 nt, Human adenovirus B (HAdV-B)
agaaugccaucaucuc

SEQ ID NO: 283063 - RNA, 17 nt, Human adenovirus B (HAdV-B)
agaaugccaucaucucc

SEQ ID NO: 283064 - RNA, 16 nt, Human adenovirus B (HAdV-B)
agacguagaugggauc

SEQ ID NO: 283065 - RNA, 21 nt, Human adenovirus B (HAdV-B)
agacucaucuaaaaccaugca

SEQ ID NO: 283066 - RNA, 19 nt, Human adenovirus B (HAdV-B)
agagaccugcuaccaauga

SEQ ID NO: 283067 - RNA, 18 nt, Human adenovirus B (HAdV-B)
agagccuugauacaugua

SEQ ID NO: 283068 - RNA, 15 nt, Human adenovirus B (HAdV-B)
agagcucagagccau

SEQ ID NO: 283069 - RNA, 20 nt, Human adenovirus B (HAdV-B)
agagggcaucuagugguacu

SEQ ID NO: 283070 - RNA, 22 nt, Human adenovirus B (HAdV-B)
agagggcaucuagugguacuga

SEQ ID NO: 283071 - RNA, 21 nt, Human adenovirus B (HAdV-B)
agagugcuuuuugauugucac

SEQ ID NO: 283072 - RNA, 14 nt, Human adenovirus B (HAdV-B)
agagugugguugua

SEQ ID NO: 283073 - RNA, 12 nt, Human adenovirus B (HAdV-B)
agaguuuuuaca

SEQ ID NO: 283074 - RNA, 16 nt, Human adenovirus B (HAdV-B)
agauaaagacagcggc

SEQ ID NO: 283075 - RNA, 20 nt, Human adenovirus B (HAdV-B)
agaucaccgcuacugaccau

SEQ ID NO: 283076 - RNA, 15 nt, Human adenovirus B (HAdV-B)
agaugaaagcaccuc

SEQ ID NO: 283077 - RNA, 15 nt, Human adenovirus B (HAdV-B)
agaugcaugcauuua

SEQ ID NO: 283078 - RNA, 20 nt, Human adenovirus B (HAdV-B)
agauggcgugagaauuggaa

SEQ ID NO: 283079 - RNA, 19 nt, Human adenovirus B (HAdV-B)
agaugucauccaaauucac

SEQ ID NO: 283080 - RNA, 22 nt, Human adenovirus B (HAdV-B)
agauuacgaaagugaaccacaa

SEQ ID NO: 283081 - RNA, 14 nt, Human adenovirus B (HAdV-B)
agauuccacauucc

SEQ ID NO: 283082 - RNA, 16 nt, Human adenovirus B (HAdV-B)
agauuccacauuccaa

SEQ ID NO: 283083 - RNA, 17 nt, Human adenovirus B (HAdV-B)
agauuggaauaagcaua

SEQ ID NO: 283084 - RNA, 13 nt, Human adenovirus B (HAdV-B)
agcaaaguuuaca

SEQ ID NO: 283085 - RNA, 18 nt, Human adenovirus B (HAdV-B)
agcaaccccagacuguau

SEQ ID NO: 283086 - RNA, 21 nt, Human adenovirus B (HAdV-B)
agcaagagcucagagccauug

SEQ ID NO: 283087 - RNA, 16 nt, Human adenovirus B (HAdV-B)
agcaauaaggucucug

SEQ ID NO: 283088 - RNA, 16 nt, Human adenovirus B (HAdV-B)
agcaauuucauggugg

SEQ ID NO: 283089 - RNA, 23 nt, Human adenovirus B (HAdV-B)
agcaccucacuucccucuuccca

SEQ ID NO: 283090 - RNA, 15 nt, Human adenovirus B (HAdV-B)
agcacgagauacaau

SEQ ID NO: 283091 - RNA, 12 nt, Human adenovirus B (HAdV-B)
agcagcaccuca

SEQ ID NO: 283092 - RNA, 14 nt, Human adenovirus B (HAdV-B)
agcagccgcugucu

SEQ ID NO: 283093 - RNA, 19 nt, Human adenovirus B (HAdV-B)
agcaugaccaccaucgaaa

SEQ ID NO: 283094 - RNA, 16 nt, Human adenovirus B (HAdV-B)
agcauguuguuuggca

SEQ ID NO: 283095 - RNA, 17 nt, Human adenovirus B (HAdV-B)
agcauguuguuuggcac

SEQ ID NO: 283096 - RNA, 18 nt, Human adenovirus B (HAdV-B)
cgaucucuaucauugaga

SEQ ID NO: 283097 - RNA, 16 nt, Human adenovirus B (HAdV-B)
cgcaacuaugcucgac

SEQ ID NO: 283098 - RNA, 13 nt, Human adenovirus B (HAdV-B)
cgcagacguccug

SEQ ID NO: 283099 - RNA, 19 nt, Human adenovirus B (HAdV-B)
cgcagcaguuggacuguga

SEQ ID NO: 283100 - RNA, 21 nt, Human adenovirus B (HAdV-B)
cgcagcaguuggacugugaaa

SEQ ID NO: 283101 - RNA, 15 nt, Human adenovirus B (HAdV-B)
cgcaguggcccuuuc

SEQ ID NO: 283102 - RNA, 14 nt, Human adenovirus B (HAdV-B)
cgccgcgcacgggc

SEQ ID NO: 283103 - RNA, 16 nt, Human adenovirus B (HAdV-B)
cgcuacaacaguagca

SEQ ID NO: 283104 - RNA, 14 nt, Human adenovirus B (HAdV-B)
cgcuccaacauugu

SEQ ID NO: 283105 - RNA, 16 nt, Human adenovirus B (HAdV-B)
cgcugaguuacuuuca

SEQ ID NO: 283106 - RNA, 13 nt, Human adenovirus B (HAdV-B)
cgcugcagagcca

SEQ ID NO: 283107 - RNA, 16 nt, Human adenovirus B (HAdV-B)
cgcugcugcaauuggc

SEQ ID NO: 283108 - RNA, 15 nt, Human adenovirus B (HAdV-B)
cgcuuucacagucca

SEQ ID NO: 283109 - RNA, 22 nt, Human adenovirus B (HAdV-B)
cggaacccugcaagccauugac

SEQ ID NO: 283110 - RNA, 16 nt, Human adenovirus B (HAdV-B)
cggaaugcuuguuaca

SEQ ID NO: 283111 - RNA, 21 nt, Human adenovirus B (HAdV-B)
cggaccuuuggacuugaguac

SEQ ID NO: 283112 - RNA, 15 nt, Human adenovirus B (HAdV-B)
cggacugguauacaa

SEQ ID NO: 283113 - RNA, 14 nt, Human adenovirus B (HAdV-B)
cggcaucaauggag

SEQ ID NO: 283114 - RNA, 20 nt, Human adenovirus B (HAdV-B)
cggccaaagagcucagagau

SEQ ID NO: 283115 - RNA, 12 nt, Human adenovirus B (HAdV-B)
cgggaacaaagc

SEQ ID NO: 283116 - RNA, 13 nt, Human adenovirus B (HAdV-B)
cgguaagaaggau

SEQ ID NO: 283117 - RNA, 20 nt, Human adenovirus B (HAdV-B)
cgucacagcagcagaggaaa

SEQ ID NO: 283118 - RNA, 21 nt, Human adenovirus B (HAdV-B)
cgucuaucggccaucauggaa

SEQ ID NO: 283119 - RNA, 23 nt, Human adenovirus B (HAdV-B)
cgucucagaacagcgacucgccc

SEQ ID NO: 283120 - RNA, 15 nt, Human adenovirus B (HAdV-B)
cgucucuacaaacga

SEQ ID NO: 283121 - RNA, 16 nt, Human adenovirus B (HAdV-B)
cgucucuaucccucua

SEQ ID NO: 283122 - RNA, 14 nt, Human adenovirus B (HAdV-B)
cgucuucucugaug

SEQ ID NO: 283123 - RNA, 16 nt, Human adenovirus B (HAdV-B)
cgugaaggaacaugca

SEQ ID NO: 283124 - RNA, 21 nt, Human adenovirus B (HAdV-B)
cgugcuauccgcaagcaauug

SEQ ID NO: 283125 - RNA, 23 nt, Human adenovirus B (HAdV-B)
cgugcugaucgagcgagaccagg

SEQ ID NO: 283126 - RNA, 14 nt, Human adenovirus B (HAdV-B)
cuaaauccugagga

SEQ ID NO: 283127 - RNA, 13 nt, Human adenovirus B (HAdV-B)
cuaacaaccacag

SEQ ID NO: 283128 - RNA, 21 nt, Human adenovirus B (HAdV-B)
cuaaccauuaucaacgugaca

SEQ ID NO: 283129 - RNA, 14 nt, Human adenovirus B (HAdV-B)
cuaagagaccugcu

SEQ ID NO: 283130 - RNA, 18 nt, Human adenovirus B (HAdV-B)
cuaaggguugcauucacu

SEQ ID NO: 283131 - RNA, 23 nt, Human adenovirus B (HAdV-B)
cuaauucaaaacuaacaauguug

SEQ ID NO: 283132 - RNA, 15 nt, Human adenovirus B (HAdV-B)
cuacaaaacaugcaa

SEQ ID NO: 283133 - RNA, 13 nt, Human adenovirus B (HAdV-B)
cuacaagaacuuc

SEQ ID NO: 283134 - RNA, 17 nt, Human adenovirus B (HAdV-B)
cuacagagucucugaca

SEQ ID NO: 283135 - RNA, 18 nt, Human adenovirus B (HAdV-B)
cuaccuauacacaccuug

SEQ ID NO: 283136 - RNA, 16 nt, Human adenovirus B (HAdV-B)
cuacuauagccagcaa

SEQ ID NO: 283137 - RNA, 14 nt, Human adenovirus B (HAdV-B)
cuacucggauuuug

SEQ ID NO: 283138 - RNA, 18 nt, Human adenovirus B (HAdV-B)
cuacucggauuuugugaa

SEQ ID NO: 283139 - RNA, 18 nt, Human adenovirus B (HAdV-B)
cuacuucgaacuccccaa

SEQ ID NO: 283140 - RNA, 20 nt, Human adenovirus B (HAdV-B)
cuagaucugaguuggcuuua

SEQ ID NO: 283141 - RNA, 15 nt, Human adenovirus B (HAdV-B)
cuagucuugcuuguu

SEQ ID NO: 283142 - RNA, 18 nt, Human adenovirus B (HAdV-B)
cuagugguacugaugcua

SEQ ID NO: 283143 - RNA, 14 nt, Human adenovirus B (HAdV-B)
cuaguuguaaaaac

SEQ ID NO: 283144 - RNA, 12 nt, Human adenovirus B (HAdV-B)
cuauacuaccaa

SEQ ID NO: 283145 - RNA, 13 nt, Human adenovirus B (HAdV-B)
cuauaguacucca

SEQ ID NO: 283146 - RNA, 17 nt, Human adenovirus B (HAdV-B)
cuaucgagaaaaaucag

SEQ ID NO: 283147 - RNA, 21 nt, Human adenovirus B (HAdV-B)
cuaugcuacuuuaaguucuuc

SEQ ID NO: 283148 - RNA, 13 nt, Human adenovirus B (HAdV-B)
cuauguugugcca

SEQ ID NO: 283149 - RNA, 15 nt, Human adenovirus B (HAdV-B)
cuauuaguuacuuca

SEQ ID NO: 283150 - RNA, 16 nt, Human adenovirus B (HAdV-B)
cuauuaguuacuucaa

SEQ ID NO: 283151 - RNA, 21 nt, Human adenovirus B (HAdV-B)
cuauuaugguuaugacagaua

SEQ ID NO: 283152 - RNA, 22 nt, Human adenovirus B (HAdV-B)
cuauucccugggauauguuucu

SEQ ID NO: 283153 - RNA, 22 nt, Human adenovirus B (HAdV-B)
cuauugcuucccuacgcugucu

SEQ ID NO: 283154 - RNA, 22 nt, Human adenovirus B (HAdV-B)
cuauuugauuuuggcuggaaug

SEQ ID NO: 283155 - RNA, 19 nt, Human adenovirus B (HAdV-B)
cucaaacugcacacuaaaa

SEQ ID NO: 283156 - RNA, 16 nt, Human adenovirus B (HAdV-B)
cucaaccauaaaaaca

SEQ ID NO: 283157 - RNA, 17 nt, Human adenovirus B (HAdV-B)
cucacaccucacuguaa

SEQ ID NO: 283158 - RNA, 19 nt, Human adenovirus B (HAdV-B)
cucacgcuugccagcacgg

SEQ ID NO: 283159 - RNA, 20 nt, Human adenovirus B (HAdV-B)
cucacgcuugccagcacggu

SEQ ID NO: 283160 - RNA, 18 nt, Human adenovirus B (HAdV-B)
cucacuucccucuuccca

SEQ ID NO: 283161 - RNA, 17 nt, Human adenovirus B (HAdV-B)
cucagugacuccuucaa

SEQ ID NO: 283162 - RNA, 19 nt, Human adenovirus B (HAdV-B)
cucaucaaacccacaagca

SEQ ID NO: 283163 - RNA, 16 nt, Human adenovirus B (HAdV-B)
cucauuugugcauuua

SEQ ID NO: 283164 - RNA, 17 nt, Human adenovirus B (HAdV-B)
cuccaaggucuuccuac

SEQ ID NO: 283165 - RNA, 17 nt, Human adenovirus B (HAdV-B)
cuccacccgcaugaauu

SEQ ID NO: 283166 - RNA, 14 nt, Human adenovirus B (HAdV-B)
cuccauacuuuaaa

SEQ ID NO: 283167 - RNA, 11 nt, Human adenovirus B (HAdV-B)
cuccauugaag

SEQ ID NO: 283168 - RNA, 12 nt, Human adenovirus B (HAdV-B)
cucccaaugcac

SEQ ID NO: 283169 - RNA, 16 nt, Human adenovirus B (HAdV-B)
cuccccaauuggcucc

SEQ ID NO: 283170 - RNA, 13 nt, Human adenovirus B (HAdV-B)
cuccugcuugaaa

SEQ ID NO: 283171 - RNA, 22 nt, Human adenovirus B (HAdV-B)
cucgucagcaugaccaccaucg

SEQ ID NO: 283172 - RNA, 23 nt, Human adenovirus B (HAdV-B)
cucgucagcaugaccaccaucga

SEQ ID NO: 283173 - RNA, 21 nt, Human adenovirus B (HAdV-B)
cucuaaucccacucaugagaa

SEQ ID NO: 283174 - RNA, 20 nt, Human adenovirus B (HAdV-B)
cucuagaaacuuuuacaucu

SEQ ID NO: 283175 - RNA, 16 nt, Human adenovirus B (HAdV-B)
cucuagaauuaucauu

SEQ ID NO: 283176 - RNA, 19 nt, Human adenovirus B (HAdV-B)
cucuagaauuaucauugaa

SEQ ID NO: 283177 - RNA, 22 nt, Human adenovirus B (HAdV-B)
cucuaggacauaauuacacucu

SEQ ID NO: 283178 - RNA, 20 nt, Human adenovirus B (HAdV-B)
cucugggaugcaaaugcaau

SEQ ID NO: 283179 - RNA, 18 nt, Human adenovirus B (HAdV-B)
cucuugcuucuugcaugc

SEQ ID NO: 283180 - RNA, 17 nt, Human adenovirus B (HAdV-B)
cugaaaauuaucuggga

SEQ ID NO: 283181 - RNA, 16 nt, Human adenovirus B (HAdV-B)
cugaaacaccaucagc

SEQ ID NO: 283182 - RNA, 22 nt, Human adenovirus B (HAdV-B)
cugaaacuguuuggaaugugga

SEQ ID NO: 283183 - RNA, 21 nt, Human adenovirus B (HAdV-B)
cugaaaugugcgaucuggcca

SEQ ID NO: 283184 - RNA, 17 nt, Human adenovirus B (HAdV-B)
cugaacuaucagaauga

SEQ ID NO: 283185 - RNA, 22 nt, Human adenovirus B (HAdV-B)
cugacacuccugguccugugac

SEQ ID NO: 283186 - RNA, 15 nt, Human adenovirus B (HAdV-B)
cugaguuggcuuuaa

SEQ ID NO: 283187 - RNA, 19 nt, Human adenovirus B (HAdV-B)
cugauacuuggguugccac

SEQ ID NO: 283188 - RNA, 13 nt, Human adenovirus B (HAdV-B)
cugcaacaaaaca

SEQ ID NO: 283189 - RNA, 20 nt, Human adenovirus B (HAdV-B)
cugcaacaaaacaaaaccaa

SEQ ID NO: 283190 - RNA, 22 nt, Human adenovirus B (HAdV-B)
cugcaacaaaacaaaaccaaua

SEQ ID NO: 283191 - RNA, 18 nt, Human adenovirus B (HAdV-B)
cugcaacgggugcuuacu

SEQ ID NO: 283192 - RNA, 16 nt, Human adenovirus B (HAdV-B)
cugccccauggcaugg

SEQ ID NO: 283193 - RNA, 17 nt, Human adenovirus B (HAdV-B)
cugccuauaguacucca

SEQ ID NO: 283194 - RNA, 15 nt, Human adenovirus B (HAdV-B)
cugcgccaccauccc

SEQ ID NO: 283195 - RNA, 22 nt, Human adenovirus B (HAdV-B)
cugcgccuacaucuacugugga

SEQ ID NO: 283196 - RNA, 14 nt, Human adenovirus B (HAdV-B)
cugcggaucccaaa

SEQ ID NO: 283197 - RNA, 15 nt, Human adenovirus B (HAdV-B)
cugcuuugcccggga

SEQ ID NO: 283198 - RNA, 22 nt, Human adenovirus B (HAdV-B)
cuggacgggauaggggcguuaa

SEQ ID NO: 283199 - RNA, 15 nt, Human adenovirus B (HAdV-B)
cuggacuuuaggaga

SEQ ID NO: 283200 - RNA, 18 nt, Human adenovirus B (HAdV-B)
cacuccugguccugugac

SEQ ID NO: 283201 - RNA, 13 nt, Human adenovirus B (HAdV-B)
cacuuacuugaaa

SEQ ID NO: 283202 - RNA, 13 nt, Human adenovirus B (HAdV-B)
cacuucaaugcau

SEQ ID NO: 283203 - RNA, 13 nt, Human adenovirus B (HAdV-B)
cagaaaaccagca

SEQ ID NO: 283204 - RNA, 19 nt, Human adenovirus B (HAdV-B)
cagaaauuugcuaucauca

SEQ ID NO: 283205 - RNA, 14 nt, Human adenovirus B (HAdV-B)
cagaagcauuuucc

SEQ ID NO: 283206 - RNA, 23 nt, Human adenovirus B (HAdV-B)
cagaagcauuuucccuacuaaua

SEQ ID NO: 283207 - RNA, 22 nt, Human adenovirus B (HAdV-B)
cagaagccccccgggaacaaga

SEQ ID NO: 283208 - RNA, 18 nt, Human adenovirus B (HAdV-B)
cagaauacaccaaucucu

SEQ ID NO: 283209 - RNA, 20 nt, Human adenovirus B (HAdV-B)
cagacauggcuucucuuaca

SEQ ID NO: 283210 - RNA, 21 nt, Human adenovirus B (HAdV-B)
cagacuguauaggagcauuug

SEQ ID NO: 283211 - RNA, 15 nt, Human adenovirus B (HAdV-B)
cagagaccuaaccau

SEQ ID NO: 283212 - RNA, 17 nt, Human adenovirus B (HAdV-B)
cagagaccuaaccauua

SEQ ID NO: 283213 - RNA, 21 nt, Human adenovirus B (HAdV-B)
cagagaccuaaccauuaucaa

SEQ ID NO: 283214 - RNA, 18 nt, Human adenovirus B (HAdV-B)
cagagccauuguccaaga

SEQ ID NO: 283215 - RNA, 19 nt, Human adenovirus B (HAdV-B)
cagagccuugauacaugua

SEQ ID NO: 283216 - RNA, 16 nt, Human adenovirus B (HAdV-B)
cagaggaacacauucc

SEQ ID NO: 283217 - RNA, 20 nt, Human adenovirus B (HAdV-B)
cagauaagcccuugguguag

SEQ ID NO: 283218 - RNA, 18 nt, Human adenovirus B (HAdV-B)
cagauacaguagucaaua

SEQ ID NO: 283219 - RNA, 21 nt, Human adenovirus B (HAdV-B)
cagauugugauacuaugacua

SEQ ID NO: 283220 - RNA, 17 nt, Human adenovirus B (HAdV-B)
cagcaacuucgaugaua

SEQ ID NO: 283221 - RNA, 18 nt, Human adenovirus B (HAdV-B)
cagcaguagccacagcaa

SEQ ID NO: 283222 - RNA, 19 nt, Human adenovirus B (HAdV-B)
cagcggcggcgaccuccaa

SEQ ID NO: 283223 - RNA, 13 nt, Human adenovirus B (HAdV-B)
cagcugcaaagcu

SEQ ID NO: 283224 - RNA, 12 nt, Human adenovirus B (HAdV-B)
caggacaaguua

SEQ ID NO: 283225 - RNA, 20 nt, Human adenovirus B (HAdV-B)
caggacaggcgcuuagaaau

SEQ ID NO: 283226 - RNA, 12 nt, Human adenovirus B (HAdV-B)
caggacuauaaa

SEQ ID NO: 283227 - RNA, 21 nt, Human adenovirus B (HAdV-B)
caggacuuuuugaagcucuua

SEQ ID NO: 283228 - RNA, 16 nt, Human adenovirus B (HAdV-B)
caggagaaauauucac

SEQ ID NO: 283229 - RNA, 20 nt, Human adenovirus B (HAdV-B)
caggagaaauauucacugga

SEQ ID NO: 283230 - RNA, 22 nt, Human adenovirus B (HAdV-B)
caggaugcuucggaguaccuga

SEQ ID NO: 283231 - RNA, 22 nt, Human adenovirus B (HAdV-B)
caggaugucacuccacagcuuu

SEQ ID NO: 283232 - RNA, 14 nt, Human adenovirus B (HAdV-B)
caggccaugcaacg

SEQ ID NO: 283233 - RNA, 19 nt, Human adenovirus B (HAdV-B)
caggccgaaguccaaauga

SEQ ID NO: 283234 - RNA, 20 nt, Human adenovirus B (HAdV-B)
caggccucgcaacgacauug

SEQ ID NO: 283235 - RNA, 17 nt, Human adenovirus B (HAdV-B)
caggcgccucccaggac

SEQ ID NO: 283236 - RNA, 19 nt, Human adenovirus B (HAdV-B)
caggcuauacuaccaauau

SEQ ID NO: 283237 - RNA, 19 nt, Human adenovirus B (HAdV-B)
caggcugugcagaaaaaga

SEQ ID NO: 283238 - RNA, 22 nt, Human adenovirus B (HAdV-B)
cagggccgcguuuugcuauaca

SEQ ID NO: 283239 - RNA, 21 nt, Human adenovirus B (HAdV-B)
caggggacgcuacagugcagu

SEQ ID NO: 283240 - RNA, 13 nt, Human adenovirus B (HAdV-B)
caguagcaaugug

SEQ ID NO: 283241 - RNA, 15 nt, Human adenovirus B (HAdV-B)
caguccaacugcugc

SEQ ID NO: 283242 - RNA, 22 nt, Human adenovirus B (HAdV-B)
cagugauacguugcggaacuga

SEQ ID NO: 283243 - RNA, 19 nt, Human adenovirus B (HAdV-B)
cagugauagauaaaaaucc

SEQ ID NO: 283244 - RNA, 12 nt, Human adenovirus B (HAdV-B)
cagugcaaugua

SEQ ID NO: 283245 - RNA, 17 nt, Human adenovirus B (HAdV-B)
cagugcaugguguugca

SEQ ID NO: 283246 - RNA, 14 nt, Human adenovirus B (HAdV-B)
caguugaaaaccac

SEQ ID NO: 283247 - RNA, 14 nt, Human adenovirus B (HAdV-B)
caguuggacuguga

SEQ ID NO: 283248 - RNA, 15 nt, Human adenovirus B (HAdV-B)
caguuggacugugaa

SEQ ID NO: 283249 - RNA, 19 nt, Human adenovirus B (HAdV-B)
caguuuggugauaauauga

SEQ ID NO: 283250 - RNA, 14 nt, Human adenovirus B (HAdV-B)
cauaagauucuuga

SEQ ID NO: 283251 - RNA, 13 nt, Human adenovirus B (HAdV-B)
cauaauuacacuc

SEQ ID NO: 283252 - RNA, 16 nt, Human adenovirus B (HAdV-B)
cauaauuacacucuca

SEQ ID NO: 283253 - RNA, 21 nt, Human adenovirus B (HAdV-B)
cauaauuucauuuuugauaua

SEQ ID NO: 283254 - RNA, 13 nt, Human adenovirus B (HAdV-B)
cauacaugccaca

SEQ ID NO: 283255 - RNA, 19 nt, Human adenovirus B (HAdV-B)
cauacucauuugugcauuu

SEQ ID NO: 283256 - RNA, 22 nt, Human adenovirus B (HAdV-B)
cauacucuuacaaagugcggua

SEQ ID NO: 283257 - RNA, 21 nt, Human adenovirus B (HAdV-B)
cuuuggacgcagcugcagcug

SEQ ID NO: 283258 - RNA, 14 nt, Human adenovirus B (HAdV-B)
cuuuggacuugagu

SEQ ID NO: 283259 - RNA, 12 nt, Human adenovirus B (HAdV-B)
cuuuuggaaccg

SEQ ID NO: 283260 - RNA, 23 nt, Human adenovirus B (HAdV-B)
cuuuuggaaccggguucugccaa

SEQ ID NO: 283261 - RNA, 16 nt, Human adenovirus B (HAdV-B)
cuuuuguuacuugcau

SEQ ID NO: 283262 - RNA, 16 nt, Human adenovirus B (HAdV-B)
gaaaaaucuacccaga

SEQ ID NO: 283263 - RNA, 22 nt, Human adenovirus B (HAdV-B)
gaaaaaucuacccagaccgugc

SEQ ID NO: 283264 - RNA, 14 nt, Human adenovirus B (HAdV-B)
gaaaaauuugccaa

SEQ ID NO: 283265 - RNA, 19 nt, Human adenovirus B (HAdV-B)
gaaaaccacgaaaaugcca

SEQ ID NO: 283266 - RNA, 11 nt, Human adenovirus B (HAdV-B)
gaaaaccagca

SEQ ID NO: 283267 - RNA, 16 nt, Human adenovirus B (HAdV-B)
gaaaaugaaacccgag

SEQ ID NO: 283268 - RNA, 20 nt, Human adenovirus B (HAdV-B)
gaaaaugccaaauauggcaa

SEQ ID NO: 283269 - RNA, 18 nt, Human adenovirus B (HAdV-B)
gaaacacaauccaguugc

SEQ ID NO: 283270 - RNA, 20 nt, Human adenovirus B (HAdV-B)
gaaacuuuuccugucgucca

SEQ ID NO: 283271 - RNA, 13 nt, Human adenovirus B (HAdV-B)
gaaagcaccuccc

SEQ ID NO: 283272 - RNA, 21 nt, Human adenovirus B (HAdV-B)
gaaagcgcuuuaaaagacuau

SEQ ID NO: 283273 - RNA, 16 nt, Human adenovirus B (HAdV-B)
gaaagugaaccacaac

SEQ ID NO: 283274 - RNA, 16 nt, Human adenovirus B (HAdV-B)
gaaauauucacuggaa

SEQ ID NO: 283275 - RNA, 18 nt, Human adenovirus B (HAdV-B)
gaaaucaaguaccaucug

SEQ ID NO: 283276 - RNA, 18 nt, Human adenovirus B (HAdV-B)
gaaaucggaucuuuccaa

SEQ ID NO: 283277 - RNA, 17 nt, Human adenovirus B (HAdV-B)
gaaaucuugaaaucaca

SEQ ID NO: 283278 - RNA, 16 nt, Human adenovirus B (HAdV-B)
gaaaugggcaugaggu

SEQ ID NO: 283279 - RNA, 20 nt, Human adenovirus B (HAdV-B)
gaaauucccacgccuuacau

SEQ ID NO: 283280 - RNA, 21 nt, Human adenovirus B (HAdV-B)
gaacacauuccccuacaaaac

SEQ ID NO: 283281 - RNA, 22 nt, Human adenovirus B (HAdV-B)
gaacaccuuagaaaaugcaaau

SEQ ID NO: 283282 - RNA, 15 nt, Human adenovirus B (HAdV-B)
gaaccacaaccccca

SEQ ID NO: 283283 - RNA, 15 nt, Human adenovirus B (HAdV-B)
gaaccggguucugcc

SEQ ID NO: 283284 - RNA, 21 nt, Human adenovirus B (HAdV-B)
gaacugcaacgggugcuuacu

SEQ ID NO: 283285 - RNA, 22 nt, Human adenovirus B (HAdV-B)
gaacuuuugcagcaaacucucu

SEQ ID NO: 283286 - RNA, 18 nt, Human adenovirus B (HAdV-B)
gaagaacuuagagccaag

SEQ ID NO: 283287 - RNA, 23 nt, Human adenovirus B (HAdV-B)
gaagacccuaugcggccuaagag

SEQ ID NO: 283288 - RNA, 18 nt, Human adenovirus B (HAdV-B)
gaagacuaggcaacuguu

SEQ ID NO: 283289 - RNA, 21 nt, Human adenovirus B (HAdV-B)
gaagagauggugggucuuuga

SEQ ID NO: 283290 - RNA, 20 nt, Human adenovirus B (HAdV-B)
gaagccccccgggaacaaga

SEQ ID NO: 283291 - RNA, 15 nt, Human adenovirus B (HAdV-B)
gaagguccuggccau

SEQ ID NO: 283292 - RNA, 14 nt, Human adenovirus B (HAdV-B)
gaaguccaaaugac

SEQ ID NO: 283293 - RNA, 17 nt, Human adenovirus B (HAdV-B)
gaaguuucuguauugca

SEQ ID NO: 283294 - RNA, 22 nt, Human adenovirus B (HAdV-B)
gaauaaaaauuaacaugguucu

SEQ ID NO: 283295 - RNA, 17 nt, Human adenovirus B (HAdV-B)
gaauaccgcaaccaaaa

SEQ ID NO: 283296 - RNA, 22 nt, Human adenovirus B (HAdV-B)
gaaucagaaugacccgcaggca

SEQ ID NO: 283297 - RNA, 19 nt, Human adenovirus B (HAdV-B)
gaaugcucccaaugcacau

SEQ ID NO: 283298 - RNA, 18 nt, Human adenovirus B (HAdV-B)
gaaugcuuguuacauauc

SEQ ID NO: 283299 - RNA, 16 nt, Human adenovirus B (HAdV-B)
gaauguuuuuuuggca

SEQ ID NO: 283300 - RNA, 17 nt, Human adenovirus B (HAdV-B)
gaauuaagacucuccua

SEQ ID NO: 283301 - RNA, 21 nt, Human adenovirus B (HAdV-B)
gaauuuucucccagcggcccg

SEQ ID NO: 283302 - RNA, 14 nt, Human adenovirus B (HAdV-B)
gacaaagugggcau

SEQ ID NO: 283303 - RNA, 15 nt, Human adenovirus B (HAdV-B)
gacaaagugggcaua

SEQ ID NO: 283304 - RNA, 15 nt, Human adenovirus B (HAdV-B)
gacaauucucuagaa

SEQ ID NO: 283305 - RNA, 14 nt, Human adenovirus B (HAdV-B)
gacaccuacuucaa

SEQ ID NO: 283306 - RNA, 16 nt, Human adenovirus B (HAdV-B)
gacacgaauaauucaa

SEQ ID NO: 283307 - RNA, 19 nt, Human adenovirus B (HAdV-B)
gacagcaaccccaggccaa

SEQ ID NO: 283308 - RNA, 21 nt, Human adenovirus B (HAdV-B)
gacaucacccuuacaccagag

SEQ ID NO: 283309 - RNA, 23 nt, Human adenovirus B (HAdV-B)
gacaucaugcgccagacaucacc

SEQ ID NO: 283310 - RNA, 22 nt, Human adenovirus B (HAdV-B)
gacaucggcacgagccaacuga

SEQ ID NO: 283311 - RNA, 17 nt, Human adenovirus B (HAdV-B)
gacaucuagaccacugc

SEQ ID NO: 283312 - RNA, 13 nt, Human adenovirus B (HAdV-B)
gaccaccaucgaa

SEQ ID NO: 283313 - RNA, 15 nt, Human adenovirus B (HAdV-B)
gaccacgguggugca

SEQ ID NO: 283314 - RNA, 21 nt, Human adenovirus B (HAdV-B)
gaccagaacuuccaacaaaaa

SEQ ID NO: 283315 - RNA, 19 nt, Human adenovirus B (HAdV-B)
gaccuacagagucucugac

SEQ ID NO: 283316 - RNA, 23 nt, Human adenovirus B (HAdV-B)
gaccuacagagucucugacaaag

SEQ ID NO: 283317 - RNA, 17 nt, Human adenovirus B (HAdV-B)
gaccugcuaccaaugaa

SEQ ID NO: 283318 - RNA, 20 nt, Human adenovirus B (HAdV-B)
gaccugugugguuagcucau

SEQ ID NO: 283319 - RNA, 15 nt, Human adenovirus B (HAdV-B)
augcucccaaugcac

SEQ ID NO: 283320 - RNA, 20 nt, Human adenovirus B (HAdV-B)
augcuuacuagucucgcaac

SEQ ID NO: 283321 - RNA, 21 nt, Human adenovirus B (HAdV-B)
augcuuauuccaaucuuguuu

SEQ ID NO: 283322 - RNA, 21 nt, Human adenovirus B (HAdV-B)
augcuuguuacauaucuggaa

SEQ ID NO: 283323 - RNA, 23 nt, Human adenovirus B (HAdV-B)
augcuuguuacauaucuggaaau

SEQ ID NO: 283324 - RNA, 13 nt, Human adenovirus B (HAdV-B)
auggcaacaucaa

SEQ ID NO: 283325 - RNA, 18 nt, Human adenovirus B (HAdV-B)
auggccugcggaucccaa

SEQ ID NO: 283326 - RNA, 12 nt, Human adenovirus B (HAdV-B)
augggaaucaua

SEQ ID NO: 283327 - RNA, 15 nt, Human adenovirus B (HAdV-B)
augggaucuacugug

SEQ ID NO: 283328 - RNA, 17 nt, Human adenovirus B (HAdV-B)
augggaucuacugugga

SEQ ID NO: 283329 - RNA, 21 nt, Human adenovirus B (HAdV-B)
augggaucuacuguggaugga

SEQ ID NO: 283330 - RNA, 20 nt, Human adenovirus B (HAdV-B)
auggugggucuuugaaaaau

SEQ ID NO: 283331 - RNA, 16 nt, Human adenovirus B (HAdV-B)
auguaaacaacguguu

SEQ ID NO: 283332 - RNA, 22 nt, Human adenovirus B (HAdV-B)
augucauagacguagaugggau

SEQ ID NO: 283333 - RNA, 23 nt, Human adenovirus B (HAdV-B)
augucauccaaauucaccaaugc

SEQ ID NO: 283334 - RNA, 17 nt, Human adenovirus B (HAdV-B)
augucuauguugugcca

SEQ ID NO: 283335 - RNA, 16 nt, Human adenovirus B (HAdV-B)
augucuuucuucccag

SEQ ID NO: 283336 - RNA, 14 nt, Human adenovirus B (HAdV-B)
auguguacugaguu

SEQ ID NO: 283337 - RNA, 18 nt, Human adenovirus B (HAdV-B)
auguguggauuggauuua

SEQ ID NO: 283338 - RNA, 16 nt, Human adenovirus B (HAdV-B)
auguugccauucucaa

SEQ ID NO: 283339 - RNA, 14 nt, Human adenovirus B (HAdV-B)
auuaagacucuccu

SEQ ID NO: 283340 - RNA, 21 nt, Human adenovirus B (HAdV-B)
auuaauguuagcaaaguuuac

SEQ ID NO: 283341 - RNA, 13 nt, Human adenovirus B (HAdV-B)
auuacaacugaag

SEQ ID NO: 283342 - RNA, 21 nt, Human adenovirus B (HAdV-B)
auuacagccaacgagccagcg

SEQ ID NO: 283343 - RNA, 19 nt, Human adenovirus B (HAdV-B)
auuacgaaagugaaccaca

SEQ ID NO: 283344 - RNA, 20 nt, Human adenovirus B (HAdV-B)
auuacuugguucguguuacc

SEQ ID NO: 283345 - RNA, 23 nt, Human adenovirus B (HAdV-B)
auuaguaauggcaccaguagcca

SEQ ID NO: 283346 - RNA, 13 nt, Human adenovirus B (HAdV-B)
auuaucaacguga

SEQ ID NO: 283347 - RNA, 17 nt, Human adenovirus B (HAdV-B)
auuaugguuaugacaga

SEQ ID NO: 283348 - RNA, 15 nt, Human adenovirus B (HAdV-B)
auucaauuuuuacaa

SEQ ID NO: 283349 - RNA, 14 nt, Human adenovirus B (HAdV-B)
auucaccaaugcaa

SEQ ID NO: 283350 - RNA, 18 nt, Human adenovirus B (HAdV-B)
auuccaucgagugcaccu

SEQ ID NO: 283351 - RNA, 23 nt, Human adenovirus B (HAdV-B)
auuccccuacaaaacaugcaaca

SEQ ID NO: 283352 - RNA, 18 nt, Human adenovirus B (HAdV-B)
auucgauccgaugacaau

SEQ ID NO: 283353 - RNA, 13 nt, Human adenovirus B (HAdV-B)
auucucaagugau

SEQ ID NO: 283354 - RNA, 17 nt, Human adenovirus B (HAdV-B)
auucucaagugauucac

SEQ ID NO: 283355 - RNA, 16 nt, Human adenovirus B (HAdV-B)
auucuguuaaauggga

SEQ ID NO: 283356 - RNA, 18 nt, Human adenovirus B (HAdV-B)
auucuuugcuaccuauac

SEQ ID NO: 283357 - RNA, 22 nt, Human adenovirus B (HAdV-B)
auugagaauggcaacaucaauu

SEQ ID NO: 283358 - RNA, 12 nt, Human adenovirus B (HAdV-B)
auugccacagau

SEQ ID NO: 283359 - RNA, 16 nt, Human adenovirus B (HAdV-B)
gacgcagcugcagcug

SEQ ID NO: 283360 - RNA, 15 nt, Human adenovirus B (HAdV-B)
gacgcugaguuacuu

SEQ ID NO: 283361 - RNA, 21 nt, Human adenovirus B (HAdV-B)
gacgucaauggcuugcagggu

SEQ ID NO: 283362 - RNA, 20 nt, Human adenovirus B (HAdV-B)
gacuaauucaaaacuaacaa

SEQ ID NO: 283363 - RNA, 17 nt, Human adenovirus B (HAdV-B)
gacuaggcaacuguuag

SEQ ID NO: 283364 - RNA, 18 nt, Human adenovirus B (HAdV-B)
gacuaggcaacuguuaga

SEQ ID NO: 283365 - RNA, 21 nt, Human adenovirus B (HAdV-B)
gacucugacacuccugguccu

SEQ ID NO: 283366 - RNA, 16 nt, Human adenovirus B (HAdV-B)
gacugccgcuucuuca

SEQ ID NO: 283367 - RNA, 19 nt, Human adenovirus B (HAdV-B)
gacuguauaggagcauuug

SEQ ID NO: 283368 - RNA, 17 nt, Human adenovirus B (HAdV-B)
gacuucugcucgcucac

SEQ ID NO: 283369 - RNA, 21 nt, Human adenovirus B (HAdV-B)
gacuucugcucgcucacaccu

SEQ ID NO: 283370 - RNA, 12 nt, Human adenovirus B (HAdV-B)
gacuuuaccccu

SEQ ID NO: 283371 - RNA, 22 nt, Human adenovirus B (HAdV-B)
gagaaaguucacccagacguug

SEQ ID NO: 283372 - RNA, 18 nt, Human adenovirus B (HAdV-B)
gagaaauauucacuggaa

SEQ ID NO: 283373 - RNA, 17 nt, Human adenovirus B (HAdV-B)
gagaagaugcaugcauu

SEQ ID NO: 283374 - RNA, 16 nt, Human adenovirus B (HAdV-B)
gagaauauaugacaau

SEQ ID NO: 283375 - RNA, 18 nt, Human adenovirus B (HAdV-B)
gagaccugcuaccaauga

SEQ ID NO: 283376 - RNA, 16 nt, Human adenovirus B (HAdV-B)
gagagccaccaccgau

SEQ ID NO: 283377 - RNA, 18 nt, Human adenovirus B (HAdV-B)
gagaucguuuggaauaaa

SEQ ID NO: 283378 - RNA, 18 nt, Human adenovirus B (HAdV-B)
gagccagccguccggcau

SEQ ID NO: 283379 - RNA, 19 nt, Human adenovirus B (HAdV-B)
gagccgcaagagcucugcu

SEQ ID NO: 283380 - RNA, 16 nt, Human adenovirus B (HAdV-B)
gagcuaccacugccau

SEQ ID NO: 283381 - RNA, 11 nt, Human adenovirus B (HAdV-B)
gaggaacacau

SEQ ID NO: 283382 - RNA, 23 nt, Human adenovirus B (HAdV-B)
gaggcgagucgugcuaggcggag

SEQ ID NO: 283383 - RNA, 20 nt, Human adenovirus B (HAdV-B)
gaggcuuugcuggaagccac

SEQ ID NO: 283384 - RNA, 14 nt, Human adenovirus B (HAdV-B)
gaggugagcuccaa

SEQ ID NO: 283385 - RNA, 20 nt, Human adenovirus B (HAdV-B)
gagguucagaaagagggaag

SEQ ID NO: 283386 - RNA, 14 nt, Human adenovirus B (HAdV-B)
gaguaaagaaauuc

SEQ ID NO: 283387 - RNA, 16 nt, Human adenovirus B (HAdV-B)
gaguuuugagggauga

SEQ ID NO: 283388 - RNA, 17 nt, Human adenovirus B (HAdV-B)
gauaagcucgccugugc

SEQ ID NO: 283389 - RNA, 22 nt, Human adenovirus B (HAdV-B)
gauaagcucgccugugccauug

SEQ ID NO: 283390 - RNA, 11 nt, Human adenovirus B (HAdV-B)
gauacaagucc

SEQ ID NO: 283391 - RNA, 15 nt, Human adenovirus B (HAdV-B)
gauacaguagucaau

SEQ ID NO: 283392 - RNA, 21 nt, Human adenovirus B (HAdV-B)
gauaggggcguuaagagggag

SEQ ID NO: 283393 - RNA, 14 nt, Human adenovirus B (HAdV-B)
gauauaaucugcaa

SEQ ID NO: 283394 - RNA, 20 nt, Human adenovirus B (HAdV-B)
gauauuuuucauucucaagu

SEQ ID NO: 283395 - RNA, 20 nt, Human adenovirus B (HAdV-B)
gaucaaaagaaaaaacaaag

SEQ ID NO: 283396 - RNA, 19 nt, Human adenovirus B (HAdV-B)
gaucaccgcuacugaccau

SEQ ID NO: 283397 - RNA, 13 nt, Human adenovirus B (HAdV-B)
guaaccuauugca

SEQ ID NO: 283398 - RNA, 23 nt, Human adenovirus B (HAdV-B)
guacaccggauugcagcacugaa

SEQ ID NO: 283399 - RNA, 12 nt, Human adenovirus B (HAdV-B)
guaccaucugaa

SEQ ID NO: 283400 - RNA, 14 nt, Human adenovirus B (HAdV-B)
guacugaguuuaau

SEQ ID NO: 283401 - RNA, 18 nt, Human adenovirus B (HAdV-B)
guacugccaucuaccacu

SEQ ID NO: 283402 - RNA, 17 nt, Human adenovirus B (HAdV-B)
guacuugaacuaucaca

SEQ ID NO: 283403 - RNA, 24 nt, Human adenovirus B (HAdV-B)
guagagugcuuuuugauugucaca

SEQ ID NO: 283404 - RNA, 16 nt, Human adenovirus B (HAdV-B)
guagauuuuucugcaa

SEQ ID NO: 283405 - RNA, 22 nt, Human adenovirus B (HAdV-B)
guagcauagucugccugguuau

SEQ ID NO: 283406 - RNA, 23 nt, Human adenovirus B (HAdV-B)
guauaaugaggcgagucgugcua

SEQ ID NO: 283407 - RNA, 21 nt, Human adenovirus B (HAdV-B)
guauaugugucauuacacgcc

SEQ ID NO: 283408 - RNA, 14 nt, Human adenovirus B (HAdV-B)
guaugauaacagau

SEQ ID NO: 283409 - RNA, 19 nt, Human adenovirus B (HAdV-B)
guauugggaaaacuuuggg

SEQ ID NO: 283410 - RNA, 23 nt, Human adenovirus B (HAdV-B)
gucaauauuugugugacagugca

SEQ ID NO: 283411 - RNA, 13 nt, Human adenovirus B (HAdV-B)
gucaauugauguu

SEQ ID NO: 283412 - RNA, 17 nt, Human adenovirus B (HAdV-B)
gucaauugauguugcca

SEQ ID NO: 283413 - RNA, 18 nt, Human adenovirus B (HAdV-B)
gucaauugauguugccau

SEQ ID NO: 283414 - RNA, 21 nt, Human adenovirus B (HAdV-B)
gucauccaaauucaccaaugc

SEQ ID NO: 283415 - RNA, 21 nt, Human adenovirus B (HAdV-B)
guccaacccgccaauucuuca

SEQ ID NO: 283416 - RNA, 13 nt, Human adenovirus B (HAdV-B)
guccaacugcugc

SEQ ID NO: 283417 - RNA, 15 nt, Human adenovirus B (HAdV-B)
guccagcaguggaaa

SEQ ID NO: 283418 - RNA, 12 nt, Human adenovirus B (HAdV-B)
guccaugguaca

SEQ ID NO: 283419 - RNA, 19 nt, Human adenovirus B (HAdV-B)
guccuggccaucgugaacg

SEQ ID NO: 283420 - RNA, 13 nt, Human adenovirus B (HAdV-B)
gucuauaucuaau

SEQ ID NO: 283421 - RNA, 13 nt, Human adenovirus B (HAdV-B)
gucucaaccccag

SEQ ID NO: 283422 - RNA, 14 nt, Human adenovirus B (HAdV-B)
gucucaaccccagc

SEQ ID NO: 283423 - RNA, 13 nt, Human adenovirus B (HAdV-B)
gucuggugcaguu

SEQ ID NO: 283424 - RNA, 20 nt, Human adenovirus B (HAdV-B)
gucuuccuuguucugccagc

SEQ ID NO: 283425 - RNA, 15 nt, Human adenovirus B (HAdV-B)
gugaaggaacaugca

SEQ ID NO: 283426 - RNA, 22 nt, Human adenovirus B (HAdV-B)
uguccaagcgcaaauacaagga

SEQ ID NO: 283427 - RNA, 22 nt, Human adenovirus B (HAdV-B)
ugucuaccccuaugaagaugaa

SEQ ID NO: 283428 - RNA, 17 nt, Human adenovirus B (HAdV-B)
ugucuauguugugccac

SEQ ID NO: 283429 - RNA, 19 nt, Human adenovirus B (HAdV-B)
ugucuugcagcugucauga

SEQ ID NO: 283430 - RNA, 14 nt, Human adenovirus B (HAdV-B)
ugugacagugcaau

SEQ ID NO: 283431 - RNA, 10 nt, Human adenovirus B (HAdV-B)
ugugaccaac

SEQ ID NO: 283432 - RNA, 14 nt, Human adenovirus B (HAdV-B)
ugugaccaaccugg

SEQ ID NO: 283433 - RNA, 16 nt, Human adenovirus B (HAdV-B)
ugugcgaucuggccau

SEQ ID NO: 283434 - RNA, 23 nt, Human adenovirus B (HAdV-B)
uguggaaaucaaguaccaucuga

SEQ ID NO: 283435 - RNA, 13 nt, Human adenovirus B (HAdV-B)
uguggaaucuaaa

SEQ ID NO: 283436 - RNA, 22 nt, Human adenovirus B (HAdV-B)
uguucaugagcaaacaguauuc

SEQ ID NO: 283437 - RNA, 16 nt, Human adenovirus B (HAdV-B)
uguucguggucuuccu

SEQ ID NO: 283438 - RNA, 15 nt, Human adenovirus B (HAdV-B)
uguugccauucucaa

SEQ ID NO: 283439 - RNA, 21 nt, Human adenovirus B (HAdV-B)
uguugccgcuaacacugugcu

SEQ ID NO: 283440 - RNA, 14 nt, Human adenovirus B (HAdV-B)
uguuguuuggcacu

SEQ ID NO: 283441 - RNA, 15 nt, Human adenovirus B (HAdV-B)
uguuuaaagcugugc

SEQ ID NO: 283442 - RNA, 20 nt, Human adenovirus B (HAdV-B)
uuaaacauuuggauaccauu

SEQ ID NO: 283443 - RNA, 21 nt, Human adenovirus B (HAdV-B)
uuaaagcgcuuucacagucca

SEQ ID NO: 283444 - RNA, 16 nt, Human adenovirus B (HAdV-B)
uuaaaugggaaggggg

SEQ ID NO: 283445 - RNA, 23 nt, Human adenovirus B (HAdV-B)
uuaacuucaccuuuccuacucac

SEQ ID NO: 283446 - RNA, 12 nt, Human adenovirus B (HAdV-B)
uuaacuugcaug

SEQ ID NO: 283447 - RNA, 14 nt, Human adenovirus B (HAdV-B)
uuaagaaugguggu

SEQ ID NO: 283448 - RNA, 20 nt, Human adenovirus B (HAdV-B)
uuaagcaugacagauauguc

SEQ ID NO: 283449 - RNA, 18 nt, Human adenovirus B (HAdV-B)
uuaaggggggagucuuca

SEQ ID NO: 283450 - RNA, 19 nt, Human adenovirus B (HAdV-B)
uuaauaaugauugcuggaa

SEQ ID NO: 283451 - RNA, 15 nt, Human adenovirus B (HAdV-B)
uuaauguuugcgcua

SEQ ID NO: 283452 - RNA, 13 nt, Human adenovirus B (HAdV-B)
uuacacucucaua

SEQ ID NO: 283453 - RNA, 23 nt, Human adenovirus B (HAdV-B)
uuacaugagucauuauugaacau

SEQ ID NO: 283454 - RNA, 19 nt, Human adenovirus B (HAdV-B)
uuacccaguugaaaaccac

SEQ ID NO: 283455 - RNA, 12 nt, Human adenovirus B (HAdV-B)
uuacuauggaag

SEQ ID NO: 283456 - RNA, 18 nt, Human adenovirus B (HAdV-B)
uuacuuucgcuuuuggaa

SEQ ID NO: 283457 - RNA, 17 nt, Human adenovirus B (HAdV-B)
uuagaaaaugcaaauuc

SEQ ID NO: 283458 - RNA, 17 nt, Human adenovirus B (HAdV-B)
uuagauuccacauucca

SEQ ID NO: 283459 - RNA, 14 nt, Human adenovirus B (HAdV-B)
uuaggcgaguuugc

SEQ ID NO: 283460 - RNA, 18 nt, Human adenovirus B (HAdV-B)
uuaugagaagaugcaugc

SEQ ID NO: 283461 - RNA, 20 nt, Human adenovirus B (HAdV-B)
uuaugggaucuacuguggau

SEQ ID NO: 283462 - RNA, 13 nt, Human adenovirus B (HAdV-B)
uuauucuuugcua

SEQ ID NO: 283463 - RNA, 11 nt, Human adenovirus B (HAdV-B)
uuauugaacac

SEQ ID NO: 283464 - RNA, 17 nt, Human adenovirus B (HAdV-B)
uucaccaaugcaaaaaa

SEQ ID NO: 283465 - RNA, 22 nt, Human adenovirus B (HAdV-B)
uucaccuuuggacgcagcugca

SEQ ID NO: 283466 - RNA, 17 nt, Human adenovirus B (HAdV-B)
uucagaugguacuugau

SEQ ID NO: 283467 - RNA, 19 nt, Human adenovirus B (HAdV-B)
uucauucucaagugauuca

SEQ ID NO: 283468 - RNA, 21 nt, Human adenovirus B (HAdV-B)
uuccaauuaucgcugcugcaa

SEQ ID NO: 283469 - RNA, 20 nt, Human adenovirus B (HAdV-B)
uuccagcguaauacagcggu

SEQ ID NO: 283470 - RNA, 20 nt, Human adenovirus B (HAdV-B)
uuccauaguaacccauucca

SEQ ID NO: 283471 - RNA, 22 nt, Human adenovirus B (HAdV-B)
uuccauccacaguagaucccau

SEQ ID NO: 283472 - RNA, 18 nt, Human adenovirus B (HAdV-B)
uuccaucgagugcaccua

SEQ ID NO: 283473 - RNA, 20 nt, Human adenovirus B (HAdV-B)
uucccacgccuuacaugugg

SEQ ID NO: 283474 - RNA, 11 nt, Human adenovirus B (HAdV-B)
uucccacugaa

SEQ ID NO: 283475 - RNA, 20 nt, Human adenovirus B (HAdV-B)
uuccccaaauggcuucacac

SEQ ID NO: 283476 - RNA, 13 nt, Human adenovirus B (HAdV-B)
uucgcuuuuggaa

SEQ ID NO: 283477 - RNA, 19 nt, Human adenovirus B (HAdV-B)
uucggaacuggcaccucag

SEQ ID NO: 283478 - RNA, 16 nt, Human adenovirus B (HAdV-B)
uucuaacaccugcuac

SEQ ID NO: 283479 - RNA, 16 nt, Human adenovirus B (HAdV-B)
uucuacccaacauccu

SEQ ID NO: 283480 - RNA, 16 nt, Human adenovirus B (HAdV-B)
uucuaugacugaagac

SEQ ID NO: 283481 - RNA, 16 nt, Human adenovirus B (HAdV-B)
uucugacgagaaucag

SEQ ID NO: 283482 - RNA, 13 nt, Human adenovirus B (HAdV-B)
uucuuaguggugu

SEQ ID NO: 283483 - RNA, 22 nt, Human adenovirus B (HAdV-B)
uucuucaacgcugaccuaugcu

SEQ ID NO: 283484 - RNA, 17 nt, Human adenovirus B (HAdV-B)
uucuucaccauacucau

SEQ ID NO: 283485 - RNA, 16 nt, Human adenovirus B (HAdV-B)
uugaaaaccacgaaaa

SEQ ID NO: 283486 - RNA, 14 nt, Human adenovirus B (HAdV-B)
uugaaguacugcga

SEQ ID NO: 283487 - RNA, 18 nt, Human adenovirus B (HAdV-B)
uugagaacucgguggauu

SEQ ID NO: 283488 - RNA, 21 nt, Human adenovirus B (HAdV-B)
uugauauaaucugcaacaaaa

SEQ ID NO: 283489 - RNA, 13 nt, Human adenovirus B (HAdV-B)
uugauuacuuuga

SEQ ID NO: 283490 - RNA, 17 nt, Human adenovirus B (HAdV-B)
uugcagacuaauucaaa

SEQ ID NO: 283491 - RNA, 12 nt, Human adenovirus B (HAdV-B)
uugcagcuguca

SEQ ID NO: 283492 - RNA, 22 nt, Human adenovirus B (HAdV-B)
uugcauucacugcuccugcgau

SEQ ID NO: 283493 - RNA, 17 nt, Human adenovirus B (HAdV-B)
uugccagauugugauac

SEQ ID NO: 283494 - RNA, 19 nt, Human adenovirus B (HAdV-B)
uugccgcuaacacugugcu

SEQ ID NO: 283495 - RNA, 19 nt, Human adenovirus B (HAdV-B)
uugccucccccuucccauu

SEQ ID NO: 283496 - RNA, 19 nt, Human adenovirus B (HAdV-B)
uugcuagauggaacagcaa

SEQ ID NO: 283497 - RNA, 20 nt, Human adenovirus B (HAdV-B)
uugcuucuauugcuucccua

SEQ ID NO: 283498 - RNA, 20 nt, Human adenovirus B (HAdV-B)
uugcuugguugggauuugca

SEQ ID NO: 283499 - RNA, 15 nt, Human adenovirus B (HAdV-B)
uugcuuguuuuacuu

SEQ ID NO: 283500 - RNA, 18 nt, Human adenovirus B (HAdV-B)
uuggaaccggguucugcc

SEQ ID NO: 283501 - RNA, 17 nt, Human adenovirus B (HAdV-B)
uuggacgggucuuccau

SEQ ID NO: 283502 - RNA, 13 nt, Human adenovirus B (HAdV-B)
uuggacugugaaa

SEQ ID NO: 283503 - RNA, 14 nt, Human adenovirus B (HAdV-B)
uuggagccugagga

SEQ ID NO: 283504 - RNA, 21 nt, Human adenovirus B (HAdV-B)
uuggcccccaacgacaaaaau

SEQ ID NO: 283505 - RNA, 18 nt, Human adenovirus B (HAdV-B)
uuggcggguuggacgggu

SEQ ID NO: 283506 - RNA, 15 nt, Human adenovirus B (HAdV-B)
uuggcuccagcaaaa

SEQ ID NO: 283507 - RNA, 15 nt, Human adenovirus B (HAdV-B)
uuggcucgcucugaa

SEQ ID NO: 283508 - RNA, 19 nt, Human adenovirus B (HAdV-B)
uuggcuggaaugcucccaa

SEQ ID NO: 283509 - RNA, 20 nt, Human adenovirus B (HAdV-B)
uuggugcgggaaaauaugca

SEQ ID NO: 283510 - RNA, 22 nt, Human adenovirus B (HAdV-B)
uugguggagaauauaugacaau

SEQ ID NO: 283511 - RNA, 11 nt, Human adenovirus B (HAdV-B)
uugguggcaug

SEQ ID NO: 283512 - RNA, 20 nt, Human adenovirus B (HAdV-B)
uugguggcaugagguucaga

SEQ ID NO: 283513 - RNA, 23 nt, Human adenovirus B (HAdV-B)
uugguguauucuguuaaauggga

SEQ ID NO: 283514 - RNA, 14 nt, Human adenovirus B (HAdV-B)
uugucacacagggu

SEQ ID NO: 283515 - RNA, 17 nt, Human adenovirus B (HAdV-B)
uuguccugagucagggu

SEQ ID NO: 283516 - RNA, 16 nt, Human adenovirus B (HAdV-B)
uugugcgcgaguuugc

SEQ ID NO: 283517 - RNA, 15 nt, Human adenovirus B (HAdV-B)
uuguucugccagcuu

SEQ ID NO: 283518 - RNA, 22 nt, Human adenovirus B (HAdV-B)
uuuaaguuuaaugagucgcaga

SEQ ID NO: 283519 - RNA, 13 nt, Human adenovirus B (HAdV-B)
uuuacaaccagaa

SEQ ID NO: 283520 - RNA, 21 nt, Human adenovirus B (HAdV-B)
uuuacaagaaacucugccuga

SEQ ID NO: 283521 - RNA, 19 nt, Human adenovirus B (HAdV-B)
uuuacagcgguuacuauua

SEQ ID NO: 283522 - RNA, 16 nt, Human adenovirus B (HAdV-B)
uuuaccaguuugaaua

SEQ ID NO: 283523 - RNA, 12 nt, Human adenovirus B (HAdV-B)
uuuagacagcaa

SEQ ID NO: 283524 - RNA, 15 nt, Human adenovirus B (HAdV-B)
uuuaucuaucacuga

SEQ ID NO: 283525 - RNA, 16 nt, Human adenovirus B (HAdV-B)
uuuaugucuauguugu

SEQ ID NO: 283526 - RNA, 14 nt, Human adenovirus B (HAdV-B)
uuucaaaaccggag

SEQ ID NO: 283527 - RNA, 12 nt, Human adenovirus B (HAdV-B)
uuucacagucca

SEQ ID NO: 283528 - RNA, 13 nt, Human adenovirus B (HAdV-B)
uuucacaguccaa

SEQ ID NO: 283529 - RNA, 20 nt, Human adenovirus B (HAdV-B)
uuucacaguccaacugcugc

SEQ ID NO: 283530 - RNA, 21 nt, Human adenovirus B (HAdV-B)
auauuggguugcaugauuaac

SEQ ID NO: 283531 - RNA, 18 nt, Human adenovirus B (HAdV-B)
auauuugugugacagugc

SEQ ID NO: 283532 - RNA, 22 nt, Human adenovirus B (HAdV-B)
aucaacgugacagcaaaugaca

SEQ ID NO: 283533 - RNA, 16 nt, Human adenovirus B (HAdV-B)
aucaaguaccaucuga

SEQ ID NO: 283534 - RNA, 14 nt, Human adenovirus B (HAdV-B)
aucacccucaaggu

SEQ ID NO: 283535 - RNA, 14 nt, Human adenovirus B (HAdV-B)
aucacuuacuugaa

SEQ ID NO: 283536 - RNA, 13 nt, Human adenovirus B (HAdV-B)
aucagaaauuccc

SEQ ID NO: 283537 - RNA, 21 nt, Human adenovirus B (HAdV-B)
aucagaaauucccccaaauuu

SEQ ID NO: 283538 - RNA, 16 nt, Human adenovirus B (HAdV-B)
aucagguucacuuuaa

SEQ ID NO: 283539 - RNA, 15 nt, Human adenovirus B (HAdV-B)
aucauccacaagacc

SEQ ID NO: 283540 - RNA, 19 nt, Human adenovirus B (HAdV-B)
aucauccacaagacccaga

SEQ ID NO: 283541 - RNA, 19 nt, Human adenovirus B (HAdV-B)
aucaugcgccagacaucac

SEQ ID NO: 283542 - RNA, 12 nt, Human adenovirus B (HAdV-B)
auccacaguaga

SEQ ID NO: 283543 - RNA, 21 nt, Human adenovirus B (HAdV-B)
auccauggagguuugggccau

SEQ ID NO: 283544 - RNA, 20 nt, Human adenovirus B (HAdV-B)
aucccucuaggacauaauua

SEQ ID NO: 283545 - RNA, 19 nt, Human adenovirus B (HAdV-B)
auccgcauuaguaacaaca

SEQ ID NO: 283546 - RNA, 15 nt, Human adenovirus B (HAdV-B)
auccucgacaugagu

SEQ ID NO: 283547 - RNA, 22 nt, Human adenovirus B (HAdV-B)
aucgagaaaaaucagaaauucc

SEQ ID NO: 283548 - RNA, 13 nt, Human adenovirus B (HAdV-B)
aucgaucaggugg

SEQ ID NO: 283549 - RNA, 19 nt, Human adenovirus B (HAdV-B)
aucgcauuucuuuugaucu

SEQ ID NO: 283550 - RNA, 22 nt, Human adenovirus B (HAdV-B)
aucgcggcacuucuuagacuca

SEQ ID NO: 283551 - RNA, 22 nt, Human adenovirus B (HAdV-B)
aucggccaucauggaagcugua

SEQ ID NO: 283552 - RNA, 19 nt, Human adenovirus B (HAdV-B)
aucuaccacuccagcaccc

SEQ ID NO: 283553 - RNA, 11 nt, Human adenovirus B (HAdV-B)
aucuacugugg

SEQ ID NO: 283554 - RNA, 14 nt, Human adenovirus B (HAdV-B)
aucuagaccacugc

SEQ ID NO: 283555 - RNA, 16 nt, Human adenovirus B (HAdV-B)
aucugcaacaaaacaa

SEQ ID NO: 283556 - RNA, 12 nt, Human adenovirus B (HAdV-B)
aucugcaaucau

SEQ ID NO: 283557 - RNA, 18 nt, Human adenovirus B (HAdV-B)
aucugugucuaguauaau

SEQ ID NO: 283558 - RNA, 16 nt, Human adenovirus B (HAdV-B)
aucuguugcaccauaa

SEQ ID NO: 283559 - RNA, 21 nt, Human adenovirus B (HAdV-B)
aucuucaugucuuucuuccca

SEQ ID NO: 283560 - RNA, 15 nt, Human adenovirus B (HAdV-B)
augaaaccuuuagca

SEQ ID NO: 283561 - RNA, 12 nt, Human adenovirus B (HAdV-B)
augaaagcaccu

SEQ ID NO: 283562 - RNA, 20 nt, Human adenovirus B (HAdV-B)
augaagaugaaagcaccucc

SEQ ID NO: 283563 - RNA, 13 nt, Human adenovirus B (HAdV-B)
augacaauucucu

SEQ ID NO: 283564 - RNA, 16 nt, Human adenovirus B (HAdV-B)
augacaauucucuaga

SEQ ID NO: 283565 - RNA, 21 nt, Human adenovirus B (HAdV-B)
augacagauaugucaauggga

SEQ ID NO: 283566 - RNA, 12 nt, Human adenovirus B (HAdV-B)
augacuaugcau

SEQ ID NO: 283567 - RNA, 20 nt, Human adenovirus B (HAdV-B)
augaguaaagaaauucccac

SEQ ID NO: 283568 - RNA, 13 nt, Human adenovirus B (HAdV-B)
augcaaauuccaa

SEQ ID NO: 283569 - RNA, 22 nt, Human adenovirus B (HAdV-B)
augcagagccuugauacaugua

SEQ ID NO: 283570 - RNA, 21 nt, Human adenovirus B (HAdV-B)
augcaguuauugacaguguag

SEQ ID NO: 283571 - RNA, 14 nt, Human adenovirus B (HAdV-B)
augcauaguguaag

SEQ ID NO: 283572 - RNA, 18 nt, Human adenovirus B (HAdV-B)
augcauguaagggaaaug

SEQ ID NO: 283573 - RNA, 13 nt, Human adenovirus B (HAdV-B)
augccaucugcgc

SEQ ID NO: 283574 - RNA, 20 nt, Human adenovirus B (HAdV-B)
augccaucugcgcgaucuac

SEQ ID NO: 283575 - RNA, 22 nt, Human adenovirus B (HAdV-B)
augcggccuaagagaccugcua

SEQ ID NO: 283576 - RNA, 21 nt, Human adenovirus B (HAdV-B)
augcuuccauaguaacccauu

SEQ ID NO: 283577 - RNA, 16 nt, Human adenovirus B (HAdV-B)
auggacaaacagucgu

SEQ ID NO: 283578 - RNA, 20 nt, Human adenovirus B (HAdV-B)
auggacagauugaguaaaaa

SEQ ID NO: 283579 - RNA, 17 nt, Human adenovirus B (HAdV-B)
auggcaccaguagccau

SEQ ID NO: 283580 - RNA, 12 nt, Human adenovirus B (HAdV-B)
auggcaugggau

SEQ ID NO: 283581 - RNA, 14 nt, Human adenovirus B (HAdV-B)
augggcaccuggag

SEQ ID NO: 283582 - RNA, 16 nt, Human adenovirus B (HAdV-B)
augggcauacaugcac

SEQ ID NO: 283583 - RNA, 19 nt, Human adenovirus B (HAdV-B)
auggguuacuauggaagca

SEQ ID NO: 283584 - RNA, 22 nt, Human adenovirus B (HAdV-B)
augguuuccacuaccacauucc

SEQ ID NO: 283585 - RNA, 17 nt, Human adenovirus B (HAdV-B)
augguuuuagauuccac

SEQ ID NO: 283586 - RNA, 14 nt, Human adenovirus B (HAdV-B)
auguaagggaaaug

SEQ ID NO: 283587 - RNA, 23 nt, Human adenovirus B (HAdV-B)
auguaguaaaagguaaaugggga

SEQ ID NO: 283588 - RNA, 19 nt, Human adenovirus B (HAdV-B)
augucaaauuuuagcuccu

SEQ ID NO: 283589 - RNA, 13 nt, Human adenovirus B (HAdV-B)
augucaaugggaa

SEQ ID NO: 283590 - RNA, 16 nt, Human adenovirus B (HAdV-B)
augucuauguugugcc

SEQ ID NO: 283591 - RNA, 20 nt, Human adenovirus B (HAdV-B)
augucucacgcuugccagca

SEQ ID NO: 283592 - RNA, 15 nt, Human adenovirus B (HAdV-B)
augucuuucuuccca

SEQ ID NO: 283593 - RNA, 17 nt, Human adenovirus B (HAdV-B)
auguguacugaguuuaa

SEQ ID NO: 283594 - RNA, 16 nt, Human adenovirus B (HAdV-B)
auguuaacuguucacu

SEQ ID NO: 283595 - RNA, 22 nt, Human adenovirus B (HAdV-B)
auguuaugggaucuacugugga

SEQ ID NO: 283596 - RNA, 15 nt, Human adenovirus B (HAdV-B)
auguugaaaugggca

SEQ ID NO: 283597 - RNA, 15 nt, Human adenovirus B (HAdV-B)
auuaagaaaauggua

SEQ ID NO: 283598 - RNA, 18 nt, Human adenovirus B (HAdV-B)
auuacacacaauaacaaa

SEQ ID NO: 283599 - RNA, 17 nt, Human adenovirus B (HAdV-B)
auuacuggcgguuccca

SEQ ID NO: 283600 - RNA, 23 nt, Human adenovirus B (HAdV-B)
auuacuggcgguucccaauaugc

SEQ ID NO: 283601 - RNA, 11 nt, Human adenovirus B (HAdV-B)
auuacuuugau

SEQ ID NO: 283602 - RNA, 19 nt, Human adenovirus B (HAdV-B)
auuacuuugauauaaucug

SEQ ID NO: 283603 - RNA, 13 nt, Human adenovirus B (HAdV-B)
auuauacuccuac

SEQ ID NO: 283604 - RNA, 15 nt, Human adenovirus B (HAdV-B)
auuccaaacaguuuc

SEQ ID NO: 283605 - RNA, 18 nt, Human adenovirus B (HAdV-B)
auuccaaacaguuucaga

SEQ ID NO: 283606 - RNA, 13 nt, Human adenovirus B (HAdV-B)
auuccaagcacag

SEQ ID NO: 283607 - RNA, 14 nt, Human adenovirus B (HAdV-B)
auuccaagcacagu

SEQ ID NO: 283608 - RNA, 16 nt, Human adenovirus B (HAdV-B)
auuccaagcacagugu

SEQ ID NO: 283609 - RNA, 19 nt, Human adenovirus B (HAdV-B)
auuccaauuaucgcugcug

SEQ ID NO: 283610 - RNA, 14 nt, Human adenovirus B (HAdV-B)
auuccacauuccaa

SEQ ID NO: 283611 - RNA, 15 nt, Human adenovirus B (HAdV-B)
auuccacauuccaaa

SEQ ID NO: 283612 - RNA, 20 nt, Human adenovirus B (HAdV-B)
auuccacccucggaacugaa

SEQ ID NO: 283613 - RNA, 22 nt, Human adenovirus B (HAdV-B)
auuccccuacaaaacaugcaac

SEQ ID NO: 283614 - RNA, 17 nt, Human adenovirus B (HAdV-B)
auucggaacuggcaccu

SEQ ID NO: 283615 - RNA, 16 nt, Human adenovirus B (HAdV-B)
auucucaagugauuca

SEQ ID NO: 283616 - RNA, 20 nt, Human adenovirus B (HAdV-B)
auucugguucgcuagugaau

SEQ ID NO: 283617 - RNA, 15 nt, Human adenovirus B (HAdV-B)
auucuuugcuaccua

SEQ ID NO: 283618 - RNA, 22 nt, Human adenovirus B (HAdV-B)
auugacaugcccuuggcucuaa

SEQ ID NO: 283619 - RNA, 20 nt, Human adenovirus B (HAdV-B)
auugagaauggcaacaucaa

SEQ ID NO: 283620 - RNA, 20 nt, Human adenovirus B (HAdV-B)
auugauguugccauucucaa

SEQ ID NO: 283621 - RNA, 14 nt, Human adenovirus B (HAdV-B)
auugccacagauaa

SEQ ID NO: 283622 - RNA, 16 nt, Human adenovirus B (HAdV-B)
auuggacccaggccau

SEQ ID NO: 283623 - RNA, 19 nt, Human adenovirus B (HAdV-B)
auuggacccaggccaugca

SEQ ID NO: 283624 - RNA, 19 nt, Human adenovirus B (HAdV-B)
auuggagcaguaucuggag

SEQ ID NO: 283625 - RNA, 13 nt, Human adenovirus B (HAdV-B)
auuguacugccau

SEQ ID NO: 283626 - RNA, 15 nt, Human adenovirus B (HAdV-B)
auugugauacuauga

SEQ ID NO: 283627 - RNA, 23 nt, Human adenovirus B (HAdV-B)
auugugucucaucaaacccacaa

SEQ ID NO: 283628 - RNA, 21 nt, Human adenovirus B (HAdV-B)
auuuaacagaauacaccaauc

SEQ ID NO: 283629 - RNA, 12 nt, Human adenovirus B (HAdV-B)
auuuacaguaug

SEQ ID NO: 283630 - RNA, 14 nt, Human adenovirus B (HAdV-B)
auuuaugucuaugu

SEQ ID NO: 283631 - RNA, 19 nt, Human adenovirus B (HAdV-B)
auuucuucuucaccauacu

SEQ ID NO: 283632 - RNA, 22 nt, Human adenovirus B (HAdV-B)
auuugccauucucgagcugcca

SEQ ID NO: 283633 - RNA, 12 nt, Human adenovirus B (HAdV-B)
auuugcuaucau

SEQ ID NO: 283634 - RNA, 20 nt, Human adenovirus B (HAdV-B)
auuugcuuccuaugcacuuu

SEQ ID NO: 283635 - RNA, 23 nt, Human adenovirus B (HAdV-B)
cagcaggcgacggcggugaugca

SEQ ID NO: 283636 - RNA, 23 nt, Human adenovirus B (HAdV-B)
cagcaggguucacuucaaugcau

SEQ ID NO: 283637 - RNA, 21 nt, Human adenovirus B (HAdV-B)
cagcagugucgcuaacaauac

SEQ ID NO: 283638 - RNA, 13 nt, Human adenovirus B (HAdV-B)
cagccccuacuau

SEQ ID NO: 283639 - RNA, 18 nt, Human adenovirus B (HAdV-B)
cagcgcucuugcuaccaa

SEQ ID NO: 283640 - RNA, 13 nt, Human adenovirus B (HAdV-B)
cagcucuuaccac

SEQ ID NO: 283641 - RNA, 15 nt, Human adenovirus B (HAdV-B)
cagcugccuauagua

SEQ ID NO: 283642 - RNA, 15 nt, Human adenovirus B (HAdV-B)
cagcuuuaaacauuu

SEQ ID NO: 283643 - RNA, 22 nt, Human adenovirus B (HAdV-B)
cagcuuuacuguucugcaagag

SEQ ID NO: 283644 - RNA, 15 nt, Human adenovirus B (HAdV-B)
cagcuuucuggucag

SEQ ID NO: 283645 - RNA, 20 nt, Human adenovirus B (HAdV-B)
caggaacgcgcggccaaaga

SEQ ID NO: 283646 - RNA, 14 nt, Human adenovirus B (HAdV-B)
caggaauguaauau

SEQ ID NO: 283647 - RNA, 13 nt, Human adenovirus B (HAdV-B)
caggacucuggac

SEQ ID NO: 283648 - RNA, 18 nt, Human adenovirus B (HAdV-B)
caggagaaauauucacug

SEQ ID NO: 283649 - RNA, 22 nt, Human adenovirus B (HAdV-B)
caggagaaauauucacuggaac

SEQ ID NO: 283650 - RNA, 18 nt, Human adenovirus B (HAdV-B)
caggaggauuaaagauua

SEQ ID NO: 283651 - RNA, 21 nt, Human adenovirus B (HAdV-B)
caggaguucgucagaauguua

SEQ ID NO: 283652 - RNA, 22 nt, Human adenovirus B (HAdV-B)
caggauccuauagaggugggau

SEQ ID NO: 283653 - RNA, 16 nt, Human adenovirus B (HAdV-B)
caggaugucacuccac

SEQ ID NO: 283654 - RNA, 20 nt, Human adenovirus B (HAdV-B)
caggaugucacuccacagcu

SEQ ID NO: 283655 - RNA, 22 nt, Human adenovirus B (HAdV-B)
caggccucggcuucccacugaa

SEQ ID NO: 283656 - RNA, 20 nt, Human adenovirus B (HAdV-B)
caggcgacggcggugaugca

SEQ ID NO: 283657 - RNA, 15 nt, Human adenovirus B (HAdV-B)
caggcuauacuacca

SEQ ID NO: 283658 - RNA, 13 nt, Human adenovirus B (HAdV-B)
caggcugugcaga

SEQ ID NO: 283659 - RNA, 15 nt, Human adenovirus B (HAdV-B)
cagggaaacaccacg

SEQ ID NO: 283660 - RNA, 22 nt, Human adenovirus B (HAdV-B)
caggggacgcuacagugcagua

SEQ ID NO: 283661 - RNA, 23 nt, Human adenovirus B (HAdV-B)
caggguuuauuuccccaaauggc

SEQ ID NO: 283662 - RNA, 15 nt, Human adenovirus B (HAdV-B)
caggucaggagccga

SEQ ID NO: 283663 - RNA, 12 nt, Human adenovirus B (HAdV-B)
cagguucacuuu

SEQ ID NO: 283664 - RNA, 14 nt, Human adenovirus B (HAdV-B)
cagguucacuuuaa

SEQ ID NO: 283665 - RNA, 17 nt, Human adenovirus B (HAdV-B)
caguacgauaccaccag

SEQ ID NO: 283666 - RNA, 18 nt, Human adenovirus B (HAdV-B)
caguauggugaacaccaa

SEQ ID NO: 283667 - RNA, 23 nt, Human adenovirus B (HAdV-B)
cagucgucuucucugauguagua

SEQ ID NO: 283668 - RNA, 21 nt, Human adenovirus B (HAdV-B)
cagugauagauaaaaauccau

SEQ ID NO: 283669 - RNA, 22 nt, Human adenovirus B (HAdV-B)
cagugcgaucacuagcugugua

SEQ ID NO: 283670 - RNA, 17 nt, Human adenovirus B (HAdV-B)
cagugcuuugagcgcga

SEQ ID NO: 283671 - RNA, 17 nt, Human adenovirus B (HAdV-B)
caguggaaaaacuugag

SEQ ID NO: 283672 - RNA, 18 nt, Human adenovirus B (HAdV-B)
caguggaaaaacuugagg

SEQ ID NO: 283673 - RNA, 22 nt, Human adenovirus B (HAdV-B)
caguucgcccgcgccacagaca

SEQ ID NO: 283674 - RNA, 19 nt, Human adenovirus B (HAdV-B)
caguugaaaaccacgaaaa

SEQ ID NO: 283675 - RNA, 19 nt, Human adenovirus B (HAdV-B)
cauaagaaugccaucaucu

SEQ ID NO: 283676 - RNA, 17 nt, Human adenovirus B (HAdV-B)
cauaauuacacucucau

SEQ ID NO: 283677 - RNA, 17 nt, Human adenovirus B (HAdV-B)
cauacaaaaucuuacau

SEQ ID NO: 283678 - RNA, 15 nt, Human adenovirus B (HAdV-B)
cauacaugccacaga

SEQ ID NO: 283679 - RNA, 18 nt, Human adenovirus B (HAdV-B)
cauacuagucuugcuugu

SEQ ID NO: 283680 - RNA, 20 nt, Human adenovirus B (HAdV-B)
cauacucauuugugcauuua

SEQ ID NO: 283681 - RNA, 22 nt, Human adenovirus B (HAdV-B)
cauacucauuugugcauuuaau

SEQ ID NO: 283682 - RNA, 20 nt, Human adenovirus B (HAdV-B)
cauacuuucuccauacuuua

SEQ ID NO: 283683 - RNA, 19 nt, Human adenovirus B (HAdV-B)
cauagacguagaugggauc

SEQ ID NO: 283684 - RNA, 18 nt, Human adenovirus B (HAdV-B)
cauauaguucaugugaug

SEQ ID NO: 283685 - RNA, 18 nt, Human adenovirus B (HAdV-B)
cauauccguguuuacuua

SEQ ID NO: 283686 - RNA, 21 nt, Human adenovirus B (HAdV-B)
cauauccguguuuacuuaagg

SEQ ID NO: 283687 - RNA, 20 nt, Human adenovirus B (HAdV-B)
cauauuugucagcauuguca

SEQ ID NO: 283688 - RNA, 14 nt, Human adenovirus B (HAdV-B)
caucaauugacaug

SEQ ID NO: 283689 - RNA, 15 nt, Human adenovirus B (HAdV-B)
caucaucuccugcuu

SEQ ID NO: 283690 - RNA, 18 nt, Human adenovirus B (HAdV-B)
cauccuuggcuccgcgac

SEQ ID NO: 283691 - RNA, 15 nt, Human adenovirus B (HAdV-B)
caucuaccacuccag

SEQ ID NO: 283692 - RNA, 23 nt, Human adenovirus B (HAdV-B)
caucuagugguacugaugcuaga

SEQ ID NO: 283693 - RNA, 16 nt, Human adenovirus B (HAdV-B)
caucuccugcuugcau

SEQ ID NO: 283694 - RNA, 14 nt, Human adenovirus B (HAdV-B)
caugaccaccaucg

SEQ ID NO: 283695 - RNA, 21 nt, Human adenovirus B (HAdV-B)
caugagcaaacaguauucucu

SEQ ID NO: 283696 - RNA, 24 nt, Human adenovirus B (HAdV-B)
caugagugcgggggcaacauaucc

SEQ ID NO: 283697 - RNA, 13 nt, Human adenovirus B (HAdV-B)
caugcaacaucca

SEQ ID NO: 283698 - RNA, 15 nt, Human adenovirus B (HAdV-B)
caugcaacguaucau

SEQ ID NO: 283699 - RNA, 20 nt, Human adenovirus B (HAdV-B)
caugcaggcuauacuaccaa

SEQ ID NO: 283700 - RNA, 23 nt, Human adenovirus B (HAdV-B)
caugcaggcuauacuaccaauau

SEQ ID NO: 283701 - RNA, 17 nt, Human adenovirus B (HAdV-B)
caugccacagaugucau

SEQ ID NO: 283702 - RNA, 14 nt, Human adenovirus B (HAdV-B)
cauggcaugggaug

SEQ ID NO: 283703 - RNA, 18 nt, Human adenovirus B (HAdV-B)
cauggcccccgauaagcu

SEQ ID NO: 283704 - RNA, 20 nt, Human adenovirus B (HAdV-B)
cauggcuucucuuacaucuc

SEQ ID NO: 283705 - RNA, 19 nt, Human adenovirus B (HAdV-B)
caugggaugggugagugca

SEQ ID NO: 283706 - RNA, 21 nt, Human adenovirus B (HAdV-B)
caugggaugggugagugcaga

SEQ ID NO: 283707 - RNA, 17 nt, Human adenovirus B (HAdV-B)
cauggggugaacuuucc

SEQ ID NO: 283708 - RNA, 18 nt, Human adenovirus B (HAdV-B)
cauggggugaacuuuccg

SEQ ID NO: 283709 - RNA, 21 nt, Human adenovirus B (HAdV-B)
cauguaaacaacguguucaau

SEQ ID NO: 283710 - RNA, 22 nt, Human adenovirus B (HAdV-B)
cauguaucaaggcucugcauua

SEQ ID NO: 283711 - RNA, 20 nt, Human adenovirus B (HAdV-B)
caugucaauugauguugcca

SEQ ID NO: 283712 - RNA, 14 nt, Human adenovirus B (HAdV-B)
cauuaguaacaaca

SEQ ID NO: 283713 - RNA, 16 nt, Human adenovirus B (HAdV-B)
cauuaguaacaacacu

SEQ ID NO: 283714 - RNA, 17 nt, Human adenovirus B (HAdV-B)
cauuaguaacaacacuu

SEQ ID NO: 283715 - RNA, 19 nt, Human adenovirus B (HAdV-B)
cauuaucaacgugacagca

SEQ ID NO: 283716 - RNA, 19 nt, Human adenovirus B (HAdV-B)
cauucaaaaccucugggau

SEQ ID NO: 283717 - RNA, 17 nt, Human adenovirus B (HAdV-B)
cauuccaagcacagugu

SEQ ID NO: 283718 - RNA, 16 nt, Human adenovirus B (HAdV-B)
cauugacgucucuaca

SEQ ID NO: 283719 - RNA, 15 nt, Human adenovirus B (HAdV-B)
cauugcuuauugcuu

SEQ ID NO: 283720 - RNA, 15 nt, Human adenovirus B (HAdV-B)
cauugucauuguaau

SEQ ID NO: 283721 - RNA, 17 nt, Human adenovirus B (HAdV-B)
cauugucauuguaauca

SEQ ID NO: 283722 - RNA, 21 nt, Human adenovirus B (HAdV-B)
cauuuaauguuugcgcuacuu

SEQ ID NO: 283723 - RNA, 18 nt, Human adenovirus B (HAdV-B)
cauuugcuuccuaugcac

SEQ ID NO: 283724 - RNA, 14 nt, Human adenovirus B (HAdV-B)
cauuuggauaccau

SEQ ID NO: 283725 - RNA, 15 nt, Human adenovirus B (HAdV-B)
cauuugguggcauga

SEQ ID NO: 283726 - RNA, 13 nt, Human adenovirus B (HAdV-B)
cauuugugcauuu

SEQ ID NO: 283727 - RNA, 14 nt, Human adenovirus B (HAdV-B)
cauuugugcauuua

SEQ ID NO: 283728 - RNA, 18 nt, Human adenovirus B (HAdV-B)
cauuuucgcgcuccaugg

SEQ ID NO: 283729 - RNA, 17 nt, Human adenovirus B (HAdV-B)
cauuuuggaagaccuua

SEQ ID NO: 283730 - RNA, 23 nt, Human adenovirus B (HAdV-B)
ccaaacggaguucuuacuuuaaa

SEQ ID NO: 283731 - RNA, 17 nt, Human adenovirus B (HAdV-B)
ccaaacugcuuagccag

SEQ ID NO: 283732 - RNA, 16 nt, Human adenovirus B (HAdV-B)
ccaaaugacuaaugca

SEQ ID NO: 283733 - RNA, 13 nt, Human adenovirus B (HAdV-B)
ccaaauguuuaaa

SEQ ID NO: 283734 - RNA, 17 nt, Human adenovirus B (HAdV-B)
ccaaauucaccaaugca

SEQ ID NO: 283735 - RNA, 19 nt, Human adenovirus B (HAdV-B)
ccaaauucaccaaugcaaa

SEQ ID NO: 283736 - RNA, 17 nt, Human adenovirus B (HAdV-B)
ccaaauuuaauaaugau

SEQ ID NO: 283737 - RNA, 13 nt, Human adenovirus B (HAdV-B)
ccuucaacccugu

SEQ ID NO: 283738 - RNA, 22 nt, Human adenovirus B (HAdV-B)
ccuucacgcggcgcuacuugcu

SEQ ID NO: 283739 - RNA, 17 nt, Human adenovirus B (HAdV-B)
ccuugcuucacuuucuu

SEQ ID NO: 283740 - RNA, 13 nt, Human adenovirus B (HAdV-B)
ccuuguucugcca

SEQ ID NO: 283741 - RNA, 15 nt, Human adenovirus B (HAdV-B)
ccuuguucugccagc

SEQ ID NO: 283742 - RNA, 14 nt, Human adenovirus B (HAdV-B)
ccuuuagacagcaa

SEQ ID NO: 283743 - RNA, 20 nt, Human adenovirus B (HAdV-B)
ccuuuggacgcagcugcagc

SEQ ID NO: 283744 - RNA, 15 nt, Human adenovirus B (HAdV-B)
cgaaagugaaccaca

SEQ ID NO: 283745 - RNA, 14 nt, Human adenovirus B (HAdV-B)
cgaaguccaaauga

SEQ ID NO: 283746 - RNA, 20 nt, Human adenovirus B (HAdV-B)
cgacaaaaauuuaccugcau

SEQ ID NO: 283747 - RNA, 17 nt, Human adenovirus B (HAdV-B)
cgacacggcacgaagcc

SEQ ID NO: 283748 - RNA, 13 nt, Human adenovirus B (HAdV-B)
cgacagauaaaga

SEQ ID NO: 283749 - RNA, 16 nt, Human adenovirus B (HAdV-B)
cgacaucggcacgagc

SEQ ID NO: 283750 - RNA, 21 nt, Human adenovirus B (HAdV-B)
cgagaaaaaucagaaauuccc

SEQ ID NO: 283751 - RNA, 22 nt, Human adenovirus B (HAdV-B)
cgagguccugacgguuccaucc

SEQ ID NO: 283752 - RNA, 22 nt, Human adenovirus B (HAdV-B)
cgauaagcucgccugugccauu

SEQ ID NO: 283753 - RNA, 17 nt, Human adenovirus B (HAdV-B)
cgaucacuagcugugua

SEQ ID NO: 283754 - RNA, 21 nt, Human adenovirus B (HAdV-B)
cgauccgaugacaauucucua

SEQ ID NO: 283755 - RNA, 17 nt, Human adenovirus B (HAdV-B)
cgcaauguuuugcauua

SEQ ID NO: 283756 - RNA, 13 nt, Human adenovirus B (HAdV-B)
cgcacauagucau

SEQ ID NO: 283757 - RNA, 16 nt, Human adenovirus B (HAdV-B)
cgcacgggcagguucu

SEQ ID NO: 283758 - RNA, 15 nt, Human adenovirus B (HAdV-B)
cgcgcggccaaagag

SEQ ID NO: 283759 - RNA, 16 nt, Human adenovirus B (HAdV-B)
cgcgcucauauggguu

SEQ ID NO: 283760 - RNA, 18 nt, Human adenovirus B (HAdV-B)
cgcggccaaagagcucag

SEQ ID NO: 283761 - RNA, 17 nt, Human adenovirus B (HAdV-B)
cggaguucuuacuuuaa

SEQ ID NO: 283762 - RNA, 17 nt, Human adenovirus B (HAdV-B)
cggaugaucgucucaaa

SEQ ID NO: 283763 - RNA, 21 nt, Human adenovirus B (HAdV-B)
cggaugucucacgcuugccag

SEQ ID NO: 283764 - RNA, 14 nt, Human adenovirus B (HAdV-B)
cggccgcgucucag

SEQ ID NO: 283765 - RNA, 15 nt, Human adenovirus B (HAdV-B)
cgggaaucaccaacu

SEQ ID NO: 283766 - RNA, 15 nt, Human adenovirus B (HAdV-B)
cgggugcuuacugga

SEQ ID NO: 283767 - RNA, 19 nt, Human adenovirus B (HAdV-B)
cgguaaccuauugcauuug

SEQ ID NO: 283768 - RNA, 10 nt, Human adenovirus B (HAdV-B)
cggugaugca

SEQ ID NO: 283769 - RNA, 17 nt, Human adenovirus B (HAdV-B)
cggugggaucugcaauc

SEQ ID NO: 283770 - RNA, 22 nt, Human adenovirus B (HAdV-B)
cgugcuauccgcaagcaauugc

SEQ ID NO: 283771 - RNA, 13 nt, Human adenovirus B (HAdV-B)
cguucuacccaac

SEQ ID NO: 283772 - RNA, 16 nt, Human adenovirus B (HAdV-B)
cguucuacccaacauc

SEQ ID NO: 283773 - RNA, 13 nt, Human adenovirus B (HAdV-B)
cguugauuacuuu

SEQ ID NO: 283774 - RNA, 15 nt, Human adenovirus B (HAdV-B)
cuaaaaggaccucaa

SEQ ID NO: 283775 - RNA, 14 nt, Human adenovirus B (HAdV-B)
cuaacaaccacagg

SEQ ID NO: 283776 - RNA, 15 nt, Human adenovirus B (HAdV-B)
cuaacaccugcuacc

SEQ ID NO: 283777 - RNA, 15 nt, Human adenovirus B (HAdV-B)
cuaaccaggcugugc

SEQ ID NO: 283778 - RNA, 15 nt, Human adenovirus B (HAdV-B)
cuaaugguauccaaa

SEQ ID NO: 283779 - RNA, 16 nt, Human adenovirus B (HAdV-B)
cuacaaaacaugcaac

SEQ ID NO: 283780 - RNA, 16 nt, Human adenovirus B (HAdV-B)
cuacagaaaacccuug

SEQ ID NO: 283781 - RNA, 14 nt, Human adenovirus B (HAdV-B)
cuacaucuacugug

SEQ ID NO: 283782 - RNA, 16 nt, Human adenovirus B (HAdV-B)
cuaccgucaccuccac

SEQ ID NO: 283783 - RNA, 21 nt, Human adenovirus B (HAdV-B)
cuacggacugccgcuucuuca

SEQ ID NO: 283784 - RNA, 16 nt, Human adenovirus B (HAdV-B)
cuacuaauacuacuuu

SEQ ID NO: 283785 - RNA, 15 nt, Human adenovirus B (HAdV-B)
cuacucccugcuauu

SEQ ID NO: 283786 - RNA, 20 nt, Human adenovirus B (HAdV-B)
cuacuuucacagcaguagcc

SEQ ID NO: 283787 - RNA, 22 nt, Human adenovirus B (HAdV-B)
cuacuuucucuagcagcagugu

SEQ ID NO: 283788 - RNA, 16 nt, Human adenovirus B (HAdV-B)
cuaggacauaauuaca

SEQ ID NO: 283789 - RNA, 18 nt, Human adenovirus B (HAdV-B)
cuaggacauaauuacacu

SEQ ID NO: 283790 - RNA, 22 nt, Human adenovirus B (HAdV-B)
cuaggacauaauuacacucuca

SEQ ID NO: 283791 - RNA, 19 nt, Human adenovirus B (HAdV-B)
cuaggcggagcgguggugu

SEQ ID NO: 283792 - RNA, 20 nt, Human adenovirus B (HAdV-B)
cuaggcggagcgguggugua

SEQ ID NO: 283793 - RNA, 15 nt, Human adenovirus B (HAdV-B)
cuauacuaccaauau

SEQ ID NO: 283794 - RNA, 16 nt, Human adenovirus B (HAdV-B)
cuauagauauuuuuca

SEQ ID NO: 283795 - RNA, 13 nt, Human adenovirus B (HAdV-B)
cuauagccagcaa

SEQ ID NO: 283796 - RNA, 16 nt, Human adenovirus B (HAdV-B)
cuaucgagaaaaauca

SEQ ID NO: 283797 - RNA, 18 nt, Human adenovirus B (HAdV-B)
cuaucggccaucauggaa

SEQ ID NO: 283798 - RNA, 21 nt, Human adenovirus B (HAdV-B)
cuaugaagaugaaagcaccuc

SEQ ID NO: 283799 - RNA, 23 nt, Human adenovirus B (HAdV-B)
cuaugcggccuaagagaccugcu

SEQ ID NO: 283800 - RNA, 16 nt, Human adenovirus B (HAdV-B)
cuauguugugccacua

SEQ ID NO: 283801 - RNA, 22 nt, Human adenovirus B (HAdV-B)
cuauuauggaaccgacuauaaa

SEQ ID NO: 283802 - RNA, 19 nt, Human adenovirus B (HAdV-B)
cuauugcauuugcauccca

SEQ ID NO: 283803 - RNA, 12 nt, Human adenovirus B (HAdV-B)
cuauugcuuccc

SEQ ID NO: 283804 - RNA, 14 nt, Human adenovirus B (HAdV-B)
cucaaccauaaaaa

SEQ ID NO: 283805 - RNA, 15 nt, Human adenovirus B (HAdV-B)
cucacgcuugccagc

SEQ ID NO: 283806 - RNA, 19 nt, Human adenovirus B (HAdV-B)
cucagugacuccuucaacc

SEQ ID NO: 283807 - RNA, 21 nt, Human adenovirus B (HAdV-B)
cucaucaaacccacaagcagc

SEQ ID NO: 283808 - RNA, 18 nt, Human adenovirus B (HAdV-B)
cucaucuaaaaccaugca

SEQ ID NO: 283809 - RNA, 13 nt, Human adenovirus B (HAdV-B)
cucauuugugcau

SEQ ID NO: 283810 - RNA, 15 nt, Human adenovirus B (HAdV-B)
cucauuugugcauuu

SEQ ID NO: 283811 - RNA, 20 nt, Human adenovirus B (HAdV-B)
cuccaacagaaaaccagcag

SEQ ID NO: 283812 - RNA, 19 nt, Human adenovirus B (HAdV-B)
cuccaauuccgccgaggau

SEQ ID NO: 283813 - RNA, 14 nt, Human adenovirus B (HAdV-B)
cucccaaugcacau

SEQ ID NO: 283814 - RNA, 17 nt, Human adenovirus B (HAdV-B)
cucccaggacuacucca

SEQ ID NO: 283815 - RNA, 16 nt, Human adenovirus B (HAdV-B)
cuccccacgcacagcu

SEQ ID NO: 283816 - RNA, 20 nt, Human adenovirus B (HAdV-B)
cuccccacgcacagcuuuaa

SEQ ID NO: 283817 - RNA, 18 nt, Human adenovirus B (HAdV-B)
cucccccuucccauuuaa

SEQ ID NO: 283818 - RNA, 22 nt, Human adenovirus B (HAdV-B)
cucccugcuauuaguuacuuca

SEQ ID NO: 283819 - RNA, 15 nt, Human adenovirus B (HAdV-B)
cuccugcuugcauga

SEQ ID NO: 283820 - RNA, 17 nt, Human adenovirus B (HAdV-B)
cucgacagauaaagaca

SEQ ID NO: 283821 - RNA, 14 nt, Human adenovirus B (HAdV-B)
cucgcaacuaugcu

SEQ ID NO: 283822 - RNA, 22 nt, Human adenovirus B (HAdV-B)
cucgcaacucugacuucugcuc

SEQ ID NO: 283823 - RNA, 20 nt, Human adenovirus B (HAdV-B)
cucgccugcaacgaauuuuc

SEQ ID NO: 283824 - RNA, 22 nt, Human adenovirus B (HAdV-B)
cucgcucugaaacuguuuggaa

SEQ ID NO: 283825 - RNA, 22 nt, Human adenovirus B (HAdV-B)
cucuacaaacgaaccuguggaa

SEQ ID NO: 283826 - RNA, 20 nt, Human adenovirus B (HAdV-B)
cucugaacuaucagaaugac

SEQ ID NO: 283827 - RNA, 15 nt, Human adenovirus B (HAdV-B)
cucugauguaguaaa

SEQ ID NO: 283828 - RNA, 21 nt, Human adenovirus B (HAdV-B)
cucugggaugcaaaugcaaua

SEQ ID NO: 283829 - RNA, 19 nt, Human adenovirus B (HAdV-B)
cucuguuaacuucaccuuu

SEQ ID NO: 283830 - RNA, 21 nt, Human adenovirus B (HAdV-B)
cucuguuaacuucaccuuucc

SEQ ID NO: 283831 - RNA, 13 nt, Human adenovirus B (HAdV-B)
cucuuacaucucu

SEQ ID NO: 283832 - RNA, 19 nt, Human adenovirus B (HAdV-B)
cucuuucuguuuacagaca

SEQ ID NO: 283833 - RNA, 14 nt, Human adenovirus B (HAdV-B)
cugaaacaccauca

SEQ ID NO: 283834 - RNA, 23 nt, Human adenovirus B (HAdV-B)
cugaccgauuaggcgaguuugcu

SEQ ID NO: 283835 - RNA, 13 nt, Human adenovirus B (HAdV-B)
cugagucagggua

SEQ ID NO: 283836 - RNA, 15 nt, Human adenovirus B (HAdV-B)
cugauaaacaguaua

SEQ ID NO: 283837 - RNA, 22 nt, Human adenovirus B (HAdV-B)
cugaucgagcgagaccagggaa

SEQ ID NO: 283838 - RNA, 24 nt, Human adenovirus B (HAdV-B)
cugcaacaaaacaaaaccaauaau

SEQ ID NO: 283839 - RNA, 15 nt, Human adenovirus B (HAdV-B)
cugcaagagcuuccu

SEQ ID NO: 283840 - RNA, 17 nt, Human adenovirus B (HAdV-B)
gaagcguugauuacuuu

SEQ ID NO: 283841 - RNA, 18 nt, Human adenovirus B (HAdV-B)
gaagcguugauuacuuug

SEQ ID NO: 283842 - RNA, 21 nt, Human adenovirus B (HAdV-B)
gaagcucuuaauuugggccau

SEQ ID NO: 283843 - RNA, 22 nt, Human adenovirus B (HAdV-B)
gaaggaugaaaaaaaaccccgc

SEQ ID NO: 283844 - RNA, 19 nt, Human adenovirus B (HAdV-B)
gaaggguuauuagaggaag

SEQ ID NO: 283845 - RNA, 14 nt, Human adenovirus B (HAdV-B)
gaaguaggcugauu

SEQ ID NO: 283846 - RNA, 15 nt, Human adenovirus B (HAdV-B)
gaaugccaucaucuc

SEQ ID NO: 283847 - RNA, 21 nt, Human adenovirus B (HAdV-B)
gaauguggaaucuaaaaccau

SEQ ID NO: 283848 - RNA, 14 nt, Human adenovirus B (HAdV-B)
gaauuaagacucuc

SEQ ID NO: 283849 - RNA, 22 nt, Human adenovirus B (HAdV-B)
gacacggaacccugcaagccau

SEQ ID NO: 283850 - RNA, 22 nt, Human adenovirus B (HAdV-B)
gacagauacaguagucaauaua

SEQ ID NO: 283851 - RNA, 23 nt, Human adenovirus B (HAdV-B)
gacaggcgcuuagaaauaaacuu

SEQ ID NO: 283852 - RNA, 19 nt, Human adenovirus B (HAdV-B)
gacauaauuacacucucau

SEQ ID NO: 283853 - RNA, 22 nt, Human adenovirus B (HAdV-B)
gacaugaguaaagaaauuccca

SEQ ID NO: 283854 - RNA, 20 nt, Human adenovirus B (HAdV-B)
gaccaccaucgaaacagaag

SEQ ID NO: 283855 - RNA, 12 nt, Human adenovirus B (HAdV-B)
gaccacugccgc

SEQ ID NO: 283856 - RNA, 20 nt, Human adenovirus B (HAdV-B)
gaccagaacuuccaacaaaa

SEQ ID NO: 283857 - RNA, 20 nt, Human adenovirus B (HAdV-B)
gaccagggaaacaccacggu

SEQ ID NO: 283858 - RNA, 21 nt, Human adenovirus B (HAdV-B)
gacccagaggaacacauuccc

SEQ ID NO: 283859 - RNA, 16 nt, Human adenovirus B (HAdV-B)
gacccccaaucacuuc

SEQ ID NO: 283860 - RNA, 18 nt, Human adenovirus B (HAdV-B)
gacccccaaucacuucag

SEQ ID NO: 283861 - RNA, 20 nt, Human adenovirus B (HAdV-B)
gaccgcuguauuacgcugga

SEQ ID NO: 283862 - RNA, 16 nt, Human adenovirus B (HAdV-B)
gaccugcuaccaauga

SEQ ID NO: 283863 - RNA, 18 nt, Human adenovirus B (HAdV-B)
gaccugcuaccaaugaau

SEQ ID NO: 283864 - RNA, 20 nt, Human adenovirus B (HAdV-B)
gacgauuggacccaggccau

SEQ ID NO: 283865 - RNA, 15 nt, Human adenovirus B (HAdV-B)
gacggcggugaugca

SEQ ID NO: 283866 - RNA, 19 nt, Human adenovirus B (HAdV-B)
gacuaugcauaguguaagu

SEQ ID NO: 283867 - RNA, 22 nt, Human adenovirus B (HAdV-B)
gacugccccauggcaugggaug

SEQ ID NO: 283868 - RNA, 16 nt, Human adenovirus B (HAdV-B)
gacuggauccuugugc

SEQ ID NO: 283869 - RNA, 15 nt, Human adenovirus B (HAdV-B)
gacugguauacaacg

SEQ ID NO: 283870 - RNA, 20 nt, Human adenovirus B (HAdV-B)
gacuguauaggagcauuugc

SEQ ID NO: 283871 - RNA, 21 nt, Human adenovirus B (HAdV-B)
gacuucgacccagaaaacugc

SEQ ID NO: 283872 - RNA, 12 nt, Human adenovirus B (HAdV-B)
gacuugccuccc

SEQ ID NO: 283873 - RNA, 19 nt, Human adenovirus B (HAdV-B)
gagaauauaugacaaugga

SEQ ID NO: 283874 - RNA, 22 nt, Human adenovirus B (HAdV-B)
gagagaauuggguucuucauug

SEQ ID NO: 283875 - RNA, 14 nt, Human adenovirus B (HAdV-B)
gagagcgugaugca

SEQ ID NO: 283876 - RNA, 23 nt, Human adenovirus B (HAdV-B)
gagauggugggucuuugaaaaau

SEQ ID NO: 283877 - RNA, 22 nt, Human adenovirus B (HAdV-B)
gagcaagagcucagagccauug

SEQ ID NO: 283878 - RNA, 23 nt, Human adenovirus B (HAdV-B)
gagcucagagaugucauccaaau

SEQ ID NO: 283879 - RNA, 15 nt, Human adenovirus B (HAdV-B)
gagcugccagugcgc

SEQ ID NO: 283880 - RNA, 14 nt, Human adenovirus B (HAdV-B)
gagcuucuaugacu

SEQ ID NO: 283881 - RNA, 14 nt, Human adenovirus B (HAdV-B)
gaggaacacauucc

SEQ ID NO: 283882 - RNA, 21 nt, Human adenovirus B (HAdV-B)
gaggaguuagaaaaugcuccu

SEQ ID NO: 283883 - RNA, 17 nt, Human adenovirus B (HAdV-B)
gaggugacuaggguugu

SEQ ID NO: 283884 - RNA, 20 nt, Human adenovirus B (HAdV-B)
gagugcgggggcaacauauc

SEQ ID NO: 283885 - RNA, 23 nt, Human adenovirus B (HAdV-B)
gagugcuuuuugauugucacaca

SEQ ID NO: 283886 - RNA, 16 nt, Human adenovirus B (HAdV-B)
gaguucaucuacuucg

SEQ ID NO: 283887 - RNA, 15 nt, Human adenovirus B (HAdV-B)
gaguucuuacuuuaa

SEQ ID NO: 283888 - RNA, 18 nt, Human adenovirus B (HAdV-B)
gaguuuuuacaacuagaa

SEQ ID NO: 283889 - RNA, 18 nt, Human adenovirus B (HAdV-B)
gauacaguagucaauaua

SEQ ID NO: 283890 - RNA, 18 nt, Human adenovirus B (HAdV-B)
gauacuaugacuaugcau

SEQ ID NO: 283891 - RNA, 19 nt, Human adenovirus B (HAdV-B)
gauacuaugacuaugcaua

SEQ ID NO: 283892 - RNA, 13 nt, Human adenovirus B (HAdV-B)
gauacuugcucgc

SEQ ID NO: 283893 - RNA, 22 nt, Human adenovirus B (HAdV-B)
gauacuuggguugccacuugaa

SEQ ID NO: 283894 - RNA, 16 nt, Human adenovirus B (HAdV-B)
gauagauaaaaaucca

SEQ ID NO: 283895 - RNA, 15 nt, Human adenovirus B (HAdV-B)
gauauaaucugcaac

SEQ ID NO: 283896 - RNA, 21 nt, Human adenovirus B (HAdV-B)
gauauuacuggcgguucccaa

SEQ ID NO: 283897 - RNA, 16 nt, Human adenovirus B (HAdV-B)
gauauuuuucauucuc

SEQ ID NO: 283898 - RNA, 12 nt, Human adenovirus B (HAdV-B)
gaucauccacaa

SEQ ID NO: 283899 - RNA, 13 nt, Human adenovirus B (HAdV-B)
gaucauccacaag

SEQ ID NO: 283900 - RNA, 15 nt, Human adenovirus B (HAdV-B)
gaucauccacaagac

SEQ ID NO: 283901 - RNA, 18 nt, Human adenovirus B (HAdV-B)
gaucauccacaagaccca

SEQ ID NO: 283902 - RNA, 22 nt, Human adenovirus B (HAdV-B)
gauccaugucuagacuucgacc

SEQ ID NO: 283903 - RNA, 18 nt, Human adenovirus B (HAdV-B)
gaucuacguccacuggac

SEQ ID NO: 283904 - RNA, 15 nt, Human adenovirus B (HAdV-B)
gaugucauagacgua

SEQ ID NO: 283905 - RNA, 22 nt, Human adenovirus B (HAdV-B)
gauuaauaaaaaaucacuuacu

SEQ ID NO: 283906 - RNA, 22 nt, Human adenovirus B (HAdV-B)
gauuacagccaacgagccagcg

SEQ ID NO: 283907 - RNA, 24 nt, Human adenovirus B (HAdV-B)
gauuccacauuccaaacaguuuca

SEQ ID NO: 283908 - RNA, 21 nt, Human adenovirus B (HAdV-B)
gauucugguucgcuagugaau

SEQ ID NO: 283909 - RNA, 13 nt, Human adenovirus B (HAdV-B)
gauugcuggaaua

SEQ ID NO: 283910 - RNA, 15 nt, Human adenovirus B (HAdV-B)
gauuggcucgcucug

SEQ ID NO: 283911 - RNA, 18 nt, Human adenovirus B (HAdV-B)
gauugugauacuaugacu

SEQ ID NO: 283912 - RNA, 20 nt, Human adenovirus B (HAdV-B)
gcaaagcuccaagcagguca

SEQ ID NO: 283913 - RNA, 13 nt, Human adenovirus B (HAdV-B)
gcaaaugacaaag

SEQ ID NO: 283914 - RNA, 12 nt, Human adenovirus B (HAdV-B)
gcaaaugcaaua

SEQ ID NO: 283915 - RNA, 14 nt, Human adenovirus B (HAdV-B)
gcaaauuccaacaa

SEQ ID NO: 283916 - RNA, 22 nt, Human adenovirus B (HAdV-B)
gcaaauuuuucuuuuauucaau

SEQ ID NO: 283917 - RNA, 23 nt, Human adenovirus B (HAdV-B)
gcaaauuuuucuuuuauucaauu

SEQ ID NO: 283918 - RNA, 23 nt, Human adenovirus B (HAdV-B)
gcaacaaaacaaaaccaauaaua

SEQ ID NO: 283919 - RNA, 21 nt, Human adenovirus B (HAdV-B)
gcaacauacaaaaucuuacau

SEQ ID NO: 283920 - RNA, 17 nt, Human adenovirus B (HAdV-B)
gcacacuuacuuuugca

SEQ ID NO: 283921 - RNA, 19 nt, Human adenovirus B (HAdV-B)
gcacagcuuuaaacauuug

SEQ ID NO: 283922 - RNA, 22 nt, Human adenovirus B (HAdV-B)
gcaccucacuucccucuuccca

SEQ ID NO: 283923 - RNA, 17 nt, Human adenovirus B (HAdV-B)
gcacggugggaucugca

SEQ ID NO: 283924 - RNA, 21 nt, Human adenovirus B (HAdV-B)
gcagaccugugugguuagcuc

SEQ ID NO: 283925 - RNA, 15 nt, Human adenovirus B (HAdV-B)
gcagacguccugaaa

SEQ ID NO: 283926 - RNA, 18 nt, Human adenovirus B (HAdV-B)
gcagcaguuggacuguga

SEQ ID NO: 283927 - RNA, 17 nt, Human adenovirus B (HAdV-B)
gcagcgcucuugcuacc

SEQ ID NO: 283928 - RNA, 19 nt, Human adenovirus B (HAdV-B)
gcaggaacgcgcggccaaa

SEQ ID NO: 283929 - RNA, 20 nt, Human adenovirus B (HAdV-B)
gcaggaugucacuccacagc

SEQ ID NO: 283930 - RNA, 18 nt, Human adenovirus B (HAdV-B)
gcaggcgacggcggugau

SEQ ID NO: 283931 - RNA, 22 nt, Human adenovirus B (HAdV-B)
gcaggggacgcuacagugcagu

SEQ ID NO: 283932 - RNA, 21 nt, Human adenovirus B (HAdV-B)
gcaguacaggacaggcgcuua

SEQ ID NO: 283933 - RNA, 13 nt, Human adenovirus B (HAdV-B)
gcaguagccacag

SEQ ID NO: 283934 - RNA, 22 nt, Human adenovirus B (HAdV-B)
gcaguagccacagcaaccccag

SEQ ID NO: 283935 - RNA, 21 nt, Human adenovirus B (HAdV-B)
gcaguaucuggagcgggcuua

SEQ ID NO: 283936 - RNA, 15 nt, Human adenovirus B (HAdV-B)
gcauaagaaugccau

SEQ ID NO: 283937 - RNA, 23 nt, Human adenovirus B (HAdV-B)
gcaucccagagguuuugaauguu

SEQ ID NO: 283938 - RNA, 18 nt, Human adenovirus B (HAdV-B)
gcaucgccccccucugau

SEQ ID NO: 283939 - RNA, 16 nt, Human adenovirus B (HAdV-B)
gcaucuagugguacug

SEQ ID NO: 283940 - RNA, 23 nt, Human adenovirus B (HAdV-B)
gcaucuccuguguuccaggacca

SEQ ID NO: 283941 - RNA, 12 nt, Human adenovirus B (HAdV-B)
aaaaacuugagg

SEQ ID NO: 283942 - RNA, 20 nt, Human adenovirus B (HAdV-B)
aaaaacuuuuccucacuaca

SEQ ID NO: 283943 - RNA, 19 nt, Human adenovirus B (HAdV-B)
aaaaaggcgggaauuacau

SEQ ID NO: 283944 - RNA, 15 nt, Human adenovirus B (HAdV-B)
aaaaauacaauggac

SEQ ID NO: 283945 - RNA, 18 nt, Human adenovirus B (HAdV-B)
aaaaaucacuuacuugaa

SEQ ID NO: 283946 - RNA, 22 nt, Human adenovirus B (HAdV-B)
aaaaauuuguuuuuucugucuu

SEQ ID NO: 283947 - RNA, 18 nt, Human adenovirus B (HAdV-B)
aaaacaagccaagauauc

SEQ ID NO: 283948 - RNA, 20 nt, Human adenovirus B (HAdV-B)
aaaacauacgggaacaaagc

SEQ ID NO: 283949 - RNA, 15 nt, Human adenovirus B (HAdV-B)
aaaacguauaaauaa

SEQ ID NO: 283950 - RNA, 11 nt, Human adenovirus B (HAdV-B)
aaaacuugagg

SEQ ID NO: 283951 - RNA, 21 nt, Human adenovirus B (HAdV-B)
aaaacuugaggacuuguuaca

SEQ ID NO: 283952 - RNA, 19 nt, Human adenovirus B (HAdV-B)
aaaacuuuggggugggauu

SEQ ID NO: 283953 - RNA, 18 nt, Human adenovirus B (HAdV-B)
aaaagaaaaauuugccaa

SEQ ID NO: 283954 - RNA, 14 nt, Human adenovirus B (HAdV-B)
aaaagguaaauggg

SEQ ID NO: 283955 - RNA, 20 nt, Human adenovirus B (HAdV-B)
aaaaguaguuuagauuauaa

SEQ ID NO: 283956 - RNA, 12 nt, Human adenovirus B (HAdV-B)
aaaaucuuacau

SEQ ID NO: 283957 - RNA, 14 nt, Human adenovirus B (HAdV-B)
aaaaugcaaauucc

SEQ ID NO: 283958 - RNA, 12 nt, Human adenovirus B (HAdV-B)
aaaaugccaaau

SEQ ID NO: 283959 - RNA, 22 nt, Human adenovirus B (HAdV-B)
aaaauuugccaaaaaaacauuc

SEQ ID NO: 283960 - RNA, 15 nt, Human adenovirus B (HAdV-B)
aaacagucgucucua

SEQ ID NO: 283961 - RNA, 13 nt, Human adenovirus B (HAdV-B)
aaacaugcaacau

SEQ ID NO: 283962 - RNA, 16 nt, Human adenovirus B (HAdV-B)
aaacaugcaacaucca

SEQ ID NO: 283963 - RNA, 18 nt, Human adenovirus B (HAdV-B)
aaaccacgaaaaugccaa

SEQ ID NO: 283964 - RNA, 20 nt, Human adenovirus B (HAdV-B)
aaaccaugugaccaaccugg

SEQ ID NO: 283965 - RNA, 23 nt, Human adenovirus B (HAdV-B)
aaacccaggguuuauuuccccaa

SEQ ID NO: 283966 - RNA, 16 nt, Human adenovirus B (HAdV-B)
aaacuaccaccugcaa

SEQ ID NO: 283967 - RNA, 16 nt, Human adenovirus B (HAdV-B)
aaagaaaaaacaaagg

SEQ ID NO: 283968 - RNA, 19 nt, Human adenovirus B (HAdV-B)
aaagagggaagggaugaag

SEQ ID NO: 283969 - RNA, 19 nt, Human adenovirus B (HAdV-B)
aaagcaccucccaacaccc

SEQ ID NO: 283970 - RNA, 13 nt, Human adenovirus B (HAdV-B)
aaagcagugcgau

SEQ ID NO: 283971 - RNA, 18 nt, Human adenovirus B (HAdV-B)
aaagucccgcucccacca

SEQ ID NO: 283972 - RNA, 13 nt, Human adenovirus B (HAdV-B)
aaauacaauggac

SEQ ID NO: 283973 - RNA, 23 nt, Human adenovirus B (HAdV-B)
aaauagcagcugcaaccauggcc

SEQ ID NO: 283974 - RNA, 12 nt, Human adenovirus B (HAdV-B)
aaauauaaucag

SEQ ID NO: 283975 - RNA, 18 nt, Human adenovirus B (HAdV-B)
aaauauguuaacuguuca

SEQ ID NO: 283976 - RNA, 13 nt, Human adenovirus B (HAdV-B)
aaaucaacaacaa

SEQ ID NO: 283977 - RNA, 14 nt, Human adenovirus B (HAdV-B)
aaaucaaguaccau

SEQ ID NO: 283978 - RNA, 16 nt, Human adenovirus B (HAdV-B)
aaaucaaguaccaucu

SEQ ID NO: 283979 - RNA, 12 nt, Human adenovirus B (HAdV-B)
aaaucaaguguu

SEQ ID NO: 283980 - RNA, 15 nt, Human adenovirus B (HAdV-B)
aaaucacuuacuuga

SEQ ID NO: 283981 - RNA, 16 nt, Human adenovirus B (HAdV-B)
aaaucagaaauucccc

SEQ ID NO: 283982 - RNA, 16 nt, Human adenovirus B (HAdV-B)
uaccacguugugagga

SEQ ID NO: 283983 - RNA, 22 nt, Human adenovirus B (HAdV-B)
uacccacaaucuucaugucuuu

SEQ ID NO: 283984 - RNA, 12 nt, Human adenovirus B (HAdV-B)
uaccguggauga

SEQ ID NO: 283985 - RNA, 16 nt, Human adenovirus B (HAdV-B)
uaccuauacacaccuu

SEQ ID NO: 283986 - RNA, 19 nt, Human adenovirus B (HAdV-B)
uaccuauacacaccuugcu

SEQ ID NO: 283987 - RNA, 17 nt, Human adenovirus B (HAdV-B)
uaccugcgccaccaucc

SEQ ID NO: 283988 - RNA, 17 nt, Human adenovirus B (HAdV-B)
uacgagagcgugaugca

SEQ ID NO: 283989 - RNA, 13 nt, Human adenovirus B (HAdV-B)
uacggacugccgc

SEQ ID NO: 283990 - RNA, 13 nt, Human adenovirus B (HAdV-B)
uacuagucuugcu

SEQ ID NO: 283991 - RNA, 14 nt, Human adenovirus B (HAdV-B)
uacuagucuugcuu

SEQ ID NO: 283992 - RNA, 15 nt, Human adenovirus B (HAdV-B)
uacuaugacuaugca

SEQ ID NO: 283993 - RNA, 16 nt, Human adenovirus B (HAdV-B)
uacuaugacuaugcau

SEQ ID NO: 283994 - RNA, 19 nt, Human adenovirus B (HAdV-B)
uacuaugacuaugcauagu

SEQ ID NO: 283995 - RNA, 15 nt, Human adenovirus B (HAdV-B)
uacucauuugugcau

SEQ ID NO: 283996 - RNA, 18 nt, Human adenovirus B (HAdV-B)
uacucauuugugcauuua

SEQ ID NO: 283997 - RNA, 19 nt, Human adenovirus B (HAdV-B)
uacucauuugugcauuuaa

SEQ ID NO: 283998 - RNA, 18 nt, Human adenovirus B (HAdV-B)
uacugccaucuaccacuc

SEQ ID NO: 283999 - RNA, 21 nt, Human adenovirus B (HAdV-B)
uacuggcgguucccaauaugc

SEQ ID NO: 284000 - RNA, 16 nt, Human adenovirus B (HAdV-B)
uacuguucugcaagag

SEQ ID NO: 284001 - RNA, 13 nt, Human adenovirus B (HAdV-B)
uacuucaaccuaa

SEQ ID NO: 284002 - RNA, 15 nt, Human adenovirus B (HAdV-B)
uacuucaaucuggga

SEQ ID NO: 284003 - RNA, 16 nt, Human adenovirus B (HAdV-B)
uacuugaacuaucaca

SEQ ID NO: 284004 - RNA, 23 nt, Human adenovirus B (HAdV-B)
uacuuucacagcaguagccacag

SEQ ID NO: 284005 - RNA, 15 nt, Human adenovirus B (HAdV-B)
uacuuucucuagcag

SEQ ID NO: 284006 - RNA, 15 nt, Human adenovirus B (HAdV-B)
uagaaaaugcaaauu

SEQ ID NO: 284007 - RNA, 19 nt, Human adenovirus B (HAdV-B)
uagaaaaugcaaauuccaa

SEQ ID NO: 284008 - RNA, 17 nt, Human adenovirus B (HAdV-B)
uagaaauuucuucuuca

SEQ ID NO: 284009 - RNA, 21 nt, Human adenovirus B (HAdV-B)
uagaagagcacgagauacaau

SEQ ID NO: 284010 - RNA, 23 nt, Human adenovirus B (HAdV-B)
uagacaugguuuuagauuccaca

SEQ ID NO: 284011 - RNA, 17 nt, Human adenovirus B (HAdV-B)
uagaccuacagagucuc

SEQ ID NO: 284012 - RNA, 14 nt, Human adenovirus B (HAdV-B)
uagacucucgccug

SEQ ID NO: 284013 - RNA, 15 nt, Human adenovirus B (HAdV-B)
uagauaaaaauccau

SEQ ID NO: 284014 - RNA, 16 nt, Human adenovirus B (HAdV-B)
uagauaaaaauccauc

SEQ ID NO: 284015 - RNA, 21 nt, Human adenovirus B (HAdV-B)
uagauaaaaauccaucgggau

SEQ ID NO: 284016 - RNA, 16 nt, Human adenovirus B (HAdV-B)
uagauuuggcuaacca

SEQ ID NO: 284017 - RNA, 15 nt, Human adenovirus B (HAdV-B)
uagcauagucugccu

SEQ ID NO: 284018 - RNA, 21 nt, Human adenovirus B (HAdV-B)
uagcaucgccccccucugaua

SEQ ID NO: 284019 - RNA, 17 nt, Human adenovirus B (HAdV-B)
uagccacagcaacccca

SEQ ID NO: 284020 - RNA, 17 nt, Human adenovirus B (HAdV-B)
uagccaugaugcuucca

SEQ ID NO: 284021 - RNA, 21 nt, Human adenovirus B (HAdV-B)
uagccccccagguggacauga

SEQ ID NO: 284022 - RNA, 14 nt, Human adenovirus B (HAdV-B)
uaggaauucuugcg

SEQ ID NO: 284023 - RNA, 20 nt, Human adenovirus B (HAdV-B)
uaggacccccaaucacuuca

SEQ ID NO: 284024 - RNA, 19 nt, Human adenovirus B (HAdV-B)
uaggagcauuugcuuccua

SEQ ID NO: 284025 - RNA, 20 nt, Human adenovirus B (HAdV-B)
uaggcugauugccacagaua

SEQ ID NO: 284026 - RNA, 21 nt, Human adenovirus B (HAdV-B)
uaguacuccaccagaacaccu

SEQ ID NO: 284027 - RNA, 20 nt, Human adenovirus B (HAdV-B)
uagugcuaggaauucuugcg

SEQ ID NO: 284028 - RNA, 15 nt, Human adenovirus B (HAdV-B)
uauaaaaguaguuua

SEQ ID NO: 284029 - RNA, 15 nt, Human adenovirus B (HAdV-B)
uauaaacaagaauuu

SEQ ID NO: 284030 - RNA, 20 nt, Human adenovirus B (HAdV-B)
uauacagccaugguuuccac

SEQ ID NO: 284031 - RNA, 21 nt, Human adenovirus B (HAdV-B)
uauacagccaugguuuccacu

SEQ ID NO: 284032 - RNA, 16 nt, Human adenovirus B (HAdV-B)
uauagaaauuacuugg

SEQ ID NO: 284033 - RNA, 11 nt, Human adenovirus B (HAdV-B)
uauagccagca

SEQ ID NO: 284034 - RNA, 14 nt, Human adenovirus B (HAdV-B)
uauaggagcauuug

SEQ ID NO: 284035 - RNA, 22 nt, Human adenovirus B (HAdV-B)
uauaggcucaaacugcacacua

SEQ ID NO: 284036 - RNA, 11 nt, Human adenovirus B (HAdV-B)
uauaguacucc

SEQ ID NO: 284037 - RNA, 17 nt, Human adenovirus B (HAdV-B)
uauauuggguugcauga

SEQ ID NO: 284038 - RNA, 15 nt, Human adenovirus B (HAdV-B)
uaucaccaaacugcu

SEQ ID NO: 284039 - RNA, 21 nt, Human adenovirus B (HAdV-B)
uaucccucuaggacauaauua

SEQ ID NO: 284040 - RNA, 16 nt, Human adenovirus B (HAdV-B)
uauccgcaagcaauug

SEQ ID NO: 284041 - RNA, 17 nt, Human adenovirus B (HAdV-B)
uauccgcaagcaauugc

SEQ ID NO: 284042 - RNA, 17 nt, Human adenovirus B (HAdV-B)
uaucgcugcugcaauug

SEQ ID NO: 284043 - RNA, 18 nt, Human adenovirus B (HAdV-B)
uaucgcugcugcaauugg

SEQ ID NO: 284044 - RNA, 12 nt, Human adenovirus B (HAdV-B)
uaucggccauca

SEQ ID NO: 284045 - RNA, 16 nt, Human adenovirus B (HAdV-B)
uaucggccaucaugga

SEQ ID NO: 284046 - RNA, 17 nt, Human adenovirus B (HAdV-B)
uaugagaagaugcaugc

SEQ ID NO: 284047 - RNA, 22 nt, Human adenovirus B (HAdV-B)
uaugcggccuaagagaccugcu

SEQ ID NO: 284048 - RNA, 23 nt, Human adenovirus B (HAdV-B)
uaugcuaccguggaugauuuccu

SEQ ID NO: 284049 - RNA, 22 nt, Human adenovirus B (HAdV-B)
uauggacggccgcgucucagaa

SEQ ID NO: 284050 - RNA, 19 nt, Human adenovirus B (HAdV-B)
uauguagguuggauagcau

SEQ ID NO: 284051 - RNA, 19 nt, Human adenovirus B (HAdV-B)
uaugucuauguugugccac

SEQ ID NO: 284052 - RNA, 12 nt, Human adenovirus B (HAdV-B)
uauucacuggaa

SEQ ID NO: 284053 - RNA, 18 nt, Human adenovirus B (HAdV-B)
uauucuguuaaaugggaa

SEQ ID NO: 284054 - RNA, 20 nt, Human adenovirus B (HAdV-B)
uauucuuugcuaccuauaca

SEQ ID NO: 284055 - RNA, 14 nt, Human adenovirus B (HAdV-B)
uauugaacauccau

SEQ ID NO: 284056 - RNA, 14 nt, Human adenovirus B (HAdV-B)
uauugcaggagaaa

SEQ ID NO: 284057 - RNA, 20 nt, Human adenovirus B (HAdV-B)
uauugcuugugcgcuugccu

SEQ ID NO: 284058 - RNA, 13 nt, Human adenovirus B (HAdV-B)
uauugcuuuuugg

SEQ ID NO: 284059 - RNA, 20 nt, Human adenovirus B (HAdV-B)
uauuugaaaaucaauucaca

SEQ ID NO: 284060 - RNA, 15 nt, Human adenovirus B (HAdV-B)
ucaaacugcacacua

SEQ ID NO: 284061 - RNA, 23 nt, Human adenovirus B (HAdV-B)
ucaaauuuuagcuccucuccugu

SEQ ID NO: 284062 - RNA, 16 nt, Human adenovirus B (HAdV-B)
ucaaccccagcugccu

SEQ ID NO: 284063 - RNA, 23 nt, Human adenovirus B (HAdV-B)
ucaaccccauaguuaucacccag

SEQ ID NO: 284064 - RNA, 13 nt, Human adenovirus B (HAdV-B)
ucaacgacuacac

SEQ ID NO: 284065 - RNA, 18 nt, Human adenovirus B (HAdV-B)
ucaacgcugaccuaugcu

SEQ ID NO: 284066 - RNA, 17 nt, Human adenovirus B (HAdV-B)
ucaagugauucacgguc

SEQ ID NO: 284067 - RNA, 19 nt, Human adenovirus B (HAdV-B)
ucaauauagaaauuacuug

SEQ ID NO: 284068 - RNA, 14 nt, Human adenovirus B (HAdV-B)
ucaauggcuugcag

SEQ ID NO: 284069 - RNA, 14 nt, Human adenovirus B (HAdV-B)
ucaauugauguugc

SEQ ID NO: 284070 - RNA, 15 nt, Human adenovirus B (HAdV-B)
ucaauugauguugcc

SEQ ID NO: 284071 - RNA, 22 nt, Human adenovirus B (HAdV-B)
ucaauugcucagaaauuugcua

SEQ ID NO: 284072 - RNA, 16 nt, Human adenovirus B (HAdV-B)
ucaauuggagcaguau

SEQ ID NO: 284073 - RNA, 19 nt, Human adenovirus B (HAdV-B)
ucacaccucacuguaacua

SEQ ID NO: 284074 - RNA, 19 nt, Human adenovirus B (HAdV-B)
ucaccuuuccuacucacaa

SEQ ID NO: 284075 - RNA, 16 nt, Human adenovirus B (HAdV-B)
ucacuacaagaacuuc

SEQ ID NO: 284076 - RNA, 20 nt, Human adenovirus B (HAdV-B)
ucacugaccccagauuggcu

SEQ ID NO: 284077 - RNA, 18 nt, Human adenovirus B (HAdV-B)
ucagagaugucauccaaa

SEQ ID NO: 284078 - RNA, 17 nt, Human adenovirus B (HAdV-B)
ucagagccauuguccaa

SEQ ID NO: 284079 - RNA, 17 nt, Human adenovirus B (HAdV-B)
ucagcaggguucacuuc

SEQ ID NO: 284080 - RNA, 18 nt, Human adenovirus B (HAdV-B)
ucaggacaaguuacuugu

SEQ ID NO: 284081 - RNA, 23 nt, Human adenovirus B (HAdV-B)
ucaggcagaguuucuuguaaaaa

SEQ ID NO: 284082 - RNA, 13 nt, Human adenovirus B (HAdV-B)
ucagguucacuuu

SEQ ID NO: 284083 - RNA, 16 nt, Human adenovirus B (HAdV-B)
ucagguucacuuuaaa

SEQ ID NO: 284084 - RNA, 17 nt, Human adenovirus B (HAdV-B)
ucaguacgauaccacca

SEQ ID NO: 284085 - RNA, 19 nt, Human adenovirus B (HAdV-B)
ucaguacgauaccaccagg

SEQ ID NO: 284086 - RNA, 18 nt, Human adenovirus B (HAdV-B)
ugaagaugaaagcaccuc

SEQ ID NO: 284087 - RNA, 19 nt, Human adenovirus B (HAdV-B)
ugaagaugaaagcaccucc

SEQ ID NO: 284088 - RNA, 19 nt, Human adenovirus B (HAdV-B)
ugaagcucuuaauuugggc

SEQ ID NO: 284089 - RNA, 16 nt, Human adenovirus B (HAdV-B)
ugaauuaagacucucc

SEQ ID NO: 284090 - RNA, 17 nt, Human adenovirus B (HAdV-B)
ugacaaagugggcauaa

SEQ ID NO: 284091 - RNA, 24 nt, Human adenovirus B (HAdV-B)
ugacacuccugguccugugacuau

SEQ ID NO: 284092 - RNA, 18 nt, Human adenovirus B (HAdV-B)
ugacagauacaguaguca

SEQ ID NO: 284093 - RNA, 14 nt, Human adenovirus B (HAdV-B)
ugacagauauguca

SEQ ID NO: 284094 - RNA, 15 nt, Human adenovirus B (HAdV-B)
ugacagcaaaugaca

SEQ ID NO: 284095 - RNA, 18 nt, Human adenovirus B (HAdV-B)
ugacagcaaaugacaaag

SEQ ID NO: 284096 - RNA, 16 nt, Human adenovirus B (HAdV-B)
ugaccacgguggugca

SEQ ID NO: 284097 - RNA, 17 nt, Human adenovirus B (HAdV-B)
ugacgucuuguaucuga

SEQ ID NO: 284098 - RNA, 17 nt, Human adenovirus B (HAdV-B)
ugacuccuucaacccug

SEQ ID NO: 284099 - RNA, 18 nt, Human adenovirus B (HAdV-B)
ugacuucugcucgcucac

SEQ ID NO: 284100 - RNA, 14 nt, Human adenovirus B (HAdV-B)
ugacuuuaccccua

SEQ ID NO: 284101 - RNA, 17 nt, Human adenovirus B (HAdV-B)
ugagaauggcaacauca

SEQ ID NO: 284102 - RNA, 18 nt, Human adenovirus B (HAdV-B)
ugagaauggcaacaucaa

SEQ ID NO: 284103 - RNA, 21 nt, Human adenovirus B (HAdV-B)
ugaggugguaauagauacuca

SEQ ID NO: 284104 - RNA, 18 nt, Human adenovirus B (HAdV-B)
uuucagagcgagccaauc

SEQ ID NO: 284105 - RNA, 16 nt, Human adenovirus B (HAdV-B)
uuucauccuuggcucc

SEQ ID NO: 284106 - RNA, 21 nt, Human adenovirus B (HAdV-B)
uuuccuacucacaaacuagaa

SEQ ID NO: 284107 - RNA, 18 nt, Human adenovirus B (HAdV-B)
uuucucccagcagcaccu

SEQ ID NO: 284108 - RNA, 20 nt, Human adenovirus B (HAdV-B)
uuugaaaaucaauucacaaa

SEQ ID NO: 284109 - RNA, 15 nt, Human adenovirus B (HAdV-B)
uuugaagcucuuaau

SEQ ID NO: 284110 - RNA, 16 nt, Human adenovirus C
aggcaaauguuuuuau

SEQ ID NO: 284111 - RNA, 19 nt, Human adenovirus C
aggcccuugguguaagugu

SEQ ID NO: 284112 - RNA, 22 nt, Human adenovirus C
agggcagaaaccugcuggcgca

SEQ ID NO: 284113 - RNA, 14 nt, Human adenovirus C
aggggaagugcagg

SEQ ID NO: 284114 - RNA, 23 nt, Human adenovirus C
aggggaagugcaggcagcccucu

SEQ ID NO: 284115 - RNA, 15 nt, Human adenovirus C
agguacggugaucaa

SEQ ID NO: 284116 - RNA, 15 nt, Human adenovirus C
agguaucaccuggac

SEQ ID NO: 284117 - RNA, 14 nt, Human adenovirus C
aggugcugagguac

SEQ ID NO: 284118 - RNA, 15 nt, Human adenovirus C
agguggcugaacugu

SEQ ID NO: 284119 - RNA, 17 nt, Human adenovirus C
agguguaaaccugugau

SEQ ID NO: 284120 - RNA, 16 nt, Human adenovirus C
agguguuauauuccac

SEQ ID NO: 284121 - RNA, 21 nt, Human adenovirus C
aguagaagaccaccagccaaa

SEQ ID NO: 284122 - RNA, 15 nt, Human adenovirus C
agucgcagcugcuca

SEQ ID NO: 284123 - RNA, 17 nt, Human adenovirus C
agucgcagcugcucagg

SEQ ID NO: 284124 - RNA, 15 nt, Human adenovirus C
agucugcagaauuaa

SEQ ID NO: 284125 - RNA, 19 nt, Human adenovirus C
agugagcaggaacugaaag

SEQ ID NO: 284126 - RNA, 15 nt, Human adenovirus C
aguggagaggcagag

SEQ ID NO: 284127 - RNA, 17 nt, Human adenovirus C
aguggccccccugcuca

SEQ ID NO: 284128 - RNA, 19 nt, Human adenovirus C
aguggccccccugcucagg

SEQ ID NO: 284129 - RNA, 21 nt, Human adenovirus C
aguggccccccugcucaggga

SEQ ID NO: 284130 - RNA, 21 nt, Human adenovirus C
aguguacaaauaaaaacauuu

SEQ ID NO: 284131 - RNA, 20 nt, Human adenovirus C
aguucagaugacuaacucag

SEQ ID NO: 284132 - RNA, 23 nt, Human adenovirus C
aguucccgggucaaagaauccaa

SEQ ID NO: 284133 - RNA, 12 nt, Human adenovirus C
aguuuaccugcu

SEQ ID NO: 284134 - RNA, 21 nt, Human adenovirus C
auaaacacguugaaacauaac

SEQ ID NO: 284135 - RNA, 14 nt, Human adenovirus C
auaaccuuaauccc

SEQ ID NO: 284136 - RNA, 12 nt, Human adenovirus C
auaagagugcag

SEQ ID NO: 284137 - RNA, 13 nt, Human adenovirus C
auaagagugcaga

SEQ ID NO: 284138 - RNA, 20 nt, Human adenovirus C
auaagaucucuaauaccaca

SEQ ID NO: 284139 - RNA, 19 nt, Human adenovirus C
auaaggugggggucucaug

SEQ ID NO: 284140 - RNA, 22 nt, Human adenovirus C
auaaucacccgagaguguacaa

SEQ ID NO: 284141 - RNA, 12 nt, Human adenovirus C
auaauugcgcua

SEQ ID NO: 284142 - RNA, 23 nt, Human adenovirus C
auaauugcgcuaaugagcuugau

SEQ ID NO: 284143 - RNA, 11 nt, Human adenovirus C
auacacagggu

SEQ ID NO: 284144 - RNA, 22 nt, Human adenovirus C
auacacaggguugcagcacugg

SEQ ID NO: 284145 - RNA, 16 nt, Human adenovirus C
auaggggaagugcagg

SEQ ID NO: 284146 - RNA, 19 nt, Human adenovirus C
auauaaggugggggucuca

SEQ ID NO: 284147 - RNA, 16 nt, Human adenovirus C
aucaacaacagcugcc

SEQ ID NO: 284148 - RNA, 16 nt, Human adenovirus C
auccaauugugccaaa

SEQ ID NO: 284149 - RNA, 21 nt, Human adenovirus C
auccaauugugccaaaagagc

SEQ ID NO: 284150 - RNA, 21 nt, Human adenovirus C
auccacagcggcggcagcagc

SEQ ID NO: 284151 - RNA, 15 nt, Human adenovirus C
aucccaccuuucaca

SEQ ID NO: 284152 - RNA, 22 nt, Human adenovirus C
auccguuacucugaguuggcac

SEQ ID NO: 284153 - RNA, 23 nt, Human adenovirus C
aucgacgccgccaccaaccagcc

SEQ ID NO: 284154 - RNA, 15 nt, Human adenovirus C
aucgcccagcaauaa

SEQ ID NO: 284155 - RNA, 23 nt, Human adenovirus C
aucgccccgcagguagacaugau

SEQ ID NO: 284156 - RNA, 19 nt, Human adenovirus C
aucuaacuuuuagcuuaau

SEQ ID NO: 284157 - RNA, 22 nt, Human adenovirus C
aucucuaauaccacacaugguu

SEQ ID NO: 284158 - RNA, 16 nt, Human adenovirus C
aucugcagccucguca

SEQ ID NO: 284159 - RNA, 20 nt, Human adenovirus C
aucuucauauuguugcagau

SEQ ID NO: 284160 - RNA, 18 nt, Human adenovirus C
augaccggcucaaccauc

SEQ ID NO: 284161 - RNA, 14 nt, Human adenovirus C
augacuugcaagag

SEQ ID NO: 284162 - RNA, 20 nt, Human adenovirus C
augaguugauguaaguuuaa

SEQ ID NO: 284163 - RNA, 20 nt, Human adenovirus C
augauuuugaggaggcuauu

SEQ ID NO: 284164 - RNA, 18 nt, Human adenovirus C
augcaaagguggcacuua

SEQ ID NO: 284165 - RNA, 14 nt, Human adenovirus C
augcaagucaggga

SEQ ID NO: 284166 - RNA, 20 nt, Human adenovirus C
augcaagucagggacaugcu

SEQ ID NO: 284167 - RNA, 16 nt, Human adenovirus C
augcagcgcgcggcga

SEQ ID NO: 284168 - RNA, 18 nt, Human adenovirus C
augcgagguaaaccugca

SEQ ID NO: 284169 - RNA, 18 nt, Human adenovirus C
augcggccucuugcaagu

SEQ ID NO: 284170 - RNA, 18 nt, Human adenovirus C
augcuggagcccaucaca

SEQ ID NO: 284171 - RNA, 14 nt, Human adenovirus C
augcuugcgcuuaa

SEQ ID NO: 284172 - RNA, 14 nt, Human adenovirus C
auggaagacaucaa

SEQ ID NO: 284173 - RNA, 15 nt, Human adenovirus C
auggaagcauuguga

SEQ ID NO: 284174 - RNA, 14 nt, Human adenovirus C
auggccuuugccug

SEQ ID NO: 284175 - RNA, 17 nt, Human adenovirus C
augggcuccagcauuga

SEQ ID NO: 284176 - RNA, 12 nt, Human adenovirus C
auguaaguuuaa

SEQ ID NO: 284177 - RNA, 21 nt, Human adenovirus C
auguaucgaggacuugcuuaa

SEQ ID NO: 284178 - RNA, 14 nt, Human adenovirus C
auguaugcguccau

SEQ ID NO: 284179 - RNA, 20 nt, Human adenovirus C
auguccaaggugaaccugaa

SEQ ID NO: 284180 - RNA, 14 nt, Human adenovirus C
augucgcuguccag

SEQ ID NO: 284181 - RNA, 15 nt, Human adenovirus C
augugaugggcucca

SEQ ID NO: 284182 - RNA, 19 nt, Human adenovirus C
auguggcuuauuuguugcc

SEQ ID NO: 284183 - RNA, 15 nt, Human adenovirus C
auguuuguuugccuu

SEQ ID NO: 284184 - RNA, 19 nt, Human adenovirus C
auuauacccacaaccuuca

SEQ ID NO: 284185 - RNA, 16 nt, Human adenovirus C
auucagcaucaccucc

SEQ ID NO: 284186 - RNA, 14 nt, Human adenovirus C
auucaguucauuga

SEQ ID NO: 284187 - RNA, 14 nt, Human adenovirus C
auuccucauguucu

SEQ ID NO: 284188 - RNA, 22 nt, Human adenovirus C
auucuuagguguuauauuccac

SEQ ID NO: 284189 - RNA, 21 nt, Human adenovirus C
auugcagaaaauuucaaguca

SEQ ID NO: 284190 - RNA, 18 nt, Human adenovirus C
auugcaucccaccuuuca

SEQ ID NO: 284191 - RNA, 15 nt, Human adenovirus C
auugcguaccucagg

SEQ ID NO: 284192 - RNA, 20 nt, Human adenovirus C
auuuauguuuuaaaccgcau

SEQ ID NO: 284193 - RNA, 20 nt, Human adenovirus C
auuuccugcagauucacuca

SEQ ID NO: 284194 - RNA, 20 nt, Human adenovirus C
auuugacaacgcgcaugccc

SEQ ID NO: 284195 - RNA, 13 nt, Human adenovirus C
auuuggucaggga

SEQ ID NO: 284196 - RNA, 14 nt, Human adenovirus C
auuuguugccuaaa

SEQ ID NO: 284197 - RNA, 17 nt, Human adenovirus C
caaaacaaugacuacag

SEQ ID NO: 284198 - RNA, 13 nt, Human adenovirus C
caaaagacauauu

SEQ ID NO: 284199 - RNA, 23 nt, Human adenovirus C
caaaagagccgucaacuugucau

SEQ ID NO: 284200 - RNA, 16 nt, Human adenovirus C
caaaauccaaacagag

SEQ ID NO: 284201 - RNA, 13 nt, Human adenovirus C
caaagcccaagaa

SEQ ID NO: 284202 - RNA, 12 nt, Human adenovirus C
caaagucaguca

SEQ ID NO: 284203 - RNA, 21 nt, Human adenovirus C
caaagucagucacaaucccgc

SEQ ID NO: 284204 - RNA, 15 nt, Human adenovirus C
caacacccagugcgc

SEQ ID NO: 284205 - RNA, 21 nt, Human adenovirus C
caacagcugcugagaaacgac

SEQ ID NO: 284206 - RNA, 22 nt, Human adenovirus C
caacgcgcaugcccccaugggc

SEQ ID NO: 284207 - RNA, 19 nt, Human adenovirus C
caacuugucaucgcgggcg

SEQ ID NO: 284208 - RNA, 21 nt, Human adenovirus C
caagacgcaacggacccggcg

SEQ ID NO: 284209 - RNA, 14 nt, Human adenovirus C
caagacuacucaac

SEQ ID NO: 284210 - RNA, 13 nt, Human adenovirus C
caagacucugaca

SEQ ID NO: 284211 - RNA, 17 nt, Human adenovirus C
caagacucugacaaagc

SEQ ID NO: 284212 - RNA, 17 nt, Human adenovirus C
caagacugugggggcaa

SEQ ID NO: 284213 - RNA, 15 nt, Human adenovirus C
caagagcaacaacag

SEQ ID NO: 284214 - RNA, 16 nt, Human adenovirus C
caagagcaacaacagc

SEQ ID NO: 284215 - RNA, 19 nt, Human adenovirus C
caagcgcguguaugaugag

SEQ ID NO: 284216 - RNA, 21 nt, Human adenovirus C
caagcgggcucaggaaagcaa

SEQ ID NO: 284217 - RNA, 13 nt, Human adenovirus C
caagggugggggg

SEQ ID NO: 284218 - RNA, 12 nt, Human adenovirus C
caagucagggac

SEQ ID NO: 284219 - RNA, 19 nt, Human adenovirus C
caagucagggacaugcuua

SEQ ID NO: 284220 - RNA, 15 nt, Human adenovirus C
caagucauuuuucau

SEQ ID NO: 284221 - RNA, 19 nt, Human adenovirus C
caagucauuuuucauucag

SEQ ID NO: 284222 - RNA, 14 nt, Human adenovirus C
caaguugcaugugg

SEQ ID NO: 284223 - RNA, 16 nt, Human adenovirus C
caaguugcauguggaa

SEQ ID NO: 284224 - RNA, 21 nt, Human adenovirus C
caauacagagacaggacuaua

SEQ ID NO: 284225 - RNA, 23 nt, Human adenovirus C
caauugcagaaaauuucaaguca

SEQ ID NO: 284226 - RNA, 23 nt, Human adenovirus C
cacagcggcggcagcagcaggag

SEQ ID NO: 284227 - RNA, 21 nt, Human adenovirus C
cacaggguugcagcacuggaa

SEQ ID NO: 284228 - RNA, 22 nt, Human adenovirus C
aggaaauucccacgcccuacau

SEQ ID NO: 284229 - RNA, 12 nt, Human adenovirus C
aggaaccugcuu

SEQ ID NO: 284230 - RNA, 14 nt, Human adenovirus C
aggaagaaugcacc

SEQ ID NO: 284231 - RNA, 16 nt, Human adenovirus C
aggaaucuaacuuuua

SEQ ID NO: 284232 - RNA, 22 nt, Human adenovirus C
aggacuauagcugaucuucuca

SEQ ID NO: 284233 - RNA, 20 nt, Human adenovirus C
ccccuccauuuguuucaccc

SEQ ID NO: 284234 - RNA, 16 nt, Human adenovirus C
cccgcgggauugugac

SEQ ID NO: 284235 - RNA, 18 nt, Human adenovirus C
cccgggucaaagaaucca

SEQ ID NO: 284236 - RNA, 15 nt, Human adenovirus C
cccucccaacacaca

SEQ ID NO: 284237 - RNA, 18 nt, Human adenovirus C
cccuccuuauuccacuga

SEQ ID NO: 284238 - RNA, 13 nt, Human adenovirus C
cccugcucaggga

SEQ ID NO: 284239 - RNA, 17 nt, Human adenovirus C
cccuggggcgcgcacaa

SEQ ID NO: 284240 - RNA, 16 nt, Human adenovirus C
ccgacaucaccugugu

SEQ ID NO: 284241 - RNA, 18 nt, Human adenovirus C
ccgaccauggagcacuuu

SEQ ID NO: 284242 - RNA, 15 nt, Human adenovirus C
ccgcagguagacaug

SEQ ID NO: 284243 - RNA, 15 nt, Human adenovirus C
ccgcaguggucuuac

SEQ ID NO: 284244 - RNA, 21 nt, Human adenovirus C
ccgccacaagugcuuugcccg

SEQ ID NO: 284245 - RNA, 16 nt, Human adenovirus C
ccgccaccaaccagcc

SEQ ID NO: 284246 - RNA, 15 nt, Human adenovirus C
ccgcgcggcgggcgg

SEQ ID NO: 284247 - RNA, 12 nt, Human adenovirus C
ccgcgcucaaaa

SEQ ID NO: 284248 - RNA, 19 nt, Human adenovirus C
ccgcgcugguccgugcaga

SEQ ID NO: 284249 - RNA, 21 nt, Human adenovirus C
ccgcuucagccgcugcagcca

SEQ ID NO: 284250 - RNA, 22 nt, Human adenovirus C
ccgcuugcaagcagugcagcuu

SEQ ID NO: 284251 - RNA, 12 nt, Human adenovirus C
ccggaauugcau

SEQ ID NO: 284252 - RNA, 16 nt, Human adenovirus C
ccggccuuaacuccac

SEQ ID NO: 284253 - RNA, 20 nt, Human adenovirus C
ccggcgcgcgcaaaccccac

SEQ ID NO: 284254 - RNA, 23 nt, Human adenovirus C
ccggugaguuuuguuacuuugaa

SEQ ID NO: 284255 - RNA, 19 nt, Human adenovirus C
ccgucugaagacaccuuca

SEQ ID NO: 284256 - RNA, 16 nt, Human adenovirus C
ccguuagcccaagagc

SEQ ID NO: 284257 - RNA, 20 nt, Human adenovirus C
ccucagcgccucccaaaaga

SEQ ID NO: 284258 - RNA, 21 nt, Human adenovirus C
gagagaguggauauacuacaa

SEQ ID NO: 284259 - RNA, 14 nt, Human adenovirus C
gagaguguacaaau

SEQ ID NO: 284260 - RNA, 13 nt, Human adenovirus C
gagcaacaacagc

SEQ ID NO: 284261 - RNA, 12 nt, Human adenovirus C
gagcagccagac

SEQ ID NO: 284262 - RNA, 17 nt, Human adenovirus C
gagcauguccaagguga

SEQ ID NO: 284263 - RNA, 18 nt, Human adenovirus C
gagccagccguccggccu

SEQ ID NO: 284264 - RNA, 13 nt, Human adenovirus C
gagccccggccac

SEQ ID NO: 284265 - RNA, 19 nt, Human adenovirus C
gagcccgagagcaugucca

SEQ ID NO: 284266 - RNA, 22 nt, Human adenovirus C
gagcgcugggcguggugccuaa

SEQ ID NO: 284267 - RNA, 21 nt, Human adenovirus C
gagcguuuggcucgacaggaa

SEQ ID NO: 284268 - RNA, 16 nt, Human adenovirus C
gagcucauauuugaca

SEQ ID NO: 284269 - RNA, 16 nt, Human adenovirus C
gagcuguaaacgcccc

SEQ ID NO: 284270 - RNA, 19 nt, Human adenovirus C
gaggaugggcaggggcuaa

SEQ ID NO: 284271 - RNA, 15 nt, Human adenovirus C
gagguaaaccugcag

SEQ ID NO: 284272 - RNA, 17 nt, Human adenovirus C
gagguuucuguggggcu

SEQ ID NO: 284273 - RNA, 16 nt, Human adenovirus C
gaguaugcgugucaua

SEQ ID NO: 284274 - RNA, 22 nt, Human adenovirus C
gauaccucuuuuacacuggugu

SEQ ID NO: 284275 - RNA, 16 nt, Human adenovirus C
gauagcaagacucuga

SEQ ID NO: 284276 - RNA, 12 nt, Human adenovirus C
gauagcugugac

SEQ ID NO: 284277 - RNA, 17 nt, Human adenovirus C
gauaggggaagugcagg

SEQ ID NO: 284278 - RNA, 16 nt, Human adenovirus C
gauaugagaugcaucu

SEQ ID NO: 284279 - RNA, 12 nt, Human adenovirus C
gauaugcuccag

SEQ ID NO: 284280 - RNA, 13 nt, Human adenovirus C
gaucaaaauccaa

SEQ ID NO: 284281 - RNA, 14 nt, Human adenovirus C
gaucaaaauccaaa

SEQ ID NO: 284282 - RNA, 15 nt, Human adenovirus C
gaucaauauaagcua

SEQ ID NO: 284283 - RNA, 22 nt, Human adenovirus C
gaucaauauaagcuauguggug

SEQ ID NO: 284284 - RNA, 20 nt, Human adenovirus C
gaucacggcggacggccgga

SEQ ID NO: 284285 - RNA, 19 nt, Human adenovirus C
gauccaacagcugcugaga

SEQ ID NO: 284286 - RNA, 22 nt, Human adenovirus C
gaucuggaaggugcugagguac

SEQ ID NO: 284287 - RNA, 17 nt, Human adenovirus C
gaucuucucagaauucu

SEQ ID NO: 284288 - RNA, 20 nt, Human adenovirus C
gaugacggcagcugcagcuc

SEQ ID NO: 284289 - RNA, 12 nt, Human adenovirus C
gaugaugaugaa

SEQ ID NO: 284290 - RNA, 23 nt, Human adenovirus C
gaugcaaaauaaaaaacucacca

SEQ ID NO: 284291 - RNA, 19 nt, Human adenovirus C
gaugcaucuaaaagcggug

SEQ ID NO: 284292 - RNA, 20 nt, Human adenovirus C
gaugcaucuaaaagcgguga

SEQ ID NO: 284293 - RNA, 20 nt, Human adenovirus C
gauggaagcauugugagcuc

SEQ ID NO: 284294 - RNA, 13 nt, Human adenovirus C
gaugugcuugcuu

SEQ ID NO: 284295 - RNA, 16 nt, Human adenovirus C
gauuaagguacgguga

SEQ ID NO: 284296 - RNA, 22 nt, Human adenovirus C
gauuacaagccccgaaagcuaa

SEQ ID NO: 284297 - RNA, 20 nt, Human adenovirus C
gauuauacccacaaccuuca

SEQ ID NO: 284298 - RNA, 19 nt, Human adenovirus C
gauucuuugaaucuggguc

SEQ ID NO: 284299 - RNA, 21 nt, Human adenovirus C
gauuuuuugcgcccuaccugu

SEQ ID NO: 284300 - RNA, 22 nt, Human adenovirus C
gcaaacuuguaaauaucaggaa

SEQ ID NO: 284301 - RNA, 12 nt, Human adenovirus C
gcaacaacagcg

SEQ ID NO: 284302 - RNA, 18 nt, Human adenovirus C
gcaacggacccggcggug

SEQ ID NO: 284303 - RNA, 14 nt, Human adenovirus C
gcaagcagugcagc

SEQ ID NO: 284304 - RNA, 18 nt, Human adenovirus C
gcaagugucuugcugucu

SEQ ID NO: 284305 - RNA, 21 nt, Human adenovirus C
gcaagugucuugcugucuuua

SEQ ID NO: 284306 - RNA, 14 nt, Human adenovirus C
gcacaaacgcggcc

SEQ ID NO: 284307 - RNA, 14 nt, Human adenovirus C
gcacaaccauccgc

SEQ ID NO: 284308 - RNA, 17 nt, Human adenovirus C
gcaccggcggcagcggc

SEQ ID NO: 284309 - RNA, 17 nt, Human adenovirus C
gcagaaguauuccauag

SEQ ID NO: 284310 - RNA, 14 nt, Human adenovirus C
gcagaccugcacga

SEQ ID NO: 284311 - RNA, 13 nt, Human adenovirus C
gcagcaacagcag

SEQ ID NO: 284312 - RNA, 15 nt, Human adenovirus C
gcagccgcaggccaa

SEQ ID NO: 284313 - RNA, 14 nt, Human adenovirus C
gcagccuguggcuc

SEQ ID NO: 284314 - RNA, 22 nt, Human adenovirus C
gcagcggucacacagaagcaaa

SEQ ID NO: 284315 - RNA, 12 nt, Human adenovirus C
gcagcugcucag

SEQ ID NO: 284316 - RNA, 22 nt, Human adenovirus C
gcaggaacugaaagccauuguc

SEQ ID NO: 284317 - RNA, 13 nt, Human adenovirus C
gcaggagcuggug

SEQ ID NO: 284318 - RNA, 21 nt, Human adenovirus C
gcaguggucuuacaugcacau

SEQ ID NO: 284319 - RNA, 19 nt, Human adenovirus C
gcaucccugaacuaccaga

SEQ ID NO: 284320 - RNA, 22 nt, Human adenovirus C
gcaucgcuaugcgccacuggca

SEQ ID NO: 284321 - RNA, 15 nt, Human adenovirus C
gcauuacuaccguca

SEQ ID NO: 284322 - RNA, 15 nt, Human adenovirus C
gccaaggcuaccgcu

SEQ ID NO: 284323 - RNA, 18 nt, Human adenovirus C
gccaccguuuuuacccac

SEQ ID NO: 284324 - RNA, 22 nt, Human adenovirus C
gccagagcgucccgaccaugga

SEQ ID NO: 284325 - RNA, 14 nt, Human adenovirus C
gccagcacgcucuu

SEQ ID NO: 284326 - RNA, 12 nt, Human adenovirus C
gccauagucaau

SEQ ID NO: 284327 - RNA, 19 nt, Human adenovirus C
gccauuaugagcaaggaaa

SEQ ID NO: 284328 - RNA, 20 nt, Human adenovirus C
gccauucagaccguggugcg

SEQ ID NO: 284329 - RNA, 20 nt, Human adenovirus C
gccauugacgcgguggugga

SEQ ID NO: 284330 - RNA, 15 nt, Human adenovirus C
gcccaagacuacuca

SEQ ID NO: 284331 - RNA, 18 nt, Human adenovirus C
gcccacaacggacuaucg

SEQ ID NO: 284332 - RNA, 16 nt, Human adenovirus C
gcccacgccgccacca

SEQ ID NO: 284333 - RNA, 23 nt, Human adenovirus C
gcccaggcggcggguacagugga

SEQ ID NO: 284334 - RNA, 19 nt, Human adenovirus C
gccccaccaccacauagcu

SEQ ID NO: 284335 - RNA, 17 nt, Human adenovirus C
gccccccugcucaggga

SEQ ID NO: 284336 - RNA, 20 nt, Human adenovirus C
gccccgggcuggugcaguuu

SEQ ID NO: 284337 - RNA, 15 nt, Human adenovirus C
gccccuggaaaucag

SEQ ID NO: 284338 - RNA, 22 nt, Human adenovirus C
gcccgucucugggguggaggua

SEQ ID NO: 284339 - RNA, 20 nt, Human adenovirus C
gcccugacccggcuaugcga

SEQ ID NO: 284340 - RNA, 20 nt, Human adenovirus C
gcccuugguguaaguguuua

SEQ ID NO: 284341 - RNA, 24 nt, Human adenovirus C
gccgaaguucagaugacuaacuca

SEQ ID NO: 284342 - RNA, 18 nt, Human adenovirus C
gccgacccggcacugccg

SEQ ID NO: 284343 - RNA, 18 nt, Human adenovirus C
gccgccaccaaccagccc

SEQ ID NO: 284344 - RNA, 15 nt, Human adenovirus C
gccgccaccaguguc

SEQ ID NO: 284345 - RNA, 14 nt, Human adenovirus C
gccgccgacccggc

SEQ ID NO: 284346 - RNA, 14 nt, Human adenovirus C
gccgcgggagcucc

SEQ ID NO: 284347 - RNA, 15 nt, Human adenovirus C
gccgcggucgcucac

SEQ ID NO: 284348 - RNA, 13 nt, Human adenovirus C
gccguccggccuu

SEQ ID NO: 284349 - RNA, 18 nt, Human adenovirus C
gccguuagcccaagagca

SEQ ID NO: 284350 - RNA, 18 nt, Human adenovirus C
gccuaaaaaugucuuuca

SEQ ID NO: 284351 - RNA, 15 nt, Human adenovirus C
gccucccaaaagaca

SEQ ID NO: 284352 - RNA, 15 nt, Human adenovirus C
gcgaacgcgacgacg

SEQ ID NO: 284353 - RNA, 16 nt, Human adenovirus C
gcgaggcuuugccuga

SEQ ID NO: 284354 - RNA, 17 nt, Human adenovirus C
gcgaguggcgcuccagg

SEQ ID NO: 284355 - RNA, 17 nt, Human adenovirus C
gcgaguugcgauacaca

SEQ ID NO: 284356 - RNA, 20 nt, Human adenovirus C
gcgcacgccucaccggccag

SEQ ID NO: 284357 - RNA, 16 nt, Human adenovirus C
gcgcagaaguauucca

SEQ ID NO: 284358 - RNA, 16 nt, Human adenovirus C
gcgcagagacacugau

SEQ ID NO: 284359 - RNA, 19 nt, Human adenovirus C
gcgcaugaaggaguuuaca

SEQ ID NO: 284360 - RNA, 17 nt, Human adenovirus C
gcgcauuuggucaggga

SEQ ID NO: 284361 - RNA, 18 nt, Human adenovirus C
gcgcauuuggucagggaa

SEQ ID NO: 284362 - RNA, 16 nt, Human adenovirus C
gcgccauagucaauac

SEQ ID NO: 284363 - RNA, 12 nt, Human adenovirus C
gcgccgcgggga

SEQ ID NO: 284364 - RNA, 17 nt, Human adenovirus C
gcgcgggcacaagaacg

SEQ ID NO: 284365 - RNA, 15 nt, Human adenovirus C
gcggcagcggcagca

SEQ ID NO: 284366 - RNA, 15 nt, Human adenovirus C
gcggcgggcgguggg

SEQ ID NO: 284367 - RNA, 13 nt, Human adenovirus C
gcgggcacaagaa

SEQ ID NO: 284368 - RNA, 20 nt, Human adenovirus C
gcgggcuagguccaggugau

SEQ ID NO: 284369 - RNA, 14 nt, Human adenovirus C
gcggucacacagaa

SEQ ID NO: 284370 - RNA, 16 nt, Human adenovirus C
gcggucacacagaagc

SEQ ID NO: 284371 - RNA, 20 nt, Human adenovirus C
gcuaggaaucuaacuuuuag

SEQ ID NO: 284372 - RNA, 16 nt, Human adenovirus C
ggcuuauuuguugccu

SEQ ID NO: 284373 - RNA, 20 nt, Human adenovirus C
ggcuuccacguacuuugaca

SEQ ID NO: 284374 - RNA, 15 nt, Human adenovirus C
gggaccccacaugau

SEQ ID NO: 284375 - RNA, 21 nt, Human adenovirus C
gggcagcucgcuuaaguucau

SEQ ID NO: 284376 - RNA, 14 nt, Human adenovirus C
gggcgguggcugca

SEQ ID NO: 284377 - RNA, 13 nt, Human adenovirus C
ggggcuaaagggg

SEQ ID NO: 284378 - RNA, 22 nt, Human adenovirus C
ggggcuucugaggcuacagagg

SEQ ID NO: 284379 - RNA, 15 nt, Human adenovirus C
ggguugugauccaug

SEQ ID NO: 284380 - RNA, 23 nt, Human adenovirus C
gguaggcccgggaccagcggucu

SEQ ID NO: 284381 - RNA, 16 nt, Human adenovirus C
ggucaaacgcucaaaa

SEQ ID NO: 284382 - RNA, 17 nt, Human adenovirus C
ggugaaguuuucacucc

SEQ ID NO: 284383 - RNA, 19 nt, Human adenovirus C
gguggcacuuaggccagau

SEQ ID NO: 284384 - RNA, 14 nt, Human adenovirus C
gguggugcacgcug

SEQ ID NO: 284385 - RNA, 17 nt, Human adenovirus C
gguguaaaccugugauu

SEQ ID NO: 284386 - RNA, 21 nt, Human adenovirus C
gguuaagcugggaugggugca

SEQ ID NO: 284387 - RNA, 12 nt, Human adenovirus C
gguucuugcaga

SEQ ID NO: 284388 - RNA, 23 nt, Human adenovirus C
guaaaccugcaggagcucccgcc

SEQ ID NO: 284389 - RNA, 20 nt, Human adenovirus C
guaagucgcagcugcucagg

SEQ ID NO: 284390 - RNA, 10 nt, Human adenovirus C
guacacucuc

SEQ ID NO: 284391 - RNA, 15 nt, Human adenovirus C
guacuaggagacacu

SEQ ID NO: 284392 - RNA, 18 nt, Human adenovirus C
guagaagaccaccagcca

SEQ ID NO: 284393 - RNA, 21 nt, Human adenovirus C
guagaagaccaccagccaaac

SEQ ID NO: 284394 - RNA, 15 nt, Human adenovirus C
guagauugcauccca

SEQ ID NO: 284395 - RNA, 21 nt, Human adenovirus C
guagguuaaccaugucuucaa

SEQ ID NO: 284396 - RNA, 14 nt, Human adenovirus C
guauauaaugcgcc

SEQ ID NO: 284397 - RNA, 15 nt, Human adenovirus C
guauuccccuggaca

SEQ ID NO: 284398 - RNA, 17 nt, Human adenovirus C
gucaucgccuucauuca

SEQ ID NO: 284399 - RNA, 17 nt, Human adenovirus C
gucaucuccagcggcca

SEQ ID NO: 284400 - RNA, 21 nt, Human adenovirus C
gucauuuuuguuuugcugauu

SEQ ID NO: 284401 - RNA, 20 nt, Human adenovirus C
guccacaguggacgcggcca

SEQ ID NO: 284402 - RNA, 24 nt, Human adenovirus C
gucccuccgcacccacuaucuuca

SEQ ID NO: 284403 - RNA, 21 nt, Human adenovirus C
gucucacgcucgcuugguccu

SEQ ID NO: 284404 - RNA, 23 nt, Human adenovirus C
gucucacgcucgcuugguccugu

SEQ ID NO: 284405 - RNA, 16 nt, Human adenovirus C
gugaccgaggagcuga

SEQ ID NO: 284406 - RNA, 13 nt, Human adenovirus C
gugaugcuggaug

SEQ ID NO: 284407 - RNA, 14 nt, Human adenovirus C
gugcauacgugggg

SEQ ID NO: 284408 - RNA, 15 nt, Human adenovirus C
gugcccuuucuuacc

SEQ ID NO: 284409 - RNA, 18 nt, Human adenovirus C
gugcgcauugcguaccuc

SEQ ID NO: 284410 - RNA, 15 nt, Human adenovirus C
gugcguaacuugcug

SEQ ID NO: 284411 - RNA, 22 nt, Human adenovirus C
gugcugcgcgcggagguugcug

SEQ ID NO: 284412 - RNA, 21 nt, Human adenovirus C
guggccccccugcucagggau

SEQ ID NO: 284413 - RNA, 13 nt, Human adenovirus C
gugggaauuugaa

SEQ ID NO: 284414 - RNA, 22 nt, Human adenovirus C
gugggcgucgccaggcugugga

SEQ ID NO: 284415 - RNA, 18 nt, Human adenovirus C
gugggggcaacaucuccu

SEQ ID NO: 284416 - RNA, 19 nt, Human adenovirus C
gugguaaaggugacucugg

SEQ ID NO: 284417 - RNA, 14 nt, Human adenovirus C
gugguacuucccag

SEQ ID NO: 284418 - RNA, 16 nt, Human adenovirus C
guguguuacuuuucag

SEQ ID NO: 284419 - RNA, 15 nt, Human adenovirus C
guguuaaauggggcg

SEQ ID NO: 284420 - RNA, 13 nt, Human adenovirus C
guguuaauuccau

SEQ ID NO: 284421 - RNA, 19 nt, Human adenovirus C
guguuauauuccacacggu

SEQ ID NO: 284422 - RNA, 18 nt, Human adenovirus C
guguuuauguuaguugaa

SEQ ID NO: 284423 - RNA, 14 nt, Human adenovirus C
guuaagcugggaug

SEQ ID NO: 284424 - RNA, 12 nt, Human adenovirus C
guuauauuccac

SEQ ID NO: 284425 - RNA, 14 nt, Human adenovirus C
guucagaugacuaa

SEQ ID NO: 284426 - RNA, 17 nt, Human adenovirus C
guucagaugacuaacuc

SEQ ID NO: 284427 - RNA, 20 nt, Human adenovirus C
guucauugacuggguuugug

SEQ ID NO: 284428 - RNA, 20 nt, Human adenovirus C
guugcauguggaaaaaucaa

SEQ ID NO: 284429 - RNA, 22 nt, Human adenovirus C
guugcgauacacaggguugcag

SEQ ID NO: 284430 - RNA, 16 nt, Human adenovirus C
guugcgauacuggugu

SEQ ID NO: 284431 - RNA, 16 nt, Human adenovirus C
guuuaauaaaggguga

SEQ ID NO: 284432 - RNA, 20 nt, Human adenovirus C
guuuaauaaagggugagaua

SEQ ID NO: 284433 - RNA, 21 nt, Human adenovirus C
guuuaauaaagggugagauaa

SEQ ID NO: 284434 - RNA, 19 nt, Human adenovirus C
guuugauggaagcauugug

SEQ ID NO: 284435 - RNA, 20 nt, Human adenovirus C
guuugauuaagguacgguga

SEQ ID NO: 284436 - RNA, 15 nt, Human adenovirus C
guuugauucuuugaa

SEQ ID NO: 284437 - RNA, 22 nt, Human adenovirus C
guuuuguaucuguuuugcagca

SEQ ID NO: 284438 - RNA, 17 nt, Human adenovirus C
uaaaaagcaucauauca

SEQ ID NO: 284439 - RNA, 21 nt, Human adenovirus C
uaaacacguugaaacauaaca

SEQ ID NO: 284440 - RNA, 13 nt, Human adenovirus C
uaaaccugugauu

SEQ ID NO: 284441 - RNA, 12 nt, Human adenovirus C
uaaacuacauga

SEQ ID NO: 284442 - RNA, 23 nt, Human adenovirus C
ucaggaaagcaaagucagucaca

SEQ ID NO: 284443 - RNA, 24 nt, Human adenovirus C
ucaggaaagcaaagucagucacaa

SEQ ID NO: 284444 - RNA, 16 nt, Human adenovirus C
ucaguagcaagcugau

SEQ ID NO: 284445 - RNA, 23 nt, Human adenovirus C
ucaguguggguucuuuugucaug

SEQ ID NO: 284446 - RNA, 22 nt, Human adenovirus C
ucaucgccuuauguuggaagac

SEQ ID NO: 284447 - RNA, 14 nt, Human adenovirus C
ucaugccuuuguca

SEQ ID NO: 284448 - RNA, 18 nt, Human adenovirus C
uccaaaguuuaaauggga

SEQ ID NO: 284449 - RNA, 13 nt, Human adenovirus C
uccaacagcugcu

SEQ ID NO: 284450 - RNA, 20 nt, Human adenovirus C
uccaacuugcgguugcucaa

SEQ ID NO: 284451 - RNA, 22 nt, Human adenovirus C
uccacaggcugcgcaccaucac

SEQ ID NO: 284452 - RNA, 15 nt, Human adenovirus C
uccagcuuauucagc

SEQ ID NO: 284453 - RNA, 22 nt, Human adenovirus C
uccaggacgugguaaaggugac

SEQ ID NO: 284454 - RNA, 14 nt, Human adenovirus C
ucccaaaccucagc

SEQ ID NO: 284455 - RNA, 14 nt, Human adenovirus C
ucccaacacacaga

SEQ ID NO: 284456 - RNA, 14 nt, Human adenovirus C
ucccaccacugugg

SEQ ID NO: 284457 - RNA, 22 nt, Human adenovirus C
ucccacggcaugcuugcgcuua

SEQ ID NO: 284458 - RNA, 17 nt, Human adenovirus C
uccccggcuggccuuaa

SEQ ID NO: 284459 - RNA, 20 nt, Human adenovirus C
uccccgggcagcucgcuuaa

SEQ ID NO: 284460 - RNA, 16 nt, Human adenovirus C
uccccucgagcagcca

SEQ ID NO: 284461 - RNA, 19 nt, Human adenovirus C
uccccuggacaauuuacuc

SEQ ID NO: 284462 - RNA, 13 nt, Human adenovirus C
ucccgaccaugga

SEQ ID NO: 284463 - RNA, 19 nt, Human adenovirus C
uccgaguaugcgugucaua

SEQ ID NO: 284464 - RNA, 13 nt, Human adenovirus C
uccuaacccugga

SEQ ID NO: 284465 - RNA, 16 nt, Human adenovirus C
uccucccgugugugac

SEQ ID NO: 284466 - RNA, 18 nt, Human adenovirus C
uccugaguguguuacuuu

SEQ ID NO: 284467 - RNA, 23 nt, Human adenovirus C
uccugcauuacuaccgucaucuc

SEQ ID NO: 284468 - RNA, 23 nt, Human adenovirus C
uccuucuaacacaccuccugaga

SEQ ID NO: 284469 - RNA, 19 nt, Human adenovirus C
uccuugcaagaacugcuau

SEQ ID NO: 284470 - RNA, 22 nt, Human adenovirus C
ucgaacaggcggcuauuaccac

SEQ ID NO: 284471 - RNA, 22 nt, Human adenovirus C
ucgacgccgccaccaaccagcc

SEQ ID NO: 284472 - RNA, 13 nt, Human adenovirus C
ucgagcagccaga

SEQ ID NO: 284473 - RNA, 18 nt, Human adenovirus C
ucgcagaacgaaugugua

SEQ ID NO: 284474 - RNA, 13 nt, Human adenovirus C
ucgcagcugcuca

SEQ ID NO: 284475 - RNA, 14 nt, Human adenovirus C
ucgcccagcaauaa

SEQ ID NO: 284476 - RNA, 17 nt, Human adenovirus C
ucgcuuaaguucauguc

SEQ ID NO: 284477 - RNA, 23 nt, Human adenovirus C
ucguuugauggaagcauugugag

SEQ ID NO: 284478 - RNA, 22 nt, Human adenovirus C
ucuaacacaccuccugagauac

SEQ ID NO: 284479 - RNA, 16 nt, Human adenovirus C
ucuaacuuuuagcuua

SEQ ID NO: 284480 - RNA, 22 nt, Human adenovirus C
ucuaccaucacggcguggccuu

SEQ ID NO: 284481 - RNA, 14 nt, Human adenovirus C
ucuccacacaagcu

SEQ ID NO: 284482 - RNA, 16 nt, Human adenovirus C
ucuccccuaccccgga

SEQ ID NO: 284483 - RNA, 18 nt, Human adenovirus C
ucugacaaagcccaagaa

SEQ ID NO: 284484 - RNA, 19 nt, Human adenovirus C
ucugaccucauggaggcuu

SEQ ID NO: 284485 - RNA, 23 nt, Human adenovirus C
ucugaggcuacagaggaggcuag

SEQ ID NO: 284486 - RNA, 19 nt, Human adenovirus C
ucugcggugguggauguua

SEQ ID NO: 284487 - RNA, 20 nt, Human adenovirus C
ucugcugugcguaacuugcu

SEQ ID NO: 284488 - RNA, 15 nt, Human adenovirus C
ucuggaaggugcuga

SEQ ID NO: 284489 - RNA, 21 nt, Human adenovirus C
ucuggcgcauuuggucaggga

SEQ ID NO: 284490 - RNA, 14 nt, Human adenovirus C
ucugguaucucagc

SEQ ID NO: 284491 - RNA, 14 nt, Human adenovirus C
ucuguuuugcagca

SEQ ID NO: 284492 - RNA, 13 nt, Human adenovirus C
ucuuacaugcaca

SEQ ID NO: 284493 - RNA, 17 nt, Human adenovirus C
ucuugguuuuggagguu

SEQ ID NO: 284494 - RNA, 11 nt, Human adenovirus C
ucuuuguccag

SEQ ID NO: 284495 - RNA, 15 nt, Human adenovirus C
ugaaaaaugacuuga

SEQ ID NO: 284496 - RNA, 16 nt, Human adenovirus C
ugaaaaaugacuugaa

SEQ ID NO: 284497 - RNA, 14 nt, Human adenovirus C
ugaagaucuggaag

SEQ ID NO: 284498 - RNA, 15 nt, Human adenovirus C
ugaaggaguuuacau

SEQ ID NO: 284499 - RNA, 23 nt, Human adenovirus C
ugaccacacaaaagauaccucuu

SEQ ID NO: 284500 - RNA, 15 nt, Human adenovirus C
ugaccggcucaacca

SEQ ID NO: 284501 - RNA, 17 nt, Human adenovirus C
ugaccgugguuugcaac

SEQ ID NO: 284502 - RNA, 20 nt, Human adenovirus C
ugaccgugguuugcaacugu

SEQ ID NO: 284503 - RNA, 10 nt, Human adenovirus C
ugacuacagc

SEQ ID NO: 284504 - RNA, 20 nt, Human adenovirus C
ugacugggcgagcuuggaca

SEQ ID NO: 284505 - RNA, 18 nt, Human adenovirus C
ugagcagcaccuugcauu

SEQ ID NO: 284506 - RNA, 22 nt, Human adenovirus C
ugagcagcaccuugcauuuuau

SEQ ID NO: 284507 - RNA, 20 nt, Human adenovirus C
ugagcccgagagcaugucca

SEQ ID NO: 284508 - RNA, 19 nt, Human adenovirus C
ugggcuaaucuugguuaca

SEQ ID NO: 284509 - RNA, 12 nt, Human adenovirus C
ugggcucgcgcg

SEQ ID NO: 284510 - RNA, 16 nt, Human adenovirus C
ugggggcaacaucucc

SEQ ID NO: 284511 - RNA, 11 nt, Human adenovirus C
uggucagggaa

SEQ ID NO: 284512 - RNA, 19 nt, Human adenovirus C
uggucagggaaaacaugca

SEQ ID NO: 284513 - RNA, 14 nt, Human adenovirus C
uggucccgcugugc

SEQ ID NO: 284514 - RNA, 23 nt, Human adenovirus C
ugguuccggaacuuaccugccuu

SEQ ID NO: 284515 - RNA, 17 nt, Human adenovirus C
ugguugugggccauauu

SEQ ID NO: 284516 - RNA, 22 nt, Human adenovirus C
uguacacucucgggugauuauu

SEQ ID NO: 284517 - RNA, 14 nt, Human adenovirus C
uguauccauaugac

SEQ ID NO: 284518 - RNA, 16 nt, Human adenovirus C
uguauuccccuggaca

SEQ ID NO: 284519 - RNA, 12 nt, Human adenovirus C
ugucaaugacug

SEQ ID NO: 284520 - RNA, 17 nt, Human adenovirus C
ugucacccuuauccuca

SEQ ID NO: 284521 - RNA, 14 nt, Human adenovirus C
ugugcgcauugcgu

SEQ ID NO: 284522 - RNA, 20 nt, Human adenovirus C
uguggaguuaccagccacaa

SEQ ID NO: 284523 - RNA, 23 nt, Human adenovirus C
ugugugcgcauugcguaccucag

SEQ ID NO: 284524 - RNA, 15 nt, Human adenovirus C
uguguuacuuuucag

SEQ ID NO: 284525 - RNA, 22 nt, Human adenovirus C
uguguuacuuuucagcagauua

SEQ ID NO: 284526 - RNA, 14 nt, Human adenovirus C
uguuauauuccaca

SEQ ID NO: 284527 - RNA, 22 nt, Human adenovirus C
uguuguagaugauccagucgua

SEQ ID NO: 284528 - RNA, 14 nt, Human adenovirus C
uguuuaacuugcau

SEQ ID NO: 284529 - RNA, 15 nt, Human adenovirus C
uguuugacaugacca

SEQ ID NO: 284530 - RNA, 22 nt, Human adenovirus C
uuaaacucaggcacaaccaucc

SEQ ID NO: 284531 - RNA, 11 nt, Human adenovirus C
uuaaaggguau

SEQ ID NO: 284532 - RNA, 21 nt, Human adenovirus C
uuaacuugcauggcguguuaa

SEQ ID NO: 284533 - RNA, 21 nt, Human adenovirus C
uuaagcugggaugggugcaua

SEQ ID NO: 284534 - RNA, 22 nt, Human adenovirus C
uuaagcugggaugggugcauac

SEQ ID NO: 284535 - RNA, 23 nt, Human adenovirus C
uuacauguuuuucaagugacaaa

SEQ ID NO: 284536 - RNA, 12 nt, Human adenovirus C
uuaccaccacac

SEQ ID NO: 284537 - RNA, 15 nt, Human adenovirus C
uuacccacccaaagc

SEQ ID NO: 284538 - RNA, 21 nt, Human adenovirus C
uuaccccuccauuuguuucac

SEQ ID NO: 284539 - RNA, 23 nt, Human adenovirus C
uuacuuaaaaucagucagcaaau

SEQ ID NO: 284540 - RNA, 14 nt, Human adenovirus C
uuacuuuucagcag

SEQ ID NO: 284541 - RNA, 14 nt, Human adenovirus C
uuagcccaagagca

SEQ ID NO: 284542 - RNA, 20 nt, Human adenovirus C
uuaggccagauugcaaguac

SEQ ID NO: 284543 - RNA, 13 nt, Human adenovirus C
uuagucugcagaa

SEQ ID NO: 284544 - RNA, 13 nt, Human adenovirus C
uuauauugaucac

SEQ ID NO: 284545 - RNA, 16 nt, Human adenovirus C
uucaguagcaagcuga

SEQ ID NO: 284546 - RNA, 16 nt, Human adenovirus C
uucaugccuuugucaa

SEQ ID NO: 284547 - RNA, 19 nt, Human adenovirus C
uucaugucgcuguccagcu

SEQ ID NO: 284548 - RNA, 14 nt, Human adenovirus C
uucauucaguucau

SEQ ID NO: 284549 - RNA, 21 nt, Human adenovirus C
uuccagaacugagacgcauuu

SEQ ID NO: 284550 - RNA, 22 nt, Human adenovirus C
uuccaggacgugguaaagguga

SEQ ID NO: 284551 - RNA, 20 nt, Human adenovirus C
uucccacgcccuacaugugg

SEQ ID NO: 284552 - RNA, 22 nt, Human adenovirus C
uucccgggucaaagaauccaau

SEQ ID NO: 284553 - RNA, 17 nt, Human adenovirus C
uuccucauguucuuguc

SEQ ID NO: 284554 - RNA, 18 nt, Human adenovirus C
uuccugcagauucacuca

SEQ ID NO: 284555 - RNA, 22 nt, Human adenovirus C
uucuaacacaccuccugagaua

SEQ ID NO: 284556 - RNA, 15 nt, Human adenovirus C
uucucccaccauaag

SEQ ID NO: 284557 - RNA, 23 nt, Human adenovirus C
uucugccagcgccugcacugcaa

SEQ ID NO: 284558 - RNA, 21 nt, Human adenovirus C
uucuucccccgaccgcuguau

SEQ ID NO: 284559 - RNA, 18 nt, Human adenovirus C
uugaaacauaacaugcaa

SEQ ID NO: 284560 - RNA, 20 nt, Human adenovirus C
uugaaauuuucugcaauuga

SEQ ID NO: 284561 - RNA, 14 nt, Human adenovirus C
uugacaugaccaug

SEQ ID NO: 284562 - RNA, 20 nt, Human adenovirus C
uugacgcugcgguucauccc

SEQ ID NO: 284563 - RNA, 13 nt, Human adenovirus C
uugaggaggcuau

SEQ ID NO: 284564 - RNA, 19 nt, Human adenovirus C
uugccuuuauugaaagugu

SEQ ID NO: 284565 - RNA, 17 nt, Human adenovirus C
uugcgcuuaaaaugggc

SEQ ID NO: 284566 - RNA, 16 nt, Human adenovirus C
uugcgugugugguuaa

SEQ ID NO: 284567 - RNA, 19 nt, Human adenovirus C
uugcuggaacagagcucua

SEQ ID NO: 284568 - RNA, 12 nt, Human adenovirus C
uuggucagggaa

SEQ ID NO: 284569 - RNA, 20 nt, Human adenovirus C
uuguacagguggcugaacug

SEQ ID NO: 284570 - RNA, 12 nt, Human adenovirus C
gcuacagaggag

SEQ ID NO: 284571 - RNA, 19 nt, Human adenovirus C
gcuaccggacuaacaucug

SEQ ID NO: 284572 - RNA, 21 nt, Human adenovirus C
gcucaaccaucgcgcccacaa

SEQ ID NO: 284573 - RNA, 22 nt, Human adenovirus C
gcucaaccaucgcgcccacaac

SEQ ID NO: 284574 - RNA, 15 nt, Human adenovirus C
gcucaggaaagcaaa

SEQ ID NO: 284575 - RNA, 15 nt, Human adenovirus C
gcuccagaccaugga

SEQ ID NO: 284576 - RNA, 20 nt, Human adenovirus C
gcucccaccacugugguacu

SEQ ID NO: 284577 - RNA, 19 nt, Human adenovirus C
gcuccugucgccauccugu

SEQ ID NO: 284578 - RNA, 22 nt, Human adenovirus C
gcucguggcgcgggcacaagaa

SEQ ID NO: 284579 - RNA, 18 nt, Human adenovirus C
gcucguuacaacagcggc

SEQ ID NO: 284580 - RNA, 15 nt, Human adenovirus C
gcugaacuguuucca

SEQ ID NO: 284581 - RNA, 22 nt, Human adenovirus C
gcugaguauaauaaauacagaa

SEQ ID NO: 284582 - RNA, 12 nt, Human adenovirus C
gcugcucaggaa

SEQ ID NO: 284583 - RNA, 18 nt, Human adenovirus C
gcuggacagcgacaugaa

SEQ ID NO: 284584 - RNA, 15 nt, Human adenovirus C
gcuggagcccaucac

SEQ ID NO: 284585 - RNA, 13 nt, Human adenovirus C
gcuggaugugacc

SEQ ID NO: 284586 - RNA, 15 nt, Human adenovirus C
gcugggcguggugcc

SEQ ID NO: 284587 - RNA, 16 nt, Human adenovirus C
gcugguccgugcagac

SEQ ID NO: 284588 - RNA, 20 nt, Human adenovirus C
gcuguaccuggggacuguua

SEQ ID NO: 284589 - RNA, 15 nt, Human adenovirus C
gcuguagagcuguuc

SEQ ID NO: 284590 - RNA, 12 nt, Human adenovirus C
gcuuaaagggua

SEQ ID NO: 284591 - RNA, 13 nt, Human adenovirus C
gcuuucuucccag

SEQ ID NO: 284592 - RNA, 22 nt, Human adenovirus C
ggaaaccguguggaauauaaca

SEQ ID NO: 284593 - RNA, 15 nt, Human adenovirus C
ggaaccugcuuucuu

SEQ ID NO: 284594 - RNA, 16 nt, Human adenovirus C
ggaagcauugugagcu

SEQ ID NO: 284595 - RNA, 17 nt, Human adenovirus C
ggaaggugcugagguac

SEQ ID NO: 284596 - RNA, 14 nt, Human adenovirus C
ggaauaagaucucu

SEQ ID NO: 284597 - RNA, 16 nt, Human adenovirus C
ggacuaacaucugccc

SEQ ID NO: 284598 - RNA, 14 nt, Human adenovirus C
ggagaaacagcauc

SEQ ID NO: 284599 - RNA, 22 nt, Human adenovirus C
ggagaaaggacuguguacucug

SEQ ID NO: 284600 - RNA, 13 nt, Human adenovirus C
ggagacugcagcc

SEQ ID NO: 284601 - RNA, 22 nt, Human adenovirus C
ggagcuggugcugcgcgcggag

SEQ ID NO: 284602 - RNA, 19 nt, Human adenovirus C
ggaggcuaggaaucuaacu

SEQ ID NO: 284603 - RNA, 14 nt, Human adenovirus C
ggaggcugcagucu

SEQ ID NO: 284604 - RNA, 13 nt, Human adenovirus C
ggaguuaccagcc

SEQ ID NO: 284605 - RNA, 21 nt, Human adenovirus C
ggaugaacgggaagcugcacu

SEQ ID NO: 284606 - RNA, 21 nt, Human adenovirus C
ggauuuugaucaagcaagugu

SEQ ID NO: 284607 - RNA, 22 nt, Human adenovirus C
ggcacuuaggccagauugcaag

SEQ ID NO: 284608 - RNA, 19 nt, Human adenovirus C
ggcagcaacagcagcgguc

SEQ ID NO: 284609 - RNA, 17 nt, Human adenovirus C
ggcagcugcagcucucu

SEQ ID NO: 284610 - RNA, 18 nt, Human adenovirus C
ggcauaagcccgucucug

SEQ ID NO: 284611 - RNA, 18 nt, Human adenovirus C
ggcaucccugaacuacca

SEQ ID NO: 284612 - RNA, 13 nt, Human adenovirus C
ggccacggccuga

SEQ ID NO: 284613 - RNA, 21 nt, Human adenovirus C
ggcccgaugaggccggccugg

SEQ ID NO: 284614 - RNA, 21 nt, Human adenovirus C
ggccugacgggcggcaugcgu

SEQ ID NO: 284615 - RNA, 15 nt, Human adenovirus C
ggcgaggggcucaaa

SEQ ID NO: 284616 - RNA, 13 nt, Human adenovirus C
ggcgcuccuaauc

SEQ ID NO: 284617 - RNA, 22 nt, Human adenovirus C
ggcggaugaacgggaagcugca

SEQ ID NO: 284618 - RNA, 15 nt, Human adenovirus C
ggcgggcccccggag

SEQ ID NO: 284619 - RNA, 18 nt, Human adenovirus C
ggcggugcgggcggcgcu

SEQ ID NO: 284620 - RNA, 18 nt, Human adenovirus C
ggcgguugaucuccugaa

SEQ ID NO: 284621 - RNA, 21 nt, Human adenovirus C
ggcuauuaggguauaugcaaa

SEQ ID NO: 284622 - RNA, 22 nt, Human adenovirus C
ggcuauuaggguauaugcaaag

SEQ ID NO: 284623 - RNA, 13 nt, Human adenovirus C
ggcucaaccaucg

SEQ ID NO: 284624 - RNA, 19 nt, Human adenovirus C
ggcugcgguaagucgcagc

SEQ ID NO: 284625 - RNA, 12 nt, Human adenovirus C
gggaagugcagg

SEQ ID NO: 284626 - RNA, 19 nt, Human adenovirus C
gggaugacggcagcugcag

SEQ ID NO: 284627 - RNA, 20 nt, Human adenovirus C
gggaugacggcagcugcagc

SEQ ID NO: 284628 - RNA, 13 nt, Human adenovirus C
ggggaagugcagg

SEQ ID NO: 284629 - RNA, 22 nt, Human adenovirus C
ggggaggaagccuucagggcag

SEQ ID NO: 284630 - RNA, 22 nt, Human adenovirus C
gggggaugugcgcgaggccgug

SEQ ID NO: 284631 - RNA, 12 nt, Human adenovirus C
ggguguuugaca

SEQ ID NO: 284632 - RNA, 12 nt, Human adenovirus C
gguaaacauauu

SEQ ID NO: 284633 - RNA, 20 nt, Human adenovirus C
gguaagucgcagcugcucag

SEQ ID NO: 284634 - RNA, 19 nt, Human adenovirus C
gguaucaccuggaccuagc

SEQ ID NO: 284635 - RNA, 14 nt, Human adenovirus C
ggucaaggacaagc

SEQ ID NO: 284636 - RNA, 16 nt, Human adenovirus C
ggucaaggacaagcag

SEQ ID NO: 284637 - RNA, 17 nt, Human adenovirus C
ggucccagcguuugacg

SEQ ID NO: 284638 - RNA, 20 nt, Human adenovirus C
ggugacucuggauguucaga

SEQ ID NO: 284639 - RNA, 19 nt, Human adenovirus C
ggugcagacccugcgagug

SEQ ID NO: 284640 - RNA, 19 nt, Human adenovirus C
ggugcaguuugcccgcgcc

SEQ ID NO: 284641 - RNA, 16 nt, Human adenovirus C
aaagaaagaugaugau

SEQ ID NO: 284642 - RNA, 22 nt, Human adenovirus C
aaagaagagaugcuccagguca

SEQ ID NO: 284643 - RNA, 22 nt, Human adenovirus C
aaagacauauuuccugcagauu

SEQ ID NO: 284644 - RNA, 16 nt, Human adenovirus C
aaagcaaagucaguca

SEQ ID NO: 284645 - RNA, 18 nt, Human adenovirus C
aaagcaaagucagucaca

SEQ ID NO: 284646 - RNA, 17 nt, Human adenovirus C
aaagcgggucaaaaaga

SEQ ID NO: 284647 - RNA, 22 nt, Human adenovirus C
aaaggacuguguacucugugug

SEQ ID NO: 284648 - RNA, 13 nt, Human adenovirus C
aaagggugagaua

SEQ ID NO: 284649 - RNA, 20 nt, Human adenovirus C
aaaggugacucuggauguuc

SEQ ID NO: 284650 - RNA, 13 nt, Human adenovirus C
aaagucagucaca

SEQ ID NO: 284651 - RNA, 15 nt, Human adenovirus C
aaagucccgcuccca

SEQ ID NO: 284652 - RNA, 20 nt, Human adenovirus C
aaauaucaggaauuguugcu

SEQ ID NO: 284653 - RNA, 15 nt, Human adenovirus C
aaauaugacuacguc

SEQ ID NO: 284654 - RNA, 16 nt, Human adenovirus C
aaauaugacuacgucc

SEQ ID NO: 284655 - RNA, 13 nt, Human adenovirus C
aaaucaaaggggu

SEQ ID NO: 284656 - RNA, 24 nt, Human adenovirus C
aaauucccacgcccuacaugugga

SEQ ID NO: 284657 - RNA, 23 nt, Human adenovirus C
aaauuuaccccaaguucaugccu

SEQ ID NO: 284658 - RNA, 20 nt, Human adenovirus C
aacagcugcugagaaacgac

SEQ ID NO: 284659 - RNA, 16 nt, Human adenovirus C
aacauaacaugcaaca

SEQ ID NO: 284660 - RNA, 16 nt, Human adenovirus C
aacaucaacaacagcu

SEQ ID NO: 284661 - RNA, 23 nt, Human adenovirus C
aaccagacucuguuuggauuuug

SEQ ID NO: 284662 - RNA, 18 nt, Human adenovirus C
aaccagccugugaugcug

SEQ ID NO: 284663 - RNA, 23 nt, Human adenovirus C
aaccaucgcgcccacaacggacu

SEQ ID NO: 284664 - RNA, 19 nt, Human adenovirus C
aacccagcuucagcuugcc

SEQ ID NO: 284665 - RNA, 15 nt, Human adenovirus C
aacccuaguauucaa

SEQ ID NO: 284666 - RNA, 23 nt, Human adenovirus C
aacccuaguauucaaccugccac

SEQ ID NO: 284667 - RNA, 23 nt, Human adenovirus C
aaccugaacgggguguuugacau

SEQ ID NO: 284668 - RNA, 20 nt, Human adenovirus C
aaccugcuggcgcagaucca

SEQ ID NO: 284669 - RNA, 15 nt, Human adenovirus C
aaccuggaccggcug

SEQ ID NO: 284670 - RNA, 23 nt, Human adenovirus C
aacgaaguggccccccugcucag

SEQ ID NO: 284671 - RNA, 13 nt, Human adenovirus C
aacgcucaaaagc

SEQ ID NO: 284672 - RNA, 22 nt, Human adenovirus C
aacucacagaacccuaguauuc

SEQ ID NO: 284673 - RNA, 12 nt, Human adenovirus C
aacucguuugau

SEQ ID NO: 284674 - RNA, 13 nt, Human adenovirus C
aacugaaagccau

SEQ ID NO: 284675 - RNA, 16 nt, Human adenovirus C
aacuguuuccagaacu

SEQ ID NO: 284676 - RNA, 23 nt, Human adenovirus C
aacuugcuggaacagagcucuaa

SEQ ID NO: 284677 - RNA, 20 nt, Human adenovirus C
aagacacuugcuugaucaaa

SEQ ID NO: 284678 - RNA, 17 nt, Human adenovirus C
aagacauauuuccugca

SEQ ID NO: 284679 - RNA, 11 nt, Human adenovirus C
aagagugcaga

SEQ ID NO: 284680 - RNA, 21 nt, Human adenovirus C
aagaucuugguugugggccau

SEQ ID NO: 284681 - RNA, 13 nt, Human adenovirus C
aagaugaugauga

SEQ ID NO: 284682 - RNA, 15 nt, Human adenovirus C
aagcaagugucuugc

SEQ ID NO: 284683 - RNA, 16 nt, Human adenovirus C
aagcaagugucuugcu

SEQ ID NO: 284684 - RNA, 12 nt, Human adenovirus C
aagcauugugag

SEQ ID NO: 284685 - RNA, 13 nt, Human adenovirus C
aagcauugugagc

SEQ ID NO: 284686 - RNA, 14 nt, Human adenovirus C
aagcauugugagcu

SEQ ID NO: 284687 - RNA, 22 nt, Human adenovirus C
aagccggucuuugugguucuug

SEQ ID NO: 284688 - RNA, 19 nt, Human adenovirus C
aagcgagcugcccggggag

SEQ ID NO: 284689 - RNA, 20 nt, Human adenovirus C
aagcggcggcggaggcugca

SEQ ID NO: 284690 - RNA, 13 nt, Human adenovirus C
aagcugcacugcu

SEQ ID NO: 284691 - RNA, 20 nt, Human adenovirus C
aaggacuguguacucugugu

SEQ ID NO: 284692 - RNA, 15 nt, Human adenovirus C
aaggccagccgggga

SEQ ID NO: 284693 - RNA, 16 nt, Human adenovirus C
aaggccagccggggag

SEQ ID NO: 284694 - RNA, 17 nt, Human adenovirus C
aagucagggacaugcuu

SEQ ID NO: 284695 - RNA, 19 nt, Human adenovirus C
aagucagggacaugcuuaa

SEQ ID NO: 284696 - RNA, 17 nt, Human adenovirus C
aagucagucacaauccc

SEQ ID NO: 284697 - RNA, 16 nt, Human adenovirus C
aagucccgcucccacc

SEQ ID NO: 284698 - RNA, 17 nt, Human adenovirus C
aagucgcagcugcucag

SEQ ID NO: 284699 - RNA, 18 nt, Human adenovirus C
aagucgcagcugcucagg

SEQ ID NO: 284700 - RNA, 19 nt, Human adenovirus C
aaguggccccccugcucag

SEQ ID NO: 284701 - RNA, 23 nt, Human adenovirus C
aaguggccccccugcucagggau

SEQ ID NO: 284702 - RNA, 20 nt, Human adenovirus C
aaguucccgggucaaagaau

SEQ ID NO: 284703 - RNA, 17 nt, Human adenovirus C
aauaaagggugagauaa

SEQ ID NO: 284704 - RNA, 14 nt, Human adenovirus C
aauaagagugcaga

SEQ ID NO: 284705 - RNA, 12 nt, Human adenovirus C
aauaagaucucu

SEQ ID NO: 284706 - RNA, 11 nt, Human adenovirus C
aaucaaagggg

SEQ ID NO: 284707 - RNA, 17 nt, Human adenovirus C
aauccaauugugccaaa

SEQ ID NO: 284708 - RNA, 12 nt, Human adenovirus C
aauccuguggug

SEQ ID NO: 284709 - RNA, 19 nt, Human adenovirus C
aauccuguggugagcuguu

SEQ ID NO: 284710 - RNA, 17 nt, Human adenovirus C
aaucuuuguccagcuua

SEQ ID NO: 284711 - RNA, 19 nt, Human adenovirus C
aaugaaaaaugacuugaaa

SEQ ID NO: 284712 - RNA, 20 nt, Human adenovirus C
aaugcuggagcccaucacau

SEQ ID NO: 284713 - RNA, 23 nt, Human adenovirus C
aauguacuaggagacacuuucaa

SEQ ID NO: 284714 - RNA, 15 nt, Human adenovirus C
aauguuuaacuugca

SEQ ID NO: 284715 - RNA, 22 nt, Human adenovirus C
aauguuuuuauuuguacacucu

SEQ ID NO: 284716 - RNA, 21 nt, Human adenovirus C
aauuaugaaacggagugucau

SEQ ID NO: 284717 - RNA, 22 nt, Human adenovirus C
aauuaugaaacggagugucauu

SEQ ID NO: 284718 - RNA, 12 nt, Human adenovirus C
aauuuaccccaa

SEQ ID NO: 284719 - RNA, 22 nt, Human adenovirus C
acaaagcccaagaaauccacag

SEQ ID NO: 284720 - RNA, 15 nt, Human adenovirus C
acaagauuagcaaac

SEQ ID NO: 284721 - RNA, 20 nt, Human adenovirus C
acaagauuagcaaacuugua

SEQ ID NO: 284722 - RNA, 19 nt, Human adenovirus C
acacaaaagauaccucuuu

SEQ ID NO: 284723 - RNA, 17 nt, Human adenovirus C
acacaccuccugagaua

SEQ ID NO: 284724 - RNA, 19 nt, Human adenovirus C
acacaggguugcagcacug

SEQ ID NO: 284725 - RNA, 13 nt, Human adenovirus C
acaccacugcuac

SEQ ID NO: 284726 - RNA, 18 nt, Human adenovirus C
acacguugaaacauaaca

SEQ ID NO: 284727 - RNA, 23 nt, Human adenovirus C
acacguugaaacauaacaugcaa

SEQ ID NO: 284728 - RNA, 19 nt, Human adenovirus C
acagaaaccgggccuccaa

SEQ ID NO: 284729 - RNA, 18 nt, Human adenovirus C
acagaacccuaguauuca

SEQ ID NO: 284730 - RNA, 18 nt, Human adenovirus C
acagaguacacaguccuu

SEQ ID NO: 284731 - RNA, 14 nt, Human adenovirus C
acagauugagguac

SEQ ID NO: 284732 - RNA, 18 nt, Human adenovirus C
acagauugagguacugaa

SEQ ID NO: 284733 - RNA, 13 nt, Human adenovirus C
acagcgacaugaa

SEQ ID NO: 284734 - RNA, 14 nt, Human adenovirus C
acagcgacaugaac

SEQ ID NO: 284735 - RNA, 16 nt, Human adenovirus C
acaggcugcuguccaa

SEQ ID NO: 284736 - RNA, 20 nt, Human adenovirus C
acaucgaaguagauugcauc

SEQ ID NO: 284737 - RNA, 12 nt, Human adenovirus C
acaucugcccua

SEQ ID NO: 284738 - RNA, 20 nt, Human adenovirus C
acaucuggacuuugggcucg

SEQ ID NO: 284739 - RNA, 19 nt, Human adenovirus C
acaugauuccucgaguucu

SEQ ID NO: 284740 - RNA, 15 nt, Human adenovirus C
acaugcacaucucgg

SEQ ID NO: 284741 - RNA, 16 nt, Human adenovirus C
acaugcuaccucuuug

SEQ ID NO: 284742 - RNA, 17 nt, Human adenovirus C
accaccgccgccggcau

SEQ ID NO: 284743 - RNA, 20 nt, Human adenovirus C
accagaacgaccacagcaac

SEQ ID NO: 284744 - RNA, 18 nt, Human adenovirus C
accagacaccguccugag

SEQ ID NO: 284745 - RNA, 21 nt, Human adenovirus C
accauccgcaauacagagaca

SEQ ID NO: 284746 - RNA, 20 nt, Human adenovirus C
accauccgcggcagcucggu

SEQ ID NO: 284747 - RNA, 19 nt, Human adenovirus C
accauggagcacuuuuugc

SEQ ID NO: 284748 - RNA, 19 nt, Human adenovirus C
acccaaagcgugcaggggc

SEQ ID NO: 284749 - RNA, 20 nt, Human adenovirus C
acccaaugguuuccaagaaa

SEQ ID NO: 284750 - RNA, 15 nt, Human adenovirus C
acccagugcgcgugc

SEQ ID NO: 284751 - RNA, 18 nt, Human adenovirus C
accccuccauuuguuuca

SEQ ID NO: 284752 - RNA, 18 nt, Human adenovirus C
accccuucgaugaugccg

SEQ ID NO: 284753 - RNA, 17 nt, Human adenovirus C
acccgcaccuacaagcg

SEQ ID NO: 284754 - RNA, 22 nt, Human adenovirus C
acccugauaggggaagugcagg

SEQ ID NO: 284755 - RNA, 13 nt, Human adenovirus C
acccuuguugcgc

SEQ ID NO: 284756 - RNA, 20 nt, Human adenovirus C
accgcccgcgggauugugac

SEQ ID NO: 284757 - RNA, 15 nt, Human adenovirus C
guucuuuugucaugg

SEQ ID NO: 284758 - RNA, 17 nt, Human adenovirus C
guugcgauacacagggu

SEQ ID NO: 284759 - RNA, 14 nt, Human adenovirus C
guugcgcuuuucug

SEQ ID NO: 284760 - RNA, 19 nt, Human adenovirus C
guugcuacauuucugggaa

SEQ ID NO: 284761 - RNA, 21 nt, Human adenovirus C
guuuauuaauaucacugauga

SEQ ID NO: 284762 - RNA, 22 nt, Human adenovirus C
guuuauuaauaucacugaugag

SEQ ID NO: 284763 - RNA, 20 nt, Human adenovirus C
guuugacgcugcgguucauc

SEQ ID NO: 284764 - RNA, 17 nt, Human adenovirus C
guuuggcucgacaggaa

SEQ ID NO: 284765 - RNA, 20 nt, Human adenovirus C
guuuugcagcagccgccgcc

SEQ ID NO: 284766 - RNA, 23 nt, Human adenovirus C
guuuuuacccacccaaagcagac

SEQ ID NO: 284767 - RNA, 19 nt, Human adenovirus C
guuuuuauuuguacacucu

SEQ ID NO: 284768 - RNA, 20 nt, Human adenovirus C
guuuuuauuuguacacucuc

SEQ ID NO: 284769 - RNA, 15 nt, Human adenovirus C
uaaaaaacucaccaa

SEQ ID NO: 284770 - RNA, 20 nt, Human adenovirus C
uaaacacguugaaacauaac

SEQ ID NO: 284771 - RNA, 14 nt, Human adenovirus C
uaaagggugagaua

SEQ ID NO: 284772 - RNA, 22 nt, Human adenovirus C
uaaauaucaggaauuguugcua

SEQ ID NO: 284773 - RNA, 20 nt, Human adenovirus C
uaacacaccuccugagauac

SEQ ID NO: 284774 - RNA, 19 nt, Human adenovirus C
uaacaccuaagaauauguc

SEQ ID NO: 284775 - RNA, 15 nt, Human adenovirus C
uaacaucugcccuaa

SEQ ID NO: 284776 - RNA, 22 nt, Human adenovirus C
uaacaucugcccuaaauuuacc

SEQ ID NO: 284777 - RNA, 19 nt, Human adenovirus C
uaacgcuggaaaaguccac

SEQ ID NO: 284778 - RNA, 22 nt, Human adenovirus C
uaacuccccucgagcagccaga

SEQ ID NO: 284779 - RNA, 14 nt, Human adenovirus C
uaagaauaugucug

SEQ ID NO: 284780 - RNA, 12 nt, Human adenovirus C
uaagguguaaac

SEQ ID NO: 284781 - RNA, 21 nt, Human adenovirus C
uaagucgcagcugcucaggaa

SEQ ID NO: 284782 - RNA, 13 nt, Human adenovirus C
uaaguucaugucg

SEQ ID NO: 284783 - RNA, 18 nt, Human adenovirus C
uaaguuuaauaaagggug

SEQ ID NO: 284784 - RNA, 15 nt, Human adenovirus C
uaauaagagugcaga

SEQ ID NO: 284785 - RNA, 18 nt, Human adenovirus C
uaauguacuaggagacac

SEQ ID NO: 284786 - RNA, 22 nt, Human adenovirus C
uaauuaugaaacggagugucau

SEQ ID NO: 284787 - RNA, 15 nt, Human adenovirus C
uacagauugagguac

SEQ ID NO: 284788 - RNA, 18 nt, Human adenovirus C
uacaggcucuccuuuugc

SEQ ID NO: 284789 - RNA, 22 nt, Human adenovirus C
uacaugagcgcgggaccccaca

SEQ ID NO: 284790 - RNA, 21 nt, Human adenovirus C
uacauguuuuucaagugacaa

SEQ ID NO: 284791 - RNA, 16 nt, Human adenovirus C
uaccuccuuuugagac

SEQ ID NO: 284792 - RNA, 13 nt, Human adenovirus C
uaccugccuuuau

SEQ ID NO: 284793 - RNA, 13 nt, Human adenovirus C
uaccugugcuuug

SEQ ID NO: 284794 - RNA, 15 nt, Human adenovirus C
uacucuaugugggau

SEQ ID NO: 284795 - RNA, 22 nt, Human adenovirus C
uacucugaguuggcaccccuau

SEQ ID NO: 284796 - RNA, 15 nt, Human adenovirus C
uacugcaccggcggc

SEQ ID NO: 284797 - RNA, 22 nt, Human adenovirus C
uagaaaccccacgguggcaccu

SEQ ID NO: 284798 - RNA, 17 nt, Human adenovirus C
uagacucguacuguugu

SEQ ID NO: 284799 - RNA, 21 nt, Human adenovirus C
uagagcagcugaccacuuacu

SEQ ID NO: 284800 - RNA, 14 nt, Human adenovirus C
uagaugauccaguc

SEQ ID NO: 284801 - RNA, 15 nt, Human adenovirus C
uagcugaucuucuca

SEQ ID NO: 284802 - RNA, 15 nt, Human adenovirus C
uaggagacacuuuca

SEQ ID NO: 284803 - RNA, 20 nt, Human adenovirus C
uaguacggauagcugugacu

SEQ ID NO: 284804 - RNA, 23 nt, Human adenovirus C
uaguugaauggaauaagaucucu

SEQ ID NO: 284805 - RNA, 16 nt, Human adenovirus C
uauaacaccuaagaau

SEQ ID NO: 284806 - RNA, 15 nt, Human adenovirus C
uauacuacugaauga

SEQ ID NO: 284807 - RNA, 15 nt, Human adenovirus C
uauccucaucugcag

SEQ ID NO: 284808 - RNA, 15 nt, Human adenovirus C
uaucgaggacuugcu

SEQ ID NO: 284809 - RNA, 18 nt, Human adenovirus C
uaucgcaacaccacugcu

SEQ ID NO: 284810 - RNA, 19 nt, Human adenovirus C
uaugacaagcgcuuuccag

SEQ ID NO: 284811 - RNA, 19 nt, Human adenovirus C
uaugcaaagguggcacuua

SEQ ID NO: 284812 - RNA, 18 nt, Human adenovirus C
uauguuuguuugccuuau

SEQ ID NO: 284813 - RNA, 17 nt, Human adenovirus C
uauuaggguauaugcaa

SEQ ID NO: 284814 - RNA, 17 nt, Human adenovirus C
uauuuccugcagauuca

SEQ ID NO: 284815 - RNA, 23 nt, Human adenovirus C
uauuuccugcagauucacucaaa

SEQ ID NO: 284816 - RNA, 12 nt, Human adenovirus C
ucaaaauccaaa

SEQ ID NO: 284817 - RNA, 17 nt, Human adenovirus C
ucaaaauccaaacagag

SEQ ID NO: 284818 - RNA, 22 nt, Human adenovirus C
ucaaacccagcuucagcuugcc

SEQ ID NO: 284819 - RNA, 18 nt, Human adenovirus C
ucaaacgcucaaaagcau

SEQ ID NO: 284820 - RNA, 23 nt, Human adenovirus C
ucaaagaauccaauugugccaaa

SEQ ID NO: 284821 - RNA, 16 nt, Human adenovirus C
ucaaaucaaacuuucc

SEQ ID NO: 284822 - RNA, 20 nt, Human adenovirus C
ucaacccgaauaaacuacau

SEQ ID NO: 284823 - RNA, 19 nt, Human adenovirus C
ucaacguguuuauuuuuca

SEQ ID NO: 284824 - RNA, 16 nt, Human adenovirus C
ucaagcagguuuacca

SEQ ID NO: 284825 - RNA, 15 nt, Human adenovirus C
ucaagucauuuuuca

SEQ ID NO: 284826 - RNA, 21 nt, Human adenovirus C
ucaaugcuggagcccaucaca

SEQ ID NO: 284827 - RNA, 15 nt, Human adenovirus C
ucaccuccuuuccuu

SEQ ID NO: 284828 - RNA, 13 nt, Human adenovirus C
ucaccuggauguc

SEQ ID NO: 284829 - RNA, 17 nt, Human adenovirus C
ucagaugacuaacucag

SEQ ID NO: 284830 - RNA, 14 nt, Human adenovirus C
ucagcaaaucuuug

SEQ ID NO: 284831 - RNA, 19 nt, Human adenovirus C
ucagcgccggguggugcac

SEQ ID NO: 284832 - RNA, 12 nt, Human adenovirus C
ucaggaaccugc

SEQ ID NO: 284833 - RNA, 13 nt, Human adenovirus C
ucagggaaaacau

SEQ ID NO: 284834 - RNA, 15 nt, Human adenovirus C
ucagggaaaacaugc

SEQ ID NO: 284835 - RNA, 14 nt, Human adenovirus C
ucagucacaauccc

SEQ ID NO: 284836 - RNA, 16 nt, Human adenovirus C
ucaucgccuucauuca

SEQ ID NO: 284837 - RNA, 16 nt, Human adenovirus C
ucauggguaacagaca

SEQ ID NO: 284838 - RNA, 13 nt, Human adenovirus C
ucaugucgcuguc

SEQ ID NO: 284839 - RNA, 23 nt, Human adenovirus C
ucauucaaaacaaugacuacagc

SEQ ID NO: 284840 - RNA, 13 nt, Human adenovirus C
ucauucaguucau

SEQ ID NO: 284841 - RNA, 16 nt, Human adenovirus C
uccaacugugcccuuu

SEQ ID NO: 284842 - RNA, 14 nt, Human adenovirus C
uccaagauggcuac

SEQ ID NO: 284843 - RNA, 14 nt, Human adenovirus C
uccaaggacacccc

SEQ ID NO: 284844 - RNA, 19 nt, Human adenovirus C
uccaauugugccaaaagag

SEQ ID NO: 284845 - RNA, 16 nt, Human adenovirus C
uccaccagaccacgga

SEQ ID NO: 284846 - RNA, 14 nt, Human adenovirus C
uccagguacaucua

SEQ ID NO: 284847 - RNA, 23 nt, Human adenovirus C
uccauagagcagcugaccacuua

SEQ ID NO: 284848 - RNA, 19 nt, Human adenovirus C
ucccaacucugguaucuca

SEQ ID NO: 284849 - RNA, 19 nt, Human adenovirus C
uccccucgagcagccagac

SEQ ID NO: 284850 - RNA, 16 nt, Human adenovirus C
ucccgcucccaccacu

SEQ ID NO: 284851 - RNA, 22 nt, Human adenovirus C
uccggcagcagccgcaggccaa

SEQ ID NO: 284852 - RNA, 17 nt, Human adenovirus C
uccuaacccuggauuac

SEQ ID NO: 284853 - RNA, 18 nt, Human adenovirus C
uccugucgccauccugug

SEQ ID NO: 284854 - RNA, 19 nt, Human adenovirus C
uccugucgccauccuguga

SEQ ID NO: 284855 - RNA, 14 nt, Human adenovirus C
uccuuuugagacag

SEQ ID NO: 284856 - RNA, 17 nt, Human adenovirus C
ucgaaguagauugcauc

SEQ ID NO: 284857 - RNA, 11 nt, Human adenovirus C
ucgcagcugcu

SEQ ID NO: 284858 - RNA, 14 nt, Human adenovirus C
ucgcagcugcucag

SEQ ID NO: 284859 - RNA, 15 nt, Human adenovirus C
ucgcagcugcucagg

SEQ ID NO: 284860 - RNA, 14 nt, Human adenovirus C
ucgccuucauucag

SEQ ID NO: 284861 - RNA, 22 nt, Human adenovirus C
ucguacaaagcgcgguucaccc

SEQ ID NO: 284862 - RNA, 17 nt, Human adenovirus C
ucguuacaacagcggca

SEQ ID NO: 284863 - RNA, 16 nt, Human adenovirus C
ucuagagaaugcaaua

SEQ ID NO: 284864 - RNA, 16 nt, Human adenovirus C
ucuccagcggccacac

SEQ ID NO: 284865 - RNA, 18 nt, Human adenovirus C
ucucuuaacuaccaguug

SEQ ID NO: 284866 - RNA, 14 nt, Human adenovirus C
ucugaacucaaagc

SEQ ID NO: 284867 - RNA, 19 nt, Human adenovirus C
ucugccagcgccugcacug

SEQ ID NO: 284868 - RNA, 13 nt, Human adenovirus C
ucugcgcacugug

SEQ ID NO: 284869 - RNA, 18 nt, Human adenovirus C
ucuggacccugauagggg

SEQ ID NO: 284870 - RNA, 19 nt, Human adenovirus C
ucugugcgugcucuacauu

SEQ ID NO: 284871 - RNA, 22 nt, Human adenovirus C
ucuucauauuguugcagaugaa

SEQ ID NO: 284872 - RNA, 15 nt, Human adenovirus C
ucuucucuaccauca

SEQ ID NO: 284873 - RNA, 16 nt, Human adenovirus C
ucuuugaaucuggguc

SEQ ID NO: 284874 - RNA, 17 nt, Human adenovirus C
ugaaagccauugucaaa

SEQ ID NO: 284875 - RNA, 18 nt, Human adenovirus C
ugaaauuuucugcaauug

SEQ ID NO: 284876 - RNA, 15 nt, Human adenovirus C
gaaaaaugacuugaa

SEQ ID NO: 284877 - RNA, 19 nt, Human adenovirus C
gaaaacaugcaagucaggg

SEQ ID NO: 284878 - RNA, 20 nt, Human adenovirus C
gaaacagcauccguuacucu

SEQ ID NO: 284879 - RNA, 21 nt, Human adenovirus C
gaaaccguguggaauauaaca

SEQ ID NO: 284880 - RNA, 15 nt, Human adenovirus C
gaaacggagugucau

SEQ ID NO: 284881 - RNA, 19 nt, Human adenovirus C
gaaaggacuguguacucug

SEQ ID NO: 284882 - RNA, 20 nt, Human adenovirus C
gaaagugucuccuaguacau

SEQ ID NO: 284883 - RNA, 23 nt, Human adenovirus C
gaaauucccacgcccuacaugug

SEQ ID NO: 284884 - RNA, 11 nt, Human adenovirus C
gaacacuauca

SEQ ID NO: 284885 - RNA, 16 nt, Human adenovirus C
gaaccagccugugaug

SEQ ID NO: 284886 - RNA, 14 nt, Human adenovirus C
gaaccuguugcaug

SEQ ID NO: 284887 - RNA, 17 nt, Human adenovirus C
gaacgggguguuugaca

SEQ ID NO: 284888 - RNA, 11 nt, Human adenovirus C
gaacucaaagc

SEQ ID NO: 284889 - RNA, 19 nt, Human adenovirus C
gaagacgacgggcccggug

SEQ ID NO: 284890 - RNA, 16 nt, Human adenovirus C
gaagguccuccucccu

SEQ ID NO: 284891 - RNA, 12 nt, Human adenovirus C
gaauaaacuaca

SEQ ID NO: 284892 - RNA, 22 nt, Human adenovirus C
gaauaagaucucuaauaccaca

SEQ ID NO: 284893 - RNA, 15 nt, Human adenovirus C
gaauauaacaccuaa

SEQ ID NO: 284894 - RNA, 15 nt, Human adenovirus C
gaauaugucuguuac

SEQ ID NO: 284895 - RNA, 13 nt, Human adenovirus C
gaauccgcgccca

SEQ ID NO: 284896 - RNA, 18 nt, Human adenovirus C
gaaugaaaaaugacuuga

SEQ ID NO: 284897 - RNA, 20 nt, Human adenovirus C
gaaugaaaaaugacuugaaa

SEQ ID NO: 284898 - RNA, 16 nt, Human adenovirus C
gacaagcgcuuuccag

SEQ ID NO: 284899 - RNA, 15 nt, Human adenovirus C
gacaucaccuguguc

SEQ ID NO: 284900 - RNA, 19 nt, Human adenovirus C
gaccaaccuggaccggcug

SEQ ID NO: 284901 - RNA, 19 nt, Human adenovirus C
gaccaugaagaucuggaag

SEQ ID NO: 284902 - RNA, 16 nt, Human adenovirus C
gacccgcaccaggugc

SEQ ID NO: 284903 - RNA, 19 nt, Human adenovirus C
gacccggcacugccgccca

SEQ ID NO: 284904 - RNA, 20 nt, Human adenovirus C
gaccgcuguauaacgcugga

SEQ ID NO: 284905 - RNA, 21 nt, Human adenovirus C
gaccgucugaagacaccuuca

SEQ ID NO: 284906 - RNA, 19 nt, Human adenovirus C
gacgccgccaccaaccagc

SEQ ID NO: 284907 - RNA, 14 nt, Human adenovirus C
gacgcgguggugga

SEQ ID NO: 284908 - RNA, 20 nt, Human adenovirus C
gacgugguaaaggugacucu

SEQ ID NO: 284909 - RNA, 21 nt, Human adenovirus C
gacgugguaaaggugacucug

SEQ ID NO: 284910 - RNA, 21 nt, Human adenovirus C
gacucugacaaagcccaagaa

SEQ ID NO: 284911 - RNA, 22 nt, Human adenovirus C
gacucugacaaagcccaagaaa

SEQ ID NO: 284912 - RNA, 19 nt, Human adenovirus C
gacugcagccuccgccgcc

SEQ ID NO: 284913 - RNA, 20 nt, Human adenovirus C
gacugugggggcaacaucuc

SEQ ID NO: 284914 - RNA, 14 nt, Human adenovirus C
gacuugagcuguaa

SEQ ID NO: 284915 - RNA, 22 nt, Human adenovirus C
gagaggcagagcgacugcgccu

SEQ ID NO: 284916 - RNA, 18 nt, Human adenovirus C
gagauacacccggugguc

SEQ ID NO: 284917 - RNA, 14 nt, Human adenovirus C
gagcaacaacagcg

SEQ ID NO: 284918 - RNA, 21 nt, Human adenovirus C
gagcaggaacugaaagccauu

SEQ ID NO: 284919 - RNA, 21 nt, Human adenovirus C
gagccacaggcugcuguccaa

SEQ ID NO: 284920 - RNA, 19 nt, Human adenovirus C
gagcgcugcgucuggcgcc

SEQ ID NO: 284921 - RNA, 20 nt, Human adenovirus C
gagcugcccaagacuacuca

SEQ ID NO: 284922 - RNA, 23 nt, Human adenovirus C
gagcugcugagccgccgugcgcc

SEQ ID NO: 284923 - RNA, 22 nt, Human adenovirus C
gagcuguuugauucuuugaauc

SEQ ID NO: 284924 - RNA, 23 nt, Human adenovirus C
gagcuugaucugcuggcgcagaa

SEQ ID NO: 284925 - RNA, 14 nt, Human adenovirus C
gaggcugcagucuc

SEQ ID NO: 284926 - RNA, 15 nt, Human adenovirus C
gaggcugcagucucc

SEQ ID NO: 284927 - RNA, 16 nt, Human adenovirus C
gagguggaacugcugc

SEQ ID NO: 284928 - RNA, 13 nt, Human adenovirus C
gagucugggcaac

SEQ ID NO: 284929 - RNA, 21 nt, Human adenovirus C
gaguuuauuaauaucacugau

SEQ ID NO: 284930 - RNA, 10 nt, Human adenovirus C
gaugcucccc

SEQ ID NO: 284931 - RNA, 23 nt, Human adenovirus C
gaugggcuccagcauugaugguc

SEQ ID NO: 284932 - RNA, 14 nt, Human adenovirus C
gauuauacccacaa

SEQ ID NO: 284933 - RNA, 15 nt, Human adenovirus C
gauuauacccacaac

SEQ ID NO: 284934 - RNA, 17 nt, Human adenovirus C
gauucgggaguuuacca

SEQ ID NO: 284935 - RNA, 14 nt, Human adenovirus C
gcaaagucagucac

SEQ ID NO: 284936 - RNA, 16 nt, Human adenovirus C
gcaacaccacugcuac

SEQ ID NO: 284937 - RNA, 12 nt, Human adenovirus C
gcaacagcagcg

SEQ ID NO: 284938 - RNA, 14 nt, Human adenovirus C
gcaacgaagcuaug

SEQ ID NO: 284939 - RNA, 13 nt, Human adenovirus C
gcaagaacugcua

SEQ ID NO: 284940 - RNA, 18 nt, Human adenovirus C
gcaagacucugacaaagc

SEQ ID NO: 284941 - RNA, 22 nt, Human adenovirus C
gcaagacucugacaaagcccaa

SEQ ID NO: 284942 - RNA, 12 nt, Human adenovirus C
gcaagucaggga

SEQ ID NO: 284943 - RNA, 14 nt, Human adenovirus C
gcacccacuaucuu

SEQ ID NO: 284944 - RNA, 15 nt, Human adenovirus C
gcacugccgcccaac

SEQ ID NO: 284945 - RNA, 13 nt, Human adenovirus C
gcagaaaauuuca

SEQ ID NO: 284946 - RNA, 14 nt, Human adenovirus C
gcagauccaacagc

SEQ ID NO: 284947 - RNA, 14 nt, Human adenovirus C
gcagcaacagcagc

SEQ ID NO: 284948 - RNA, 19 nt, Human adenovirus C
gcagcacuggaacacuauc

SEQ ID NO: 284949 - RNA, 12 nt, Human adenovirus C
gcagcagccgcc

SEQ ID NO: 284950 - RNA, 20 nt, Human adenovirus C
gcagcucgcuuaaguucaug

SEQ ID NO: 284951 - RNA, 19 nt, Human adenovirus C
acugugggggcaacaucuc

SEQ ID NO: 284952 - RNA, 14 nt, Human adenovirus C
acuuaaaaucaguc

SEQ ID NO: 284953 - RNA, 15 nt, Human adenovirus C
acuuaaaaucaguca

SEQ ID NO: 284954 - RNA, 19 nt, Human adenovirus C
acuucagccugaauaacaa

SEQ ID NO: 284955 - RNA, 20 nt, Human adenovirus C
acuugcuggaacagagcucu

SEQ ID NO: 284956 - RNA, 22 nt, Human adenovirus C
acuugcuugaucaaaauccaaa

SEQ ID NO: 284957 - RNA, 15 nt, Human adenovirus C
acuuugacauccgcg

SEQ ID NO: 284958 - RNA, 14 nt, Human adenovirus C
agaaaaaugguguc

SEQ ID NO: 284959 - RNA, 19 nt, Human adenovirus C
agaaacgacauuaaguucc

SEQ ID NO: 284960 - RNA, 13 nt, Human adenovirus C
agaaaggacugug

SEQ ID NO: 284961 - RNA, 17 nt, Human adenovirus C
agaaaggacuguguacu

SEQ ID NO: 284962 - RNA, 22 nt, Human adenovirus C
agaaaggacuguguacucugug

SEQ ID NO: 284963 - RNA, 21 nt, Human adenovirus C
agacaugauuccucgaguucu

SEQ ID NO: 284964 - RNA, 14 nt, Human adenovirus C
agaccauggacagc

SEQ ID NO: 284965 - RNA, 18 nt, Human adenovirus C
agacccgcaccaggugca

SEQ ID NO: 284966 - RNA, 15 nt, Human adenovirus C
agacucugacaaagc

SEQ ID NO: 284967 - RNA, 20 nt, Human adenovirus C
agacugggggcguacacugg

SEQ ID NO: 284968 - RNA, 23 nt, Human adenovirus C
agacugggggcguacacuggaug

SEQ ID NO: 284969 - RNA, 20 nt, Human adenovirus C
agacugugggggcaacaucu

SEQ ID NO: 284970 - RNA, 14 nt, Human adenovirus C
agagcaacaacagc

SEQ ID NO: 284971 - RNA, 12 nt, Human adenovirus C
agagcuucaugc

SEQ ID NO: 284972 - RNA, 14 nt, Human adenovirus C
agagcuuuugaaau

SEQ ID NO: 284973 - RNA, 15 nt, Human adenovirus C
agagcuuuugaaauc

SEQ ID NO: 284974 - RNA, 17 nt, Human adenovirus C
agaggaggcuaggaauc

SEQ ID NO: 284975 - RNA, 10 nt, Human adenovirus C
agagugcaga

SEQ ID NO: 284976 - RNA, 14 nt, Human adenovirus C
agaucuguuuguca

SEQ ID NO: 284977 - RNA, 20 nt, Human adenovirus C
agaucuugguugugggccau

SEQ ID NO: 284978 - RNA, 19 nt, Human adenovirus C
agaugauccagucguagca

SEQ ID NO: 284979 - RNA, 12 nt, Human adenovirus C
agcaacagcagc

SEQ ID NO: 284980 - RNA, 13 nt, Human adenovirus C
agcaacagcagcg

SEQ ID NO: 284981 - RNA, 22 nt, Human adenovirus C
agcaagacacuugcuugaucaa

SEQ ID NO: 284982 - RNA, 24 nt, Human adenovirus C
agcaagacucugacaaagcccaag

SEQ ID NO: 284983 - RNA, 16 nt, Human adenovirus C
agcaaggaaauuccca

SEQ ID NO: 284984 - RNA, 22 nt, Human adenovirus C
agcacuuuuugccgcugcgcaa

SEQ ID NO: 284985 - RNA, 13 nt, Human adenovirus C
agcagccgccgcc

SEQ ID NO: 284986 - RNA, 16 nt, Human adenovirus C
agcaggauuacaagcc

SEQ ID NO: 284987 - RNA, 18 nt, Human adenovirus C
agcagguuuaccaguuug

SEQ ID NO: 284988 - RNA, 16 nt, Human adenovirus C
agcaucaccuccuuuc

SEQ ID NO: 284989 - RNA, 22 nt, Human adenovirus C
agccagacggucaaggacaagc

SEQ ID NO: 284990 - RNA, 14 nt, Human adenovirus C
agccauugucaaag

SEQ ID NO: 284991 - RNA, 16 nt, Human adenovirus C
agcccaagagcaacaa

SEQ ID NO: 284992 - RNA, 20 nt, Human adenovirus C
agcccaagagcaacaacagc

SEQ ID NO: 284993 - RNA, 17 nt, Human adenovirus C
agccugugaugcuggau

SEQ ID NO: 284994 - RNA, 16 nt, Human adenovirus C
agcgcagacgcgccag

SEQ ID NO: 284995 - RNA, 13 nt, Human adenovirus C
agcgccauugcuu

SEQ ID NO: 284996 - RNA, 19 nt, Human adenovirus C
agcgccugauuucugccag

SEQ ID NO: 284997 - RNA, 17 nt, Human adenovirus C
agcgcguguaugaugag

SEQ ID NO: 284998 - RNA, 16 nt, Human adenovirus C
agcggcagcaacagca

SEQ ID NO: 284999 - RNA, 16 nt, Human adenovirus C
agcggcggcagcagca

SEQ ID NO: 285000 - RNA, 20 nt, Human adenovirus C
agcgucaacgacugcgcacg

SEQ ID NO: 285001 - RNA, 20 nt, Human adenovirus C
agcguuuggcucgacaggaa

SEQ ID NO: 285002 - RNA, 18 nt, Human adenovirus C
agcuaaagcgggucaaaa

SEQ ID NO: 285003 - RNA, 22 nt, Human adenovirus C
agcuccgaguaugcgugucaua

SEQ ID NO: 285004 - RNA, 21 nt, Human adenovirus C
agcucgcuuaaguucaugucg

SEQ ID NO: 285005 - RNA, 16 nt, Human adenovirus C
agcugcaaacuuucuc

SEQ ID NO: 285006 - RNA, 19 nt, Human adenovirus C
agcugcaaacuuucuccaa

SEQ ID NO: 285007 - RNA, 17 nt, Human adenovirus C
agcugcagcucucuuaa

SEQ ID NO: 285008 - RNA, 14 nt, Human adenovirus C
agcugccgccaugg

SEQ ID NO: 285009 - RNA, 19 nt, Human adenovirus C
agcugcugagaaacgacau

SEQ ID NO: 285010 - RNA, 20 nt, Human adenovirus C
agcuggacagcgacaugaac

SEQ ID NO: 285011 - RNA, 16 nt, Human adenovirus C
agcugggaugggugca

SEQ ID NO: 285012 - RNA, 15 nt, Human adenovirus C
agcuuaaugaccaga

SEQ ID NO: 285013 - RNA, 17 nt, Human adenovirus C
agcuuaaugaccagaca

SEQ ID NO: 285014 - RNA, 21 nt, Human adenovirus C
agcuuaaugaccagacaccgu

SEQ ID NO: 285015 - RNA, 16 nt, Human adenovirus C
agcuuauucagcauca

SEQ ID NO: 285016 - RNA, 16 nt, Human adenovirus C
agcuucagcuugccug

SEQ ID NO: 285017 - RNA, 17 nt, Human adenovirus C
agcuuggacauguggug

SEQ ID NO: 285018 - RNA, 19 nt, Human adenovirus C
aggaaagucccgcucccac

SEQ ID NO: 285019 - RNA, 23 nt, Human adenovirus C
aggaaucuaacuuuuagcuuaau

SEQ ID NO: 285020 - RNA, 20 nt, Human adenovirus C
aggccgaaguucagaugacu

SEQ ID NO: 285021 - RNA, 18 nt, Human adenovirus C
aggccgcauccccgcggc

SEQ ID NO: 285022 - RNA, 14 nt, Human adenovirus C
aggcugcagucucc

SEQ ID NO: 285023 - RNA, 12 nt, Human adenovirus C
agggagguggca

SEQ ID NO: 285024 - RNA, 15 nt, Human adenovirus C
aggggcugguuggug

SEQ ID NO: 285025 - RNA, 16 nt, Human adenovirus C
aggggcugguuggugg

SEQ ID NO: 285026 - RNA, 12 nt, Human adenovirus C
agggugagauaa

SEQ ID NO: 285027 - RNA, 22 nt, Human adenovirus C
aggguucugugaguuugauuaa

SEQ ID NO: 285028 - RNA, 14 nt, Human adenovirus C
agguacggugauca

SEQ ID NO: 285029 - RNA, 16 nt, Human adenovirus C
agguacggugaucaau

SEQ ID NO: 285030 - RNA, 15 nt, Human adenovirus C
aggugggggucucau

SEQ ID NO: 285031 - RNA, 21 nt, Human adenovirus C
aguacauuauuuuuacauguu

SEQ ID NO: 285032 - RNA, 14 nt, Human adenovirus C
aguagaagaccacc

SEQ ID NO: 285033 - RNA, 17 nt, Human adenovirus C
aguagggcgaguggcgc

SEQ ID NO: 285034 - RNA, 18 nt, Human adenovirus C
aguagggcgaguggcgcu

SEQ ID NO: 285035 - RNA, 12 nt, Human adenovirus C
agucacaauccc

SEQ ID NO: 285036 - RNA, 18 nt, Human adenovirus C
agucagggacaugcuuaa

SEQ ID NO: 285037 - RNA, 18 nt, Human adenovirus C
aucaauauaagcuaugug

SEQ ID NO: 285038 - RNA, 16 nt, Human adenovirus C
aucaccaacgcguuua

SEQ ID NO: 285039 - RNA, 19 nt, Human adenovirus C
aucaccuggauguccaggu

SEQ ID NO: 285040 - RNA, 15 nt, Human adenovirus C
aucacuuggugcugg

SEQ ID NO: 285041 - RNA, 18 nt, Human adenovirus C
aucauggguaacagacau

SEQ ID NO: 285042 - RNA, 22 nt, Human adenovirus C
aucauggguaacagacauauuc

SEQ ID NO: 285043 - RNA, 17 nt, Human adenovirus C
auccaauucuagaucua

SEQ ID NO: 285044 - RNA, 18 nt, Human adenovirus C
auccaauucuagaucuag

SEQ ID NO: 285045 - RNA, 15 nt, Human adenovirus C
auccaauugugccaa

SEQ ID NO: 285046 - RNA, 16 nt, Human adenovirus C
auccaccagaccacgg

SEQ ID NO: 285047 - RNA, 21 nt, Human adenovirus C
aucccaccuuucacaguuuac

SEQ ID NO: 285048 - RNA, 20 nt, Human adenovirus C
aucgccuucauucaguucau

SEQ ID NO: 285049 - RNA, 15 nt, Human adenovirus C
aucugaacucaaagc

SEQ ID NO: 285050 - RNA, 20 nt, Human adenovirus C
augaccaugaagaucuggaa

SEQ ID NO: 285051 - RNA, 18 nt, Human adenovirus C
augagcgcgggaccccac

SEQ ID NO: 285052 - RNA, 14 nt, Human adenovirus C
augagcuugaucug

SEQ ID NO: 285053 - RNA, 22 nt, Human adenovirus C
augagcuugaucugcuggcgca

SEQ ID NO: 285054 - RNA, 20 nt, Human adenovirus C
augcuaccucuuugagcccu

SEQ ID NO: 285055 - RNA, 13 nt, Human adenovirus C
augcuuugagaga

SEQ ID NO: 285056 - RNA, 21 nt, Human adenovirus C
auggaagcauugugagcucau

SEQ ID NO: 285057 - RNA, 16 nt, Human adenovirus C
auggaauaagaucucu

SEQ ID NO: 285058 - RNA, 20 nt, Human adenovirus C
auggucgccccguccugccc

SEQ ID NO: 285059 - RNA, 19 nt, Human adenovirus C
auguacuaggagacacuuu

SEQ ID NO: 285060 - RNA, 18 nt, Human adenovirus C
auguaucgaggacuugcu

SEQ ID NO: 285061 - RNA, 15 nt, Human adenovirus C
auguuuaacuugcau

SEQ ID NO: 285062 - RNA, 12 nt, Human adenovirus C
auuaauaucacu

SEQ ID NO: 285063 - RNA, 21 nt, Human adenovirus C
auuacaagccccgaaagcuaa

SEQ ID NO: 285064 - RNA, 20 nt, Human adenovirus C
auuacuaccgucaucucuac

SEQ ID NO: 285065 - RNA, 22 nt, Human adenovirus C
auuagaaucuacuggggcuccu

SEQ ID NO: 285066 - RNA, 18 nt, Human adenovirus C
auuauacccacaaccuuc

SEQ ID NO: 285067 - RNA, 20 nt, Human adenovirus C
auuaugaaacggagugucau

SEQ ID NO: 285068 - RNA, 22 nt, Human adenovirus C
auuauguggcuuauuuguugcc

SEQ ID NO: 285069 - RNA, 15 nt, Human adenovirus C
auucagcaucaccuc

SEQ ID NO: 285070 - RNA, 16 nt, Human adenovirus C
auugaaagugucuccu

SEQ ID NO: 285071 - RNA, 23 nt, Human adenovirus C
auugauggucgccccguccugcc

SEQ ID NO: 285072 - RNA, 22 nt, Human adenovirus C
auugugagcucauauuugacaa

SEQ ID NO: 285073 - RNA, 14 nt, Human adenovirus C
auuuggucagggaa

SEQ ID NO: 285074 - RNA, 13 nt, Human adenovirus C
auuuuaaccauua

SEQ ID NO: 285075 - RNA, 14 nt, Human adenovirus C
caaaagauaccucu

SEQ ID NO: 285076 - RNA, 18 nt, Human adenovirus C
caaaagauaccucuuuua

SEQ ID NO: 285077 - RNA, 18 nt, Human adenovirus C
caaacgcucaaaagcaug

SEQ ID NO: 285078 - RNA, 20 nt, Human adenovirus C
caaacuuucuccaaaguuua

SEQ ID NO: 285079 - RNA, 14 nt, Human adenovirus C
caacaccacugcua

SEQ ID NO: 285080 - RNA, 16 nt, Human adenovirus C
caaccuggaccggcug

SEQ ID NO: 285081 - RNA, 23 nt, Human adenovirus C
caaccuuuggacuugagcuguaa

SEQ ID NO: 285082 - RNA, 19 nt, Human adenovirus C
caacggaauccgcgcccac

SEQ ID NO: 285083 - RNA, 19 nt, Human adenovirus C
caacguguuuauuuuucaa

SEQ ID NO: 285084 - RNA, 16 nt, Human adenovirus C
caacucugguaucuca

SEQ ID NO: 285085 - RNA, 20 nt, Human adenovirus C
caagaacgccauaguugcuu

SEQ ID NO: 285086 - RNA, 12 nt, Human adenovirus C
caagaacugcua

SEQ ID NO: 285087 - RNA, 16 nt, Human adenovirus C
caagacacuugcuuga

SEQ ID NO: 285088 - RNA, 12 nt, Human adenovirus C
caagacuacuca

SEQ ID NO: 285089 - RNA, 17 nt, Human adenovirus C
caagauuauacccacaa

SEQ ID NO: 285090 - RNA, 14 nt, Human adenovirus C
caagcaagugucuu

SEQ ID NO: 285091 - RNA, 22 nt, Human adenovirus C
caagcagguuuaccaguuugag

SEQ ID NO: 285092 - RNA, 18 nt, Human adenovirus C
caagcgcaaaaucaaaga

SEQ ID NO: 285093 - RNA, 18 nt, Human adenovirus C
caagcgcguguaugauga

SEQ ID NO: 285094 - RNA, 23 nt, Human adenovirus C
caagucagggacaugcuuaacga

SEQ ID NO: 285095 - RNA, 18 nt, Human adenovirus C
caagucauuuuucauuca

SEQ ID NO: 285096 - RNA, 21 nt, Human adenovirus C
caagucauuuuucauucagua

SEQ ID NO: 285097 - RNA, 11 nt, Human adenovirus C
caagugacaaa

SEQ ID NO: 285098 - RNA, 13 nt, Human adenovirus C
caagugucuugcu

SEQ ID NO: 285099 - RNA, 17 nt, Human adenovirus C
caaguugcauguggaaa

SEQ ID NO: 285100 - RNA, 16 nt, Human adenovirus C
cacaaaagauaccucu

SEQ ID NO: 285101 - RNA, 16 nt, Human adenovirus C
cacaaucccgcgggcg

SEQ ID NO: 285102 - RNA, 16 nt, Human adenovirus C
cacacgguuuccuguc

SEQ ID NO: 285103 - RNA, 21 nt, Human adenovirus C
cacagaacccuaguauucaac

SEQ ID NO: 285104 - RNA, 19 nt, Human adenovirus C
cacaggguugcagcacugg

SEQ ID NO: 285105 - RNA, 12 nt, Human adenovirus C
cacauagcuuau

SEQ ID NO: 285106 - RNA, 20 nt, Human adenovirus C
cacaucgaaguagauugcau

SEQ ID NO: 285107 - RNA, 20 nt, Human adenovirus C
caccaucaccaacgcguuua

SEQ ID NO: 285108 - RNA, 18 nt, Human adenovirus C
caccauccgcaauacaga

SEQ ID NO: 285109 - RNA, 13 nt, Human adenovirus C
cacccuacgcugg

SEQ ID NO: 285110 - RNA, 21 nt, Human adenovirus C
caccgcccgcgggauugugac

SEQ ID NO: 285111 - RNA, 21 nt, Human adenovirus C
caccggccagagcgucccgac

SEQ ID NO: 285112 - RNA, 20 nt, Human adenovirus C
caccuccuuuccuuccuccc

SEQ ID NO: 285113 - RNA, 16 nt, Human adenovirus C
caccuuucacaguuua

SEQ ID NO: 285114 - RNA, 23 nt, Human adenovirus C
cacgcgggcgguaaccgcaugga

SEQ ID NO: 285115 - RNA, 22 nt, Human adenovirus C
cacuaucuucauauuguugcag

SEQ ID NO: 285116 - RNA, 20 nt, Human adenovirus C
cacugcaaauuugaucaaac

SEQ ID NO: 285117 - RNA, 17 nt, Human adenovirus C
cacugugguacuuccca

SEQ ID NO: 285118 - RNA, 14 nt, Human adenovirus C
cagaacgaccacag

SEQ ID NO: 285119 - RNA, 18 nt, Human adenovirus C
ccugaccugucgccgcgg

SEQ ID NO: 285120 - RNA, 20 nt, Human adenovirus C
ccugauucgggaguuuacca

SEQ ID NO: 285121 - RNA, 19 nt, Human adenovirus C
ccugauuuuuugagcagca

SEQ ID NO: 285122 - RNA, 22 nt, Human adenovirus C
ccugcacgcuuuggguggacuu

SEQ ID NO: 285123 - RNA, 15 nt, Human adenovirus C
ccugcagauucacuc

SEQ ID NO: 285124 - RNA, 13 nt, Human adenovirus C
ccugcucagggau

SEQ ID NO: 285125 - RNA, 19 nt, Human adenovirus C
ccugcuggcgcagauccaa

SEQ ID NO: 285126 - RNA, 16 nt, Human adenovirus C
ccuggacaauuuacuc

SEQ ID NO: 285127 - RNA, 15 nt, Human adenovirus C
ccuggcuguggguga

SEQ ID NO: 285128 - RNA, 19 nt, Human adenovirus C
ccugucgccauccugugaa

SEQ ID NO: 285129 - RNA, 20 nt, Human adenovirus C
ccugucgccgcgggagcucc

SEQ ID NO: 285130 - RNA, 22 nt, Human adenovirus C
ccugugauugcgugugugguua

SEQ ID NO: 285131 - RNA, 16 nt, Human adenovirus C
ccuguggugagcuguu

SEQ ID NO: 285132 - RNA, 16 nt, Human adenovirus C
ccuuaaaaagcaucau

SEQ ID NO: 285133 - RNA, 23 nt, Human adenovirus C
ccuucaaccccguguauccauau

SEQ ID NO: 285134 - RNA, 17 nt, Human adenovirus C
ccuucgaugaugccgca

SEQ ID NO: 285135 - RNA, 15 nt, Human adenovirus C
ccuucgcccgccgcu

SEQ ID NO: 285136 - RNA, 17 nt, Human adenovirus C
ccuugcaagaacugcua

SEQ ID NO: 285137 - RNA, 22 nt, Human adenovirus C
ccuugcaggcgcagagacacug

SEQ ID NO: 285138 - RNA, 14 nt, Human adenovirus C
ccuuuggacaccuc

SEQ ID NO: 285139 - RNA, 14 nt, Human adenovirus C
ccuuuguuugcuga

SEQ ID NO: 285140 - RNA, 20 nt, Human adenovirus C
ccuuuuagcugcaaacuuuc

SEQ ID NO: 285141 - RNA, 15 nt, Human adenovirus C
cgaaaacagggccau

SEQ ID NO: 285142 - RNA, 13 nt, Human adenovirus C
cgaauaaacuaca

SEQ ID NO: 285143 - RNA, 15 nt, Human adenovirus C
cgacaucaccugugu

SEQ ID NO: 285144 - RNA, 19 nt, Human adenovirus C
cgaccacagcaacuuucua

SEQ ID NO: 285145 - RNA, 22 nt, Human adenovirus C
cgaccgccgcgcgcggacaucu

SEQ ID NO: 285146 - RNA, 19 nt, Human adenovirus C
cgagaccggagacgcagau

SEQ ID NO: 285147 - RNA, 13 nt, Human adenovirus C
cgauacacagggu

SEQ ID NO: 285148 - RNA, 13 nt, Human adenovirus C
cgcagcugcucag

SEQ ID NO: 285149 - RNA, 16 nt, Human adenovirus C
cgcauuuggucaggga

SEQ ID NO: 285150 - RNA, 17 nt, Human adenovirus C
cgcauuuggucagggaa

SEQ ID NO: 285151 - RNA, 16 nt, Human adenovirus C
cgcccgccgcuuucuu

SEQ ID NO: 285152 - RNA, 14 nt, Human adenovirus C
cgccgccaccagug

SEQ ID NO: 285153 - RNA, 15 nt, Human adenovirus C
cgccgcgcgcgggca

SEQ ID NO: 285154 - RNA, 15 nt, Human adenovirus C
cgccuggaacugcuu

SEQ ID NO: 285155 - RNA, 15 nt, Human adenovirus C
cgcgaaaacuacguc

SEQ ID NO: 285156 - RNA, 21 nt, Human adenovirus C
cgcgaaaacuacgucaucucc

SEQ ID NO: 285157 - RNA, 15 nt, Human adenovirus C
cgcgaguugcgauac

SEQ ID NO: 285158 - RNA, 11 nt, Human adenovirus C
cgcgcaacuac

SEQ ID NO: 285159 - RNA, 16 nt, Human adenovirus C
cgcguccgcgacuuuc

SEQ ID NO: 285160 - RNA, 18 nt, Human adenovirus C
cgcucaaaagcaugccua

SEQ ID NO: 285161 - RNA, 16 nt, Human adenovirus C
cgcugggcguggugcc

SEQ ID NO: 285162 - RNA, 14 nt, Human adenovirus C
cggcagcaacagca

SEQ ID NO: 285163 - RNA, 23 nt, Human adenovirus C
cggcagcucggugaaguuuucac

SEQ ID NO: 285164 - RNA, 13 nt, Human adenovirus C
cggccucuugcaa

SEQ ID NO: 285165 - RNA, 17 nt, Human adenovirus C
cggcgcugcagagccag

SEQ ID NO: 285166 - RNA, 17 nt, Human adenovirus C
cgggaagcugcacugcu

SEQ ID NO: 285167 - RNA, 16 nt, Human adenovirus C
cggggaaguggccgcg

SEQ ID NO: 285168 - RNA, 15 nt, Human adenovirus C
cgggguguuugacau

SEQ ID NO: 285169 - RNA, 17 nt, Human adenovirus C
cgggucaaagaauccaa

SEQ ID NO: 285170 - RNA, 23 nt, Human adenovirus C
cgguaaacauauuaggaaccagc

SEQ ID NO: 285171 - RNA, 18 nt, Human adenovirus C
cgguaaccgcauggauca

SEQ ID NO: 285172 - RNA, 12 nt, Human adenovirus C
cggucguccgcc

SEQ ID NO: 285173 - RNA, 19 nt, Human adenovirus C
cggucguccgccaugauac

SEQ ID NO: 285174 - RNA, 14 nt, Human adenovirus C
cggugacgcgggcg

SEQ ID NO: 285175 - RNA, 16 nt, Human adenovirus C
cggugaguuuuguuac

SEQ ID NO: 285176 - RNA, 21 nt, Human adenovirus C
cggugaguuuuguuacuuuga

SEQ ID NO: 285177 - RNA, 12 nt, Human adenovirus C
cguaagacgugu

SEQ ID NO: 285178 - RNA, 15 nt, Human adenovirus C
cgucccgaccaugga

SEQ ID NO: 285179 - RNA, 14 nt, Human adenovirus C
cguccgccaugaua

SEQ ID NO: 285180 - RNA, 22 nt, Human adenovirus C
cgucucuggccccgcgacacgg

SEQ ID NO: 285181 - RNA, 17 nt, Human adenovirus C
cgugcgcaccaccggcg

SEQ ID NO: 285182 - RNA, 18 nt, Human adenovirus C
cgugcgcaccaccggcgg

SEQ ID NO: 285183 - RNA, 16 nt, Human adenovirus C
cgugggcuaaucuugg

SEQ ID NO: 285184 - RNA, 21 nt, Human adenovirus C
cguuugauggaagcauuguga

SEQ ID NO: 285185 - RNA, 20 nt, Human adenovirus C
cuaacaguaccucuugguuu

SEQ ID NO: 285186 - RNA, 19 nt, Human adenovirus C
cuaacccuggauuacauca

SEQ ID NO: 285187 - RNA, 20 nt, Human adenovirus C
cuaaucuugguuacaucuga

SEQ ID NO: 285188 - RNA, 19 nt, Human adenovirus C
cuacagaggaggcuaggaa

SEQ ID NO: 285189 - RNA, 20 nt, Human adenovirus C
cuaccucuuugagcccuuug

SEQ ID NO: 285190 - RNA, 16 nt, Human adenovirus C
cuacgaccaacacgau

SEQ ID NO: 285191 - RNA, 13 nt, Human adenovirus C
cuacuacacagag

SEQ ID NO: 285192 - RNA, 16 nt, Human adenovirus C
cuaggagacacuuuca

SEQ ID NO: 285193 - RNA, 18 nt, Human adenovirus C
cuauagcugaucuucuca

SEQ ID NO: 285194 - RNA, 19 nt, Human adenovirus C
cuauagcugaucuucucag

SEQ ID NO: 285195 - RNA, 20 nt, Human adenovirus C
cuaugugggauaugcuccag

SEQ ID NO: 285196 - RNA, 14 nt, Human adenovirus C
cucaaaaacaugcu

SEQ ID NO: 285197 - RNA, 23 nt, Human adenovirus C
cucaagcagguuuaccaguuuga

SEQ ID NO: 285198 - RNA, 19 nt, Human adenovirus C
cucacagaacccuaguauu

SEQ ID NO: 285199 - RNA, 18 nt, Human adenovirus C
cuccaacggcguuccaga

SEQ ID NO: 285200 - RNA, 15 nt, Human adenovirus C
cucccaaaccucagc

SEQ ID NO: 285201 - RNA, 20 nt, Human adenovirus C
cucccaacucugguaucuca

SEQ ID NO: 285202 - RNA, 20 nt, Human adenovirus C
cucccaccauaagcaccagu

SEQ ID NO: 285203 - RNA, 18 nt, Human adenovirus C
cucccucccaacacacag

SEQ ID NO: 285204 - RNA, 23 nt, Human adenovirus C
cuccgcacccacuaucuucauau

SEQ ID NO: 285205 - RNA, 18 nt, Human adenovirus C
cuccuuuugcacggucua

SEQ ID NO: 285206 - RNA, 17 nt, Human adenovirus C
cucgggugauuauuuac

SEQ ID NO: 285207 - RNA, 17 nt, Human adenovirus C
cucggugaaguuuucac

SEQ ID NO: 285208 - RNA, 13 nt, Human adenovirus C
cucuaauaccaca

SEQ ID NO: 285209 - RNA, 12 nt, Human adenovirus C
cucuggggugga

SEQ ID NO: 285210 - RNA, 12 nt, Human adenovirus C
cugaacuaccag

SEQ ID NO: 285211 - RNA, 14 nt, Human adenovirus C
cugaagacaccuuc

SEQ ID NO: 285212 - RNA, 21 nt, Human adenovirus C
cugaaugaaaaaugacuugaa

SEQ ID NO: 285213 - RNA, 17 nt, Human adenovirus C
cugacaaagcccaagaa

SEQ ID NO: 285214 - RNA, 20 nt, Human adenovirus C
cugacacaccucgaccacug

SEQ ID NO: 285215 - RNA, 16 nt, Human adenovirus C
cugaccugucgccgcg

SEQ ID NO: 285216 - RNA, 12 nt, Human adenovirus C
cugauuucugcc

SEQ ID NO: 285217 - RNA, 20 nt, Human adenovirus C
cugcaaacuuucuccaaagu

SEQ ID NO: 285218 - RNA, 14 nt, Human adenovirus C
cugcagauucacuc

SEQ ID NO: 285219 - RNA, 15 nt, Human adenovirus C
cugcagauucacuca

SEQ ID NO: 285220 - RNA, 15 nt, Human adenovirus C
cugcagccaggggau

SEQ ID NO: 285221 - RNA, 18 nt, Human adenovirus C
cugcagcucucuuaacua

SEQ ID NO: 285222 - RNA, 21 nt, Human adenovirus C
cugccagcgccugcacugcaa

SEQ ID NO: 285223 - RNA, 22 nt, Human adenovirus C
cugccagcgccugcacugcaaa

SEQ ID NO: 285224 - RNA, 17 nt, Human adenovirus C
cugcccggggaguuuau

SEQ ID NO: 285225 - RNA, 19 nt, Human adenovirus C
cugccuuuaucugcaugag

SEQ ID NO: 285226 - RNA, 12 nt, Human adenovirus C
cugcucagggau

SEQ ID NO: 285227 - RNA, 18 nt, Human adenovirus C
cugcugagaaacgacauu

SEQ ID NO: 285228 - RNA, 19 nt, Human adenovirus C
cugcugugcguaacuugcu

SEQ ID NO: 285229 - RNA, 19 nt, Human adenovirus C
cugcuugaccacacaaaag

SEQ ID NO: 285230 - RNA, 20 nt, Human adenovirus C
cugcuuucuucccagcugau

SEQ ID NO: 285231 - RNA, 23 nt, Human adenovirus C
cuggaaaucagguaucaccugga

SEQ ID NO: 285232 - RNA, 16 nt, Human adenovirus C
cuggaacacuaucagc

SEQ ID NO: 285233 - RNA, 20 nt, Human adenovirus C
cuggaacagagcucuaacag

SEQ ID NO: 285234 - RNA, 17 nt, Human adenovirus C
cuggacagcgacaugaa

SEQ ID NO: 285235 - RNA, 15 nt, Human adenovirus C
cuggagcccaucaca

SEQ ID NO: 285236 - RNA, 17 nt, Human adenovirus C
acagcaagacacuugcu

SEQ ID NO: 285237 - RNA, 15 nt, Human adenovirus C
acagcgacaugaacu

SEQ ID NO: 285238 - RNA, 16 nt, Human adenovirus C
acagcgccaaggcuac

SEQ ID NO: 285239 - RNA, 16 nt, Human adenovirus C
acagcugccgccaugg

SEQ ID NO: 285240 - RNA, 21 nt, Human adenovirus C
acaggcggcuauuaccaccac

SEQ ID NO: 285241 - RNA, 21 nt, Human adenovirus C
acaguagggaucgccuaccuc

SEQ ID NO: 285242 - RNA, 20 nt, Human adenovirus C
acaucaacuuugcgucucug

SEQ ID NO: 285243 - RNA, 16 nt, Human adenovirus C
acaucuacggauauca

SEQ ID NO: 285244 - RNA, 10 nt, Human adenovirus C
acaugcaagu

SEQ ID NO: 285245 - RNA, 23 nt, Human adenovirus C
acaugcuaccucuuugagcccuu

SEQ ID NO: 285246 - RNA, 18 nt, Human adenovirus C
acauguggaguuaccagc

SEQ ID NO: 285247 - RNA, 21 nt, Human adenovirus C
accacaccucguaauaaccuu

SEQ ID NO: 285248 - RNA, 14 nt, Human adenovirus C
accaccacaccucg

SEQ ID NO: 285249 - RNA, 11 nt, Human adenovirus C
accacuguggu

SEQ ID NO: 285250 - RNA, 14 nt, Human adenovirus C
accacuuacuggcu

SEQ ID NO: 285251 - RNA, 13 nt, Human adenovirus C
accagacucuguu

SEQ ID NO: 285252 - RNA, 12 nt, Human adenovirus C
accauaacuccc

SEQ ID NO: 285253 - RNA, 17 nt, Human adenovirus C
accauaagcaccaguuu

SEQ ID NO: 285254 - RNA, 22 nt, Human adenovirus C
accaucgcgcccacaacggacu

SEQ ID NO: 285255 - RNA, 16 nt, Human adenovirus C
accauggacagcuccc

SEQ ID NO: 285256 - RNA, 17 nt, Human adenovirus C
accauggacagcuccca

SEQ ID NO: 285257 - RNA, 23 nt, Human adenovirus C
accccuccauuuguuucacccaa

SEQ ID NO: 285258 - RNA, 19 nt, Human adenovirus C
acccgaauaaacuacauga

SEQ ID NO: 285259 - RNA, 16 nt, Human adenovirus C
acccgagaguguacaa

SEQ ID NO: 285260 - RNA, 22 nt, Human adenovirus C
acccgccaggcgaggggcucaa

SEQ ID NO: 285261 - RNA, 17 nt, Human adenovirus C
acccggcuaugcgaggu

SEQ ID NO: 285262 - RNA, 21 nt, Human adenovirus C
acccguguguaccuuguggac

SEQ ID NO: 285263 - RNA, 23 nt, Human adenovirus C
acccuugccgucugcgccguuua

SEQ ID NO: 285264 - RNA, 16 nt, Human adenovirus C
accgaggagcugaggc

SEQ ID NO: 285265 - RNA, 16 nt, Human adenovirus C
accgccgccggcauca

SEQ ID NO: 285266 - RNA, 15 nt, Human adenovirus C
accgccgcgcgcgga

SEQ ID NO: 285267 - RNA, 17 nt, Human adenovirus C
accgccuggaacugcuu

SEQ ID NO: 285268 - RNA, 18 nt, Human adenovirus C
accgcuguauaacgcugg

SEQ ID NO: 285269 - RNA, 16 nt, Human adenovirus C
accuacaagcgcgugu

SEQ ID NO: 285270 - RNA, 14 nt, Human adenovirus C
accuccugagauac

SEQ ID NO: 285271 - RNA, 17 nt, Human adenovirus C
accugauuuccaggggc

SEQ ID NO: 285272 - RNA, 20 nt, Human adenovirus C
accugccuuuaucugcauga

SEQ ID NO: 285273 - RNA, 12 nt, Human adenovirus C
accuucaaauca

SEQ ID NO: 285274 - RNA, 17 nt, Human adenovirus C
accuugcauuuuauauc

SEQ ID NO: 285275 - RNA, 20 nt, Human adenovirus C
accuuuggacaccucccacg

SEQ ID NO: 285276 - RNA, 23 nt, Human adenovirus C
acgaaguggccccccugcucagg

SEQ ID NO: 285277 - RNA, 15 nt, Human adenovirus C
acgagucacuccugc

SEQ ID NO: 285278 - RNA, 19 nt, Human adenovirus C
acgccgccaccaaccagcc

SEQ ID NO: 285279 - RNA, 16 nt, Human adenovirus C
acgcucaucagugaua

SEQ ID NO: 285280 - RNA, 16 nt, Human adenovirus C
acgcuggccagcacgc

SEQ ID NO: 285281 - RNA, 16 nt, Human adenovirus C
acggauagcugugacu

SEQ ID NO: 285282 - RNA, 15 nt, Human adenovirus C
acggcguuccagaca

SEQ ID NO: 285283 - RNA, 22 nt, Human adenovirus C
acguuagcgccugauuucugcc

SEQ ID NO: 285284 - RNA, 15 nt, Human adenovirus C
acguugaaacauaac

SEQ ID NO: 285285 - RNA, 18 nt, Human adenovirus C
acuaacaucugcccuaaa

SEQ ID NO: 285286 - RNA, 18 nt, Human adenovirus C
acuaccgucaucucuaca

SEQ ID NO: 285287 - RNA, 22 nt, Human adenovirus C
acuacucaacccgaauaaacua

SEQ ID NO: 285288 - RNA, 17 nt, Human adenovirus C
acuaggagacacuuuca

SEQ ID NO: 285289 - RNA, 17 nt, Human adenovirus C
acuaggguucugugagu

SEQ ID NO: 285290 - RNA, 21 nt, Human adenovirus C
acuaucuucauauuguugcag

SEQ ID NO: 285291 - RNA, 12 nt, Human adenovirus C
acucaggcacaa

SEQ ID NO: 285292 - RNA, 17 nt, Human adenovirus C
acucugacaaagcccaa

SEQ ID NO: 285293 - RNA, 15 nt, Human adenovirus C
acucugguaucucag

SEQ ID NO: 285294 - RNA, 14 nt, Human adenovirus C
acugaaagccauug

SEQ ID NO: 285295 - RNA, 16 nt, Human adenovirus C
acugcaaauuugauca

SEQ ID NO: 285296 - RNA, 14 nt, Human adenovirus C
acugcuaccggacu

SEQ ID NO: 285297 - RNA, 21 nt, Human adenovirus C
acugcuuggucaaacgcucaa

SEQ ID NO: 285298 - RNA, 16 nt, Human adenovirus C
acuggaacacuaucag

SEQ ID NO: 285299 - RNA, 12 nt, Human adenovirus C
acuguagucauc

SEQ ID NO: 285300 - RNA, 14 nt, Human adenovirus C
acuguguacucugu

SEQ ID NO: 285301 - RNA, 16 nt, Human adenovirus C
acuguguacucugugu

SEQ ID NO: 285302 - RNA, 20 nt, Human adenovirus C
acuugcuugaucaaaaucca

SEQ ID NO: 285303 - RNA, 12 nt, Human adenovirus C
acuuggugcugg

SEQ ID NO: 285304 - RNA, 18 nt, Human adenovirus C
acuuguaaauaucaggaa

SEQ ID NO: 285305 - RNA, 18 nt, Human adenovirus C
acuuucaauaaaggcaaa

SEQ ID NO: 285306 - RNA, 18 nt, Human adenovirus C
acuuugcuuccuugcaag

SEQ ID NO: 285307 - RNA, 19 nt, Human adenovirus C
acuuugcuuccuugcaaga

SEQ ID NO: 285308 - RNA, 24 nt, Human adenovirus C
agaaaccugcuggcgcagauccaa

SEQ ID NO: 285309 - RNA, 14 nt, Human adenovirus C
agaaagaugaugau

SEQ ID NO: 285310 - RNA, 14 nt, Human adenovirus C
agaaaggacugugu

SEQ ID NO: 285311 - RNA, 16 nt, Human adenovirus C
agaaauccacagcggc

SEQ ID NO: 285312 - RNA, 17 nt, Human adenovirus C
agaacccuaguauucaa

SEQ ID NO: 285313 - RNA, 15 nt, Human adenovirus C
agaccaccagccaaa

SEQ ID NO: 285314 - RNA, 15 nt, Human adenovirus C
agagcaacaacagcg

SEQ ID NO: 285315 - RNA, 19 nt, Human adenovirus C
agagcauguccaaggugaa

SEQ ID NO: 285316 - RNA, 10 nt, Human adenovirus C
agaguguaca

SEQ ID NO: 285317 - RNA, 22 nt, Human adenovirus C
agauacagauugagguacugaa

SEQ ID NO: 285318 - RNA, 13 nt, Human adenovirus C
agauccaacagcu

SEQ ID NO: 285319 - RNA, 16 nt, Human adenovirus C
agaucucuaauaccac

SEQ ID NO: 285320 - RNA, 18 nt, Human adenovirus C
agaucuggaaggugcuga

SEQ ID NO: 285321 - RNA, 15 nt, Human adenovirus C
agaucuugguugugg

SEQ ID NO: 285322 - RNA, 23 nt, Human adenovirus C
agaugauccagucguagcaggag

SEQ ID NO: 285323 - RNA, 20 nt, Human adenovirus C
agauuuuucugcugugcgua

SEQ ID NO: 285324 - RNA, 13 nt, Human adenovirus C
agcaacaacagcg

SEQ ID NO: 285325 - RNA, 16 nt, Human adenovirus C
agcacuggaacacuau

SEQ ID NO: 285326 - RNA, 19 nt, Human adenovirus C
agcagccgccgccaugagc

SEQ ID NO: 285327 - RNA, 13 nt, Human adenovirus C
agcaucauaucau

SEQ ID NO: 285328 - RNA, 16 nt, Human adenovirus C
agccacaaaugggacu

SEQ ID NO: 285329 - RNA, 13 nt, Human adenovirus C
agccauugucaaa

SEQ ID NO: 285330 - RNA, 21 nt, Human adenovirus C
agcccaagagcaacaacagcg

SEQ ID NO: 285331 - RNA, 20 nt, Human adenovirus C
agccgcaggccaaccggcuc

SEQ ID NO: 285332 - RNA, 23 nt, Human adenovirus C
agccugauucgggaguuuaccaa

SEQ ID NO: 285333 - RNA, 23 nt, Human adenovirus C
agccuucagggcagaaaccugcu

SEQ ID NO: 285334 - RNA, 18 nt, Human adenovirus C
agcgccugauuucugcca

SEQ ID NO: 285335 - RNA, 14 nt, Human adenovirus C
agcgcguguaugau

SEQ ID NO: 285336 - RNA, 21 nt, Human adenovirus C
agcgcuuauguuuguuugccu

SEQ ID NO: 285337 - RNA, 16 nt, Human adenovirus C
agcggggucccugugu

SEQ ID NO: 285338 - RNA, 20 nt, Human adenovirus C
agcuauguccaagcgcaaaa

SEQ ID NO: 285339 - RNA, 15 nt, Human adenovirus C
agcucauauuugaca

SEQ ID NO: 285340 - RNA, 20 nt, Human adenovirus C
agcuccagaccauggacagc

SEQ ID NO: 285341 - RNA, 16 nt, Human adenovirus C
agcucgccugcgccau

SEQ ID NO: 285342 - RNA, 17 nt, Human adenovirus C
agcucgcuuaaguucau

SEQ ID NO: 285343 - RNA, 22 nt, Human adenovirus C
agcucggugaaguuuucacucc

SEQ ID NO: 285344 - RNA, 19 nt, Human adenovirus C
agcuggacagcgacaugaa

SEQ ID NO: 285345 - RNA, 12 nt, Human adenovirus C
agcuggugcugc

SEQ ID NO: 285346 - RNA, 18 nt, Human adenovirus C
agcuguuccugguugcga

SEQ ID NO: 285347 - RNA, 22 nt, Human adenovirus C
agcuucagcuugccugcuccag

SEQ ID NO: 285348 - RNA, 18 nt, Human adenovirus C
aggaaagcaaagucaguc

SEQ ID NO: 285349 - RNA, 21 nt, Human adenovirus C
aggaaagcaaagucagucaca

SEQ ID NO: 285350 - RNA, 24 nt, Human adenovirus C
cacaucgaaguagauugcauccca

SEQ ID NO: 285351 - RNA, 22 nt, Human adenovirus C
caccacugcuaccggacuaaca

SEQ ID NO: 285352 - RNA, 15 nt, Human adenovirus C
caccacugugguacu

SEQ ID NO: 285353 - RNA, 18 nt, Human adenovirus C
cacccgagaguguacaaa

SEQ ID NO: 285354 - RNA, 22 nt, Human adenovirus C
caccgaaaccgaauucuccucg

SEQ ID NO: 285355 - RNA, 21 nt, Human adenovirus C
caccuggguucgacacgcggg

SEQ ID NO: 285356 - RNA, 19 nt, Human adenovirus C
cacgcacgagaaggugcug

SEQ ID NO: 285357 - RNA, 16 nt, Human adenovirus C
cacgccgccaccagug

SEQ ID NO: 285358 - RNA, 17 nt, Human adenovirus C
cacgcuggccagcacgc

SEQ ID NO: 285359 - RNA, 14 nt, Human adenovirus C
cacuaucuucauau

SEQ ID NO: 285360 - RNA, 19 nt, Human adenovirus C
cacugauuaaaaacaaguu

SEQ ID NO: 285361 - RNA, 12 nt, Human adenovirus C
cacugcuugcaa

SEQ ID NO: 285362 - RNA, 13 nt, Human adenovirus C
cacuuggugcugg

SEQ ID NO: 285363 - RNA, 13 nt, Human adenovirus C
cagaaugugaugg

SEQ ID NO: 285364 - RNA, 21 nt, Human adenovirus C
cagacauauucuuagguguua

SEQ ID NO: 285365 - RNA, 16 nt, Human adenovirus C
cagauugagguacuga

SEQ ID NO: 285366 - RNA, 11 nt, Human adenovirus C
cagcaacagca

SEQ ID NO: 285367 - RNA, 12 nt, Human adenovirus C
cagcaacagcag

SEQ ID NO: 285368 - RNA, 15 nt, Human adenovirus C
cagcaccuugcauuu

SEQ ID NO: 285369 - RNA, 14 nt, Human adenovirus C
cagcagccgccgcc

SEQ ID NO: 285370 - RNA, 17 nt, Human adenovirus C
cagcagccgccgccaug

SEQ ID NO: 285371 - RNA, 16 nt, Human adenovirus C
cagccccuggaaauca

SEQ ID NO: 285372 - RNA, 14 nt, Human adenovirus C
cagccuccgccgcc

SEQ ID NO: 285373 - RNA, 21 nt, Human adenovirus C
cagcggcaacgugcagaccaa

SEQ ID NO: 285374 - RNA, 15 nt, Human adenovirus C
cagcugcagcucucu

SEQ ID NO: 285375 - RNA, 23 nt, Human adenovirus C
cagcuucagcuugccugcuccag

SEQ ID NO: 285376 - RNA, 16 nt, Human adenovirus C
cagcuugccugcucca

SEQ ID NO: 285377 - RNA, 17 nt, Human adenovirus C
cagcuugccugcuccag

SEQ ID NO: 285378 - RNA, 23 nt, Human adenovirus C
caggaaagcaaagucagucacaa

SEQ ID NO: 285379 - RNA, 13 nt, Human adenovirus C
caggaaccugcuu

SEQ ID NO: 285380 - RNA, 22 nt, Human adenovirus C
caggacgccucggaguaccuga

SEQ ID NO: 285381 - RNA, 14 nt, Human adenovirus C
caggauuacaagcc

SEQ ID NO: 285382 - RNA, 16 nt, Human adenovirus C
cagggcagaaaccugc

SEQ ID NO: 285383 - RNA, 17 nt, Human adenovirus C
caggguugcagcacugg

SEQ ID NO: 285384 - RNA, 21 nt, Human adenovirus C
caguagggaucgccuaccucc

SEQ ID NO: 285385 - RNA, 13 nt, Human adenovirus C
cagucacaauccc

SEQ ID NO: 285386 - RNA, 13 nt, Human adenovirus C
caguucauugacu

SEQ ID NO: 285387 - RNA, 15 nt, Human adenovirus C
cauagcuuauauuga

SEQ ID NO: 285388 - RNA, 22 nt, Human adenovirus C
caucgaaguagauugcauccca

SEQ ID NO: 285389 - RNA, 19 nt, Human adenovirus C
caucgcuaugcgccacugg

SEQ ID NO: 285390 - RNA, 13 nt, Human adenovirus C
caucucuacagcc

SEQ ID NO: 285391 - RNA, 21 nt, Human adenovirus C
caucugaccucauggaggcuu

SEQ ID NO: 285392 - RNA, 23 nt, Human adenovirus C
caugaagaucuggaaggugcuga

SEQ ID NO: 285393 - RNA, 18 nt, Human adenovirus C
caugagcaugacuacgau

SEQ ID NO: 285394 - RNA, 23 nt, Human adenovirus C
caugauccccccaucugaacuca

SEQ ID NO: 285395 - RNA, 16 nt, Human adenovirus C
caugcaagucagggac

SEQ ID NO: 285396 - RNA, 22 nt, Human adenovirus C
cauggaccgcaucaugucgcug

SEQ ID NO: 285397 - RNA, 14 nt, Human adenovirus C
cauuacuaccguca

SEQ ID NO: 285398 - RNA, 14 nt, Human adenovirus C
cauugcguaccuca

SEQ ID NO: 285399 - RNA, 16 nt, Human adenovirus C
cauugcguaccucagg

SEQ ID NO: 285400 - RNA, 20 nt, Human adenovirus C
cauuggccgcggucgcucac

SEQ ID NO: 285401 - RNA, 23 nt, Human adenovirus C
cauugugagcucauauuugacaa

SEQ ID NO: 285402 - RNA, 13 nt, Human adenovirus C
cauuuuucauuca

SEQ ID NO: 285403 - RNA, 18 nt, Human adenovirus C
cauuuuuguuuugcugau

SEQ ID NO: 285404 - RNA, 20 nt, Human adenovirus C
ccaaacgcucaucagugaua

SEQ ID NO: 285405 - RNA, 20 nt, Human adenovirus C
ccaaagcgugcaggggccca

SEQ ID NO: 285406 - RNA, 22 nt, Human adenovirus C
ccaaaguuuaaaugggauguca

SEQ ID NO: 285407 - RNA, 13 nt, Human adenovirus C
ccaacacccagug

SEQ ID NO: 285408 - RNA, 14 nt, Human adenovirus C
ccaacacccagugc

SEQ ID NO: 285409 - RNA, 13 nt, Human adenovirus C
ccaagacuacuca

SEQ ID NO: 285410 - RNA, 15 nt, Human adenovirus C
ccaaggugaaccuga

SEQ ID NO: 285411 - RNA, 15 nt, Human adenovirus C
ccaauucuagaucua

SEQ ID NO: 285412 - RNA, 14 nt, Human adenovirus C
ccaauugugccaaa

SEQ ID NO: 285413 - RNA, 17 nt, Human adenovirus C
ccaauugugccaaaaga

SEQ ID NO: 285414 - RNA, 12 nt, Human adenovirus C
ccacacaagcuc

SEQ ID NO: 285415 - RNA, 22 nt, Human adenovirus C
ccacagaccggucccagcguuu

SEQ ID NO: 285416 - RNA, 19 nt, Human adenovirus C
ccacagcggcggcagcagc

SEQ ID NO: 285417 - RNA, 13 nt, Human adenovirus C
ccacaugauaucc

SEQ ID NO: 285418 - RNA, 23 nt, Human adenovirus C
ccaccacaccucguaauaaccuu

SEQ ID NO: 285419 - RNA, 14 nt, Human adenovirus C
ccaccaccgccgcc

SEQ ID NO: 285420 - RNA, 11 nt, Human adenovirus C
ccacccaaagc

SEQ ID NO: 285421 - RNA, 17 nt, Human adenovirus C
ccacgcccuacaugugg

SEQ ID NO: 285422 - RNA, 17 nt, Human adenovirus C
ccacugcagagcuucau

SEQ ID NO: 285423 - RNA, 19 nt, Human adenovirus C
ccagaacugagacgcauuu

SEQ ID NO: 285424 - RNA, 14 nt, Human adenovirus C
ccagccugugaugc

SEQ ID NO: 285425 - RNA, 16 nt, Human adenovirus C
ccagcugcugagccac

SEQ ID NO: 285426 - RNA, 18 nt, Human adenovirus C
ccaggccauaagguguaa

SEQ ID NO: 285427 - RNA, 23 nt, Human adenovirus C
ccagugcgcgugcgcgggcacua

SEQ ID NO: 285428 - RNA, 21 nt, Human adenovirus C
ccauaagguguaaaccuguga

SEQ ID NO: 285429 - RNA, 12 nt, Human adenovirus C
ccaucaaugcug

SEQ ID NO: 285430 - RNA, 20 nt, Human adenovirus C
ccauccgcaauacagagaca

SEQ ID NO: 285431 - RNA, 14 nt, Human adenovirus C
ccaucugaacucaa

SEQ ID NO: 285432 - RNA, 14 nt, Human adenovirus C
ccauucagaccgug

SEQ ID NO: 285433 - RNA, 14 nt, Human adenovirus C
cccaaaagacauau

SEQ ID NO: 285434 - RNA, 17 nt, Human adenovirus C
cccaaagcagaccaaag

SEQ ID NO: 285435 - RNA, 12 nt, Human adenovirus C
cccaacacacag

SEQ ID NO: 285436 - RNA, 18 nt, Human adenovirus C
cccaacucugguaucuca

SEQ ID NO: 285437 - RNA, 17 nt, Human adenovirus C
cccaaugguuuccaaga

SEQ ID NO: 285438 - RNA, 17 nt, Human adenovirus C
cccagcguuugacgcug

SEQ ID NO: 285439 - RNA, 16 nt, Human adenovirus C
cccagguagagcuuac

SEQ ID NO: 285440 - RNA, 12 nt, Human adenovirus C
ccccacaugaua

SEQ ID NO: 285441 - RNA, 14 nt, Human adenovirus C
ccccaccaccacau

SEQ ID NO: 285442 - RNA, 11 nt, Human adenovirus C
ccccaucugaa

SEQ ID NO: 285443 - RNA, 13 nt, Human adenovirus C
ccccccugcucag

SEQ ID NO: 285444 - RNA, 20 nt, Human adenovirus C
ccccgcagguagacaugauc

SEQ ID NO: 285445 - RNA, 14 nt, Human adenovirus C
ccucccaaaagaca

SEQ ID NO: 285446 - RNA, 13 nt, Human adenovirus C
ccuccugagauac

SEQ ID NO: 285447 - RNA, 22 nt, Human adenovirus C
ccugaacuaccagaacgaccac

SEQ ID NO: 285448 - RNA, 20 nt, Human adenovirus C
ccugauaggggaagugcagg

SEQ ID NO: 285449 - RNA, 18 nt, Human adenovirus C
ccugauucgggaguuuac

SEQ ID NO: 285450 - RNA, 14 nt, Human adenovirus C
ccugcaggagcucc

SEQ ID NO: 285451 - RNA, 17 nt, Human adenovirus C
ccugcaggagcucccgc

SEQ ID NO: 285452 - RNA, 12 nt, Human adenovirus C
ccugcucaggga

SEQ ID NO: 285453 - RNA, 14 nt, Human adenovirus C
ccuggaacugcuug

SEQ ID NO: 285454 - RNA, 17 nt, Human adenovirus C
ccugugcuuugcuccca

SEQ ID NO: 285455 - RNA, 17 nt, Human adenovirus C
ccuuaaaaagcaucaua

SEQ ID NO: 285456 - RNA, 16 nt, Human adenovirus C
ccuuauaucgcccagc

SEQ ID NO: 285457 - RNA, 20 nt, Human adenovirus C
ccuuauaucgcccagcaaua

SEQ ID NO: 285458 - RNA, 14 nt, Human adenovirus C
ccuucaaaucaaac

SEQ ID NO: 285459 - RNA, 13 nt, Human adenovirus C
ccuucauucaguu

SEQ ID NO: 285460 - RNA, 16 nt, Human adenovirus C
ccuucauucaguucau

SEQ ID NO: 285461 - RNA, 16 nt, Human adenovirus C
ccuugguguaaguguu

SEQ ID NO: 285462 - RNA, 15 nt, Human adenovirus C
ccuuucuuaccccuc

SEQ ID NO: 285463 - RNA, 17 nt, Human adenovirus C
ccuuuggacaccuccca

SEQ ID NO: 285464 - RNA, 15 nt, Human adenovirus C
ccuuuuagcugcaaa

SEQ ID NO: 285465 - RNA, 17 nt, Human adenovirus C
cgacaucaccugugucu

SEQ ID NO: 285466 - RNA, 21 nt, Human adenovirus C
cgacucaagcagguuuaccag

SEQ ID NO: 285467 - RNA, 14 nt, Human adenovirus C
cgagacguacuuca

SEQ ID NO: 285468 - RNA, 21 nt, Human adenovirus C
cgagcgccuucuggcgcauuu

SEQ ID NO: 285469 - RNA, 20 nt, Human adenovirus C
cgaggaugggcaggggcuaa

SEQ ID NO: 285470 - RNA, 17 nt, Human adenovirus C
cgcacccacuaucuuca

SEQ ID NO: 285471 - RNA, 15 nt, Human adenovirus C
cgcagauccaacagc

SEQ ID NO: 285472 - RNA, 17 nt, Human adenovirus C
cgcagcugcucaggaac

SEQ ID NO: 285473 - RNA, 19 nt, Human adenovirus C
cgcaguggucuuacaugca

SEQ ID NO: 285474 - RNA, 19 nt, Human adenovirus C
cgcauccccgcggcgcgac

SEQ ID NO: 285475 - RNA, 23 nt, Human adenovirus C
cgcaucgcuaugcgccacuggca

SEQ ID NO: 285476 - RNA, 15 nt, Human adenovirus C
cgcaugcccccaugg

SEQ ID NO: 285477 - RNA, 18 nt, Human adenovirus C
cgcauuuggucagggaaa

SEQ ID NO: 285478 - RNA, 14 nt, Human adenovirus C
cgccaccaaccagc

SEQ ID NO: 285479 - RNA, 13 nt, Human adenovirus C
cgccaccaguguc

SEQ ID NO: 285480 - RNA, 18 nt, Human adenovirus C
cgccauaguugcuugcuu

SEQ ID NO: 285481 - RNA, 15 nt, Human adenovirus C
cgccaugauacccuu

SEQ ID NO: 285482 - RNA, 17 nt, Human adenovirus C
cgcccgcgggauuguga

SEQ ID NO: 285483 - RNA, 13 nt, Human adenovirus C
cgcccgcuuucca

SEQ ID NO: 285484 - RNA, 15 nt, Human adenovirus C
cgcccuacaugugga

SEQ ID NO: 285485 - RNA, 21 nt, Human adenovirus C
cgcccuaccugugcuuugcuc

SEQ ID NO: 285486 - RNA, 21 nt, Human adenovirus C
cgcccugacccggcuaugcga

SEQ ID NO: 285487 - RNA, 19 nt, Human adenovirus C
cgccgcuucagccgcugca

SEQ ID NO: 285488 - RNA, 13 nt, Human adenovirus C
cgccgugggcuaa

SEQ ID NO: 285489 - RNA, 18 nt, Human adenovirus C
cgccguuagcccaagagc

SEQ ID NO: 285490 - RNA, 19 nt, Human adenovirus C
cgccguuuaaaaaucaaag

SEQ ID NO: 285491 - RNA, 19 nt, Human adenovirus C
cgccguuugugccuccgcg

SEQ ID NO: 285492 - RNA, 18 nt, Human adenovirus C
cgccucggaguaccugag

SEQ ID NO: 285493 - RNA, 17 nt, Human adenovirus C
cgccuucauucaguuca

SEQ ID NO: 285494 - RNA, 16 nt, Human adenovirus C
cgcuaaugagcuugau

SEQ ID NO: 285495 - RNA, 18 nt, Human adenovirus C
cgcugcccugguguacca

SEQ ID NO: 285496 - RNA, 13 nt, Human adenovirus C
cgcuguccagcug

SEQ ID NO: 285497 - RNA, 16 nt, Human adenovirus C
cggaaacgguuuucuu

SEQ ID NO: 285498 - RNA, 13 nt, Human adenovirus C
cggaauugcaucc

SEQ ID NO: 285499 - RNA, 15 nt, Human adenovirus C
cggauagcugugacu

SEQ ID NO: 285500 - RNA, 24 nt, Human adenovirus C
cggauuugucacccuuauccucau

SEQ ID NO: 285501 - RNA, 19 nt, Human adenovirus C
cggcagcugcagcucucuu

SEQ ID NO: 285502 - RNA, 22 nt, Human adenovirus C
cgggagcggggucccuguguuc

SEQ ID NO: 285503 - RNA, 19 nt, Human adenovirus C
cggggggagaaacagcauc

SEQ ID NO: 285504 - RNA, 15 nt, Human adenovirus C
cggugacgcgggcgg

SEQ ID NO: 285505 - RNA, 13 nt, Human adenovirus C
cggugauagguuu

SEQ ID NO: 285506 - RNA, 14 nt, Human adenovirus C
cguacucguacaaa

SEQ ID NO: 285507 - RNA, 18 nt, Human adenovirus C
cgugcagaccugcacgau

SEQ ID NO: 285508 - RNA, 16 nt, Human adenovirus C
cguggcgcgggcacaa

SEQ ID NO: 285509 - RNA, 21 nt, Human adenovirus C
cguggggauaugagaugcauc

SEQ ID NO: 285510 - RNA, 21 nt, Human adenovirus C
cguggugccuaaaaaugucuu

SEQ ID NO: 285511 - RNA, 14 nt, Human adenovirus C
cguuagcccaagag

SEQ ID NO: 285512 - RNA, 11 nt, Human adenovirus C
cguugagcaac

SEQ ID NO: 285513 - RNA, 20 nt, Human adenovirus C
cuaagcgacgagaccggaga

SEQ ID NO: 285514 - RNA, 14 nt, Human adenovirus C
cuaaugagcuugau

SEQ ID NO: 285515 - RNA, 14 nt, Human adenovirus C
cuacacagagcgag

SEQ ID NO: 285516 - RNA, 19 nt, Human adenovirus C
cuaccagaacgaccacagc

SEQ ID NO: 285517 - RNA, 18 nt, Human adenovirus C
cuaccuccuuuugagaca

SEQ ID NO: 285518 - RNA, 20 nt, Human adenovirus C
cuaccugugcuuugcuccca

SEQ ID NO: 285519 - RNA, 21 nt, Human adenovirus C
cuacucaacccgaauaaacua

SEQ ID NO: 285520 - RNA, 12 nt, Human adenovirus C
cuauacuacuga

SEQ ID NO: 285521 - RNA, 20 nt, Human adenovirus C
cuaugcgagguaaaccugca

SEQ ID NO: 285522 - RNA, 17 nt, Human adenovirus C
cuauuaggguauaugca

SEQ ID NO: 285523 - RNA, 13 nt, Human adenovirus C
cuauuuuguagaa

SEQ ID NO: 285524 - RNA, 17 nt, Human adenovirus C
cucaaaaacaugcuacc

SEQ ID NO: 285525 - RNA, 15 nt, Human adenovirus C
cucaaaagcaugccu

SEQ ID NO: 285526 - RNA, 22 nt, Human adenovirus C
cucacagaacccuaguauucaa

SEQ ID NO: 285527 - RNA, 15 nt, Human adenovirus C
cucaucagugauauu

SEQ ID NO: 285528 - RNA, 21 nt, Human adenovirus C
cuccacuuaaacucaggcaca

SEQ ID NO: 285529 - RNA, 14 nt, Human adenovirus C
cuccauuuguuuca

SEQ ID NO: 285530 - RNA, 19 nt, Human adenovirus C
cucccaacucugguaucuc

SEQ ID NO: 285531 - RNA, 15 nt, Human adenovirus C
cucccaccacugugg

SEQ ID NO: 285532 - RNA, 18 nt, Human adenovirus C
cucccacggcaugcuugc

SEQ ID NO: 285533 - RNA, 14 nt, Human adenovirus C
cuccgaccgccgcg

SEQ ID NO: 285534 - RNA, 16 nt, Human adenovirus C
cucgcuugguccugua

SEQ ID NO: 285535 - RNA, 16 nt, Human adenovirus C
cucguaggucaaggua

SEQ ID NO: 285536 - RNA, 22 nt, Human adenovirus C
cucguggcgcgggcacaagaac

SEQ ID NO: 285537 - RNA, 21 nt, Human adenovirus C
cucuaugugggauaugcucca

SEQ ID NO: 285538 - RNA, 16 nt, Human adenovirus C
cucugacaaagcccaa

SEQ ID NO: 285539 - RNA, 11 nt, Human adenovirus C
cugaaagccau

SEQ ID NO: 285540 - RNA, 14 nt, Human adenovirus C
cugacaaagcccaa

SEQ ID NO: 285541 - RNA, 18 nt, Human adenovirus C
cugacaaagcccaagaaa

SEQ ID NO: 285542 - RNA, 19 nt, Human adenovirus C
cugauaggggaagugcagg

SEQ ID NO: 285543 - RNA, 20 nt, Human adenovirus C
cugauaggggaagugcaggc

SEQ ID NO: 285544 - RNA, 15 nt, Human adenovirus C
cugaucgccgcggcg

SEQ ID NO: 285545 - RNA, 21 nt, Human adenovirus C
cugauuaaaaacaaguugcau

SEQ ID NO: 285546 - RNA, 12 nt, Human adenovirus C
cugcagagccag

SEQ ID NO: 285547 - RNA, 13 nt, Human adenovirus C
cugcaggagcucc

SEQ ID NO: 285548 - RNA, 20 nt, Human adenovirus C
cugcccugguguaccaggaa

SEQ ID NO: 285549 - RNA, 19 nt, Human adenovirus C
cugcgcgauguugucauca

SEQ ID NO: 285550 - RNA, 19 nt, Human adenovirus C
cugcuggcgcagauccaac

SEQ ID NO: 285551 - RNA, 18 nt, Human adenovirus C
cugcuuucuucccagcug

SEQ ID NO: 285552 - RNA, 17 nt, Human adenovirus C
cuggaaccgcguccgcg

SEQ ID NO: 285553 - RNA, 18 nt, Human adenovirus C
cuggaacugcuuggucaa

SEQ ID NO: 285554 - RNA, 18 nt, Human adenovirus C
cuggaugcuuugagagag

SEQ ID NO: 285555 - RNA, 14 nt, Human adenovirus C
cuggauuacaucaa

SEQ ID NO: 285556 - RNA, 17 nt, Human adenovirus C
cuggcgcauuuggucag

SEQ ID NO: 285557 - RNA, 18 nt, Human adenovirus C
cuggcugugggugacaac

SEQ ID NO: 285558 - RNA, 16 nt, Human adenovirus C
cugggaacggggccga

SEQ ID NO: 285559 - RNA, 20 nt, Human adenovirus C
cuguaacuauuuuguagaau

SEQ ID NO: 285560 - RNA, 22 nt, Human adenovirus C
cuguagucaucgccuucauuca

SEQ ID NO: 285561 - RNA, 13 nt, Human adenovirus C
cugugaguuugau

SEQ ID NO: 285562 - RNA, 18 nt, Human adenovirus C
cugugggaccgccuggaa

SEQ ID NO: 285563 - RNA, 18 nt, Human adenovirus C
cuguggugagcuguuuga

SEQ ID NO: 285564 - RNA, 19 nt, Human adenovirus C
cuguuacccaugauaugau

SEQ ID NO: 285565 - RNA, 19 nt, Human adenovirus C
cuuaaaaagcaucauauca

SEQ ID NO: 285566 - RNA, 17 nt, Human adenovirus C
cuuaaucaaacucacag

SEQ ID NO: 285567 - RNA, 16 nt, Human adenovirus C
cuuaccccuccauuug

SEQ ID NO: 285568 - RNA, 23 nt, Human adenovirus C
cuuacuuaaaaucagucagcaaa

SEQ ID NO: 285569 - RNA, 16 nt, Human adenovirus C
cuuaggccagauugca

SEQ ID NO: 285570 - RNA, 14 nt, Human adenovirus C
cuuagguguuauau

SEQ ID NO: 285571 - RNA, 18 nt, Human adenovirus C
cuuagguguuauauucca

SEQ ID NO: 285572 - RNA, 16 nt, Human adenovirus C
cuuauccucaucugca

SEQ ID NO: 285573 - RNA, 18 nt, Human adenovirus C
cuuauucagcaucaccuc

SEQ ID NO: 285574 - RNA, 15 nt, Human adenovirus C
cuuauuccacugauc

SEQ ID NO: 285575 - RNA, 19 nt, Human adenovirus C
cuucagcuugccugcucca

SEQ ID NO: 285576 - RNA, 20 nt, Human adenovirus C
cuucagggcagaaaccugcu

SEQ ID NO: 285577 - RNA, 14 nt, Human adenovirus C
cuucauauuguugc

SEQ ID NO: 285578 - RNA, 21 nt, Human adenovirus C
cuucuaacacaccuccugaga

SEQ ID NO: 285579 - RNA, 23 nt, Human adenovirus C
cuucuaacacaccuccugagaua

SEQ ID NO: 285580 - RNA, 21 nt, Human adenovirus C
cuugaucaaaauccaaacaga

SEQ ID NO: 285581 - RNA, 16 nt, Human adenovirus C
cuugcaagaacugcua

SEQ ID NO: 285582 - RNA, 14 nt, Human adenovirus C
cuugcaagcagugc

SEQ ID NO: 285583 - RNA, 21 nt, Human adenovirus C
cuugcauuuuauaucgccgcc

SEQ ID NO: 285584 - RNA, 20 nt, Human adenovirus C
cuugccgucugcgccguuua

SEQ ID NO: 285585 - RNA, 20 nt, Human adenovirus C
cuugcuggaacagagcucua

SEQ ID NO: 285586 - RNA, 20 nt, Human adenovirus C
cuugcuugaucaaaauccaa

SEQ ID NO: 285587 - RNA, 21 nt, Human adenovirus C
cuugcuugaucaaaauccaaa

SEQ ID NO: 285588 - RNA, 17 nt, Human adenovirus C
cuuuauugaaagugucu

SEQ ID NO: 285589 - RNA, 14 nt, Human adenovirus C
cuuucacaguuuac

SEQ ID NO: 285590 - RNA, 18 nt, Human adenovirus C
cuuugaauugcccgaaga

SEQ ID NO: 285591 - RNA, 21 nt, Human adenovirus C
cuuugcgucucuggccccgcg

SEQ ID NO: 285592 - RNA, 19 nt, Human adenovirus C
cuuugcucccaaaccucag

SEQ ID NO: 285593 - RNA, 19 nt, Human adenovirus C
cuuuuacacugguguaggu

SEQ ID NO: 285594 - RNA, 19 nt, Human adenovirus C
cuuuucugugcgugcucua

SEQ ID NO: 285595 - RNA, 19 nt, Human adenovirus C
cuuuugaaauccuguggug

SEQ ID NO: 285596 - RNA, 15 nt, Human adenovirus C
cuuuugagacagaga

SEQ ID NO: 285597 - RNA, 19 nt, Human adenovirus C
gaaaaauaaacacguugaa

SEQ ID NO: 285598 - RNA, 13 nt, Human adenovirus C
gaaaaaugacuug

SEQ ID NO: 285599 - RNA, 15 nt, Human adenovirus C
gaaaaauggugucuu

SEQ ID NO: 285600 - RNA, 20 nt, Human adenovirus C
gaaaacaugcaagucaggga

SEQ ID NO: 285601 - RNA, 13 nt, Human adenovirus C
gaaaggacugugu

SEQ ID NO: 285602 - RNA, 15 nt, Human adenovirus C
gaaaggacuguguac

SEQ ID NO: 285603 - RNA, 22 nt, Human adenovirus C
gaaaggacuguguacucugugu

SEQ ID NO: 285604 - RNA, 14 nt, Human adenovirus C
gaaauccuguggug

SEQ ID NO: 285605 - RNA, 20 nt, Human adenovirus C
gaaccccggucguccgccau

SEQ ID NO: 285606 - RNA, 16 nt, Human adenovirus C
gaaccugcuuucuucc

SEQ ID NO: 285607 - RNA, 20 nt, Human adenovirus C
gaaccuguugcauguuaugu

SEQ ID NO: 285608 - RNA, 18 nt, Human adenovirus C
gaaccuuuggacaccucc

SEQ ID NO: 285609 - RNA, 20 nt, Human adenovirus C
gaacgggaagcugcacugcu

SEQ ID NO: 285610 - RNA, 23 nt, Human adenovirus C
gaacgggguguuugacaugacca

SEQ ID NO: 285611 - RNA, 21 nt, Human adenovirus C
gaacugaaagccauugucaaa

SEQ ID NO: 285612 - RNA, 15 nt, Human adenovirus C
gaacuguuuccagaa

SEQ ID NO: 285613 - RNA, 20 nt, Human adenovirus C
gaagaucuggaaggugcuga

SEQ ID NO: 285614 - RNA, 14 nt, Human adenovirus C
gaagcaaaggcgac

SEQ ID NO: 285615 - RNA, 18 nt, Human adenovirus C
gaaggaguuuacauagaa

SEQ ID NO: 285616 - RNA, 19 nt, Human adenovirus C
gaaguagaagaccaccagc

SEQ ID NO: 285617 - RNA, 20 nt, Human adenovirus C
gaaguagaagaccaccagcc

SEQ ID NO: 285618 - RNA, 19 nt, Human adenovirus C
gaaguggccccccugcuca

SEQ ID NO: 285619 - RNA, 22 nt, Human adenovirus C
gaaguggccccccugcucaggg

SEQ ID NO: 285620 - RNA, 23 nt, Human adenovirus C
gaaguggccccccugcucaggga

SEQ ID NO: 285621 - RNA, 22 nt, Human adenovirus C
gaaguuuucacuccacaggcug

SEQ ID NO: 285622 - RNA, 15 nt, Human adenovirus C
gaauaaacuacauga

SEQ ID NO: 285623 - RNA, 18 nt, Human adenovirus C
gaauacuaggguucugug

SEQ ID NO: 285624 - RNA, 20 nt, Human adenovirus C
gaauacuaggguucugugag

SEQ ID NO: 285625 - RNA, 20 nt, Human adenovirus C
gaauauaacaccuaagaaua

SEQ ID NO: 285626 - RNA, 15 nt, Human adenovirus C
gacaauuuacucuau

SEQ ID NO: 285627 - RNA, 20 nt, Human adenovirus C
gacaccacccguguguaccu

SEQ ID NO: 285628 - RNA, 21 nt, Human adenovirus C
gacauauucuuagguguuaua

SEQ ID NO: 285629 - RNA, 14 nt, Human adenovirus C
gacaugaacuuaag

SEQ ID NO: 285630 - RNA, 13 nt, Human adenovirus C
gacccggcacugc

SEQ ID NO: 285631 - RNA, 23 nt, Human adenovirus C
gacccugauaggggaagugcagg

SEQ ID NO: 285632 - RNA, 22 nt, Human adenovirus C
gaccgugguuugcaacuguccu

SEQ ID NO: 285633 - RNA, 19 nt, Human adenovirus C
gacgcaacggacccggcgg

SEQ ID NO: 285634 - RNA, 22 nt, Human adenovirus C
gacuacgaugugcuugcuuuuu

SEQ ID NO: 285635 - RNA, 23 nt, Human adenovirus C
gacuaucgcaacaccacugcuac

SEQ ID NO: 285636 - RNA, 20 nt, Human adenovirus C
gacucaagcagguuuaccag

SEQ ID NO: 285637 - RNA, 14 nt, Human adenovirus C
gacucugacaaagc

SEQ ID NO: 285638 - RNA, 15 nt, Human adenovirus C
gacucuggauguuca

SEQ ID NO: 285639 - RNA, 17 nt, Human adenovirus C
gacuggcgccaggucau

SEQ ID NO: 285640 - RNA, 23 nt, Human adenovirus C
gagacccgcaccaggugcagacc

SEQ ID NO: 285641 - RNA, 12 nt, Human adenovirus C
gagacgcccagg

SEQ ID NO: 285642 - RNA, 22 nt, Human adenovirus C
gcuagguccaggugauaccuga

SEQ ID NO: 285643 - RNA, 14 nt, Human adenovirus C
gcuauacuacugaa

SEQ ID NO: 285644 - RNA, 16 nt, Human adenovirus C
gcuaugcgccacuggc

SEQ ID NO: 285645 - RNA, 22 nt, Human adenovirus C
gcucagcagcuggacagcgaca

SEQ ID NO: 285646 - RNA, 19 nt, Human adenovirus C
gcucguggcgcgggcacaa

SEQ ID NO: 285647 - RNA, 15 nt, Human adenovirus C
gcugggaugggugca

SEQ ID NO: 285648 - RNA, 15 nt, Human adenovirus C
gcugggugacgguga

SEQ ID NO: 285649 - RNA, 17 nt, Human adenovirus C
gcuguauaacgcuggaa

SEQ ID NO: 285650 - RNA, 13 nt, Human adenovirus C
gcuuaaaggguau

SEQ ID NO: 285651 - RNA, 21 nt, Human adenovirus C
gcuuauguuuguuugccuuau

SEQ ID NO: 285652 - RNA, 18 nt, Human adenovirus C
gcuucagccgcugcagcc

SEQ ID NO: 285653 - RNA, 12 nt, Human adenovirus C
gcuugaaccuga

SEQ ID NO: 285654 - RNA, 16 nt, Human adenovirus C
gcuugcaagacugugg

SEQ ID NO: 285655 - RNA, 13 nt, Human adenovirus C
gcuuguagcugag

SEQ ID NO: 285656 - RNA, 19 nt, Human adenovirus C
ggaaccagccugugaugcu

SEQ ID NO: 285657 - RNA, 21 nt, Human adenovirus C
ggaaccagccugugaugcugg

SEQ ID NO: 285658 - RNA, 23 nt, Human adenovirus C
ggaacgccguuggagacugcagc

SEQ ID NO: 285659 - RNA, 13 nt, Human adenovirus C
ggacuguguacuc

SEQ ID NO: 285660 - RNA, 16 nt, Human adenovirus C
ggacuguguacucugu

SEQ ID NO: 285661 - RNA, 19 nt, Human adenovirus C
ggacuguguacucugugug

SEQ ID NO: 285662 - RNA, 15 nt, Human adenovirus C
ggacuugagcuguaa

SEQ ID NO: 285663 - RNA, 17 nt, Human adenovirus C
ggagaaaggacugugua

SEQ ID NO: 285664 - RNA, 22 nt, Human adenovirus C
ggaguuuggggccaguuggcaa

SEQ ID NO: 285665 - RNA, 19 nt, Human adenovirus C
ggcacuuaggccagauugc

SEQ ID NO: 285666 - RNA, 13 nt, Human adenovirus C
ggcagcaacagca

SEQ ID NO: 285667 - RNA, 19 nt, Human adenovirus C
ggcagcagccgcaggccaa

SEQ ID NO: 285668 - RNA, 22 nt, Human adenovirus C
ggccagagcgucccgaccaugg

SEQ ID NO: 285669 - RNA, 14 nt, Human adenovirus C
ggccagauugcaag

SEQ ID NO: 285670 - RNA, 19 nt, Human adenovirus C
ggcccgaugaggccggccu

SEQ ID NO: 285671 - RNA, 14 nt, Human adenovirus C
ggcccggugagcuu

SEQ ID NO: 285672 - RNA, 14 nt, Human adenovirus C
ggccggucgcgaga

SEQ ID NO: 285673 - RNA, 23 nt, Human adenovirus C
ggccugcuugaccacacaaaaga

SEQ ID NO: 285674 - RNA, 23 nt, Human adenovirus C
ggccuuaaaaagcaucauaucau

SEQ ID NO: 285675 - RNA, 19 nt, Human adenovirus C
ggcgaccaucaaugcugga

SEQ ID NO: 285676 - RNA, 13 nt, Human adenovirus C
ggcgaguggcgcu

SEQ ID NO: 285677 - RNA, 16 nt, Human adenovirus C
ggcgccucugcgugaa

SEQ ID NO: 285678 - RNA, 20 nt, Human adenovirus C
ggcgcgcaacgaagcuaugu

SEQ ID NO: 285679 - RNA, 16 nt, Human adenovirus C
ggcgcugcagagccag

SEQ ID NO: 285680 - RNA, 13 nt, Human adenovirus C
ggcggaggcugca

SEQ ID NO: 285681 - RNA, 13 nt, Human adenovirus C
ggcggcgcgcaac

SEQ ID NO: 285682 - RNA, 20 nt, Human adenovirus C
ggcgucgccaggcuguggaa

SEQ ID NO: 285683 - RNA, 18 nt, Human adenovirus C
ggcguuccagacacgguc

SEQ ID NO: 285684 - RNA, 14 nt, Human adenovirus C
ggcuauuaccacca

SEQ ID NO: 285685 - RNA, 22 nt, Human adenovirus C
ggcucaggaaagcaaagucagu

SEQ ID NO: 285686 - RNA, 14 nt, Human adenovirus C
ggcuccagcauuga

SEQ ID NO: 285687 - RNA, 21 nt, Human adenovirus C
uaaauaaaaaccagacucugu

SEQ ID NO: 285688 - RNA, 14 nt, Human adenovirus C
uaaauuacuuacuu

SEQ ID NO: 285689 - RNA, 14 nt, Human adenovirus C
uaaauuuaccccaa

SEQ ID NO: 285690 - RNA, 12 nt, Human adenovirus C
uaagagugcaga

SEQ ID NO: 285691 - RNA, 21 nt, Human adenovirus C
uaagcugggaugggugcauac

SEQ ID NO: 285692 - RNA, 18 nt, Human adenovirus C
uaagguguaaaccuguga

SEQ ID NO: 285693 - RNA, 19 nt, Human adenovirus C
uaagguguaaaccugugau

SEQ ID NO: 285694 - RNA, 16 nt, Human adenovirus C
uaagucgcagcugcuc

SEQ ID NO: 285695 - RNA, 19 nt, Human adenovirus C
uaagucgcagcugcucagg

SEQ ID NO: 285696 - RNA, 17 nt, Human adenovirus C
uaauaaagggugagaua

SEQ ID NO: 285697 - RNA, 22 nt, Human adenovirus C
uaaucacccgagaguguacaaa

SEQ ID NO: 285698 - RNA, 16 nt, Human adenovirus C
uaauguuuaacuugca

SEQ ID NO: 285699 - RNA, 19 nt, Human adenovirus C
uaauguuuaacuugcaugg

SEQ ID NO: 285700 - RNA, 21 nt, Human adenovirus C
uaauugcgcuaaugagcuuga

SEQ ID NO: 285701 - RNA, 16 nt, Human adenovirus C
uacacaggguugcagc

SEQ ID NO: 285702 - RNA, 18 nt, Human adenovirus C
uacaucugaccucaugga

SEQ ID NO: 285703 - RNA, 18 nt, Human adenovirus C
uaccccaaguucaugccu

SEQ ID NO: 285704 - RNA, 22 nt, Human adenovirus C
uaccuccuuuugagacagagac

SEQ ID NO: 285705 - RNA, 21 nt, Human adenovirus C
uaccugcuuuacggauuuguc

SEQ ID NO: 285706 - RNA, 16 nt, Human adenovirus C
uacggauagcugugac

SEQ ID NO: 285707 - RNA, 15 nt, Human adenovirus C
uacggauuugucacc

SEQ ID NO: 285708 - RNA, 13 nt, Human adenovirus C
uacuaggagacac

SEQ ID NO: 285709 - RNA, 22 nt, Human adenovirus C
uacuaggguucugugaguuuga

SEQ ID NO: 285710 - RNA, 23 nt, Human adenovirus C
uacucaacccgaauaaacuacau

SEQ ID NO: 285711 - RNA, 22 nt, Human adenovirus C
uacugaaugaaaaaugacuuga

SEQ ID NO: 285712 - RNA, 11 nt, Human adenovirus C
uacuggcugca

SEQ ID NO: 285713 - RNA, 16 nt, Human adenovirus C
uagaagaccaccagcc

SEQ ID NO: 285714 - RNA, 20 nt, Human adenovirus C
uagaaucuacuggggcuccu

SEQ ID NO: 285715 - RNA, 22 nt, Human adenovirus C
uagcccaagagcaacaacagcg

SEQ ID NO: 285716 - RNA, 23 nt, Human adenovirus C
uaggaaucuaacuuuuagcuuaa

SEQ ID NO: 285717 - RNA, 19 nt, Human adenovirus C
uagggaucgccuaccuccu

SEQ ID NO: 285718 - RNA, 15 nt, Human adenovirus C
uaggggaagugcagg

SEQ ID NO: 285719 - RNA, 16 nt, Human adenovirus C
uaggguauaugcaaag

SEQ ID NO: 285720 - RNA, 15 nt, Human adenovirus C
uagguccaggugaua

SEQ ID NO: 285721 - RNA, 21 nt, Human adenovirus C
uagucaucgccuucauucagu

SEQ ID NO: 285722 - RNA, 22 nt, Human adenovirus C
uauacccacaaccuucaaauca

SEQ ID NO: 285723 - RNA, 23 nt, Human adenovirus C
uauagccccaccaccacauagcu

SEQ ID NO: 285724 - RNA, 14 nt, Human adenovirus C
uaugagaugcaucu

SEQ ID NO: 285725 - RNA, 22 nt, Human adenovirus C
uaugcgccacuggcagggacac

SEQ ID NO: 285726 - RNA, 13 nt, Human adenovirus C
uauuaccaccaca

SEQ ID NO: 285727 - RNA, 21 nt, Human adenovirus C
uauuuccugcagauucacuca

SEQ ID NO: 285728 - RNA, 22 nt, Human adenovirus C
ucaacccgaauaaacuacauga

SEQ ID NO: 285729 - RNA, 12 nt, Human adenovirus C
ucaacuugucau

SEQ ID NO: 285730 - RNA, 14 nt, Human adenovirus C
ucaauauaagcuau

SEQ ID NO: 285731 - RNA, 23 nt, Human adenovirus C
ucaauugcagaaaauuucaaguc

SEQ ID NO: 285732 - RNA, 22 nt, Human adenovirus C
ucacccaaugguuuccaagaaa

SEQ ID NO: 285733 - RNA, 16 nt, Human adenovirus C
ucagcuugccugcucc

SEQ ID NO: 285734 - RNA, 18 nt, Human adenovirus C
ucagcuugccugcuccag

SEQ ID NO: 285735 - RNA, 17 nt, Human adenovirus C
ugaggcccgaucacuug

SEQ ID NO: 285736 - RNA, 20 nt, Human adenovirus C
ugagguacgaugagacccgc

SEQ ID NO: 285737 - RNA, 23 nt, Human adenovirus C
ugaguguguuacuuuucagcaga

SEQ ID NO: 285738 - RNA, 20 nt, Human adenovirus C
ugaguuuuguuacuuugaau

SEQ ID NO: 285739 - RNA, 18 nt, Human adenovirus C
ugauaggggaagugcagg

SEQ ID NO: 285740 - RNA, 19 nt, Human adenovirus C
ugaucaaaauccaaacaga

SEQ ID NO: 285741 - RNA, 16 nt, Human adenovirus C
ugaucaauauaagcua

SEQ ID NO: 285742 - RNA, 23 nt, Human adenovirus C
ugaucaauauaagcuauguggug

SEQ ID NO: 285743 - RNA, 13 nt, Human adenovirus C
ugauucuuugaau

SEQ ID NO: 285744 - RNA, 22 nt, Human adenovirus C
ugauuuacgggcccaccggcug

SEQ ID NO: 285745 - RNA, 14 nt, Human adenovirus C
ugcaagaacugcua

SEQ ID NO: 285746 - RNA, 21 nt, Human adenovirus C
ugcaaguacaagauuagcaaa

SEQ ID NO: 285747 - RNA, 22 nt, Human adenovirus C
ugcaaguacaagauuagcaaac

SEQ ID NO: 285748 - RNA, 14 nt, Human adenovirus C
ugcaagucagggac

SEQ ID NO: 285749 - RNA, 15 nt, Human adenovirus C
ugcacgcuggccagc

SEQ ID NO: 285750 - RNA, 19 nt, Human adenovirus C
ugcacugcaaauuugauca

SEQ ID NO: 285751 - RNA, 14 nt, Human adenovirus C
ugcacugcuugcaa

SEQ ID NO: 285752 - RNA, 16 nt, Human adenovirus C
ugcagcacuggaacac

SEQ ID NO: 285753 - RNA, 17 nt, Human adenovirus C
ugcagcagccgccgcca

SEQ ID NO: 285754 - RNA, 14 nt, Human adenovirus C
ugcagccuccgccg

SEQ ID NO: 285755 - RNA, 16 nt, Human adenovirus C
ugcauuacuaccguca

SEQ ID NO: 285756 - RNA, 15 nt, Human adenovirus C
ugcccggggaguuua

SEQ ID NO: 285757 - RNA, 15 nt, Human adenovirus C
ugccuuuaucugcau

SEQ ID NO: 285758 - RNA, 17 nt, Human adenovirus C
ugcgcauugcguaccuc

SEQ ID NO: 285759 - RNA, 15 nt, Human adenovirus C
ugcgccauagucaau

SEQ ID NO: 285760 - RNA, 13 nt, Human adenovirus C
ugcgcuaaugagc

SEQ ID NO: 285761 - RNA, 18 nt, Human adenovirus C
ugcggccuaccgggggga

SEQ ID NO: 285762 - RNA, 22 nt, Human adenovirus C
ugcggccucuugcaagucaucg

SEQ ID NO: 285763 - RNA, 14 nt, Human adenovirus C
ugcuaccucuuuga

SEQ ID NO: 285764 - RNA, 16 nt, Human adenovirus C
ugcugagccacaggcu

SEQ ID NO: 285765 - RNA, 17 nt, Human adenovirus C
ugcuggccugcacccgc

SEQ ID NO: 285766 - RNA, 21 nt, Human adenovirus C
ugcuggcgcagauccaacagc

SEQ ID NO: 285767 - RNA, 18 nt, Human adenovirus C
ugcugugcguaacuugcu

SEQ ID NO: 285768 - RNA, 14 nt, Human adenovirus C
ugcuuaacgagucu

SEQ ID NO: 285769 - RNA, 20 nt, Human adenovirus C
ugcuuaacgagucugggcaa

SEQ ID NO: 285770 - RNA, 13 nt, Human adenovirus C
ugcuuccuugcaa

SEQ ID NO: 285771 - RNA, 11 nt, Human adenovirus C
ugcuuggucaa

SEQ ID NO: 285772 - RNA, 22 nt, Human adenovirus C
ugcuuugcucccaaaccucagc

SEQ ID NO: 285773 - RNA, 18 nt, Human adenovirus C
uggaacgccguuggagac

SEQ ID NO: 285774 - RNA, 16 nt, Human adenovirus C
uggaagcauugugagc

SEQ ID NO: 285775 - RNA, 13 nt, Human adenovirus C
uggaaggugcuga

SEQ ID NO: 285776 - RNA, 22 nt, Human adenovirus C
uggaauauaacaccuaagaaua

SEQ ID NO: 285777 - RNA, 17 nt, Human adenovirus C
uggacagcgacaugaac

SEQ ID NO: 285778 - RNA, 21 nt, Human adenovirus C
uggacagcgacaugaacuuaa

SEQ ID NO: 285779 - RNA, 13 nt, Human adenovirus C
uggauauacuaca

SEQ ID NO: 285780 - RNA, 18 nt, Human adenovirus C
uggauggccuuugccugg

SEQ ID NO: 285781 - RNA, 22 nt, Human adenovirus C
uggcaccccuauucgacaccac

SEQ ID NO: 285782 - RNA, 22 nt, Human adenovirus C
uggcacuuaggccagauugcaa

SEQ ID NO: 285783 - RNA, 16 nt, Human adenovirus C
uggcaugacacuacga

SEQ ID NO: 285784 - RNA, 20 nt, Human adenovirus C
uggccccccugcucagggau

SEQ ID NO: 285785 - RNA, 19 nt, Human adenovirus C
uggcuuauuuguugccuaa

SEQ ID NO: 285786 - RNA, 15 nt, Human adenovirus C
ugggcuaaucuuggu

SEQ ID NO: 285787 - RNA, 17 nt, Human adenovirus C
uugucacccuuauccuc

SEQ ID NO: 285788 - RNA, 21 nt, Human adenovirus C
uugucccuccgcacccacuau

SEQ ID NO: 285789 - RNA, 15 nt, Human adenovirus C
uugugguucuugcag

SEQ ID NO: 285790 - RNA, 14 nt, Human adenovirus C
uuguuucacccaau

SEQ ID NO: 285791 - RNA, 19 nt, Human adenovirus C
uuuaagcgcgaaaacuacg

SEQ ID NO: 285792 - RNA, 16 nt, Human adenovirus C
uuuacccacccaaagc

SEQ ID NO: 285793 - RNA, 20 nt, Human adenovirus C
uuuagcuuaaugaccagaca

SEQ ID NO: 285794 - RNA, 14 nt, Human adenovirus C
uuucaagugacaaa

SEQ ID NO: 285795 - RNA, 20 nt, Human adenovirus C
uuucacccaaugguuuccaa

SEQ ID NO: 285796 - RNA, 14 nt, Human adenovirus C
uuuccaggggcugg

SEQ ID NO: 285797 - RNA, 17 nt, Human adenovirus C
uuucugugcgugcucua

SEQ ID NO: 285798 - RNA, 21 nt, Human adenovirus C
uuugaaucugggucaccaggc

SEQ ID NO: 285799 - RNA, 17 nt, Human adenovirus C
uuugaucaagcaagugu

SEQ ID NO: 285800 - RNA, 15 nt, Human adenovirus C
uuugcgcccuaccug

SEQ ID NO: 285801 - RNA, 16 nt, Human adenovirus C
uuugcgcccuaccugu

SEQ ID NO: 285802 - RNA, 20 nt, Human adenovirus C
uuugggcaccuaugacaagc

SEQ ID NO: 285803 - RNA, 19 nt, Human adenovirus C
uuuggggccaguuggcaaa

SEQ ID NO: 285804 - RNA, 15 nt, Human adenovirus C
uuuguuucacccaau

SEQ ID NO: 285805 - RNA, 19 nt, Human adenovirus C
uuuucugugcgugcucuac

SEQ ID NO: 285806 - RNA, 18 nt, Human adenovirus C
uuuuuccaggacguggua

SEQ ID NO: 285807 - RNA, 18 nt, Human adenovirus C
uuuuucuguggugguucc

SEQ ID NO: 285808 - RNA, 14 nt, Human adenovirus C
uuuuugcgcccuac

SEQ ID NO: 285809 - RNA, 18 nt, Human adenovirus C
uuuuuugggcaccuauga

SEQ ID NO: 285810 - RNA, 13 nt, Human adenovirus C
aaaaaacucacca

SEQ ID NO: 285811 - RNA, 18 nt, Human adenovirus C
aaaaacaugguucuucca

SEQ ID NO: 285812 - RNA, 19 nt, Human adenovirus C
aaaaagaaguggcgcuccu

SEQ ID NO: 285813 - RNA, 14 nt, Human adenovirus C
aaaaaugucuuuca

SEQ ID NO: 285814 - RNA, 20 nt, Human adenovirus C
aaaaaugucuuucaguagca

SEQ ID NO: 285815 - RNA, 15 nt, Human adenovirus C
aaaacaugcuaccuc

SEQ ID NO: 285816 - RNA, 17 nt, Human adenovirus C
aaaagaaagaugaugau

SEQ ID NO: 285817 - RNA, 12 nt, Human adenovirus C
aaaagagccguc

SEQ ID NO: 285818 - RNA, 13 nt, Human adenovirus C
aaaagauaccucu

SEQ ID NO: 285819 - RNA, 13 nt, Human adenovirus C
aaacauaacaugc

SEQ ID NO: 285820 - RNA, 22 nt, Human adenovirus C
aaacauauuaggaaccagccug

SEQ ID NO: 285821 - RNA, 21 nt, Human adenovirus C
aaacccagcuucagcuugccu

SEQ ID NO: 285822 - RNA, 22 nt, Human adenovirus C
aaacccgccaggcgaggggcuc

SEQ ID NO: 285823 - RNA, 22 nt, Human adenovirus C
aaaccguguggaauauaacacc

SEQ ID NO: 285824 - RNA, 10 nt, Human adenovirus C
aaaccucagc

SEQ ID NO: 285825 - RNA, 22 nt, Human adenovirus C
aaacuccccgggcagcucgcuu

SEQ ID NO: 285826 - RNA, 14 nt, Human adenovirus C
aaagaagagaugcu

SEQ ID NO: 285827 - RNA, 12 nt, Human adenovirus C
aaagaugaugau

SEQ ID NO: 285828 - RNA, 18 nt, Human adenovirus C
aaagcuaaagcgggucaa

SEQ ID NO: 285829 - RNA, 15 nt, Human adenovirus C
aaaggacuguguacu

SEQ ID NO: 285830 - RNA, 12 nt, Human adenovirus C
aaaggguauaua

SEQ ID NO: 285831 - RNA, 14 nt, Human adenovirus C
aaaggugacucugg

SEQ ID NO: 285832 - RNA, 19 nt, Human adenovirus C
aaaucaaagaagagaugcu

SEQ ID NO: 285833 - RNA, 22 nt, Human adenovirus C
aaauucccacgcccuacaugug

SEQ ID NO: 285834 - RNA, 22 nt, Human adenovirus C
aacaacagcugccgccaugggc

SEQ ID NO: 285835 - RNA, 19 nt, Human adenovirus C
aacacaccuccugagauac

SEQ ID NO: 285836 - RNA, 21 nt, Human adenovirus C
aacagcagcggucacacagaa

SEQ ID NO: 285837 - RNA, 14 nt, Human adenovirus C
aacagcgccaaggc

SEQ ID NO: 285838 - RNA, 23 nt, Human adenovirus C
aacaugcaagucagggacaugcu

SEQ ID NO: 285839 - RNA, 16 nt, Human adenovirus C
aaccacggucauucaa

SEQ ID NO: 285840 - RNA, 17 nt, Human adenovirus C
aaccagccugugaugcu

SEQ ID NO: 285841 - RNA, 18 nt, Human adenovirus C
aaccgcauugggagggga

SEQ ID NO: 285842 - RNA, 22 nt, Human adenovirus C
aaccugaacgggguguuugaca

SEQ ID NO: 285843 - RNA, 12 nt, Human adenovirus C
aacgaagcuaug

SEQ ID NO: 285844 - RNA, 21 nt, Human adenovirus C
aacgaaguggccccccugcuc

SEQ ID NO: 285845 - RNA, 15 nt, Human adenovirus C
aacgccguuggagac

SEQ ID NO: 285846 - RNA, 20 nt, Human adenovirus C
aacgugucguaugugucaug

SEQ ID NO: 285847 - RNA, 15 nt, Human adenovirus C
aacuacgucaucucc

SEQ ID NO: 285848 - RNA, 19 nt, Human adenovirus C
aacuccccgggcagcucgc

SEQ ID NO: 285849 - RNA, 20 nt, Human adenovirus C
aacuuaccugccuuuaucug

SEQ ID NO: 285850 - RNA, 22 nt, Human adenovirus C
aagaccaccagccaaacccgcc

SEQ ID NO: 285851 - RNA, 23 nt, Human adenovirus C
aagacugugggggcaacaucucc

SEQ ID NO: 285852 - RNA, 18 nt, Human adenovirus C
aagaucucuaauaccaca

SEQ ID NO: 285853 - RNA, 22 nt, Human adenovirus C
aagaucuggaaggugcugaggu

SEQ ID NO: 285854 - RNA, 14 nt, Human adenovirus C
aagauuauacccac

SEQ ID NO: 285855 - RNA, 17 nt, Human adenovirus C
aagcaaagucagucaca

SEQ ID NO: 285856 - RNA, 13 nt, Human adenovirus C
aagcaucauauca

SEQ ID NO: 285857 - RNA, 18 nt, Human adenovirus C
aagcauugugagcucaua

SEQ ID NO: 285858 - RNA, 18 nt, Human adenovirus C
aagcgagcugcccgggga

SEQ ID NO: 285859 - RNA, 19 nt, Human adenovirus C
aagcuauguccaagcgcaa

SEQ ID NO: 285860 - RNA, 15 nt, Human adenovirus C
aaggauaauugcgcu

SEQ ID NO: 285861 - RNA, 17 nt, Human adenovirus C
aaggauaauugcgcuaa

SEQ ID NO: 285862 - RNA, 13 nt, Human adenovirus C
aagggugagauaa

SEQ ID NO: 285863 - RNA, 21 nt, Human adenovirus C
aagggugggaaagaauauaua

SEQ ID NO: 285864 - RNA, 17 nt, Human adenovirus C
aagguacggugaucaau

SEQ ID NO: 285865 - RNA, 20 nt, Human adenovirus C
aaggugggggucucauguag

SEQ ID NO: 285866 - RNA, 17 nt, Human adenovirus C
aagguguaaaccuguga

SEQ ID NO: 285867 - RNA, 11 nt, Human adenovirus C
aagucagggac

SEQ ID NO: 285868 - RNA, 13 nt, Human adenovirus C
aagucagucacaa

SEQ ID NO: 285869 - RNA, 17 nt, Human adenovirus C
aagucauuuuucauuca

SEQ ID NO: 285870 - RNA, 15 nt, Human adenovirus C
aagucgcagcugcuc

SEQ ID NO: 285871 - RNA, 16 nt, Human adenovirus C
aagucgcagcugcuca

SEQ ID NO: 285872 - RNA, 11 nt, Human adenovirus C
aagugacaaaa

SEQ ID NO: 285873 - RNA, 14 nt, Human adenovirus C
aagugcuuugcccg

SEQ ID NO: 285874 - RNA, 22 nt, Human adenovirus C
aaguggccccccugcucaggga

SEQ ID NO: 285875 - RNA, 13 nt, Human adenovirus C
aaguucaugucgc

SEQ ID NO: 285876 - RNA, 20 nt, Human adenovirus C
aaguucaugucgcuguccag

SEQ ID NO: 285877 - RNA, 23 nt, Human adenovirus C
aaguugcauguggaaaaaucaaa

SEQ ID NO: 285878 - RNA, 19 nt, Human adenovirus C
aauaaaaaacucaccaagg

SEQ ID NO: 285879 - RNA, 16 nt, Human adenovirus C
aauaagaucucuaaua

SEQ ID NO: 285880 - RNA, 17 nt, Human adenovirus C
aauaagguucauggugg

SEQ ID NO: 285881 - RNA, 20 nt, Human adenovirus C
aauacuaggguucugugagu

SEQ ID NO: 285882 - RNA, 23 nt, Human adenovirus C
aauaguaguacggauagcuguga

SEQ ID NO: 285883 - RNA, 12 nt, Human adenovirus C
aauaugacuacg

SEQ ID NO: 285884 - RNA, 21 nt, Human adenovirus C
aaucacccgagaguguacaaa

SEQ ID NO: 285885 - RNA, 23 nt, Human adenovirus C
aauccacagcggcggcagcagca

SEQ ID NO: 285886 - RNA, 16 nt, Human adenovirus C
aaucugcgcacugugg

SEQ ID NO: 285887 - RNA, 18 nt, Human adenovirus C
aaugaaaaaugacuugaa

SEQ ID NO: 285888 - RNA, 18 nt, Human adenovirus C
aauggaagacaucaacuu

SEQ ID NO: 285889 - RNA, 22 nt, Human adenovirus C
aauguacuaggagacacuuuca

SEQ ID NO: 285890 - RNA, 20 nt, Human adenovirus C
aauguaucgaggacuugcuu

SEQ ID NO: 285891 - RNA, 22 nt, Human adenovirus C
aauugcauccguggccuugcag

SEQ ID NO: 285892 - RNA, 21 nt, Human adenovirus C
aauuuaccccaaguucaugcc

SEQ ID NO: 285893 - RNA, 15 nt, Human adenovirus C
aauuugaagagcuuu

SEQ ID NO: 285894 - RNA, 23 nt, Human adenovirus C
acaacagcgccaaggcuaccgcu

SEQ ID NO: 285895 - RNA, 23 nt, Human adenovirus C
acaaccuucaaaucaaacuuucc

SEQ ID NO: 285896 - RNA, 21 nt, Human adenovirus C
acaagucaacggauguggcau

SEQ ID NO: 285897 - RNA, 23 nt, Human adenovirus C
acaagugggaauuugaagagcuu

SEQ ID NO: 285898 - RNA, 12 nt, Human adenovirus C
acacacaauaaa

SEQ ID NO: 285899 - RNA, 13 nt, Human adenovirus C
acacagaagcaaa

SEQ ID NO: 285900 - RNA, 14 nt, Human adenovirus C
acacagaagcaaag

SEQ ID NO: 285901 - RNA, 15 nt, Human adenovirus C
acaccuccugagaua

SEQ ID NO: 285902 - RNA, 15 nt, Human adenovirus C
acacuuucaauaaag

SEQ ID NO: 285903 - RNA, 20 nt, Human adenovirus C
acagaaauuagaaucuacug

SEQ ID NO: 285904 - RNA, 18 nt, Human adenovirus C
acagcaacuuucuaacca

SEQ ID NO: 285905 - RNA, 13 nt, Human adenovirus C
gguggcugcagcg

SEQ ID NO: 285906 - RNA, 12 nt, Human adenovirus C
gguguagguuaa

SEQ ID NO: 285907 - RNA, 20 nt, Human adenovirus C
gguguccuuggaugaugcau

SEQ ID NO: 285908 - RNA, 15 nt, Human adenovirus C
gguugcagcacugga

SEQ ID NO: 285909 - RNA, 13 nt, Human adenovirus C
gguuuaccaguuu

SEQ ID NO: 285910 - RNA, 20 nt, Human adenovirus C
gguuuuaauaagagugcaga

SEQ ID NO: 285911 - RNA, 19 nt, Human adenovirus C
guaaaggugacucuggaug

SEQ ID NO: 285912 - RNA, 16 nt, Human adenovirus C
guaagucgcagcugcu

SEQ ID NO: 285913 - RNA, 22 nt, Human adenovirus C
guaagucuaagcagccgccgcc

SEQ ID NO: 285914 - RNA, 23 nt, Human adenovirus C
guacaguagggaucgccuaccuc

SEQ ID NO: 285915 - RNA, 21 nt, Human adenovirus C
guacauuauuuuuacauguuu

SEQ ID NO: 285916 - RNA, 16 nt, Human adenovirus C
guaccuggggacuguu

SEQ ID NO: 285917 - RNA, 22 nt, Human adenovirus C
guaccuuaaucaaacucacaga

SEQ ID NO: 285918 - RNA, 16 nt, Human adenovirus C
guacggauagcuguga

SEQ ID NO: 285919 - RNA, 12 nt, Human adenovirus C
guacuuugacau

SEQ ID NO: 285920 - RNA, 19 nt, Human adenovirus C
guagaagaccaccagccaa

SEQ ID NO: 285921 - RNA, 20 nt, Human adenovirus C
guagaagaccaccagccaaa

SEQ ID NO: 285922 - RNA, 22 nt, Human adenovirus C
guagcacgucgccaccgccgcc

SEQ ID NO: 285923 - RNA, 21 nt, Human adenovirus C
guauagccccaccaccacaua

SEQ ID NO: 285924 - RNA, 19 nt, Human adenovirus C
guaucgaggacuugcuuaa

SEQ ID NO: 285925 - RNA, 20 nt, Human adenovirus C
gucaaggacaagcagccgaa

SEQ ID NO: 285926 - RNA, 17 nt, Human adenovirus C
gucccgcucccaccacu

SEQ ID NO: 285927 - RNA, 12 nt, Human adenovirus C
guccggcucacc

SEQ ID NO: 285928 - RNA, 13 nt, Human adenovirus C
gucuccgaaccuu

SEQ ID NO: 285929 - RNA, 15 nt, Human adenovirus C
gucugaagacaccuu

SEQ ID NO: 285930 - RNA, 21 nt, Human adenovirus C
gugacaaaaagaaguggcgcu

SEQ ID NO: 285931 - RNA, 16 nt, Human adenovirus C
gugagauaauguuuaa

SEQ ID NO: 285932 - RNA, 14 nt, Human adenovirus C
gugcagaccugcac

SEQ ID NO: 285933 - RNA, 23 nt, Human adenovirus C
gugcgcgggcacuaccgcgcgcc

SEQ ID NO: 285934 - RNA, 23 nt, Human adenovirus C
gugcugcgcgcggagguugcugg

SEQ ID NO: 285935 - RNA, 19 nt, Human adenovirus C
guggacuuuuccagcguua

SEQ ID NO: 285936 - RNA, 18 nt, Human adenovirus C
guggccccccugcucagg

SEQ ID NO: 285937 - RNA, 23 nt, Human adenovirus C
guggggcuauacuacugaaugaa

SEQ ID NO: 285938 - RNA, 19 nt, Human adenovirus C
guggggcuccucccaggca

SEQ ID NO: 285939 - RNA, 19 nt, Human adenovirus C
guggguucuuuugucaugg

SEQ ID NO: 285940 - RNA, 17 nt, Human adenovirus C
gugguacuucccagaga

SEQ ID NO: 285941 - RNA, 16 nt, Human adenovirus C
guguaaaccugugauu

SEQ ID NO: 285942 - RNA, 12 nt, Human adenovirus C
guguaccaggaa

SEQ ID NO: 285943 - RNA, 13 nt, Human adenovirus C
gugucuccuagua

SEQ ID NO: 285944 - RNA, 23 nt, Human adenovirus C
guuaagcugggaugggugcauac

SEQ ID NO: 285945 - RNA, 22 nt, Human adenovirus C
guuacuuugaauugcccgaaga

SEQ ID NO: 285946 - RNA, 20 nt, Human adenovirus C
guuacuuuucagcagauuaa

SEQ ID NO: 285947 - RNA, 15 nt, Human adenovirus C
guucagauacauggg

SEQ ID NO: 285948 - RNA, 19 nt, Human adenovirus C
guucagauacaugggcaua

SEQ ID NO: 285949 - RNA, 22 nt, Human adenovirus C
guucaugccuuugucaaugacu

SEQ ID NO: 285950 - RNA, 22 nt, Human adenovirus C
guucccgggucaaagaauccaa

SEQ ID NO: 285951 - RNA, 20 nt, Human adenovirus C
guucuugcagauauggcccu

SEQ ID NO: 285952 - RNA, 22 nt, Human adenovirus C
ugaacgccaccguuuuuaccca

SEQ ID NO: 285953 - RNA, 16 nt, Human adenovirus C
ugaacgggaagcugca

SEQ ID NO: 285954 - RNA, 17 nt, Human adenovirus C
ugaacgggaagcugcac

SEQ ID NO: 285955 - RNA, 18 nt, Human adenovirus C
ugaacuguuuccagaacu

SEQ ID NO: 285956 - RNA, 22 nt, Human adenovirus C
ugaacuguuuccagaacugaga

SEQ ID NO: 285957 - RNA, 19 nt, Human adenovirus C
ugaaggaguuuacauagaa

SEQ ID NO: 285958 - RNA, 22 nt, Human adenovirus C
ugaauacuaggguucugugagu

SEQ ID NO: 285959 - RNA, 17 nt, Human adenovirus C
ugacaaagcccaagaaa

SEQ ID NO: 285960 - RNA, 22 nt, Human adenovirus C
ugacgacgagguggaacugcug

SEQ ID NO: 285961 - RNA, 21 nt, Human adenovirus C
ugacgcguuccggcagcagcc

SEQ ID NO: 285962 - RNA, 14 nt, Human adenovirus C
ugacggcagcugca

SEQ ID NO: 285963 - RNA, 21 nt, Human adenovirus C
ugacuacguccggcguuccau

SEQ ID NO: 285964 - RNA, 14 nt, Human adenovirus C
ugacucuggauguu

SEQ ID NO: 285965 - RNA, 14 nt, Human adenovirus C
ugacugcgcguaac

SEQ ID NO: 285966 - RNA, 22 nt, Human adenovirus C
ugagagaguggauauacuacaa

SEQ ID NO: 285967 - RNA, 21 nt, Human adenovirus C
ugagauaauguuuaacuugca

SEQ ID NO: 285968 - RNA, 22 nt, Human adenovirus C
ugagauaauguuuaacuugcau

SEQ ID NO: 285969 - RNA, 14 nt, Human adenovirus C
ugagcaggaacuga

SEQ ID NO: 285970 - RNA, 23 nt, Human adenovirus C
ugagcaggaacugaaagccauug

SEQ ID NO: 285971 - RNA, 22 nt, Human adenovirus C
ugagcaugacuacgaugugcuu

SEQ ID NO: 285972 - RNA, 20 nt, Human adenovirus C
ugagcuugaaccugaaagag

SEQ ID NO: 285973 - RNA, 15 nt, Human adenovirus C
ugagguacgaugaga

SEQ ID NO: 285974 - RNA, 17 nt, Human adenovirus C
ugaucaccguaccuuaa

SEQ ID NO: 285975 - RNA, 22 nt, Human adenovirus C
ugauguaaguuuaauaaagggu

SEQ ID NO: 285976 - RNA, 17 nt, Human adenovirus C
ugauguuucugaucaga

SEQ ID NO: 285977 - RNA, 19 nt, Human adenovirus C
ugauucgggaguuuaccaa

SEQ ID NO: 285978 - RNA, 13 nt, Human adenovirus C
ugcaagucaggga

SEQ ID NO: 285979 - RNA, 16 nt, Human adenovirus C
ugcagaaaauuucaag

SEQ ID NO: 285980 - RNA, 14 nt, Human adenovirus C
ugcagauucacuca

SEQ ID NO: 285981 - RNA, 21 nt, Human adenovirus C
ugcagcacuggaacacuauca

SEQ ID NO: 285982 - RNA, 23 nt, Human adenovirus C
ugcagccgguaauaggugugauu

SEQ ID NO: 285983 - RNA, 22 nt, Human adenovirus C
ugcagccucgucacuguaguca

SEQ ID NO: 285984 - RNA, 18 nt, Human adenovirus C
ugcauguuauguuucaac

SEQ ID NO: 285985 - RNA, 22 nt, Human adenovirus C
ugcauuacuaccgucaucucua

SEQ ID NO: 285986 - RNA, 23 nt, Human adenovirus C
ugccaccucccucccaacacaca

SEQ ID NO: 285987 - RNA, 20 nt, Human adenovirus C
ugccagcgccugcacugcaa

SEQ ID NO: 285988 - RNA, 16 nt, Human adenovirus C
ugcccuaaauuuaccc

SEQ ID NO: 285989 - RNA, 19 nt, Human adenovirus C
ugcccugguguaccaggaa

SEQ ID NO: 285990 - RNA, 21 nt, Human adenovirus C
ugccuggaacccgcgcucaaa

SEQ ID NO: 285991 - RNA, 20 nt, Human adenovirus C
ugccuuauuauuauguggcu

SEQ ID NO: 285992 - RNA, 18 nt, Human adenovirus C
ugcgcauugcguaccuca

SEQ ID NO: 285993 - RNA, 16 nt, Human adenovirus C
ugcgccgugggcuaau

SEQ ID NO: 285994 - RNA, 15 nt, Human adenovirus C
ugcgcgauguuguca

SEQ ID NO: 285995 - RNA, 14 nt, Human adenovirus C
ugcggccucuugca

SEQ ID NO: 285996 - RNA, 18 nt, Human adenovirus C
ugcgggcggcgcugcaga

SEQ ID NO: 285997 - RNA, 13 nt, Human adenovirus C
ugcguaccucagg

SEQ ID NO: 285998 - RNA, 21 nt, Human adenovirus C
ugcuaccucuuugagcccuuu

SEQ ID NO: 285999 - RNA, 16 nt, Human adenovirus C
ugcucaggaaccugcu

SEQ ID NO: 286000 - RNA, 11 nt, Human adenovirus C
ugcucagggau

SEQ ID NO: 286001 - RNA, 13 nt, Human adenovirus C
ugcugaaugaguu

SEQ ID NO: 286002 - RNA, 16 nt, Human adenovirus C
ugcugaaugaguugau

SEQ ID NO: 286003 - RNA, 21 nt, Human adenovirus C
ugcuuccuugcaagaacugcu

SEQ ID NO: 286004 - RNA, 13 nt, Human adenovirus C
ugcuugcaagacu

SEQ ID NO: 286005 - RNA, 21 nt, Human adenovirus C
ugcuuggucaaacgcucaaaa

SEQ ID NO: 286006 - RNA, 19 nt, Human adenovirus C
ugcuuucuucccagcugau

SEQ ID NO: 286007 - RNA, 15 nt, Human adenovirus C
ugcuuugcucccaaa

SEQ ID NO: 286008 - RNA, 19 nt, Human adenovirus C
uggaacugcugcacgcaac

SEQ ID NO: 286009 - RNA, 17 nt, Human adenovirus C
uggaacugcuuggucaa

SEQ ID NO: 286010 - RNA, 12 nt, Human adenovirus C
uggaagcauugu

SEQ ID NO: 286011 - RNA, 15 nt, Human adenovirus C
uggacaacaagucaa

SEQ ID NO: 286012 - RNA, 13 nt, Human adenovirus C
uggacaauuuacu

SEQ ID NO: 286013 - RNA, 16 nt, Human adenovirus C
uggacagcagccugug

SEQ ID NO: 286014 - RNA, 16 nt, Human adenovirus C
uggacagcgacaugaa

SEQ ID NO: 286015 - RNA, 16 nt, Human adenovirus C
uggagcacuuuuugcc

SEQ ID NO: 286016 - RNA, 16 nt, Human adenovirus C
uggccuuaaaaagcau

SEQ ID NO: 286017 - RNA, 21 nt, Human adenovirus C
uggccuucccccguaacaucc

SEQ ID NO: 286018 - RNA, 13 nt, Human adenovirus C
uggccuuugccug

SEQ ID NO: 286019 - RNA, 20 nt, Human adenovirus C
uggcgaucguaaacgcgcug

SEQ ID NO: 286020 - RNA, 16 nt, Human adenovirus C
uggcgcauuuggucag

SEQ ID NO: 286021 - RNA, 20 nt, Human adenovirus C
uggcgcauuuggucagggaa

SEQ ID NO: 286022 - RNA, 17 nt, Human adenovirus C
uggcgcgggcacaagaa

SEQ ID NO: 286023 - RNA, 23 nt, Human adenovirus C
ugggcaccuaugacaagcgcuuu

SEQ ID NO: 286024 - RNA, 13 nt, Human adenovirus C
ugggccgcggggg

SEQ ID NO: 286025 - RNA, 23 nt, Human adenovirus C
ugggguugugauccaugggaguu

SEQ ID NO: 286026 - RNA, 14 nt, Human adenovirus C
uggguaacagacau

SEQ ID NO: 286027 - RNA, 21 nt, Human adenovirus C
uggucaaacgcucaaaagcau

SEQ ID NO: 286028 - RNA, 16 nt, Human adenovirus C
uggucagggaaaacau

SEQ ID NO: 286029 - RNA, 20 nt, Human adenovirus C
uggucagggaaaacaugcaa

SEQ ID NO: 286030 - RNA, 19 nt, Human adenovirus C
uggucccggcgcgcgcaaa

SEQ ID NO: 286031 - RNA, 17 nt, Human adenovirus C
uggucuacgacgcgcug

SEQ ID NO: 286032 - RNA, 17 nt, Human adenovirus C
uggucuuacaugcacau

SEQ ID NO: 286033 - RNA, 23 nt, Human adenovirus C
uggugguggggcuauacuacuga

SEQ ID NO: 286034 - RNA, 13 nt, Human adenovirus C
uguaaaccuguga

SEQ ID NO: 286035 - RNA, 18 nt, Human adenovirus C
uguaucgaggacuugcuu

SEQ ID NO: 286036 - RNA, 18 nt, Human adenovirus C
ugucauuuuuguuuugcu

SEQ ID NO: 286037 - RNA, 22 nt, Human adenovirus C
uguccagcuuauucagcaucac

SEQ ID NO: 286038 - RNA, 17 nt, Human adenovirus C
ugucccuccgcacccac

SEQ ID NO: 286039 - RNA, 23 nt, Human adenovirus C
uguccuaacccuggauuacauca

SEQ ID NO: 286040 - RNA, 23 nt, Human adenovirus C
ugucuuucaguagcaagcugauu

SEQ ID NO: 286041 - RNA, 14 nt, Human adenovirus C
ugugaugcuggaug

SEQ ID NO: 286042 - RNA, 21 nt, Human adenovirus C
ugugaugggcuccagcauuga

SEQ ID NO: 286043 - RNA, 15 nt, Human adenovirus C
ugugcuuugcuccca

SEQ ID NO: 286044 - RNA, 23 nt, Human adenovirus C
ugugcuuugcucccaaaccucag

SEQ ID NO: 286045 - RNA, 17 nt, Human adenovirus C
ugugggauaugcuccag

SEQ ID NO: 286046 - RNA, 23 nt, Human adenovirus C
uguuaaauggggcggggcuuaaa

SEQ ID NO: 286047 - RNA, 21 nt, Human adenovirus C
uguucugaccgugguuugcaa

SEQ ID NO: 286048 - RNA, 19 nt, Human adenovirus C
uguugcuacauuucuggga

SEQ ID NO: 286049 - RNA, 21 nt, Human adenovirus C
uguuuauuuuucaauugcaga

SEQ ID NO: 286050 - RNA, 18 nt, Human adenovirus C
uguuuuucaagugacaaa

SEQ ID NO: 286051 - RNA, 22 nt, Human adenovirus C
uuaacuugcauggcguguuaaa

SEQ ID NO: 286052 - RNA, 20 nt, Human adenovirus C
uuaagcgcgaaaacuacguc

SEQ ID NO: 286053 - RNA, 19 nt, Human adenovirus C
uuaauaaagggugagauaa

SEQ ID NO: 286054 - RNA, 21 nt, Human adenovirus C
uuacaggcucuccuuuugcac

SEQ ID NO: 286055 - RNA, 21 nt, Human adenovirus C
uuaccugcuuuacggauuugu

SEQ ID NO: 286056 - RNA, 17 nt, Human adenovirus C
uuacuggcugcagccag

SEQ ID NO: 286057 - RNA, 12 nt, Human adenovirus C
uuagcccaagag

SEQ ID NO: 286058 - RNA, 16 nt, Human adenovirus C
uuagcugcaaacuuuc

SEQ ID NO: 286059 - RNA, 21 nt, Human adenovirus C
uuagcugcaaacuuucuccaa

SEQ ID NO: 286060 - RNA, 19 nt, Human adenovirus C
uuaggccagauugcaagua

SEQ ID NO: 286061 - RNA, 22 nt, Human adenovirus C
uuauauugaucaccguaccuua

SEQ ID NO: 286062 - RNA, 19 nt, Human adenovirus C
uuaugaaacggagugucau

SEQ ID NO: 286063 - RNA, 15 nt, Human adenovirus C
uucaauaaaggcaaa

SEQ ID NO: 286064 - RNA, 15 nt, Human adenovirus C
uucacccaaugguuu

SEQ ID NO: 286065 - RNA, 17 nt, Human adenovirus C
uucagauacaugggcau

SEQ ID NO: 286066 - RNA, 18 nt, Human adenovirus C
uucagauacaugggcaua

SEQ ID NO: 286067 - RNA, 21 nt, Human adenovirus C
uucaggaaauaugacuacguc

SEQ ID NO: 286068 - RNA, 17 nt, Human adenovirus C
uucaguagcaagcugau

SEQ ID NO: 286069 - RNA, 18 nt, Human adenovirus C
uucauucaguucauugac

SEQ ID NO: 286070 - RNA, 19 nt, Human adenovirus C
uucauucaguucauugacu

SEQ ID NO: 286071 - RNA, 18 nt, Human adenovirus C
uucccacgcccuacaugu

SEQ ID NO: 286072 - RNA, 22 nt, Human adenovirus C
uuccugagcccgcuugcaagca

SEQ ID NO: 286073 - RNA, 14 nt, Human adenovirus C
uuccuuccucccaa

SEQ ID NO: 286074 - RNA, 19 nt, Human adenovirus C
uuccuugcaagaacugcua

SEQ ID NO: 286075 - RNA, 20 nt, Human adenovirus C
uuccuugcaagaacugcuau

SEQ ID NO: 286076 - RNA, 13 nt, Human adenovirus C
uucgaaccccggu

SEQ ID NO: 286077 - RNA, 23 nt, Human adenovirus C
uucuaacacaccuccugagauac

SEQ ID NO: 286078 - RNA, 19 nt, Human adenovirus C
uucuccccggcuggccuua

SEQ ID NO: 286079 - RNA, 21 nt, Human adenovirus C
uucuccccggcuggccuuaaa

SEQ ID NO: 286080 - RNA, 20 nt, Human adenovirus C
uucugcugugcguaacuugc

SEQ ID NO: 286081 - RNA, 21 nt, Human adenovirus C
uucugcugugcguaacuugcu

SEQ ID NO: 286082 - RNA, 13 nt, Human adenovirus C
uucuucccagcug

SEQ ID NO: 286083 - RNA, 17 nt, Human adenovirus C
uugagcccgagagcaug

SEQ ID NO: 286084 - RNA, 15 nt, Human adenovirus C
uugcuggaacagagc

SEQ ID NO: 286085 - RNA, 18 nt, Human adenovirus C
uugcuugaucaaaaucca

SEQ ID NO: 286086 - RNA, 23 nt, Human adenovirus C
uugggagggagguggcagguuga

SEQ ID NO: 286087 - RNA, 10 nt, Human adenovirus C
uuggugcugg

SEQ ID NO: 286088 - RNA, 17 nt, Human adenovirus C
uuguguuuaaugcagga

SEQ ID NO: 286089 - RNA, 15 nt, Human adenovirus C
uuuaauaaaggguga

SEQ ID NO: 286090 - RNA, 16 nt, Human adenovirus C
uuucacuccacaggcu

SEQ ID NO: 286091 - RNA, 13 nt, Human adenovirus C
uuucagcagauua

SEQ ID NO: 286092 - RNA, 16 nt, Human adenovirus C
uuuccugcagauucac

SEQ ID NO: 286093 - RNA, 12 nt, Human adenovirus C
uuucuucucuac

SEQ ID NO: 286094 - RNA, 18 nt, Human adenovirus C
uuucuucucuaccaucac

SEQ ID NO: 286095 - RNA, 19 nt, Human adenovirus C
uuuggacuugagcuguaaa

SEQ ID NO: 286096 - RNA, 22 nt, Human adenovirus C
uuuggcaugacacuacgaccaa

SEQ ID NO: 286097 - RNA, 19 nt, Human adenovirus C
uuuggcuuuucugaccaac

SEQ ID NO: 286098 - RNA, 18 nt, Human adenovirus C
uuugggcaccuaugacaa

SEQ ID NO: 286099 - RNA, 23 nt, Human adenovirus C
uuugugugcgcauugcguaccuc

SEQ ID NO: 286100 - RNA, 23 nt, Human adenovirus C
uuuugcgcccuaccugugcuuug

SEQ ID NO: 286101 - RNA, 23 nt, Human adenovirus C
uuuuguagaauggaagacaucaa

SEQ ID NO: 286102 - RNA, 20 nt, Human adenovirus C
gcagcucggugaaguuuuca

SEQ ID NO: 286103 - RNA, 15 nt, Human adenovirus C
gcagcugcucaggaa

SEQ ID NO: 286104 - RNA, 15 nt, Human adenovirus C
gcagggacacguugc

SEQ ID NO: 286105 - RNA, 19 nt, Human adenovirus C
gcauccguggccuugcagg

SEQ ID NO: 286106 - RNA, 22 nt, Human adenovirus C
gcaugaaggaguuuacauagaa

SEQ ID NO: 286107 - RNA, 13 nt, Human adenovirus C
gcauugugagcuc

SEQ ID NO: 286108 - RNA, 15 nt, Human adenovirus C
gccccccugcucagg

SEQ ID NO: 286109 - RNA, 21 nt, Human adenovirus C
gccccuccuuauuccacugau

SEQ ID NO: 286110 - RNA, 19 nt, Human adenovirus C
gcccgacaucaccuguguc

SEQ ID NO: 286111 - RNA, 19 nt, Human adenovirus C
gcccgaugaggccggccug

SEQ ID NO: 286112 - RNA, 19 nt, Human adenovirus C
gcccugguguaccaggaaa

SEQ ID NO: 286113 - RNA, 16 nt, Human adenovirus C
gccgaaguucagauga

SEQ ID NO: 286114 - RNA, 18 nt, Human adenovirus C
gccgcacugggcgcacca

SEQ ID NO: 286115 - RNA, 15 nt, Human adenovirus C
gccgcuucagccgcu

SEQ ID NO: 286116 - RNA, 18 nt, Human adenovirus C
gccuccgcgguaccugcg

SEQ ID NO: 286117 - RNA, 21 nt, Human adenovirus C
gccugcgcuucccaagcaaga

SEQ ID NO: 286118 - RNA, 14 nt, Human adenovirus C
gccuggaacugcuu

SEQ ID NO: 286119 - RNA, 13 nt, Human adenovirus C
gccugugaugcug

SEQ ID NO: 286120 - RNA, 18 nt, Human adenovirus C
gccuuauuauuauguggc

SEQ ID NO: 286121 - RNA, 15 nt, Human adenovirus C
gcgaaaacuacguca

SEQ ID NO: 286122 - RNA, 16 nt, Human adenovirus C
gcgaaaacuacgucau

SEQ ID NO: 286123 - RNA, 18 nt, Human adenovirus C
gcgaccaucaaugcugga

SEQ ID NO: 286124 - RNA, 19 nt, Human adenovirus C
gcgacugcgccugacacac

SEQ ID NO: 286125 - RNA, 16 nt, Human adenovirus C
gcgaggccguggcgca

SEQ ID NO: 286126 - RNA, 16 nt, Human adenovirus C
gcgccauuaugagcaa

SEQ ID NO: 286127 - RNA, 20 nt, Human adenovirus C
gcgccauuaugagcaaggaa

SEQ ID NO: 286128 - RNA, 12 nt, Human adenovirus C
gcgcccuaccug

SEQ ID NO: 286129 - RNA, 16 nt, Human adenovirus C
gcgcccugacccggcu

SEQ ID NO: 286130 - RNA, 16 nt, Human adenovirus C
gcgccgcgcgcgggca

SEQ ID NO: 286131 - RNA, 14 nt, Human adenovirus C
gcgcgaaaacuacg

SEQ ID NO: 286132 - RNA, 20 nt, Human adenovirus C
gcgcgcaacuacacgcccac

SEQ ID NO: 286133 - RNA, 20 nt, Human adenovirus C
gcgcugcagagccagccguc

SEQ ID NO: 286134 - RNA, 16 nt, Human adenovirus C
gcggaugaacgggaag

SEQ ID NO: 286135 - RNA, 23 nt, Human adenovirus C
gcggccauucagaccguggugcg

SEQ ID NO: 286136 - RNA, 22 nt, Human adenovirus C
gcggccgaguugggccccugca

SEQ ID NO: 286137 - RNA, 14 nt, Human adenovirus C
gcggcgcgacuacg

SEQ ID NO: 286138 - RNA, 18 nt, Human adenovirus C
gcgggagcuccagaccau

SEQ ID NO: 286139 - RNA, 15 nt, Human adenovirus C
gcgggcccccggagg

SEQ ID NO: 286140 - RNA, 21 nt, Human adenovirus C
gcgguaagucgcagcugcuca

SEQ ID NO: 286141 - RNA, 17 nt, Human adenovirus C
gcgguggcugcagcggc

SEQ ID NO: 286142 - RNA, 13 nt, Human adenovirus C
gcguacacuggau

SEQ ID NO: 286143 - RNA, 22 nt, Human adenovirus C
gcguagcacgucgccaccgccg

SEQ ID NO: 286144 - RNA, 19 nt, Human adenovirus C
gcgugcgcgggcacuaccg

SEQ ID NO: 286145 - RNA, 16 nt, Human adenovirus C
gcuaaucuugguuaca

SEQ ID NO: 286146 - RNA, 18 nt, Human adenovirus C
agucaucgccuucauuca

SEQ ID NO: 286147 - RNA, 16 nt, Human adenovirus C
agucgcagcugcucag

SEQ ID NO: 286148 - RNA, 13 nt, Human adenovirus C
agucuccaacggc

SEQ ID NO: 286149 - RNA, 21 nt, Human adenovirus C
agugacaaaaagaaguggcgc

SEQ ID NO: 286150 - RNA, 18 nt, Human adenovirus C
aguggccccccugcucag

SEQ ID NO: 286151 - RNA, 19 nt, Human adenovirus C
aguucagaugacuaacuca

SEQ ID NO: 286152 - RNA, 22 nt, Human adenovirus C
aguucccgggucaaagaaucca

SEQ ID NO: 286153 - RNA, 22 nt, Human adenovirus C
aguugaauggaauaagaucucu

SEQ ID NO: 286154 - RNA, 18 nt, Human adenovirus C
aguugcgauacacagggu

SEQ ID NO: 286155 - RNA, 16 nt, Human adenovirus C
aguuggcccgcugccc

SEQ ID NO: 286156 - RNA, 21 nt, Human adenovirus C
aguuugcgggcaggacggggc

SEQ ID NO: 286157 - RNA, 19 nt, Human adenovirus C
aguuuucacuccacaggcu

SEQ ID NO: 286158 - RNA, 13 nt, Human adenovirus C
auaaacacguuga

SEQ ID NO: 286159 - RNA, 13 nt, Human adenovirus C
auaaacuacauga

SEQ ID NO: 286160 - RNA, 15 nt, Human adenovirus C
auaaagggugagaua

SEQ ID NO: 286161 - RNA, 11 nt, Human adenovirus C
auaacaugcaa

SEQ ID NO: 286162 - RNA, 18 nt, Human adenovirus C
auaaggugggggucucau

SEQ ID NO: 286163 - RNA, 19 nt, Human adenovirus C
auaagguucaugguggggu

SEQ ID NO: 286164 - RNA, 18 nt, Human adenovirus C
auacuaggguucugugag

SEQ ID NO: 286165 - RNA, 20 nt, Human adenovirus C
auagagcagcugaccacuua

SEQ ID NO: 286166 - RNA, 16 nt, Human adenovirus C
auagcugaucuucuca

SEQ ID NO: 286167 - RNA, 15 nt, Human adenovirus C
auaggggaagugcag

SEQ ID NO: 286168 - RNA, 19 nt, Human adenovirus C
auauacuacaacuacuaca

SEQ ID NO: 286169 - RNA, 13 nt, Human adenovirus C
auaucacugauga

SEQ ID NO: 286170 - RNA, 12 nt, Human adenovirus C
auaucaggaauu

SEQ ID NO: 286171 - RNA, 13 nt, Human adenovirus C
auauggcuuccac

SEQ ID NO: 286172 - RNA, 16 nt, Human adenovirus C
auauucuuagguguua

SEQ ID NO: 286173 - RNA, 20 nt, Human adenovirus C
auauuuccugcagauucacu

SEQ ID NO: 286174 - RNA, 22 nt, Human adenovirus C
auauuuccugcagauucacuca

SEQ ID NO: 286175 - RNA, 13 nt, Human adenovirus C
aucaaaauccaaa

SEQ ID NO: 286176 - RNA, 12 nt, Human adenovirus C
aucaaacuuucc

SEQ ID NO: 286177 - RNA, 14 nt, Human adenovirus C
aucaacaacagcug

SEQ ID NO: 286178 - RNA, 14 nt, Human adenovirus C
aucaagaucuuugu

SEQ ID NO: 286179 - RNA, 14 nt, Human adenovirus C
cagacauauucuua

SEQ ID NO: 286180 - RNA, 14 nt, Human adenovirus C
cagagacacugauu

SEQ ID NO: 286181 - RNA, 23 nt, Human adenovirus C
cagagcgucccgaccauggagca

SEQ ID NO: 286182 - RNA, 15 nt, Human adenovirus C
cagauccaacagcug

SEQ ID NO: 286183 - RNA, 17 nt, Human adenovirus C
cagauccaacagcugcu

SEQ ID NO: 286184 - RNA, 15 nt, Human adenovirus C
cagaugacuaacuca

SEQ ID NO: 286185 - RNA, 17 nt, Human adenovirus C
cagcaaaucuuugucca

SEQ ID NO: 286186 - RNA, 15 nt, Human adenovirus C
cagcagccgccgcca

SEQ ID NO: 286187 - RNA, 18 nt, Human adenovirus C
cagcagccgccgccauga

SEQ ID NO: 286188 - RNA, 15 nt, Human adenovirus C
cagcagccuguggcu

SEQ ID NO: 286189 - RNA, 19 nt, Human adenovirus C
cagcauccguuacucugag

SEQ ID NO: 286190 - RNA, 13 nt, Human adenovirus C
cagccaaacccgc

SEQ ID NO: 286191 - RNA, 14 nt, Human adenovirus C
cagccaaacccgcc

SEQ ID NO: 286192 - RNA, 17 nt, Human adenovirus C
cagccacaaaugggacu

SEQ ID NO: 286193 - RNA, 17 nt, Human adenovirus C
cagccgccgccaugagc

SEQ ID NO: 286194 - RNA, 22 nt, Human adenovirus C
cagccgguaauaggugugauuu

SEQ ID NO: 286195 - RNA, 18 nt, Human adenovirus C
cagcggucacacagaagc

SEQ ID NO: 286196 - RNA, 18 nt, Human adenovirus C
cagcucgcuuaaguucau

SEQ ID NO: 286197 - RNA, 15 nt, Human adenovirus C
cagcucucuuaacua

SEQ ID NO: 286198 - RNA, 21 nt, Human adenovirus C
cagcugccgccaugggcucca

SEQ ID NO: 286199 - RNA, 17 nt, Human adenovirus C
caggaaauaugacuacg

SEQ ID NO: 286200 - RNA, 22 nt, Human adenovirus C
caggagcgcugggcguggugcc

SEQ ID NO: 286201 - RNA, 18 nt, Human adenovirus C
caggcugcuguccaacuu

SEQ ID NO: 286202 - RNA, 19 nt, Human adenovirus C
cagggacacguugcgauac

SEQ ID NO: 286203 - RNA, 18 nt, Human adenovirus C
cagggacaugcuuaacga

SEQ ID NO: 286204 - RNA, 17 nt, Human adenovirus C
cagggcagaaaccugcu

SEQ ID NO: 286205 - RNA, 19 nt, Human adenovirus C
cagggcagcggcgcaugaa

SEQ ID NO: 286206 - RNA, 20 nt, Human adenovirus C
cagucagcaaaucuuugucc

SEQ ID NO: 286207 - RNA, 19 nt, Human adenovirus C
cagugagcaggaacugaaa

SEQ ID NO: 286208 - RNA, 13 nt, Human adenovirus C
caguuuaccugcu

SEQ ID NO: 286209 - RNA, 20 nt, Human adenovirus C
cauaagguguaaaccuguga

SEQ ID NO: 286210 - RNA, 18 nt, Human adenovirus C
cauagaacccgaagccag

SEQ ID NO: 286211 - RNA, 16 nt, Human adenovirus C
cauauuuccugcagau

SEQ ID NO: 286212 - RNA, 18 nt, Human adenovirus C
caucgacgccgccaccaa

SEQ ID NO: 286213 - RNA, 23 nt, Human adenovirus C
caucugcgcgauguugucaucaa

SEQ ID NO: 286214 - RNA, 22 nt, Human adenovirus C
caucuggaaccgcguccgcgac

SEQ ID NO: 286215 - RNA, 23 nt, Human adenovirus C
caugccuacggcggacggccuca

SEQ ID NO: 286216 - RNA, 17 nt, Human adenovirus C
caugcuaccucuuugag

SEQ ID NO: 286217 - RNA, 16 nt, Human adenovirus C
cauggugggguuguga

SEQ ID NO: 286218 - RNA, 23 nt, Human adenovirus C
caugguuuuaauaagagugcaga

SEQ ID NO: 286219 - RNA, 15 nt, Human adenovirus C
caugucgcuguccag

SEQ ID NO: 286220 - RNA, 18 nt, Human adenovirus C
cauguuuuucaagugaca

SEQ ID NO: 286221 - RNA, 15 nt, Human adenovirus C
cauugcguaccucag

SEQ ID NO: 286222 - RNA, 14 nt, Human adenovirus C
cauugugagcucau

SEQ ID NO: 286223 - RNA, 15 nt, Human adenovirus C
cauuuguuucaccca

SEQ ID NO: 286224 - RNA, 21 nt, Human adenovirus C
ccaaaagacauauuuccugca

SEQ ID NO: 286225 - RNA, 12 nt, Human adenovirus C
ccaaaccucagc

SEQ ID NO: 286226 - RNA, 13 nt, Human adenovirus C
ccaaacgcucauc

SEQ ID NO: 286227 - RNA, 17 nt, Human adenovirus C
ccaaacgcucaucagug

SEQ ID NO: 286228 - RNA, 15 nt, Human adenovirus C
ccaacgacucaagca

SEQ ID NO: 286229 - RNA, 18 nt, Human adenovirus C
ccaacggcguuccagaca

SEQ ID NO: 286230 - RNA, 16 nt, Human adenovirus C
ccaacucguuugaugg

SEQ ID NO: 286231 - RNA, 17 nt, Human adenovirus C
ccaacucugguaucuca

SEQ ID NO: 286232 - RNA, 18 nt, Human adenovirus C
ccaacucugguaucucag

SEQ ID NO: 286233 - RNA, 16 nt, Human adenovirus C
ccaagagcaacaacag

SEQ ID NO: 286234 - RNA, 18 nt, Human adenovirus C
ccaagagcaacaacagcg

SEQ ID NO: 286235 - RNA, 14 nt, Human adenovirus C
ccacaccucguaau

SEQ ID NO: 286236 - RNA, 17 nt, Human adenovirus C
ccacagcggcggcagca

SEQ ID NO: 286237 - RNA, 21 nt, Human adenovirus C
ccacagcggcggcagcagcag

SEQ ID NO: 286238 - RNA, 13 nt, Human adenovirus C
ccaccacuguggu

SEQ ID NO: 286239 - RNA, 20 nt, Human adenovirus C
ccacccaaagcagaccaaag

SEQ ID NO: 286240 - RNA, 15 nt, Human adenovirus C
ccaccgcccgccgcg

SEQ ID NO: 286241 - RNA, 16 nt, Human adenovirus C
ccaccguuuuuaccca

SEQ ID NO: 286242 - RNA, 22 nt, Human adenovirus C
ccaccucccucccaacacacag

SEQ ID NO: 286243 - RNA, 17 nt, Human adenovirus C
ccacgccgccaccagug

SEQ ID NO: 286244 - RNA, 15 nt, Human adenovirus C
ccacguacuuugaca

SEQ ID NO: 286245 - RNA, 19 nt, Human adenovirus C
ccacugccgccgccacaag

SEQ ID NO: 286246 - RNA, 15 nt, Human adenovirus C
ccacuggaaccaggg

SEQ ID NO: 286247 - RNA, 22 nt, Human adenovirus C
ccacugugguacuucccagaga

SEQ ID NO: 286248 - RNA, 23 nt, Human adenovirus C
ccagaccgucugaagacaccuuc

SEQ ID NO: 286249 - RNA, 13 nt, Human adenovirus C
ccagcuuauucag

SEQ ID NO: 286250 - RNA, 20 nt, Human adenovirus C
ccauagagcagcugaccacu

SEQ ID NO: 286251 - RNA, 19 nt, Human adenovirus C
ccauauuuuuugggcaccu

SEQ ID NO: 286252 - RNA, 19 nt, Human adenovirus C
ccauccaauucuagaucua

SEQ ID NO: 286253 - RNA, 20 nt, Human adenovirus C
ccaugcaacaagcuuacaua

SEQ ID NO: 286254 - RNA, 13 nt, Human adenovirus C
ccaugggccgggg

SEQ ID NO: 286255 - RNA, 13 nt, Human adenovirus C
cccaaaagacaua

SEQ ID NO: 286256 - RNA, 13 nt, Human adenovirus C
cccaagacuacuc

SEQ ID NO: 286257 - RNA, 14 nt, Human adenovirus C
cccaccaccacaua

SEQ ID NO: 286258 - RNA, 20 nt, Human adenovirus C
cccaccaccacauagcuuau

SEQ ID NO: 286259 - RNA, 23 nt, Human adenovirus C
cccccguaacauccugcauuacu

SEQ ID NO: 286260 - RNA, 20 nt, Human adenovirus C
cccgaauaaacuacaugagc

SEQ ID NO: 286261 - RNA, 20 nt, Human adenovirus C
cccgaccauggagcacuuuu

SEQ ID NO: 286262 - RNA, 20 nt, Human adenovirus C
cccuacauguggaguuacca

SEQ ID NO: 286263 - RNA, 21 nt, Human adenovirus C
cccuaguauucaaccugccac

SEQ ID NO: 286264 - RNA, 17 nt, Human adenovirus C
cccuccauuuguuucac

SEQ ID NO: 286265 - RNA, 21 nt, Human adenovirus C
cccuccauuuguuucacccaa

SEQ ID NO: 286266 - RNA, 16 nt, Human adenovirus C
cccuccgcacccacua

SEQ ID NO: 286267 - RNA, 21 nt, Human adenovirus C
cccugauaggggaagugcagg

SEQ ID NO: 286268 - RNA, 14 nt, Human adenovirus C
cccugcucagggau

SEQ ID NO: 286269 - RNA, 17 nt, Human adenovirus C
cccuggaaaucagguau

SEQ ID NO: 286270 - RNA, 19 nt, Human adenovirus C
ccgaaccuuuggacaccuc

SEQ ID NO: 286271 - RNA, 22 nt, Human adenovirus C
ccgaaguagaagaccaccagcc

SEQ ID NO: 286272 - RNA, 13 nt, Human adenovirus C
ccgagaguguaca

SEQ ID NO: 286273 - RNA, 15 nt, Human adenovirus C
ccgaguaugcguguc

SEQ ID NO: 286274 - RNA, 15 nt, Human adenovirus C
ccgcaccuacaagcg

SEQ ID NO: 286275 - RNA, 16 nt, Human adenovirus C
ccgcauccccgcggcg

SEQ ID NO: 286276 - RNA, 15 nt, Human adenovirus C
ccgccagccgccgcc

SEQ ID NO: 286277 - RNA, 12 nt, Human adenovirus C
ccgccgcuuucu

SEQ ID NO: 286278 - RNA, 18 nt, Human adenovirus C
ccgccguuagcccaagag

SEQ ID NO: 286279 - RNA, 16 nt, Human adenovirus C
ccgccuggaacugcuu

SEQ ID NO: 286280 - RNA, 22 nt, Human adenovirus C
ccgcugcagccaccgcccgcgg

SEQ ID NO: 286281 - RNA, 14 nt, Human adenovirus C
ccggaacuuaccug

SEQ ID NO: 286282 - RNA, 19 nt, Human adenovirus C
ccggaacuuaccugccuuu

SEQ ID NO: 286283 - RNA, 21 nt, Human adenovirus C
ccggcagcagccgcaggccaa

SEQ ID NO: 286284 - RNA, 12 nt, Human adenovirus C
ccggccuggucu

SEQ ID NO: 286285 - RNA, 23 nt, Human adenovirus C
ccggcguuccauuuggcaugaca

SEQ ID NO: 286286 - RNA, 17 nt, Human adenovirus C
ccguagucgcgccgcgg

SEQ ID NO: 286287 - RNA, 18 nt, Human adenovirus C
ccgucgcaugcgcggcgg

SEQ ID NO: 286288 - RNA, 13 nt, Human adenovirus C
ccguuagcccaag

SEQ ID NO: 286289 - RNA, 12 nt, Human adenovirus C
ccuaaauuuacc

SEQ ID NO: 286290 - RNA, 21 nt, Human adenovirus C
ccuaccugugcuuugcuccca

SEQ ID NO: 286291 - RNA, 20 nt, Human adenovirus C
ccuacggcggacggccucaa

SEQ ID NO: 286292 - RNA, 20 nt, Human adenovirus C
ccuaugacaagcgcuuucca

SEQ ID NO: 286293 - RNA, 12 nt, Human adenovirus C
ccuccaacugug

SEQ ID NO: 286294 - RNA, 13 nt, Human adenovirus C
ccucccaacucug

SEQ ID NO: 286295 - RNA, 16 nt, Human adenovirus C
cuggagcccaucacau

SEQ ID NO: 286296 - RNA, 17 nt, Human adenovirus C
cuggagcccaucacauu

SEQ ID NO: 286297 - RNA, 16 nt, Human adenovirus C
cuggagcugcccaaga

SEQ ID NO: 286298 - RNA, 14 nt, Human adenovirus C
cuggauggccuuug

SEQ ID NO: 286299 - RNA, 22 nt, Human adenovirus C
cuggauuacaucaagaucuuug

SEQ ID NO: 286300 - RNA, 15 nt, Human adenovirus C
cuggcgccaggucau

SEQ ID NO: 286301 - RNA, 14 nt, Human adenovirus C
cugggaugggugca

SEQ ID NO: 286302 - RNA, 15 nt, Human adenovirus C
cugggcgcaccaccg

SEQ ID NO: 286303 - RNA, 14 nt, Human adenovirus C
cugguguaccagga

SEQ ID NO: 286304 - RNA, 21 nt, Human adenovirus C
cugguugguggcggcgucgau

SEQ ID NO: 286305 - RNA, 21 nt, Human adenovirus C
cuguaaacgccccaggccaua

SEQ ID NO: 286306 - RNA, 14 nt, Human adenovirus C
cuguccuaacccug

SEQ ID NO: 286307 - RNA, 19 nt, Human adenovirus C
cugugguacuucccagaga

SEQ ID NO: 286308 - RNA, 19 nt, Human adenovirus C
cuguggugagcuguuugau

SEQ ID NO: 286309 - RNA, 17 nt, Human adenovirus C
cuguuaagcauggaguu

SEQ ID NO: 286310 - RNA, 22 nt, Human adenovirus C
cuguuuugcagcagccgccgcc

SEQ ID NO: 286311 - RNA, 10 nt, Human adenovirus C
cuuaaagggu

SEQ ID NO: 286312 - RNA, 15 nt, Human adenovirus C
cuuaaguucaugucg

SEQ ID NO: 286313 - RNA, 15 nt, Human adenovirus C
cuuaaugaccagaca

SEQ ID NO: 286314 - RNA, 19 nt, Human adenovirus C
cuuauguuuguuugccuua

SEQ ID NO: 286315 - RNA, 13 nt, Human adenovirus C
cuuauuuguugcc

SEQ ID NO: 286316 - RNA, 15 nt, Human adenovirus C
cuuauuuguugccua

SEQ ID NO: 286317 - RNA, 18 nt, Human adenovirus C
cuucaaccccguguaucc

SEQ ID NO: 286318 - RNA, 22 nt, Human adenovirus C
cuucaaccccguguauccauau

SEQ ID NO: 286319 - RNA, 20 nt, Human adenovirus C
cuucaugcugcgggguggug

SEQ ID NO: 286320 - RNA, 14 nt, Human adenovirus C
cuucucuaccauca

SEQ ID NO: 286321 - RNA, 16 nt, Human adenovirus C
cuugaucaaaauccaa

SEQ ID NO: 286322 - RNA, 20 nt, Human adenovirus C
cuugcaagcgggcucaggaa

SEQ ID NO: 286323 - RNA, 22 nt, Human adenovirus C
cuugcuuaacgagucugggcaa

SEQ ID NO: 286324 - RNA, 22 nt, Human adenovirus C
cuugcuugaucaaaauccaaac

SEQ ID NO: 286325 - RNA, 17 nt, Human adenovirus C
cuuguaaauaucaggaa

SEQ ID NO: 286326 - RNA, 17 nt, Human adenovirus C
cuuuacggauuugucac

SEQ ID NO: 286327 - RNA, 12 nt, Human adenovirus C
cuuuccuggacg

SEQ ID NO: 286328 - RNA, 21 nt, Human adenovirus C
cuuucuucccagcugaucucc

SEQ ID NO: 286329 - RNA, 23 nt, Human adenovirus C
cuuugccuggaacccgcgcucaa

SEQ ID NO: 286330 - RNA, 14 nt, Human adenovirus C
cuuuguuugcugaa

SEQ ID NO: 286331 - RNA, 22 nt, Human adenovirus C
cuuuguuugcugaaugaguuga

SEQ ID NO: 286332 - RNA, 14 nt, Human adenovirus C
cuuuuagcugcaaa

SEQ ID NO: 286333 - RNA, 22 nt, Human adenovirus C
cuuuuagcugcaaacuuucucc

SEQ ID NO: 286334 - RNA, 12 nt, Human adenovirus C
cuuuuagcuuaa

SEQ ID NO: 286335 - RNA, 16 nt, Human adenovirus C
gaaaaacuuugcuucc

SEQ ID NO: 286336 - RNA, 17 nt, Human adenovirus C
aaaacuacgucaucucc

SEQ ID NO: 286337 - RNA, 12 nt, Human adenovirus C
aaaacucaccaa

SEQ ID NO: 286338 - RNA, 13 nt, Human adenovirus C
aaaaugucuuuca

SEQ ID NO: 286339 - RNA, 21 nt, Human adenovirus C
aaacacacaauaaauuacuua

SEQ ID NO: 286340 - RNA, 23 nt, Human adenovirus C
aaacccgccaggcgaggggcuca

SEQ ID NO: 286341 - RNA, 14 nt, Human adenovirus C
aaaccgaauucucc

SEQ ID NO: 286342 - RNA, 16 nt, Human adenovirus C
aaaccugcaggagcuc

SEQ ID NO: 286343 - RNA, 13 nt, Human adenovirus C
aaacuuucuccaa

SEQ ID NO: 286344 - RNA, 20 nt, Human adenovirus C
accgucugaagacaccuuca

SEQ ID NO: 286345 - RNA, 14 nt, Human adenovirus C
accgugguuugcaa

SEQ ID NO: 286346 - RNA, 17 nt, Human adenovirus C
accguguggaauauaac

SEQ ID NO: 286347 - RNA, 14 nt, Human adenovirus C
accguuuuuaccca

SEQ ID NO: 286348 - RNA, 18 nt, Human adenovirus C
accuaagaauaugucugu

SEQ ID NO: 286349 - RNA, 18 nt, Human adenovirus C
accucuuuuacacuggug

SEQ ID NO: 286350 - RNA, 19 nt, Human adenovirus C
accugcuggcgcagaucca

SEQ ID NO: 286351 - RNA, 22 nt, Human adenovirus C
accugucgccgcgggagcucca

SEQ ID NO: 286352 - RNA, 22 nt, Human adenovirus C
accuucaaccccguguauccau

SEQ ID NO: 286353 - RNA, 16 nt, Human adenovirus C
accuuuggacaccucc

SEQ ID NO: 286354 - RNA, 14 nt, Human adenovirus C
acgaggaccugcuu

SEQ ID NO: 286355 - RNA, 14 nt, Human adenovirus C
acgcagggugggcu

SEQ ID NO: 286356 - RNA, 19 nt, Human adenovirus C
acgccaccguuuuuaccca

SEQ ID NO: 286357 - RNA, 17 nt, Human adenovirus C
acgcuggaaaaguccac

SEQ ID NO: 286358 - RNA, 17 nt, Human adenovirus C
acggcggacggccucaa

SEQ ID NO: 286359 - RNA, 13 nt, Human adenovirus C
acgggaagcugca

SEQ ID NO: 286360 - RNA, 16 nt, Human adenovirus C
acgggguguuugacau

SEQ ID NO: 286361 - RNA, 21 nt, Human adenovirus C
acguugaaacauaacaugcaa

SEQ ID NO: 286362 - RNA, 13 nt, Human adenovirus C
acuaacaucugcc

SEQ ID NO: 286363 - RNA, 20 nt, Human adenovirus C
acuacaacuacuacacagag

SEQ ID NO: 286364 - RNA, 15 nt, Human adenovirus C
acuaccgucaucucu

SEQ ID NO: 286365 - RNA, 16 nt, Human adenovirus C
acuacgucaucuccag

SEQ ID NO: 286366 - RNA, 16 nt, Human adenovirus C
acuaggagacacuuuc

SEQ ID NO: 286367 - RNA, 15 nt, Human adenovirus C
acuaucgcaacacca

SEQ ID NO: 286368 - RNA, 15 nt, Human adenovirus C
acucguuugauggaa

SEQ ID NO: 286369 - RNA, 21 nt, Human adenovirus C
acucuaugugggauaugcucc

SEQ ID NO: 286370 - RNA, 15 nt, Human adenovirus C
acugcagccuccgcc

SEQ ID NO: 286371 - RNA, 13 nt, Human adenovirus C
acugcuuggucaa

SEQ ID NO: 286372 - RNA, 15 nt, Human adenovirus C
acuggaacacuauca

SEQ ID NO: 286373 - RNA, 16 nt, Human adenovirus D
aaaaaccguaccaugg

SEQ ID NO: 286374 - RNA, 19 nt, Human adenovirus D
aaaaacuaccacgcuuuau

SEQ ID NO: 286375 - RNA, 13 nt, Human adenovirus D
aaaaauuauaugu

SEQ ID NO: 286376 - RNA, 15 nt, Human adenovirus D
aaaaccacauuugaa

SEQ ID NO: 286377 - RNA, 13 nt, Human adenovirus D
aaaacccaugaaa

SEQ ID NO: 286378 - RNA, 23 nt, Human adenovirus D
aaaauugaggacuuguuacauga

SEQ ID NO: 286379 - RNA, 15 nt, Human adenovirus D
aaacaacaaaaccac

SEQ ID NO: 286380 - RNA, 16 nt, Human adenovirus D
aaacaaucagccccuu

SEQ ID NO: 286381 - RNA, 20 nt, Human adenovirus D
aaacagcaucgccucaccua

SEQ ID NO: 286382 - RNA, 16 nt, Human adenovirus D
aaacaggaugggucug

SEQ ID NO: 286383 - RNA, 20 nt, Human adenovirus D
aaacaggcaaagaucaccua

SEQ ID NO: 286384 - RNA, 17 nt, Human adenovirus D
aaacccaugaaagaaca

SEQ ID NO: 286385 - RNA, 22 nt, Human adenovirus D
aaacgccccugcaagugcacag

SEQ ID NO: 286386 - RNA, 14 nt, Human adenovirus D
aaacuacauggaca

SEQ ID NO: 286387 - RNA, 19 nt, Human adenovirus D
aaagaacauacaugggcua

SEQ ID NO: 286388 - RNA, 13 nt, Human adenovirus D
aaagagagcuuau

SEQ ID NO: 286389 - RNA, 19 nt, Human adenovirus D
aaagaucaccuacgagcuc

SEQ ID NO: 286390 - RNA, 21 nt, Human adenovirus D
aaaugcuucaauaauggaagc

SEQ ID NO: 286391 - RNA, 13 nt, Human adenovirus D
aaauuaaccuaua

SEQ ID NO: 286392 - RNA, 23 nt, Human adenovirus D
aaauuaaccuauaaaaacaacaa

SEQ ID NO: 286393 - RNA, 15 nt, Human adenovirus D
aaauuacauugaaug

SEQ ID NO: 286394 - RNA, 13 nt, Human adenovirus D
aaauuacucgcaa

SEQ ID NO: 286395 - RNA, 18 nt, Human adenovirus D
aaauuaugagcaucaaaa

SEQ ID NO: 286396 - RNA, 19 nt, Human adenovirus D
aaauugaggacuuguuaca

SEQ ID NO: 286397 - RNA, 14 nt, Human adenovirus D
aacaaaacccauga

SEQ ID NO: 286398 - RNA, 16 nt, Human adenovirus D
aacaaaacccaugaaa

SEQ ID NO: 286399 - RNA, 14 nt, Human adenovirus D
aacaaucagccccu

SEQ ID NO: 286400 - RNA, 18 nt, Human adenovirus D
aacaaucagccccuuccc

SEQ ID NO: 286401 - RNA, 16 nt, Human adenovirus D
aacaccaucagacugg

SEQ ID NO: 286402 - RNA, 22 nt, Human adenovirus D
aacagccacgauguaacaucac

SEQ ID NO: 286403 - RNA, 12 nt, Human adenovirus D
aacagcugugcu

SEQ ID NO: 286404 - RNA, 15 nt, Human adenovirus D
aacaucugugcugcc

SEQ ID NO: 286405 - RNA, 12 nt, Human adenovirus D
aacauuacuucu

SEQ ID NO: 286406 - RNA, 14 nt, Human adenovirus D
aaccacauuugaag

SEQ ID NO: 286407 - RNA, 13 nt, Human adenovirus D
aaccaugaauaca

SEQ ID NO: 286408 - RNA, 17 nt, Human adenovirus D
aaccaugaauacaguga

SEQ ID NO: 286409 - RNA, 18 nt, Human adenovirus D
aaccaugaauacagugau

SEQ ID NO: 286410 - RNA, 14 nt, Human adenovirus D
aacccagaugagga

SEQ ID NO: 286411 - RNA, 22 nt, Human adenovirus D
aacccauugguugaacccagau

SEQ ID NO: 286412 - RNA, 23 nt, Human adenovirus D
aaccuccaaguuagagacaugcu

SEQ ID NO: 286413 - RNA, 18 nt, Human adenovirus D
aaccuuuggaccugagcu

SEQ ID NO: 286414 - RNA, 22 nt, Human adenovirus D
aacuacacggucacuguccaug

SEQ ID NO: 286415 - RNA, 12 nt, Human adenovirus D
aacuacauggac

SEQ ID NO: 286416 - RNA, 14 nt, Human adenovirus D
aacuacauggacaa

SEQ ID NO: 286417 - RNA, 17 nt, Human adenovirus D
aacuaccacgcuuuauc

SEQ ID NO: 286418 - RNA, 23 nt, Human adenovirus D
aacuuccugaccacgguggugca

SEQ ID NO: 286419 - RNA, 16 nt, Human adenovirus D
aacuuucuccacaccu

SEQ ID NO: 286420 - RNA, 12 nt, Human adenovirus D
aagaacaugcaa

SEQ ID NO: 286421 - RNA, 14 nt, Human adenovirus D
aagacauaacuggg

SEQ ID NO: 286422 - RNA, 13 nt, Human adenovirus D
aagcacgcccuca

SEQ ID NO: 286423 - RNA, 19 nt, Human adenovirus D
aagcacgcccucacccgcc

SEQ ID NO: 286424 - RNA, 18 nt, Human adenovirus D
aagcauuacuauuacugc

SEQ ID NO: 286425 - RNA, 19 nt, Human adenovirus D
aagcgggccucacagucca

SEQ ID NO: 286426 - RNA, 18 nt, Human adenovirus D
aaggccauccgucccgac

SEQ ID NO: 286427 - RNA, 12 nt, Human adenovirus D
aaggccuggaau

SEQ ID NO: 286428 - RNA, 21 nt, Human adenovirus D
aagggacgcgcuguguaucuc

SEQ ID NO: 286429 - RNA, 17 nt, Human adenovirus D
aaggugugguuuaugac

SEQ ID NO: 286430 - RNA, 21 nt, Human adenovirus D
aaguacaguuaagaauccaca

SEQ ID NO: 286431 - RNA, 17 nt, Human adenovirus D
aaguacauagugaccaa

SEQ ID NO: 286432 - RNA, 20 nt, Human adenovirus D
aaguacauagugaccaagac

SEQ ID NO: 286433 - RNA, 20 nt, Human adenovirus D
aaguaccaucugcaucucaa

SEQ ID NO: 286434 - RNA, 16 nt, Human adenovirus D
aagucaugugugauau

SEQ ID NO: 286435 - RNA, 17 nt, Human adenovirus D
aagucaugugugauauc

SEQ ID NO: 286436 - RNA, 18 nt, Human adenovirus D
aagugacuuuuugcagcu

SEQ ID NO: 286437 - RNA, 19 nt, Human adenovirus D
aagugacuuuuugcagcug

SEQ ID NO: 286438 - RNA, 17 nt, Human adenovirus D
aagugcacagacccacc

SEQ ID NO: 286439 - RNA, 13 nt, Human adenovirus D
aaguucaccugca

SEQ ID NO: 286440 - RNA, 17 nt, Human adenovirus D
aauaaaacucaccaagg

SEQ ID NO: 286441 - RNA, 14 nt, Human adenovirus D
aauaccgggaugau

SEQ ID NO: 286442 - RNA, 17 nt, Human adenovirus D
aauauggccuggagcag

SEQ ID NO: 286443 - RNA, 17 nt, Human adenovirus D
aauaugggagagaacaa

SEQ ID NO: 286444 - RNA, 16 nt, Human adenovirus D
aaucagccccuucccc

SEQ ID NO: 286445 - RNA, 18 nt, Human adenovirus D
aaucauuuaauaaagauc

SEQ ID NO: 286446 - RNA, 17 nt, Human adenovirus D
aauccacuacaaugcaa

SEQ ID NO: 286447 - RNA, 17 nt, Human adenovirus D
aaucucccaccaccagc

SEQ ID NO: 286448 - RNA, 18 nt, Human adenovirus D
aaugagaggagugugaua

SEQ ID NO: 286449 - RNA, 20 nt, Human adenovirus D
aaugagaggagugugauaug

SEQ ID NO: 286450 - RNA, 17 nt, Human adenovirus D
aaugauagacaaggcag

SEQ ID NO: 286451 - RNA, 17 nt, Human adenovirus D
aaugcgagcauacaugc

SEQ ID NO: 286452 - RNA, 13 nt, Human adenovirus D
aaugcuacauggu

SEQ ID NO: 286453 - RNA, 13 nt, Human adenovirus D
aauggaauguuac

SEQ ID NO: 286454 - RNA, 18 nt, Human adenovirus D
aaugggacuuauccacaa

SEQ ID NO: 286455 - RNA, 14 nt, Human adenovirus D
aauguuaaugucac

SEQ ID NO: 286456 - RNA, 16 nt, Human adenovirus D
aauguuacugcauaca

SEQ ID NO: 286457 - RNA, 17 nt, Human adenovirus D
aauguuacugcauacaa

SEQ ID NO: 286458 - RNA, 15 nt, Human adenovirus D
aauuacuucaucaua

SEQ ID NO: 286459 - RNA, 13 nt, Human adenovirus D
uacgggugcaugu

SEQ ID NO: 286460 - RNA, 19 nt, Human adenovirus D
uacucauaaagaagacuau

SEQ ID NO: 286461 - RNA, 16 nt, Human adenovirus D
uacucggaaaacagga

SEQ ID NO: 286462 - RNA, 17 nt, Human adenovirus D
uacucuaaaugcaaauu

SEQ ID NO: 286463 - RNA, 12 nt, Human adenovirus D
uacugcauacaa

SEQ ID NO: 286464 - RNA, 21 nt, Human adenovirus D
uacugccacugccaacauuac

SEQ ID NO: 286465 - RNA, 16 nt, Human adenovirus D
uacugcugauuacucu

SEQ ID NO: 286466 - RNA, 14 nt, Human adenovirus D
uacuguaaagccac

SEQ ID NO: 286467 - RNA, 19 nt, Human adenovirus D
uacuucuggcacauacaaa

SEQ ID NO: 286468 - RNA, 22 nt, Human adenovirus D
uacuucuggcacauacaaagcu

SEQ ID NO: 286469 - RNA, 14 nt, Human adenovirus D
uagacaaggcagca

SEQ ID NO: 286470 - RNA, 12 nt, Human adenovirus D
uagacugcuauc

SEQ ID NO: 286471 - RNA, 15 nt, Human adenovirus D
uagcaaggugcugac

SEQ ID NO: 286472 - RNA, 16 nt, Human adenovirus D
uagcauagucacacuu

SEQ ID NO: 286473 - RNA, 22 nt, Human adenovirus D
uagcauagucacacuuaguuca

SEQ ID NO: 286474 - RNA, 17 nt, Human adenovirus D
uaggccgcuacaacagc

SEQ ID NO: 286475 - RNA, 17 nt, Human adenovirus D
uagucaggcaggauuca

SEQ ID NO: 286476 - RNA, 14 nt, Human adenovirus D
uagucauguguaaa

SEQ ID NO: 286477 - RNA, 23 nt, Human adenovirus D
uagugacuuauuuacaggacuuu

SEQ ID NO: 286478 - RNA, 18 nt, Human adenovirus D
uaguucuauauaaguggc

SEQ ID NO: 286479 - RNA, 17 nt, Human adenovirus D
uaguuguaaugaucaaa

SEQ ID NO: 286480 - RNA, 18 nt, Human adenovirus D
uaguuguaaugaucaaaa

SEQ ID NO: 286481 - RNA, 14 nt, Human adenovirus D
uauaaaaacaacaa

SEQ ID NO: 286482 - RNA, 21 nt, Human adenovirus D
uauaaaaacaacaaaaccaca

SEQ ID NO: 286483 - RNA, 15 nt, Human adenovirus D
uauacuccagugcau

SEQ ID NO: 286484 - RNA, 14 nt, Human adenovirus D
uauccuuucccugg

SEQ ID NO: 286485 - RNA, 21 nt, Human adenovirus D
uaucgcucuuaucccaugccc

SEQ ID NO: 286486 - RNA, 19 nt, Human adenovirus D
uaugcuguucaagggccca

SEQ ID NO: 286487 - RNA, 13 nt, Human adenovirus D
uaugucagugugc

SEQ ID NO: 286488 - RNA, 17 nt, Human adenovirus D
uauuccagcaugcaguu

SEQ ID NO: 286489 - RNA, 13 nt, Human adenovirus D
uauuccauacaaa

SEQ ID NO: 286490 - RNA, 15 nt, Human adenovirus D
ucaaacaggcaaaga

SEQ ID NO: 286491 - RNA, 21 nt, Human adenovirus D
uucaugugaacaaaacccaug

SEQ ID NO: 286492 - RNA, 11 nt, Human adenovirus D
uuccagaucac

SEQ ID NO: 286493 - RNA, 19 nt, Human adenovirus D
uucccgggcuuucuugccg

SEQ ID NO: 286494 - RNA, 17 nt, Human adenovirus D
uucccucacgcuugcca

SEQ ID NO: 286495 - RNA, 16 nt, Human adenovirus D
uuccucgaccaugacc

SEQ ID NO: 286496 - RNA, 16 nt, Human adenovirus D
uucgcagaaccaugaa

SEQ ID NO: 286497 - RNA, 19 nt, Human adenovirus D
uucugcuggggcaucucau

SEQ ID NO: 286498 - RNA, 15 nt, Human adenovirus D
uucuggcacauacaa

SEQ ID NO: 286499 - RNA, 20 nt, Human adenovirus D
uucuguccguggauuaccau

SEQ ID NO: 286500 - RNA, 14 nt, Human adenovirus D
uucugucucuucaa

SEQ ID NO: 286501 - RNA, 14 nt, Human adenovirus D
uucuuagacugcua

SEQ ID NO: 286502 - RNA, 20 nt, Human adenovirus D
uugaaugggacuuauccaca

SEQ ID NO: 286503 - RNA, 20 nt, Human adenovirus D
uugacaacccgccugccagg

SEQ ID NO: 286504 - RNA, 18 nt, Human adenovirus D
uugauuuuuacaccagcg

SEQ ID NO: 286505 - RNA, 21 nt, Human adenovirus D
uugcccgauugugaucaugca

SEQ ID NO: 286506 - RNA, 17 nt, Human adenovirus D
uugcccugcucaccugc

SEQ ID NO: 286507 - RNA, 12 nt, Human adenovirus D
uugcgguacugg

SEQ ID NO: 286508 - RNA, 23 nt, Human adenovirus D
uugcucacgccgaauggggucau

SEQ ID NO: 286509 - RNA, 14 nt, Human adenovirus D
uugcuucccugcaa

SEQ ID NO: 286510 - RNA, 21 nt, Human adenovirus D
uuggcucgucaggaaacugug

SEQ ID NO: 286511 - RNA, 22 nt, Human adenovirus D
uuggcucgucaggaaacugugu

SEQ ID NO: 286512 - RNA, 18 nt, Human adenovirus D
uugggcaauauaggagaa

SEQ ID NO: 286513 - RNA, 21 nt, Human adenovirus D
uugguugaacccagaugagga

SEQ ID NO: 286514 - RNA, 14 nt, Human adenovirus D
uugugaucauggcc

SEQ ID NO: 286515 - RNA, 17 nt, Human adenovirus D
uuucccucacgcuugcc

SEQ ID NO: 286516 - RNA, 21 nt, Human adenovirus D
uuucuguugcauguucuugca

SEQ ID NO: 286517 - RNA, 15 nt, Human adenovirus D
uuucuuagacugcua

SEQ ID NO: 286518 - RNA, 22 nt, Human adenovirus D
uuugaagucaugugugauauca

SEQ ID NO: 286519 - RNA, 19 nt, Human adenovirus D
uuugccuguuugaccaggc

SEQ ID NO: 286520 - RNA, 18 nt, Human adenovirus D
uuugugaauggaauguua

SEQ ID NO: 286521 - RNA, 15 nt, Human adenovirus D
uuugugaucauggcc

SEQ ID NO: 286522 - RNA, 20 nt, Human adenovirus D
uuuuagaauggaagacauca

SEQ ID NO: 286523 - RNA, 19 nt, Human adenovirus D
uuuuagcccuuauuugaca

SEQ ID NO: 286524 - RNA, 19 nt, Human adenovirus D
uuuugugaucauggccugu

SEQ ID NO: 286525 - RNA, 19 nt, Human adenovirus D
uuuuugcagcugacauuga

SEQ ID NO: 286526 - RNA, 15 nt, Human adenovirus D
ggcauauucuuuauu

SEQ ID NO: 286527 - RNA, 20 nt, Human adenovirus D
ggcauuaacgggguggugga

SEQ ID NO: 286528 - RNA, 14 nt, Human adenovirus D
ggccggccgcgaga

SEQ ID NO: 286529 - RNA, 18 nt, Human adenovirus D
ggccgugugguucaggag

SEQ ID NO: 286530 - RNA, 16 nt, Human adenovirus D
ggccugcgccauuguc

SEQ ID NO: 286531 - RNA, 13 nt, Human adenovirus D
ggccugugcaaug

SEQ ID NO: 286532 - RNA, 14 nt, Human adenovirus D
ggcggacauaugga

SEQ ID NO: 286533 - RNA, 15 nt, Human adenovirus D
ggcggacauauggaa

SEQ ID NO: 286534 - RNA, 16 nt, Human adenovirus D
ggcggagaacaaggcc

SEQ ID NO: 286535 - RNA, 15 nt, Human adenovirus D
ggcggcgauaugcca

SEQ ID NO: 286536 - RNA, 17 nt, Human adenovirus D
ggcuaguguacaacgcc

SEQ ID NO: 286537 - RNA, 18 nt, Human adenovirus D
ggcucauaugaccaugca

SEQ ID NO: 286538 - RNA, 13 nt, Human adenovirus D
ggcucaucugcag

SEQ ID NO: 286539 - RNA, 14 nt, Human adenovirus D
ggcugaugugauga

SEQ ID NO: 286540 - RNA, 20 nt, Human adenovirus D
ggcuucacugacugaucaac

SEQ ID NO: 286541 - RNA, 13 nt, Human adenovirus D
ggcuuuugugauc

SEQ ID NO: 286542 - RNA, 13 nt, Human adenovirus D
gggaucaccaguu

SEQ ID NO: 286543 - RNA, 22 nt, Human adenovirus D
gggaugaguugggccugaugca

SEQ ID NO: 286544 - RNA, 12 nt, Human adenovirus D
gggaugucaaau

SEQ ID NO: 286545 - RNA, 20 nt, Human adenovirus D
gggcaauaccgggaugauga

SEQ ID NO: 286546 - RNA, 12 nt, Human adenovirus D
gggcacuggggu

SEQ ID NO: 286547 - RNA, 13 nt, Human adenovirus D
gggccgccacucc

SEQ ID NO: 286548 - RNA, 12 nt, Human adenovirus D
gggcgcccagug

SEQ ID NO: 286549 - RNA, 14 nt, Human adenovirus D
gggcguacaugcac

SEQ ID NO: 286550 - RNA, 14 nt, Human adenovirus D
gggguguacuguca

SEQ ID NO: 286551 - RNA, 15 nt, Human adenovirus D
gggguguacugucau

SEQ ID NO: 286552 - RNA, 15 nt, Human adenovirus D
gggguugcagcacug

SEQ ID NO: 286553 - RNA, 23 nt, Human adenovirus D
gggucugugccucuccaucagcg

SEQ ID NO: 286554 - RNA, 17 nt, Human adenovirus D
ggguugcagcacuggaa

SEQ ID NO: 286555 - RNA, 18 nt, Human adenovirus D
ggguugcagcacuggaac

SEQ ID NO: 286556 - RNA, 23 nt, Human adenovirus D
gguacacgggguugcagcacugg

SEQ ID NO: 286557 - RNA, 21 nt, Human adenovirus D
gguacgcaagagaauccacua

SEQ ID NO: 286558 - RNA, 21 nt, Human adenovirus D
ggucaaacaggcaaagaucac

SEQ ID NO: 286559 - RNA, 23 nt, Human adenovirus D
ggucacuguccaugguagcaaug

SEQ ID NO: 286560 - RNA, 17 nt, Human adenovirus D
ggugaggcgaugcuguu

SEQ ID NO: 286561 - RNA, 23 nt, Human adenovirus D
aauuaucuuuuuauauguugaca

SEQ ID NO: 286562 - RNA, 15 nt, Human adenovirus D
aauuaugagcaucaa

SEQ ID NO: 286563 - RNA, 14 nt, Human adenovirus D
aauugucagcugua

SEQ ID NO: 286564 - RNA, 20 nt, Human adenovirus D
aauuuugugauggaaguaca

SEQ ID NO: 286565 - RNA, 22 nt, Human adenovirus D
aauuuugugauggaaguacagu

SEQ ID NO: 286566 - RNA, 16 nt, Human adenovirus D
acaaaaccacauuuga

SEQ ID NO: 286567 - RNA, 11 nt, Human adenovirus D
acaaacuacau

SEQ ID NO: 286568 - RNA, 14 nt, Human adenovirus D
acaaacuacaugga

SEQ ID NO: 286569 - RNA, 23 nt, Human adenovirus D
acaaacuacauggacaagauauc

SEQ ID NO: 286570 - RNA, 19 nt, Human adenovirus D
acaaauucaaauguuauag

SEQ ID NO: 286571 - RNA, 19 nt, Human adenovirus D
acaacaaaaccacauuuga

SEQ ID NO: 286572 - RNA, 18 nt, Human adenovirus D
acaacagccgcaggccaa

SEQ ID NO: 286573 - RNA, 15 nt, Human adenovirus D
acaaccgggugcuag

SEQ ID NO: 286574 - RNA, 22 nt, Human adenovirus D
acaagguacgcaagagaaucca

SEQ ID NO: 286575 - RNA, 21 nt, Human adenovirus D
acaauaaaaauuauaugugac

SEQ ID NO: 286576 - RNA, 14 nt, Human adenovirus D
acaauaauugaacu

SEQ ID NO: 286577 - RNA, 21 nt, Human adenovirus D
acaccuugaaagggaugucaa

SEQ ID NO: 286578 - RNA, 22 nt, Human adenovirus D
acaccuugaaagggaugucaaa

SEQ ID NO: 286579 - RNA, 15 nt, Human adenovirus D
acagcaacuuccuga

SEQ ID NO: 286580 - RNA, 13 nt, Human adenovirus D
acagcaucgccuc

SEQ ID NO: 286581 - RNA, 21 nt, Human adenovirus D
acagccacgauguaacaucac

SEQ ID NO: 286582 - RNA, 15 nt, Human adenovirus D
acaggcaaagaucac

SEQ ID NO: 286583 - RNA, 21 nt, Human adenovirus D
acaggcaaagaucaccuacga

SEQ ID NO: 286584 - RNA, 13 nt, Human adenovirus D
acaggcaaugaga

SEQ ID NO: 286585 - RNA, 15 nt, Human adenovirus D
acaguagucaucaaa

SEQ ID NO: 286586 - RNA, 18 nt, Human adenovirus D
acauaacugggugaugcu

SEQ ID NO: 286587 - RNA, 21 nt, Human adenovirus D
acauaacugggugaugcuuca

SEQ ID NO: 286588 - RNA, 22 nt, Human adenovirus D
acauacaaagcugaaagcuaua

SEQ ID NO: 286589 - RNA, 13 nt, Human adenovirus D
acauagugaccaa

SEQ ID NO: 286590 - RNA, 18 nt, Human adenovirus D
acauaguuguaaugauca

SEQ ID NO: 286591 - RNA, 19 nt, Human adenovirus D
acauaguuguaaugaucaa

SEQ ID NO: 286592 - RNA, 13 nt, Human adenovirus D
acaucugugcugc

SEQ ID NO: 286593 - RNA, 12 nt, Human adenovirus D
acaugcacugga

SEQ ID NO: 286594 - RNA, 13 nt, Human adenovirus D
acaugcacuggag

SEQ ID NO: 286595 - RNA, 13 nt, Human adenovirus D
acaugggcuauaa

SEQ ID NO: 286596 - RNA, 14 nt, Human adenovirus D
acaugggcuauaau

SEQ ID NO: 286597 - RNA, 16 nt, Human adenovirus D
acauggugggcuaaua

SEQ ID NO: 286598 - RNA, 17 nt, Human adenovirus D
acauggugggcuaauau

SEQ ID NO: 286599 - RNA, 14 nt, Human adenovirus D
acauugaaugggac

SEQ ID NO: 286600 - RNA, 9 nt, Human adenovirus D
acauuugaa

SEQ ID NO: 286601 - RNA, 17 nt, Human adenovirus D
accaaaaaaaacaauca

SEQ ID NO: 286602 - RNA, 17 nt, Human adenovirus D
accaacggcugcaucca

SEQ ID NO: 286603 - RNA, 18 nt, Human adenovirus D
accaacggcugcauccac

SEQ ID NO: 286604 - RNA, 22 nt, Human adenovirus D
accaacggcugcauccacugcu

SEQ ID NO: 286605 - RNA, 13 nt, Human adenovirus D
accaacucacccg

SEQ ID NO: 286606 - RNA, 13 nt, Human adenovirus D
accacaggcaaug

SEQ ID NO: 286607 - RNA, 22 nt, Human adenovirus D
accaccuccuccuguuacugua

SEQ ID NO: 286608 - RNA, 17 nt, Human adenovirus D
accacgaucugaugaug

SEQ ID NO: 286609 - RNA, 18 nt, Human adenovirus D
accacggaccggucccag

SEQ ID NO: 286610 - RNA, 14 nt, Human adenovirus D
accacgguggugca

SEQ ID NO: 286611 - RNA, 22 nt, Human adenovirus D
accagggcuucacugacugauc

SEQ ID NO: 286612 - RNA, 13 nt, Human adenovirus D
accaguuugggca

SEQ ID NO: 286613 - RNA, 18 nt, Human adenovirus D
accaguuugggcacuggg

SEQ ID NO: 286614 - RNA, 19 nt, Human adenovirus D
accaucaaugcuacauggu

SEQ ID NO: 286615 - RNA, 21 nt, Human adenovirus D
accaucaaugcuacauggugg

SEQ ID NO: 286616 - RNA, 17 nt, Human adenovirus D
accaucugcaucucaag

SEQ ID NO: 286617 - RNA, 19 nt, Human adenovirus D
accaugcagacucugcuca

SEQ ID NO: 286618 - RNA, 17 nt, Human adenovirus D
caguuaagaauccacag

SEQ ID NO: 286619 - RNA, 15 nt, Human adenovirus D
caguuggaugacuga

SEQ ID NO: 286620 - RNA, 17 nt, Human adenovirus D
caguuugggcacugggg

SEQ ID NO: 286621 - RNA, 18 nt, Human adenovirus D
cauaaagaagacuauaaa

SEQ ID NO: 286622 - RNA, 17 nt, Human adenovirus D
cauaauguaaguucugu

SEQ ID NO: 286623 - RNA, 14 nt, Human adenovirus D
cauacaugggcuau

SEQ ID NO: 286624 - RNA, 18 nt, Human adenovirus D
cauacucggaaaacagga

SEQ ID NO: 286625 - RNA, 23 nt, Human adenovirus D
cauagugaccaagaccgugaaua

SEQ ID NO: 286626 - RNA, 15 nt, Human adenovirus D
caucaaugcuacaug

SEQ ID NO: 286627 - RNA, 13 nt, Human adenovirus D
caucacauucaaa

SEQ ID NO: 286628 - RNA, 14 nt, Human adenovirus D
caucagaugcagag

SEQ ID NO: 286629 - RNA, 14 nt, Human adenovirus D
caucauggcccuga

SEQ ID NO: 286630 - RNA, 22 nt, Human adenovirus D
cauccaagcgggccucacaguc

SEQ ID NO: 286631 - RNA, 15 nt, Human adenovirus D
cauccccuguugccc

SEQ ID NO: 286632 - RNA, 17 nt, Human adenovirus D
caucgacuggugcugcg

SEQ ID NO: 286633 - RNA, 13 nt, Human adenovirus D
caucugugcugcc

SEQ ID NO: 286634 - RNA, 16 nt, Human adenovirus D
caugaaagaacauaca

SEQ ID NO: 286635 - RNA, 20 nt, Human adenovirus D
caugaaggcuuucacagcuu

SEQ ID NO: 286636 - RNA, 14 nt, Human adenovirus D
caugcacuggagua

SEQ ID NO: 286637 - RNA, 16 nt, Human adenovirus D
caugccacgaacagcc

SEQ ID NO: 286638 - RNA, 19 nt, Human adenovirus D
caugcccucgcuacugcug

SEQ ID NO: 286639 - RNA, 20 nt, Human adenovirus D
caugcccucgcuacugcuga

SEQ ID NO: 286640 - RNA, 19 nt, Human adenovirus D
caugcccucucaacaucac

SEQ ID NO: 286641 - RNA, 16 nt, Human adenovirus D
cauggacaagauauca

SEQ ID NO: 286642 - RNA, 17 nt, Human adenovirus D
cauggacaagauaucau

SEQ ID NO: 286643 - RNA, 14 nt, Human adenovirus D
cauggccugugcaa

SEQ ID NO: 286644 - RNA, 18 nt, Human adenovirus D
cauggccugugcaauguc

SEQ ID NO: 286645 - RNA, 18 nt, Human adenovirus D
caugugaacaaaacccau

SEQ ID NO: 286646 - RNA, 21 nt, Human adenovirus D
caugugaacaaaacccaugaa

SEQ ID NO: 286647 - RNA, 16 nt, Human adenovirus D
caugugugauaucaca

SEQ ID NO: 286648 - RNA, 17 nt, Human adenovirus D
caugugugauaucacac

SEQ ID NO: 286649 - RNA, 20 nt, Human adenovirus D
caugugugauaucacacugc

SEQ ID NO: 286650 - RNA, 18 nt, Human adenovirus D
cauuaaaguuuucccuca

SEQ ID NO: 286651 - RNA, 17 nt, Human adenovirus D
cauuaacgggguggugg

SEQ ID NO: 286652 - RNA, 17 nt, Human adenovirus D
cauuacuauuacugcca

SEQ ID NO: 286653 - RNA, 15 nt, Human adenovirus D
cauugccacuguuca

SEQ ID NO: 286654 - RNA, 17 nt, Human adenovirus D
cauugguugaacccaga

SEQ ID NO: 286655 - RNA, 14 nt, Human adenovirus D
cauuucacagugua

SEQ ID NO: 286656 - RNA, 19 nt, Human adenovirus D
ccaaauuacucgcaaaaau

SEQ ID NO: 286657 - RNA, 18 nt, Human adenovirus D
ccaacggcugcauccacu

SEQ ID NO: 286658 - RNA, 20 nt, Human adenovirus D
ccaacugcgcgcccucgucu

SEQ ID NO: 286659 - RNA, 15 nt, Human adenovirus D
ccaagaccgugaaua

SEQ ID NO: 286660 - RNA, 13 nt, Human adenovirus D
ccacacaguuucc

SEQ ID NO: 286661 - RNA, 16 nt, Human adenovirus D
ccacauuugaagauuc

SEQ ID NO: 286662 - RNA, 16 nt, Human adenovirus D
ccacgaucugaugaug

SEQ ID NO: 286663 - RNA, 17 nt, Human adenovirus D
ccacgcuuuaucacuca

SEQ ID NO: 286664 - RNA, 20 nt, Human adenovirus D
ccacguugcgguacugguac

SEQ ID NO: 286665 - RNA, 15 nt, Human adenovirus D
ccacuguucaucccc

SEQ ID NO: 286666 - RNA, 16 nt, Human adenovirus D
ccagaucacaugguau

SEQ ID NO: 286667 - RNA, 19 nt, Human adenovirus D
ccagauugcaaguacauag

SEQ ID NO: 286668 - RNA, 18 nt, Human adenovirus D
ccagcagaagcagaaguu

SEQ ID NO: 286669 - RNA, 18 nt, Human adenovirus D
ccagcagaagguggugga

SEQ ID NO: 286670 - RNA, 13 nt, Human adenovirus D
ccagcccauuuca

SEQ ID NO: 286671 - RNA, 16 nt, Human adenovirus D
ccagccuguacccaga

SEQ ID NO: 286672 - RNA, 22 nt, Human adenovirus D
ccagcgcuuccccugguaccgc

SEQ ID NO: 286673 - RNA, 22 nt, Human adenovirus D
ccaggagaugagcagaacuaca

SEQ ID NO: 286674 - RNA, 13 nt, Human adenovirus D
ccaggggagugaa

SEQ ID NO: 286675 - RNA, 15 nt, Human adenovirus D
ccauagucaucaccc

SEQ ID NO: 286676 - RNA, 15 nt, Human adenovirus D
ccaugaauacaguga

SEQ ID NO: 286677 - RNA, 15 nt, Human adenovirus D
ccaugcagacucugc

SEQ ID NO: 286678 - RNA, 16 nt, Human adenovirus D
ccaugcagacucugcu

SEQ ID NO: 286679 - RNA, 13 nt, Human adenovirus D
ccaugcaggugaa

SEQ ID NO: 286680 - RNA, 20 nt, Human adenovirus D
ccaugcaggugaacuucugc

SEQ ID NO: 286681 - RNA, 20 nt, Human adenovirus D
ccaugcccucgcuacugcug

SEQ ID NO: 286682 - RNA, 14 nt, Human adenovirus D
ccaugggaaaugca

SEQ ID NO: 286683 - RNA, 15 nt, Human adenovirus D
ccaugggaaaugcau

SEQ ID NO: 286684 - RNA, 16 nt, Human adenovirus D
cccaggacuuaaguga

SEQ ID NO: 286685 - RNA, 16 nt, Human adenovirus D
cccagugcuuccagca

SEQ ID NO: 286686 - RNA, 22 nt, Human adenovirus D
cccaugaaagaacauacauggg

SEQ ID NO: 286687 - RNA, 21 nt, Human adenovirus D
cccaugcccucgcuacugcug

SEQ ID NO: 286688 - RNA, 15 nt, Human adenovirus D
cugcaagagcuccuc

SEQ ID NO: 286689 - RNA, 20 nt, Human adenovirus D
cugcaccugcgucugcagca

SEQ ID NO: 286690 - RNA, 20 nt, Human adenovirus D
cugccacuugaacucgggga

SEQ ID NO: 286691 - RNA, 19 nt, Human adenovirus D
cugcgcuuagucaugugua

SEQ ID NO: 286692 - RNA, 19 nt, Human adenovirus D
cugcugcgccgcgccagac

SEQ ID NO: 286693 - RNA, 15 nt, Human adenovirus D
cuggauccugcauug

SEQ ID NO: 286694 - RNA, 17 nt, Human adenovirus D
cuggcacauacaaagcu

SEQ ID NO: 286695 - RNA, 23 nt, Human adenovirus D
cuggcucugaauugucagcugua

SEQ ID NO: 286696 - RNA, 14 nt, Human adenovirus D
cuggcugaugugau

SEQ ID NO: 286697 - RNA, 15 nt, Human adenovirus D
cuggcugaugugaug

SEQ ID NO: 286698 - RNA, 17 nt, Human adenovirus D
cuggcuuuacccugcuc

SEQ ID NO: 286699 - RNA, 21 nt, Human adenovirus D
cugggacgucucgaacuccuc

SEQ ID NO: 286700 - RNA, 19 nt, Human adenovirus D
cugggaggcugcgaugcaa

SEQ ID NO: 286701 - RNA, 14 nt, Human adenovirus D
cugggauaugaucc

SEQ ID NO: 286702 - RNA, 21 nt, Human adenovirus D
cuggggcaucucauaggugag

SEQ ID NO: 286703 - RNA, 16 nt, Human adenovirus D
cugggugaugcuucaa

SEQ ID NO: 286704 - RNA, 12 nt, Human adenovirus D
cugucaugccac

SEQ ID NO: 286705 - RNA, 23 nt, Human adenovirus D
cugucucagccucgaacagucca

SEQ ID NO: 286706 - RNA, 15 nt, Human adenovirus D
cugugcuaagugugg

SEQ ID NO: 286707 - RNA, 12 nt, Human adenovirus D
cuguguaucucg

SEQ ID NO: 286708 - RNA, 18 nt, Human adenovirus D
cuguugcauguucuugca

SEQ ID NO: 286709 - RNA, 21 nt, Human adenovirus D
cuguugcauguucuugcaugc

SEQ ID NO: 286710 - RNA, 13 nt, Human adenovirus D
cuuaacucugauu

SEQ ID NO: 286711 - RNA, 17 nt, Human adenovirus D
cuuaacucugauucaug

SEQ ID NO: 286712 - RNA, 20 nt, Human adenovirus D
cuuaagugacuuuuugcagc

SEQ ID NO: 286713 - RNA, 21 nt, Human adenovirus D
cuuaagugacuuuuugcagcu

SEQ ID NO: 286714 - RNA, 13 nt, Human adenovirus D
cuuagacugcuau

SEQ ID NO: 286715 - RNA, 22 nt, Human adenovirus D
cuuagcaaggugcugacaucca

SEQ ID NO: 286716 - RNA, 17 nt, Human adenovirus D
cuuaguucagcugcaau

SEQ ID NO: 286717 - RNA, 17 nt, Human adenovirus D
cuuauccacaaacuaca

SEQ ID NO: 286718 - RNA, 12 nt, Human adenovirus D
cuuauuccagca

SEQ ID NO: 286719 - RNA, 14 nt, Human adenovirus D
cuucaauaauggaa

SEQ ID NO: 286720 - RNA, 15 nt, Human adenovirus D
cuucaauaauggaag

SEQ ID NO: 286721 - RNA, 17 nt, Human adenovirus D
cuucaauuggagcagug

SEQ ID NO: 286722 - RNA, 14 nt, Human adenovirus D
cuuccugcagcuca

SEQ ID NO: 286723 - RNA, 15 nt, Human adenovirus D
cuucgagaauggaug

SEQ ID NO: 286724 - RNA, 18 nt, Human adenovirus D
cuucgcagaaccaugaau

SEQ ID NO: 286725 - RNA, 13 nt, Human adenovirus D
cuucuccagaauc

SEQ ID NO: 286726 - RNA, 13 nt, Human adenovirus D
cuucucggaccaa

SEQ ID NO: 286727 - RNA, 15 nt, Human adenovirus D
cuucugccuggucaa

SEQ ID NO: 286728 - RNA, 17 nt, Human adenovirus D
cuucuggcacauacaaa

SEQ ID NO: 286729 - RNA, 16 nt, Human adenovirus D
cuucugucucuucaac

SEQ ID NO: 286730 - RNA, 17 nt, Human adenovirus D
cuugaacucggggauca

SEQ ID NO: 286731 - RNA, 12 nt, Human adenovirus D
cuuguaacuuuu

SEQ ID NO: 286732 - RNA, 15 nt, Human adenovirus D
cuuuagacaacagcc

SEQ ID NO: 286733 - RNA, 14 nt, Human adenovirus D
cuuucacagcuugc

SEQ ID NO: 286734 - RNA, 16 nt, Human adenovirus D
cuuugcuucccugcaa

SEQ ID NO: 286735 - RNA, 19 nt, Human adenovirus D
cuuuugguuucaaauucau

SEQ ID NO: 286736 - RNA, 22 nt, Human adenovirus D
cuuuuuauauguugacaauaau

SEQ ID NO: 286737 - RNA, 22 nt, Human adenovirus D
gaaaaaacuaccacgcuuuauc

SEQ ID NO: 286738 - RNA, 18 nt, Human adenovirus D
gaaaaacuuugcuucccu

SEQ ID NO: 286739 - RNA, 12 nt, Human adenovirus D
gaaaacaggaug

SEQ ID NO: 286740 - RNA, 14 nt, Human adenovirus D
gaaaaccaccagcc

SEQ ID NO: 286741 - RNA, 18 nt, Human adenovirus D
gaaaagcucaaagaccag

SEQ ID NO: 286742 - RNA, 19 nt, Human adenovirus D
gaaaagcucaaagaccaga

SEQ ID NO: 286743 - RNA, 23 nt, Human adenovirus D
gaaagaacauacaugggcuauaa

SEQ ID NO: 286744 - RNA, 21 nt, Human adenovirus D
gaaauaaaaaacacguuuauu

SEQ ID NO: 286745 - RNA, 22 nt, Human adenovirus D
gaaauuaaaaaauuaaccuaua

SEQ ID NO: 286746 - RNA, 18 nt, Human adenovirus D
gaaauuaugagcaucaaa

SEQ ID NO: 286747 - RNA, 19 nt, Human adenovirus D
gaacauuuccuuauuuaag

SEQ ID NO: 286748 - RNA, 16 nt, Human adenovirus D
gaaccaugaauacagu

SEQ ID NO: 286749 - RNA, 19 nt, Human adenovirus D
gaaccguguacacugugaa

SEQ ID NO: 286750 - RNA, 16 nt, Human adenovirus D
gaacgcacagauucau

SEQ ID NO: 286751 - RNA, 22 nt, Human adenovirus D
gaacuacacggucacuguccau

SEQ ID NO: 286752 - RNA, 12 nt, Human adenovirus D
gaacuccucucg

SEQ ID NO: 286753 - RNA, 21 nt, Human adenovirus D
gaacucggggaucaccaguuu

SEQ ID NO: 286754 - RNA, 19 nt, Human adenovirus D
gaacuggacuuggggucua

SEQ ID NO: 286755 - RNA, 22 nt, Human adenovirus D
gaacuuucuccacaccuugaaa

SEQ ID NO: 286756 - RNA, 21 nt, Human adenovirus D
gaagaugcccuucuugcacug

SEQ ID NO: 286757 - RNA, 12 nt, Human adenovirus D
gaagauggccac

SEQ ID NO: 286758 - RNA, 18 nt, Human adenovirus D
gaagcagaaguucaccug

SEQ ID NO: 286759 - RNA, 13 nt, Human adenovirus D
gaaggugguggac

SEQ ID NO: 286760 - RNA, 14 nt, Human adenovirus D
gaaguaugccaaga

SEQ ID NO: 286761 - RNA, 20 nt, Human adenovirus D
gaauaucagacaugcugcua

SEQ ID NO: 286762 - RNA, 18 nt, Human adenovirus D
gaauauccccuuccucac

SEQ ID NO: 286763 - RNA, 18 nt, Human adenovirus D
gaaucuucgagaauggau

SEQ ID NO: 286764 - RNA, 17 nt, Human adenovirus D
gaauuucuuagacugcu

SEQ ID NO: 286765 - RNA, 24 nt, Human adenovirus D
gacaagcuggccugcgccauuguc

SEQ ID NO: 286766 - RNA, 15 nt, Human adenovirus D
gacaauaauugaacu

SEQ ID NO: 286767 - RNA, 18 nt, Human adenovirus D
gacacggccaccaacuca

SEQ ID NO: 286768 - RNA, 20 nt, Human adenovirus D
gacauaacugggugaugcuu

SEQ ID NO: 286769 - RNA, 14 nt, Human adenovirus D
gacaugcugcuaca

SEQ ID NO: 286770 - RNA, 18 nt, Human adenovirus D
gaccaacggcugcaucca

SEQ ID NO: 286771 - RNA, 19 nt, Human adenovirus D
gaccaacggcugcauccac

SEQ ID NO: 286772 - RNA, 22 nt, Human adenovirus D
gaccaacggcugcauccacugc

SEQ ID NO: 286773 - RNA, 23 nt, Human adenovirus D
gaccaugcagacucugcucauac

SEQ ID NO: 286774 - RNA, 21 nt, Human adenovirus D
gacccucgccaagaugcccau

SEQ ID NO: 286775 - RNA, 14 nt, Human adenovirus D
gacgagacuggccu

SEQ ID NO: 286776 - RNA, 15 nt, Human adenovirus D
gacuauaaagucaca

SEQ ID NO: 286777 - RNA, 18 nt, Human adenovirus D
gacucugcucauacugcu

SEQ ID NO: 286778 - RNA, 20 nt, Human adenovirus D
gacucugcucauacugcuau

SEQ ID NO: 286779 - RNA, 15 nt, Human adenovirus D
gacugaucaacaucc

SEQ ID NO: 286780 - RNA, 14 nt, Human adenovirus D
gacugcuaucagga

SEQ ID NO: 286781 - RNA, 18 nt, Human adenovirus D
gacugcugggugaugacu

SEQ ID NO: 286782 - RNA, 21 nt, Human adenovirus D
gacugucuagggccuuucccc

SEQ ID NO: 286783 - RNA, 15 nt, Human adenovirus D
gacuuuuugcagcug

SEQ ID NO: 286784 - RNA, 14 nt, Human adenovirus D
gagaacaaggccau

SEQ ID NO: 286785 - RNA, 18 nt, Human adenovirus D
gagaccaacggcugcauc

SEQ ID NO: 286786 - RNA, 17 nt, Human adenovirus D
gagaggagugugauaug

SEQ ID NO: 286787 - RNA, 15 nt, Human adenovirus D
gagaucuggaccugg

SEQ ID NO: 286788 - RNA, 20 nt, Human adenovirus D
gagcagauaaaaacccauug

SEQ ID NO: 286789 - RNA, 23 nt, Human adenovirus D
gagcccgggucuggugcaguuug

SEQ ID NO: 286790 - RNA, 17 nt, Human adenovirus D
gagccggcgggcggacg

SEQ ID NO: 286791 - RNA, 21 nt, Human adenovirus D
gagcgugccgccaaggagcuc

SEQ ID NO: 286792 - RNA, 14 nt, Human adenovirus D
gagcuacaugccca

SEQ ID NO: 286793 - RNA, 23 nt, Human adenovirus D
gagcucguguccaacggcaaaca

SEQ ID NO: 286794 - RNA, 22 nt, Human adenovirus D
gagcugacggccagucugauga

SEQ ID NO: 286795 - RNA, 15 nt, Human adenovirus D
gaggacuuguuacau

SEQ ID NO: 286796 - RNA, 19 nt, Human adenovirus D
gaggagaacugcuggcccu

SEQ ID NO: 286797 - RNA, 15 nt, Human adenovirus D
gaggcgugcgguggu

SEQ ID NO: 286798 - RNA, 17 nt, Human adenovirus D
gaggugguaaaauuaca

SEQ ID NO: 286799 - RNA, 13 nt, Human adenovirus D
gaguaagcacuau

SEQ ID NO: 286800 - RNA, 19 nt, Human adenovirus D
gaguccuuuagacaacagc

SEQ ID NO: 286801 - RNA, 15 nt, Human adenovirus D
gagugcagggaugag

SEQ ID NO: 286802 - RNA, 15 nt, Human adenovirus D
gagugugauaugcac

SEQ ID NO: 286803 - RNA, 15 nt, Human adenovirus D
gauauuccagaucac

SEQ ID NO: 286804 - RNA, 16 nt, Human adenovirus D
gauauuccagaucaca

SEQ ID NO: 286805 - RNA, 20 nt, Human adenovirus D
gaucacaugguaugauagca

SEQ ID NO: 286806 - RNA, 22 nt, Human adenovirus D
gaucauggccugugcaauguca

SEQ ID NO: 286807 - RNA, 21 nt, Human adenovirus D
gaucugaagaccauucugcac

SEQ ID NO: 286808 - RNA, 22 nt, Human adenovirus D
gaugacuucaaccccgucuacc

SEQ ID NO: 286809 - RNA, 20 nt, Human adenovirus D
gaugaggcgugcgguggugu

SEQ ID NO: 286810 - RNA, 19 nt, Human adenovirus D
gaugaguugggccugaugc

SEQ ID NO: 286811 - RNA, 17 nt, Human adenovirus D
gaugccaucaacaucca

SEQ ID NO: 286812 - RNA, 18 nt, Human adenovirus D
gaugccaucaacauccac

SEQ ID NO: 286813 - RNA, 16 nt, Human adenovirus D
gaugcuguuugccguu

SEQ ID NO: 286814 - RNA, 16 nt, Human adenovirus D
gauggcgcaggcgacc

SEQ ID NO: 286815 - RNA, 17 nt, Human adenovirus D
gauggcggcgcgguggg

SEQ ID NO: 286816 - RNA, 13 nt, Human adenovirus D
gauguaacaucac

SEQ ID NO: 286817 - RNA, 20 nt, Human adenovirus D
gauucccgggcuuucuugcc

SEQ ID NO: 286818 - RNA, 23 nt, Human adenovirus D
gauucuggaaauuaugagcauca

SEQ ID NO: 286819 - RNA, 21 nt, Human adenovirus D
gauugacuacucgcgcuggug

SEQ ID NO: 286820 - RNA, 22 nt, Human adenovirus D
gauugcaaguacauagugacca

SEQ ID NO: 286821 - RNA, 12 nt, Human adenovirus D
gauuuuuacacc

SEQ ID NO: 286822 - RNA, 15 nt, Human adenovirus D
gauuuuuacaccagc

SEQ ID NO: 286823 - RNA, 16 nt, Human adenovirus D
gauuuuuacaccagcg

SEQ ID NO: 286824 - RNA, 21 nt, Human adenovirus D
gcaaauuccucgaccaugacc

SEQ ID NO: 286825 - RNA, 15 nt, Human adenovirus D
gcaagagcuccucuc

SEQ ID NO: 286826 - RNA, 22 nt, Human adenovirus D
gcaagcgcccagagcgccuuac

SEQ ID NO: 286827 - RNA, 19 nt, Human adenovirus D
gcaauaccgggaugaugac

SEQ ID NO: 286828 - RNA, 20 nt, Human adenovirus D
gcaauaccgggaugaugacc

SEQ ID NO: 286829 - RNA, 20 nt, Human adenovirus D
gcaaugagaggagugugaua

SEQ ID NO: 286830 - RNA, 24 nt, Human adenovirus D
gcaaugagaggagugugauaugca

SEQ ID NO: 286831 - RNA, 17 nt, Human adenovirus D
gcacaguagucaucaaa

SEQ ID NO: 286832 - RNA, 21 nt, Human adenovirus D
gcaccucgguacccuccuccc

SEQ ID NO: 286833 - RNA, 19 nt, Human adenovirus D
gcaccugcgucugcagcau

SEQ ID NO: 286834 - RNA, 19 nt, Human adenovirus D
gcacgccucgcccgacugu

SEQ ID NO: 286835 - RNA, 17 nt, Human adenovirus D
gcacuggaguauaugca

SEQ ID NO: 286836 - RNA, 22 nt, Human adenovirus D
gcacugguggauguugauggca

SEQ ID NO: 286837 - RNA, 14 nt, Human adenovirus D
gcagaaccaugaau

SEQ ID NO: 286838 - RNA, 22 nt, Human adenovirus D
gcagaaccaugaauacagugau

SEQ ID NO: 286839 - RNA, 21 nt, Human adenovirus D
gcagaagaugcccuucuugca

SEQ ID NO: 286840 - RNA, 15 nt, Human adenovirus D
gcagaagguggugga

SEQ ID NO: 286841 - RNA, 15 nt, Human adenovirus D
gcagacaucaugaac

SEQ ID NO: 286842 - RNA, 16 nt, Human adenovirus D
gcagacucugcucaua

SEQ ID NO: 286843 - RNA, 23 nt, Human adenovirus D
gcagacucugcucauacugcuau

SEQ ID NO: 286844 - RNA, 15 nt, Human adenovirus D
gcagaggaacuucuc

SEQ ID NO: 286845 - RNA, 12 nt, Human adenovirus D
gcagcacuggaa

SEQ ID NO: 286846 - RNA, 19 nt, Human adenovirus D
gcagcacuggaacaccauc

SEQ ID NO: 286847 - RNA, 16 nt, Human adenovirus D
gcagccgccaugacag

SEQ ID NO: 286848 - RNA, 14 nt, Human adenovirus D
gcagcgcauccugc

SEQ ID NO: 286849 - RNA, 21 nt, Human adenovirus D
gcagugggcguacaugcacau

SEQ ID NO: 286850 - RNA, 15 nt, Human adenovirus D
gcauagucacacuua

SEQ ID NO: 286851 - RNA, 13 nt, Human adenovirus D
gcauguucaacca

SEQ ID NO: 286852 - RNA, 12 nt, Human adenovirus D
gcauuaacgggg

SEQ ID NO: 286853 - RNA, 13 nt, Human adenovirus D
gcauuaacuggau

SEQ ID NO: 286854 - RNA, 16 nt, Human adenovirus D
gccaacauuacuucug

SEQ ID NO: 286855 - RNA, 12 nt, Human adenovirus D
gccaaggagcuc

SEQ ID NO: 286856 - RNA, 15 nt, Human adenovirus D
gccaccgacacguac

SEQ ID NO: 286857 - RNA, 19 nt, Human adenovirus D
gccacgauguaacaucacc

SEQ ID NO: 286858 - RNA, 21 nt, Human adenovirus D
gccacuguucauccccuggcu

SEQ ID NO: 286859 - RNA, 22 nt, Human adenovirus D
gccagaauuuuaaggcucauau

SEQ ID NO: 286860 - RNA, 14 nt, Human adenovirus D
gccagucugaugaa

SEQ ID NO: 286861 - RNA, 15 nt, Human adenovirus D
gccagucugaugaau

SEQ ID NO: 286862 - RNA, 10 nt, Human adenovirus D
gccagugcac

SEQ ID NO: 286863 - RNA, 12 nt, Human adenovirus D
gcccaccaugca

SEQ ID NO: 286864 - RNA, 20 nt, Human adenovirus D
gcccagauugcaaguacaua

SEQ ID NO: 286865 - RNA, 22 nt, Human adenovirus D
gcccagcagcauguacggagga

SEQ ID NO: 286866 - RNA, 17 nt, Human adenovirus D
gccccuucgaccgugga

SEQ ID NO: 286867 - RNA, 16 nt, Human adenovirus D
gcccucucaacaucac

SEQ ID NO: 286868 - RNA, 12 nt, Human adenovirus D
gccgccaugaca

SEQ ID NO: 286869 - RNA, 12 nt, Human adenovirus D
gccgcgccagac

SEQ ID NO: 286870 - RNA, 14 nt, Human adenovirus D
gccgcuacaacagc

SEQ ID NO: 286871 - RNA, 19 nt, Human adenovirus D
gccgggcuaguguacaacg

SEQ ID NO: 286872 - RNA, 21 nt, Human adenovirus D
gccuggucaaacaggcaaaga

SEQ ID NO: 286873 - RNA, 17 nt, Human adenovirus D
gcgacaagcuggccugc

SEQ ID NO: 286874 - RNA, 23 nt, Human adenovirus D
gcgagcucguccgggaaaaccuc

SEQ ID NO: 286875 - RNA, 16 nt, Human adenovirus D
gcgaguagucaaucuc

SEQ ID NO: 286876 - RNA, 15 nt, Human adenovirus D
gcgcccucagcaguc

SEQ ID NO: 286877 - RNA, 15 nt, Human adenovirus D
gcgcgggcucgucag

SEQ ID NO: 286878 - RNA, 20 nt, Human adenovirus D
gcgcuacaauuacuucauca

SEQ ID NO: 286879 - RNA, 15 nt, Human adenovirus D
gcgcugcaaagccag

SEQ ID NO: 286880 - RNA, 23 nt, Human adenovirus D
gcgcuggcggagaacaaggccau

SEQ ID NO: 286881 - RNA, 21 nt, Human adenovirus D
gcggacauauggaauuucuua

SEQ ID NO: 286882 - RNA, 14 nt, Human adenovirus D
gcggccgcccacgg

SEQ ID NO: 286883 - RNA, 15 nt, Human adenovirus D
gcgggccucacaguc

SEQ ID NO: 286884 - RNA, 21 nt, Human adenovirus D
gcgggcggacugccaccgccg

SEQ ID NO: 286885 - RNA, 14 nt, Human adenovirus D
gcggucgcgguggg

SEQ ID NO: 286886 - RNA, 21 nt, Human adenovirus D
gcggucgcgguggggcgguga

SEQ ID NO: 286887 - RNA, 18 nt, Human adenovirus D
gcgguguaagcuaccaca

SEQ ID NO: 286888 - RNA, 13 nt, Human adenovirus D
gcuacaauuacuu

SEQ ID NO: 286889 - RNA, 18 nt, Human adenovirus D
gcuacugcugauuacucu

SEQ ID NO: 286890 - RNA, 14 nt, Human adenovirus D
gcuagacauggcca

SEQ ID NO: 286891 - RNA, 15 nt, Human adenovirus D
gcuagacauggccag

SEQ ID NO: 286892 - RNA, 19 nt, Human adenovirus D
gcuauuaagaaguaugcca

SEQ ID NO: 286893 - RNA, 17 nt, Human adenovirus D
gcucacgccgaaugggg

SEQ ID NO: 286894 - RNA, 14 nt, Human adenovirus D
gcucauacugcuau

SEQ ID NO: 286895 - RNA, 14 nt, Human adenovirus D
gcucguaggugauc

SEQ ID NO: 286896 - RNA, 19 nt, Human adenovirus D
gcucuugucgcugaucuga

SEQ ID NO: 286897 - RNA, 13 nt, Human adenovirus D
gcugaaagcuaua

SEQ ID NO: 286898 - RNA, 21 nt, Human adenovirus D
gcugacggccagucugaugaa

SEQ ID NO: 286899 - RNA, 14 nt, Human adenovirus D
gcugaugugaugag

SEQ ID NO: 286900 - RNA, 20 nt, Human adenovirus D
gcugauuacucuaaaugcaa

SEQ ID NO: 286901 - RNA, 16 nt, Human adenovirus D
gcuggcuuuacccugc

SEQ ID NO: 286902 - RNA, 15 nt, Human adenovirus D
gcugguggugggaga

SEQ ID NO: 286903 - RNA, 17 nt, Human adenovirus D
gcugguguaaaaaucaa

SEQ ID NO: 286904 - RNA, 18 nt, Human adenovirus D
gcuuagcaaggugcugac

SEQ ID NO: 286905 - RNA, 16 nt, Human adenovirus D
gcuucaauaauggaag

SEQ ID NO: 286906 - RNA, 20 nt, Human adenovirus D
gcuucugcuggggcaucuca

SEQ ID NO: 286907 - RNA, 12 nt, Human adenovirus D
gcuuucuugccg

SEQ ID NO: 286908 - RNA, 14 nt, Human adenovirus D
gcuuuugugaucau

SEQ ID NO: 286909 - RNA, 18 nt, Human adenovirus D
gcuuuugugaucauggcc

SEQ ID NO: 286910 - RNA, 15 nt, Human adenovirus D
ggaaauuaugagcau

SEQ ID NO: 286911 - RNA, 17 nt, Human adenovirus D
ggaacaaggccuggaau

SEQ ID NO: 286912 - RNA, 12 nt, Human adenovirus D
ggaaguacaguu

SEQ ID NO: 286913 - RNA, 20 nt, Human adenovirus D
ggaauuucuuagacugcuau

SEQ ID NO: 286914 - RNA, 14 nt, Human adenovirus D
ggacaagauaucau

SEQ ID NO: 286915 - RNA, 19 nt, Human adenovirus D
ggacaucgcgaaccaggca

SEQ ID NO: 286916 - RNA, 23 nt, Human adenovirus D
ggaccucagauauuccagaucac

SEQ ID NO: 286917 - RNA, 14 nt, Human adenovirus D
ggacggccgcagga

SEQ ID NO: 286918 - RNA, 20 nt, Human adenovirus D
ggacgucucgaacuccucuc

SEQ ID NO: 286919 - RNA, 19 nt, Human adenovirus D
ggacuuaagugacuuuuug

SEQ ID NO: 286920 - RNA, 13 nt, Human adenovirus D
ggaguauaugcaa

SEQ ID NO: 286921 - RNA, 16 nt, Human adenovirus D
ggauucaaaaacuucc

SEQ ID NO: 286922 - RNA, 20 nt, Human adenovirus D
ggcaauaccgggaugaugac

SEQ ID NO: 286923 - RNA, 18 nt, Human adenovirus D
ggcagcaccuguggcgau

SEQ ID NO: 286924 - RNA, 22 nt, Human adenovirus D
ggcagccgcagccgccaugaca

SEQ ID NO: 286925 - RNA, 13 nt, Human adenovirus D
ggcagcggccuga

SEQ ID NO: 286926 - RNA, 12 nt, Human adenovirus D
aaaaaaacaauc

SEQ ID NO: 286927 - RNA, 12 nt, Human adenovirus D
aaaaaacacguu

SEQ ID NO: 286928 - RNA, 17 nt, Human adenovirus D
aaaaauuaaccuauaaa

SEQ ID NO: 286929 - RNA, 20 nt, Human adenovirus D
aaaaccacauuugaagauuc

SEQ ID NO: 286930 - RNA, 13 nt, Human adenovirus D
aaaaccaccagcc

SEQ ID NO: 286931 - RNA, 21 nt, Human adenovirus D
aaaacccaugaaagaacauac

SEQ ID NO: 286932 - RNA, 23 nt, Human adenovirus D
aaaagucauccaagcgggccuca

SEQ ID NO: 286933 - RNA, 13 nt, Human adenovirus D
aaaauuacauuga

SEQ ID NO: 286934 - RNA, 14 nt, Human adenovirus D
aaaauuacauugaa

SEQ ID NO: 286935 - RNA, 11 nt, Human adenovirus D
aaaauuugaaa

SEQ ID NO: 286936 - RNA, 19 nt, Human adenovirus D
aaaccacauuugaagauuc

SEQ ID NO: 286937 - RNA, 12 nt, Human adenovirus D
aaacccaugaaa

SEQ ID NO: 286938 - RNA, 15 nt, Human adenovirus D
aaacgugcaguccaa

SEQ ID NO: 286939 - RNA, 20 nt, Human adenovirus D
aaacguguuuuuuauuucaa

SEQ ID NO: 286940 - RNA, 18 nt, Human adenovirus D
aaacuaccacgcuuuauc

SEQ ID NO: 286941 - RNA, 19 nt, Human adenovirus D
aaagagagcuuauuccagc

SEQ ID NO: 286942 - RNA, 15 nt, Human adenovirus D
aaagaggcuccgggu

SEQ ID NO: 286943 - RNA, 12 nt, Human adenovirus D
aaagauacauaa

SEQ ID NO: 286944 - RNA, 12 nt, Human adenovirus D
aaagaucacuua

SEQ ID NO: 286945 - RNA, 18 nt, Human adenovirus D
aaagaucacuuacuugaa

SEQ ID NO: 286946 - RNA, 16 nt, Human adenovirus D
aaagcugaaagcuaua

SEQ ID NO: 286947 - RNA, 23 nt, Human adenovirus D
aaaggaagugguuucaaauucaa

SEQ ID NO: 286948 - RNA, 21 nt, Human adenovirus D
aaagggaugucaaauuccugg

SEQ ID NO: 286949 - RNA, 16 nt, Human adenovirus D
aaaguaugucucuggu

SEQ ID NO: 286950 - RNA, 14 nt, Human adenovirus D
aaagucacaguuau

SEQ ID NO: 286951 - RNA, 19 nt, Human adenovirus D
aaauauggccuggagcaga

SEQ ID NO: 286952 - RNA, 16 nt, Human adenovirus D
aaauauuugugaaugg

SEQ ID NO: 286953 - RNA, 20 nt, Human adenovirus D
aaauauuugugaauggaaug

SEQ ID NO: 286954 - RNA, 22 nt, Human adenovirus D
aaaucauuggaacuaaucauuu

SEQ ID NO: 286955 - RNA, 16 nt, Human adenovirus D
aaaugauuaguuccaa

SEQ ID NO: 286956 - RNA, 16 nt, Human adenovirus D
aaauguuauagaguaa

SEQ ID NO: 286957 - RNA, 13 nt, Human adenovirus D
aaauuacauugaa

SEQ ID NO: 286958 - RNA, 19 nt, Human adenovirus D
aaauuccucgaccaugacc

SEQ ID NO: 286959 - RNA, 18 nt, Human adenovirus D
aaauuggcggacauaugg

SEQ ID NO: 286960 - RNA, 12 nt, Human adenovirus D
cuccagugcaug

SEQ ID NO: 286961 - RNA, 15 nt, Human adenovirus D
cucccaacucuggua

SEQ ID NO: 286962 - RNA, 12 nt, Human adenovirus D
cucccugcagug

SEQ ID NO: 286963 - RNA, 14 nt, Human adenovirus D
cuccuccccaugaa

SEQ ID NO: 286964 - RNA, 18 nt, Human adenovirus D
cuccuccuguuacuguaa

SEQ ID NO: 286965 - RNA, 13 nt, Human adenovirus D
cucgcagcucauc

SEQ ID NO: 286966 - RNA, 21 nt, Human adenovirus D
cucgcguguacuugguggaca

SEQ ID NO: 286967 - RNA, 23 nt, Human adenovirus D
cucggugcggcugcugcaaaugg

SEQ ID NO: 286968 - RNA, 21 nt, Human adenovirus D
cucguaggugaucuuugccug

SEQ ID NO: 286969 - RNA, 19 nt, Human adenovirus D
cucguccgggaaaaccucc

SEQ ID NO: 286970 - RNA, 22 nt, Human adenovirus D
cucguguccaacggcaaacagc

SEQ ID NO: 286971 - RNA, 12 nt, Human adenovirus D
cucucaacauca

SEQ ID NO: 286972 - RNA, 15 nt, Human adenovirus D
cucucagaugucaaa

SEQ ID NO: 286973 - RNA, 17 nt, Human adenovirus D
cucugcucauacugcua

SEQ ID NO: 286974 - RNA, 17 nt, Human adenovirus D
cucuucgcccgaccgcu

SEQ ID NO: 286975 - RNA, 17 nt, Human adenovirus D
cucuucugucucuucaa

SEQ ID NO: 286976 - RNA, 19 nt, Human adenovirus D
cucuucugucucuucaaca

SEQ ID NO: 286977 - RNA, 17 nt, Human adenovirus D
cugaaguuccuccucaa

SEQ ID NO: 286978 - RNA, 20 nt, Human adenovirus D
cugaaguuccuccucaaggg

SEQ ID NO: 286979 - RNA, 22 nt, Human adenovirus D
cugaaugauagacaaggcagca

SEQ ID NO: 286980 - RNA, 16 nt, Human adenovirus D
cugaccacgguggugc

SEQ ID NO: 286981 - RNA, 17 nt, Human adenovirus D
cugaccacgguggugca

SEQ ID NO: 286982 - RNA, 18 nt, Human adenovirus D
cugagagaaccguguaca

SEQ ID NO: 286983 - RNA, 15 nt, Human adenovirus D
cugaucaacaucccc

SEQ ID NO: 286984 - RNA, 18 nt, Human adenovirus D
cugauuacucuaaaugca

SEQ ID NO: 286985 - RNA, 12 nt, Human adenovirus D
cugcagcucauc

SEQ ID NO: 286986 - RNA, 20 nt, Human adenovirus D
cugcagggcgcccagcaugu

SEQ ID NO: 286987 - RNA, 19 nt, Human adenovirus D
cugcauacaaaugcuucaa

SEQ ID NO: 286988 - RNA, 15 nt, Human adenovirus D
cugcaucucaagcac

SEQ ID NO: 286989 - RNA, 20 nt, Human adenovirus D
cugcauguggcuagacuuca

SEQ ID NO: 286990 - RNA, 22 nt, Human adenovirus D
cugcgcgcgcuacaauuacuuc

SEQ ID NO: 286991 - RNA, 21 nt, Human adenovirus D
cugcuaucaggagaaaauuga

SEQ ID NO: 286992 - RNA, 15 nt, Human adenovirus D
cugcucauacugcua

SEQ ID NO: 286993 - RNA, 16 nt, Human adenovirus D
cugcuucuucauuaaa

SEQ ID NO: 286994 - RNA, 22 nt, Human adenovirus D
cuggaaauuaugagcaucaaaa

SEQ ID NO: 286995 - RNA, 23 nt, Human adenovirus D
cuggaacgagaucggcaccagcc

SEQ ID NO: 286996 - RNA, 14 nt, Human adenovirus D
cuggcacauacaaa

SEQ ID NO: 286997 - RNA, 18 nt, Human adenovirus D
cuggcagaaguacgacaa

SEQ ID NO: 286998 - RNA, 18 nt, Human adenovirus D
cuggccucgggcauuaac

SEQ ID NO: 286999 - RNA, 16 nt, Human adenovirus D
cuggcucccugcagug

SEQ ID NO: 287000 - RNA, 23 nt, Human adenovirus D
cuggcuccguuguacgacaccac

SEQ ID NO: 287001 - RNA, 13 nt, Human adenovirus D
cuggucaaacagg

SEQ ID NO: 287002 - RNA, 20 nt, Human adenovirus D
cuggugcugcgcgcgcuaca

SEQ ID NO: 287003 - RNA, 16 nt, Human adenovirus D
gacugggaggcugcga

SEQ ID NO: 287004 - RNA, 13 nt, Human adenovirus D
gacuggugcugcg

SEQ ID NO: 287005 - RNA, 19 nt, Human adenovirus D
gacuuauccacaaacuaca

SEQ ID NO: 287006 - RNA, 20 nt, Human adenovirus D
gacuuggggucuauaaucca

SEQ ID NO: 287007 - RNA, 12 nt, Human adenovirus D
gagaaccgugua

SEQ ID NO: 287008 - RNA, 21 nt, Human adenovirus D
gagaccaacggcugcauccac

SEQ ID NO: 287009 - RNA, 20 nt, Human adenovirus D
gagagaaccguguacacugu

SEQ ID NO: 287010 - RNA, 17 nt, Human adenovirus D
gagagcgugauggcgca

SEQ ID NO: 287011 - RNA, 16 nt, Human adenovirus D
gagaggagugugauau

SEQ ID NO: 287012 - RNA, 19 nt, Human adenovirus D
gagcagaacuacacgguca

SEQ ID NO: 287013 - RNA, 14 nt, Human adenovirus D
gagcauacaugccc

SEQ ID NO: 287014 - RNA, 23 nt, Human adenovirus D
gagcucugggacgucucgaacuc

SEQ ID NO: 287015 - RNA, 21 nt, Human adenovirus D
gagcuuagcaaggugcugaca

SEQ ID NO: 287016 - RNA, 22 nt, Human adenovirus D
gagcuuauuccagcaugcaguu

SEQ ID NO: 287017 - RNA, 14 nt, Human adenovirus D
gaggagugugauau

SEQ ID NO: 287018 - RNA, 18 nt, Human adenovirus D
gaggagugugauaugcac

SEQ ID NO: 287019 - RNA, 17 nt, Human adenovirus D
gaguugggccugaugca

SEQ ID NO: 287020 - RNA, 17 nt, Human adenovirus D
gauacauaaaauuugaa

SEQ ID NO: 287021 - RNA, 16 nt, Human adenovirus D
gaucaccuacgagcuc

SEQ ID NO: 287022 - RNA, 19 nt, Human adenovirus D
gaucauggccugugcaaug

SEQ ID NO: 287023 - RNA, 21 nt, Human adenovirus D
gaucggcaccagccagcugaa

SEQ ID NO: 287024 - RNA, 20 nt, Human adenovirus D
gaucugaagaccauucugca

SEQ ID NO: 287025 - RNA, 14 nt, Human adenovirus D
gaucugaugaugaa

SEQ ID NO: 287026 - RNA, 14 nt, Human adenovirus D
gaucuuugccuguu

SEQ ID NO: 287027 - RNA, 21 nt, Human adenovirus D
gauggauucaaaaacuucccc

SEQ ID NO: 287028 - RNA, 22 nt, Human adenovirus D
gauuaaagaaaaaacuaccacg

SEQ ID NO: 287029 - RNA, 15 nt, Human adenovirus D
gauucaauccagcuc

SEQ ID NO: 287030 - RNA, 21 nt, Human adenovirus D
gauucccgggcuuucuugccg

SEQ ID NO: 287031 - RNA, 22 nt, Human adenovirus D
gauugacuacucgcgcuggugu

SEQ ID NO: 287032 - RNA, 16 nt, Human adenovirus D
gcaacuuccugaccac

SEQ ID NO: 287033 - RNA, 21 nt, Human adenovirus D
gcaacuuccugaccacggugg

SEQ ID NO: 287034 - RNA, 18 nt, Human adenovirus D
gcaagccccggaccccgc

SEQ ID NO: 287035 - RNA, 21 nt, Human adenovirus D
gcaaguacauagugaccaaga

SEQ ID NO: 287036 - RNA, 20 nt, Human adenovirus D
gcaauaaucagaacauuucc

SEQ ID NO: 287037 - RNA, 15 nt, Human adenovirus D
gcaauggaaaucaca

SEQ ID NO: 287038 - RNA, 21 nt, Human adenovirus D
gcaccagccagcugaacgggg

SEQ ID NO: 287039 - RNA, 18 nt, Human adenovirus D
gcaccugcgucugcagca

SEQ ID NO: 287040 - RNA, 16 nt, Human adenovirus D
gcacguacuuugacau

SEQ ID NO: 287041 - RNA, 18 nt, Human adenovirus D
gcacuggggucucgggga

SEQ ID NO: 287042 - RNA, 23 nt, Human adenovirus D
gcacuuuuauuuuacaugcacug

SEQ ID NO: 287043 - RNA, 21 nt, Human adenovirus D
gcagaaguucaccugcauggu

SEQ ID NO: 287044 - RNA, 22 nt, Human adenovirus D
gcagacucugcucauacugcua

SEQ ID NO: 287045 - RNA, 13 nt, Human adenovirus D
gcagaguacucau

SEQ ID NO: 287046 - RNA, 15 nt, Human adenovirus D
gcagccgccaugaca

SEQ ID NO: 287047 - RNA, 17 nt, Human adenovirus D
gcagcgcauccugcaac

SEQ ID NO: 287048 - RNA, 22 nt, Human adenovirus D
gcagcugcgcuuagucaugugu

SEQ ID NO: 287049 - RNA, 18 nt, Human adenovirus D
gcaggagcaguggaugca

SEQ ID NO: 287050 - RNA, 12 nt, Human adenovirus D
gcaggagugcag

SEQ ID NO: 287051 - RNA, 18 nt, Human adenovirus D
gcagggcgcccagcaugu

SEQ ID NO: 287052 - RNA, 16 nt, Human adenovirus D
ggaagaugacuucaac

SEQ ID NO: 287053 - RNA, 22 nt, Human adenovirus D
ggacacgagcucguaggugauc

SEQ ID NO: 287054 - RNA, 13 nt, Human adenovirus D
ggacagcucccaa

SEQ ID NO: 287055 - RNA, 18 nt, Human adenovirus D
ggacauauggaauuucuu

SEQ ID NO: 287056 - RNA, 14 nt, Human adenovirus D
ggaccucagauauu

SEQ ID NO: 287057 - RNA, 16 nt, Human adenovirus D
ggacuuguuacaugac

SEQ ID NO: 287058 - RNA, 22 nt, Human adenovirus D
ggagacacaaagagagcuuauu

SEQ ID NO: 287059 - RNA, 20 nt, Human adenovirus D
ggagaggcauggcaggcagc

SEQ ID NO: 287060 - RNA, 23 nt, Human adenovirus D
ggaugacugagcggcagcagcga

SEQ ID NO: 287061 - RNA, 21 nt, Human adenovirus D
ggcaauaccgggaugaugacc

SEQ ID NO: 287062 - RNA, 18 nt, Human adenovirus D
ggcaccagccagcugaac

SEQ ID NO: 287063 - RNA, 15 nt, Human adenovirus D
ggcagcggccugaac

SEQ ID NO: 287064 - RNA, 16 nt, Human adenovirus D
ggcaggauucauacca

SEQ ID NO: 287065 - RNA, 18 nt, Human adenovirus D
ggcaggcagcggccugaa

SEQ ID NO: 287066 - RNA, 21 nt, Human adenovirus D
ggccaacagacucucggccau

SEQ ID NO: 287067 - RNA, 16 nt, Human adenovirus D
ggccagucugaugaau

SEQ ID NO: 287068 - RNA, 22 nt, Human adenovirus D
ggcccgcuuggaugacuuuuca

SEQ ID NO: 287069 - RNA, 12 nt, Human adenovirus D
ggcgaacuuucu

SEQ ID NO: 287070 - RNA, 21 nt, Human adenovirus D
ggcgaacuuucuccacaccuu

SEQ ID NO: 287071 - RNA, 20 nt, Human adenovirus D
ggcgcagcugcgcuuaguca

SEQ ID NO: 287072 - RNA, 18 nt, Human adenovirus D
ggcggagaacaaggccau

SEQ ID NO: 287073 - RNA, 17 nt, Human adenovirus D
ggcgggaggcacccugc

SEQ ID NO: 287074 - RNA, 23 nt, Human adenovirus D
ggcucaagcagauuuacagcuuc

SEQ ID NO: 287075 - RNA, 12 nt, Human adenovirus D
ggcugaugugau

SEQ ID NO: 287076 - RNA, 15 nt, Human adenovirus D
ggcuuucacagcuug

SEQ ID NO: 287077 - RNA, 15 nt, Human adenovirus D
ggcuuuugugaucau

SEQ ID NO: 287078 - RNA, 15 nt, Human adenovirus D
gggacuuauccacaa

SEQ ID NO: 287079 - RNA, 21 nt, Human adenovirus D
gggacuuauccacaaacuaca

SEQ ID NO: 287080 - RNA, 13 nt, Human adenovirus D
gggaugaugaccg

SEQ ID NO: 287081 - RNA, 19 nt, Human adenovirus D
gggcaucucauaggugagg

SEQ ID NO: 287082 - RNA, 20 nt, Human adenovirus D
gggcauuaacgggguggugg

SEQ ID NO: 287083 - RNA, 13 nt, Human adenovirus D
gggcgccuucaau

SEQ ID NO: 287084 - RNA, 13 nt, Human adenovirus D
gggcggacugcca

SEQ ID NO: 287085 - RNA, 12 nt, Human adenovirus D
gggcguacaugc

SEQ ID NO: 287086 - RNA, 14 nt, Human adenovirus D
gggcuaguguacaa

SEQ ID NO: 287087 - RNA, 18 nt, Human adenovirus D
gggcucgucagccucucc

SEQ ID NO: 287088 - RNA, 13 nt, Human adenovirus D
gggcuuucuugcc

SEQ ID NO: 287089 - RNA, 13 nt, Human adenovirus D
ggggaguggcgcg

SEQ ID NO: 287090 - RNA, 20 nt, Human adenovirus D
gggucuauaauccacacagu

SEQ ID NO: 287091 - RNA, 21 nt, Human adenovirus D
gggugagucccacgcaggcga

SEQ ID NO: 287092 - RNA, 17 nt, Human adenovirus D
gggugcuagacauggcc

SEQ ID NO: 287093 - RNA, 13 nt, Human adenovirus D
gguauauggcucc

SEQ ID NO: 287094 - RNA, 11 nt, Human adenovirus D
ggucacugucc

SEQ ID NO: 287095 - RNA, 21 nt, Human adenovirus D
ggucaucaccuuccugcagcu

SEQ ID NO: 287096 - RNA, 16 nt, Human adenovirus D
gguccuagugacuuau

SEQ ID NO: 287097 - RNA, 16 nt, Human adenovirus D
ggucgggccagugcac

SEQ ID NO: 287098 - RNA, 21 nt, Human adenovirus D
ggucguggccccgcgcagcua

SEQ ID NO: 287099 - RNA, 18 nt, Human adenovirus D
ggugaugacuaugggguu

SEQ ID NO: 287100 - RNA, 14 nt, Human adenovirus D
ggugcauguucaac

SEQ ID NO: 287101 - RNA, 18 nt, Human adenovirus D
gguguaaaaaucaauaaa

SEQ ID NO: 287102 - RNA, 13 nt, Human adenovirus D
gguguacugucau

SEQ ID NO: 287103 - RNA, 17 nt, Human adenovirus D
gguguacugucaugcca

SEQ ID NO: 287104 - RNA, 22 nt, Human adenovirus D
uaaagccucuuuagacucugac

SEQ ID NO: 287105 - RNA, 14 nt, Human adenovirus D
uaaagucacaguua

SEQ ID NO: 287106 - RNA, 20 nt, Human adenovirus D
uaaagucacaguuauaccac

SEQ ID NO: 287107 - RNA, 22 nt, Human adenovirus D
uaaauauggccuggagcagaua

SEQ ID NO: 287108 - RNA, 14 nt, Human adenovirus D
uaacaucaccacag

SEQ ID NO: 287109 - RNA, 13 nt, Human adenovirus D
uaaccaugcuuuc

SEQ ID NO: 287110 - RNA, 14 nt, Human adenovirus D
uaacgggguggugg

SEQ ID NO: 287111 - RNA, 15 nt, Human adenovirus D
uaacgggguggugga

SEQ ID NO: 287112 - RNA, 19 nt, Human adenovirus D
uaagacauaacugggugau

SEQ ID NO: 287113 - RNA, 18 nt, Human adenovirus D
uaagagcucagaugguga

SEQ ID NO: 287114 - RNA, 17 nt, Human adenovirus D
uaagcuaccacauugug

SEQ ID NO: 287115 - RNA, 13 nt, Human adenovirus D
uaaggcucauaug

SEQ ID NO: 287116 - RNA, 21 nt, Human adenovirus D
uaaggcucauaugaccaugca

SEQ ID NO: 287117 - RNA, 13 nt, Human adenovirus D
uaagugugguuua

SEQ ID NO: 287118 - RNA, 14 nt, Human adenovirus D
uaauauaacuuuag

SEQ ID NO: 287119 - RNA, 17 nt, Human adenovirus D
uaauggaagcauuacua

SEQ ID NO: 287120 - RNA, 21 nt, Human adenovirus D
uacacgggguugcagcacugg

SEQ ID NO: 287121 - RNA, 13 nt, Human adenovirus D
uacaggacuuuuc

SEQ ID NO: 287122 - RNA, 14 nt, Human adenovirus D
uacaugcacuggag

SEQ ID NO: 287123 - RNA, 21 nt, Human adenovirus D
uacaugcccucucaacaucac

SEQ ID NO: 287124 - RNA, 18 nt, Human adenovirus D
uacauggacaagauauca

SEQ ID NO: 287125 - RNA, 21 nt, Human adenovirus D
uacauggugggcuaauauaac

SEQ ID NO: 287126 - RNA, 15 nt, Human adenovirus D
uaccaaggauaacau

SEQ ID NO: 287127 - RNA, 13 nt, Human adenovirus D
uaccacauugugg

SEQ ID NO: 287128 - RNA, 16 nt, Human adenovirus D
uaccaucugcaucuca

SEQ ID NO: 287129 - RNA, 20 nt, Human adenovirus D
uaccaugggaaaugcauggg

SEQ ID NO: 287130 - RNA, 17 nt, Human adenovirus D
uacuauuacugccacug

SEQ ID NO: 287131 - RNA, 17 nt, Human adenovirus D
uacuccucuuugcccug

SEQ ID NO: 287132 - RNA, 13 nt, Human adenovirus D
uacugcauacaaa

SEQ ID NO: 287133 - RNA, 22 nt, Human adenovirus D
uacugcauacaaaugcuucaau

SEQ ID NO: 287134 - RNA, 19 nt, Human adenovirus D
uacugcuaucgcucuuauc

SEQ ID NO: 287135 - RNA, 13 nt, Human adenovirus D
uacugguacuugg

SEQ ID NO: 287136 - RNA, 11 nt, Human adenovirus D
uacugucaugc

SEQ ID NO: 287137 - RNA, 17 nt, Human adenovirus D
uacuucuggcacauaca

SEQ ID NO: 287138 - RNA, 12 nt, Human adenovirus D
uagacaacagcc

SEQ ID NO: 287139 - RNA, 20 nt, Human adenovirus D
uagcaaggugcugacaucca

SEQ ID NO: 287140 - RNA, 16 nt, Human adenovirus D
uagcaauggaaaucac

SEQ ID NO: 287141 - RNA, 15 nt, Human adenovirus D
uagucaaucucccac

SEQ ID NO: 287142 - RNA, 23 nt, Human adenovirus D
uagucaaucucccaccaccagcc

SEQ ID NO: 287143 - RNA, 17 nt, Human adenovirus D
uagucaucacccagcag

SEQ ID NO: 287144 - RNA, 18 nt, Human adenovirus D
uaguggcccaggacuuaa

SEQ ID NO: 287145 - RNA, 17 nt, Human adenovirus D
uauaaaaacaacaaaac

SEQ ID NO: 287146 - RNA, 18 nt, Human adenovirus D
uauaauccacacaguuuc

SEQ ID NO: 287147 - RNA, 16 nt, Human adenovirus D
uauaugugacgcaugc

SEQ ID NO: 287148 - RNA, 17 nt, Human adenovirus D
uaucacacugcaugugg

SEQ ID NO: 287149 - RNA, 17 nt, Human adenovirus D
uaucacucacauuuugg

SEQ ID NO: 287150 - RNA, 22 nt, Human adenovirus D
uaucauaaagauggauggaaaa

SEQ ID NO: 287151 - RNA, 23 nt, Human adenovirus D
uauccacaaacuacauggacaag

SEQ ID NO: 287152 - RNA, 15 nt, Human adenovirus D
uaugauagcacugga

SEQ ID NO: 287153 - RNA, 16 nt, Human adenovirus D
uaugcacaguagucau

SEQ ID NO: 287154 - RNA, 24 nt, Human adenovirus D
uauggaauuucuuagacugcuauc

SEQ ID NO: 287155 - RNA, 21 nt, Human adenovirus D
uaugggaacaaggccuggaau

SEQ ID NO: 287156 - RNA, 16 nt, Human adenovirus D
uaugugacgcaugcaa

SEQ ID NO: 287157 - RNA, 22 nt, Human adenovirus D
uauguugacaauaauugaacug

SEQ ID NO: 287158 - RNA, 20 nt, Human adenovirus D
uauuacuaggcccagcagca

SEQ ID NO: 287159 - RNA, 14 nt, Human adenovirus D
ucccucacgcuugc

SEQ ID NO: 287160 - RNA, 17 nt, Human adenovirus D
ucccucucagaugucaa

SEQ ID NO: 287161 - RNA, 20 nt, Human adenovirus D
ucccugggguccuagugacu

SEQ ID NO: 287162 - RNA, 13 nt, Human adenovirus D
uccuagugacuua

SEQ ID NO: 287163 - RNA, 14 nt, Human adenovirus D
uccucgaccaugac

SEQ ID NO: 287164 - RNA, 15 nt, Human adenovirus D
uccucgaccaugacc

SEQ ID NO: 287165 - RNA, 16 nt, Human adenovirus D
uccucgaccaugaccu

SEQ ID NO: 287166 - RNA, 17 nt, Human adenovirus D
uccucgaugccaucaac

SEQ ID NO: 287167 - RNA, 23 nt, Human adenovirus D
uccucggcgagcucguccgggaa

SEQ ID NO: 287168 - RNA, 19 nt, Human adenovirus D
uccucugaaaagucaucca

SEQ ID NO: 287169 - RNA, 19 nt, Human adenovirus D
uccugaaguuccuccucaa

SEQ ID NO: 287170 - RNA, 13 nt, Human adenovirus D
uccuguuacugua

SEQ ID NO: 287171 - RNA, 17 nt, Human adenovirus D
uccuuuagacaacagcc

SEQ ID NO: 287172 - RNA, 12 nt, Human adenovirus D
ucgcagaaccau

SEQ ID NO: 287173 - RNA, 21 nt, Human adenovirus D
ucgcagaaccaugaauacagu

SEQ ID NO: 287174 - RNA, 18 nt, Human adenovirus D
ucgcaggagcaguggaug

SEQ ID NO: 287175 - RNA, 20 nt, Human adenovirus D
ucgcaggagcaguggaugca

SEQ ID NO: 287176 - RNA, 15 nt, Human adenovirus D
ucgcccgacugcugg

SEQ ID NO: 287177 - RNA, 20 nt, Human adenovirus D
ucgccgacgcgcgcaacuau

SEQ ID NO: 287178 - RNA, 14 nt, Human adenovirus D
ucgcuacugcugau

SEQ ID NO: 287179 - RNA, 18 nt, Human adenovirus D
ucuacgaggucaaccuca

SEQ ID NO: 287180 - RNA, 18 nt, Human adenovirus D
ucuacuaaccaugcuuuc

SEQ ID NO: 287181 - RNA, 13 nt, Human adenovirus D
ucucaacaucaca

SEQ ID NO: 287182 - RNA, 13 nt, Human adenovirus D
ucucagaugucaa

SEQ ID NO: 287183 - RNA, 14 nt, Human adenovirus D
ucucaucucuacua

SEQ ID NO: 287184 - RNA, 14 nt, Human adenovirus D
ucugauucauguga

SEQ ID NO: 287185 - RNA, 19 nt, Human adenovirus D
ucugcagcauugucugccu

SEQ ID NO: 287186 - RNA, 21 nt, Human adenovirus D
ucugcagggcgcccagcaugu

SEQ ID NO: 287187 - RNA, 15 nt, Human adenovirus D
ucugcaucucaagca

SEQ ID NO: 287188 - RNA, 17 nt, Human adenovirus D
ucugccuggucaaacag

SEQ ID NO: 287189 - RNA, 17 nt, Human adenovirus D
ucugcucauacugcuau

SEQ ID NO: 287190 - RNA, 18 nt, Human adenovirus D
ucugcucauacugcuauc

SEQ ID NO: 287191 - RNA, 24 nt, Human adenovirus D
ucugcucauacugcuaucgcucuu

SEQ ID NO: 287192 - RNA, 15 nt, Human adenovirus D
ucuggcacauacaaa

SEQ ID NO: 287193 - RNA, 18 nt, Human adenovirus D
ucugucucuucaacaucu

SEQ ID NO: 287194 - RNA, 14 nt, Human adenovirus D
ucuuagacugcuau

SEQ ID NO: 287195 - RNA, 23 nt, Human adenovirus D
ucuucccucucagaugucaaaga

SEQ ID NO: 287196 - RNA, 19 nt, Human adenovirus D
ucuuccuauuuaacauccu

SEQ ID NO: 287197 - RNA, 22 nt, Human adenovirus D
ucuuccuauuuaacauccucuu

SEQ ID NO: 287198 - RNA, 15 nt, Human adenovirus D
ucuucgcagaaccau

SEQ ID NO: 287199 - RNA, 22 nt, Human adenovirus D
ucuucgcccgaccgcugucuca

SEQ ID NO: 287200 - RNA, 20 nt, Human adenovirus D
ucuugagaagggaguagaua

SEQ ID NO: 287201 - RNA, 21 nt, Human adenovirus D
ugaaacgucccaggaaacuag

SEQ ID NO: 287202 - RNA, 23 nt, Human adenovirus D
ugaaaucugaaaguaugucucug

SEQ ID NO: 287203 - RNA, 21 nt, Human adenovirus D
ugaaaugggcuggugguggga

SEQ ID NO: 287204 - RNA, 14 nt, Human adenovirus D
ugaacaaaacccau

SEQ ID NO: 287205 - RNA, 17 nt, Human adenovirus D
ugaacaaaacccaugaa

SEQ ID NO: 287206 - RNA, 21 nt, Human adenovirus D
ugaaccuuuggaccugagcuu

SEQ ID NO: 287207 - RNA, 21 nt, Human adenovirus D
ugaagauucuggaaauuauga

SEQ ID NO: 287208 - RNA, 17 nt, Human adenovirus D
ugaaggcuuucacagcu

SEQ ID NO: 287209 - RNA, 16 nt, Human adenovirus D
ugaagucaugugugau

SEQ ID NO: 287210 - RNA, 18 nt, Human adenovirus D
ugaagucaugugugauau

SEQ ID NO: 287211 - RNA, 22 nt, Human adenovirus D
ugaagucaugugugauaucaca

SEQ ID NO: 287212 - RNA, 16 nt, Human adenovirus D
ugaauggaauguuacu

SEQ ID NO: 287213 - RNA, 18 nt, Human adenovirus D
ugacaauaauugaacugc

SEQ ID NO: 287214 - RNA, 23 nt, Human adenovirus D
ugaccaugcagacucugcucaua

SEQ ID NO: 287215 - RNA, 21 nt, Human adenovirus D
ugacuacucgcgcugguguaa

SEQ ID NO: 287216 - RNA, 14 nt, Human adenovirus D
ugagaggaguguga

SEQ ID NO: 287217 - RNA, 22 nt, Human adenovirus D
uguaaagccacaaccagagcca

SEQ ID NO: 287218 - RNA, 18 nt, Human adenovirus D
uguacacgguucucucag

SEQ ID NO: 287219 - RNA, 15 nt, Human adenovirus D
uguacugucaugcca

SEQ ID NO: 287220 - RNA, 21 nt, Human adenovirus D
ugucaaauuccugguccacaa

SEQ ID NO: 287221 - RNA, 21 nt, Human adenovirus D
uguccaugguagcaauggaaa

SEQ ID NO: 287222 - RNA, 19 nt, Human adenovirus D
ugucuggagcgggcuuaaa

SEQ ID NO: 287223 - RNA, 12 nt, Human adenovirus D
ugugaauggaau

SEQ ID NO: 287224 - RNA, 12 nt, Human adenovirus D
ugugaucauggc

SEQ ID NO: 287225 - RNA, 20 nt, Human adenovirus D
ugugaucauggccugugcaa

SEQ ID NO: 287226 - RNA, 18 nt, Human adenovirus D
ugugccccgcuacccugg

SEQ ID NO: 287227 - RNA, 19 nt, Human adenovirus D
uguggcuagacuucauggc

SEQ ID NO: 287228 - RNA, 20 nt, Human adenovirus D
uguggcuagacuucauggcu

SEQ ID NO: 287229 - RNA, 21 nt, Human adenovirus D
ugugguucaggagagucauuu

SEQ ID NO: 287230 - RNA, 15 nt, Human adenovirus D
ugugugauaucacac

SEQ ID NO: 287231 - RNA, 20 nt, Human adenovirus D
uguuaauaugggagagaaca

SEQ ID NO: 287232 - RNA, 15 nt, Human adenovirus D
uguuacugcauacaa

SEQ ID NO: 287233 - RNA, 14 nt, Human adenovirus D
uguucauccccugg

SEQ ID NO: 287234 - RNA, 17 nt, Human adenovirus D
uguugcauguucuugca

SEQ ID NO: 287235 - RNA, 17 nt, Human adenovirus D
uuaagaauccacagauc

SEQ ID NO: 287236 - RNA, 13 nt, Human adenovirus D
uuaaugucacuag

SEQ ID NO: 287237 - RNA, 18 nt, Human adenovirus D
uuaauguuaaugucacua

SEQ ID NO: 287238 - RNA, 20 nt, Human adenovirus D
uuaccacgaucugaugauga

SEQ ID NO: 287239 - RNA, 15 nt, Human adenovirus D
uuacuaggcccagca

SEQ ID NO: 287240 - RNA, 20 nt, Human adenovirus D
uuacuauuacugccacugcc

SEQ ID NO: 287241 - RNA, 13 nt, Human adenovirus D
uuacugcauacaa

SEQ ID NO: 287242 - RNA, 14 nt, Human adenovirus D
uuacugcauacaaa

SEQ ID NO: 287243 - RNA, 18 nt, Human adenovirus D
uuacuucuggcacauaca

SEQ ID NO: 287244 - RNA, 15 nt, Human adenovirus D
uuagaauggaagaca

SEQ ID NO: 287245 - RNA, 19 nt, Human adenovirus D
uuagcauagucacacuuag

SEQ ID NO: 287246 - RNA, 17 nt, Human adenovirus D
uuagucaggcaggauuc

SEQ ID NO: 287247 - RNA, 12 nt, Human adenovirus D
uuagucaugugu

SEQ ID NO: 287248 - RNA, 21 nt, Human adenovirus D
uuagugggaccucagauauuc

SEQ ID NO: 287249 - RNA, 16 nt, Human adenovirus D
uuaguucagcugcaau

SEQ ID NO: 287250 - RNA, 13 nt, Human adenovirus D
uuaucccaugccc

SEQ ID NO: 287251 - RNA, 18 nt, Human adenovirus D
uuauuccauacaaauuca

SEQ ID NO: 287252 - RNA, 12 nt, Human adenovirus D
uucaaauucaac

SEQ ID NO: 287253 - RNA, 17 nt, Human adenovirus D
uucaacagcugugcuaa

SEQ ID NO: 287254 - RNA, 19 nt, Human adenovirus D
uucaauuggagcagugucu

SEQ ID NO: 287255 - RNA, 23 nt, Human adenovirus D
uucagcugcaaugauuaauguua

SEQ ID NO: 287256 - RNA, 16 nt, Human adenovirus D
uucauaccaucaaugc

SEQ ID NO: 287257 - RNA, 13 nt, Human adenovirus D
uucaucagaugca

SEQ ID NO: 287258 - RNA, 15 nt, Human adenovirus D
uuccagaucacaugg

SEQ ID NO: 287259 - RNA, 19 nt, Human adenovirus D
uuccagcagaagguggugg

SEQ ID NO: 287260 - RNA, 18 nt, Human adenovirus D
uucccgggcuuucuugcc

SEQ ID NO: 287261 - RNA, 17 nt, Human adenovirus D
uuccucgaccaugaccu

SEQ ID NO: 287262 - RNA, 15 nt, Human adenovirus D
uucgagaauggaugu

SEQ ID NO: 287263 - RNA, 19 nt, Human adenovirus D
uucucuucgcagaaccaug

SEQ ID NO: 287264 - RNA, 22 nt, Human adenovirus D
uucucuucgcagaaccaugaau

SEQ ID NO: 287265 - RNA, 17 nt, Human adenovirus D
uucugcuggcagaagua

SEQ ID NO: 287266 - RNA, 16 nt, Human adenovirus D
uucuggcacauacaaa

SEQ ID NO: 287267 - RNA, 21 nt, Human adenovirus D
uucuguugcauguucuugcau

SEQ ID NO: 287268 - RNA, 15 nt, Human adenovirus D
uucuuagacugcuau

SEQ ID NO: 287269 - RNA, 20 nt, Human adenovirus D
uucuugccggcgacaagcug

SEQ ID NO: 287270 - RNA, 14 nt, Human adenovirus D
uugaaaaaauugag

SEQ ID NO: 287271 - RNA, 16 nt, Human adenovirus D
uugaagucauguguga

SEQ ID NO: 287272 - RNA, 18 nt, Human adenovirus D
uugaagucaugugugaua

SEQ ID NO: 287273 - RNA, 22 nt, Human adenovirus D
uugaagucaugugugauaucac

SEQ ID NO: 287274 - RNA, 20 nt, Human adenovirus D
uugcaauuuugugauggaag

SEQ ID NO: 287275 - RNA, 12 nt, Human adenovirus D
uugcagcacugg

SEQ ID NO: 287276 - RNA, 15 nt, Human adenovirus D
uugcagcacuggaac

SEQ ID NO: 287277 - RNA, 17 nt, Human adenovirus D
uuggggucuauaaucca

SEQ ID NO: 287278 - RNA, 15 nt, Human adenovirus D
uuguaaugaucaaaa

SEQ ID NO: 287279 - RNA, 20 nt, Human adenovirus D
uugugaauggaauguuacug

SEQ ID NO: 287280 - RNA, 23 nt, Human adenovirus D
uugugaauggaauguuacugcau

SEQ ID NO: 287281 - RNA, 13 nt, Human adenovirus D
uuguuacaugaca

SEQ ID NO: 287282 - RNA, 17 nt, Human adenovirus D
uuuacaugcacuggagu

SEQ ID NO: 287283 - RNA, 21 nt, Human adenovirus D
uuuaccacgaucugaugauga

SEQ ID NO: 287284 - RNA, 13 nt, Human adenovirus D
uuuagacaacagc

SEQ ID NO: 287285 - RNA, 19 nt, Human adenovirus D
uuuagugggaccucagaua

SEQ ID NO: 287286 - RNA, 12 nt, Human adenovirus D
uuuaucacucac

SEQ ID NO: 287287 - RNA, 16 nt, Human adenovirus D
uuuccccaccuacucc

SEQ ID NO: 287288 - RNA, 14 nt, Human adenovirus D
uuucuuagacugcu

SEQ ID NO: 287289 - RNA, 14 nt, Human adenovirus D
uuugaacacgcugc

SEQ ID NO: 287290 - RNA, 19 nt, Human adenovirus D
uuugaagucaugugugaua

SEQ ID NO: 287291 - RNA, 14 nt, Human adenovirus D
uuugcccugcucac

SEQ ID NO: 287292 - RNA, 17 nt, Human adenovirus D
uuuggcucgucaggaaa

SEQ ID NO: 287293 - RNA, 22 nt, Human adenovirus D
uuuggcuuuugugaucauggcc

SEQ ID NO: 287294 - RNA, 13 nt, Human adenovirus D
aacaaaaccacau

SEQ ID NO: 287295 - RNA, 16 nt, Human adenovirus D
aacaacaaaaccacau

SEQ ID NO: 287296 - RNA, 23 nt, Human adenovirus D
aacagccacgauguaacaucacc

SEQ ID NO: 287297 - RNA, 15 nt, Human adenovirus D
aacagcugugcuaag

SEQ ID NO: 287298 - RNA, 16 nt, Human adenovirus D
aacauccaccagugca

SEQ ID NO: 287299 - RNA, 19 nt, Human adenovirus D
aacauccaccagugcaaga

SEQ ID NO: 287300 - RNA, 20 nt, Human adenovirus D
aacauccccuguugcccgau

SEQ ID NO: 287301 - RNA, 11 nt, Human adenovirus D
aacauuacuuc

SEQ ID NO: 287302 - RNA, 22 nt, Human adenovirus D
aacauuacuucuggcacauaca

SEQ ID NO: 287303 - RNA, 22 nt, Human adenovirus D
aaccagggcuucacugacugau

SEQ ID NO: 287304 - RNA, 17 nt, Human adenovirus D
aaccaugaaggcuuuca

SEQ ID NO: 287305 - RNA, 10 nt, Human adenovirus D
aaccaugcuu

SEQ ID NO: 287306 - RNA, 17 nt, Human adenovirus D
aacccaugaaagaacau

SEQ ID NO: 287307 - RNA, 15 nt, Human adenovirus D
aaccccgucuacccc

SEQ ID NO: 287308 - RNA, 17 nt, Human adenovirus D
aaccgagauucaaucca

SEQ ID NO: 287309 - RNA, 13 nt, Human adenovirus D
aaccguaccaugg

SEQ ID NO: 287310 - RNA, 21 nt, Human adenovirus D
aacgagaucggcaccagccag

SEQ ID NO: 287311 - RNA, 19 nt, Human adenovirus D
aacgcaucauggcccugac

SEQ ID NO: 287312 - RNA, 21 nt, Human adenovirus D
aacuacauggacaagauauca

SEQ ID NO: 287313 - RNA, 15 nt, Human adenovirus D
aacuaccacgcuuua

SEQ ID NO: 287314 - RNA, 21 nt, Human adenovirus D
aacucagucacucucauuuca

SEQ ID NO: 287315 - RNA, 22 nt, Human adenovirus D
aacucagucacucucauuucag

SEQ ID NO: 287316 - RNA, 20 nt, Human adenovirus D
aacucgucgcuugacagcac

SEQ ID NO: 287317 - RNA, 13 nt, Human adenovirus D
aacucugauucau

SEQ ID NO: 287318 - RNA, 20 nt, Human adenovirus D
aacuuucuccacaccuugaa

SEQ ID NO: 287319 - RNA, 15 nt, Human adenovirus D
aagaacauacauggg

SEQ ID NO: 287320 - RNA, 17 nt, Human adenovirus D
aagaagaccacccgugu

SEQ ID NO: 287321 - RNA, 14 nt, Human adenovirus D
aagaaguaugccaa

SEQ ID NO: 287322 - RNA, 21 nt, Human adenovirus D
aagacuauaaagucacaguua

SEQ ID NO: 287323 - RNA, 22 nt, Human adenovirus D
aagacuauaaagucacaguuau

SEQ ID NO: 287324 - RNA, 13 nt, Human adenovirus D
aagaugacuucaa

SEQ ID NO: 287325 - RNA, 14 nt, Human adenovirus D
aagcacgcccucac

SEQ ID NO: 287326 - RNA, 17 nt, Human adenovirus D
aagcacgcccucacccg

SEQ ID NO: 287327 - RNA, 13 nt, Human adenovirus D
aagccguccucug

SEQ ID NO: 287328 - RNA, 16 nt, Human adenovirus D
aagcuaccacauugug

SEQ ID NO: 287329 - RNA, 18 nt, Human adenovirus D
aaguaccaucugcaucuc

SEQ ID NO: 287330 - RNA, 15 nt, Human adenovirus D
aagucacaguuauac

SEQ ID NO: 287331 - RNA, 15 nt, Human adenovirus D
aagucaugugugaua

SEQ ID NO: 287332 - RNA, 17 nt, Human adenovirus D
aagugacuuuuugcagc

SEQ ID NO: 287333 - RNA, 22 nt, Human adenovirus D
aagugacuuuuugcagcugaca

SEQ ID NO: 287334 - RNA, 19 nt, Human adenovirus D
aaguuagagacaugcucaa

SEQ ID NO: 287335 - RNA, 20 nt, Human adenovirus D
aaguucaccugcaugguggg

SEQ ID NO: 287336 - RNA, 14 nt, Human adenovirus D
aaguuccuccucaa

SEQ ID NO: 287337 - RNA, 15 nt, Human adenovirus D
aauaaaacucaccaa

SEQ ID NO: 287338 - RNA, 14 nt, Human adenovirus D
aauaaaguuguaca

SEQ ID NO: 287339 - RNA, 15 nt, Human adenovirus D
aauaaaucauuggaa

SEQ ID NO: 287340 - RNA, 16 nt, Human adenovirus D
aauaauggaagcauua

SEQ ID NO: 287341 - RNA, 17 nt, Human adenovirus D
aauaccgggaugaugac

SEQ ID NO: 287342 - RNA, 17 nt, Human adenovirus D
aauauccccuuccucac

SEQ ID NO: 287343 - RNA, 18 nt, Human adenovirus D
aauauguguauguuaaua

SEQ ID NO: 287344 - RNA, 12 nt, Human adenovirus D
aauccacacagu

SEQ ID NO: 287345 - RNA, 13 nt, Human adenovirus D
aauccacacaguu

SEQ ID NO: 287346 - RNA, 18 nt, Human adenovirus D
aaucucccaccaccagcc

SEQ ID NO: 287347 - RNA, 22 nt, Human adenovirus D
aaugagaggagugugauaugca

SEQ ID NO: 287348 - RNA, 23 nt, Human adenovirus D
aaugaucaaaacuuaacucugau

SEQ ID NO: 287349 - RNA, 13 nt, Human adenovirus D
cagcaggagugca

SEQ ID NO: 287350 - RNA, 14 nt, Human adenovirus D
cagcaggagugcag

SEQ ID NO: 287351 - RNA, 23 nt, Human adenovirus D
cagcauguacggaggagccaaga

SEQ ID NO: 287352 - RNA, 13 nt, Human adenovirus D
cagcauuaacugg

SEQ ID NO: 287353 - RNA, 16 nt, Human adenovirus D
cagccacgauguaaca

SEQ ID NO: 287354 - RNA, 19 nt, Human adenovirus D
cagccacgauguaacauca

SEQ ID NO: 287355 - RNA, 21 nt, Human adenovirus D
cagccacgauguaacaucacc

SEQ ID NO: 287356 - RNA, 14 nt, Human adenovirus D
cagcccauuucaca

SEQ ID NO: 287357 - RNA, 15 nt, Human adenovirus D
cagccgccaugacag

SEQ ID NO: 287358 - RNA, 15 nt, Human adenovirus D
cagcgacgcggugua

SEQ ID NO: 287359 - RNA, 19 nt, Human adenovirus D
cagcgcccucagcagucuc

SEQ ID NO: 287360 - RNA, 20 nt, Human adenovirus D
cagcgcgaguagucaaucuc

SEQ ID NO: 287361 - RNA, 23 nt, Human adenovirus D
cagcucgcuccgccaucauccau

SEQ ID NO: 287362 - RNA, 23 nt, Human adenovirus D
cagcugcgcuuagucauguguaa

SEQ ID NO: 287363 - RNA, 21 nt, Human adenovirus D
cagcugugcuaagugugguuu

SEQ ID NO: 287364 - RNA, 14 nt, Human adenovirus D
aggcaaugagagga

SEQ ID NO: 287365 - RNA, 23 nt, Human adenovirus D
aggcaaugagaggagugugauau

SEQ ID NO: 287366 - RNA, 18 nt, Human adenovirus D
aggcagaagaugcccuuc

SEQ ID NO: 287367 - RNA, 23 nt, Human adenovirus D
aggcccgcuuggaugacuuuuca

SEQ ID NO: 287368 - RNA, 15 nt, Human adenovirus D
aggccgcuacaacag

SEQ ID NO: 287369 - RNA, 18 nt, Human adenovirus D
aggccgcuacaacagcac

SEQ ID NO: 287370 - RNA, 23 nt, Human adenovirus D
aggcgaaacgccccugcaagugc

SEQ ID NO: 287371 - RNA, 16 nt, Human adenovirus D
aggcgugcgguggugu

SEQ ID NO: 287372 - RNA, 16 nt, Human adenovirus D
aggcugcgaugcaacg

SEQ ID NO: 287373 - RNA, 17 nt, Human adenovirus D
aggcugcgaugcaacgc

SEQ ID NO: 287374 - RNA, 19 nt, Human adenovirus D
aggcugcgaugcaacgcau

SEQ ID NO: 287375 - RNA, 24 nt, Human adenovirus D
agggugggcagcaccuguggcgau

SEQ ID NO: 287376 - RNA, 22 nt, Human adenovirus D
aggugcugacauccauggccag

SEQ ID NO: 287377 - RNA, 13 nt, Human adenovirus D
aguaagcacuauc

SEQ ID NO: 287378 - RNA, 20 nt, Human adenovirus D
aguacauagugaccaagacc

SEQ ID NO: 287379 - RNA, 18 nt, Human adenovirus D
aguaccaucugcaucuca

SEQ ID NO: 287380 - RNA, 19 nt, Human adenovirus D
aguaccaucugcaucucaa

SEQ ID NO: 287381 - RNA, 23 nt, Human adenovirus D
aguacucauaaagaagacuauaa

SEQ ID NO: 287382 - RNA, 22 nt, Human adenovirus D
aguagccccucugugcccaguu

SEQ ID NO: 287383 - RNA, 15 nt, Human adenovirus D
agucagacccagugg

SEQ ID NO: 287384 - RNA, 15 nt, Human adenovirus D
agucaugugugauau

SEQ ID NO: 287385 - RNA, 18 nt, Human adenovirus D
agucaugugugauaucac

SEQ ID NO: 287386 - RNA, 17 nt, Human adenovirus D
aguccuuuagacaacag

SEQ ID NO: 287387 - RNA, 19 nt, Human adenovirus D
aguccuuuagacaacagcc

SEQ ID NO: 287388 - RNA, 17 nt, Human adenovirus D
aguggcccaggacuuaa

SEQ ID NO: 287389 - RNA, 16 nt, Human adenovirus D
agugugauaugcacag

SEQ ID NO: 287390 - RNA, 14 nt, Human adenovirus D
aguucaccugcaug

SEQ ID NO: 287391 - RNA, 15 nt, Human adenovirus D
aguucagcugcaaug

SEQ ID NO: 287392 - RNA, 14 nt, Human adenovirus D
aguuccaaugauuu

SEQ ID NO: 287393 - RNA, 23 nt, Human adenovirus D
aguuguaaugaucaaaacuuaac

SEQ ID NO: 287394 - RNA, 18 nt, Human adenovirus D
aguuguucagcagcaccu

SEQ ID NO: 287395 - RNA, 23 nt, Human adenovirus D
aguuuucccucacgcuugccagu

SEQ ID NO: 287396 - RNA, 19 nt, Human adenovirus D
aguuuuugggugcuagcuu

SEQ ID NO: 287397 - RNA, 16 nt, Human adenovirus D
auaaaaacaacaaaac

SEQ ID NO: 287398 - RNA, 17 nt, Human adenovirus D
auaaaaauuauauguga

SEQ ID NO: 287399 - RNA, 15 nt, Human adenovirus D
auaaagauacauaaa

SEQ ID NO: 287400 - RNA, 14 nt, Human adenovirus D
auaauaagcagagu

SEQ ID NO: 287401 - RNA, 19 nt, Human adenovirus D
auaauaagcagaguacuca

SEQ ID NO: 287402 - RNA, 16 nt, Human adenovirus D
auaauggaagcauuac

SEQ ID NO: 287403 - RNA, 23 nt, Human adenovirus D
auacaaagcugaaagcuauaaaa

SEQ ID NO: 287404 - RNA, 22 nt, Human adenovirus D
auacaugcccucucaacaucac

SEQ ID NO: 287405 - RNA, 13 nt, Human adenovirus D
auacaugggcuau

SEQ ID NO: 287406 - RNA, 20 nt, Human adenovirus D
auacaugggcuauaauaagc

SEQ ID NO: 287407 - RNA, 16 nt, Human adenovirus D
auaccaucaaugcuac

SEQ ID NO: 287408 - RNA, 18 nt, Human adenovirus D
auaccaucaaugcuacau

SEQ ID NO: 287409 - RNA, 11 nt, Human adenovirus D
auacugcuauc

SEQ ID NO: 287410 - RNA, 15 nt, Human adenovirus D
auagaguaagcacua

SEQ ID NO: 287411 - RNA, 14 nt, Human adenovirus D
auagugaccaagac

SEQ ID NO: 287412 - RNA, 16 nt, Human adenovirus D
auauacuccagugcau

SEQ ID NO: 287413 - RNA, 14 nt, Human adenovirus D
auaucagacaugcu

SEQ ID NO: 287414 - RNA, 23 nt, Human adenovirus D
auauggaauuucuuagacugcua

SEQ ID NO: 287415 - RNA, 16 nt, Human adenovirus D
auauuccagaucacau

SEQ ID NO: 287416 - RNA, 20 nt, Human adenovirus D
auauuccagaucacauggua

SEQ ID NO: 287417 - RNA, 20 nt, Human adenovirus D
auauucuuuauuccauacaa

SEQ ID NO: 287418 - RNA, 21 nt, Human adenovirus D
auauucuuuauuccauacaaa

SEQ ID NO: 287419 - RNA, 16 nt, Human adenovirus D
aucaacaucaguucau

SEQ ID NO: 287420 - RNA, 22 nt, Human adenovirus D
aucaaugcuacauggugggcua

SEQ ID NO: 287421 - RNA, 23 nt, Human adenovirus D
aucaaugcuacauggugggcuaa

SEQ ID NO: 287422 - RNA, 15 nt, Human adenovirus D
aucacacugcaugug

SEQ ID NO: 287423 - RNA, 19 nt, Human adenovirus D
aucacaugguaugauagca

SEQ ID NO: 287424 - RNA, 18 nt, Human adenovirus D
aucaccacaggcaaugag

SEQ ID NO: 287425 - RNA, 21 nt, Human adenovirus D
aucaccaguuugggcacuggg

SEQ ID NO: 287426 - RNA, 21 nt, Human adenovirus D
aucacccagcagucgggcgag

SEQ ID NO: 287427 - RNA, 17 nt, Human adenovirus D
aucacucacauuuugga

SEQ ID NO: 287428 - RNA, 15 nt, Human adenovirus D
aucacuuacuugaaa

SEQ ID NO: 287429 - RNA, 14 nt, Human adenovirus D
aucagaacauuucc

SEQ ID NO: 287430 - RNA, 17 nt, Human adenovirus D
aucagacauaguuguaa

SEQ ID NO: 287431 - RNA, 23 nt, Human adenovirus D
aucagacaugcugcuacaucucg

SEQ ID NO: 287432 - RNA, 22 nt, Human adenovirus D
aucagcgcccucagcagucucu

SEQ ID NO: 287433 - RNA, 20 nt, Human adenovirus D
aucauaaagauggauggaaa

SEQ ID NO: 287434 - RNA, 18 nt, Human adenovirus D
aucauggccugugcaaug

SEQ ID NO: 287435 - RNA, 15 nt, Human adenovirus D
aucauuuaauaaaga

SEQ ID NO: 287436 - RNA, 16 nt, Human adenovirus D
auccacaaacuacaug

SEQ ID NO: 287437 - RNA, 19 nt, Human adenovirus D
auccacaaacuacauggac

SEQ ID NO: 287438 - RNA, 20 nt, Human adenovirus D
auccacaaacuacauggaca

SEQ ID NO: 287439 - RNA, 18 nt, Human adenovirus D
auccagccuguacccaga

SEQ ID NO: 287440 - RNA, 16 nt, Human adenovirus D
auccauggccagggga

SEQ ID NO: 287441 - RNA, 17 nt, Human adenovirus D
aucccaaauuacucgca

SEQ ID NO: 287442 - RNA, 22 nt, Human adenovirus D
aucccaugcccucgcuacugcu

SEQ ID NO: 287443 - RNA, 23 nt, Human adenovirus D
aucccaugcccucgcuacugcug

SEQ ID NO: 287444 - RNA, 15 nt, Human adenovirus D
auccugcauugccac

SEQ ID NO: 287445 - RNA, 23 nt, Human adenovirus D
auccugcauugccacuguucauc

SEQ ID NO: 287446 - RNA, 23 nt, Human adenovirus D
aucgccccgcagguggacaugau

SEQ ID NO: 287447 - RNA, 15 nt, Human adenovirus D
aucgcgaggacacca

SEQ ID NO: 287448 - RNA, 13 nt, Human adenovirus D
aucugcaucucaa

SEQ ID NO: 287449 - RNA, 14 nt, Human adenovirus D
aucugcuucuucau

SEQ ID NO: 287450 - RNA, 12 nt, Human adenovirus D
aucugugcugcc

SEQ ID NO: 287451 - RNA, 23 nt, Human adenovirus D
aucuuugccuguuugaccaggca

SEQ ID NO: 287452 - RNA, 17 nt, Human adenovirus D
augaaaaccaccagcca

SEQ ID NO: 287453 - RNA, 17 nt, Human adenovirus D
augaagccguccucuga

SEQ ID NO: 287454 - RNA, 18 nt, Human adenovirus D
augaaggcuuucacagcu

SEQ ID NO: 287455 - RNA, 19 nt, Human adenovirus D
augaaggcuuucacagcuu

SEQ ID NO: 287456 - RNA, 13 nt, Human adenovirus D
augaauacaguga

SEQ ID NO: 287457 - RNA, 14 nt, Human adenovirus D
augaauacagugau

SEQ ID NO: 287458 - RNA, 16 nt, Human adenovirus D
augaaucgcaagcgcc

SEQ ID NO: 287459 - RNA, 23 nt, Human adenovirus D
augaccaugcagacucugcucau

SEQ ID NO: 287460 - RNA, 14 nt, Human adenovirus D
augaccgagcugac

SEQ ID NO: 287461 - RNA, 23 nt, Human adenovirus D
augagaggagugugauaugcaca

SEQ ID NO: 287462 - RNA, 24 nt, Human adenovirus D
augaguugggccugaugcaggaua

SEQ ID NO: 287463 - RNA, 20 nt, Human adenovirus D
augaugaaaccagggcuuca

SEQ ID NO: 287464 - RNA, 20 nt, Human adenovirus D
augcagaggaacuucuccag

SEQ ID NO: 287465 - RNA, 17 nt, Human adenovirus D
augcccucgcuacugcu

SEQ ID NO: 287466 - RNA, 19 nt, Human adenovirus D
augcccucgcuacugcuga

SEQ ID NO: 287467 - RNA, 21 nt, Human adenovirus D
augcccucgcuacugcugauu

SEQ ID NO: 287468 - RNA, 18 nt, Human adenovirus D
augcccucucaacaucac

SEQ ID NO: 287469 - RNA, 18 nt, Human adenovirus D
augcgagcauacaugccc

SEQ ID NO: 287470 - RNA, 14 nt, Human adenovirus D
augcuucaacagcu

SEQ ID NO: 287471 - RNA, 18 nt, Human adenovirus D
augcuucaauaauggaag

SEQ ID NO: 287472 - RNA, 19 nt, Human adenovirus D
augcuuucuguuuuucaga

SEQ ID NO: 287473 - RNA, 23 nt, Human adenovirus D
auggaaguacaguuaagaaucca

SEQ ID NO: 287474 - RNA, 17 nt, Human adenovirus D
auggaauguuacugcau

SEQ ID NO: 287475 - RNA, 22 nt, Human adenovirus D
auggaauuucuuagacugcuau

SEQ ID NO: 287476 - RNA, 16 nt, Human adenovirus D
auggccugugcaaugu

SEQ ID NO: 287477 - RNA, 17 nt, Human adenovirus D
auggccugugcaauguc

SEQ ID NO: 287478 - RNA, 15 nt, Human adenovirus D
augggaaaugcaugg

SEQ ID NO: 287479 - RNA, 23 nt, Human adenovirus D
augggacuuauccacaaacuaca

SEQ ID NO: 287480 - RNA, 15 nt, Human adenovirus D
augggcaccuggaac

SEQ ID NO: 287481 - RNA, 17 nt, Human adenovirus D
ggugaucugaagaccau

SEQ ID NO: 287482 - RNA, 17 nt, Human adenovirus D
gguggauguugauggca

SEQ ID NO: 287483 - RNA, 15 nt, Human adenovirus D
gguguacugucaugc

SEQ ID NO: 287484 - RNA, 15 nt, Human adenovirus D
ggugugguuuaugac

SEQ ID NO: 287485 - RNA, 15 nt, Human adenovirus D
gguugcagcacugga

SEQ ID NO: 287486 - RNA, 14 nt, Human adenovirus D
guaaaauuacauug

SEQ ID NO: 287487 - RNA, 22 nt, Human adenovirus D
guacaauaaaaauuauauguga

SEQ ID NO: 287488 - RNA, 23 nt, Human adenovirus D
guacacugugaaaugggcuggug

SEQ ID NO: 287489 - RNA, 19 nt, Human adenovirus D
guacaguuaagaauccaca

SEQ ID NO: 287490 - RNA, 18 nt, Human adenovirus D
guaccaucugcaucucaa

SEQ ID NO: 287491 - RNA, 14 nt, Human adenovirus D
guacgaggccaugc

SEQ ID NO: 287492 - RNA, 23 nt, Human adenovirus D
guacucauaaagaagacuauaaa

SEQ ID NO: 287493 - RNA, 14 nt, Human adenovirus D
guacugguacuugg

SEQ ID NO: 287494 - RNA, 21 nt, Human adenovirus D
guagccccucugugcccaguu

SEQ ID NO: 287495 - RNA, 14 nt, Human adenovirus D
guagucaucaaaug

SEQ ID NO: 287496 - RNA, 20 nt, Human adenovirus D
guauccagccuguacccaga

SEQ ID NO: 287497 - RNA, 24 nt, Human adenovirus D
gucaaaagcgguggcguguucgau

SEQ ID NO: 287498 - RNA, 14 nt, Human adenovirus D
gucaaacaggcaaa

SEQ ID NO: 287499 - RNA, 21 nt, Human adenovirus D
gucaaacaggcaaagaucacc

SEQ ID NO: 287500 - RNA, 19 nt, Human adenovirus D
gucauccaagcgggccuca

SEQ ID NO: 287501 - RNA, 16 nt, Human adenovirus D
gucaugugugauauca

SEQ ID NO: 287502 - RNA, 20 nt, Human adenovirus D
guccaguucccgcaauaauc

SEQ ID NO: 287503 - RNA, 20 nt, Human adenovirus D
gucccuucucggaccaaccc

SEQ ID NO: 287504 - RNA, 23 nt, Human adenovirus D
guccguggauuaccaugugcugc

SEQ ID NO: 287505 - RNA, 13 nt, Human adenovirus D
guccuagugacuu

SEQ ID NO: 287506 - RNA, 23 nt, Human adenovirus D
guccucugaaaagucauccaagc

SEQ ID NO: 287507 - RNA, 18 nt, Human adenovirus D
guccuggcugaugugaug

SEQ ID NO: 287508 - RNA, 23 nt, Human adenovirus D
gucuccuccgauggauucaaaaa

SEQ ID NO: 287509 - RNA, 22 nt, Human adenovirus D
gucucggggaaggucucgcucc

SEQ ID NO: 287510 - RNA, 18 nt, Human adenovirus D
gucugccuggucaucacc

SEQ ID NO: 287511 - RNA, 20 nt, Human adenovirus D
gucuucccucucagauguca

SEQ ID NO: 287512 - RNA, 22 nt, Human adenovirus D
gucuucccucucagaugucaaa

SEQ ID NO: 287513 - RNA, 16 nt, Human adenovirus D
gugagucccacgcagg

SEQ ID NO: 287514 - RNA, 16 nt, Human adenovirus D
gugauaucacacugca

SEQ ID NO: 287515 - RNA, 23 nt, Human adenovirus D
gugauaugcacaguagucaucaa

SEQ ID NO: 287516 - RNA, 21 nt, Human adenovirus D
gugaucauggccugugcaaug

SEQ ID NO: 287517 - RNA, 23 nt, Human adenovirus D
gugaucauggccugugcaauguc

SEQ ID NO: 287518 - RNA, 16 nt, Human adenovirus D
gugaucuuugccuguu

SEQ ID NO: 287519 - RNA, 12 nt, Human adenovirus D
gugauugaaaug

SEQ ID NO: 287520 - RNA, 10 nt, Human adenovirus D
gugcaagaag

SEQ ID NO: 287521 - RNA, 12 nt, Human adenovirus D
gugcgguggugu

SEQ ID NO: 287522 - RNA, 14 nt, Human adenovirus D
guggcuagacuuca

SEQ ID NO: 287523 - RNA, 16 nt, Human adenovirus D
gugggcguacaugcac

SEQ ID NO: 287524 - RNA, 15 nt, Human adenovirus D
gugggggguguacug

SEQ ID NO: 287525 - RNA, 19 nt, Human adenovirus D
gugguaaaauuacauugaa

SEQ ID NO: 287526 - RNA, 20 nt, Human adenovirus D
guuaagaauccacagaucag

SEQ ID NO: 287527 - RNA, 16 nt, Human adenovirus D
guuacuguaaagccac

SEQ ID NO: 287528 - RNA, 23 nt, Human adenovirus D
guucuauauaaguggcaacaccu

SEQ ID NO: 287529 - RNA, 13 nt, Human adenovirus D
guugacaauaauu

SEQ ID NO: 287530 - RNA, 16 nt, Human adenovirus D
guugcccgauugugau

SEQ ID NO: 287531 - RNA, 16 nt, Human adenovirus D
guugcgguacugguac

SEQ ID NO: 287532 - RNA, 13 nt, Human adenovirus D
guuggaugacuga

SEQ ID NO: 287533 - RNA, 18 nt, Human adenovirus D
guugggcaauauaggaga

SEQ ID NO: 287534 - RNA, 21 nt, Human adenovirus D
uaaaaaccaaaaaaaacaauc

SEQ ID NO: 287535 - RNA, 13 nt, Human adenovirus D
uaaagaagacuau

SEQ ID NO: 287536 - RNA, 15 nt, Human adenovirus D
uaaagaagacuauaa

SEQ ID NO: 287537 - RNA, 20 nt, Human adenovirus D
uaaagggagagcuuaacuug

SEQ ID NO: 287538 - RNA, 18 nt, Human adenovirus D
uaacaucaccacaggcaa

SEQ ID NO: 287539 - RNA, 15 nt, Human adenovirus D
uaaccuauaaaaaca

SEQ ID NO: 287540 - RNA, 17 nt, Human adenovirus D
uaagaauccacagauca

SEQ ID NO: 287541 - RNA, 13 nt, Human adenovirus D
uaagugacuuuuu

SEQ ID NO: 287542 - RNA, 19 nt, Human adenovirus D
uaauaagcagaguacucau

SEQ ID NO: 287543 - RNA, 18 nt, Human adenovirus D
uaaucaacaucaguucau

SEQ ID NO: 287544 - RNA, 19 nt, Human adenovirus D
uaaucauuuaauaaagauc

SEQ ID NO: 287545 - RNA, 15 nt, Human adenovirus D
uaauguuaaugucac

SEQ ID NO: 287546 - RNA, 17 nt, Human adenovirus D
uaauguuaaugucacua

SEQ ID NO: 287547 - RNA, 13 nt, Human adenovirus D
uacaaaugcuuca

SEQ ID NO: 287548 - RNA, 15 nt, Human adenovirus D
uacaaaugcuucaau

SEQ ID NO: 287549 - RNA, 14 nt, Human adenovirus D
uacaacgcccugcu

SEQ ID NO: 287550 - RNA, 18 nt, Human adenovirus D
uacacgcaguuguuucau

SEQ ID NO: 287551 - RNA, 20 nt, Human adenovirus D
uacacgggguugcagcacug

SEQ ID NO: 287552 - RNA, 23 nt, Human adenovirus D
uacacgggguugcagcacuggaa

SEQ ID NO: 287553 - RNA, 18 nt, Human adenovirus D
uacacgguucucucagca

SEQ ID NO: 287554 - RNA, 11 nt, Human adenovirus D
uacacugugaa

SEQ ID NO: 287555 - RNA, 20 nt, Human adenovirus D
uacagcaggagugcagggau

SEQ ID NO: 287556 - RNA, 22 nt, Human adenovirus D
uacaugcacuggaguauaugca

SEQ ID NO: 287557 - RNA, 15 nt, Human adenovirus D
uacauggacaagaua

SEQ ID NO: 287558 - RNA, 14 nt, Human adenovirus D
uaccacauuguggu

SEQ ID NO: 287559 - RNA, 16 nt, Human adenovirus D
uaccacgaucugauga

SEQ ID NO: 287560 - RNA, 14 nt, Human adenovirus D
uaccacgcuuuauc

SEQ ID NO: 287561 - RNA, 16 nt, Human adenovirus D
uaccgccagauuguaa

SEQ ID NO: 287562 - RNA, 16 nt, Human adenovirus D
uaccgggaugaugacc

SEQ ID NO: 287563 - RNA, 15 nt, Human adenovirus D
uacgagcuacagcag

SEQ ID NO: 287564 - RNA, 16 nt, Human adenovirus D
uacgcaagagaaucca

SEQ ID NO: 287565 - RNA, 18 nt, Human adenovirus D
ucaaaugcgagcauacau

SEQ ID NO: 287566 - RNA, 21 nt, Human adenovirus D
ucaaauucauuuuugaaguca

SEQ ID NO: 287567 - RNA, 15 nt, Human adenovirus D
ucaacagcugugcua

SEQ ID NO: 287568 - RNA, 16 nt, Human adenovirus D
ucaacagcugugcuaa

SEQ ID NO: 287569 - RNA, 14 nt, Human adenovirus D
ucaacaucugugcu

SEQ ID NO: 287570 - RNA, 19 nt, Human adenovirus D
ucaagccccugaaaaacuu

SEQ ID NO: 287571 - RNA, 14 nt, Human adenovirus D
ucaaguaccaucug

SEQ ID NO: 287572 - RNA, 17 nt, Human adenovirus D
ucaauaauggaagcauu

SEQ ID NO: 287573 - RNA, 15 nt, Human adenovirus D
ucaaugcuacauggu

SEQ ID NO: 287574 - RNA, 13 nt, Human adenovirus D
ucacacugcaugu

SEQ ID NO: 287575 - RNA, 14 nt, Human adenovirus D
ucacacuuaguuca

SEQ ID NO: 287576 - RNA, 16 nt, Human adenovirus D
ucacaguuauaccacc

SEQ ID NO: 287577 - RNA, 15 nt, Human adenovirus D
ucaccacaggcaaug

SEQ ID NO: 287578 - RNA, 17 nt, Human adenovirus D
ucaccacaggcaaugag

SEQ ID NO: 287579 - RNA, 23 nt, Human adenovirus D
ucaccuaugagaugccccagcag

SEQ ID NO: 287580 - RNA, 14 nt, Human adenovirus D
ucacugacugauca

SEQ ID NO: 287581 - RNA, 15 nt, Human adenovirus D
ucacugacugaucaa

SEQ ID NO: 287582 - RNA, 21 nt, Human adenovirus D
ucacuguccaugguagcaaug

SEQ ID NO: 287583 - RNA, 13 nt, Human adenovirus D
ucagacccagugg

SEQ ID NO: 287584 - RNA, 18 nt, Human adenovirus D
ucagauauuccagaucac

SEQ ID NO: 287585 - RNA, 17 nt, Human adenovirus D
ucagcagcaccucggua

SEQ ID NO: 287586 - RNA, 20 nt, Human adenovirus D
ucaggcaggauucauaccau

SEQ ID NO: 287587 - RNA, 12 nt, Human adenovirus D
ucauacugcuau

SEQ ID NO: 287588 - RNA, 13 nt, Human adenovirus D
ucauacugcuauc

SEQ ID NO: 287589 - RNA, 22 nt, Human adenovirus D
ucauaggugaggcgaugcuguu

SEQ ID NO: 287590 - RNA, 22 nt, Human adenovirus D
ucauaugaccaugcagacucug

SEQ ID NO: 287591 - RNA, 15 nt, Human adenovirus D
ucaucgacuggugcu

SEQ ID NO: 287592 - RNA, 17 nt, Human adenovirus D
ucaucggggucaucuac

SEQ ID NO: 287593 - RNA, 20 nt, Human adenovirus D
ucauggcccugacgacccgc

SEQ ID NO: 287594 - RNA, 17 nt, Human adenovirus D
ucauggccugugcaaug

SEQ ID NO: 287595 - RNA, 20 nt, Human adenovirus D
ucauggccugugcaauguca

SEQ ID NO: 287596 - RNA, 17 nt, Human adenovirus D
ucaugggcaccuggaac

SEQ ID NO: 287597 - RNA, 18 nt, Human adenovirus D
ucaugugaacaaaaccca

SEQ ID NO: 287598 - RNA, 23 nt, Human adenovirus D
ucaugugaacaaaacccaugaaa

SEQ ID NO: 287599 - RNA, 22 nt, Human adenovirus D
ucaugugugauaucacacugca

SEQ ID NO: 287600 - RNA, 15 nt, Human adenovirus D
ucauuuuugaaguca

SEQ ID NO: 287601 - RNA, 17 nt, Human adenovirus D
uccaaccuggaccggcu

SEQ ID NO: 287602 - RNA, 15 nt, Human adenovirus D
uccaacggcaaacag

SEQ ID NO: 287603 - RNA, 18 nt, Human adenovirus D
uccacaaacuacauggac

SEQ ID NO: 287604 - RNA, 12 nt, Human adenovirus D
uccacagaucag

SEQ ID NO: 287605 - RNA, 15 nt, Human adenovirus D
uccagaucacauggu

SEQ ID NO: 287606 - RNA, 21 nt, Human adenovirus D
uccagaucacaugguaugaua

SEQ ID NO: 287607 - RNA, 14 nt, Human adenovirus D
uccauggccagggg

SEQ ID NO: 287608 - RNA, 15 nt, Human adenovirus D
uccaugguagcaaug

SEQ ID NO: 287609 - RNA, 17 nt, Human adenovirus D
uccaugguagcaaugga

SEQ ID NO: 287610 - RNA, 23 nt, Human adenovirus D
uccaugguagcaauggaaaucac

SEQ ID NO: 287611 - RNA, 18 nt, Human adenovirus D
ucccaaauuacucgcaaa

SEQ ID NO: 287612 - RNA, 23 nt, Human adenovirus D
ucccaugcccucgcuacugcuga

SEQ ID NO: 287613 - RNA, 23 nt, Human adenovirus D
uccccuggcucccugcagugucg

SEQ ID NO: 287614 - RNA, 20 nt, Human adenovirus D
uccccugguaccgccagauu

SEQ ID NO: 287615 - RNA, 17 nt, Human adenovirus D
uccccuguugcccgauu

SEQ ID NO: 287616 - RNA, 15 nt, Human adenovirus D
ucccgcgcgggcucg

SEQ ID NO: 287617 - RNA, 17 nt, Human adenovirus D
ucccgggcuuucuugcc

SEQ ID NO: 287618 - RNA, 19 nt, Human adenovirus D
ucccucucagaugucaaag

SEQ ID NO: 287619 - RNA, 19 nt, Human adenovirus D
uccgauggauucaaaaacu

SEQ ID NO: 287620 - RNA, 14 nt, Human adenovirus D
uccgcgaccuccuc

SEQ ID NO: 287621 - RNA, 22 nt, Human adenovirus D
uccggcgggcggcgaacuuucu

SEQ ID NO: 287622 - RNA, 14 nt, Human adenovirus D
uccuccccaugaac

SEQ ID NO: 287623 - RNA, 13 nt, Human adenovirus D
uccuccucaaggg

SEQ ID NO: 287624 - RNA, 17 nt, Human adenovirus D
uccuccuguuacuguaa

SEQ ID NO: 287625 - RNA, 22 nt, Human adenovirus D
uccucgaggagccccaggguga

SEQ ID NO: 287626 - RNA, 14 nt, Human adenovirus D
uccucgcagcucau

SEQ ID NO: 287627 - RNA, 17 nt, Human adenovirus D
uccucgcagcucaucac

SEQ ID NO: 287628 - RNA, 16 nt, Human adenovirus D
uccucggcgagcucgu

SEQ ID NO: 287629 - RNA, 19 nt, Human adenovirus D
uccucuuugcccugcucac

SEQ ID NO: 287630 - RNA, 18 nt, Human adenovirus D
uccugaaguuccuccuca

SEQ ID NO: 287631 - RNA, 14 nt, Human adenovirus D
uccugcaacugcgc

SEQ ID NO: 287632 - RNA, 14 nt, Human adenovirus D
uccugcauugccac

SEQ ID NO: 287633 - RNA, 16 nt, Human adenovirus D
uccugcauugccacug

SEQ ID NO: 287634 - RNA, 15 nt, Human adenovirus D
uccuggcugauguga

SEQ ID NO: 287635 - RNA, 18 nt, Human adenovirus D
uccuggcugaugugauga

SEQ ID NO: 287636 - RNA, 15 nt, Human adenovirus D
uccuguuacuguaaa

SEQ ID NO: 287637 - RNA, 17 nt, Human adenovirus D
uccuugaacuaccaccu

SEQ ID NO: 287638 - RNA, 18 nt, Human adenovirus D
uccuugaacuaccaccug

SEQ ID NO: 287639 - RNA, 13 nt, Human adenovirus D
ucgaagggguucu

SEQ ID NO: 287640 - RNA, 15 nt, Human adenovirus D
ucgacuggugcugcg

SEQ ID NO: 287641 - RNA, 17 nt, Human adenovirus D
ucgagcuacaugcccag

SEQ ID NO: 287642 - RNA, 16 nt, Human adenovirus D
ucgcagaaccaugaau

SEQ ID NO: 287643 - RNA, 14 nt, Human adenovirus D
ucgcccagcaauaa

SEQ ID NO: 287644 - RNA, 14 nt, Human adenovirus D
ucgcccgacugucu

SEQ ID NO: 287645 - RNA, 15 nt, Human adenovirus D
ucgcgcugguguaaa

SEQ ID NO: 287646 - RNA, 17 nt, Human adenovirus D
ucgcgcugguguaaaaa

SEQ ID NO: 287647 - RNA, 13 nt, Human adenovirus D
ucgcuacugcuga

SEQ ID NO: 287648 - RNA, 21 nt, Human adenovirus D
ucgcuacugcugauuacucua

SEQ ID NO: 287649 - RNA, 21 nt, Human adenovirus D
ucgggcgggaggcacccugcu

SEQ ID NO: 287650 - RNA, 18 nt, Human adenovirus D
ucggucgggccagugcac

SEQ ID NO: 287651 - RNA, 16 nt, Human adenovirus D
ucggugauugaaauga

SEQ ID NO: 287652 - RNA, 16 nt, Human adenovirus D
ucguccgggaaaaccu

SEQ ID NO: 287653 - RNA, 21 nt, Human adenovirus D
ucguugugcgccgcgcugggg

SEQ ID NO: 287654 - RNA, 14 nt, Human adenovirus D
ucucaacaucacau

SEQ ID NO: 287655 - RNA, 23 nt, Human adenovirus D
ucucaagcacgcccucacccgcc

SEQ ID NO: 287656 - RNA, 22 nt, Human adenovirus D
ucucucagcacgguggccuuaa

SEQ ID NO: 287657 - RNA, 22 nt, Human adenovirus D
ucucucuucuuguaacuuuuag

SEQ ID NO: 287658 - RNA, 20 nt, Human adenovirus D
ucugauuagcauagucacac

SEQ ID NO: 287659 - RNA, 18 nt, Human adenovirus D
ucugcagacaucaugaac

SEQ ID NO: 287660 - RNA, 16 nt, Human adenovirus D
ucugccuggucaaaca

SEQ ID NO: 287661 - RNA, 16 nt, Human adenovirus D
ucugcucauacugcua

SEQ ID NO: 287662 - RNA, 19 nt, Human adenovirus D
ucugcuucuucauuaaaag

SEQ ID NO: 287663 - RNA, 22 nt, Human adenovirus D
ucuggaaauuaugagcaucaaa

SEQ ID NO: 287664 - RNA, 13 nt, Human adenovirus D
ucuuagacugcua

SEQ ID NO: 287665 - RNA, 15 nt, Human adenovirus D
ucuuagacugcuauc

SEQ ID NO: 287666 - RNA, 14 nt, Human adenovirus D
ucuucaacaucugu

SEQ ID NO: 287667 - RNA, 20 nt, Human adenovirus D
ucuucaacaucugugcugcc

SEQ ID NO: 287668 - RNA, 17 nt, Human adenovirus D
ucuucgcccgaccgcug

SEQ ID NO: 287669 - RNA, 17 nt, Human adenovirus D
ucuugucgcugaucuga

SEQ ID NO: 287670 - RNA, 21 nt, Human adenovirus D
ucuuugcccugcucaccugca

SEQ ID NO: 287671 - RNA, 14 nt, Human adenovirus D
ugaaaaccaccagc

SEQ ID NO: 287672 - RNA, 14 nt, Human adenovirus D
ugaaagaacauaca

SEQ ID NO: 287673 - RNA, 13 nt, Human adenovirus D
ugaaagcuauaaa

SEQ ID NO: 287674 - RNA, 22 nt, Human adenovirus D
ugaaauaaaaaacacguuuauu

SEQ ID NO: 287675 - RNA, 17 nt, Human adenovirus D
ugaagucaugugugaua

SEQ ID NO: 287676 - RNA, 15 nt, Human adenovirus D
ugaaguuccuccuca

SEQ ID NO: 287677 - RNA, 16 nt, Human adenovirus D
ugaaguuccuccucaa

SEQ ID NO: 287678 - RNA, 12 nt, Human adenovirus D
ugaauugucagc

SEQ ID NO: 287679 - RNA, 20 nt, Human adenovirus D
ugacauccauggccagggga

SEQ ID NO: 287680 - RNA, 21 nt, Human adenovirus D
ugacauccauggccaggggag

SEQ ID NO: 287681 - RNA, 16 nt, Human adenovirus D
ugacauggguggggau

SEQ ID NO: 287682 - RNA, 15 nt, Human adenovirus D
ugaccacgguggugc

SEQ ID NO: 287683 - RNA, 21 nt, Human adenovirus D
ugaccaugcagacucugcuca

SEQ ID NO: 287684 - RNA, 23 nt, Human adenovirus D
ugacgcaugcaaggugugguuua

SEQ ID NO: 287685 - RNA, 19 nt, Human adenovirus D
ugacggccagucugaugaa

SEQ ID NO: 287686 - RNA, 22 nt, Human adenovirus D
ugagagaaccguguacacugug

SEQ ID NO: 287687 - RNA, 16 nt, Human adenovirus D
ugagaggagugugaua

SEQ ID NO: 287688 - RNA, 19 nt, Human adenovirus D
ugagaugccccagcagaag

SEQ ID NO: 287689 - RNA, 19 nt, Human adenovirus D
ugagcagaacuacacgguc

SEQ ID NO: 287690 - RNA, 20 nt, Human adenovirus D
ugagcagaacuacacgguca

SEQ ID NO: 287691 - RNA, 21 nt, Human adenovirus D
ugagcuugaaacgucccagga

SEQ ID NO: 287692 - RNA, 13 nt, Human adenovirus D
ugauagacaaggc

SEQ ID NO: 287693 - RNA, 15 nt, Human adenovirus D
ugauaugcacaguag

SEQ ID NO: 287694 - RNA, 18 nt, Human adenovirus D
ugauaugcacaguaguca

SEQ ID NO: 287695 - RNA, 23 nt, Human adenovirus D
ugauuaaagaaaaaacuaccacg

SEQ ID NO: 287696 - RNA, 20 nt, Human adenovirus D
ugauuagcauagucacacuu

SEQ ID NO: 287697 - RNA, 19 nt, Human adenovirus D
ugauucaugugaacaaaac

SEQ ID NO: 287698 - RNA, 19 nt, Human adenovirus D
ugauuccuaguucuuccua

SEQ ID NO: 287699 - RNA, 21 nt, Human adenovirus D
ugcaaauuggcggacauaugg

SEQ ID NO: 287700 - RNA, 17 nt, Human adenovirus D
ugcaaggugugguuuau

SEQ ID NO: 287701 - RNA, 21 nt, Human adenovirus D
ugcaaugucaggucugcuggu

SEQ ID NO: 287702 - RNA, 21 nt, Human adenovirus D
ugcacagacccaccccaguca

SEQ ID NO: 287703 - RNA, 16 nt, Human adenovirus D
ugcaccugcgucugca

SEQ ID NO: 287704 - RNA, 23 nt, Human adenovirus D
ugcagacucugcucauacugcua

SEQ ID NO: 287705 - RNA, 12 nt, Human adenovirus D
ugcagcacugga

SEQ ID NO: 287706 - RNA, 21 nt, Human adenovirus D
ugcaguuuuugggugcuagcu

SEQ ID NO: 287707 - RNA, 19 nt, Human adenovirus D
ugcauauacuccagugcau

SEQ ID NO: 287708 - RNA, 14 nt, Human adenovirus D
ugcauccacugcuc

SEQ ID NO: 287709 - RNA, 22 nt, Human adenovirus D
ugcaugggugggcgacugggaa

SEQ ID NO: 287710 - RNA, 14 nt, Human adenovirus D
ugcauguucuugca

SEQ ID NO: 287711 - RNA, 15 nt, Human adenovirus D
ugccaacauuacuuc

SEQ ID NO: 287712 - RNA, 20 nt, Human adenovirus D
ugccaacauuacuucuggca

SEQ ID NO: 287713 - RNA, 15 nt, Human adenovirus D
ugccacgaacagcca

SEQ ID NO: 287714 - RNA, 19 nt, Human adenovirus D
ugccacuugaacucgggga

SEQ ID NO: 287715 - RNA, 20 nt, Human adenovirus D
ugcccgauugugaucaugca

SEQ ID NO: 287716 - RNA, 18 nt, Human adenovirus D
ugcccucgcuacugcuga

SEQ ID NO: 287717 - RNA, 19 nt, Human adenovirus D
ugcccucucaacaucacau

SEQ ID NO: 287718 - RNA, 19 nt, Human adenovirus D
ugcccuucuugcacuggug

SEQ ID NO: 287719 - RNA, 13 nt, Human adenovirus D
ugcgagcauacau

SEQ ID NO: 287720 - RNA, 16 nt, Human adenovirus D
ugcgccauugucaaca

SEQ ID NO: 287721 - RNA, 19 nt, Human adenovirus D
ugcgcuuagucauguguaa

SEQ ID NO: 287722 - RNA, 14 nt, Human adenovirus D
ugcgguacacgggg

SEQ ID NO: 287723 - RNA, 23 nt, Human adenovirus D
ugcguggacacggccaccaacuc

SEQ ID NO: 287724 - RNA, 16 nt, Human adenovirus D
ugcuacaucucgggga

SEQ ID NO: 287725 - RNA, 13 nt, Human adenovirus D
ugcucauacugcu

SEQ ID NO: 287726 - RNA, 14 nt, Human adenovirus D
ugcucauacugcua

SEQ ID NO: 287727 - RNA, 15 nt, Human adenovirus D
ugcucauacugcuau

SEQ ID NO: 287728 - RNA, 10 nt, Human adenovirus D
ugcuuccagc

SEQ ID NO: 287729 - RNA, 22 nt, Human adenovirus D
uggaacaccaucagacuggggu

SEQ ID NO: 287730 - RNA, 21 nt, Human adenovirus D
uggaacgagaucggcaccagc

SEQ ID NO: 287731 - RNA, 15 nt, Human adenovirus D
uggaagaugacuuca

SEQ ID NO: 287732 - RNA, 15 nt, Human adenovirus D
uggaauguuacugca

SEQ ID NO: 287733 - RNA, 18 nt, Human adenovirus D
uggaauuucuuagacugc

SEQ ID NO: 287734 - RNA, 21 nt, Human adenovirus D
uggaauuucuuagacugcuau

SEQ ID NO: 287735 - RNA, 21 nt, Human adenovirus D
uggacaucgcgaaccaggcag

SEQ ID NO: 287736 - RNA, 22 nt, Human adenovirus D
uggaccucgagauggacggcca

SEQ ID NO: 287737 - RNA, 17 nt, Human adenovirus D
uggaugagguacagccc

SEQ ID NO: 287738 - RNA, 12 nt, Human adenovirus D
uggcacauacaa

SEQ ID NO: 287739 - RNA, 16 nt, Human adenovirus D
uggcauauucuuuauu

SEQ ID NO: 287740 - RNA, 14 nt, Human adenovirus D
uggcccaggacuua

SEQ ID NO: 287741 - RNA, 15 nt, Human adenovirus D
uggcucccugcagug

SEQ ID NO: 287742 - RNA, 16 nt, Human adenovirus D
uggcugaugugaugag

SEQ ID NO: 287743 - RNA, 14 nt, Human adenovirus D
uggcuuuacccugc

SEQ ID NO: 287744 - RNA, 15 nt, Human adenovirus D
uggcuuuacccugcu

SEQ ID NO: 287745 - RNA, 13 nt, Human adenovirus D
ugggaaaugcaug

SEQ ID NO: 287746 - RNA, 14 nt, Human adenovirus D
ugggaccucagaua

SEQ ID NO: 287747 - RNA, 15 nt, Human adenovirus D
ugggcacuggggucu

SEQ ID NO: 287748 - RNA, 19 nt, Human adenovirus D
ugggccugaugcaggauaa

SEQ ID NO: 287749 - RNA, 18 nt, Human adenovirus D
ugggcuaauauaacuuua

SEQ ID NO: 287750 - RNA, 16 nt, Human adenovirus D
ugggcugccacuugaa

SEQ ID NO: 287751 - RNA, 17 nt, Human adenovirus D
ugggcugccacuugaac

SEQ ID NO: 287752 - RNA, 19 nt, Human adenovirus D
ugggugaugacuauggggu

SEQ ID NO: 287753 - RNA, 13 nt, Human adenovirus D
ugguagcaaugga

SEQ ID NO: 287754 - RNA, 14 nt, Human adenovirus D
uggucaaacaggca

SEQ ID NO: 287755 - RNA, 20 nt, Human adenovirus D
ugguugaacccagaugagga

SEQ ID NO: 287756 - RNA, 12 nt, Human adenovirus D
uguacacuguga

SEQ ID NO: 287757 - RNA, 13 nt, Human adenovirus D
uguaguuguucag

SEQ ID NO: 287758 - RNA, 21 nt, Human adenovirus D
ugucucagccucgaacagucc

SEQ ID NO: 287759 - RNA, 19 nt, Human adenovirus D
ugugaaaugggcugguggu

SEQ ID NO: 287760 - RNA, 13 nt, Human adenovirus D
ugugaauggaaug

SEQ ID NO: 287761 - RNA, 21 nt, Human adenovirus D
ugugaauggaauguuacugca

SEQ ID NO: 287762 - RNA, 17 nt, Human adenovirus D
ugugauaucacacugca

SEQ ID NO: 287763 - RNA, 11 nt, Human adenovirus D
ugugauaugca

SEQ ID NO: 287764 - RNA, 13 nt, Human adenovirus D
ugugauaugcaca

SEQ ID NO: 287765 - RNA, 14 nt, Human adenovirus D
ugugauaugcacag

SEQ ID NO: 287766 - RNA, 18 nt, Human adenovirus D
ugugcuaagugugguuua

SEQ ID NO: 287767 - RNA, 14 nt, Human adenovirus D
uguuaauaugggag

SEQ ID NO: 287768 - RNA, 23 nt, Human adenovirus D
uguucaaccagcgcuuccccugg

SEQ ID NO: 287769 - RNA, 13 nt, Human adenovirus D
uguugacaauaau

SEQ ID NO: 287770 - RNA, 17 nt, Human adenovirus D
uguugacaauaauugaa

SEQ ID NO: 287771 - RNA, 19 nt, Human adenovirus D
cccauugguugaacccaga

SEQ ID NO: 287772 - RNA, 13 nt, Human adenovirus D
ccccucugaauga

SEQ ID NO: 287773 - RNA, 21 nt, Human adenovirus D
cccgacugcugggugaugacu

SEQ ID NO: 287774 - RNA, 16 nt, Human adenovirus D
cccgauugugaucaug

SEQ ID NO: 287775 - RNA, 23 nt, Human adenovirus D
cccgcaauaaucagaacauuucc

SEQ ID NO: 287776 - RNA, 21 nt, Human adenovirus D
cccgccgcgccgagaucugga

SEQ ID NO: 287777 - RNA, 21 nt, Human adenovirus D
cccgcgcagcuacgggcucau

SEQ ID NO: 287778 - RNA, 20 nt, Human adenovirus D
cccguuuaccacgaucugau

SEQ ID NO: 287779 - RNA, 17 nt, Human adenovirus D
cccucucaacaucacau

SEQ ID NO: 287780 - RNA, 13 nt, Human adenovirus D
cccucugaaugau

SEQ ID NO: 287781 - RNA, 19 nt, Human adenovirus D
cccugcgcccagauugcaa

SEQ ID NO: 287782 - RNA, 14 nt, Human adenovirus D
cccuucuugcacug

SEQ ID NO: 287783 - RNA, 22 nt, Human adenovirus D
cccuucuugcacugguggaugu

SEQ ID NO: 287784 - RNA, 17 nt, Human adenovirus D
ccgagaucuggaccugg

SEQ ID NO: 287785 - RNA, 17 nt, Human adenovirus D
ccgcagccgccaugaca

SEQ ID NO: 287786 - RNA, 18 nt, Human adenovirus D
ccgcagccgccaugacag

SEQ ID NO: 287787 - RNA, 21 nt, Human adenovirus D
ccgcaggagggguauaugcug

SEQ ID NO: 287788 - RNA, 12 nt, Human adenovirus D
ccgccaugacag

SEQ ID NO: 287789 - RNA, 18 nt, Human adenovirus D
ccgccugcgcauccccgu

SEQ ID NO: 287790 - RNA, 16 nt, Human adenovirus D
ccgcgcgggcucguca

SEQ ID NO: 287791 - RNA, 14 nt, Human adenovirus D
ccgcuacaacagca

SEQ ID NO: 287792 - RNA, 18 nt, Human adenovirus D
ccgggcuaguguacaacg

SEQ ID NO: 287793 - RNA, 19 nt, Human adenovirus D
ccgggcuaguguacaacgc

SEQ ID NO: 287794 - RNA, 15 nt, Human adenovirus D
ccgggcuuucuugcc

SEQ ID NO: 287795 - RNA, 23 nt, Human adenovirus D
ccgggugcggcaagucccagcug

SEQ ID NO: 287796 - RNA, 19 nt, Human adenovirus D
ccgggugcuagacauggcc

SEQ ID NO: 287797 - RNA, 17 nt, Human adenovirus D
ccguagaaaucaaguac

SEQ ID NO: 287798 - RNA, 16 nt, Human adenovirus D
ccguggccucuucgcc

SEQ ID NO: 287799 - RNA, 22 nt, Human adenovirus D
ccguuuaccacgaucugaugau

SEQ ID NO: 287800 - RNA, 22 nt, Human adenovirus D
ccuacagaguccuggcugaugu

SEQ ID NO: 287801 - RNA, 20 nt, Human adenovirus D
ccuaguucuuccuauuuaac

SEQ ID NO: 287802 - RNA, 14 nt, Human adenovirus D
ccucagcagucucu

SEQ ID NO: 287803 - RNA, 16 nt, Human adenovirus D
ccuccgauggauucaa

SEQ ID NO: 287804 - RNA, 16 nt, Human adenovirus D
ccucggcguugcucac

SEQ ID NO: 287805 - RNA, 20 nt, Human adenovirus D
ccucucaacaucacauucaa

SEQ ID NO: 287806 - RNA, 16 nt, Human adenovirus D
ccucucagaugucaaa

SEQ ID NO: 287807 - RNA, 19 nt, Human adenovirus D
ccucugaaaagucauccaa

SEQ ID NO: 287808 - RNA, 15 nt, Human adenovirus D
ccucugugcccaguu

SEQ ID NO: 287809 - RNA, 21 nt, Human adenovirus D
ccucugugcccaguuccauca

SEQ ID NO: 287810 - RNA, 18 nt, Human adenovirus D
ccucuuugcccugcucac

SEQ ID NO: 287811 - RNA, 20 nt, Human adenovirus D
ccugacgacccgcaaccccg

SEQ ID NO: 287812 - RNA, 17 nt, Human adenovirus D
ccugcccccggaccugg

SEQ ID NO: 287813 - RNA, 22 nt, Human adenovirus D
ccugcggacuuuucuguugcau

SEQ ID NO: 287814 - RNA, 14 nt, Human adenovirus D
ccuggcugauguga

SEQ ID NO: 287815 - RNA, 15 nt, Human adenovirus D
ccuggcugaugugau

SEQ ID NO: 287816 - RNA, 17 nt, Human adenovirus D
ccuggcugaugugauga

SEQ ID NO: 287817 - RNA, 15 nt, Human adenovirus D
ccugugcaaugucag

SEQ ID NO: 287818 - RNA, 17 nt, Human adenovirus D
ccugugccccgcuaccc

SEQ ID NO: 287819 - RNA, 18 nt, Human adenovirus D
ccuuccccuaucccaaau

SEQ ID NO: 287820 - RNA, 11 nt, Human adenovirus D
cgaccaugacc

SEQ ID NO: 287821 - RNA, 14 nt, Human adenovirus D
cgagcgcuggaucc

SEQ ID NO: 287822 - RNA, 16 nt, Human adenovirus D
cgagcggucgcggugg

SEQ ID NO: 287823 - RNA, 20 nt, Human adenovirus D
cgaguacgaggccaugcugc

SEQ ID NO: 287824 - RNA, 14 nt, Human adenovirus D
cgaucgugaacgcg

SEQ ID NO: 287825 - RNA, 12 nt, Human adenovirus D
cgauggauucaa

SEQ ID NO: 287826 - RNA, 14 nt, Human adenovirus D
cgauguaacaucac

SEQ ID NO: 287827 - RNA, 21 nt, Human adenovirus D
cgauucccgggcuuucuugcc

SEQ ID NO: 287828 - RNA, 17 nt, Human adenovirus D
cgcaaagggucuugaga

SEQ ID NO: 287829 - RNA, 16 nt, Human adenovirus D
cgcagccgccaugaca

SEQ ID NO: 287830 - RNA, 14 nt, Human adenovirus D
cgcccagauugcaa

SEQ ID NO: 287831 - RNA, 20 nt, Human adenovirus D
cgcccagauugcaaguacau

SEQ ID NO: 287832 - RNA, 23 nt, Human adenovirus D
cgcgagaccggaggcgugcacug

SEQ ID NO: 287833 - RNA, 13 nt, Human adenovirus D
cgcgcaccugcua

SEQ ID NO: 287834 - RNA, 21 nt, Human adenovirus D
cgcguaggccgcuacaacagc

SEQ ID NO: 287835 - RNA, 15 nt, Human adenovirus D
cgcuacaauuacuuc

SEQ ID NO: 287836 - RNA, 17 nt, Human adenovirus D
cgcuacaauuacuucau

SEQ ID NO: 287837 - RNA, 17 nt, Human adenovirus D
cgcuuagucauguguaa

SEQ ID NO: 287838 - RNA, 19 nt, Human adenovirus D
cgcuuggaugacuuuucag

SEQ ID NO: 287839 - RNA, 18 nt, Human adenovirus D
cggaaucagaauaucccc

SEQ ID NO: 287840 - RNA, 15 nt, Human adenovirus D
cggaccgccggcuca

SEQ ID NO: 287841 - RNA, 13 nt, Human adenovirus D
cggccagucugau

SEQ ID NO: 287842 - RNA, 16 nt, Human adenovirus D
cggccagucugaugaa

SEQ ID NO: 287843 - RNA, 15 nt, Human adenovirus D
cgucaccgagcucug

SEQ ID NO: 287844 - RNA, 12 nt, Human adenovirus D
cguccucugaaa

SEQ ID NO: 287845 - RNA, 17 nt, Human adenovirus D
cguguacacugugaaau

SEQ ID NO: 287846 - RNA, 16 nt, Human adenovirus D
cguugcgguacuggua

SEQ ID NO: 287847 - RNA, 15 nt, Human adenovirus D
cuaagugugguuuau

SEQ ID NO: 287848 - RNA, 16 nt, Human adenovirus D
cuacaauuacuucauc

SEQ ID NO: 287849 - RNA, 23 nt, Human adenovirus D
cuacauggugggcuaauauaacu

SEQ ID NO: 287850 - RNA, 13 nt, Human adenovirus D
cuacgcgaccgug

SEQ ID NO: 287851 - RNA, 15 nt, Human adenovirus D
cuacucccuucucaa

SEQ ID NO: 287852 - RNA, 22 nt, Human adenovirus D
cuacuccucuuugcccugcuca

SEQ ID NO: 287853 - RNA, 17 nt, Human adenovirus D
cuagcuuuggagcauua

SEQ ID NO: 287854 - RNA, 14 nt, Human adenovirus D
cuauaaaaacaaca

SEQ ID NO: 287855 - RNA, 20 nt, Human adenovirus D
cuauaaagucacaguuauac

SEQ ID NO: 287856 - RNA, 15 nt, Human adenovirus D
cuauaauaagcagag

SEQ ID NO: 287857 - RNA, 23 nt, Human adenovirus D
cuauggcuacgcgcggaaucaga

SEQ ID NO: 287858 - RNA, 16 nt, Human adenovirus D
cuauuuaacauccucu

SEQ ID NO: 287859 - RNA, 12 nt, Human adenovirus D
cucaacaucaca

SEQ ID NO: 287860 - RNA, 13 nt, Human adenovirus D
cucaacaucacau

SEQ ID NO: 287861 - RNA, 18 nt, Human adenovirus D
cucacaguccaggucaca

SEQ ID NO: 287862 - RNA, 17 nt, Human adenovirus D
cucagaagaagaccacc

SEQ ID NO: 287863 - RNA, 18 nt, Human adenovirus D
cucagauauuccagauca

SEQ ID NO: 287864 - RNA, 19 nt, Human adenovirus D
cucauaaagaagacuauaa

SEQ ID NO: 287865 - RNA, 13 nt, Human adenovirus D
cucauacugcuau

SEQ ID NO: 287866 - RNA, 22 nt, Human adenovirus D
cucauaggugaggcgaugcugu

SEQ ID NO: 287867 - RNA, 16 nt, Human adenovirus D
cucauaugaccaugca

SEQ ID NO: 287868 - RNA, 18 nt, Human adenovirus D
cucaucgacuggugcugc

SEQ ID NO: 287869 - RNA, 20 nt, Human adenovirus D
cuccaaguuagagacaugcu

SEQ ID NO: 287870 - RNA, 15 nt, Human adenovirus D
cucccaccaccagcc

SEQ ID NO: 287871 - RNA, 22 nt, Human adenovirus D
cucccaccaccagcccauuuca

SEQ ID NO: 287872 - RNA, 22 nt, Human adenovirus D
cuccgagcagcgcauccugcaa

SEQ ID NO: 287873 - RNA, 12 nt, Human adenovirus D
cuccucaaggga

SEQ ID NO: 287874 - RNA, 17 nt, Human adenovirus D
cuccucgaugccaucaa

SEQ ID NO: 287875 - RNA, 16 nt, Human adenovirus D
cuccuguuacuguaaa

SEQ ID NO: 287876 - RNA, 21 nt, Human adenovirus D
cuccuguuacuguaaagccac

SEQ ID NO: 287877 - RNA, 14 nt, Human adenovirus D
cucgaugccaucaa

SEQ ID NO: 287878 - RNA, 13 nt, Human adenovirus D
cucgcagacccuc

SEQ ID NO: 287879 - RNA, 13 nt, Human adenovirus D
cucgcuacugcug

SEQ ID NO: 287880 - RNA, 15 nt, Human adenovirus D
cucggaccaacccca

SEQ ID NO: 287881 - RNA, 18 nt, Human adenovirus D
cucgucaggaaacugugu

SEQ ID NO: 287882 - RNA, 18 nt, Human adenovirus D
cucucagaugucaaagag

SEQ ID NO: 287883 - RNA, 16 nt, Human adenovirus D
cucugaaugauagaca

SEQ ID NO: 287884 - RNA, 19 nt, Human adenovirus D
cucugcucauacugcuauc

SEQ ID NO: 287885 - RNA, 17 nt, Human adenovirus D
cucuucgcagaaccaug

SEQ ID NO: 287886 - RNA, 19 nt, Human adenovirus D
cucuucgcagaaccaugaa

SEQ ID NO: 287887 - RNA, 16 nt, Human adenovirus D
cucuuugcccugcuca

SEQ ID NO: 287888 - RNA, 14 nt, Human adenovirus D
cugacugaucaaca

SEQ ID NO: 287889 - RNA, 17 nt, Human adenovirus D
cugauuagcauagucac

SEQ ID NO: 287890 - RNA, 20 nt, Human adenovirus D
accaugcagacucugcucau

SEQ ID NO: 287891 - RNA, 16 nt, Human adenovirus D
accaugcuuucagcga

SEQ ID NO: 287892 - RNA, 16 nt, Human adenovirus D
acccagaccgugcagg

SEQ ID NO: 287893 - RNA, 13 nt, Human adenovirus D
acccagaugagga

SEQ ID NO: 287894 - RNA, 18 nt, Human adenovirus D
acccaugaaagaacauac

SEQ ID NO: 287895 - RNA, 20 nt, Human adenovirus D
acccauugguugaacccaga

SEQ ID NO: 287896 - RNA, 18 nt, Human adenovirus D
acccccucgaugaugccg

SEQ ID NO: 287897 - RNA, 22 nt, Human adenovirus D
acccguagaaaucaaguaccau

SEQ ID NO: 287898 - RNA, 20 nt, Human adenovirus D
acccgugucccccugaucug

SEQ ID NO: 287899 - RNA, 13 nt, Human adenovirus D
acccuggcauauu

SEQ ID NO: 287900 - RNA, 23 nt, Human adenovirus D
accgggaugaugaccgagcugac

SEQ ID NO: 287901 - RNA, 20 nt, Human adenovirus D
accguaccaugggaaaugca

SEQ ID NO: 287902 - RNA, 16 nt, Human adenovirus D
accuacuccucuuugc

SEQ ID NO: 287903 - RNA, 18 nt, Human adenovirus D
accuccuccccaugaacu

SEQ ID NO: 287904 - RNA, 16 nt, Human adenovirus D
accuccuccuguuacu

SEQ ID NO: 287905 - RNA, 11 nt, Human adenovirus D
accugagcuug

SEQ ID NO: 287906 - RNA, 13 nt, Human adenovirus D
accugcaccugcg

SEQ ID NO: 287907 - RNA, 22 nt, Human adenovirus D
accugcgucugcagcauugucu

SEQ ID NO: 287908 - RNA, 17 nt, Human adenovirus D
accuuccugcagcucau

SEQ ID NO: 287909 - RNA, 13 nt, Human adenovirus D
acgagcuacagca

SEQ ID NO: 287910 - RNA, 17 nt, Human adenovirus D
acgagcucguaggugau

SEQ ID NO: 287911 - RNA, 15 nt, Human adenovirus D
acgcaagagaaucca

SEQ ID NO: 287912 - RNA, 17 nt, Human adenovirus D
acgccggcucaucugca

SEQ ID NO: 287913 - RNA, 18 nt, Human adenovirus D
acgcgcgaagauggccac

SEQ ID NO: 287914 - RNA, 22 nt, Human adenovirus D
acgcggccguucaugggcaccu

SEQ ID NO: 287915 - RNA, 16 nt, Human adenovirus D
acgcuuuaucacucac

SEQ ID NO: 287916 - RNA, 18 nt, Human adenovirus D
acggccagucugaugaau

SEQ ID NO: 287917 - RNA, 20 nt, Human adenovirus D
acggccuggccucgggcauu

SEQ ID NO: 287918 - RNA, 15 nt, Human adenovirus D
acggcuucauuucaa

SEQ ID NO: 287919 - RNA, 21 nt, Human adenovirus D
acgggguugcagcacuggaac

SEQ ID NO: 287920 - RNA, 19 nt, Human adenovirus D
acguuuauuggucuuuuau

SEQ ID NO: 287921 - RNA, 20 nt, Human adenovirus D
acuaggcgcagcugcgcuua

SEQ ID NO: 287922 - RNA, 14 nt, Human adenovirus D
acuauuacugccac

SEQ ID NO: 287923 - RNA, 20 nt, Human adenovirus D
acucagucacucucauuuca

SEQ ID NO: 287924 - RNA, 22 nt, Human adenovirus D
acuccugaaguuccuccucaag

SEQ ID NO: 287925 - RNA, 17 nt, Human adenovirus D
acucugauucaugugaa

SEQ ID NO: 287926 - RNA, 17 nt, Human adenovirus D
acucugcucauacugcu

SEQ ID NO: 287927 - RNA, 18 nt, Human adenovirus D
acucugcucauacugcua

SEQ ID NO: 287928 - RNA, 19 nt, Human adenovirus D
acucugcucauacugcuau

SEQ ID NO: 287929 - RNA, 13 nt, Human adenovirus D
acugcauacaaau

SEQ ID NO: 287930 - RNA, 15 nt, Human adenovirus D
acuggaguauaugca

SEQ ID NO: 287931 - RNA, 13 nt, Human adenovirus D
acuggauggggau

SEQ ID NO: 287932 - RNA, 14 nt, Human adenovirus D
acugggaaccagga

SEQ ID NO: 287933 - RNA, 19 nt, Human adenovirus D
acugggaaccaggagauga

SEQ ID NO: 287934 - RNA, 20 nt, Human adenovirus D
acugggaggcugcgaugcaa

SEQ ID NO: 287935 - RNA, 12 nt, Human adenovirus D
acugucaugcca

SEQ ID NO: 287936 - RNA, 13 nt, Human adenovirus D
acugucaugccac

SEQ ID NO: 287937 - RNA, 21 nt, Human adenovirus D
acugucuagggccuuucccca

SEQ ID NO: 287938 - RNA, 17 nt, Human adenovirus D
acuuaacucugauucau

SEQ ID NO: 287939 - RNA, 14 nt, Human adenovirus D
acuuaagugacuuu

SEQ ID NO: 287940 - RNA, 15 nt, Human adenovirus D
acuuauccacaaacu

SEQ ID NO: 287941 - RNA, 14 nt, Human adenovirus D
acuucaucauaguc

SEQ ID NO: 287942 - RNA, 15 nt, Human adenovirus D
acuucaucauagucc

SEQ ID NO: 287943 - RNA, 12 nt, Human adenovirus D
acuucauggcuu

SEQ ID NO: 287944 - RNA, 16 nt, Human adenovirus D
acuucauggcuugugg

SEQ ID NO: 287945 - RNA, 14 nt, Human adenovirus D
acuuccugaccacg

SEQ ID NO: 287946 - RNA, 17 nt, Human adenovirus D
acuucuggcacauacaa

SEQ ID NO: 287947 - RNA, 18 nt, Human adenovirus D
acuucuggcacauacaaa

SEQ ID NO: 287948 - RNA, 21 nt, Human adenovirus D
acuucuggcacauacaaagcu

SEQ ID NO: 287949 - RNA, 14 nt, Human adenovirus D
acuugaaaucugaa

SEQ ID NO: 287950 - RNA, 15 nt, Human adenovirus D
acuugaacucgggga

SEQ ID NO: 287951 - RNA, 20 nt, Human adenovirus D
acuugggcugccacuugaac

SEQ ID NO: 287952 - RNA, 17 nt, Human adenovirus D
acuuuagugggaccuca

SEQ ID NO: 287953 - RNA, 13 nt, Human adenovirus D
acuuuuugcagcu

SEQ ID NO: 287954 - RNA, 18 nt, Human adenovirus D
agaaacgucccagcagca

SEQ ID NO: 287955 - RNA, 18 nt, Human adenovirus D
agaaaucaaguaccaucu

SEQ ID NO: 287956 - RNA, 13 nt, Human adenovirus D
agaacaaggccau

SEQ ID NO: 287957 - RNA, 12 nt, Human adenovirus D
agaaccaugaau

SEQ ID NO: 287958 - RNA, 17 nt, Human adenovirus D
agaaguacgacaaggua

SEQ ID NO: 287959 - RNA, 13 nt, Human adenovirus D
agaaguaugccaa

SEQ ID NO: 287960 - RNA, 15 nt, Human adenovirus D
agaaguucaccugca

SEQ ID NO: 287961 - RNA, 20 nt, Human adenovirus D
agaauauguguauguuaaua

SEQ ID NO: 287962 - RNA, 19 nt, Human adenovirus D
agaauccacuacaaugcaa

SEQ ID NO: 287963 - RNA, 17 nt, Human adenovirus D
agaauggauguacuuca

SEQ ID NO: 287964 - RNA, 21 nt, Human adenovirus D
agaauuuuaaggcucauauga

SEQ ID NO: 287965 - RNA, 20 nt, Human adenovirus D
agacaacagccgcaggccaa

SEQ ID NO: 287966 - RNA, 21 nt, Human adenovirus D
agacauaguuguaaugaucaa

SEQ ID NO: 287967 - RNA, 12 nt, Human adenovirus D
agacauggccag

SEQ ID NO: 287968 - RNA, 17 nt, Human adenovirus D
agacuauaaagucacag

SEQ ID NO: 287969 - RNA, 18 nt, Human adenovirus D
agacuauaaagucacagu

SEQ ID NO: 287970 - RNA, 15 nt, Human adenovirus D
agacucugcucauac

SEQ ID NO: 287971 - RNA, 21 nt, Human adenovirus D
agacucugcucauacugcuau

SEQ ID NO: 287972 - RNA, 19 nt, Human adenovirus D
agagaaccguguacacugu

SEQ ID NO: 287973 - RNA, 20 nt, Human adenovirus D
agagaaccguguacacugug

SEQ ID NO: 287974 - RNA, 14 nt, Human adenovirus D
agagaauccacuac

SEQ ID NO: 287975 - RNA, 20 nt, Human adenovirus D
agagaauccacuacaaugca

SEQ ID NO: 287976 - RNA, 20 nt, Human adenovirus D
agagauggcucucacuugcc

SEQ ID NO: 287977 - RNA, 15 nt, Human adenovirus D
agaggagugugauau

SEQ ID NO: 287978 - RNA, 22 nt, Human adenovirus D
agaggugguaaaauuacauuga

SEQ ID NO: 287979 - RNA, 14 nt, Human adenovirus D
agaguaagcacuau

SEQ ID NO: 287980 - RNA, 16 nt, Human adenovirus D
agaguaagcacuaucu

SEQ ID NO: 287981 - RNA, 17 nt, Human adenovirus D
agauauuccagaucaca

SEQ ID NO: 287982 - RNA, 15 nt, Human adenovirus D
agaucuggaccuggc

SEQ ID NO: 287983 - RNA, 19 nt, Human adenovirus D
agaugaggauugggaggag

SEQ ID NO: 287984 - RNA, 15 nt, Human adenovirus D
agauucaauccagcu

SEQ ID NO: 287985 - RNA, 20 nt, Human adenovirus D
agcaaauuccucgaccauga

SEQ ID NO: 287986 - RNA, 22 nt, Human adenovirus D
agcaaauuccucgaccaugacc

SEQ ID NO: 287987 - RNA, 19 nt, Human adenovirus D
agcaaggugcugacaucca

SEQ ID NO: 287988 - RNA, 18 nt, Human adenovirus D
agcaauggaaaucacacu

SEQ ID NO: 287989 - RNA, 22 nt, Human adenovirus D
agcagaaguucaccugcauggu

SEQ ID NO: 287990 - RNA, 13 nt, Human adenovirus D
agcauacaugccc

SEQ ID NO: 287991 - RNA, 17 nt, Human adenovirus D
agcaucaaaaauuaucu

SEQ ID NO: 287992 - RNA, 19 nt, Human adenovirus D
agccacgauguaacaucac

SEQ ID NO: 287993 - RNA, 17 nt, Human adenovirus D
agccagggccgccacuc

SEQ ID NO: 287994 - RNA, 13 nt, Human adenovirus D
agcccauuucaca

SEQ ID NO: 287995 - RNA, 19 nt, Human adenovirus D
agccccgaguguaucuacu

SEQ ID NO: 287996 - RNA, 18 nt, Human adenovirus D
agccccggaccccgccau

SEQ ID NO: 287997 - RNA, 13 nt, Human adenovirus D
agccgcagccgcc

SEQ ID NO: 287998 - RNA, 17 nt, Human adenovirus D
agccgcagccgccauga

SEQ ID NO: 287999 - RNA, 13 nt, Human adenovirus D
agccgccaugaca

SEQ ID NO: 288000 - RNA, 15 nt, Human adenovirus D
agccuguacccagag

SEQ ID NO: 288001 - RNA, 23 nt, Human adenovirus D
agcgauucccgggcuuucuugcc

SEQ ID NO: 288002 - RNA, 13 nt, Human adenovirus D
agcgcauccugca

SEQ ID NO: 288003 - RNA, 19 nt, Human adenovirus D
agcgcccucagcagucucu

SEQ ID NO: 288004 - RNA, 18 nt, Human adenovirus D
agcgguggcguguucgau

SEQ ID NO: 288005 - RNA, 17 nt, Human adenovirus D
agcucaucgacuggugc

SEQ ID NO: 288006 - RNA, 21 nt, Human adenovirus D
agcucaucgacuggugcugcg

SEQ ID NO: 288007 - RNA, 23 nt, Human adenovirus D
agcugacauugaggcgcgagcuc

SEQ ID NO: 288008 - RNA, 21 nt, Human adenovirus D
agcugacggccagucugauga

SEQ ID NO: 288009 - RNA, 15 nt, Human adenovirus D
agcugugcuaagugu

SEQ ID NO: 288010 - RNA, 23 nt, Human adenovirus D
aggaaacuaggcgcagcugcgcu

SEQ ID NO: 288011 - RNA, 16 nt, Human adenovirus D
aggaaggaggacacua

SEQ ID NO: 288012 - RNA, 17 nt, Human adenovirus D
aggcaaagaucaccuac

SEQ ID NO: 288013 - RNA, 15 nt, Human adenovirus D
aggcgagcagcuguu

SEQ ID NO: 288014 - RNA, 14 nt, Human adenovirus D
aggcgcgagcucag

SEQ ID NO: 288015 - RNA, 23 nt, Human adenovirus D
aggcgugcgguggugucuuccuc

SEQ ID NO: 288016 - RNA, 12 nt, Human adenovirus D
aggcucauauga

SEQ ID NO: 288017 - RNA, 19 nt, Human adenovirus D
aggcucauaugaccaugca

SEQ ID NO: 288018 - RNA, 14 nt, Human adenovirus D
aggcuuucacagcu

SEQ ID NO: 288019 - RNA, 19 nt, Human adenovirus D
agggcaucuucugccuggu

SEQ ID NO: 288020 - RNA, 13 nt, Human adenovirus D
aggggaguggcgc

SEQ ID NO: 288021 - RNA, 18 nt, Human adenovirus D
agguacgcaagagaaucc

SEQ ID NO: 288022 - RNA, 21 nt, Human adenovirus D
agguacgcaagagaauccacu

SEQ ID NO: 288023 - RNA, 22 nt, Human adenovirus D
aguacaguuaagaauccacaga

SEQ ID NO: 288024 - RNA, 16 nt, Human adenovirus D
aguacauagugaccaa

SEQ ID NO: 288025 - RNA, 18 nt, Human adenovirus D
aguacauagugaccaaga

SEQ ID NO: 288026 - RNA, 16 nt, Human adenovirus D
agucaggcaggauuca

SEQ ID NO: 288027 - RNA, 17 nt, Human adenovirus D
agucaggcaggauucau

SEQ ID NO: 288028 - RNA, 21 nt, Human adenovirus D
agucaugugugauaucacacu

SEQ ID NO: 288029 - RNA, 20 nt, Human adenovirus D
agugcacagacccaccccag

SEQ ID NO: 288030 - RNA, 16 nt, Human adenovirus D
aguggcaacaccuggg

SEQ ID NO: 288031 - RNA, 21 nt, Human adenovirus D
agugggaccucagauauucca

SEQ ID NO: 288032 - RNA, 21 nt, Human adenovirus D
aguuaagaauccacagaucag

SEQ ID NO: 288033 - RNA, 18 nt, Human adenovirus D
aguuagagacaugcucaa

SEQ ID NO: 288034 - RNA, 12 nt, Human adenovirus D
aguuccuccuca

SEQ ID NO: 288035 - RNA, 13 nt, Human adenovirus D
aguuccuccucaa

SEQ ID NO: 288036 - RNA, 16 nt, Human adenovirus D
aguuccuccucaaggg

SEQ ID NO: 288037 - RNA, 22 nt, Human adenovirus D
aguucuguccguggauuaccau

SEQ ID NO: 288038 - RNA, 18 nt, Human adenovirus D
aguugcgguacacggggu

SEQ ID NO: 288039 - RNA, 16 nt, Human adenovirus D
aguuggaugacugagc

SEQ ID NO: 288040 - RNA, 15 nt, Human adenovirus D
aguugggccugaugc

SEQ ID NO: 288041 - RNA, 15 nt, Human adenovirus D
aguuguaaugaucaa

SEQ ID NO: 288042 - RNA, 16 nt, Human adenovirus D
aguuugggcacugggg

SEQ ID NO: 288043 - RNA, 17 nt, Human adenovirus D
aguuugggcacuggggu

SEQ ID NO: 288044 - RNA, 13 nt, Human adenovirus D
aguuuucccucac

SEQ ID NO: 288045 - RNA, 15 nt, Human adenovirus D
auaaaaacaacaaaa

SEQ ID NO: 288046 - RNA, 23 nt, Human adenovirus D
auaaagaagacuauaaagucaca

SEQ ID NO: 288047 - RNA, 17 nt, Human adenovirus D
auaaggaaauguucuga

SEQ ID NO: 288048 - RNA, 22 nt, Human adenovirus D
auacaaagcugaaagcuauaaa

SEQ ID NO: 288049 - RNA, 19 nt, Human adenovirus D
auacacgcaguuguuucau

SEQ ID NO: 288050 - RNA, 17 nt, Human adenovirus D
auacaugggcuauaaua

SEQ ID NO: 288051 - RNA, 14 nt, Human adenovirus D
auacuccagugcau

SEQ ID NO: 288052 - RNA, 16 nt, Human adenovirus D
auacugcuaucgcucu

SEQ ID NO: 288053 - RNA, 22 nt, Human adenovirus D
auagcgugcguucucuuccuug

SEQ ID NO: 288054 - RNA, 19 nt, Human adenovirus D
auaggugaggcgaugcugu

SEQ ID NO: 288055 - RNA, 18 nt, Human adenovirus D
auagucacacuuaguuca

SEQ ID NO: 288056 - RNA, 20 nt, Human adenovirus D
auagucaucacccagcaguc

SEQ ID NO: 288057 - RNA, 20 nt, Human adenovirus D
auaucauaaagauggaugga

SEQ ID NO: 288058 - RNA, 21 nt, Human adenovirus D
auaugaccaugcagacucugc

SEQ ID NO: 288059 - RNA, 17 nt, Human adenovirus D
auauuugugaauggaau

SEQ ID NO: 288060 - RNA, 13 nt, Human adenovirus D
aucaaaacuuaac

SEQ ID NO: 288061 - RNA, 15 nt, Human adenovirus D
aucaacaucaguuca

SEQ ID NO: 288062 - RNA, 12 nt, Human adenovirus D
aucaacauccac

SEQ ID NO: 288063 - RNA, 14 nt, Human adenovirus D
aucaacauccacca

SEQ ID NO: 288064 - RNA, 17 nt, Human adenovirus D
aucaaugcuacauggug

SEQ ID NO: 288065 - RNA, 14 nt, Human adenovirus D
aucacacugcaugu

SEQ ID NO: 288066 - RNA, 16 nt, Human adenovirus D
aucacaugguaugaua

SEQ ID NO: 288067 - RNA, 20 nt, Human adenovirus D
aucaccaguuugggcacugg

SEQ ID NO: 288068 - RNA, 14 nt, Human adenovirus D
aucaccuuccugca

SEQ ID NO: 288069 - RNA, 14 nt, Human adenovirus D
aucagacaugcugc

SEQ ID NO: 288070 - RNA, 17 nt, Human adenovirus D
aucagcgcccucagcag

SEQ ID NO: 288071 - RNA, 15 nt, Human adenovirus D
aucauccauaucgca

SEQ ID NO: 288072 - RNA, 17 nt, Human adenovirus D
aucauuggaacuaauca

SEQ ID NO: 288073 - RNA, 12 nt, Human adenovirus D
auccacacaguu

SEQ ID NO: 288074 - RNA, 13 nt, Human adenovirus D
auccacugcuccu

SEQ ID NO: 288075 - RNA, 19 nt, Human adenovirus D
auccagccuguacccagag

SEQ ID NO: 288076 - RNA, 23 nt, Human adenovirus D
auccauggccaggggagugaaga

SEQ ID NO: 288077 - RNA, 17 nt, Human adenovirus D
auccccuguugcccgau

SEQ ID NO: 288078 - RNA, 15 nt, Human adenovirus D
auccucaccacagag

SEQ ID NO: 288079 - RNA, 23 nt, Human adenovirus D
auccuuguccagauccucggcgu

SEQ ID NO: 288080 - RNA, 17 nt, Human adenovirus D
aucgccccgcaggugga

SEQ ID NO: 288081 - RNA, 20 nt, Human adenovirus D
aucgcucuuaucccaugccc

SEQ ID NO: 288082 - RNA, 16 nt, Human adenovirus D
aucucccaccaccagc

SEQ ID NO: 288083 - RNA, 14 nt, Human adenovirus D
aucucuacuaacca

SEQ ID NO: 288084 - RNA, 13 nt, Human adenovirus D
aucugaugaugaa

SEQ ID NO: 288085 - RNA, 16 nt, Human adenovirus D
aucugcaucucaagca

SEQ ID NO: 288086 - RNA, 11 nt, Human adenovirus D
augacuucaac

SEQ ID NO: 288087 - RNA, 17 nt, Human adenovirus D
augagaggagugugaua

SEQ ID NO: 288088 - RNA, 18 nt, Human adenovirus D
augagaggagugugauau

SEQ ID NO: 288089 - RNA, 14 nt, Human adenovirus D
augagaugccccag

SEQ ID NO: 288090 - RNA, 16 nt, Human adenovirus D
augagcagaacuacac

SEQ ID NO: 288091 - RNA, 19 nt, Human adenovirus D
augaggcgugcgguggugu

SEQ ID NO: 288092 - RNA, 19 nt, Human adenovirus D
augaguugggccugaugca

SEQ ID NO: 288093 - RNA, 22 nt, Human adenovirus D
augaguugggccugaugcagga

SEQ ID NO: 288094 - RNA, 17 nt, Human adenovirus D
augcaaaccgagauuca

SEQ ID NO: 288095 - RNA, 17 nt, Human adenovirus D
augcaaggugugguuua

SEQ ID NO: 288096 - RNA, 11 nt, Human adenovirus D
augcacuggag

SEQ ID NO: 288097 - RNA, 14 nt, Human adenovirus D
augcagacucugcu

SEQ ID NO: 288098 - RNA, 17 nt, Human adenovirus D
augcagacucugcucau

SEQ ID NO: 288099 - RNA, 20 nt, Human adenovirus D
augcaguuuuugggugcuag

SEQ ID NO: 288100 - RNA, 23 nt, Human adenovirus D
augcaugggugggcgacugggaa

SEQ ID NO: 288101 - RNA, 13 nt, Human adenovirus D
augccaucaacau

SEQ ID NO: 288102 - RNA, 18 nt, Human adenovirus D
augcccucgcuacugcug

SEQ ID NO: 288103 - RNA, 19 nt, Human adenovirus D
augcccucucaacaucaca

SEQ ID NO: 288104 - RNA, 19 nt, Human adenovirus D
augcuacauggugggcuaa

SEQ ID NO: 288105 - RNA, 20 nt, Human adenovirus D
augcuucaacagcugugcua

SEQ ID NO: 288106 - RNA, 17 nt, Human adenovirus D
augcuucaauaauggaa

SEQ ID NO: 288107 - RNA, 20 nt, Human adenovirus D
augcuucaauaauggaagca

SEQ ID NO: 288108 - RNA, 18 nt, Human adenovirus D
auggaauguuacugcaua

SEQ ID NO: 288109 - RNA, 21 nt, Human adenovirus D
auggaauguuacugcauacaa

SEQ ID NO: 288110 - RNA, 22 nt, Human adenovirus D
auggaauguuacugcauacaaa

SEQ ID NO: 288111 - RNA, 21 nt, Human adenovirus D
auggaauuucuuagacugcua

SEQ ID NO: 288112 - RNA, 15 nt, Human adenovirus D
auggauguacuucag

SEQ ID NO: 288113 - RNA, 21 nt, Human adenovirus D
auggcaucgaggagcuccuug

SEQ ID NO: 288114 - RNA, 13 nt, Human adenovirus D
auggccuggagca

SEQ ID NO: 288115 - RNA, 20 nt, Human adenovirus D
augggacuuauccacaaacu

SEQ ID NO: 288116 - RNA, 23 nt, Human adenovirus D
augggguugacgcccaccaugca

SEQ ID NO: 288117 - RNA, 15 nt, Human adenovirus D
augguaugauagcac

SEQ ID NO: 288118 - RNA, 20 nt, Human adenovirus D
augguaugauagcacuggau

SEQ ID NO: 288119 - RNA, 20 nt, Human adenovirus D
auguaacaucaccacaggca

SEQ ID NO: 288120 - RNA, 20 nt, Human adenovirus D
auguaugucagugugccugu

SEQ ID NO: 288121 - RNA, 21 nt, Human adenovirus D
augugaacaaaacccaugaaa

SEQ ID NO: 288122 - RNA, 15 nt, Human adenovirus D
augugacgcaugcaa

SEQ ID NO: 288123 - RNA, 13 nt, Human adenovirus D
augugugauauca

SEQ ID NO: 288124 - RNA, 14 nt, Human adenovirus D
augugugauaucac

SEQ ID NO: 288125 - RNA, 15 nt, Human adenovirus D
auguuaaugucacua

SEQ ID NO: 288126 - RNA, 21 nt, Human adenovirus D
auguuauagaguaagcacuau

SEQ ID NO: 288127 - RNA, 19 nt, Human adenovirus D
auuaaaaaauuaaccuaua

SEQ ID NO: 288128 - RNA, 23 nt, Human adenovirus D
auuaaaaaccaaaaaaaacaauc

SEQ ID NO: 288129 - RNA, 19 nt, Human adenovirus D
auuaaagaaaaaacuacca

SEQ ID NO: 288130 - RNA, 17 nt, Human adenovirus D
auuacuauuacugccac

SEQ ID NO: 288131 - RNA, 23 nt, Human adenovirus D
auuacugccacugccaacauuac

SEQ ID NO: 288132 - RNA, 19 nt, Human adenovirus D
auuacuucuggcacauaca

SEQ ID NO: 288133 - RNA, 14 nt, Human adenovirus D
auucaugugaacaa

SEQ ID NO: 288134 - RNA, 17 nt, Human adenovirus D
auucaugugaacaaaac

SEQ ID NO: 288135 - RNA, 13 nt, Human adenovirus D
auuccagcaugca

SEQ ID NO: 288136 - RNA, 19 nt, Human adenovirus D
auucccgggcuuucuugcc

SEQ ID NO: 288137 - RNA, 20 nt, Human adenovirus D
auucccgggcuuucuugccg

SEQ ID NO: 288138 - RNA, 18 nt, Human adenovirus D
auuccucgaccaugaccu

SEQ ID NO: 288139 - RNA, 18 nt, Human adenovirus D
auugaggcgcgagcucag

SEQ ID NO: 288140 - RNA, 17 nt, Human adenovirus D
auugucugccuggucau

SEQ ID NO: 288141 - RNA, 22 nt, Human adenovirus D
auuguggucccugggguccuag

SEQ ID NO: 288142 - RNA, 16 nt, Human adenovirus D
auuuacaggacuuuuc

SEQ ID NO: 288143 - RNA, 19 nt, Human adenovirus D
auuucaucagaugcagagg

SEQ ID NO: 288144 - RNA, 21 nt, Human adenovirus D
auuucaucagaugcagaggaa

SEQ ID NO: 288145 - RNA, 16 nt, Human adenovirus D
auuucuuagacugcua

SEQ ID NO: 288146 - RNA, 17 nt, Human adenovirus D
auuucuuagacugcuau

SEQ ID NO: 288147 - RNA, 18 nt, Human adenovirus D
auuucuuagacugcuauc

SEQ ID NO: 288148 - RNA, 15 nt, Human adenovirus D
auuugugaauggaau

SEQ ID NO: 288149 - RNA, 22 nt, Human adenovirus D
auuugugaauggaauguuacug

SEQ ID NO: 288150 - RNA, 16 nt, Human adenovirus D
auuuuaaggcucauau

SEQ ID NO: 288151 - RNA, 17 nt, Human adenovirus D
auuuuacaugcacugga

SEQ ID NO: 288152 - RNA, 14 nt, Human adenovirus D
auuuuuacaccagc

SEQ ID NO: 288153 - RNA, 16 nt, Human adenovirus D
caaaaaaaacaaucag

SEQ ID NO: 288154 - RNA, 16 nt, Human adenovirus D
caaaaccacauuugaa

SEQ ID NO: 288155 - RNA, 12 nt, Human adenovirus D
caaacagcaucg

SEQ ID NO: 288156 - RNA, 15 nt, Human adenovirus D
caaacuacauggaca

SEQ ID NO: 288157 - RNA, 15 nt, Human adenovirus D
caaagagagcuuauu

SEQ ID NO: 288158 - RNA, 13 nt, Human adenovirus D
caaagaucaccua

SEQ ID NO: 288159 - RNA, 21 nt, Human adenovirus D
caaagggucuugagaagggag

SEQ ID NO: 288160 - RNA, 20 nt, Human adenovirus D
caaaugcgagcauacaugcc

SEQ ID NO: 288161 - RNA, 21 nt, Human adenovirus D
caaaugcgagcauacaugccc

SEQ ID NO: 288162 - RNA, 22 nt, Human adenovirus D
caaaugcgagcauacaugcccu

SEQ ID NO: 288163 - RNA, 20 nt, Human adenovirus D
caaaugcuucaauaauggaa

SEQ ID NO: 288164 - RNA, 14 nt, Human adenovirus D
caacagcugugcua

SEQ ID NO: 288165 - RNA, 15 nt, Human adenovirus D
caacaucacauucaa

SEQ ID NO: 288166 - RNA, 16 nt, Human adenovirus D
caacaucugugcugcc

SEQ ID NO: 288167 - RNA, 24 nt, Human adenovirus D
caacauuacuucuggcacauacaa

SEQ ID NO: 288168 - RNA, 16 nt, Human adenovirus D
caaccagagccagaau

SEQ ID NO: 288169 - RNA, 13 nt, Human adenovirus D
caacggcugcauc

SEQ ID NO: 288170 - RNA, 22 nt, Human adenovirus D
caaggagcuccucgaugccauc

SEQ ID NO: 288171 - RNA, 21 nt, Human adenovirus D
caaggcagcauuaacuggaug

SEQ ID NO: 288172 - RNA, 14 nt, Human adenovirus D
caaggugugguuua

SEQ ID NO: 288173 - RNA, 20 nt, Human adenovirus D
caaggugugguuuaugacuc

SEQ ID NO: 288174 - RNA, 20 nt, Human adenovirus D
caaucagccccuuccccuau

SEQ ID NO: 288175 - RNA, 19 nt, Human adenovirus D
caaucucccaccaccagcc

SEQ ID NO: 288176 - RNA, 17 nt, Human adenovirus D
cacaaagagagcuuauu

SEQ ID NO: 288177 - RNA, 23 nt, Human adenovirus D
cacaccuugaaagggaugucaaa

SEQ ID NO: 288178 - RNA, 16 nt, Human adenovirus D
cacacuuaguucagcu

SEQ ID NO: 288179 - RNA, 16 nt, Human adenovirus D
cacacuuuugguuuca

SEQ ID NO: 288180 - RNA, 18 nt, Human adenovirus D
cacagcuugcguucugau

SEQ ID NO: 288181 - RNA, 16 nt, Human adenovirus D
cacaguagucaucaaa

SEQ ID NO: 288182 - RNA, 22 nt, Human adenovirus D
cacauacgccggcucaucugca

SEQ ID NO: 288183 - RNA, 15 nt, Human adenovirus D
caccacaggcaauga

SEQ ID NO: 288184 - RNA, 22 nt, Human adenovirus D
caccaguuugggcacugggguc

SEQ ID NO: 288185 - RNA, 23 nt, Human adenovirus D
caccaucagacugggguacuuua

SEQ ID NO: 288186 - RNA, 21 nt, Human adenovirus D
caccuaugagaugccccagca

SEQ ID NO: 288187 - RNA, 19 nt, Human adenovirus D
caccugcgucugcagcauu

SEQ ID NO: 288188 - RNA, 16 nt, Human adenovirus D
caccuuccugcagcuc

SEQ ID NO: 288189 - RNA, 22 nt, Human adenovirus D
cacgaacagccacgauguaaca

SEQ ID NO: 288190 - RNA, 11 nt, Human adenovirus D
cacguuuauug

SEQ ID NO: 288191 - RNA, 20 nt, Human adenovirus D
cacguuuauuggucuuuuau

SEQ ID NO: 288192 - RNA, 17 nt, Human adenovirus D
cacugacugaucaacau

SEQ ID NO: 288193 - RNA, 23 nt, Human adenovirus D
cacugacugaucaacauccccug

SEQ ID NO: 288194 - RNA, 22 nt, Human adenovirus D
cacugcauguggcuagacuuca

SEQ ID NO: 288195 - RNA, 16 nt, Human adenovirus D
cacugguggauguuga

SEQ ID NO: 288196 - RNA, 22 nt, Human adenovirus D
cacuguccaugguagcaaugga

SEQ ID NO: 288197 - RNA, 13 nt, Human adenovirus D
cacuuacuugaaa

SEQ ID NO: 288198 - RNA, 22 nt, Human adenovirus D
cacuuaguucagcugcaaugau

SEQ ID NO: 288199 - RNA, 20 nt, Human adenovirus D
cacuuuugguuucaaauuca

SEQ ID NO: 288200 - RNA, 21 nt, Human adenovirus D
cacuuuugguuucaaauucau

SEQ ID NO: 288201 - RNA, 17 nt, Human adenovirus D
cagaagcagaaguucac

SEQ ID NO: 288202 - RNA, 23 nt, Human adenovirus D
cagaagcagaaguucaccugcau

SEQ ID NO: 288203 - RNA, 18 nt, Human adenovirus D
cagaaguucaccugcaug

SEQ ID NO: 288204 - RNA, 21 nt, Human adenovirus D
cagaaucuucgagaauggaug

SEQ ID NO: 288205 - RNA, 15 nt, Human adenovirus D
cagacauaguuguaa

SEQ ID NO: 288206 - RNA, 15 nt, Human adenovirus D
cagacucucaucucu

SEQ ID NO: 288207 - RNA, 13 nt, Human adenovirus D
cagagccagaaua

SEQ ID NO: 288208 - RNA, 17 nt, Human adenovirus D
cagaguacucauaaaga

SEQ ID NO: 288209 - RNA, 15 nt, Human adenovirus D
cagaguccuggcuga

SEQ ID NO: 288210 - RNA, 22 nt, Human adenovirus D
cagaguccuggcugaugugaug

SEQ ID NO: 288211 - RNA, 19 nt, Human adenovirus D
cagauauuccagaucacau

SEQ ID NO: 288212 - RNA, 14 nt, Human adenovirus D
cagaucagacauag

SEQ ID NO: 288213 - RNA, 15 nt, Human adenovirus D
cagcacguacuuuga

SEQ ID NO: 288214 - RNA, 20 nt, Human adenovirus D
cagcaggagcgugccgccaa

SEQ ID NO: 288215 - RNA, 20 nt, Human adenovirus D
cagcauguacggaggagcca

SEQ ID NO: 288216 - RNA, 13 nt, Human adenovirus D
cagcccauuucac

SEQ ID NO: 288217 - RNA, 21 nt, Human adenovirus D
cagccccuuccccuaucccaa

SEQ ID NO: 288218 - RNA, 19 nt, Human adenovirus D
cagccgcagccgccaugac

SEQ ID NO: 288219 - RNA, 20 nt, Human adenovirus D
cagccgcagccgccaugaca

SEQ ID NO: 288220 - RNA, 14 nt, Human adenovirus D
cagccgccaugaca

SEQ ID NO: 288221 - RNA, 21 nt, Human adenovirus D
cagccucuccguccucgagga

SEQ ID NO: 288222 - RNA, 15 nt, Human adenovirus D
cagccuguacccaga

SEQ ID NO: 288223 - RNA, 20 nt, Human adenovirus D
cagcgcccucagcagucucu

SEQ ID NO: 288224 - RNA, 21 nt, Human adenovirus D
cagcgcccucagcagucucug

SEQ ID NO: 288225 - RNA, 18 nt, Human adenovirus D
cagcucaucgacuggugc

SEQ ID NO: 288226 - RNA, 21 nt, Human adenovirus D
cagcugcauguccuugaacua

SEQ ID NO: 288227 - RNA, 22 nt, Human adenovirus D
cagcugcgcuuagucaugugua

SEQ ID NO: 288228 - RNA, 14 nt, Human adenovirus D
caggaaacugugug

SEQ ID NO: 288229 - RNA, 22 nt, Human adenovirus D
caggagggguauaugcuguuca

SEQ ID NO: 288230 - RNA, 19 nt, Human adenovirus D
cagggcccguuuaccacga

SEQ ID NO: 288231 - RNA, 14 nt, Human adenovirus D
cagggcuucacuga

SEQ ID NO: 288232 - RNA, 17 nt, Human adenovirus D
cagucacucucauuuca

SEQ ID NO: 288233 - RNA, 18 nt, Human adenovirus D
cagucugguggaacgaga

SEQ ID NO: 288234 - RNA, 23 nt, Human adenovirus D
caguggcgagaggcgagcagcug

SEQ ID NO: 288235 - RNA, 17 nt, Human adenovirus D
cagugggcguacaugca

SEQ ID NO: 288236 - RNA, 16 nt, Human adenovirus D
cagugugccugugccc

SEQ ID NO: 288237 - RNA, 15 nt, Human adenovirus D
ccucggcgagcucgu

SEQ ID NO: 288238 - RNA, 19 nt, Human adenovirus D
ccucucaacaucacauuca

SEQ ID NO: 288239 - RNA, 22 nt, Human adenovirus D
ccugaacuaucaaaacgaccac

SEQ ID NO: 288240 - RNA, 18 nt, Human adenovirus D
ccugaaguuccuccucaa

SEQ ID NO: 288241 - RNA, 12 nt, Human adenovirus D
ccugaugcagga

SEQ ID NO: 288242 - RNA, 15 nt, Human adenovirus D
ccugcaagagcuccu

SEQ ID NO: 288243 - RNA, 22 nt, Human adenovirus D
ccugcccccggaccuggaucuc

SEQ ID NO: 288244 - RNA, 14 nt, Human adenovirus D
ccugcucaccugca

SEQ ID NO: 288245 - RNA, 21 nt, Human adenovirus D
ccuggucaucaccuuccugca

SEQ ID NO: 288246 - RNA, 22 nt, Human adenovirus D
ccuggugggggguguacuguca

SEQ ID NO: 288247 - RNA, 14 nt, Human adenovirus D
ccugugcaauguca

SEQ ID NO: 288248 - RNA, 20 nt, Human adenovirus D
ccuguugcccgauugugauc

SEQ ID NO: 288249 - RNA, 19 nt, Human adenovirus D
ccuugaaagggaugucaaa

SEQ ID NO: 288250 - RNA, 20 nt, Human adenovirus D
ccuugaacuaccaccugcaa

SEQ ID NO: 288251 - RNA, 16 nt, Human adenovirus D
ccuuuccccaccuacu

SEQ ID NO: 288252 - RNA, 14 nt, Human adenovirus D
cgacacguacuuca

SEQ ID NO: 288253 - RNA, 17 nt, Human adenovirus D
cgacccacgaugugacc

SEQ ID NO: 288254 - RNA, 14 nt, Human adenovirus D
cgaccgcugucuca

SEQ ID NO: 288255 - RNA, 14 nt, Human adenovirus D
cgacuggugcugcg

SEQ ID NO: 288256 - RNA, 21 nt, Human adenovirus D
cgagaccggaggcgugcacug

SEQ ID NO: 288257 - RNA, 21 nt, Human adenovirus D
cgagcgcuggauccugcauug

SEQ ID NO: 288258 - RNA, 17 nt, Human adenovirus D
cgagcucguaggugauc

SEQ ID NO: 288259 - RNA, 23 nt, Human adenovirus D
cgagcucguaggugaucuuugcc

SEQ ID NO: 288260 - RNA, 23 nt, Human adenovirus D
cgagcugacggccagucugauga

SEQ ID NO: 288261 - RNA, 19 nt, Human adenovirus D
cgaguacgaggccaugcug

SEQ ID NO: 288262 - RNA, 14 nt, Human adenovirus D
cgaucugaugauga

SEQ ID NO: 288263 - RNA, 14 nt, Human adenovirus D
cgaugcuguuugcc

SEQ ID NO: 288264 - RNA, 19 nt, Human adenovirus D
cgcagugggcguacaugca

SEQ ID NO: 288265 - RNA, 13 nt, Human adenovirus D
cgcaguugggacc

SEQ ID NO: 288266 - RNA, 15 nt, Human adenovirus D
cgccaaggagcuccu

SEQ ID NO: 288267 - RNA, 17 nt, Human adenovirus D
cgccucggaguaccuga

SEQ ID NO: 288268 - RNA, 18 nt, Human adenovirus D
cgccucggaguaccugag

SEQ ID NO: 288269 - RNA, 14 nt, Human adenovirus D
cgcgaaccaggcag

SEQ ID NO: 288270 - RNA, 16 nt, Human adenovirus D
cgcgaaccaggcagug

SEQ ID NO: 288271 - RNA, 20 nt, Human adenovirus D
cgcgcuguguaucucgugga

SEQ ID NO: 288272 - RNA, 14 nt, Human adenovirus D
cgcugcaaagccag

SEQ ID NO: 288273 - RNA, 22 nt, Human adenovirus D
cgcuggcggagaacaaggccau

SEQ ID NO: 288274 - RNA, 23 nt, Human adenovirus D
cgcuggcggagaacaaggccauc

SEQ ID NO: 288275 - RNA, 13 nt, Human adenovirus D
cgcuguguaucuc

SEQ ID NO: 288276 - RNA, 15 nt, Human adenovirus D
cggaccuaugggaac

SEQ ID NO: 288277 - RNA, 18 nt, Human adenovirus D
cggacggaucgcccaggc

SEQ ID NO: 288278 - RNA, 18 nt, Human adenovirus D
cggccaucggcacgaucc

SEQ ID NO: 288279 - RNA, 22 nt, Human adenovirus D
cggccaucggcacgaucccggg

SEQ ID NO: 288280 - RNA, 14 nt, Human adenovirus D
cgggaaaaccucca

SEQ ID NO: 288281 - RNA, 22 nt, Human adenovirus D
cgggcauuaacgggguggugga

SEQ ID NO: 288282 - RNA, 13 nt, Human adenovirus D
cgggccagugcac

SEQ ID NO: 288283 - RNA, 14 nt, Human adenovirus D
cgggccagugcacg

SEQ ID NO: 288284 - RNA, 14 nt, Human adenovirus D
cgggcgcccagugc

SEQ ID NO: 288285 - RNA, 21 nt, Human adenovirus D
cggggcaguuguugagggaaa

SEQ ID NO: 288286 - RNA, 18 nt, Human adenovirus D
cgggugcauguucaacca

SEQ ID NO: 288287 - RNA, 16 nt, Human adenovirus D
cgguacugguacuugg

SEQ ID NO: 288288 - RNA, 16 nt, Human adenovirus D
cguccaucgugcgcga

SEQ ID NO: 288289 - RNA, 14 nt, Human adenovirus D
cguggaugagguac

SEQ ID NO: 288290 - RNA, 11 nt, Human adenovirus D
cuacaacagca

SEQ ID NO: 288291 - RNA, 13 nt, Human adenovirus D
cuacaaugcaaac

SEQ ID NO: 288292 - RNA, 16 nt, Human adenovirus D
cuacacggucacuguc

SEQ ID NO: 288293 - RNA, 18 nt, Human adenovirus D
cuacauggacaagauauc

SEQ ID NO: 288294 - RNA, 16 nt, Human adenovirus D
cuacauggugggcuaa

SEQ ID NO: 288295 - RNA, 15 nt, Human adenovirus D
cuaccaaggauaaca

SEQ ID NO: 288296 - RNA, 16 nt, Human adenovirus D
cuaccaaggauaacau

SEQ ID NO: 288297 - RNA, 15 nt, Human adenovirus D
cuaccacgcuuuauc

SEQ ID NO: 288298 - RNA, 20 nt, Human adenovirus D
cuacgagcucguguccaacg

SEQ ID NO: 288299 - RNA, 16 nt, Human adenovirus D
cuacgggcucaugcaa

SEQ ID NO: 288300 - RNA, 22 nt, Human adenovirus D
cuacucgcgcugguguaaaaau

SEQ ID NO: 288301 - RNA, 11 nt, Human adenovirus D
cuagugacuua

SEQ ID NO: 288302 - RNA, 14 nt, Human adenovirus D
cuauaaagucacag

SEQ ID NO: 288303 - RNA, 21 nt, Human adenovirus D
cuauaauaagcagaguacuca

SEQ ID NO: 288304 - RNA, 21 nt, Human adenovirus D
cuauauaaguggcaacaccug

SEQ ID NO: 288305 - RNA, 23 nt, Human adenovirus D
cuaucccaaauuacucgcaaaaa

SEQ ID NO: 288306 - RNA, 14 nt, Human adenovirus D
cucaccaaggccau

SEQ ID NO: 288307 - RNA, 22 nt, Human adenovirus D
cucagauauuccagaucacaug

SEQ ID NO: 288308 - RNA, 20 nt, Human adenovirus D
cucauaaagaagacuauaaa

SEQ ID NO: 288309 - RNA, 12 nt, Human adenovirus D
cucauacugcua

SEQ ID NO: 288310 - RNA, 14 nt, Human adenovirus D
cucaucucuacuaa

SEQ ID NO: 288311 - RNA, 22 nt, Human adenovirus D
cucaucucuacuaaccaugcuu

SEQ ID NO: 288312 - RNA, 15 nt, Human adenovirus D
cuccacaccuugaaa

SEQ ID NO: 288313 - RNA, 23 nt, Human adenovirus D
auggggcgccgcccgagcucugc

SEQ ID NO: 288314 - RNA, 23 nt, Human adenovirus D
augggucggucgggccagugcac

SEQ ID NO: 288315 - RNA, 16 nt, Human adenovirus D
augggucugugccucu

SEQ ID NO: 288316 - RNA, 15 nt, Human adenovirus D
augguagcaauggaa

SEQ ID NO: 288317 - RNA, 18 nt, Human adenovirus D
augugcugcuggcuuuac

SEQ ID NO: 288318 - RNA, 21 nt, Human adenovirus D
auguggcuagacuucauggcu

SEQ ID NO: 288319 - RNA, 22 nt, Human adenovirus D
auguggcuagacuucauggcuu

SEQ ID NO: 288320 - RNA, 12 nt, Human adenovirus D
augugugauauc

SEQ ID NO: 288321 - RNA, 16 nt, Human adenovirus D
auguuacugcauacaa

SEQ ID NO: 288322 - RNA, 11 nt, Human adenovirus D
auguucuugca

SEQ ID NO: 288323 - RNA, 18 nt, Human adenovirus D
auuaaaugauuaguucca

SEQ ID NO: 288324 - RNA, 12 nt, Human adenovirus D
auuaaccuauaa

SEQ ID NO: 288325 - RNA, 20 nt, Human adenovirus D
auuaagaaguaugccaagau

SEQ ID NO: 288326 - RNA, 20 nt, Human adenovirus D
auuacuucuggcacauacaa

SEQ ID NO: 288327 - RNA, 14 nt, Human adenovirus D
auuaugagcaucaa

SEQ ID NO: 288328 - RNA, 20 nt, Human adenovirus D
auucaaaaaccguaccaugg

SEQ ID NO: 288329 - RNA, 13 nt, Human adenovirus D
auucaaaaacuuc

SEQ ID NO: 288330 - RNA, 15 nt, Human adenovirus D
auucauacucggaaa

SEQ ID NO: 288331 - RNA, 22 nt, Human adenovirus D
auucaugugaacaaaacccaug

SEQ ID NO: 288332 - RNA, 16 nt, Human adenovirus D
auuccucgaccaugac

SEQ ID NO: 288333 - RNA, 17 nt, Human adenovirus D
auuccucgaccaugacc

SEQ ID NO: 288334 - RNA, 21 nt, Human adenovirus D
auuccugguccacaauuuuca

SEQ ID NO: 288335 - RNA, 22 nt, Human adenovirus D
auugaaucuuguuguuuugaac

SEQ ID NO: 288336 - RNA, 12 nt, Human adenovirus D
auugaaugggac

SEQ ID NO: 288337 - RNA, 17 nt, Human adenovirus D
auugauacccuggacaa

SEQ ID NO: 288338 - RNA, 16 nt, Human adenovirus D
auugguugaacccaga

SEQ ID NO: 288339 - RNA, 12 nt, Human adenovirus D
auugugaucaug

SEQ ID NO: 288340 - RNA, 16 nt, Human adenovirus D
auuuacgggugcaugu

SEQ ID NO: 288341 - RNA, 12 nt, Human adenovirus D
auuucacagugu

SEQ ID NO: 288342 - RNA, 17 nt, Human adenovirus D
auuucaucagaugcaga

SEQ ID NO: 288343 - RNA, 17 nt, Human adenovirus D
auuucugcuggcagaag

SEQ ID NO: 288344 - RNA, 19 nt, Human adenovirus D
auuucugcuggcagaagua

SEQ ID NO: 288345 - RNA, 15 nt, Human adenovirus D
auuuuacaugcacug

SEQ ID NO: 288346 - RNA, 15 nt, Human adenovirus D
auuuuuacaccagcg

SEQ ID NO: 288347 - RNA, 22 nt, Human adenovirus D
auuuuugaagucaugugugaua

SEQ ID NO: 288348 - RNA, 23 nt, Human adenovirus D
auuuuugaagucaugugugauau

SEQ ID NO: 288349 - RNA, 14 nt, Human adenovirus D
caaaaauuaucuuu

SEQ ID NO: 288350 - RNA, 15 nt, Human adenovirus D
caaaaccacauuuga

SEQ ID NO: 288351 - RNA, 14 nt, Human adenovirus D
caaaacccaugaaa

SEQ ID NO: 288352 - RNA, 19 nt, Human adenovirus D
caaaacccaugaaagaaca

SEQ ID NO: 288353 - RNA, 22 nt, Human adenovirus D
caaaacuuaacucugauucaug

SEQ ID NO: 288354 - RNA, 22 nt, Human adenovirus D
caaacagcaucgccucaccuau

SEQ ID NO: 288355 - RNA, 13 nt, Human adenovirus D
caaacuacaugga

SEQ ID NO: 288356 - RNA, 20 nt, Human adenovirus D
caaauuccucgaccaugacc

SEQ ID NO: 288357 - RNA, 18 nt, Human adenovirus D
caacaaaaccacauuuga

SEQ ID NO: 288358 - RNA, 23 nt, Human adenovirus D
caacauccaccagugcaagaagg

SEQ ID NO: 288359 - RNA, 15 nt, Human adenovirus D
caacaucugugcugc

SEQ ID NO: 288360 - RNA, 13 nt, Human adenovirus D
caaccagagccag

SEQ ID NO: 288361 - RNA, 14 nt, Human adenovirus D
caaccagagccaga

SEQ ID NO: 288362 - RNA, 18 nt, Human adenovirus D
caacccuggcauauucuu

SEQ ID NO: 288363 - RNA, 23 nt, Human adenovirus D
caacccuggcauauucuuuauuc

SEQ ID NO: 288364 - RNA, 23 nt, Human adenovirus D
caacugcgcguccgucagcagca

SEQ ID NO: 288365 - RNA, 13 nt, Human adenovirus D
caagccccugaaa

SEQ ID NO: 288366 - RNA, 17 nt, Human adenovirus D
caaggugcugacaucca

SEQ ID NO: 288367 - RNA, 13 nt, Human adenovirus D
caaggugugguuu

SEQ ID NO: 288368 - RNA, 19 nt, Human adenovirus D
caaguacauagugaccaag

SEQ ID NO: 288369 - RNA, 21 nt, Human adenovirus D
caaguaccaucugcaucucaa

SEQ ID NO: 288370 - RNA, 20 nt, Human adenovirus D
caauaauggaagcauuacua

SEQ ID NO: 288371 - RNA, 21 nt, Human adenovirus D
caauaauggaagcauuacuau

SEQ ID NO: 288372 - RNA, 19 nt, Human adenovirus D
caaugagaggagugugaua

SEQ ID NO: 288373 - RNA, 20 nt, Human adenovirus D
caaugagaggagugugauau

SEQ ID NO: 288374 - RNA, 23 nt, Human adenovirus D
caaugagaggagugugauaugca

SEQ ID NO: 288375 - RNA, 23 nt, Human adenovirus D
caauuuugugauggaaguacagu

SEQ ID NO: 288376 - RNA, 18 nt, Human adenovirus D
cacaaacgugcaguccaa

SEQ ID NO: 288377 - RNA, 16 nt, Human adenovirus D
cacaaacuacauggac

SEQ ID NO: 288378 - RNA, 19 nt, Human adenovirus D
cacacuuaguucagcugca

SEQ ID NO: 288379 - RNA, 22 nt, Human adenovirus D
cacacuuuugguuucaaauuca

SEQ ID NO: 288380 - RNA, 23 nt, Human adenovirus D
cacacuuuugguuucaaauucau

SEQ ID NO: 288381 - RNA, 12 nt, Human adenovirus D
cacaguccaggu

SEQ ID NO: 288382 - RNA, 14 nt, Human adenovirus D
cacaguuauaccac

SEQ ID NO: 288383 - RNA, 19 nt, Human adenovirus D
cacaugguaugauagcacu

SEQ ID NO: 288384 - RNA, 19 nt, Human adenovirus D
caccaccagcccauuucac

SEQ ID NO: 288385 - RNA, 21 nt, Human adenovirus D
caccagcccauuucacagugu

SEQ ID NO: 288386 - RNA, 15 nt, Human adenovirus D
caccaugcaggugaa

SEQ ID NO: 288387 - RNA, 17 nt, Human adenovirus D
caccgacacguacuuca

SEQ ID NO: 288388 - RNA, 21 nt, Human adenovirus D
caccuccuccuguuacuguaa

SEQ ID NO: 288389 - RNA, 19 nt, Human adenovirus D
caccuugaaagggauguca

SEQ ID NO: 288390 - RNA, 21 nt, Human adenovirus D
caccuugaaagggaugucaaa

SEQ ID NO: 288391 - RNA, 22 nt, Human adenovirus D
caccuugaaagggaugucaaau

SEQ ID NO: 288392 - RNA, 16 nt, Human adenovirus D
cacgauguaacaucac

SEQ ID NO: 288393 - RNA, 21 nt, Human adenovirus D
cacgccucgcccgacugucua

SEQ ID NO: 288394 - RNA, 19 nt, Human adenovirus D
cacgggguugcagcacugg

SEQ ID NO: 288395 - RNA, 20 nt, Human adenovirus D
cacuaucugcuucuucauua

SEQ ID NO: 288396 - RNA, 14 nt, Human adenovirus D
cacucucauuucag

SEQ ID NO: 288397 - RNA, 18 nt, Human adenovirus D
cacugccaacauuacuuc

SEQ ID NO: 288398 - RNA, 21 nt, Human adenovirus D
cacuguccaugguagcaaugg

SEQ ID NO: 288399 - RNA, 16 nt, Human adenovirus D
cacuguucauccccug

SEQ ID NO: 288400 - RNA, 23 nt, Human adenovirus D
cacuuuuauuuuacaugcacugg

SEQ ID NO: 288401 - RNA, 15 nt, Human adenovirus D
cagaacauuuccuua

SEQ ID NO: 288402 - RNA, 13 nt, Human adenovirus D
cagaaccaugaau

SEQ ID NO: 288403 - RNA, 15 nt, Human adenovirus D
cagaacuuccagcag

SEQ ID NO: 288404 - RNA, 19 nt, Human adenovirus D
cagaagaagaccacccgug

SEQ ID NO: 288405 - RNA, 13 nt, Human adenovirus D
cagaagguggugg

SEQ ID NO: 288406 - RNA, 18 nt, Human adenovirus D
cagaaguacgacaaggua

SEQ ID NO: 288407 - RNA, 22 nt, Human adenovirus D
cagacauaguuguaaugaucaa

SEQ ID NO: 288408 - RNA, 11 nt, Human adenovirus D
cagacaucaug

SEQ ID NO: 288409 - RNA, 21 nt, Human adenovirus D
cagacaugcugcuacaucucg

SEQ ID NO: 288410 - RNA, 12 nt, Human adenovirus D
cagacccagugg

SEQ ID NO: 288411 - RNA, 20 nt, Human adenovirus D
cagacucugcucauacugcu

SEQ ID NO: 288412 - RNA, 21 nt, Human adenovirus D
cagacucugcucauacugcua

SEQ ID NO: 288413 - RNA, 17 nt, Human adenovirus D
cagacugggguacuuua

SEQ ID NO: 288414 - RNA, 13 nt, Human adenovirus D
cagaggaugguca

SEQ ID NO: 288415 - RNA, 12 nt, Human adenovirus D
cagauauuccag

SEQ ID NO: 288416 - RNA, 17 nt, Human adenovirus D
cuguaaagccacaacca

SEQ ID NO: 288417 - RNA, 19 nt, Human adenovirus D
cugugccucuccaucagcg

SEQ ID NO: 288418 - RNA, 18 nt, Human adenovirus D
cuguucauccccuggcuc

SEQ ID NO: 288419 - RNA, 20 nt, Human adenovirus D
cuguugcccgauugugauca

SEQ ID NO: 288420 - RNA, 23 nt, Human adenovirus D
cuguuuuucagacucucaucucu

SEQ ID NO: 288421 - RNA, 15 nt, Human adenovirus D
cuuaacucugauuca

SEQ ID NO: 288422 - RNA, 13 nt, Human adenovirus D
cuuaagugacuuu

SEQ ID NO: 288423 - RNA, 18 nt, Human adenovirus D
cuuagcccuggcucugaa

SEQ ID NO: 288424 - RNA, 16 nt, Human adenovirus D
cuuaguucagcugcaa

SEQ ID NO: 288425 - RNA, 16 nt, Human adenovirus D
cuuauuccagcaugca

SEQ ID NO: 288426 - RNA, 16 nt, Human adenovirus D
cuuauuuacaggacuu

SEQ ID NO: 288427 - RNA, 12 nt, Human adenovirus D
cuucaacagcug

SEQ ID NO: 288428 - RNA, 19 nt, Human adenovirus D
cuucaacaucugugcugcc

SEQ ID NO: 288429 - RNA, 22 nt, Human adenovirus D
cuucaaccccgucuaccccuau

SEQ ID NO: 288430 - RNA, 21 nt, Human adenovirus D
cuucaauaauggaagcauuac

SEQ ID NO: 288431 - RNA, 14 nt, Human adenovirus D
cuucaguuggauga

SEQ ID NO: 288432 - RNA, 15 nt, Human adenovirus D
cuucaguuggaugac

SEQ ID NO: 288433 - RNA, 15 nt, Human adenovirus D
cuuccucacuccccc

SEQ ID NO: 288434 - RNA, 12 nt, Human adenovirus D
cuucucaagacc

SEQ ID NO: 288435 - RNA, 20 nt, Human adenovirus D
cuucugccuggucaaacagg

SEQ ID NO: 288436 - RNA, 17 nt, Human adenovirus D
cuugaaacgucccagga

SEQ ID NO: 288437 - RNA, 18 nt, Human adenovirus D
cuugaacuaccaccugca

SEQ ID NO: 288438 - RNA, 12 nt, Human adenovirus D
cuuguaugugcc

SEQ ID NO: 288439 - RNA, 14 nt, Human adenovirus D
cuuuagacaacagc

SEQ ID NO: 288440 - RNA, 12 nt, Human adenovirus D
cuuuaucacuca

SEQ ID NO: 288441 - RNA, 21 nt, Human adenovirus D
cuuucuugccggcgacaagcu

SEQ ID NO: 288442 - RNA, 21 nt, Human adenovirus D
cuuuuagucaggcaggauuca

SEQ ID NO: 288443 - RNA, 22 nt, Human adenovirus D
cuuuuauuuuacaugcacugga

SEQ ID NO: 288444 - RNA, 23 nt, Human adenovirus D
cuuuuauuuuacaugcacuggag

SEQ ID NO: 288445 - RNA, 18 nt, Human adenovirus D
gaaaaaacuaccacgcuu

SEQ ID NO: 288446 - RNA, 15 nt, Human adenovirus D
gaaaccugcucuccu

SEQ ID NO: 288447 - RNA, 17 nt, Human adenovirus D
gaaacgucccagcagca

SEQ ID NO: 288448 - RNA, 19 nt, Human adenovirus D
gaaauaaaaaacacguuua

SEQ ID NO: 288449 - RNA, 19 nt, Human adenovirus D
gaaaugaagccguccucug

SEQ ID NO: 288450 - RNA, 17 nt, Human adenovirus D
gaaaugggcugguggug

SEQ ID NO: 288451 - RNA, 16 nt, Human adenovirus D
gaacaaaacccaugaa

SEQ ID NO: 288452 - RNA, 17 nt, Human adenovirus D
gaacaaaacccaugaaa

SEQ ID NO: 288453 - RNA, 20 nt, Human adenovirus D
gaacaccaucagacuggggu

SEQ ID NO: 288454 - RNA, 14 nt, Human adenovirus D
gaacauacaugggc

SEQ ID NO: 288455 - RNA, 21 nt, Human adenovirus D
gaacccugcccccggaccugg

SEQ ID NO: 288456 - RNA, 22 nt, Human adenovirus D
gaacgagaagaacgcacagauu

SEQ ID NO: 288457 - RNA, 14 nt, Human adenovirus D
gaacgagaucggca

SEQ ID NO: 288458 - RNA, 13 nt, Human adenovirus D
gaacgcacagauu

SEQ ID NO: 288459 - RNA, 16 nt, Human adenovirus D
gaacuuucuccacacc

SEQ ID NO: 288460 - RNA, 23 nt, Human adenovirus D
gaagacuauaaagucacaguuau

SEQ ID NO: 288461 - RNA, 23 nt, Human adenovirus D
gaagccguccucugaaaagucau

SEQ ID NO: 288462 - RNA, 12 nt, Human adenovirus D
gaaguaugccaa

SEQ ID NO: 288463 - RNA, 19 nt, Human adenovirus D
gaagucaugugugauauca

SEQ ID NO: 288464 - RNA, 21 nt, Human adenovirus D
gaagucaugugugauaucaca

SEQ ID NO: 288465 - RNA, 19 nt, Human adenovirus D
gaagugguuucaaauucaa

SEQ ID NO: 288466 - RNA, 16 nt, Human adenovirus D
gaauauccccuuccuc

SEQ ID NO: 288467 - RNA, 13 nt, Human adenovirus D
gaauggaagacau

SEQ ID NO: 288468 - RNA, 19 nt, Human adenovirus D
gaauuucuuagacugcuau

SEQ ID NO: 288469 - RNA, 20 nt, Human adenovirus D
gaauuucuuagacugcuauc

SEQ ID NO: 288470 - RNA, 19 nt, Human adenovirus D
gacacaaagagagcuuauu

SEQ ID NO: 288471 - RNA, 17 nt, Human adenovirus D
gacacaccugguccugu

SEQ ID NO: 288472 - RNA, 18 nt, Human adenovirus D
gacaccauggacagcucc

SEQ ID NO: 288473 - RNA, 19 nt, Human adenovirus D
gacacggccaccaacucac

SEQ ID NO: 288474 - RNA, 20 nt, Human adenovirus D
gacauaguuguaaugaucaa

SEQ ID NO: 288475 - RNA, 15 nt, Human adenovirus D
gacauccauggccag

SEQ ID NO: 288476 - RNA, 17 nt, Human adenovirus D
gaccaagaccgugaaua

SEQ ID NO: 288477 - RNA, 15 nt, Human adenovirus D
gaccacgguggugca

SEQ ID NO: 288478 - RNA, 15 nt, Human adenovirus D
gaccaugcagacucu

SEQ ID NO: 288479 - RNA, 23 nt, Human adenovirus D
gaccucagauauuccagaucaca

SEQ ID NO: 288480 - RNA, 21 nt, Human adenovirus D
gacgcccaccaugcaggugaa

SEQ ID NO: 288481 - RNA, 21 nt, Human adenovirus D
gacgcgguguaagcuaccaca

SEQ ID NO: 288482 - RNA, 16 nt, Human adenovirus D
gacggccuggccucgg

SEQ ID NO: 288483 - RNA, 12 nt, Human adenovirus D
gacucugcucau

SEQ ID NO: 288484 - RNA, 12 nt, Human adenovirus D
gacugaucaaca

SEQ ID NO: 288485 - RNA, 22 nt, Human adenovirus D
gcauacaaaugcuucaauaaug

SEQ ID NO: 288486 - RNA, 16 nt, Human adenovirus D
gcaucuucugccuggu

SEQ ID NO: 288487 - RNA, 13 nt, Human adenovirus D
gcauguucuugca

SEQ ID NO: 288488 - RNA, 19 nt, Human adenovirus D
gcauuacuauuacugccac

SEQ ID NO: 288489 - RNA, 14 nt, Human adenovirus D
gccaacauuacuuc

SEQ ID NO: 288490 - RNA, 12 nt, Human adenovirus D
gccacuguucau

SEQ ID NO: 288491 - RNA, 18 nt, Human adenovirus D
gccagacgcaagagccgg

SEQ ID NO: 288492 - RNA, 14 nt, Human adenovirus D
gccagcugaacggg

SEQ ID NO: 288493 - RNA, 14 nt, Human adenovirus D
gccaggggagugaa

SEQ ID NO: 288494 - RNA, 16 nt, Human adenovirus D
gccagucugaugaauc

SEQ ID NO: 288495 - RNA, 15 nt, Human adenovirus D
gccaucaacauccac

SEQ ID NO: 288496 - RNA, 18 nt, Human adenovirus D
gccauugucaacacggcc

SEQ ID NO: 288497 - RNA, 18 nt, Human adenovirus D
gcccagcaauaacaccgg

SEQ ID NO: 288498 - RNA, 19 nt, Human adenovirus D
gcccaggacuuaagugacu

SEQ ID NO: 288499 - RNA, 20 nt, Human adenovirus D
gcccaggacuuaagugacuu

SEQ ID NO: 288500 - RNA, 14 nt, Human adenovirus D
gccccagcagaagc

SEQ ID NO: 288501 - RNA, 14 nt, Human adenovirus D
gccccgcaggugga

SEQ ID NO: 288502 - RNA, 22 nt, Human adenovirus D
gcccgacugcugggugaugacu

SEQ ID NO: 288503 - RNA, 20 nt, Human adenovirus D
gcccgauugugaucaugcag

SEQ ID NO: 288504 - RNA, 16 nt, Human adenovirus D
gcccucgcuacugcug

SEQ ID NO: 288505 - RNA, 17 nt, Human adenovirus D
gcccucgcuacugcuga

SEQ ID NO: 288506 - RNA, 17 nt, Human adenovirus D
gcccucucaacaucaca

SEQ ID NO: 288507 - RNA, 11 nt, Human adenovirus D
gcccugcucac

SEQ ID NO: 288508 - RNA, 18 nt, Human adenovirus D
gccgcagccgccaugaca

SEQ ID NO: 288509 - RNA, 13 nt, Human adenovirus D
gccgcuacaacag

SEQ ID NO: 288510 - RNA, 15 nt, Human adenovirus D
gccgcuacaacagca

SEQ ID NO: 288511 - RNA, 17 nt, Human adenovirus D
gccucgagcuacaugcc

SEQ ID NO: 288512 - RNA, 19 nt, Human adenovirus D
gccucuccguccucgagga

SEQ ID NO: 288513 - RNA, 20 nt, Human adenovirus D
gccuggaauaguagcacggg

SEQ ID NO: 288514 - RNA, 13 nt, Human adenovirus D
gccugugcaaugu

SEQ ID NO: 288515 - RNA, 21 nt, Human adenovirus D
gcgaacaugaaaaccaccagc

SEQ ID NO: 288516 - RNA, 20 nt, Human adenovirus D
gcgaccuccuccccaugaac

SEQ ID NO: 288517 - RNA, 15 nt, Human adenovirus D
gcgaugggggcaaua

SEQ ID NO: 288518 - RNA, 22 nt, Human adenovirus D
gcgauucccgggcuuucuugcc

SEQ ID NO: 288519 - RNA, 23 nt, Human adenovirus D
gcgauucccgggcuuucuugccg

SEQ ID NO: 288520 - RNA, 19 nt, Human adenovirus D
gcgcauccugcaacugcgc

SEQ ID NO: 288521 - RNA, 13 nt, Human adenovirus D
gcgcgggcggacu

SEQ ID NO: 288522 - RNA, 13 nt, Human adenovirus D
gcggccacuuccg

SEQ ID NO: 288523 - RNA, 17 nt, Human adenovirus D
gcggcgauaugccagac

SEQ ID NO: 288524 - RNA, 23 nt, Human adenovirus D
gcggcgauaugccagacgcaaga

SEQ ID NO: 288525 - RNA, 18 nt, Human adenovirus D
gcggcgcugcaaagccag

SEQ ID NO: 288526 - RNA, 20 nt, Human adenovirus D
gcguaggccgcuacaacagc

SEQ ID NO: 288527 - RNA, 21 nt, Human adenovirus D
gcguaggccgcuacaacagca

SEQ ID NO: 288528 - RNA, 18 nt, Human adenovirus D
gcgucugcagcauugucu

SEQ ID NO: 288529 - RNA, 12 nt, Human adenovirus D
gcuacaacagca

SEQ ID NO: 288530 - RNA, 14 nt, Human adenovirus D
gcuacaauuacuuc

SEQ ID NO: 288531 - RNA, 13 nt, Human adenovirus D
gcuacccuggacu

SEQ ID NO: 288532 - RNA, 14 nt, Human adenovirus D
gcuaucgcucuuau

SEQ ID NO: 288533 - RNA, 23 nt, Human adenovirus D
gcuaucgcucuuaucccaugccc

SEQ ID NO: 288534 - RNA, 21 nt, Human adenovirus D
gcucaccugcaccugcgucug

SEQ ID NO: 288535 - RNA, 13 nt, Human adenovirus D
gcucauacugcua

SEQ ID NO: 288536 - RNA, 23 nt, Human adenovirus D
gcucauacugcuaucgcucuuau

SEQ ID NO: 288537 - RNA, 20 nt, Human adenovirus D
gcucccgcgcgggcucguca

SEQ ID NO: 288538 - RNA, 17 nt, Human adenovirus D
gcucgcguccaucgugc

SEQ ID NO: 288539 - RNA, 23 nt, Human adenovirus D
gcucggugcggcugcugcaaaug

SEQ ID NO: 288540 - RNA, 18 nt, Human adenovirus D
gcugacggccagucugau

SEQ ID NO: 288541 - RNA, 16 nt, Human adenovirus D
gcugcauccacugcuc

SEQ ID NO: 288542 - RNA, 15 nt, Human adenovirus D
gcuggcggagaacaa

SEQ ID NO: 288543 - RNA, 19 nt, Human adenovirus D
gcugggcggggaccgccuc

SEQ ID NO: 288544 - RNA, 12 nt, Human adenovirus D
gcugggugauga

SEQ ID NO: 288545 - RNA, 21 nt, Human adenovirus D
gcuggugacggacgugcgcga

SEQ ID NO: 288546 - RNA, 20 nt, Human adenovirus D
gcuuauuccagcaugcaguu

SEQ ID NO: 288547 - RNA, 21 nt, Human adenovirus D
gcuucaauaauggaagcauua

SEQ ID NO: 288548 - RNA, 15 nt, Human adenovirus D
gcuucacugacugau

SEQ ID NO: 288549 - RNA, 20 nt, Human adenovirus D
gcuugccagucccacgcuua

SEQ ID NO: 288550 - RNA, 13 nt, Human adenovirus D
gcuuuaucacuca

SEQ ID NO: 288551 - RNA, 12 nt, Human adenovirus D
ggaaacugugug

SEQ ID NO: 288552 - RNA, 13 nt, Human adenovirus D
guaaaaaucaaua

SEQ ID NO: 288553 - RNA, 17 nt, Human adenovirus D
guaaaauuacauugaau

SEQ ID NO: 288554 - RNA, 22 nt, Human adenovirus D
guacaaggcgcgcuucacucug

SEQ ID NO: 288555 - RNA, 15 nt, Human adenovirus D
guacacgguucucuc

SEQ ID NO: 288556 - RNA, 17 nt, Human adenovirus D
guacauagugaccaaga

SEQ ID NO: 288557 - RNA, 14 nt, Human adenovirus D
guacuccagucucc

SEQ ID NO: 288558 - RNA, 21 nt, Human adenovirus D
guacuugggcugccacuugaa

SEQ ID NO: 288559 - RNA, 22 nt, Human adenovirus D
guagaaaucaaguaccaucugc

SEQ ID NO: 288560 - RNA, 18 nt, Human adenovirus D
guagccccucugugccca

SEQ ID NO: 288561 - RNA, 23 nt, Human adenovirus D
guaggccgcuacaacagcacaaa

SEQ ID NO: 288562 - RNA, 13 nt, Human adenovirus D
guaggugaucuuu

SEQ ID NO: 288563 - RNA, 12 nt, Human adenovirus D
guauaugcuguu

SEQ ID NO: 288564 - RNA, 21 nt, Human adenovirus D
guauuacuaggcccagcagca

SEQ ID NO: 288565 - RNA, 15 nt, Human adenovirus D
gucaaaagcgguggc

SEQ ID NO: 288566 - RNA, 21 nt, Human adenovirus D
gucaaccccauagucaucacc

SEQ ID NO: 288567 - RNA, 21 nt, Human adenovirus D
gucaaucucccaccaccagcc

SEQ ID NO: 288568 - RNA, 18 nt, Human adenovirus D
gucagcagcaggagcgug

SEQ ID NO: 288569 - RNA, 14 nt, Human adenovirus D
gucaucacccucag

SEQ ID NO: 288570 - RNA, 13 nt, Human adenovirus D
gucaugugugaua

SEQ ID NO: 288571 - RNA, 15 nt, Human adenovirus D
gucaugugugauauc

SEQ ID NO: 288572 - RNA, 17 nt, Human adenovirus D
gucaugugugauaucac

SEQ ID NO: 288573 - RNA, 16 nt, Human adenovirus D
guccaugguagcaaug

SEQ ID NO: 288574 - RNA, 20 nt, Human adenovirus D
guccucugaaaagucaucca

SEQ ID NO: 288575 - RNA, 17 nt, Human adenovirus D
guccuuuagacaacagc

SEQ ID NO: 288576 - RNA, 19 nt, Human adenovirus D
gucgggcgaagaggccacg

SEQ ID NO: 288577 - RNA, 16 nt, Human adenovirus D
gucuauaauccacaca

SEQ ID NO: 288578 - RNA, 15 nt, Human adenovirus D
gugaacaaaacccau

SEQ ID NO: 288579 - RNA, 23 nt, Human adenovirus D
gugaacgcgcuggcggagaacaa

SEQ ID NO: 288580 - RNA, 18 nt, Human adenovirus D
gugacgcaugcaaggugu

SEQ ID NO: 288581 - RNA, 15 nt, Human adenovirus D
gugaggcgaugcugu

SEQ ID NO: 288582 - RNA, 17 nt, Human adenovirus D
gugaucugaagaccauu

SEQ ID NO: 288583 - RNA, 19 nt, Human adenovirus D
gugaugcuucaacagcugu

SEQ ID NO: 288584 - RNA, 15 nt, Human adenovirus D
gugcaguccaaccug

SEQ ID NO: 288585 - RNA, 21 nt, Human adenovirus D
guggacaacaagucggcggac

SEQ ID NO: 288586 - RNA, 19 nt, Human adenovirus D
guggacaucgcgaaccagg

SEQ ID NO: 288587 - RNA, 15 nt, Human adenovirus D
guggcuagacuucau

SEQ ID NO: 288588 - RNA, 15 nt, Human adenovirus D
gugguuucaaauuca

SEQ ID NO: 288589 - RNA, 20 nt, Human adenovirus D
guguaaauaaaguuguacaa

SEQ ID NO: 288590 - RNA, 14 nt, Human adenovirus D
guguacacugugaa

SEQ ID NO: 288591 - RNA, 16 nt, Human adenovirus D
guguacugucaugcca

SEQ ID NO: 288592 - RNA, 21 nt, Human adenovirus D
gugucccccugaucugucagg

SEQ ID NO: 288593 - RNA, 12 nt, Human adenovirus D
gugugauaugca

SEQ ID NO: 288594 - RNA, 24 nt, Human adenovirus D
gugugguucaggagagucauuuac

SEQ ID NO: 288595 - RNA, 17 nt, Human adenovirus D
guuacuguaaagccaca

SEQ ID NO: 288596 - RNA, 15 nt, Human adenovirus D
guucagcagcaccuc

SEQ ID NO: 288597 - RNA, 23 nt, Human adenovirus D
guucucucagcacgguggccuua

SEQ ID NO: 288598 - RNA, 15 nt, Human adenovirus D
guucugauuagcaua

SEQ ID NO: 288599 - RNA, 13 nt, Human adenovirus D
guugaacccagau

SEQ ID NO: 288600 - RNA, 15 nt, Human adenovirus D
guugcagcacuggaa

SEQ ID NO: 288601 - RNA, 16 nt, Human adenovirus D
guugcauguucuugca

SEQ ID NO: 288602 - RNA, 16 nt, Human adenovirus D
guugcgguacacgggg

SEQ ID NO: 288603 - RNA, 22 nt, Human adenovirus D
guuggucucgcccgacugcugg

SEQ ID NO: 288604 - RNA, 19 nt, Human adenovirus D
guuguuuugaacacgcugc

SEQ ID NO: 288605 - RNA, 21 nt, Human adenovirus D
guuucuagguccggugucaga

SEQ ID NO: 288606 - RNA, 15 nt, Human adenovirus D
guuugggcacugggg

SEQ ID NO: 288607 - RNA, 16 nt, Human adenovirus D
guuugggcacuggggu

SEQ ID NO: 288608 - RNA, 22 nt, Human adenovirus D
guuuuuaaucaacaucaguuca

SEQ ID NO: 288609 - RNA, 23 nt, Human adenovirus D
guuuuuaaucaacaucaguucau

SEQ ID NO: 288610 - RNA, 21 nt, Human adenovirus D
guuuuucagacucucaucucu

SEQ ID NO: 288611 - RNA, 19 nt, Human adenovirus D
uaaaaaauuaaccuauaaa

SEQ ID NO: 288612 - RNA, 12 nt, Human adenovirus D
uaaaaagaugua

SEQ ID NO: 288613 - RNA, 15 nt, Human adenovirus D
uaaaauuacauugaa

SEQ ID NO: 288614 - RNA, 22 nt, Human adenovirus D
uaaaauuacauugaaugggacu

SEQ ID NO: 288615 - RNA, 18 nt, Human adenovirus D
uaaagaucacuuacuuga

SEQ ID NO: 288616 - RNA, 15 nt, Human adenovirus D
ugagaggagugugau

SEQ ID NO: 288617 - RNA, 17 nt, Human adenovirus D
ugagaggagugugauau

SEQ ID NO: 288618 - RNA, 18 nt, Human adenovirus D
ugagaggagugugauaug

SEQ ID NO: 288619 - RNA, 12 nt, Human adenovirus D
ugagcggcagca

SEQ ID NO: 288620 - RNA, 18 nt, Human adenovirus D
ugaguugggccugaugca

SEQ ID NO: 288621 - RNA, 21 nt, Human adenovirus D
ugaguugggccugaugcagga

SEQ ID NO: 288622 - RNA, 18 nt, Human adenovirus D
ugauaucacacugcaugu

SEQ ID NO: 288623 - RNA, 15 nt, Human adenovirus D
ugaucugaagaccau

SEQ ID NO: 288624 - RNA, 20 nt, Human adenovirus D
ugauuaauguuaaugucacu

SEQ ID NO: 288625 - RNA, 21 nt, Human adenovirus D
ugauuagcauagucacacuua

SEQ ID NO: 288626 - RNA, 18 nt, Human adenovirus D
ugauucaugugaacaaaa

SEQ ID NO: 288627 - RNA, 17 nt, Human adenovirus D
ugauuuuuacaccagcg

SEQ ID NO: 288628 - RNA, 17 nt, Human adenovirus D
ugcaagagcuccucucg

SEQ ID NO: 288629 - RNA, 14 nt, Human adenovirus D
ugcaaugucagguc

SEQ ID NO: 288630 - RNA, 16 nt, Human adenovirus D
ugcacugguggauguu

SEQ ID NO: 288631 - RNA, 16 nt, Human adenovirus D
ugcagacucugcucau

SEQ ID NO: 288632 - RNA, 21 nt, Human adenovirus D
ugcauauacuccagugcaugu

SEQ ID NO: 288633 - RNA, 18 nt, Human adenovirus D
ugccacugccaacauuac

SEQ ID NO: 288634 - RNA, 14 nt, Human adenovirus D
ugcccgauugugau

SEQ ID NO: 288635 - RNA, 17 nt, Human adenovirus D
ugcccugcucaccugca

SEQ ID NO: 288636 - RNA, 23 nt, Human adenovirus D
ugccgcagugggcguacaugcac

SEQ ID NO: 288637 - RNA, 15 nt, Human adenovirus D
ugccucuccaucagc

SEQ ID NO: 288638 - RNA, 18 nt, Human adenovirus D
ugccuguuugaccaggca

SEQ ID NO: 288639 - RNA, 13 nt, Human adenovirus D
ugcgggaacugga

SEQ ID NO: 288640 - RNA, 23 nt, Human adenovirus D
ugcugacauccauggccagggga

SEQ ID NO: 288641 - RNA, 18 nt, Human adenovirus D
ugcugcuacaucucgggg

SEQ ID NO: 288642 - RNA, 16 nt, Human adenovirus D
ugcuucaacagcugug

SEQ ID NO: 288643 - RNA, 12 nt, Human adenovirus D
ugcuucaauaau

SEQ ID NO: 288644 - RNA, 22 nt, Human adenovirus D
ugcuucugcuggggcaucucau

SEQ ID NO: 288645 - RNA, 23 nt, Human adenovirus D
ugcuuuucugcagacaucaugaa

SEQ ID NO: 288646 - RNA, 14 nt, Human adenovirus D
uggaagcauuacua

SEQ ID NO: 288647 - RNA, 12 nt, Human adenovirus D
uggaaguacagu

SEQ ID NO: 288648 - RNA, 20 nt, Human adenovirus D
uggaauguuacugcauacaa

SEQ ID NO: 288649 - RNA, 21 nt, Human adenovirus D
uggaauguuacugcauacaaa

SEQ ID NO: 288650 - RNA, 14 nt, Human adenovirus D
uggacagcucccaa

SEQ ID NO: 288651 - RNA, 13 nt, Human adenovirus D
uggaccugagcuu

SEQ ID NO: 288652 - RNA, 17 nt, Human adenovirus D
uggacgggcgcccagug

SEQ ID NO: 288653 - RNA, 22 nt, Human adenovirus D
uggacuugguaagagcucagau

SEQ ID NO: 288654 - RNA, 14 nt, Human adenovirus D
uggauccugcauug

SEQ ID NO: 288655 - RNA, 12 nt, Human adenovirus D
uggauugcaauu

SEQ ID NO: 288656 - RNA, 15 nt, Human adenovirus D
uggcacauacaaagc

SEQ ID NO: 288657 - RNA, 18 nt, Human adenovirus D
uggccagcacguacuuug

SEQ ID NO: 288658 - RNA, 16 nt, Human adenovirus D
uggcccccuaccaagg

SEQ ID NO: 288659 - RNA, 17 nt, Human adenovirus D
uggcccccuaccaagga

SEQ ID NO: 288660 - RNA, 20 nt, Human adenovirus D
uggccucgagcuacaugccc

SEQ ID NO: 288661 - RNA, 17 nt, Human adenovirus D
uggccuggagcagauaa

SEQ ID NO: 288662 - RNA, 15 nt, Human adenovirus D
uggccugugcaaugu

SEQ ID NO: 288663 - RNA, 18 nt, Human adenovirus D
uggcuagacuucauggcu

SEQ ID NO: 288664 - RNA, 16 nt, Human adenovirus D
uggcuuuugugaucau

SEQ ID NO: 288665 - RNA, 14 nt, Human adenovirus D
ugggaggcugcgau

SEQ ID NO: 288666 - RNA, 19 nt, Human adenovirus D
ugggauaggggaaggggcu

SEQ ID NO: 288667 - RNA, 13 nt, Human adenovirus D
ugggcacuggggu

SEQ ID NO: 288668 - RNA, 13 nt, Human adenovirus D
ugggccugaugca

SEQ ID NO: 288669 - RNA, 15 nt, Human adenovirus D
ugggcugccacuuga

SEQ ID NO: 288670 - RNA, 14 nt, Human adenovirus D
ugguaccgccagau

SEQ ID NO: 288671 - RNA, 18 nt, Human adenovirus D
ugguaugauagcacugga

SEQ ID NO: 288672 - RNA, 20 nt, Human adenovirus D
uggugacggacgugcgcgaa

SEQ ID NO: 288673 - RNA, 19 nt, Human adenovirus D
uguaaagccacaaccagag

SEQ ID NO: 288674 - RNA, 13 nt, Human adenovirus D
uauuccagaucac

SEQ ID NO: 288675 - RNA, 15 nt, Human adenovirus D
uauuccagaucacau

SEQ ID NO: 288676 - RNA, 18 nt, Human adenovirus D
uauuccagaucacauggu

SEQ ID NO: 288677 - RNA, 19 nt, Human adenovirus D
uauuccagaucacauggua

SEQ ID NO: 288678 - RNA, 20 nt, Human adenovirus D
uauugauuuuuacaccagcg

SEQ ID NO: 288679 - RNA, 18 nt, Human adenovirus D
uauuuaaggccaccgugc

SEQ ID NO: 288680 - RNA, 16 nt, Human adenovirus D
ucaacaucacauucaa

SEQ ID NO: 288681 - RNA, 22 nt, Human adenovirus D
ucaacauccaccagugcaagaa

SEQ ID NO: 288682 - RNA, 17 nt, Human adenovirus D
ucaacaucugugcugcc

SEQ ID NO: 288683 - RNA, 19 nt, Human adenovirus D
ucaauaaagauacauaaaa

SEQ ID NO: 288684 - RNA, 18 nt, Human adenovirus D
ucaauaauggaagcauua

SEQ ID NO: 288685 - RNA, 20 nt, Human adenovirus D
ucaaucucccaccaccagcc

SEQ ID NO: 288686 - RNA, 14 nt, Human adenovirus D
ucacaugguaugau

SEQ ID NO: 288687 - RNA, 13 nt, Human adenovirus D
ucaccaaggccau

SEQ ID NO: 288688 - RNA, 14 nt, Human adenovirus D
ucaccaaggccaua

SEQ ID NO: 288689 - RNA, 18 nt, Human adenovirus D
ucaccacaggcaaugaga

SEQ ID NO: 288690 - RNA, 16 nt, Human adenovirus D
ucaccgagcucuggga

SEQ ID NO: 288691 - RNA, 13 nt, Human adenovirus D
ucaccugcaccug

SEQ ID NO: 288692 - RNA, 23 nt, Human adenovirus D
ucacuagaggugguaaaauuaca

SEQ ID NO: 288693 - RNA, 16 nt, Human adenovirus D
ucacuguccaugguag

SEQ ID NO: 288694 - RNA, 19 nt, Human adenovirus D
ucacuguccaugguagcaa

SEQ ID NO: 288695 - RNA, 23 nt, Human adenovirus D
ucacuguccaugguagcaaugga

SEQ ID NO: 288696 - RNA, 21 nt, Human adenovirus D
ucacuuacuugaaaucugaaa

SEQ ID NO: 288697 - RNA, 18 nt, Human adenovirus D
ucagacauaguuguaaug

SEQ ID NO: 288698 - RNA, 20 nt, Human adenovirus D
ucagacauaguuguaaugau

SEQ ID NO: 288699 - RNA, 22 nt, Human adenovirus D
ucagacaugcugcuacaucucg

SEQ ID NO: 288700 - RNA, 20 nt, Human adenovirus D
ucagauauuccagaucacau

SEQ ID NO: 288701 - RNA, 13 nt, Human adenovirus D
ucagaugucaaag

SEQ ID NO: 288702 - RNA, 13 nt, Human adenovirus D
ucagcaaguucau

SEQ ID NO: 288703 - RNA, 22 nt, Human adenovirus D
ucagccucuccguccucgagga

SEQ ID NO: 288704 - RNA, 15 nt, Human adenovirus D
ucagcgcccucagca

SEQ ID NO: 288705 - RNA, 21 nt, Human adenovirus D
ucagcgcccucagcagucucu

SEQ ID NO: 288706 - RNA, 15 nt, Human adenovirus D
ucagcugcaaugauu

SEQ ID NO: 288707 - RNA, 13 nt, Human adenovirus D
ucaggaaacugug

SEQ ID NO: 288708 - RNA, 19 nt, Human adenovirus D
ucagucacucucauuucag

SEQ ID NO: 288709 - RNA, 13 nt, Human adenovirus D
ucaguucaugggg

SEQ ID NO: 288710 - RNA, 21 nt, Human adenovirus D
ucauaugaccaugcagacucu

SEQ ID NO: 288711 - RNA, 17 nt, Human adenovirus D
ucaucagaugcagagga

SEQ ID NO: 288712 - RNA, 21 nt, Human adenovirus D
ucaucauagucccgaauacag

SEQ ID NO: 288713 - RNA, 14 nt, Human adenovirus D
ucaucgacuggugc

SEQ ID NO: 288714 - RNA, 17 nt, Human adenovirus D
ucaucgacuggugcugc

SEQ ID NO: 288715 - RNA, 18 nt, Human adenovirus D
ucaucgacuggugcugcg

SEQ ID NO: 288716 - RNA, 15 nt, Human adenovirus D
ucaucucgcccagca

SEQ ID NO: 288717 - RNA, 22 nt, Human adenovirus D
ucaucucuacuaaccaugcuuu

SEQ ID NO: 288718 - RNA, 19 nt, Human adenovirus D
ucauggccugugcaauguc

SEQ ID NO: 288719 - RNA, 17 nt, Human adenovirus D
ucauuggaacuaaucau

SEQ ID NO: 288720 - RNA, 17 nt, Human adenovirus D
uccaagcgggccucaca

SEQ ID NO: 288721 - RNA, 15 nt, Human adenovirus D
uccacaccuugaaag

SEQ ID NO: 288722 - RNA, 11 nt, Human adenovirus D
uccacagauca

SEQ ID NO: 288723 - RNA, 14 nt, Human adenovirus D
uccaccagugcaag

SEQ ID NO: 288724 - RNA, 17 nt, Human adenovirus D
uccaccagugcaagaag

SEQ ID NO: 288725 - RNA, 16 nt, Human adenovirus D
uccagaucacauggua

SEQ ID NO: 288726 - RNA, 18 nt, Human adenovirus D
uccaguucccgcaauaau

SEQ ID NO: 288727 - RNA, 19 nt, Human adenovirus D
ucccaacucugguacucca

SEQ ID NO: 288728 - RNA, 13 nt, Human adenovirus D
ucccaccaccagc

SEQ ID NO: 288729 - RNA, 21 nt, Human adenovirus D
ucccaugcccucgcuacugcu

SEQ ID NO: 288730 - RNA, 20 nt, Human adenovirus D
uccccaugaacugauguuga

SEQ ID NO: 288731 - RNA, 15 nt, Human adenovirus D
uccccugggauauga

SEQ ID NO: 288732 - RNA, 19 nt, Human adenovirus D
uccccugguaccgccagau

SEQ ID NO: 288733 - RNA, 14 nt, Human adenovirus D
uccccuguugcccg

SEQ ID NO: 288734 - RNA, 21 nt, Human adenovirus D
accucagauauuccagaucac

SEQ ID NO: 288735 - RNA, 16 nt, Human adenovirus D
accuccuccccaugaa

SEQ ID NO: 288736 - RNA, 20 nt, Human adenovirus D
accuccuccuguuacuguaa

SEQ ID NO: 288737 - RNA, 12 nt, Human adenovirus D
accuggaucucc

SEQ ID NO: 288738 - RNA, 15 nt, Human adenovirus D
acgaaggcaugcaag

SEQ ID NO: 288739 - RNA, 12 nt, Human adenovirus D
acgaggccaugc

SEQ ID NO: 288740 - RNA, 12 nt, Human adenovirus D
acgaucugauga

SEQ ID NO: 288741 - RNA, 19 nt, Human adenovirus D
acgaucugaugaugaaacc

SEQ ID NO: 288742 - RNA, 20 nt, Human adenovirus D
acgauguaacaucaccacag

SEQ ID NO: 288743 - RNA, 13 nt, Human adenovirus D
acgcaugcaaggu

SEQ ID NO: 288744 - RNA, 19 nt, Human adenovirus D
acgccucgcccgacugucu

SEQ ID NO: 288745 - RNA, 16 nt, Human adenovirus D
acgcuggccagcacgc

SEQ ID NO: 288746 - RNA, 13 nt, Human adenovirus D
acgcuugccaguc

SEQ ID NO: 288747 - RNA, 15 nt, Human adenovirus D
acgcuuuaucacuca

SEQ ID NO: 288748 - RNA, 19 nt, Human adenovirus D
acgggguugcagcacugga

SEQ ID NO: 288749 - RNA, 16 nt, Human adenovirus D
acgguucucucagcac

SEQ ID NO: 288750 - RNA, 21 nt, Human adenovirus D
acuaccacgcuuuaucacuca

SEQ ID NO: 288751 - RNA, 15 nt, Human adenovirus D
acuauaaagucacag

SEQ ID NO: 288752 - RNA, 18 nt, Human adenovirus D
acuaucaaaacgaccaca

SEQ ID NO: 288753 - RNA, 15 nt, Human adenovirus D
acucacauuuuggaa

SEQ ID NO: 288754 - RNA, 23 nt, Human adenovirus D
acuccgcgaccuccuccccauga

SEQ ID NO: 288755 - RNA, 15 nt, Human adenovirus D
acuccucuuugcccu

SEQ ID NO: 288756 - RNA, 21 nt, Human adenovirus D
acuccucuuugcccugcucac

SEQ ID NO: 288757 - RNA, 16 nt, Human adenovirus D
acucucaucucuacua

SEQ ID NO: 288758 - RNA, 19 nt, Human adenovirus D
acucugauucaugugaaca

SEQ ID NO: 288759 - RNA, 20 nt, Human adenovirus D
acucugcucauacugcuauc

SEQ ID NO: 288760 - RNA, 14 nt, Human adenovirus D
acugacugaucaac

SEQ ID NO: 288761 - RNA, 12 nt, Human adenovirus D
acugcauacaaa

SEQ ID NO: 288762 - RNA, 21 nt, Human adenovirus D
acugcauguggcuagacuuca

SEQ ID NO: 288763 - RNA, 14 nt, Human adenovirus D
acugcgcgcccucg

SEQ ID NO: 288764 - RNA, 21 nt, Human adenovirus D
acugcgcguccgucagcagca

SEQ ID NO: 288765 - RNA, 14 nt, Human adenovirus D
acugcuaucgcucu

SEQ ID NO: 288766 - RNA, 15 nt, Human adenovirus D
acugcugauuacucu

SEQ ID NO: 288767 - RNA, 24 nt, Human adenovirus D
acugggaggcugcgaugcaacgca

SEQ ID NO: 288768 - RNA, 14 nt, Human adenovirus D
acugggugaugcuu

SEQ ID NO: 288769 - RNA, 23 nt, Human adenovirus D
acugggugaugcuucaacagcug

SEQ ID NO: 288770 - RNA, 13 nt, Human adenovirus D
acuguaaagccac

SEQ ID NO: 288771 - RNA, 18 nt, Human adenovirus D
acuguaaagccacaacca

SEQ ID NO: 288772 - RNA, 22 nt, Human adenovirus D
acugucaugccacgaacagcca

SEQ ID NO: 288773 - RNA, 21 nt, Human adenovirus D
acuguccaugguagcaaugga

SEQ ID NO: 288774 - RNA, 12 nt, Human adenovirus D
acuuacuugaaa

SEQ ID NO: 288775 - RNA, 23 nt, Human adenovirus D
acuuaguucagcugcaaugauua

SEQ ID NO: 288776 - RNA, 14 nt, Human adenovirus D
acuucuggcacaua

SEQ ID NO: 288777 - RNA, 19 nt, Human adenovirus D
acuucuggcacauacaaag

SEQ ID NO: 288778 - RNA, 23 nt, Human adenovirus D
acuugcauauacuccagugcaug

SEQ ID NO: 288779 - RNA, 19 nt, Human adenovirus D
acuuuagugggaccucaga

SEQ ID NO: 288780 - RNA, 16 nt, Human adenovirus D
agaacaacgauuucac

SEQ ID NO: 288781 - RNA, 22 nt, Human adenovirus D
agaacaaggccauccgucccga

SEQ ID NO: 288782 - RNA, 18 nt, Human adenovirus D
agaacauacaugggcuau

SEQ ID NO: 288783 - RNA, 23 nt, Human adenovirus D
agaacauacaugggcuauaauaa

SEQ ID NO: 288784 - RNA, 13 nt, Human adenovirus D
agaacauuuccuu

SEQ ID NO: 288785 - RNA, 14 nt, Human adenovirus D
agaacuuccagcag

SEQ ID NO: 288786 - RNA, 17 nt, Human adenovirus D
agaagacuauaaaguca

SEQ ID NO: 288787 - RNA, 19 nt, Human adenovirus D
agaagacuauaaagucaca

SEQ ID NO: 288788 - RNA, 13 nt, Human adenovirus D
agaagguggugga

SEQ ID NO: 288789 - RNA, 21 nt, Human adenovirus D
agaaguacgacaagguacgca

SEQ ID NO: 288790 - RNA, 23 nt, Human adenovirus D
agaauauccccuuccucacuccc

SEQ ID NO: 288791 - RNA, 18 nt, Human adenovirus D
agaauauguguauguuaa

SEQ ID NO: 288792 - RNA, 16 nt, Human adenovirus D
agaauccacagaucag

SEQ ID NO: 288793 - RNA, 11 nt, Human adenovirus D
agacaacagcc

SEQ ID NO: 288794 - RNA, 19 nt, Human adenovirus D
agacacaaagagagcuuau

SEQ ID NO: 288795 - RNA, 19 nt, Human adenovirus D
agacauaguuguaaugauc

SEQ ID NO: 288796 - RNA, 14 nt, Human adenovirus D
agacaucaugaacg

SEQ ID NO: 288797 - RNA, 16 nt, Human adenovirus D
agacuauaaagucaca

SEQ ID NO: 288798 - RNA, 21 nt, Human adenovirus D
agacuauaaagucacaguuau

SEQ ID NO: 288799 - RNA, 18 nt, Human adenovirus D
agacucucaucucuacua

SEQ ID NO: 288800 - RNA, 14 nt, Human adenovirus D
agacucugcucaua

SEQ ID NO: 288801 - RNA, 18 nt, Human adenovirus D
agacucugcucauacugc

SEQ ID NO: 288802 - RNA, 20 nt, Human adenovirus D
agacucugcucauacugcua

SEQ ID NO: 288803 - RNA, 17 nt, Human adenovirus D
agacugggguacuuuac

SEQ ID NO: 288804 - RNA, 23 nt, Human adenovirus D
agagaacgcgcgaagauggccac

SEQ ID NO: 288805 - RNA, 18 nt, Human adenovirus D
agagagcuuauuccagca

SEQ ID NO: 288806 - RNA, 17 nt, Human adenovirus D
agagccagaauaugugu

SEQ ID NO: 288807 - RNA, 23 nt, Human adenovirus D
agagccagaauauguguauguua

SEQ ID NO: 288808 - RNA, 22 nt, Human adenovirus D
agagcuuagcaaggugcugaca

SEQ ID NO: 288809 - RNA, 15 nt, Human adenovirus D
agagguggucauuga

SEQ ID NO: 288810 - RNA, 13 nt, Human adenovirus D
agauaucauaaag

SEQ ID NO: 288811 - RNA, 16 nt, Human adenovirus D
agauauuccagaucac

SEQ ID NO: 288812 - RNA, 21 nt, Human adenovirus D
agauauuccagaucacauggu

SEQ ID NO: 288813 - RNA, 12 nt, Human adenovirus D
agaucacauggu

SEQ ID NO: 288814 - RNA, 13 nt, Human adenovirus D
agaucacauggua

SEQ ID NO: 288815 - RNA, 18 nt, Human adenovirus D
agaucacaugguaugaua

SEQ ID NO: 288816 - RNA, 16 nt, Human adenovirus D
agaucacuuacuugaa

SEQ ID NO: 288817 - RNA, 21 nt, Human adenovirus D
agaugaggcgugcgguggugu

SEQ ID NO: 288818 - RNA, 13 nt, Human adenovirus D
agauucaauccag

SEQ ID NO: 288819 - RNA, 14 nt, Human adenovirus D
agauugacuacucg

SEQ ID NO: 288820 - RNA, 12 nt, Human adenovirus D
agcaacuuccug

SEQ ID NO: 288821 - RNA, 14 nt, Human adenovirus D
agcaaggugcugac

SEQ ID NO: 288822 - RNA, 15 nt, Human adenovirus D
agcaauggaaaucac

SEQ ID NO: 288823 - RNA, 18 nt, Human adenovirus D
agcaccgccgcagccgcg

SEQ ID NO: 288824 - RNA, 23 nt, Human adenovirus D
agcacgcccucacccgccucuac

SEQ ID NO: 288825 - RNA, 16 nt, Human adenovirus D
agcauagucacacuua

SEQ ID NO: 288826 - RNA, 17 nt, Human adenovirus D
agcauugucugccuggu

SEQ ID NO: 288827 - RNA, 20 nt, Human adenovirus D
agcauugucugccuggucau

SEQ ID NO: 288828 - RNA, 18 nt, Human adenovirus D
agccacgauguaacauca

SEQ ID NO: 288829 - RNA, 14 nt, Human adenovirus D
agccgccaugacag

SEQ ID NO: 288830 - RNA, 17 nt, Human adenovirus D
agccucuccguccucga

SEQ ID NO: 288831 - RNA, 14 nt, Human adenovirus D
agccuguacccaga

SEQ ID NO: 288832 - RNA, 21 nt, Human adenovirus D
agccuguacccagagcuuagc

SEQ ID NO: 288833 - RNA, 23 nt, Human adenovirus D
agcgaugggggcaauaccgggau

SEQ ID NO: 288834 - RNA, 17 nt, Human adenovirus D
agcgcauccugcaacug

SEQ ID NO: 288835 - RNA, 15 nt, Human adenovirus D
agcgcccagagcgcc

SEQ ID NO: 288836 - RNA, 17 nt, Human adenovirus D
agcgcgggcggacugcc

SEQ ID NO: 288837 - RNA, 18 nt, Human adenovirus D
agcgggccucacagucca

SEQ ID NO: 288838 - RNA, 15 nt, Human adenovirus D
agcucaucgacuggu

SEQ ID NO: 288839 - RNA, 18 nt, Human adenovirus D
agcucaucgacuggugcu

SEQ ID NO: 288840 - RNA, 19 nt, Human adenovirus D
agcucaucgacuggugcug

SEQ ID NO: 288841 - RNA, 20 nt, Human adenovirus D
agcuccucgaugccaucaac

SEQ ID NO: 288842 - RNA, 21 nt, Human adenovirus D
agcuccucgaugccaucaaca

SEQ ID NO: 288843 - RNA, 17 nt, Human adenovirus D
agcucguaggugaucuu

SEQ ID NO: 288844 - RNA, 21 nt, Human adenovirus D
agcucguccgggaaaaccucc

SEQ ID NO: 288845 - RNA, 15 nt, Human adenovirus D
agcugaaagcuauaa

SEQ ID NO: 288846 - RNA, 19 nt, Human adenovirus D
agcugacggccagucugau

SEQ ID NO: 288847 - RNA, 16 nt, Human adenovirus D
agcuguugagaaaccu

SEQ ID NO: 288848 - RNA, 21 nt, Human adenovirus D
agcuuauuccagcaugcaguu

SEQ ID NO: 288849 - RNA, 18 nt, Human adenovirus D
aggacuuguuacaugaca

SEQ ID NO: 288850 - RNA, 14 nt, Human adenovirus D
aggagugcagggau

SEQ ID NO: 288851 - RNA, 14 nt, Human adenovirus D
aggagugugauaug

SEQ ID NO: 288852 - RNA, 17 nt, Human adenovirus D
aggagugugauaugcac

SEQ ID NO: 288853 - RNA, 20 nt, Human adenovirus D
cagcuguugagaaaccugcu

SEQ ID NO: 288854 - RNA, 17 nt, Human adenovirus D
caggaaacuguguggau

SEQ ID NO: 288855 - RNA, 22 nt, Human adenovirus D
caggacgccucggaguaccuga

SEQ ID NO: 288856 - RNA, 13 nt, Human adenovirus D
caggagaugagca

SEQ ID NO: 288857 - RNA, 14 nt, Human adenovirus D
caggauucauacca

SEQ ID NO: 288858 - RNA, 14 nt, Human adenovirus D
caggcaggauucau

SEQ ID NO: 288859 - RNA, 15 nt, Human adenovirus D
caggcaggauucaua

SEQ ID NO: 288860 - RNA, 22 nt, Human adenovirus D
caggcaggauucauaccaucaa

SEQ ID NO: 288861 - RNA, 18 nt, Human adenovirus D
caggcgccauucggagca

SEQ ID NO: 288862 - RNA, 21 nt, Human adenovirus D
caggcgccauucggagcacgc

SEQ ID NO: 288863 - RNA, 21 nt, Human adenovirus D
cagggaugaguugggccugau

SEQ ID NO: 288864 - RNA, 15 nt, Human adenovirus D
cagggcuucacugac

SEQ ID NO: 288865 - RNA, 22 nt, Human adenovirus D
caguagucaucaaaugcgagca

SEQ ID NO: 288866 - RNA, 14 nt, Human adenovirus D
caguccaggucaca

SEQ ID NO: 288867 - RNA, 16 nt, Human adenovirus D
cagugcuuccagcaaa

SEQ ID NO: 288868 - RNA, 22 nt, Human adenovirus D
cagugucuggagcgggcuuaaa

SEQ ID NO: 288869 - RNA, 22 nt, Human adenovirus D
caguuaagaauccacagaucag

SEQ ID NO: 288870 - RNA, 22 nt, Human adenovirus D
cauaaagaagacuauaaaguca

SEQ ID NO: 288871 - RNA, 20 nt, Human adenovirus D
cauaagggcggcgcugcaaa

SEQ ID NO: 288872 - RNA, 13 nt, Human adenovirus D
cauacaaagcuga

SEQ ID NO: 288873 - RNA, 14 nt, Human adenovirus D
cauacaaauucaaa

SEQ ID NO: 288874 - RNA, 22 nt, Human adenovirus D
cauacaugggcuauaauaagca

SEQ ID NO: 288875 - RNA, 19 nt, Human adenovirus D
cauacgccggcucaucugc

SEQ ID NO: 288876 - RNA, 14 nt, Human adenovirus D
cauagugaccaaga

SEQ ID NO: 288877 - RNA, 17 nt, Human adenovirus D
cauauacuccagugcau

SEQ ID NO: 288878 - RNA, 16 nt, Human adenovirus D
cauauggaauuucuua

SEQ ID NO: 288879 - RNA, 20 nt, Human adenovirus D
cauauucuuuauuccauaca

SEQ ID NO: 288880 - RNA, 20 nt, Human adenovirus D
caucaaaugcgagcauacau

SEQ ID NO: 288881 - RNA, 23 nt, Human adenovirus D
caucaaaugcgagcauacaugcc

SEQ ID NO: 288882 - RNA, 19 nt, Human adenovirus D
caucaccacaggcaaugag

SEQ ID NO: 288883 - RNA, 12 nt, Human adenovirus D
caucacccagca

SEQ ID NO: 288884 - RNA, 20 nt, Human adenovirus D
caucacccccgccccggaaa

SEQ ID NO: 288885 - RNA, 18 nt, Human adenovirus D
caucaccuuccugcagcu

SEQ ID NO: 288886 - RNA, 13 nt, Human adenovirus D
caucauccauauc

SEQ ID NO: 288887 - RNA, 21 nt, Human adenovirus D
cauccaagcgggccucacagu

SEQ ID NO: 288888 - RNA, 22 nt, Human adenovirus D
cauccauggccaggggagugaa

SEQ ID NO: 288889 - RNA, 19 nt, Human adenovirus D
cauccccuggcucccugca

SEQ ID NO: 288890 - RNA, 18 nt, Human adenovirus D
cauccgcggcguccugga

SEQ ID NO: 288891 - RNA, 18 nt, Human adenovirus D
cauccucuucugucucuu

SEQ ID NO: 288892 - RNA, 15 nt, Human adenovirus D
cauccugcaacugcg

SEQ ID NO: 288893 - RNA, 13 nt, Human adenovirus D
caucugcaucuca

SEQ ID NO: 288894 - RNA, 19 nt, Human adenovirus D
caugaaggcuuucacagcu

SEQ ID NO: 288895 - RNA, 21 nt, Human adenovirus D
caugcaaugcguggacacggc

SEQ ID NO: 288896 - RNA, 18 nt, Human adenovirus D
caugcagacucugcucau

SEQ ID NO: 288897 - RNA, 20 nt, Human adenovirus D
caugcccagcagcagcagua

SEQ ID NO: 288898 - RNA, 18 nt, Human adenovirus D
caugcccucucaacauca

SEQ ID NO: 288899 - RNA, 17 nt, Human adenovirus D
caugcgcaggcgccuga

SEQ ID NO: 288900 - RNA, 16 nt, Human adenovirus D
cauggccugugcaaug

SEQ ID NO: 288901 - RNA, 17 nt, Human adenovirus D
cauggccugugcaaugu

SEQ ID NO: 288902 - RNA, 19 nt, Human adenovirus D
cauggccugugcaauguca

SEQ ID NO: 288903 - RNA, 13 nt, Human adenovirus D
caugggcaccugg

SEQ ID NO: 288904 - RNA, 18 nt, Human adenovirus D
cauggguggggaugaacc

SEQ ID NO: 288905 - RNA, 15 nt, Human adenovirus D
caugguagcaaugga

SEQ ID NO: 288906 - RNA, 21 nt, Human adenovirus D
cauguacggaggagccaagaa

SEQ ID NO: 288907 - RNA, 22 nt, Human adenovirus D
cauguccuugaacuaccaccug

SEQ ID NO: 288908 - RNA, 22 nt, Human adenovirus D
caugugaacaaaacccaugaaa

SEQ ID NO: 288909 - RNA, 12 nt, Human adenovirus D
cauguucuugca

SEQ ID NO: 288910 - RNA, 20 nt, Human adenovirus D
cauuacuauuacugccacug

SEQ ID NO: 288911 - RNA, 20 nt, Human adenovirus D
cauuacuucuggcacauaca

SEQ ID NO: 288912 - RNA, 14 nt, Human adenovirus D
cauuucagaaccau

SEQ ID NO: 288913 - RNA, 23 nt, Human adenovirus D
cauuugaagauucuggaaauuau

SEQ ID NO: 288914 - RNA, 18 nt, Human adenovirus D
cauuuuugaagucaugug

SEQ ID NO: 288915 - RNA, 14 nt, Human adenovirus D
ccaacggcugcauc

SEQ ID NO: 288916 - RNA, 17 nt, Human adenovirus D
ccacaaacuacauggac

SEQ ID NO: 288917 - RNA, 23 nt, Human adenovirus D
ccacaccuugaaagggaugucaa

SEQ ID NO: 288918 - RNA, 17 nt, Human adenovirus D
ccacagaucagacauag

SEQ ID NO: 288919 - RNA, 20 nt, Human adenovirus D
ccaccagcccauuucacagu

SEQ ID NO: 288920 - RNA, 13 nt, Human adenovirus D
ccacgacacagcg

SEQ ID NO: 288921 - RNA, 17 nt, Human adenovirus D
ccacgaucugaugauga

SEQ ID NO: 288922 - RNA, 16 nt, Human adenovirus D
ccacgauguaacauca

SEQ ID NO: 288923 - RNA, 14 nt, Human adenovirus D
ccagaccgugcagg

SEQ ID NO: 288924 - RNA, 15 nt, Human adenovirus D
ccagagccagaauau

SEQ ID NO: 288925 - RNA, 21 nt, Human adenovirus D
ccagcaaauuccucgaccaug

SEQ ID NO: 288926 - RNA, 19 nt, Human adenovirus D
ccagggcuucacugacuga

SEQ ID NO: 288927 - RNA, 16 nt, Human adenovirus D
ccagucagacccagug

SEQ ID NO: 288928 - RNA, 15 nt, Human adenovirus D
ccagugcuuccagca

SEQ ID NO: 288929 - RNA, 14 nt, Human adenovirus D
ccaguuccaucauc

SEQ ID NO: 288930 - RNA, 14 nt, Human adenovirus D
ccauacaaauucaa

SEQ ID NO: 288931 - RNA, 21 nt, Human adenovirus D
ccauagucaucacccagcagu

SEQ ID NO: 288932 - RNA, 15 nt, Human adenovirus D
ccaucaacauccacc

SEQ ID NO: 288933 - RNA, 15 nt, Human adenovirus D
ccaucaaugcuacau

SEQ ID NO: 288934 - RNA, 19 nt, Human adenovirus D
ccaucagacugggguacuu

SEQ ID NO: 288935 - RNA, 20 nt, Human adenovirus D
ccaugaaagaacauacaugg

SEQ ID NO: 288936 - RNA, 19 nt, Human adenovirus D
ccaugcccucgcuacugcu

SEQ ID NO: 288937 - RNA, 21 nt, Human adenovirus D
ccaugcccucgcuacugcuga

SEQ ID NO: 288938 - RNA, 11 nt, Human adenovirus D
ccaugcugcgc

SEQ ID NO: 288939 - RNA, 16 nt, Human adenovirus D
ccaugguagcaaugga

SEQ ID NO: 288940 - RNA, 15 nt, Human adenovirus D
cccagaccgugcagg

SEQ ID NO: 288941 - RNA, 17 nt, Human adenovirus D
cccagcgucugacgcug

SEQ ID NO: 288942 - RNA, 20 nt, Human adenovirus D
cccagcuguugagaaaccug

SEQ ID NO: 288943 - RNA, 22 nt, Human adenovirus D
cccagcuguugagaaaccugcu

SEQ ID NO: 288944 - RNA, 17 nt, Human adenovirus D
cccagggugagucccac

SEQ ID NO: 288945 - RNA, 13 nt, Human adenovirus D
cccaguuccauca

SEQ ID NO: 288946 - RNA, 13 nt, Human adenovirus D
cccauagucauca

SEQ ID NO: 288947 - RNA, 17 nt, Human adenovirus D
cccaugaaagaacauac

SEQ ID NO: 288948 - RNA, 19 nt, Human adenovirus D
cccaugaaagaacauacau

SEQ ID NO: 288949 - RNA, 21 nt, Human adenovirus D
cccaugaaagaacauacaugg

SEQ ID NO: 288950 - RNA, 21 nt, Human adenovirus D
cccauugguugaacccagaug

SEQ ID NO: 288951 - RNA, 15 nt, Human adenovirus D
ccccucugaaugaua

SEQ ID NO: 288952 - RNA, 19 nt, Human adenovirus D
ccccugguaccgccagauu

SEQ ID NO: 288953 - RNA, 22 nt, Human adenovirus D
cccgauugugaucaugcagauu

SEQ ID NO: 288954 - RNA, 17 nt, Human adenovirus D
cccucucagaugucaaa

SEQ ID NO: 288955 - RNA, 19 nt, Human adenovirus D
cccugcccccggaccugga

SEQ ID NO: 288956 - RNA, 15 nt, Human adenovirus D
cccugcgcccagauu

SEQ ID NO: 288957 - RNA, 18 nt, Human adenovirus D
cccuuccccuaucccaaa

SEQ ID NO: 288958 - RNA, 16 nt, Human adenovirus D
ccgagaugaaagccug

SEQ ID NO: 288959 - RNA, 23 nt, Human adenovirus D
ccgcgcucgcgcaccugcuacau

SEQ ID NO: 288960 - RNA, 19 nt, Human adenovirus D
ccgcuuggaugacuuuuca

SEQ ID NO: 288961 - RNA, 16 nt, Human adenovirus D
ccggaccuggaucucc

SEQ ID NO: 288962 - RNA, 16 nt, Human adenovirus D
ccggaggcgugcacug

SEQ ID NO: 288963 - RNA, 16 nt, Human adenovirus D
ccguguacacugugaa

SEQ ID NO: 288964 - RNA, 21 nt, Human adenovirus D
ccgugucccccugaucuguca

SEQ ID NO: 288965 - RNA, 12 nt, Human adenovirus D
ccucacagucca

SEQ ID NO: 288966 - RNA, 13 nt, Human adenovirus D
ccucacaguccag

SEQ ID NO: 288967 - RNA, 16 nt, Human adenovirus D
ccucacgcuugccagu

SEQ ID NO: 288968 - RNA, 17 nt, Human adenovirus D
ccucacgcuugccaguc

SEQ ID NO: 288969 - RNA, 18 nt, Human adenovirus D
ccuccccaugaacugaug

SEQ ID NO: 288970 - RNA, 16 nt, Human adenovirus D
ccucgaugaugccgca

SEQ ID NO: 288971 - RNA, 20 nt, Human adenovirus D
aaugcuacauggugggcuaa

SEQ ID NO: 288972 - RNA, 22 nt, Human adenovirus D
aaugcuacauggugggcuaaua

SEQ ID NO: 288973 - RNA, 18 nt, Human adenovirus D
aaugcuucaauaauggaa

SEQ ID NO: 288974 - RNA, 19 nt, Human adenovirus D
aauggaauguuacugcaua

SEQ ID NO: 288975 - RNA, 13 nt, Human adenovirus D
aauguuacugcau

SEQ ID NO: 288976 - RNA, 18 nt, Human adenovirus D
aauguuacugcauacaaa

SEQ ID NO: 288977 - RNA, 15 nt, Human adenovirus D
aauuaaccuauaaaa

SEQ ID NO: 288978 - RNA, 21 nt, Human adenovirus D
aauuaaccuauaaaaacaaca

SEQ ID NO: 288979 - RNA, 19 nt, Human adenovirus D
aauuccucgaccaugaccu

SEQ ID NO: 288980 - RNA, 18 nt, Human adenovirus D
aauugaggacuuguuaca

SEQ ID NO: 288981 - RNA, 13 nt, Human adenovirus D
aauuggagcagug

SEQ ID NO: 288982 - RNA, 17 nt, Human adenovirus D
aauuucuuagacugcua

SEQ ID NO: 288983 - RNA, 16 nt, Human adenovirus D
aauuuuaaggcucaua

SEQ ID NO: 288984 - RNA, 20 nt, Human adenovirus D
aauuuuaaggcucauaugac

SEQ ID NO: 288985 - RNA, 22 nt, Human adenovirus D
aauuuucauugucuucccucuc

SEQ ID NO: 288986 - RNA, 16 nt, Human adenovirus D
acaaacuacauggaca

SEQ ID NO: 288987 - RNA, 19 nt, Human adenovirus D
acaaccagagccagaauau

SEQ ID NO: 288988 - RNA, 17 nt, Human adenovirus D
acaauuacuucaucaua

SEQ ID NO: 288989 - RNA, 15 nt, Human adenovirus D
acaccugguccugua

SEQ ID NO: 288990 - RNA, 21 nt, Human adenovirus D
acacgagcucguaggugaucu

SEQ ID NO: 288991 - RNA, 19 nt, Human adenovirus D
acacgggguugcagcacug

SEQ ID NO: 288992 - RNA, 21 nt, Human adenovirus D
acacgggguugcagcacugga

SEQ ID NO: 288993 - RNA, 22 nt, Human adenovirus D
acacgggguugcagcacuggaa

SEQ ID NO: 288994 - RNA, 17 nt, Human adenovirus D
acacggucacuguccau

SEQ ID NO: 288995 - RNA, 15 nt, Human adenovirus D
acagaucagacauag

SEQ ID NO: 288996 - RNA, 14 nt, Human adenovirus D
acagauucauacuc

SEQ ID NO: 288997 - RNA, 19 nt, Human adenovirus D
acagcaucgccucaccuau

SEQ ID NO: 288998 - RNA, 21 nt, Human adenovirus D
acagcaucgccucaccuauga

SEQ ID NO: 288999 - RNA, 15 nt, Human adenovirus D
acagccgcaggccaa

SEQ ID NO: 289000 - RNA, 12 nt, Human adenovirus D
acaggcaaugag

SEQ ID NO: 289001 - RNA, 20 nt, Human adenovirus D
acaguccaggucacagucug

SEQ ID NO: 289002 - RNA, 20 nt, Human adenovirus D
acaguguacacgguucucuc

SEQ ID NO: 289003 - RNA, 23 nt, Human adenovirus D
acaguuaagaauccacagaucag

SEQ ID NO: 289004 - RNA, 22 nt, Human adenovirus D
acauacgccggcucaucugcag

SEQ ID NO: 289005 - RNA, 12 nt, Human adenovirus D
acaucacauuca

SEQ ID NO: 289006 - RNA, 13 nt, Human adenovirus D
acaucacauucaa

SEQ ID NO: 289007 - RNA, 19 nt, Human adenovirus D
acaucaccacaggcaauga

SEQ ID NO: 289008 - RNA, 14 nt, Human adenovirus D
acauccauggccag

SEQ ID NO: 289009 - RNA, 20 nt, Human adenovirus D
acaucgcgaaccaggcagug

SEQ ID NO: 289010 - RNA, 14 nt, Human adenovirus D
acaucugugcugcc

SEQ ID NO: 289011 - RNA, 19 nt, Human adenovirus D
acaucugugcugccuuugc

SEQ ID NO: 289012 - RNA, 23 nt, Human adenovirus D
acaugcacuggaguauaugcaag

SEQ ID NO: 289013 - RNA, 22 nt, Human adenovirus D
acaugcccucucaacaucacau

SEQ ID NO: 289014 - RNA, 19 nt, Human adenovirus D
acaugcucaacgagguggc

SEQ ID NO: 289015 - RNA, 13 nt, Human adenovirus D
acaugcugcuaca

SEQ ID NO: 289016 - RNA, 16 nt, Human adenovirus D
acaugcugcuacaucu

SEQ ID NO: 289017 - RNA, 21 nt, Human adenovirus D
acauuacuucuggcacauaca

SEQ ID NO: 289018 - RNA, 21 nt, Human adenovirus D
acauucaaaaaccguaccaug

SEQ ID NO: 289019 - RNA, 15 nt, Human adenovirus D
accacgaucugauga

SEQ ID NO: 289020 - RNA, 18 nt, Human adenovirus D
accacgaucugaugauga

SEQ ID NO: 289021 - RNA, 22 nt, Human adenovirus D
accagcgcgaguagucaaucuc

SEQ ID NO: 289022 - RNA, 23 nt, Human adenovirus D
accagggcuucacugacugauca

SEQ ID NO: 289023 - RNA, 20 nt, Human adenovirus D
accaucaaugcuacauggug

SEQ ID NO: 289024 - RNA, 22 nt, Human adenovirus D
accaucagacugggguacuuua

SEQ ID NO: 289025 - RNA, 21 nt, Human adenovirus D
accaugaaggcuuucacagcu

SEQ ID NO: 289026 - RNA, 18 nt, Human adenovirus D
accauggacagcucccaa

SEQ ID NO: 289027 - RNA, 13 nt, Human adenovirus D
accaugugcugcu

SEQ ID NO: 289028 - RNA, 14 nt, Human adenovirus D
acccagaugaggau

SEQ ID NO: 289029 - RNA, 23 nt, Human adenovirus D
acccauugguugaacccagauga

SEQ ID NO: 289030 - RNA, 15 nt, Human adenovirus D
acccugcuccaagag

SEQ ID NO: 289031 - RNA, 17 nt, Human adenovirus D
accggaggcgugcacug

SEQ ID NO: 289032 - RNA, 17 nt, Human adenovirus D
accguguacacugugaa

SEQ ID NO: 289033 - RNA, 22 nt, Human adenovirus D
accuacuccucuuugcccugcu

SEQ ID NO: 289034 - RNA, 20 nt, Human adenovirus D
uguugagggaaaagcucaaa

SEQ ID NO: 289035 - RNA, 17 nt, Human adenovirus D
uuaaaguuuucccucac

SEQ ID NO: 289036 - RNA, 17 nt, Human adenovirus D
uuaacggggugguggac

SEQ ID NO: 289037 - RNA, 21 nt, Human adenovirus D
uuaacggggugguggacaucg

SEQ ID NO: 289038 - RNA, 22 nt, Human adenovirus D
uuaaggcucauaugaccaugca

SEQ ID NO: 289039 - RNA, 19 nt, Human adenovirus D
uuaaucaacaucaguucau

SEQ ID NO: 289040 - RNA, 13 nt, Human adenovirus D
uuacauugaaugg

SEQ ID NO: 289041 - RNA, 16 nt, Human adenovirus D
uuaccacgaucugaug

SEQ ID NO: 289042 - RNA, 18 nt, Human adenovirus D
uuaccacgaucugaugau

SEQ ID NO: 289043 - RNA, 15 nt, Human adenovirus D
uuacuauuacugcca

SEQ ID NO: 289044 - RNA, 14 nt, Human adenovirus D
uuacucuaaaugca

SEQ ID NO: 289045 - RNA, 12 nt, Human adenovirus D
uuacugcauaca

SEQ ID NO: 289046 - RNA, 20 nt, Human adenovirus D
uuacuucuggcacauacaaa

SEQ ID NO: 289047 - RNA, 13 nt, Human adenovirus D
uuagacugcuauc

SEQ ID NO: 289048 - RNA, 13 nt, Human adenovirus D
uuagaugcagcaa

SEQ ID NO: 289049 - RNA, 14 nt, Human adenovirus D
uuagucauguguaa

SEQ ID NO: 289050 - RNA, 14 nt, Human adenovirus D
uuaguucagcugca

SEQ ID NO: 289051 - RNA, 19 nt, Human adenovirus D
uuauaugugacgcaugcaa

SEQ ID NO: 289052 - RNA, 13 nt, Human adenovirus D
uuaugacucaugg

SEQ ID NO: 289053 - RNA, 22 nt, Human adenovirus D
uuauuaaaugauuaguuccaau

SEQ ID NO: 289054 - RNA, 21 nt, Human adenovirus D
uuauugauuuuuacaccagcg

SEQ ID NO: 289055 - RNA, 19 nt, Human adenovirus D
uucaacaucugugcugccu

SEQ ID NO: 289056 - RNA, 21 nt, Human adenovirus D
uucacaguguacacgguucuc

SEQ ID NO: 289057 - RNA, 17 nt, Human adenovirus D
uucaguuggaugacuga

SEQ ID NO: 289058 - RNA, 14 nt, Human adenovirus D
uucauaccaucaau

SEQ ID NO: 289059 - RNA, 17 nt, Human adenovirus D
uucauaccaucaaugcu

SEQ ID NO: 289060 - RNA, 14 nt, Human adenovirus D
uucaugugaacaaa

SEQ ID NO: 289061 - RNA, 16 nt, Human adenovirus E
acaagaaguaccucac

SEQ ID NO: 289062 - RNA, 17 nt, Human adenovirus E
acaagauuacuaagcug

SEQ ID NO: 289063 - RNA, 15 nt, Human adenovirus E
acaagucaagacuug

SEQ ID NO: 289064 - RNA, 15 nt, Human adenovirus E
acaauuugagguuau

SEQ ID NO: 289065 - RNA, 22 nt, Human adenovirus E
acacacacgguuuacaugucuu

SEQ ID NO: 289066 - RNA, 17 nt, Human adenovirus E
acacacuuggaaacauc

SEQ ID NO: 289067 - RNA, 16 nt, Human adenovirus E
acacucugaucaagac

SEQ ID NO: 289068 - RNA, 17 nt, Human adenovirus E
acacuggcacuaaucac

SEQ ID NO: 289069 - RNA, 13 nt, Human adenovirus E
acagaaacugaau

SEQ ID NO: 289070 - RNA, 13 nt, Human adenovirus E
acagacaccuacu

SEQ ID NO: 289071 - RNA, 12 nt, Human adenovirus E
acagcaaccuca

SEQ ID NO: 289072 - RNA, 16 nt, Human adenovirus E
acagcaaccucaggca

SEQ ID NO: 289073 - RNA, 18 nt, Human adenovirus E
acagcagccccaggccaa

SEQ ID NO: 289074 - RNA, 17 nt, Human adenovirus E
acagccuugaacaucug

SEQ ID NO: 289075 - RNA, 18 nt, Human adenovirus E
acaggccaagaucuccua

SEQ ID NO: 289076 - RNA, 13 nt, Human adenovirus E
acaguguucauuc

SEQ ID NO: 289077 - RNA, 15 nt, Human adenovirus E
acaguuuuacaggau

SEQ ID NO: 289078 - RNA, 20 nt, Human adenovirus E
acauacacacacgguuuaca

SEQ ID NO: 289079 - RNA, 23 nt, Human adenovirus E
acaucucagggaauggggcugaa

SEQ ID NO: 289080 - RNA, 15 nt, Human adenovirus E
acaugaaagugcugu

SEQ ID NO: 289081 - RNA, 16 nt, Human adenovirus E
acauggaauuuuauca

SEQ ID NO: 289082 - RNA, 17 nt, Human adenovirus E
accaaggggugcaucca

SEQ ID NO: 289083 - RNA, 19 nt, Human adenovirus E
accaaggggugcauccacu

SEQ ID NO: 289084 - RNA, 13 nt, Human adenovirus E
accacaaccacaa

SEQ ID NO: 289085 - RNA, 13 nt, Human adenovirus E
accacaauuacuc

SEQ ID NO: 289086 - RNA, 14 nt, Human adenovirus E
accacaauuacuca

SEQ ID NO: 289087 - RNA, 15 nt, Human adenovirus E
accacagcaaccuca

SEQ ID NO: 289088 - RNA, 15 nt, Human adenovirus E
accacuacagccuag

SEQ ID NO: 289089 - RNA, 22 nt, Human adenovirus E
accacuacagccuaggccacaa

SEQ ID NO: 289090 - RNA, 15 nt, Human adenovirus E
accagagugccguag

SEQ ID NO: 289091 - RNA, 18 nt, Human adenovirus E
acccaggccaugcaacgc

SEQ ID NO: 289092 - RNA, 18 nt, Human adenovirus E
accccacucuguggaaca

SEQ ID NO: 289093 - RNA, 15 nt, Human adenovirus E
accccaucgaugcug

SEQ ID NO: 289094 - RNA, 15 nt, Human adenovirus E
accccaucgucauca

SEQ ID NO: 289095 - RNA, 22 nt, Human adenovirus E
acccggggucucuucgcugcau

SEQ ID NO: 289096 - RNA, 14 nt, Human adenovirus E
acccuaauuaacau

SEQ ID NO: 289097 - RNA, 19 nt, Human adenovirus E
acccucccaggacauggaa

SEQ ID NO: 289098 - RNA, 14 nt, Human adenovirus E
acccugcaugccaa

SEQ ID NO: 289099 - RNA, 11 nt, Human adenovirus E
accgcgugcug

SEQ ID NO: 289100 - RNA, 22 nt, Human adenovirus E
accuagcucggcuucgacaccu

SEQ ID NO: 289101 - RNA, 19 nt, Human adenovirus E
accucacagcucaacagcu

SEQ ID NO: 289102 - RNA, 18 nt, Human adenovirus E
accuccaccaacgccacc

SEQ ID NO: 289103 - RNA, 19 nt, Human adenovirus E
accucugcucuaugcaauu

SEQ ID NO: 289104 - RNA, 21 nt, Human adenovirus E
accugaucccgaauaccacag

SEQ ID NO: 289105 - RNA, 22 nt, Human adenovirus E
accugcaugagggccagaauaa

SEQ ID NO: 289106 - RNA, 16 nt, Human adenovirus E
acgagaccgagcucca

SEQ ID NO: 289107 - RNA, 17 nt, Human adenovirus E
acgagaccgagcuccag

SEQ ID NO: 289108 - RNA, 20 nt, Human adenovirus E
acgauuggacccaggccaug

SEQ ID NO: 289109 - RNA, 12 nt, Human adenovirus E
acgcagggccau

SEQ ID NO: 289110 - RNA, 21 nt, Human adenovirus E
acggagucucuuaccugugga

SEQ ID NO: 289111 - RNA, 16 nt, Human adenovirus E
acggccgcgccucgga

SEQ ID NO: 289112 - RNA, 12 nt, Human adenovirus E
acuaacaaccaa

SEQ ID NO: 289113 - RNA, 16 nt, Human adenovirus E
acuacagaaacugaau

SEQ ID NO: 289114 - RNA, 13 nt, Human adenovirus E
acuaccaccacua

SEQ ID NO: 289115 - RNA, 15 nt, Human adenovirus E
acuagagacuaugua

SEQ ID NO: 289116 - RNA, 17 nt, Human adenovirus E
acuaguucgaaucauuc

SEQ ID NO: 289117 - RNA, 20 nt, Human adenovirus E
acuaugaggccgagccacag

SEQ ID NO: 289118 - RNA, 21 nt, Human adenovirus E
acuauuuacacuggcacuaau

SEQ ID NO: 289119 - RNA, 13 nt, Human adenovirus E
acucacaccacac

SEQ ID NO: 289120 - RNA, 14 nt, Human adenovirus E
acucacaccacaca

SEQ ID NO: 289121 - RNA, 22 nt, Human adenovirus E
acuccaccuccacccaccacaa

SEQ ID NO: 289122 - RNA, 16 nt, Human adenovirus E
acucugguggccaacu

SEQ ID NO: 289123 - RNA, 22 nt, Human adenovirus E
acucuguggaaacaauaacaaa

SEQ ID NO: 289124 - RNA, 13 nt, Human adenovirus E
acugaacucugug

SEQ ID NO: 289125 - RNA, 20 nt, Human adenovirus E
acugacugugggucugauga

SEQ ID NO: 289126 - RNA, 22 nt, Human adenovirus E
acugaucaagugcggaugggaa

SEQ ID NO: 289127 - RNA, 18 nt, Human adenovirus E
acugaucugauacuccuc

SEQ ID NO: 289128 - RNA, 14 nt, Human adenovirus E
acugcucgaucucc

SEQ ID NO: 289129 - RNA, 13 nt, Human adenovirus E
acugugaguauau

SEQ ID NO: 289130 - RNA, 17 nt, Human adenovirus E
acuugaggugaugucag

SEQ ID NO: 289131 - RNA, 13 nt, Human adenovirus E
acuuggaaacauc

SEQ ID NO: 289132 - RNA, 23 nt, Human adenovirus E
acuuguugguuagagccugagga

SEQ ID NO: 289133 - RNA, 17 nt, Human adenovirus E
acuuucacaagacuaga

SEQ ID NO: 289134 - RNA, 15 nt, Human adenovirus E
acuuuuccaggguga

SEQ ID NO: 289135 - RNA, 13 nt, Human adenovirus E
agaaacugaauua

SEQ ID NO: 289136 - RNA, 16 nt, Human adenovirus E
agaaacugaauuaugc

SEQ ID NO: 289137 - RNA, 20 nt, Human adenovirus E
agaaaugccugcuacaucuc

SEQ ID NO: 289138 - RNA, 22 nt, Human adenovirus E
agaaaugccugcuacaucucag

SEQ ID NO: 289139 - RNA, 13 nt, Human adenovirus E
agaacaaggccau

SEQ ID NO: 289140 - RNA, 13 nt, Human adenovirus E
agaacaagucaag

SEQ ID NO: 289141 - RNA, 20 nt, Human adenovirus E
agaaugaccacaaccacaaa

SEQ ID NO: 289142 - RNA, 12 nt, Human adenovirus E
agacauuuaaca

SEQ ID NO: 289143 - RNA, 23 nt, Human adenovirus E
agaccugugugguuagcucagag

SEQ ID NO: 289144 - RNA, 20 nt, Human adenovirus E
agagacuauguagguaugua

SEQ ID NO: 289145 - RNA, 22 nt, Human adenovirus E
agagacuauguagguauguauu

SEQ ID NO: 289146 - RNA, 22 nt, Human adenovirus E
agagcccuugauuuuacuacuc

SEQ ID NO: 289147 - RNA, 15 nt, Human adenovirus E
agagccgucaaggag

SEQ ID NO: 289148 - RNA, 20 nt, Human adenovirus E
agaggugggcuuggauguug

SEQ ID NO: 289149 - RNA, 15 nt, Human adenovirus E
agauacaaucauauu

SEQ ID NO: 289150 - RNA, 14 nt, Human adenovirus E
agaucauauugaug

SEQ ID NO: 289151 - RNA, 12 nt, Human adenovirus E
agaucucuugca

SEQ ID NO: 289152 - RNA, 16 nt, Human adenovirus E
agaucugucuccagga

SEQ ID NO: 289153 - RNA, 18 nt, Human adenovirus E
agaugcaacaacaacagc

SEQ ID NO: 289154 - RNA, 19 nt, Human adenovirus E
agaugcaacaacaacagcc

SEQ ID NO: 289155 - RNA, 13 nt, Human adenovirus E
agaugcagcagcu

SEQ ID NO: 289156 - RNA, 12 nt, Human adenovirus E
agauguaucuac

SEQ ID NO: 289157 - RNA, 23 nt, Human adenovirus E
agauguaucuacugaacucugug

SEQ ID NO: 289158 - RNA, 14 nt, Human adenovirus E
gagcucagggccau

SEQ ID NO: 289159 - RNA, 18 nt, Human adenovirus E
gagcuccagcuccagugu

SEQ ID NO: 289160 - RNA, 15 nt, Human adenovirus E
gaggaccugcaugag

SEQ ID NO: 289161 - RNA, 18 nt, Human adenovirus E
gaggauguccaagcgcaa

SEQ ID NO: 289162 - RNA, 14 nt, Human adenovirus E
gaggcgcucgccaa

SEQ ID NO: 289163 - RNA, 21 nt, Human adenovirus E
gagggugguguauuccauguc

SEQ ID NO: 289164 - RNA, 18 nt, Human adenovirus E
gagguagccaucaggaau

SEQ ID NO: 289165 - RNA, 15 nt, Human adenovirus E
gaggugccaucuccg

SEQ ID NO: 289166 - RNA, 22 nt, Human adenovirus E
gagguguacggggaugaugaua

SEQ ID NO: 289167 - RNA, 20 nt, Human adenovirus E
gaguggggugggaaggguug

SEQ ID NO: 289168 - RNA, 19 nt, Human adenovirus E
gagugguacaccgucucug

SEQ ID NO: 289169 - RNA, 23 nt, Human adenovirus E
gauaaauaucagaaaugccugcu

SEQ ID NO: 289170 - RNA, 21 nt, Human adenovirus E
gauacaaucauauugaugauu

SEQ ID NO: 289171 - RNA, 14 nt, Human adenovirus E
gauacaguguucau

SEQ ID NO: 289172 - RNA, 15 nt, Human adenovirus E
gaucauauugaugau

SEQ ID NO: 289173 - RNA, 22 nt, Human adenovirus E
gaucuccuacgaggucacucca

SEQ ID NO: 289174 - RNA, 20 nt, Human adenovirus E
gaucucggucaugaacugcu

SEQ ID NO: 289175 - RNA, 13 nt, Human adenovirus E
gaucugacacuac

SEQ ID NO: 289176 - RNA, 18 nt, Human adenovirus E
gaucugacuuaacccuaa

SEQ ID NO: 289177 - RNA, 15 nt, Human adenovirus E
gaugagcaagcagua

SEQ ID NO: 289178 - RNA, 15 nt, Human adenovirus E
gaugaugauuuuaca

SEQ ID NO: 289179 - RNA, 17 nt, Human adenovirus E
gaugcaacaacaacagc

SEQ ID NO: 289180 - RNA, 17 nt, Human adenovirus E
gaugcgcgcgcgguggg

SEQ ID NO: 289181 - RNA, 18 nt, Human adenovirus E
gauuggacccaggccaug

SEQ ID NO: 289182 - RNA, 22 nt, Human adenovirus E
gauuuuacuacuccuggcagaa

SEQ ID NO: 289183 - RNA, 18 nt, Human adenovirus E
gcaaaauucaaaauucuu

SEQ ID NO: 289184 - RNA, 14 nt, Human adenovirus E
gcaacaacaacagc

SEQ ID NO: 289185 - RNA, 15 nt, Human adenovirus E
gcaacaacaacagcc

SEQ ID NO: 289186 - RNA, 15 nt, Human adenovirus E
gcaaccaccccggcc

SEQ ID NO: 289187 - RNA, 21 nt, Human adenovirus E
gcaaccucaggcacacgcacu

SEQ ID NO: 289188 - RNA, 22 nt, Human adenovirus E
gcaagaguuccccgugcccugg

SEQ ID NO: 289189 - RNA, 13 nt, Human adenovirus E
gcaagcuccagcu

SEQ ID NO: 289190 - RNA, 23 nt, Human adenovirus E
gcaaugguacugaucugauacuc

SEQ ID NO: 289191 - RNA, 21 nt, Human adenovirus E
gcacagccuugaacaucugaa

SEQ ID NO: 289192 - RNA, 15 nt, Human adenovirus E
gcacaucgccggaca

SEQ ID NO: 289193 - RNA, 20 nt, Human adenovirus E
gcaccagccaacugaacggg

SEQ ID NO: 289194 - RNA, 16 nt, Human adenovirus E
gcaccucacagcucaa

SEQ ID NO: 289195 - RNA, 15 nt, Human adenovirus E
gcagaugcagcagcu

SEQ ID NO: 289196 - RNA, 19 nt, Human adenovirus E
gcaggugcagaccugugug

SEQ ID NO: 289197 - RNA, 13 nt, Human adenovirus E
gcagucuggcgau

SEQ ID NO: 289198 - RNA, 17 nt, Human adenovirus E
gcauaugccugugcugu

SEQ ID NO: 289199 - RNA, 19 nt, Human adenovirus E
gcaucugcaccucacagcu

SEQ ID NO: 289200 - RNA, 21 nt, Human adenovirus E
gcaucugcaccucacagcuca

SEQ ID NO: 289201 - RNA, 13 nt, Human adenovirus E
gcaugagggccag

SEQ ID NO: 289202 - RNA, 15 nt, Human adenovirus E
gcaugguguugcaca

SEQ ID NO: 289203 - RNA, 19 nt, Human adenovirus E
gcauguccaucaccaaugg

SEQ ID NO: 289204 - RNA, 12 nt, Human adenovirus E
gcauuacucuca

SEQ ID NO: 289205 - RNA, 17 nt, Human adenovirus E
gcauuacucucaucaag

SEQ ID NO: 289206 - RNA, 16 nt, Human adenovirus E
gcauucgccagcagca

SEQ ID NO: 289207 - RNA, 17 nt, Human adenovirus E
gcauuucggacauggaa

SEQ ID NO: 289208 - RNA, 13 nt, Human adenovirus E
gccaagaucuccu

SEQ ID NO: 289209 - RNA, 22 nt, Human adenovirus E
gccagaaguucaccugccuggu

SEQ ID NO: 289210 - RNA, 13 nt, Human adenovirus E
gccaucagcagca

SEQ ID NO: 289211 - RNA, 22 nt, Human adenovirus E
gccaucaggcaugaugggaucu

SEQ ID NO: 289212 - RNA, 20 nt, Human adenovirus E
gccaucuccgcgaucuucau

SEQ ID NO: 289213 - RNA, 14 nt, Human adenovirus E
gcccaggacuacuc

SEQ ID NO: 289214 - RNA, 17 nt, Human adenovirus E
gcccaggacuacuccac

SEQ ID NO: 289215 - RNA, 18 nt, Human adenovirus E
gcccaguaauaacaccgg

SEQ ID NO: 289216 - RNA, 23 nt, Human adenovirus E
gcccgcgaacucuucaacccuga

SEQ ID NO: 289217 - RNA, 15 nt, Human adenovirus E
gcccgcuacaacagc

SEQ ID NO: 289218 - RNA, 18 nt, Human adenovirus E
gcccggagaaaacuggcg

SEQ ID NO: 289219 - RNA, 15 nt, Human adenovirus E
gcccuagaucugcug

SEQ ID NO: 289220 - RNA, 18 nt, Human adenovirus E
gcccuggagaugaugcug

SEQ ID NO: 289221 - RNA, 19 nt, Human adenovirus E
gccgagccacagcgaccca

SEQ ID NO: 289222 - RNA, 20 nt, Human adenovirus E
  unsure 11..11: n is a, c, g, or t
gccgaguugcnagauggcca

SEQ ID NO: 289223 - RNA, 21 nt, Human adenovirus E
gccgcgugcggucgcgcacca

SEQ ID NO: 289224 - RNA, 18 nt, Human adenovirus E
gccggccguccaccgugg

SEQ ID NO: 289225 - RNA, 20 nt, Human adenovirus E
gccguugucaaccacugcga

SEQ ID NO: 289226 - RNA, 19 nt, Human adenovirus E
gccucgacucccaccugcu

SEQ ID NO: 289227 - RNA, 15 nt, Human adenovirus E
gccucugggugaagg

SEQ ID NO: 289228 - RNA, 19 nt, Human adenovirus E
gccugcacccucaucuccu

SEQ ID NO: 289229 - RNA, 23 nt, Human adenovirus E
gccugcgccaucgucaacacggc

SEQ ID NO: 289230 - RNA, 19 nt, Human adenovirus E
gccugcgcgcgcccagcaa

SEQ ID NO: 289231 - RNA, 21 nt, Human adenovirus E
gccugcuacaucucagggaau

SEQ ID NO: 289232 - RNA, 16 nt, Human adenovirus E
gccuggucggagucaa

SEQ ID NO: 289233 - RNA, 17 nt, Human adenovirus E
gccuuacauguggagcu

SEQ ID NO: 289234 - RNA, 20 nt, Human adenovirus E
gccuuguugcgcagggccag

SEQ ID NO: 289235 - RNA, 15 nt, Human adenovirus E
gcgaacacgaucagc

SEQ ID NO: 289236 - RNA, 23 nt, Human adenovirus E
gcgaacucuucaacccugaccua

SEQ ID NO: 289237 - RNA, 21 nt, Human adenovirus E
gcgacaaccgcgugcuggaca

SEQ ID NO: 289238 - RNA, 12 nt, Human adenovirus E
gcgauacccugu

SEQ ID NO: 289239 - RNA, 18 nt, Human adenovirus E
gcgcaaauucaaggaaga

SEQ ID NO: 289240 - RNA, 21 nt, Human adenovirus E
gcgcacgggacgcagggccau

SEQ ID NO: 289241 - RNA, 14 nt, Human adenovirus E
gcgccaagagccgg

SEQ ID NO: 289242 - RNA, 11 nt, Human adenovirus E
gcgccaucagc

SEQ ID NO: 289243 - RNA, 14 nt, Human adenovirus E
gcgcccauggccau

SEQ ID NO: 289244 - RNA, 23 nt, Human adenovirus E
gcgcccggaccagguucugcuac

SEQ ID NO: 289245 - RNA, 17 nt, Human adenovirus E
gcgccucggagcagcga

SEQ ID NO: 289246 - RNA, 19 nt, Human adenovirus E
gcgcgagcucuuuaucaug

SEQ ID NO: 289247 - RNA, 22 nt, Human adenovirus E
gcgcguggcccgcuacaacagc

SEQ ID NO: 289248 - RNA, 15 nt, Human adenovirus E
gcggcagaugcagca

SEQ ID NO: 289249 - RNA, 22 nt, Human adenovirus E
gcggccgagcgcggacccugca

SEQ ID NO: 289250 - RNA, 15 nt, Human adenovirus E
gcgggcggggcggug

SEQ ID NO: 289251 - RNA, 18 nt, Human adenovirus E
gcggggaagaaucugacu

SEQ ID NO: 289252 - RNA, 20 nt, Human adenovirus E
gcgggguucgcuguccugca

SEQ ID NO: 289253 - RNA, 18 nt, Human adenovirus E
gcggucgaaggcgguggc

SEQ ID NO: 289254 - RNA, 23 nt, Human adenovirus E
gcgguggccauccaccagugcaa

SEQ ID NO: 289255 - RNA, 19 nt, Human adenovirus E
gcgugcuggacauggccag

SEQ ID NO: 289256 - RNA, 14 nt, Human adenovirus E
gcuacaucucaggg

SEQ ID NO: 289257 - RNA, 16 nt, Human adenovirus E
gcuacaucucagggaa

SEQ ID NO: 289258 - RNA, 20 nt, Human adenovirus E
gcuauuuuggaucugacacu

SEQ ID NO: 289259 - RNA, 12 nt, Human adenovirus E
gcuccacggugg

SEQ ID NO: 289260 - RNA, 13 nt, Human adenovirus E
gcuccugcagcug

SEQ ID NO: 289261 - RNA, 14 nt, Human adenovirus E
gcucgaacaccugc

SEQ ID NO: 289262 - RNA, 18 nt, Human adenovirus E
gcucgcucugaaacugug

SEQ ID NO: 289263 - RNA, 12 nt, Human adenovirus E
gcucuaugcaau

SEQ ID NO: 289264 - RNA, 13 nt, Human adenovirus E
gcucuaugcaauu

SEQ ID NO: 289265 - RNA, 14 nt, Human adenovirus E
gcucugaaacugug

SEQ ID NO: 289266 - RNA, 21 nt, Human adenovirus E
gcugacuaacucaggugucca

SEQ ID NO: 289267 - RNA, 17 nt, Human adenovirus E
gcugagacccggcacca

SEQ ID NO: 289268 - RNA, 21 nt, Human adenovirus E
gcugaguuuucagcccgaugg

SEQ ID NO: 289269 - RNA, 16 nt, Human adenovirus E
gcugauccccaucauc

SEQ ID NO: 289270 - RNA, 19 nt, Human adenovirus E
gcugcaucugccgccagcg

SEQ ID NO: 289271 - RNA, 14 nt, Human adenovirus E
gcuggacauggcca

SEQ ID NO: 289272 - RNA, 12 nt, Human adenovirus E
gcuggcccugug

SEQ ID NO: 289273 - RNA, 17 nt, Human adenovirus E
gcuucgacaccuggacc

SEQ ID NO: 289274 - RNA, 17 nt, Human adenovirus E
agcuguugagcugugag

SEQ ID NO: 289275 - RNA, 15 nt, Human adenovirus E
aggaauuaugccaag

SEQ ID NO: 289276 - RNA, 22 nt, Human adenovirus E
aggacccgguagaggugggcuu

SEQ ID NO: 289277 - RNA, 17 nt, Human adenovirus E
aggaucacccggugcug

SEQ ID NO: 289278 - RNA, 18 nt, Human adenovirus E
aggaucacccggugcugc

SEQ ID NO: 289279 - RNA, 17 nt, Human adenovirus E
aggauuauagugaacaa

SEQ ID NO: 289280 - RNA, 21 nt, Human adenovirus E
aggcaucuucugccuggugaa

SEQ ID NO: 289281 - RNA, 12 nt, Human adenovirus E
aggcaugaugag

SEQ ID NO: 289282 - RNA, 15 nt, Human adenovirus E
aggcaugaugggauc

SEQ ID NO: 289283 - RNA, 17 nt, Human adenovirus E
aggccaagaucuccuac

SEQ ID NO: 289284 - RNA, 18 nt, Human adenovirus E
aggccacaauacaugccc

SEQ ID NO: 289285 - RNA, 21 nt, Human adenovirus E
aggcuggcggggaacgggaug

SEQ ID NO: 289286 - RNA, 19 nt, Human adenovirus E
agggguggggacugugagu

SEQ ID NO: 289287 - RNA, 18 nt, Human adenovirus E
aggguguggagugcaaua

SEQ ID NO: 289288 - RNA, 20 nt, Human adenovirus E
aggguguggagugcaauaaa

SEQ ID NO: 289289 - RNA, 15 nt, Human adenovirus E
aggguuggcaugcag

SEQ ID NO: 289290 - RNA, 14 nt, Human adenovirus E
agguauaagaguua

SEQ ID NO: 289291 - RNA, 14 nt, Human adenovirus E
aggugaugucagua

SEQ ID NO: 289292 - RNA, 14 nt, Human adenovirus E
aggugggcuuggau

SEQ ID NO: 289293 - RNA, 11 nt, Human adenovirus E
agguggugaac

SEQ ID NO: 289294 - RNA, 18 nt, Human adenovirus E
agucauagcaggggcgca

SEQ ID NO: 289295 - RNA, 19 nt, Human adenovirus E
aguccagcugacuaacuca

SEQ ID NO: 289296 - RNA, 15 nt, Human adenovirus E
agucuacagggccaa

SEQ ID NO: 289297 - RNA, 16 nt, Human adenovirus E
agugaaauaaagauca

SEQ ID NO: 289298 - RNA, 22 nt, Human adenovirus E
aguguuuuauugauucaacagu

SEQ ID NO: 289299 - RNA, 16 nt, Human adenovirus E
aguucgaaucauucaa

SEQ ID NO: 289300 - RNA, 22 nt, Human adenovirus E
aguucugugcgaggauugcccu

SEQ ID NO: 289301 - RNA, 14 nt, Human adenovirus E
aguugagagugcug

SEQ ID NO: 289302 - RNA, 15 nt, Human adenovirus E
auaaagaucauauug

SEQ ID NO: 289303 - RNA, 15 nt, Human adenovirus E
auaaucccgccagcc

SEQ ID NO: 289304 - RNA, 20 nt, Human adenovirus E
auacaaucauauugaugauu

SEQ ID NO: 289305 - RNA, 20 nt, Human adenovirus E
auacaugcccauauuagacu

SEQ ID NO: 289306 - RNA, 15 nt, Human adenovirus E
auagacuuguucagc

SEQ ID NO: 289307 - RNA, 20 nt, Human adenovirus E
auaggguguggagugcaaua

SEQ ID NO: 289308 - RNA, 13 nt, Human adenovirus E
aucacaccuucca

SEQ ID NO: 289309 - RNA, 14 nt, Human adenovirus E
aucagaaaugccug

SEQ ID NO: 289310 - RNA, 21 nt, Human adenovirus E
aucaggaauuaugccaagcug

SEQ ID NO: 289311 - RNA, 16 nt, Human adenovirus E
aucagucucacuuuaa

SEQ ID NO: 289312 - RNA, 12 nt, Human adenovirus E
aucauuaccucu

SEQ ID NO: 289313 - RNA, 14 nt, Human adenovirus E
aucauuugauuuga

SEQ ID NO: 289314 - RNA, 13 nt, Human adenovirus E
auccacugcuccu

SEQ ID NO: 289315 - RNA, 16 nt, Human adenovirus E
aucccgaauaccacag

SEQ ID NO: 289316 - RNA, 18 nt, Human adenovirus E
aucgccguugucaaccac

SEQ ID NO: 289317 - RNA, 20 nt, Human adenovirus E
aucgccguugucaaccacug

SEQ ID NO: 289318 - RNA, 14 nt, Human adenovirus E
aucuacugaacucu

SEQ ID NO: 289319 - RNA, 20 nt, Human adenovirus E
aucucagggaauggggcuga

SEQ ID NO: 289320 - RNA, 11 nt, Human adenovirus E
aucucuugcac

SEQ ID NO: 289321 - RNA, 12 nt, Human adenovirus E
aucugacacuac

SEQ ID NO: 289322 - RNA, 17 nt, Human adenovirus E
aucugacgccucugggu

SEQ ID NO: 289323 - RNA, 16 nt, Human adenovirus E
aucugauacuccucaa

SEQ ID NO: 289324 - RNA, 18 nt, Human adenovirus E
aucugcugcacggucuga

SEQ ID NO: 289325 - RNA, 15 nt, Human adenovirus E
aucuggggauggugc

SEQ ID NO: 289326 - RNA, 22 nt, Human adenovirus E
aucugucuccaggaaagggugg

SEQ ID NO: 289327 - RNA, 13 nt, Human adenovirus E
augaaagucuuug

SEQ ID NO: 289328 - RNA, 18 nt, Human adenovirus E
augaaucagauguaucua

SEQ ID NO: 289329 - RNA, 15 nt, Human adenovirus E
augaccacaaccaca

SEQ ID NO: 289330 - RNA, 19 nt, Human adenovirus E
augagaaaauuacuauuua

SEQ ID NO: 289331 - RNA, 12 nt, Human adenovirus E
augagagcauua

SEQ ID NO: 289332 - RNA, 19 nt, Human adenovirus E
augagagcauuacucucau

SEQ ID NO: 289333 - RNA, 16 nt, Human adenovirus E
augagggccagaauaa

SEQ ID NO: 289334 - RNA, 14 nt, Human adenovirus E
augaucucacgggu

SEQ ID NO: 289335 - RNA, 16 nt, Human adenovirus E
augcaacaacaacagc

SEQ ID NO: 289336 - RNA, 17 nt, Human adenovirus E
augcaacaacaacagcc

SEQ ID NO: 289337 - RNA, 23 nt, Human adenovirus E
augcagggugggauacaguguuc

SEQ ID NO: 289338 - RNA, 20 nt, Human adenovirus E
augcaucccagcuggaucau

SEQ ID NO: 289339 - RNA, 17 nt, Human adenovirus E
augcaugcggggggaga

SEQ ID NO: 289340 - RNA, 17 nt, Human adenovirus E
augcauguguaacauga

SEQ ID NO: 289341 - RNA, 17 nt, Human adenovirus E
augccugcuacaucuca

SEQ ID NO: 289342 - RNA, 17 nt, Human adenovirus E
augcggcccaugagcug

SEQ ID NO: 289343 - RNA, 17 nt, Human adenovirus E
augcuuuuggucuccac

SEQ ID NO: 289344 - RNA, 22 nt, Human adenovirus E
auggcaaucggugcgcgguacu

SEQ ID NO: 289345 - RNA, 18 nt, Human adenovirus E
auggcauucagauguuca

SEQ ID NO: 289346 - RNA, 20 nt, Human adenovirus E
auggcauucagauguucaag

SEQ ID NO: 289347 - RNA, 18 nt, Human adenovirus E
auggugggguucuugucc

SEQ ID NO: 289348 - RNA, 14 nt, Human adenovirus E
auguaucuacugaa

SEQ ID NO: 289349 - RNA, 16 nt, Human adenovirus E
auguaucuacugaacu

SEQ ID NO: 289350 - RNA, 13 nt, Human adenovirus E
auguauuauggaa

SEQ ID NO: 289351 - RNA, 15 nt, Human adenovirus E
augucuugauucaug

SEQ ID NO: 289352 - RNA, 23 nt, Human adenovirus E
auuaacaauuauauaugcaaugg

SEQ ID NO: 289353 - RNA, 20 nt, Human adenovirus E
auuaccucugcucuaugcaa

SEQ ID NO: 289354 - RNA, 11 nt, Human adenovirus E
auuacgggcua

SEQ ID NO: 289355 - RNA, 13 nt, Human adenovirus E
auuauagugaaca

SEQ ID NO: 289356 - RNA, 13 nt, Human adenovirus E
auuauauaugcaa

SEQ ID NO: 289357 - RNA, 14 nt, Human adenovirus E
auuauauaugcaau

SEQ ID NO: 289358 - RNA, 15 nt, Human adenovirus E
auuauauaugcaaug

SEQ ID NO: 289359 - RNA, 23 nt, Human adenovirus E
auuaugccaagcuggcucugagg

SEQ ID NO: 289360 - RNA, 16 nt, Human adenovirus E
auucaacaguuuuaca

SEQ ID NO: 289361 - RNA, 15 nt, Human adenovirus E
auucucaucucgccc

SEQ ID NO: 289362 - RNA, 14 nt, Human adenovirus E
auugagcacccggu

SEQ ID NO: 289363 - RNA, 12 nt, Human adenovirus E
auugaugaugau

SEQ ID NO: 289364 - RNA, 14 nt, Human adenovirus E
auugaugaugauuu

SEQ ID NO: 289365 - RNA, 21 nt, Human adenovirus E
auugccgucauucauggaaug

SEQ ID NO: 289366 - RNA, 20 nt, Human adenovirus E
auugcgauacccuguccaug

SEQ ID NO: 289367 - RNA, 17 nt, Human adenovirus E
auuggacccaggccaug

SEQ ID NO: 289368 - RNA, 20 nt, Human adenovirus E
auuuacacuggcacuaauca

SEQ ID NO: 289369 - RNA, 15 nt, Human adenovirus E
auuucgagagcccuu

SEQ ID NO: 289370 - RNA, 15 nt, Human adenovirus E
auuugccagucucau

SEQ ID NO: 289371 - RNA, 18 nt, Human adenovirus E
auuuggauuucaccgugg

SEQ ID NO: 289372 - RNA, 13 nt, Human adenovirus E
auuugguguugcc

SEQ ID NO: 289373 - RNA, 16 nt, Human adenovirus E
auuuuaaugaaucaga

SEQ ID NO: 289374 - RNA, 20 nt, Human adenovirus E
auuuuggaucugacacuaca

SEQ ID NO: 289375 - RNA, 15 nt, Human adenovirus E
ugcgcacaugugcga

SEQ ID NO: 289376 - RNA, 13 nt, Human adenovirus E
ugcgcgguacuga

SEQ ID NO: 289377 - RNA, 14 nt, Human adenovirus E
ugcggaugggaaug

SEQ ID NO: 289378 - RNA, 20 nt, Human adenovirus E
ugcggccuccgcgaccuccu

SEQ ID NO: 289379 - RNA, 20 nt, Human adenovirus E
ugcggggggagaggguggug

SEQ ID NO: 289380 - RNA, 15 nt, Human adenovirus E
ugcgucucgggaccc

SEQ ID NO: 289381 - RNA, 17 nt, Human adenovirus E
ugcuacaucucagggaa

SEQ ID NO: 289382 - RNA, 15 nt, Human adenovirus E
ugcuaccgccaaaaa

SEQ ID NO: 289383 - RNA, 15 nt, Human adenovirus E
ugcuagaugcaacaa

SEQ ID NO: 289384 - RNA, 22 nt, Human adenovirus E
ugcuagaugcaacaacaacagc

SEQ ID NO: 289385 - RNA, 23 nt, Human adenovirus E
ugcuagaugcaacaacaacagcc

SEQ ID NO: 289386 - RNA, 20 nt, Human adenovirus E
ugcuccugcagcugagccac

SEQ ID NO: 289387 - RNA, 12 nt, Human adenovirus E
ugcugcaucugc

SEQ ID NO: 289388 - RNA, 22 nt, Human adenovirus E
ugcuguuuauuaaagacauuua

SEQ ID NO: 289389 - RNA, 15 nt, Human adenovirus E
ugcuucggaucuuca

SEQ ID NO: 289390 - RNA, 21 nt, Human adenovirus E
ugcuuucgugguauugcuauu

SEQ ID NO: 289391 - RNA, 17 nt, Human adenovirus E
uggaaugaguaaugaga

SEQ ID NO: 289392 - RNA, 12 nt, Human adenovirus E
uggacaugcuuu

SEQ ID NO: 289393 - RNA, 20 nt, Human adenovirus E
uggacccaggccaugcaacg

SEQ ID NO: 289394 - RNA, 22 nt, Human adenovirus E
uggaccgcgaggacaacaccua

SEQ ID NO: 289395 - RNA, 18 nt, Human adenovirus E
uggagaacaaggccaucc

SEQ ID NO: 289396 - RNA, 22 nt, Human adenovirus E
uggcaaaauucaaaauucuuaa

SEQ ID NO: 289397 - RNA, 13 nt, Human adenovirus E
uggcacuaaucac

SEQ ID NO: 289398 - RNA, 19 nt, Human adenovirus E
uggccaacaacaacgucaa

SEQ ID NO: 289399 - RNA, 16 nt, Human adenovirus E
uggcccgcuacaacag

SEQ ID NO: 289400 - RNA, 21 nt, Human adenovirus E
uggcgggcggggcggugcugg

SEQ ID NO: 289401 - RNA, 16 nt, Human adenovirus E
ugggauacaguguuca

SEQ ID NO: 289402 - RNA, 17 nt, Human adenovirus E
ugggaucuucaucacuc

SEQ ID NO: 289403 - RNA, 15 nt, Human adenovirus E
ugggcgggagugcgu

SEQ ID NO: 289404 - RNA, 13 nt, Human adenovirus E
uggggacugugag

SEQ ID NO: 289405 - RNA, 15 nt, Human adenovirus E
uggggacugugagua

SEQ ID NO: 289406 - RNA, 14 nt, Human adenovirus E
ugguacugaucuga

SEQ ID NO: 289407 - RNA, 15 nt, Human adenovirus E
ugguacugaucugau

SEQ ID NO: 289408 - RNA, 18 nt, Human adenovirus E
uggucuucacgcccggcg

SEQ ID NO: 289409 - RNA, 15 nt, Human adenovirus E
uggugaaggaggaaa

SEQ ID NO: 289410 - RNA, 14 nt, Human adenovirus E
ugguggaggaucac

SEQ ID NO: 289411 - RNA, 16 nt, Human adenovirus E
ugguggaggaucaccc

SEQ ID NO: 289412 - RNA, 18 nt, Human adenovirus E
ugguguauuccauguccu

SEQ ID NO: 289413 - RNA, 17 nt, Human adenovirus E
ugguuccgcaggaucau

SEQ ID NO: 289414 - RNA, 16 nt, Human adenovirus E
ugguuuaugacucagg

SEQ ID NO: 289415 - RNA, 19 nt, Human adenovirus E
uguagguauguauuaugga

SEQ ID NO: 289416 - RNA, 13 nt, Human adenovirus E
uguauuauggaac

SEQ ID NO: 289417 - RNA, 19 nt, Human adenovirus E
ugucuuguuucuggaugug

SEQ ID NO: 289418 - RNA, 18 nt, Human adenovirus E
ugugaggagaccgagacc

SEQ ID NO: 289419 - RNA, 18 nt, Human adenovirus E
ugugcgaggauugcccug

SEQ ID NO: 289420 - RNA, 14 nt, Human adenovirus E
uguggaaacaauaa

SEQ ID NO: 289421 - RNA, 17 nt, Human adenovirus E
ugugggucugaugaguc

SEQ ID NO: 289422 - RNA, 13 nt, Human adenovirus E
ugugguggcauga

SEQ ID NO: 289423 - RNA, 13 nt, Human adenovirus E
uguguaacaugaa

SEQ ID NO: 289424 - RNA, 21 nt, Human adenovirus E
uguucagcucccagaugaucc

SEQ ID NO: 289425 - RNA, 15 nt, Human adenovirus E
uguucauucuugggc

SEQ ID NO: 289426 - RNA, 24 nt, Human adenovirus E
uguucuggucuuuuugacgcucuu

SEQ ID NO: 289427 - RNA, 20 nt, Human adenovirus E
uguuuuauugauucaacagu

SEQ ID NO: 289428 - RNA, 14 nt, Human adenovirus E
uuaaaauuaacaau

SEQ ID NO: 289429 - RNA, 22 nt, Human adenovirus E
uuaacuugggccaucagucuca

SEQ ID NO: 289430 - RNA, 23 nt, Human adenovirus E
uuaagugcgugguuuaugacuca

SEQ ID NO: 289431 - RNA, 16 nt, Human adenovirus E
uuagacagcagcccca

SEQ ID NO: 289432 - RNA, 18 nt, Human adenovirus E
uuaucuggggauggugca

SEQ ID NO: 289433 - RNA, 13 nt, Human adenovirus E
uuaugacucaggg

SEQ ID NO: 289434 - RNA, 21 nt, Human adenovirus E
uuaugccaagcuggcucugag

SEQ ID NO: 289435 - RNA, 23 nt, Human adenovirus E
uuauuaaagacauuuaacauaca

SEQ ID NO: 289436 - RNA, 17 nt, Human adenovirus E
uuauuugccagucucau

SEQ ID NO: 289437 - RNA, 16 nt, Human adenovirus E
uucaauguggaucuga

SEQ ID NO: 289438 - RNA, 16 nt, Human adenovirus E
uucagcucccagauga

SEQ ID NO: 289439 - RNA, 23 nt, Human adenovirus E
uucauggaaugaguaaugagaaa

SEQ ID NO: 289440 - RNA, 22 nt, Human adenovirus E
uuccaccugaucccgaauacca

SEQ ID NO: 289441 - RNA, 20 nt, Human adenovirus E
uuccucaaaugcuaccgcca

SEQ ID NO: 289442 - RNA, 13 nt, Human adenovirus E
uuccugaauccau

SEQ ID NO: 289443 - RNA, 17 nt, Human adenovirus E
uucgcucgggaucucgc

SEQ ID NO: 289444 - RNA, 15 nt, Human adenovirus E
uucgcuguccugcaa

SEQ ID NO: 289445 - RNA, 14 nt, Human adenovirus E
uucggacauggaau

SEQ ID NO: 289446 - RNA, 18 nt, Human adenovirus E
uucgucguuggacgcagc

SEQ ID NO: 289447 - RNA, 15 nt, Human adenovirus E
uucuguguguugcag

SEQ ID NO: 289448 - RNA, 22 nt, Human adenovirus E
uugaaagguccagaaaaagcca

SEQ ID NO: 289449 - RNA, 20 nt, Human adenovirus E
uugaacaucugaaugccauu

SEQ ID NO: 289450 - RNA, 11 nt, Human adenovirus E
uugacuuuaag

SEQ ID NO: 289451 - RNA, 22 nt, Human adenovirus E
uugacuuuaagugcgugguuua

SEQ ID NO: 289452 - RNA, 17 nt, Human adenovirus E
uugaggugaugucagua

SEQ ID NO: 289453 - RNA, 22 nt, Human adenovirus E
uugaggugaugucaguauuuau

SEQ ID NO: 289454 - RNA, 23 nt, Human adenovirus E
uugaguuuaacaaaaaaauaaag

SEQ ID NO: 289455 - RNA, 16 nt, Human adenovirus E
uugaucccauacucca

SEQ ID NO: 289456 - RNA, 12 nt, Human adenovirus E
uugaugauuuga

SEQ ID NO: 289457 - RNA, 18 nt, Human adenovirus E
uugaugauuugaguuuaa

SEQ ID NO: 289458 - RNA, 19 nt, Human adenovirus E
uugauucaacaguuuuaca

SEQ ID NO: 289459 - RNA, 12 nt, Human adenovirus E
uugcaucaucug

SEQ ID NO: 289460 - RNA, 19 nt, Human adenovirus E
uugcuauuuuggaucugac

SEQ ID NO: 289461 - RNA, 16 nt, Human adenovirus E
uugggaucgugaacau

SEQ ID NO: 289462 - RNA, 14 nt, Human adenovirus E
uuguucagcuccca

SEQ ID NO: 289463 - RNA, 23 nt, Human adenovirus E
uuguugaucccauacuccaccuc

SEQ ID NO: 289464 - RNA, 19 nt, Human adenovirus E
uuguugguuagagccugag

SEQ ID NO: 289465 - RNA, 18 nt, Human adenovirus E
uuuaccccugcuuugacu

SEQ ID NO: 289466 - RNA, 17 nt, Human adenovirus E
uuuauuugccagucuca

SEQ ID NO: 289467 - RNA, 19 nt, Human adenovirus E
uuucaaucccaacaaaugc

SEQ ID NO: 289468 - RNA, 13 nt, Human adenovirus E
uuuccugaacugc

SEQ ID NO: 289469 - RNA, 17 nt, Human adenovirus E
uuugaaguacuccgaga

SEQ ID NO: 289470 - RNA, 14 nt, Human adenovirus E
uuugguguaggugu

SEQ ID NO: 289471 - RNA, 16 nt, Human adenovirus E
uuuuccaggacccggu

SEQ ID NO: 289472 - RNA, 14 nt, Human adenovirus E
uuuuggaucugaca

SEQ ID NO: 289473 - RNA, 12 nt, Human adenovirus E
uuuuucagacca

SEQ ID NO: 289474 - RNA, 12 nt, Human adenovirus E
agagacuaugua

SEQ ID NO: 289475 - RNA, 18 nt, Human adenovirus E
agagaugcuccaggucau

SEQ ID NO: 289476 - RNA, 12 nt, Human adenovirus E
agagcauuacuc

SEQ ID NO: 289477 - RNA, 22 nt, Human adenovirus E
agaggcaugaugagacuaauca

SEQ ID NO: 289478 - RNA, 23 nt, Human adenovirus E
agaggcaugaugagacuaaucac

SEQ ID NO: 289479 - RNA, 15 nt, Human adenovirus E
agaggugccaucucc

SEQ ID NO: 289480 - RNA, 11 nt, Human adenovirus E
agagugcugaa

SEQ ID NO: 289481 - RNA, 19 nt, Human adenovirus E
agaguggggugggaagggu

SEQ ID NO: 289482 - RNA, 17 nt, Human adenovirus E
agauacaaucauauuga

SEQ ID NO: 289483 - RNA, 19 nt, Human adenovirus E
agauacaaucauauugaug

SEQ ID NO: 289484 - RNA, 17 nt, Human adenovirus E
agaucauauugaugaug

SEQ ID NO: 289485 - RNA, 12 nt, Human adenovirus E
agaucugcugca

SEQ ID NO: 289486 - RNA, 16 nt, Human adenovirus E
agaugcauguguaaca

SEQ ID NO: 289487 - RNA, 15 nt, Human adenovirus E
agauggaagacauca

SEQ ID NO: 289488 - RNA, 10 nt, Human adenovirus E
agauggccac

SEQ ID NO: 289489 - RNA, 15 nt, Human adenovirus E
agauuacuaagcuga

SEQ ID NO: 289490 - RNA, 23 nt, Human adenovirus E
agauuacuaagcugauaaauauc

SEQ ID NO: 289491 - RNA, 20 nt, Human adenovirus E
agcaaccucaggcacacgca

SEQ ID NO: 289492 - RNA, 12 nt, Human adenovirus E
agcaaguucaug

SEQ ID NO: 289493 - RNA, 21 nt, Human adenovirus E
agcaccaacgugcagaccaac

SEQ ID NO: 289494 - RNA, 18 nt, Human adenovirus E
agcaggugcagaccugug

SEQ ID NO: 289495 - RNA, 18 nt, Human adenovirus E
agcaguuauuuuuccucc

SEQ ID NO: 289496 - RNA, 17 nt, Human adenovirus E
agccaccugcuggguca

SEQ ID NO: 289497 - RNA, 21 nt, Human adenovirus E
agcccacgaccguacuacuuc

SEQ ID NO: 289498 - RNA, 14 nt, Human adenovirus E
agcccgauggcaau

SEQ ID NO: 289499 - RNA, 19 nt, Human adenovirus E
agccgccuccacccaucau

SEQ ID NO: 289500 - RNA, 16 nt, Human adenovirus E
agccgcgucccgccau

SEQ ID NO: 289501 - RNA, 14 nt, Human adenovirus E
agccugaggaugau

SEQ ID NO: 289502 - RNA, 16 nt, Human adenovirus E
agcgaaggguaugcuu

SEQ ID NO: 289503 - RNA, 21 nt, Human adenovirus E
agcgcccggaccagguucugc

SEQ ID NO: 289504 - RNA, 23 nt, Human adenovirus E
agcgcccggaccagguucugcua

SEQ ID NO: 289505 - RNA, 15 nt, Human adenovirus E
agcgccucaagcaga

SEQ ID NO: 289506 - RNA, 23 nt, Human adenovirus E
agcgcguccggguggaugaugac

SEQ ID NO: 289507 - RNA, 15 nt, Human adenovirus E
agcgcuccggcaccg

SEQ ID NO: 289508 - RNA, 19 nt, Human adenovirus E
agcgggagaggcaugauga

SEQ ID NO: 289509 - RNA, 18 nt, Human adenovirus E
agcgggggcgagaggugc

SEQ ID NO: 289510 - RNA, 22 nt, Human adenovirus E
agcgguggguccuccauugcca

SEQ ID NO: 289511 - RNA, 12 nt, Human adenovirus E
agcucaacagcu

SEQ ID NO: 289512 - RNA, 20 nt, Human adenovirus E
agcugagacagcgacuacuc

SEQ ID NO: 289513 - RNA, 21 nt, Human adenovirus E
agcugagacagcgacuacucc

SEQ ID NO: 289514 - RNA, 13 nt, Human adenovirus E
agcugcgagaagg

SEQ ID NO: 289515 - RNA, 14 nt, Human adenovirus E
aggaaaggguggcu

SEQ ID NO: 289516 - RNA, 21 nt, Human adenovirus E
aggacaauccucagcuguuga

SEQ ID NO: 289517 - RNA, 22 nt, Human adenovirus E
aggacaauccucagcuguugag

SEQ ID NO: 289518 - RNA, 19 nt, Human adenovirus E
aggaggagacugauggcca

SEQ ID NO: 289519 - RNA, 20 nt, Human adenovirus E
aggaucacccggugcugccu

SEQ ID NO: 289520 - RNA, 20 nt, Human adenovirus E
aggaucauccggggcugcau

SEQ ID NO: 289521 - RNA, 21 nt, Human adenovirus E
aggaucauccggggcugcaug

SEQ ID NO: 289522 - RNA, 20 nt, Human adenovirus E
aggcacacgcacuaccacca

SEQ ID NO: 289523 - RNA, 18 nt, Human adenovirus E
aggcauuucggacaugga

SEQ ID NO: 289524 - RNA, 19 nt, Human adenovirus E
aggcccuagaucugcugca

SEQ ID NO: 289525 - RNA, 20 nt, Human adenovirus E
aggcuuccugcccgcgcuga

SEQ ID NO: 289526 - RNA, 17 nt, Human adenovirus E
aggggugcauccacugc

SEQ ID NO: 289527 - RNA, 17 nt, Human adenovirus E
agggugguguauuccau

SEQ ID NO: 289528 - RNA, 18 nt, Human adenovirus E
aggguuggcaugcagggu

SEQ ID NO: 289529 - RNA, 14 nt, Human adenovirus E
agguacaugggcau

SEQ ID NO: 289530 - RNA, 16 nt, Human adenovirus E
agguagccaucaggaa

SEQ ID NO: 289531 - RNA, 12 nt, Human adenovirus E
aggucaggguug

SEQ ID NO: 289532 - RNA, 20 nt, Human adenovirus E
aggucuucgaguggucggga

SEQ ID NO: 289533 - RNA, 16 nt, Human adenovirus E
aggugcaucuuggccu

SEQ ID NO: 289534 - RNA, 13 nt, Human adenovirus E
agguucugcuaca

SEQ ID NO: 289535 - RNA, 22 nt, Human adenovirus E
aguaccucaccuggcuguucca

SEQ ID NO: 289536 - RNA, 17 nt, Human adenovirus E
agugaaauaaagaucau

SEQ ID NO: 289537 - RNA, 20 nt, Human adenovirus E
agugaacaauuugagguuau

SEQ ID NO: 289538 - RNA, 22 nt, Human adenovirus E
aguuauuuuuccuccacccucc

SEQ ID NO: 289539 - RNA, 15 nt, Human adenovirus E
aguugagagugcuga

SEQ ID NO: 289540 - RNA, 17 nt, Human adenovirus E
  unsure 7..7: n is a, c, g, or t
aguugcnagauggccac

SEQ ID NO: 289541 - RNA, 23 nt, Human adenovirus E
aguuguccugguaugcgaucucg

SEQ ID NO: 289542 - RNA, 17 nt, Human adenovirus E
aacggagacgguuguug

SEQ ID NO: 289543 - RNA, 20 nt, Human adenovirus E
aacggagucucuuaccugug

SEQ ID NO: 289544 - RNA, 17 nt, Human adenovirus E
aacuacagcaggcauuu

SEQ ID NO: 289545 - RNA, 17 nt, Human adenovirus E
aacugaacugacugugg

SEQ ID NO: 289546 - RNA, 12 nt, Human adenovirus E
aacugcaucaug

SEQ ID NO: 289547 - RNA, 19 nt, Human adenovirus E
aacugcgccgggugcugac

SEQ ID NO: 289548 - RNA, 16 nt, Human adenovirus E
aagaagaaagugaugu

SEQ ID NO: 289549 - RNA, 12 nt, Human adenovirus E
aagaaucugacu

SEQ ID NO: 289550 - RNA, 16 nt, Human adenovirus E
aagagaggcaucuucu

SEQ ID NO: 289551 - RNA, 21 nt, Human adenovirus E
aagauacaaucauauugauga

SEQ ID NO: 289552 - RNA, 17 nt, Human adenovirus E
aagaucucuugcacguc

SEQ ID NO: 289553 - RNA, 18 nt, Human adenovirus E
aagauuacuaagcugaua

SEQ ID NO: 289554 - RNA, 14 nt, Human adenovirus E
aagcaguacgauau

SEQ ID NO: 289555 - RNA, 22 nt, Human adenovirus E
aagccaccguggaacaucucga

SEQ ID NO: 289556 - RNA, 23 nt, Human adenovirus E
aagccccacaagaaguaccucac

SEQ ID NO: 289557 - RNA, 13 nt, Human adenovirus E
aagcggcuccuuu

SEQ ID NO: 289558 - RNA, 23 nt, Human adenovirus E
aaggcugugcggggggagagggu

SEQ ID NO: 289559 - RNA, 20 nt, Human adenovirus E
aaggguuggcaugcagggug

SEQ ID NO: 289560 - RNA, 21 nt, Human adenovirus E
aaguaacuguuguugauccca

SEQ ID NO: 289561 - RNA, 20 nt, Human adenovirus E
aaguacaagauuacuaagcu

SEQ ID NO: 289562 - RNA, 15 nt, Human adenovirus E
aauaaagaucauauu

SEQ ID NO: 289563 - RNA, 21 nt, Human adenovirus E
aauaacugcucgaauccugua

SEQ ID NO: 289564 - RNA, 17 nt, Human adenovirus E
aaucacagaacugaacu

SEQ ID NO: 289565 - RNA, 14 nt, Human adenovirus E
aaucagacaugcau

SEQ ID NO: 289566 - RNA, 14 nt, Human adenovirus E
aaucagauguaucu

SEQ ID NO: 289567 - RNA, 16 nt, Human adenovirus E
aauccaucaaccaguc

SEQ ID NO: 289568 - RNA, 20 nt, Human adenovirus E
aauccaucaaccagucuuug

SEQ ID NO: 289569 - RNA, 19 nt, Human adenovirus E
aaugaccacaaccacaaaa

SEQ ID NO: 289570 - RNA, 22 nt, Human adenovirus E
aaugagaaaauuacuauuuaca

SEQ ID NO: 289571 - RNA, 22 nt, Human adenovirus E
aaugagagcauuacucucauca

SEQ ID NO: 289572 - RNA, 13 nt, Human adenovirus E
aauuaacaauuau

SEQ ID NO: 289573 - RNA, 15 nt, Human adenovirus E
aauuacuauuuacac

SEQ ID NO: 289574 - RNA, 14 nt, Human adenovirus E
aauuacucacacca

SEQ ID NO: 289575 - RNA, 15 nt, Human adenovirus E
aauuacucacaccac

SEQ ID NO: 289576 - RNA, 14 nt, Human adenovirus E
aauugcaucaucug

SEQ ID NO: 289577 - RNA, 23 nt, Human adenovirus E
aauuucaacaccgagcguuccaa

SEQ ID NO: 289578 - RNA, 20 nt, Human adenovirus E
acaaaaaaauaaagaaucac

SEQ ID NO: 289579 - RNA, 23 nt, Human adenovirus E
acaaaaaaauaaagaaucacuua

SEQ ID NO: 289580 - RNA, 14 nt, Human adenovirus E
acaaaauugcauca

SEQ ID NO: 289581 - RNA, 20 nt, Human adenovirus E
acaaccaaacuaaccuccac

SEQ ID NO: 289582 - RNA, 18 nt, Human adenovirus E
acaagacucggaacaaua

SEQ ID NO: 289583 - RNA, 19 nt, Human adenovirus E
acaauaacaagacucggaa

SEQ ID NO: 289584 - RNA, 13 nt, Human adenovirus E
acaauacaugccc

SEQ ID NO: 289585 - RNA, 17 nt, Human adenovirus E
acaaucauauugaugau

SEQ ID NO: 289586 - RNA, 21 nt, Human adenovirus E
acaaucauauugaugauuuga

SEQ ID NO: 289587 - RNA, 18 nt, Human adenovirus E
acaauuauauaugcaaug

SEQ ID NO: 289588 - RNA, 19 nt, Human adenovirus E
acacacacgguuuacaugu

SEQ ID NO: 289589 - RNA, 21 nt, Human adenovirus E
acacauugaaagguccagaaa

SEQ ID NO: 289590 - RNA, 20 nt, Human adenovirus E
acagaacugaacugacugug

SEQ ID NO: 289591 - RNA, 17 nt, Human adenovirus E
acagacccuucugacuc

SEQ ID NO: 289592 - RNA, 16 nt, Human adenovirus E
acagauggaagacauc

SEQ ID NO: 289593 - RNA, 20 nt, Human adenovirus E
acagccuugaacaucugaau

SEQ ID NO: 289594 - RNA, 17 nt, Human adenovirus E
acagcgacccaugcucc

SEQ ID NO: 289595 - RNA, 13 nt, Human adenovirus E
acagcgacuacuc

SEQ ID NO: 289596 - RNA, 15 nt, Human adenovirus E
acagcucaacagcug

SEQ ID NO: 289597 - RNA, 18 nt, Human adenovirus E
acaggauuauagugaaca

SEQ ID NO: 289598 - RNA, 21 nt, Human adenovirus E
acauucuggccugcacccuca

SEQ ID NO: 289599 - RNA, 22 nt, Human adenovirus E
accaaggggugcauccacugcu

SEQ ID NO: 289600 - RNA, 19 nt, Human adenovirus E
accacagcaaccucaggca

SEQ ID NO: 289601 - RNA, 15 nt, Human adenovirus E
accagaggauuucga

SEQ ID NO: 289602 - RNA, 15 nt, Human adenovirus E
acccaccacaauuac

SEQ ID NO: 289603 - RNA, 15 nt, Human adenovirus E
accccgagugguaca

SEQ ID NO: 289604 - RNA, 14 nt, Human adenovirus E
acccgaucauuugg

SEQ ID NO: 289605 - RNA, 20 nt, Human adenovirus E
acccgcagaagcaagcucca

SEQ ID NO: 289606 - RNA, 13 nt, Human adenovirus E
auuauacacugaa

SEQ ID NO: 289607 - RNA, 13 nt, Human adenovirus E
auucaacaguuuu

SEQ ID NO: 289608 - RNA, 23 nt, Human adenovirus E
auucauggaaugaguaaugagaa

SEQ ID NO: 289609 - RNA, 17 nt, Human adenovirus E
auucccacgccuuacau

SEQ ID NO: 289610 - RNA, 18 nt, Human adenovirus E
auugaaagguccagaaaa

SEQ ID NO: 289611 - RNA, 15 nt, Human adenovirus E
auugccgucauucau

SEQ ID NO: 289612 - RNA, 22 nt, Human adenovirus E
auuuauaggguguggagugcaa

SEQ ID NO: 289613 - RNA, 22 nt, Human adenovirus E
auuucaacaccgagcguuccaa

SEQ ID NO: 289614 - RNA, 17 nt, Human adenovirus E
auuucggacauggaauu

SEQ ID NO: 289615 - RNA, 22 nt, Human adenovirus E
auuugaaauaaagauacaauca

SEQ ID NO: 289616 - RNA, 13 nt, Human adenovirus E
auuuuuccuccac

SEQ ID NO: 289617 - RNA, 19 nt, Human adenovirus E
caaaaaaauaaagaaucac

SEQ ID NO: 289618 - RNA, 21 nt, Human adenovirus E
caaaaaaauaaagaaucacuu

SEQ ID NO: 289619 - RNA, 13 nt, Human adenovirus E
caaaaaucagaca

SEQ ID NO: 289620 - RNA, 21 nt, Human adenovirus E
caaaaaucagacaugcauccc

SEQ ID NO: 289621 - RNA, 14 nt, Human adenovirus E
caaaugcaaauucc

SEQ ID NO: 289622 - RNA, 15 nt, Human adenovirus E
caaauuauacacuga

SEQ ID NO: 289623 - RNA, 17 nt, Human adenovirus E
caacaaaauugcaucau

SEQ ID NO: 289624 - RNA, 20 nt, Human adenovirus E
caacauagacuuguucagcu

SEQ ID NO: 289625 - RNA, 13 nt, Human adenovirus E
caacgcuccacgc

SEQ ID NO: 289626 - RNA, 13 nt, Human adenovirus E
caacgucaacgac

SEQ ID NO: 289627 - RNA, 21 nt, Human adenovirus E
caacucgaguuccaccaauaa

SEQ ID NO: 289628 - RNA, 15 nt, Human adenovirus E
caagaaguaccucac

SEQ ID NO: 289629 - RNA, 15 nt, Human adenovirus E
caaggagcugcagga

SEQ ID NO: 289630 - RNA, 23 nt, Human adenovirus E
caagugcggaugggaaugcgaga

SEQ ID NO: 289631 - RNA, 20 nt, Human adenovirus E
caaucauauugaugauuuga

SEQ ID NO: 289632 - RNA, 16 nt, Human adenovirus E
caauccucagcuguug

SEQ ID NO: 289633 - RNA, 18 nt, Human adenovirus E
caauccucagcuguugag

SEQ ID NO: 289634 - RNA, 17 nt, Human adenovirus E
caaugguacugaucuga

SEQ ID NO: 289635 - RNA, 18 nt, Human adenovirus E
caauguggaucugacuua

SEQ ID NO: 289636 - RNA, 19 nt, Human adenovirus E
caauguggaucugacuuaa

SEQ ID NO: 289637 - RNA, 12 nt, Human adenovirus E
caauuacucaca

SEQ ID NO: 289638 - RNA, 17 nt, Human adenovirus E
caauuauauaugcaaug

SEQ ID NO: 289639 - RNA, 18 nt, Human adenovirus E
caauuauauaugcaaugg

SEQ ID NO: 289640 - RNA, 16 nt, Human adenovirus E
cacaagaaguaccuca

SEQ ID NO: 289641 - RNA, 21 nt, Human adenovirus E
cacaagacuagacagcugcua

SEQ ID NO: 289642 - RNA, 13 nt, Human adenovirus E
cacaauacaugcc

SEQ ID NO: 289643 - RNA, 14 nt, Human adenovirus E
cacaauacaugccc

SEQ ID NO: 289644 - RNA, 17 nt, Human adenovirus E
cacaauguaaguucugu

SEQ ID NO: 289645 - RNA, 13 nt, Human adenovirus E
cacaccaccacag

SEQ ID NO: 289646 - RNA, 17 nt, Human adenovirus E
cacagacaccuacuuca

SEQ ID NO: 289647 - RNA, 19 nt, Human adenovirus E
cacagccuugaacaucuga

SEQ ID NO: 289648 - RNA, 16 nt, Human adenovirus E
caccaccgucgacgac

SEQ ID NO: 289649 - RNA, 18 nt, Human adenovirus E
caccacgccuagaaugac

SEQ ID NO: 289650 - RNA, 15 nt, Human adenovirus E
caccagccaacugaa

SEQ ID NO: 289651 - RNA, 21 nt, Human adenovirus E
cacccaucaucaugagcaaag

SEQ ID NO: 289652 - RNA, 22 nt, Human adenovirus E
cacccccgccgcggcgccuguu

SEQ ID NO: 289653 - RNA, 22 nt, Human adenovirus E
cacccucagggcccggcccacg

SEQ ID NO: 289654 - RNA, 24 nt, Human adenovirus E
caccugcccuggagaugaugcuga

SEQ ID NO: 289655 - RNA, 20 nt, Human adenovirus E
caccugcuucggaucuucag

SEQ ID NO: 289656 - RNA, 13 nt, Human adenovirus E
caccuggaccacu

SEQ ID NO: 289657 - RNA, 19 nt, Human adenovirus E
cacggcacgcggccguuca

SEQ ID NO: 289658 - RNA, 17 nt, Human adenovirus E
cacgggccggccgucca

SEQ ID NO: 289659 - RNA, 17 nt, Human adenovirus E
cacggguacgagcggug

SEQ ID NO: 289660 - RNA, 12 nt, Human adenovirus E
cacuaaucacac

SEQ ID NO: 289661 - RNA, 15 nt, Human adenovirus E
cacuacagaaacuga

SEQ ID NO: 289662 - RNA, 20 nt, Human adenovirus E
cacuacagaaacugaauuau

SEQ ID NO: 289663 - RNA, 15 nt, Human adenovirus E
cagaaaaagccacag

SEQ ID NO: 289664 - RNA, 15 nt, Human adenovirus E
cagaagcaagcucca

SEQ ID NO: 289665 - RNA, 16 nt, Human adenovirus E
cagaagcaagcuccag

SEQ ID NO: 289666 - RNA, 12 nt, Human adenovirus E
cagaauaacuga

SEQ ID NO: 289667 - RNA, 16 nt, Human adenovirus E
cagacaugcaucccag

SEQ ID NO: 289668 - RNA, 16 nt, Human adenovirus E
cagaccugugugguua

SEQ ID NO: 289669 - RNA, 13 nt, Human adenovirus E
cagagccaucagg

SEQ ID NO: 289670 - RNA, 15 nt, Human adenovirus E
cagagccaucaggca

SEQ ID NO: 289671 - RNA, 22 nt, Human adenovirus E
cagagcggcauggagauuugga

SEQ ID NO: 289672 - RNA, 15 nt, Human adenovirus E
cagaguuuguuccac

SEQ ID NO: 289673 - RNA, 14 nt, Human adenovirus E
cagauacuccuaga

SEQ ID NO: 289674 - RNA, 22 nt, Human adenovirus E
cagaugaggugucggugaugca

SEQ ID NO: 289675 - RNA, 16 nt, Human adenovirus E
cagauguaucuacuga

SEQ ID NO: 289676 - RNA, 17 nt, Human adenovirus E
cagauguaucuacugaa

SEQ ID NO: 289677 - RNA, 19 nt, Human adenovirus E
ccaacaccacuucacuccc

SEQ ID NO: 289678 - RNA, 16 nt, Human adenovirus E
ccaaggggugcaucca

SEQ ID NO: 289679 - RNA, 13 nt, Human adenovirus E
ccacacaguuuca

SEQ ID NO: 289680 - RNA, 15 nt, Human adenovirus E
ccacagacaccuacu

SEQ ID NO: 289681 - RNA, 20 nt, Human adenovirus E
ccacagcaaccucaggcaca

SEQ ID NO: 289682 - RNA, 21 nt, Human adenovirus E
ccacgccccgcaaucaccuca

SEQ ID NO: 289683 - RNA, 12 nt, Human adenovirus E
ccacgcugugag

SEQ ID NO: 289684 - RNA, 21 nt, Human adenovirus E
ccacgguggucgaugugauca

SEQ ID NO: 289685 - RNA, 16 nt, Human adenovirus E
ccacucuguggaacaa

SEQ ID NO: 289686 - RNA, 20 nt, Human adenovirus E
ccacucuguggaacaaacuc

SEQ ID NO: 289687 - RNA, 17 nt, Human adenovirus E
ccagaaaaagccacaga

SEQ ID NO: 289688 - RNA, 19 nt, Human adenovirus E
ccagaaaaagccacagaag

SEQ ID NO: 289689 - RNA, 14 nt, Human adenovirus E
ccagaggauuucga

SEQ ID NO: 289690 - RNA, 21 nt, Human adenovirus E
ccaggcgcugggucaaggccu

SEQ ID NO: 289691 - RNA, 17 nt, Human adenovirus E
ccagucuuuguucuuca

SEQ ID NO: 289692 - RNA, 16 nt, Human adenovirus E
ccauacuccaccucca

SEQ ID NO: 289693 - RNA, 16 nt, Human adenovirus E
ccaucaccaauggcau

SEQ ID NO: 289694 - RNA, 18 nt, Human adenovirus E
ccaucacccguaucggcc

SEQ ID NO: 289695 - RNA, 19 nt, Human adenovirus E
ccaucagucucacuuuaac

SEQ ID NO: 289696 - RNA, 16 nt, Human adenovirus E
ccauccaccagugcaa

SEQ ID NO: 289697 - RNA, 11 nt, Human adenovirus E
ccaugcucccc

SEQ ID NO: 289698 - RNA, 22 nt, Human adenovirus E
ccauuccgcgcacggcgcuggc

SEQ ID NO: 289699 - RNA, 15 nt, Human adenovirus E
cccaacaaaauugca

SEQ ID NO: 289700 - RNA, 20 nt, Human adenovirus E
cccaacaaaauugcaucauc

SEQ ID NO: 289701 - RNA, 21 nt, Human adenovirus E
cccaacaaaauugcaucaucu

SEQ ID NO: 289702 - RNA, 18 nt, Human adenovirus E
cccacaagaaguaccuca

SEQ ID NO: 289703 - RNA, 21 nt, Human adenovirus E
cccaccugcuucggaucuuca

SEQ ID NO: 289704 - RNA, 18 nt, Human adenovirus E
cccacgaccguacuacuu

SEQ ID NO: 289705 - RNA, 16 nt, Human adenovirus E
cccaggacauggaaua

SEQ ID NO: 289706 - RNA, 21 nt, Human adenovirus E
cccaggccgaaguccagcuga

SEQ ID NO: 289707 - RNA, 18 nt, Human adenovirus E
cccauauuagacuaugag

SEQ ID NO: 289708 - RNA, 16 nt, Human adenovirus E
cccaucgucaucaccc

SEQ ID NO: 289709 - RNA, 20 nt, Human adenovirus E
ccccacaagaaguaccucac

SEQ ID NO: 289710 - RNA, 12 nt, Human adenovirus E
ccccugcuuuga

SEQ ID NO: 289711 - RNA, 18 nt, Human adenovirus E
ccccugcuuugacuuugg

SEQ ID NO: 289712 - RNA, 14 nt, Human adenovirus E
cccgacugcgucca

SEQ ID NO: 289713 - RNA, 20 nt, Human adenovirus E
cccgacugcguccacacucu

SEQ ID NO: 289714 - RNA, 21 nt, Human adenovirus E
cccgcccagucgcagaaaaag

SEQ ID NO: 289715 - RNA, 12 nt, Human adenovirus E
cccucaucuccu

SEQ ID NO: 289716 - RNA, 18 nt, Human adenovirus E
cccuggagaugaugcuga

SEQ ID NO: 289717 - RNA, 12 nt, Human adenovirus E
cccuguucugcg

SEQ ID NO: 289718 - RNA, 15 nt, Human adenovirus E
ccgaaagcaacugca

SEQ ID NO: 289719 - RNA, 14 nt, Human adenovirus E
ccgagcuccagcuc

SEQ ID NO: 289720 - RNA, 13 nt, Human adenovirus E
ccgcaagaucucu

SEQ ID NO: 289721 - RNA, 13 nt, Human adenovirus E
ccgcauggugacc

SEQ ID NO: 289722 - RNA, 17 nt, Human adenovirus E
ccgcccaggacuacucc

SEQ ID NO: 289723 - RNA, 20 nt, Human adenovirus E
ccgcgaggacaacaccuacu

SEQ ID NO: 289724 - RNA, 15 nt, Human adenovirus E
ccgcuacaacagcac

SEQ ID NO: 289725 - RNA, 21 nt, Human adenovirus E
ccggcaccaccguggucuuca

SEQ ID NO: 289726 - RNA, 15 nt, Human adenovirus E
ccggcaccgcuucca

SEQ ID NO: 289727 - RNA, 20 nt, Human adenovirus E
ccgggcccgcgaugaucuca

SEQ ID NO: 289728 - RNA, 15 nt, Human adenovirus E
ccgggcggcaggggc

SEQ ID NO: 289729 - RNA, 16 nt, Human adenovirus E
ccggguggaugaugac

SEQ ID NO: 289730 - RNA, 19 nt, Human adenovirus E
ccgugaauaauacuuucau

SEQ ID NO: 289731 - RNA, 21 nt, Human adenovirus E
ccgugcagcccgcgaacucuu

SEQ ID NO: 289732 - RNA, 16 nt, Human adenovirus E
ccuagcucggcuucga

SEQ ID NO: 289733 - RNA, 20 nt, Human adenovirus E
ccuaugcaacccugagcucu

SEQ ID NO: 289734 - RNA, 18 nt, Human adenovirus E
ccucaccuggcuguucca

SEQ ID NO: 289735 - RNA, 14 nt, Human adenovirus E
ccuccugggcggga

SEQ ID NO: 289736 - RNA, 17 nt, Human adenovirus E
ccucugcucuaugcaau

SEQ ID NO: 289737 - RNA, 23 nt, Human adenovirus E
ccucugcucuaugcaauucugac

SEQ ID NO: 289738 - RNA, 18 nt, Human adenovirus E
ccugaucccgaauaccac

SEQ ID NO: 289739 - RNA, 17 nt, Human adenovirus E
ccugcacccucaucucc

SEQ ID NO: 289740 - RNA, 17 nt, Human adenovirus E
ccugcaugaaagucuuu

SEQ ID NO: 289741 - RNA, 20 nt, Human adenovirus E
ccugcaugagggccagaaua

SEQ ID NO: 289742 - RNA, 19 nt, Human adenovirus E
ccuggaggccguggugccc

SEQ ID NO: 289743 - RNA, 18 nt, Human adenovirus E
ccuggccaucgugaacgc

SEQ ID NO: 289744 - RNA, 21 nt, Human adenovirus E
ccugguugcggcgcagggugg

SEQ ID NO: 289745 - RNA, 17 nt, Human adenovirus E
ccuuauccagugaaaua

SEQ ID NO: 289746 - RNA, 20 nt, Human adenovirus E
ccuuauccagugaaauaaag

SEQ ID NO: 289747 - RNA, 18 nt, Human adenovirus E
ccuucugacucuguacug

SEQ ID NO: 289748 - RNA, 16 nt, Human adenovirus E
ccuugaacaucugaau

SEQ ID NO: 289749 - RNA, 20 nt, Human adenovirus E
ccuugaacaucugaaugcca

SEQ ID NO: 289750 - RNA, 19 nt, Human adenovirus E
ccuuguugcgcagggccag

SEQ ID NO: 289751 - RNA, 21 nt, Human adenovirus E
cgugaacgcgcugguggagaa

SEQ ID NO: 289752 - RNA, 18 nt, Human adenovirus E
cgugcuggacauggccag

SEQ ID NO: 289753 - RNA, 23 nt, Human adenovirus E
cguggagaccaaaagcaugucca

SEQ ID NO: 289754 - RNA, 18 nt, Human adenovirus E
cguugucaaccacugcga

SEQ ID NO: 289755 - RNA, 14 nt, Human adenovirus E
cuaauacuaccacc

SEQ ID NO: 289756 - RNA, 13 nt, Human adenovirus E
cuaaucacagaac

SEQ ID NO: 289757 - RNA, 16 nt, Human adenovirus E
cuaaucacagaacuga

SEQ ID NO: 289758 - RNA, 11 nt, Human adenovirus E
cuacaacagca

SEQ ID NO: 289759 - RNA, 17 nt, Human adenovirus E
cuacagccuaggccaca

SEQ ID NO: 289760 - RNA, 11 nt, Human adenovirus E
cuaccaccacu

SEQ ID NO: 289761 - RNA, 17 nt, Human adenovirus E
cuaccaccacuacagcc

SEQ ID NO: 289762 - RNA, 12 nt, Human adenovirus E
cuacugaacucu

SEQ ID NO: 289763 - RNA, 15 nt, Human adenovirus E
cuagaacaagucaag

SEQ ID NO: 289764 - RNA, 15 nt, Human adenovirus E
cuaucagauguccaa

SEQ ID NO: 289765 - RNA, 23 nt, Human adenovirus E
cuauguagguauguauuauggaa

SEQ ID NO: 289766 - RNA, 13 nt, Human adenovirus E
cucaaaugcuacc

SEQ ID NO: 289767 - RNA, 23 nt, Human adenovirus E
cucagaugcauguguaacaugaa

SEQ ID NO: 289768 - RNA, 16 nt, Human adenovirus E
cucagcgccacugaga

SEQ ID NO: 289769 - RNA, 20 nt, Human adenovirus E
cucagcgccacugagacaca

SEQ ID NO: 289770 - RNA, 21 nt, Human adenovirus E
cucagcuguugagcugugagg

SEQ ID NO: 289771 - RNA, 21 nt, Human adenovirus E
cucaucaaguuucaaugugga

SEQ ID NO: 289772 - RNA, 14 nt, Human adenovirus E
cuccaaacgaccau

SEQ ID NO: 289773 - RNA, 19 nt, Human adenovirus E
cuccacccaccacaauuac

SEQ ID NO: 289774 - RNA, 22 nt, Human adenovirus E
cuccacccaucaucaugagcaa

SEQ ID NO: 289775 - RNA, 17 nt, Human adenovirus E
cuccacguuccacacag

SEQ ID NO: 289776 - RNA, 23 nt, Human adenovirus E
cuccacguuccacacaguuucag

SEQ ID NO: 289777 - RNA, 13 nt, Human adenovirus E
cuccagcuccagu

SEQ ID NO: 289778 - RNA, 15 nt, Human adenovirus E
cuccuacgagcuccu

SEQ ID NO: 289779 - RNA, 20 nt, Human adenovirus E
cuccuacgaggucacuccaa

SEQ ID NO: 289780 - RNA, 19 nt, Human adenovirus E
cuccugggcgggagugcgu

SEQ ID NO: 289781 - RNA, 13 nt, Human adenovirus E
cucgcgcuucugc

SEQ ID NO: 289782 - RNA, 23 nt, Human adenovirus E
cucuaugcaauucugacaaugag

SEQ ID NO: 289783 - RNA, 17 nt, Human adenovirus E
cucucaucaaguuucaa

SEQ ID NO: 289784 - RNA, 16 nt, Human adenovirus E
cucugaggccagacaa

SEQ ID NO: 289785 - RNA, 14 nt, Human adenovirus E
cucuguacugcauc

SEQ ID NO: 289786 - RNA, 18 nt, Human adenovirus E
cucuguggaaacaauaac

SEQ ID NO: 289787 - RNA, 18 nt, Human adenovirus E
cucuguggaacaaacucu

SEQ ID NO: 289788 - RNA, 13 nt, Human adenovirus E
cucuuaacuuggg

SEQ ID NO: 289789 - RNA, 14 nt, Human adenovirus E
cucuugaaggucuc

SEQ ID NO: 289790 - RNA, 20 nt, Human adenovirus E
cucuugcuucuugcaagcca

SEQ ID NO: 289791 - RNA, 16 nt, Human adenovirus E
cugaaggggaugucaa

SEQ ID NO: 289792 - RNA, 22 nt, Human adenovirus E
cugaaucuaauacuaccaccca

SEQ ID NO: 289793 - RNA, 22 nt, Human adenovirus E
  unsure 12..12: n is a, c, g, or t
cugaauuaugcnaucuuaagaa

SEQ ID NO: 289794 - RNA, 13 nt, Human adenovirus E
cugacacaccacc

SEQ ID NO: 289795 - RNA, 16 nt, Human adenovirus E
cugacacaccaccaca

SEQ ID NO: 289796 - RNA, 21 nt, Human adenovirus E
cugaccuguuuccugaacugc

SEQ ID NO: 289797 - RNA, 17 nt, Human adenovirus E
cugacuaacucaggugu

SEQ ID NO: 289798 - RNA, 15 nt, Human adenovirus E
cugacuagagugagu

SEQ ID NO: 289799 - RNA, 22 nt, Human adenovirus E
cugagacacacuuggaaacauc

SEQ ID NO: 289800 - RNA, 24 nt, Human adenovirus E
cugaucugauacuccucaauauca

SEQ ID NO: 289801 - RNA, 23 nt, Human adenovirus E
cugcacccucaucuccuuuguga

SEQ ID NO: 289802 - RNA, 20 nt, Human adenovirus E
cugcacgggccggccgucca

SEQ ID NO: 289803 - RNA, 14 nt, Human adenovirus E
cugcagagccagcc

SEQ ID NO: 289804 - RNA, 14 nt, Human adenovirus E
cugccaacaccacu

SEQ ID NO: 289805 - RNA, 19 nt, Human adenovirus E
cugcccuggagaugaugcu

SEQ ID NO: 289806 - RNA, 20 nt, Human adenovirus E
cugccgccgcagcugcugca

SEQ ID NO: 289807 - RNA, 16 nt, Human adenovirus E
cugccugauugcgaua

SEQ ID NO: 289808 - RNA, 17 nt, Human adenovirus E
cugccuggucggaguca

SEQ ID NO: 289809 - RNA, 17 nt, Human adenovirus E
cugcguccacacucuga

SEQ ID NO: 289810 - RNA, 15 nt, Human adenovirus E
cugcucuaugcaauu

SEQ ID NO: 289811 - RNA, 22 nt, Human adenovirus E
cugcuucgguggcgaccuagcu

SEQ ID NO: 289812 - RNA, 23 nt, Human adenovirus E
cuggagcgacaucggcaccagcc

SEQ ID NO: 289813 - RNA, 17 nt, Human adenovirus E
cuggaugugcgcgugga

SEQ ID NO: 289814 - RNA, 22 nt, Human adenovirus E
cuggcacuaaucacacauugaa

SEQ ID NO: 289815 - RNA, 20 nt, Human adenovirus E
cuggcucgcucugaaacugu

SEQ ID NO: 289816 - RNA, 11 nt, Human adenovirus E
cuggggcgggg

SEQ ID NO: 289817 - RNA, 21 nt, Human adenovirus E
cugguggagaacaaggccauc

SEQ ID NO: 289818 - RNA, 17 nt, Human adenovirus E
cuguaaaacuguugaau

SEQ ID NO: 289819 - RNA, 13 nt, Human adenovirus E
cuguccccggugc

SEQ ID NO: 289820 - RNA, 16 nt, Human adenovirus E
cuguccccggugcuga

SEQ ID NO: 289821 - RNA, 19 nt, Human adenovirus E
cugugcccuucgcccuagc

SEQ ID NO: 289822 - RNA, 21 nt, Human adenovirus E
cugugcugugccaacauagac

SEQ ID NO: 289823 - RNA, 22 nt, Human adenovirus E
cugugcuuuucuguguguugca

SEQ ID NO: 289824 - RNA, 16 nt, Human adenovirus E
cugugugguuagcuca

SEQ ID NO: 289825 - RNA, 20 nt, Human adenovirus E
cuucagucuggggaacaagu

SEQ ID NO: 289826 - RNA, 14 nt, Human adenovirus E
cuuccuguucuucc

SEQ ID NO: 289827 - RNA, 13 nt, Human adenovirus E
gagaugaggugca

SEQ ID NO: 289828 - RNA, 19 nt, Human adenovirus E
gagccacagcgacccaugc

SEQ ID NO: 289829 - RNA, 12 nt, Human adenovirus E
gagcccuugauu

SEQ ID NO: 289830 - RNA, 16 nt, Human adenovirus E
gagcgcggacccugca

SEQ ID NO: 289831 - RNA, 23 nt, Human adenovirus E
gagcucaggguugcauaggucag

SEQ ID NO: 289832 - RNA, 16 nt, Human adenovirus E
gagcuccagcuccagu

SEQ ID NO: 289833 - RNA, 17 nt, Human adenovirus E
gagcuccugcagcagcg

SEQ ID NO: 289834 - RNA, 20 nt, Human adenovirus E
gagcugcccgaggagcaccc

SEQ ID NO: 289835 - RNA, 17 nt, Human adenovirus E
gagcugggccaucagca

SEQ ID NO: 289836 - RNA, 16 nt, Human adenovirus E
gaggacaauccucagc

SEQ ID NO: 289837 - RNA, 23 nt, Human adenovirus E
gaggcaugaugagacuaaucaca

SEQ ID NO: 289838 - RNA, 17 nt, Human adenovirus E
gagggugguguauucca

SEQ ID NO: 289839 - RNA, 14 nt, Human adenovirus E
gaggguuucaucuc

SEQ ID NO: 289840 - RNA, 15 nt, Human adenovirus E
gaggugcaucuuggc

SEQ ID NO: 289841 - RNA, 21 nt, Human adenovirus E
gaggugucggugaugcaugag

SEQ ID NO: 289842 - RNA, 23 nt, Human adenovirus E
gagguuuucucuagaacaaguca

SEQ ID NO: 289843 - RNA, 19 nt, Human adenovirus E
gagucgcaagcgcccagaa

SEQ ID NO: 289844 - RNA, 18 nt, Human adenovirus E
  unsure 8..8: n is a, c, g, or t
gaguugcnagauggccac

SEQ ID NO: 289845 - RNA, 14 nt, Human adenovirus E
gaguuguccuggua

SEQ ID NO: 289846 - RNA, 22 nt, Human adenovirus E
gaguuuucagcccgauggcaau

SEQ ID NO: 289847 - RNA, 18 nt, Human adenovirus E
gauacaguguucauucuu

SEQ ID NO: 289848 - RNA, 20 nt, Human adenovirus E
gauaccaaggggugcaucca

SEQ ID NO: 289849 - RNA, 19 nt, Human adenovirus E
gaucauauugaugaugauu

SEQ ID NO: 289850 - RNA, 19 nt, Human adenovirus E
gaucauugagcacccggug

SEQ ID NO: 289851 - RNA, 21 nt, Human adenovirus E
gaucauugggaucgugaacau

SEQ ID NO: 289852 - RNA, 12 nt, Human adenovirus E
gaucccaucaca

SEQ ID NO: 289853 - RNA, 20 nt, Human adenovirus E
gaucgccguugucaaccacu

SEQ ID NO: 289854 - RNA, 17 nt, Human adenovirus E
gaucuccuccucuugaa

SEQ ID NO: 289855 - RNA, 15 nt, Human adenovirus E
gaucugacacuacag

SEQ ID NO: 289856 - RNA, 17 nt, Human adenovirus E
gaucugacacuacagaa

SEQ ID NO: 289857 - RNA, 18 nt, Human adenovirus E
gaucugucuccaggaaag

SEQ ID NO: 289858 - RNA, 16 nt, Human adenovirus E
gaugcaacaacaacag

SEQ ID NO: 289859 - RNA, 13 nt, Human adenovirus E
gauggaagacauc

SEQ ID NO: 289860 - RNA, 22 nt, Human adenovirus E
  unsure 10..10: n is a, c, g, or t
gauggugcangaguguaacaug

SEQ ID NO: 289861 - RNA, 15 nt, Human adenovirus E
gaugucaaauuccuc

SEQ ID NO: 289862 - RNA, 14 nt, Human adenovirus E
gcaaauuccaagaa

SEQ ID NO: 289863 - RNA, 13 nt, Human adenovirus E
gcaacaacaacag

SEQ ID NO: 289864 - RNA, 13 nt, Human adenovirus E
gcaacugcaucau

SEQ ID NO: 289865 - RNA, 20 nt, Human adenovirus E
gcacagccuugaacaucuga

SEQ ID NO: 289866 - RNA, 14 nt, Human adenovirus E
gcacaugugcgaca

SEQ ID NO: 289867 - RNA, 23 nt, Human adenovirus E
gcaccaacgugcagaccaaccug

SEQ ID NO: 289868 - RNA, 16 nt, Human adenovirus E
gcaccagccaacugaa

SEQ ID NO: 289869 - RNA, 19 nt, Human adenovirus E
gcacccucagggcccggcc

SEQ ID NO: 289870 - RNA, 21 nt, Human adenovirus E
gcacccucagggcccggccca

SEQ ID NO: 289871 - RNA, 15 nt, Human adenovirus E
gcacgagaagguccu

SEQ ID NO: 289872 - RNA, 16 nt, Human adenovirus E
gcagaugcagcagcug

SEQ ID NO: 289873 - RNA, 13 nt, Human adenovirus E
gcagcaacagcuu

SEQ ID NO: 289874 - RNA, 15 nt, Human adenovirus E
gcagccccaggccaa

SEQ ID NO: 289875 - RNA, 22 nt, Human adenovirus E
gcagcccggggaccccgagugg

SEQ ID NO: 289876 - RNA, 13 nt, Human adenovirus E
gcagcugagccac

SEQ ID NO: 289877 - RNA, 15 nt, Human adenovirus E
gcagcugagccaccu

SEQ ID NO: 289878 - RNA, 13 nt, Human adenovirus E
gcaggaacaugca

SEQ ID NO: 289879 - RNA, 18 nt, Human adenovirus E
gcagggcaugguguugca

SEQ ID NO: 289880 - RNA, 18 nt, Human adenovirus E
gcaucaucuggcuggguc

SEQ ID NO: 289881 - RNA, 23 nt, Human adenovirus E
gcaucugcaaccaccccggccug

SEQ ID NO: 289882 - RNA, 19 nt, Human adenovirus E
gcaucuucugccuggugaa

SEQ ID NO: 289883 - RNA, 15 nt, Human adenovirus E
gcaugaaagucuuug

SEQ ID NO: 289884 - RNA, 16 nt, Human adenovirus E
gcaugagcauaugccu

SEQ ID NO: 289885 - RNA, 23 nt, Human adenovirus E
gcaugagcauaugccugugcugu

SEQ ID NO: 289886 - RNA, 19 nt, Human adenovirus E
gcaugagcccgucccgggg

SEQ ID NO: 289887 - RNA, 22 nt, Human adenovirus E
gcaugagcggaagcggcuccuu

SEQ ID NO: 289888 - RNA, 23 nt, Human adenovirus E
gcaugaugagacuaaucacagaa

SEQ ID NO: 289889 - RNA, 16 nt, Human adenovirus E
gcauguguaacaugaa

SEQ ID NO: 289890 - RNA, 18 nt, Human adenovirus E
gcauuucggacauggaau

SEQ ID NO: 289891 - RNA, 19 nt, Human adenovirus E
gcauuucggacauggaauu

SEQ ID NO: 289892 - RNA, 19 nt, Human adenovirus E
gccaaaaaucagacaugca

SEQ ID NO: 289893 - RNA, 21 nt, Human adenovirus E
gccaacccuucccaccccacu

SEQ ID NO: 289894 - RNA, 17 nt, Human adenovirus E
gccacagaaguuucaug

SEQ ID NO: 289895 - RNA, 13 nt, Human adenovirus E
gccacagacaccu

SEQ ID NO: 289896 - RNA, 15 nt, Human adenovirus E
gccacagacaccuac

SEQ ID NO: 289897 - RNA, 21 nt, Human adenovirus E
gccacagcgacccaugcuccc

SEQ ID NO: 289898 - RNA, 22 nt, Human adenovirus E
gccagaauaacugaaaucugug

SEQ ID NO: 289899 - RNA, 18 nt, Human adenovirus E
gccagacaagaaguacaa

SEQ ID NO: 289900 - RNA, 19 nt, Human adenovirus E
gccaucacaccuuccaccu

SEQ ID NO: 289901 - RNA, 19 nt, Human adenovirus E
gccccggcgggcugcaaac

SEQ ID NO: 289902 - RNA, 16 nt, Human adenovirus E
gcccgcgaugaucuca

SEQ ID NO: 289903 - RNA, 23 nt, Human adenovirus E
gcccggcgagcgcuccggcaccg

SEQ ID NO: 289904 - RNA, 14 nt, Human adenovirus E
gcccggcggcaccg

SEQ ID NO: 289905 - RNA, 14 nt, Human adenovirus E
gcccuagaucugcu

SEQ ID NO: 289906 - RNA, 19 nt, Human adenovirus E
gcgugcaggaacaugcagc

SEQ ID NO: 289907 - RNA, 19 nt, Human adenovirus E
gcguggcccgcuacaacag

SEQ ID NO: 289908 - RNA, 11 nt, Human adenovirus E
gcuacaacagc

SEQ ID NO: 289909 - RNA, 12 nt, Human adenovirus E
gcuacaacagca

SEQ ID NO: 289910 - RNA, 21 nt, Human adenovirus E
gcuagaugcaacaacaacagc

SEQ ID NO: 289911 - RNA, 17 nt, Human adenovirus E
gcuagucuacagggcca

SEQ ID NO: 289912 - RNA, 18 nt, Human adenovirus E
gcuagucuacagggccaa

SEQ ID NO: 289913 - RNA, 21 nt, Human adenovirus E
  unsure 10..10: n is a, c, g, or t
gcuccagcunuuccaacccuu

SEQ ID NO: 289914 - RNA, 15 nt, Human adenovirus E
gcuccuuugagggag

SEQ ID NO: 289915 - RNA, 19 nt, Human adenovirus E
gcucuaugcaauucugaca

SEQ ID NO: 289916 - RNA, 21 nt, Human adenovirus E
gcucuaugcaauucugacaau

SEQ ID NO: 289917 - RNA, 20 nt, Human adenovirus E
gcucugaggccagacaagaa

SEQ ID NO: 289918 - RNA, 18 nt, Human adenovirus E
gcucuuaacuugggccau

SEQ ID NO: 289919 - RNA, 19 nt, Human adenovirus E
gcugaaggggaugucaaau

SEQ ID NO: 289920 - RNA, 15 nt, Human adenovirus E
gcugcaaacuuccuc

SEQ ID NO: 289921 - RNA, 16 nt, Human adenovirus E
gcugcugcaucugccg

SEQ ID NO: 289922 - RNA, 21 nt, Human adenovirus E
gcuggaucaugaucauuggga

SEQ ID NO: 289923 - RNA, 15 nt, Human adenovirus E
gcuggccgugggcga

SEQ ID NO: 289924 - RNA, 15 nt, Human adenovirus E
gcugggagggaugca

SEQ ID NO: 289925 - RNA, 14 nt, Human adenovirus E
gcuguccugcaaga

SEQ ID NO: 289926 - RNA, 17 nt, Human adenovirus E
gcuuacggcaagcgcag

SEQ ID NO: 289927 - RNA, 15 nt, Human adenovirus E
gcuucuugcaagcca

SEQ ID NO: 289928 - RNA, 13 nt, Human adenovirus E
ggaacaucucgag

SEQ ID NO: 289929 - RNA, 14 nt, Human adenovirus E
ggaagaaucugacu

SEQ ID NO: 289930 - RNA, 22 nt, Human adenovirus E
ggaauuaugccaagcuggcucu

SEQ ID NO: 289931 - RNA, 17 nt, Human adenovirus E
ggagaggcaugaugaga

SEQ ID NO: 289932 - RNA, 18 nt, Human adenovirus E
ggagaucugucuccagga

SEQ ID NO: 289933 - RNA, 18 nt, Human adenovirus E
ggagcgacaucggcacca

SEQ ID NO: 289934 - RNA, 20 nt, Human adenovirus E
ggagugcccggaggguuuca

SEQ ID NO: 289935 - RNA, 15 nt, Human adenovirus E
ggauacaguguucau

SEQ ID NO: 289936 - RNA, 14 nt, Human adenovirus E
ggaucacccggugc

SEQ ID NO: 289937 - RNA, 16 nt, Human adenovirus E
ggaugcgucgccacca

SEQ ID NO: 289938 - RNA, 19 nt, Human adenovirus E
ggcacucccgcaucugcac

SEQ ID NO: 289939 - RNA, 18 nt, Human adenovirus E
ggcauucagauguucaag

SEQ ID NO: 289940 - RNA, 21 nt, Human adenovirus E
ggccaaccggcucucggccau

SEQ ID NO: 289941 - RNA, 17 nt, Human adenovirus E
ggccauccaccagugca

SEQ ID NO: 289942 - RNA, 17 nt, Human adenovirus E
ggcgacgaggccggccu

SEQ ID NO: 289943 - RNA, 15 nt, Human adenovirus E
ggcgaucggugugca

SEQ ID NO: 289944 - RNA, 18 nt, Human adenovirus E
ggcgcagggcaugguguu

SEQ ID NO: 289945 - RNA, 21 nt, Human adenovirus E
ggcgcagggcaugguguugca

SEQ ID NO: 289946 - RNA, 12 nt, Human adenovirus E
ggcgcagggugg

SEQ ID NO: 289947 - RNA, 16 nt, Human adenovirus E
ggcggcagaugcagca

SEQ ID NO: 289948 - RNA, 20 nt, Human adenovirus E
ggcucucggccauccuggag

SEQ ID NO: 289949 - RNA, 15 nt, Human adenovirus E
gggagaggcaugaug

SEQ ID NO: 289950 - RNA, 20 nt, Human adenovirus E
gggagugcgucagaauguga

SEQ ID NO: 289951 - RNA, 12 nt, Human adenovirus E
gggcguacaugc

SEQ ID NO: 289952 - RNA, 14 nt, Human adenovirus E
ggggaagaaucuga

SEQ ID NO: 289953 - RNA, 17 nt, Human adenovirus E
gggggagaugaggugca

SEQ ID NO: 289954 - RNA, 21 nt, Human adenovirus E
ggguggacuuuuccaggguga

SEQ ID NO: 289955 - RNA, 14 nt, Human adenovirus E
ggguuucaucuccc

SEQ ID NO: 289956 - RNA, 19 nt, Human adenovirus E
ggucauguggaugagcaag

SEQ ID NO: 289957 - RNA, 21 nt, Human adenovirus E
gguccagcgaaggguaugcuu

SEQ ID NO: 289958 - RNA, 14 nt, Human adenovirus E
ggucgaugugauca

SEQ ID NO: 289959 - RNA, 13 nt, Human adenovirus E
ggugaugucagua

SEQ ID NO: 289960 - RNA, 20 nt, Human adenovirus E
ggugcugagacccggcacca

SEQ ID NO: 289961 - RNA, 14 nt, Human adenovirus E
gguggacuuuucca

SEQ ID NO: 289962 - RNA, 19 nt, Human adenovirus E
gguggccauccaccagugc

SEQ ID NO: 289963 - RNA, 17 nt, Human adenovirus E
ggugggguucuugucca

SEQ ID NO: 289964 - RNA, 16 nt, Human adenovirus E
gguucgcuguccugca

SEQ ID NO: 289965 - RNA, 18 nt, Human adenovirus E
gguugcggcgcagggugg

SEQ ID NO: 289966 - RNA, 15 nt, Human adenovirus E
guaaaacuguugaau

SEQ ID NO: 289967 - RNA, 23 nt, Human adenovirus E
guaagccccacaagaaguaccuc

SEQ ID NO: 289968 - RNA, 23 nt, Human adenovirus E
guaaugagaaaauuacuauuuac

SEQ ID NO: 289969 - RNA, 21 nt, Human adenovirus E
guaccucaccuggcuguucca

SEQ ID NO: 289970 - RNA, 15 nt, Human adenovirus E
guacgcccgcgccaa

SEQ ID NO: 289971 - RNA, 12 nt, Human adenovirus E
guacugaucuga

SEQ ID NO: 289972 - RNA, 16 nt, Human adenovirus E
guacugaucugauacu

SEQ ID NO: 289973 - RNA, 20 nt, Human adenovirus E
guaggcccuggaccaccggu

SEQ ID NO: 289974 - RNA, 17 nt, Human adenovirus E
guauauaagcaggugca

SEQ ID NO: 289975 - RNA, 13 nt, Human adenovirus E
guaugcgaucucg

SEQ ID NO: 289976 - RNA, 14 nt, Human adenovirus E
gucaaaaaggacaa

SEQ ID NO: 289977 - RNA, 23 nt, Human adenovirus E
gucaaaaaggacaaaaaggaaga

SEQ ID NO: 289978 - RNA, 16 nt, Human adenovirus E
gucagcaaguucaugg

SEQ ID NO: 289979 - RNA, 14 nt, Human adenovirus E
gucauucauggaau

SEQ ID NO: 289980 - RNA, 21 nt, Human adenovirus E
guccagcgaaggguaugcuuu

SEQ ID NO: 289981 - RNA, 17 nt, Human adenovirus E
guccagcugacuaacuc

SEQ ID NO: 289982 - RNA, 22 nt, Human adenovirus E
guccaucaccaauggcauucag

SEQ ID NO: 289983 - RNA, 16 nt, Human adenovirus E
guccccggugcugacg

SEQ ID NO: 289984 - RNA, 15 nt, Human adenovirus E
gucccgucgaccccc

SEQ ID NO: 289985 - RNA, 15 nt, Human adenovirus E
guccuccauugccau

SEQ ID NO: 289986 - RNA, 14 nt, Human adenovirus E
gucuacagggccaa

SEQ ID NO: 289987 - RNA, 22 nt, Human adenovirus E
gucuccacguuccacacaguuu

SEQ ID NO: 289988 - RNA, 17 nt, Human adenovirus E
ugagagguuuucucuag

SEQ ID NO: 289989 - RNA, 16 nt, Human adenovirus E
ugagcaagcaguacga

SEQ ID NO: 289990 - RNA, 17 nt, Human adenovirus E
ugagcaagcaguacgau

SEQ ID NO: 289991 - RNA, 20 nt, Human adenovirus E
ugagccaccugcugggucag

SEQ ID NO: 289992 - RNA, 18 nt, Human adenovirus E
ugaggcccuagaucugcu

SEQ ID NO: 289993 - RNA, 16 nt, Human adenovirus E
ugaggugaugucagua

SEQ ID NO: 289994 - RNA, 21 nt, Human adenovirus E
ugaggugucggugaugcauga

SEQ ID NO: 289995 - RNA, 14 nt, Human adenovirus E
ugaucccauacucc

SEQ ID NO: 289996 - RNA, 22 nt, Human adenovirus E
ugauuuuacuacuccuggcaga

SEQ ID NO: 289997 - RNA, 16 nt, Human adenovirus E
ugcaacaacaacagcc

SEQ ID NO: 289998 - RNA, 17 nt, Human adenovirus E
ugcaacaacaacagcca

SEQ ID NO: 289999 - RNA, 19 nt, Human adenovirus E
ugcaacaacaacagccacc

SEQ ID NO: 290000 - RNA, 22 nt, Human adenovirus E
ugcaagaguuccccgugcccug

SEQ ID NO: 290001 - RNA, 12 nt, Human adenovirus E
ugcaauucugac

SEQ ID NO: 290002 - RNA, 16 nt, Human adenovirus E
ugcaccucacagcuca

SEQ ID NO: 290003 - RNA, 18 nt, Human adenovirus E
ugcagcccgcgaacucuu

SEQ ID NO: 290004 - RNA, 14 nt, Human adenovirus E
ugcagcugagccac

SEQ ID NO: 290005 - RNA, 14 nt, Human adenovirus E
ugcaggaacaugca

SEQ ID NO: 290006 - RNA, 21 nt, Human adenovirus E
ugcagucgacuggcacagaug

SEQ ID NO: 290007 - RNA, 14 nt, Human adenovirus E
  unsure 5..5: n is a, c, g, or t
ugcangaguguaac

SEQ ID NO: 290008 - RNA, 15 nt, Human adenovirus E
ugcauccacugcucc

SEQ ID NO: 290009 - RNA, 16 nt, Human adenovirus E
ugcaugaaagucuuug

SEQ ID NO: 290010 - RNA, 17 nt, Human adenovirus E
ugcaugaaagucuuugu

SEQ ID NO: 290011 - RNA, 19 nt, Human adenovirus E
ugcaugccaacccuuccca

SEQ ID NO: 290012 - RNA, 20 nt, Human adenovirus E
ugcaugccaacccuucccac

SEQ ID NO: 290013 - RNA, 16 nt, Human adenovirus E
ugcauguguaacauga

SEQ ID NO: 290014 - RNA, 22 nt, Human adenovirus E
ugccaacccuucccaccccacu

SEQ ID NO: 290015 - RNA, 19 nt, Human adenovirus E
ugcccuggagaugaugcug

SEQ ID NO: 290016 - RNA, 22 nt, Human adenovirus E
ugcccuggagaugaugcugaca

SEQ ID NO: 290017 - RNA, 14 nt, Human adenovirus E
ugccgcaagaucuc

SEQ ID NO: 290018 - RNA, 18 nt, Human adenovirus E
ugccgucauucauggaau

SEQ ID NO: 290019 - RNA, 16 nt, Human adenovirus E
ugccugcuacaucuca

SEQ ID NO: 290020 - RNA, 13 nt, Human adenovirus E
ugcgcagggccag

SEQ ID NO: 290021 - RNA, 23 nt, Human adenovirus E
ugcgcgcggcgcggagccuuguu

SEQ ID NO: 290022 - RNA, 16 nt, Human adenovirus E
ugcgucagaaugugau

SEQ ID NO: 290023 - RNA, 20 nt, Human adenovirus E
ugcguccacacucugaucaa

SEQ ID NO: 290024 - RNA, 14 nt, Human adenovirus E
ugcuagaugcaaca

SEQ ID NO: 290025 - RNA, 18 nt, Human adenovirus E
ugcuauuuuggaucugac

SEQ ID NO: 290026 - RNA, 19 nt, Human adenovirus E
ugcuauuuuggaucugaca

SEQ ID NO: 290027 - RNA, 17 nt, Human adenovirus E
ugcugaagagaugcaug

SEQ ID NO: 290028 - RNA, 18 nt, Human adenovirus E
ugcugaagagaugcauga

SEQ ID NO: 290029 - RNA, 19 nt, Human adenovirus E
ugcuucgcucgggaucucg

SEQ ID NO: 290030 - RNA, 16 nt, Human adenovirus E
ugcuuuuggucuccac

SEQ ID NO: 290031 - RNA, 16 nt, Human adenovirus E
uggacucugacgcucc

SEQ ID NO: 290032 - RNA, 18 nt, Human adenovirus E
uggacuuuuccaggguga

SEQ ID NO: 290033 - RNA, 15 nt, Human adenovirus E
uggagaacaaggcca

SEQ ID NO: 290034 - RNA, 16 nt, Human adenovirus E
uggagaugaugcugac

SEQ ID NO: 290035 - RNA, 16 nt, Human adenovirus E
uggaucugacacuaca

SEQ ID NO: 290036 - RNA, 22 nt, Human adenovirus E
uggaugagcaagcaguacgaua

SEQ ID NO: 290037 - RNA, 19 nt, Human adenovirus E
uggauuucaccguggcaac

SEQ ID NO: 290038 - RNA, 21 nt, Human adenovirus E
uggcacuaaucacacauugaa

SEQ ID NO: 290039 - RNA, 22 nt, Human adenovirus E
uggccaccccaucgaugcugcc

SEQ ID NO: 290040 - RNA, 15 nt, Human adenovirus E
uggccugcacccuca

SEQ ID NO: 290041 - RNA, 14 nt, Human adenovirus E
ugggcuuggauguu

SEQ ID NO: 290042 - RNA, 15 nt, Human adenovirus E
ugggcuuggauguug

SEQ ID NO: 290043 - RNA, 20 nt, Human adenovirus E
ugggguucuuguccaugggg

SEQ ID NO: 290044 - RNA, 16 nt, Human adenovirus E
uggguuccaccugggg

SEQ ID NO: 290045 - RNA, 20 nt, Human adenovirus E
ugguacugaucugauacucc

SEQ ID NO: 290046 - RNA, 23 nt, Human adenovirus E
ugguauugcuauuuuggaucuga

SEQ ID NO: 290047 - RNA, 21 nt, Human adenovirus E
ugguauuguuauuuuaaugaa

SEQ ID NO: 290048 - RNA, 16 nt, Human adenovirus E
uggugaaacaggccaa

SEQ ID NO: 290049 - RNA, 19 nt, Human adenovirus E
ugguggagaacaaggccau

SEQ ID NO: 290050 - RNA, 20 nt, Human adenovirus E
ugguggcaugaggugcaguc

SEQ ID NO: 290051 - RNA, 22 nt, Human adenovirus E
ugguguauuccauguccuggga

SEQ ID NO: 290052 - RNA, 22 nt, Human adenovirus E
uguaucccacccugcaugccaa

SEQ ID NO: 290053 - RNA, 23 nt, Human adenovirus E
ugucccaugguggcgcagcugac

SEQ ID NO: 290054 - RNA, 21 nt, Human adenovirus E
uguccugggaggguggaggaa

SEQ ID NO: 290055 - RNA, 16 nt, Human adenovirus E
ugugaggagaccgaga

SEQ ID NO: 290056 - RNA, 20 nt, Human adenovirus E
ugugaucagagccaucaggc

SEQ ID NO: 290057 - RNA, 14 nt, Human adenovirus E
uguggagauucugc

SEQ ID NO: 290058 - RNA, 22 nt, Human adenovirus E
ugugguuccgcaggaucauccg

SEQ ID NO: 290059 - RNA, 19 nt, Human adenovirus E
uguguuccugaauccauca

SEQ ID NO: 290060 - RNA, 15 nt, Human adenovirus E
uguucuucaccggga

SEQ ID NO: 290061 - RNA, 14 nt, Human adenovirus E
uuaaagacauuuaa

SEQ ID NO: 290062 - RNA, 18 nt, Human adenovirus E
uuaacaauuauauaugca

SEQ ID NO: 290063 - RNA, 14 nt, Human adenovirus E
uuaacccuaauuaa

SEQ ID NO: 290064 - RNA, 14 nt, Human adenovirus E
uuaaucaugguucu

SEQ ID NO: 290065 - RNA, 21 nt, Human adenovirus E
uuacaauuucaacaccgagcg

SEQ ID NO: 290066 - RNA, 19 nt, Human adenovirus E
uuacacuggcacuaaucac

SEQ ID NO: 290067 - RNA, 19 nt, Human adenovirus E
uuaccucugcucuaugcaa

SEQ ID NO: 290068 - RNA, 14 nt, Human adenovirus E
uuacucacaccaca

SEQ ID NO: 290069 - RNA, 16 nt, Human adenovirus E
uuauuuuaaugaauca

SEQ ID NO: 290070 - RNA, 15 nt, Human adenovirus E
uuauuuuuccuccac

SEQ ID NO: 290071 - RNA, 13 nt, Human adenovirus E
uucaauguggauc

SEQ ID NO: 290072 - RNA, 21 nt, Human adenovirus E
uucaauguggaucugacuuaa

SEQ ID NO: 290073 - RNA, 15 nt, Human adenovirus E
caaaaaaaaugagag

SEQ ID NO: 290074 - RNA, 23 nt, Human adenovirus E
caaaaaggaagaagaaagugaug

SEQ ID NO: 290075 - RNA, 18 nt, Human adenovirus E
caaaaaucagacaugcau

SEQ ID NO: 290076 - RNA, 18 nt, Human adenovirus E
caaaaucaagcgggucaa

SEQ ID NO: 290077 - RNA, 14 nt, Human adenovirus E
caaaauucuuaaaa

SEQ ID NO: 290078 - RNA, 20 nt, Human adenovirus E
caaaauugcaucaucuggcu

SEQ ID NO: 290079 - RNA, 22 nt, Human adenovirus E
caaacgaccaucgccucuccua

SEQ ID NO: 290080 - RNA, 14 nt, Human adenovirus E
caaacuaaccucca

SEQ ID NO: 290081 - RNA, 16 nt, Human adenovirus E
caaacuaaccuccacc

SEQ ID NO: 290082 - RNA, 15 nt, Human adenovirus E
caaaugcaaauucca

SEQ ID NO: 290083 - RNA, 18 nt, Human adenovirus E
caacaaaauugcaucauc

SEQ ID NO: 290084 - RNA, 23 nt, Human adenovirus E
caacaaaauugcaucaucuggcu

SEQ ID NO: 290085 - RNA, 14 nt, Human adenovirus E
caacaaaugccagc

SEQ ID NO: 290086 - RNA, 14 nt, Human adenovirus E
caacaaccgucucc

SEQ ID NO: 290087 - RNA, 13 nt, Human adenovirus E
caacaccuacucg

SEQ ID NO: 290088 - RNA, 14 nt, Human adenovirus E
caacagcugaggau

SEQ ID NO: 290089 - RNA, 22 nt, Human adenovirus E
caacauagacuuguucagcucc

SEQ ID NO: 290090 - RNA, 17 nt, Human adenovirus E
caaccaaacuaaccucc

SEQ ID NO: 290091 - RNA, 15 nt, Human adenovirus E
caaccucaggcacac

SEQ ID NO: 290092 - RNA, 13 nt, Human adenovirus E
caacugcaucaug

SEQ ID NO: 290093 - RNA, 20 nt, Human adenovirus E
caagaguuccccgugcccug

SEQ ID NO: 290094 - RNA, 15 nt, Human adenovirus E
caagauuacuaagcu

SEQ ID NO: 290095 - RNA, 15 nt, Human adenovirus E
caaggaagagaugcu

SEQ ID NO: 290096 - RNA, 15 nt, Human adenovirus E
caagucaagacuugu

SEQ ID NO: 290097 - RNA, 14 nt, Human adenovirus E
caaucauauugaug

SEQ ID NO: 290098 - RNA, 15 nt, Human adenovirus E
caaucauauugauga

SEQ ID NO: 290099 - RNA, 21 nt, Human adenovirus E
caaucauauugaugauuugag

SEQ ID NO: 290100 - RNA, 20 nt, Human adenovirus E
caaucggugcgcgguacuga

SEQ ID NO: 290101 - RNA, 19 nt, Human adenovirus E
caaugguacugaucugaua

SEQ ID NO: 290102 - RNA, 16 nt, Human adenovirus E
caauuauauaugcaau

SEQ ID NO: 290103 - RNA, 14 nt, Human adenovirus E
cacaaccacaaaaa

SEQ ID NO: 290104 - RNA, 15 nt, Human adenovirus E
cacacgguuuacaug

SEQ ID NO: 290105 - RNA, 18 nt, Human adenovirus E
cacacgguuuacaugucu

SEQ ID NO: 290106 - RNA, 14 nt, Human adenovirus E
cacagcaaccucag

SEQ ID NO: 290107 - RNA, 17 nt, Human adenovirus E
cacagcaaccucaggca

SEQ ID NO: 290108 - RNA, 17 nt, Human adenovirus E
cacagccuugaacaucu

SEQ ID NO: 290109 - RNA, 14 nt, Human adenovirus E
cacagcgacccaug

SEQ ID NO: 290110 - RNA, 15 nt, Human adenovirus E
cacagcucaacagcu

SEQ ID NO: 290111 - RNA, 23 nt, Human adenovirus E
caccaauggcauucagauguuca

SEQ ID NO: 290112 - RNA, 13 nt, Human adenovirus E
cacccggugcugc

SEQ ID NO: 290113 - RNA, 14 nt, Human adenovirus E
cacccggugcugcc

SEQ ID NO: 290114 - RNA, 15 nt, Human adenovirus E
cacccgguggaucuu

SEQ ID NO: 290115 - RNA, 14 nt, Human adenovirus E
cacccucaucuccu

SEQ ID NO: 290116 - RNA, 13 nt, Human adenovirus E
caccgucgacgac

SEQ ID NO: 290117 - RNA, 14 nt, Human adenovirus E
caccucacagcuca

SEQ ID NO: 290118 - RNA, 17 nt, Human adenovirus E
cacgaccguacuacuuc

SEQ ID NO: 290119 - RNA, 19 nt, Human adenovirus E
cacgggacgcagggccaug

SEQ ID NO: 290120 - RNA, 15 nt, Human adenovirus E
cacggucauguggau

SEQ ID NO: 290121 - RNA, 19 nt, Human adenovirus E
cacguuccacacaguuuca

SEQ ID NO: 290122 - RNA, 19 nt, Human adenovirus E
cacuacagccuaggccaca

SEQ ID NO: 290123 - RNA, 16 nt, Human adenovirus E
cacuagagacuaugua

SEQ ID NO: 290124 - RNA, 12 nt, Human adenovirus E
cacucuguggaa

SEQ ID NO: 290125 - RNA, 14 nt, Human adenovirus E
cagaaaaagccaca

SEQ ID NO: 290126 - RNA, 14 nt, Human adenovirus E
cagaacugaacuga

SEQ ID NO: 290127 - RNA, 16 nt, Human adenovirus E
cagaacugaacugacu

SEQ ID NO: 290128 - RNA, 18 nt, Human adenovirus E
cagaagcaagcuccagcu

SEQ ID NO: 290129 - RNA, 17 nt, Human adenovirus E
cagagggugauguggua

SEQ ID NO: 290130 - RNA, 15 nt, Human adenovirus E
cagauggaagacauc

SEQ ID NO: 290131 - RNA, 19 nt, Human adenovirus E
cagauguaucuacugaacu

SEQ ID NO: 290132 - RNA, 21 nt, Human adenovirus E
cagccagcggcugacgcugcg

SEQ ID NO: 290133 - RNA, 12 nt, Human adenovirus E
cagccugaacga

SEQ ID NO: 290134 - RNA, 23 nt, Human adenovirus E
cagcgcccggaccagguucugcu

SEQ ID NO: 290135 - RNA, 16 nt, Human adenovirus E
cagcgcucaccgccac

SEQ ID NO: 290136 - RNA, 21 nt, Human adenovirus E
caggaauuaugccaagcuggc

SEQ ID NO: 290137 - RNA, 21 nt, Human adenovirus E
caggacauggaauacaccacc

SEQ ID NO: 290138 - RNA, 22 nt, Human adenovirus E
caggacgcuucggaguaccuga

SEQ ID NO: 290139 - RNA, 21 nt, Human adenovirus E
caggaugcgguggccauccac

SEQ ID NO: 290140 - RNA, 17 nt, Human adenovirus E
caggauucgagcaguua

SEQ ID NO: 290141 - RNA, 14 nt, Human adenovirus E
caggcacacgcacu

SEQ ID NO: 290142 - RNA, 23 nt, Human adenovirus E
caggcacacgcacuaccaccacu

SEQ ID NO: 290143 - RNA, 16 nt, Human adenovirus E
caggccaagaucuccu

SEQ ID NO: 290144 - RNA, 21 nt, Human adenovirus E
caggccucucagcgccacuga

SEQ ID NO: 290145 - RNA, 18 nt, Human adenovirus E
cagggguggggacuguga

SEQ ID NO: 290146 - RNA, 14 nt, Human adenovirus E
cagucucacuuuaa

SEQ ID NO: 290147 - RNA, 22 nt, Human adenovirus E
cagucucauugccgucauucau

SEQ ID NO: 290148 - RNA, 15 nt, Human adenovirus E
cagugugguggcaug

SEQ ID NO: 290149 - RNA, 18 nt, Human adenovirus E
caguuacaccugcccugg

SEQ ID NO: 290150 - RNA, 22 nt, Human adenovirus E
caguuugcccgcgccacagaca

SEQ ID NO: 290151 - RNA, 17 nt, Human adenovirus E
cauauuagacuaugagg

SEQ ID NO: 290152 - RNA, 15 nt, Human adenovirus E
caucaaccagucuuu

SEQ ID NO: 290153 - RNA, 19 nt, Human adenovirus E
caucaggcaugaugggauc

SEQ ID NO: 290154 - RNA, 19 nt, Human adenovirus E
caugaugagacuaaucaca

SEQ ID NO: 290155 - RNA, 20 nt, Human adenovirus E
caugaugggaucuucaucac

SEQ ID NO: 290156 - RNA, 15 nt, Human adenovirus E
caugcagggugggau

SEQ ID NO: 290157 - RNA, 14 nt, Human adenovirus E
cauggagauuugga

SEQ ID NO: 290158 - RNA, 19 nt, Human adenovirus E
cauggccccgcacaagcug

SEQ ID NO: 290159 - RNA, 16 nt, Human adenovirus E
cauguggaugagcaag

SEQ ID NO: 290160 - RNA, 13 nt, Human adenovirus E
cauguguaacaug

SEQ ID NO: 290161 - RNA, 19 nt, Human adenovirus E
cauguguguuuacuugagg

SEQ ID NO: 290162 - RNA, 12 nt, Human adenovirus E
cauuacucucau

SEQ ID NO: 290163 - RNA, 22 nt, Human adenovirus E
cauuacucucaucaaguuucaa

SEQ ID NO: 290164 - RNA, 16 nt, Human adenovirus E
cauucauggaaugagu

SEQ ID NO: 290165 - RNA, 18 nt, Human adenovirus E
cauugccgucauucaugg

SEQ ID NO: 290166 - RNA, 21 nt, Human adenovirus E
cauugccgucauucauggaau

SEQ ID NO: 290167 - RNA, 15 nt, Human adenovirus E
cauuucggacaugga

SEQ ID NO: 290168 - RNA, 12 nt, Human adenovirus E
cauuugauuuga

SEQ ID NO: 290169 - RNA, 16 nt, Human adenovirus E
cauuugauuugaaaua

SEQ ID NO: 290170 - RNA, 22 nt, Human adenovirus E
cauuuuugcgcacaugugcgac

SEQ ID NO: 290171 - RNA, 18 nt, Human adenovirus E
ccaaaaaucagacaugca

SEQ ID NO: 290172 - RNA, 19 nt, Human adenovirus E
ccaaaaaucagacaugcau

SEQ ID NO: 290173 - RNA, 15 nt, Human adenovirus E
ccaaaagcaugucca

SEQ ID NO: 290174 - RNA, 16 nt, Human adenovirus E
ccaaaagcauguccau

SEQ ID NO: 290175 - RNA, 16 nt, Human adenovirus E
ccaaacuaaccuccac

SEQ ID NO: 290176 - RNA, 21 nt, Human adenovirus E
ccaacaaaauugcaucaucug

SEQ ID NO: 290177 - RNA, 21 nt, Human adenovirus E
ccaacucgaguuccaccaaua

SEQ ID NO: 290178 - RNA, 18 nt, Human adenovirus E
ccaaggggugcauccacu

SEQ ID NO: 290179 - RNA, 15 nt, Human adenovirus E
ccacaauacaugccc

SEQ ID NO: 290180 - RNA, 14 nt, Human adenovirus E
ccacacacacagau

SEQ ID NO: 290181 - RNA, 15 nt, Human adenovirus E
ccacacucugaucaa

SEQ ID NO: 290182 - RNA, 21 nt, Human adenovirus E
ccacacucugaucaagacccu

SEQ ID NO: 290183 - RNA, 14 nt, Human adenovirus E
ccacagaaguuuca

SEQ ID NO: 290184 - RNA, 15 nt, Human adenovirus E
ccacagaaguuucau

SEQ ID NO: 290185 - RNA, 19 nt, Human adenovirus E
ccacagaguggggugggaa

SEQ ID NO: 290186 - RNA, 16 nt, Human adenovirus E
ccaccacaauuacuca

SEQ ID NO: 290187 - RNA, 14 nt, Human adenovirus E
ccaccugcuucgga

SEQ ID NO: 290188 - RNA, 12 nt, Human adenovirus E
ccacugcuccug

SEQ ID NO: 290189 - RNA, 20 nt, Human adenovirus E
ccagaaacagugugguggca

SEQ ID NO: 290190 - RNA, 13 nt, Human adenovirus E
ccagauacuccua

SEQ ID NO: 290191 - RNA, 13 nt, Human adenovirus E
ccagccaacugaa

SEQ ID NO: 290192 - RNA, 22 nt, Human adenovirus E
ccagcggggaagaaucugacua

SEQ ID NO: 290193 - RNA, 21 nt, Human adenovirus E
ccaggaaauuccccagcccac

SEQ ID NO: 290194 - RNA, 15 nt, Human adenovirus E
ccaggacuacuccac

SEQ ID NO: 290195 - RNA, 17 nt, Human adenovirus E
ccaggccaugcaacgca

SEQ ID NO: 290196 - RNA, 14 nt, Human adenovirus E
ccagguucugcuac

SEQ ID NO: 290197 - RNA, 18 nt, Human adenovirus E
ccagugggcguacaugca

SEQ ID NO: 290198 - RNA, 19 nt, Human adenovirus E
ccaguguaagccccacaag

SEQ ID NO: 290199 - RNA, 16 nt, Human adenovirus E
ccaucacaccuuccac

SEQ ID NO: 290200 - RNA, 15 nt, Human adenovirus E
ccaucgccucuccua

SEQ ID NO: 290201 - RNA, 14 nt, Human adenovirus E
ccaucgugaacgcg

SEQ ID NO: 290202 - RNA, 16 nt, Human adenovirus E
cccaacaaaauugcau

SEQ ID NO: 290203 - RNA, 19 nt, Human adenovirus E
cccaacaaaauugcaucau

SEQ ID NO: 290204 - RNA, 13 nt, Human adenovirus E
cccaccacaauua

SEQ ID NO: 290205 - RNA, 11 nt, Human adenovirus E
cccacccaguc

SEQ ID NO: 290206 - RNA, 22 nt, Human adenovirus E
cuauuuacacuggcacuaauca

SEQ ID NO: 290207 - RNA, 13 nt, Human adenovirus E
cucaauaucacga

SEQ ID NO: 290208 - RNA, 19 nt, Human adenovirus E
cucaauaucacgaaaucau

SEQ ID NO: 290209 - RNA, 21 nt, Human adenovirus E
cucaauaucacgaaaucauau

SEQ ID NO: 290210 - RNA, 17 nt, Human adenovirus E
cucacagcucaacagcu

SEQ ID NO: 290211 - RNA, 17 nt, Human adenovirus E
cucagaugcauguguaa

SEQ ID NO: 290212 - RNA, 21 nt, Human adenovirus E
cucagaugcauguguaacaug

SEQ ID NO: 290213 - RNA, 15 nt, Human adenovirus E
cucaggguugcauag

SEQ ID NO: 290214 - RNA, 21 nt, Human adenovirus E
cuccacguuccacacaguuuc

SEQ ID NO: 290215 - RNA, 15 nt, Human adenovirus E
cuccagcuccagugu

SEQ ID NO: 290216 - RNA, 11 nt, Human adenovirus E
cuccauugcag

SEQ ID NO: 290217 - RNA, 16 nt, Human adenovirus E
cuccauugccauugcc

SEQ ID NO: 290218 - RNA, 17 nt, Human adenovirus E
cuccccccgcacagccu

SEQ ID NO: 290219 - RNA, 14 nt, Human adenovirus E
cuccuccccaugaa

SEQ ID NO: 290220 - RNA, 14 nt, Human adenovirus E
cuccucuugaaggu

SEQ ID NO: 290221 - RNA, 23 nt, Human adenovirus E
cucggacgagcgccucaagcaga

SEQ ID NO: 290222 - RNA, 20 nt, Human adenovirus E
cucggcuucgacaccuggac

SEQ ID NO: 290223 - RNA, 16 nt, Human adenovirus E
cucucagcgccacuga

SEQ ID NO: 290224 - RNA, 16 nt, Human adenovirus E
cucugcucuaugcaau

SEQ ID NO: 290225 - RNA, 17 nt, Human adenovirus E
cucugcucuaugcaauu

SEQ ID NO: 290226 - RNA, 19 nt, Human adenovirus E
cucugcucuaugcaauucu

SEQ ID NO: 290227 - RNA, 15 nt, Human adenovirus E
cucugggugaaggcc

SEQ ID NO: 290228 - RNA, 17 nt, Human adenovirus E
cugaaacuguguggaac

SEQ ID NO: 290229 - RNA, 14 nt, Human adenovirus E
cugaacucugugga

SEQ ID NO: 290230 - RNA, 17 nt, Human adenovirus E
cugaagagaugcaugag

SEQ ID NO: 290231 - RNA, 20 nt, Human adenovirus E
cugaguccgggucuggugca

SEQ ID NO: 290232 - RNA, 17 nt, Human adenovirus E
cugauaaauaucagaaa

SEQ ID NO: 290233 - RNA, 16 nt, Human adenovirus E
cugaucaagugcggau

SEQ ID NO: 290234 - RNA, 16 nt, Human adenovirus E
cugaucccgaauacca

SEQ ID NO: 290235 - RNA, 15 nt, Human adenovirus E
cugaugagucgcaag

SEQ ID NO: 290236 - RNA, 18 nt, Human adenovirus E
cugcaugagggccagaau

SEQ ID NO: 290237 - RNA, 17 nt, Human adenovirus E
cugcgcgagcucuuuau

SEQ ID NO: 290238 - RNA, 16 nt, Human adenovirus E
cugcgucacccuggaa

SEQ ID NO: 290239 - RNA, 21 nt, Human adenovirus E
cugcuacaucucagggaaugg

SEQ ID NO: 290240 - RNA, 15 nt, Human adenovirus E
cugcucgaauccugu

SEQ ID NO: 290241 - RNA, 13 nt, Human adenovirus E
cugcucuaugcaa

SEQ ID NO: 290242 - RNA, 14 nt, Human adenovirus E
cugcucuaugcaau

SEQ ID NO: 290243 - RNA, 20 nt, Human adenovirus E
cugcugggucagcucgccca

SEQ ID NO: 290244 - RNA, 13 nt, Human adenovirus E
cugcuguguacug

SEQ ID NO: 290245 - RNA, 16 nt, Human adenovirus E
cugcuucggaucuuca

SEQ ID NO: 290246 - RNA, 17 nt, Human adenovirus E
cuggaagccaccgugga

SEQ ID NO: 290247 - RNA, 13 nt, Human adenovirus E
cugggccaucagc

SEQ ID NO: 290248 - RNA, 20 nt, Human adenovirus E
cugggccaucagcagcaaca

SEQ ID NO: 290249 - RNA, 21 nt, Human adenovirus E
cugguacugcaggccccggcg

SEQ ID NO: 290250 - RNA, 20 nt, Human adenovirus E
cugguggaggaucacccggu

SEQ ID NO: 290251 - RNA, 14 nt, Human adenovirus E
cugguguaccagga

SEQ ID NO: 290252 - RNA, 17 nt, Human adenovirus E
cuguccccggugcugac

SEQ ID NO: 290253 - RNA, 17 nt, Human adenovirus E
cuguguuaaaaucaaca

SEQ ID NO: 290254 - RNA, 20 nt, Human adenovirus E
cuuaaaauuaacaauuauau

SEQ ID NO: 290255 - RNA, 21 nt, Human adenovirus E
cuuaagaauggcaaaauucaa

SEQ ID NO: 290256 - RNA, 22 nt, Human adenovirus E
cuuacauguggagcuaccagcc

SEQ ID NO: 290257 - RNA, 22 nt, Human adenovirus E
cuuccgcugcuucgcucgggau

SEQ ID NO: 290258 - RNA, 15 nt, Human adenovirus E
cuuccguguguuccu

SEQ ID NO: 290259 - RNA, 22 nt, Human adenovirus E
cuucgacaccuggaccacugcc

SEQ ID NO: 290260 - RNA, 17 nt, Human adenovirus E
cuucugacucuguacug

SEQ ID NO: 290261 - RNA, 13 nt, Human adenovirus E
cuugaacaucuga

SEQ ID NO: 290262 - RNA, 18 nt, Human adenovirus E
cuuggauguugagguaca

SEQ ID NO: 290263 - RNA, 13 nt, Human adenovirus E
cuuuuugacgcuc

SEQ ID NO: 290264 - RNA, 22 nt, Human adenovirus E
gaaaauuacuauuuacacuggc

SEQ ID NO: 290265 - RNA, 21 nt, Human adenovirus E
gaaacagugugguggcaugag

SEQ ID NO: 290266 - RNA, 21 nt, Human adenovirus E
gaaauaaagauacaaucauau

SEQ ID NO: 290267 - RNA, 20 nt, Human adenovirus E
gaaaugccugcuacaucuca

SEQ ID NO: 290268 - RNA, 23 nt, Human adenovirus E
gaaaugccugcuacaucucaggg

SEQ ID NO: 290269 - RNA, 14 nt, Human adenovirus E
gaacaaacucugaa

SEQ ID NO: 290270 - RNA, 12 nt, Human adenovirus E
gaacaaggccau

SEQ ID NO: 290271 - RNA, 14 nt, Human adenovirus E
gaacaauacucucg

SEQ ID NO: 290272 - RNA, 17 nt, Human adenovirus E
gaacaucugaaugccau

SEQ ID NO: 290273 - RNA, 19 nt, Human adenovirus E
gaacccaccacgccuagaa

SEQ ID NO: 290274 - RNA, 18 nt, Human adenovirus E
gaaccugacacaccacca

SEQ ID NO: 290275 - RNA, 14 nt, Human adenovirus E
gaacucuguggaaa

SEQ ID NO: 290276 - RNA, 14 nt, Human adenovirus E
gaagcaagcuccag

SEQ ID NO: 290277 - RNA, 22 nt, Human adenovirus E
gaaggugcaaccggugcugaga

SEQ ID NO: 290278 - RNA, 17 nt, Human adenovirus E
gaaguggagaucugucu

SEQ ID NO: 290279 - RNA, 23 nt, Human adenovirus E
gaaguggagaucugucuccagga

SEQ ID NO: 290280 - RNA, 21 nt, Human adenovirus E
gaauccaucaaccagucuuug

SEQ ID NO: 290281 - RNA, 18 nt, Human adenovirus E
gaaucuaauacuaccacc

SEQ ID NO: 290282 - RNA, 17 nt, Human adenovirus E
gaaugaccacaaccaca

SEQ ID NO: 290283 - RNA, 18 nt, Human adenovirus E
gacacggucauguggaug

SEQ ID NO: 290284 - RNA, 20 nt, Human adenovirus E
gacagacccuucugacucug

SEQ ID NO: 290285 - RNA, 19 nt, Human adenovirus E
gacagcagccccaggccaa

SEQ ID NO: 290286 - RNA, 15 nt, Human adenovirus E
gacccgaucauuugg

SEQ ID NO: 290287 - RNA, 13 nt, Human adenovirus E
gacccuucugacu

SEQ ID NO: 290288 - RNA, 16 nt, Human adenovirus E
gaccgccgccggcgau

SEQ ID NO: 290289 - RNA, 17 nt, Human adenovirus E
gaccuccuccccaugaa

SEQ ID NO: 290290 - RNA, 18 nt, Human adenovirus E
gaccuuucugaaucuaau

SEQ ID NO: 290291 - RNA, 14 nt, Human adenovirus E
gacgaagagcucag

SEQ ID NO: 290292 - RNA, 14 nt, Human adenovirus E
gacgcucuuaacuu

SEQ ID NO: 290293 - RNA, 21 nt, Human adenovirus E
gacgcucuuaacuugggccau

SEQ ID NO: 290294 - RNA, 17 nt, Human adenovirus E
gacgcuucggaguaccu

SEQ ID NO: 290295 - RNA, 21 nt, Human adenovirus E
gacggucuuggaagacuuuca

SEQ ID NO: 290296 - RNA, 18 nt, Human adenovirus E
gacgguugacguccugga

SEQ ID NO: 290297 - RNA, 22 nt, Human adenovirus E
gacgguuguugauuuuaacaca

SEQ ID NO: 290298 - RNA, 21 nt, Human adenovirus E
gacuagacagcugcuagagaa

SEQ ID NO: 290299 - RNA, 13 nt, Human adenovirus E
gacuagagugagu

SEQ ID NO: 290300 - RNA, 20 nt, Human adenovirus E
gacuaugaggccgagccaca

SEQ ID NO: 290301 - RNA, 12 nt, Human adenovirus E
gacuauguaggu

SEQ ID NO: 290302 - RNA, 22 nt, Human adenovirus E
gacuuaacccuaauuaacauca

SEQ ID NO: 290303 - RNA, 14 nt, Human adenovirus E
gagaaaauuacuau

SEQ ID NO: 290304 - RNA, 15 nt, Human adenovirus E
gagaacaaggccauc

SEQ ID NO: 290305 - RNA, 24 nt, Human adenovirus E
gagaccaaaagcauguccaucacc

SEQ ID NO: 290306 - RNA, 11 nt, Human adenovirus E
gagacuaugua

SEQ ID NO: 290307 - RNA, 19 nt, Human adenovirus E
gagacuggcucgcucugaa

SEQ ID NO: 290308 - RNA, 21 nt, Human adenovirus E
gagaggcaucuucugccuggu

SEQ ID NO: 290309 - RNA, 14 nt, Human adenovirus E
gagaggcaugauga

SEQ ID NO: 290310 - RNA, 18 nt, Human adenovirus E
gagaucugucuccaggaa

SEQ ID NO: 290311 - RNA, 19 nt, Human adenovirus E
gagaucugucuccaggaaa

SEQ ID NO: 290312 - RNA, 12 nt, Human adenovirus E
gagaugaugcug

SEQ ID NO: 290313 - RNA, 13 nt, Human adenovirus E
gagaugaugcuga

SEQ ID NO: 290314 - RNA, 22 nt, Human adenovirus E
gagcaagcaguacgauaugugg

SEQ ID NO: 290315 - RNA, 15 nt, Human adenovirus E
agauguucaaggcug

SEQ ID NO: 290316 - RNA, 22 nt, Human adenovirus E
agauuuggacggucuuggaaga

SEQ ID NO: 290317 - RNA, 14 nt, Human adenovirus E
agcaacugcaucau

SEQ ID NO: 290318 - RNA, 15 nt, Human adenovirus E
agcaagcaguacgau

SEQ ID NO: 290319 - RNA, 16 nt, Human adenovirus E
agcagccccaggccaa

SEQ ID NO: 290320 - RNA, 18 nt, Human adenovirus E
agcauaugccugugcugu

SEQ ID NO: 290321 - RNA, 12 nt, Human adenovirus E
agccagcggcug

SEQ ID NO: 290322 - RNA, 22 nt, Human adenovirus E
agccccacaagaaguaccucac

SEQ ID NO: 290323 - RNA, 20 nt, Human adenovirus E
agccccaggccaaccggcuc

SEQ ID NO: 290324 - RNA, 13 nt, Human adenovirus E
agccuaggccaca

SEQ ID NO: 290325 - RNA, 22 nt, Human adenovirus E
agccuaggccacaauacaugcc

SEQ ID NO: 290326 - RNA, 16 nt, Human adenovirus E
agccuugaacaucuga

SEQ ID NO: 290327 - RNA, 21 nt, Human adenovirus E
agccuuguugcgcagggccag

SEQ ID NO: 290328 - RNA, 17 nt, Human adenovirus E
agccuuuagacagcagc

SEQ ID NO: 290329 - RNA, 17 nt, Human adenovirus E
agcgccacugagacaca

SEQ ID NO: 290330 - RNA, 14 nt, Human adenovirus E
agcguccgauccug

SEQ ID NO: 290331 - RNA, 18 nt, Human adenovirus E
agcuccaguguaagcccc

SEQ ID NO: 290332 - RNA, 20 nt, Human adenovirus E
agcugagccaccugcugggu

SEQ ID NO: 290333 - RNA, 20 nt, Human adenovirus E
agcugcggcggcagcugcgu

SEQ ID NO: 290334 - RNA, 21 nt, Human adenovirus E
cccaccccacucuguggaaca

SEQ ID NO: 290335 - RNA, 22 nt, Human adenovirus E
cccagcaagauguacggaggcg

SEQ ID NO: 290336 - RNA, 17 nt, Human adenovirus E
cccaggccaugcaacgc

SEQ ID NO: 290337 - RNA, 17 nt, Human adenovirus E
cccagucgcagaaaaag

SEQ ID NO: 290338 - RNA, 21 nt, Human adenovirus E
cccaucaucaugagcaaagag

SEQ ID NO: 290339 - RNA, 18 nt, Human adenovirus E
ccccggucccccacccag

SEQ ID NO: 290340 - RNA, 14 nt, Human adenovirus E
cccgaauaccacag

SEQ ID NO: 290341 - RNA, 22 nt, Human adenovirus E
cccgcagaagcaagcuccagcu

SEQ ID NO: 290342 - RNA, 13 nt, Human adenovirus E
cccugcaugccaa

SEQ ID NO: 290343 - RNA, 13 nt, Human adenovirus E
cccugccaucaca

SEQ ID NO: 290344 - RNA, 14 nt, Human adenovirus E
cccuggaaauuccu

SEQ ID NO: 290345 - RNA, 19 nt, Human adenovirus E
cccuggcuccgcgacacgg

SEQ ID NO: 290346 - RNA, 20 nt, Human adenovirus E
ccgaaagcaacugcaucaug

SEQ ID NO: 290347 - RNA, 20 nt, Human adenovirus E
ccgaagccuuuagacagcag

SEQ ID NO: 290348 - RNA, 17 nt, Human adenovirus E
ccgacccgagacuggcu

SEQ ID NO: 290349 - RNA, 19 nt, Human adenovirus E
ccgaguuugccuacuuuga

SEQ ID NO: 290350 - RNA, 22 nt, Human adenovirus E
ccgcacagccuugaacaucuga

SEQ ID NO: 290351 - RNA, 21 nt, Human adenovirus E
ccgcagaagcaagcuccagcu

SEQ ID NO: 290352 - RNA, 22 nt, Human adenovirus E
ccgcgaccuccuccccaugaac

SEQ ID NO: 290353 - RNA, 16 nt, Human adenovirus E
ccgcggcgaucggggc

SEQ ID NO: 290354 - RNA, 19 nt, Human adenovirus E
ccgcgugcuggacauggcc

SEQ ID NO: 290355 - RNA, 14 nt, Human adenovirus E
ccgcuacaacagca

SEQ ID NO: 290356 - RNA, 19 nt, Human adenovirus E
ccggcaccgcuuccaagcg

SEQ ID NO: 290357 - RNA, 19 nt, Human adenovirus E
ccggccugguguacaacgc

SEQ ID NO: 290358 - RNA, 15 nt, Human adenovirus E
ccguacuacuuccgc

SEQ ID NO: 290359 - RNA, 18 nt, Human adenovirus E
ccgugaauaauacuuuca

SEQ ID NO: 290360 - RNA, 17 nt, Human adenovirus E
ccguggaucccaucaca

SEQ ID NO: 290361 - RNA, 13 nt, Human adenovirus E
ccguguguuccug

SEQ ID NO: 290362 - RNA, 16 nt, Human adenovirus E
ccuacucguacaaagu

SEQ ID NO: 290363 - RNA, 16 nt, Human adenovirus E
ccuagaaugaccacaa

SEQ ID NO: 290364 - RNA, 12 nt, Human adenovirus E
ccucacagcuca

SEQ ID NO: 290365 - RNA, 19 nt, Human adenovirus E
ccucagcuguugagcugug

SEQ ID NO: 290366 - RNA, 16 nt, Human adenovirus E
ccuccaccaacgccac

SEQ ID NO: 290367 - RNA, 14 nt, Human adenovirus E
ccuccauugccauu

SEQ ID NO: 290368 - RNA, 19 nt, Human adenovirus E
ccucccaggacauggaaua

SEQ ID NO: 290369 - RNA, 19 nt, Human adenovirus E
ccucgcgcuccaaccccac

SEQ ID NO: 290370 - RNA, 13 nt, Human adenovirus E
ccugacacaccac

SEQ ID NO: 290371 - RNA, 21 nt, Human adenovirus E
ccugacacaccaccacagcaa

SEQ ID NO: 290372 - RNA, 18 nt, Human adenovirus E
ccugaggcccuagaucug

SEQ ID NO: 290373 - RNA, 20 nt, Human adenovirus E
ccugaucccgaauaccacag

SEQ ID NO: 290374 - RNA, 22 nt, Human adenovirus E
ccugcacggucuggguggacuu

SEQ ID NO: 290375 - RNA, 19 nt, Human adenovirus E
ccugcagcagcgccagaag

SEQ ID NO: 290376 - RNA, 23 nt, Human adenovirus E
ccugcccuggagaugaugcugac

SEQ ID NO: 290377 - RNA, 17 nt, Human adenovirus E
ccugccgcaagaucucu

SEQ ID NO: 290378 - RNA, 21 nt, Human adenovirus E
ccuggccaccgaggaccgcug

SEQ ID NO: 290379 - RNA, 20 nt, Human adenovirus E
ccuggcuccgcgacacggca

SEQ ID NO: 290380 - RNA, 14 nt, Human adenovirus E
ccugggagggugga

SEQ ID NO: 290381 - RNA, 15 nt, Human adenovirus E
ccuggucggagucaa

SEQ ID NO: 290382 - RNA, 14 nt, Human adenovirus E
ccugguguacaacg

SEQ ID NO: 290383 - RNA, 13 nt, Human adenovirus E
ccuguaaaacugu

SEQ ID NO: 290384 - RNA, 19 nt, Human adenovirus E
ccuucugacucuguacugc

SEQ ID NO: 290385 - RNA, 17 nt, Human adenovirus E
cgaaaccagauacuccu

SEQ ID NO: 290386 - RNA, 18 nt, Human adenovirus E
cgaaagcaacugcaucau

SEQ ID NO: 290387 - RNA, 12 nt, Human adenovirus E
cgaaguccagcu

SEQ ID NO: 290388 - RNA, 14 nt, Human adenovirus E
cgacccaugcuccc

SEQ ID NO: 290389 - RNA, 15 nt, Human adenovirus E
cgacugcguccacac

SEQ ID NO: 290390 - RNA, 15 nt, Human adenovirus E
cgagaacgugagaau

SEQ ID NO: 290391 - RNA, 20 nt, Human adenovirus E
cgagacuggcucgcucugaa

SEQ ID NO: 290392 - RNA, 12 nt, Human adenovirus E
cgagcuccagcu

SEQ ID NO: 290393 - RNA, 19 nt, Human adenovirus E
cgaggaggauguccaagcg

SEQ ID NO: 290394 - RNA, 14 nt, Human adenovirus E
cgaggucacuccaa

SEQ ID NO: 290395 - RNA, 18 nt, Human adenovirus E
cgaguucgccccccggcg

SEQ ID NO: 290396 - RNA, 20 nt, Human adenovirus E
cgaucauugagcacccggug

SEQ ID NO: 290397 - RNA, 17 nt, Human adenovirus E
cgcaaaugcaaauucca

SEQ ID NO: 290398 - RNA, 16 nt, Human adenovirus E
cgcaagcgcccagaaa

SEQ ID NO: 290399 - RNA, 22 nt, Human adenovirus E
cgcacagccuugaacaucugaa

SEQ ID NO: 290400 - RNA, 18 nt, Human adenovirus E
cgcagaagcaagcuccag

SEQ ID NO: 290401 - RNA, 12 nt, Human adenovirus E
cgcagggccaug

SEQ ID NO: 290402 - RNA, 10 nt, Human adenovirus E
cgcagggugg

SEQ ID NO: 290403 - RNA, 18 nt, Human adenovirus E
cgcaucugcaccucacag

SEQ ID NO: 290404 - RNA, 16 nt, Human adenovirus E
cgccaacgcuccacgc

SEQ ID NO: 290405 - RNA, 16 nt, Human adenovirus E
cgccacugagacacac

SEQ ID NO: 290406 - RNA, 21 nt, Human adenovirus E
cgcccaccgaaaccagauacu

SEQ ID NO: 290407 - RNA, 15 nt, Human adenovirus E
cgcccaggacuacuc

SEQ ID NO: 290408 - RNA, 18 nt, Human adenovirus E
cgcccaggcgcuggguca

SEQ ID NO: 290409 - RNA, 19 nt, Human adenovirus E
cgccccgcaaucaccucaa

SEQ ID NO: 290410 - RNA, 20 nt, Human adenovirus E
cgcccggcggcaccggagca

SEQ ID NO: 290411 - RNA, 22 nt, Human adenovirus E
cgccgcgcgcggguagguucug

SEQ ID NO: 290412 - RNA, 18 nt, Human adenovirus E
cgccugaaccugacacac

SEQ ID NO: 290413 - RNA, 17 nt, Human adenovirus E
cgcggccguucaugggc

SEQ ID NO: 290414 - RNA, 21 nt, Human adenovirus E
cgcguggcccgcuacaacagc

SEQ ID NO: 290415 - RNA, 14 nt, Human adenovirus E
cgcuacacgcuggc

SEQ ID NO: 290416 - RNA, 14 nt, Human adenovirus E
cgcucgggaucucg

SEQ ID NO: 290417 - RNA, 19 nt, Human adenovirus E
cgcucuuaacuugggccau

SEQ ID NO: 290418 - RNA, 22 nt, Human adenovirus E
cgcugcuucgcucgggaucucg

SEQ ID NO: 290419 - RNA, 19 nt, Human adenovirus E
cgcuggccgugggcgacaa

SEQ ID NO: 290420 - RNA, 23 nt, Human adenovirus E
cgcugguggagaacaaggccauc

SEQ ID NO: 290421 - RNA, 16 nt, Human adenovirus E
cggaggguuucaucuc

SEQ ID NO: 290422 - RNA, 14 nt, Human adenovirus E
cggaucaaauuaua

SEQ ID NO: 290423 - RNA, 21 nt, Human adenovirus E
cggaucaaauuauacacugaa

SEQ ID NO: 290424 - RNA, 21 nt, Human adenovirus E
cgggaugcgucgccaccacca

SEQ ID NO: 290425 - RNA, 19 nt, Human adenovirus E
cgggcccgcgaugaucuca

SEQ ID NO: 290426 - RNA, 14 nt, Human adenovirus E
cggggcugcauguu

SEQ ID NO: 290427 - RNA, 16 nt, Human adenovirus E
cggugcaggccucuca

SEQ ID NO: 290428 - RNA, 16 nt, Human adenovirus E
cggugccgcccaggac

SEQ ID NO: 290429 - RNA, 19 nt, Human adenovirus E
cggugcuggcccugugguu

SEQ ID NO: 290430 - RNA, 15 nt, Human adenovirus E
cgguggccauccacc

SEQ ID NO: 290431 - RNA, 17 nt, Human adenovirus E
cgguggucgaugugauc

SEQ ID NO: 290432 - RNA, 14 nt, Human adenovirus E
cgguuuacaugucu

SEQ ID NO: 290433 - RNA, 13 nt, Human adenovirus E
cguacuacuuccg

SEQ ID NO: 290434 - RNA, 15 nt, Human adenovirus E
cgucagaaugugaug

SEQ ID NO: 290435 - RNA, 21 nt, Human adenovirus E
cguggcccgcuacaacagcac

SEQ ID NO: 290436 - RNA, 22 nt, Human adenovirus E
cuaacaaccaaacuaaccucca

SEQ ID NO: 290437 - RNA, 15 nt, Human adenovirus E
cuaauacuaccaccc

SEQ ID NO: 290438 - RNA, 14 nt, Human adenovirus E
cuaauuaacaucac

SEQ ID NO: 290439 - RNA, 18 nt, Human adenovirus E
cuacagccuaggccacaa

SEQ ID NO: 290440 - RNA, 15 nt, Human adenovirus E
cuaccagccccagau

SEQ ID NO: 290441 - RNA, 18 nt, Human adenovirus E
cuacgagcuccugcagca

SEQ ID NO: 290442 - RNA, 22 nt, Human adenovirus E
cuacggcacucugguggccaac

SEQ ID NO: 290443 - RNA, 15 nt, Human adenovirus E
cuagaaugaccacaa

SEQ ID NO: 290444 - RNA, 19 nt, Human adenovirus E
cuagaaugaccacaaccac

SEQ ID NO: 290445 - RNA, 21 nt, Human adenovirus E
cuagaaugaccacaaccacaa

SEQ ID NO: 290446 - RNA, 20 nt, Human adenovirus E
cuagaugcaacaacaacagc

SEQ ID NO: 290447 - RNA, 14 nt, Human adenovirus E
cuaucauuaccucu

SEQ ID NO: 290448 - RNA, 18 nt, Human adenovirus E
cuaugaggccgagccaca

SEQ ID NO: 290449 - RNA, 20 nt, Human adenovirus E
cuaugcaauucugacaauga

SEQ ID NO: 290450 - RNA, 19 nt, Human adenovirus E
aaaaaauaaagaaucacuu

SEQ ID NO: 290451 - RNA, 13 nt, Human adenovirus E
aaaaaauaaucau

SEQ ID NO: 290452 - RNA, 15 nt, Human adenovirus E
aaaaaauaaucauuu

SEQ ID NO: 290453 - RNA, 12 nt, Human adenovirus E
aaaaagccacag

SEQ ID NO: 290454 - RNA, 14 nt, Human adenovirus E
aaaaauaaucauuu

SEQ ID NO: 290455 - RNA, 20 nt, Human adenovirus E
aaaaaugagagcauuacucu

SEQ ID NO: 290456 - RNA, 14 nt, Human adenovirus E
aaaagcauguccau

SEQ ID NO: 290457 - RNA, 18 nt, Human adenovirus E
aaaauaaagaaucacuua

SEQ ID NO: 290458 - RNA, 14 nt, Human adenovirus E
aaaaucagacaugc

SEQ ID NO: 290459 - RNA, 21 nt, Human adenovirus E
aaaaugagagcauuacucuca

SEQ ID NO: 290460 - RNA, 15 nt, Human adenovirus E
aaaauuaacaauuau

SEQ ID NO: 290461 - RNA, 13 nt, Human adenovirus E
aaaauugcaucau

SEQ ID NO: 290462 - RNA, 13 nt, Human adenovirus E
aaacuaaccucca

SEQ ID NO: 290463 - RNA, 19 nt, Human adenovirus E
aaagauacaaucauauuga

SEQ ID NO: 290464 - RNA, 14 nt, Human adenovirus E
aaagaucauauuga

SEQ ID NO: 290465 - RNA, 15 nt, Human adenovirus E
aaagcaacugcauca

SEQ ID NO: 290466 - RNA, 16 nt, Human adenovirus E
aaagcaacugcaucau

SEQ ID NO: 290467 - RNA, 22 nt, Human adenovirus E
aaagguccagaaaaagccacag

SEQ ID NO: 290468 - RNA, 18 nt, Human adenovirus E
aaauaaagaucauauuga

SEQ ID NO: 290469 - RNA, 21 nt, Human adenovirus E
aaauaaagaucauauugauga

SEQ ID NO: 290470 - RNA, 15 nt, Human adenovirus E
aaauaacugcucgaa

SEQ ID NO: 290471 - RNA, 12 nt, Human adenovirus E
aaauaaucauuu

SEQ ID NO: 290472 - RNA, 13 nt, Human adenovirus E
aaaucacccaguc

SEQ ID NO: 290473 - RNA, 15 nt, Human adenovirus E
aaauuacuauuuaca

SEQ ID NO: 290474 - RNA, 23 nt, Human adenovirus E
aaauuacuauuuacacuggcacu

SEQ ID NO: 290475 - RNA, 22 nt, Human adenovirus E
aaauuuuugcuuuuauuugcca

SEQ ID NO: 290476 - RNA, 12 nt, Human adenovirus E
aacaaggccauc

SEQ ID NO: 290477 - RNA, 18 nt, Human adenovirus E
aacaauuauauaugcaau

SEQ ID NO: 290478 - RNA, 19 nt, Human adenovirus E
aacaccgagcguuccaagc

SEQ ID NO: 290479 - RNA, 21 nt, Human adenovirus E
aacauucuggccugcacccuc

SEQ ID NO: 290480 - RNA, 22 nt, Human adenovirus E
aacauucuggccugcacccuca

SEQ ID NO: 290481 - RNA, 21 nt, Human adenovirus E
aaccaccccggccugcaugaa

SEQ ID NO: 290482 - RNA, 17 nt, Human adenovirus E
aaccagagggugaugug

SEQ ID NO: 290483 - RNA, 14 nt, Human adenovirus E
aaccagauacuccu

SEQ ID NO: 290484 - RNA, 19 nt, Human adenovirus E
aaccagucuuuguucuuca

SEQ ID NO: 290485 - RNA, 18 nt, Human adenovirus E
aacccuggaaauuccuca

SEQ ID NO: 290486 - RNA, 14 nt, Human adenovirus E
aaccgcgugcugga

SEQ ID NO: 290487 - RNA, 17 nt, Human adenovirus E
aaccugacacaccacca

SEQ ID NO: 290488 - RNA, 19 nt, Human adenovirus E
aacgagaccgagcuccagc

SEQ ID NO: 290489 - RNA, 23 nt, Human adenovirus E
acccggggucucuucgcugcaug

SEQ ID NO: 290490 - RNA, 21 nt, Human adenovirus E
accgaaaccagauacuccuag

SEQ ID NO: 290491 - RNA, 23 nt, Human adenovirus E
accgcagccagcggcugacgcug

SEQ ID NO: 290492 - RNA, 21 nt, Human adenovirus E
accgcgaggacaacaccuacu

SEQ ID NO: 290493 - RNA, 22 nt, Human adenovirus E
accgcgugcuggacauggccag

SEQ ID NO: 290494 - RNA, 18 nt, Human adenovirus E
accggcucucggccaucc

SEQ ID NO: 290495 - RNA, 15 nt, Human adenovirus E
accguacuacuuccg

SEQ ID NO: 290496 - RNA, 16 nt, Human adenovirus E
accguggaacaucucg

SEQ ID NO: 290497 - RNA, 16 nt, Human adenovirus E
accuaugcaacccuga

SEQ ID NO: 290498 - RNA, 12 nt, Human adenovirus E
accucacagcuc

SEQ ID NO: 290499 - RNA, 20 nt, Human adenovirus E
accucaccuggcuguuccag

SEQ ID NO: 290500 - RNA, 12 nt, Human adenovirus E
accucaggcaca

SEQ ID NO: 290501 - RNA, 21 nt, Human adenovirus E
accuccacccaccacaauuac

SEQ ID NO: 290502 - RNA, 20 nt, Human adenovirus E
accuccuccccaugaacuaa

SEQ ID NO: 290503 - RNA, 18 nt, Human adenovirus E
accucugcucuaugcaau

SEQ ID NO: 290504 - RNA, 23 nt, Human adenovirus E
accugcccuggagaugaugcuga

SEQ ID NO: 290505 - RNA, 18 nt, Human adenovirus E
accuggcuguuccagggc

SEQ ID NO: 290506 - RNA, 18 nt, Human adenovirus E
accuuccaccugaucccg

SEQ ID NO: 290507 - RNA, 19 nt, Human adenovirus E
acgccuagaaugaccacaa

SEQ ID NO: 290508 - RNA, 17 nt, Human adenovirus E
acgggacgcagggccau

SEQ ID NO: 290509 - RNA, 14 nt, Human adenovirus E
acggucauguggau

SEQ ID NO: 290510 - RNA, 18 nt, Human adenovirus E
acgguggucgaugugauc

SEQ ID NO: 290511 - RNA, 17 nt, Human adenovirus E
acguuccacacaguuuc

SEQ ID NO: 290512 - RNA, 16 nt, Human adenovirus E
acuacagcaggcauuu

SEQ ID NO: 290513 - RNA, 12 nt, Human adenovirus E
acuacagccuag

SEQ ID NO: 290514 - RNA, 15 nt, Human adenovirus E
acuacagccuaggcc

SEQ ID NO: 290515 - RNA, 19 nt, Human adenovirus E
acuaugaggccgagccaca

SEQ ID NO: 290516 - RNA, 15 nt, Human adenovirus E
acuauuuacacuggc

SEQ ID NO: 290517 - RNA, 18 nt, Human adenovirus E
acuauuuacacuggcacu

SEQ ID NO: 290518 - RNA, 15 nt, Human adenovirus E
acuccucaauaucac

SEQ ID NO: 290519 - RNA, 14 nt, Human adenovirus E
acucugaaacacaa

SEQ ID NO: 290520 - RNA, 18 nt, Human adenovirus E
acucuguggaaacaauaa

SEQ ID NO: 290521 - RNA, 21 nt, Human adenovirus E
acugacugugggucugaugag

SEQ ID NO: 290522 - RNA, 18 nt, Human adenovirus E
acugcguccacacucuga

SEQ ID NO: 290523 - RNA, 16 nt, Human adenovirus E
acuuaacccuaauuaa

SEQ ID NO: 290524 - RNA, 21 nt, Human adenovirus E
acuucgcauucgccagcagca

SEQ ID NO: 290525 - RNA, 15 nt, Human adenovirus E
acuugaggugauguc

SEQ ID NO: 290526 - RNA, 22 nt, Human adenovirus E
acuuucacaagacuagacagcu

SEQ ID NO: 290527 - RNA, 13 nt, Human adenovirus E
agaaaaagccaca

SEQ ID NO: 290528 - RNA, 19 nt, Human adenovirus E
agaaaauuacuauuuacac

SEQ ID NO: 290529 - RNA, 18 nt, Human adenovirus E
agaaacagugugguggca

SEQ ID NO: 290530 - RNA, 20 nt, Human adenovirus E
agaaacagugugguggcaug

SEQ ID NO: 290531 - RNA, 23 nt, Human adenovirus E
agaacgugagaaucgaguacaau

SEQ ID NO: 290532 - RNA, 15 nt, Human adenovirus E
agaaguucaccugcc

SEQ ID NO: 290533 - RNA, 22 nt, Human adenovirus E
agaaguuucaugguauuguuau

SEQ ID NO: 290534 - RNA, 13 nt, Human adenovirus E
agaaugaccacaa

SEQ ID NO: 290535 - RNA, 19 nt, Human adenovirus E
agaaugaccacaaccacaa

SEQ ID NO: 290536 - RNA, 23 nt, Human adenovirus E
agacccgcgcuucucugguggag

SEQ ID NO: 290537 - RNA, 15 nt, Human adenovirus E
agaccgagcuccagc

SEQ ID NO: 290538 - RNA, 22 nt, Human adenovirus E
agacuaugaggccgagccacag

SEQ ID NO: 290539 - RNA, 23 nt, Human adenovirus E
auaaacggagacgguuguugauu

SEQ ID NO: 290540 - RNA, 20 nt, Human adenovirus E
auaaagauacaaucauauug

SEQ ID NO: 290541 - RNA, 14 nt, Human adenovirus E
auaagcaggugcag

SEQ ID NO: 290542 - RNA, 14 nt, Human adenovirus E
auaauacuuucauu

SEQ ID NO: 290543 - RNA, 21 nt, Human adenovirus E
auacacacacgguuuacaugu

SEQ ID NO: 290544 - RNA, 12 nt, Human adenovirus E
auacaguguuca

SEQ ID NO: 290545 - RNA, 24 nt, Human adenovirus E
auacaugcccauauuagacuauga

SEQ ID NO: 290546 - RNA, 14 nt, Human adenovirus E
auacuccaccucca

SEQ ID NO: 290547 - RNA, 14 nt, Human adenovirus E
auagacuuguucag

SEQ ID NO: 290548 - RNA, 23 nt, Human adenovirus E
auauacggcccugcgguggugaa

SEQ ID NO: 290549 - RNA, 13 nt, Human adenovirus E
auauugaugauuu

SEQ ID NO: 290550 - RNA, 16 nt, Human adenovirus E
auauugaugauuugag

SEQ ID NO: 290551 - RNA, 16 nt, Human adenovirus E
aucaaccagucuuugu

SEQ ID NO: 290552 - RNA, 15 nt, Human adenovirus E
aucacccggugcugc

SEQ ID NO: 290553 - RNA, 15 nt, Human adenovirus E
aucagacaugcaucc

SEQ ID NO: 290554 - RNA, 19 nt, Human adenovirus E
aucagauguaucuacugaa

SEQ ID NO: 290555 - RNA, 16 nt, Human adenovirus E
aucauuugguguugcc

SEQ ID NO: 290556 - RNA, 19 nt, Human adenovirus E
aucccacccugcaugccaa

SEQ ID NO: 290557 - RNA, 14 nt, Human adenovirus E
aucccauacuccac

SEQ ID NO: 290558 - RNA, 15 nt, Human adenovirus E
aucccugcuugcauu

SEQ ID NO: 290559 - RNA, 20 nt, Human adenovirus E
aucgucaucacccagcaguc

SEQ ID NO: 290560 - RNA, 14 nt, Human adenovirus E
aucgugaacauucu

SEQ ID NO: 290561 - RNA, 14 nt, Human adenovirus E
aucuaauacuacca

SEQ ID NO: 290562 - RNA, 16 nt, Human adenovirus E
aucuaauacuaccacc

SEQ ID NO: 290563 - RNA, 18 nt, Human adenovirus E
aucucagggaauggggcu

SEQ ID NO: 290564 - RNA, 17 nt, Human adenovirus E
aucuccuccucuugaag

SEQ ID NO: 290565 - RNA, 13 nt, Human adenovirus E
aucugacacuaca

SEQ ID NO: 290566 - RNA, 17 nt, Human adenovirus E
aucugacuuaacccuaa

SEQ ID NO: 290567 - RNA, 17 nt, Human adenovirus E
aucuggaagaagcagaa

SEQ ID NO: 290568 - RNA, 22 nt, Human adenovirus E
augagagcauuacucucaucaa

SEQ ID NO: 290569 - RNA, 14 nt, Human adenovirus E
augaggugcaucuu

SEQ ID NO: 290570 - RNA, 22 nt, Human adenovirus E
augaugagacuaaucacagaac

SEQ ID NO: 290571 - RNA, 21 nt, Human adenovirus E
augcaacaacaacagccaccu

SEQ ID NO: 290572 - RNA, 19 nt, Human adenovirus E
augcaacccugagcucuuc

SEQ ID NO: 290573 - RNA, 12 nt, Human adenovirus E
augcaauucuga

SEQ ID NO: 290574 - RNA, 13 nt, Human adenovirus E
augcaauucugac

SEQ ID NO: 290575 - RNA, 22 nt, Human adenovirus E
auggcgggcggggcggugcugg

SEQ ID NO: 290576 - RNA, 15 nt, Human adenovirus E
augguacugaucuga

SEQ ID NO: 290577 - RNA, 13 nt, Human adenovirus E
auguaaguucugu

SEQ ID NO: 290578 - RNA, 13 nt, Human adenovirus E
auguggaucugac

SEQ ID NO: 290579 - RNA, 15 nt, Human adenovirus E
auguguugacuuuaa

SEQ ID NO: 290580 - RNA, 13 nt, Human adenovirus E
auuaaaaguuaau

SEQ ID NO: 290581 - RNA, 21 nt, Human adenovirus E
auuaacaauuauauaugcaau

SEQ ID NO: 290582 - RNA, 21 nt, Human adenovirus E
auuaccucugcucuaugcaau

SEQ ID NO: 290583 - RNA, 22 nt, Human adenovirus E
auuaccucugcucuaugcaauu

SEQ ID NO: 290584 - RNA, 23 nt, Human adenovirus E
auuaccucugcucuaugcaauuc

SEQ ID NO: 290585 - RNA, 16 nt, Human adenovirus E
auuacuaagcugauaa

SEQ ID NO: 290586 - RNA, 13 nt, Human adenovirus E
auuacucucauca

SEQ ID NO: 290587 - RNA, 18 nt, Human adenovirus E
cagcaccaacgugcagac

SEQ ID NO: 290588 - RNA, 16 nt, Human adenovirus E
cagcccuuaucugacg

SEQ ID NO: 290589 - RNA, 17 nt, Human adenovirus E
cagcgacccaugcuccc

SEQ ID NO: 290590 - RNA, 15 nt, Human adenovirus E
cagcucaacagcuga

SEQ ID NO: 290591 - RNA, 23 nt, Human adenovirus E
cagcuggaucaugaucauuggga

SEQ ID NO: 290592 - RNA, 22 nt, Human adenovirus E
caggaauuaugccaagcuggcu

SEQ ID NO: 290593 - RNA, 14 nt, Human adenovirus E
caggacuacuccac

SEQ ID NO: 290594 - RNA, 22 nt, Human adenovirus E
caggcacacgcacuaccaccac

SEQ ID NO: 290595 - RNA, 20 nt, Human adenovirus E
caggcauuucggacauggaa

SEQ ID NO: 290596 - RNA, 20 nt, Human adenovirus E
caggccgaaguccagcugac

SEQ ID NO: 290597 - RNA, 16 nt, Human adenovirus E
caggggcggcaggggc

SEQ ID NO: 290598 - RNA, 21 nt, Human adenovirus E
cagggguggggacugugagua

SEQ ID NO: 290599 - RNA, 17 nt, Human adenovirus E
caggugcagaccugugu

SEQ ID NO: 290600 - RNA, 15 nt, Human adenovirus E
cagucuggggaacaa

SEQ ID NO: 290601 - RNA, 21 nt, Human adenovirus E
cagugaaauaaagaucauauu

SEQ ID NO: 290602 - RNA, 12 nt, Human adenovirus E
caguuacaccug

SEQ ID NO: 290603 - RNA, 23 nt, Human adenovirus E
caguuauuuuuccuccacccucc

SEQ ID NO: 290604 - RNA, 17 nt, Human adenovirus E
cauaugccugugcugug

SEQ ID NO: 290605 - RNA, 14 nt, Human adenovirus E
cauauugaugauga

SEQ ID NO: 290606 - RNA, 15 nt, Human adenovirus E
cauauugaugaugau

SEQ ID NO: 290607 - RNA, 16 nt, Human adenovirus E
caucaaguuucaaugu

SEQ ID NO: 290608 - RNA, 14 nt, Human adenovirus E
caucacaccuucca

SEQ ID NO: 290609 - RNA, 19 nt, Human adenovirus E
caucacuagagacuaugua

SEQ ID NO: 290610 - RNA, 20 nt, Human adenovirus E
caucagucucacuuuaacca

SEQ ID NO: 290611 - RNA, 15 nt, Human adenovirus E
cauccaccagugcaa

SEQ ID NO: 290612 - RNA, 15 nt, Human adenovirus E
cauccacugcuccug

SEQ ID NO: 290613 - RNA, 14 nt, Human adenovirus E
cauccggggcugca

SEQ ID NO: 290614 - RNA, 15 nt, Human adenovirus E
cauccggggcugcau

SEQ ID NO: 290615 - RNA, 16 nt, Human adenovirus E
caugagcauaugccug

SEQ ID NO: 290616 - RNA, 20 nt, Human adenovirus E
caugaugagacuaaucacag

SEQ ID NO: 290617 - RNA, 21 nt, Human adenovirus E
caugaugagacuaaucacaga

SEQ ID NO: 290618 - RNA, 20 nt, Human adenovirus E
cauggaaugaguaaugagaa

SEQ ID NO: 290619 - RNA, 23 nt, Human adenovirus E
cauggcgggcggggcggugcugg

SEQ ID NO: 290620 - RNA, 19 nt, Human adenovirus E
caugguggcgcagcugacc

SEQ ID NO: 290621 - RNA, 21 nt, Human adenovirus E
cauuaccucugcucuaugcaa

SEQ ID NO: 290622 - RNA, 22 nt, Human adenovirus E
cauucagauguucaaggcugug

SEQ ID NO: 290623 - RNA, 15 nt, Human adenovirus E
cauuccacggugguc

SEQ ID NO: 290624 - RNA, 16 nt, Human adenovirus E
cauuucggacauggaa

SEQ ID NO: 290625 - RNA, 17 nt, Human adenovirus E
cauuucggacauggaau

SEQ ID NO: 290626 - RNA, 18 nt, Human adenovirus E
cauuucggacauggaauu

SEQ ID NO: 290627 - RNA, 13 nt, Human adenovirus E
cauuugauuugaa

SEQ ID NO: 290628 - RNA, 15 nt, Human adenovirus E
cauuugguguugccc

SEQ ID NO: 290629 - RNA, 18 nt, Human adenovirus E
ccaaacgaccaucgccuc

SEQ ID NO: 290630 - RNA, 15 nt, Human adenovirus E
ccaaacuaaccucca

SEQ ID NO: 290631 - RNA, 22 nt, Human adenovirus E
ccuuuuaauuuuuucuaucauu

SEQ ID NO: 290632 - RNA, 21 nt, Human adenovirus E
cgaagggggccucgacuccca

SEQ ID NO: 290633 - RNA, 22 nt, Human adenovirus E
cgaauccuguaaaacuguugaa

SEQ ID NO: 290634 - RNA, 18 nt, Human adenovirus E
cgaccuucuccuggacau

SEQ ID NO: 290635 - RNA, 16 nt, Human adenovirus E
cgagaccgagcuccag

SEQ ID NO: 290636 - RNA, 12 nt, Human adenovirus E
cgagccagucuc

SEQ ID NO: 290637 - RNA, 13 nt, Human adenovirus E
cgagcuccagcuc

SEQ ID NO: 290638 - RNA, 14 nt, Human adenovirus E
cgaggacaauccuc

SEQ ID NO: 290639 - RNA, 15 nt, Human adenovirus E
cgaggagcacccuca

SEQ ID NO: 290640 - RNA, 13 nt, Human adenovirus E
cgaucauuuggug

SEQ ID NO: 290641 - RNA, 19 nt, Human adenovirus E
cgauuggacccaggccaug

SEQ ID NO: 290642 - RNA, 21 nt, Human adenovirus E
cgcaaauucaaggaagagaug

SEQ ID NO: 290643 - RNA, 15 nt, Human adenovirus E
  unsure 6..6: n is a, c, g, or t
cgcaanuacaccccc

SEQ ID NO: 290644 - RNA, 18 nt, Human adenovirus E
cgcccaccgaaaccagau

SEQ ID NO: 290645 - RNA, 18 nt, Human adenovirus E
cgcccaggacuacuccac

SEQ ID NO: 290646 - RNA, 21 nt, Human adenovirus E
cgcccaggccgaaguccagcu

SEQ ID NO: 290647 - RNA, 16 nt, Human adenovirus E
cgcccaggcgcugggu

SEQ ID NO: 290648 - RNA, 18 nt, Human adenovirus E
cgccccgcaaucaccuca

SEQ ID NO: 290649 - RNA, 17 nt, Human adenovirus E
cgccggcuacuacggca

SEQ ID NO: 290650 - RNA, 21 nt, Human adenovirus E
cgccgugcgcggaauggccau

SEQ ID NO: 290651 - RNA, 12 nt, Human adenovirus E
cgccucggagca

SEQ ID NO: 290652 - RNA, 17 nt, Human adenovirus E
cgcgaacacgaucagcc

SEQ ID NO: 290653 - RNA, 12 nt, Human adenovirus E
cgcuacaacagc

SEQ ID NO: 290654 - RNA, 12 nt, Human adenovirus E
cgcucuaucucc

SEQ ID NO: 290655 - RNA, 18 nt, Human adenovirus E
cgcucugaaacugugugg

SEQ ID NO: 290656 - RNA, 13 nt, Human adenovirus E
cgcuucccgggau

SEQ ID NO: 290657 - RNA, 17 nt, Human adenovirus E
cggaccagguucugcua

SEQ ID NO: 290658 - RNA, 17 nt, Human adenovirus E
cggcacgcggccguuca

SEQ ID NO: 290659 - RNA, 18 nt, Human adenovirus E
cggcgaggaggaugucca

SEQ ID NO: 290660 - RNA, 13 nt, Human adenovirus E
cggcgcagggugg

SEQ ID NO: 290661 - RNA, 13 nt, Human adenovirus E
cggcgcggagccu

SEQ ID NO: 290662 - RNA, 11 nt, Human adenovirus E
cggcucggggc

SEQ ID NO: 290663 - RNA, 17 nt, Human adenovirus E
cgggcccgcgaugaucu

SEQ ID NO: 290664 - RNA, 15 nt, Human adenovirus E
cgggccggccgucca

SEQ ID NO: 290665 - RNA, 13 nt, Human adenovirus E
cggggcggugcug

SEQ ID NO: 290666 - RNA, 17 nt, Human adenovirus E
cgggugcugacuagguc

SEQ ID NO: 290667 - RNA, 21 nt, Human adenovirus E
cggucagggagaugaaacccu

SEQ ID NO: 290668 - RNA, 14 nt, Human adenovirus E
cggugcugccugau

SEQ ID NO: 290669 - RNA, 14 nt, Human adenovirus E
cggugggagcgaaa

SEQ ID NO: 290670 - RNA, 14 nt, Human adenovirus E
cgguuaucuggaag

SEQ ID NO: 290671 - RNA, 14 nt, Human adenovirus E
cgucauucauggaa

SEQ ID NO: 290672 - RNA, 18 nt, Human adenovirus E
cguccacacucugaucaa

SEQ ID NO: 290673 - RNA, 17 nt, Human adenovirus E
cgucgccaccaccaccg

SEQ ID NO: 290674 - RNA, 21 nt, Human adenovirus E
cuucugcuguuagugcucccc

SEQ ID NO: 290675 - RNA, 13 nt, Human adenovirus E
cuugaaggucucc

SEQ ID NO: 290676 - RNA, 18 nt, Human adenovirus E
cuugaggugaugucagua

SEQ ID NO: 290677 - RNA, 19 nt, Human adenovirus E
cuuguugguuagagccuga

SEQ ID NO: 290678 - RNA, 18 nt, Human adenovirus E
cuuuguucuucaccggga

SEQ ID NO: 290679 - RNA, 23 nt, Human adenovirus E
cuuuguugucugcuguguacuga

SEQ ID NO: 290680 - RNA, 19 nt, Human adenovirus E
cuuuuaauuuuuucuauca

SEQ ID NO: 290681 - RNA, 14 nt, Human adenovirus E
gaaauaaagauaca

SEQ ID NO: 290682 - RNA, 15 nt, Human adenovirus E
gaaauaaagaucaua

SEQ ID NO: 290683 - RNA, 16 nt, Human adenovirus E
gaaauaaagaucauau

SEQ ID NO: 290684 - RNA, 15 nt, Human adenovirus E
gaaaugccugcuaca

SEQ ID NO: 290685 - RNA, 17 nt, Human adenovirus E
gaaccugacacaccacc

SEQ ID NO: 290686 - RNA, 19 nt, Human adenovirus E
gaacgagaccgagcuccag

SEQ ID NO: 290687 - RNA, 18 nt, Human adenovirus E
gaacuacagcaggcauuu

SEQ ID NO: 290688 - RNA, 19 nt, Human adenovirus E
gaacucgaguuggccacca

SEQ ID NO: 290689 - RNA, 20 nt, Human adenovirus E
gaacugcgccgggugcugac

SEQ ID NO: 290690 - RNA, 21 nt, Human adenovirus E
gaacugcgccgggugcugacu

SEQ ID NO: 290691 - RNA, 12 nt, Human adenovirus E
gaagaaucugac

SEQ ID NO: 290692 - RNA, 16 nt, Human adenovirus E
gaagcggcuccuuuga

SEQ ID NO: 290693 - RNA, 21 nt, Human adenovirus E
gaaggcgugcaggaacaugca

SEQ ID NO: 290694 - RNA, 17 nt, Human adenovirus E
gaauaacugaaaucugu

SEQ ID NO: 290695 - RNA, 14 nt, Human adenovirus E
gaauaauacuuuca

SEQ ID NO: 290696 - RNA, 18 nt, Human adenovirus E
gaauacaccacccucucc

SEQ ID NO: 290697 - RNA, 19 nt, Human adenovirus E
gaauccaucaaccagucuu

SEQ ID NO: 290698 - RNA, 18 nt, Human adenovirus E
gaauccuguaaaacuguu

SEQ ID NO: 290699 - RNA, 19 nt, Human adenovirus E
gaaugaccacaaccacaaa

SEQ ID NO: 290700 - RNA, 17 nt, Human adenovirus E
gaaugaguaaugagaaa

SEQ ID NO: 290701 - RNA, 21 nt, Human adenovirus E
gacacuacagaaacugaauua

SEQ ID NO: 290702 - RNA, 19 nt, Human adenovirus E
gacagcgugguggcggacg

SEQ ID NO: 290703 - RNA, 13 nt, Human adenovirus E
gacaguaugauuu

SEQ ID NO: 290704 - RNA, 18 nt, Human adenovirus E
gacccaggccaugcaacg

SEQ ID NO: 290705 - RNA, 14 nt, Human adenovirus E
gacccugccaucac

SEQ ID NO: 290706 - RNA, 15 nt, Human adenovirus E
gacccugccaucaca

SEQ ID NO: 290707 - RNA, 23 nt, Human adenovirus E
gacccuucugacucuguacugca

SEQ ID NO: 290708 - RNA, 20 nt, Human adenovirus E
gaccuagcucggcuucgaca

SEQ ID NO: 290709 - RNA, 18 nt, Human adenovirus E
gacgcagcugccgccgca

SEQ ID NO: 290710 - RNA, 13 nt, Human adenovirus E
gacgcagggccau

SEQ ID NO: 290711 - RNA, 20 nt, Human adenovirus E
gacucuguacugcaucugca

SEQ ID NO: 290712 - RNA, 17 nt, Human adenovirus E
gagaaggccgaucccug

SEQ ID NO: 290713 - RNA, 18 nt, Human adenovirus E
gucugaaucuuuauuuga

SEQ ID NO: 290714 - RNA, 20 nt, Human adenovirus E
gugaucagagccaucaggca

SEQ ID NO: 290715 - RNA, 14 nt, Human adenovirus E
gugcaguggcgcgg

SEQ ID NO: 290716 - RNA, 22 nt, Human adenovirus E
gugcggggggagaggguggugu

SEQ ID NO: 290717 - RNA, 19 nt, Human adenovirus E
gugcugaagagaugcauga

SEQ ID NO: 290718 - RNA, 15 nt, Human adenovirus E
gugcuggacauggcc

SEQ ID NO: 290719 - RNA, 14 nt, Human adenovirus E
guggaacaucucga

SEQ ID NO: 290720 - RNA, 15 nt, Human adenovirus E
guggagcuaccagcc

SEQ ID NO: 290721 - RNA, 16 nt, Human adenovirus E
gugggcguacaugcac

SEQ ID NO: 290722 - RNA, 13 nt, Human adenovirus E
guggggacuguga

SEQ ID NO: 290723 - RNA, 16 nt, Human adenovirus E
guggggacugugagua

SEQ ID NO: 290724 - RNA, 23 nt, Human adenovirus E
guguggaacguggagaccaaaag

SEQ ID NO: 290725 - RNA, 23 nt, Human adenovirus E
guguugcagcagcaugagcggaa

SEQ ID NO: 290726 - RNA, 19 nt, Human adenovirus E
guguuguaaaucacccagu

SEQ ID NO: 290727 - RNA, 13 nt, Human adenovirus E
guuagugcucccc

SEQ ID NO: 290728 - RNA, 17 nt, Human adenovirus E
guucaccugccuggucg

SEQ ID NO: 290729 - RNA, 18 nt, Human adenovirus E
guuccacacaguuucaga

SEQ ID NO: 290730 - RNA, 21 nt, Human adenovirus E
guuccacagagugggguggga

SEQ ID NO: 290731 - RNA, 14 nt, Human adenovirus E
guuccugaauccau

SEQ ID NO: 290732 - RNA, 14 nt, Human adenovirus E
guucugguacugcg

SEQ ID NO: 290733 - RNA, 17 nt, Human adenovirus E
guugacuuuaagugcgu

SEQ ID NO: 290734 - RNA, 15 nt, Human adenovirus E
guugagagugcugaa

SEQ ID NO: 290735 - RNA, 16 nt, Human adenovirus E
guugcagcagcaugag

SEQ ID NO: 290736 - RNA, 17 nt, Human adenovirus E
guuggacgcagcugccg

SEQ ID NO: 290737 - RNA, 16 nt, Human adenovirus E
guuguugauuuuaaca

SEQ ID NO: 290738 - RNA, 13 nt, Human adenovirus E
guuuucugccaac

SEQ ID NO: 290739 - RNA, 15 nt, Human adenovirus E
uaaaauuaacaauua

SEQ ID NO: 290740 - RNA, 23 nt, Human adenovirus E
uaaaauuaacaauuauauaugca

SEQ ID NO: 290741 - RNA, 19 nt, Human adenovirus E
uaaagacauuuaacauaca

SEQ ID NO: 290742 - RNA, 12 nt, Human adenovirus E
uaaauaucagaa

SEQ ID NO: 290743 - RNA, 23 nt, Human adenovirus E
uaacaaaaaaaaugagagcauua

SEQ ID NO: 290744 - RNA, 18 nt, Human adenovirus E
uaacaaccaaacuaaccu

SEQ ID NO: 290745 - RNA, 18 nt, Human adenovirus E
uaacaauuauauaugcaa

SEQ ID NO: 290746 - RNA, 18 nt, Human adenovirus E
uaagaauggcaaaauuca

SEQ ID NO: 290747 - RNA, 17 nt, Human adenovirus E
uaagcgggagaggcaug

SEQ ID NO: 290748 - RNA, 18 nt, Human adenovirus E
uaagcgggagaggcauga

SEQ ID NO: 290749 - RNA, 9 nt, Human adenovirus E
uacaacagc

SEQ ID NO: 290750 - RNA, 21 nt, Human adenovirus E
uacaacagcaccaacgugcag

SEQ ID NO: 290751 - RNA, 16 nt, Human adenovirus E
uaccacgcugugagga

SEQ ID NO: 290752 - RNA, 18 nt, Human adenovirus E
uaccucugcucuaugcaa

SEQ ID NO: 290753 - RNA, 20 nt, Human adenovirus E
uacgagcuccugcagcagcg

SEQ ID NO: 290754 - RNA, 15 nt, Human adenovirus E
uacgagggccugcug

SEQ ID NO: 290755 - RNA, 14 nt, Human adenovirus E
uacucacaccacac

SEQ ID NO: 290756 - RNA, 12 nt, Human adenovirus E
uacuccaccucc

SEQ ID NO: 290757 - RNA, 16 nt, Human adenovirus E
uacuugaaaucugaua

SEQ ID NO: 290758 - RNA, 13 nt, Human adenovirus E
uagaaugaccaca

SEQ ID NO: 290759 - RNA, 21 nt, Human adenovirus E
uagaaugaccacaaccacaaa

SEQ ID NO: 290760 - RNA, 20 nt, Human adenovirus E
uagacagcagccccaggcca

SEQ ID NO: 290761 - RNA, 16 nt, Human adenovirus E
uagacagcugcuagag

SEQ ID NO: 290762 - RNA, 20 nt, Human adenovirus E
uagaugcaacaacaacagcc

SEQ ID NO: 290763 - RNA, 21 nt, Human adenovirus E
uagguguuuacaaaucuguug

SEQ ID NO: 290764 - RNA, 15 nt, Human adenovirus E
uauaagcaggugcag

SEQ ID NO: 290765 - RNA, 11 nt, Human adenovirus E
uauacacugaa

SEQ ID NO: 290766 - RNA, 11 nt, Human adenovirus E
uauauaugcaa

SEQ ID NO: 290767 - RNA, 21 nt, Human adenovirus E
uaugcuuucgugguauugcua

SEQ ID NO: 290768 - RNA, 21 nt, Human adenovirus E
uauuuuggaucugacacuaca

SEQ ID NO: 290769 - RNA, 14 nt, Human adenovirus E
uauuuuguguuuca

SEQ ID NO: 290770 - RNA, 20 nt, Human adenovirus E
ucaaaugcuaccgccaaaaa

SEQ ID NO: 290771 - RNA, 22 nt, Human adenovirus E
ucaaccagagggugauguggua

SEQ ID NO: 290772 - RNA, 14 nt, Human adenovirus E
ucaacgaccuucuc

SEQ ID NO: 290773 - RNA, 19 nt, Human adenovirus E
ucaaguuucugugucugaa

SEQ ID NO: 290774 - RNA, 20 nt, Human adenovirus E
ucaauguggaucugacuuaa

SEQ ID NO: 290775 - RNA, 19 nt, Human adenovirus E
ucacacauugaaaggucca

SEQ ID NO: 290776 - RNA, 17 nt, Human adenovirus E
ucacagaacugaacuga

SEQ ID NO: 290777 - RNA, 21 nt, Human adenovirus E
ucacccggugcugccugauug

SEQ ID NO: 290778 - RNA, 16 nt, Human adenovirus E
ucacgguuaucuggaa

SEQ ID NO: 290779 - RNA, 23 nt, Human adenovirus E
ucagaaaugccugcuacaucuca

SEQ ID NO: 290780 - RNA, 13 nt, Human adenovirus E
ucagauguccaaa

SEQ ID NO: 290781 - RNA, 13 nt, Human adenovirus E
ucagauguucaag

SEQ ID NO: 290782 - RNA, 14 nt, Human adenovirus E
ucagcaaguucaug

SEQ ID NO: 290783 - RNA, 18 nt, Human adenovirus E
ucagcuguugagcuguga

SEQ ID NO: 290784 - RNA, 16 nt, Human adenovirus E
ucaguauuuauagggu

SEQ ID NO: 290785 - RNA, 13 nt, Human adenovirus E
ucauauugaugau

SEQ ID NO: 290786 - RNA, 17 nt, Human adenovirus E
ucauauugaugaugauu

SEQ ID NO: 290787 - RNA, 14 nt, Human adenovirus E
ucauauugaugauu

SEQ ID NO: 290788 - RNA, 13 nt, Human adenovirus E
ucaucaaguuuca

SEQ ID NO: 290789 - RNA, 14 nt, Human adenovirus E
ucaucaaguuucaa

SEQ ID NO: 290790 - RNA, 15 nt, Human adenovirus E
ucauccggggcugca

SEQ ID NO: 290791 - RNA, 17 nt, Human adenovirus E
ucauccggggcugcaug

SEQ ID NO: 290792 - RNA, 18 nt, Human adenovirus E
ucaugagcaaagagauuc

SEQ ID NO: 290793 - RNA, 21 nt, Human adenovirus E
ucauuaccucugcucuaugca

SEQ ID NO: 290794 - RNA, 12 nt, Human adenovirus E
ucauucauggaa

SEQ ID NO: 290795 - RNA, 23 nt, Human adenovirus E
ucauugagcacccgguggaucuu

SEQ ID NO: 290796 - RNA, 16 nt, Human adenovirus E
uccaaacgaccaucgc

SEQ ID NO: 290797 - RNA, 16 nt, Human adenovirus E
uccaccagugcaagag

SEQ ID NO: 290798 - RNA, 23 nt, Human adenovirus E
uccacccgcagaagcaagcucca

SEQ ID NO: 290799 - RNA, 22 nt, Human adenovirus E
uccacccucccaggacauggaa

SEQ ID NO: 290800 - RNA, 16 nt, Human adenovirus E
uccacgcaacaccccg

SEQ ID NO: 290801 - RNA, 20 nt, Human adenovirus E
uccacgguggucgaugugau

SEQ ID NO: 290802 - RNA, 16 nt, Human adenovirus E
uccagaaaaagccaca

SEQ ID NO: 290803 - RNA, 19 nt, Human adenovirus E
uccagaaaaagccacagaa

SEQ ID NO: 290804 - RNA, 19 nt, Human adenovirus E
  unsure 8..8: n is a, c, g, or t
uccagcunuuccaacccuu

SEQ ID NO: 290805 - RNA, 10 nt, Human adenovirus E
uccaggguga

SEQ ID NO: 290806 - RNA, 18 nt, Human adenovirus E
uccaucaaccagucuuug

SEQ ID NO: 290807 - RNA, 19 nt, Human adenovirus E
uccaucaaccagucuuugu

SEQ ID NO: 290808 - RNA, 11 nt, Human adenovirus E
uccauguccug

SEQ ID NO: 290809 - RNA, 23 nt, Human adenovirus E
uccauucucaucucgcccaguaa

SEQ ID NO: 290810 - RNA, 18 nt, Human adenovirus E
ucccacccugcaugccaa

SEQ ID NO: 290811 - RNA, 17 nt, Human adenovirus E
ucccaggacauggaaua

SEQ ID NO: 290812 - RNA, 14 nt, Human adenovirus E
ucccauacuccacc

SEQ ID NO: 290813 - RNA, 13 nt, Human adenovirus E
uccccggugcuga

SEQ ID NO: 290814 - RNA, 13 nt, Human adenovirus E
uccccgugcccug

SEQ ID NO: 290815 - RNA, 13 nt, Human adenovirus E
ucccugcuugcau

SEQ ID NO: 290816 - RNA, 17 nt, Human adenovirus E
uccugcaagaguucccc

SEQ ID NO: 290817 - RNA, 14 nt, Human adenovirus E
ucgaacaccugcua

SEQ ID NO: 290818 - RNA, 16 nt, Human adenovirus E
ucgacagcgugguggc

SEQ ID NO: 290819 - RNA, 15 nt, Human adenovirus E
ucgaccccuucgggu

SEQ ID NO: 290820 - RNA, 22 nt, Human adenovirus E
ucgagcugggccaucagcagca

SEQ ID NO: 290821 - RNA, 18 nt, Human adenovirus E
ucgcaagcgcccagaaac

SEQ ID NO: 290822 - RNA, 18 nt, Human adenovirus E
ucgccguugucaaccacu

SEQ ID NO: 290823 - RNA, 20 nt, Human adenovirus E
ucgccucuccuacgagcucc

SEQ ID NO: 290824 - RNA, 14 nt, Human adenovirus E
ucggacauggaauu

SEQ ID NO: 290825 - RNA, 21 nt, Human adenovirus E
ucggaucaaauuauacacuga

SEQ ID NO: 290826 - RNA, 22 nt, Human adenovirus E
ucggaucaaauuauacacugaa

SEQ ID NO: 290827 - RNA, 14 nt, Human adenovirus E
ucggugaugcauga

SEQ ID NO: 290828 - RNA, 19 nt, Human adenovirus E
ucggugcgcgguacugauc

SEQ ID NO: 290829 - RNA, 14 nt, Human adenovirus E
ucuacagggccaaa

SEQ ID NO: 290830 - RNA, 14 nt, Human adenovirus E
ucuaucucccgccu

SEQ ID NO: 290831 - RNA, 17 nt, Human adenovirus E
ucuaugcaauucugaca

SEQ ID NO: 290832 - RNA, 21 nt, Human adenovirus E
gcccuggagaugaugcugaca

SEQ ID NO: 290833 - RNA, 23 nt, Human adenovirus E
gcccuggagaugaugcugacagu

SEQ ID NO: 290834 - RNA, 16 nt, Human adenovirus E
gcccugggauaugguu

SEQ ID NO: 290835 - RNA, 14 nt, Human adenovirus E
gcccugguguacca

SEQ ID NO: 290836 - RNA, 14 nt, Human adenovirus E
gcccuuaucugacg

SEQ ID NO: 290837 - RNA, 21 nt, Human adenovirus E
gccgcagcugcugcaucugcc

SEQ ID NO: 290838 - RNA, 17 nt, Human adenovirus E
gccgcuuccgcugcuuc

SEQ ID NO: 290839 - RNA, 18 nt, Human adenovirus E
gccggcgcccauggccau

SEQ ID NO: 290840 - RNA, 13 nt, Human adenovirus E
gccgggugcugac

SEQ ID NO: 290841 - RNA, 17 nt, Human adenovirus E
gccguugucaaccacug

SEQ ID NO: 290842 - RNA, 22 nt, Human adenovirus E
gccuccgcgaccuccuccccau

SEQ ID NO: 290843 - RNA, 17 nt, Human adenovirus E
gccucgagcugggccau

SEQ ID NO: 290844 - RNA, 18 nt, Human adenovirus E
gccucucagcgccacuga

SEQ ID NO: 290845 - RNA, 17 nt, Human adenovirus E
gccugaaccugacacac

SEQ ID NO: 290846 - RNA, 18 nt, Human adenovirus E
gccugcuacaucucaggg

SEQ ID NO: 290847 - RNA, 19 nt, Human adenovirus E
gccugcuacaucucaggga

SEQ ID NO: 290848 - RNA, 22 nt, Human adenovirus E
gccuggucggagucaaccccau

SEQ ID NO: 290849 - RNA, 15 nt, Human adenovirus E
gccugguguacaacg

SEQ ID NO: 290850 - RNA, 15 nt, Human adenovirus E
gccuugaacaucuga

SEQ ID NO: 290851 - RNA, 23 nt, Human adenovirus E
gccuugaacaucugaaugccauu

SEQ ID NO: 290852 - RNA, 16 nt, Human adenovirus E
gccuuuagacagcagc

SEQ ID NO: 290853 - RNA, 16 nt, Human adenovirus E
gcgacccaugcucccc

SEQ ID NO: 290854 - RNA, 16 nt, Human adenovirus E
gcgacuacuccggacu

SEQ ID NO: 290855 - RNA, 18 nt, Human adenovirus E
gcgagcaggagcucaggg

SEQ ID NO: 290856 - RNA, 17 nt, Human adenovirus E
gcgaggacaacaccuac

SEQ ID NO: 290857 - RNA, 17 nt, Human adenovirus E
gcgaggauugcccuguu

SEQ ID NO: 290858 - RNA, 19 nt, Human adenovirus E
gcgauacccuguccaugca

SEQ ID NO: 290859 - RNA, 16 nt, Human adenovirus E
gcgccacugagacaca

SEQ ID NO: 290860 - RNA, 22 nt, Human adenovirus E
gcgccgugcgcggaauggccau

SEQ ID NO: 290861 - RNA, 22 nt, Human adenovirus E
gcgcuccuacgacgagguguac

SEQ ID NO: 290862 - RNA, 23 nt, Human adenovirus E
gcgcugguggagaacaaggccau

SEQ ID NO: 290863 - RNA, 20 nt, Human adenovirus E
  unsure 9..9: n is a, c, g, or t
gcggccgancgccugggcga

SEQ ID NO: 290864 - RNA, 23 nt, Human adenovirus E
gcggcgcaucgcccggcggcacc

SEQ ID NO: 290865 - RNA, 21 nt, Human adenovirus E
gcggcgcgugcaguggcgcgg

SEQ ID NO: 290866 - RNA, 20 nt, Human adenovirus E
gcggggggagaugaggugca

SEQ ID NO: 290867 - RNA, 18 nt, Human adenovirus E
gcggugcuggcccugugg

SEQ ID NO: 290868 - RNA, 20 nt, Human adenovirus E
ucuccaggaaaggguggcuu

SEQ ID NO: 290869 - RNA, 21 nt, Human adenovirus E
ucuccuccucuugaaggucuc

SEQ ID NO: 290870 - RNA, 18 nt, Human adenovirus E
ucucggucaugaacugcu

SEQ ID NO: 290871 - RNA, 14 nt, Human adenovirus E
ucucuuaccugugg

SEQ ID NO: 290872 - RNA, 14 nt, Human adenovirus E
ucucuucgcugcau

SEQ ID NO: 290873 - RNA, 15 nt, Human adenovirus E
ucucuucgcugcaug

SEQ ID NO: 290874 - RNA, 13 nt, Human adenovirus E
ucugaaacugugu

SEQ ID NO: 290875 - RNA, 16 nt, Human adenovirus E
ucugaaucuaauacua

SEQ ID NO: 290876 - RNA, 13 nt, Human adenovirus E
ucugaaugccauu

SEQ ID NO: 290877 - RNA, 15 nt, Human adenovirus E
ucugaggccagacaa

SEQ ID NO: 290878 - RNA, 16 nt, Human adenovirus E
ucugcucuaugcaauu

SEQ ID NO: 290879 - RNA, 20 nt, Human adenovirus E
ucugcucuaugcaauucuga

SEQ ID NO: 290880 - RNA, 15 nt, Human adenovirus E
ucugcuguguacuga

SEQ ID NO: 290881 - RNA, 16 nt, Human adenovirus E
ucugcuguguacugag

SEQ ID NO: 290882 - RNA, 15 nt, Human adenovirus E
ucuggcccauuccac

SEQ ID NO: 290883 - RNA, 19 nt, Human adenovirus E
ucuguggaacaaacucuga

SEQ ID NO: 290884 - RNA, 16 nt, Human adenovirus E
ucuuggccuggaucuu

SEQ ID NO: 290885 - RNA, 22 nt, Human adenovirus E
ugaaauaaagauacaaucauau

SEQ ID NO: 290886 - RNA, 18 nt, Human adenovirus E
ugaaauaaagaucauauu

SEQ ID NO: 290887 - RNA, 16 nt, Human adenovirus E
ugaacucuguggaaac

SEQ ID NO: 290888 - RNA, 17 nt, Human adenovirus E
ugaacugcucgaucucc

SEQ ID NO: 290889 - RNA, 21 nt, Human adenovirus E
ugaagauccuaggccuuuuaa

SEQ ID NO: 290890 - RNA, 14 nt, Human adenovirus E
ugaaguacuccgag

SEQ ID NO: 290891 - RNA, 21 nt, Human adenovirus E
ugaaucagauguaucuacuga

SEQ ID NO: 290892 - RNA, 18 nt, Human adenovirus E
ugaaucuaauacuaccac

SEQ ID NO: 290893 - RNA, 19 nt, Human adenovirus E
ugacauccgcgcccaccga

SEQ ID NO: 290894 - RNA, 14 nt, Human adenovirus E
ugaccacaaccaca

SEQ ID NO: 290895 - RNA, 14 nt, Human adenovirus E
ugaccgacgugcgc

SEQ ID NO: 290896 - RNA, 22 nt, Human adenovirus E
ugacgcuccugguccugugaug

SEQ ID NO: 290897 - RNA, 14 nt, Human adenovirus E
ugacuagagugagu

SEQ ID NO: 290898 - RNA, 17 nt, Human adenovirus E
ugagaaucgaguacaau

SEQ ID NO: 290899 - RNA, 23 nt, Human adenovirus E
ugagacuaaucacagaacugaac

SEQ ID NO: 290900 - RNA, 15 nt, Human adenovirus E
ugagagcauuacucu

SEQ ID NO: 290901 - RNA, 21 nt, Human adenovirus E
uucagauguucaaggcugugc

SEQ ID NO: 290902 - RNA, 17 nt, Human adenovirus E
uuccaagcgccgagacc

SEQ ID NO: 290903 - RNA, 20 nt, Human adenovirus E
uuccaggacccgguagaggu

SEQ ID NO: 290904 - RNA, 15 nt, Human adenovirus E
uuccccagcccacga

SEQ ID NO: 290905 - RNA, 23 nt, Human adenovirus E
uuccugaacugcgccgggugcug

SEQ ID NO: 290906 - RNA, 14 nt, Human adenovirus E
uucggaucuucagc

SEQ ID NO: 290907 - RNA, 15 nt, Human adenovirus E
uucuaucauuaccuc

SEQ ID NO: 290908 - RNA, 12 nt, Human adenovirus E
uucugaaucuaa

SEQ ID NO: 290909 - RNA, 21 nt, Human adenovirus E
uucugaaucuaauacuaccac

SEQ ID NO: 290910 - RNA, 13 nt, Human adenovirus E
uucugccugguga

SEQ ID NO: 290911 - RNA, 20 nt, Human adenovirus E
uucugugcgaggauugcccu

SEQ ID NO: 290912 - RNA, 12 nt, Human adenovirus E
uucugugucuga

SEQ ID NO: 290913 - RNA, 19 nt, Human adenovirus E
uucuguguguugcagcagc

SEQ ID NO: 290914 - RNA, 15 nt, Human adenovirus E
uucuugcaagccaug

SEQ ID NO: 290915 - RNA, 18 nt, Human adenovirus E
uucuugggcgauguauga

SEQ ID NO: 290916 - RNA, 18 nt, Human adenovirus E
uugaaagguccagaaaaa

SEQ ID NO: 290917 - RNA, 15 nt, Human adenovirus E
uugcaucaucuggcu

SEQ ID NO: 290918 - RNA, 22 nt, Human adenovirus E
uugcccgcgccacagacaccua

SEQ ID NO: 290919 - RNA, 22 nt, Human adenovirus E
uugcgauacccuguccaugcac

SEQ ID NO: 290920 - RNA, 19 nt, Human adenovirus E
uuggucuccacguuccaca

SEQ ID NO: 290921 - RNA, 17 nt, Human adenovirus E
uuguugaucccauacuc

SEQ ID NO: 290922 - RNA, 17 nt, Human adenovirus E
uuguugcgcagggccag

SEQ ID NO: 290923 - RNA, 17 nt, Human adenovirus E
uuuaauuuuuucuauca

SEQ ID NO: 290924 - RNA, 13 nt, Human adenovirus E
uuuagacagcagc

SEQ ID NO: 290925 - RNA, 23 nt, Human adenovirus E
uuuauaggguguggagugcaaua

SEQ ID NO: 290926 - RNA, 22 nt, Human adenovirus E
uuucauuuuugcgcacaugugc

SEQ ID NO: 290927 - RNA, 16 nt, Human adenovirus E
uuuccacccgcagaag

SEQ ID NO: 290928 - RNA, 16 nt, Human adenovirus E
uuucugccaacaccac

SEQ ID NO: 290929 - RNA, 15 nt, Human adenovirus E
uuuucugccaacacc

SEQ ID NO: 290930 - RNA, 18 nt, Human adenovirus E
uuuuucuaucauuaccuc

SEQ ID NO: 290931 - RNA, 12 nt, Human adenovirus E
uuuuuucuauca

SEQ ID NO: 290932 - RNA, 21 nt, Human adenovirus E
aaaaagccacagaaguuucau

SEQ ID NO: 290933 - RNA, 17 nt, Human adenovirus E
aaaaaugagagcauuac

SEQ ID NO: 290934 - RNA, 20 nt, Human adenovirus E
aaaauuacuauuuacacugg

SEQ ID NO: 290935 - RNA, 20 nt, Human adenovirus E
aaacaggccaagaucuccua

SEQ ID NO: 290936 - RNA, 22 nt, Human adenovirus E
aaacccaacaaaauugcaucau

SEQ ID NO: 290937 - RNA, 12 nt, Human adenovirus E
aaacgaccaucg

SEQ ID NO: 290938 - RNA, 15 nt, Human adenovirus E
aaacgaccaucgccu

SEQ ID NO: 290939 - RNA, 12 nt, Human adenovirus E
aaagaaucacuu

SEQ ID NO: 290940 - RNA, 22 nt, Human adenovirus E
aaagaucauauugaugaugauu

SEQ ID NO: 290941 - RNA, 21 nt, Human adenovirus E
aaagccacagaaguuucaugg

SEQ ID NO: 290942 - RNA, 14 nt, Human adenovirus E
aaaguuaaucaugg

SEQ ID NO: 290943 - RNA, 19 nt, Human adenovirus E
aaauaaucauuugauuuga

SEQ ID NO: 290944 - RNA, 19 nt, Human adenovirus E
aaauaucagaaaugccugc

SEQ ID NO: 290945 - RNA, 17 nt, Human adenovirus E
aaaucacccagucauag

SEQ ID NO: 290946 - RNA, 14 nt, Human adenovirus E
aaaucugauaccag

SEQ ID NO: 290947 - RNA, 14 nt, Human adenovirus E
aaaugagagcauua

SEQ ID NO: 290948 - RNA, 14 nt, Human adenovirus E
aacaaacucugaaa

SEQ ID NO: 290949 - RNA, 12 nt, Human adenovirus E
aacaacaacagc

SEQ ID NO: 290950 - RNA, 13 nt, Human adenovirus E
aacaacaacagcc

SEQ ID NO: 290951 - RNA, 16 nt, Human adenovirus E
aacaacaacagccacc

SEQ ID NO: 290952 - RNA, 19 nt, Human adenovirus E
aacaauuauauaugcaaug

SEQ ID NO: 290953 - RNA, 11 nt, Human adenovirus E
aacaccacuuc

SEQ ID NO: 290954 - RNA, 18 nt, Human adenovirus E
aacaggccaagaucuccu

SEQ ID NO: 290955 - RNA, 20 nt, Human adenovirus E
aacagugugguggcaugagg

SEQ ID NO: 290956 - RNA, 22 nt, Human adenovirus E
aacccuucccaccccacucugu

SEQ ID NO: 290957 - RNA, 21 nt, Human adenovirus E
aacccuuccuccccgggaccu

SEQ ID NO: 290958 - RNA, 13 nt, Human adenovirus E
aaccggugcugag

SEQ ID NO: 290959 - RNA, 21 nt, Human adenovirus E
aacgaccaucgccucuccuac

SEQ ID NO: 290960 - RNA, 22 nt, Human adenovirus E
aacgacgaagagcucaggguug

SEQ ID NO: 290961 - RNA, 23 nt, Human adenovirus E
aacgugagaaucgaguacaauaa

SEQ ID NO: 290962 - RNA, 18 nt, Human adenovirus E
aacugacugugggucuga

SEQ ID NO: 290963 - RNA, 22 nt, Human adenovirus E
aacugacugugggucugaugag

SEQ ID NO: 290964 - RNA, 14 nt, Human adenovirus E
aacugcaucaugac

SEQ ID NO: 290965 - RNA, 18 nt, Human adenovirus E
aacugcgccgggugcuga

SEQ ID NO: 290966 - RNA, 21 nt, Human adenovirus E
aacugcgccgggugcugacua

SEQ ID NO: 290967 - RNA, 15 nt, Human adenovirus E
aacugcucgaucucc

SEQ ID NO: 290968 - RNA, 10 nt, Human adenovirus E
aacuguugaa

SEQ ID NO: 290969 - RNA, 22 nt, Human adenovirus E
aacuugcuugucugugugugua

SEQ ID NO: 290970 - RNA, 21 nt, Human adenovirus E
aagaacccuggaaauuccuca

SEQ ID NO: 290971 - RNA, 19 nt, Human adenovirus E
aagaaucacuuacuugaaa

SEQ ID NO: 290972 - RNA, 17 nt, Human adenovirus E
aagaauggcaaaauuca

SEQ ID NO: 290973 - RNA, 16 nt, Human adenovirus E
aagauacaaucauauu

SEQ ID NO: 290974 - RNA, 18 nt, Human adenovirus E
aagauacaaucauauuga

SEQ ID NO: 290975 - RNA, 23 nt, Human adenovirus E
aagauguacggaggcgcucgcca

SEQ ID NO: 290976 - RNA, 15 nt, Human adenovirus E
aagcaacugcaucau

SEQ ID NO: 290977 - RNA, 13 nt, Human adenovirus E
aagcaagcuccag

SEQ ID NO: 290978 - RNA, 14 nt, Human adenovirus E
aagcaagcuccagc

SEQ ID NO: 290979 - RNA, 15 nt, Human adenovirus E
aagcggcuccuuuga

SEQ ID NO: 290980 - RNA, 20 nt, Human adenovirus E
aaggcgugcaggaacaugca

SEQ ID NO: 290981 - RNA, 12 nt, Human adenovirus E
aaguaccucacc

SEQ ID NO: 290982 - RNA, 22 nt, Human adenovirus E
aaguacgaaaauguccgaaagc

SEQ ID NO: 290983 - RNA, 15 nt, Human adenovirus E
aagugcgugguuuau

SEQ ID NO: 290984 - RNA, 20 nt, Human adenovirus E
aagugcgugguuuaugacuc

SEQ ID NO: 290985 - RNA, 21 nt, Human adenovirus E
aaguuucugugucugaaccca

SEQ ID NO: 290986 - RNA, 15 nt, Human adenovirus E
aauacaccacccucu

SEQ ID NO: 290987 - RNA, 13 nt, Human adenovirus E
aaucagacaugca

SEQ ID NO: 290988 - RNA, 15 nt, Human adenovirus E
aaucagauguaucua

SEQ ID NO: 290989 - RNA, 17 nt, Human adenovirus E
aaucagauguaucuacu

SEQ ID NO: 290990 - RNA, 21 nt, Human adenovirus E
aaucagauguaucuacugaac

SEQ ID NO: 290991 - RNA, 12 nt, Human adenovirus E
aaucauuugauu

SEQ ID NO: 290992 - RNA, 20 nt, Human adenovirus E
aaugaaucagauguaucuac

SEQ ID NO: 290993 - RNA, 23 nt, Human adenovirus E
aaugaaucagauguaucuacuga

SEQ ID NO: 290994 - RNA, 17 nt, Human adenovirus E
aaugagaaaauuacuau

SEQ ID NO: 290995 - RNA, 13 nt, Human adenovirus E
aaugagagcauua

SEQ ID NO: 290996 - RNA, 12 nt, Human adenovirus E
aauggcauucag

SEQ ID NO: 290997 - RNA, 16 nt, Human adenovirus E
aaugguacugaucuga

SEQ ID NO: 290998 - RNA, 21 nt, Human adenovirus E
aaugguacugaucugauacuc

SEQ ID NO: 290999 - RNA, 14 nt, Human adenovirus E
aauuaacaucacua

SEQ ID NO: 291000 - RNA, 14 nt, Human adenovirus E
aauuacuauuuaca

SEQ ID NO: 291001 - RNA, 21 nt, Human adenovirus E
aauuacuauuuacacuggcac

SEQ ID NO: 291002 - RNA, 13 nt, Human adenovirus E
aauuauacacuga

SEQ ID NO: 291003 - RNA, 14 nt, Human adenovirus E
aauuauauaugcaa

SEQ ID NO: 291004 - RNA, 16 nt, Human adenovirus E
aauuccucaaaugcua

SEQ ID NO: 291005 - RNA, 12 nt, Human adenovirus E
aauugcaucauc

SEQ ID NO: 291006 - RNA, 16 nt, Human adenovirus E
aauugcaucaucuggc

SEQ ID NO: 291007 - RNA, 16 nt, Human adenovirus E
acaaaaaaaaugagag

SEQ ID NO: 291008 - RNA, 15 nt, Human adenovirus E
acaaaauugcaucau

SEQ ID NO: 291009 - RNA, 14 nt, Human adenovirus E
acaaaguaacuguu

SEQ ID NO: 291010 - RNA, 17 nt, Human adenovirus E
acaacaacgucaacgac

SEQ ID NO: 291011 - RNA, 19 nt, Human adenovirus E
acaacgucaacgaccuucu

SEQ ID NO: 291012 - RNA, 13 nt, Human adenovirus E
gagcacccggugg

SEQ ID NO: 291013 - RNA, 19 nt, Human adenovirus E
gagccgucaaggagcugca

SEQ ID NO: 291014 - RNA, 22 nt, Human adenovirus E
gagccuuguugcgcagggccag

SEQ ID NO: 291015 - RNA, 19 nt, Human adenovirus E
gagcggcauggagauuugg

SEQ ID NO: 291016 - RNA, 12 nt, Human adenovirus E
gagcuaccagcc

SEQ ID NO: 291017 - RNA, 21 nt, Human adenovirus E
gcuucucugguggaggaucac

SEQ ID NO: 291018 - RNA, 13 nt, Human adenovirus E
gcuugcauuucaa

SEQ ID NO: 291019 - RNA, 20 nt, Human adenovirus E
ggaacgagaccgagcuccag

SEQ ID NO: 291020 - RNA, 17 nt, Human adenovirus E
ggaacucgaguuggcca

SEQ ID NO: 291021 - RNA, 13 nt, Human adenovirus E
ggaauacaccacc

SEQ ID NO: 291022 - RNA, 20 nt, Human adenovirus E
ggaauuaugccaagcuggcu

SEQ ID NO: 291023 - RNA, 14 nt, Human adenovirus E
ggacgcagggccau

SEQ ID NO: 291024 - RNA, 17 nt, Human adenovirus E
ggacuuuuccaggguga

SEQ ID NO: 291025 - RNA, 15 nt, Human adenovirus E
ggagaggcaugauga

SEQ ID NO: 291026 - RNA, 23 nt, Human adenovirus E
ggagccuuguugcgcagggccag

SEQ ID NO: 291027 - RNA, 17 nt, Human adenovirus E
ggagguagccaucagga

SEQ ID NO: 291028 - RNA, 19 nt, Human adenovirus E
ggaucacccggugcugccu

SEQ ID NO: 291029 - RNA, 19 nt, Human adenovirus E
ggaucauccggggcugcau

SEQ ID NO: 291030 - RNA, 17 nt, Human adenovirus E
ggauuucaccguggcaa

SEQ ID NO: 291031 - RNA, 18 nt, Human adenovirus E
ggcauuucggacauggaa

SEQ ID NO: 291032 - RNA, 15 nt, Human adenovirus E
ggccacaauacaugc

SEQ ID NO: 291033 - RNA, 22 nt, Human adenovirus E
ggccaugcaacgcaucauggcg

SEQ ID NO: 291034 - RNA, 15 nt, Human adenovirus E
ggcccgcuacaacag

SEQ ID NO: 291035 - RNA, 12 nt, Human adenovirus E
ggcccugccaac

SEQ ID NO: 291036 - RNA, 14 nt, Human adenovirus E
ggccggccgcgaga

SEQ ID NO: 291037 - RNA, 23 nt, Human adenovirus E
ggcgcccauggccauuccgcgca

SEQ ID NO: 291038 - RNA, 14 nt, Human adenovirus E
ggcggaaggugcaa

SEQ ID NO: 291039 - RNA, 16 nt, Human adenovirus E
ggcucugaggccagac

SEQ ID NO: 291040 - RNA, 13 nt, Human adenovirus E
ggcugacgcugcg

SEQ ID NO: 291041 - RNA, 13 nt, Human adenovirus E
gggaagaaucuga

SEQ ID NO: 291042 - RNA, 13 nt, Human adenovirus E
gggacugugagua

SEQ ID NO: 291043 - RNA, 20 nt, Human adenovirus E
gggaucacgguuaucuggaa

SEQ ID NO: 291044 - RNA, 22 nt, Human adenovirus E
gggcgcagggcaugguguugca

SEQ ID NO: 291045 - RNA, 14 nt, Human adenovirus E
gggcguacaugcac

SEQ ID NO: 291046 - RNA, 23 nt, Human adenovirus E
ggggauuaagcgggagaggcaug

SEQ ID NO: 291047 - RNA, 21 nt, Human adenovirus E
ggggcggucgggccagugcac

SEQ ID NO: 291048 - RNA, 12 nt, Human adenovirus E
gggggagagggu

SEQ ID NO: 291049 - RNA, 20 nt, Human adenovirus E
gguagccaucaggaauuaug

SEQ ID NO: 291050 - RNA, 12 nt, Human adenovirus E
ggucaugaacug

SEQ ID NO: 291051 - RNA, 15 nt, Human adenovirus E
ggucaugaacugcuc

SEQ ID NO: 291052 - RNA, 21 nt, Human adenovirus E
gguccagaaaaagccacagaa

SEQ ID NO: 291053 - RNA, 21 nt, Human adenovirus E
ggugccgcccaggacuacucc

SEQ ID NO: 291054 - RNA, 13 nt, Human adenovirus E
gguggcaugaggu

SEQ ID NO: 291055 - RNA, 21 nt, Human adenovirus E
gguggccauccaccagugcaa

SEQ ID NO: 291056 - RNA, 17 nt, Human adenovirus E
gguguagguguuuacaa

SEQ ID NO: 291057 - RNA, 16 nt, Human adenovirus E
gguguggagugcaaua

SEQ ID NO: 291058 - RNA, 16 nt, Human adenovirus E
gguucugguacugcgc

SEQ ID NO: 291059 - RNA, 22 nt, Human adenovirus E
guaaugagaaaauuacuauuua

SEQ ID NO: 291060 - RNA, 21 nt, Human adenovirus E
guagacagauggaagacauca

SEQ ID NO: 291061 - RNA, 16 nt, Human adenovirus E
guauuauggaacuaca

SEQ ID NO: 291062 - RNA, 13 nt, Human adenovirus E
guauucagcccuu

SEQ ID NO: 291063 - RNA, 13 nt, Human adenovirus E
gucauucauggaa

SEQ ID NO: 291064 - RNA, 20 nt, Human adenovirus E
guccagcgaaggguaugcuu

SEQ ID NO: 291065 - RNA, 14 nt, Human adenovirus E
guccagcugacuaa

SEQ ID NO: 291066 - RNA, 14 nt, Human adenovirus E
guccuccauugcca

SEQ ID NO: 291067 - RNA, 23 nt, Human adenovirus E
gucggaucaaauuauacacugaa

SEQ ID NO: 291068 - RNA, 21 nt, Human adenovirus E
gucuaccccuacgaugcagac

SEQ ID NO: 291069 - RNA, 23 nt, Human adenovirus E
gucuccacguuccacacaguuuc

SEQ ID NO: 291070 - RNA, 20 nt, Human adenovirus E
gucugaaucuuuauuugauu

SEQ ID NO: 291071 - RNA, 17 nt, Human adenovirus E
gucugcuccugcagcug

SEQ ID NO: 291072 - RNA, 16 nt, Human adenovirus E
gucuuuguugucugcu

SEQ ID NO: 291073 - RNA, 18 nt, Human adenovirus E
gugaaauaaagaucauau

SEQ ID NO: 291074 - RNA, 15 nt, Human adenovirus E
gugaaggccacggga

SEQ ID NO: 291075 - RNA, 22 nt, Human adenovirus E
gugccaucuccgcgaucuucau

SEQ ID NO: 291076 - RNA, 20 nt, Human adenovirus E
gugcccucgcgcuccaaccc

SEQ ID NO: 291077 - RNA, 19 nt, Human adenovirus E
gugccgcccaggacuacuc

SEQ ID NO: 291078 - RNA, 14 nt, Human adenovirus E
gugcgcgguacuga

SEQ ID NO: 291079 - RNA, 19 nt, Human adenovirus E
guggaaacaauaacaaaaa

SEQ ID NO: 291080 - RNA, 16 nt, Human adenovirus E
guggaacaucucgaga

SEQ ID NO: 291081 - RNA, 20 nt, Human adenovirus E
guggagaccaaaagcauguc

SEQ ID NO: 291082 - RNA, 22 nt, Human adenovirus E
guggagaccaaaagcaugucca

SEQ ID NO: 291083 - RNA, 13 nt, Human adenovirus E
guggagugcaaua

SEQ ID NO: 291084 - RNA, 17 nt, Human adenovirus E
guggaguuugugcgcga

SEQ ID NO: 291085 - RNA, 18 nt, Human adenovirus E
guggcccgcuacaacagc

SEQ ID NO: 291086 - RNA, 20 nt, Human adenovirus E
gugguaccgggaggugguga

SEQ ID NO: 291087 - RNA, 12 nt, Human adenovirus E
gugguauugcua

SEQ ID NO: 291088 - RNA, 11 nt, Human adenovirus E
gugguggcaug

SEQ ID NO: 291089 - RNA, 13 nt, Human adenovirus E
gugguggcaugag

SEQ ID NO: 291090 - RNA, 18 nt, Human adenovirus E
gugucggugaugcaugag

SEQ ID NO: 291091 - RNA, 14 nt, Human adenovirus E
guguggagugcaau

SEQ ID NO: 291092 - RNA, 20 nt, Human adenovirus E
guguugcacaauaucuuuga

SEQ ID NO: 291093 - RNA, 20 nt, Human adenovirus E
guguuguaaaucacccaguc

SEQ ID NO: 291094 - RNA, 14 nt, Human adenovirus E
guuaucuggaagaa

SEQ ID NO: 291095 - RNA, 23 nt, Human adenovirus E
guuccagcggggaagaaucugac

SEQ ID NO: 291096 - RNA, 14 nt, Human adenovirus E
guucuuguccaugg

SEQ ID NO: 291097 - RNA, 14 nt, Human adenovirus E
guugagagugcuga

SEQ ID NO: 291098 - RNA, 14 nt, Human adenovirus E
guuucaauguggau

SEQ ID NO: 291099 - RNA, 18 nt, Human adenovirus E
guuucagagcgagccagu

SEQ ID NO: 291100 - RNA, 20 nt, Human adenovirus E
guuugcccgcgccacagaca

SEQ ID NO: 291101 - RNA, 21 nt, Human adenovirus E
guuuuacaggauucgagcagu

SEQ ID NO: 291102 - RNA, 16 nt, Human adenovirus E
uaaaaaauaaucauuu

SEQ ID NO: 291103 - RNA, 15 nt, Human adenovirus E
uaaaacuguugaauc

SEQ ID NO: 291104 - RNA, 18 nt, Human adenovirus E
uaaagacauuuaacauac

SEQ ID NO: 291105 - RNA, 17 nt, Human adenovirus E
uaagcugauaaauauca

SEQ ID NO: 291106 - RNA, 17 nt, Human adenovirus E
uaaugagaaaauuacua

SEQ ID NO: 291107 - RNA, 15 nt, Human adenovirus E
uacaaucauauugau

SEQ ID NO: 291108 - RNA, 14 nt, Human adenovirus E
uacagcaggcauuu

SEQ ID NO: 291109 - RNA, 14 nt, Human adenovirus E
uacaucucagggaa

SEQ ID NO: 291110 - RNA, 15 nt, Human adenovirus E
uacaucucagggaau

SEQ ID NO: 291111 - RNA, 18 nt, Human adenovirus E
uaccaaggggugcaucca

SEQ ID NO: 291112 - RNA, 17 nt, Human adenovirus E
uaccgggagguggugaa

SEQ ID NO: 291113 - RNA, 15 nt, Human adenovirus E
uacgaggucacucca

SEQ ID NO: 291114 - RNA, 15 nt, Human adenovirus E
uacuaagcugauaaa

SEQ ID NO: 291115 - RNA, 15 nt, Human adenovirus E
uacuacggcacucug

SEQ ID NO: 291116 - RNA, 23 nt, Human adenovirus E
uagaaugaccacaaccacaaaaa

SEQ ID NO: 291117 - RNA, 14 nt, Human adenovirus E
uagagacuauguag

SEQ ID NO: 291118 - RNA, 13 nt, Human adenovirus E
uagaucugcugca

SEQ ID NO: 291119 - RNA, 12 nt, Human adenovirus E
uagaugcaacaa

SEQ ID NO: 291120 - RNA, 12 nt, Human adenovirus E
uagucuacaggg

SEQ ID NO: 291121 - RNA, 13 nt, Human adenovirus E
uagucuacagggc

SEQ ID NO: 291122 - RNA, 23 nt, Human adenovirus E
uauaagcaggugcagaccugugu

SEQ ID NO: 291123 - RNA, 19 nt, Human adenovirus E
uauaggguguggagugcaa

SEQ ID NO: 291124 - RNA, 21 nt, Human adenovirus E
uauaggguguggagugcaaua

SEQ ID NO: 291125 - RNA, 13 nt, Human adenovirus E
uauauaugcaaug

SEQ ID NO: 291126 - RNA, 11 nt, Human adenovirus E
uauaugcaaug

SEQ ID NO: 291127 - RNA, 11 nt, Human adenovirus E
uauuauggaac

SEQ ID NO: 291128 - RNA, 20 nt, Human adenovirus E
uauuuuggaucugacacuac

SEQ ID NO: 291129 - RNA, 21 nt, Human adenovirus E
uauuuuuccuccacccuccca

SEQ ID NO: 291130 - RNA, 15 nt, Human adenovirus E
ucaaauuauacacug

SEQ ID NO: 291131 - RNA, 16 nt, Human adenovirus E
ucaaccagagggugau

SEQ ID NO: 291132 - RNA, 21 nt, Human adenovirus E
ucaacgaccuucuccuggaca

SEQ ID NO: 291133 - RNA, 19 nt, Human adenovirus E
ucaaggaagagaugcucca

SEQ ID NO: 291134 - RNA, 16 nt, Human adenovirus E
ucaaggagcugcagga

SEQ ID NO: 291135 - RNA, 17 nt, Human adenovirus E
ucaaguuucaaugugga

SEQ ID NO: 291136 - RNA, 16 nt, Human adenovirus E
ucacagcucaacagcu

SEQ ID NO: 291137 - RNA, 18 nt, Human adenovirus E
ucacagcucaacagcuga

SEQ ID NO: 291138 - RNA, 15 nt, Human adenovirus E
ucacccggugcugcc

SEQ ID NO: 291139 - RNA, 13 nt, Human adenovirus E
ucaccguggcaac

SEQ ID NO: 291140 - RNA, 22 nt, Human adenovirus E
ucaccugccuggucggagucaa

SEQ ID NO: 291141 - RNA, 16 nt, Human adenovirus E
ucagagccaucaggca

SEQ ID NO: 291142 - RNA, 15 nt, Human adenovirus E
ucagcccgauggcaa

SEQ ID NO: 291143 - RNA, 20 nt, Human adenovirus E
ucagggguggggacugugag

SEQ ID NO: 291144 - RNA, 22 nt, Human adenovirus E
ucagggguggggacugugagua

SEQ ID NO: 291145 - RNA, 23 nt, Human adenovirus E
  unsure 8..8: n is a, c, g, or t
ucauaugnuggcaguuacaccug

SEQ ID NO: 291146 - RNA, 14 nt, Human adenovirus E
ucauauugaugaug

SEQ ID NO: 291147 - RNA, 18 nt, Human adenovirus E
ucauauugaugauuugag

SEQ ID NO: 291148 - RNA, 18 nt, Human adenovirus E
ucaucaaguuucaaugug

SEQ ID NO: 291149 - RNA, 16 nt, Human adenovirus E
ucauccggggcugcau

SEQ ID NO: 291150 - RNA, 18 nt, Human adenovirus E
ucauccggggcugcaugu

SEQ ID NO: 291151 - RNA, 18 nt, Human adenovirus E
ucauggugggguucuugu

SEQ ID NO: 291152 - RNA, 23 nt, Human adenovirus E
ucauuaccucugcucuaugcaau

SEQ ID NO: 291153 - RNA, 17 nt, Human adenovirus E
ucauucaaggcuggaaa

SEQ ID NO: 291154 - RNA, 14 nt, Human adenovirus E
ucauucauggaaug

SEQ ID NO: 291155 - RNA, 18 nt, Human adenovirus E
ucauugccgucauucaug

SEQ ID NO: 291156 - RNA, 22 nt, Human adenovirus E
ucauugccgucauucauggaau

SEQ ID NO: 291157 - RNA, 14 nt, Human adenovirus E
ucauuugauuugaa

SEQ ID NO: 291158 - RNA, 13 nt, Human adenovirus E
uccaaacgaccau

SEQ ID NO: 291159 - RNA, 19 nt, Human adenovirus E
uccaacgacgaagagcuca

SEQ ID NO: 291160 - RNA, 23 nt, Human adenovirus E
uccaacgacgaagagcucagggu

SEQ ID NO: 291161 - RNA, 15 nt, Human adenovirus E
uccacacucugauca

SEQ ID NO: 291162 - RNA, 21 nt, Human adenovirus E
uccacccagaccgugcagggu

SEQ ID NO: 291163 - RNA, 22 nt, Human adenovirus E
uccacgguggucgaugugauca

SEQ ID NO: 291164 - RNA, 17 nt, Human adenovirus E
uccacguuccacacagu

SEQ ID NO: 291165 - RNA, 18 nt, Human adenovirus E
uccagaaaaagccacaga

SEQ ID NO: 291166 - RNA, 21 nt, Human adenovirus E
uccagcggggaagaaucugac

SEQ ID NO: 291167 - RNA, 17 nt, Human adenovirus E
uccagcugacuaacuca

SEQ ID NO: 291168 - RNA, 20 nt, Human adenovirus E
ucccaccccacucuguggaa

SEQ ID NO: 291169 - RNA, 22 nt, Human adenovirus E
ucccaccugcuucggaucuuca

SEQ ID NO: 291170 - RNA, 14 nt, Human adenovirus E
ucccaggacaugga

SEQ ID NO: 291171 - RNA, 18 nt, Human adenovirus E
uccccgggaccuaucagu

SEQ ID NO: 291172 - RNA, 19 nt, Human adenovirus E
  unsure 7..7: n is a, c, g, or t
uccccgnuacuaacaacca

SEQ ID NO: 291173 - RNA, 14 nt, Human adenovirus E
ucccgaauaccaca

SEQ ID NO: 291174 - RNA, 17 nt, Human adenovirus E
ucccggggguggaggua

SEQ ID NO: 291175 - RNA, 20 nt, Human adenovirus E
uccgaaagcaacugcaucau

SEQ ID NO: 291176 - RNA, 22 nt, Human adenovirus E
uccgaaagcaacugcaucauga

SEQ ID NO: 291177 - RNA, 19 nt, Human adenovirus E
uccgagaccguuuggauua

SEQ ID NO: 291178 - RNA, 13 nt, Human adenovirus E
uccgcaaaugcaa

SEQ ID NO: 291179 - RNA, 14 nt, Human adenovirus E
uccgcgaccuccuc

SEQ ID NO: 291180 - RNA, 14 nt, Human adenovirus E
uccggggcugcaug

SEQ ID NO: 291181 - RNA, 13 nt, Human adenovirus E
uccucaaaugcua

SEQ ID NO: 291182 - RNA, 20 nt, Human adenovirus E
uccucaaaugcuaccgccaa

SEQ ID NO: 291183 - RNA, 14 nt, Human adenovirus E
uccuccauugccau

SEQ ID NO: 291184 - RNA, 14 nt, Human adenovirus E
uccucguucaggcu

SEQ ID NO: 291185 - RNA, 15 nt, Human adenovirus E
uccugaauccaucaa

SEQ ID NO: 291186 - RNA, 22 nt, Human adenovirus E
uccugaggcccuagaucugcug

SEQ ID NO: 291187 - RNA, 18 nt, Human adenovirus E
uccugggcgggagugcgu

SEQ ID NO: 291188 - RNA, 17 nt, Human adenovirus E
uccuguaaaacuguuga

SEQ ID NO: 291189 - RNA, 15 nt, Human adenovirus E
ucgaguggucgggag

SEQ ID NO: 291190 - RNA, 12 nt, Human adenovirus E
ucgccagcagca

SEQ ID NO: 291191 - RNA, 15 nt, Human adenovirus E
ucgccggacaggacg

SEQ ID NO: 291192 - RNA, 15 nt, Human adenovirus E
ucgcucgggaucucg

SEQ ID NO: 291193 - RNA, 22 nt, Human adenovirus E
ucggagucaaccccaucgucau

SEQ ID NO: 291194 - RNA, 12 nt, Human adenovirus E
ucggcaccagcc

SEQ ID NO: 291195 - RNA, 23 nt, Human adenovirus E
ucguagacagauggaagacauca

SEQ ID NO: 291196 - RNA, 13 nt, Human adenovirus E
ucuacagggccaa

SEQ ID NO: 291197 - RNA, 22 nt, Human adenovirus E
ucuaugcaauucugacaaugag

SEQ ID NO: 291198 - RNA, 14 nt, Human adenovirus E
ucucgaucauugag

SEQ ID NO: 291199 - RNA, 17 nt, Human adenovirus E
ucucuagaacaagucaa

SEQ ID NO: 291200 - RNA, 20 nt, Human adenovirus E
ucugacacuacagaaacuga

SEQ ID NO: 291201 - RNA, 16 nt, Human adenovirus E
ucugacuagagugagu

SEQ ID NO: 291202 - RNA, 16 nt, Human adenovirus E
ucugacucuguacugc

SEQ ID NO: 291203 - RNA, 16 nt, Human adenovirus E
ucugacuuaacccuaa

SEQ ID NO: 291204 - RNA, 14 nt, Human adenovirus E
ucugauacuccuca

SEQ ID NO: 291205 - RNA, 15 nt, Human adenovirus E
ucugaucaagacccu

SEQ ID NO: 291206 - RNA, 17 nt, Human adenovirus E
ucugccuggugaaacag

SEQ ID NO: 291207 - RNA, 15 nt, Human adenovirus E
ucugcucuaugcaau

SEQ ID NO: 291208 - RNA, 16 nt, Human adenovirus E
ucuggguggacuuuuc

SEQ ID NO: 291209 - RNA, 18 nt, Human adenovirus E
ucuuaacuugggccauca

SEQ ID NO: 291210 - RNA, 12 nt, Human adenovirus E
ucuuaccugugg

SEQ ID NO: 291211 - RNA, 13 nt, Human adenovirus E
ucuucuaucagau

SEQ ID NO: 291212 - RNA, 13 nt, Human adenovirus E
ucuuuguugucug

SEQ ID NO: 291213 - RNA, 15 nt, Human adenovirus E
ugaaacuguguggaa

SEQ ID NO: 291214 - RNA, 16 nt, Human adenovirus E
ugaaacuguguggaac

SEQ ID NO: 291215 - RNA, 13 nt, Human adenovirus E
ugaaagucuuugu

SEQ ID NO: 291216 - RNA, 17 nt, Human adenovirus E
ugaaauaaagauacaau

SEQ ID NO: 291217 - RNA, 23 nt, Human adenovirus E
ugaaauaaagauacaaucauauu

SEQ ID NO: 291218 - RNA, 21 nt, Human adenovirus E
ugaaauaaagaucauauugau

SEQ ID NO: 291219 - RNA, 15 nt, Human adenovirus E
ugaauaauacuuuca

SEQ ID NO: 291220 - RNA, 23 nt, Human adenovirus E
ugaauccaucaaccagucuuugu

SEQ ID NO: 291221 - RNA, 22 nt, Human adenovirus E
ugaccuguuuccugaacugcgc

SEQ ID NO: 291222 - RNA, 24 nt, Human adenovirus E
ugacuuaacccuaauuaacaucac

SEQ ID NO: 291223 - RNA, 17 nt, Human adenovirus E
ugagacuaaucacagaa

SEQ ID NO: 291224 - RNA, 17 nt, Human adenovirus E
ugaggaggagacugaug

SEQ ID NO: 291225 - RNA, 20 nt, Human adenovirus E
ugagucgcaagcgcccagaa

SEQ ID NO: 291226 - RNA, 21 nt, Human adenovirus E
ugaguuuucagcccgauggca

SEQ ID NO: 291227 - RNA, 19 nt, Human adenovirus E
ugauacuccucaauaucac

SEQ ID NO: 291228 - RNA, 20 nt, Human adenovirus E
ugaucaagugcggaugggaa

SEQ ID NO: 291229 - RNA, 15 nt, Human adenovirus E
ugaucccauacucca

SEQ ID NO: 291230 - RNA, 18 nt, Human adenovirus E
ugaucccgaauaccacag

SEQ ID NO: 291231 - RNA, 19 nt, Human adenovirus E
ugaucgaccaggugguggc

SEQ ID NO: 291232 - RNA, 15 nt, Human adenovirus E
ugaucugauacuccu

SEQ ID NO: 291233 - RNA, 17 nt, Human adenovirus E
ugaucugauacuccuca

SEQ ID NO: 291234 - RNA, 19 nt, Human adenovirus E
ugaugagacuaaucacaga

SEQ ID NO: 291235 - RNA, 12 nt, Human adenovirus E
ugaugauuugag

SEQ ID NO: 291236 - RNA, 20 nt, Human adenovirus E
ugaugggaucuucaucacuc

SEQ ID NO: 291237 - RNA, 12 nt, Human adenovirus E
ugauucaacagu

SEQ ID NO: 291238 - RNA, 15 nt, Human adenovirus E
ugauucaacaguuuu

SEQ ID NO: 291239 - RNA, 17 nt, Human adenovirus E
ugauucaacaguuuuac

SEQ ID NO: 291240 - RNA, 15 nt, Human adenovirus E
ugcaaacuuccucca

SEQ ID NO: 291241 - RNA, 15 nt, Human adenovirus E
ugcaaauuccaagaa

SEQ ID NO: 291242 - RNA, 16 nt, Human adenovirus E
ugcacaauaucuuuga

SEQ ID NO: 291243 - RNA, 14 nt, Human adenovirus E
ugcagaccugugug

SEQ ID NO: 291244 - RNA, 13 nt, Human adenovirus E
ugcagcugagcca

SEQ ID NO: 291245 - RNA, 14 nt, Human adenovirus E
ugcaucaucuggcu

SEQ ID NO: 291246 - RNA, 12 nt, Human adenovirus E
ugcauguucaac

SEQ ID NO: 291247 - RNA, 20 nt, Human adenovirus E
ugccacacauguguguuuac

SEQ ID NO: 291248 - RNA, 15 nt, Human adenovirus E
ugccgcaagaucucu

SEQ ID NO: 291249 - RNA, 19 nt, Human adenovirus E
ugccgcccaggacuacucc

SEQ ID NO: 291250 - RNA, 21 nt, Human adenovirus E
ugccugcuacaucucagggaa

SEQ ID NO: 291251 - RNA, 20 nt, Human adenovirus E
ugcgauacccuguccaugca

SEQ ID NO: 291252 - RNA, 21 nt, Human adenovirus E
ugcgauacccuguccaugcac

SEQ ID NO: 291253 - RNA, 13 nt, Human adenovirus F
acuguacugcuac

SEQ ID NO: 291254 - RNA, 22 nt, Human adenovirus F
acuguacugcuacuacuuuaac

SEQ ID NO: 291255 - RNA, 16 nt, Human adenovirus F
acuguauaacuuaaga

SEQ ID NO: 291256 - RNA, 13 nt, Human adenovirus F
acugucacuguau

SEQ ID NO: 291257 - RNA, 13 nt, Human adenovirus F
acuguuaauauac

SEQ ID NO: 291258 - RNA, 23 nt, Human adenovirus F
acuguucuugucguaaccaacuc

SEQ ID NO: 291259 - RNA, 15 nt, Human adenovirus F
acuguuugcuaguau

SEQ ID NO: 291260 - RNA, 21 nt, Human adenovirus F
acuuaaauucuggaaucagca

SEQ ID NO: 291261 - RNA, 18 nt, Human adenovirus F
acuuacaaccaaaaacgg

SEQ ID NO: 291262 - RNA, 15 nt, Human adenovirus F
acuuacuagucuuag

SEQ ID NO: 291263 - RNA, 22 nt, Human adenovirus F
acuucaaccccgucuacccuua

SEQ ID NO: 291264 - RNA, 16 nt, Human adenovirus F
acuucuauugcacuua

SEQ ID NO: 291265 - RNA, 17 nt, Human adenovirus F
acuucuauugcacuuaa

SEQ ID NO: 291266 - RNA, 18 nt, Human adenovirus F
acuucuauugcacuuaac

SEQ ID NO: 291267 - RNA, 22 nt, Human adenovirus F
acuugcacuuuggcucgcuuua

SEQ ID NO: 291268 - RNA, 20 nt, Human adenovirus F
acuugguuaaagaaaaccag

SEQ ID NO: 291269 - RNA, 15 nt, Human adenovirus F
acuuuaaaacuuggc

SEQ ID NO: 291270 - RNA, 14 nt, Human adenovirus F
acuuuaaacaagca

SEQ ID NO: 291271 - RNA, 15 nt, Human adenovirus F
acuuuaacuaaugua

SEQ ID NO: 291272 - RNA, 20 nt, Human adenovirus F
acuuucaucuuaacucugaa

SEQ ID NO: 291273 - RNA, 16 nt, Human adenovirus F
acuuuguuaugaugua

SEQ ID NO: 291274 - RNA, 22 nt, Human adenovirus F
acuuuguuaugauguaacccaa

SEQ ID NO: 291275 - RNA, 18 nt, Human adenovirus F
acuuuuuuuguggccauu

SEQ ID NO: 291276 - RNA, 15 nt, Human adenovirus F
agaaaccucuuccuu

SEQ ID NO: 291277 - RNA, 17 nt, Human adenovirus F
aauuacgucauugacau

SEQ ID NO: 291278 - RNA, 22 nt, Human adenovirus F
aauuauucaagauugcagcuua

SEQ ID NO: 291279 - RNA, 18 nt, Human adenovirus F
aauugaagacgacuucaa

SEQ ID NO: 291280 - RNA, 16 nt, Human adenovirus F
aauuguaagagguuuu

SEQ ID NO: 291281 - RNA, 14 nt, Human adenovirus F
aauuugauaucagu

SEQ ID NO: 291282 - RNA, 23 nt, Human adenovirus F
acaaaguccuggccaacugccac

SEQ ID NO: 291283 - RNA, 23 nt, Human adenovirus F
acaacaaaaucaggaacuguuca

SEQ ID NO: 291284 - RNA, 22 nt, Human adenovirus F
acaacagccuuuguaacaacug

SEQ ID NO: 291285 - RNA, 22 nt, Human adenovirus F
acaacgauucuucugugacaaa

SEQ ID NO: 291286 - RNA, 22 nt, Human adenovirus F
acaagcaaagacagagcuuuau

SEQ ID NO: 291287 - RNA, 13 nt, Human adenovirus F
acaaguauacauu

SEQ ID NO: 291288 - RNA, 23 nt, Human adenovirus F
acaauccuaacaaaaacuuacaa

SEQ ID NO: 291289 - RNA, 23 nt, Human adenovirus F
acacagguucuuugcuggcaaag

SEQ ID NO: 291290 - RNA, 15 nt, Human adenovirus F
acaccaaacucuuua

SEQ ID NO: 291291 - RNA, 13 nt, Human adenovirus F
acaccaaugcaaa

SEQ ID NO: 291292 - RNA, 21 nt, Human adenovirus F
acaccacccggguuuaccugg

SEQ ID NO: 291293 - RNA, 23 nt, Human adenovirus F
acacgagcugucauauacuuuaa

SEQ ID NO: 291294 - RNA, 13 nt, Human adenovirus F
acacuacaauccc

SEQ ID NO: 291295 - RNA, 21 nt, Human adenovirus F
acacuaugguaaaaacccugu

SEQ ID NO: 291296 - RNA, 15 nt, Human adenovirus F
acacugucacuguau

SEQ ID NO: 291297 - RNA, 16 nt, Human adenovirus F
acagaaaccucuuccu

SEQ ID NO: 291298 - RNA, 16 nt, Human adenovirus F
acagacaauuuugcaa

SEQ ID NO: 291299 - RNA, 14 nt, Human adenovirus F
acagagcuuuauga

SEQ ID NO: 291300 - RNA, 20 nt, Human adenovirus F
acagcacgguggaguccaaa

SEQ ID NO: 291301 - RNA, 15 nt, Human adenovirus F
acagcuccuccaagc

SEQ ID NO: 291302 - RNA, 15 nt, Human adenovirus F
acagcuggaacucaa

SEQ ID NO: 291303 - RNA, 16 nt, Human adenovirus F
acaggacgaccaucaa

SEQ ID NO: 291304 - RNA, 16 nt, Human adenovirus F
acagggauacuggaua

SEQ ID NO: 291305 - RNA, 16 nt, Human adenovirus F
acaggggaugucaaaa

SEQ ID NO: 291306 - RNA, 23 nt, Human adenovirus F
acaguagagggugcucuuaacaa

SEQ ID NO: 291307 - RNA, 21 nt, Human adenovirus F
acagucaagcucuccacgggu

SEQ ID NO: 291308 - RNA, 23 nt, Human adenovirus F
acaguccaaaaucugcugccaug

SEQ ID NO: 291309 - RNA, 14 nt, Human adenovirus F
acauguggagcuau

SEQ ID NO: 291310 - RNA, 20 nt, Human adenovirus F
acauucugacgcacuccugc

SEQ ID NO: 291311 - RNA, 21 nt, Human adenovirus F
acauugccucccugaacuacc

SEQ ID NO: 291312 - RNA, 15 nt, Human adenovirus F
accaaagagcuugaa

SEQ ID NO: 291313 - RNA, 16 nt, Human adenovirus F
accaaagagcuugaac

SEQ ID NO: 291314 - RNA, 22 nt, Human adenovirus F
accaaagagcuugaacauaaca

SEQ ID NO: 291315 - RNA, 14 nt, Human adenovirus F
accaaaucaaucag

SEQ ID NO: 291316 - RNA, 20 nt, Human adenovirus F
accaaauucugcuagaacag

SEQ ID NO: 291317 - RNA, 12 nt, Human adenovirus F
accaacaaaauc

SEQ ID NO: 291318 - RNA, 17 nt, Human adenovirus F
accaauccugaaugcau

SEQ ID NO: 291319 - RNA, 16 nt, Human adenovirus F
accaccccagcacuug

SEQ ID NO: 291320 - RNA, 15 nt, Human adenovirus F
accacggacagggca

SEQ ID NO: 291321 - RNA, 15 nt, Human adenovirus F
accacuaaagcauuu

SEQ ID NO: 291322 - RNA, 16 nt, Human adenovirus F
accagaacgaccauag

SEQ ID NO: 291323 - RNA, 17 nt, Human adenovirus F
accauaguaacuuucaa

SEQ ID NO: 291324 - RNA, 12 nt, Human adenovirus F
acccaacaggga

SEQ ID NO: 291325 - RNA, 19 nt, Human adenovirus F
acccaacagggacacgagc

SEQ ID NO: 291326 - RNA, 19 nt, Human adenovirus F
accccgucuaccccuauga

SEQ ID NO: 291327 - RNA, 22 nt, Human adenovirus F
acccgcagcugcuuguaucaca

SEQ ID NO: 291328 - RNA, 21 nt, Human adenovirus F
acccgucuucccucuugggca

SEQ ID NO: 291329 - RNA, 23 nt, Human adenovirus F
acccuaauuaaguccacccaaac

SEQ ID NO: 291330 - RNA, 17 nt, Human adenovirus F
accuccgggaguccuca

SEQ ID NO: 291331 - RNA, 23 nt, Human adenovirus F
accucgagugcguaagaccucau

SEQ ID NO: 291332 - RNA, 15 nt, Human adenovirus F
accugggucucuuca

SEQ ID NO: 291333 - RNA, 21 nt, Human adenovirus F
accuguguugauuuugucaca

SEQ ID NO: 291334 - RNA, 13 nt, Human adenovirus F
accuuaaaauugg

SEQ ID NO: 291335 - RNA, 18 nt, Human adenovirus F
accuuacuuucugggcac

SEQ ID NO: 291336 - RNA, 21 nt, Human adenovirus F
accuucgccgcagucucccac

SEQ ID NO: 291337 - RNA, 20 nt, Human adenovirus F
accuucgcugcuuuacuuaa

SEQ ID NO: 291338 - RNA, 19 nt, Human adenovirus F
accuuuuagagcuaggcau

SEQ ID NO: 291339 - RNA, 23 nt, Human adenovirus F
acgcacuccugcccaagagggaa

SEQ ID NO: 291340 - RNA, 17 nt, Human adenovirus F
acgcggcagcagcugca

SEQ ID NO: 291341 - RNA, 18 nt, Human adenovirus F
acgcugcaggcgcuccac

SEQ ID NO: 291342 - RNA, 13 nt, Human adenovirus F
acggauugucuuc

SEQ ID NO: 291343 - RNA, 20 nt, Human adenovirus F
acggcgugguggauauagcc

SEQ ID NO: 291344 - RNA, 14 nt, Human adenovirus F
acgggcagugcacu

SEQ ID NO: 291345 - RNA, 20 nt, Human adenovirus F
acgggcugaggagcuguuaa

SEQ ID NO: 291346 - RNA, 23 nt, Human adenovirus F
acgggcuggcuuccggcauuaac

SEQ ID NO: 291347 - RNA, 13 nt, Human adenovirus F
acggguuacagga

SEQ ID NO: 291348 - RNA, 16 nt, Human adenovirus F
acggugaaaugaauuu

SEQ ID NO: 291349 - RNA, 13 nt, Human adenovirus F
acgucagcuacaa

SEQ ID NO: 291350 - RNA, 19 nt, Human adenovirus F
acgucccuccccguuaccu

SEQ ID NO: 291351 - RNA, 13 nt, Human adenovirus F
acgugcaggccaa

SEQ ID NO: 291352 - RNA, 18 nt, Human adenovirus F
acguucucuccccacagc

SEQ ID NO: 291353 - RNA, 19 nt, Human adenovirus F
acuacaauccccuugacau

SEQ ID NO: 291354 - RNA, 21 nt, Human adenovirus F
acuacaauccccuugacauuc

SEQ ID NO: 291355 - RNA, 15 nt, Human adenovirus F
acuaccaaugcuaaa

SEQ ID NO: 291356 - RNA, 19 nt, Human adenovirus F
acuaccagaacgaccauag

SEQ ID NO: 291357 - RNA, 13 nt, Human adenovirus F
acuagcagugggc

SEQ ID NO: 291358 - RNA, 16 nt, Human adenovirus F
acuagcagugggcaaa

SEQ ID NO: 291359 - RNA, 21 nt, Human adenovirus F
acuauucugggacgcucuuau

SEQ ID NO: 291360 - RNA, 15 nt, Human adenovirus F
acuauuuauaccauu

SEQ ID NO: 291361 - RNA, 18 nt, Human adenovirus F
acucaacagaaaccucuu

SEQ ID NO: 291362 - RNA, 20 nt, Human adenovirus F
acucaaguacacugacccca

SEQ ID NO: 291363 - RNA, 20 nt, Human adenovirus F
acucccagcauucccuaugu

SEQ ID NO: 291364 - RNA, 14 nt, Human adenovirus F
acucuugcucucaa

SEQ ID NO: 291365 - RNA, 21 nt, Human adenovirus F
acugauccacuuacaaccaaa

SEQ ID NO: 291366 - RNA, 16 nt, Human adenovirus F
acugcugagacagcuc

SEQ ID NO: 291367 - RNA, 13 nt, Human adenovirus F
acuggugggccag

SEQ ID NO: 291368 - RNA, 22 nt, Human adenovirus F
cagagccauuuuggcagacaua

SEQ ID NO: 291369 - RNA, 14 nt, Human adenovirus F
cagagcucugcaaa

SEQ ID NO: 291370 - RNA, 15 nt, Human adenovirus F
cagaugaaacgagcc

SEQ ID NO: 291371 - RNA, 20 nt, Human adenovirus F
cagaugcauuuuggccugaa

SEQ ID NO: 291372 - RNA, 23 nt, Human adenovirus F
cagcacugccggggcaauaucuc

SEQ ID NO: 291373 - RNA, 21 nt, Human adenovirus F
cagcagacgcggcagcagcug

SEQ ID NO: 291374 - RNA, 13 nt, Human adenovirus F
cagcagauuuugg

SEQ ID NO: 291375 - RNA, 12 nt, Human adenovirus F
cagcagcugcag

SEQ ID NO: 291376 - RNA, 20 nt, Human adenovirus F
cagcauucccuauguagcuc

SEQ ID NO: 291377 - RNA, 21 nt, Human adenovirus F
cagccugaaauacacugaucc

SEQ ID NO: 291378 - RNA, 22 nt, Human adenovirus F
cagccugaaauacacugaucca

SEQ ID NO: 291379 - RNA, 15 nt, Human adenovirus F
cagccuggggaacaa

SEQ ID NO: 291380 - RNA, 15 nt, Human adenovirus F
cagcuggaacucaaa

SEQ ID NO: 291381 - RNA, 17 nt, Human adenovirus F
cagcuggaacucaaagu

SEQ ID NO: 291382 - RNA, 17 nt, Human adenovirus F
cagcuggagcuucucag

SEQ ID NO: 291383 - RNA, 16 nt, Human adenovirus F
caggugggcuuggaug

SEQ ID NO: 291384 - RNA, 16 nt, Human adenovirus F
caguaugguaacuccu

SEQ ID NO: 291385 - RNA, 17 nt, Human adenovirus F
caguccaaaaucugcug

SEQ ID NO: 291386 - RNA, 20 nt, Human adenovirus F
caguggcgcgcuaacagaca

SEQ ID NO: 291387 - RNA, 21 nt, Human adenovirus F
caguuguuugucaaguuuuuc

SEQ ID NO: 291388 - RNA, 14 nt, Human adenovirus F
cauaccaaagagcu

SEQ ID NO: 291389 - RNA, 20 nt, Human adenovirus F
cauauacuuuaaacaagcaa

SEQ ID NO: 291390 - RNA, 21 nt, Human adenovirus F
cauauacuuuaaacaagcaaa

SEQ ID NO: 291391 - RNA, 14 nt, Human adenovirus F
caucgacguucucu

SEQ ID NO: 291392 - RNA, 16 nt, Human adenovirus F
caucgccgggcaggac

SEQ ID NO: 291393 - RNA, 22 nt, Human adenovirus F
caucuuuuuugacuuggcugua

SEQ ID NO: 291394 - RNA, 15 nt, Human adenovirus F
cauggccagcaccua

SEQ ID NO: 291395 - RNA, 15 nt, Human adenovirus F
cauguacacuauggu

SEQ ID NO: 291396 - RNA, 21 nt, Human adenovirus F
cauuuaccaccccagcacuug

SEQ ID NO: 291397 - RNA, 13 nt, Human adenovirus F
cauuuauuacacc

SEQ ID NO: 291398 - RNA, 15 nt, Human adenovirus F
cauuugaauaugcau

SEQ ID NO: 291399 - RNA, 14 nt, Human adenovirus F
ccaaagacaaaauc

SEQ ID NO: 291400 - RNA, 15 nt, Human adenovirus F
ccaaagacaaaauca

SEQ ID NO: 291401 - RNA, 19 nt, Human adenovirus F
ccaaagcagagcucugcaa

SEQ ID NO: 291402 - RNA, 20 nt, Human adenovirus F
ccaaagcagagcucugcaaa

SEQ ID NO: 291403 - RNA, 13 nt, Human adenovirus F
ccaaauucugcua

SEQ ID NO: 291404 - RNA, 18 nt, Human adenovirus F
ccaagagcgccgcuugca

SEQ ID NO: 291405 - RNA, 16 nt, Human adenovirus F
ccaaugcaaaaagggu

SEQ ID NO: 291406 - RNA, 21 nt, Human adenovirus F
ccacaaucuucaucuugcaga

SEQ ID NO: 291407 - RNA, 17 nt, Human adenovirus F
ccacaguccuucugcca

SEQ ID NO: 291408 - RNA, 21 nt, Human adenovirus F
ccaccuuuuugggauuacaaa

SEQ ID NO: 291409 - RNA, 18 nt, Human adenovirus F
ccacgagcaguagaggca

SEQ ID NO: 291410 - RNA, 17 nt, Human adenovirus F
ccacgcaggagcucaga

SEQ ID NO: 291411 - RNA, 13 nt, Human adenovirus F
ccacggacagggc

SEQ ID NO: 291412 - RNA, 18 nt, Human adenovirus F
ccacuuuaccuuauacac

SEQ ID NO: 291413 - RNA, 20 nt, Human adenovirus F
ccacuuuaccuuauacaccu

SEQ ID NO: 291414 - RNA, 20 nt, Human adenovirus F
ccagaaaaaacccuuaacaa

SEQ ID NO: 291415 - RNA, 21 nt, Human adenovirus F
ccagaacgaccauaguaacuu

SEQ ID NO: 291416 - RNA, 13 nt, Human adenovirus F
ccagaauugaaga

SEQ ID NO: 291417 - RNA, 22 nt, Human adenovirus F
ccagcacacagggauacuggau

SEQ ID NO: 291418 - RNA, 15 nt, Human adenovirus F
ccauaaaagcaauau

SEQ ID NO: 291419 - RNA, 11 nt, Human adenovirus F
ccauaccaaag

SEQ ID NO: 291420 - RNA, 13 nt, Human adenovirus F
ccauaccaaagag

SEQ ID NO: 291421 - RNA, 23 nt, Human adenovirus F
ccaucaguuauuagcuacuuuca

SEQ ID NO: 291422 - RNA, 16 nt, Human adenovirus F
ccauguggcacuguuu

SEQ ID NO: 291423 - RNA, 16 nt, Human adenovirus F
ccauuuuccaaacugc

SEQ ID NO: 291424 - RNA, 18 nt, Human adenovirus F
ccauuuuccaaacugcgg

SEQ ID NO: 291425 - RNA, 17 nt, Human adenovirus F
cccaaauccgcacucuu

SEQ ID NO: 291426 - RNA, 11 nt, Human adenovirus F
cccaacaggga

SEQ ID NO: 291427 - RNA, 19 nt, Human adenovirus F
cccacgauguaaccacaga

SEQ ID NO: 291428 - RNA, 19 nt, Human adenovirus F
cccagcacuuggauuacau

SEQ ID NO: 291429 - RNA, 23 nt, Human adenovirus F
cccauaccaaagagcuugaacau

SEQ ID NO: 291430 - RNA, 14 nt, Human adenovirus F
cccauuacuaccaa

SEQ ID NO: 291431 - RNA, 11 nt, Human adenovirus F
ccccaccacau

SEQ ID NO: 291432 - RNA, 11 nt, Human adenovirus F
ccccaccggcu

SEQ ID NO: 291433 - RNA, 13 nt, Human adenovirus F
cccccacaugauu

SEQ ID NO: 291434 - RNA, 21 nt, Human adenovirus F
cccccgggaguuuuagcacuc

SEQ ID NO: 291435 - RNA, 14 nt, Human adenovirus F
ccccgaccacaguc

SEQ ID NO: 291436 - RNA, 14 nt, Human adenovirus F
ccccuggggggcuu

SEQ ID NO: 291437 - RNA, 21 nt, Human adenovirus F
ccccuuccacuuuaccuuaua

SEQ ID NO: 291438 - RNA, 14 nt, Human adenovirus F
cccgcugaucugaa

SEQ ID NO: 291439 - RNA, 16 nt, Human adenovirus F
cccuaauuaaguccac

SEQ ID NO: 291440 - RNA, 20 nt, Human adenovirus F
cccuacaccaaugcaaaaag

SEQ ID NO: 291441 - RNA, 22 nt, Human adenovirus F
cccuaucacuaaaaccaacaaa

SEQ ID NO: 291442 - RNA, 17 nt, Human adenovirus F
cccuccccguuaccugg

SEQ ID NO: 291443 - RNA, 16 nt, Human adenovirus F
cccugaacuaccagaa

SEQ ID NO: 291444 - RNA, 15 nt, Human adenovirus F
cccugacccacaauc

SEQ ID NO: 291445 - RNA, 14 nt, Human adenovirus F
cccugcaaagccaa

SEQ ID NO: 291446 - RNA, 14 nt, Human adenovirus F
cccuguguuuauuu

SEQ ID NO: 291447 - RNA, 20 nt, Human adenovirus F
cccuuacccgucuccugcaa

SEQ ID NO: 291448 - RNA, 13 nt, Human adenovirus F
cccuugauucuau

SEQ ID NO: 291449 - RNA, 15 nt, Human adenovirus F
ccgaaguccaaauga

SEQ ID NO: 291450 - RNA, 18 nt, Human adenovirus F
ccgacgcuguaugcuauu

SEQ ID NO: 291451 - RNA, 15 nt, Human adenovirus F
ccgagugacacguca

SEQ ID NO: 291452 - RNA, 13 nt, Human adenovirus F
ccgaucacuccgu

SEQ ID NO: 291453 - RNA, 16 nt, Human adenovirus F
ccgcaauggucuuaca

SEQ ID NO: 291454 - RNA, 20 nt, Human adenovirus F
ccgcgaggaaaccgccuacu

SEQ ID NO: 291455 - RNA, 17 nt, Human adenovirus F
ccggaucgccaacagcc

SEQ ID NO: 291456 - RNA, 17 nt, Human adenovirus F
ccgugcuguuggacgau

SEQ ID NO: 291457 - RNA, 11 nt, Human adenovirus F
ccuaaaaccac

SEQ ID NO: 291458 - RNA, 19 nt, Human adenovirus F
ccuaaggacuucaccuaca

SEQ ID NO: 291459 - RNA, 20 nt, Human adenovirus F
ccuaucacuaaaaccaacaa

SEQ ID NO: 291460 - RNA, 15 nt, Human adenovirus F
ccuauguuaggcuuu

SEQ ID NO: 291461 - RNA, 18 nt, Human adenovirus F
ccucagccugaaauacac

SEQ ID NO: 291462 - RNA, 19 nt, Human adenovirus F
ccucagccugaaauacacu

SEQ ID NO: 291463 - RNA, 16 nt, Human adenovirus F
ccucccaacuuucgua

SEQ ID NO: 291464 - RNA, 21 nt, Human adenovirus F
ccuccuguguuacgccagaga

SEQ ID NO: 291465 - RNA, 20 nt, Human adenovirus F
ccucucgcucugcaaaauaa

SEQ ID NO: 291466 - RNA, 17 nt, Human adenovirus F
ccucuucucugucuuau

SEQ ID NO: 291467 - RNA, 21 nt, Human adenovirus F
ccucuucucugucuuauccuc

SEQ ID NO: 291468 - RNA, 13 nt, Human adenovirus F
ccugcaaagccaa

SEQ ID NO: 291469 - RNA, 16 nt, Human adenovirus F
ccugcccuuccuccca

SEQ ID NO: 291470 - RNA, 20 nt, Human adenovirus F
ccugcuugucugucugccaa

SEQ ID NO: 291471 - RNA, 14 nt, Human adenovirus F
ccuggaacccaaag

SEQ ID NO: 291472 - RNA, 18 nt, Human adenovirus F
ccuggacuuuuagagugu

SEQ ID NO: 291473 - RNA, 18 nt, Human adenovirus F
ccugggggcuuugaagca

SEQ ID NO: 291474 - RNA, 15 nt, Human adenovirus F
ccugguugugacgca

SEQ ID NO: 291475 - RNA, 21 nt, Human adenovirus F
ccugucaugaaaguuccucuu

SEQ ID NO: 291476 - RNA, 19 nt, Human adenovirus F
ccuguggaguggcauuaaa

SEQ ID NO: 291477 - RNA, 16 nt, Human adenovirus F
ccuuacgucagcuaca

SEQ ID NO: 291478 - RNA, 20 nt, Human adenovirus F
ccuuccucccaacuuucgua

SEQ ID NO: 291479 - RNA, 14 nt, Human adenovirus F
ccuugcugacuuau

SEQ ID NO: 291480 - RNA, 16 nt, Human adenovirus F
ccuuuuuacccugacc

SEQ ID NO: 291481 - RNA, 22 nt, Human adenovirus F
cgaaagcgugauggaaacagcg

SEQ ID NO: 291482 - RNA, 13 nt, Human adenovirus F
cgaacacuacaau

SEQ ID NO: 291483 - RNA, 23 nt, Human adenovirus F
cgaacacuacaauccccuugaca

SEQ ID NO: 291484 - RNA, 23 nt, Human adenovirus F
cugcuuuacuuaaaaagccugug

SEQ ID NO: 291485 - RNA, 14 nt, Human adenovirus F
cuggaacccaaaga

SEQ ID NO: 291486 - RNA, 16 nt, Human adenovirus F
cuggacuauacacugu

SEQ ID NO: 291487 - RNA, 17 nt, Human adenovirus F
cuggcaagagccaccuu

SEQ ID NO: 291488 - RNA, 15 nt, Human adenovirus F
cuggccaacugccac

SEQ ID NO: 291489 - RNA, 20 nt, Human adenovirus F
cuggccaacugccaccucca

SEQ ID NO: 291490 - RNA, 17 nt, Human adenovirus F
cuggccgugggcgacaa

SEQ ID NO: 291491 - RNA, 18 nt, Human adenovirus F
cuggccuggaacccaaag

SEQ ID NO: 291492 - RNA, 15 nt, Human adenovirus F
cuggcgugugccauu

SEQ ID NO: 291493 - RNA, 23 nt, Human adenovirus F
cuggggaauggagcuguggugcg

SEQ ID NO: 291494 - RNA, 14 nt, Human adenovirus F
cuggggacuuugcu

SEQ ID NO: 291495 - RNA, 16 nt, Human adenovirus F
cugguaaaccagcaca

SEQ ID NO: 291496 - RNA, 17 nt, Human adenovirus F
cugguaaaccagcacac

SEQ ID NO: 291497 - RNA, 17 nt, Human adenovirus F
cuguaaaaauacaugac

SEQ ID NO: 291498 - RNA, 17 nt, Human adenovirus F
cuguaaaaguaucaaua

SEQ ID NO: 291499 - RNA, 12 nt, Human adenovirus F
cuguacugcuac

SEQ ID NO: 291500 - RNA, 13 nt, Human adenovirus F
cuguacugcuacu

SEQ ID NO: 291501 - RNA, 14 nt, Human adenovirus F
cuguacugcuacua

SEQ ID NO: 291502 - RNA, 16 nt, Human adenovirus F
cugucauauacuuuaa

SEQ ID NO: 291503 - RNA, 17 nt, Human adenovirus F
cugucaugaaaguuccu

SEQ ID NO: 291504 - RNA, 19 nt, Human adenovirus F
cugugacaaaaucaacaca

SEQ ID NO: 291505 - RNA, 18 nt, Human adenovirus F
cugugcgcgagcuuuuaa

SEQ ID NO: 291506 - RNA, 18 nt, Human adenovirus F
cuguggaguggcauuaaa

SEQ ID NO: 291507 - RNA, 23 nt, Human adenovirus F
cuguggaguggcauuaaaaacuu

SEQ ID NO: 291508 - RNA, 18 nt, Human adenovirus F
cuguguggucuaagggaa

SEQ ID NO: 291509 - RNA, 22 nt, Human adenovirus F
cuguucaaccuucaagcccuac

SEQ ID NO: 291510 - RNA, 22 nt, Human adenovirus F
cuguuggagaauccuuuuuggc

SEQ ID NO: 291511 - RNA, 19 nt, Human adenovirus F
cuguuguagucugccaacg

SEQ ID NO: 291512 - RNA, 23 nt, Human adenovirus F
cuguuuuuucccucuucccggua

SEQ ID NO: 291513 - RNA, 13 nt, Human adenovirus F
cuuacaaccaaaa

SEQ ID NO: 291514 - RNA, 17 nt, Human adenovirus F
cuuacccgucuccugca

SEQ ID NO: 291515 - RNA, 16 nt, Human adenovirus F
cuuacgaacacuacaa

SEQ ID NO: 291516 - RNA, 17 nt, Human adenovirus F
cuuacucuuucuuacaa

SEQ ID NO: 291517 - RNA, 18 nt, Human adenovirus F
cuuacucuuucuuacaac

SEQ ID NO: 291518 - RNA, 21 nt, Human adenovirus F
cuuagugccggcccccacaug

SEQ ID NO: 291519 - RNA, 20 nt, Human adenovirus F
cuucagccuggggaacaagu

SEQ ID NO: 291520 - RNA, 14 nt, Human adenovirus F
cuucuccccuuuaa

SEQ ID NO: 291521 - RNA, 23 nt, Human adenovirus F
cuucuguaugcuauugacacugc

SEQ ID NO: 291522 - RNA, 15 nt, Human adenovirus F
cuucugugccuguca

SEQ ID NO: 291523 - RNA, 18 nt, Human adenovirus F
cuugaacauaacaccuau

SEQ ID NO: 291524 - RNA, 21 nt, Human adenovirus F
cuugcaaaaccaaaucaauca

SEQ ID NO: 291525 - RNA, 16 nt, Human adenovirus F
cuugcaagaaaaaccu

SEQ ID NO: 291526 - RNA, 16 nt, Human adenovirus F
cuugcaagauggccac

SEQ ID NO: 291527 - RNA, 13 nt, Human adenovirus F
cuuguaucacaga

SEQ ID NO: 291528 - RNA, 17 nt, Human adenovirus F
cuugucugucugccaau

SEQ ID NO: 291529 - RNA, 11 nt, Human adenovirus F
cuuuaugacua

SEQ ID NO: 291530 - RNA, 16 nt, Human adenovirus F
cuuugaagcaugcugu

SEQ ID NO: 291531 - RNA, 13 nt, Human adenovirus F
cuuugccaccuuu

SEQ ID NO: 291532 - RNA, 22 nt, Human adenovirus F
cuuuguaacaacuguacugcua

SEQ ID NO: 291533 - RNA, 13 nt, Human adenovirus F
cuuuguuaugaug

SEQ ID NO: 291534 - RNA, 20 nt, Human adenovirus F
cuuuucaguaugguaacucc

SEQ ID NO: 291535 - RNA, 21 nt, Human adenovirus F
cuuuucaguaugguaacuccu

SEQ ID NO: 291536 - RNA, 21 nt, Human adenovirus F
cuuuucggacgagcgccucaa

SEQ ID NO: 291537 - RNA, 22 nt, Human adenovirus F
cuuuucggacgagcgccucaaa

SEQ ID NO: 291538 - RNA, 15 nt, Human adenovirus F
cuuuugccaaagugg

SEQ ID NO: 291539 - RNA, 15 nt, Human adenovirus F
gaaaaccagcauguc

SEQ ID NO: 291540 - RNA, 11 nt, Human adenovirus F
gaaaacucaaa

SEQ ID NO: 291541 - RNA, 19 nt, Human adenovirus F
gaaaagauauggccauguu

SEQ ID NO: 291542 - RNA, 20 nt, Human adenovirus F
gaaaagauauggccauguua

SEQ ID NO: 291543 - RNA, 20 nt, Human adenovirus F
gaaaaugcuuuugcuauguu

SEQ ID NO: 291544 - RNA, 15 nt, Human adenovirus F
gaaaccgccuacucu

SEQ ID NO: 291545 - RNA, 14 nt, Human adenovirus F
gaaacgagccagau

SEQ ID NO: 291546 - RNA, 16 nt, Human adenovirus F
gaaaggcccauaccaa

SEQ ID NO: 291547 - RNA, 17 nt, Human adenovirus F
gaaaggcccauaccaaa

SEQ ID NO: 291548 - RNA, 19 nt, Human adenovirus F
gaaaggcccauaccaaaga

SEQ ID NO: 291549 - RNA, 20 nt, Human adenovirus F
gaaagggagguguauaaggu

SEQ ID NO: 291550 - RNA, 16 nt, Human adenovirus F
gaaaguuccucuucuc

SEQ ID NO: 291551 - RNA, 13 nt, Human adenovirus F
gaaauacacugau

SEQ ID NO: 291552 - RNA, 16 nt, Human adenovirus F
gaaaucagaugcauuu

SEQ ID NO: 291553 - RNA, 18 nt, Human adenovirus F
gaacaguaacacagguca

SEQ ID NO: 291554 - RNA, 14 nt, Human adenovirus F
gaacgagaucggca

SEQ ID NO: 291555 - RNA, 21 nt, Human adenovirus F
gaacucaaaguaaaaaaccga

SEQ ID NO: 291556 - RNA, 16 nt, Human adenovirus F
gaacuuccagcuguug

SEQ ID NO: 291557 - RNA, 19 nt, Human adenovirus F
gaacuuuguuaugauguaa

SEQ ID NO: 291558 - RNA, 14 nt, Human adenovirus F
gaagacgacuucaa

SEQ ID NO: 291559 - RNA, 15 nt, Human adenovirus F
gaagacggguuguca

SEQ ID NO: 291560 - RNA, 14 nt, Human adenovirus F
gaagaucuguguuc

SEQ ID NO: 291561 - RNA, 14 nt, Human adenovirus F
gaagcaugcuguuu

SEQ ID NO: 291562 - RNA, 19 nt, Human adenovirus F
gaagcugugcgcgagcuuu

SEQ ID NO: 291563 - RNA, 22 nt, Human adenovirus F
gaagcugugcgcgagcuuuuaa

SEQ ID NO: 291564 - RNA, 14 nt, Human adenovirus F
gaagugaagaccaa

SEQ ID NO: 291565 - RNA, 12 nt, Human adenovirus F
gaaguuaccaaa

SEQ ID NO: 291566 - RNA, 14 nt, Human adenovirus F
gaaguuaccaaaga

SEQ ID NO: 291567 - RNA, 15 nt, Human adenovirus F
gaaguuaccaaagac

SEQ ID NO: 291568 - RNA, 16 nt, Human adenovirus F
gaauaauuaugccucu

SEQ ID NO: 291569 - RNA, 20 nt, Human adenovirus F
gaaucaauaaaagcuuuuau

SEQ ID NO: 291570 - RNA, 18 nt, Human adenovirus F
gaauggagcuguggugcg

SEQ ID NO: 291571 - RNA, 21 nt, Human adenovirus F
gaauuauucaagauugcagcu

SEQ ID NO: 291572 - RNA, 18 nt, Human adenovirus F
gacaaaaucaacacaggu

SEQ ID NO: 291573 - RNA, 22 nt, Human adenovirus F
gacaagacauggaagacaucaa

SEQ ID NO: 291574 - RNA, 14 nt, Human adenovirus F
gacacgagcuguca

SEQ ID NO: 291575 - RNA, 17 nt, Human adenovirus F
gacacugaggauuuucu

SEQ ID NO: 291576 - RNA, 12 nt, Human adenovirus F
gacagagcuuua

SEQ ID NO: 291577 - RNA, 22 nt, Human adenovirus F
gacagaugguuucgcugcagac

SEQ ID NO: 291578 - RNA, 20 nt, Human adenovirus F
gacccggcacuacuguagua

SEQ ID NO: 291579 - RNA, 18 nt, Human adenovirus F
gaccgcgaggaaaccgcc

SEQ ID NO: 291580 - RNA, 14 nt, Human adenovirus F
gaccuuggccacca

SEQ ID NO: 291581 - RNA, 15 nt, Human adenovirus F
gacgaagacugaguu

SEQ ID NO: 291582 - RNA, 19 nt, Human adenovirus F
gacgacugggcggcggcca

SEQ ID NO: 291583 - RNA, 20 nt, Human adenovirus F
gacgacugggcggcggccau

SEQ ID NO: 291584 - RNA, 18 nt, Human adenovirus F
gacgauguuucugaaggu

SEQ ID NO: 291585 - RNA, 20 nt, Human adenovirus F
gacgcacuccugcccaagag

SEQ ID NO: 291586 - RNA, 12 nt, Human adenovirus F
gacgcagggugg

SEQ ID NO: 291587 - RNA, 16 nt, Human adenovirus F
gacgggcagugcacug

SEQ ID NO: 291588 - RNA, 14 nt, Human adenovirus F
gacuaaacacccgc

SEQ ID NO: 291589 - RNA, 20 nt, Human adenovirus F
gacugcaggaguggcugaac

SEQ ID NO: 291590 - RNA, 16 nt, Human adenovirus F
gacugcgcggcuguaa

SEQ ID NO: 291591 - RNA, 22 nt, Human adenovirus F
gacuucaaccccgucuaccccu

SEQ ID NO: 291592 - RNA, 14 nt, Human adenovirus F
gagaaaacaccucg

SEQ ID NO: 291593 - RNA, 16 nt, Human adenovirus F
gagacagcuccuccaa

SEQ ID NO: 291594 - RNA, 17 nt, Human adenovirus F
gagcaugaaacuggaag

SEQ ID NO: 291595 - RNA, 20 nt, Human adenovirus F
gagccgcggucaacagcugg

SEQ ID NO: 291596 - RNA, 16 nt, Human adenovirus F
gagcucugcaaaaaca

SEQ ID NO: 291597 - RNA, 13 nt, Human adenovirus F
gagcuucucagga

SEQ ID NO: 291598 - RNA, 20 nt, Human adenovirus F
gagcuugaacauaacaccua

SEQ ID NO: 291599 - RNA, 14 nt, Human adenovirus F
gaggaaaaugcuuu

SEQ ID NO: 291600 - RNA, 17 nt, Human adenovirus F
gaggaaaccgccuacuc

SEQ ID NO: 291601 - RNA, 20 nt, Human adenovirus F
gaggauuuucucaacuuccc

SEQ ID NO: 291602 - RNA, 17 nt, Human adenovirus F
gaggcuaauggccagag

SEQ ID NO: 291603 - RNA, 15 nt, Human adenovirus F
augaagaucuguguu

SEQ ID NO: 291604 - RNA, 14 nt, Human adenovirus F
augagcaacagggg

SEQ ID NO: 291605 - RNA, 16 nt, Human adenovirus F
augagcaacaggggau

SEQ ID NO: 291606 - RNA, 15 nt, Human adenovirus F
augagcuuacuuuaa

SEQ ID NO: 291607 - RNA, 21 nt, Human adenovirus F
augaguuuaaaaacggugaaa

SEQ ID NO: 291608 - RNA, 18 nt, Human adenovirus F
augcagacaagacaugga

SEQ ID NO: 291609 - RNA, 17 nt, Human adenovirus F
augcuauugacacugcu

SEQ ID NO: 291610 - RNA, 17 nt, Human adenovirus F
augcuccgggauaagcu

SEQ ID NO: 291611 - RNA, 21 nt, Human adenovirus F
auggaaaggcccauaccaaag

SEQ ID NO: 291612 - RNA, 22 nt, Human adenovirus F
auggaaaggcccauaccaaaga

SEQ ID NO: 291613 - RNA, 16 nt, Human adenovirus F
auggagcuguggugcg

SEQ ID NO: 291614 - RNA, 11 nt, Human adenovirus F
auggauguuuu

SEQ ID NO: 291615 - RNA, 18 nt, Human adenovirus F
auggccacccccucgaug

SEQ ID NO: 291616 - RNA, 17 nt, Human adenovirus F
auggcuuugacuugccg

SEQ ID NO: 291617 - RNA, 20 nt, Human adenovirus F
augggcaaagggggacaaag

SEQ ID NO: 291618 - RNA, 19 nt, Human adenovirus F
augucaaaacguucauuau

SEQ ID NO: 291619 - RNA, 14 nt, Human adenovirus F
auguggcacuguuu

SEQ ID NO: 291620 - RNA, 23 nt, Human adenovirus F
auguuggcggcccugcaaagcca

SEQ ID NO: 291621 - RNA, 20 nt, Human adenovirus F
auuaagccucgcgugcucaa

SEQ ID NO: 291622 - RNA, 15 nt, Human adenovirus F
auuaagguuacucag

SEQ ID NO: 291623 - RNA, 22 nt, Human adenovirus F
auuaagucauuugguaacaagg

SEQ ID NO: 291624 - RNA, 18 nt, Human adenovirus F
auuaaguugggagggaug

SEQ ID NO: 291625 - RNA, 21 nt, Human adenovirus F
auuaaguugggagggaugcau

SEQ ID NO: 291626 - RNA, 15 nt, Human adenovirus F
auuaauaaagcuuac

SEQ ID NO: 291627 - RNA, 17 nt, Human adenovirus F
auuaauaaagcuuaccu

SEQ ID NO: 291628 - RNA, 19 nt, Human adenovirus F
auuaauaaagcuuaccuua

SEQ ID NO: 291629 - RNA, 17 nt, Human adenovirus F
auuaaugggcaaagggg

SEQ ID NO: 291630 - RNA, 12 nt, Human adenovirus F
auuaauguugau

SEQ ID NO: 291631 - RNA, 20 nt, Human adenovirus F
auuaggccgucccugggaug

SEQ ID NO: 291632 - RNA, 17 nt, Human adenovirus F
auucaagauugcagcuu

SEQ ID NO: 291633 - RNA, 15 nt, Human adenovirus F
auucaugcaugcaga

SEQ ID NO: 291634 - RNA, 14 nt, Human adenovirus F
auucugauggaguu

SEQ ID NO: 291635 - RNA, 13 nt, Human adenovirus F
auugccacccgcc

SEQ ID NO: 291636 - RNA, 23 nt, Human adenovirus F
auugccucccugaacuaccagaa

SEQ ID NO: 291637 - RNA, 17 nt, Human adenovirus F
auugggauaccuuuuag

SEQ ID NO: 291638 - RNA, 19 nt, Human adenovirus F
auugguaauuuggaaaauc

SEQ ID NO: 291639 - RNA, 14 nt, Human adenovirus F
auuguuaacacggc

SEQ ID NO: 291640 - RNA, 14 nt, Human adenovirus F
auuguucuguuaca

SEQ ID NO: 291641 - RNA, 17 nt, Human adenovirus F
auuuaccaguuugagua

SEQ ID NO: 291642 - RNA, 16 nt, Human adenovirus F
auuuaggauuuacaca

SEQ ID NO: 291643 - RNA, 17 nt, Human adenovirus F
auuuaugguucacugua

SEQ ID NO: 291644 - RNA, 13 nt, Human adenovirus F
auuucauuuacca

SEQ ID NO: 291645 - RNA, 21 nt, Human adenovirus F
auuucgaacgcgccaggugaa

SEQ ID NO: 291646 - RNA, 16 nt, Human adenovirus F
auuucucguacguggg

SEQ ID NO: 291647 - RNA, 17 nt, Human adenovirus F
auuucuuuuuuccagau

SEQ ID NO: 291648 - RNA, 17 nt, Human adenovirus F
auuugaagaugacuuca

SEQ ID NO: 291649 - RNA, 19 nt, Human adenovirus F
auuuggaaaaucgcaucuu

SEQ ID NO: 291650 - RNA, 22 nt, Human adenovirus F
auuugguaacaaggccuggaac

SEQ ID NO: 291651 - RNA, 20 nt, Human adenovirus F
auuuguuuuugcagagcucu

SEQ ID NO: 291652 - RNA, 22 nt, Human adenovirus F
auuuuauuguucuguuacauaa

SEQ ID NO: 291653 - RNA, 15 nt, Human adenovirus F
auuuugaggaaaaug

SEQ ID NO: 291654 - RNA, 11 nt, Human adenovirus F
auuuuggcaga

SEQ ID NO: 291655 - RNA, 18 nt, Human adenovirus F
auuuuucugagucuacca

SEQ ID NO: 291656 - RNA, 20 nt, Human adenovirus F
caaaaaauucaugcaugcag

SEQ ID NO: 291657 - RNA, 22 nt, Human adenovirus F
caaaaaauucaugcaugcagac

SEQ ID NO: 291658 - RNA, 17 nt, Human adenovirus F
caaaaacggggcuuuaa

SEQ ID NO: 291659 - RNA, 15 nt, Human adenovirus F
caaaaacucugugaa

SEQ ID NO: 291660 - RNA, 16 nt, Human adenovirus F
caaaaacucugugaag

SEQ ID NO: 291661 - RNA, 19 nt, Human adenovirus F
caaaaacuuacaaucauuu

SEQ ID NO: 291662 - RNA, 17 nt, Human adenovirus F
caaaacguucauuauuu

SEQ ID NO: 291663 - RNA, 17 nt, Human adenovirus F
caaaaggucaggugcag

SEQ ID NO: 291664 - RNA, 18 nt, Human adenovirus F
caaaaucguagguuuaaa

SEQ ID NO: 291665 - RNA, 19 nt, Human adenovirus F
caaaauggacgaagacuga

SEQ ID NO: 291666 - RNA, 16 nt, Human adenovirus F
caaacaggaagacaau

SEQ ID NO: 291667 - RNA, 16 nt, Human adenovirus F
caaacgcgguggcuuu

SEQ ID NO: 291668 - RNA, 14 nt, Human adenovirus F
caaagacauuccca

SEQ ID NO: 291669 - RNA, 20 nt, Human adenovirus F
caaagacauucccacgccuu

SEQ ID NO: 291670 - RNA, 15 nt, Human adenovirus F
caaagggggacaaag

SEQ ID NO: 291671 - RNA, 18 nt, Human adenovirus F
caaagggggacaaagaga

SEQ ID NO: 291672 - RNA, 16 nt, Human adenovirus F
caaaguccuggccaac

SEQ ID NO: 291673 - RNA, 22 nt, Human adenovirus F
caaaguccuggccaacugccac

SEQ ID NO: 291674 - RNA, 17 nt, Human adenovirus F
caaaucccagcuuuugc

SEQ ID NO: 291675 - RNA, 18 nt, Human adenovirus F
caaauuacgucauugaca

SEQ ID NO: 291676 - RNA, 22 nt, Human adenovirus F
caacaaaaucaggaacuguuca

SEQ ID NO: 291677 - RNA, 20 nt, Human adenovirus F
caacgauucuucugugacaa

SEQ ID NO: 291678 - RNA, 20 nt, Human adenovirus F
caacuguacugcuacuacuu

SEQ ID NO: 291679 - RNA, 10 nt, Human adenovirus F
caacuuuauu

SEQ ID NO: 291680 - RNA, 22 nt, Human adenovirus F
caacuuucguacgggaugugcc

SEQ ID NO: 291681 - RNA, 16 nt, Human adenovirus F
caagcuaaaugccauu

SEQ ID NO: 291682 - RNA, 12 nt, Human adenovirus F
caagcuccucau

SEQ ID NO: 291683 - RNA, 17 nt, Human adenovirus F
caaggaaacaacagccu

SEQ ID NO: 291684 - RNA, 18 nt, Human adenovirus F
caaggaaacaacagccuu

SEQ ID NO: 291685 - RNA, 15 nt, Human adenovirus F
caaguauacauuuga

SEQ ID NO: 291686 - RNA, 13 nt, Human adenovirus F
caaguuuuuccag

SEQ ID NO: 291687 - RNA, 19 nt, Human adenovirus F
caauauuuuauuguucugu

SEQ ID NO: 291688 - RNA, 13 nt, Human adenovirus F
caauccuaacaaa

SEQ ID NO: 291689 - RNA, 20 nt, Human adenovirus F
caauccuaacaaaaacuuac

SEQ ID NO: 291690 - RNA, 22 nt, Human adenovirus F
caauccuaacaaaaacuuacaa

SEQ ID NO: 291691 - RNA, 17 nt, Human adenovirus F
cacaaaauggacgaaga

SEQ ID NO: 291692 - RNA, 23 nt, Human adenovirus F
cacaaaguccuggccaacugcca

SEQ ID NO: 291693 - RNA, 16 nt, Human adenovirus F
cacaauugguuggaaa

SEQ ID NO: 291694 - RNA, 23 nt, Human adenovirus F
cacagaagaaucguuguguaaau

SEQ ID NO: 291695 - RNA, 17 nt, Human adenovirus F
cacccggguuuaccugg

SEQ ID NO: 291696 - RNA, 18 nt, Human adenovirus F
cacccggguuuaccuggu

SEQ ID NO: 291697 - RNA, 22 nt, Human adenovirus F
caccgaguuccugcgcugcuac

SEQ ID NO: 291698 - RNA, 17 nt, Human adenovirus F
caccgauaccuacuuca

SEQ ID NO: 291699 - RNA, 19 nt, Human adenovirus F
caccgcaaacaacugcaau

SEQ ID NO: 291700 - RNA, 18 nt, Human adenovirus F
caccucuguuugcugcac

SEQ ID NO: 291701 - RNA, 22 nt, Human adenovirus F
gggguuccaccaagcuccucau

SEQ ID NO: 291702 - RNA, 18 nt, Human adenovirus F
ggguacuagcagugggca

SEQ ID NO: 291703 - RNA, 18 nt, Human adenovirus F
ggguuagcgcacugguaa

SEQ ID NO: 291704 - RNA, 13 nt, Human adenovirus F
ggguuuuggacau

SEQ ID NO: 291705 - RNA, 15 nt, Human adenovirus F
gguaagagccauguu

SEQ ID NO: 291706 - RNA, 14 nt, Human adenovirus F
gguacacaccaaac

SEQ ID NO: 291707 - RNA, 23 nt, Human adenovirus F
gguacuagcagugggcaaagggg

SEQ ID NO: 291708 - RNA, 19 nt, Human adenovirus F
ggucaaaaacucugugaag

SEQ ID NO: 291709 - RNA, 17 nt, Human adenovirus F
ggucaaaugcuccggga

SEQ ID NO: 291710 - RNA, 11 nt, Human adenovirus F
ggucaacagcu

SEQ ID NO: 291711 - RNA, 15 nt, Human adenovirus F
ggucucuucaaugua

SEQ ID NO: 291712 - RNA, 17 nt, Human adenovirus F
ggugggcuuggauguuc

SEQ ID NO: 291713 - RNA, 12 nt, Human adenovirus F
gguucacuguau

SEQ ID NO: 291714 - RNA, 17 nt, Human adenovirus F
gguuggaaaagucaaaa

SEQ ID NO: 291715 - RNA, 14 nt, Human adenovirus F
gguuuaaauuacac

SEQ ID NO: 291716 - RNA, 23 nt, Human adenovirus F
gguuuugaacgcuggacuauaca

SEQ ID NO: 291717 - RNA, 18 nt, Human adenovirus F
gguuuuggacauggccag

SEQ ID NO: 291718 - RNA, 19 nt, Human adenovirus F
guaaauggaauucgugcca

SEQ ID NO: 291719 - RNA, 16 nt, Human adenovirus F
guaacuccucuucucc

SEQ ID NO: 291720 - RNA, 15 nt, Human adenovirus F
guaagagguuuugaa

SEQ ID NO: 291721 - RNA, 13 nt, Human adenovirus F
guacacugacccc

SEQ ID NO: 291722 - RNA, 21 nt, Human adenovirus F
guacaguccaaaaucugcugc

SEQ ID NO: 291723 - RNA, 18 nt, Human adenovirus F
guaccaccgcaaacaacu

SEQ ID NO: 291724 - RNA, 17 nt, Human adenovirus F
guaccgcuccaucaagc

SEQ ID NO: 291725 - RNA, 15 nt, Human adenovirus F
guaccugcuaccucu

SEQ ID NO: 291726 - RNA, 22 nt, Human adenovirus F
guacgccuuaguugguaccaau

SEQ ID NO: 291727 - RNA, 14 nt, Human adenovirus F
guacugcuacuacu

SEQ ID NO: 291728 - RNA, 17 nt, Human adenovirus F
guaggcccuagaccacc

SEQ ID NO: 291729 - RNA, 18 nt, Human adenovirus F
guauaagguaaaguggaa

SEQ ID NO: 291730 - RNA, 20 nt, Human adenovirus F
guauaaucuuaaaacugacg

SEQ ID NO: 291731 - RNA, 17 nt, Human adenovirus F
guaugaaggucuccuaa

SEQ ID NO: 291732 - RNA, 18 nt, Human adenovirus F
guaugcuauugacacugc

SEQ ID NO: 291733 - RNA, 19 nt, Human adenovirus F
guaugcuauugacacugcu

SEQ ID NO: 291734 - RNA, 15 nt, Human adenovirus F
guaugguaacuccuc

SEQ ID NO: 291735 - RNA, 14 nt, Human adenovirus F
guauuaaaccuggg

SEQ ID NO: 291736 - RNA, 14 nt, Human adenovirus F
gucaaacacgggau

SEQ ID NO: 291737 - RNA, 20 nt, Human adenovirus F
gucaaguuuuuccagcagca

SEQ ID NO: 291738 - RNA, 19 nt, Human adenovirus F
gucagauaugggcuaaaca

SEQ ID NO: 291739 - RNA, 22 nt, Human adenovirus F
gucauauacuuuaaacaagcaa

SEQ ID NO: 291740 - RNA, 14 nt, Human adenovirus F
guccucagccugaa

SEQ ID NO: 291741 - RNA, 18 nt, Human adenovirus F
guccuggccaacugccac

SEQ ID NO: 291742 - RNA, 16 nt, Human adenovirus F
guccuugaacaguuug

SEQ ID NO: 291743 - RNA, 12 nt, Human adenovirus F
gucguugccagc

SEQ ID NO: 291744 - RNA, 15 nt, Human adenovirus F
gucuaccacuucuau

SEQ ID NO: 291745 - RNA, 21 nt, Human adenovirus F
gucuccgggguuccaccaagc

SEQ ID NO: 291746 - RNA, 16 nt, Human adenovirus F
gucuuauccuccuuca

SEQ ID NO: 291747 - RNA, 17 nt, Human adenovirus F
gucuuauccuccuucac

SEQ ID NO: 291748 - RNA, 12 nt, Human adenovirus F
gucuuccaccuc

SEQ ID NO: 291749 - RNA, 15 nt, Human adenovirus F
gugaaguuaccaaag

SEQ ID NO: 291750 - RNA, 16 nt, Human adenovirus F
gugaaguuaccaaaga

SEQ ID NO: 291751 - RNA, 20 nt, Human adenovirus F
gugccaccgauaccuacuuc

SEQ ID NO: 291752 - RNA, 19 nt, Human adenovirus F
gugccagaaaaaacccuua

SEQ ID NO: 291753 - RNA, 21 nt, Human adenovirus F
guggacaacaagucggcggac

SEQ ID NO: 291754 - RNA, 14 nt, Human adenovirus F
guggccaauguggu

SEQ ID NO: 291755 - RNA, 18 nt, Human adenovirus F
gugggcuuggauguucaa

SEQ ID NO: 291756 - RNA, 20 nt, Human adenovirus F
guguagguaagagccauguu

SEQ ID NO: 291757 - RNA, 15 nt, Human adenovirus F
gugugaacauuugaa

SEQ ID NO: 291758 - RNA, 17 nt, Human adenovirus F
gugugcuaaguuuaaca

SEQ ID NO: 291759 - RNA, 15 nt, Human adenovirus F
guguuaucucaagac

SEQ ID NO: 291760 - RNA, 18 nt, Human adenovirus F
guguugauuuugucacag

SEQ ID NO: 291761 - RNA, 12 nt, Human adenovirus F
guuaagcccauu

SEQ ID NO: 291762 - RNA, 21 nt, Human adenovirus F
guuaauauacguaaaugugcc

SEQ ID NO: 291763 - RNA, 17 nt, Human adenovirus F
guuagcucugaacacuu

SEQ ID NO: 291764 - RNA, 19 nt, Human adenovirus F
guucaaccuucaagcccua

SEQ ID NO: 291765 - RNA, 22 nt, Human adenovirus F
guucaaggaaacaacagccuuu

SEQ ID NO: 291766 - RNA, 23 nt, Human adenovirus F
guucaccuuuuuacccugaccca

SEQ ID NO: 291767 - RNA, 19 nt, Human adenovirus F
guuccucuucucugucuua

SEQ ID NO: 291768 - RNA, 20 nt, Human adenovirus F
guuccugcgcugcuacucaa

SEQ ID NO: 291769 - RNA, 16 nt, Human adenovirus F
guucuuugcuggcaaa

SEQ ID NO: 291770 - RNA, 17 nt, Human adenovirus F
guucuuugcuggcaaag

SEQ ID NO: 291771 - RNA, 19 nt, Human adenovirus F
guucuuuuuugugugcuaa

SEQ ID NO: 291772 - RNA, 15 nt, Human adenovirus F
guugauuuugucaca

SEQ ID NO: 291773 - RNA, 16 nt, Human adenovirus F
guuguagucugccaac

SEQ ID NO: 291774 - RNA, 19 nt, Human adenovirus F
guuucaucgccgccuggca

SEQ ID NO: 291775 - RNA, 16 nt, Human adenovirus F
guuucugggcuugcuu

SEQ ID NO: 291776 - RNA, 13 nt, Human adenovirus F
guuuuagcacuca

SEQ ID NO: 291777 - RNA, 20 nt, Human adenovirus F
uaaaaagccugugauuucau

SEQ ID NO: 291778 - RNA, 22 nt, Human adenovirus F
uaaaaauggagaucuuucuuca

SEQ ID NO: 291779 - RNA, 18 nt, Human adenovirus F
uaaaacuuggcagcaaca

SEQ ID NO: 291780 - RNA, 14 nt, Human adenovirus F
uaaacaagcaaaga

SEQ ID NO: 291781 - RNA, 13 nt, Human adenovirus F
uaaacaagcugaa

SEQ ID NO: 291782 - RNA, 16 nt, Human adenovirus F
uaaacaugagcuuacu

SEQ ID NO: 291783 - RNA, 16 nt, Human adenovirus F
uaaagaaaaccagcau

SEQ ID NO: 291784 - RNA, 15 nt, Human adenovirus F
uaaagcauuuccgca

SEQ ID NO: 291785 - RNA, 19 nt, Human adenovirus F
uaaagcauuuccgcagcuu

SEQ ID NO: 291786 - RNA, 21 nt, Human adenovirus F
uaaaguccagcgcgugcuuag

SEQ ID NO: 291787 - RNA, 17 nt, Human adenovirus F
uaaaguugaaaauacaa

SEQ ID NO: 291788 - RNA, 19 nt, Human adenovirus F
uaaaugggaaaagcaugug

SEQ ID NO: 291789 - RNA, 12 nt, Human adenovirus F
uaaauuacacua

SEQ ID NO: 291790 - RNA, 16 nt, Human adenovirus F
uaacaaggccuggaac

SEQ ID NO: 291791 - RNA, 18 nt, Human adenovirus F
uaacaaguagccuaagga

SEQ ID NO: 291792 - RNA, 22 nt, Human adenovirus F
uaacaucugcaucggugccgua

SEQ ID NO: 291793 - RNA, 18 nt, Human adenovirus F
uaacccuggaauuuuugc

SEQ ID NO: 291794 - RNA, 15 nt, Human adenovirus F
uaaccguuaaucucc

SEQ ID NO: 291795 - RNA, 22 nt, Human adenovirus F
uaaccuucgcugcuuuacuuaa

SEQ ID NO: 291796 - RNA, 20 nt, Human adenovirus F
uaacuaauguaaucuauaga

SEQ ID NO: 291797 - RNA, 15 nt, Human adenovirus F
uaagaagguccaugg

SEQ ID NO: 291798 - RNA, 20 nt, Human adenovirus F
uaagagguuuugaacgcugg

SEQ ID NO: 291799 - RNA, 21 nt, Human adenovirus F
uaagagguuuugaacgcugga

SEQ ID NO: 291800 - RNA, 18 nt, Human adenovirus F
uaagccucucgcucugca

SEQ ID NO: 291801 - RNA, 21 nt, Human adenovirus F
uaaggaggaggcuaauggcca

SEQ ID NO: 291802 - RNA, 22 nt, Human adenovirus F
uaaguccacccaaacuguucaa

SEQ ID NO: 291803 - RNA, 13 nt, Human adenovirus F
uaauaaagcuuac

SEQ ID NO: 291804 - RNA, 16 nt, Human adenovirus F
uaauaaagcuuaccuu

SEQ ID NO: 291805 - RNA, 14 nt, Human adenovirus F
uaauuaaaguuauu

SEQ ID NO: 291806 - RNA, 23 nt, Human adenovirus F
uacaaaguuaucagaaccuccga

SEQ ID NO: 291807 - RNA, 15 nt, Human adenovirus F
uacaaccaaaaacgg

SEQ ID NO: 291808 - RNA, 12 nt, Human adenovirus F
uacaagauucca

SEQ ID NO: 291809 - RNA, 20 nt, Human adenovirus F
uacaagauuccaccaaaggu

SEQ ID NO: 291810 - RNA, 18 nt, Human adenovirus F
uacaaguauacauuugaa

SEQ ID NO: 291811 - RNA, 21 nt, Human adenovirus F
uacaauccccuugacauucca

SEQ ID NO: 291812 - RNA, 20 nt, Human adenovirus F
uacacaccaaacucuuuauu

SEQ ID NO: 291813 - RNA, 13 nt, Human adenovirus F
uacaccaaugcaa

SEQ ID NO: 291814 - RNA, 14 nt, Human adenovirus F
uacacugaccccau

SEQ ID NO: 291815 - RNA, 15 nt, Human adenovirus F
uacacugucacugua

SEQ ID NO: 291816 - RNA, 17 nt, Human adenovirus F
uacacugucacuguauu

SEQ ID NO: 291817 - RNA, 20 nt, Human adenovirus F
uacaggugggcuuggauguu

SEQ ID NO: 291818 - RNA, 20 nt, Human adenovirus F
uacaguccaaaaucugcugc

SEQ ID NO: 291819 - RNA, 19 nt, Human adenovirus F
uacauaagaaaaugagcaa

SEQ ID NO: 291820 - RNA, 18 nt, Human adenovirus F
ugacuuuuccaaccaauu

SEQ ID NO: 291821 - RNA, 14 nt, Human adenovirus F
ugagcaacagggga

SEQ ID NO: 291822 - RNA, 22 nt, Human adenovirus F
ugagcaacaggggaugucaaaa

SEQ ID NO: 291823 - RNA, 17 nt, Human adenovirus F
ugagcaugaaacuggaa

SEQ ID NO: 291824 - RNA, 14 nt, Human adenovirus F
ugagucuaccacuu

SEQ ID NO: 291825 - RNA, 22 nt, Human adenovirus F
ugaguuugugcgguccuuugcc

SEQ ID NO: 291826 - RNA, 19 nt, Human adenovirus F
ugauagugugguggccaac

SEQ ID NO: 291827 - RNA, 20 nt, Human adenovirus F
ugaucuucgugacuugcacu

SEQ ID NO: 291828 - RNA, 22 nt, Human adenovirus F
ugaucuucgugacuugcacuuu

SEQ ID NO: 291829 - RNA, 22 nt, Human adenovirus F
ugaugauuuaugguucacugua

SEQ ID NO: 291830 - RNA, 23 nt, Human adenovirus F
ugaugauuuaugguucacuguau

SEQ ID NO: 291831 - RNA, 16 nt, Human adenovirus F
ugauuauaaaugcucu

SEQ ID NO: 291832 - RNA, 20 nt, Human adenovirus F
ugauuuaugguucacuguau

SEQ ID NO: 291833 - RNA, 11 nt, Human adenovirus F
ugcaaagccaa

SEQ ID NO: 291834 - RNA, 18 nt, Human adenovirus F
ugcaauuuaggauuuaca

SEQ ID NO: 291835 - RNA, 21 nt, Human adenovirus F
ugcacugagcagcuuauccuu

SEQ ID NO: 291836 - RNA, 16 nt, Human adenovirus F
ugcacugccaucugca

SEQ ID NO: 291837 - RNA, 17 nt, Human adenovirus F
ugcagcuuaauguuuga

SEQ ID NO: 291838 - RNA, 22 nt, Human adenovirus F
ugcagguaggaccacuggaggg

SEQ ID NO: 291839 - RNA, 20 nt, Human adenovirus F
ugcaggugcagaagagggcg

SEQ ID NO: 291840 - RNA, 13 nt, Human adenovirus F
ugcaugcaugaau

SEQ ID NO: 291841 - RNA, 22 nt, Human adenovirus F
ugccaacgggcggcaaacuuuc

SEQ ID NO: 291842 - RNA, 14 nt, Human adenovirus F
ugccaccuuuuugg

SEQ ID NO: 291843 - RNA, 17 nt, Human adenovirus F
ugccacgcgacgcggaa

SEQ ID NO: 291844 - RNA, 21 nt, Human adenovirus F
ugccacuuuuuuuguggccau

SEQ ID NO: 291845 - RNA, 19 nt, Human adenovirus F
ugccagccgguccccguca

SEQ ID NO: 291846 - RNA, 18 nt, Human adenovirus F
ugccggggcaauaucuca

SEQ ID NO: 291847 - RNA, 19 nt, Human adenovirus F
ugccuaugugcuggggaau

SEQ ID NO: 291848 - RNA, 20 nt, Human adenovirus F
ugccucuacugcucguggca

SEQ ID NO: 291849 - RNA, 21 nt, Human adenovirus F
ugccucuacugcucguggcau

SEQ ID NO: 291850 - RNA, 20 nt, Human adenovirus F
ugcgaacauuuguuggcagc

SEQ ID NO: 291851 - RNA, 15 nt, Human adenovirus F
ugcgcugcuacucaa

SEQ ID NO: 291852 - RNA, 19 nt, Human adenovirus F
ugcgcugcuacucaacaga

SEQ ID NO: 291853 - RNA, 20 nt, Human adenovirus F
ugcgcuuuacgcuggccgug

SEQ ID NO: 291854 - RNA, 18 nt, Human adenovirus F
ugcggcaaaucccagcuu

SEQ ID NO: 291855 - RNA, 18 nt, Human adenovirus F
ugcgugugccagccuuag

SEQ ID NO: 291856 - RNA, 12 nt, Human adenovirus F
ugcuauguuugu

SEQ ID NO: 291857 - RNA, 21 nt, Human adenovirus F
ugcucggcgaaaacucaaaca

SEQ ID NO: 291858 - RNA, 21 nt, Human adenovirus F
ugcugacuuaucucaucuuca

SEQ ID NO: 291859 - RNA, 20 nt, Human adenovirus F
ugcugcacugccaucugcag

SEQ ID NO: 291860 - RNA, 22 nt, Human adenovirus F
ugcuucuuugaauuuggggcau

SEQ ID NO: 291861 - RNA, 18 nt, Human adenovirus F
ugcuugucugucugccaa

SEQ ID NO: 291862 - RNA, 19 nt, Human adenovirus F
uggaaaggcccauaccaaa

SEQ ID NO: 291863 - RNA, 20 nt, Human adenovirus F
uggaaaggcccauaccaaag

SEQ ID NO: 291864 - RNA, 17 nt, Human adenovirus F
uggaacaguaacacagg

SEQ ID NO: 291865 - RNA, 22 nt, Human adenovirus F
uggaaccaagcuaaaugccauu

SEQ ID NO: 291866 - RNA, 19 nt, Human adenovirus F
uggaagacaucaauuuugc

SEQ ID NO: 291867 - RNA, 23 nt, Human adenovirus F
uggacauggccagcaccuacuuu

SEQ ID NO: 291868 - RNA, 18 nt, Human adenovirus F
uggacuauacacugucac

SEQ ID NO: 291869 - RNA, 20 nt, Human adenovirus F
uggacuuuuagagugugaac

SEQ ID NO: 291870 - RNA, 15 nt, Human adenovirus F
uggagaaaacaccuc

SEQ ID NO: 291871 - RNA, 15 nt, Human adenovirus F
uggagcuucucagga

SEQ ID NO: 291872 - RNA, 16 nt, Human adenovirus F
uggagcuucucaggau

SEQ ID NO: 291873 - RNA, 17 nt, Human adenovirus F
uggagcuucucaggauu

SEQ ID NO: 291874 - RNA, 22 nt, Human adenovirus F
uggaggcuugggaggauuuuga

SEQ ID NO: 291875 - RNA, 12 nt, Human adenovirus F
uggaguccaaag

SEQ ID NO: 291876 - RNA, 16 nt, Human adenovirus F
uggaguccaaagcaga

SEQ ID NO: 291877 - RNA, 14 nt, Human adenovirus F
uggccaacugccac

SEQ ID NO: 291878 - RNA, 12 nt, Human adenovirus F
uggccaaugugg

SEQ ID NO: 291879 - RNA, 16 nt, Human adenovirus F
uggcgccaguuuacaa

SEQ ID NO: 291880 - RNA, 15 nt, Human adenovirus F
uggcucgcuuuacaa

SEQ ID NO: 291881 - RNA, 14 nt, Human adenovirus F
uggcuuagugccgg

SEQ ID NO: 291882 - RNA, 17 nt, Human adenovirus F
uggcuuccggcauuaac

SEQ ID NO: 291883 - RNA, 21 nt, Human adenovirus F
ugggaaaagcaugugugcaaa

SEQ ID NO: 291884 - RNA, 21 nt, Human adenovirus F
ugggaauuauucaagauugca

SEQ ID NO: 291885 - RNA, 15 nt, Human adenovirus F
ugggccaguuuacaa

SEQ ID NO: 291886 - RNA, 22 nt, Human adenovirus F
ugggcuggaugcauccucccaa

SEQ ID NO: 291887 - RNA, 19 nt, Human adenovirus F
ugggcuuggauguucaaau

SEQ ID NO: 291888 - RNA, 15 nt, Human adenovirus F
uggggagagguguga

SEQ ID NO: 291889 - RNA, 16 nt, Human adenovirus F
uggggguuaagcccau

SEQ ID NO: 291890 - RNA, 11 nt, Human adenovirus F
ugggucucuuc

SEQ ID NO: 291891 - RNA, 16 nt, Human adenovirus F
ugguaaaccagcacac

SEQ ID NO: 291892 - RNA, 18 nt, Human adenovirus F
uggucuuacaugcacauc

SEQ ID NO: 291893 - RNA, 13 nt, Human adenovirus F
ugguucacuguau

SEQ ID NO: 291894 - RNA, 15 nt, Human adenovirus F
ugguucacuguauaa

SEQ ID NO: 291895 - RNA, 21 nt, Human adenovirus F
ugguuccuuacgucagcuaca

SEQ ID NO: 291896 - RNA, 21 nt, Human adenovirus F
uguaccaauccugaaugcaug

SEQ ID NO: 291897 - RNA, 23 nt, Human adenovirus F
uguaccaccgcaaacaacugcaa

SEQ ID NO: 291898 - RNA, 13 nt, Human adenovirus F
uguacgccuccug

SEQ ID NO: 291899 - RNA, 13 nt, Human adenovirus F
uguacugcuacua

SEQ ID NO: 291900 - RNA, 17 nt, Human adenovirus F
uguaucacagaagugaa

SEQ ID NO: 291901 - RNA, 21 nt, Human adenovirus F
ugucaaguuuuuccagcagca

SEQ ID NO: 291902 - RNA, 14 nt, Human adenovirus F
ugucacuguauuaa

SEQ ID NO: 291903 - RNA, 16 nt, Human adenovirus F
ugucaugaaaguuccu

SEQ ID NO: 291904 - RNA, 19 nt, Human adenovirus F
ugucugccaauuaucuacg

SEQ ID NO: 291905 - RNA, 19 nt, Human adenovirus F
ugucuuauccuccuucaca

SEQ ID NO: 291906 - RNA, 19 nt, Human adenovirus F
ugucuucccgccuugcuga

SEQ ID NO: 291907 - RNA, 21 nt, Human adenovirus F
ugucuuuauuaagaaguauua

SEQ ID NO: 291908 - RNA, 17 nt, Human adenovirus F
ugugaaguuaccaaaga

SEQ ID NO: 291909 - RNA, 22 nt, Human adenovirus F
ugugacgcaggguggguacaac

SEQ ID NO: 291910 - RNA, 23 nt, Human adenovirus F
ugugagcgaggugaggucuauuc

SEQ ID NO: 291911 - RNA, 17 nt, Human adenovirus F
uguggcacuguuugcua

SEQ ID NO: 291912 - RNA, 21 nt, Human adenovirus F
uguguuuauuucuugggcgug

SEQ ID NO: 291913 - RNA, 23 nt, Human adenovirus F
uguucaccuuuuuacccugaccc

SEQ ID NO: 291914 - RNA, 12 nt, Human adenovirus F
uguucuguuaca

SEQ ID NO: 291915 - RNA, 22 nt, Human adenovirus F
uguugauuuugucacagaagaa

SEQ ID NO: 291916 - RNA, 17 nt, Human adenovirus F
uguuggacgauguuucu

SEQ ID NO: 291917 - RNA, 20 nt, Human adenovirus F
uguuuauuuauuucuuuugc

SEQ ID NO: 291918 - RNA, 18 nt, Human adenovirus F
uguuugcugcacugccau

SEQ ID NO: 291919 - RNA, 20 nt, Human adenovirus F
uguuugcugugccacuauua

SEQ ID NO: 291920 - RNA, 19 nt, Human adenovirus F
uuaaacuaucaacuacagc

SEQ ID NO: 291921 - RNA, 16 nt, Human adenovirus F
uuaaagaaaaccagca

SEQ ID NO: 291922 - RNA, 21 nt, Human adenovirus F
uuaaagaaaaccagcauguca

SEQ ID NO: 291923 - RNA, 19 nt, Human adenovirus F
uuaacaaguagccuaagga

SEQ ID NO: 291924 - RNA, 17 nt, Human adenovirus F
uuaaccuugaguuuaau

SEQ ID NO: 291925 - RNA, 21 nt, Human adenovirus F
uuaagcccauuaagguuacuc

SEQ ID NO: 291926 - RNA, 20 nt, Human adenovirus F
uuaauauacguaaaugugcc

SEQ ID NO: 291927 - RNA, 18 nt, Human adenovirus F
uuaaucaaauuguaagag

SEQ ID NO: 291928 - RNA, 15 nt, Human adenovirus F
uuaauuuaugaugca

SEQ ID NO: 291929 - RNA, 10 nt, Human adenovirus F
uuaccaaaga

SEQ ID NO: 291930 - RNA, 18 nt, Human adenovirus F
uuaccaccccagcacuug

SEQ ID NO: 291931 - RNA, 22 nt, Human adenovirus F
uuacggaucagcgcuuugccag

SEQ ID NO: 291932 - RNA, 23 nt, Human adenovirus F
uaccaaagagcuugaacauaaca

SEQ ID NO: 291933 - RNA, 21 nt, Human adenovirus F
uaccaaugcuaaacaugagcu

SEQ ID NO: 291934 - RNA, 14 nt, Human adenovirus F
uaccagagccauag

SEQ ID NO: 291935 - RNA, 16 nt, Human adenovirus F
uacccgucuccugcaa

SEQ ID NO: 291936 - RNA, 20 nt, Human adenovirus F
uacccuuacgaacacuacaa

SEQ ID NO: 291937 - RNA, 16 nt, Human adenovirus F
uaccgucaucucuaca

SEQ ID NO: 291938 - RNA, 21 nt, Human adenovirus F
uacgaaagcgugauggaaaca

SEQ ID NO: 291939 - RNA, 13 nt, Human adenovirus F
uacgaacacuaca

SEQ ID NO: 291940 - RNA, 18 nt, Human adenovirus F
uacgaacacuacaauccc

SEQ ID NO: 291941 - RNA, 15 nt, Human adenovirus F
uacuuuaaacaagca

SEQ ID NO: 291942 - RNA, 15 nt, Human adenovirus F
uagaaagcaaagcca

SEQ ID NO: 291943 - RNA, 22 nt, Human adenovirus F
uagaacaggccgcccuaaccuc

SEQ ID NO: 291944 - RNA, 20 nt, Human adenovirus F
uagcaccaacgugcaggcca

SEQ ID NO: 291945 - RNA, 15 nt, Human adenovirus F
uagcuccgcccuucg

SEQ ID NO: 291946 - RNA, 15 nt, Human adenovirus F
uagcuggaucaaaca

SEQ ID NO: 291947 - RNA, 14 nt, Human adenovirus F
uagguaagagccau

SEQ ID NO: 291948 - RNA, 15 nt, Human adenovirus F
uagguaagagccaug

SEQ ID NO: 291949 - RNA, 21 nt, Human adenovirus F
uagguaagagccauguucuga

SEQ ID NO: 291950 - RNA, 19 nt, Human adenovirus F
uagguuggcaauguugcca

SEQ ID NO: 291951 - RNA, 16 nt, Human adenovirus F
uaguacggccgugacu

SEQ ID NO: 291952 - RNA, 16 nt, Human adenovirus F
uaguggaagccgugau

SEQ ID NO: 291953 - RNA, 15 nt, Human adenovirus F
uaguguuaguuuauu

SEQ ID NO: 291954 - RNA, 18 nt, Human adenovirus F
uauaaucuuaaaacugac

SEQ ID NO: 291955 - RNA, 14 nt, Human adenovirus F
uauacauuugaaca

SEQ ID NO: 291956 - RNA, 15 nt, Human adenovirus F
uauacuuuaaacaag

SEQ ID NO: 291957 - RNA, 16 nt, Human adenovirus F
uauacuuuaaacaagc

SEQ ID NO: 291958 - RNA, 20 nt, Human adenovirus F
uauccaccgacgauccaaua

SEQ ID NO: 291959 - RNA, 14 nt, Human adenovirus F
uaucucauucgcac

SEQ ID NO: 291960 - RNA, 17 nt, Human adenovirus F
uaugacaccuccucaac

SEQ ID NO: 291961 - RNA, 21 nt, Human adenovirus F
uaugcagacaagacauggaag

SEQ ID NO: 291962 - RNA, 16 nt, Human adenovirus F
uaugcuauugacacug

SEQ ID NO: 291963 - RNA, 21 nt, Human adenovirus F
uaugguggggguuaagcccau

SEQ ID NO: 291964 - RNA, 17 nt, Human adenovirus F
uauucaagauugcagcu

SEQ ID NO: 291965 - RNA, 17 nt, Human adenovirus F
uauugcaggaguggcca

SEQ ID NO: 291966 - RNA, 23 nt, Human adenovirus F
uauugcaggaguggccaaugugg

SEQ ID NO: 291967 - RNA, 14 nt, Human adenovirus F
uauugccccucagg

SEQ ID NO: 291968 - RNA, 20 nt, Human adenovirus F
uauuguucuguuacauaaga

SEQ ID NO: 291969 - RNA, 14 nt, Human adenovirus F
uauuuucaacuuua

SEQ ID NO: 291970 - RNA, 17 nt, Human adenovirus F
ucaaaaacucugugaag

SEQ ID NO: 291971 - RNA, 12 nt, Human adenovirus F
ucaaacauguga

SEQ ID NO: 291972 - RNA, 13 nt, Human adenovirus F
ucaaacaugugac

SEQ ID NO: 291973 - RNA, 22 nt, Human adenovirus F
ucaaaccacggugguacaaaau

SEQ ID NO: 291974 - RNA, 14 nt, Human adenovirus F
ucaacacagguucu

SEQ ID NO: 291975 - RNA, 18 nt, Human adenovirus F
ucaaguacacugacccca

SEQ ID NO: 291976 - RNA, 18 nt, Human adenovirus F
ucaaucagcggcuggaaa

SEQ ID NO: 291977 - RNA, 18 nt, Human adenovirus F
ucacaaaguccuggccaa

SEQ ID NO: 291978 - RNA, 16 nt, Human adenovirus F
ucacccgcagcugcuu

SEQ ID NO: 291979 - RNA, 19 nt, Human adenovirus F
ucacuaaaaccaacaaaau

SEQ ID NO: 291980 - RNA, 18 nt, Human adenovirus F
ucacuguauuaaaccugg

SEQ ID NO: 291981 - RNA, 12 nt, Human adenovirus F
ucagaugcauuu

SEQ ID NO: 291982 - RNA, 18 nt, Human adenovirus F
ucagcuacaagauuccac

SEQ ID NO: 291983 - RNA, 17 nt, Human adenovirus F
ucaggugcagaaauuuu

SEQ ID NO: 291984 - RNA, 14 nt, Human adenovirus F
ucagguucagagau

SEQ ID NO: 291985 - RNA, 15 nt, Human adenovirus F
ucaugaaaguuccuc

SEQ ID NO: 291986 - RNA, 18 nt, Human adenovirus F
ucaugcaugcagacuuuu

SEQ ID NO: 291987 - RNA, 20 nt, Human adenovirus F
uccaagacccgguacaggug

SEQ ID NO: 291988 - RNA, 14 nt, Human adenovirus F
uccaccaagcuccu

SEQ ID NO: 291989 - RNA, 20 nt, Human adenovirus F
uccacuuaccagagccauag

SEQ ID NO: 291990 - RNA, 19 nt, Human adenovirus F
uccacuuuaccuuauacac

SEQ ID NO: 291991 - RNA, 21 nt, Human adenovirus F
uccaucauccacccacagcaa

SEQ ID NO: 291992 - RNA, 23 nt, Human adenovirus F
ucccacgccuuacauguggagcu

SEQ ID NO: 291993 - RNA, 22 nt, Human adenovirus F
ucccgccuugcugacuuaucuc

SEQ ID NO: 291994 - RNA, 13 nt, Human adenovirus F
uccgacgcuguau

SEQ ID NO: 291995 - RNA, 16 nt, Human adenovirus F
uccgacgcuguaugcu

SEQ ID NO: 291996 - RNA, 18 nt, Human adenovirus F
uccgccggcauguacggc

SEQ ID NO: 291997 - RNA, 12 nt, Human adenovirus F
uccggcauuaac

SEQ ID NO: 291998 - RNA, 22 nt, Human adenovirus F
uccucagccugaaauacacuga

SEQ ID NO: 291999 - RNA, 12 nt, Human adenovirus F
uccucccaacaa

SEQ ID NO: 292000 - RNA, 20 nt, Human adenovirus F
uccuggccaacugccaccuc

SEQ ID NO: 292001 - RNA, 23 nt, Human adenovirus F
uccuggccguacgguuucugggc

SEQ ID NO: 292002 - RNA, 22 nt, Human adenovirus F
uccuugcucggcgaaaacucaa

SEQ ID NO: 292003 - RNA, 19 nt, Human adenovirus F
uccuuuuggcuguacucca

SEQ ID NO: 292004 - RNA, 18 nt, Human adenovirus F
ucgcauccuggcccuaac

SEQ ID NO: 292005 - RNA, 12 nt, Human adenovirus F
ucgccaacagcc

SEQ ID NO: 292006 - RNA, 17 nt, Human adenovirus F
ucgccguaggagaggca

SEQ ID NO: 292007 - RNA, 17 nt, Human adenovirus F
ucggacgagcgccucaa

SEQ ID NO: 292008 - RNA, 15 nt, Human adenovirus F
ucggccuacugccgc

SEQ ID NO: 292009 - RNA, 15 nt, Human adenovirus F
ucgugacuugcacuu

SEQ ID NO: 292010 - RNA, 16 nt, Human adenovirus F
ucgugacuugcacuuu

SEQ ID NO: 292011 - RNA, 23 nt, Human adenovirus F
ucguuuaaaacuuuauggauguu

SEQ ID NO: 292012 - RNA, 11 nt, Human adenovirus F
ucuaccacuuc

SEQ ID NO: 292013 - RNA, 15 nt, Human adenovirus F
ucuaccacuucuauu

SEQ ID NO: 292014 - RNA, 13 nt, Human adenovirus F
ucuaccccuauga

SEQ ID NO: 292015 - RNA, 19 nt, Human adenovirus F
ucuacgccuccaccaccuu

SEQ ID NO: 292016 - RNA, 21 nt, Human adenovirus F
ucuacuauuaccgucaucucu

SEQ ID NO: 292017 - RNA, 19 nt, Human adenovirus F
ucugaagaugucugaccaa

SEQ ID NO: 292018 - RNA, 17 nt, Human adenovirus F
ucugagucuaccacuuc

SEQ ID NO: 292019 - RNA, 17 nt, Human adenovirus F
ucugauggaguugugga

SEQ ID NO: 292020 - RNA, 15 nt, Human adenovirus F
ucugcagcauugcca

SEQ ID NO: 292021 - RNA, 17 nt, Human adenovirus F
ucugcagcauugccacu

SEQ ID NO: 292022 - RNA, 13 nt, Human adenovirus F
ucugcaugcauga

SEQ ID NO: 292023 - RNA, 13 nt, Human adenovirus F
ucugccagaacuu

SEQ ID NO: 292024 - RNA, 14 nt, Human adenovirus F
ucugcucugccuau

SEQ ID NO: 292025 - RNA, 16 nt, Human adenovirus F
ucuggaaucagcaucu

SEQ ID NO: 292026 - RNA, 21 nt, Human adenovirus F
ucugguagaaagcaaagccau

SEQ ID NO: 292027 - RNA, 22 nt, Human adenovirus F
ucugguagaaagcaaagccauc

SEQ ID NO: 292028 - RNA, 15 nt, Human adenovirus F
ucugugacaaaauca

SEQ ID NO: 292029 - RNA, 20 nt, Human adenovirus F
ucuguuugcugcacugccau

SEQ ID NO: 292030 - RNA, 16 nt, Human adenovirus F
ucuuauccuccuucac

SEQ ID NO: 292031 - RNA, 20 nt, Human adenovirus F
ucuuauccuccuucacaaag

SEQ ID NO: 292032 - RNA, 11 nt, Human adenovirus F
ucuuccaccuc

SEQ ID NO: 292033 - RNA, 22 nt, Human adenovirus F
ucuuccaccucccucugaggau

SEQ ID NO: 292034 - RNA, 23 nt, Human adenovirus F
ucuuggccugccgcccagguuua

SEQ ID NO: 292035 - RNA, 21 nt, Human adenovirus F
ucuuuucugcucugccuaugc

SEQ ID NO: 292036 - RNA, 21 nt, Human adenovirus F
ugaaaagauauggccauguua

SEQ ID NO: 292037 - RNA, 19 nt, Human adenovirus F
ugaaagagcgcgacaacga

SEQ ID NO: 292038 - RNA, 22 nt, Human adenovirus F
ugaacuaccagaacgaccauag

SEQ ID NO: 292039 - RNA, 14 nt, Human adenovirus F
ugaagaugacuuca

SEQ ID NO: 292040 - RNA, 17 nt, Human adenovirus F
ugaagaugucugaccaa

SEQ ID NO: 292041 - RNA, 12 nt, Human adenovirus F
ugaaguuaccaa

SEQ ID NO: 292042 - RNA, 14 nt, Human adenovirus F
ugaaguuaccaaag

SEQ ID NO: 292043 - RNA, 15 nt, Human adenovirus F
ugaaguuaccaaaga

SEQ ID NO: 292044 - RNA, 16 nt, Human adenovirus F
ugaaucaauaaaagcu

SEQ ID NO: 292045 - RNA, 19 nt, Human adenovirus F
ugaaucccgcuauguuggc

SEQ ID NO: 292046 - RNA, 17 nt, Human adenovirus F
ugacacgucaccgccaa

SEQ ID NO: 292047 - RNA, 21 nt, Human adenovirus F
ugacaguagagggugcucuua

SEQ ID NO: 292048 - RNA, 12 nt, Human adenovirus F
ugacuuaucuca

SEQ ID NO: 292049 - RNA, 21 nt, Human adenovirus F
cuuccuuuuggcuguacucca

SEQ ID NO: 292050 - RNA, 16 nt, Human adenovirus F
cuucuauugcacuuaa

SEQ ID NO: 292051 - RNA, 20 nt, Human adenovirus F
cuucuccugcuugucugucu

SEQ ID NO: 292052 - RNA, 16 nt, Human adenovirus F
cuucugugccugucau

SEQ ID NO: 292053 - RNA, 23 nt, Human adenovirus F
cuucuucagcucuaagacuguca

SEQ ID NO: 292054 - RNA, 23 nt, Human adenovirus F
cuugaacaguuuggguggacuua

SEQ ID NO: 292055 - RNA, 21 nt, Human adenovirus F
cuugaacauaacaccuauguu

SEQ ID NO: 292056 - RNA, 21 nt, Human adenovirus F
cuugacauuccauuuauuaca

SEQ ID NO: 292057 - RNA, 21 nt, Human adenovirus F
cuugauacggauugucuuccc

SEQ ID NO: 292058 - RNA, 13 nt, Human adenovirus F
cuugcaagcagcu

SEQ ID NO: 292059 - RNA, 21 nt, Human adenovirus F
cuugguaucgagaaauuguaa

SEQ ID NO: 292060 - RNA, 19 nt, Human adenovirus F
cuugguuaaagaaaaccag

SEQ ID NO: 292061 - RNA, 21 nt, Human adenovirus F
cuugguuggaguuggcuuuaa

SEQ ID NO: 292062 - RNA, 16 nt, Human adenovirus F
cuuguaucacagaagu

SEQ ID NO: 292063 - RNA, 15 nt, Human adenovirus F
cuugucugucugcca

SEQ ID NO: 292064 - RNA, 15 nt, Human adenovirus F
cuuuaugacuauggu

SEQ ID NO: 292065 - RNA, 23 nt, Human adenovirus F
cuuuauuuuucugagucuaccac

SEQ ID NO: 292066 - RNA, 21 nt, Human adenovirus F
cuuucaaaccacggugguaca

SEQ ID NO: 292067 - RNA, 12 nt, Human adenovirus F
cuuucaacaaaa

SEQ ID NO: 292068 - RNA, 22 nt, Human adenovirus F
cuuuggguccuccauuaaguca

SEQ ID NO: 292069 - RNA, 14 nt, Human adenovirus F
cuuuguaacaacug

SEQ ID NO: 292070 - RNA, 13 nt, Human adenovirus F
cuuuucugcugca

SEQ ID NO: 292071 - RNA, 13 nt, Human adenovirus F
gcccauaccaaag

SEQ ID NO: 292072 - RNA, 18 nt, Human adenovirus F
gcccauaucugacaaccc

SEQ ID NO: 292073 - RNA, 22 nt, Human adenovirus F
gcccauuaagguuacucagcaa

SEQ ID NO: 292074 - RNA, 22 nt, Human adenovirus F
gccccuaucacuaaaaccaaca

SEQ ID NO: 292075 - RNA, 13 nt, Human adenovirus F
gcccugcaaagcc

SEQ ID NO: 292076 - RNA, 15 nt, Human adenovirus F
gcccugcaaagccaa

SEQ ID NO: 292077 - RNA, 19 nt, Human adenovirus F
gcccugcaaagccaaccuu

SEQ ID NO: 292078 - RNA, 20 nt, Human adenovirus F
gcccuuccucccaacuuucg

SEQ ID NO: 292079 - RNA, 21 nt, Human adenovirus F
gccgcaauggucuuacaugca

SEQ ID NO: 292080 - RNA, 14 nt, Human adenovirus F
gccuaaaaccacua

SEQ ID NO: 292081 - RNA, 14 nt, Human adenovirus F
gccuccagcacugc

SEQ ID NO: 292082 - RNA, 17 nt, Human adenovirus F
gccuccagcacugccgg

SEQ ID NO: 292083 - RNA, 17 nt, Human adenovirus F
gccugaaauacacugau

SEQ ID NO: 292084 - RNA, 20 nt, Human adenovirus F
gccuggaacaguaacacagg

SEQ ID NO: 292085 - RNA, 15 nt, Human adenovirus F
gccuggaacccaaag

SEQ ID NO: 292086 - RNA, 17 nt, Human adenovirus F
gccuggcagcuggagcu

SEQ ID NO: 292087 - RNA, 14 nt, Human adenovirus F
gccugugauuucau

SEQ ID NO: 292088 - RNA, 20 nt, Human adenovirus F
gccugugauuucauuuacca

SEQ ID NO: 292089 - RNA, 17 nt, Human adenovirus F
gccuuacauguggagcu

SEQ ID NO: 292090 - RNA, 18 nt, Human adenovirus F
gccuuaguugguaccaau

SEQ ID NO: 292091 - RNA, 15 nt, Human adenovirus F
gccuuuucugcugca

SEQ ID NO: 292092 - RNA, 14 nt, Human adenovirus F
gcgcaaucuucgca

SEQ ID NO: 292093 - RNA, 16 nt, Human adenovirus F
gcggucaacagcugga

SEQ ID NO: 292094 - RNA, 21 nt, Human adenovirus F
gcggugagcgucucuugcaag

SEQ ID NO: 292095 - RNA, 15 nt, Human adenovirus F
gcuaaaggaccaaaa

SEQ ID NO: 292096 - RNA, 17 nt, Human adenovirus F
gcuaaaggaccaaaacu

SEQ ID NO: 292097 - RNA, 22 nt, Human adenovirus F
gcuaaaggaccaaaacuuucaa

SEQ ID NO: 292098 - RNA, 23 nt, Human adenovirus F
gcuacccuucugugccugucaug

SEQ ID NO: 292099 - RNA, 11 nt, Human adenovirus F
gcuauguuugu

SEQ ID NO: 292100 - RNA, 15 nt, Human adenovirus F
gcucacccgcagcug

SEQ ID NO: 292101 - RNA, 14 nt, Human adenovirus F
gcuccaucaagccc

SEQ ID NO: 292102 - RNA, 14 nt, Human adenovirus F
gcuccugguuguga

SEQ ID NO: 292103 - RNA, 13 nt, Human adenovirus F
gcucgcuuuacaa

SEQ ID NO: 292104 - RNA, 13 nt, Human adenovirus F
gcucuauuugcug

SEQ ID NO: 292105 - RNA, 21 nt, Human adenovirus F
gcucugguagaaagcaaagcc

SEQ ID NO: 292106 - RNA, 16 nt, Human adenovirus F
gcugacuuaucucauc

SEQ ID NO: 292107 - RNA, 14 nt, Human adenovirus F
gcugaggagcuguu

SEQ ID NO: 292108 - RNA, 20 nt, Human adenovirus F
gcugauuuggaagaugaguu

SEQ ID NO: 292109 - RNA, 19 nt, Human adenovirus F
gcuggacuauacacuguca

SEQ ID NO: 292110 - RNA, 17 nt, Human adenovirus F
gcuggcuuccggcauua

SEQ ID NO: 292111 - RNA, 23 nt, Human adenovirus F
gcuggggaauggagcuguggugc

SEQ ID NO: 292112 - RNA, 20 nt, Human adenovirus F
gcugugccacuauuaauguu

SEQ ID NO: 292113 - RNA, 18 nt, Human adenovirus F
gcuguuugaacguuuaug

SEQ ID NO: 292114 - RNA, 12 nt, Human adenovirus F
gcuuaacacuga

SEQ ID NO: 292115 - RNA, 14 nt, Human adenovirus F
gcuuauuaacccuc

SEQ ID NO: 292116 - RNA, 16 nt, Human adenovirus F
gcuugcaagauggcca

SEQ ID NO: 292117 - RNA, 19 nt, Human adenovirus F
gcuuuacuuaaaaagccug

SEQ ID NO: 292118 - RNA, 23 nt, Human adenovirus F
gcuuuacuuaaaaagccugugau

SEQ ID NO: 292119 - RNA, 20 nt, Human adenovirus F
gcuuucaguuggagcagccu

SEQ ID NO: 292120 - RNA, 21 nt, Human adenovirus F
gcuuucaguuggagcagccug

SEQ ID NO: 292121 - RNA, 13 nt, Human adenovirus F
gcuuugaagcaug

SEQ ID NO: 292122 - RNA, 17 nt, Human adenovirus F
gcuuugccagcaaagaa

SEQ ID NO: 292123 - RNA, 16 nt, Human adenovirus F
ggaaacaacagccuuu

SEQ ID NO: 292124 - RNA, 21 nt, Human adenovirus F
ggaaaccgccuacucuuacaa

SEQ ID NO: 292125 - RNA, 19 nt, Human adenovirus F
ggaaaggcccauaccaaag

SEQ ID NO: 292126 - RNA, 20 nt, Human adenovirus F
ggaaaggcccauaccaaaga

SEQ ID NO: 292127 - RNA, 17 nt, Human adenovirus F
ggaaaucagaugcauuu

SEQ ID NO: 292128 - RNA, 19 nt, Human adenovirus F
ggaacuguucaaccuucaa

SEQ ID NO: 292129 - RNA, 17 nt, Human adenovirus F
ggaagacaauccuaaca

SEQ ID NO: 292130 - RNA, 20 nt, Human adenovirus F
ggaagacaauccuaacaaaa

SEQ ID NO: 292131 - RNA, 21 nt, Human adenovirus F
ggacaguucccaaauccgcac

SEQ ID NO: 292132 - RNA, 20 nt, Human adenovirus F
ggacucccuggacaguuccc

SEQ ID NO: 292133 - RNA, 21 nt, Human adenovirus F
ggacugauauauaaugccuua

SEQ ID NO: 292134 - RNA, 13 nt, Human adenovirus F
ggaguggcauuaa

SEQ ID NO: 292135 - RNA, 18 nt, Human adenovirus F
ggaucagcgcuuugccag

SEQ ID NO: 292136 - RNA, 15 nt, Human adenovirus F
ggaucgccaacagcc

SEQ ID NO: 292137 - RNA, 13 nt, Human adenovirus F
ggcaagacacuga

SEQ ID NO: 292138 - RNA, 19 nt, Human adenovirus F
ggcagcagccccaggccaa

SEQ ID NO: 292139 - RNA, 20 nt, Human adenovirus F
ggcagcagccccaggccaac

SEQ ID NO: 292140 - RNA, 21 nt, Human adenovirus F
ggccaaccgcuuuucggccau

SEQ ID NO: 292141 - RNA, 13 nt, Human adenovirus F
ggccaacugccac

SEQ ID NO: 292142 - RNA, 16 nt, Human adenovirus F
ggcccuagaccaccug

SEQ ID NO: 292143 - RNA, 13 nt, Human adenovirus F
ggccuugcaaaac

SEQ ID NO: 292144 - RNA, 12 nt, Human adenovirus F
ggcggcggccau

SEQ ID NO: 292145 - RNA, 17 nt, Human adenovirus F
ggcguagguaaggguug

SEQ ID NO: 292146 - RNA, 13 nt, Human adenovirus F
ggcuguacuccau

SEQ ID NO: 292147 - RNA, 22 nt, Human adenovirus F
ggcuugggaggauuuugaguua

SEQ ID NO: 292148 - RNA, 20 nt, Human adenovirus F
gggauacuggauacuggcaa

SEQ ID NO: 292149 - RNA, 11 nt, Human adenovirus F
gggcaaagggg

SEQ ID NO: 292150 - RNA, 13 nt, Human adenovirus F
gggcagugcacug

SEQ ID NO: 292151 - RNA, 16 nt, Human adenovirus F
gggccuggcagcugga

SEQ ID NO: 292152 - RNA, 15 nt, Human adenovirus F
gggcgucaugcucug

SEQ ID NO: 292153 - RNA, 21 nt, Human adenovirus F
ggguggacuuaauuaggguga

SEQ ID NO: 292154 - RNA, 16 nt, Human adenovirus F
gguaagaagguccaug

SEQ ID NO: 292155 - RNA, 16 nt, Human adenovirus F
gguaagagccauguuc

SEQ ID NO: 292156 - RNA, 19 nt, Human adenovirus F
gguaggcccuagaccaccu

SEQ ID NO: 292157 - RNA, 11 nt, Human adenovirus F
ggucaaaaacu

SEQ ID NO: 292158 - RNA, 21 nt, Human adenovirus F
ggucaacaccacggacagggc

SEQ ID NO: 292159 - RNA, 12 nt, Human adenovirus F
ggucaccuugca

SEQ ID NO: 292160 - RNA, 12 nt, Human adenovirus F
ggucuaagggaa

SEQ ID NO: 292161 - RNA, 16 nt, Human adenovirus F
ggucuuacaugcacau

SEQ ID NO: 292162 - RNA, 20 nt, Human adenovirus F
ggugaaaggcaagacacuga

SEQ ID NO: 292163 - RNA, 21 nt, Human adenovirus F
ggugaaaggcaagacacugag

SEQ ID NO: 292164 - RNA, 14 nt, Human adenovirus F
gguugcgcuccaug

SEQ ID NO: 292165 - RNA, 16 nt, Human adenovirus F
gguuuaaaaugaugau

SEQ ID NO: 292166 - RNA, 18 nt, Human adenovirus F
gguuuaaauuacacuaag

SEQ ID NO: 292167 - RNA, 13 nt, Human adenovirus F
gguuuaccuggug

SEQ ID NO: 292168 - RNA, 16 nt, Human adenovirus F
gguuucaaacauguga

SEQ ID NO: 292169 - RNA, 17 nt, Human adenovirus F
gguuuuugagcaugaaa

SEQ ID NO: 292170 - RNA, 16 nt, Human adenovirus F
guaaaaaaaagggaag

SEQ ID NO: 292171 - RNA, 15 nt, Human adenovirus F
guaaaaguaucaaua

SEQ ID NO: 292172 - RNA, 19 nt, Human adenovirus F
guaaaccagcacacaggga

SEQ ID NO: 292173 - RNA, 15 nt, Human adenovirus F
guaacuccucuucuc

SEQ ID NO: 292174 - RNA, 21 nt, Human adenovirus F
guaacuuucaaaccacggugg

SEQ ID NO: 292175 - RNA, 17 nt, Human adenovirus F
guacaaaauaaugacuu

SEQ ID NO: 292176 - RNA, 15 nt, Human adenovirus F
guacaaccgcuccug

SEQ ID NO: 292177 - RNA, 22 nt, Human adenovirus F
guacaaccgcuccugguuguga

SEQ ID NO: 292178 - RNA, 20 nt, Human adenovirus F
guacaaccugggggcuuuga

SEQ ID NO: 292179 - RNA, 23 nt, Human adenovirus F
guaccaauccugaaugcauguac

SEQ ID NO: 292180 - RNA, 22 nt, Human adenovirus F
guacuagcagugggcaaagggg

SEQ ID NO: 292181 - RNA, 17 nt, Human adenovirus F
guagaaagcaaagccau

SEQ ID NO: 292182 - RNA, 13 nt, Human adenovirus F
guagcuccgcccu

SEQ ID NO: 292183 - RNA, 15 nt, Human adenovirus F
guagguaagagccau

SEQ ID NO: 292184 - RNA, 21 nt, Human adenovirus F
guaucacagaagugaagacca

SEQ ID NO: 292185 - RNA, 22 nt, Human adenovirus F
guaucacagaagugaagaccaa

SEQ ID NO: 292186 - RNA, 21 nt, Human adenovirus F
gucagcugaacccacccucuu

SEQ ID NO: 292187 - RNA, 15 nt, Human adenovirus F
gucaugaaaguuccu

SEQ ID NO: 292188 - RNA, 17 nt, Human adenovirus F
guccaaaugacuaacuc

SEQ ID NO: 292189 - RNA, 18 nt, Human adenovirus F
gucgauaaccccaugugg

SEQ ID NO: 292190 - RNA, 16 nt, Human adenovirus F
gucgcuguaaaaauac

SEQ ID NO: 292191 - RNA, 17 nt, Human adenovirus F
gucucucccuccaccuc

SEQ ID NO: 292192 - RNA, 15 nt, Human adenovirus F
gucucuuaaggacua

SEQ ID NO: 292193 - RNA, 15 nt, Human adenovirus F
gucucuucaauguaa

SEQ ID NO: 292194 - RNA, 17 nt, Human adenovirus F
gucugguuaaacaagcu

SEQ ID NO: 292195 - RNA, 20 nt, Human adenovirus F
gucuuagcuggaucaaacag

SEQ ID NO: 292196 - RNA, 13 nt, Human adenovirus F
gucuuauccuccu

SEQ ID NO: 292197 - RNA, 21 nt, Human adenovirus F
gucuucccgccuugcugacuu

SEQ ID NO: 292198 - RNA, 19 nt, Human adenovirus F
gugaaaggcaagacacuga

SEQ ID NO: 292199 - RNA, 17 nt, Human adenovirus F
gugaagaccaacugcag

SEQ ID NO: 292200 - RNA, 17 nt, Human adenovirus F
gugaaguuaccaaagac

SEQ ID NO: 292201 - RNA, 18 nt, Human adenovirus F
gugacugcgcggcuguaa

SEQ ID NO: 292202 - RNA, 20 nt, Human adenovirus F
gugccacuauuaauguugau

SEQ ID NO: 292203 - RNA, 18 nt, Human adenovirus F
gugcccgcugaucugaac

SEQ ID NO: 292204 - RNA, 15 nt, Human adenovirus F
gugcgcgagcuuuua

SEQ ID NO: 292205 - RNA, 21 nt, Human adenovirus F
gugcgguuucaaacaugugac

SEQ ID NO: 292206 - RNA, 23 nt, Human adenovirus F
guggacuuaauuagggugauaca

SEQ ID NO: 292207 - RNA, 19 nt, Human adenovirus F
guggcauuaaaaacuuugg

SEQ ID NO: 292208 - RNA, 22 nt, Human adenovirus F
gugguggauauagccaaccagg

SEQ ID NO: 292209 - RNA, 14 nt, Human adenovirus F
gugucucuuaagga

SEQ ID NO: 292210 - RNA, 18 nt, Human adenovirus F
gugugcuaaguuuaacaa

SEQ ID NO: 292211 - RNA, 21 nt, Human adenovirus F
guguuugcugugccacuauua

SEQ ID NO: 292212 - RNA, 12 nt, Human adenovirus F
guuaaacaagcu

SEQ ID NO: 292213 - RNA, 20 nt, Human adenovirus F
guuaauauacguaaaugugc

SEQ ID NO: 292214 - RNA, 11 nt, Human adenovirus F
guuaccugggg

SEQ ID NO: 292215 - RNA, 16 nt, Human adenovirus F
guuagcucugaacacu

SEQ ID NO: 292216 - RNA, 15 nt, Human adenovirus F
guuauacaaguauac

SEQ ID NO: 292217 - RNA, 13 nt, Human adenovirus F
guuaucagaaccu

SEQ ID NO: 292218 - RNA, 17 nt, Human adenovirus F
guucaguggcgcgcuaa

SEQ ID NO: 292219 - RNA, 18 nt, Human adenovirus F
guuccaccaagcuccuca

SEQ ID NO: 292220 - RNA, 21 nt, Human adenovirus F
guuggucgccaucgugcgcga

SEQ ID NO: 292221 - RNA, 18 nt, Human adenovirus F
guuguuugcggugguaca

SEQ ID NO: 292222 - RNA, 16 nt, Human adenovirus F
guuuaaaaugaugauu

SEQ ID NO: 292223 - RNA, 15 nt, Human adenovirus F
guuuacaaaagcaug

SEQ ID NO: 292224 - RNA, 23 nt, Human adenovirus F
guuucuugaagugcgugugccag

SEQ ID NO: 292225 - RNA, 17 nt, Human adenovirus F
guuugcugcacugccau

SEQ ID NO: 292226 - RNA, 19 nt, Human adenovirus F
guuugcugugccacuauua

SEQ ID NO: 292227 - RNA, 22 nt, Human adenovirus F
guuuugaacgcuggacuauaca

SEQ ID NO: 292228 - RNA, 15 nt, Human adenovirus F
uaaaaagccugugau

SEQ ID NO: 292229 - RNA, 17 nt, Human adenovirus F
uaaaaccacuaaagcau

SEQ ID NO: 292230 - RNA, 20 nt, Human adenovirus F
uaaaaccacuaaagcauuuc

SEQ ID NO: 292231 - RNA, 16 nt, Human adenovirus F
uaaacacccgcgcuuu

SEQ ID NO: 292232 - RNA, 15 nt, Human adenovirus F
uaaacaugagcuuac

SEQ ID NO: 292233 - RNA, 19 nt, Human adenovirus F
uaaacauugauaaaaaugg

SEQ ID NO: 292234 - RNA, 14 nt, Human adenovirus F
uaaaccagcacaca

SEQ ID NO: 292235 - RNA, 12 nt, Human adenovirus F
uaaaggaguuaa

SEQ ID NO: 292236 - RNA, 20 nt, Human adenovirus F
uaaaugggaaaagcaugugu

SEQ ID NO: 292237 - RNA, 16 nt, Human adenovirus F
uaaauuacacuaagcc

SEQ ID NO: 292238 - RNA, 21 nt, Human adenovirus F
uaaauucuggaaucagcaucu

SEQ ID NO: 292239 - RNA, 21 nt, Human adenovirus F
uaacccaacagggacacgagc

SEQ ID NO: 292240 - RNA, 21 nt, Human adenovirus F
uaaccuucgcugcuuuacuua

SEQ ID NO: 292241 - RNA, 14 nt, Human adenovirus F
uaagaaaaugagca

SEQ ID NO: 292242 - RNA, 22 nt, Human adenovirus F
uaagaccucauccgccauugcc

SEQ ID NO: 292243 - RNA, 13 nt, Human adenovirus F
uaagggaacuucu

SEQ ID NO: 292244 - RNA, 14 nt, Human adenovirus F
uaagggaacuucuc

SEQ ID NO: 292245 - RNA, 22 nt, Human adenovirus F
uaaggguugucgaguuggcagg

SEQ ID NO: 292246 - RNA, 15 nt, Human adenovirus F
uaauaaagcuuaccu

SEQ ID NO: 292247 - RNA, 19 nt, Human adenovirus F
uaauaaagcuuaccuuaaa

SEQ ID NO: 292248 - RNA, 22 nt, Human adenovirus F
uaaugaguagccuucuauugca

SEQ ID NO: 292249 - RNA, 16 nt, Human adenovirus F
uacaaaagcauguaaa

SEQ ID NO: 292250 - RNA, 12 nt, Human adenovirus F
uacaaccaaaaa

SEQ ID NO: 292251 - RNA, 19 nt, Human adenovirus F
uacaaccguugguuccuua

SEQ ID NO: 292252 - RNA, 20 nt, Human adenovirus F
uacaaguugcaaagcuccca

SEQ ID NO: 292253 - RNA, 19 nt, Human adenovirus F
uacacugauccacuuacaa

SEQ ID NO: 292254 - RNA, 22 nt, Human adenovirus F
uacacugauccacuuacaacca

SEQ ID NO: 292255 - RNA, 16 nt, Human adenovirus F
uacacugucacuguau

SEQ ID NO: 292256 - RNA, 23 nt, Human adenovirus F
uacagucaagcucuccacggguu

SEQ ID NO: 292257 - RNA, 13 nt, Human adenovirus F
uacaguccaaaau

SEQ ID NO: 292258 - RNA, 18 nt, Human adenovirus F
uacaguccaaaaucugcu

SEQ ID NO: 292259 - RNA, 16 nt, Human adenovirus F
uacauuugaacagcug

SEQ ID NO: 292260 - RNA, 13 nt, Human adenovirus F
uaccaaagacaaa

SEQ ID NO: 292261 - RNA, 22 nt, Human adenovirus F
uaccaauccugaaugcauguac

SEQ ID NO: 292262 - RNA, 20 nt, Human adenovirus F
uaccaccgcaaacaacugca

SEQ ID NO: 292263 - RNA, 20 nt, Human adenovirus F
uaccacuucuauugcacuua

SEQ ID NO: 292264 - RNA, 20 nt, Human adenovirus F
uaccccgcgacgucagcuga

SEQ ID NO: 292265 - RNA, 21 nt, Human adenovirus F
uaccccgcgacgucagcugaa

SEQ ID NO: 292266 - RNA, 17 nt, Human adenovirus F
uaccccuaugacaccuc

SEQ ID NO: 292267 - RNA, 18 nt, Human adenovirus F
uacccugacccacaaucu

SEQ ID NO: 292268 - RNA, 19 nt, Human adenovirus F
uacccuuacgaacacuaca

SEQ ID NO: 292269 - RNA, 16 nt, Human adenovirus F
uaccggcuggggacuu

SEQ ID NO: 292270 - RNA, 22 nt, Human adenovirus F
uaccuauacguuagaguggcau

SEQ ID NO: 292271 - RNA, 19 nt, Human adenovirus F
uaccugguggacaacaagu

SEQ ID NO: 292272 - RNA, 16 nt, Human adenovirus F
uaccuuuuagagcuag

SEQ ID NO: 292273 - RNA, 15 nt, Human adenovirus F
uacgaacacuacaau

SEQ ID NO: 292274 - RNA, 20 nt, Human adenovirus F
uacggaucagcgcuuugcca

SEQ ID NO: 292275 - RNA, 17 nt, Human adenovirus F
uacuagcagugggcaaa

SEQ ID NO: 292276 - RNA, 21 nt, Human adenovirus F
uacugcaaacgagaggaccac

SEQ ID NO: 292277 - RNA, 18 nt, Human adenovirus F
uacugccgccaugacugc

SEQ ID NO: 292278 - RNA, 17 nt, Human adenovirus F
uacugcuacuacuuuaa

SEQ ID NO: 292279 - RNA, 16 nt, Human adenovirus F
uacuggcaagagccac

SEQ ID NO: 292280 - RNA, 15 nt, Human adenovirus F
uacuucuucagcucu

SEQ ID NO: 292281 - RNA, 16 nt, Human adenovirus F
uacuuuaaacaagcaa

SEQ ID NO: 292282 - RNA, 21 nt, Human adenovirus F
uacuuucaucuuaacucugaa

SEQ ID NO: 292283 - RNA, 16 nt, Human adenovirus F
uagaaagcaaagccau

SEQ ID NO: 292284 - RNA, 12 nt, Human adenovirus F
uagaguaaaaaa

SEQ ID NO: 292285 - RNA, 20 nt, Human adenovirus F
uagaguaaaaaaaagggaag

SEQ ID NO: 292286 - RNA, 22 nt, Human adenovirus F
uagaguggcauacuaucgucau

SEQ ID NO: 292287 - RNA, 17 nt, Human adenovirus F
uagagugugaacauuug

SEQ ID NO: 292288 - RNA, 22 nt, Human adenovirus F
uagcacucaaguacacugaccc

SEQ ID NO: 292289 - RNA, 19 nt, Human adenovirus F
uagcagugggcaaaggggg

SEQ ID NO: 292290 - RNA, 16 nt, Human adenovirus F
uagcgccccuaucacu

SEQ ID NO: 292291 - RNA, 14 nt, Human adenovirus F
uaggaccacuggag

SEQ ID NO: 292292 - RNA, 13 nt, Human adenovirus F
uagguaagagcca

SEQ ID NO: 292293 - RNA, 16 nt, Human adenovirus F
uaguaauaaaguuauu

SEQ ID NO: 292294 - RNA, 18 nt, Human adenovirus F
uaguacggccgugacugc

SEQ ID NO: 292295 - RNA, 22 nt, Human adenovirus F
uaguaucccuucguugucaaac

SEQ ID NO: 292296 - RNA, 17 nt, Human adenovirus F
uaguuuauucugaugga

SEQ ID NO: 292297 - RNA, 23 nt, Human adenovirus F
uauaauggaaaggcccauaccaa

SEQ ID NO: 292298 - RNA, 18 nt, Human adenovirus F
uauacacugucacuguau

SEQ ID NO: 292299 - RNA, 16 nt, Human adenovirus F
uauacguaaaugugcc

SEQ ID NO: 292300 - RNA, 17 nt, Human adenovirus F
uaucaauaaaguugaaa

SEQ ID NO: 292301 - RNA, 18 nt, Human adenovirus F
uaucacuaaaaccaacaa

SEQ ID NO: 292302 - RNA, 21 nt, Human adenovirus F
uauccaccgacgauccaauag

SEQ ID NO: 292303 - RNA, 14 nt, Human adenovirus F
uaucucaucuucac

SEQ ID NO: 292304 - RNA, 15 nt, Human adenovirus F
uaucucaucuucacc

SEQ ID NO: 292305 - RNA, 12 nt, Human adenovirus F
uaugaaaacucc

SEQ ID NO: 292306 - RNA, 14 nt, Human adenovirus F
uaugcuauuuucca

SEQ ID NO: 292307 - RNA, 13 nt, Human adenovirus F
uauggccauguua

SEQ ID NO: 292308 - RNA, 16 nt, Human adenovirus F
uaugggcaccuggaac

SEQ ID NO: 292309 - RNA, 14 nt, Human adenovirus F
uaugguucacugua

SEQ ID NO: 292310 - RNA, 15 nt, Human adenovirus F
uaugguucacuguau

SEQ ID NO: 292311 - RNA, 21 nt, Human adenovirus F
uaugugcuggggaauggagcu

SEQ ID NO: 292312 - RNA, 13 nt, Human adenovirus F
uauuaaaccuggg

SEQ ID NO: 292313 - RNA, 12 nt, Human adenovirus F
uauugcacuuaa

SEQ ID NO: 292314 - RNA, 23 nt, Human adenovirus F
ucaaaaaauucaugcaugcagac

SEQ ID NO: 292315 - RNA, 18 nt, Human adenovirus F
ucaacagcuggaacucaa

SEQ ID NO: 292316 - RNA, 18 nt, Human adenovirus F
ucaaccccgucuaccccu

SEQ ID NO: 292317 - RNA, 17 nt, Human adenovirus F
ucaacuacagccuguca

SEQ ID NO: 292318 - RNA, 14 nt, Human adenovirus F
ucaaggaaacaaca

SEQ ID NO: 292319 - RNA, 21 nt, Human adenovirus F
ucaaggaaacaacagccuuug

SEQ ID NO: 292320 - RNA, 21 nt, Human adenovirus F
ucaaguacacugaccccauua

SEQ ID NO: 292321 - RNA, 17 nt, Human adenovirus F
ucacccgcagcugcuug

SEQ ID NO: 292322 - RNA, 22 nt, Human adenovirus F
ucaccucuguuugcugcacugc

SEQ ID NO: 292323 - RNA, 18 nt, Human adenovirus F
ucaccuuuuuacccugac

SEQ ID NO: 292324 - RNA, 22 nt, Human adenovirus F
ucaccuuuuuacccugacccac

SEQ ID NO: 292325 - RNA, 16 nt, Human adenovirus F
ucacuaaaaccaacaa

SEQ ID NO: 292326 - RNA, 17 nt, Human adenovirus F
ucacuaaaaccaacaaa

SEQ ID NO: 292327 - RNA, 10 nt, Human adenovirus F
ucacuguaua

SEQ ID NO: 292328 - RNA, 22 nt, Human adenovirus F
ucagaaccuuuuucauugggau

SEQ ID NO: 292329 - RNA, 11 nt, Human adenovirus F
ucagaugcauu

SEQ ID NO: 292330 - RNA, 18 nt, Human adenovirus F
ucagauugacgaacuuac

SEQ ID NO: 292331 - RNA, 23 nt, Human adenovirus F
ucagcuacaagauuccaccaaag

SEQ ID NO: 292332 - RNA, 13 nt, Human adenovirus F
ucaggaacuguuc

SEQ ID NO: 292333 - RNA, 14 nt, Human adenovirus F
ucaggauuacucca

SEQ ID NO: 292334 - RNA, 21 nt, Human adenovirus F
ucaggcagcagccccaggcca

SEQ ID NO: 292335 - RNA, 21 nt, Human adenovirus F
ucaguggcgcgcuaacagaca

SEQ ID NO: 292336 - RNA, 21 nt, Human adenovirus F
ucaguuggagcagccugugga

SEQ ID NO: 292337 - RNA, 15 nt, Human adenovirus F
ucauccgccauugcc

SEQ ID NO: 292338 - RNA, 17 nt, Human adenovirus F
ucauccgccauugccac

SEQ ID NO: 292339 - RNA, 21 nt, Human adenovirus F
ucaugcugcuguuuuuacuuu

SEQ ID NO: 292340 - RNA, 22 nt, Human adenovirus F
ucauuuuuucaagaaauuguga

SEQ ID NO: 292341 - RNA, 22 nt, Human adenovirus F
ucauuuuuuuuuauuggucaaa

SEQ ID NO: 292342 - RNA, 15 nt, Human adenovirus F
uccaacagcacggug

SEQ ID NO: 292343 - RNA, 17 nt, Human adenovirus F
uccaccaagcuccucau

SEQ ID NO: 292344 - RNA, 11 nt, Human adenovirus F
uccacccaaac

SEQ ID NO: 292345 - RNA, 23 nt, Human adenovirus F
uccaccggcccaccgaguuccug

SEQ ID NO: 292346 - RNA, 23 nt, Human adenovirus F
uccacgggcugaggagcuguuaa

SEQ ID NO: 292347 - RNA, 17 nt, Human adenovirus F
uccacuuacaaccaaaa

SEQ ID NO: 292348 - RNA, 15 nt, Human adenovirus F
uccacuuaccagagc

SEQ ID NO: 292349 - RNA, 16 nt, Human adenovirus F
uccagcagcaccaccu

SEQ ID NO: 292350 - RNA, 20 nt, Human adenovirus F
uccagucgcaugaauuggcu

SEQ ID NO: 292351 - RNA, 18 nt, Human adenovirus F
uccaucgccggaucgcca

SEQ ID NO: 292352 - RNA, 20 nt, Human adenovirus F
uccauuauuuuuauuuugau

SEQ ID NO: 292353 - RNA, 21 nt, Human adenovirus F
ucccaacaaccuacccagauu

SEQ ID NO: 292354 - RNA, 11 nt, Human adenovirus F
ucccacccacg

SEQ ID NO: 292355 - RNA, 22 nt, Human adenovirus F
ucccagcauucccuauguagcu

SEQ ID NO: 292356 - RNA, 22 nt, Human adenovirus F
ucccuccccccuuccacuuuac

SEQ ID NO: 292357 - RNA, 19 nt, Human adenovirus F
ucccuggacaguucccaaa

SEQ ID NO: 292358 - RNA, 17 nt, Human adenovirus F
ucccuuucccccuguac

SEQ ID NO: 292359 - RNA, 13 nt, Human adenovirus F
uccgccauugcca

SEQ ID NO: 292360 - RNA, 18 nt, Human adenovirus F
uccuaacaaaaacuuaca

SEQ ID NO: 292361 - RNA, 20 nt, Human adenovirus F
uccucuucucugucuuaucc

SEQ ID NO: 292362 - RNA, 23 nt, Human adenovirus F
uccucuucucugucuuauccucc

SEQ ID NO: 292363 - RNA, 18 nt, Human adenovirus F
uccugcuugucugucugc

SEQ ID NO: 292364 - RNA, 20 nt, Human adenovirus F
uccugcuugucugucugcca

SEQ ID NO: 292365 - RNA, 17 nt, Human adenovirus F
uccuggccaacugccac

SEQ ID NO: 292366 - RNA, 18 nt, Human adenovirus F
uccuggcgagcccauaaa

SEQ ID NO: 292367 - RNA, 18 nt, Human adenovirus F
uccuuacgucagcuacaa

SEQ ID NO: 292368 - RNA, 18 nt, Human adenovirus F
uccuuuuggcuguacucc

SEQ ID NO: 292369 - RNA, 17 nt, Human adenovirus F
ucgauaaccccaugugg

SEQ ID NO: 292370 - RNA, 18 nt, Human adenovirus F
ucgcaucuuuuuugacuu

SEQ ID NO: 292371 - RNA, 19 nt, Human adenovirus F
ucggcaccagccagcucaa

SEQ ID NO: 292372 - RNA, 18 nt, Human adenovirus F
ucgggcgugacacccuca

SEQ ID NO: 292373 - RNA, 14 nt, Human adenovirus F
ucgguuaagagaag

SEQ ID NO: 292374 - RNA, 13 nt, Human adenovirus F
ucguccaacagca

SEQ ID NO: 292375 - RNA, 18 nt, Human adenovirus F
ucguuuaaaacuuuaugg

SEQ ID NO: 292376 - RNA, 14 nt, Human adenovirus F
ucuaccccuaugac

SEQ ID NO: 292377 - RNA, 19 nt, Human adenovirus F
ucucaacuucccucuccga

SEQ ID NO: 292378 - RNA, 16 nt, Human adenovirus F
ucuccacguccuaaag

SEQ ID NO: 292379 - RNA, 21 nt, Human adenovirus F
ucucccuccaccuccagugag

SEQ ID NO: 292380 - RNA, 21 nt, Human adenovirus F
ucucgucgccaucaugagucu

SEQ ID NO: 292381 - RNA, 16 nt, Human adenovirus F
ucucucccuccaccuc

SEQ ID NO: 292382 - RNA, 17 nt, Human adenovirus F
ucugaacacuuuugcca

SEQ ID NO: 292383 - RNA, 14 nt, Human adenovirus F
ucugagucuaccac

SEQ ID NO: 292384 - RNA, 18 nt, Human adenovirus F
ucugcaaaaacaaauaca

SEQ ID NO: 292385 - RNA, 15 nt, Human adenovirus F
ucugccaauuaucua

SEQ ID NO: 292386 - RNA, 18 nt, Human adenovirus F
ucugcuagaacaggccgc

SEQ ID NO: 292387 - RNA, 20 nt, Human adenovirus F
ucugugaaguuaccaaagac

SEQ ID NO: 292388 - RNA, 18 nt, Human adenovirus F
ucugugcccgcugaucug

SEQ ID NO: 292389 - RNA, 15 nt, Human adenovirus F
ucuguuuggugggcu

SEQ ID NO: 292390 - RNA, 14 nt, Human adenovirus F
ucuuaaaacugacg

SEQ ID NO: 292391 - RNA, 17 nt, Human adenovirus F
ucuuauccuccuucaca

SEQ ID NO: 292392 - RNA, 23 nt, Human adenovirus F
ucuucccgguagucaaaaugaga

SEQ ID NO: 292393 - RNA, 17 nt, Human adenovirus F
ucuucgugacuugcacu

SEQ ID NO: 292394 - RNA, 16 nt, Human adenovirus F
ucuucuccuggccgua

SEQ ID NO: 292395 - RNA, 15 nt, Human adenovirus F
ucuugcaacugcuga

SEQ ID NO: 292396 - RNA, 22 nt, Human adenovirus F
ucuugcagaugaaaagaaccag

SEQ ID NO: 292397 - RNA, 22 nt, Human adenovirus F
ucuugguuggaguuggcuuuaa

SEQ ID NO: 292398 - RNA, 18 nt, Human adenovirus F
ucuugucguaaccaacuc

SEQ ID NO: 292399 - RNA, 17 nt, Human adenovirus F
ucuuuccgacgcuguau

SEQ ID NO: 292400 - RNA, 18 nt, Human adenovirus F
ucuuugcuggcaaagcgc

SEQ ID NO: 292401 - RNA, 17 nt, Human adenovirus F
ucuuuuuugacuuggcu

SEQ ID NO: 292402 - RNA, 21 nt, Human adenovirus F
ugaaaauacaaaauaacaaua

SEQ ID NO: 292403 - RNA, 18 nt, Human adenovirus F
ugaaaggcaagacacuga

SEQ ID NO: 292404 - RNA, 19 nt, Human adenovirus F
ugaaaggcaagacacugag

SEQ ID NO: 292405 - RNA, 17 nt, Human adenovirus F
ugaaaguuccucuucuc

SEQ ID NO: 292406 - RNA, 24 nt, Human adenovirus F
ugaaauacacugauccacuuacaa

SEQ ID NO: 292407 - RNA, 14 nt, Human adenovirus F
ugaaaugaauuugu

SEQ ID NO: 292408 - RNA, 15 nt, Human adenovirus F
ugaacauaacaccua

SEQ ID NO: 292409 - RNA, 14 nt, Human adenovirus F
ugaaggucuccuaa

SEQ ID NO: 292410 - RNA, 16 nt, Human adenovirus F
ugaaguuaccaaagac

SEQ ID NO: 292411 - RNA, 20 nt, Human adenovirus F
ugacaccuccucaacuccca

SEQ ID NO: 292412 - RNA, 15 nt, Human adenovirus F
ugacacugcuaccaa

SEQ ID NO: 292413 - RNA, 15 nt, Human adenovirus F
ugacccacaaucuuc

SEQ ID NO: 292414 - RNA, 16 nt, Human adenovirus F
ugaccuuuugucgcau

SEQ ID NO: 292415 - RNA, 18 nt, Human adenovirus F
ugacgucauugacuccgu

SEQ ID NO: 292416 - RNA, 19 nt, Human adenovirus F
ugacuccgugguagccgau

SEQ ID NO: 292417 - RNA, 16 nt, Human adenovirus F
ugacugcgcggcugua

SEQ ID NO: 292418 - RNA, 14 nt, Human adenovirus F
uugaaccguuacau

SEQ ID NO: 292419 - RNA, 16 nt, Human adenovirus F
uugaagacgacuucaa

SEQ ID NO: 292420 - RNA, 22 nt, Human adenovirus F
uugaaucaauaaaagcuuuuau

SEQ ID NO: 292421 - RNA, 16 nt, Human adenovirus F
uugaguuuaaugucuc

SEQ ID NO: 292422 - RNA, 21 nt, Human adenovirus F
uugauuuuaaucaaauuguaa

SEQ ID NO: 292423 - RNA, 22 nt, Human adenovirus F
uugcaacugcugagacagcucc

SEQ ID NO: 292424 - RNA, 20 nt, Human adenovirus F
uugcaagauggccacccccu

SEQ ID NO: 292425 - RNA, 23 nt, Human adenovirus F
uugccucccugaacuaccagaac

SEQ ID NO: 292426 - RNA, 15 nt, Human adenovirus F
uugcugcacugccau

SEQ ID NO: 292427 - RNA, 17 nt, Human adenovirus F
uuggaagaugaguuuaa

SEQ ID NO: 292428 - RNA, 20 nt, Human adenovirus F
uuggaauuuuccugcgcuaa

SEQ ID NO: 292429 - RNA, 22 nt, Human adenovirus F
uuggccucaaccccggaccauu

SEQ ID NO: 292430 - RNA, 14 nt, Human adenovirus F
uuggcggcccugca

SEQ ID NO: 292431 - RNA, 14 nt, Human adenovirus F
uuggcuggaggcuu

SEQ ID NO: 292432 - RNA, 22 nt, Human adenovirus F
uugggaauuauucaagauugca

SEQ ID NO: 292433 - RNA, 24 nt, Human adenovirus F
uuguaagagguuuugaacgcugga

SEQ ID NO: 292434 - RNA, 15 nt, Human adenovirus F
uuguacaguccaaaa

SEQ ID NO: 292435 - RNA, 14 nt, Human adenovirus F
uuguaucacccuaa

SEQ ID NO: 292436 - RNA, 22 nt, Human adenovirus F
uugugacgcaggguggguacaa

SEQ ID NO: 292437 - RNA, 23 nt, Human adenovirus F
uugugacgcaggguggguacaac

SEQ ID NO: 292438 - RNA, 14 nt, Human adenovirus F
uuguuauacaagua

SEQ ID NO: 292439 - RNA, 18 nt, Human adenovirus F
uuuaccaccccagcacuu

SEQ ID NO: 292440 - RNA, 15 nt, Human adenovirus F
uuuaccugguggaca

SEQ ID NO: 292441 - RNA, 18 nt, Human adenovirus F
uuuacuuaaaaagccugu

SEQ ID NO: 292442 - RNA, 21 nt, Human adenovirus F
uuuagcacucaaguacacuga

SEQ ID NO: 292443 - RNA, 19 nt, Human adenovirus F
uuuagcccauaucugacaa

SEQ ID NO: 292444 - RNA, 15 nt, Human adenovirus F
uuuauaccauuaaga

SEQ ID NO: 292445 - RNA, 14 nt, Human adenovirus F
uuucaaacauguga

SEQ ID NO: 292446 - RNA, 20 nt, Human adenovirus F
uuuccgacgcuguaugcuau

SEQ ID NO: 292447 - RNA, 16 nt, Human adenovirus F
uuugaauuuggggcau

SEQ ID NO: 292448 - RNA, 21 nt, Human adenovirus F
uuugcugaccuuuugucgcau

SEQ ID NO: 292449 - RNA, 14 nt, Human adenovirus F
uuugcuucuuugaa

SEQ ID NO: 292450 - RNA, 15 nt, Human adenovirus F
uuuggacauggccag

SEQ ID NO: 292451 - RNA, 14 nt, Human adenovirus F
uuuggacuguacaa

SEQ ID NO: 292452 - RNA, 13 nt, Human adenovirus F
uuuucaacuuuau

SEQ ID NO: 292453 - RNA, 17 nt, Human adenovirus F
uuuuccagcagcaccac

SEQ ID NO: 292454 - RNA, 13 nt, Human adenovirus F
uuuugacuuggcu

SEQ ID NO: 292455 - RNA, 14 nt, Human adenovirus F
agaaagcaaagcca

SEQ ID NO: 292456 - RNA, 21 nt, Human adenovirus F
agaaaucgacgggcagugcac

SEQ ID NO: 292457 - RNA, 14 nt, Human adenovirus F
agaaauuaaggcuu

SEQ ID NO: 292458 - RNA, 15 nt, Human adenovirus F
agaacguugcgccag

SEQ ID NO: 292459 - RNA, 14 nt, Human adenovirus F
agacgacgguguug

SEQ ID NO: 292460 - RNA, 15 nt, Human adenovirus F
agagccgagugacac

SEQ ID NO: 292461 - RNA, 23 nt, Human adenovirus F
agagccgcggucaacagcuggaa

SEQ ID NO: 292462 - RNA, 14 nt, Human adenovirus F
agagcuacuuuccc

SEQ ID NO: 292463 - RNA, 15 nt, Human adenovirus F
agagggaagacgggu

SEQ ID NO: 292464 - RNA, 19 nt, Human adenovirus F
agaggugugaucuucguga

SEQ ID NO: 292465 - RNA, 19 nt, Human adenovirus F
agaucggcaccagccagcu

SEQ ID NO: 292466 - RNA, 13 nt, Human adenovirus F
agaugaguuuaaa

SEQ ID NO: 292467 - RNA, 20 nt, Human adenovirus F
agaugcccuguccguggugu

SEQ ID NO: 292468 - RNA, 14 nt, Human adenovirus F
agaugucugaccaa

SEQ ID NO: 292469 - RNA, 16 nt, Human adenovirus F
agaugucugaccaacu

SEQ ID NO: 292470 - RNA, 17 nt, Human adenovirus F
agaugucugaccaacua

SEQ ID NO: 292471 - RNA, 17 nt, Human adenovirus F
agauugacgaacuuacu

SEQ ID NO: 292472 - RNA, 18 nt, Human adenovirus F
agcaaagacagagcuuua

SEQ ID NO: 292473 - RNA, 19 nt, Human adenovirus F
agcacugccggggcaauau

SEQ ID NO: 292474 - RNA, 22 nt, Human adenovirus F
agcagagccgcggucaacagcu

SEQ ID NO: 292475 - RNA, 16 nt, Human adenovirus F
agcaugaaacuggaag

SEQ ID NO: 292476 - RNA, 22 nt, Human adenovirus F
agccaccuugucgguuacuucu

SEQ ID NO: 292477 - RNA, 18 nt, Human adenovirus F
agcccauaaaagcaauau

SEQ ID NO: 292478 - RNA, 17 nt, Human adenovirus F
agccgcggucaacagcu

SEQ ID NO: 292479 - RNA, 16 nt, Human adenovirus F
agccucucgcucugca

SEQ ID NO: 292480 - RNA, 11 nt, Human adenovirus F
agccugugauu

SEQ ID NO: 292481 - RNA, 22 nt, Human adenovirus F
agccugugauuucauuuaccac

SEQ ID NO: 292482 - RNA, 21 nt, Human adenovirus F
agccuguggaguggcauuaaa

SEQ ID NO: 292483 - RNA, 19 nt, Human adenovirus F
agccuuuguaacaacugua

SEQ ID NO: 292484 - RNA, 13 nt, Human adenovirus F
agcgcacugguaa

SEQ ID NO: 292485 - RNA, 13 nt, Human adenovirus F
agcgcgcuauaau

SEQ ID NO: 292486 - RNA, 14 nt, Human adenovirus F
agcggaaaauuauu

SEQ ID NO: 292487 - RNA, 15 nt, Human adenovirus F
agcucugaacacuuu

SEQ ID NO: 292488 - RNA, 15 nt, Human adenovirus F
agcugaagacacauu

SEQ ID NO: 292489 - RNA, 18 nt, Human adenovirus F
agcugucauauacuuuaa

SEQ ID NO: 292490 - RNA, 14 nt, Human adenovirus F
agcuugaacauaac

SEQ ID NO: 292491 - RNA, 13 nt, Human adenovirus F
aggaaaccgccua

SEQ ID NO: 292492 - RNA, 15 nt, Human adenovirus F
aggaaacgguacaac

SEQ ID NO: 292493 - RNA, 20 nt, Human adenovirus F
aggaacuguucaaccuucaa

SEQ ID NO: 292494 - RNA, 16 nt, Human adenovirus F
aggacuucaccuacaa

SEQ ID NO: 292495 - RNA, 10 nt, Human adenovirus F
aggagcucag

SEQ ID NO: 292496 - RNA, 17 nt, Human adenovirus F
aggagcucagaaaacgc

SEQ ID NO: 292497 - RNA, 19 nt, Human adenovirus F
aggagcucagaaaacgcau

SEQ ID NO: 292498 - RNA, 14 nt, Human adenovirus F
aggaguuaaccuug

SEQ ID NO: 292499 - RNA, 14 nt, Human adenovirus F
aggcaagacacuga

SEQ ID NO: 292500 - RNA, 13 nt, Human adenovirus F
aggcacuguucaa

SEQ ID NO: 292501 - RNA, 16 nt, Human adenovirus F
aggcccauaccaaaga

SEQ ID NO: 292502 - RNA, 17 nt, Human adenovirus F
aggcccauaccaaagag

SEQ ID NO: 292503 - RNA, 21 nt, Human adenovirus F
aggccgucccugggaugcagg

SEQ ID NO: 292504 - RNA, 20 nt, Human adenovirus F
aggcuuaacacugacuuccu

SEQ ID NO: 292505 - RNA, 21 nt, Human adenovirus F
agggaagacggguugucagau

SEQ ID NO: 292506 - RNA, 20 nt, Human adenovirus F
aggggaaaucagaugcauuu

SEQ ID NO: 292507 - RNA, 16 nt, Human adenovirus F
agggucaccuugcaaa

SEQ ID NO: 292508 - RNA, 23 nt, Human adenovirus F
agggugaaaggcaagacacugag

SEQ ID NO: 292509 - RNA, 23 nt, Human adenovirus F
agguaaggguugucgaguuggca

SEQ ID NO: 292510 - RNA, 15 nt, Human adenovirus F
agguauuaacaaauc

SEQ ID NO: 292511 - RNA, 19 nt, Human adenovirus F
aggucgcagcgacugacgc

SEQ ID NO: 292512 - RNA, 14 nt, Human adenovirus F
aggucuggaccugu

SEQ ID NO: 292513 - RNA, 23 nt, Human adenovirus F
aggugaauuuuaaugaguagccu

SEQ ID NO: 292514 - RNA, 21 nt, Human adenovirus F
aggugggcuuggauguucaaa

SEQ ID NO: 292515 - RNA, 17 nt, Human adenovirus F
agguuacucagcaaucc

SEQ ID NO: 292516 - RNA, 21 nt, Human adenovirus F
agguuuaaauuacacuaagcc

SEQ ID NO: 292517 - RNA, 17 nt, Human adenovirus F
aguacacugaccccauu

SEQ ID NO: 292518 - RNA, 15 nt, Human adenovirus F
aguaccgcuccauca

SEQ ID NO: 292519 - RNA, 21 nt, Human adenovirus F
aguaccgcuccaucaagcccc

SEQ ID NO: 292520 - RNA, 18 nt, Human adenovirus F
aguaucaauaaaguugaa

SEQ ID NO: 292521 - RNA, 20 nt, Human adenovirus F
aguaucccuucguugucaaa

SEQ ID NO: 292522 - RNA, 23 nt, Human adenovirus F
aguaucccuucguugucaaacac

SEQ ID NO: 292523 - RNA, 21 nt, Human adenovirus F
aguccaaagcagagcucugca

SEQ ID NO: 292524 - RNA, 13 nt, Human adenovirus F
aguccuucugcca

SEQ ID NO: 292525 - RNA, 12 nt, Human adenovirus F
agucuaccacuu

SEQ ID NO: 292526 - RNA, 18 nt, Human adenovirus F
agucuuagcuggaucaaa

SEQ ID NO: 292527 - RNA, 18 nt, Human adenovirus F
agugaagaccaacugcag

SEQ ID NO: 292528 - RNA, 20 nt, Human adenovirus F
agugccggcccccacaugau

SEQ ID NO: 292529 - RNA, 22 nt, Human adenovirus F
aguuaaccuugaguuuaauguc

SEQ ID NO: 292530 - RNA, 19 nt, Human adenovirus F
aguuagcucugaacacuuu

SEQ ID NO: 292531 - RNA, 14 nt, Human adenovirus F
aguuauucugauua

SEQ ID NO: 292532 - RNA, 18 nt, Human adenovirus F
aguuccugcgcugcuacu

SEQ ID NO: 292533 - RNA, 21 nt, Human adenovirus F
aguuccugcgcugcuacucaa

SEQ ID NO: 292534 - RNA, 17 nt, Human adenovirus F
aguugagggaagcauuc

SEQ ID NO: 292535 - RNA, 19 nt, Human adenovirus F
aguugggagggaugcaugc

SEQ ID NO: 292536 - RNA, 18 nt, Human adenovirus F
aguuuaacaaguagccua

SEQ ID NO: 292537 - RNA, 14 nt, Human adenovirus F
auaaauauugcucg

SEQ ID NO: 292538 - RNA, 21 nt, Human adenovirus F
auaacuuaagauucccuuggu

SEQ ID NO: 292539 - RNA, 19 nt, Human adenovirus F
auaauaagguauaauguca

SEQ ID NO: 292540 - RNA, 22 nt, Human adenovirus F
auaauggaaaggcccauaccaa

SEQ ID NO: 292541 - RNA, 18 nt, Human adenovirus F
auacaaguauacauuuga

SEQ ID NO: 292542 - RNA, 15 nt, Human adenovirus F
auacaaugguccggg

SEQ ID NO: 292543 - RNA, 14 nt, Human adenovirus F
auacaccucccuuu

SEQ ID NO: 292544 - RNA, 16 nt, Human adenovirus F
auacacugauccacuu

SEQ ID NO: 292545 - RNA, 21 nt, Human adenovirus F
auacacugauccacuuacaac

SEQ ID NO: 292546 - RNA, 16 nt, Human adenovirus F
auacacugucacugua

SEQ ID NO: 292547 - RNA, 21 nt, Human adenovirus F
auacacugucacuguauuaaa

SEQ ID NO: 292548 - RNA, 15 nt, Human adenovirus F
auacagucaagcucu

SEQ ID NO: 292549 - RNA, 11 nt, Human adenovirus F
auaccaaagag

SEQ ID NO: 292550 - RNA, 19 nt, Human adenovirus F
aaaaacccuuaacaaccuc

SEQ ID NO: 292551 - RNA, 11 nt, Human adenovirus F
aaaaacuuaca

SEQ ID NO: 292552 - RNA, 14 nt, Human adenovirus F
aaaaccaacaaaau

SEQ ID NO: 292553 - RNA, 19 nt, Human adenovirus F
aaaaccacuaaagcauuuc

SEQ ID NO: 292554 - RNA, 18 nt, Human adenovirus F
aaaacccuuaacaaccuc

SEQ ID NO: 292555 - RNA, 23 nt, Human adenovirus F
aaaacucugugaaguuaccaaag

SEQ ID NO: 292556 - RNA, 16 nt, Human adenovirus F
aaaagaaauccacuua

SEQ ID NO: 292557 - RNA, 18 nt, Human adenovirus F
aaaagaaauccacuuacc

SEQ ID NO: 292558 - RNA, 18 nt, Human adenovirus F
aaaagucugcaugcauga

SEQ ID NO: 292559 - RNA, 17 nt, Human adenovirus F
aaaauggagaucuuucu

SEQ ID NO: 292560 - RNA, 17 nt, Human adenovirus F
aaaauuuacaugcgugu

SEQ ID NO: 292561 - RNA, 12 nt, Human adenovirus F
aaacaacugcaa

SEQ ID NO: 292562 - RNA, 19 nt, Human adenovirus F
aaacaggaagacaauccua

SEQ ID NO: 292563 - RNA, 17 nt, Human adenovirus F
aaaccacuaaagcauuu

SEQ ID NO: 292564 - RNA, 19 nt, Human adenovirus F
aaaccgccuacucuuacaa

SEQ ID NO: 292565 - RNA, 19 nt, Human adenovirus F
aaacgagaggaccacuuaa

SEQ ID NO: 292566 - RNA, 20 nt, Human adenovirus F
aaacugcggacuaccuauac

SEQ ID NO: 292567 - RNA, 14 nt, Human adenovirus F
aaacuugcuuucca

SEQ ID NO: 292568 - RNA, 16 nt, Human adenovirus F
aaacuugcuuuccacc

SEQ ID NO: 292569 - RNA, 12 nt, Human adenovirus F
aaagaaaaccag

SEQ ID NO: 292570 - RNA, 16 nt, Human adenovirus F
aaagacagagcuuuau

SEQ ID NO: 292571 - RNA, 19 nt, Human adenovirus F
aaagagaaagauggaaaac

SEQ ID NO: 292572 - RNA, 22 nt, Human adenovirus F
aaagauggaaaacgagggggag

SEQ ID NO: 292573 - RNA, 13 nt, Human adenovirus F
aaagcaaagccau

SEQ ID NO: 292574 - RNA, 12 nt, Human adenovirus F
aaagcauuuccg

SEQ ID NO: 292575 - RNA, 17 nt, Human adenovirus F
aaagcauuuccgcagcu

SEQ ID NO: 292576 - RNA, 22 nt, Human adenovirus F
aaaggacuccuggacuuuuaga

SEQ ID NO: 292577 - RNA, 23 nt, Human adenovirus F
aaaggaguuaaccuugaguuuaa

SEQ ID NO: 292578 - RNA, 18 nt, Human adenovirus F
aaaggcccauaccaaaga

SEQ ID NO: 292579 - RNA, 19 nt, Human adenovirus F
aaaggcccauaccaaagag

SEQ ID NO: 292580 - RNA, 15 nt, Human adenovirus F
aaaggguauaucggu

SEQ ID NO: 292581 - RNA, 20 nt, Human adenovirus F
aaaguccuggccaacugcca

SEQ ID NO: 292582 - RNA, 22 nt, Human adenovirus F
aaauacacugauccacuuacaa

SEQ ID NO: 292583 - RNA, 14 nt, Human adenovirus F
aaaucagaugcauu

SEQ ID NO: 292584 - RNA, 17 nt, Human adenovirus F
aaaucaggaacuguuca

SEQ ID NO: 292585 - RNA, 13 nt, Human adenovirus F
aaauccacuuacc

SEQ ID NO: 292586 - RNA, 14 nt, Human adenovirus F
aaaucccagcuuuu

SEQ ID NO: 292587 - RNA, 17 nt, Human adenovirus F
aaaugagcaacagggga

SEQ ID NO: 292588 - RNA, 18 nt, Human adenovirus F
aaaugggccuggcagcug

SEQ ID NO: 292589 - RNA, 18 nt, Human adenovirus F
aacaacagccuuuguaac

SEQ ID NO: 292590 - RNA, 18 nt, Human adenovirus F
aacaagcaaagacagagc

SEQ ID NO: 292591 - RNA, 22 nt, Human adenovirus F
aacaaguagccuaaggacuuca

SEQ ID NO: 292592 - RNA, 21 nt, Human adenovirus F
aacaagucggcggacauugcc

SEQ ID NO: 292593 - RNA, 19 nt, Human adenovirus F
aacaaguucagaaacccca

SEQ ID NO: 292594 - RNA, 16 nt, Human adenovirus F
aacaccccacccucaa

SEQ ID NO: 292595 - RNA, 15 nt, Human adenovirus F
aacagaaaccucuuc

SEQ ID NO: 292596 - RNA, 22 nt, Human adenovirus F
aacagcacgguggaguccaaag

SEQ ID NO: 292597 - RNA, 18 nt, Human adenovirus F
aacaugagcuuacuuuaa

SEQ ID NO: 292598 - RNA, 20 nt, Human adenovirus F
aacauuugaauaugcauuau

SEQ ID NO: 292599 - RNA, 20 nt, Human adenovirus F
aaccaaaucaaucagcggcu

SEQ ID NO: 292600 - RNA, 17 nt, Human adenovirus F
aaccacuaaagcauuuc

SEQ ID NO: 292601 - RNA, 17 nt, Human adenovirus F
aaccccggaccauugua

SEQ ID NO: 292602 - RNA, 19 nt, Human adenovirus F
aacccuggaauuuuugcuu

SEQ ID NO: 292603 - RNA, 16 nt, Human adenovirus F
aacccuuaacaaccuc

SEQ ID NO: 292604 - RNA, 23 nt, Human adenovirus F
aaccguaccugcuaccucuucga

SEQ ID NO: 292605 - RNA, 16 nt, Human adenovirus F
aaccguugguuccuua

SEQ ID NO: 292606 - RNA, 20 nt, Human adenovirus F
aaccuguguugauuuuguca

SEQ ID NO: 292607 - RNA, 21 nt, Human adenovirus F
aaccuucgcugcuuuacuuaa

SEQ ID NO: 292608 - RNA, 15 nt, Human adenovirus F
aaccuugaguuuaau

SEQ ID NO: 292609 - RNA, 16 nt, Human adenovirus F
aaccuugaguuuaaug

SEQ ID NO: 292610 - RNA, 21 nt, Human adenovirus F
aacgauucuucugugacaaaa

SEQ ID NO: 292611 - RNA, 23 nt, Human adenovirus F
aacgcgcuuacucuuucuuacaa

SEQ ID NO: 292612 - RNA, 22 nt, Human adenovirus F
aacggcuugcaagaaaaaccuc

SEQ ID NO: 292613 - RNA, 19 nt, Human adenovirus F
aacgggcggcaaacuuucu

SEQ ID NO: 292614 - RNA, 23 nt, Human adenovirus F
aacgggcggcaaacuuucuccac

SEQ ID NO: 292615 - RNA, 14 nt, Human adenovirus F
aacuccggagcgca

SEQ ID NO: 292616 - RNA, 22 nt, Human adenovirus F
aacucugugaaguuaccaaaga

SEQ ID NO: 292617 - RNA, 17 nt, Human adenovirus F
aacugcagcgcacgcug

SEQ ID NO: 292618 - RNA, 22 nt, Human adenovirus F
aacuguacugcuacuacuuuaa

SEQ ID NO: 292619 - RNA, 18 nt, Human adenovirus F
aacuuuguuaugauguaa

SEQ ID NO: 292620 - RNA, 19 nt, Human adenovirus F
aagaaauccacuuaccaga

SEQ ID NO: 292621 - RNA, 17 nt, Human adenovirus F
aagacagagcuuuauga

SEQ ID NO: 292622 - RNA, 11 nt, Human adenovirus F
aagacauggaa

SEQ ID NO: 292623 - RNA, 15 nt, Human adenovirus F
aagagacguuugcaa

SEQ ID NO: 292624 - RNA, 21 nt, Human adenovirus F
aagagcuugaacauaacaccu

SEQ ID NO: 292625 - RNA, 21 nt, Human adenovirus F
aagagggaagacggguuguca

SEQ ID NO: 292626 - RNA, 17 nt, Human adenovirus F
aagauauggccauguua

SEQ ID NO: 292627 - RNA, 20 nt, Human adenovirus F
aagauggcaguugcaucucc

SEQ ID NO: 292628 - RNA, 16 nt, Human adenovirus F
aagcaaagacagagcu

SEQ ID NO: 292629 - RNA, 12 nt, Human adenovirus F
aagcaaagccau

SEQ ID NO: 292630 - RNA, 16 nt, Human adenovirus F
aagcagagcucugcaa

SEQ ID NO: 292631 - RNA, 11 nt, Human adenovirus F
aagcaggguug

SEQ ID NO: 292632 - RNA, 18 nt, Human adenovirus F
aagcagguagaaugguuu

SEQ ID NO: 292633 - RNA, 15 nt, Human adenovirus F
aagcauucuuuguca

SEQ ID NO: 292634 - RNA, 18 nt, Human adenovirus F
aagcgcgcacgacgggga

SEQ ID NO: 292635 - RNA, 19 nt, Human adenovirus F
aagcggguuaaaaagcgag

SEQ ID NO: 292636 - RNA, 21 nt, Human adenovirus F
aagcuacguugcgauacugca

SEQ ID NO: 292637 - RNA, 22 nt, Human adenovirus F
auaccauuaagaagacuguuaa

SEQ ID NO: 292638 - RNA, 23 nt, Human adenovirus F
auacgggguuagcgcacugguaa

SEQ ID NO: 292639 - RNA, 22 nt, Human adenovirus F
auacugcaaacgagaggaccac

SEQ ID NO: 292640 - RNA, 16 nt, Human adenovirus F
auacuggauacuggca

SEQ ID NO: 292641 - RNA, 17 nt, Human adenovirus F
auacuggcaagagccac

SEQ ID NO: 292642 - RNA, 22 nt, Human adenovirus F
auagcaccaacgugcaggccaa

SEQ ID NO: 292643 - RNA, 16 nt, Human adenovirus F
auauagccaaccaggc

SEQ ID NO: 292644 - RNA, 14 nt, Human adenovirus F
auauggccauguua

SEQ ID NO: 292645 - RNA, 18 nt, Human adenovirus F
aucacuccguucgcucac

SEQ ID NO: 292646 - RNA, 18 nt, Human adenovirus F
aucagccgcaaaugggcc

SEQ ID NO: 292647 - RNA, 14 nt, Human adenovirus F
aucaugagucuguu

SEQ ID NO: 292648 - RNA, 17 nt, Human adenovirus F
auccacuuacaaccaaa

SEQ ID NO: 292649 - RNA, 18 nt, Human adenovirus F
auccuaacaaaaacuuac

SEQ ID NO: 292650 - RNA, 16 nt, Human adenovirus F
auccuccuucacaaag

SEQ ID NO: 292651 - RNA, 21 nt, Human adenovirus F
aucguagguuuaaauuacacu

SEQ ID NO: 292652 - RNA, 16 nt, Human adenovirus F
aucucauucgcacggc

SEQ ID NO: 292653 - RNA, 20 nt, Human adenovirus F
aucuucgugacuugcacuuu

SEQ ID NO: 292654 - RNA, 22 nt, Human adenovirus F
aucuugcagaugaaaagaacca

SEQ ID NO: 292655 - RNA, 14 nt, Human adenovirus F
aucuuucuucagau

SEQ ID NO: 292656 - RNA, 18 nt, Human adenovirus F
aucuuuuuugacuuggcu

SEQ ID NO: 292657 - RNA, 23 nt, Human adenovirus F
aagcuacguugcgauacugcaaa

SEQ ID NO: 292658 - RNA, 18 nt, Human adenovirus F
aagcugugcgcgagcuuu

SEQ ID NO: 292659 - RNA, 14 nt, Human adenovirus F
aaggaggaagcagg

SEQ ID NO: 292660 - RNA, 20 nt, Human adenovirus F
aaggcccauaccaaagagcu

SEQ ID NO: 292661 - RNA, 18 nt, Human adenovirus F
aaggcggauuuuugcccg

SEQ ID NO: 292662 - RNA, 16 nt, Human adenovirus F
aaguacacugacccca

SEQ ID NO: 292663 - RNA, 15 nt, Human adenovirus F
aaguagccuaaggac

SEQ ID NO: 292664 - RNA, 14 nt, Human adenovirus F
aaguauacauuuga

SEQ ID NO: 292665 - RNA, 14 nt, Human adenovirus F
aaguccacccaaac

SEQ ID NO: 292666 - RNA, 19 nt, Human adenovirus F
aaguccuggccaacugcca

SEQ ID NO: 292667 - RNA, 16 nt, Human adenovirus F
aaguuaccaaagacaa

SEQ ID NO: 292668 - RNA, 20 nt, Human adenovirus F
aauacacugauccacuuaca

SEQ ID NO: 292669 - RNA, 20 nt, Human adenovirus F
aauacagucaagcucuccac

SEQ ID NO: 292670 - RNA, 22 nt, Human adenovirus F
aauaccggcuggggacuuugcu

SEQ ID NO: 292671 - RNA, 22 nt, Human adenovirus F
aauauuuuauuguucuguuaca

SEQ ID NO: 292672 - RNA, 20 nt, Human adenovirus F
aauccgcacucuugcucuca

SEQ ID NO: 292673 - RNA, 16 nt, Human adenovirus F
aauccuaacaaaaacu

SEQ ID NO: 292674 - RNA, 15 nt, Human adenovirus F
aaucguagguuuaaa

SEQ ID NO: 292675 - RNA, 15 nt, Human adenovirus F
aaucuaucccuugau

SEQ ID NO: 292676 - RNA, 16 nt, Human adenovirus F
aaucuaucccuugauu

SEQ ID NO: 292677 - RNA, 17 nt, Human adenovirus F
aaugaauuuguuauaca

SEQ ID NO: 292678 - RNA, 20 nt, Human adenovirus F
aaugggccuggcagcuggag

SEQ ID NO: 292679 - RNA, 23 nt, Human adenovirus F
aaugggccuggcagcuggagcuu

SEQ ID NO: 292680 - RNA, 18 nt, Human adenovirus F
aaugguccgggguugagg

SEQ ID NO: 292681 - RNA, 13 nt, Human adenovirus F
aauggucuuacau

SEQ ID NO: 292682 - RNA, 16 nt, Human adenovirus F
aauggucuuacaugca

SEQ ID NO: 292683 - RNA, 18 nt, Human adenovirus F
aauuacauggcgccaguu

SEQ ID NO: 292684 - RNA, 20 nt, Human adenovirus F
caccuuuuuacccugaccca

SEQ ID NO: 292685 - RNA, 22 nt, Human adenovirus F
cacgagcugucauauacuuuaa

SEQ ID NO: 292686 - RNA, 15 nt, Human adenovirus F
cacgcaggagcucag

SEQ ID NO: 292687 - RNA, 17 nt, Human adenovirus F
cacgcaggagcucagaa

SEQ ID NO: 292688 - RNA, 23 nt, Human adenovirus F
cacgcgacgcggaagccgaaguc

SEQ ID NO: 292689 - RNA, 20 nt, Human adenovirus F
cacguuccgucgcuguaaaa

SEQ ID NO: 292690 - RNA, 19 nt, Human adenovirus F
cacucaaguacacugaccc

SEQ ID NO: 292691 - RNA, 22 nt, Human adenovirus F
cacucaaguacacugaccccau

SEQ ID NO: 292692 - RNA, 14 nt, Human adenovirus F
cacucgaaaccaaa

SEQ ID NO: 292693 - RNA, 16 nt, Human adenovirus F
cacugauccacuuaca

SEQ ID NO: 292694 - RNA, 13 nt, Human adenovirus F
cacugucacugua

SEQ ID NO: 292695 - RNA, 14 nt, Human adenovirus F
cacugucacuguau

SEQ ID NO: 292696 - RNA, 15 nt, Human adenovirus F
cacugucacuguauu

SEQ ID NO: 292697 - RNA, 15 nt, Human adenovirus F
cacuuacaaccaaaa

SEQ ID NO: 292698 - RNA, 12 nt, Human adenovirus F
cacuuaccagag

SEQ ID NO: 292699 - RNA, 18 nt, Human adenovirus F
cagaaaaaacccuuaaca

SEQ ID NO: 292700 - RNA, 22 nt, Human adenovirus F
cagaaacaucguccaacagcac

SEQ ID NO: 292701 - RNA, 13 nt, Human adenovirus F
cagagccauagca

SEQ ID NO: 292702 - RNA, 13 nt, Human adenovirus F
cgaagacugaguu

SEQ ID NO: 292703 - RNA, 17 nt, Human adenovirus F
cgaagaggguacuagca

SEQ ID NO: 292704 - RNA, 14 nt, Human adenovirus F
cgacgauccaauag

SEQ ID NO: 292705 - RNA, 16 nt, Human adenovirus F
cgacgcuugcuggagu

SEQ ID NO: 292706 - RNA, 13 nt, Human adenovirus F
cgagcgccucaaa

SEQ ID NO: 292707 - RNA, 15 nt, Human adenovirus F
cgaggcacuguucaa

SEQ ID NO: 292708 - RNA, 17 nt, Human adenovirus F
cgagugcguaagaccuc

SEQ ID NO: 292709 - RNA, 22 nt, Human adenovirus F
cgaguuccugcgcugcuacuca

SEQ ID NO: 292710 - RNA, 14 nt, Human adenovirus F
cgauaccuacuuca

SEQ ID NO: 292711 - RNA, 11 nt, Human adenovirus F
cgaucacuccg

SEQ ID NO: 292712 - RNA, 17 nt, Human adenovirus F
cgauggccuaaaaccac

SEQ ID NO: 292713 - RNA, 19 nt, Human adenovirus F
cgcaauggucuuacaugca

SEQ ID NO: 292714 - RNA, 21 nt, Human adenovirus F
cgcacggcguuacuugcuuuu

SEQ ID NO: 292715 - RNA, 15 nt, Human adenovirus F
cgcagcugcuuguau

SEQ ID NO: 292716 - RNA, 16 nt, Human adenovirus F
cgcauaacccuggaau

SEQ ID NO: 292717 - RNA, 22 nt, Human adenovirus F
cgccaggugaauuuuaaugagu

SEQ ID NO: 292718 - RNA, 13 nt, Human adenovirus F
cgcccgugccacc

SEQ ID NO: 292719 - RNA, 22 nt, Human adenovirus F
cgccgcuugcaagauggccacc

SEQ ID NO: 292720 - RNA, 13 nt, Human adenovirus F
cgcuaacagacaa

SEQ ID NO: 292721 - RNA, 11 nt, Human adenovirus F
cgcuccauggg

SEQ ID NO: 292722 - RNA, 14 nt, Human adenovirus F
cgcuuuacgcuggc

SEQ ID NO: 292723 - RNA, 18 nt, Human adenovirus F
cggaaggaaacgcuguga

SEQ ID NO: 292724 - RNA, 19 nt, Human adenovirus F
cggaagggcggaacagcau

SEQ ID NO: 292725 - RNA, 15 nt, Human adenovirus F
cggcaccagccagcu

SEQ ID NO: 292726 - RNA, 16 nt, Human adenovirus F
cggcacuacuguagua

SEQ ID NO: 292727 - RNA, 17 nt, Human adenovirus F
cggcccaccgaguuccu

SEQ ID NO: 292728 - RNA, 15 nt, Human adenovirus F
cggcggacauugccu

SEQ ID NO: 292729 - RNA, 22 nt, Human adenovirus F
cgggacugauauauaaugccuu

SEQ ID NO: 292730 - RNA, 23 nt, Human adenovirus F
cgggacugauauauaaugccuua

SEQ ID NO: 292731 - RNA, 23 nt, Human adenovirus F
cgggcaaagcuacguugcgauac

SEQ ID NO: 292732 - RNA, 21 nt, Human adenovirus F
cgggcaguaccgcuccaucaa

SEQ ID NO: 292733 - RNA, 15 nt, Human adenovirus F
cggggcaauaucuca

SEQ ID NO: 292734 - RNA, 12 nt, Human adenovirus F
cggucaacagcu

SEQ ID NO: 292735 - RNA, 15 nt, Human adenovirus F
cggugguacaggggg

SEQ ID NO: 292736 - RNA, 19 nt, Human adenovirus F
cgguuccucgcaacguccu

SEQ ID NO: 292737 - RNA, 10 nt, Human adenovirus F
cgguuugcug

SEQ ID NO: 292738 - RNA, 19 nt, Human adenovirus F
cguagugcguuggccucaa

SEQ ID NO: 292739 - RNA, 16 nt, Human adenovirus F
cgucuacccuuacgaa

SEQ ID NO: 292740 - RNA, 23 nt, Human adenovirus F
cgucuggaauaauuaugccucuu

SEQ ID NO: 292741 - RNA, 21 nt, Human adenovirus F
cgugacugcgcggcuguaaca

SEQ ID NO: 292742 - RNA, 14 nt, Human adenovirus F
cgugcgcgaacugg

SEQ ID NO: 292743 - RNA, 17 nt, Human adenovirus F
cgugcucaagcggguua

SEQ ID NO: 292744 - RNA, 14 nt, Human adenovirus F
cguuccguccuacc

SEQ ID NO: 292745 - RNA, 13 nt, Human adenovirus F
cguuggccucaac

SEQ ID NO: 292746 - RNA, 11 nt, Human adenovirus F
cuaaaaccacu

SEQ ID NO: 292747 - RNA, 19 nt, Human adenovirus F
cuaaaugggaaaagcaugu

SEQ ID NO: 292748 - RNA, 23 nt, Human adenovirus F
cuaaaugggaaaagcaugugugc

SEQ ID NO: 292749 - RNA, 16 nt, Human adenovirus F
cuaacaaaaacuuaca

SEQ ID NO: 292750 - RNA, 14 nt, Human adenovirus F
cuaaggcgggcaca

SEQ ID NO: 292751 - RNA, 20 nt, Human adenovirus F
cuaccccuaugacaccuccu

SEQ ID NO: 292752 - RNA, 13 nt, Human adenovirus F
cuagcagugggca

SEQ ID NO: 292753 - RNA, 16 nt, Human adenovirus F
cuagcagugggcaaag

SEQ ID NO: 292754 - RNA, 19 nt, Human adenovirus F
cuagcagugggcaaagggg

SEQ ID NO: 292755 - RNA, 19 nt, Human adenovirus F
cuauacacugucacuguau

SEQ ID NO: 292756 - RNA, 15 nt, Human adenovirus F
cuaucacuaaaacca

SEQ ID NO: 292757 - RNA, 18 nt, Human adenovirus F
cuaucacuaaaaccaaca

SEQ ID NO: 292758 - RNA, 20 nt, Human adenovirus F
cuaucacuaaaaccaacaaa

SEQ ID NO: 292759 - RNA, 14 nt, Human adenovirus F
cuauuaauguugau

SEQ ID NO: 292760 - RNA, 17 nt, Human adenovirus F
cuauuacagguauaaag

SEQ ID NO: 292761 - RNA, 13 nt, Human adenovirus F
cuauugacacugc

SEQ ID NO: 292762 - RNA, 20 nt, Human adenovirus F
cucaacagaaaccucuuccu

SEQ ID NO: 292763 - RNA, 12 nt, Human adenovirus F
cucaacucccag

SEQ ID NO: 292764 - RNA, 17 nt, Human adenovirus F
cucaacucccagcauuc

SEQ ID NO: 292765 - RNA, 18 nt, Human adenovirus F
cucaacucccagcauucc

SEQ ID NO: 292766 - RNA, 13 nt, Human adenovirus F
cucaagcggguua

SEQ ID NO: 292767 - RNA, 16 nt, Human adenovirus F
cucaggauuacuccag

SEQ ID NO: 292768 - RNA, 12 nt, Human adenovirus F
cucccaacuuuc

SEQ ID NO: 292769 - RNA, 16 nt, Human adenovirus F
cuccccguuaccuggg

SEQ ID NO: 292770 - RNA, 16 nt, Human adenovirus F
cucccuccaccuccag

SEQ ID NO: 292771 - RNA, 21 nt, Human adenovirus F
cuccucagauugacgaacuua

SEQ ID NO: 292772 - RNA, 14 nt, Human adenovirus F
cuccugcaagucaa

SEQ ID NO: 292773 - RNA, 23 nt, Human adenovirus F
cucgcaaacaauaaaagaaggcu

SEQ ID NO: 292774 - RNA, 15 nt, Human adenovirus F
cucuaagacugucaa

SEQ ID NO: 292775 - RNA, 21 nt, Human adenovirus F
cucuaccccgcgacgucagcu

SEQ ID NO: 292776 - RNA, 16 nt, Human adenovirus F
cucuauacgacaccac

SEQ ID NO: 292777 - RNA, 15 nt, Human adenovirus F
cucuccacggguucu

SEQ ID NO: 292778 - RNA, 19 nt, Human adenovirus F
cucugcaaaaacaaauaca

SEQ ID NO: 292779 - RNA, 19 nt, Human adenovirus F
cucugguagaaagcaaagc

SEQ ID NO: 292780 - RNA, 16 nt, Human adenovirus F
cucugucuuauccucc

SEQ ID NO: 292781 - RNA, 21 nt, Human adenovirus F
cucuguuugcugcacugccau

SEQ ID NO: 292782 - RNA, 22 nt, Human adenovirus F
cucuucuccugcuugucugucu

SEQ ID NO: 292783 - RNA, 13 nt, Human adenovirus F
cucuucucugucu

SEQ ID NO: 292784 - RNA, 15 nt, Human adenovirus F
cucuugcucucaagc

SEQ ID NO: 292785 - RNA, 14 nt, Human adenovirus F
cucuuucuuacaac

SEQ ID NO: 292786 - RNA, 12 nt, Human adenovirus F
cugaacacuuuu

SEQ ID NO: 292787 - RNA, 22 nt, Human adenovirus F
cugaaugcauguacacuauggu

SEQ ID NO: 292788 - RNA, 20 nt, Human adenovirus F
cugaauuuuuagguuggcaa

SEQ ID NO: 292789 - RNA, 14 nt, Human adenovirus F
cugacgaagacauu

SEQ ID NO: 292790 - RNA, 20 nt, Human adenovirus F
cugacgauucuggccucuau

SEQ ID NO: 292791 - RNA, 20 nt, Human adenovirus F
cugagcccgggccuggugca

SEQ ID NO: 292792 - RNA, 16 nt, Human adenovirus F
cugaggauuuucucaa

SEQ ID NO: 292793 - RNA, 22 nt, Human adenovirus F
cugauccacuuacaaccaaaaa

SEQ ID NO: 292794 - RNA, 12 nt, Human adenovirus F
cugauggaguug

SEQ ID NO: 292795 - RNA, 18 nt, Human adenovirus F
cugauuaauaaagcuuac

SEQ ID NO: 292796 - RNA, 12 nt, Human adenovirus F
cugcaaagccaa

SEQ ID NO: 292797 - RNA, 12 nt, Human adenovirus F
cugcacugccau

SEQ ID NO: 292798 - RNA, 20 nt, Human adenovirus F
cugcagcgcacgcuggagga

SEQ ID NO: 292799 - RNA, 15 nt, Human adenovirus F
cugccggggcaauau

SEQ ID NO: 292800 - RNA, 14 nt, Human adenovirus F
cugcgcugcuacuc

SEQ ID NO: 292801 - RNA, 16 nt, Human adenovirus F
cugcgcugcuacucaa

SEQ ID NO: 292802 - RNA, 20 nt, Human adenovirus F
cugcgcugcuacucaacaga

SEQ ID NO: 292803 - RNA, 15 nt, Human adenovirus F
cugcuaccaacucac

SEQ ID NO: 292804 - RNA, 14 nt, Human adenovirus F
cugcuacuacuuua

SEQ ID NO: 292805 - RNA, 15 nt, Human adenovirus F
cugcuacuacuuuaa

SEQ ID NO: 292806 - RNA, 20 nt, Human adenovirus F
cugcuugucugucugccaau

SEQ ID NO: 292807 - RNA, 18 nt, Human adenovirus F
gaguagccuucuauugca

SEQ ID NO: 292808 - RNA, 14 nt, Human adenovirus F
gaguuggcuuuaac

SEQ ID NO: 292809 - RNA, 20 nt, Human adenovirus F
gauacuggcaagagccaccu

SEQ ID NO: 292810 - RNA, 14 nt, Human adenovirus F
gauacuuuuacaga

SEQ ID NO: 292811 - RNA, 17 nt, Human adenovirus F
gauaguacggccgugac

SEQ ID NO: 292812 - RNA, 16 nt, Human adenovirus F
gauagugugguggcca

SEQ ID NO: 292813 - RNA, 18 nt, Human adenovirus F
gaucaaacaggaagacaa

SEQ ID NO: 292814 - RNA, 14 nt, Human adenovirus F
gaucgccaacagcc

SEQ ID NO: 292815 - RNA, 20 nt, Human adenovirus F
gaucuucgugacuugcacuu

SEQ ID NO: 292816 - RNA, 21 nt, Human adenovirus F
gaugcauccucccaacaaccu

SEQ ID NO: 292817 - RNA, 16 nt, Human adenovirus F
gauguaaccacagaca

SEQ ID NO: 292818 - RNA, 19 nt, Human adenovirus F
gauguaacccaacagggac

SEQ ID NO: 292819 - RNA, 22 nt, Human adenovirus F
gaugucaaaacguucauuauuu

SEQ ID NO: 292820 - RNA, 22 nt, Human adenovirus F
gauuacuccagucgcaugaauu

SEQ ID NO: 292821 - RNA, 13 nt, Human adenovirus F
gauuccaccaaag

SEQ ID NO: 292822 - RNA, 20 nt, Human adenovirus F
gauucuaugaaaacuccuca

SEQ ID NO: 292823 - RNA, 22 nt, Human adenovirus F
gauugggcggguaaauggaauu

SEQ ID NO: 292824 - RNA, 19 nt, Human adenovirus F
gauuuaugguucacuguau

SEQ ID NO: 292825 - RNA, 14 nt, Human adenovirus F
gcaaaaccaaauca

SEQ ID NO: 292826 - RNA, 16 nt, Human adenovirus F
gcaagagacguuugca

SEQ ID NO: 292827 - RNA, 13 nt, Human adenovirus F
gcaagauggccac

SEQ ID NO: 292828 - RNA, 14 nt, Human adenovirus F
gcaagcagcucgca

SEQ ID NO: 292829 - RNA, 20 nt, Human adenovirus F
gcaauuuaggauuuacacaa

SEQ ID NO: 292830 - RNA, 23 nt, Human adenovirus F
gcaccaacgugcaggccaaccua

SEQ ID NO: 292831 - RNA, 15 nt, Human adenovirus F
gcaccaccugcccuu

SEQ ID NO: 292832 - RNA, 17 nt, Human adenovirus F
gcaccaccugcccuucc

SEQ ID NO: 292833 - RNA, 14 nt, Human adenovirus F
gcaccagccagcuc

SEQ ID NO: 292834 - RNA, 17 nt, Human adenovirus F
gcacuaacccuacccac

SEQ ID NO: 292835 - RNA, 19 nt, Human adenovirus F
gcacucaaguacacugacc

SEQ ID NO: 292836 - RNA, 22 nt, Human adenovirus F
gcacugccggggcaauaucuca

SEQ ID NO: 292837 - RNA, 16 nt, Human adenovirus F
gcagacauaucuugca

SEQ ID NO: 292838 - RNA, 19 nt, Human adenovirus F
gcagacgcggcagcagcug

SEQ ID NO: 292839 - RNA, 22 nt, Human adenovirus F
gcagagcucugcaaaaacaaau

SEQ ID NO: 292840 - RNA, 15 nt, Human adenovirus F
gcagccccaggccaa

SEQ ID NO: 292841 - RNA, 19 nt, Human adenovirus F
gcagccccaggccaaccgc

SEQ ID NO: 292842 - RNA, 21 nt, Human adenovirus F
gcagcuggagcuucucaggau

SEQ ID NO: 292843 - RNA, 12 nt, Human adenovirus F
gcagcuuggaag

SEQ ID NO: 292844 - RNA, 15 nt, Human adenovirus F
gcaggagcucagaaa

SEQ ID NO: 292845 - RNA, 20 nt, Human adenovirus F
gcaguaccgcuccaucaagc

SEQ ID NO: 292846 - RNA, 15 nt, Human adenovirus F
gcagugcacugagca

SEQ ID NO: 292847 - RNA, 18 nt, Human adenovirus F
gcagugcacugagcagcu

SEQ ID NO: 292848 - RNA, 16 nt, Human adenovirus F
gcaucuuuuuugacuu

SEQ ID NO: 292849 - RNA, 22 nt, Human adenovirus F
gcaugaaacuggaagauguccu

SEQ ID NO: 292850 - RNA, 19 nt, Human adenovirus F
gcauuaaugggcaaagggg

SEQ ID NO: 292851 - RNA, 13 nt, Human adenovirus F
gccaacacccugu

SEQ ID NO: 292852 - RNA, 12 nt, Human adenovirus F
gccaauuaucua

SEQ ID NO: 292853 - RNA, 20 nt, Human adenovirus F
gccacgcaggagcucagaaa

SEQ ID NO: 292854 - RNA, 15 nt, Human adenovirus F
gccagccuccggugg

SEQ ID NO: 292855 - RNA, 22 nt, Human adenovirus F
gccaucgugcgcgaacugggcu

SEQ ID NO: 292856 - RNA, 18 nt, Human adenovirus F
gcccagguuuaucaggaa

SEQ ID NO: 292857 - RNA, 15 nt, Human adenovirus F
gcccaguugagggaa

SEQ ID NO: 292858 - RNA, 14 nt, Human adenovirus F
gcccauaccaaaga

SEQ ID NO: 292859 - RNA, 22 nt, Human adenovirus F
gccccugccaacucgacaaccc

SEQ ID NO: 292860 - RNA, 15 nt, Human adenovirus F
gcccggacacuauuu

SEQ ID NO: 292861 - RNA, 21 nt, Human adenovirus F
gcccgugccaccgauaccuac

SEQ ID NO: 292862 - RNA, 18 nt, Human adenovirus F
gcccuacaccaaugcaaa

SEQ ID NO: 292863 - RNA, 22 nt, Human adenovirus F
gccgcaaaugggccuggcagcu

SEQ ID NO: 292864 - RNA, 16 nt, Human adenovirus F
gccgcccuaaccucua

SEQ ID NO: 292865 - RNA, 22 nt, Human adenovirus F
gccuaaaaccacuaaagcauuu

SEQ ID NO: 292866 - RNA, 19 nt, Human adenovirus F
gccuacugccgccaugacu

SEQ ID NO: 292867 - RNA, 13 nt, Human adenovirus F
gccuauugccaca

SEQ ID NO: 292868 - RNA, 19 nt, Human adenovirus F
gccuauugccacaauggaa

SEQ ID NO: 292869 - RNA, 23 nt, Human adenovirus F
gccuccguggccuugcaagcagc

SEQ ID NO: 292870 - RNA, 17 nt, Human adenovirus F
gccucggaguaccugag

SEQ ID NO: 292871 - RNA, 16 nt, Human adenovirus F
gccucucgcucugcaa

SEQ ID NO: 292872 - RNA, 23 nt, Human adenovirus F
gccugaauuuuuagguuggcaau

SEQ ID NO: 292873 - RNA, 14 nt, Human adenovirus F
gccuggcagcugga

SEQ ID NO: 292874 - RNA, 21 nt, Human adenovirus F
gccugugauuucauuuaccac

SEQ ID NO: 292875 - RNA, 18 nt, Human adenovirus F
gcgaaaacucaaacaaca

SEQ ID NO: 292876 - RNA, 22 nt, Human adenovirus F
gcgacaaccggguuuuggacau

SEQ ID NO: 292877 - RNA, 22 nt, Human adenovirus F
gcgcuuugcgcaggcgaauaaa

SEQ ID NO: 292878 - RNA, 12 nt, Human adenovirus F
gcggacuaccua

SEQ ID NO: 292879 - RNA, 12 nt, Human adenovirus F
gcggauuugccg

SEQ ID NO: 292880 - RNA, 18 nt, Human adenovirus F
gcggcccugcaaagccaa

SEQ ID NO: 292881 - RNA, 19 nt, Human adenovirus F
gcggcuguaacaucugcau

SEQ ID NO: 292882 - RNA, 15 nt, Human adenovirus F
gcggugguacagggg

SEQ ID NO: 292883 - RNA, 19 nt, Human adenovirus F
gcuaacagacaauuuugca

SEQ ID NO: 292884 - RNA, 22 nt, Human adenovirus F
gcuacucaacagaaaccucuuc

SEQ ID NO: 292885 - RNA, 17 nt, Human adenovirus F
gcuauguuggcggcccu

SEQ ID NO: 292886 - RNA, 15 nt, Human adenovirus F
gcuauugacacugcu

SEQ ID NO: 292887 - RNA, 16 nt, Human adenovirus F
gcuccucaugagugac

SEQ ID NO: 292888 - RNA, 15 nt, Human adenovirus F
gcucugaacacuuuu

SEQ ID NO: 292889 - RNA, 23 nt, Human adenovirus F
gcucugguagaaagcaaagccau

SEQ ID NO: 292890 - RNA, 18 nt, Human adenovirus F
gcucuucgcccggacacu

SEQ ID NO: 292891 - RNA, 14 nt, Human adenovirus F
gcugacuuaucuca

SEQ ID NO: 292892 - RNA, 13 nt, Human adenovirus F
gcugcacugccau

SEQ ID NO: 292893 - RNA, 15 nt, Human adenovirus F
gcuggccgugggcga

SEQ ID NO: 292894 - RNA, 12 nt, Human adenovirus F
gcuguaacaucu

SEQ ID NO: 292895 - RNA, 23 nt, Human adenovirus F
gcugugccacuauuaauguugau

SEQ ID NO: 292896 - RNA, 13 nt, Human adenovirus F
gcuuaauguuuga

SEQ ID NO: 292897 - RNA, 16 nt, Human adenovirus F
gcuucacggaaggaaa

SEQ ID NO: 292898 - RNA, 21 nt, Human adenovirus F
gcuuccuccaacggcuugcaa

SEQ ID NO: 292899 - RNA, 12 nt, Human adenovirus F
gcuucucaggau

SEQ ID NO: 292900 - RNA, 21 nt, Human adenovirus F
gcuugcuuuuauuuguuuuau

SEQ ID NO: 292901 - RNA, 16 nt, Human adenovirus F
gcuuuaaccugcuguu

SEQ ID NO: 292902 - RNA, 14 nt, Human adenovirus F
gcuuuuaauuuaug

SEQ ID NO: 292903 - RNA, 19 nt, Human adenovirus F
gcuuuugcgaaacuugcuu

SEQ ID NO: 292904 - RNA, 21 nt, Human adenovirus F
ggaaaggcccauaccaaagag

SEQ ID NO: 292905 - RNA, 15 nt, Human adenovirus F
ggacgagcgccucaa

SEQ ID NO: 292906 - RNA, 22 nt, Human adenovirus F
ggacuauacacugucacuguau

SEQ ID NO: 292907 - RNA, 14 nt, Human adenovirus F
ggagcuucucagga

SEQ ID NO: 292908 - RNA, 13 nt, Human adenovirus F
ggagggaugcaug

SEQ ID NO: 292909 - RNA, 23 nt, Human adenovirus F
ggauaagcuaaaggaccaaaacu

SEQ ID NO: 292910 - RNA, 20 nt, Human adenovirus F
ggaugcagguaggaccacug

SEQ ID NO: 292911 - RNA, 12 nt, Human adenovirus F
ggcaaacuuucu

SEQ ID NO: 292912 - RNA, 13 nt, Human adenovirus F
ggccaccacggga

SEQ ID NO: 292913 - RNA, 14 nt, Human adenovirus F
ggccaguuuacaaa

SEQ ID NO: 292914 - RNA, 16 nt, Human adenovirus F
ggcccauaccaaagag

SEQ ID NO: 292915 - RNA, 16 nt, Human adenovirus F
ggcccugcaaagccaa

SEQ ID NO: 292916 - RNA, 20 nt, Human adenovirus F
ggccgucccugggaugcagg

SEQ ID NO: 292917 - RNA, 19 nt, Human adenovirus F
ggccguuuaugggcaccug

SEQ ID NO: 292918 - RNA, 20 nt, Human adenovirus F
ggccuugcaaaaccaaauca

SEQ ID NO: 292919 - RNA, 23 nt, Human adenovirus F
ggcugauuuggaagaugaguuua

SEQ ID NO: 292920 - RNA, 19 nt, Human adenovirus F
ggcuggcuuccggcauuaa

SEQ ID NO: 292921 - RNA, 16 nt, Human adenovirus F
ggcuuccggcauuaac

SEQ ID NO: 292922 - RNA, 17 nt, Human adenovirus F
gggagguguauaaggua

SEQ ID NO: 292923 - RNA, 20 nt, Human adenovirus F
gggcaguaccgcuccaucaa

SEQ ID NO: 292924 - RNA, 21 nt, Human adenovirus F
gggccuacggaagggcggaac

SEQ ID NO: 292925 - RNA, 20 nt, Human adenovirus F
uacauuugaacagcugaaga

SEQ ID NO: 292926 - RNA, 13 nt, Human adenovirus F
ugacuugcacuuu

SEQ ID NO: 292927 - RNA, 18 nt, Human adenovirus F
uuacuccagucgcaugaa

SEQ ID NO: 292928 - RNA, 21 nt, Human adenovirus F
uuacuuuaaaacuuggcagca

SEQ ID NO: 292929 - RNA, 13 nt, Human adenovirus F
uuagaguggcaua

SEQ ID NO: 292930 - RNA, 21 nt, Human adenovirus F
uuagugccggcccccacauga

SEQ ID NO: 292931 - RNA, 23 nt, Human adenovirus F
uuagugccggcccccacaugauu

SEQ ID NO: 292932 - RNA, 14 nt, Human adenovirus F
uuaguuuauucuga

SEQ ID NO: 292933 - RNA, 13 nt, Human adenovirus F
uuauccuugcucg

SEQ ID NO: 292934 - RNA, 16 nt, Human adenovirus F
uuaucuacgccuccac

SEQ ID NO: 292935 - RNA, 19 nt, Human adenovirus F
uuaucuacgccuccaccac

SEQ ID NO: 292936 - RNA, 16 nt, Human adenovirus F
uuaugguucacuguau

SEQ ID NO: 292937 - RNA, 18 nt, Human adenovirus F
uuauucaagauugcagcu

SEQ ID NO: 292938 - RNA, 15 nt, Human adenovirus F
uuauuggucaaaaac

SEQ ID NO: 292939 - RNA, 16 nt, Human adenovirus F
uuauuugggaauuauu

SEQ ID NO: 292940 - RNA, 18 nt, Human adenovirus F
uucaagauugcagcuuaa

SEQ ID NO: 292941 - RNA, 19 nt, Human adenovirus F
uucacaaaguccuggccaa

SEQ ID NO: 292942 - RNA, 22 nt, Human adenovirus F
uucaccucuguuugcugcacug

SEQ ID NO: 292943 - RNA, 18 nt, Human adenovirus F
uucaccuuuuuacccuga

SEQ ID NO: 292944 - RNA, 20 nt, Human adenovirus F
uucagaaacaucguccaaca

SEQ ID NO: 292945 - RNA, 22 nt, Human adenovirus F
uucaggcagcagccccaggcca

SEQ ID NO: 292946 - RNA, 19 nt, Human adenovirus F
uucaguaugguaacuccuc

SEQ ID NO: 292947 - RNA, 13 nt, Human adenovirus F
uucaucuugcaga

SEQ ID NO: 292948 - RNA, 16 nt, Human adenovirus F
uuccacuuuaccuuau

SEQ ID NO: 292949 - RNA, 17 nt, Human adenovirus F
uucccucuccgauuucu

SEQ ID NO: 292950 - RNA, 23 nt, Human adenovirus F
uucccuugguaucgagaaauugu

SEQ ID NO: 292951 - RNA, 21 nt, Human adenovirus F
uuccgucucucccuccaccuc

SEQ ID NO: 292952 - RNA, 16 nt, Human adenovirus F
uuccucccaacuuucg

SEQ ID NO: 292953 - RNA, 18 nt, Human adenovirus F
uuccucuucucugucuua

SEQ ID NO: 292954 - RNA, 23 nt, Human adenovirus F
uuccucuucucugucuuauccuc

SEQ ID NO: 292955 - RNA, 19 nt, Human adenovirus F
uuccuggacucccuggaca

SEQ ID NO: 292956 - RNA, 19 nt, Human adenovirus F
uucgaacgcgccaggugaa

SEQ ID NO: 292957 - RNA, 19 nt, Human adenovirus F
uucguugucaaacacggga

SEQ ID NO: 292958 - RNA, 16 nt, Human adenovirus F
uucugagucuaccacu

SEQ ID NO: 292959 - RNA, 14 nt, Human adenovirus F
uucugcugcauguu

SEQ ID NO: 292960 - RNA, 13 nt, Human adenovirus F
uucugggcacguu

SEQ ID NO: 292961 - RNA, 22 nt, Human adenovirus F
uucuguaugcuauugacacugc

SEQ ID NO: 292962 - RNA, 13 nt, Human adenovirus F
uugaacauaacac

SEQ ID NO: 292963 - RNA, 16 nt, Human adenovirus F
uugaacauaacaccua

SEQ ID NO: 292964 - RNA, 14 nt, Human adenovirus F
uugacuuggcugua

SEQ ID NO: 292965 - RNA, 18 nt, Human adenovirus F
uugacuuggcuguaauuu

SEQ ID NO: 292966 - RNA, 14 nt, Human adenovirus F
uugauggucguccu

SEQ ID NO: 292967 - RNA, 20 nt, Human adenovirus F
uugcagaugaaaagaaccag

SEQ ID NO: 292968 - RNA, 14 nt, Human adenovirus F
uugccacaauggaa

SEQ ID NO: 292969 - RNA, 23 nt, Human adenovirus F
uugccacuuuuuuuguggccauu

SEQ ID NO: 292970 - RNA, 21 nt, Human adenovirus F
uugcgccaggaaacgguacaa

SEQ ID NO: 292971 - RNA, 22 nt, Human adenovirus F
uugcgccaggaaacgguacaac

SEQ ID NO: 292972 - RNA, 22 nt, Human adenovirus F
uugcucggcgaaaacucaaaca

SEQ ID NO: 292973 - RNA, 15 nt, Human adenovirus F
uugcugacuuaucuc

SEQ ID NO: 292974 - RNA, 13 nt, Human adenovirus F
uugcugcgucaau

SEQ ID NO: 292975 - RNA, 13 nt, Human adenovirus F
uuggaaaaucgca

SEQ ID NO: 292976 - RNA, 20 nt, Human adenovirus F
uuggcggcccugcaaagcca

SEQ ID NO: 292977 - RNA, 18 nt, Human adenovirus F
uuggguccuccauuaagu

SEQ ID NO: 292978 - RNA, 20 nt, Human adenovirus F
uugucgauaaccccaugugg

SEQ ID NO: 292979 - RNA, 19 nt, Human adenovirus F
uugucgcaugccuccagca

SEQ ID NO: 292980 - RNA, 15 nt, Human adenovirus F
uugucguaaccaacu

SEQ ID NO: 292981 - RNA, 14 nt, Human adenovirus F
uugucuaaauggga

SEQ ID NO: 292982 - RNA, 23 nt, Human adenovirus F
uuguguaaauccuaaauugcagu

SEQ ID NO: 292983 - RNA, 22 nt, Human adenovirus F
uuguuugcggugguacaggggg

SEQ ID NO: 292984 - RNA, 12 nt, Human adenovirus F
uuuaaacaagca

SEQ ID NO: 292985 - RNA, 15 nt, Human adenovirus F
uuuaaccugcuguuu

SEQ ID NO: 292986 - RNA, 14 nt, Human adenovirus F
uuuaauggaugugu

SEQ ID NO: 292987 - RNA, 16 nt, Human adenovirus F
uuuacgggugccuuca

SEQ ID NO: 292988 - RNA, 17 nt, Human adenovirus F
uuuacggucccacuggc

SEQ ID NO: 292989 - RNA, 23 nt, Human adenovirus F
uuuauaccauuaagaagacuguu

SEQ ID NO: 292990 - RNA, 22 nt, Human adenovirus F
uuuaugcagacaagacauggaa

SEQ ID NO: 292991 - RNA, 17 nt, Human adenovirus F
uuuaugggcaccuggaa

SEQ ID NO: 292992 - RNA, 19 nt, Human adenovirus F
uuucgaacgcgccagguga

SEQ ID NO: 292993 - RNA, 21 nt, Human adenovirus F
uuucgaacgcgccaggugaau

SEQ ID NO: 292994 - RNA, 20 nt, Human adenovirus F
uuucggacgagcgccucaaa

SEQ ID NO: 292995 - RNA, 16 nt, Human adenovirus F
uuucggccauuuugga

SEQ ID NO: 292996 - RNA, 22 nt, Human adenovirus F
uuucugaagguuucauuuccau

SEQ ID NO: 292997 - RNA, 19 nt, Human adenovirus F
uuucugggcacguuugaca

SEQ ID NO: 292998 - RNA, 18 nt, Human adenovirus F
uuuggaagaugaguuuaa

SEQ ID NO: 292999 - RNA, 16 nt, Human adenovirus F
uuuggcucaacuuuaa

SEQ ID NO: 293000 - RNA, 14 nt, Human adenovirus F
uuuuggaagccgug

SEQ ID NO: 293001 - RNA, 18 nt, Human adenovirus F
uuuuucaagaaauuguga

SEQ ID NO: 293002 - RNA, 18 nt, Human adenovirus F
uuuuuccagcagcaccac

SEQ ID NO: 293003 - RNA, 16 nt, Human adenovirus F
aaaaacggggcuuuaa

SEQ ID NO: 293004 - RNA, 22 nt, Human adenovirus F
aaaaaguguagguaagagccau

SEQ ID NO: 293005 - RNA, 15 nt, Human adenovirus F
aaaaaugaccauggc

SEQ ID NO: 293006 - RNA, 20 nt, Human adenovirus F
aaaaccacuaaagcauuucc

SEQ ID NO: 293007 - RNA, 15 nt, Human adenovirus F
aaaaccagcauguca

SEQ ID NO: 293008 - RNA, 14 nt, Human adenovirus F
aaaacggugaaaug

SEQ ID NO: 293009 - RNA, 14 nt, Human adenovirus F
aaaacucugugaag

SEQ ID NO: 293010 - RNA, 22 nt, Human adenovirus F
aaaacucugugaaguuaccaaa

SEQ ID NO: 293011 - RNA, 17 nt, Human adenovirus F
aaaagguguuggcgauu

SEQ ID NO: 293012 - RNA, 21 nt, Human adenovirus F
aaaaguguagguaagagccau

SEQ ID NO: 293013 - RNA, 22 nt, Human adenovirus F
aaaaucguagguuuaaauuaca

SEQ ID NO: 293014 - RNA, 20 nt, Human adenovirus F
aaaaucugcugccaugccac

SEQ ID NO: 293015 - RNA, 15 nt, Human adenovirus F
aaaaugaugauuuau

SEQ ID NO: 293016 - RNA, 22 nt, Human adenovirus F
aaaauuauuugggaauuauuca

SEQ ID NO: 293017 - RNA, 23 nt, Human adenovirus F
aaaauugggcacgggacuaaaca

SEQ ID NO: 293018 - RNA, 20 nt, Human adenovirus F
aaacaacagccuuuguaaca

SEQ ID NO: 293019 - RNA, 10 nt, Human adenovirus F
aaacaagcug

SEQ ID NO: 293020 - RNA, 18 nt, Human adenovirus F
aaacaagcugaacuuugu

SEQ ID NO: 293021 - RNA, 14 nt, Human adenovirus F
aaacaggaagacaa

SEQ ID NO: 293022 - RNA, 19 nt, Human adenovirus F
aaacaucguccaacagcac

SEQ ID NO: 293023 - RNA, 12 nt, Human adenovirus F
aaaccaacaaaa

SEQ ID NO: 293024 - RNA, 21 nt, Human adenovirus F
aaacccaccgucuuccaccuc

SEQ ID NO: 293025 - RNA, 16 nt, Human adenovirus F
aaacccuuaacaaccu

SEQ ID NO: 293026 - RNA, 19 nt, Human adenovirus F
aaacguuuggagaaaacac

SEQ ID NO: 293027 - RNA, 21 nt, Human adenovirus F
aaacuaucaacuacagccugu

SEQ ID NO: 293028 - RNA, 22 nt, Human adenovirus F
aaacucugugaaguuaccaaag

SEQ ID NO: 293029 - RNA, 23 nt, Human adenovirus F
aaacucugugaaguuaccaaaga

SEQ ID NO: 293030 - RNA, 17 nt, Human adenovirus F
aaacugcggacuaccua

SEQ ID NO: 293031 - RNA, 20 nt, Human adenovirus F
aaacuguucaaggaccguuu

SEQ ID NO: 293032 - RNA, 13 nt, Human adenovirus F
aaacuugcuuucc

SEQ ID NO: 293033 - RNA, 17 nt, Human adenovirus F
aaacuuuuugaauuaca

SEQ ID NO: 293034 - RNA, 17 nt, Human adenovirus F
aaagaaaaccagcaugu

SEQ ID NO: 293035 - RNA, 13 nt, Human adenovirus F
aaagagcuugaac

SEQ ID NO: 293036 - RNA, 13 nt, Human adenovirus F
aaagcuuaccuua

SEQ ID NO: 293037 - RNA, 22 nt, Human adenovirus F
aaaggaccaaaacuuucaacaa

SEQ ID NO: 293038 - RNA, 16 nt, Human adenovirus F
aaaggcaagacacuga

SEQ ID NO: 293039 - RNA, 19 nt, Human adenovirus F
aaaggcaagacacugagga

SEQ ID NO: 293040 - RNA, 16 nt, Human adenovirus F
aaaggcccauaccaaa

SEQ ID NO: 293041 - RNA, 17 nt, Human adenovirus F
aaaggcccauaccaaag

SEQ ID NO: 293042 - RNA, 13 nt, Human adenovirus F
aaagguguuggcg

SEQ ID NO: 293043 - RNA, 14 nt, Human adenovirus F
aaaguccuggccaa

SEQ ID NO: 293044 - RNA, 21 nt, Human adenovirus F
aaaguccuggccaacugccac

SEQ ID NO: 293045 - RNA, 14 nt, Human adenovirus F
aaagucugcaugca

SEQ ID NO: 293046 - RNA, 17 nt, Human adenovirus F
aaaguuauucugauuaa

SEQ ID NO: 293047 - RNA, 16 nt, Human adenovirus F
aaaguuccucuucucu

SEQ ID NO: 293048 - RNA, 19 nt, Human adenovirus F
aaauaauccaaucguagca

SEQ ID NO: 293049 - RNA, 16 nt, Human adenovirus F
aaauaaugacuuuacc

SEQ ID NO: 293050 - RNA, 15 nt, Human adenovirus F
aaaucagaugcauuu

SEQ ID NO: 293051 - RNA, 14 nt, Human adenovirus F
aaaugaaaccuuca

SEQ ID NO: 293052 - RNA, 14 nt, Human adenovirus F
aaaugaugauuuau

SEQ ID NO: 293053 - RNA, 22 nt, Human adenovirus F
aaauugggcacgggacuaaaca

SEQ ID NO: 293054 - RNA, 18 nt, Human adenovirus F
aacaaaaacuuacaauca

SEQ ID NO: 293055 - RNA, 23 nt, Human adenovirus F
aacaaauacagucaagcucucca

SEQ ID NO: 293056 - RNA, 23 nt, Human adenovirus F
aacaacuguacugcuacuacuuu

SEQ ID NO: 293057 - RNA, 23 nt, Human adenovirus F
aacaauauuuuauuguucuguua

SEQ ID NO: 293058 - RNA, 14 nt, Human adenovirus F
aacacuacaauccc

SEQ ID NO: 293059 - RNA, 23 nt, Human adenovirus F
aacagaaaccucuuccuuuuggc

SEQ ID NO: 293060 - RNA, 18 nt, Human adenovirus F
aacagacaauuuugcaaa

SEQ ID NO: 293061 - RNA, 22 nt, Human adenovirus F
aacagacaauuuugcaaacuau

SEQ ID NO: 293062 - RNA, 15 nt, Human adenovirus F
aacaguaacacaggu

SEQ ID NO: 293063 - RNA, 13 nt, Human adenovirus F
aacauaacaccua

SEQ ID NO: 293064 - RNA, 17 nt, Human adenovirus F
aacaucugcaucggugc

SEQ ID NO: 293065 - RNA, 21 nt, Human adenovirus F
aaccacgagguggcuacccuu

SEQ ID NO: 293066 - RNA, 14 nt, Human adenovirus F
aaccagcacacagg

SEQ ID NO: 293067 - RNA, 21 nt, Human adenovirus F
aacccaacagggacacgagcu

SEQ ID NO: 293068 - RNA, 14 nt, Human adenovirus F
aaccccauguggca

SEQ ID NO: 293069 - RNA, 18 nt, Human adenovirus F
aaccgcuuuucggccauu

SEQ ID NO: 293070 - RNA, 23 nt, Human adenovirus F
aaccggguuuuggacauggccag

SEQ ID NO: 293071 - RNA, 22 nt, Human adenovirus F
aaccgucgauuugcgaacauuu

SEQ ID NO: 293072 - RNA, 16 nt, Human adenovirus F
aaccuucgcugcuuua

SEQ ID NO: 293073 - RNA, 20 nt, Human adenovirus F
aaccuuguauuuguauaauc

SEQ ID NO: 293074 - RNA, 18 nt, Human adenovirus F
aacgagaggaccacuuaa

SEQ ID NO: 293075 - RNA, 14 nt, Human adenovirus F
aacgcgccagguga

SEQ ID NO: 293076 - RNA, 22 nt, Human adenovirus F
aacgcgcuuacucuuucuuaca

SEQ ID NO: 293077 - RNA, 17 nt, Human adenovirus F
aacgcugugaguuuuga

SEQ ID NO: 293078 - RNA, 18 nt, Human adenovirus F
aacgguuagaauucugua

SEQ ID NO: 293079 - RNA, 15 nt, Human adenovirus F
aacguaaccuuguau

SEQ ID NO: 293080 - RNA, 16 nt, Human adenovirus F
aacguuaguguuggca

SEQ ID NO: 293081 - RNA, 13 nt, Human adenovirus F
aacuccucagauu

SEQ ID NO: 293082 - RNA, 18 nt, Human adenovirus F
aacucucgccugcguggu

SEQ ID NO: 293083 - RNA, 20 nt, Human adenovirus F
aacucugugaaguuaccaaa

SEQ ID NO: 293084 - RNA, 21 nt, Human adenovirus F
aacucugugaaguuaccaaag

SEQ ID NO: 293085 - RNA, 23 nt, Human adenovirus F
aacucugugaaguuaccaaagac

SEQ ID NO: 293086 - RNA, 22 nt, Human adenovirus F
aacugacgauucuggccucuau

SEQ ID NO: 293087 - RNA, 13 nt, Human adenovirus F
aacuguacugcua

SEQ ID NO: 293088 - RNA, 20 nt, Human adenovirus F
aacuugcuuuccacccagcu

SEQ ID NO: 293089 - RNA, 16 nt, Human adenovirus F
aacuuuauggauguuu

SEQ ID NO: 293090 - RNA, 16 nt, Human adenovirus F
aagaaaaccagcaugu

SEQ ID NO: 293091 - RNA, 19 nt, Human adenovirus F
aagaaaaccagcaugucag

SEQ ID NO: 293092 - RNA, 14 nt, Human adenovirus F
aagaagguccaugg

SEQ ID NO: 293093 - RNA, 19 nt, Human adenovirus F
aagaagguccauggugggg

SEQ ID NO: 293094 - RNA, 21 nt, Human adenovirus F
aagacacugaggauuuucuca

SEQ ID NO: 293095 - RNA, 15 nt, Human adenovirus F
aagacagagcuuuau

SEQ ID NO: 293096 - RNA, 22 nt, Human adenovirus F
aagaggguacuagcagugggca

SEQ ID NO: 293097 - RNA, 13 nt, Human adenovirus F
aagauauggccau

SEQ ID NO: 293098 - RNA, 13 nt, Human adenovirus F
aagaugaguuuaa

SEQ ID NO: 293099 - RNA, 14 nt, Human adenovirus F
aagauggcaguugc

SEQ ID NO: 293100 - RNA, 13 nt, Human adenovirus F
aagcaaagccauc

SEQ ID NO: 293101 - RNA, 22 nt, Human adenovirus F
aagcaauauugucgcaugccuc

SEQ ID NO: 293102 - RNA, 18 nt, Human adenovirus F
aagcagagcucugcaaaa

SEQ ID NO: 293103 - RNA, 22 nt, Human adenovirus F
aagcauguaaaaacaugcagca

SEQ ID NO: 293104 - RNA, 18 nt, Human adenovirus F
aagccucucgcucugcaa

SEQ ID NO: 293105 - RNA, 19 nt, Human adenovirus F
aagccucucgcucugcaaa

SEQ ID NO: 293106 - RNA, 17 nt, Human adenovirus F
aagcucuccacggguuc

SEQ ID NO: 293107 - RNA, 16 nt, Human adenovirus F
aagcugaacuuuguua

SEQ ID NO: 293108 - RNA, 19 nt, Human adenovirus F
aagcugaacuuuguuauga

SEQ ID NO: 293109 - RNA, 22 nt, Human adenovirus F
aagcuggcgugugccauuguua

SEQ ID NO: 293110 - RNA, 11 nt, Human adenovirus F
aagcuuaccuu

SEQ ID NO: 293111 - RNA, 13 nt, Human adenovirus F
aagcuuaccuuaa

SEQ ID NO: 293112 - RNA, 20 nt, Human adenovirus F
aagcuuaccuuaaauuugau

SEQ ID NO: 293113 - RNA, 14 nt, Human adenovirus F
aaggaccaaaacuu

SEQ ID NO: 293114 - RNA, 17 nt, Human adenovirus F
aaggcccauaccaaaga

SEQ ID NO: 293115 - RNA, 18 nt, Human adenovirus F
aaggcccauaccaaagag

SEQ ID NO: 293116 - RNA, 12 nt, Human adenovirus F
aaggccuggaac

SEQ ID NO: 293117 - RNA, 19 nt, Human adenovirus F
aaggguugucgaguuggca

SEQ ID NO: 293118 - RNA, 18 nt, Human adenovirus F
aagguacacaccaaacuc

SEQ ID NO: 293119 - RNA, 20 nt, Human adenovirus F
aaguccuggccaacugccac

SEQ ID NO: 293120 - RNA, 22 nt, Human adenovirus F
aaguccuggccaacugccaccu

SEQ ID NO: 293121 - RNA, 14 nt, Human adenovirus F
aaguuaccaaagac

SEQ ID NO: 293122 - RNA, 20 nt, Human adenovirus F
aaguuuuuccagcagcacca

SEQ ID NO: 293123 - RNA, 21 nt, Human adenovirus F
aauaaaaggcggauuuuugcc

SEQ ID NO: 293124 - RNA, 18 nt, Human adenovirus F
aauacacugauccacuua

SEQ ID NO: 293125 - RNA, 16 nt, Human adenovirus F
aauacagucaagcucu

SEQ ID NO: 293126 - RNA, 15 nt, Human adenovirus F
aauacauaggcauua

SEQ ID NO: 293127 - RNA, 14 nt, Human adenovirus F
aaucccagcuuuug

SEQ ID NO: 293128 - RNA, 20 nt, Human adenovirus F
aaucccugucuccgggguuc

SEQ ID NO: 293129 - RNA, 16 nt, Human adenovirus F
aauccuaaauugcagu

SEQ ID NO: 293130 - RNA, 14 nt, Human adenovirus F
aauccuaacaaaaa

SEQ ID NO: 293131 - RNA, 12 nt, Human adenovirus F
aauccuuuuugg

SEQ ID NO: 293132 - RNA, 21 nt, Human adenovirus F
aaucucccuccccccuuccac

SEQ ID NO: 293133 - RNA, 14 nt, Human adenovirus F
aaucuuaaaacuga

SEQ ID NO: 293134 - RNA, 14 nt, Human adenovirus F
aaucuucaucuugc

SEQ ID NO: 293135 - RNA, 18 nt, Human adenovirus F
aaucuucaucuugcagau

SEQ ID NO: 293136 - RNA, 21 nt, Human adenovirus F
aaugaauuuguuauacaagua

SEQ ID NO: 293137 - RNA, 19 nt, Human adenovirus F
aaugcaaaaagggucuuuu

SEQ ID NO: 293138 - RNA, 22 nt, Human adenovirus F
aauggaaaggcccauaccaaag

SEQ ID NO: 293139 - RNA, 23 nt, Human adenovirus F
aauguaaggcgggggguguagug

SEQ ID NO: 293140 - RNA, 14 nt, Human adenovirus F
aauguugauuuuaa

SEQ ID NO: 293141 - RNA, 15 nt, Human adenovirus F
aauuagggugauaca

SEQ ID NO: 293142 - RNA, 12 nt, Human adenovirus F
aauucgugccac

SEQ ID NO: 293143 - RNA, 14 nt, Human adenovirus F
aauuuuuugaauca

SEQ ID NO: 293144 - RNA, 14 nt, Human adenovirus F
acaaaauaacaaua

SEQ ID NO: 293145 - RNA, 20 nt, Human adenovirus F
acaaacuuuuugaauuacau

SEQ ID NO: 293146 - RNA, 16 nt, Human adenovirus F
acaaaguccuggccaa

SEQ ID NO: 293147 - RNA, 18 nt, Human adenovirus F
acaaaguccuggccaacu

SEQ ID NO: 293148 - RNA, 19 nt, Human adenovirus F
acaaaguccuggccaacug

SEQ ID NO: 293149 - RNA, 14 nt, Human adenovirus F
acaaauacagucaa

SEQ ID NO: 293150 - RNA, 16 nt, Human adenovirus F
acaacagccuuuguaa

SEQ ID NO: 293151 - RNA, 12 nt, Human adenovirus F
acaaccaaaaac

SEQ ID NO: 293152 - RNA, 14 nt, Human adenovirus F
acaaguauacauuu

SEQ ID NO: 293153 - RNA, 20 nt, Human adenovirus F
acaaguauacauuugaacag

SEQ ID NO: 293154 - RNA, 15 nt, Human adenovirus F
acaauccccuugaca

SEQ ID NO: 293155 - RNA, 15 nt, Human adenovirus F
acaauccuaacaaaa

SEQ ID NO: 293156 - RNA, 13 nt, Human adenovirus F
acaaugguccggg

SEQ ID NO: 293157 - RNA, 20 nt, Human adenovirus F
acaaugguccgggguugagg

SEQ ID NO: 293158 - RNA, 22 nt, Human adenovirus F
acacccccguuugcuuccucca

SEQ ID NO: 293159 - RNA, 16 nt, Human adenovirus F
acacugauccacuuac

SEQ ID NO: 293160 - RNA, 17 nt, Human adenovirus F
acacugauccacuuaca

SEQ ID NO: 293161 - RNA, 21 nt, Human adenovirus F
acacugauccacuuacaacca

SEQ ID NO: 293162 - RNA, 19 nt, Human adenovirus F
acacugucacuguauuaaa

SEQ ID NO: 293163 - RNA, 12 nt, Human adenovirus F
acagaaaccucu

SEQ ID NO: 293164 - RNA, 20 nt, Human adenovirus F
acaggugggcuuggauguuc

SEQ ID NO: 293165 - RNA, 13 nt, Human adenovirus F
acagucaagcucu

SEQ ID NO: 293166 - RNA, 24 nt, Human adenovirus F
acaguccaaaaucugcugccaugc

SEQ ID NO: 293167 - RNA, 17 nt, Human adenovirus F
acaguugggaccuuggc

SEQ ID NO: 293168 - RNA, 24 nt, Human adenovirus F
acauaacaccuauguuaggcuuua

SEQ ID NO: 293169 - RNA, 14 nt, Human adenovirus F
acaucaauuuugcg

SEQ ID NO: 293170 - RNA, 16 nt, Human adenovirus F
acaugaagaucugugu

SEQ ID NO: 293171 - RNA, 17 nt, Human adenovirus F
acaugagcuuacuuuaa

SEQ ID NO: 293172 - RNA, 17 nt, Human adenovirus F
acaugauauugucuaaa

SEQ ID NO: 293173 - RNA, 13 nt, Human adenovirus F
acaugcagcagaa

SEQ ID NO: 293174 - RNA, 16 nt, Human adenovirus F
acauugauaaaaaugg

SEQ ID NO: 293175 - RNA, 18 nt, Human adenovirus F
accaauccugaaugcaug

SEQ ID NO: 293176 - RNA, 19 nt, Human adenovirus F
accacaguccuucugccac

SEQ ID NO: 293177 - RNA, 17 nt, Human adenovirus F
accacccggguuuaccu

SEQ ID NO: 293178 - RNA, 16 nt, Human adenovirus F
accacggacagggcau

SEQ ID NO: 293179 - RNA, 14 nt, Human adenovirus F
accacggugguaca

SEQ ID NO: 293180 - RNA, 13 nt, Human adenovirus F
accagagccauag

SEQ ID NO: 293181 - RNA, 18 nt, Human adenovirus F
acccacgauguaaccaca

SEQ ID NO: 293182 - RNA, 20 nt, Human adenovirus F
accccgccccgaccacaguc

SEQ ID NO: 293183 - RNA, 17 nt, Human adenovirus F
accccgucuacccuuac

SEQ ID NO: 293184 - RNA, 20 nt, Human adenovirus F
acccgcaaucccgaagccuu

SEQ ID NO: 293185 - RNA, 22 nt, Human adenovirus F
acccggguuuaccugguggaca

SEQ ID NO: 293186 - RNA, 11 nt, Human adenovirus F
acccugaccca

SEQ ID NO: 293187 - RNA, 21 nt, Human adenovirus F
acccuguguggucuaagggaa

SEQ ID NO: 293188 - RNA, 15 nt, Human adenovirus F
acccuuaacaaccuc

SEQ ID NO: 293189 - RNA, 19 nt, Human adenovirus F
acccuuacgaacacuacaa

SEQ ID NO: 293190 - RNA, 24 nt, Human adenovirus F
acccuucugugccugucaugaaag

SEQ ID NO: 293191 - RNA, 22 nt, Human adenovirus F
accgacgauccaauaguggcgu

SEQ ID NO: 293192 - RNA, 22 nt, Human adenovirus F
accgaguuccugcgcugcuacu

SEQ ID NO: 293193 - RNA, 19 nt, Human adenovirus F
accggcggcguacacuggc

SEQ ID NO: 293194 - RNA, 13 nt, Human adenovirus F
accgucaucucua

SEQ ID NO: 293195 - RNA, 15 nt, Human adenovirus F
accucccucugagga

SEQ ID NO: 293196 - RNA, 22 nt, Human adenovirus F
accucuguuugcugcacugcca

SEQ ID NO: 293197 - RNA, 23 nt, Human adenovirus F
accucuguuugcugcacugccau

SEQ ID NO: 293198 - RNA, 16 nt, Human adenovirus F
accugggggcuuugaa

SEQ ID NO: 293199 - RNA, 20 nt, Human adenovirus F
accugggucucuucaaugua

SEQ ID NO: 293200 - RNA, 19 nt, Human adenovirus F
accugucgcggucguuuaa

SEQ ID NO: 293201 - RNA, 13 nt, Human adenovirus F
accuugaguuuaa

SEQ ID NO: 293202 - RNA, 23 nt, Human adenovirus F
accuuguauuuguauaaucuuaa

SEQ ID NO: 293203 - RNA, 19 nt, Human adenovirus F
accuuuuuacccugaccca

SEQ ID NO: 293204 - RNA, 21 nt, Human adenovirus F
acgauucuggccucuauaaug

SEQ ID NO: 293205 - RNA, 18 nt, Human adenovirus F
acgcaagagacguuugca

SEQ ID NO: 293206 - RNA, 14 nt, Human adenovirus F
acgcaggagcucag

SEQ ID NO: 293207 - RNA, 15 nt, Human adenovirus F
acgccuccaccaccu

SEQ ID NO: 293208 - RNA, 14 nt, Human adenovirus F
acgcgcuuugcgca

SEQ ID NO: 293209 - RNA, 21 nt, Human adenovirus F
acgcucuuauuguucaaggaa

SEQ ID NO: 293210 - RNA, 19 nt, Human adenovirus F
acgcugaaaguagggagaa

SEQ ID NO: 293211 - RNA, 16 nt, Human adenovirus F
acgcuugcuggaguug

SEQ ID NO: 293212 - RNA, 23 nt, Human adenovirus F
acgcuuuccggguuuuauggcac

SEQ ID NO: 293213 - RNA, 15 nt, Human adenovirus F
acggauugucuuccc

SEQ ID NO: 293214 - RNA, 18 nt, Human adenovirus F
acgggcugaggagcuguu

SEQ ID NO: 293215 - RNA, 21 nt, Human adenovirus F
acgggguuagcgcacugguaa

SEQ ID NO: 293216 - RNA, 21 nt, Human adenovirus F
acgucccuccccguuaccugg

SEQ ID NO: 293217 - RNA, 14 nt, Human adenovirus F
acguccucuacuau

SEQ ID NO: 293218 - RNA, 12 nt, Human adenovirus F
acuaaaaccaac

SEQ ID NO: 293219 - RNA, 22 nt, Human adenovirus F
acuacaauccccuugacauucc

SEQ ID NO: 293220 - RNA, 24 nt, Human adenovirus F
acuagaaaucgacgggcagugcac

SEQ ID NO: 293221 - RNA, 17 nt, Human adenovirus F
acuagucuuagcuggau

SEQ ID NO: 293222 - RNA, 19 nt, Human adenovirus F
acuauacacugucacugua

SEQ ID NO: 293223 - RNA, 20 nt, Human adenovirus F
acuauacacugucacuguau

SEQ ID NO: 293224 - RNA, 22 nt, Human adenovirus F
acuaugguggggguuaagccca

SEQ ID NO: 293225 - RNA, 15 nt, Human adenovirus F
acuauuaccgucauc

SEQ ID NO: 293226 - RNA, 22 nt, Human adenovirus F
acucguucaguggcgcgcuaac

SEQ ID NO: 293227 - RNA, 20 nt, Human adenovirus F
acucugugaaguuaccaaag

SEQ ID NO: 293228 - RNA, 21 nt, Human adenovirus F
acucugugaaguuaccaaaga

SEQ ID NO: 293229 - RNA, 22 nt, Human adenovirus F
acucugugaaguuaccaaagac

SEQ ID NO: 293230 - RNA, 13 nt, Human adenovirus F
acucuuucuuaca

SEQ ID NO: 293231 - RNA, 14 nt, Human adenovirus F
acucuuucuuacaa

SEQ ID NO: 293232 - RNA, 20 nt, Human adenovirus F
acugaccccauuacuaccaa

SEQ ID NO: 293233 - RNA, 20 nt, Human adenovirus F
acugaggauuuucucaacuu

SEQ ID NO: 293234 - RNA, 16 nt, Human adenovirus F
acugauccacuuacaa

SEQ ID NO: 293235 - RNA, 19 nt, Human adenovirus F
acugauccacuuacaacca

SEQ ID NO: 293236 - RNA, 17 nt, Human adenovirus F
acugcgcggcuguaaca

SEQ ID NO: 293237 - RNA, 19 nt, Human adenovirus F
acugcuaccaacucaccaa

SEQ ID NO: 293238 - RNA, 15 nt, Human adenovirus F
acuggauacuggcaa

SEQ ID NO: 293239 - RNA, 21 nt, Human adenovirus F
acuggcaagagccaccuuguc

SEQ ID NO: 293240 - RNA, 16 nt, Human adenovirus F
acugucacuguauuaa

SEQ ID NO: 293241 - RNA, 21 nt, Human adenovirus F
acuguucaaccuucaagcccu

SEQ ID NO: 293242 - RNA, 22 nt, Human adenovirus F
acuguucuugucguaaccaacu

SEQ ID NO: 293243 - RNA, 17 nt, Human adenovirus F
acuuaucucaucuucac

SEQ ID NO: 293244 - RNA, 22 nt, Human adenovirus F
acuucaaccccgucuaccccua

SEQ ID NO: 293245 - RNA, 20 nt, Human adenovirus F
acuugcacuuuggcucgcuu

SEQ ID NO: 293246 - RNA, 22 nt, Human adenovirus F
acuugcuuuuucacgacggggu

SEQ ID NO: 293247 - RNA, 15 nt, Human adenovirus F
acuuuaaacaagcaa

SEQ ID NO: 293248 - RNA, 21 nt, Human adenovirus F
acuuuauugauacuuuuacag

SEQ ID NO: 293249 - RNA, 14 nt, Human adenovirus F
acuuucguacggga

SEQ ID NO: 293250 - RNA, 19 nt, Human adenovirus F
acuuucuccacguccuaaa

SEQ ID NO: 293251 - RNA, 14 nt, Human adenovirus F
agaaaaaaaagagg

SEQ ID NO: 293252 - RNA, 15 nt, Human adenovirus F
agaagacuguuaaua

SEQ ID NO: 293253 - RNA, 13 nt, Human adenovirus F
agaaugugguggg

SEQ ID NO: 293254 - RNA, 13 nt, Human adenovirus F
agaauucuguaaa

SEQ ID NO: 293255 - RNA, 16 nt, Human adenovirus F
agacauaucuugcaac

SEQ ID NO: 293256 - RNA, 20 nt, Human adenovirus F
agaccaacugcagcgcacgc

SEQ ID NO: 293257 - RNA, 22 nt, Human adenovirus F
agacugaguuucccugucguug

SEQ ID NO: 293258 - RNA, 22 nt, Human adenovirus F
agacuugguuaaagaaaaccag

SEQ ID NO: 293259 - RNA, 19 nt, Human adenovirus F
agagccauagcaacagcgu

SEQ ID NO: 293260 - RNA, 19 nt, Human adenovirus F
agagccgcggucaacagcu

SEQ ID NO: 293261 - RNA, 20 nt, Human adenovirus F
agaguggcauacuaucguca

SEQ ID NO: 293262 - RNA, 13 nt, Human adenovirus F
agauauggccaug

SEQ ID NO: 293263 - RNA, 16 nt, Human adenovirus F
agauauggccauguua

SEQ ID NO: 293264 - RNA, 19 nt, Human adenovirus F
agaugcauuuuggccugaa

SEQ ID NO: 293265 - RNA, 20 nt, Human adenovirus F
agauggcaguugcaucuccu

SEQ ID NO: 293266 - RNA, 20 nt, Human adenovirus F
agauuugaagaugacuucaa

SEQ ID NO: 293267 - RNA, 16 nt, Human adenovirus F
agcaaauugguuuaaa

SEQ ID NO: 293268 - RNA, 21 nt, Human adenovirus F
agcaacaggggaugucaaaac

SEQ ID NO: 293269 - RNA, 14 nt, Human adenovirus F
agcagcuuauccuu

SEQ ID NO: 293270 - RNA, 17 nt, Human adenovirus F
agcagugggcaaagggg

SEQ ID NO: 293271 - RNA, 18 nt, Human adenovirus F
agcauguaaaaacaugca

SEQ ID NO: 293272 - RNA, 21 nt, Human adenovirus F
agccagauuugaagaugacuu

SEQ ID NO: 293273 - RNA, 20 nt, Human adenovirus F
agccgcggucaacagcugga

SEQ ID NO: 293274 - RNA, 14 nt, Human adenovirus F
agccucgcgugcuc

SEQ ID NO: 293275 - RNA, 18 nt, Human adenovirus F
agccuucuauugcaugau

SEQ ID NO: 293276 - RNA, 20 nt, Human adenovirus F
agcuaaaggaccaaaacuuu

SEQ ID NO: 293277 - RNA, 20 nt, Human adenovirus F
agcucagaaaacgcaucuuu

SEQ ID NO: 293278 - RNA, 12 nt, Human adenovirus F
agcucugaacac

SEQ ID NO: 293279 - RNA, 17 nt, Human adenovirus F
agcugucauauacuuua

SEQ ID NO: 293280 - RNA, 20 nt, Human adenovirus F
agcugugcgcgagcuuuuaa

SEQ ID NO: 293281 - RNA, 21 nt, Human adenovirus F
agcuuacuuuaaaacuuggca

SEQ ID NO: 293282 - RNA, 15 nt, Human adenovirus F
agcuugaacauaaca

SEQ ID NO: 293283 - RNA, 19 nt, Human adenovirus F
agcuugaacauaacaccua

SEQ ID NO: 293284 - RNA, 19 nt, Human adenovirus F
aggaggaggcuaauggcca

SEQ ID NO: 293285 - RNA, 20 nt, Human adenovirus F
aggcagcagccccaggccaa

SEQ ID NO: 293286 - RNA, 14 nt, Human adenovirus F
aggcccauaccaaa

SEQ ID NO: 293287 - RNA, 20 nt, Human adenovirus F
aggcgcaaucuucgcauuuc

SEQ ID NO: 293288 - RNA, 14 nt, Human adenovirus F
aggcuuaacacuga

SEQ ID NO: 293289 - RNA, 22 nt, Human adenovirus F
agggaagcauucuuugucagug

SEQ ID NO: 293290 - RNA, 17 nt, Human adenovirus F
agggacacgagcuguca

SEQ ID NO: 293291 - RNA, 15 nt, Human adenovirus F
agggcggaacagcau

SEQ ID NO: 293292 - RNA, 19 nt, Human adenovirus F
agggcggaacagcauacgu

SEQ ID NO: 293293 - RNA, 15 nt, Human adenovirus F
agggucaccuugcaa

SEQ ID NO: 293294 - RNA, 22 nt, Human adenovirus F
agggugaaaggcaagacacuga

SEQ ID NO: 293295 - RNA, 19 nt, Human adenovirus F
aggguuuuugagcaugaaa

SEQ ID NO: 293296 - RNA, 13 nt, Human adenovirus F
agguaaaguggaa

SEQ ID NO: 293297 - RNA, 17 nt, Human adenovirus F
agguaaggguugucgag

SEQ ID NO: 293298 - RNA, 13 nt, Human adenovirus F
agguaggaccacu

SEQ ID NO: 293299 - RNA, 17 nt, Human adenovirus F
agguaggaccacuggag

SEQ ID NO: 293300 - RNA, 18 nt, Human adenovirus F
aggugaaucccgcuaugu

SEQ ID NO: 293301 - RNA, 16 nt, Human adenovirus F
aggugaggucuauucc

SEQ ID NO: 293302 - RNA, 18 nt, Human adenovirus F
agguuucauuuccauuac

SEQ ID NO: 293303 - RNA, 14 nt, Human adenovirus F
aguacacugacccc

SEQ ID NO: 293304 - RNA, 22 nt, Human adenovirus F
aguagccuaaggacuucaccua

SEQ ID NO: 293305 - RNA, 23 nt, Human adenovirus F
aguagccuucuauugcaugauua

SEQ ID NO: 293306 - RNA, 13 nt, Human adenovirus F
aguccaaaugacu

SEQ ID NO: 293307 - RNA, 16 nt, Human adenovirus F
aguccagcgcgugcuu

SEQ ID NO: 293308 - RNA, 16 nt, Human adenovirus F
aguccuggccaacugc

SEQ ID NO: 293309 - RNA, 15 nt, Human adenovirus F
agucuaccacuucua

SEQ ID NO: 293310 - RNA, 16 nt, Human adenovirus F
agucuaccacuucuau

SEQ ID NO: 293311 - RNA, 13 nt, Human adenovirus F
agucucccaccuu

SEQ ID NO: 293312 - RNA, 23 nt, Human adenovirus F
agucuuagcuggaucaaacagga

SEQ ID NO: 293313 - RNA, 18 nt, Human adenovirus F
agugcguaagaccucauc

SEQ ID NO: 293314 - RNA, 17 nt, Human adenovirus F
agugcguuggccucaac

SEQ ID NO: 293315 - RNA, 15 nt, Human adenovirus F
aguguuaguuuauuc

SEQ ID NO: 293316 - RNA, 18 nt, Human adenovirus F
aguuaaccuugaguuuaa

SEQ ID NO: 293317 - RNA, 22 nt, Human adenovirus F
aguuaccaaagacaaaaucacu

SEQ ID NO: 293318 - RNA, 20 nt, Human adenovirus F
aguucaaagaagagcugcug

SEQ ID NO: 293319 - RNA, 19 nt, Human adenovirus F
aguuccugcgcugcuacuc

SEQ ID NO: 293320 - RNA, 22 nt, Human adenovirus F
aguuccugcgcugcuacucaac

SEQ ID NO: 293321 - RNA, 12 nt, Human adenovirus F
aguugaaaauac

SEQ ID NO: 293322 - RNA, 18 nt, Human adenovirus F
aguugggagggaugcaug

SEQ ID NO: 293323 - RNA, 16 nt, Human adenovirus F
aguuuauucugaugga

SEQ ID NO: 293324 - RNA, 20 nt, Human adenovirus F
auaaaaggcggauuuuugcc

SEQ ID NO: 293325 - RNA, 16 nt, Human adenovirus F
auaaagcuuaccuuaa

SEQ ID NO: 293326 - RNA, 14 nt, Human adenovirus F
auaaccccaugugg

SEQ ID NO: 293327 - RNA, 21 nt, Human adenovirus F
auaaccccauguggcacuguu

SEQ ID NO: 293328 - RNA, 22 nt, Human adenovirus F
auaaccccauguggcacuguuu

SEQ ID NO: 293329 - RNA, 17 nt, Human adenovirus F
auacacugucacuguau

SEQ ID NO: 293330 - RNA, 11 nt, Human adenovirus F
auaccuacuuc

SEQ ID NO: 293331 - RNA, 20 nt, Human adenovirus F
auacuaucgucaucaucccc

SEQ ID NO: 293332 - RNA, 22 nt, Human adenovirus F
auacugcuccuggcgagcccau

SEQ ID NO: 293333 - RNA, 17 nt, Human adenovirus F
auacuuuuacagaauuc

SEQ ID NO: 293334 - RNA, 17 nt, Human adenovirus F
auauacguaaaugugcc

SEQ ID NO: 293335 - RNA, 15 nt, Human adenovirus F
auauggccauguuag

SEQ ID NO: 293336 - RNA, 21 nt, Human adenovirus F
aucaaacaggaagacaauccu

SEQ ID NO: 293337 - RNA, 19 nt, Human adenovirus F
aucaagccccgcaguaauc

SEQ ID NO: 293338 - RNA, 21 nt, Human adenovirus F
aucaagccccgcaguaauccc

SEQ ID NO: 293339 - RNA, 12 nt, Human adenovirus F
aucaauuuugcg

SEQ ID NO: 293340 - RNA, 14 nt, Human adenovirus F
aucacuaaaaccaa

SEQ ID NO: 293341 - RNA, 23 nt, Human adenovirus F
aucacuccguucgcucacccgca

SEQ ID NO: 293342 - RNA, 23 nt, Human adenovirus F
aucagaaccuccgacgcuugcug

SEQ ID NO: 293343 - RNA, 13 nt, Human adenovirus F
auccacuuacaac

SEQ ID NO: 293344 - RNA, 15 nt, Human adenovirus F
auccacuuacaacca

SEQ ID NO: 293345 - RNA, 18 nt, Human adenovirus F
auccacuuacaaccaaaa

SEQ ID NO: 293346 - RNA, 15 nt, Human adenovirus F
aucccccccucagaa

SEQ ID NO: 293347 - RNA, 17 nt, Human adenovirus F
aucccgcuauguuggcg

SEQ ID NO: 293348 - RNA, 20 nt, Human adenovirus F
auccgcacucuugcucucaa

SEQ ID NO: 293349 - RNA, 15 nt, Human adenovirus F
auccuaacaaaaacu

SEQ ID NO: 293350 - RNA, 14 nt, Human adenovirus F
auccucccaacaac

SEQ ID NO: 293351 - RNA, 13 nt, Human adenovirus F
aucgccaacagcc

SEQ ID NO: 293352 - RNA, 18 nt, Human adenovirus F
aucuccacgggcugagga

SEQ ID NO: 293353 - RNA, 19 nt, Human adenovirus F
aucuccacgggcugaggag

SEQ ID NO: 293354 - RNA, 23 nt, Human adenovirus F
aucucccuccccccuuccacuuu

SEQ ID NO: 293355 - RNA, 20 nt, Human adenovirus F
aucugacaacccgucuuccc

SEQ ID NO: 293356 - RNA, 18 nt, Human adenovirus F
aucugcagcauugccacu

SEQ ID NO: 293357 - RNA, 22 nt, Human adenovirus F
aucuucaucuugcagaugaaaa

SEQ ID NO: 293358 - RNA, 18 nt, Human adenovirus F
aucuucgugacuugcacu

SEQ ID NO: 293359 - RNA, 22 nt, Human adenovirus F
aucuugugcgccuuuuguagua

SEQ ID NO: 293360 - RNA, 15 nt, Human adenovirus F
augaaaguuccucuu

SEQ ID NO: 293361 - RNA, 16 nt, Human adenovirus F
augaaaguuccucuuc

SEQ ID NO: 293362 - RNA, 15 nt, Human adenovirus F
augacaccuccucaa

SEQ ID NO: 293363 - RNA, 21 nt, Human adenovirus F
augaguagccuucuauugcau

SEQ ID NO: 293364 - RNA, 20 nt, Human adenovirus F
augagucuguuuggugggcu

SEQ ID NO: 293365 - RNA, 20 nt, Human adenovirus F
augauuuaugguucacugua

SEQ ID NO: 293366 - RNA, 21 nt, Human adenovirus F
augauuuaugguucacuguau

SEQ ID NO: 293367 - RNA, 18 nt, Human adenovirus F
augcauuuuggccugaau

SEQ ID NO: 293368 - RNA, 16 nt, Human adenovirus F
augcuauugacacugc

SEQ ID NO: 293369 - RNA, 18 nt, Human adenovirus F
augcuccgggauaagcua

SEQ ID NO: 293370 - RNA, 22 nt, Human adenovirus F
auggaaaugaaaccuucagaaa

SEQ ID NO: 293371 - RNA, 14 nt, Human adenovirus F
auggccacccccuc

SEQ ID NO: 293372 - RNA, 16 nt, Human adenovirus F
auggccagcaccuacu

SEQ ID NO: 293373 - RNA, 18 nt, Human adenovirus F
auggccagcaccuacuuu

SEQ ID NO: 293374 - RNA, 12 nt, Human adenovirus F
auggccauguua

SEQ ID NO: 293375 - RNA, 15 nt, Human adenovirus F
auggccuaaaaccac

SEQ ID NO: 293376 - RNA, 15 nt, Human adenovirus F
augggacuggugggc

SEQ ID NO: 293377 - RNA, 15 nt, Human adenovirus F
augggcaccuggaac

SEQ ID NO: 293378 - RNA, 15 nt, Human adenovirus F
augggcuaaacaccc

SEQ ID NO: 293379 - RNA, 16 nt, Human adenovirus F
augguaacuccucuuc

SEQ ID NO: 293380 - RNA, 19 nt, Human adenovirus F
augguaacuccucuucucc

SEQ ID NO: 293381 - RNA, 16 nt, Human adenovirus F
auggucuuacaugcac

SEQ ID NO: 293382 - RNA, 14 nt, Human adenovirus F
augguucacuguau

SEQ ID NO: 293383 - RNA, 15 nt, Human adenovirus F
augguucacuguaua

SEQ ID NO: 293384 - RNA, 19 nt, Human adenovirus F
augguucacuguauaacuu

SEQ ID NO: 293385 - RNA, 22 nt, Human adenovirus F
augugagcgaggugaggucuau

SEQ ID NO: 293386 - RNA, 13 nt, Human adenovirus F
auuaaaccugggu

SEQ ID NO: 293387 - RNA, 18 nt, Human adenovirus F
auuaaugggcaaaggggg

SEQ ID NO: 293388 - RNA, 22 nt, Human adenovirus F
auuaaugggcaaagggggacaa

SEQ ID NO: 293389 - RNA, 20 nt, Human adenovirus F
auuacuccagucgcaugaau

SEQ ID NO: 293390 - RNA, 12 nt, Human adenovirus F
auuaugccucuu

SEQ ID NO: 293391 - RNA, 23 nt, Human adenovirus F
auuauuucgaacgcgccagguga

SEQ ID NO: 293392 - RNA, 17 nt, Human adenovirus F
auuccauuuauuacacc

SEQ ID NO: 293393 - RNA, 18 nt, Human adenovirus F
auucugggacgcucuuau

SEQ ID NO: 293394 - RNA, 20 nt, Human adenovirus F
auugacacugcuaccaacuc

SEQ ID NO: 293395 - RNA, 14 nt, Human adenovirus F
auugacgaacuuac

SEQ ID NO: 293396 - RNA, 22 nt, Human adenovirus F
auugcaugauuauaaaugcucu

SEQ ID NO: 293397 - RNA, 23 nt, Human adenovirus F
auugggauaccuuuuagagcuag

SEQ ID NO: 293398 - RNA, 14 nt, Human adenovirus F
auuuaccaccccag

SEQ ID NO: 293399 - RNA, 18 nt, Human adenovirus F
auuuaugguucacuguau

SEQ ID NO: 293400 - RNA, 23 nt, Human adenovirus F
auuuccugguuuccuauuacagc

SEQ ID NO: 293401 - RNA, 16 nt, Human adenovirus F
auuuucuuugccaccu

SEQ ID NO: 293402 - RNA, 17 nt, Human adenovirus F
auuuuggcagacauauc

SEQ ID NO: 293403 - RNA, 16 nt, Human adenovirus F
auuuugucacagaaga

SEQ ID NO: 293404 - RNA, 12 nt, Human adenovirus F
caaaauaacaau

SEQ ID NO: 293405 - RNA, 21 nt, Human adenovirus F
caaaauaacgcgcuuacucuu

SEQ ID NO: 293406 - RNA, 14 nt, Human adenovirus F
caaaaucaacacag

SEQ ID NO: 293407 - RNA, 14 nt, Human adenovirus F
caaacaacugcaau

SEQ ID NO: 293408 - RNA, 19 nt, Human adenovirus F
caaacacgggauaguuuuu

SEQ ID NO: 293409 - RNA, 11 nt, Human adenovirus F
caaacauguga

SEQ ID NO: 293410 - RNA, 15 nt, Human adenovirus F
caaacuauucuggga

SEQ ID NO: 293411 - RNA, 15 nt, Human adenovirus F
caaagacaaaaucac

SEQ ID NO: 293412 - RNA, 20 nt, Human adenovirus F
caaagagcuugaacauaaca

SEQ ID NO: 293413 - RNA, 21 nt, Human adenovirus F
caaagagcuugaacauaacac

SEQ ID NO: 293414 - RNA, 17 nt, Human adenovirus F
caaagccaaccuucggg

SEQ ID NO: 293415 - RNA, 19 nt, Human adenovirus F
caaaguccuggccaacugc

SEQ ID NO: 293416 - RNA, 21 nt, Human adenovirus F
caaaugggccuggcagcugga

SEQ ID NO: 293417 - RNA, 22 nt, Human adenovirus F
caaauugguuuaaaaugaugau

SEQ ID NO: 293418 - RNA, 12 nt, Human adenovirus F
caacagccuuug

SEQ ID NO: 293419 - RNA, 17 nt, Human adenovirus F
caacagccuuuguaaca

SEQ ID NO: 293420 - RNA, 22 nt, Human adenovirus F
caacgcaagagacguuugcaac

SEQ ID NO: 293421 - RNA, 16 nt, Human adenovirus F
caacguuggaccccac

SEQ ID NO: 293422 - RNA, 23 nt, Human adenovirus F
caacuagaaaucgacgggcagug

SEQ ID NO: 293423 - RNA, 22 nt, Human adenovirus F
caacugcaauuuaggauuuaca

SEQ ID NO: 293424 - RNA, 16 nt, Human adenovirus F
caacuucccucuccga

SEQ ID NO: 293425 - RNA, 11 nt, Human adenovirus F
caagacacuga

SEQ ID NO: 293426 - RNA, 17 nt, Human adenovirus F
caagcgggucaacacca

SEQ ID NO: 293427 - RNA, 13 nt, Human adenovirus F
caagcugaacuuu

SEQ ID NO: 293428 - RNA, 19 nt, Human adenovirus F
caaggaaacaacagccuuu

SEQ ID NO: 293429 - RNA, 14 nt, Human adenovirus F
caaguauacauuug

SEQ ID NO: 293430 - RNA, 15 nt, Human adenovirus F
caaguucaaagaaga

SEQ ID NO: 293431 - RNA, 17 nt, Human adenovirus F
caaguucaaagaagagc

SEQ ID NO: 293432 - RNA, 13 nt, Human adenovirus F
caauaaaguugaa

SEQ ID NO: 293433 - RNA, 17 nt, Human adenovirus F
caauaucucauucgcac

SEQ ID NO: 293434 - RNA, 16 nt, Human adenovirus F
caaucccgaagccuuc

SEQ ID NO: 293435 - RNA, 19 nt, Human adenovirus F
caaucccgaagccuucagg

SEQ ID NO: 293436 - RNA, 17 nt, Human adenovirus F
caauccuaacaaaaacu

SEQ ID NO: 293437 - RNA, 21 nt, Human adenovirus F
caaucuaucccuugauucuau

SEQ ID NO: 293438 - RNA, 17 nt, Human adenovirus F
caauggucuuacaugca

SEQ ID NO: 293439 - RNA, 21 nt, Human adenovirus F
caauggucuuacaugcacauc

SEQ ID NO: 293440 - RNA, 12 nt, Human adenovirus F
caauuaucuacg

SEQ ID NO: 293441 - RNA, 20 nt, Human adenovirus F
cacaaaauggacgaagacug

SEQ ID NO: 293442 - RNA, 20 nt, Human adenovirus F
cacagacaggucgcagcgac

SEQ ID NO: 293443 - RNA, 19 nt, Human adenovirus F
caccaaagguacacaccaa

SEQ ID NO: 293444 - RNA, 19 nt, Human adenovirus F
caccaauggaaaucaaguu

SEQ ID NO: 293445 - RNA, 22 nt, Human adenovirus F
caccaccugcccuuccucccaa

SEQ ID NO: 293446 - RNA, 15 nt, Human adenovirus F
caccacggacagggc

SEQ ID NO: 293447 - RNA, 14 nt, Human adenovirus F
caccccagcacuug

SEQ ID NO: 293448 - RNA, 19 nt, Human adenovirus F
caccuauguuaggcuuuau

SEQ ID NO: 293449 - RNA, 23 nt, Human adenovirus F
caccucuguuugcugcacugcca

SEQ ID NO: 293450 - RNA, 12 nt, Human adenovirus F
caccuugcaaaa

SEQ ID NO: 293451 - RNA, 20 nt, Human adenovirus F
cacgcgacgcggaagccgaa

SEQ ID NO: 293452 - RNA, 14 nt, Human adenovirus F
cacgggacuaaaca

SEQ ID NO: 293453 - RNA, 15 nt, Human adenovirus F
cacggugguacaaaa

SEQ ID NO: 293454 - RNA, 16 nt, Human adenovirus F
cacgucccuccccguu

SEQ ID NO: 293455 - RNA, 21 nt, Human adenovirus F
cacucuugcucucaagcugaa

SEQ ID NO: 293456 - RNA, 21 nt, Human adenovirus F
cacugacuuccugguccugac

SEQ ID NO: 293457 - RNA, 17 nt, Human adenovirus F
cacugauccacuuacaa

SEQ ID NO: 293458 - RNA, 21 nt, Human adenovirus F
cacuuaccagagccauagcaa

SEQ ID NO: 293459 - RNA, 17 nt, Human adenovirus F
cacuuuggcucgcuuua

SEQ ID NO: 293460 - RNA, 20 nt, Human adenovirus F
cacuuuggcucgcuuuacaa

SEQ ID NO: 293461 - RNA, 16 nt, Human adenovirus F
cagaaacaucguccaa

SEQ ID NO: 293462 - RNA, 20 nt, Human adenovirus F
cagaaacaucguccaacagc

SEQ ID NO: 293463 - RNA, 17 nt, Human adenovirus F
cagaacgaccauaguaa

SEQ ID NO: 293464 - RNA, 13 nt, Human adenovirus F
cagagcucugcaa

SEQ ID NO: 293465 - RNA, 20 nt, Human adenovirus F
cagagcucugcuuuggacuc

SEQ ID NO: 293466 - RNA, 20 nt, Human adenovirus F
cagagcuuuaugacuauggu

SEQ ID NO: 293467 - RNA, 23 nt, Human adenovirus F
cagauaugggcuaaacaccccac

SEQ ID NO: 293468 - RNA, 20 nt, Human adenovirus F
cagauuugaagaugacuuca

SEQ ID NO: 293469 - RNA, 15 nt, Human adenovirus F
cagcacgguggaguc

SEQ ID NO: 293470 - RNA, 19 nt, Human adenovirus F
cagcagauuuuggacugua

SEQ ID NO: 293471 - RNA, 14 nt, Human adenovirus F
cagccgcaaauggg

SEQ ID NO: 293472 - RNA, 14 nt, Human adenovirus F
cagccuccgguggc

SEQ ID NO: 293473 - RNA, 22 nt, Human adenovirus F
cagccuguggaguggcauuaaa

SEQ ID NO: 293474 - RNA, 17 nt, Human adenovirus F
cagcgacugacgcugcg

SEQ ID NO: 293475 - RNA, 12 nt, Human adenovirus F
cagcuggagcuu

SEQ ID NO: 293476 - RNA, 20 nt, Human adenovirus F
cagcuggagcuucucaggau

SEQ ID NO: 293477 - RNA, 16 nt, Human adenovirus F
cagcuuggaagagcua

SEQ ID NO: 293478 - RNA, 19 nt, Human adenovirus F
caggcgcuccacgucccuc

SEQ ID NO: 293479 - RNA, 16 nt, Human adenovirus F
cagggauacuggauac

SEQ ID NO: 293480 - RNA, 18 nt, Human adenovirus F
cagguucuuugcuggcaa

SEQ ID NO: 293481 - RNA, 15 nt, Human adenovirus F
cagguuuaucaggaa

SEQ ID NO: 293482 - RNA, 23 nt, Human adenovirus F
caguaugguaacuccucuucucc

SEQ ID NO: 293483 - RNA, 15 nt, Human adenovirus F
cagucaagcucucca

SEQ ID NO: 293484 - RNA, 18 nt, Human adenovirus F
cagucucccaccuugaua

SEQ ID NO: 293485 - RNA, 14 nt, Human adenovirus F
cagugcacugagca

SEQ ID NO: 293486 - RNA, 11 nt, Human adenovirus F
cauaccaaaga

SEQ ID NO: 293487 - RNA, 18 nt, Human adenovirus F
cauaucuugcaacugcug

SEQ ID NO: 293488 - RNA, 20 nt, Human adenovirus F
caucaguuauuagcuacuuu

SEQ ID NO: 293489 - RNA, 23 nt, Human adenovirus F
caucgccggaucgccaacagccc

SEQ ID NO: 293490 - RNA, 20 nt, Human adenovirus F
caugaaaguuccucuucucu

SEQ ID NO: 293491 - RNA, 21 nt, Human adenovirus F
caugagcaagcgcaaguucaa

SEQ ID NO: 293492 - RNA, 13 nt, Human adenovirus F
caugagcuuacuu

SEQ ID NO: 293493 - RNA, 21 nt, Human adenovirus F
caugauuauaaaugcucugaa

SEQ ID NO: 293494 - RNA, 12 nt, Human adenovirus F
cauguggagcua

SEQ ID NO: 293495 - RNA, 17 nt, Human adenovirus F
cauuaagaagacuguua

SEQ ID NO: 293496 - RNA, 19 nt, Human adenovirus F
cauuaagguuacucagcaa

SEQ ID NO: 293497 - RNA, 14 nt, Human adenovirus F
cauuaaugggcaaa

SEQ ID NO: 293498 - RNA, 18 nt, Human adenovirus F
cauuaaugggcaaagggg

SEQ ID NO: 293499 - RNA, 19 nt, Human adenovirus F
cauugacauuaugagcaaa

SEQ ID NO: 293500 - RNA, 23 nt, Human adenovirus F
cauugccacuuuuuuuguggcca

SEQ ID NO: 293501 - RNA, 21 nt, Human adenovirus F
cauuuuuuuuuauuggucaaa

SEQ ID NO: 293502 - RNA, 14 nt, Human adenovirus F
ccaaaacuuucaac

SEQ ID NO: 293503 - RNA, 16 nt, Human adenovirus F
ccaaaacuuucaacaa

SEQ ID NO: 293504 - RNA, 23 nt, Human adenovirus F
ccaaacucuuuauuuuucugagu

SEQ ID NO: 293505 - RNA, 19 nt, Human adenovirus F
ccaacagggacacgagcug

SEQ ID NO: 293506 - RNA, 18 nt, Human adenovirus F
ccaaccaggccuugcaaa

SEQ ID NO: 293507 - RNA, 22 nt, Human adenovirus F
ccaacgggcggcaaacuuucuc

SEQ ID NO: 293508 - RNA, 21 nt, Human adenovirus F
ccaacugcagcgcacgcugga

SEQ ID NO: 293509 - RNA, 11 nt, Human adenovirus F
ccaacugccac

SEQ ID NO: 293510 - RNA, 14 nt, Human adenovirus F
ccaccccagcacuu

SEQ ID NO: 293511 - RNA, 21 nt, Human adenovirus F
ccaccgcaaacaacugcaauu

SEQ ID NO: 293512 - RNA, 20 nt, Human adenovirus F
ccaccggcuccugugcagcg

SEQ ID NO: 293513 - RNA, 20 nt, Human adenovirus F
ccaccgucuuccaccucccu

SEQ ID NO: 293514 - RNA, 16 nt, Human adenovirus F
ccacggugguacaaaa

SEQ ID NO: 293515 - RNA, 18 nt, Human adenovirus F
ccacucgaaaccaaauuc

SEQ ID NO: 293516 - RNA, 22 nt, Human adenovirus F
ccacuggagggcgucaugcucu

SEQ ID NO: 293517 - RNA, 15 nt, Human adenovirus F
ccacuuacaaccaaa

SEQ ID NO: 293518 - RNA, 16 nt, Human adenovirus F
ccacuuacaaccaaaa

SEQ ID NO: 293519 - RNA, 17 nt, Human adenovirus F
ccacuuacaaccaaaaa

SEQ ID NO: 293520 - RNA, 17 nt, Human adenovirus F
ccagagccauagcaaca

SEQ ID NO: 293521 - RNA, 21 nt, Human adenovirus F
ccagcacugccggggcaauau

SEQ ID NO: 293522 - RNA, 19 nt, Human adenovirus F
ccagcugguaagcagccua

SEQ ID NO: 293523 - RNA, 15 nt, Human adenovirus F
ccaggccuugcaaaa

SEQ ID NO: 293524 - RNA, 12 nt, Human adenovirus F
ccauaccaaaga

SEQ ID NO: 293525 - RNA, 23 nt, Human adenovirus F
ccauaccaaagagcuugaacaua

SEQ ID NO: 293526 - RNA, 14 nt, Human adenovirus F
ccauagcaacagcg

SEQ ID NO: 293527 - RNA, 21 nt, Human adenovirus F
ccaucaguuauuagcuacuuu

SEQ ID NO: 293528 - RNA, 17 nt, Human adenovirus F
ccaucaugagucuguuu

SEQ ID NO: 293529 - RNA, 17 nt, Human adenovirus F
ccaugccacgagcagua

SEQ ID NO: 293530 - RNA, 18 nt, Human adenovirus F
ccauuaagaagacuguua

SEQ ID NO: 293531 - RNA, 19 nt, Human adenovirus F
cccaagagggaagacgggu

SEQ ID NO: 293532 - RNA, 23 nt, Human adenovirus F
cccaccgaguuccugcgcugcua

SEQ ID NO: 293533 - RNA, 16 nt, Human adenovirus F
cccaccgucuuccacc

SEQ ID NO: 293534 - RNA, 13 nt, Human adenovirus F
cccauaccaaaga

SEQ ID NO: 293535 - RNA, 20 nt, Human adenovirus F
cccauguggcacuguuugcu

SEQ ID NO: 293536 - RNA, 20 nt, Human adenovirus F
ccccagcugguaagcagccu

SEQ ID NO: 293537 - RNA, 13 nt, Human adenovirus F
ccccaggccaacc

SEQ ID NO: 293538 - RNA, 23 nt, Human adenovirus F
ccccauuacuaccaaugcuaaac

SEQ ID NO: 293539 - RNA, 14 nt, Human adenovirus F
cccgguagucaaaa

SEQ ID NO: 293540 - RNA, 17 nt, Human adenovirus F
cccuccaccuccaguga

SEQ ID NO: 293541 - RNA, 20 nt, Human adenovirus F
cccuggccuggaacccaaag

SEQ ID NO: 293542 - RNA, 12 nt, Human adenovirus F
cccuguguuuau

SEQ ID NO: 293543 - RNA, 22 nt, Human adenovirus F
cccuuacgaacacuacaauccc

SEQ ID NO: 293544 - RNA, 14 nt, Human adenovirus F
cccuugacauucca

SEQ ID NO: 293545 - RNA, 17 nt, Human adenovirus F
cccuugauucuaugaaa

SEQ ID NO: 293546 - RNA, 21 nt, Human adenovirus F
cccuuucccccuguaccaccg

SEQ ID NO: 293547 - RNA, 12 nt, Human adenovirus F
ccgaucacuccg

SEQ ID NO: 293548 - RNA, 21 nt, Human adenovirus F
ccgcagcugcuuguaucacag

SEQ ID NO: 293549 - RNA, 12 nt, Human adenovirus F
ccgcuccaucaa

SEQ ID NO: 293550 - RNA, 18 nt, Human adenovirus F
ccggagagcgguccguca

SEQ ID NO: 293551 - RNA, 17 nt, Human adenovirus F
ccggcggcguacacugg

SEQ ID NO: 293552 - RNA, 16 nt, Human adenovirus F
ccggggcaauaucuca

SEQ ID NO: 293553 - RNA, 19 nt, Human adenovirus F
ccgggguuccaccaagcuc

SEQ ID NO: 293554 - RNA, 19 nt, Human adenovirus F
ccggguuuuggacauggcc

SEQ ID NO: 293555 - RNA, 22 nt, Human adenovirus F
ccgugccagaaaaaacccuuaa

SEQ ID NO: 293556 - RNA, 20 nt, Human adenovirus F
ccguucgcucacccgcagcu

SEQ ID NO: 293557 - RNA, 20 nt, Human adenovirus F
ccguuuaugggcaccuggaa

SEQ ID NO: 293558 - RNA, 15 nt, Human adenovirus F
ccuaacaaaaacuua

SEQ ID NO: 293559 - RNA, 21 nt, Human adenovirus F
ccuaauuaaguccacccaaac

SEQ ID NO: 293560 - RNA, 16 nt, Human adenovirus F
ccuacucuuacaaagu

SEQ ID NO: 293561 - RNA, 19 nt, Human adenovirus F
ccuaucacuaaaaccaaca

SEQ ID NO: 293562 - RNA, 17 nt, Human adenovirus F
ccucagccugaaauaca

SEQ ID NO: 293563 - RNA, 12 nt, Human adenovirus F
ccuccaccggcc

SEQ ID NO: 293564 - RNA, 12 nt, Human adenovirus F
ccuccagcacug

SEQ ID NO: 293565 - RNA, 17 nt, Human adenovirus F
ccucucgcucugcaaaa

SEQ ID NO: 293566 - RNA, 21 nt, Human adenovirus F
ccucuguuugcugcacugcca

SEQ ID NO: 293567 - RNA, 22 nt, Human adenovirus F
ccucuguuugcugcacugccau

SEQ ID NO: 293568 - RNA, 23 nt, Human adenovirus F
ccucuucucugucuuauccuccu

SEQ ID NO: 293569 - RNA, 16 nt, Human adenovirus F
ccugcgcugcuacuca

SEQ ID NO: 293570 - RNA, 22 nt, Human adenovirus F
ccuggacuuuuagagugugaac

SEQ ID NO: 293571 - RNA, 15 nt, Human adenovirus F
ccuggccaacugcca

SEQ ID NO: 293572 - RNA, 12 nt, Human adenovirus F
ccugggaugcag

SEQ ID NO: 293573 - RNA, 19 nt, Human adenovirus F
ccugggcuggaugcauccu

SEQ ID NO: 293574 - RNA, 12 nt, Human adenovirus F
ccuggggaacaa

SEQ ID NO: 293575 - RNA, 18 nt, Human adenovirus F
ccugucaugaaaguuccu

SEQ ID NO: 293576 - RNA, 18 nt, Human adenovirus F
ccugucuccgggguucca

SEQ ID NO: 293577 - RNA, 15 nt, Human adenovirus F
ccuuaacaaccucgu

SEQ ID NO: 293578 - RNA, 20 nt, Human adenovirus F
ccuucgcugcuuuacuuaaa

SEQ ID NO: 293579 - RNA, 16 nt, Human adenovirus F
ccuucuauugcaugau

SEQ ID NO: 293580 - RNA, 21 nt, Human adenovirus F
ccuugauacggauugucuucc

SEQ ID NO: 293581 - RNA, 15 nt, Human adenovirus F
ccuugcaaaaccaaa

SEQ ID NO: 293582 - RNA, 22 nt, Human adenovirus F
ccuuguauuuguauaaucuuaa

SEQ ID NO: 293583 - RNA, 17 nt, Human adenovirus F
ccuuuuuacccugaccc

SEQ ID NO: 293584 - RNA, 22 nt, Human adenovirus F
cgacgggcagugcacugagcag

SEQ ID NO: 293585 - RNA, 18 nt, Human adenovirus F
cgaggaaaccgccuacuc

SEQ ID NO: 293586 - RNA, 18 nt, Human adenovirus F
cgagggggaggacuuuuu

SEQ ID NO: 293587 - RNA, 16 nt, Human adenovirus F
cgcaaacaacugcaau

SEQ ID NO: 293588 - RNA, 22 nt, Human adenovirus F
cgcaauggucuuacaugcacau

SEQ ID NO: 293589 - RNA, 23 nt, Human adenovirus F
cgccaaacggcguucuagccaac

SEQ ID NO: 293590 - RNA, 15 nt, Human adenovirus F
cgccaucaugagucu

SEQ ID NO: 293591 - RNA, 16 nt, Human adenovirus F
cgcccuucguuucuuc

SEQ ID NO: 293592 - RNA, 18 nt, Human adenovirus F
cgccucggaguaccugag

SEQ ID NO: 293593 - RNA, 20 nt, Human adenovirus F
cgcgcuuacucuuucuuaca

SEQ ID NO: 293594 - RNA, 13 nt, Human adenovirus F
cgcggucaacagc

SEQ ID NO: 293595 - RNA, 19 nt, Human adenovirus F
cgcuggccgugggcgacaa

SEQ ID NO: 293596 - RNA, 20 nt, Human adenovirus F
cgcuuuacaaccgucuggaa

SEQ ID NO: 293597 - RNA, 21 nt, Human adenovirus F
cggaagccgaaguccaaauga

SEQ ID NO: 293598 - RNA, 15 nt, Human adenovirus F
cggaucgccaacagc

SEQ ID NO: 293599 - RNA, 15 nt, Human adenovirus F
cgggcaguaccgcuc

SEQ ID NO: 293600 - RNA, 19 nt, Human adenovirus F
cgggguuccaccaagcucc

SEQ ID NO: 293601 - RNA, 20 nt, Human adenovirus F
cggguggcaagcggaaaauu

SEQ ID NO: 293602 - RNA, 16 nt, Human adenovirus F
cggguugucagauaug

SEQ ID NO: 293603 - RNA, 19 nt, Human adenovirus F
cgguaagaagguccauggu

SEQ ID NO: 293604 - RNA, 12 nt, Human adenovirus F
cguaaaguccag

SEQ ID NO: 293605 - RNA, 19 nt, Human adenovirus F
cguaaccuucgcugcuuua

SEQ ID NO: 293606 - RNA, 23 nt, Human adenovirus F
cguaaccuucgcugcuuuacuua

SEQ ID NO: 293607 - RNA, 13 nt, Human adenovirus F
cguaccugcuacc

SEQ ID NO: 293608 - RNA, 14 nt, Human adenovirus F
cgugcaggccaacc

SEQ ID NO: 293609 - RNA, 21 nt, Human adenovirus F
cgugccaccgauaccuacuuc

SEQ ID NO: 293610 - RNA, 21 nt, Human adenovirus F
cgugugccagccuuaguggaa

SEQ ID NO: 293611 - RNA, 14 nt, Human adenovirus F
cguucccuccauca

SEQ ID NO: 293612 - RNA, 15 nt, Human adenovirus F
cguugaugacgucau

SEQ ID NO: 293613 - RNA, 15 nt, Human adenovirus F
cguugccacguccac

SEQ ID NO: 293614 - RNA, 16 nt, Human adenovirus F
cguugcgauacugcaa

SEQ ID NO: 293615 - RNA, 17 nt, Human adenovirus F
cguugucaaacacggga

SEQ ID NO: 293616 - RNA, 14 nt, Human adenovirus F
cuaaacaugagcuu

SEQ ID NO: 293617 - RNA, 12 nt, Human adenovirus F
cuaacaaaaacu

SEQ ID NO: 293618 - RNA, 21 nt, Human adenovirus F
cuacaagauuccaccaaaggu

SEQ ID NO: 293619 - RNA, 22 nt, Human adenovirus F
cuacaauccccuugacauucca

SEQ ID NO: 293620 - RNA, 17 nt, Human adenovirus F
cuacaccaaugcaaaaa

SEQ ID NO: 293621 - RNA, 15 nt, Human adenovirus F
cuacagcauuggaaa

SEQ ID NO: 293622 - RNA, 14 nt, Human adenovirus F
cuacagccugucau

SEQ ID NO: 293623 - RNA, 20 nt, Human adenovirus F
cuacuauuaccgucaucucu

SEQ ID NO: 293624 - RNA, 14 nt, Human adenovirus F
cuacuuucccuggg

SEQ ID NO: 293625 - RNA, 15 nt, Human adenovirus F
cuagcagugggcaaa

SEQ ID NO: 293626 - RNA, 22 nt, Human adenovirus F
cuaguaucccuucguugucaaa

SEQ ID NO: 293627 - RNA, 13 nt, Human adenovirus F
cuauacacuguca

SEQ ID NO: 293628 - RNA, 21 nt, Human adenovirus F
cuaucccuugauucuaugaaa

SEQ ID NO: 293629 - RNA, 18 nt, Human adenovirus F
cuaucgucaucaucccca

SEQ ID NO: 293630 - RNA, 11 nt, Human adenovirus F
cuauguagcuc

SEQ ID NO: 293631 - RNA, 17 nt, Human adenovirus F
cuauuaccgucaucucu

SEQ ID NO: 293632 - RNA, 14 nt, Human adenovirus F
cuauugacacugcu

SEQ ID NO: 293633 - RNA, 15 nt, Human adenovirus F
cuauugacacugcua

SEQ ID NO: 293634 - RNA, 14 nt, Human adenovirus F
cuauugcacuuaac

SEQ ID NO: 293635 - RNA, 17 nt, Human adenovirus F
cuauugccacaauggaa

SEQ ID NO: 293636 - RNA, 14 nt, Human adenovirus F
cucaagcugaaggu

SEQ ID NO: 293637 - RNA, 18 nt, Human adenovirus F
cucauccgccauugccac

SEQ ID NO: 293638 - RNA, 22 nt, Human adenovirus F
cucauccgccauugccacccgc

SEQ ID NO: 293639 - RNA, 14 nt, Human adenovirus F
cucaucuucaccuc

SEQ ID NO: 293640 - RNA, 17 nt, Human adenovirus F
cuccaacggcuugcaag

SEQ ID NO: 293641 - RNA, 22 nt, Human adenovirus F
cuccaagcgggucaacaccacg

SEQ ID NO: 293642 - RNA, 17 nt, Human adenovirus F
cuccagucgcaugaauu

SEQ ID NO: 293643 - RNA, 17 nt, Human adenovirus F
cucccagcauucccuau

SEQ ID NO: 293644 - RNA, 22 nt, Human adenovirus F
cuccgggguuccaccaagcucc

SEQ ID NO: 293645 - RNA, 12 nt, Human adenovirus F
cuccugcaaguc

SEQ ID NO: 293646 - RNA, 17 nt, Human adenovirus F
cuccugcuugucugucu

SEQ ID NO: 293647 - RNA, 18 nt, Human adenovirus F
cucgccucuguuguaguc

SEQ ID NO: 293648 - RNA, 13 nt, Human adenovirus F
cucgcucugcaaa

SEQ ID NO: 293649 - RNA, 20 nt, Human adenovirus F
cucuacuauuaccgucaucu

SEQ ID NO: 293650 - RNA, 17 nt, Human adenovirus F
cucuccacggguucucg

SEQ ID NO: 293651 - RNA, 20 nt, Human adenovirus F
cucugaacacuuuugccaaa

SEQ ID NO: 293652 - RNA, 19 nt, Human adenovirus F
cucugaagaugucugacca

SEQ ID NO: 293653 - RNA, 17 nt, Human adenovirus F
cucugguagaaagcaaa

SEQ ID NO: 293654 - RNA, 22 nt, Human adenovirus F
cucugguagaaagcaaagccau

SEQ ID NO: 293655 - RNA, 23 nt, Human adenovirus F
cucugguagaaagcaaagccauc

SEQ ID NO: 293656 - RNA, 20 nt, Human adenovirus F
cucugugaaguuaccaaaga

SEQ ID NO: 293657 - RNA, 19 nt, Human adenovirus F
cucuguuguagucugccaa

SEQ ID NO: 293658 - RNA, 17 nt, Human adenovirus F
cucuguuugcugcacug

SEQ ID NO: 293659 - RNA, 20 nt, Human adenovirus F
cucuguuugcugcacugcca

SEQ ID NO: 293660 - RNA, 18 nt, Human adenovirus F
cucuuauuguucaaggaa

SEQ ID NO: 293661 - RNA, 13 nt, Human adenovirus F
cucuucaauguaa

SEQ ID NO: 293662 - RNA, 16 nt, Human adenovirus F
cucuucucugucuuau

SEQ ID NO: 293663 - RNA, 13 nt, Human adenovirus F
cucuugcucucaa

SEQ ID NO: 293664 - RNA, 14 nt, Human adenovirus F
cugaacuaccagaa

SEQ ID NO: 293665 - RNA, 18 nt, Human adenovirus F
cugaagaugucugaccaa

SEQ ID NO: 293666 - RNA, 16 nt, Human adenovirus F
cugaaugcauguacac

SEQ ID NO: 293667 - RNA, 13 nt, Human adenovirus F
cugacuuaucuca

SEQ ID NO: 293668 - RNA, 17 nt, Human adenovirus F
cugaggauuuucucaac

SEQ ID NO: 293669 - RNA, 18 nt, Human adenovirus F
cugauauauaaugccuua

SEQ ID NO: 293670 - RNA, 16 nt, Human adenovirus F
cugauccguaauggaa

SEQ ID NO: 293671 - RNA, 17 nt, Human adenovirus F
cugauuaauaaagcuua

SEQ ID NO: 293672 - RNA, 19 nt, Human adenovirus F
cugauuuggaagaugaguu

SEQ ID NO: 293673 - RNA, 21 nt, Human adenovirus F
cugcaaacgagaggaccacuu

SEQ ID NO: 293674 - RNA, 15 nt, Human adenovirus F
cugcuacucaacaga

SEQ ID NO: 293675 - RNA, 17 nt, Human adenovirus F
cuggaagauguccuuaa

SEQ ID NO: 293676 - RNA, 15 nt, Human adenovirus F
cuggacaguucccaa

SEQ ID NO: 293677 - RNA, 21 nt, Human adenovirus F
cuggaucaaacaggaagacaa

SEQ ID NO: 293678 - RNA, 16 nt, Human adenovirus F
cuggcagcuggagcuu

SEQ ID NO: 293679 - RNA, 17 nt, Human adenovirus F
cuggcccuggccuggaa

SEQ ID NO: 293680 - RNA, 18 nt, Human adenovirus F
cuggcuuccggcauuaac

SEQ ID NO: 293681 - RNA, 12 nt, Human adenovirus F
cugggaugcagg

SEQ ID NO: 293682 - RNA, 22 nt, Human adenovirus F
cugggaugcagguaggaccacu

SEQ ID NO: 293683 - RNA, 20 nt, Human adenovirus F
cugguagaaagcaaagccau

SEQ ID NO: 293684 - RNA, 16 nt, Human adenovirus F
cuguaaaaguaucaau

SEQ ID NO: 293685 - RNA, 21 nt, Human adenovirus F
cuguacugcuacuacuuuaac

SEQ ID NO: 293686 - RNA, 20 nt, Human adenovirus F
cuguaugcuauugacacugc

SEQ ID NO: 293687 - RNA, 22 nt, Human adenovirus F
cugucacuguauuaaaccuggg

SEQ ID NO: 293688 - RNA, 18 nt, Human adenovirus F
cugugaaguuaccaaaga

SEQ ID NO: 293689 - RNA, 21 nt, Human adenovirus F
cugugaaguuaccaaagacaa

SEQ ID NO: 293690 - RNA, 18 nt, Human adenovirus F
cugugauuucauuuacca

SEQ ID NO: 293691 - RNA, 21 nt, Human adenovirus F
cugugauuucauuuaccaccc

SEQ ID NO: 293692 - RNA, 21 nt, Human adenovirus F
cuguucaaccuucaagcccua

SEQ ID NO: 293693 - RNA, 14 nt, Human adenovirus F
cuguuuuuaacuau

SEQ ID NO: 293694 - RNA, 22 nt, Human adenovirus F
cuuaacaaacuuuuugaauuac

SEQ ID NO: 293695 - RNA, 19 nt, Human adenovirus F
cuuaauuagggugauacaa

SEQ ID NO: 293696 - RNA, 16 nt, Human adenovirus F
cuuacauguggagcua

SEQ ID NO: 293697 - RNA, 21 nt, Human adenovirus F
cuuacccgucuccugcaaguc

SEQ ID NO: 293698 - RNA, 16 nt, Human adenovirus F
cuuacgucagcuacaa

SEQ ID NO: 293699 - RNA, 17 nt, Human adenovirus F
cuuagcuggaucaaaca

SEQ ID NO: 293700 - RNA, 12 nt, Human adenovirus F
cuuaguugguac

SEQ ID NO: 293701 - RNA, 23 nt, Human adenovirus F
cuuauuguucaaggaaacaacag

SEQ ID NO: 293702 - RNA, 20 nt, Human adenovirus F
cuucaaccccgucuaccccu

SEQ ID NO: 293703 - RNA, 21 nt, Human adenovirus F
cuucaaccccgucuaccccua

SEQ ID NO: 293704 - RNA, 22 nt, Human adenovirus F
cuucaaccccgucuaccccuau

SEQ ID NO: 293705 - RNA, 22 nt, Human adenovirus F
cuucaagcccuacaccaaugca

SEQ ID NO: 293706 - RNA, 18 nt, Human adenovirus F
cuucagccuggggaacaa

SEQ ID NO: 293707 - RNA, 14 nt, Human adenovirus F
cuuccggcauuaac

SEQ ID NO: 293708 - RNA, 20 nt, Human adenovirus F
cuuccuccaacggcuugcaa

SEQ ID NO: 293709 - RNA, 15 nt, Human adenovirus F
uuuuggacauggcca

SEQ ID NO: 293710 - RNA, 13 nt, Human adenovirus F
uuuuggccugaau

SEQ ID NO: 293711 - RNA, 13 nt, Human adenovirus F
uuuugucacagaa

SEQ ID NO: 293712 - RNA, 19 nt, Human adenovirus F
uuuuguggccauuuuccaa

SEQ ID NO: 293713 - RNA, 14 nt, Human adenovirus F
cuuuuucauuggga

SEQ ID NO: 293714 - RNA, 22 nt, Human adenovirus F
cuuuuuugucugguuaaacaag

SEQ ID NO: 293715 - RNA, 15 nt, Human adenovirus F
cuuuuuugugugcua

SEQ ID NO: 293716 - RNA, 16 nt, Human adenovirus F
gaaaaaacccuuaaca

SEQ ID NO: 293717 - RNA, 16 nt, Human adenovirus F
gaaaagauauggccau

SEQ ID NO: 293718 - RNA, 18 nt, Human adenovirus F
gaaaauagccgccagccu

SEQ ID NO: 293719 - RNA, 14 nt, Human adenovirus F
gaaaaucgcaucuu

SEQ ID NO: 293720 - RNA, 16 nt, Human adenovirus F
gaaaccuucagaaaca

SEQ ID NO: 293721 - RNA, 16 nt, Human adenovirus F
gaaacuugcuuuccac

SEQ ID NO: 293722 - RNA, 14 nt, Human adenovirus F
gaaagcaaagccau

SEQ ID NO: 293723 - RNA, 17 nt, Human adenovirus F
gaaaggcaagacacuga

SEQ ID NO: 293724 - RNA, 20 nt, Human adenovirus F
gaaaggcccauaccaaagag

SEQ ID NO: 293725 - RNA, 17 nt, Human adenovirus F
gaaaguuccucuucucu

SEQ ID NO: 293726 - RNA, 22 nt, Human adenovirus F
gaaauacacugauccacuuaca

SEQ ID NO: 293727 - RNA, 14 nt, Human adenovirus F
gaacauaacaccua

SEQ ID NO: 293728 - RNA, 17 nt, Human adenovirus F
gaaccaagcuaaaugcc

SEQ ID NO: 293729 - RNA, 15 nt, Human adenovirus F
gaacgaccauaguaa

SEQ ID NO: 293730 - RNA, 22 nt, Human adenovirus F
gaacgcuggacuauacacuguc

SEQ ID NO: 293731 - RNA, 17 nt, Human adenovirus F
gaagacaauccuaacaa

SEQ ID NO: 293732 - RNA, 22 nt, Human adenovirus F
gaagacaauccuaacaaaaacu

SEQ ID NO: 293733 - RNA, 17 nt, Human adenovirus F
gaagagcuacuuucccu

SEQ ID NO: 293734 - RNA, 19 nt, Human adenovirus F
gaagauguccuuaaggagg

SEQ ID NO: 293735 - RNA, 21 nt, Human adenovirus F
gaaguauuagcgggaggguua

SEQ ID NO: 293736 - RNA, 13 nt, Human adenovirus F
gaaguuaccaaag

SEQ ID NO: 293737 - RNA, 17 nt, Human adenovirus F
gaaguuaccaaagacaa

SEQ ID NO: 293738 - RNA, 17 nt, Human adenovirus F
gaaugguuuuaguguua

SEQ ID NO: 293739 - RNA, 14 nt, Human adenovirus F
gacaaaaucacugu

SEQ ID NO: 293740 - RNA, 18 nt, Human adenovirus F
gacaacccgucuucccuc

SEQ ID NO: 293741 - RNA, 15 nt, Human adenovirus F
gacaacccuuaccua

SEQ ID NO: 293742 - RNA, 20 nt, Human adenovirus F
gacauuaugagcaaagacau

SEQ ID NO: 293743 - RNA, 21 nt, Human adenovirus F
gaccacuuaaauucuggaauc

SEQ ID NO: 293744 - RNA, 19 nt, Human adenovirus F
gaccgcgaggaaaccgccu

SEQ ID NO: 293745 - RNA, 18 nt, Human adenovirus F
gaccuuacuuucugggca

SEQ ID NO: 293746 - RNA, 17 nt, Human adenovirus F
gacgucauugacuccgu

SEQ ID NO: 293747 - RNA, 14 nt, Human adenovirus F
gacuaaacauugau

SEQ ID NO: 293748 - RNA, 21 nt, Human adenovirus F
gacuauacacugucacuguau

SEQ ID NO: 293749 - RNA, 23 nt, Human adenovirus F
gacuauuuuaugcagacaagaca

SEQ ID NO: 293750 - RNA, 15 nt, Human adenovirus F
gagaucggcaccagc

SEQ ID NO: 293751 - RNA, 15 nt, Human adenovirus F
gagccauguucugaa

SEQ ID NO: 293752 - RNA, 18 nt, Human adenovirus F
gagccgagugacacguca

SEQ ID NO: 293753 - RNA, 21 nt, Human adenovirus F
gagcuaggcauaaauucuaca

SEQ ID NO: 293754 - RNA, 13 nt, Human adenovirus F
gagcuguggugcg

SEQ ID NO: 293755 - RNA, 12 nt, Human adenovirus F
gaggagcuguua

SEQ ID NO: 293756 - RNA, 20 nt, Human adenovirus F
gaggguacuagcagugggca

SEQ ID NO: 293757 - RNA, 19 nt, Human adenovirus F
gaggugaggucuauuccau

SEQ ID NO: 293758 - RNA, 17 nt, Human adenovirus F
gagucuaccacuucuau

SEQ ID NO: 293759 - RNA, 13 nt, Human adenovirus F
gaguggcauuaaa

SEQ ID NO: 293760 - RNA, 23 nt, Human adenovirus F
gaguuccugcgcugcuacucaac

SEQ ID NO: 293761 - RNA, 15 nt, Human adenovirus F
gaguuggucgccauc

SEQ ID NO: 293762 - RNA, 12 nt, Human adenovirus F
gauaccuacuuc

SEQ ID NO: 293763 - RNA, 19 nt, Human adenovirus F
gauccacuuacaaccaaaa

SEQ ID NO: 293764 - RNA, 15 nt, Human adenovirus F
gaucggcaccagcca

SEQ ID NO: 293765 - RNA, 14 nt, Human adenovirus F
gaucuucgugacuu

SEQ ID NO: 293766 - RNA, 16 nt, Human adenovirus F
gaugaaaagaaccaga

SEQ ID NO: 293767 - RNA, 15 nt, Human adenovirus F
gaugacgucauugac

SEQ ID NO: 293768 - RNA, 22 nt, Human adenovirus F
gaugauuuaugguucacuguau

SEQ ID NO: 293769 - RNA, 22 nt, Human adenovirus F
gaugcagguaggaccacuggag

SEQ ID NO: 293770 - RNA, 13 nt, Human adenovirus F
gaugcauccuccc

SEQ ID NO: 293771 - RNA, 16 nt, Human adenovirus F
gauggccuaaaaccac

SEQ ID NO: 293772 - RNA, 14 nt, Human adenovirus F
gauucuucugugac

SEQ ID NO: 293773 - RNA, 12 nt, Human adenovirus F
gauuuggaagau

SEQ ID NO: 293774 - RNA, 13 nt, Human adenovirus F
gcaaacaacugca

SEQ ID NO: 293775 - RNA, 11 nt, Human adenovirus F
gcaacugcuga

SEQ ID NO: 293776 - RNA, 15 nt, Human adenovirus F
gcaacugcugagaca

SEQ ID NO: 293777 - RNA, 17 nt, Human adenovirus F
gcaaucccgaagccuuc

SEQ ID NO: 293778 - RNA, 15 nt, Human adenovirus F
gcaauggucuuacau

SEQ ID NO: 293779 - RNA, 22 nt, Human adenovirus F
gcaauggucuuacaugcacauc

SEQ ID NO: 293780 - RNA, 18 nt, Human adenovirus F
gcaauguugccaccgaga

SEQ ID NO: 293781 - RNA, 20 nt, Human adenovirus F
gcacacagggauacuggaua

SEQ ID NO: 293782 - RNA, 19 nt, Human adenovirus F
gcaccaccugcccuuccuc

SEQ ID NO: 293783 - RNA, 16 nt, Human adenovirus F
gcacugccaucugcag

SEQ ID NO: 293784 - RNA, 17 nt, Human adenovirus F
gcagacauaucuugcaa

SEQ ID NO: 293785 - RNA, 23 nt, Human adenovirus F
gcagacauaucuugcaacugcug

SEQ ID NO: 293786 - RNA, 13 nt, Human adenovirus F
gcagagcucugca

SEQ ID NO: 293787 - RNA, 14 nt, Human adenovirus F
gcagagcucugcaa

SEQ ID NO: 293788 - RNA, 15 nt, Human adenovirus F
gcagagcucugcaaa

SEQ ID NO: 293789 - RNA, 21 nt, Human adenovirus F
gcagccuguggaguggcauua

SEQ ID NO: 293790 - RNA, 19 nt, Human adenovirus F
gcagcucgcaaacaauaaa

SEQ ID NO: 293791 - RNA, 23 nt, Human adenovirus F
gcaggacgccucggaguaccuga

SEQ ID NO: 293792 - RNA, 14 nt, Human adenovirus F
gcaggguugcuaga

SEQ ID NO: 293793 - RNA, 18 nt, Human adenovirus F
gcagguaggaccacugga

SEQ ID NO: 293794 - RNA, 20 nt, Human adenovirus F
gcagguaggaccacuggagg

SEQ ID NO: 293795 - RNA, 19 nt, Human adenovirus F
gcauccuggcccuaaccac

SEQ ID NO: 293796 - RNA, 14 nt, Human adenovirus F
gcaugaaacuggaa

SEQ ID NO: 293797 - RNA, 15 nt, Human adenovirus F
gcaugaaacuggaag

SEQ ID NO: 293798 - RNA, 14 nt, Human adenovirus F
gcauuaaaaacuuu

SEQ ID NO: 293799 - RNA, 15 nt, Human adenovirus F
gcauuaaugggcaaa

SEQ ID NO: 293800 - RNA, 17 nt, Human adenovirus F
gccaccgauaccuacuu

SEQ ID NO: 293801 - RNA, 17 nt, Human adenovirus F
gccacucgaaaccaaau

SEQ ID NO: 293802 - RNA, 14 nt, Human adenovirus F
gccagcaccuacuu

SEQ ID NO: 293803 - RNA, 20 nt, Human adenovirus F
gccaggaaacgguacaaccg

SEQ ID NO: 293804 - RNA, 19 nt, Human adenovirus F
gccaucugcagcauugcca

SEQ ID NO: 293805 - RNA, 13 nt, Human adenovirus F
ugacuuaucucau

SEQ ID NO: 293806 - RNA, 19 nt, Human adenovirus F
ugacuuaucucaucuucac

SEQ ID NO: 293807 - RNA, 19 nt, Human adenovirus F
ugagcaugaaacuggaaga

SEQ ID NO: 293808 - RNA, 17 nt, Human adenovirus F
ugaggucuggaccugug

SEQ ID NO: 293809 - RNA, 18 nt, Human adenovirus F
ugaguuuaaaaacgguga

SEQ ID NO: 293810 - RNA, 20 nt, Human adenovirus F
ugaguuucccugucguugcc

SEQ ID NO: 293811 - RNA, 15 nt, Human adenovirus F
ugauuguacagucca

SEQ ID NO: 293812 - RNA, 14 nt, Human adenovirus F
ugcaaaaccaaauc

SEQ ID NO: 293813 - RNA, 16 nt, Human adenovirus F
ugcaagaaaaaccucc

SEQ ID NO: 293814 - RNA, 18 nt, Human adenovirus F
ugcacugagcagcuuauc

SEQ ID NO: 293815 - RNA, 16 nt, Human adenovirus F
ugcagcauugccacuu

SEQ ID NO: 293816 - RNA, 20 nt, Human adenovirus F
ugcagguaggaccacuggag

SEQ ID NO: 293817 - RNA, 17 nt, Human adenovirus F
ugcauguacacuauggu

SEQ ID NO: 293818 - RNA, 14 nt, Human adenovirus F
ugcauuaugugagc

SEQ ID NO: 293819 - RNA, 17 nt, Human adenovirus F
ugccaccgauaccuacu

SEQ ID NO: 293820 - RNA, 20 nt, Human adenovirus F
ugcccuuccucccaacuuuc

SEQ ID NO: 293821 - RNA, 13 nt, Human adenovirus F
ugccuauugccac

SEQ ID NO: 293822 - RNA, 19 nt, Human adenovirus F
ugccuauugccacaaugga

SEQ ID NO: 293823 - RNA, 19 nt, Human adenovirus F
ugcgguuucaaacauguga

SEQ ID NO: 293824 - RNA, 13 nt, Human adenovirus F
ugcgugguaccau

SEQ ID NO: 293825 - RNA, 15 nt, Human adenovirus F
ugcuauugacacugc

SEQ ID NO: 293826 - RNA, 17 nt, Human adenovirus F
ugcuauugacacugcua

SEQ ID NO: 293827 - RNA, 14 nt, Human adenovirus F
ugcuauuuuccagc

SEQ ID NO: 293828 - RNA, 14 nt, Human adenovirus F
ugcugcacugccau

SEQ ID NO: 293829 - RNA, 12 nt, Human adenovirus F
ugcuugucuguc

SEQ ID NO: 293830 - RNA, 22 nt, Human adenovirus F
ugcuuuacuuaaaaagccugug

SEQ ID NO: 293831 - RNA, 21 nt, Human adenovirus F
uggaaaggcccauaccaaaga

SEQ ID NO: 293832 - RNA, 21 nt, Human adenovirus F
uggaacaguaacacaggucaa

SEQ ID NO: 293833 - RNA, 21 nt, Human adenovirus F
uggaaccaagcuaaaugccau

SEQ ID NO: 293834 - RNA, 16 nt, Human adenovirus F
uggaagaugaguuuaa

SEQ ID NO: 293835 - RNA, 13 nt, Human adenovirus F
uggacuauacacu

SEQ ID NO: 293836 - RNA, 20 nt, Human adenovirus F
uggacucccuggacaguucc

SEQ ID NO: 293837 - RNA, 16 nt, Human adenovirus F
uggacuguacaaucaa

SEQ ID NO: 293838 - RNA, 18 nt, Human adenovirus F
uggagaucuuucuucaga

SEQ ID NO: 293839 - RNA, 23 nt, Human adenovirus F
uggagcuaucagccgcaaauggg

SEQ ID NO: 293840 - RNA, 14 nt, Human adenovirus F
uggccaauguggug

SEQ ID NO: 293841 - RNA, 20 nt, Human adenovirus F
uggcggcccugcaaagccaa

SEQ ID NO: 293842 - RNA, 21 nt, Human adenovirus F
uggcguagguaaggguugucg

SEQ ID NO: 293843 - RNA, 14 nt, Human adenovirus F
uggcgugugccauu

SEQ ID NO: 293844 - RNA, 17 nt, Human adenovirus F
ugggaaaagcaugugug

SEQ ID NO: 293845 - RNA, 20 nt, Human adenovirus F
ugggaaaagcaugugugcaa

SEQ ID NO: 293846 - RNA, 21 nt, Human adenovirus F
ugggacuggugggccaguuua

SEQ ID NO: 293847 - RNA, 15 nt, Human adenovirus F
ugggcaggagugcgu

SEQ ID NO: 293848 - RNA, 21 nt, Human adenovirus F
ugggccaguuuacaaaagcau

SEQ ID NO: 293849 - RNA, 16 nt, Human adenovirus F
ugggcuaaacacccca

SEQ ID NO: 293850 - RNA, 16 nt, Human adenovirus F
uggggugguguuguaa

SEQ ID NO: 293851 - RNA, 18 nt, Human adenovirus F
uggggugguguuguaaau

SEQ ID NO: 293852 - RNA, 17 nt, Human adenovirus F
ugggucucuucaaugua

SEQ ID NO: 293853 - RNA, 17 nt, Human adenovirus F
ugguaacuccucuucuc

SEQ ID NO: 293854 - RNA, 19 nt, Human adenovirus F
ugguagaaagcaaagccau

SEQ ID NO: 293855 - RNA, 18 nt, Human adenovirus F
ugguagccgaugcccaac

SEQ ID NO: 293856 - RNA, 17 nt, Human adenovirus F
uggucuuacaugcacau

SEQ ID NO: 293857 - RNA, 21 nt, Human adenovirus F
uggugggccaguuuacaaaag

SEQ ID NO: 293858 - RNA, 14 nt, Human adenovirus F
ugguuaaacaagcu

SEQ ID NO: 293859 - RNA, 15 nt, Human adenovirus F
ugguuuccuauuaca

SEQ ID NO: 293860 - RNA, 17 nt, Human adenovirus F
uguaacaacuguacugc

SEQ ID NO: 293861 - RNA, 13 nt, Human adenovirus F
uguaacaucugca

SEQ ID NO: 293862 - RNA, 16 nt, Human adenovirus F
uguagguaagagccau

SEQ ID NO: 293863 - RNA, 19 nt, Human adenovirus F
uguaugcuauuuuccagca

SEQ ID NO: 293864 - RNA, 15 nt, Human adenovirus F
ugucaaguuuuucca

SEQ ID NO: 293865 - RNA, 13 nt, Human adenovirus F
ugucucuuaagga

SEQ ID NO: 293866 - RNA, 14 nt, Human adenovirus F
ugucugucugccaa

SEQ ID NO: 293867 - RNA, 16 nt, Human adenovirus F
ugucugucugccaauu

SEQ ID NO: 293868 - RNA, 20 nt, Human adenovirus F
ugugaucuucgugacuugca

SEQ ID NO: 293869 - RNA, 14 nt, Human adenovirus F
ugugccuauugcca

SEQ ID NO: 293870 - RNA, 18 nt, Human adenovirus F
uguguugauuuugucaca

SEQ ID NO: 293871 - RNA, 16 nt, Human adenovirus F
uguguuugcugugcca

SEQ ID NO: 293872 - RNA, 14 nt, Human adenovirus F
uguuaauauacgua

SEQ ID NO: 293873 - RNA, 22 nt, Human adenovirus F
uguuauacaaguauacauuuga

SEQ ID NO: 293874 - RNA, 14 nt, Human adenovirus F
uguucaaccuucaa

SEQ ID NO: 293875 - RNA, 17 nt, Human adenovirus F
uguucaccuuuuuaccc

SEQ ID NO: 293876 - RNA, 21 nt, Human adenovirus F
uguuguagucugccaacguaa

SEQ ID NO: 293877 - RNA, 15 nt, Human adenovirus F
uguuuauuucuuggg

SEQ ID NO: 293878 - RNA, 20 nt, Human adenovirus F
uuaaauuacacuaagccucu

SEQ ID NO: 293879 - RNA, 16 nt, Human adenovirus F
uuaaccuugaguuuaa

SEQ ID NO: 293880 - RNA, 23 nt, Human adenovirus F
uuaacgguuagaauucuguaaaa

SEQ ID NO: 293881 - RNA, 13 nt, Human adenovirus F
uuaagcagagcca

SEQ ID NO: 293882 - RNA, 16 nt, Human adenovirus F
uuaagguuacucagca

SEQ ID NO: 293883 - RNA, 21 nt, Human adenovirus F
uuaaguugggagggaugcaug

SEQ ID NO: 293884 - RNA, 19 nt, Human adenovirus F
uuaauaaagcuuaccuuaa

SEQ ID NO: 293885 - RNA, 16 nt, Human adenovirus F
uuaaugggcaaagggg

SEQ ID NO: 293886 - RNA, 17 nt, Human adenovirus F
uuaaugggcaaaggggg

SEQ ID NO: 293887 - RNA, 16 nt, Human adenovirus F
uuaauuaaaguuauuc

SEQ ID NO: 293888 - RNA, 15 nt, Human adenovirus F
uuacauguggagcua

SEQ ID NO: 293889 - RNA, 11 nt, Human adenovirus F
uuaccaaagac

SEQ ID NO: 293890 - RNA, 23 nt, Human adenovirus F
uuacuagucuuagcuggaucaaa

SEQ ID NO: 293891 - RNA, 17 nt, Human adenovirus F
uuacuccagucgcauga

SEQ ID NO: 293892 - RNA, 15 nt, Human adenovirus F
uuauaaaugcucuga

SEQ ID NO: 293893 - RNA, 16 nt, Human adenovirus F
uuauacaaguauacau

SEQ ID NO: 293894 - RNA, 13 nt, Human adenovirus F
uuauccuccuuca

SEQ ID NO: 293895 - RNA, 22 nt, Human adenovirus F
uuauccuccuucacaaaguccu

SEQ ID NO: 293896 - RNA, 18 nt, Human adenovirus F
uuaucucaucuucaccuc

SEQ ID NO: 293897 - RNA, 16 nt, Human adenovirus F
uuaugauguaacccaa

SEQ ID NO: 293898 - RNA, 17 nt, Human adenovirus F
uuaugggcaccuggaac

SEQ ID NO: 293899 - RNA, 16 nt, Human adenovirus F
uuauuagcuacuuuca

SEQ ID NO: 293900 - RNA, 17 nt, Human adenovirus F
uuauuagcuacuuucau

SEQ ID NO: 293901 - RNA, 11 nt, Human adenovirus F
uuauuggucaa

SEQ ID NO: 293902 - RNA, 15 nt, Human adenovirus F
uucaaacaugugacc

SEQ ID NO: 293903 - RNA, 19 nt, Human adenovirus F
uucaaauacauaggcauua

SEQ ID NO: 293904 - RNA, 12 nt, Human adenovirus F
uucaauguaagg

SEQ ID NO: 293905 - RNA, 13 nt, Human adenovirus F
uucacaaaguccu

SEQ ID NO: 293906 - RNA, 20 nt, Human adenovirus F
uucaccugggcuggaugcau

SEQ ID NO: 293907 - RNA, 13 nt, Human adenovirus F
uucaucuuaacuc

SEQ ID NO: 293908 - RNA, 17 nt, Human adenovirus F
uucaucuuaacucugaa

SEQ ID NO: 293909 - RNA, 13 nt, Human adenovirus F
uucauuuggucaa

SEQ ID NO: 293910 - RNA, 21 nt, Human adenovirus F
uuccaaacugcggacuaccua

SEQ ID NO: 293911 - RNA, 18 nt, Human adenovirus F
uuccagcagcaccaccug

SEQ ID NO: 293912 - RNA, 15 nt, Human adenovirus F
uuccauuuauuacac

SEQ ID NO: 293913 - RNA, 20 nt, Human adenovirus F
uucccacgccuuacaugugg

SEQ ID NO: 293914 - RNA, 19 nt, Human adenovirus F
uucccgccuugcugacuua

SEQ ID NO: 293915 - RNA, 18 nt, Human adenovirus F
uuccuccaacggcuugca

SEQ ID NO: 293916 - RNA, 20 nt, Human adenovirus F
uuccuuuuggcuguacucca

SEQ ID NO: 293917 - RNA, 13 nt, Human adenovirus F
uucgcucacccgc

SEQ ID NO: 293918 - RNA, 15 nt, Human adenovirus F
uucgugacuugcacu

SEQ ID NO: 293919 - RNA, 12 nt, Human adenovirus F
uucuccugcuug

SEQ ID NO: 293920 - RNA, 20 nt, Human adenovirus F
uucugugccugucaugaaag

SEQ ID NO: 293921 - RNA, 21 nt, Human adenovirus F
uucuugggcguguuugugggu

SEQ ID NO: 293922 - RNA, 16 nt, Human astrovirus
aaaccugcaauauguc

SEQ ID NO: 293923 - RNA, 14 nt, Human astrovirus
aacauugucaauaa

SEQ ID NO: 293924 - RNA, 16 nt, Human astrovirus
aacgucaaucuucuca

SEQ ID NO: 293925 - RNA, 17 nt, Human astrovirus
aauaugucagagagcaa

SEQ ID NO: 293926 - RNA, 17 nt, Human astrovirus
aaucagucaagaucaca

SEQ ID NO: 293927 - RNA, 14 nt, Human astrovirus
acaaacgucaaucu

SEQ ID NO: 293928 - RNA, 22 nt, Human astrovirus
acagcuuccuucuuuucugucu

SEQ ID NO: 293929 - RNA, 15 nt, Human astrovirus
acagucgggucaaac

SEQ ID NO: 293930 - RNA, 16 nt, Human astrovirus
accauuuaaaauugau

SEQ ID NO: 293931 - RNA, 18 nt, Human astrovirus
accauuuaaaauugauuu

SEQ ID NO: 293932 - RNA, 22 nt, Human astrovirus
agacaaaucagucaagaucaca

SEQ ID NO: 293933 - RNA, 21 nt, Human astrovirus
agauugaggcguguauucucc

SEQ ID NO: 293934 - RNA, 13 nt, Human astrovirus
agcaggaguaaau

SEQ ID NO: 293935 - RNA, 16 nt, Human astrovirus
agcaggaguaaaucaa

SEQ ID NO: 293936 - RNA, 19 nt, Human astrovirus
agucaagaucacagucaau

SEQ ID NO: 293937 - RNA, 22 nt, Human astrovirus
agucaagaucacagucaauuca

SEQ ID NO: 293938 - RNA, 21 nt, Human astrovirus
aucacagucaauucaagaaac

SEQ ID NO: 293939 - RNA, 17 nt, Human astrovirus
caaacaccaguggcacc

SEQ ID NO: 293940 - RNA, 21 nt, Human astrovirus
caagaaacagagccaggagac

SEQ ID NO: 293941 - RNA, 20 nt, Human astrovirus
cacaaucuaggggccgagac

SEQ ID NO: 293942 - RNA, 16 nt, Human astrovirus
cagagagcaacagcaa

SEQ ID NO: 293943 - RNA, 18 nt, Human astrovirus
cagucaagaucacaguca

SEQ ID NO: 293944 - RNA, 11 nt, Human astrovirus
ccaguggcacc

SEQ ID NO: 293945 - RNA, 17 nt, Human astrovirus
ccaguggcaccacugag

SEQ ID NO: 293946 - RNA, 21 nt, Human astrovirus
cucaggaaacagggugucaca

SEQ ID NO: 293947 - RNA, 22 nt, Human astrovirus
cugugcaggcgcuaggugcaca

SEQ ID NO: 293948 - RNA, 16 nt, Human astrovirus
gaaacagggugucaca

SEQ ID NO: 293949 - RNA, 23 nt, Human astrovirus
gagacaaaucagucaagaucaca

SEQ ID NO: 293950 - RNA, 13 nt, Human astrovirus
ggcccguucacaa

SEQ ID NO: 293951 - RNA, 20 nt, Human astrovirus
guaacuguugaggucaguaa

SEQ ID NO: 293952 - RNA, 19 nt, Human astrovirus
gucaaacaccaguggcacc

SEQ ID NO: 293953 - RNA, 18 nt, Human astrovirus
gucagagagcaacagcaa

SEQ ID NO: 293954 - RNA, 15 nt, Human astrovirus
guggcaccacugaga

SEQ ID NO: 293955 - RNA, 21 nt, Human astrovirus
guguauucuccucaacccugu

SEQ ID NO: 293956 - RNA, 13 nt, Human astrovirus
uauuuuaaucacc

SEQ ID NO: 293957 - RNA, 15 nt, Human astrovirus
ucaagaucacaguca

SEQ ID NO: 293958 - RNA, 19 nt, Human astrovirus
ucaaucuucucaacguguc

SEQ ID NO: 293959 - RNA, 19 nt, Human astrovirus
ucaauucaagaaacagagc

SEQ ID NO: 293960 - RNA, 12 nt, Human astrovirus
ucaccauuuaaa

SEQ ID NO: 293961 - RNA, 21 nt, Human astrovirus
ucaggaaacagggugucacag

SEQ ID NO: 293962 - RNA, 22 nt, Human astrovirus
uccucguuaaggacgcuacugg

SEQ ID NO: 293963 - RNA, 17 nt, Human astrovirus
uguugaggucaguaaua

SEQ ID NO: 293964 - RNA, 19 nt, Human astrovirus
uuccuucuuuucugucucu

SEQ ID NO: 293965 - RNA, 17 nt, Human astrovirus
aagaaacagagccagga

SEQ ID NO: 293966 - RNA, 17 nt, Human astrovirus
aagaucacagucaauuc

SEQ ID NO: 293967 - RNA, 20 nt, Human astrovirus
aaucuaggggccgagacaaa

SEQ ID NO: 293968 - RNA, 13 nt, Human astrovirus
acauugucaauaa

SEQ ID NO: 293969 - RNA, 20 nt, Human astrovirus
accauuuaaaauugauuuaa

SEQ ID NO: 293970 - RNA, 16 nt, Human astrovirus
acucaggaaacagggu

SEQ ID NO: 293971 - RNA, 12 nt, Human astrovirus
agggugucacag

SEQ ID NO: 293972 - RNA, 18 nt, Human astrovirus
agggugucacaggaccaa

SEQ ID NO: 293973 - RNA, 16 nt, Human astrovirus
aucacagucaauucaa

SEQ ID NO: 293974 - RNA, 21 nt, Human astrovirus
auuauuuuaaucaccauuuaa

SEQ ID NO: 293975 - RNA, 21 nt, Human astrovirus
caaucuaggggccgagacaaa

SEQ ID NO: 293976 - RNA, 18 nt, Human astrovirus
cagcccggacgcgacaaa

SEQ ID NO: 293977 - RNA, 19 nt, Human astrovirus
caggaaacagggugucaca

SEQ ID NO: 293978 - RNA, 22 nt, Human astrovirus
caggaaacagggugucacagga

SEQ ID NO: 293979 - RNA, 19 nt, Human astrovirus
cagucaagaucacagucaa

SEQ ID NO: 293980 - RNA, 18 nt, Human astrovirus
cagucaauucaagaaaca

SEQ ID NO: 293981 - RNA, 22 nt, Human astrovirus
cgacaaacgucaaucuucucaa

SEQ ID NO: 293982 - RNA, 17 nt, Human astrovirus
cgagacaaaucagucaa

SEQ ID NO: 293983 - RNA, 14 nt, Human astrovirus
cguaacauugucaa

SEQ ID NO: 293984 - RNA, 13 nt, Human astrovirus
cugcaauauguca

SEQ ID NO: 293985 - RNA, 22 nt, Human astrovirus
gaccaaaaccugcaauauguca

SEQ ID NO: 293986 - RNA, 22 nt, Human astrovirus
gagacagcccggacgcgacaaa

SEQ ID NO: 293987 - RNA, 15 nt, Human astrovirus
gcaaguaacuguuga

SEQ ID NO: 293988 - RNA, 18 nt, Human astrovirus
gcaggcgcuaggugcaca

SEQ ID NO: 293989 - RNA, 15 nt, Human astrovirus
ggcgcuaggugcaca

SEQ ID NO: 293990 - RNA, 18 nt, Human astrovirus
ggcguguauucuccucaa

SEQ ID NO: 293991 - RNA, 17 nt, Human astrovirus
ggggccgagacaaauca

SEQ ID NO: 293992 - RNA, 21 nt, Human astrovirus
gggucaaacaccaguggcacc

SEQ ID NO: 293993 - RNA, 16 nt, Human astrovirus
guaacauugucaauaa

SEQ ID NO: 293994 - RNA, 13 nt, Human astrovirus
gucaauucaagaa

SEQ ID NO: 293995 - RNA, 20 nt, Human astrovirus
gucacaggaccaaaaccugc

SEQ ID NO: 293996 - RNA, 22 nt, Human astrovirus
gucacaggaccaaaaccugcaa

SEQ ID NO: 293997 - RNA, 16 nt, Human astrovirus
ucaagaucacagucaa

SEQ ID NO: 293998 - RNA, 16 nt, Human astrovirus
ucagucaagaucacag

SEQ ID NO: 293999 - RNA, 17 nt, Human astrovirus
uccaacaagcaaguaac

SEQ ID NO: 294000 - RNA, 23 nt, Human astrovirus
uggccgcagcaggaguaaaucaa

SEQ ID NO: 294001 - RNA, 13 nt, Human coronavirus 229E
aaaauguauuugc

SEQ ID NO: 294002 - RNA, 18 nt, Human coronavirus 229E
aaucaaucgcuuagcaau

SEQ ID NO: 294003 - RNA, 18 nt, Human coronavirus 229E
aaucacugucacaaccgu

SEQ ID NO: 294004 - RNA, 21 nt, Human coronavirus 229E
aauccuuuucguuuaugugcc

SEQ ID NO: 294005 - RNA, 16 nt, Human coronavirus 229E
aauggaagagccaguc

SEQ ID NO: 294006 - RNA, 20 nt, Human coronavirus 229E
aauguaaccacacuuugcua

SEQ ID NO: 294007 - RNA, 15 nt, Human coronavirus 229E
aauguagauaaggau

SEQ ID NO: 294008 - RNA, 13 nt, Human coronavirus 229E
aaugucaaaugac

SEQ ID NO: 294009 - RNA, 22 nt, Human coronavirus 229E
aauguuuguuuugcuuguugca

SEQ ID NO: 294010 - RNA, 21 nt, Human coronavirus 229E
aauuaagcuuuguuucacuug

SEQ ID NO: 294011 - RNA, 17 nt, Human coronavirus 229E
acacuuugcuaugcaag

SEQ ID NO: 294012 - RNA, 20 nt, Human coronavirus 229E
acagacauagauuacugugu

SEQ ID NO: 294013 - RNA, 14 nt, Human coronavirus 229E
acagcuuggcacug

SEQ ID NO: 294014 - RNA, 19 nt, Human coronavirus 229E
acagucaaaugggcugaug

SEQ ID NO: 294015 - RNA, 14 nt, Human coronavirus 229E
acauagauuacugu

SEQ ID NO: 294016 - RNA, 16 nt, Human coronavirus 229E
acauagauuacugugu

SEQ ID NO: 294017 - RNA, 14 nt, Human coronavirus 229E
accacauuuaccaa

SEQ ID NO: 294018 - RNA, 21 nt, Human coronavirus 229E
acccauuugaagaauuggaau

SEQ ID NO: 294019 - RNA, 20 nt, Human coronavirus 229E
accuaggugaacgcuaguau

SEQ ID NO: 294020 - RNA, 14 nt, Human coronavirus 229E
accucaucuguugu

SEQ ID NO: 294021 - RNA, 15 nt, Human coronavirus 229E
accucaucuguugua

SEQ ID NO: 294022 - RNA, 12 nt, Human coronavirus 229E
acguugcauuaa

SEQ ID NO: 294023 - RNA, 17 nt, Human coronavirus 229E
acuaagauguuccuuaa

SEQ ID NO: 294024 - RNA, 18 nt, Human coronavirus 229E
acuauguuacugaaccua

SEQ ID NO: 294025 - RNA, 20 nt, Human coronavirus 229E
acuguguccgugcauuugac

SEQ ID NO: 294026 - RNA, 14 nt, Human coronavirus 229E
acuucgcaaacagu

SEQ ID NO: 294027 - RNA, 23 nt, Human coronavirus 229E
acuugccauauguuuuguaauag

SEQ ID NO: 294028 - RNA, 12 nt, Human coronavirus 229E
acuugcuuuguc

SEQ ID NO: 294029 - RNA, 19 nt, Human coronavirus 229E
agaaccagagauaccacac

SEQ ID NO: 294030 - RNA, 14 nt, Human coronavirus 229E
agaauucagaacca

SEQ ID NO: 294031 - RNA, 18 nt, Human coronavirus 229E
agacauagauuacugugu

SEQ ID NO: 294032 - RNA, 15 nt, Human coronavirus 229E
agagagcguguugaa

SEQ ID NO: 294033 - RNA, 17 nt, Human coronavirus 229E
agauauugguucuuacu

SEQ ID NO: 294034 - RNA, 20 nt, Human coronavirus 229E
agauuacuguguccgugcau

SEQ ID NO: 294035 - RNA, 23 nt, Human coronavirus 229E
agauuguuuuaugguuugaagau

SEQ ID NO: 294036 - RNA, 13 nt, Human coronavirus 229E
agccaacaaugga

SEQ ID NO: 294037 - RNA, 23 nt, Human coronavirus 229E
agcugcauuuuuauuaucuuggc

SEQ ID NO: 294038 - RNA, 15 nt, Human coronavirus 229E
agcuuggcacugcug

SEQ ID NO: 294039 - RNA, 22 nt, Human coronavirus 229E
agcuuuguuucacuugccauau

SEQ ID NO: 294040 - RNA, 17 nt, Human coronavirus 229E
aggaucuuacuaaauac

SEQ ID NO: 294041 - RNA, 18 nt, Human coronavirus 229E
aggaugacgcguucuaua

SEQ ID NO: 294042 - RNA, 17 nt, Human coronavirus 229E
agugcugaaguuucacg

SEQ ID NO: 294043 - RNA, 14 nt, Human coronavirus 229E
auagauuacugugu

SEQ ID NO: 294044 - RNA, 20 nt, Human coronavirus 229E
auagucaacacagauuucaa

SEQ ID NO: 294045 - RNA, 18 nt, Human coronavirus 229E
aucaauuccuuuacauag

SEQ ID NO: 294046 - RNA, 11 nt, Human coronavirus 229E
aucugaaccac

SEQ ID NO: 294047 - RNA, 16 nt, Human coronavirus 229E
auggaagagccaguca

SEQ ID NO: 294048 - RNA, 19 nt, Human coronavirus 229E
auggcacuguuaccuucaa

SEQ ID NO: 294049 - RNA, 19 nt, Human coronavirus 229E
auguaaccacacuuugcua

SEQ ID NO: 294050 - RNA, 15 nt, Human coronavirus 229E
auguaugaugguacg

SEQ ID NO: 294051 - RNA, 14 nt, Human coronavirus 229E
auuagaaauccacu

SEQ ID NO: 294052 - RNA, 18 nt, Human coronavirus 229E
auucagaaccagagauac

SEQ ID NO: 294053 - RNA, 17 nt, Human coronavirus 229E
auugauaaagaccucag

SEQ ID NO: 294054 - RNA, 14 nt, Human coronavirus 229E
auuuacgcaacuuu

SEQ ID NO: 294055 - RNA, 14 nt, Human coronavirus 229E
auuugcuacuaugu

SEQ ID NO: 294056 - RNA, 22 nt, Human coronavirus 229E
caacggcuguguugguuauuca

SEQ ID NO: 294057 - RNA, 16 nt, Human coronavirus 229E
caagaauucagaacca

SEQ ID NO: 294058 - RNA, 20 nt, Human coronavirus 229E
caagacgugaaagauggcac

SEQ ID NO: 294059 - RNA, 21 nt, Human coronavirus 229E
caagacgugaaagauggcacu

SEQ ID NO: 294060 - RNA, 17 nt, Human coronavirus 229E
cacgacagguuauccaa

SEQ ID NO: 294061 - RNA, 23 nt, Human coronavirus 229E
cacgacagguuauccaagacgug

SEQ ID NO: 294062 - RNA, 13 nt, Human coronavirus 229E
cacgagcagucca

SEQ ID NO: 294063 - RNA, 14 nt, Human coronavirus 229E
cacgagcaguccau

SEQ ID NO: 294064 - RNA, 20 nt, Human coronavirus 229E
cacuaguuacucuguuugca

SEQ ID NO: 294065 - RNA, 14 nt, Human coronavirus 229E
cacuuugcuaugca

SEQ ID NO: 294066 - RNA, 15 nt, Human coronavirus 229E
cagaaccagagauac

SEQ ID NO: 294067 - RNA, 15 nt, Human coronavirus 229E
cagaauuguuucuua

SEQ ID NO: 294068 - RNA, 14 nt, Human coronavirus 229E
cagacauagauuac

SEQ ID NO: 294069 - RNA, 15 nt, Human coronavirus 229E
caguuucagacuuuu

SEQ ID NO: 294070 - RNA, 14 nt, Human coronavirus 229E
cauaaagaugcaaa

SEQ ID NO: 294071 - RNA, 16 nt, Human coronavirus 229E
cauacagcuuggcacu

SEQ ID NO: 294072 - RNA, 18 nt, Human coronavirus 229E
cauacguuacaaccucaa

SEQ ID NO: 294073 - RNA, 17 nt, Human coronavirus 229E
cauauugcugguuguca

SEQ ID NO: 294074 - RNA, 20 nt, Human coronavirus 229E
cauauugcugguugucaaac

SEQ ID NO: 294075 - RNA, 11 nt, Human coronavirus 229E
caucugaacca

SEQ ID NO: 294076 - RNA, 14 nt, Human coronavirus 229E
caucugaaccacaa

SEQ ID NO: 294077 - RNA, 23 nt, Human coronavirus 229E
caugaucccuugcuuuggcuuga

SEQ ID NO: 294078 - RNA, 19 nt, Human coronavirus 229E
cauguauaacuuacuuaaa

SEQ ID NO: 294079 - RNA, 15 nt, Human coronavirus 229E
cauuacaaaugugcu

SEQ ID NO: 294080 - RNA, 16 nt, Human coronavirus 229E
cauuacaaaugugcug

SEQ ID NO: 294081 - RNA, 17 nt, Human coronavirus 229E
ccacacuuugcuaugca

SEQ ID NO: 294082 - RNA, 18 nt, Human coronavirus 229E
ccacuaagauguuccuua

SEQ ID NO: 294083 - RNA, 18 nt, Human coronavirus 229E
ccauacagcuuggcacug

SEQ ID NO: 294084 - RNA, 19 nt, Human coronavirus 229E
cccuccgacuuugcauuca

SEQ ID NO: 294085 - RNA, 21 nt, Human coronavirus 229E
ccgacuuugcauucaauaauu

SEQ ID NO: 294086 - RNA, 16 nt, Human coronavirus 229E
ccuuaagcuaguggau

SEQ ID NO: 294087 - RNA, 16 nt, Human coronavirus 229E
ccuuuguugcauuuag

SEQ ID NO: 294088 - RNA, 21 nt, Human coronavirus 229E
ccuuuguugcauuuagcuuuu

SEQ ID NO: 294089 - RNA, 12 nt, Human coronavirus 229E
ccuuuguugcuu

SEQ ID NO: 294090 - RNA, 16 nt, Human coronavirus 229E
cgaaaguuagugcuga

SEQ ID NO: 294091 - RNA, 12 nt, Human coronavirus 229E
cuaauaccucau

SEQ ID NO: 294092 - RNA, 13 nt, Human coronavirus 229E
cuacuagugugua

SEQ ID NO: 294093 - RNA, 14 nt, Human coronavirus 229E
cuagaaagggcaaa

SEQ ID NO: 294094 - RNA, 20 nt, Human coronavirus 229E
cuaggugaacgcuaguauaa

SEQ ID NO: 294095 - RNA, 13 nt, Human coronavirus 229E
cuagucuuauaca

SEQ ID NO: 294096 - RNA, 18 nt, Human coronavirus 229E
cuaguggaugaucaugcu

SEQ ID NO: 294097 - RNA, 13 nt, Human coronavirus 229E
cuaguuacucugu

SEQ ID NO: 294098 - RNA, 18 nt, Human coronavirus 229E
cucagauguuuugucuga

SEQ ID NO: 294099 - RNA, 21 nt, Human coronavirus 229E
cucaucuguuguagauggugu

SEQ ID NO: 294100 - RNA, 22 nt, Human coronavirus 229E
cucuagguuuguucacauugca

SEQ ID NO: 294101 - RNA, 19 nt, Human coronavirus 229E
cucugaucuauguaugaug

SEQ ID NO: 294102 - RNA, 12 nt, Human coronavirus 229E
cucuguuugcaa

SEQ ID NO: 294103 - RNA, 17 nt, Human coronavirus 229E
cugaaccuacagguuac

SEQ ID NO: 294104 - RNA, 14 nt, Human coronavirus 229E
cugaucuauguaug

SEQ ID NO: 294105 - RNA, 17 nt, Human coronavirus 229E
cugaugcaucugaacca

SEQ ID NO: 294106 - RNA, 15 nt, Human coronavirus 229E
cuguauuggucucaa

SEQ ID NO: 294107 - RNA, 22 nt, Human coronavirus 229E
cuuauacacaaugguaagccag

SEQ ID NO: 294108 - RNA, 18 nt, Human coronavirus 229E
cuuauagugauacuacua

SEQ ID NO: 294109 - RNA, 16 nt, Human coronavirus 229E
cuuauuucucaacuaa

SEQ ID NO: 294110 - RNA, 18 nt, Human coronavirus 229E
cuucuaacuaauaccuca

SEQ ID NO: 294111 - RNA, 17 nt, Human coronavirus 229E
cuugcgguuuacuacug

SEQ ID NO: 294112 - RNA, 18 nt, Human coronavirus 229E
cuugcuuuggcuugacaa

SEQ ID NO: 294113 - RNA, 19 nt, Human coronavirus 229E
cuuggaaggugauaccucg

SEQ ID NO: 294114 - RNA, 19 nt, Human coronavirus 229E
aaaauguguaccacauuua

SEQ ID NO: 294115 - RNA, 22 nt, Human coronavirus 229E
aaaguuagugcugaaguuucac

SEQ ID NO: 294116 - RNA, 23 nt, Human coronavirus 229E
aaaugugcuggaguaaucaaaga

SEQ ID NO: 294117 - RNA, 23 nt, Human coronavirus 229E
aaauguguaccacauuuaccaau

SEQ ID NO: 294118 - RNA, 21 nt, Human coronavirus 229E
aagacgugaaagauggcacug

SEQ ID NO: 294119 - RNA, 17 nt, Human coronavirus 229E
aaggugucgucuggguu

SEQ ID NO: 294120 - RNA, 17 nt, Human coronavirus 229E
aaucaaucgcuuagcaa

SEQ ID NO: 294121 - RNA, 16 nt, Human coronavirus 229E
aaucauauaugcacau

SEQ ID NO: 294122 - RNA, 19 nt, Human coronavirus 229E
aaucauauaugcacauaga

SEQ ID NO: 294123 - RNA, 21 nt, Human coronavirus 229E
aauccacuaagauguuccuua

SEQ ID NO: 294124 - RNA, 22 nt, Human coronavirus 229E
aauccugagguuaaugcaauca

SEQ ID NO: 294125 - RNA, 15 nt, Human coronavirus 229E
aaugcaaucacuguc

SEQ ID NO: 294126 - RNA, 15 nt, Human coronavirus 229E
aaugguaagccagug

SEQ ID NO: 294127 - RNA, 14 nt, Human coronavirus 229E
aaugucaaaugaca

SEQ ID NO: 294128 - RNA, 21 nt, Human coronavirus 229E
aauuguacgggugacauuguc

SEQ ID NO: 294129 - RNA, 20 nt, Human coronavirus 229E
acaauggaagagccagucau

SEQ ID NO: 294130 - RNA, 16 nt, Human coronavirus 229E
acaccaugauggauuu

SEQ ID NO: 294131 - RNA, 14 nt, Human coronavirus 229E
acaccguggcagag

SEQ ID NO: 294132 - RNA, 18 nt, Human coronavirus 229E
acaggaucuuacuaaaua

SEQ ID NO: 294133 - RNA, 14 nt, Human coronavirus 229E
acaugggauuucau

SEQ ID NO: 294134 - RNA, 14 nt, Human coronavirus 229E
acccaagcugcauu

SEQ ID NO: 294135 - RNA, 19 nt, Human coronavirus 229E
acgacagguuauccaagac

SEQ ID NO: 294136 - RNA, 13 nt, Human coronavirus 229E
acguuuacaauaa

SEQ ID NO: 294137 - RNA, 13 nt, Human coronavirus 229E
acugguuguugua

SEQ ID NO: 294138 - RNA, 14 nt, Human coronavirus 229E
acugguuuugucua

SEQ ID NO: 294139 - RNA, 19 nt, Human coronavirus 229E
acuguguccgugcauuuga

SEQ ID NO: 294140 - RNA, 21 nt, Human coronavirus 229E
acuguuaccuucaacuugcua

SEQ ID NO: 294141 - RNA, 17 nt, Human coronavirus 229E
acuugcuuugucaaucu

SEQ ID NO: 294142 - RNA, 23 nt, Human coronavirus 229E
agacgugaaagauggcacuguua

SEQ ID NO: 294143 - RNA, 22 nt, Human coronavirus 229E
guuguaguacugauuacuuuga

SEQ ID NO: 294144 - RNA, 21 nt, Human coronavirus 229E
guuucacgacagguuauccaa

SEQ ID NO: 294145 - RNA, 17 nt, Human coronavirus 229E
guuugaagaugcuugua

SEQ ID NO: 294146 - RNA, 16 nt, Human coronavirus 229E
guuuugcuuguugcau

SEQ ID NO: 294147 - RNA, 12 nt, Human coronavirus 229E
uaaauacaccau

SEQ ID NO: 294148 - RNA, 19 nt, Human coronavirus 229E
uaacggugaauguguauac

SEQ ID NO: 294149 - RNA, 14 nt, Human coronavirus 229E
uaagaaauuugcua

SEQ ID NO: 294150 - RNA, 17 nt, Human coronavirus 229E
uaauaccucaucuguug

SEQ ID NO: 294151 - RNA, 20 nt, Human coronavirus 229E
uaaugcuguugcuaagcaug

SEQ ID NO: 294152 - RNA, 22 nt, Human coronavirus 229E
uaaugguacugggagaggugau

SEQ ID NO: 294153 - RNA, 14 nt, Human coronavirus 229E
uaauuaacaugauc

SEQ ID NO: 294154 - RNA, 20 nt, Human coronavirus 229E
uaauuaacaugaucccuugc

SEQ ID NO: 294155 - RNA, 13 nt, Human coronavirus 229E
uacaaaugggcug

SEQ ID NO: 294156 - RNA, 16 nt, Human coronavirus 229E
uacaccaugauggauu

SEQ ID NO: 294157 - RNA, 21 nt, Human coronavirus 229E
uacagacauagauuacugugu

SEQ ID NO: 294158 - RNA, 19 nt, Human coronavirus 229E
uacagcuuggcacugcugg

SEQ ID NO: 294159 - RNA, 21 nt, Human coronavirus 229E
uacauugcuuuucucugaucu

SEQ ID NO: 294160 - RNA, 12 nt, Human coronavirus 229E
uacguuacaacc

SEQ ID NO: 294161 - RNA, 18 nt, Human coronavirus 229E
uacuacuaguguguauua

SEQ ID NO: 294162 - RNA, 19 nt, Human coronavirus 229E
uacuacuaguguguauuac

SEQ ID NO: 294163 - RNA, 17 nt, Human coronavirus 229E
uagaugaauacauugcu

SEQ ID NO: 294164 - RNA, 18 nt, Human coronavirus 229E
uaguauaacucauuacaa

SEQ ID NO: 294165 - RNA, 14 nt, Human coronavirus 229E
uagucuuauacaca

SEQ ID NO: 294166 - RNA, 14 nt, Human coronavirus 229E
uauaagaaauuugc

SEQ ID NO: 294167 - RNA, 17 nt, Human coronavirus 229E
uaugugccauugcugua

SEQ ID NO: 294168 - RNA, 19 nt, Human coronavirus 229E
uauucuucaguuuggacac

SEQ ID NO: 294169 - RNA, 16 nt, Human coronavirus 229E
ucaaaugacaauugua

SEQ ID NO: 294170 - RNA, 18 nt, Human coronavirus 229E
ucaaaugacaauuguacg

SEQ ID NO: 294171 - RNA, 19 nt, Human coronavirus 229E
ucaaaugggcugaugcauc

SEQ ID NO: 294172 - RNA, 22 nt, Human coronavirus 229E
ucaaucuuugacaccugggcua

SEQ ID NO: 294173 - RNA, 21 nt, Human coronavirus 229E
ucacccauuugaagaauugga

SEQ ID NO: 294174 - RNA, 13 nt, Human coronavirus 229E
ucacuugccauau

SEQ ID NO: 294175 - RNA, 19 nt, Human coronavirus 229E
ucagaaaauguauuugcug

SEQ ID NO: 294176 - RNA, 18 nt, Human coronavirus 229E
ucauacguuacaaccuca

SEQ ID NO: 294177 - RNA, 17 nt, Human coronavirus 229E
ucauuacaaaugugcug

SEQ ID NO: 294178 - RNA, 19 nt, Human coronavirus 229E
uccacuaagauguuccuua

SEQ ID NO: 294179 - RNA, 23 nt, Human coronavirus 229E
uccugagguuaaugcaaucacug

SEQ ID NO: 294180 - RNA, 14 nt, Human coronavirus 229E
ucuaaccauauuca

SEQ ID NO: 294181 - RNA, 17 nt, Human coronavirus 229E
ucuaaccauauucauug

SEQ ID NO: 294182 - RNA, 17 nt, Human coronavirus 229E
ucuaacuaauaccucau

SEQ ID NO: 294183 - RNA, 16 nt, Human coronavirus 229E
agaggacguauugaua

SEQ ID NO: 294184 - RNA, 17 nt, Human coronavirus 229E
agauguuuugucugaug

SEQ ID NO: 294185 - RNA, 17 nt, Human coronavirus 229E
agcaugauuucuuuacu

SEQ ID NO: 294186 - RNA, 23 nt, Human coronavirus 229E
aggaguuuucagccuuuguugcu

SEQ ID NO: 294187 - RNA, 21 nt, Human coronavirus 229E
aggcuguaaugcuguugcuaa

SEQ ID NO: 294188 - RNA, 21 nt, Human coronavirus 229E
aguagacaggaucuuacuaaa

SEQ ID NO: 294189 - RNA, 21 nt, Human coronavirus 229E
agucauuugucuugagaccua

SEQ ID NO: 294190 - RNA, 22 nt, Human coronavirus 229E
agugauacuacuaguguguauu

SEQ ID NO: 294191 - RNA, 12 nt, Human coronavirus 229E
aguguguauuac

SEQ ID NO: 294192 - RNA, 14 nt, Human coronavirus 229E
aguuuggacacuau

SEQ ID NO: 294193 - RNA, 13 nt, Human coronavirus 229E
auaauuaaacuaa

SEQ ID NO: 294194 - RNA, 14 nt, Human coronavirus 229E
auauaugcacauag

SEQ ID NO: 294195 - RNA, 15 nt, Human coronavirus 229E
auaugccuuguugca

SEQ ID NO: 294196 - RNA, 16 nt, Human coronavirus 229E
auauguuuuguaauag

SEQ ID NO: 294197 - RNA, 18 nt, Human coronavirus 229E
auauugguucuuacuggu

SEQ ID NO: 294198 - RNA, 19 nt, Human coronavirus 229E
auauuguuaaacguugcau

SEQ ID NO: 294199 - RNA, 22 nt, Human coronavirus 229E
aucuagucuuauacacaauggu

SEQ ID NO: 294200 - RNA, 13 nt, Human coronavirus 229E
aucugaaguccaa

SEQ ID NO: 294201 - RNA, 13 nt, Human coronavirus 229E
augccuuguugca

SEQ ID NO: 294202 - RNA, 12 nt, Human coronavirus 229E
augcuguugcua

SEQ ID NO: 294203 - RNA, 22 nt, Human coronavirus 229E
augcuguugcuaagcaugauuu

SEQ ID NO: 294204 - RNA, 15 nt, Human coronavirus 229E
augguaagccagugg

SEQ ID NO: 294205 - RNA, 14 nt, Human coronavirus 229E
augguacugggaga

SEQ ID NO: 294206 - RNA, 18 nt, Human coronavirus 229E
auguauuugcuguugaga

SEQ ID NO: 294207 - RNA, 22 nt, Human coronavirus 229E
augucauacguuacaaccucaa

SEQ ID NO: 294208 - RNA, 20 nt, Human coronavirus 229E
auguuacugaaccuagguga

SEQ ID NO: 294209 - RNA, 13 nt, Human coronavirus 229E
auuaagcuuuguu

SEQ ID NO: 294210 - RNA, 22 nt, Human coronavirus 229E
auugauuucuaaacuaaacgac

SEQ ID NO: 294211 - RNA, 16 nt, Human coronavirus 229E
auuggucucaagcaua

SEQ ID NO: 294212 - RNA, 21 nt, Human coronavirus 229E
auuguaaagguuuuuccucag

SEQ ID NO: 294213 - RNA, 16 nt, Human coronavirus 229E
auuguacgggugacau

SEQ ID NO: 294214 - RNA, 17 nt, Human coronavirus 229E
auuguacgggugacauu

SEQ ID NO: 294215 - RNA, 23 nt, Human coronavirus 229E
auuuaccaaucauauaugcacau

SEQ ID NO: 294216 - RNA, 16 nt, Human coronavirus 229E
auuuugaagaaaaccu

SEQ ID NO: 294217 - RNA, 19 nt, Human coronavirus 229E
caaaaacguuucagaacua

SEQ ID NO: 294218 - RNA, 19 nt, Human coronavirus 229E
caaauuagaaauccacuaa

SEQ ID NO: 294219 - RNA, 14 nt, Human coronavirus 229E
caacuugugucugc

SEQ ID NO: 294220 - RNA, 18 nt, Human coronavirus 229E
caagacaugggauuucau

SEQ ID NO: 294221 - RNA, 19 nt, Human coronavirus 229E
caagcauauauuuacgcaa

SEQ ID NO: 294222 - RNA, 21 nt, Human coronavirus 229E
caaucauauaugcacauagac

SEQ ID NO: 294223 - RNA, 14 nt, Human coronavirus 229E
cacuaguuacucug

SEQ ID NO: 294224 - RNA, 23 nt, Human coronavirus 229E
cacugcuggcucuacaagacaug

SEQ ID NO: 294225 - RNA, 14 nt, Human coronavirus 229E
cacuguuaccuuca

SEQ ID NO: 294226 - RNA, 16 nt, Human coronavirus 229E
cagucauuugucuuga

SEQ ID NO: 294227 - RNA, 19 nt, Human coronavirus 229E
caguccauguauaacuuac

SEQ ID NO: 294228 - RNA, 22 nt, Human coronavirus 229E
cauaugccuuguugcauauugc

SEQ ID NO: 294229 - RNA, 20 nt, Human coronavirus 229E
caugccacuguguuguuuga

SEQ ID NO: 294230 - RNA, 17 nt, Human coronavirus 229E
caugggauuucauuguc

SEQ ID NO: 294231 - RNA, 22 nt, Human coronavirus 229E
caugggauuucauugucuucaa

SEQ ID NO: 294232 - RNA, 21 nt, Human coronavirus 229E
cauugucacccauuugaagaa

SEQ ID NO: 294233 - RNA, 19 nt, Human coronavirus 229E
ccaacaauggaagagccag

SEQ ID NO: 294234 - RNA, 15 nt, Human coronavirus 229E
ccaaucauauaugca

SEQ ID NO: 294235 - RNA, 18 nt, Human coronavirus 229E
ccaaucauauaugcacau

SEQ ID NO: 294236 - RNA, 18 nt, Human coronavirus 229E
ccacucguacuugcuuug

SEQ ID NO: 294237 - RNA, 22 nt, Human coronavirus 229E
ccauuaaaaauguguaccacau

SEQ ID NO: 294238 - RNA, 22 nt, Human coronavirus 229E
ccucagauguuuugucugaugu

SEQ ID NO: 294239 - RNA, 14 nt, Human coronavirus 229E
ccucaucuguugua

SEQ ID NO: 294240 - RNA, 14 nt, Human coronavirus 229E
ccuucuaacuaaua

SEQ ID NO: 294241 - RNA, 20 nt, Human coronavirus 229E
ccuuggaaggugauaccucg

SEQ ID NO: 294242 - RNA, 16 nt, Human coronavirus 229E
cgagccaacaauggaa

SEQ ID NO: 294243 - RNA, 21 nt, Human coronavirus 229E
cgcaagaauucagaaccagag

SEQ ID NO: 294244 - RNA, 22 nt, Human coronavirus 229E
cgcuuagcaaugcgaaaguuag

SEQ ID NO: 294245 - RNA, 21 nt, Human coronavirus 229E
cggaaaaaaucugaaguccaa

SEQ ID NO: 294246 - RNA, 14 nt, Human coronavirus 229E
cuaaaacugaaccu

SEQ ID NO: 294247 - RNA, 22 nt, Human coronavirus 229E
cuaaacgacaaugucaaaugac

SEQ ID NO: 294248 - RNA, 19 nt, Human coronavirus 229E
cuaagcaugauuucuuuac

SEQ ID NO: 294249 - RNA, 21 nt, Human coronavirus 229E
cuaauugggccuuuguugcau

SEQ ID NO: 294250 - RNA, 22 nt, Human coronavirus 229E
cuacucugguguguggugcuua

SEQ ID NO: 294251 - RNA, 18 nt, Human coronavirus 229E
cuaguauaacucauuaca

SEQ ID NO: 294252 - RNA, 12 nt, Human coronavirus 229E
cugaugucauac

SEQ ID NO: 294253 - RNA, 18 nt, Human coronavirus 229E
cugguugucaaacuacaa

SEQ ID NO: 294254 - RNA, 16 nt, Human coronavirus 229E
cuguugcuaagcauga

SEQ ID NO: 294255 - RNA, 18 nt, Human coronavirus 229E
cuuaauugcuuauggucu

SEQ ID NO: 294256 - RNA, 23 nt, Human coronavirus 229E
cuuacugguuguuguaguacuga

SEQ ID NO: 294257 - RNA, 12 nt, Human coronavirus 229E
cuugacaaggau

SEQ ID NO: 294258 - RNA, 17 nt, Human coronavirus 229E
cuugugucugcuguuaa

SEQ ID NO: 294259 - RNA, 22 nt, Human coronavirus 229E
cuuugauugcuguaauuuugcu

SEQ ID NO: 294260 - RNA, 19 nt, Human coronavirus 229E
cuuuguuguguauuuugcu

SEQ ID NO: 294261 - RNA, 21 nt, Human coronavirus 229E
cuuuucguuuaugugccauug

SEQ ID NO: 294262 - RNA, 22 nt, Human coronavirus 229E
gaaccuaggugaacgcuaguau

SEQ ID NO: 294263 - RNA, 20 nt, Human coronavirus 229E
gacaaugucaaaugacaauu

SEQ ID NO: 294264 - RNA, 20 nt, Human coronavirus 229E
gagagauuuggcgccuuggu

SEQ ID NO: 294265 - RNA, 14 nt, Human coronavirus 229E
gaucaauuccuuua

SEQ ID NO: 294266 - RNA, 15 nt, Human coronavirus 229E
gauggugcuaaaacu

SEQ ID NO: 294267 - RNA, 17 nt, Human coronavirus 229E
gcaacuuugauugcugu

SEQ ID NO: 294268 - RNA, 21 nt, Human coronavirus 229E
gcacauagacccuuucccuaa

SEQ ID NO: 294269 - RNA, 18 nt, Human coronavirus 229E
gcaguccauguauaacuu

SEQ ID NO: 294270 - RNA, 15 nt, Human coronavirus 229E
gcuaaaacugaaccu

SEQ ID NO: 294271 - RNA, 23 nt, Human coronavirus 229E
gcuaguauaacucauuacaaaug

SEQ ID NO: 294272 - RNA, 18 nt, Human coronavirus 229E
gcucuagguuuguucaca

SEQ ID NO: 294273 - RNA, 18 nt, Human coronavirus 229E
gcucugcguaacuuugau

SEQ ID NO: 294274 - RNA, 22 nt, Human coronavirus 229E
gcugguugucaaacuacaaaug

SEQ ID NO: 294275 - RNA, 19 nt, Human coronavirus 229E
gcuguugagaguggugguu

SEQ ID NO: 294276 - RNA, 16 nt, Human coronavirus 229E
gcuguuggaauaguca

SEQ ID NO: 294277 - RNA, 16 nt, Human coronavirus 229E
gcuuauagugauacua

SEQ ID NO: 294278 - RNA, 21 nt, Human coronavirus 229E
ggaauccugagguuaaugcaa

SEQ ID NO: 294279 - RNA, 23 nt, Human coronavirus 229E
ggaauccugagguuaaugcaauc

SEQ ID NO: 294280 - RNA, 15 nt, Human coronavirus 229E
ggaauguuauucuaa

SEQ ID NO: 294281 - RNA, 17 nt, Human coronavirus 229E
ggcagagcugcucuuau

SEQ ID NO: 294282 - RNA, 16 nt, Human coronavirus 229E
ggugaauguguauacu

SEQ ID NO: 294283 - RNA, 16 nt, Human coronavirus 229E
guaaugguacagacau

SEQ ID NO: 294284 - RNA, 16 nt, Human coronavirus 229E
guaauuugguacccau

SEQ ID NO: 294285 - RNA, 21 nt, Human coronavirus 229E
guauaagaaauuugcuacuau

SEQ ID NO: 294286 - RNA, 13 nt, Human coronavirus 229E
gucuuauacacaa

SEQ ID NO: 294287 - RNA, 12 nt, Human coronavirus 229E
gugccauugcug

SEQ ID NO: 294288 - RNA, 18 nt, Human coronavirus 229E
guggugcuuauagugaua

SEQ ID NO: 294289 - RNA, 17 nt, Human coronavirus 229E
guuaaacguugcauuaa

SEQ ID NO: 294290 - RNA, 17 nt, Human coronavirus 229E
guuaguaacugcuaaug

SEQ ID NO: 294291 - RNA, 18 nt, Human coronavirus 229E
guuagugcugaaguuuca

SEQ ID NO: 294292 - RNA, 19 nt, Human coronavirus 229E
ucugaaaccauucguuugu

SEQ ID NO: 294293 - RNA, 17 nt, Human coronavirus 229E
ucuguuguagauggugu

SEQ ID NO: 294294 - RNA, 13 nt, Human coronavirus 229E
ucuuggcacagga

SEQ ID NO: 294295 - RNA, 18 nt, Human coronavirus 229E
ugaaauucaggcuuuagu

SEQ ID NO: 294296 - RNA, 18 nt, Human coronavirus 229E
ugaauacauugcuuuucu

SEQ ID NO: 294297 - RNA, 16 nt, Human coronavirus 229E
ugacaccugggcuaau

SEQ ID NO: 294298 - RNA, 14 nt, Human coronavirus 229E
ugagguuaaugcaa

SEQ ID NO: 294299 - RNA, 17 nt, Human coronavirus 229E
ugagguuaaugcaauca

SEQ ID NO: 294300 - RNA, 20 nt, Human coronavirus 229E
ugcucgaacuuuuugggcau

SEQ ID NO: 294301 - RNA, 20 nt, Human coronavirus 229E
ugcuuaauugcuuauggucu

SEQ ID NO: 294302 - RNA, 20 nt, Human coronavirus 229E
ugcuuguugauagugaacaa

SEQ ID NO: 294303 - RNA, 15 nt, Human coronavirus 229E
uggaagagccaguca

SEQ ID NO: 294304 - RNA, 20 nt, Human coronavirus 229E
uggaagagccagucauuugu

SEQ ID NO: 294305 - RNA, 17 nt, Human coronavirus 229E
uggcucuacaagacaug

SEQ ID NO: 294306 - RNA, 22 nt, Human coronavirus 229E
uggcuugcgguuuacuacuggu

SEQ ID NO: 294307 - RNA, 20 nt, Human coronavirus 229E
ugguaagccagugguaguaa

SEQ ID NO: 294308 - RNA, 13 nt, Human coronavirus 229E
uguaaugcuguug

SEQ ID NO: 294309 - RNA, 22 nt, Human coronavirus 229E
uguacuguggcuucuuuggcca

SEQ ID NO: 294310 - RNA, 14 nt, Human coronavirus 229E
uguauaacuuacuu

SEQ ID NO: 294311 - RNA, 16 nt, Human coronavirus 229E
ugucaaucuuugacac

SEQ ID NO: 294312 - RNA, 13 nt, Human coronavirus 229E
ugugaacacccag

SEQ ID NO: 294313 - RNA, 16 nt, Human coronavirus 229E
ugugccauugcuguau

SEQ ID NO: 294314 - RNA, 19 nt, Human coronavirus 229E
uguguggugcuuauaguga

SEQ ID NO: 294315 - RNA, 17 nt, Human coronavirus 229E
uguugcauuuagcuuuu

SEQ ID NO: 294316 - RNA, 15 nt, Human coronavirus 229E
uguuguagauggugu

SEQ ID NO: 294317 - RNA, 20 nt, Human coronavirus 229E
uuaaacuaauuaagcuuugu

SEQ ID NO: 294318 - RNA, 12 nt, Human coronavirus 229E
uuaaaggcugua

SEQ ID NO: 294319 - RNA, 22 nt, Human coronavirus 229E
uuaaggagauauugguucuuac

SEQ ID NO: 294320 - RNA, 18 nt, Human coronavirus 229E
uuacuguguccgugcauu

SEQ ID NO: 294321 - RNA, 22 nt, Human coronavirus 229E
uucaauguaaccacacuuugcu

SEQ ID NO: 294322 - RNA, 13 nt, Human coronavirus 229E
uucacuugccaua

SEQ ID NO: 294323 - RNA, 13 nt, Human coronavirus 229E
uucagaaccagag

SEQ ID NO: 294324 - RNA, 22 nt, Human coronavirus 229E
uucagaaccagagauaccacac

SEQ ID NO: 294325 - RNA, 16 nt, Human coronavirus 229E
uucagccuuuguugcu

SEQ ID NO: 294326 - RNA, 17 nt, Human coronavirus 229E
uuccauacagcuuggca

SEQ ID NO: 294327 - RNA, 18 nt, Human coronavirus 229E
uucuaacuaauaccucau

SEQ ID NO: 294328 - RNA, 18 nt, Human coronavirus 229E
uugaagaugcuuguacug

SEQ ID NO: 294329 - RNA, 16 nt, Human coronavirus 229E
uugaugaaaaagacug

SEQ ID NO: 294330 - RNA, 23 nt, Human coronavirus 229E
uuggcuugacaaggaucuagucu

SEQ ID NO: 294331 - RNA, 19 nt, Human coronavirus 229E
uuguaaagguuuuuccuca

SEQ ID NO: 294332 - RNA, 19 nt, Human coronavirus 229E
uuuaauuaacaugaucccu

SEQ ID NO: 294333 - RNA, 20 nt, Human coronavirus 229E
uuuaccaaucauauaugcac

SEQ ID NO: 294334 - RNA, 14 nt, Human coronavirus 229E
uuucagaacuagaa

SEQ ID NO: 294335 - RNA, 18 nt, Human coronavirus 229E
uuugguuguuaauguacu

SEQ ID NO: 294336 - RNA, 19 nt, Human coronavirus 229E
cuuuaguuggaauuuugcu

SEQ ID NO: 294337 - RNA, 16 nt, Human coronavirus 229E
cuuuauuuaaagcaag

SEQ ID NO: 294338 - RNA, 15 nt, Human coronavirus 229E
cuuugauugcuguaa

SEQ ID NO: 294339 - RNA, 19 nt, Human coronavirus 229E
cuuuucucugaucuaugua

SEQ ID NO: 294340 - RNA, 15 nt, Human coronavirus 229E
gaaaguuagugcuga

SEQ ID NO: 294341 - RNA, 21 nt, Human coronavirus 229E
gaauccugagguuaaugcaau

SEQ ID NO: 294342 - RNA, 15 nt, Human coronavirus 229E
gaauguucaaaaacg

SEQ ID NO: 294343 - RNA, 18 nt, Human coronavirus 229E
gacaaugucaaaugacaa

SEQ ID NO: 294344 - RNA, 19 nt, Human coronavirus 229E
gacaaugucaaaugacaau

SEQ ID NO: 294345 - RNA, 14 nt, Human coronavirus 229E
gacaugggauuuca

SEQ ID NO: 294346 - RNA, 19 nt, Human coronavirus 229E
gacgugaaagauggcacug

SEQ ID NO: 294347 - RNA, 13 nt, Human coronavirus 229E
gagcugcuuuuaa

SEQ ID NO: 294348 - RNA, 17 nt, Human coronavirus 229E
gaugaaaaagacuguga

SEQ ID NO: 294349 - RNA, 14 nt, Human coronavirus 229E
gaugaauacauugc

SEQ ID NO: 294350 - RNA, 18 nt, Human coronavirus 229E
gaugcaucugaaccacaa

SEQ ID NO: 294351 - RNA, 14 nt, Human coronavirus 229E
gaugcuuguacugu

SEQ ID NO: 294352 - RNA, 21 nt, Human coronavirus 229E
gauuacuguguccgugcauuu

SEQ ID NO: 294353 - RNA, 14 nt, Human coronavirus 229E
gauuucuaaacuaa

SEQ ID NO: 294354 - RNA, 19 nt, Human coronavirus 229E
gcauaugccuuguugcaua

SEQ ID NO: 294355 - RNA, 11 nt, Human coronavirus 229E
gccauugcugu

SEQ ID NO: 294356 - RNA, 20 nt, Human coronavirus 229E
gcucgaacuuuuugggcaug

SEQ ID NO: 294357 - RNA, 14 nt, Human coronavirus 229E
gcuggaguaaucaa

SEQ ID NO: 294358 - RNA, 14 nt, Human coronavirus 229E
gcuuguugcauaug

SEQ ID NO: 294359 - RNA, 21 nt, Human coronavirus 229E
gcuuugguuguuaauguacua

SEQ ID NO: 294360 - RNA, 18 nt, Human coronavirus 229E
ggaaggugauaccucgua

SEQ ID NO: 294361 - RNA, 22 nt, Human coronavirus 229E
ggagauauugguucuuacuggu

SEQ ID NO: 294362 - RNA, 16 nt, Human coronavirus 229E
ggcuguguugguuauu

SEQ ID NO: 294363 - RNA, 15 nt, Human coronavirus 229E
ggguagaauaccuua

SEQ ID NO: 294364 - RNA, 14 nt, Human coronavirus 229E
ggguugcuguugau

SEQ ID NO: 294365 - RNA, 18 nt, Human coronavirus 229E
ggugcuuauagugauacu

SEQ ID NO: 294366 - RNA, 22 nt, Human coronavirus 229E
guaaccacacuuugcuaugcaa

SEQ ID NO: 294367 - RNA, 16 nt, Human coronavirus 229E
guaguacugauuacuu

SEQ ID NO: 294368 - RNA, 19 nt, Human coronavirus 229E
gucaggguagaauaccuua

SEQ ID NO: 294369 - RNA, 21 nt, Human coronavirus 229E
gucgucaggguagaauaccuu

SEQ ID NO: 294370 - RNA, 21 nt, Human coronavirus 229E
gugauacuacuaguguguauu

SEQ ID NO: 294371 - RNA, 17 nt, Human coronavirus 229E
guggauuugucacccaa

SEQ ID NO: 294372 - RNA, 18 nt, Human coronavirus 229E
guguauuacaauaauuaa

SEQ ID NO: 294373 - RNA, 16 nt, Human coronavirus 229E
guguuaggcgcaagaa

SEQ ID NO: 294374 - RNA, 17 nt, Human coronavirus 229E
guucacauugcaacuug

SEQ ID NO: 294375 - RNA, 19 nt, Human coronavirus 229E
guuccuucuaacuaauacc

SEQ ID NO: 294376 - RNA, 15 nt, Human coronavirus 229E
guuguagaugguguu

SEQ ID NO: 294377 - RNA, 17 nt, Human coronavirus 229E
uaaaauucuaauccuuu

SEQ ID NO: 294378 - RNA, 15 nt, Human coronavirus 229E
uaaacgacaauguca

SEQ ID NO: 294379 - RNA, 12 nt, Human coronavirus 229E
uaacuaauaccu

SEQ ID NO: 294380 - RNA, 18 nt, Human coronavirus 229E
uaacuaauaccucaucug

SEQ ID NO: 294381 - RNA, 22 nt, Human coronavirus 229E
uaauccuuuucguuuaugugcc

SEQ ID NO: 294382 - RNA, 22 nt, Human coronavirus 229E
uaccaaucauauaugcacauag

SEQ ID NO: 294383 - RNA, 22 nt, Human coronavirus 229E
uaccucguaauuugguacccau

SEQ ID NO: 294384 - RNA, 19 nt, Human coronavirus 229E
uacgcaacuuugauugcug

SEQ ID NO: 294385 - RNA, 22 nt, Human coronavirus 229E
uacggaggggaucaauuccuuu

SEQ ID NO: 294386 - RNA, 17 nt, Human coronavirus 229E
uacguuacaaccucaau

SEQ ID NO: 294387 - RNA, 16 nt, Human coronavirus 229E
uacuauguuacugaac

SEQ ID NO: 294388 - RNA, 21 nt, Human coronavirus 229E
uacugguuguuguaguacuga

SEQ ID NO: 294389 - RNA, 14 nt, Human coronavirus 229E
uagauuacuguguc

SEQ ID NO: 294390 - RNA, 17 nt, Human coronavirus 229E
uagugaacaaccuugga

SEQ ID NO: 294391 - RNA, 21 nt, Human coronavirus 229E
uauaacggugaauguguauac

SEQ ID NO: 294392 - RNA, 22 nt, Human coronavirus 229E
uauaacggugaauguguauacu

SEQ ID NO: 294393 - RNA, 12 nt, Human coronavirus 229E
uauagugauacu

SEQ ID NO: 294394 - RNA, 20 nt, Human coronavirus 229E
uauauuuacgcaacuuugau

SEQ ID NO: 294395 - RNA, 19 nt, Human coronavirus 229E
uaugugggugauguacuuc

SEQ ID NO: 294396 - RNA, 15 nt, Human coronavirus 229E
uauuuuaaugguacu

SEQ ID NO: 294397 - RNA, 20 nt, Human coronavirus 229E
ucaaaaacguuucagaacua

SEQ ID NO: 294398 - RNA, 17 nt, Human coronavirus 229E
ucaacuugcuagcguau

SEQ ID NO: 294399 - RNA, 15 nt, Human coronavirus 229E
ucaagaauguagaua

SEQ ID NO: 294400 - RNA, 19 nt, Human coronavirus 229E
ucaauuuugaagaaaaccu

SEQ ID NO: 294401 - RNA, 16 nt, Human coronavirus 229E
ucacccaagcugcauu

SEQ ID NO: 294402 - RNA, 19 nt, Human coronavirus 229E
ucacugucacaaccguguu

SEQ ID NO: 294403 - RNA, 13 nt, Human coronavirus 229E
ucagaaccagaga

SEQ ID NO: 294404 - RNA, 13 nt, Human coronavirus 229E
ucagaacuagaaa

SEQ ID NO: 294405 - RNA, 16 nt, Human coronavirus 229E
ucagccuuuguugcuu

SEQ ID NO: 294406 - RNA, 15 nt, Human coronavirus 229E
ucauauaugcacaua

SEQ ID NO: 294407 - RNA, 18 nt, Human coronavirus 229E
ucauauaugcacauagac

SEQ ID NO: 294408 - RNA, 15 nt, Human coronavirus 229E
ucauuguuauucuuc

SEQ ID NO: 294409 - RNA, 14 nt, Human coronavirus 229E
uccuucuaacuaau

SEQ ID NO: 294410 - RNA, 12 nt, Human coronavirus 229E
ucgcuuagcaau

SEQ ID NO: 294411 - RNA, 16 nt, Human coronavirus 229E
ucuaacuaauaccuca

SEQ ID NO: 294412 - RNA, 16 nt, Human coronavirus 229E
ucugcguaacuuugau

SEQ ID NO: 294413 - RNA, 20 nt, Human coronavirus 229E
ucuuacugguuguuguagua

SEQ ID NO: 294414 - RNA, 13 nt, Human coronavirus 229E
ugaaaaagacugu

SEQ ID NO: 294415 - RNA, 15 nt, Human coronavirus 229E
ugaaaaagacuguga

SEQ ID NO: 294416 - RNA, 21 nt, Human coronavirus 229E
ugaacaaccuuggaaggugau

SEQ ID NO: 294417 - RNA, 22 nt, Human coronavirus 229E
ugaacaaccuuggaaggugaua

SEQ ID NO: 294418 - RNA, 22 nt, Human coronavirus 229E
ugaauacauugcuuuucucuga

SEQ ID NO: 294419 - RNA, 20 nt, Human coronavirus 229E
ugauacuacuaguguguauu

SEQ ID NO: 294420 - RNA, 14 nt, Human coronavirus 229E
ugaucuauguauga

SEQ ID NO: 294421 - RNA, 18 nt, Human coronavirus 229E
ugaugguacgaucagagc

SEQ ID NO: 294422 - RNA, 22 nt, Human coronavirus 229E
ugauguacuucgcaaacaguuu

SEQ ID NO: 294423 - RNA, 14 nt, Human coronavirus 229E
ugauuucuuuacuu

SEQ ID NO: 294424 - RNA, 14 nt, Human coronavirus 229E
ugcauauugcuggu

SEQ ID NO: 294425 - RNA, 19 nt, Human coronavirus 229E
ugccacuguguuguuugaa

SEQ ID NO: 294426 - RNA, 22 nt, Human coronavirus 229E
ugccauauguuuuguaauagaa

SEQ ID NO: 294427 - RNA, 17 nt, Human coronavirus 229E
ugcgaaaguuagugcug

SEQ ID NO: 294428 - RNA, 17 nt, Human coronavirus 229E
ugcuacuauguuacuga

SEQ ID NO: 294429 - RNA, 19 nt, Human coronavirus 229E
ugcuuauagugauacuacu

SEQ ID NO: 294430 - RNA, 21 nt, Human coronavirus 229E
ugcuuauagugauacuacuag

SEQ ID NO: 294431 - RNA, 23 nt, Human coronavirus 229E
uggcacugcuggcucuacaagac

SEQ ID NO: 294432 - RNA, 14 nt, Human coronavirus 229E
uggccguaucaaca

SEQ ID NO: 294433 - RNA, 13 nt, Human coronavirus 229E
ugguuauauaccc

SEQ ID NO: 294434 - RNA, 22 nt, Human coronavirus 229E
ugguuguuaauguacuacucug

SEQ ID NO: 294435 - RNA, 19 nt, Human coronavirus 229E
uguaaagguuuuuccucag

SEQ ID NO: 294436 - RNA, 15 nt, Human coronavirus 229E
uguacgggugacauu

SEQ ID NO: 294437 - RNA, 12 nt, Human coronavirus 229E
uguauacuuguu

SEQ ID NO: 294438 - RNA, 14 nt, Human coronavirus 229E
ugucacccauuuga

SEQ ID NO: 294439 - RNA, 15 nt, Human coronavirus 229E
ugucugaugucauac

SEQ ID NO: 294440 - RNA, 15 nt, Human coronavirus 229E
ugugccauugcugua

SEQ ID NO: 294441 - RNA, 16 nt, Human coronavirus 229E
uguuaaucaaucgcuu

SEQ ID NO: 294442 - RNA, 15 nt, Human coronavirus 229E
uguuaauguacuacu

SEQ ID NO: 294443 - RNA, 21 nt, Human coronavirus 229E
uguuauucuucaguuuggaca

SEQ ID NO: 294444 - RNA, 14 nt, Human coronavirus 229E
uguugcauauugcu

SEQ ID NO: 294445 - RNA, 15 nt, Human coronavirus 229E
uguugcuuaauugcu

SEQ ID NO: 294446 - RNA, 19 nt, Human coronavirus 229E
uuaagcuuuguuucacuug

SEQ ID NO: 294447 - RNA, 15 nt, Human coronavirus 229E
uuaaucaaucgcuua

SEQ ID NO: 294448 - RNA, 17 nt, Human coronavirus 229E
aaaggcuguaaugcugu

SEQ ID NO: 294449 - RNA, 22 nt, Human coronavirus 229E
aacacuaguuacucuguuugca

SEQ ID NO: 294450 - RNA, 19 nt, Human coronavirus 229E
aaccauuuaugguaauguu

SEQ ID NO: 294451 - RNA, 19 nt, Human coronavirus 229E
aaccguguugggacagaca

SEQ ID NO: 294452 - RNA, 18 nt, Human coronavirus 229E
aacguggucgucagggua

SEQ ID NO: 294453 - RNA, 15 nt, Human coronavirus 229E
aacuaauaccucauc

SEQ ID NO: 294454 - RNA, 22 nt, Human coronavirus 229E
aacuaauuaagcuuuguuucac

SEQ ID NO: 294455 - RNA, 16 nt, Human coronavirus 229E
aacuuacuuaaaggcu

SEQ ID NO: 294456 - RNA, 23 nt, Human coronavirus 229E
aagaaauuugcuacuauguuacu

SEQ ID NO: 294457 - RNA, 21 nt, Human coronavirus 229E
aagcuuuguuucacuugccau

SEQ ID NO: 294458 - RNA, 18 nt, Human coronavirus 229E
uuaaugcaaucacuguca

SEQ ID NO: 294459 - RNA, 14 nt, Human coronavirus 229E
uuaauguacuacuc

SEQ ID NO: 294460 - RNA, 22 nt, Human coronavirus 229E
uuacgcaacuuugauugcugua

SEQ ID NO: 294461 - RNA, 22 nt, Human coronavirus 229E
uuagagagcguguugaaggugu

SEQ ID NO: 294462 - RNA, 16 nt, Human coronavirus 229E
uuaguuggaauuuugc

SEQ ID NO: 294463 - RNA, 23 nt, Human coronavirus 229E
uuauagcccuuugcuuguugaua

SEQ ID NO: 294464 - RNA, 15 nt, Human coronavirus 229E
uuauucuaaccauau

SEQ ID NO: 294465 - RNA, 14 nt, Human coronavirus 229E
uuauugauuucuaa

SEQ ID NO: 294466 - RNA, 14 nt, Human coronavirus 229E
uucaguuuggacac

SEQ ID NO: 294467 - RNA, 16 nt, Human coronavirus 229E
uucuaaccauauucau

SEQ ID NO: 294468 - RNA, 15 nt, Human coronavirus 229E
uucuaacuaauaccu

SEQ ID NO: 294469 - RNA, 20 nt, Human coronavirus 229E
uucucaacuaacgacuugua

SEQ ID NO: 294470 - RNA, 14 nt, Human coronavirus 229E
uucuuuuauuaucu

SEQ ID NO: 294471 - RNA, 18 nt, Human coronavirus 229E
uugaugaaaaagacugug

SEQ ID NO: 294472 - RNA, 12 nt, Human coronavirus 229E
uugucacccauu

SEQ ID NO: 294473 - RNA, 23 nt, Human coronavirus 229E
uugucuugagaccuaucuaguua

SEQ ID NO: 294474 - RNA, 16 nt, Human coronavirus 229E
uugugucugcuguuaa

SEQ ID NO: 294475 - RNA, 20 nt, Human coronavirus 229E
uugugugcgcuucaagaaug

SEQ ID NO: 294476 - RNA, 15 nt, Human coronavirus 229E
uuguugcauauugcu

SEQ ID NO: 294477 - RNA, 18 nt, Human coronavirus 229E
uuuaaaauucuaauccuu

SEQ ID NO: 294478 - RNA, 14 nt, Human coronavirus 229E
uuucucugaucuau

SEQ ID NO: 294479 - RNA, 21 nt, Human coronavirus 229E
uuugguacccaucaacaagaa

SEQ ID NO: 294480 - RNA, 22 nt, Human coronavirus 229E
uuugguuggaauguuauucuaa

SEQ ID NO: 294481 - RNA, 13 nt, Human coronavirus 229E
uuuuaaugguacu

SEQ ID NO: 294482 - RNA, 17 nt, Human coronavirus 229E
uuuucucugaucuaugu

SEQ ID NO: 294483 - RNA, 23 nt, Human coronavirus OC43 (HCoV-OC43)
aaaaauaccaagguuauuaaaga

SEQ ID NO: 294484 - RNA, 22 nt, Human coronavirus OC43 (HCoV-OC43)
aaaauacaaacagcgccacaca

SEQ ID NO: 294485 - RNA, 14 nt, Human coronavirus OC43 (HCoV-OC43)
aaaccucagcaagu

SEQ ID NO: 294486 - RNA, 15 nt, Human coronavirus OC43 (HCoV-OC43)
aacaacuugaugugu

SEQ ID NO: 294487 - RNA, 19 nt, Human coronavirus OC43 (HCoV-OC43)
aacaacuugauguguauag

SEQ ID NO: 294488 - RNA, 18 nt, Human coronavirus OC43 (HCoV-OC43)
aacauguuuuugauacuu

SEQ ID NO: 294489 - RNA, 18 nt, Human coronavirus OC43 (HCoV-OC43)
aacuacaccagcaccagu

SEQ ID NO: 294490 - RNA, 15 nt, Human coronavirus OC43 (HCoV-OC43)
aacuugauguguaua

SEQ ID NO: 294491 - RNA, 12 nt, Human coronavirus OC43 (HCoV-OC43)
aagaaguuauug

SEQ ID NO: 294492 - RNA, 17 nt, Human coronavirus OC43 (HCoV-OC43)
aagagcucaacccaagc

SEQ ID NO: 294493 - RNA, 21 nt, Human coronavirus OC43 (HCoV-OC43)
aagauuagaguuggccaaagu

SEQ ID NO: 294494 - RNA, 10 nt, Human coronavirus OC43 (HCoV-OC43)
aagcaaucca

SEQ ID NO: 294495 - RNA, 15 nt, Human coronavirus OC43 (HCoV-OC43)
aagcauacugccaaa

SEQ ID NO: 294496 - RNA, 23 nt, Human coronavirus OC43 (HCoV-OC43)
aagguguagaagaauugcaugac

SEQ ID NO: 294497 - RNA, 16 nt, Human coronavirus OC43 (HCoV-OC43)
aagugcccaagggaag

SEQ ID NO: 294498 - RNA, 19 nt, Human coronavirus OC43 (HCoV-OC43)
aaguguacuucagauacua

SEQ ID NO: 294499 - RNA, 16 nt, Human coronavirus OC43 (HCoV-OC43)
aauagagguaggcagu

SEQ ID NO: 294500 - RNA, 19 nt, Human coronavirus OC43 (HCoV-OC43)
aauaguuguaguggcauuu

SEQ ID NO: 294501 - RNA, 22 nt, Human coronavirus OC43 (HCoV-OC43)
aaugguuauuacccuacuucag

SEQ ID NO: 294502 - RNA, 18 nt, Human coronavirus OC43 (HCoV-OC43)
aaugguuuggguacuuau

SEQ ID NO: 294503 - RNA, 21 nt, Human coronavirus OC43 (HCoV-OC43)
aauuacauucgugauaaaggu

SEQ ID NO: 294504 - RNA, 12 nt, Human coronavirus OC43 (HCoV-OC43)
aauuauaaaggu

SEQ ID NO: 294505 - RNA, 22 nt, Human coronavirus OC43 (HCoV-OC43)
aauuuuucuuuggguauuauac

SEQ ID NO: 294506 - RNA, 18 nt, Human coronavirus OC43 (HCoV-OC43)
acacugugugguaugugg

SEQ ID NO: 294507 - RNA, 13 nt, Human coronavirus OC43 (HCoV-OC43)
acagcauucgcua

SEQ ID NO: 294508 - RNA, 20 nt, Human coronavirus OC43 (HCoV-OC43)
accaacggcuuuugcuguua

SEQ ID NO: 294509 - RNA, 21 nt, Human coronavirus OC43 (HCoV-OC43)
accaguccuugauguggauga

SEQ ID NO: 294510 - RNA, 18 nt, Human coronavirus OC43 (HCoV-OC43)
acccaguaauuaguaaau

SEQ ID NO: 294511 - RNA, 18 nt, Human coronavirus OC43 (HCoV-OC43)
acgcauugaauaaugugu

SEQ ID NO: 294512 - RNA, 12 nt, Human coronavirus OC43 (HCoV-OC43)
acuaucugggaa

SEQ ID NO: 294513 - RNA, 21 nt, Human coronavirus OC43 (HCoV-OC43)
acuauucuugguucucuggaa

SEQ ID NO: 294514 - RNA, 17 nt, Human coronavirus OC43 (HCoV-OC43)
acugaagggaaguguac

SEQ ID NO: 294515 - RNA, 19 nt, Human coronavirus OC43 (HCoV-OC43)
acugauacuguugauguua

SEQ ID NO: 294516 - RNA, 15 nt, Human coronavirus OC43 (HCoV-OC43)
acugaucucuuguua

SEQ ID NO: 294517 - RNA, 15 nt, Human coronavirus OC43 (HCoV-OC43)
acuucagauacuagu

SEQ ID NO: 294518 - RNA, 12 nt, Human coronavirus OC43 (HCoV-OC43)
agaaauguuaaa

SEQ ID NO: 294519 - RNA, 15 nt, Human coronavirus OC43 (HCoV-OC43)
agaagaauugcauga

SEQ ID NO: 294520 - RNA, 19 nt, Human coronavirus OC43 (HCoV-OC43)
agaagaugcuuguuuuaaa

SEQ ID NO: 294521 - RNA, 18 nt, Human coronavirus OC43 (HCoV-OC43)
agaauuagaagaugcuug

SEQ ID NO: 294522 - RNA, 20 nt, Human coronavirus OC43 (HCoV-OC43)
agaggcccuaaucagaauuu

SEQ ID NO: 294523 - RNA, 15 nt, Human coronavirus OC43 (HCoV-OC43)
agaguuggccaaagu

SEQ ID NO: 294524 - RNA, 16 nt, Human coronavirus OC43 (HCoV-OC43)
agaucuuuuugcaauc

SEQ ID NO: 294525 - RNA, 13 nt, Human coronavirus OC43 (HCoV-OC43)
agcaaacugcuac

SEQ ID NO: 294526 - RNA, 22 nt, Human coronavirus OC43 (HCoV-OC43)
agcuaagggguacugguacaga

SEQ ID NO: 294527 - RNA, 23 nt, Human coronavirus OC43 (HCoV-OC43)
aggaugccacuaaaccucagcaa

SEQ ID NO: 294528 - RNA, 18 nt, Human coronavirus OC43 (HCoV-OC43)
agggguagaagagcucaa

SEQ ID NO: 294529 - RNA, 16 nt, Human coronavirus OC43 (HCoV-OC43)
aguaaaacuacaccag

SEQ ID NO: 294530 - RNA, 16 nt, Human coronavirus OC43 (HCoV-OC43)
agucccagcuacugaa

SEQ ID NO: 294531 - RNA, 17 nt, Human coronavirus OC43 (HCoV-OC43)
agucguucagauuguaa

SEQ ID NO: 294532 - RNA, 19 nt, Human coronavirus OC43 (HCoV-OC43)
aguuauugaugauaugcau

SEQ ID NO: 294533 - RNA, 19 nt, Human coronavirus OC43 (HCoV-OC43)
aguuggccaaagugcagaa

SEQ ID NO: 294534 - RNA, 22 nt, Human coronavirus OC43 (HCoV-OC43)
auaaauauuuuggaguaauaaa

SEQ ID NO: 294535 - RNA, 17 nt, Human coronavirus OC43 (HCoV-OC43)
auacuacguuguuucuu

SEQ ID NO: 294536 - RNA, 19 nt, Human coronavirus OC43 (HCoV-OC43)
auacuguagaggaugcugu

SEQ ID NO: 294537 - RNA, 18 nt, Human coronavirus OC43 (HCoV-OC43)
auacuguugauguuacua

SEQ ID NO: 294538 - RNA, 19 nt, Human coronavirus OC43 (HCoV-OC43)
guuuuaaauuuaacuauca

SEQ ID NO: 294539 - RNA, 14 nt, Human coronavirus OC43 (HCoV-OC43)
guuuuaaugucuca

SEQ ID NO: 294540 - RNA, 15 nt, Human coronavirus OC43 (HCoV-OC43)
uaaaguguacuucag

SEQ ID NO: 294541 - RNA, 22 nt, Human coronavirus OC43 (HCoV-OC43)
uaaauacuacguuguuucuuaa

SEQ ID NO: 294542 - RNA, 20 nt, Human coronavirus OC43 (HCoV-OC43)
uaaaugaaugaaguuaauua

SEQ ID NO: 294543 - RNA, 18 nt, Human coronavirus OC43 (HCoV-OC43)
uaaaugguuucacagcau

SEQ ID NO: 294544 - RNA, 13 nt, Human coronavirus OC43 (HCoV-OC43)
uaaauuguguauu

SEQ ID NO: 294545 - RNA, 16 nt, Human coronavirus OC43 (HCoV-OC43)
uaacuauuuucaauug

SEQ ID NO: 294546 - RNA, 15 nt, Human coronavirus OC43 (HCoV-OC43)
uaagcauacugccaa

SEQ ID NO: 294547 - RNA, 15 nt, Human coronavirus OC43 (HCoV-OC43)
uaaguacugauacug

SEQ ID NO: 294548 - RNA, 11 nt, Human coronavirus OC43 (HCoV-OC43)
uaauacuguag

SEQ ID NO: 294549 - RNA, 15 nt, Human coronavirus OC43 (HCoV-OC43)
uaauagagguaggca

SEQ ID NO: 294550 - RNA, 22 nt, Human coronavirus OC43 (HCoV-OC43)
uaaucauauuguuaauaucaac

SEQ ID NO: 294551 - RNA, 22 nt, Human coronavirus OC43 (HCoV-OC43)
uaaucauuuuaucaauuuucca

SEQ ID NO: 294552 - RNA, 20 nt, Human coronavirus OC43 (HCoV-OC43)
uaaucuuaacuauuuucaau

SEQ ID NO: 294553 - RNA, 23 nt, Human coronavirus OC43 (HCoV-OC43)
uaaugguuauuacccuacuucag

SEQ ID NO: 294554 - RNA, 19 nt, Human coronavirus OC43 (HCoV-OC43)
uaauguauaguguuggaga

SEQ ID NO: 294555 - RNA, 21 nt, Human coronavirus OC43 (HCoV-OC43)
uaauuauggccaauuggaaga

SEQ ID NO: 294556 - RNA, 16 nt, Human coronavirus OC43 (HCoV-OC43)
uaauuuccuuaccaac

SEQ ID NO: 294557 - RNA, 23 nt, Human coronavirus OC43 (HCoV-OC43)
uaauuuuacgccuuaucaugccu

SEQ ID NO: 294558 - RNA, 18 nt, Human coronavirus OC43 (HCoV-OC43)
uacaaacagcgccacaca

SEQ ID NO: 294559 - RNA, 19 nt, Human coronavirus OC43 (HCoV-OC43)
uacaaucauauugcaauuu

SEQ ID NO: 294560 - RNA, 12 nt, Human coronavirus OC43 (HCoV-OC43)
uacccauuuuca

SEQ ID NO: 294561 - RNA, 15 nt, Human coronavirus OC43 (HCoV-OC43)
uacugauacuguuga

SEQ ID NO: 294562 - RNA, 17 nt, Human coronavirus OC43 (HCoV-OC43)
uagagcguccucuggaa

SEQ ID NO: 294563 - RNA, 19 nt, Human coronavirus OC43 (HCoV-OC43)
uagauuuugugcuacauuc

SEQ ID NO: 294564 - RNA, 15 nt, Human coronavirus OC43 (HCoV-OC43)
uagcuguugacuuua

SEQ ID NO: 294565 - RNA, 21 nt, Human coronavirus OC43 (HCoV-OC43)
uagcuguugacuuuauuaccu

SEQ ID NO: 294566 - RNA, 18 nt, Human coronavirus OC43 (HCoV-OC43)
uaggauauuguagaguuc

SEQ ID NO: 294567 - RNA, 23 nt, Human coronavirus OC43 (HCoV-OC43)
uaggcaguuuuaugaguuuuaca

SEQ ID NO: 294568 - RNA, 18 nt, Human coronavirus OC43 (HCoV-OC43)
uaguaaaacuacaccagc

SEQ ID NO: 294569 - RNA, 20 nt, Human coronavirus OC43 (HCoV-OC43)
uaguagagcguccucuggaa

SEQ ID NO: 294570 - RNA, 16 nt, Human coronavirus OC43 (HCoV-OC43)
uagucuuguucuggca

SEQ ID NO: 294571 - RNA, 15 nt, Human coronavirus OC43 (HCoV-OC43)
uagugacccacaguu

SEQ ID NO: 294572 - RNA, 16 nt, Human coronavirus OC43 (HCoV-OC43)
uauacuacuuuuuauu

SEQ ID NO: 294573 - RNA, 19 nt, Human coronavirus OC43 (HCoV-OC43)
uaucuugcagacacugugu

SEQ ID NO: 294574 - RNA, 18 nt, Human coronavirus OC43 (HCoV-OC43)
uaugaguuuuacaaugau

SEQ ID NO: 294575 - RNA, 21 nt, Human coronavirus OC43 (HCoV-OC43)
uauuaacgguuuuaaugucuc

SEQ ID NO: 294576 - RNA, 18 nt, Human coronavirus OC43 (HCoV-OC43)
uauuagaacuggaaguuu

SEQ ID NO: 294577 - RNA, 20 nt, Human coronavirus OC43 (HCoV-OC43)
uauugagcagacuaugguuu

SEQ ID NO: 294578 - RNA, 19 nt, Human coronavirus OC43 (HCoV-OC43)
uauuuucaauugcguauac

SEQ ID NO: 294579 - RNA, 22 nt, Human coronavirus OC43 (HCoV-OC43)
ucaaaaauaccaagguuauuaa

SEQ ID NO: 294580 - RNA, 14 nt, Human coronavirus OC43 (HCoV-OC43)
ucaacccaagcaaa

SEQ ID NO: 294581 - RNA, 16 nt, Human coronavirus OC43 (HCoV-OC43)
ucaacuuugcgguaug

SEQ ID NO: 294582 - RNA, 23 nt, Human coronavirus OC43 (HCoV-OC43)
ucaacuuugcgguauguguaaua

SEQ ID NO: 294583 - RNA, 17 nt, Human coronavirus OC43 (HCoV-OC43)
ucaguuucaaaagggaa

SEQ ID NO: 294584 - RNA, 12 nt, Human coronavirus OC43 (HCoV-OC43)
ucauauugcaau

SEQ ID NO: 294585 - RNA, 18 nt, Human coronavirus OC43 (HCoV-OC43)
ucauauugcaauuuggau

SEQ ID NO: 294586 - RNA, 13 nt, Human coronavirus OC43 (HCoV-OC43)
ucauugcacugau

SEQ ID NO: 294587 - RNA, 16 nt, Human coronavirus OC43 (HCoV-OC43)
ucauugcacugaucuc

SEQ ID NO: 294588 - RNA, 23 nt, Human coronavirus OC43 (HCoV-OC43)
uccaaacauuaugaguaguaaaa

SEQ ID NO: 294589 - RNA, 14 nt, Human coronavirus OC43 (HCoV-OC43)
uccccauucuugca

SEQ ID NO: 294590 - RNA, 15 nt, Human coronavirus OC43 (HCoV-OC43)
uccugguaagcaauc

SEQ ID NO: 294591 - RNA, 15 nt, Human coronavirus OC43 (HCoV-OC43)
uccuugauguggaug

SEQ ID NO: 294592 - RNA, 22 nt, Human coronavirus OC43 (HCoV-OC43)
uccuugauguggaugacguuua

SEQ ID NO: 294593 - RNA, 19 nt, Human coronavirus OC43 (HCoV-OC43)
ucucuaucagaauggaugu

SEQ ID NO: 294594 - RNA, 19 nt, Human coronavirus OC43 (HCoV-OC43)
ucugauuuuauuaauggua

SEQ ID NO: 294595 - RNA, 15 nt, Human coronavirus OC43 (HCoV-OC43)
ucugguaaaauauca

SEQ ID NO: 294596 - RNA, 16 nt, Human coronavirus OC43 (HCoV-OC43)
ucugguaaaauaucau

SEQ ID NO: 294597 - RNA, 17 nt, Human coronavirus OC43 (HCoV-OC43)
ugaagacuauaaaagug

SEQ ID NO: 294598 - RNA, 22 nt, Human coronavirus OC43 (HCoV-OC43)
ugaagacuauaaaaguguugau

SEQ ID NO: 294599 - RNA, 21 nt, Human coronavirus OC43 (HCoV-OC43)
ugaauaagccccgccagaaga

SEQ ID NO: 294600 - RNA, 16 nt, Human coronavirus OC43 (HCoV-OC43)
ugagaagaaauaucuc

SEQ ID NO: 294601 - RNA, 15 nt, Human coronavirus OC43 (HCoV-OC43)
ugagcagacuauggu

SEQ ID NO: 294602 - RNA, 19 nt, Human coronavirus OC43 (HCoV-OC43)
ugaguuuguagaaggacaa

SEQ ID NO: 294603 - RNA, 13 nt, Human coronavirus OC43 (HCoV-OC43)
ugaguuuuacaau

SEQ ID NO: 294604 - RNA, 23 nt, Human coronavirus OC43 (HCoV-OC43)
ugaugaagcuauuaaauuccuaa

SEQ ID NO: 294605 - RNA, 22 nt, Human coronavirus OC43 (HCoV-OC43)
ugcagaacucgcacccacagcu

SEQ ID NO: 294606 - RNA, 12 nt, Human coronavirus OC43 (HCoV-OC43)
ugcuacauucac

SEQ ID NO: 294607 - RNA, 20 nt, Human coronavirus OC43 (HCoV-OC43)
ugcuacauucacucuuuaug

SEQ ID NO: 294608 - RNA, 22 nt, Human coronavirus OC43 (HCoV-OC43)
aaaacagccgauggcaaccagc

SEQ ID NO: 294609 - RNA, 19 nt, Human coronavirus OC43 (HCoV-OC43)
aaacagccgauggcaacca

SEQ ID NO: 294610 - RNA, 20 nt, Human coronavirus OC43 (HCoV-OC43)
aaaccucagcaaguaacuaa

SEQ ID NO: 294611 - RNA, 15 nt, Human coronavirus OC43 (HCoV-OC43)
aaacugcuaccucuc

SEQ ID NO: 294612 - RNA, 18 nt, Human coronavirus OC43 (HCoV-OC43)
aaagguuguguugcugac

SEQ ID NO: 294613 - RNA, 14 nt, Human coronavirus OC43 (HCoV-OC43)
aaagugcagaauuu

SEQ ID NO: 294614 - RNA, 21 nt, Human coronavirus OC43 (HCoV-OC43)
aaaugguuucacagcauucgc

SEQ ID NO: 294615 - RNA, 20 nt, Human coronavirus OC43 (HCoV-OC43)
aacagccgauggcaaccagc

SEQ ID NO: 294616 - RNA, 16 nt, Human coronavirus OC43 (HCoV-OC43)
aacauuaugaguagua

SEQ ID NO: 294617 - RNA, 21 nt, Human coronavirus OC43 (HCoV-OC43)
aacuuugcgguauguguaaua

SEQ ID NO: 294618 - RNA, 17 nt, Human coronavirus OC43 (HCoV-OC43)
aacuuuuaaauugugua

SEQ ID NO: 294619 - RNA, 17 nt, Human coronavirus OC43 (HCoV-OC43)
aagaggagccccaauaa

SEQ ID NO: 294620 - RNA, 16 nt, Human coronavirus OC43 (HCoV-OC43)
aagaugcauaguuuua

SEQ ID NO: 294621 - RNA, 19 nt, Human coronavirus OC43 (HCoV-OC43)
aagauuagaguuggccaaa

SEQ ID NO: 294622 - RNA, 18 nt, Human coronavirus OC43 (HCoV-OC43)
aagcauacugccaaagaa

SEQ ID NO: 294623 - RNA, 22 nt, Human coronavirus OC43 (HCoV-OC43)
aaggaguggauuguaaaauaca

SEQ ID NO: 294624 - RNA, 14 nt, Human coronavirus OC43 (HCoV-OC43)
aaguacugauacug

SEQ ID NO: 294625 - RNA, 13 nt, Human coronavirus OC43 (HCoV-OC43)
aaguguacuucag

SEQ ID NO: 294626 - RNA, 18 nt, Human coronavirus OC43 (HCoV-OC43)
aauagagguaggcaguuu

SEQ ID NO: 294627 - RNA, 12 nt, Human coronavirus OC43 (HCoV-OC43)
aaucuagcauuu

SEQ ID NO: 294628 - RNA, 12 nt, Human coronavirus OC43 (HCoV-OC43)
cugcuauaacua

SEQ ID NO: 294629 - RNA, 13 nt, Human coronavirus OC43 (HCoV-OC43)
cuggacauacagc

SEQ ID NO: 294630 - RNA, 21 nt, Human coronavirus OC43 (HCoV-OC43)
cuggcaaaacuuggcaaggau

SEQ ID NO: 294631 - RNA, 18 nt, Human coronavirus OC43 (HCoV-OC43)
cugguuuucuuagcuguu

SEQ ID NO: 294632 - RNA, 15 nt, Human coronavirus OC43 (HCoV-OC43)
cuuaacuauuuucaa

SEQ ID NO: 294633 - RNA, 21 nt, Human coronavirus OC43 (HCoV-OC43)
cuucagguuccacauaucgua

SEQ ID NO: 294634 - RNA, 18 nt, Human coronavirus OC43 (HCoV-OC43)
cuugcugcuauaauagau

SEQ ID NO: 294635 - RNA, 15 nt, Human coronavirus OC43 (HCoV-OC43)
cuuguucuggcaaaa

SEQ ID NO: 294636 - RNA, 17 nt, Human coronavirus OC43 (HCoV-OC43)
cuuugauucauugcacu

SEQ ID NO: 294637 - RNA, 21 nt, Human coronavirus OC43 (HCoV-OC43)
gaagaauugcaugacgauuua

SEQ ID NO: 294638 - RNA, 23 nt, Human coronavirus OC43 (HCoV-OC43)
gaaguuauugaugauaugcauug

SEQ ID NO: 294639 - RNA, 12 nt, Human coronavirus OC43 (HCoV-OC43)
gaauaguaucag

SEQ ID NO: 294640 - RNA, 15 nt, Human coronavirus OC43 (HCoV-OC43)
gaauguuguacccua

SEQ ID NO: 294641 - RNA, 17 nt, Human coronavirus OC43 (HCoV-OC43)
gacaagccuaaucauuu

SEQ ID NO: 294642 - RNA, 13 nt, Human coronavirus OC43 (HCoV-OC43)
gagaauccucaca

SEQ ID NO: 294643 - RNA, 18 nt, Human coronavirus OC43 (HCoV-OC43)
gagaccugagaagaaaua

SEQ ID NO: 294644 - RNA, 16 nt, Human coronavirus OC43 (HCoV-OC43)
gauguaaaaccaccag

SEQ ID NO: 294645 - RNA, 18 nt, Human coronavirus OC43 (HCoV-OC43)
gauuagaguuggccaaag

SEQ ID NO: 294646 - RNA, 14 nt, Human coronavirus OC43 (HCoV-OC43)
gauucauugcacug

SEQ ID NO: 294647 - RNA, 20 nt, Human coronavirus OC43 (HCoV-OC43)
gauucauugcacugaucucu

SEQ ID NO: 294648 - RNA, 19 nt, Human coronavirus OC43 (HCoV-OC43)
gauuuaaaguguacuucag

SEQ ID NO: 294649 - RNA, 18 nt, Human coronavirus OC43 (HCoV-OC43)
gauuuugugcuacauuca

SEQ ID NO: 294650 - RNA, 13 nt, Human coronavirus OC43 (HCoV-OC43)
gcaaacugcuacc

SEQ ID NO: 294651 - RNA, 17 nt, Human coronavirus OC43 (HCoV-OC43)
gcaaacugcuaccucuc

SEQ ID NO: 294652 - RNA, 22 nt, Human coronavirus OC43 (HCoV-OC43)
gcaaccagcgucaacugcugcc

SEQ ID NO: 294653 - RNA, 23 nt, Human coronavirus OC43 (HCoV-OC43)
gcaacuuuuaaauuguguauuca

SEQ ID NO: 294654 - RNA, 20 nt, Human coronavirus OC43 (HCoV-OC43)
gcagaacucgcacccacagc

SEQ ID NO: 294655 - RNA, 18 nt, Human coronavirus OC43 (HCoV-OC43)
gcugucgcuuaugcagac

SEQ ID NO: 294656 - RNA, 21 nt, Human coronavirus OC43 (HCoV-OC43)
ggcacugaagggaaguguacu

SEQ ID NO: 294657 - RNA, 17 nt, Human coronavirus OC43 (HCoV-OC43)
gggaauguuguacccua

SEQ ID NO: 294658 - RNA, 17 nt, Human coronavirus OC43 (HCoV-OC43)
gguauuuuuacuaucug

SEQ ID NO: 294659 - RNA, 23 nt, Human coronavirus OC43 (HCoV-OC43)
gguauuuuuacuaucugggaaca

SEQ ID NO: 294660 - RNA, 10 nt, Human coronavirus OC43 (HCoV-OC43)
guaagcaauc

SEQ ID NO: 294661 - RNA, 22 nt, Human coronavirus OC43 (HCoV-OC43)
guacugguacagacacaacaga

SEQ ID NO: 294662 - RNA, 15 nt, Human coronavirus OC43 (HCoV-OC43)
guccuugauguggau

SEQ ID NO: 294663 - RNA, 17 nt, Human coronavirus OC43 (HCoV-OC43)
gucuuugauucauugca

SEQ ID NO: 294664 - RNA, 14 nt, Human coronavirus OC43 (HCoV-OC43)
guuaaaguucuuaa

SEQ ID NO: 294665 - RNA, 11 nt, Human coronavirus OC43 (HCoV-OC43)
guuaauaucaa

SEQ ID NO: 294666 - RNA, 16 nt, Human coronavirus OC43 (HCoV-OC43)
guuagaucuuuuugca

SEQ ID NO: 294667 - RNA, 18 nt, Human coronavirus OC43 (HCoV-OC43)
guuauuacccuacuucag

SEQ ID NO: 294668 - RNA, 21 nt, Human coronavirus OC43 (HCoV-OC43)
guucagcaguguuuugguaag

SEQ ID NO: 294669 - RNA, 16 nt, Human coronavirus OC43 (HCoV-OC43)
guucuuuuaaaacagc

SEQ ID NO: 294670 - RNA, 17 nt, Human coronavirus OC43 (HCoV-OC43)
guuguacccuacuauuc

SEQ ID NO: 294671 - RNA, 14 nt, Human coronavirus OC43 (HCoV-OC43)
guuuggguacuuau

SEQ ID NO: 294672 - RNA, 12 nt, Human coronavirus OC43 (HCoV-OC43)
guuuuguguuaa

SEQ ID NO: 294673 - RNA, 18 nt, Human coronavirus OC43 (HCoV-OC43)
guuuuucuuuggaucaag

SEQ ID NO: 294674 - RNA, 13 nt, Human coronavirus OC43 (HCoV-OC43)
uaaaaccaccagu

SEQ ID NO: 294675 - RNA, 14 nt, Human coronavirus OC43 (HCoV-OC43)
uaaaaccaccaguc

SEQ ID NO: 294676 - RNA, 21 nt, Human coronavirus OC43 (HCoV-OC43)
uaaaacuacaccagcaccagu

SEQ ID NO: 294677 - RNA, 23 nt, Human coronavirus OC43 (HCoV-OC43)
uaaaacuacaccagcaccaguuu

SEQ ID NO: 294678 - RNA, 12 nt, Human coronavirus OC43 (HCoV-OC43)
uaaaauaucauc

SEQ ID NO: 294679 - RNA, 19 nt, Human coronavirus OC43 (HCoV-OC43)
uaaacauguuuuugauacu

SEQ ID NO: 294680 - RNA, 13 nt, Human coronavirus OC43 (HCoV-OC43)
uaaauauuuugga

SEQ ID NO: 294681 - RNA, 20 nt, Human coronavirus OC43 (HCoV-OC43)
uaaauuugagaauccucaca

SEQ ID NO: 294682 - RNA, 18 nt, Human coronavirus OC43 (HCoV-OC43)
uaacgguuuuaaugucuc

SEQ ID NO: 294683 - RNA, 13 nt, Human coronavirus OC43 (HCoV-OC43)
uaacuaucaauuu

SEQ ID NO: 294684 - RNA, 19 nt, Human coronavirus OC43 (HCoV-OC43)
uaacuauuuucaauugcgu

SEQ ID NO: 294685 - RNA, 18 nt, Human coronavirus OC43 (HCoV-OC43)
uaagcauacugccaaaga

SEQ ID NO: 294686 - RNA, 21 nt, Human coronavirus OC43 (HCoV-OC43)
uaaguuaccacccaguaauua

SEQ ID NO: 294687 - RNA, 16 nt, Human coronavirus OC43 (HCoV-OC43)
uacaauaguuguagug

SEQ ID NO: 294688 - RNA, 19 nt, Human coronavirus OC43 (HCoV-OC43)
uacaauaguuguaguggca

SEQ ID NO: 294689 - RNA, 16 nt, Human coronavirus OC43 (HCoV-OC43)
uacaaucauauugcaa

SEQ ID NO: 294690 - RNA, 17 nt, Human coronavirus OC43 (HCoV-OC43)
uacaaucauauugcaau

SEQ ID NO: 294691 - RNA, 13 nt, Human coronavirus OC43 (HCoV-OC43)
uacaaugauguaa

SEQ ID NO: 294692 - RNA, 20 nt, Human coronavirus OC43 (HCoV-OC43)
uacaccagcaccaguuuaua

SEQ ID NO: 294693 - RNA, 22 nt, Human coronavirus OC43 (HCoV-OC43)
uacagccugaagacuauaaaag

SEQ ID NO: 294694 - RNA, 23 nt, Human coronavirus OC43 (HCoV-OC43)
uaccaacggcuuuugcuguuaua

SEQ ID NO: 294695 - RNA, 21 nt, Human coronavirus OC43 (HCoV-OC43)
uacgcauugaauaauguguau

SEQ ID NO: 294696 - RNA, 16 nt, Human coronavirus OC43 (HCoV-OC43)
uagaucuuuuugcaau

SEQ ID NO: 294697 - RNA, 21 nt, Human coronavirus OC43 (HCoV-OC43)
uagauuuugugcuacauucac

SEQ ID NO: 294698 - RNA, 22 nt, Human coronavirus OC43 (HCoV-OC43)
uagauuuugugcuacauucacu

SEQ ID NO: 294699 - RNA, 18 nt, Human coronavirus OC43 (HCoV-OC43)
uagcauuuguuaaaguuc

SEQ ID NO: 294700 - RNA, 15 nt, Human coronavirus OC43 (HCoV-OC43)
uaguuagcugcauaa

SEQ ID NO: 294701 - RNA, 16 nt, Human coronavirus OC43 (HCoV-OC43)
uaguuguaguggcauu

SEQ ID NO: 294702 - RNA, 16 nt, Human coronavirus OC43 (HCoV-OC43)
uauaaguacugauacu

SEQ ID NO: 294703 - RNA, 21 nt, Human coronavirus OC43 (HCoV-OC43)
uauacuacuuuuuauuacaau

SEQ ID NO: 294704 - RNA, 14 nt, Human coronavirus OC43 (HCoV-OC43)
uauaggagauuuaa

SEQ ID NO: 294705 - RNA, 21 nt, Human coronavirus OC43 (HCoV-OC43)
uauagugaguucccugcuaua

SEQ ID NO: 294706 - RNA, 12 nt, Human coronavirus OC43 (HCoV-OC43)
uauaguugccau

SEQ ID NO: 294707 - RNA, 18 nt, Human coronavirus OC43 (HCoV-OC43)
uauaguugccauuuguuu

SEQ ID NO: 294708 - RNA, 21 nt, Human coronavirus OC43 (HCoV-OC43)
uauaucuggacugcugaugaa

SEQ ID NO: 294709 - RNA, 16 nt, Human coronavirus OC43 (HCoV-OC43)
uaucagguuguuuauu

SEQ ID NO: 294710 - RNA, 18 nt, Human coronavirus OC43 (HCoV-OC43)
uaucuggacugcugauga

SEQ ID NO: 294711 - RNA, 20 nt, Human coronavirus OC43 (HCoV-OC43)
uauuauguggauuguguauu

SEQ ID NO: 294712 - RNA, 23 nt, Human coronavirus OC43 (HCoV-OC43)
uauuauguuuuagaucgugugua

SEQ ID NO: 294713 - RNA, 19 nt, Human coronavirus OC43 (HCoV-OC43)
uauucuugguucucuggaa

SEQ ID NO: 294714 - RNA, 22 nt, Human coronavirus OC43 (HCoV-OC43)
uauugagcagacuaugguuuaa

SEQ ID NO: 294715 - RNA, 21 nt, Human coronavirus OC43 (HCoV-OC43)
ucaacccaagcaaacugcuac

SEQ ID NO: 294716 - RNA, 19 nt, Human coronavirus OC43 (HCoV-OC43)
ucaacuuugcgguaugugu

SEQ ID NO: 294717 - RNA, 20 nt, Human coronavirus OC43 (HCoV-OC43)
ucaagauuagaguuggccaa

SEQ ID NO: 294718 - RNA, 13 nt, Human coronavirus OC43 (HCoV-OC43)
ucacucuuuaugg

SEQ ID NO: 294719 - RNA, 18 nt, Human coronavirus OC43 (HCoV-OC43)
ucauauuguuaauaucaa

SEQ ID NO: 294720 - RNA, 12 nt, Human coronavirus OC43 (HCoV-OC43)
uccaaacauuau

SEQ ID NO: 294721 - RNA, 22 nt, Human coronavirus OC43 (HCoV-OC43)
uccacuuacccauuuucagggu

SEQ ID NO: 294722 - RNA, 14 nt, Human coronavirus OC43 (HCoV-OC43)
uuuauuacaaucau

SEQ ID NO: 294723 - RNA, 22 nt, Human coronavirus OC43 (HCoV-OC43)
uuuauuacaaucauauugcaau

SEQ ID NO: 294724 - RNA, 22 nt, Human coronavirus OC43 (HCoV-OC43)
aauuuuggugguggagaaaugu

SEQ ID NO: 294725 - RNA, 15 nt, Human coronavirus OC43 (HCoV-OC43)
acaccagcaccaguu

SEQ ID NO: 294726 - RNA, 20 nt, Human coronavirus OC43 (HCoV-OC43)
acauccuaggaagaugcaua

SEQ ID NO: 294727 - RNA, 19 nt, Human coronavirus OC43 (HCoV-OC43)
acauuagucuuacuaugcu

SEQ ID NO: 294728 - RNA, 15 nt, Human coronavirus OC43 (HCoV-OC43)
accagcaccaguuua

SEQ ID NO: 294729 - RNA, 17 nt, Human coronavirus OC43 (HCoV-OC43)
accagcgucaacugcug

SEQ ID NO: 294730 - RNA, 18 nt, Human coronavirus OC43 (HCoV-OC43)
accaguuuauaucuggac

SEQ ID NO: 294731 - RNA, 19 nt, Human coronavirus OC43 (HCoV-OC43)
accauaguggccauuauua

SEQ ID NO: 294732 - RNA, 20 nt, Human coronavirus OC43 (HCoV-OC43)
accugagaagaaauaucucc

SEQ ID NO: 294733 - RNA, 16 nt, Human coronavirus OC43 (HCoV-OC43)
acuaaaccucagcaag

SEQ ID NO: 294734 - RNA, 16 nt, Human coronavirus OC43 (HCoV-OC43)
acuaugcuggacauac

SEQ ID NO: 294735 - RNA, 20 nt, Human coronavirus OC43 (HCoV-OC43)
acugauacuguugauguuac

SEQ ID NO: 294736 - RNA, 15 nt, Human coronavirus OC43 (HCoV-OC43)
acuugauguguauag

SEQ ID NO: 294737 - RNA, 16 nt, Human coronavirus OC43 (HCoV-OC43)
acuuugcgguaugugu

SEQ ID NO: 294738 - RNA, 17 nt, Human coronavirus OC43 (HCoV-OC43)
agaagagcucaacccaa

SEQ ID NO: 294739 - RNA, 20 nt, Human coronavirus OC43 (HCoV-OC43)
agaagguuauagcagacuau

SEQ ID NO: 294740 - RNA, 22 nt, Human coronavirus OC43 (HCoV-OC43)
agaauggaugucuugcugcuau

SEQ ID NO: 294741 - RNA, 13 nt, Human coronavirus OC43 (HCoV-OC43)
agaauugcaugac

SEQ ID NO: 294742 - RNA, 18 nt, Human coronavirus OC43 (HCoV-OC43)
agaccugagaagaaauau

SEQ ID NO: 294743 - RNA, 14 nt, Human coronavirus OC43 (HCoV-OC43)
agcauacugccaaa

SEQ ID NO: 294744 - RNA, 19 nt, Human coronavirus OC43 (HCoV-OC43)
aggagauuuaaaguguacu

SEQ ID NO: 294745 - RNA, 18 nt, Human coronavirus OC43 (HCoV-OC43)
aggagccccaauaaacaa

SEQ ID NO: 294746 - RNA, 14 nt, Human coronavirus OC43 (HCoV-OC43)
aggauauuguagag

SEQ ID NO: 294747 - RNA, 16 nt, Human coronavirus OC43 (HCoV-OC43)
agggaaguguacuauu

SEQ ID NO: 294748 - RNA, 22 nt, Human coronavirus OC43 (HCoV-OC43)
agguagauuuugugcuacauuc

SEQ ID NO: 294749 - RNA, 14 nt, Human coronavirus OC43 (HCoV-OC43)
agguuguuuauuag

SEQ ID NO: 294750 - RNA, 13 nt, Human coronavirus OC43 (HCoV-OC43)
aguaacuaagcau

SEQ ID NO: 294751 - RNA, 21 nt, Human coronavirus OC43 (HCoV-OC43)
aguaacuaagcauacugccaa

SEQ ID NO: 294752 - RNA, 22 nt, Human coronavirus OC43 (HCoV-OC43)
aguaguagagcguccucuggaa

SEQ ID NO: 294753 - RNA, 16 nt, Human coronavirus OC43 (HCoV-OC43)
agucuuguucuggcaa

SEQ ID NO: 294754 - RNA, 18 nt, Human coronavirus OC43 (HCoV-OC43)
aguuccccauucuugcag

SEQ ID NO: 294755 - RNA, 17 nt, Human coronavirus OC43 (HCoV-OC43)
aguuuagaaauguucaa

SEQ ID NO: 294756 - RNA, 16 nt, Human coronavirus OC43 (HCoV-OC43)
auaaguacugauacug

SEQ ID NO: 294757 - RNA, 13 nt, Human coronavirus OC43 (HCoV-OC43)
auacugccaaaga

SEQ ID NO: 294758 - RNA, 23 nt, Human coronavirus OC43 (HCoV-OC43)
auacugccaaagaagucagacag

SEQ ID NO: 294759 - RNA, 16 nt, Human coronavirus OC43 (HCoV-OC43)
auagagguaggcaguu

SEQ ID NO: 294760 - RNA, 20 nt, Human coronavirus OC43 (HCoV-OC43)
auaggagauuuaaaguguac

SEQ ID NO: 294761 - RNA, 22 nt, Human coronavirus OC43 (HCoV-OC43)
auaugcauuggggugaugguuu

SEQ ID NO: 294762 - RNA, 15 nt, Human coronavirus OC43 (HCoV-OC43)
auauugcaauuugga

SEQ ID NO: 294763 - RNA, 15 nt, Human coronavirus OC43 (HCoV-OC43)
aucaguccgaccagu

SEQ ID NO: 294764 - RNA, 17 nt, Human coronavirus OC43 (HCoV-OC43)
auccaggaaauggauug

SEQ ID NO: 294765 - RNA, 23 nt, Human coronavirus OC43 (HCoV-OC43)
aucuaaacauguuuuugauacuu

SEQ ID NO: 294766 - RNA, 18 nt, Human coronavirus OC43 (HCoV-OC43)
aucuugcagacacugugu

SEQ ID NO: 294767 - RNA, 13 nt, Human coronavirus OC43 (HCoV-OC43)
augauaugcauug

SEQ ID NO: 294768 - RNA, 16 nt, Human coronavirus OC43 (HCoV-OC43)
augcacuguucagcag

SEQ ID NO: 294769 - RNA, 20 nt, Human coronavirus OC43 (HCoV-OC43)
augcauaguuuuagauguua

SEQ ID NO: 294770 - RNA, 15 nt, Human coronavirus OC43 (HCoV-OC43)
augcuggacauacag

SEQ ID NO: 294771 - RNA, 19 nt, Human coronavirus OC43 (HCoV-OC43)
auguggccccuuacuauaa

SEQ ID NO: 294772 - RNA, 12 nt, Human coronavirus OC43 (HCoV-OC43)
auguuacuaaug

SEQ ID NO: 294773 - RNA, 20 nt, Human coronavirus OC43 (HCoV-OC43)
auguuguacccuacuauucu

SEQ ID NO: 294774 - RNA, 15 nt, Human coronavirus OC43 (HCoV-OC43)
auuacccuacuucag

SEQ ID NO: 294775 - RNA, 14 nt, Human coronavirus OC43 (HCoV-OC43)
auuauaaagguuua

SEQ ID NO: 294776 - RNA, 23 nt, Human coronavirus OC43 (HCoV-OC43)
auucaacuuugcgguauguguaa

SEQ ID NO: 294777 - RNA, 19 nt, Human coronavirus OC43 (HCoV-OC43)
auucgcuaauacuguagag

SEQ ID NO: 294778 - RNA, 14 nt, Human coronavirus OC43 (HCoV-OC43)
auuguaaaauacaa

SEQ ID NO: 294779 - RNA, 15 nt, Human coronavirus OC43 (HCoV-OC43)
auuuaaauacuacgu

SEQ ID NO: 294780 - RNA, 20 nt, Human coronavirus OC43 (HCoV-OC43)
auuuaacuaucaauuuccua

SEQ ID NO: 294781 - RNA, 17 nt, Human coronavirus OC43 (HCoV-OC43)
auuuuauuaaugguauu

SEQ ID NO: 294782 - RNA, 13 nt, Human coronavirus OC43 (HCoV-OC43)
auuuugugaauag

SEQ ID NO: 294783 - RNA, 15 nt, Human coronavirus OC43 (HCoV-OC43)
caaacauuaugagua

SEQ ID NO: 294784 - RNA, 18 nt, Human coronavirus OC43 (HCoV-OC43)
caaacugguuuucuuagc

SEQ ID NO: 294785 - RNA, 13 nt, Human coronavirus OC43 (HCoV-OC43)
caacugcugccac

SEQ ID NO: 294786 - RNA, 18 nt, Human coronavirus OC43 (HCoV-OC43)
caacuuugcgguaugugu

SEQ ID NO: 294787 - RNA, 22 nt, Human coronavirus OC43 (HCoV-OC43)
caagauuagaguuggccaaagu

SEQ ID NO: 294788 - RNA, 14 nt, Human coronavirus OC43 (HCoV-OC43)
caagcaaacugcua

SEQ ID NO: 294789 - RNA, 19 nt, Human coronavirus OC43 (HCoV-OC43)
caaucuagcauuuguuaaa

SEQ ID NO: 294790 - RNA, 24 nt, Human coronavirus OC43 (HCoV-OC43)
caauuuggauauacaagucgcagu

SEQ ID NO: 294791 - RNA, 20 nt, Human coronavirus OC43 (HCoV-OC43)
caccaguccuugauguggau

SEQ ID NO: 294792 - RNA, 16 nt, Human coronavirus OC43 (HCoV-OC43)
cacucuuuaugguaaa

SEQ ID NO: 294793 - RNA, 23 nt, Human coronavirus OC43 (HCoV-OC43)
cacugaagggaaguguacuauug

SEQ ID NO: 294794 - RNA, 20 nt, Human coronavirus OC43 (HCoV-OC43)
caggguuuuguguuaaauua

SEQ ID NO: 294795 - RNA, 22 nt, Human coronavirus OC43 (HCoV-OC43)
caggguuuuguguuaaauuaua

SEQ ID NO: 294796 - RNA, 17 nt, Human coronavirus OC43 (HCoV-OC43)
caguuuuaugaguuuua

SEQ ID NO: 294797 - RNA, 20 nt, Human coronavirus OC43 (HCoV-OC43)
cauuaugaguaguaaaacua

SEQ ID NO: 294798 - RNA, 16 nt, Human coronavirus OC43 (HCoV-OC43)
ccaaagugcagaauuu

SEQ ID NO: 294799 - RNA, 16 nt, Human coronavirus OC43 (HCoV-OC43)
ccagaaggauguuuau

SEQ ID NO: 294800 - RNA, 17 nt, Human coronavirus OC43 (HCoV-OC43)
ccagcgucaacugcugc

SEQ ID NO: 294801 - RNA, 23 nt, Human coronavirus OC43 (HCoV-OC43)
ccauuuuuaggaguuuucacuuu

SEQ ID NO: 294802 - RNA, 23 nt, Human coronavirus OC43 (HCoV-OC43)
cccuacuucagguuccacauauc

SEQ ID NO: 294803 - RNA, 15 nt, Human coronavirus OC43 (HCoV-OC43)
ccuaggaagaugcau

SEQ ID NO: 294804 - RNA, 20 nt, Human coronavirus OC43 (HCoV-OC43)
ccuaggaagaugcauaguuu

SEQ ID NO: 294805 - RNA, 23 nt, Human coronavirus OC43 (HCoV-OC43)
ccuauaaguacugauacuguuga

SEQ ID NO: 294806 - RNA, 23 nt, Human coronavirus OC43 (HCoV-OC43)
ccuguucugugugauucugguaa

SEQ ID NO: 294807 - RNA, 12 nt, Human coronavirus OC43 (HCoV-OC43)
ccuuuaaaugca

SEQ ID NO: 294808 - RNA, 13 nt, Human coronavirus OC43 (HCoV-OC43)
cguccucuggaaa

SEQ ID NO: 294809 - RNA, 19 nt, Human coronavirus OC43 (HCoV-OC43)
cuaagcauacugccaaaga

SEQ ID NO: 294810 - RNA, 16 nt, Human coronavirus OC43 (HCoV-OC43)
cuaagggguacuggua

SEQ ID NO: 294811 - RNA, 20 nt, Human coronavirus OC43 (HCoV-OC43)
cuaaggucaaaaauaccaag

SEQ ID NO: 294812 - RNA, 12 nt, Human coronavirus OC43 (HCoV-OC43)
cuacauucacuc

SEQ ID NO: 294813 - RNA, 14 nt, Human coronavirus OC43 (HCoV-OC43)
cuaccucucagcaa

SEQ ID NO: 294814 - RNA, 15 nt, Human coronavirus OC43 (HCoV-OC43)
cuauugcaccaggag

SEQ ID NO: 294815 - RNA, 12 nt, Human coronavirus OC43 (HCoV-OC43)
cuauuuaugugu

SEQ ID NO: 294816 - RNA, 12 nt, Human coronavirus OC43 (HCoV-OC43)
cucagcaaguaa

SEQ ID NO: 294817 - RNA, 14 nt, Human coronavirus OC43 (HCoV-OC43)
cuccugguaagcaa

SEQ ID NO: 294818 - RNA, 14 nt, Human coronavirus OC43 (HCoV-OC43)
uccaggaaauggau

SEQ ID NO: 294819 - RNA, 15 nt, Human coronavirus OC43 (HCoV-OC43)
ucucgaugaaggagu

SEQ ID NO: 294820 - RNA, 21 nt, Human coronavirus OC43 (HCoV-OC43)
ucucuuguuagaucuuuuugc

SEQ ID NO: 294821 - RNA, 22 nt, Human coronavirus OC43 (HCoV-OC43)
ucuggcaaaacuuggcaaggau

SEQ ID NO: 294822 - RNA, 23 nt, Human coronavirus OC43 (HCoV-OC43)
ucuugcagacacugugugguaug

SEQ ID NO: 294823 - RNA, 22 nt, Human coronavirus OC43 (HCoV-OC43)
ugaaggaguggauuguaaaaua

SEQ ID NO: 294824 - RNA, 17 nt, Human coronavirus OC43 (HCoV-OC43)
ugaagggaaguguacua

SEQ ID NO: 294825 - RNA, 17 nt, Human coronavirus OC43 (HCoV-OC43)
ugacauggcugaucaaa

SEQ ID NO: 294826 - RNA, 22 nt, Human coronavirus OC43 (HCoV-OC43)
ugauaaauauuuuggaguaaua

SEQ ID NO: 294827 - RNA, 18 nt, Human coronavirus OC43 (HCoV-OC43)
ugauauuuggaugcagaa

SEQ ID NO: 294828 - RNA, 23 nt, Human coronavirus OC43 (HCoV-OC43)
ugaucucuuguuagaucuuuuug

SEQ ID NO: 294829 - RNA, 22 nt, Human coronavirus OC43 (HCoV-OC43)
ugaugauaugcauuggggugau

SEQ ID NO: 294830 - RNA, 13 nt, Human coronavirus OC43 (HCoV-OC43)
ugauucauugcac

SEQ ID NO: 294831 - RNA, 23 nt, Human coronavirus OC43 (HCoV-OC43)
ugcagaacucgcacccacagcug

SEQ ID NO: 294832 - RNA, 15 nt, Human coronavirus OC43 (HCoV-OC43)
ugcagacacugugug

SEQ ID NO: 294833 - RNA, 18 nt, Human coronavirus OC43 (HCoV-OC43)
uggaacuagugacccaca

SEQ ID NO: 294834 - RNA, 19 nt, Human coronavirus OC43 (HCoV-OC43)
uggaacuagugacccacag

SEQ ID NO: 294835 - RNA, 21 nt, Human coronavirus OC43 (HCoV-OC43)
uggaacuagugacccacaguu

SEQ ID NO: 294836 - RNA, 22 nt, Human coronavirus OC43 (HCoV-OC43)
uggauuguaaaauacaaacagc

SEQ ID NO: 294837 - RNA, 21 nt, Human coronavirus OC43 (HCoV-OC43)
uggcaacuuuuaaauugugua

SEQ ID NO: 294838 - RNA, 22 nt, Human coronavirus OC43 (HCoV-OC43)
uggcugucgcuuaugcagacaa

SEQ ID NO: 294839 - RNA, 21 nt, Human coronavirus OC43 (HCoV-OC43)
ugggaauccugacgagcccca

SEQ ID NO: 294840 - RNA, 17 nt, Human coronavirus OC43 (HCoV-OC43)
uguuaaauuauaaaggu

SEQ ID NO: 294841 - RNA, 14 nt, Human coronavirus OC43 (HCoV-OC43)
uguugauguuacua

SEQ ID NO: 294842 - RNA, 19 nt, Human coronavirus OC43 (HCoV-OC43)
uguuguacccuacuauucu

SEQ ID NO: 294843 - RNA, 16 nt, Human coronavirus OC43 (HCoV-OC43)
uuaaaguguacuucag

SEQ ID NO: 294844 - RNA, 13 nt, Human coronavirus OC43 (HCoV-OC43)
uuaaaguucuuaa

SEQ ID NO: 294845 - RNA, 17 nt, Human coronavirus OC43 (HCoV-OC43)
uuacaauuucaaauucu

SEQ ID NO: 294846 - RNA, 19 nt, Human coronavirus OC43 (HCoV-OC43)
uuacuaugcuggacauaca

SEQ ID NO: 294847 - RNA, 23 nt, Human coronavirus OC43 (HCoV-OC43)
uuagaguuggccaaagugcagaa

SEQ ID NO: 294848 - RNA, 15 nt, Human coronavirus OC43 (HCoV-OC43)
uuaguaaaugaauga

SEQ ID NO: 294849 - RNA, 20 nt, Human coronavirus OC43 (HCoV-OC43)
uuauaucuggacugcugaug

SEQ ID NO: 294850 - RNA, 16 nt, Human coronavirus OC43 (HCoV-OC43)
uuauuacccuacuuca

SEQ ID NO: 294851 - RNA, 21 nt, Human coronavirus OC43 (HCoV-OC43)
uuguucuggcaaaacuuggca

SEQ ID NO: 294852 - RNA, 16 nt, Human coronavirus OC43 (HCoV-OC43)
uuuagauguuaaaggu

SEQ ID NO: 294853 - RNA, 14 nt, Human coronavirus OC43 (HCoV-OC43)
uuuauaguugccau

SEQ ID NO: 294854 - RNA, 13 nt, Human coronavirus OC43 (HCoV-OC43)
uuuauaucuggac

SEQ ID NO: 294855 - RNA, 19 nt, Human coronavirus OC43 (HCoV-OC43)
auagugaguucccugcuau

SEQ ID NO: 294856 - RNA, 23 nt, Human coronavirus OC43 (HCoV-OC43)
auauuaacgguuuuaaugucuca

SEQ ID NO: 294857 - RNA, 12 nt, Human coronavirus OC43 (HCoV-OC43)
aucuagcauuug

SEQ ID NO: 294858 - RNA, 22 nt, Human coronavirus OC43 (HCoV-OC43)
aucuugcagacacuguguggua

SEQ ID NO: 294859 - RNA, 20 nt, Human coronavirus OC43 (HCoV-OC43)
augacguuuagguaauccaa

SEQ ID NO: 294860 - RNA, 20 nt, Human coronavirus OC43 (HCoV-OC43)
augauguaaaaccaccaguc

SEQ ID NO: 294861 - RNA, 17 nt, Human coronavirus OC43 (HCoV-OC43)
augcacuguucagcagu

SEQ ID NO: 294862 - RNA, 17 nt, Human coronavirus OC43 (HCoV-OC43)
augccacuaaaccucag

SEQ ID NO: 294863 - RNA, 16 nt, Human coronavirus OC43 (HCoV-OC43)
auguaaaaccaccagu

SEQ ID NO: 294864 - RNA, 23 nt, Human coronavirus OC43 (HCoV-OC43)
auguucaaaccagggguagaaga

SEQ ID NO: 294865 - RNA, 16 nt, Human coronavirus OC43 (HCoV-OC43)
auguuuguuuauguua

SEQ ID NO: 294866 - RNA, 15 nt, Human coronavirus OC43 (HCoV-OC43)
auguuuuugauacuu

SEQ ID NO: 294867 - RNA, 14 nt, Human coronavirus OC43 (HCoV-OC43)
auuaaugauaaaga

SEQ ID NO: 294868 - RNA, 18 nt, Human coronavirus OC43 (HCoV-OC43)
auuacaaucauauugcaa

SEQ ID NO: 294869 - RNA, 13 nt, Human coronavirus OC43 (HCoV-OC43)
auuagaacuggaa

SEQ ID NO: 294870 - RNA, 13 nt, Human coronavirus OC43 (HCoV-OC43)
auucauugcacug

SEQ ID NO: 294871 - RNA, 22 nt, Human coronavirus OC43 (HCoV-OC43)
auucuuauauggaccuuaaucc

SEQ ID NO: 294872 - RNA, 14 nt, Human coronavirus OC43 (HCoV-OC43)
auugagcagacuau

SEQ ID NO: 294873 - RNA, 23 nt, Human coronavirus OC43 (HCoV-OC43)
auuguaaucauauuguuaauauc

SEQ ID NO: 294874 - RNA, 15 nt, Human coronavirus OC43 (HCoV-OC43)
auuguagaguuccua

SEQ ID NO: 294875 - RNA, 15 nt, Human coronavirus OC43 (HCoV-OC43)
auuuaaaguguacuu

SEQ ID NO: 294876 - RNA, 18 nt, Human coronavirus OC43 (HCoV-OC43)
auuuaaaguguacuucag

SEQ ID NO: 294877 - RNA, 14 nt, Human coronavirus OC43 (HCoV-OC43)
auuuaaauacuacg

SEQ ID NO: 294878 - RNA, 21 nt, Human coronavirus OC43 (HCoV-OC43)
auuuaacuaucaauuuccuaa

SEQ ID NO: 294879 - RNA, 21 nt, Human coronavirus OC43 (HCoV-OC43)
auuugagaauccucacauccu

SEQ ID NO: 294880 - RNA, 15 nt, Human coronavirus OC43 (HCoV-OC43)
auuuuggaguaauaa

SEQ ID NO: 294881 - RNA, 17 nt, Human coronavirus OC43 (HCoV-OC43)
auuuuggugguggagaa

SEQ ID NO: 294882 - RNA, 13 nt, Human coronavirus OC43 (HCoV-OC43)
auuuuuacuaucu

SEQ ID NO: 294883 - RNA, 14 nt, Human coronavirus OC43 (HCoV-OC43)
caaaacuuggcaag

SEQ ID NO: 294884 - RNA, 19 nt, Human coronavirus OC43 (HCoV-OC43)
caaccagcgucaacugcug

SEQ ID NO: 294885 - RNA, 23 nt, Human coronavirus OC43 (HCoV-OC43)
caaccagcgucaacugcugccac

SEQ ID NO: 294886 - RNA, 13 nt, Human coronavirus OC43 (HCoV-OC43)
caaccaucaggag

SEQ ID NO: 294887 - RNA, 21 nt, Human coronavirus OC43 (HCoV-OC43)
caacccagaaacaaacaacuu

SEQ ID NO: 294888 - RNA, 15 nt, Human coronavirus OC43 (HCoV-OC43)
caaccguucugguag

SEQ ID NO: 294889 - RNA, 17 nt, Human coronavirus OC43 (HCoV-OC43)
caauaaacaaugcacug

SEQ ID NO: 294890 - RNA, 20 nt, Human coronavirus OC43 (HCoV-OC43)
caauaguuguaguggcauuu

SEQ ID NO: 294891 - RNA, 16 nt, Human coronavirus OC43 (HCoV-OC43)
caaucauauugcaauu

SEQ ID NO: 294892 - RNA, 15 nt, Human coronavirus OC43 (HCoV-OC43)
caaucuagcauuugu

SEQ ID NO: 294893 - RNA, 20 nt, Human coronavirus OC43 (HCoV-OC43)
cacauccuaggaagaugcau

SEQ ID NO: 294894 - RNA, 19 nt, Human coronavirus OC43 (HCoV-OC43)
cacugaagggaaguguacu

SEQ ID NO: 294895 - RNA, 18 nt, Human coronavirus OC43 (HCoV-OC43)
cagaaaagucgagauaag

SEQ ID NO: 294896 - RNA, 16 nt, Human coronavirus OC43 (HCoV-OC43)
cagacacuguguggua

SEQ ID NO: 294897 - RNA, 17 nt, Human coronavirus OC43 (HCoV-OC43)
cagacacugugugguau

SEQ ID NO: 294898 - RNA, 20 nt, Human coronavirus OC43 (HCoV-OC43)
cagcauucgcuaauacugua

SEQ ID NO: 294899 - RNA, 23 nt, Human coronavirus OC43 (HCoV-OC43)
caguaguagagcguccucuggaa

SEQ ID NO: 294900 - RNA, 14 nt, Human coronavirus OC43 (HCoV-OC43)
cauacugccaaaga

SEQ ID NO: 294901 - RNA, 16 nt, Human coronavirus OC43 (HCoV-OC43)
cauauuguuaauauca

SEQ ID NO: 294902 - RNA, 15 nt, Human coronavirus OC43 (HCoV-OC43)
cauuauuauguggau

SEQ ID NO: 294903 - RNA, 22 nt, Human coronavirus OC43 (HCoV-OC43)
cauuuguuuauugguuacaaua

SEQ ID NO: 294904 - RNA, 15 nt, Human coronavirus OC43 (HCoV-OC43)
ccaagcaaacugcua

SEQ ID NO: 294905 - RNA, 21 nt, Human coronavirus OC43 (HCoV-OC43)
ccacaguuccccauucuugca

SEQ ID NO: 294906 - RNA, 16 nt, Human coronavirus OC43 (HCoV-OC43)
cccaagcaaacugcua

SEQ ID NO: 294907 - RNA, 22 nt, Human coronavirus OC43 (HCoV-OC43)
cccagaaggauguuuaugaauu

SEQ ID NO: 294908 - RNA, 19 nt, Human coronavirus OC43 (HCoV-OC43)
ccgaucaguccgaccaguu

SEQ ID NO: 294909 - RNA, 17 nt, Human coronavirus OC43 (HCoV-OC43)
ccgauggcaaccagcgu

SEQ ID NO: 294910 - RNA, 21 nt, Human coronavirus OC43 (HCoV-OC43)
ccugaagacuauaaaaguguu

SEQ ID NO: 294911 - RNA, 22 nt, Human coronavirus OC43 (HCoV-OC43)
ccuucuauuuauguguuuaaua

SEQ ID NO: 294912 - RNA, 17 nt, Human coronavirus OC43 (HCoV-OC43)
cgcaauuagguuugaca

SEQ ID NO: 294913 - RNA, 17 nt, Human coronavirus OC43 (HCoV-OC43)
cgccuuaucaugccuuu

SEQ ID NO: 294914 - RNA, 17 nt, Human coronavirus OC43 (HCoV-OC43)
cgguccuccuccuauaa

SEQ ID NO: 294915 - RNA, 21 nt, Human coronavirus OC43 (HCoV-OC43)
cgucuuugauucauugcacug

SEQ ID NO: 294916 - RNA, 12 nt, Human coronavirus OC43 (HCoV-OC43)
cuaaaccucagc

SEQ ID NO: 294917 - RNA, 16 nt, Human coronavirus OC43 (HCoV-OC43)
cuaagcauacugccaa

SEQ ID NO: 294918 - RNA, 20 nt, Human coronavirus OC43 (HCoV-OC43)
cuaagcauacugccaaagaa

SEQ ID NO: 294919 - RNA, 23 nt, Human coronavirus OC43 (HCoV-OC43)
cuacuauucuugguucucuggaa

SEQ ID NO: 294920 - RNA, 19 nt, Human coronavirus OC43 (HCoV-OC43)
cuagucuuguucuggcaaa

SEQ ID NO: 294921 - RNA, 15 nt, Human coronavirus OC43 (HCoV-OC43)
cuauaaguacugaua

SEQ ID NO: 294922 - RNA, 16 nt, Human coronavirus OC43 (HCoV-OC43)
cuauaauagauagaga

SEQ ID NO: 294923 - RNA, 21 nt, Human coronavirus OC43 (HCoV-OC43)
cuauucuugguucucuggaau

SEQ ID NO: 294924 - RNA, 13 nt, Human coronavirus OC43 (HCoV-OC43)
cucucuaucagaa

SEQ ID NO: 294925 - RNA, 20 nt, Human coronavirus OC43 (HCoV-OC43)
cucuggaaaucguucuggua

SEQ ID NO: 294926 - RNA, 23 nt, Human coronavirus OC43 (HCoV-OC43)
cucuuguuagaucuuuuugcaau

SEQ ID NO: 294927 - RNA, 17 nt, Human coronavirus OC43 (HCoV-OC43)
cugaagggaaguguacu

SEQ ID NO: 294928 - RNA, 19 nt, Human coronavirus OC43 (HCoV-OC43)
cugacgagccccagaagga

SEQ ID NO: 294929 - RNA, 20 nt, Human coronavirus OC43 (HCoV-OC43)
cugacgagccccagaaggau

SEQ ID NO: 294930 - RNA, 22 nt, Human coronavirus OC43 (HCoV-OC43)
cugauacuguugauguuacuaa

SEQ ID NO: 294931 - RNA, 17 nt, Human coronavirus OC43 (HCoV-OC43)
cugcuaccucucagcaa

SEQ ID NO: 294932 - RNA, 22 nt, Human coronavirus OC43 (HCoV-OC43)
cuggaaguuuuuggaguuucaa

SEQ ID NO: 294933 - RNA, 15 nt, Human coronavirus OC43 (HCoV-OC43)
cugguaaaauaucau

SEQ ID NO: 294934 - RNA, 15 nt, Human coronavirus OC43 (HCoV-OC43)
cuuacuaugcuggac

SEQ ID NO: 294935 - RNA, 14 nt, Human coronavirus OC43 (HCoV-OC43)
cuugcggaaguaau

SEQ ID NO: 294936 - RNA, 17 nt, Human coronavirus OC43 (HCoV-OC43)
gaaacaaacaacuugau

SEQ ID NO: 294937 - RNA, 23 nt, Human coronavirus OC43 (HCoV-OC43)
gaaacaaacaacuugauguguau

SEQ ID NO: 294938 - RNA, 16 nt, Human coronavirus OC43 (HCoV-OC43)
gaaaucguucugguaa

SEQ ID NO: 294939 - RNA, 21 nt, Human coronavirus OC43 (HCoV-OC43)
gaagagcucaacccaagcaaa

SEQ ID NO: 294940 - RNA, 13 nt, Human coronavirus OC43 (HCoV-OC43)
gagaaagugaaag

SEQ ID NO: 294941 - RNA, 16 nt, Human coronavirus OC43 (HCoV-OC43)
gauaaagguuguguug

SEQ ID NO: 294942 - RNA, 20 nt, Human coronavirus OC43 (HCoV-OC43)
gauaaagguuguguugcuga

SEQ ID NO: 294943 - RNA, 15 nt, Human coronavirus OC43 (HCoV-OC43)
gauaaauauuuugga

SEQ ID NO: 294944 - RNA, 21 nt, Human coronavirus OC43 (HCoV-OC43)
gauacuguugauguuacuaau

SEQ ID NO: 294945 - RNA, 14 nt, Human coronavirus OC43 (HCoV-OC43)
gcauacugccaaag

SEQ ID NO: 294946 - RNA, 18 nt, Human coronavirus OC43 (HCoV-OC43)
gccauuuguuuauugguu

SEQ ID NO: 294947 - RNA, 18 nt, Human coronavirus OC43 (HCoV-OC43)
gcuaagggguacugguac

SEQ ID NO: 294948 - RNA, 13 nt, Human coronavirus OC43 (HCoV-OC43)
gcuacauucacuc

SEQ ID NO: 294949 - RNA, 15 nt, Human coronavirus OC43 (HCoV-OC43)
gcuuccuagauuuau

SEQ ID NO: 294950 - RNA, 21 nt, Human coronavirus OC43 (HCoV-OC43)
ggguacugguacagacacaac

SEQ ID NO: 294951 - RNA, 23 nt, Human coronavirus OC43 (HCoV-OC43)
ggguagaagagcucaacccaagc

SEQ ID NO: 294952 - RNA, 15 nt, Human coronavirus OC43 (HCoV-OC43)
gguuucacagcauuc

SEQ ID NO: 294953 - RNA, 13 nt, Human coronavirus OC43 (HCoV-OC43)
guaagcaauccag

SEQ ID NO: 294954 - RNA, 22 nt, Human coronavirus OC43 (HCoV-OC43)
guaaucaagguagauuuugugc

SEQ ID NO: 294955 - RNA, 16 nt, Human coronavirus OC43 (HCoV-OC43)
guagaggaugcuguua

SEQ ID NO: 294956 - RNA, 15 nt, Human coronavirus OC43 (HCoV-OC43)
guagauuuugugcua

SEQ ID NO: 294957 - RNA, 14 nt, Human coronavirus OC43 (HCoV-OC43)
guaggauauuguag

SEQ ID NO: 294958 - RNA, 15 nt, Human coronavirus OC43 (HCoV-OC43)
guauacgcauugaau

SEQ ID NO: 294959 - RNA, 15 nt, Human coronavirus OC43 (HCoV-OC43)
guccccuucuauuua

SEQ ID NO: 294960 - RNA, 21 nt, Human coronavirus OC43 (HCoV-OC43)
guccccuucuauuuauguguu

SEQ ID NO: 294961 - RNA, 16 nt, Human coronavirus OC43 (HCoV-OC43)
gugcuacauucacucu

SEQ ID NO: 294962 - RNA, 20 nt, Human coronavirus OC43 (HCoV-OC43)
guguagaagaauugcaugac

SEQ ID NO: 294963 - RNA, 18 nt, Human coronavirus OC43 (HCoV-OC43)
guguuggagaaagugaaa

SEQ ID NO: 294964 - RNA, 13 nt, Human coronavirus OC43 (HCoV-OC43)
guucccugcuaua

SEQ ID NO: 294965 - RNA, 16 nt, Human coronavirus OC43 (HCoV-OC43)
guuuguagaaggacaa

SEQ ID NO: 294966 - RNA, 17 nt, Human coronavirus OC43 (HCoV-OC43)
guuuuaaauuuaacuau

SEQ ID NO: 294967 - RNA, 16 nt, Human coronavirus OC43 (HCoV-OC43)
ugcugaugaagcuauu

SEQ ID NO: 294968 - RNA, 13 nt, Human coronavirus OC43 (HCoV-OC43)
uggauuguaaaau

SEQ ID NO: 294969 - RNA, 16 nt, Human coronavirus OC43 (HCoV-OC43)
uggcaaaacuuggcaa

SEQ ID NO: 294970 - RNA, 23 nt, Human coronavirus OC43 (HCoV-OC43)
uggcacugaagggaaguguacua

SEQ ID NO: 294971 - RNA, 23 nt, Human coronavirus OC43 (HCoV-OC43)
uggggugaugguuuucagauuaa

SEQ ID NO: 294972 - RNA, 14 nt, Human coronavirus OC43 (HCoV-OC43)
ugguuuucagauua

SEQ ID NO: 294973 - RNA, 18 nt, Human coronavirus OC43 (HCoV-OC43)
uguaauaccuuaguacug

SEQ ID NO: 294974 - RNA, 21 nt, Human coronavirus OC43 (HCoV-OC43)
uguauuuaaauacuacguugu

SEQ ID NO: 294975 - RNA, 13 nt, Human coronavirus OC43 (HCoV-OC43)
ugugcuacauuca

SEQ ID NO: 294976 - RNA, 15 nt, Human coronavirus OC43 (HCoV-OC43)
uguuaaaacuuggaa

SEQ ID NO: 294977 - RNA, 15 nt, Human coronavirus OC43 (HCoV-OC43)
uguuacuaaugguuu

SEQ ID NO: 294978 - RNA, 21 nt, Human coronavirus OC43 (HCoV-OC43)
uuaaaacagccgauggcaacc

SEQ ID NO: 294979 - RNA, 15 nt, Human coronavirus OC43 (HCoV-OC43)
uuaaaguguacuuca

SEQ ID NO: 294980 - RNA, 22 nt, Human coronavirus OC43 (HCoV-OC43)
uuaaaguguacuucagauacua

SEQ ID NO: 294981 - RNA, 14 nt, Human coronavirus OC43 (HCoV-OC43)
uuaauggacauuug

SEQ ID NO: 294982 - RNA, 16 nt, Human coronavirus OC43 (HCoV-OC43)
uuacaaugauguaaaa

SEQ ID NO: 294983 - RNA, 14 nt, Human coronavirus OC43 (HCoV-OC43)
uuacccuacuucag

SEQ ID NO: 294984 - RNA, 20 nt, Human coronavirus OC43 (HCoV-OC43)
uuacuaugcuggacauacag

SEQ ID NO: 294985 - RNA, 14 nt, Human coronavirus OC43 (HCoV-OC43)
uuauuaaugguauu

SEQ ID NO: 294986 - RNA, 20 nt, Human coronavirus OC43 (HCoV-OC43)
uuauuacaaucauauugcaa

SEQ ID NO: 294987 - RNA, 17 nt, Human coronavirus OC43 (HCoV-OC43)
uuauugaugauaugcau

SEQ ID NO: 294988 - RNA, 22 nt, Human coronavirus OC43 (HCoV-OC43)
uuccacauaucguaauauggca

SEQ ID NO: 294989 - RNA, 15 nt, Human coronavirus OC43 (HCoV-OC43)
uuccacuuacccauu

SEQ ID NO: 294990 - RNA, 15 nt, Human coronavirus OC43 (HCoV-OC43)
uugauucauugcacu

SEQ ID NO: 294991 - RNA, 13 nt, Human coronavirus OC43 (HCoV-OC43)
uuuaaaguguacu

SEQ ID NO: 294992 - RNA, 14 nt, Human coronavirus OC43 (HCoV-OC43)
uuuacuccugguaa

SEQ ID NO: 294993 - RNA, 20 nt, Human coronavirus OC43 (HCoV-OC43)
uuugagaauccucacauccu

SEQ ID NO: 294994 - RNA, 17 nt, Human coronavirus OC43 (HCoV-OC43)
uuugauucauugcacug

SEQ ID NO: 294995 - RNA, 21 nt, Human coronavirus OC43 (HCoV-OC43)
uuuucuuuggguauuauacua

SEQ ID NO: 294996 - RNA, 12 nt, Human coronavirus OC43 (HCoV-OC43)
uuuuuacuaucu

SEQ ID NO: 294997 - RNA, 17 nt, Human echovirus 1
acccuaccgcaugaacc

SEQ ID NO: 294998 - RNA, 13 nt, Human echovirus 1
caauuaguagauu

SEQ ID NO: 294999 - RNA, 21 nt, Human echovirus 1
gauaaaagugcgguaggggua

SEQ ID NO: 295000 - RNA, 17 nt, Human echovirus 1
ugaaccgaacuugauaa

SEQ ID NO: 295001 - RNA, 22 nt, Human echovirus 1
uugauaaaagugcgguaggggu

SEQ ID NO: 295002 - RNA, 23 nt, Human echovirus 1
uugauaaaagugcgguaggggua

SEQ ID NO: 295003 - RNA, 16 nt, Human echovirus 1
aacccuaccgcaugaa

SEQ ID NO: 295004 - RNA, 18 nt, Human echovirus 1
caugaaccgaacuugaua

SEQ ID NO: 295005 - RNA, 17 nt, Human echovirus 1
gauuaaauuggcuuaac

SEQ ID NO: 295006 - RNA, 19 nt, Human echovirus 1
gcaugaaccgaacuugaua

SEQ ID NO: 295007 - RNA, 13 nt, Human echovirus 1
ggguaaauucucc

SEQ ID NO: 295008 - RNA, 16 nt, Human enterovirus A
aaccccaccagggauc

SEQ ID NO: 295009 - RNA, 21 nt, Human enterovirus A
aaccccaccagggaucugguc

SEQ ID NO: 295010 - RNA, 13 nt, Human enterovirus A
agauauaccucaa

SEQ ID NO: 295011 - RNA, 17 nt, Human enterovirus A
agggaucuggucgugaa

SEQ ID NO: 295012 - RNA, 16 nt, Human enterovirus A
gaauaugacugguggg

SEQ ID NO: 295013 - RNA, 17 nt, Human enterovirus A
gauauaccucaacccca

SEQ ID NO: 295014 - RNA, 13 nt, Human enterovirus A
gugaauaugacug

SEQ ID NO: 295015 - RNA, 14 nt, Human enterovirus A
uguuauaaccagaa

SEQ ID NO: 295016 - RNA, 15 nt, Human enterovirus A
uguuauaaccagaau

SEQ ID NO: 295017 - RNA, 16 nt, Human enterovirus A
uuuguuauaaccagaa

SEQ ID NO: 295018 - RNA, 19 nt, Human enterovirus A
aaauuuguuauaaccagaa

SEQ ID NO: 295019 - RNA, 19 nt, Human enterovirus A
accucaaccccaccaggga

SEQ ID NO: 295020 - RNA, 12 nt, Human enterovirus A
acuggugggggu

SEQ ID NO: 295021 - RNA, 17 nt, Human enterovirus A
gaucuggucgugaauau

SEQ ID NO: 295022 - RNA, 20 nt, Human enterovirus A
ucuggucgugaauaugacug

SEQ ID NO: 295023 - RNA, 21 nt, Human enterovirus A
ucuggucgugaauaugacugg

SEQ ID NO: 295024 - RNA, 14 nt, Human enterovirus B
auaacggugcagug

SEQ ID NO: 295025 - RNA, 11 nt, Human enterovirus B
cggugcagugg

SEQ ID NO: 295026 - RNA, 15 nt, Human enterovirus B
gacaauuugaacuaa

SEQ ID NO: 295027 - RNA, 13 nt, Human enterovirus B
ggguaaauucucc

SEQ ID NO: 295028 - RNA, 15 nt, Human enterovirus B
uaaccgaacuagaua

SEQ ID NO: 295029 - RNA, 14 nt, Human enterovirus B
uaacggugcagugg

SEQ ID NO: 295030 - RNA, 21 nt, Human enterovirus B
uagagacaauuugaacuaauu

SEQ ID NO: 295031 - RNA, 19 nt, Human enterovirus B
acuagauaacggugcagug

SEQ ID NO: 295032 - RNA, 19 nt, Human enterovirus B
auaacggugcagugggggu

SEQ ID NO: 295033 - RNA, 20 nt, Human enterovirus B
auuagagacaauuugaacua

SEQ ID NO: 295034 - RNA, 15 nt, Human enterovirus B
caauuugaacuaauu

SEQ ID NO: 295035 - RNA, 23 nt, Human enterovirus B
ccgaacuagauaacggugcagug

SEQ ID NO: 295036 - RNA, 18 nt, Human enterovirus B
cuagauaacggugcagug

SEQ ID NO: 295037 - RNA, 17 nt, Human enterovirus B
gacaauuugaacuaauu

SEQ ID NO: 295038 - RNA, 16 nt, Human enterovirus C
cucagucggauucgga

SEQ ID NO: 295039 - RNA, 13 nt, Human enterovirus C
cuguuguaggggu

SEQ ID NO: 295040 - RNA, 22 nt, Human enterovirus C
gauucggauuggguuauacugu

SEQ ID NO: 295041 - RNA, 21 nt, Human enterovirus C
gguuauacuguuguaggggua

SEQ ID NO: 295042 - RNA, 22 nt, Human enterovirus C
gguuauacuguuguagggguaa

SEQ ID NO: 295043 - RNA, 22 nt, Human enterovirus C
guagggguaaauuuuucuuuaa

SEQ ID NO: 295044 - RNA, 13 nt, Human enterovirus C
guuguagggguaa

SEQ ID NO: 295045 - RNA, 12 nt, Human enterovirus C
uauacuguugua

SEQ ID NO: 295046 - RNA, 16 nt, Human enterovirus C
uauacuguuguagggg

SEQ ID NO: 295047 - RNA, 16 nt, Human enterovirus C
ucagucggauucggau

SEQ ID NO: 295048 - RNA, 15 nt, Human enterovirus C
uggguuauacuguug

SEQ ID NO: 295049 - RNA, 23 nt, Human enterovirus C
uucggauuggguuauacuguugu

SEQ ID NO: 295050 - RNA, 11 nt, Human enterovirus C
uuuucuuuaau

SEQ ID NO: 295051 - RNA, 19 nt, Human enterovirus C
accucagucggauucggau

SEQ ID NO: 295052 - RNA, 17 nt, Human enterovirus C
auacuguuguaggggua

SEQ ID NO: 295053 - RNA, 22 nt, Human enterovirus C
auucggauuggguuauacuguu

SEQ ID NO: 295054 - RNA, 15 nt, Human enterovirus C
auuuuucuuuaauuc

SEQ ID NO: 295055 - RNA, 23 nt, Human enterovirus C
cagucggauucggauuggguuau

SEQ ID NO: 295056 - RNA, 17 nt, Human enterovirus C
gauuggguuauacuguu

SEQ ID NO: 295057 - RNA, 15 nt, Human enterovirus C
gggguaaauuuuucu

SEQ ID NO: 295058 - RNA, 13 nt, Human enterovirus C
ggguuauacuguu

SEQ ID NO: 295059 - RNA, 13 nt, Human enterovirus C
uacuguuguaggg

SEQ ID NO: 295060 - RNA, 15 nt, Human enterovirus C
uacuguuguaggggu

SEQ ID NO: 295061 - RNA, 16 nt, Human enterovirus C
uacuguuguaggggua

SEQ ID NO: 295062 - RNA, 11 nt, Human enterovirus C
uauacuguugu

SEQ ID NO: 295063 - RNA, 17 nt, Human enterovirus C
ucggauuggguuauacu

SEQ ID NO: 295064 - RNA, 18 nt, Human enterovirus C
ucggauuggguuauacug

SEQ ID NO: 295065 - RNA, 19 nt, Human enterovirus C
ucggauuggguuauacugu

SEQ ID NO: 295066 - RNA, 19 nt, Human enterovirus C
uucggauuggguuauacug

SEQ ID NO: 295067 - RNA, 14 nt, Human enterovirus C
uuguagggguaaau

SEQ ID NO: 295068 - RNA, 19 nt, Human enterovirus D
aacucuacuuaggaaccca

SEQ ID NO: 295069 - RNA, 20 nt, Human enterovirus D
ccucccuggggcauuagauu

SEQ ID NO: 295070 - RNA, 21 nt, Human enterovirus D
cucuacuuaggaacccaagaa

SEQ ID NO: 295071 - RNA, 14 nt, Human enterovirus D
cuuaggaacccaag

SEQ ID NO: 295072 - RNA, 20 nt, Human enterovirus D
ucuacuuaggaacccaagaa

SEQ ID NO: 295073 - RNA, 21 nt, Human enterovirus D
accccucccuggggcauuaga

SEQ ID NO: 295074 - RNA, 12 nt, Human enterovirus D
aggaacccaaga

SEQ ID NO: 295075 - RNA, 17 nt, Human enterovirus D
cuacuuaggaacccaag

SEQ ID NO: 295076 - RNA, 11 nt, Human enterovirus D
ggaacccaaga

SEQ ID NO: 295077 - RNA, 18 nt, Human enterovirus D
uagauuuuguagagguaa

SEQ ID NO: 295078 - RNA, 13 nt, Human enterovirus D
uuaauugggaauc

SEQ ID NO: 295079 - RNA, 21 nt, Human enterovirus E
aaugugauuuucaccauuuga

SEQ ID NO: 295080 - RNA, 11 nt, Human enterovirus E
agacgcauaaa

SEQ ID NO: 295081 - RNA, 21 nt, Human enterovirus E
augcguuuggugagacgcaua

SEQ ID NO: 295082 - RNA, 20 nt, Human enterovirus E
auucggucgcauuggcuuuc

SEQ ID NO: 295083 - RNA, 16 nt, Human enterovirus E
auuuucaccauuugaa

SEQ ID NO: 295084 - RNA, 13 nt, Human enterovirus E
cauuggcuuucau

SEQ ID NO: 295085 - RNA, 18 nt, Human enterovirus E
cauuggcuuucauaugcg

SEQ ID NO: 295086 - RNA, 13 nt, Human enterovirus E
cuuucauaugcgu

SEQ ID NO: 295087 - RNA, 17 nt, Human enterovirus E
gauuuucaccauuugaa

SEQ ID NO: 295088 - RNA, 18 nt, Human enterovirus E
gauuuucaccauuugaau

SEQ ID NO: 295089 - RNA, 13 nt, Human enterovirus E
gcauuggcuuuca

SEQ ID NO: 295090 - RNA, 19 nt, Human enterovirus E
gcauuggcuuucauaugcg

SEQ ID NO: 295091 - RNA, 18 nt, Human enterovirus E
gcguuuggugagacgcau

SEQ ID NO: 295092 - RNA, 17 nt, Human enterovirus E
gcuuucauaugcguuug

SEQ ID NO: 295093 - RNA, 14 nt, Human enterovirus E
ggcuuucauaugcg

SEQ ID NO: 295094 - RNA, 19 nt, Human enterovirus E
gucgcauuggcuuucauau

SEQ ID NO: 295095 - RNA, 14 nt, Human enterovirus E
ucggucgcauuggc

SEQ ID NO: 295096 - RNA, 17 nt, Human enterovirus E
ugauuuucaccauuuga

SEQ ID NO: 295097 - RNA, 15 nt, Human enterovirus E
uggcuuucauaugcg

SEQ ID NO: 295098 - RNA, 15 nt, Human enterovirus E
uggugagacgcauaa

SEQ ID NO: 295099 - RNA, 13 nt, Human enterovirus E
uucaccauuugaa

SEQ ID NO: 295100 - RNA, 21 nt, Human enterovirus E
aauucggucgcauuggcuuuc

SEQ ID NO: 295101 - RNA, 22 nt, Human enterovirus E
aauucggucgcauuggcuuuca

SEQ ID NO: 295102 - RNA, 23 nt, Human enterovirus E
aauucggucgcauuggcuuucau

SEQ ID NO: 295103 - RNA, 12 nt, Human enterovirus E
agacgcauaaaa

SEQ ID NO: 295104 - RNA, 14 nt, Human enterovirus E
auaugcguuuggug

SEQ ID NO: 295105 - RNA, 20 nt, Human enterovirus E
auaugcguuuggugagacgc

SEQ ID NO: 295106 - RNA, 22 nt, Human enterovirus E
caaugugauuuucaccauuuga

SEQ ID NO: 295107 - RNA, 23 nt, Human enterovirus E
caaugugauuuucaccauuugaa

SEQ ID NO: 295108 - RNA, 14 nt, Human enterovirus E
cauuggcuuucaua

SEQ ID NO: 295109 - RNA, 12 nt, Human enterovirus E
cuuucauaugcg

SEQ ID NO: 295110 - RNA, 15 nt, Human enterovirus E
cuuucauaugcguuu

SEQ ID NO: 295111 - RNA, 14 nt, Human enterovirus E
gcauuggcuuucau

SEQ ID NO: 295112 - RNA, 17 nt, Human enterovirus E
ggucgcauuggcuuuca

SEQ ID NO: 295113 - RNA, 22 nt, Human enterovirus E
ggucgcauuggcuuucauaugc

SEQ ID NO: 295114 - RNA, 17 nt, Human enterovirus E
gucgcauuggcuuucau

SEQ ID NO: 295115 - RNA, 16 nt, Human enterovirus E
ucgcauuggcuuucau

SEQ ID NO: 295116 - RNA, 18 nt, Human enterovirus E
ugaauucggucgcauugg

SEQ ID NO: 295117 - RNA, 21 nt, Human enterovirus E
ugcguuuggugagacgcauaa

SEQ ID NO: 295118 - RNA, 14 nt, Human enterovirus E
uggcuuucauaugc

SEQ ID NO: 295119 - RNA, 15 nt, Human enterovirus E
uuucaccauuugaau

SEQ ID NO: 295120 - RNA, 14 nt, Human enterovirus E
uuuucaccauuuga

SEQ ID NO: 295121 - RNA, 15 nt, Human enterovirus E
uuuucaccauuugaa

SEQ ID NO: 295122 - RNA, 12 nt, Human erythrovirus V9
aaaaaugugcuu

SEQ ID NO: 295123 - RNA, 15 nt, Human erythrovirus V9
aaaacucuccagacc

SEQ ID NO: 295124 - RNA, 14 nt, Human erythrovirus V9
aaaaggugcagcug

SEQ ID NO: 295125 - RNA, 21 nt, Human erythrovirus V9
aaaauaccccagcaugacuuc

SEQ ID NO: 295126 - RNA, 23 nt, Human erythrovirus V9
aaccuagaggagaaaaugcagua

SEQ ID NO: 295127 - RNA, 17 nt, Human erythrovirus V9
aaugcuaagauuaugua

SEQ ID NO: 295128 - RNA, 18 nt, Human erythrovirus V9
aauggugggaaagcagug

SEQ ID NO: 295129 - RNA, 23 nt, Human erythrovirus V9
aauuucaaaaagaagacaccaaa

SEQ ID NO: 295130 - RNA, 14 nt, Human erythrovirus V9
accacccccaugcc

SEQ ID NO: 295131 - RNA, 11 nt, Human erythrovirus V9
accauuacaac

SEQ ID NO: 295132 - RNA, 18 nt, Human erythrovirus V9
acccuacaaaaagcaugu

SEQ ID NO: 295133 - RNA, 14 nt, Human erythrovirus V9
acguguacauucuc

SEQ ID NO: 295134 - RNA, 15 nt, Human erythrovirus V9
acguguacauucucu

SEQ ID NO: 295135 - RNA, 17 nt, Human erythrovirus V9
cccguaggcaaccaucu

SEQ ID NO: 295136 - RNA, 21 nt, Human erythrovirus V9
ccuagaggagaaaaugcagua

SEQ ID NO: 295137 - RNA, 22 nt, Human erythrovirus V9
cguguauaagcaguuugugcaa

SEQ ID NO: 295138 - RNA, 20 nt, Human erythrovirus V9
cuagaggagaaaaugcagua

SEQ ID NO: 295139 - RNA, 20 nt, Human erythrovirus V9
cugcuaauucuguaacgugu

SEQ ID NO: 295140 - RNA, 16 nt, Human erythrovirus V9
gaaggggcuacauuua

SEQ ID NO: 295141 - RNA, 18 nt, Human erythrovirus V9
gaaugcuaagauuaugua

SEQ ID NO: 295142 - RNA, 15 nt, Human erythrovirus V9
gaccauuacaacauu

SEQ ID NO: 295143 - RNA, 18 nt, Human erythrovirus V9
gaggagaaaaugcaguau

SEQ ID NO: 295144 - RNA, 17 nt, Human erythrovirus V9
gauaugaacaacaugua

SEQ ID NO: 295145 - RNA, 20 nt, Human erythrovirus V9
gcaauuuuaugaaaaagcua

SEQ ID NO: 295146 - RNA, 10 nt, Human erythrovirus V9
gcagugacaa

SEQ ID NO: 295147 - RNA, 14 nt, Human erythrovirus V9
gccauggacaguua

SEQ ID NO: 295148 - RNA, 23 nt, Human erythrovirus V9
gcugccccuguggcccauuuuca

SEQ ID NO: 295149 - RNA, 10 nt, Human erythrovirus V9
gcuuugcccu

SEQ ID NO: 295150 - RNA, 13 nt, Human erythrovirus V9
gguugacuuugua

SEQ ID NO: 295151 - RNA, 20 nt, Human erythrovirus V9
gugugaggggauugccuguu

SEQ ID NO: 295152 - RNA, 15 nt, Human erythrovirus V9
guuucgugaacuguu

SEQ ID NO: 295153 - RNA, 14 nt, Human erythrovirus V9
uaaaagauacagac

SEQ ID NO: 295154 - RNA, 14 nt, Human erythrovirus V9
uaaaagauuacuuu

SEQ ID NO: 295155 - RNA, 23 nt, Human erythrovirus V9
uaacaaauggugggaaagcagug

SEQ ID NO: 295156 - RNA, 20 nt, Human erythrovirus V9
uaacccauuuucuguguuaa

SEQ ID NO: 295157 - RNA, 17 nt, Human erythrovirus V9
uaagcaguuugugcaau

SEQ ID NO: 295158 - RNA, 18 nt, Human erythrovirus V9
uaaugugggagcuuggua

SEQ ID NO: 295159 - RNA, 22 nt, Human erythrovirus V9
uaauucuguaacguguacauuc

SEQ ID NO: 295160 - RNA, 17 nt, Human erythrovirus V9
uacauucucuaggcaau

SEQ ID NO: 295161 - RNA, 18 nt, Human erythrovirus V9
uagaggagaaaaugcagu

SEQ ID NO: 295162 - RNA, 23 nt, Human erythrovirus V9
uauagucaucauuuucagagcca

SEQ ID NO: 295163 - RNA, 22 nt, Human erythrovirus V9
uauucaaauuuuaaaagaccau

SEQ ID NO: 295164 - RNA, 19 nt, Human erythrovirus V9
ucaaauuuuaaaagaccau

SEQ ID NO: 295165 - RNA, 13 nt, Human erythrovirus V9
ucaagcacaagca

SEQ ID NO: 295166 - RNA, 19 nt, Human erythrovirus V9
ucagaaaaauaccccagca

SEQ ID NO: 295167 - RNA, 19 nt, Human erythrovirus V9
ucaucauuuucagagccau

SEQ ID NO: 295168 - RNA, 14 nt, Human erythrovirus V9
ucauccaguaacag

SEQ ID NO: 295169 - RNA, 23 nt, Human erythrovirus V9
ucauccaguaacaguagugcaga

SEQ ID NO: 295170 - RNA, 16 nt, Human erythrovirus V9
ucauuuucagagccau

SEQ ID NO: 295171 - RNA, 19 nt, Human erythrovirus V9
uccauaugauccagagcau

SEQ ID NO: 295172 - RNA, 19 nt, Human erythrovirus V9
ucuccagcagcuaguagcu

SEQ ID NO: 295173 - RNA, 16 nt, Human erythrovirus V9
ucuguguuaacuugua

SEQ ID NO: 295174 - RNA, 21 nt, Human erythrovirus V9
ucuuuaaaaauuucaaaaaga

SEQ ID NO: 295175 - RNA, 16 nt, Human erythrovirus V9
ucuuuauuugacuuag

SEQ ID NO: 295176 - RNA, 14 nt, Human erythrovirus V9
ugaaaaagcuacug

SEQ ID NO: 295177 - RNA, 17 nt, Human erythrovirus V9
ugaaggggcuacauuua

SEQ ID NO: 295178 - RNA, 22 nt, Human erythrovirus V9
ugaccacccccaugccuuauca

SEQ ID NO: 295179 - RNA, 22 nt, Human erythrovirus V9
ugcaggcgggggagguagcaac

SEQ ID NO: 295180 - RNA, 18 nt, Human erythrovirus V9
ugcccaggacguguauaa

SEQ ID NO: 295181 - RNA, 17 nt, Human erythrovirus V9
ugcccucauuguauuaa

SEQ ID NO: 295182 - RNA, 14 nt, Human erythrovirus V9
ugccgaucaguuuc

SEQ ID NO: 295183 - RNA, 20 nt, Human erythrovirus V9
ugccuuaucauccaguaaca

SEQ ID NO: 295184 - RNA, 15 nt, Human erythrovirus V9
ugcgcugcaguuguc

SEQ ID NO: 295185 - RNA, 22 nt, Human erythrovirus V9
uggagugaaggggcuacauuua

SEQ ID NO: 295186 - RNA, 18 nt, Human erythrovirus V9
uggauuacaaaguuuugu

SEQ ID NO: 295187 - RNA, 16 nt, Human erythrovirus V9
ugggaaagcagugaca

SEQ ID NO: 295188 - RNA, 21 nt, Human erythrovirus V9
ugggaaagcagugacaaauuu

SEQ ID NO: 295189 - RNA, 21 nt, Human erythrovirus V9
uggugggaaagcagugacaaa

SEQ ID NO: 295190 - RNA, 16 nt, Human erythrovirus V9
uguauaagcaguuugu

SEQ ID NO: 295191 - RNA, 15 nt, Human erythrovirus V9
uguauuaauguggga

SEQ ID NO: 295192 - RNA, 22 nt, Human erythrovirus V9
uguccucagccaggaaccguca

SEQ ID NO: 295193 - RNA, 15 nt, Human erythrovirus V9
ugucuggauuacaaa

SEQ ID NO: 295194 - RNA, 21 nt, Human erythrovirus V9
uguggaacauauaaacaacag

SEQ ID NO: 295195 - RNA, 22 nt, Human erythrovirus V9
uuaacuuguaaaaaaugugcuu

SEQ ID NO: 295196 - RNA, 23 nt, Human erythrovirus V9
uuaacuuguaaaaaaugugcuua

SEQ ID NO: 295197 - RNA, 20 nt, Human erythrovirus V9
uuaccugucuggauuacaaa

SEQ ID NO: 295198 - RNA, 20 nt, Human erythrovirus V9
uuaugaaaaagcuacuggaa

SEQ ID NO: 295199 - RNA, 20 nt, Human erythrovirus V9
uugcccaggacguguauaag

SEQ ID NO: 295200 - RNA, 23 nt, Human erythrovirus V9
uugguauaauggauggaaauuua

SEQ ID NO: 295201 - RNA, 20 nt, Human erythrovirus V9
uuuaugaaaaagcuacugga

SEQ ID NO: 295202 - RNA, 20 nt, Human erythrovirus V9
uuuguagauuaugaguaaaa

SEQ ID NO: 295203 - RNA, 13 nt, Human erythrovirus V9
uuugugcaauuuu

SEQ ID NO: 295204 - RNA, 21 nt, Human erythrovirus V9
aaagcuacuggaacagacuua

SEQ ID NO: 295205 - RNA, 21 nt, Human erythrovirus V9
aaauaccccagcaugacuuca

SEQ ID NO: 295206 - RNA, 13 nt, Human erythrovirus V9
aaaugcaguauua

SEQ ID NO: 295207 - RNA, 22 nt, Human erythrovirus V9
aacuagauaugaacaacaugua

SEQ ID NO: 295208 - RNA, 22 nt, Human erythrovirus V9
aagcagugacaaauuugcccag

SEQ ID NO: 295209 - RNA, 12 nt, Human erythrovirus V9
aagccagcacug

SEQ ID NO: 295210 - RNA, 13 nt, Human erythrovirus V9
aagccagcacugg

SEQ ID NO: 295211 - RNA, 15 nt, Human erythrovirus V9
aauaccccagcauga

SEQ ID NO: 295212 - RNA, 17 nt, Human erythrovirus V9
acaaaguuuuguagauu

SEQ ID NO: 295213 - RNA, 17 nt, Human erythrovirus V9
accacccccaugccuua

SEQ ID NO: 295214 - RNA, 21 nt, Human erythrovirus V9
accuagaggagaaaaugcagu

SEQ ID NO: 295215 - RNA, 22 nt, Human erythrovirus V9
accuagaggagaaaaugcagua

SEQ ID NO: 295216 - RNA, 22 nt, Human erythrovirus V9
acucugcagaagccagcacugg

SEQ ID NO: 295217 - RNA, 20 nt, Human erythrovirus V9
acuuaguugcucgcauuaaa

SEQ ID NO: 295218 - RNA, 15 nt, Human erythrovirus V9
agaccauuacaacau

SEQ ID NO: 295219 - RNA, 19 nt, Human erythrovirus V9
agaccuauauagucaucau

SEQ ID NO: 295220 - RNA, 14 nt, Human erythrovirus V9
agaguuuacuccag

SEQ ID NO: 295221 - RNA, 22 nt, Human erythrovirus V9
agcaacccuacaaaaagcaugu

SEQ ID NO: 295222 - RNA, 12 nt, Human erythrovirus V9
agcagugacaaa

SEQ ID NO: 295223 - RNA, 15 nt, Human erythrovirus V9
agcaguuugugcaau

SEQ ID NO: 295224 - RNA, 16 nt, Human erythrovirus V9
agcaguuugugcaauu

SEQ ID NO: 295225 - RNA, 15 nt, Human erythrovirus V9
aggagaaaaugcagu

SEQ ID NO: 295226 - RNA, 16 nt, Human erythrovirus V9
aggagaaaaugcagua

SEQ ID NO: 295227 - RNA, 19 nt, Human erythrovirus V9
aggagaaaaugcaguauua

SEQ ID NO: 295228 - RNA, 19 nt, Human erythrovirus V9
aggguuucaagcacaagca

SEQ ID NO: 295229 - RNA, 20 nt, Human erythrovirus V9
aguguucucuccagcagcua

SEQ ID NO: 295230 - RNA, 16 nt, Human erythrovirus V9
aguuacgucauuuccu

SEQ ID NO: 295231 - RNA, 20 nt, Human erythrovirus V9
auaagcaguuugugcaauuu

SEQ ID NO: 295232 - RNA, 23 nt, Human erythrovirus V9
auacaauuacccgguacuaacua

SEQ ID NO: 295233 - RNA, 22 nt, Human erythrovirus V9
auagucaucauuuucagagcca

SEQ ID NO: 295234 - RNA, 16 nt, Human erythrovirus V9
aucuauaaaagauaca

SEQ ID NO: 295235 - RNA, 15 nt, Human erythrovirus V9
augccuuaucaucca

SEQ ID NO: 295236 - RNA, 14 nt, Human erythrovirus V9
auggauggaaauuu

SEQ ID NO: 295237 - RNA, 16 nt, Human erythrovirus V9
augugggagcuuggua

SEQ ID NO: 295238 - RNA, 20 nt, Human erythrovirus V9
auuauaaaguguucucucca

SEQ ID NO: 295239 - RNA, 13 nt, Human erythrovirus V9
auuaucuagugaa

SEQ ID NO: 295240 - RNA, 19 nt, Human erythrovirus V9
auuaucuagugaagacuua

SEQ ID NO: 295241 - RNA, 18 nt, Human erythrovirus V9
auuauguaauauguacac

SEQ ID NO: 295242 - RNA, 16 nt, Human erythrovirus V9
auuuagagaguuuacu

SEQ ID NO: 295243 - RNA, 19 nt, Human erythrovirus V9
auuucaaaaagaagacacc

SEQ ID NO: 295244 - RNA, 14 nt, Human erythrovirus V9
auuuuaaaagacca

SEQ ID NO: 295245 - RNA, 17 nt, Human erythrovirus V9
auuuucuguguuaacuu

SEQ ID NO: 295246 - RNA, 15 nt, Human erythrovirus V9
caaaaagaagacacc

SEQ ID NO: 295247 - RNA, 17 nt, Human erythrovirus V9
caaauuuuaaaagacca

SEQ ID NO: 295248 - RNA, 12 nt, Human erythrovirus V9
caacauguaauu

SEQ ID NO: 295249 - RNA, 17 nt, Human erythrovirus V9
caccguguccucagcca

SEQ ID NO: 295250 - RNA, 22 nt, Human erythrovirus V9
cagaaccuagaggagaaaaugc

SEQ ID NO: 295251 - RNA, 22 nt, Human erythrovirus V9
cagaagccagcacuggugcagg

SEQ ID NO: 295252 - RNA, 16 nt, Human erythrovirus V9
aaaagcauguggagug

SEQ ID NO: 295253 - RNA, 22 nt, Human erythrovirus V9
aaaagcuacuggaacagacuua

SEQ ID NO: 295254 - RNA, 14 nt, Human erythrovirus V9
aaaaugcaguauua

SEQ ID NO: 295255 - RNA, 17 nt, Human erythrovirus V9
cagagccauggacaguu

SEQ ID NO: 295256 - RNA, 23 nt, Human erythrovirus V9
cagcuaguagcugccacaaugcu

SEQ ID NO: 295257 - RNA, 18 nt, Human erythrovirus V9
caguaacaguagugcaga

SEQ ID NO: 295258 - RNA, 12 nt, Human erythrovirus V9
caucauuuucag

SEQ ID NO: 295259 - RNA, 20 nt, Human erythrovirus V9
cauccaguaacaguagugca

SEQ ID NO: 295260 - RNA, 22 nt, Human erythrovirus V9
cauccaguaacaguagugcaga

SEQ ID NO: 295261 - RNA, 21 nt, Human erythrovirus V9
cauuauaaaguguucucucca

SEQ ID NO: 295262 - RNA, 16 nt, Human erythrovirus V9
cauucucuaggcaauu

SEQ ID NO: 295263 - RNA, 19 nt, Human erythrovirus V9
ccaguaacaguagugcaga

SEQ ID NO: 295264 - RNA, 20 nt, Human erythrovirus V9
ccauuacaacauuucuuuag

SEQ ID NO: 295265 - RNA, 22 nt, Human erythrovirus V9
cccaugccuuaucauccaguaa

SEQ ID NO: 295266 - RNA, 14 nt, Human erythrovirus V9
ccccucuucuuuau

SEQ ID NO: 295267 - RNA, 17 nt, Human erythrovirus V9
ccuguggcccauuuuca

SEQ ID NO: 295268 - RNA, 12 nt, Human erythrovirus V9
cguguacauucu

SEQ ID NO: 295269 - RNA, 23 nt, Human erythrovirus V9
cguguauaagcaguuugugcaau

SEQ ID NO: 295270 - RNA, 19 nt, Human erythrovirus V9
cuagaggagaaaaugcagu

SEQ ID NO: 295271 - RNA, 21 nt, Human erythrovirus V9
cuagauaugaacaacauguaa

SEQ ID NO: 295272 - RNA, 14 nt, Human erythrovirus V9
cuauaaaagauaca

SEQ ID NO: 295273 - RNA, 19 nt, Human erythrovirus V9
cuauguugggccuggcaau

SEQ ID NO: 295274 - RNA, 15 nt, Human erythrovirus V9
cuguguuaacuugua

SEQ ID NO: 295275 - RNA, 18 nt, Human erythrovirus V9
cuguuugcuguguggaac

SEQ ID NO: 295276 - RNA, 17 nt, Human erythrovirus V9
gaaagcagugacaaauu

SEQ ID NO: 295277 - RNA, 22 nt, Human erythrovirus V9
gaaggggcuacauuuacugcua

SEQ ID NO: 295278 - RNA, 14 nt, Human erythrovirus V9
gacaaauuugccca

SEQ ID NO: 295279 - RNA, 11 nt, Human erythrovirus V9
gacaccaaauc

SEQ ID NO: 295280 - RNA, 23 nt, Human erythrovirus V9
gagaguuuacuccagacuuagug

SEQ ID NO: 295281 - RNA, 22 nt, Human erythrovirus V9
gcaaccaucuauaaaagauaca

SEQ ID NO: 295282 - RNA, 17 nt, Human erythrovirus V9
gcagugacaaauuugcc

SEQ ID NO: 295283 - RNA, 16 nt, Human erythrovirus V9
gccuuaucauccagua

SEQ ID NO: 295284 - RNA, 19 nt, Human erythrovirus V9
ggaacagacuuagagcuua

SEQ ID NO: 295285 - RNA, 19 nt, Human erythrovirus V9
guaacguguacauucucua

SEQ ID NO: 295286 - RNA, 15 nt, Human erythrovirus V9
guauuaucuagugaa

SEQ ID NO: 295287 - RNA, 18 nt, Human erythrovirus V9
uaaaaaaugaaacagggu

SEQ ID NO: 295288 - RNA, 15 nt, Human erythrovirus V9
uaaaagauuacuuua

SEQ ID NO: 295289 - RNA, 16 nt, Human erythrovirus V9
uaagcaguuugugcaa

SEQ ID NO: 295290 - RNA, 19 nt, Human erythrovirus V9
uacagacgcuguagaauau

SEQ ID NO: 295291 - RNA, 19 nt, Human erythrovirus V9
uacuuuaaaaggugcagcu

SEQ ID NO: 295292 - RNA, 20 nt, Human erythrovirus V9
uagaggagaaaaugcaguau

SEQ ID NO: 295293 - RNA, 19 nt, Human erythrovirus V9
uaguagcugccacaaugcu

SEQ ID NO: 295294 - RNA, 14 nt, Human erythrovirus V9
uagugaagacuuac

SEQ ID NO: 295295 - RNA, 15 nt, Human erythrovirus V9
uagugaagacuuaca

SEQ ID NO: 295296 - RNA, 20 nt, Human erythrovirus V9
ucaaaaagaagacaccaaau

SEQ ID NO: 295297 - RNA, 18 nt, Human erythrovirus V9
ucauguaggagccucuaa

SEQ ID NO: 295298 - RNA, 12 nt, Human erythrovirus V9
uccgguacaaga

SEQ ID NO: 295299 - RNA, 20 nt, Human erythrovirus V9
ucuguguuaacuuguaaaaa

SEQ ID NO: 295300 - RNA, 20 nt, Human erythrovirus V9
ugaagacuuacacaagccug

SEQ ID NO: 295301 - RNA, 18 nt, Human erythrovirus V9
ugcaguugucauguagga

SEQ ID NO: 295302 - RNA, 22 nt, Human erythrovirus V9
ugcuguguggaacauauaaaca

SEQ ID NO: 295303 - RNA, 14 nt, Human erythrovirus V9
uggaacagacuuag

SEQ ID NO: 295304 - RNA, 21 nt, Human erythrovirus V9
uguauaagcaguuugugcaau

SEQ ID NO: 295305 - RNA, 16 nt, Human erythrovirus V9
ugucuggauuacaaag

SEQ ID NO: 295306 - RNA, 18 nt, Human erythrovirus V9
ugugggagcuugguauaa

SEQ ID NO: 295307 - RNA, 18 nt, Human erythrovirus V9
uuaucuagugaagacuua

SEQ ID NO: 295308 - RNA, 20 nt, Human erythrovirus V9
uuaucuagugaagacuuaca

SEQ ID NO: 295309 - RNA, 21 nt, Human erythrovirus V9
uuaugaguaaaaccacuaaca

SEQ ID NO: 295310 - RNA, 14 nt, Human erythrovirus V9
uucaaaaagaagac

SEQ ID NO: 295311 - RNA, 14 nt, Human erythrovirus V9
uucaagcacaagca

SEQ ID NO: 295312 - RNA, 16 nt, Human erythrovirus V9
uucagagccauggaca

SEQ ID NO: 295313 - RNA, 12 nt, Human erythrovirus V9
uuuaaaagacca

SEQ ID NO: 295314 - RNA, 16 nt, Human erythrovirus V9
uuuagagaguuuacuc

SEQ ID NO: 295315 - RNA, 15 nt, Human erythrovirus V9
uuucuguguuaacuu

SEQ ID NO: 295316 - RNA, 21 nt, Human erythrovirus V9
acuauguugggccuggcaaug

SEQ ID NO: 295317 - RNA, 14 nt, Human erythrovirus V9
acucuccagaccua

SEQ ID NO: 295318 - RNA, 18 nt, Human erythrovirus V9
agaggagaaaaugcagua

SEQ ID NO: 295319 - RNA, 13 nt, Human erythrovirus V9
agauuauguaaua

SEQ ID NO: 295320 - RNA, 22 nt, Human erythrovirus V9
agccuuaaauaaauaauucaua

SEQ ID NO: 295321 - RNA, 22 nt, Human erythrovirus V9
agcuaguagcugccacaaugcu

SEQ ID NO: 295322 - RNA, 16 nt, Human erythrovirus V9
aguagugcagaaccua

SEQ ID NO: 295323 - RNA, 23 nt, Human erythrovirus V9
aguuaacucugcagaagccagca

SEQ ID NO: 295324 - RNA, 13 nt, Human erythrovirus V9
auaaauuauuaac

SEQ ID NO: 295325 - RNA, 12 nt, Human erythrovirus V9
auaagcaguuug

SEQ ID NO: 295326 - RNA, 12 nt, Human erythrovirus V9
auauagucauca

SEQ ID NO: 295327 - RNA, 21 nt, Human erythrovirus V9
auccaguaacaguagugcaga

SEQ ID NO: 295328 - RNA, 20 nt, Human erythrovirus V9
aucuagugaagacuuacaca

SEQ ID NO: 295329 - RNA, 23 nt, Human erythrovirus V9
aucugaccacccccaugccuuau

SEQ ID NO: 295330 - RNA, 22 nt, Human erythrovirus V9
augaaacaggguuucaagcaca

SEQ ID NO: 295331 - RNA, 21 nt, Human erythrovirus V9
augacuucaguuaacucugca

SEQ ID NO: 295332 - RNA, 15 nt, Human erythrovirus V9
augcaguauuaucua

SEQ ID NO: 295333 - RNA, 23 nt, Human erythrovirus V9
auuauaaaguguucucuccagca

SEQ ID NO: 295334 - RNA, 20 nt, Human erythrovirus V9
auuaugaguaaaaccacuaa

SEQ ID NO: 295335 - RNA, 20 nt, Human erythrovirus V9
auucaaauuuuaaaagacca

SEQ ID NO: 295336 - RNA, 20 nt, Human erythrovirus V9
auuuuaaaagaccauuacaa

SEQ ID NO: 295337 - RNA, 18 nt, Human erythrovirus V9
caaaaagcauguggagug

SEQ ID NO: 295338 - RNA, 19 nt, Human erythrovirus V9
caaauggugggaaagcagu

SEQ ID NO: 295339 - RNA, 15 nt, Human erythrovirus V9
caaauuuuaaaagac

SEQ ID NO: 295340 - RNA, 17 nt, Human erythrovirus V9
caauuuuaugaaaaagc

SEQ ID NO: 295341 - RNA, 19 nt, Human erythrovirus V9
cagacgcuguagaauauaa

SEQ ID NO: 295342 - RNA, 21 nt, Human erythrovirus V9
cagacuuagagcuuauucaaa

SEQ ID NO: 295343 - RNA, 21 nt, Human erythrovirus V9
cagcugccccuguggcccauu

SEQ ID NO: 295344 - RNA, 20 nt, Human erythrovirus V9
caggguuucaagcacaagca

SEQ ID NO: 295345 - RNA, 14 nt, Human erythrovirus V9
caguuaacucugca

SEQ ID NO: 295346 - RNA, 20 nt, Human erythrovirus V9
cauacaauuacccgguacua

SEQ ID NO: 295347 - RNA, 20 nt, Human erythrovirus V9
cauuaaaaguaaucuuaaaa

SEQ ID NO: 295348 - RNA, 21 nt, Human herpesvirus 1
aaccccuuccccgcugucacu

SEQ ID NO: 295349 - RNA, 22 nt, Human herpesvirus 1
aaccccuuccccgcugucacuc

SEQ ID NO: 295350 - RNA, 20 nt, Human herpesvirus 1
aaccuagggcggggcgggga

SEQ ID NO: 295351 - RNA, 15 nt, Human herpesvirus 1
aacgacaucuugucg

SEQ ID NO: 295352 - RNA, 23 nt, Human herpesvirus 1
aacgaccccgcccauggguccca

SEQ ID NO: 295353 - RNA, 12 nt, Human herpesvirus 1
aacggacggggu

SEQ ID NO: 295354 - RNA, 21 nt, Human herpesvirus 1
aacgggggccaugucuccgga

SEQ ID NO: 295355 - RNA, 16 nt, Human herpesvirus 1
aacgggggggugucgc

SEQ ID NO: 295356 - RNA, 15 nt, Human herpesvirus 1
aacgugcgcgauccc

SEQ ID NO: 295357 - RNA, 14 nt, Human herpesvirus 1
aacuccagaccacc

SEQ ID NO: 295358 - RNA, 18 nt, Human herpesvirus 1
aacuccagaccaccgguc

SEQ ID NO: 295359 - RNA, 23 nt, Human herpesvirus 1
aacucguucguaaacaccaggag

SEQ ID NO: 295360 - RNA, 17 nt, Human herpesvirus 1
aacugauaaaacagcga

SEQ ID NO: 295361 - RNA, 22 nt, Human herpesvirus 1
aagaaucacaaugagacccaaa

SEQ ID NO: 295362 - RNA, 17 nt, Human herpesvirus 1
aagacgguccacgucac

SEQ ID NO: 295363 - RNA, 18 nt, Human herpesvirus 1
aagaggagacgagacaga

SEQ ID NO: 295364 - RNA, 14 nt, Human herpesvirus 1
aagauauacaguaa

SEQ ID NO: 295365 - RNA, 16 nt, Human herpesvirus 1
aagaugcgauacaaac

SEQ ID NO: 295366 - RNA, 15 nt, Human herpesvirus 1
aagccccgggccgcg

SEQ ID NO: 295367 - RNA, 19 nt, Human herpesvirus 1
aagcgccccgauggcccug

SEQ ID NO: 295368 - RNA, 17 nt, Human herpesvirus 1
aagcggcggggcaaugu

SEQ ID NO: 295369 - RNA, 18 nt, Human herpesvirus 1
aaggagugguuugccguu

SEQ ID NO: 295370 - RNA, 21 nt, Human herpesvirus 1
aaggcucgugcguuggugugg

SEQ ID NO: 295371 - RNA, 18 nt, Human herpesvirus 1
aagucacgagguacgggg

SEQ ID NO: 295372 - RNA, 19 nt, Human herpesvirus 1
aagucgguagcgggggacg

SEQ ID NO: 295373 - RNA, 22 nt, Human herpesvirus 1
aauaaaccagguaauaccaaau

SEQ ID NO: 295374 - RNA, 23 nt, Human herpesvirus 1
aauaaaccagguaauaccaaaua

SEQ ID NO: 295375 - RNA, 22 nt, Human herpesvirus 1
aauaggugcgccgcaggccaaa

SEQ ID NO: 295376 - RNA, 23 nt, Human herpesvirus 1
aaucagcguucacccggcggcgc

SEQ ID NO: 295377 - RNA, 13 nt, Human herpesvirus 1
aauccgacgggga

SEQ ID NO: 295378 - RNA, 16 nt, Human herpesvirus 1
aaugaaccagacccua

SEQ ID NO: 295379 - RNA, 13 nt, Human herpesvirus 1
aauguaaccauac

SEQ ID NO: 295380 - RNA, 22 nt, Human herpesvirus 1
aauugguguguuugucggugga

SEQ ID NO: 295381 - RNA, 22 nt, Human herpesvirus 1
acaaaccaccccguaccacccg

SEQ ID NO: 295382 - RNA, 11 nt, Human herpesvirus 1
acaacaaaccc

SEQ ID NO: 295383 - RNA, 20 nt, Human herpesvirus 1
acaacgcgacaggccaguau

SEQ ID NO: 295384 - RNA, 12 nt, Human herpesvirus 1
acacaaaacaca

SEQ ID NO: 295385 - RNA, 20 nt, Human herpesvirus 1
acacaaaaggcguaccaaac

SEQ ID NO: 295386 - RNA, 21 nt, Human herpesvirus 1
acacacaaaaggcguaccaaa

SEQ ID NO: 295387 - RNA, 22 nt, Human herpesvirus 1
acacacaaaaggcguaccaaac

SEQ ID NO: 295388 - RNA, 13 nt, Human herpesvirus 1
acacaccagacau

SEQ ID NO: 295389 - RNA, 16 nt, Human herpesvirus 1
acacaccccccaugcc

SEQ ID NO: 295390 - RNA, 21 nt, Human herpesvirus 1
acacagcccucccgaccgaca

SEQ ID NO: 295391 - RNA, 17 nt, Human herpesvirus 1
acaccacaggggaccgc

SEQ ID NO: 295392 - RNA, 13 nt, Human herpesvirus 1
acaccaccuacua

SEQ ID NO: 295393 - RNA, 12 nt, Human herpesvirus 1
acaccacgccug

SEQ ID NO: 295394 - RNA, 15 nt, Human herpesvirus 1
acaccccccaugcca

SEQ ID NO: 295395 - RNA, 16 nt, Human herpesvirus 1
acacccccgugacuca

SEQ ID NO: 295396 - RNA, 20 nt, Human herpesvirus 1
acacccgggggaguuugugu

SEQ ID NO: 295397 - RNA, 13 nt, Human herpesvirus 1
acacccuacccca

SEQ ID NO: 295398 - RNA, 18 nt, Human herpesvirus 1
acacccuugugugucaau

SEQ ID NO: 295399 - RNA, 15 nt, Human herpesvirus 1
acaccgcguguuccc

SEQ ID NO: 295400 - RNA, 22 nt, Human herpesvirus 1
acacgggggagcgcucuugucu

SEQ ID NO: 295401 - RNA, 12 nt, Human herpesvirus 1
acagaacagggc

SEQ ID NO: 295402 - RNA, 14 nt, Human herpesvirus 1
acagaccacgcgga

SEQ ID NO: 295403 - RNA, 15 nt, Human herpesvirus 1
acagacucaagcaca

SEQ ID NO: 295404 - RNA, 21 nt, Human herpesvirus 1
acagccacccacccaccaaga

SEQ ID NO: 295405 - RNA, 15 nt, Human herpesvirus 1
acagccgaucuccac

SEQ ID NO: 295406 - RNA, 17 nt, Human herpesvirus 1
acauacgacacacaggc

SEQ ID NO: 295407 - RNA, 20 nt, Human herpesvirus 1
acaucccaugguaccaaaga

SEQ ID NO: 295408 - RNA, 20 nt, Human herpesvirus 1
acaugcgcacgugauguagg

SEQ ID NO: 295409 - RNA, 22 nt, Human herpesvirus 1
acaugcgguuuaacacccgugg

SEQ ID NO: 295410 - RNA, 20 nt, Human herpesvirus 1
accaaaaacaccacagggga

SEQ ID NO: 295411 - RNA, 12 nt, Human herpesvirus 1
accaaacaaaca

SEQ ID NO: 295412 - RNA, 13 nt, Human herpesvirus 1
accacacaccagc

SEQ ID NO: 295413 - RNA, 19 nt, Human herpesvirus 1
accaccccaaauacagcau

SEQ ID NO: 295414 - RNA, 17 nt, Human herpesvirus 1
accacgggagccagggc

SEQ ID NO: 295415 - RNA, 14 nt, Human herpesvirus 1
accaggaaauccgu

SEQ ID NO: 295416 - RNA, 17 nt, Human herpesvirus 1
accagguaauaccaaau

SEQ ID NO: 295417 - RNA, 23 nt, Human herpesvirus 1
accauaggaugaacaaaccaccc

SEQ ID NO: 295418 - RNA, 12 nt, Human herpesvirus 1
acgcaaacaaca

SEQ ID NO: 295419 - RNA, 16 nt, Human herpesvirus 1
acgcacccccccaacg

SEQ ID NO: 295420 - RNA, 19 nt, Human herpesvirus 1
acgcaccucgaggacaccc

SEQ ID NO: 295421 - RNA, 14 nt, Human herpesvirus 1
acgcacgaccacgg

SEQ ID NO: 295422 - RNA, 13 nt, Human herpesvirus 1
acgccaaaccacg

SEQ ID NO: 295423 - RNA, 20 nt, Human herpesvirus 1
acgcccacuuuauucgcguc

SEQ ID NO: 295424 - RNA, 16 nt, Human herpesvirus 1
acgccuucgccccaca

SEQ ID NO: 295425 - RNA, 15 nt, Human herpesvirus 1
acgcgaccccauggc

SEQ ID NO: 295426 - RNA, 15 nt, Human herpesvirus 1
acgcgccucccgggg

SEQ ID NO: 295427 - RNA, 16 nt, Human herpesvirus 1
acgcgccucccggggg

SEQ ID NO: 295428 - RNA, 22 nt, Human herpesvirus 1
acgcgggguucggucccagggc

SEQ ID NO: 295429 - RNA, 19 nt, Human herpesvirus 1
acgcgguccccuguggugu

SEQ ID NO: 295430 - RNA, 17 nt, Human herpesvirus 1
acgcugcuccgccuggc

SEQ ID NO: 295431 - RNA, 12 nt, Human herpesvirus 1
acggaaccaaac

SEQ ID NO: 295432 - RNA, 13 nt, Human herpesvirus 1
acggaaccaaaca

SEQ ID NO: 295433 - RNA, 12 nt, Human herpesvirus 1
acggcauaugca

SEQ ID NO: 295434 - RNA, 16 nt, Human herpesvirus 1
acggcgucucccgggg

SEQ ID NO: 295435 - RNA, 17 nt, Human herpesvirus 1
acggcgucucccggggg

SEQ ID NO: 295436 - RNA, 22 nt, Human herpesvirus 1
acgggaucggacgccacacacc

SEQ ID NO: 295437 - RNA, 14 nt, Human herpesvirus 1
acgggcggaggcgu

SEQ ID NO: 295438 - RNA, 23 nt, Human herpesvirus 1
acgggggcccugccacuccggcg

SEQ ID NO: 295439 - RNA, 14 nt, Human herpesvirus 1
acggggucccgggc

SEQ ID NO: 295440 - RNA, 20 nt, Human herpesvirus 1
acgguucgaaacuuaacaca

SEQ ID NO: 295441 - RNA, 21 nt, Human herpesvirus 1
acuaacccaacguauaaaucc

SEQ ID NO: 295442 - RNA, 23 nt, Human herpesvirus 1
acucaagcacacacgggggagcg

SEQ ID NO: 295443 - RNA, 22 nt, Human herpesvirus 1
acucaggacaucgguguguccu

SEQ ID NO: 295444 - RNA, 16 nt, Human herpesvirus 1
acucauccuccagacg

SEQ ID NO: 295445 - RNA, 15 nt, Human herpesvirus 1
acucauuaaugggcg

SEQ ID NO: 295446 - RNA, 12 nt, Human herpesvirus 1
acucauuuggau

SEQ ID NO: 295447 - RNA, 18 nt, Human herpesvirus 1
acucugucgauaccccac

SEQ ID NO: 295448 - RNA, 18 nt, Human herpesvirus 1
acugggcgaccgccggcg

SEQ ID NO: 295449 - RNA, 14 nt, Human herpesvirus 1
acuuaacacaccaa

SEQ ID NO: 295450 - RNA, 14 nt, Human herpesvirus 1
agaaacaaaaccgg

SEQ ID NO: 295451 - RNA, 17 nt, Human herpesvirus 1
agaaacggccgaagcca

SEQ ID NO: 295452 - RNA, 20 nt, Human herpesvirus 1
agaaccuagggaacccagag

SEQ ID NO: 295453 - RNA, 17 nt, Human herpesvirus 1
agaauggaugggaggag

SEQ ID NO: 295454 - RNA, 13 nt, Human herpesvirus 1
agacaacaaacaa

SEQ ID NO: 295455 - RNA, 20 nt, Human herpesvirus 1
agacacgguuacaguuuauu

SEQ ID NO: 295456 - RNA, 19 nt, Human herpesvirus 1
agacucucccccaccgccc

SEQ ID NO: 295457 - RNA, 21 nt, Human herpesvirus 1
agagccguaacccaaccaaac

SEQ ID NO: 295458 - RNA, 16 nt, Human herpesvirus 1
agagccugccgccuca

SEQ ID NO: 295459 - RNA, 15 nt, Human herpesvirus 1
agagcgcgggaccgu

SEQ ID NO: 295460 - RNA, 15 nt, Human herpesvirus 1
agauguccaauccac

SEQ ID NO: 295461 - RNA, 13 nt, Human herpesvirus 1
agcaaaacggacu

SEQ ID NO: 295462 - RNA, 22 nt, Human herpesvirus 1
agcaaacgccccgcccacacaa

SEQ ID NO: 295463 - RNA, 13 nt, Human herpesvirus 1
agcaaucagggac

SEQ ID NO: 295464 - RNA, 22 nt, Human herpesvirus 1
agcacauccagguacccggcgg

SEQ ID NO: 295465 - RNA, 20 nt, Human herpesvirus 1
agcauaccuggguguguuua

SEQ ID NO: 295466 - RNA, 22 nt, Human herpesvirus 1
agcaugggacccacagaccgcc

SEQ ID NO: 295467 - RNA, 14 nt, Human herpesvirus 1
agccacaaaaugca

SEQ ID NO: 295468 - RNA, 23 nt, Human herpesvirus 1
agccacugaaacccgaaacgcga

SEQ ID NO: 295469 - RNA, 12 nt, Human herpesvirus 1
agccagggccaa

SEQ ID NO: 295470 - RNA, 21 nt, Human herpesvirus 1
agcccccaacaugacccagac

SEQ ID NO: 295471 - RNA, 15 nt, Human herpesvirus 1
agcccccgggacugc

SEQ ID NO: 295472 - RNA, 17 nt, Human herpesvirus 1
agcccuacaccggccac

SEQ ID NO: 295473 - RNA, 14 nt, Human herpesvirus 1
agcccucagagaca

SEQ ID NO: 295474 - RNA, 23 nt, Human herpesvirus 1
agccggggagagggcccgcggcg

SEQ ID NO: 295475 - RNA, 14 nt, Human herpesvirus 1
agccguaacccaac

SEQ ID NO: 295476 - RNA, 13 nt, Human herpesvirus 1
agccuacuacucg

SEQ ID NO: 295477 - RNA, 21 nt, Human herpesvirus 1
agccuauguucgcgggcgacg

SEQ ID NO: 295478 - RNA, 16 nt, Human herpesvirus 1
agcgcgccgcgacacu

SEQ ID NO: 295479 - RNA, 13 nt, Human herpesvirus 1
agcgcgggaccgu

SEQ ID NO: 295480 - RNA, 13 nt, Human herpesvirus 1
cccgcccccggcu

SEQ ID NO: 295481 - RNA, 16 nt, Human herpesvirus 1
cccgcccucacagggc

SEQ ID NO: 295482 - RNA, 15 nt, Human herpesvirus 1
cccgcggaccaccgg

SEQ ID NO: 295483 - RNA, 18 nt, Human herpesvirus 1
cccgcgggguucuggggu

SEQ ID NO: 295484 - RNA, 14 nt, Human herpesvirus 1
cccggcaccacggg

SEQ ID NO: 295485 - RNA, 18 nt, Human herpesvirus 1
cccggccaccucgcccac

SEQ ID NO: 295486 - RNA, 16 nt, Human herpesvirus 1
cccgggcacgcgguga

SEQ ID NO: 295487 - RNA, 15 nt, Human herpesvirus 1
cccgugugccgcgcc

SEQ ID NO: 295488 - RNA, 14 nt, Human herpesvirus 1
cccguguuugccca

SEQ ID NO: 295489 - RNA, 11 nt, Human herpesvirus 1
cccuaccccag

SEQ ID NO: 295490 - RNA, 23 nt, Human herpesvirus 1
cccucccgaccgacacccccaua

SEQ ID NO: 295491 - RNA, 12 nt, Human herpesvirus 1
cccucgagaucc

SEQ ID NO: 295492 - RNA, 12 nt, Human herpesvirus 1
cccucgcgggcc

SEQ ID NO: 295493 - RNA, 15 nt, Human herpesvirus 1
cccugcccgacaggg

SEQ ID NO: 295494 - RNA, 16 nt, Human herpesvirus 1
cccugcgcgaugugga

SEQ ID NO: 295495 - RNA, 16 nt, Human herpesvirus 1
cccuguuugucgacga

SEQ ID NO: 295496 - RNA, 20 nt, Human herpesvirus 1
cccuucuccgcgugggugau

SEQ ID NO: 295497 - RNA, 19 nt, Human herpesvirus 1
ccgaaacggccaugcacac

SEQ ID NO: 295498 - RNA, 19 nt, Human herpesvirus 1
ccgaaacuucaucaccccc

SEQ ID NO: 295499 - RNA, 11 nt, Human herpesvirus 1
ccgaaccacca

SEQ ID NO: 295500 - RNA, 15 nt, Human herpesvirus 1
ccgaaccgaaccagc

SEQ ID NO: 295501 - RNA, 21 nt, Human herpesvirus 1
ccgaccuggagccgggggggu

SEQ ID NO: 295502 - RNA, 16 nt, Human herpesvirus 1
ccgacgccgucgacga

SEQ ID NO: 295503 - RNA, 17 nt, Human herpesvirus 1
ccgcaacugcuccagaa

SEQ ID NO: 295504 - RNA, 18 nt, Human herpesvirus 1
ccgcagccuucucccggu

SEQ ID NO: 295505 - RNA, 17 nt, Human herpesvirus 1
ccgcaugugcaucuuuu

SEQ ID NO: 295506 - RNA, 23 nt, Human herpesvirus 1
ccgcauuuggccgggggcugggg

SEQ ID NO: 295507 - RNA, 16 nt, Human herpesvirus 1
ccgccacgcuggguuu

SEQ ID NO: 295508 - RNA, 21 nt, Human herpesvirus 1
ccgcccaaugggccgggccgc

SEQ ID NO: 295509 - RNA, 21 nt, Human herpesvirus 1
ccgccccgaagagggggaccc

SEQ ID NO: 295510 - RNA, 19 nt, Human herpesvirus 1
ccgcccucacagggcgggc

SEQ ID NO: 295511 - RNA, 21 nt, Human herpesvirus 1
ccgcccucacagggcgggccg

SEQ ID NO: 295512 - RNA, 22 nt, Human herpesvirus 1
ccgcccucacagggcgggccgc

SEQ ID NO: 295513 - RNA, 21 nt, Human herpesvirus 1
ccgccgacgccgucgacgagc

SEQ ID NO: 295514 - RNA, 19 nt, Human herpesvirus 1
ccgccgagucuucggggcc

SEQ ID NO: 295515 - RNA, 12 nt, Human herpesvirus 1
ccgccgggacgc

SEQ ID NO: 295516 - RNA, 14 nt, Human herpesvirus 1
ccgccguccgaacc

SEQ ID NO: 295517 - RNA, 23 nt, Human herpesvirus 1
ccgccugucgcacccacagcuuu

SEQ ID NO: 295518 - RNA, 22 nt, Human herpesvirus 1
ccgcgacccaccgggcccggcc

SEQ ID NO: 295519 - RNA, 14 nt, Human herpesvirus 1
ccgcgcauccgacc

SEQ ID NO: 295520 - RNA, 15 nt, Human herpesvirus 1
ccgcgcccucgccac

SEQ ID NO: 295521 - RNA, 15 nt, Human herpesvirus 1
ccgcgcucgcucggg

SEQ ID NO: 295522 - RNA, 17 nt, Human herpesvirus 1
ccgcggggggggcgggc

SEQ ID NO: 295523 - RNA, 22 nt, Human herpesvirus 1
ccgcgguacagaucggcgccgc

SEQ ID NO: 295524 - RNA, 23 nt, Human herpesvirus 1
ccgcggugucugggaauagagca

SEQ ID NO: 295525 - RNA, 16 nt, Human herpesvirus 1
ccgcugacaaccaccu

SEQ ID NO: 295526 - RNA, 17 nt, Human herpesvirus 1
ccggaacgaacccaaag

SEQ ID NO: 295527 - RNA, 15 nt, Human herpesvirus 1
ccggagaaacagcac

SEQ ID NO: 295528 - RNA, 15 nt, Human herpesvirus 1
ccggcacgccugggg

SEQ ID NO: 295529 - RNA, 16 nt, Human herpesvirus 1
ccggccaccucgccca

SEQ ID NO: 295530 - RNA, 18 nt, Human herpesvirus 1
ccggcccauugggcggga

SEQ ID NO: 295531 - RNA, 17 nt, Human herpesvirus 1
ccggccugggccgcgag

SEQ ID NO: 295532 - RNA, 20 nt, Human herpesvirus 1
ccggcggccccuggcgccgc

SEQ ID NO: 295533 - RNA, 23 nt, Human herpesvirus 1
ccggcgggguuauaggccacgca

SEQ ID NO: 295534 - RNA, 13 nt, Human herpesvirus 1
ccggcggucgcgc

SEQ ID NO: 295535 - RNA, 18 nt, Human herpesvirus 1
ccggcuagacccacgggg

SEQ ID NO: 295536 - RNA, 22 nt, Human herpesvirus 1
ccgggacuuuuggaugucgccc

SEQ ID NO: 295537 - RNA, 16 nt, Human herpesvirus 1
ccgggagcaccacaua

SEQ ID NO: 295538 - RNA, 11 nt, Human herpesvirus 1
ccgggagcucc

SEQ ID NO: 295539 - RNA, 14 nt, Human herpesvirus 1
ccggggcgucgccc

SEQ ID NO: 295540 - RNA, 13 nt, Human herpesvirus 1
ccgguaugguaau

SEQ ID NO: 295541 - RNA, 18 nt, Human herpesvirus 1
ccggugcguugcacguag

SEQ ID NO: 295542 - RNA, 23 nt, Human herpesvirus 1
ccgguugauuuuugggugggugg

SEQ ID NO: 295543 - RNA, 19 nt, Human herpesvirus 1
ccguaacggcauaugcaaa

SEQ ID NO: 295544 - RNA, 21 nt, Human herpesvirus 1
ccguaagugggguccggguaa

SEQ ID NO: 295545 - RNA, 20 nt, Human herpesvirus 1
ccgucaaaggugcacacccg

SEQ ID NO: 295546 - RNA, 15 nt, Human herpesvirus 1
ccguccagacacuug

SEQ ID NO: 295547 - RNA, 15 nt, Human herpesvirus 1
ccgucgccgcgggcc

SEQ ID NO: 295548 - RNA, 15 nt, Human herpesvirus 1
ccgucgggcacguac

SEQ ID NO: 295549 - RNA, 15 nt, Human herpesvirus 1
ccgucucugcuacgc

SEQ ID NO: 295550 - RNA, 19 nt, Human herpesvirus 1
ccuaaaauucaacaaaacu

SEQ ID NO: 295551 - RNA, 12 nt, Human herpesvirus 1
ccuagggcgggg

SEQ ID NO: 295552 - RNA, 13 nt, Human herpesvirus 1
ccucagaacccac

SEQ ID NO: 295553 - RNA, 13 nt, Human herpesvirus 1
ccuccaccaacgc

SEQ ID NO: 295554 - RNA, 20 nt, Human herpesvirus 1
ccuccacgucgaaggcuuuu

SEQ ID NO: 295555 - RNA, 18 nt, Human herpesvirus 1
ccucccaauaaaaaaaga

SEQ ID NO: 295556 - RNA, 16 nt, Human herpesvirus 1
ccuccuggacuuugag

SEQ ID NO: 295557 - RNA, 13 nt, Human herpesvirus 1
ccucgagaucccc

SEQ ID NO: 295558 - RNA, 16 nt, Human herpesvirus 1
ccucgcgugcgugggg

SEQ ID NO: 295559 - RNA, 15 nt, Human herpesvirus 1
ccucguguggaugaa

SEQ ID NO: 295560 - RNA, 15 nt, Human herpesvirus 1
ccucguucugcugca

SEQ ID NO: 295561 - RNA, 14 nt, Human herpesvirus 1
ccugauccgcggcg

SEQ ID NO: 295562 - RNA, 19 nt, Human herpesvirus 1
ccugauguggcugcuccgc

SEQ ID NO: 295563 - RNA, 13 nt, Human herpesvirus 1
ccugcggccaaca

SEQ ID NO: 295564 - RNA, 20 nt, Human herpesvirus 1
ccugcgguccggagccgcgc

SEQ ID NO: 295565 - RNA, 19 nt, Human herpesvirus 1
ccuggcgcccccacccucg

SEQ ID NO: 295566 - RNA, 22 nt, Human herpesvirus 1
ccugggucuuccgcggagcucc

SEQ ID NO: 295567 - RNA, 19 nt, Human herpesvirus 1
ccuggguuggcgucgggac

SEQ ID NO: 295568 - RNA, 23 nt, Human herpesvirus 1
ccugucuuggggcccacccaccc

SEQ ID NO: 295569 - RNA, 14 nt, Human herpesvirus 1
ccugugagaccagc

SEQ ID NO: 295570 - RNA, 15 nt, Human herpesvirus 1
ccuuaaccgcuggcu

SEQ ID NO: 295571 - RNA, 20 nt, Human herpesvirus 1
ccuucgagggucucguucag

SEQ ID NO: 295572 - RNA, 15 nt, Human herpesvirus 1
ccuugggagagccau

SEQ ID NO: 295573 - RNA, 23 nt, Human herpesvirus 1
ccuuugggcgggaggaagccaca

SEQ ID NO: 295574 - RNA, 18 nt, Human herpesvirus 1
ccuuuugcacuaugacag

SEQ ID NO: 295575 - RNA, 18 nt, Human herpesvirus 1
cgaacaucuugagggggg

SEQ ID NO: 295576 - RNA, 15 nt, Human herpesvirus 1
cgacaaacggugaau

SEQ ID NO: 295577 - RNA, 14 nt, Human herpesvirus 1
cgacacucacagau

SEQ ID NO: 295578 - RNA, 13 nt, Human herpesvirus 1
cgacaucuugucg

SEQ ID NO: 295579 - RNA, 13 nt, Human herpesvirus 1
cgaccaucacccg

SEQ ID NO: 295580 - RNA, 20 nt, Human herpesvirus 1
cgacccaccaauaaaauuau

SEQ ID NO: 295581 - RNA, 11 nt, Human herpesvirus 1
cgacccagaug

SEQ ID NO: 295582 - RNA, 16 nt, Human herpesvirus 1
cgaccggguucccccg

SEQ ID NO: 295583 - RNA, 16 nt, Human herpesvirus 1
cgacgacggacggcca

SEQ ID NO: 295584 - RNA, 14 nt, Human herpesvirus 1
cgacggacggccac

SEQ ID NO: 295585 - RNA, 16 nt, Human herpesvirus 1
cgagagcgcgggaccg

SEQ ID NO: 295586 - RNA, 17 nt, Human herpesvirus 1
cgagcacauacauuaca

SEQ ID NO: 295587 - RNA, 14 nt, Human herpesvirus 1
cgagggcgagcuca

SEQ ID NO: 295588 - RNA, 21 nt, Human herpesvirus 1
cgagggcgagcucagcuuuua

SEQ ID NO: 295589 - RNA, 23 nt, Human herpesvirus 1
cgagggcgcuuggucgggaggcc

SEQ ID NO: 295590 - RNA, 12 nt, Human herpesvirus 1
cgaggggcggga

SEQ ID NO: 295591 - RNA, 19 nt, Human herpesvirus 1
cgaggggcgggagggggcg

SEQ ID NO: 295592 - RNA, 15 nt, Human herpesvirus 1
cgaguucccccggca

SEQ ID NO: 295593 - RNA, 19 nt, Human herpesvirus 1
cgaucccccgcccccggcu

SEQ ID NO: 295594 - RNA, 20 nt, Human herpesvirus 1
cgauguggauaaaaagccag

SEQ ID NO: 295595 - RNA, 15 nt, Human herpesvirus 1
cgauuauuuggugug

SEQ ID NO: 295596 - RNA, 14 nt, Human herpesvirus 1
cgauuggcaauguu

SEQ ID NO: 295597 - RNA, 19 nt, Human herpesvirus 1
cgcaccaagccgcucuccg

SEQ ID NO: 295598 - RNA, 12 nt, Human herpesvirus 1
ccacacaccagc

SEQ ID NO: 295599 - RNA, 19 nt, Human herpesvirus 1
ccacacagcccucccgacc

SEQ ID NO: 295600 - RNA, 20 nt, Human herpesvirus 1
ccacagaaacaaaaccgggu

SEQ ID NO: 295601 - RNA, 22 nt, Human herpesvirus 1
ccacagacacgguuacaguuua

SEQ ID NO: 295602 - RNA, 23 nt, Human herpesvirus 1
ccacagcuuuggguucguuccgg

SEQ ID NO: 295603 - RNA, 18 nt, Human herpesvirus 1
ccaccaaagucucugugg

SEQ ID NO: 295604 - RNA, 18 nt, Human herpesvirus 1
ccaccaauagaccagagg

SEQ ID NO: 295605 - RNA, 18 nt, Human herpesvirus 1
ccaccacugcacucccug

SEQ ID NO: 295606 - RNA, 15 nt, Human herpesvirus 1
ccacgcaaacaacac

SEQ ID NO: 295607 - RNA, 13 nt, Human herpesvirus 1
ccacgcuggguuu

SEQ ID NO: 295608 - RNA, 16 nt, Human herpesvirus 1
ccacgggagccagggc

SEQ ID NO: 295609 - RNA, 15 nt, Human herpesvirus 1
ccacgggggggagca

SEQ ID NO: 295610 - RNA, 17 nt, Human herpesvirus 1
ccacguguagccuggau

SEQ ID NO: 295611 - RNA, 20 nt, Human herpesvirus 1
ccacguuucggcguguguuu

SEQ ID NO: 295612 - RNA, 21 nt, Human herpesvirus 1
ccagaauaaugaccaccacaa

SEQ ID NO: 295613 - RNA, 17 nt, Human herpesvirus 1
ccagaccggcaccaccg

SEQ ID NO: 295614 - RNA, 22 nt, Human herpesvirus 1
ccagacgcacagcgagggaccc

SEQ ID NO: 295615 - RNA, 15 nt, Human herpesvirus 1
ccagaggcgcgcgca

SEQ ID NO: 295616 - RNA, 19 nt, Human herpesvirus 1
ccaggcggcgaacgggggc

SEQ ID NO: 295617 - RNA, 13 nt, Human herpesvirus 1
ccagggaccuccu

SEQ ID NO: 295618 - RNA, 13 nt, Human herpesvirus 1
ccagggaggucac

SEQ ID NO: 295619 - RNA, 16 nt, Human herpesvirus 1
ccagggcugggagccc

SEQ ID NO: 295620 - RNA, 18 nt, Human herpesvirus 1
ccaggucggcgaccgcca

SEQ ID NO: 295621 - RNA, 16 nt, Human herpesvirus 1
ccaggucuugccgugg

SEQ ID NO: 295622 - RNA, 20 nt, Human herpesvirus 1
ccaguaacaugcgcacguga

SEQ ID NO: 295623 - RNA, 23 nt, Human herpesvirus 1
ccaucaucugagagacgaacaaa

SEQ ID NO: 295624 - RNA, 22 nt, Human herpesvirus 1
ccauccagcauguuuuugagaa

SEQ ID NO: 295625 - RNA, 13 nt, Human herpesvirus 1
ccaucccggguua

SEQ ID NO: 295626 - RNA, 13 nt, Human herpesvirus 1
ccaugaccucucg

SEQ ID NO: 295627 - RNA, 20 nt, Human herpesvirus 1
ccaugauaaacugagaguua

SEQ ID NO: 295628 - RNA, 14 nt, Human herpesvirus 1
ccaugguaccaaag

SEQ ID NO: 295629 - RNA, 15 nt, Human herpesvirus 1
ccaugguaccaaaga

SEQ ID NO: 295630 - RNA, 20 nt, Human herpesvirus 1
ccauuuacguggcuggguuu

SEQ ID NO: 295631 - RNA, 11 nt, Human herpesvirus 1
cccaaagcccu

SEQ ID NO: 295632 - RNA, 14 nt, Human herpesvirus 1
cccaacuccagacc

SEQ ID NO: 295633 - RNA, 22 nt, Human herpesvirus 1
cccaauaaacguauaucgcuac

SEQ ID NO: 295634 - RNA, 14 nt, Human herpesvirus 1
cccacccacccacu

SEQ ID NO: 295635 - RNA, 13 nt, Human herpesvirus 1
cccacgugaucag

SEQ ID NO: 295636 - RNA, 19 nt, Human herpesvirus 1
cccacuggggucuggguug

SEQ ID NO: 295637 - RNA, 21 nt, Human herpesvirus 1
cccagccuuuaacuacauuaa

SEQ ID NO: 295638 - RNA, 22 nt, Human herpesvirus 1
cccaguaacaugcgcacgugau

SEQ ID NO: 295639 - RNA, 16 nt, Human herpesvirus 1
cccauaauaaaccucu

SEQ ID NO: 295640 - RNA, 23 nt, Human herpesvirus 1
cccaucccgaggccccacgucgg

SEQ ID NO: 295641 - RNA, 21 nt, Human herpesvirus 1
cccaucgccgcggcucccggc

SEQ ID NO: 295642 - RNA, 20 nt, Human herpesvirus 1
cccaucuacguugcggggcg

SEQ ID NO: 295643 - RNA, 11 nt, Human herpesvirus 1
cccauggguug

SEQ ID NO: 295644 - RNA, 17 nt, Human herpesvirus 1
cccauuaucccauuccu

SEQ ID NO: 295645 - RNA, 21 nt, Human herpesvirus 1
ccccacgggcgccacgguggu

SEQ ID NO: 295646 - RNA, 20 nt, Human herpesvirus 1
ccccacggucagucugguau

SEQ ID NO: 295647 - RNA, 21 nt, Human herpesvirus 1
ccccaguggguuuugcggacc

SEQ ID NO: 295648 - RNA, 20 nt, Human herpesvirus 1
ccccauaucgcuucccgacc

SEQ ID NO: 295649 - RNA, 18 nt, Human herpesvirus 1
cccccgggcuacacggcc

SEQ ID NO: 295650 - RNA, 13 nt, Human herpesvirus 1
cccccgucugggu

SEQ ID NO: 295651 - RNA, 14 nt, Human herpesvirus 1
cccccguguuccca

SEQ ID NO: 295652 - RNA, 13 nt, Human herpesvirus 1
cccccuccccccg

SEQ ID NO: 295653 - RNA, 16 nt, Human herpesvirus 1
ccccgaacccugcggu

SEQ ID NO: 295654 - RNA, 19 nt, Human herpesvirus 1
ccccgcccuuccuuggggu

SEQ ID NO: 295655 - RNA, 12 nt, Human herpesvirus 1
ccccggccccca

SEQ ID NO: 295656 - RNA, 23 nt, Human herpesvirus 1
ccccggguuccgcgaccaccccg

SEQ ID NO: 295657 - RNA, 21 nt, Human herpesvirus 1
ccccuguuugucgacgagauu

SEQ ID NO: 295658 - RNA, 20 nt, Human herpesvirus 1
ccccuuacaguuccaccgaa

SEQ ID NO: 295659 - RNA, 20 nt, Human herpesvirus 1
cccgacgcgucauaugcaaa

SEQ ID NO: 295660 - RNA, 23 nt, Human herpesvirus 1
cccgagaaccuagggaacccaga

SEQ ID NO: 295661 - RNA, 14 nt, Human herpesvirus 1
cccgaggacgccua

SEQ ID NO: 295662 - RNA, 20 nt, Human herpesvirus 1
cccgauggcccuccaggcug

SEQ ID NO: 295663 - RNA, 14 nt, Human herpesvirus 1
cccgcaaccaggag

SEQ ID NO: 295664 - RNA, 12 nt, Human herpesvirus 1
cccgcccaccgg

SEQ ID NO: 295665 - RNA, 13 nt, Human herpesvirus 1
cccgcccccggca

SEQ ID NO: 295666 - RNA, 19 nt, Human herpesvirus 1
cgcgaugaggggcaccaga

SEQ ID NO: 295667 - RNA, 16 nt, Human herpesvirus 1
cgcgccguuggccccc

SEQ ID NO: 295668 - RNA, 20 nt, Human herpesvirus 1
cgcgcgauagagucgacgac

SEQ ID NO: 295669 - RNA, 15 nt, Human herpesvirus 1
cgcgcucaaccaccg

SEQ ID NO: 295670 - RNA, 12 nt, Human herpesvirus 1
cgcgcuccuccc

SEQ ID NO: 295671 - RNA, 23 nt, Human herpesvirus 1
cgcgcucgucacccgacacugaa

SEQ ID NO: 295672 - RNA, 19 nt, Human herpesvirus 1
cgcggcuugcgggacugaa

SEQ ID NO: 295673 - RNA, 17 nt, Human herpesvirus 1
cgcgggccucgugggca

SEQ ID NO: 295674 - RNA, 15 nt, Human herpesvirus 1
cgcgggcggccaugc

SEQ ID NO: 295675 - RNA, 19 nt, Human herpesvirus 1
cgcggggacacgauuccgg

SEQ ID NO: 295676 - RNA, 14 nt, Human herpesvirus 1
cgcgucauaugcaa

SEQ ID NO: 295677 - RNA, 12 nt, Human herpesvirus 1
cgcgucccugac

SEQ ID NO: 295678 - RNA, 15 nt, Human herpesvirus 1
cgcgugcggcuggcc

SEQ ID NO: 295679 - RNA, 13 nt, Human herpesvirus 1
cgcucaaccaccg

SEQ ID NO: 295680 - RNA, 11 nt, Human herpesvirus 1
cgcucagggcg

SEQ ID NO: 295681 - RNA, 12 nt, Human herpesvirus 1
cgcuccugaugu

SEQ ID NO: 295682 - RNA, 23 nt, Human herpesvirus 1
cgcucuugggguugacgcugggg

SEQ ID NO: 295683 - RNA, 15 nt, Human herpesvirus 1
cgcugacaaccaccu

SEQ ID NO: 295684 - RNA, 20 nt, Human herpesvirus 1
cgcugcuccgccuggccugc

SEQ ID NO: 295685 - RNA, 14 nt, Human herpesvirus 1
cgcuuguccccgaa

SEQ ID NO: 295686 - RNA, 12 nt, Human herpesvirus 1
cgcuugugagac

SEQ ID NO: 295687 - RNA, 13 nt, Human herpesvirus 1
cggaaccaaacag

SEQ ID NO: 295688 - RNA, 11 nt, Human herpesvirus 1
cggaaccauag

SEQ ID NO: 295689 - RNA, 12 nt, Human herpesvirus 1
cggaccacgagc

SEQ ID NO: 295690 - RNA, 17 nt, Human herpesvirus 1
cggacgcgcggcgcgag

SEQ ID NO: 295691 - RNA, 13 nt, Human herpesvirus 1
cggacucacggcc

SEQ ID NO: 295692 - RNA, 15 nt, Human herpesvirus 1
cggauaacgcacuga

SEQ ID NO: 295693 - RNA, 20 nt, Human herpesvirus 1
cggauucgcucucggugcgu

SEQ ID NO: 295694 - RNA, 18 nt, Human herpesvirus 1
cggcaauaaaaagacaga

SEQ ID NO: 295695 - RNA, 11 nt, Human herpesvirus 1
cggcaccaccg

SEQ ID NO: 295696 - RNA, 21 nt, Human herpesvirus 1
cggcaccaccggggccugaac

SEQ ID NO: 295697 - RNA, 13 nt, Human herpesvirus 1
cggcauaugcaaa

SEQ ID NO: 295698 - RNA, 14 nt, Human herpesvirus 1
cggcauaugcaaau

SEQ ID NO: 295699 - RNA, 16 nt, Human herpesvirus 1
cggcaugcaccccaga

SEQ ID NO: 295700 - RNA, 16 nt, Human herpesvirus 1
cggccacuggccggga

SEQ ID NO: 295701 - RNA, 14 nt, Human herpesvirus 1
cggcccgugcgggu

SEQ ID NO: 295702 - RNA, 17 nt, Human herpesvirus 1
cggccgcgacccaggcg

SEQ ID NO: 295703 - RNA, 17 nt, Human herpesvirus 1
cggccggauucccgggc

SEQ ID NO: 295704 - RNA, 20 nt, Human herpesvirus 1
cggccugggucuuccgcgga

SEQ ID NO: 295705 - RNA, 14 nt, Human herpesvirus 1
cggcgaccgccagc

SEQ ID NO: 295706 - RNA, 16 nt, Human herpesvirus 1
cggcgaccgccagccg

SEQ ID NO: 295707 - RNA, 19 nt, Human herpesvirus 1
cggcgcaucuucggcgggu

SEQ ID NO: 295708 - RNA, 20 nt, Human herpesvirus 1
cggcgccgcccgccccuggc

SEQ ID NO: 295709 - RNA, 16 nt, Human herpesvirus 1
cggcggacccccggag

SEQ ID NO: 295710 - RNA, 18 nt, Human herpesvirus 1
cggcggacccccggaggc

SEQ ID NO: 295711 - RNA, 20 nt, Human herpesvirus 1
cggcgggguuauaggccacg

SEQ ID NO: 295712 - RNA, 22 nt, Human herpesvirus 1
cggcgguugaguccggaacacc

SEQ ID NO: 295713 - RNA, 14 nt, Human herpesvirus 1
cggcgugggcgcgu

SEQ ID NO: 295714 - RNA, 11 nt, Human herpesvirus 1
cgggagggcgu

SEQ ID NO: 295715 - RNA, 18 nt, Human herpesvirus 1
cgggcaccacacaccagc

SEQ ID NO: 295716 - RNA, 19 nt, Human herpesvirus 1
cgggcaccacacaccagcg

SEQ ID NO: 295717 - RNA, 14 nt, Human herpesvirus 1
cgggccaaccaaga

SEQ ID NO: 295718 - RNA, 21 nt, Human herpesvirus 1
cgggccacgccacccugcgcg

SEQ ID NO: 295719 - RNA, 17 nt, Human herpesvirus 1
cgggccgccucgggggc

SEQ ID NO: 295720 - RNA, 18 nt, Human herpesvirus 1
cgggccgucguuggucag

SEQ ID NO: 295721 - RNA, 21 nt, Human herpesvirus 1
cgggccgugauuccucuccgc

SEQ ID NO: 295722 - RNA, 18 nt, Human herpesvirus 1
cgggccguguccccggag

SEQ ID NO: 295723 - RNA, 22 nt, Human herpesvirus 1
cgggcuacccucacuaucgagg

SEQ ID NO: 295724 - RNA, 15 nt, Human herpesvirus 1
cggggaccuugcccc

SEQ ID NO: 295725 - RNA, 18 nt, Human herpesvirus 1
cggggcagagccgcccgu

SEQ ID NO: 295726 - RNA, 23 nt, Human herpesvirus 1
cggggccugaacaaacaaaccac

SEQ ID NO: 295727 - RNA, 22 nt, Human herpesvirus 1
cggggcggggguguccgggggc

SEQ ID NO: 295728 - RNA, 22 nt, Human herpesvirus 1
cgggggcccugccacuccggcg

SEQ ID NO: 295729 - RNA, 19 nt, Human herpesvirus 1
cgggguugggaugggaccu

SEQ ID NO: 295730 - RNA, 15 nt, Human herpesvirus 1
cggguagcuuuacaa

SEQ ID NO: 295731 - RNA, 12 nt, Human herpesvirus 1
cggguccgcggg

SEQ ID NO: 295732 - RNA, 18 nt, Human herpesvirus 1
cgggugaaggcccagggc

SEQ ID NO: 295733 - RNA, 16 nt, Human herpesvirus 1
cgguaaacaccaacuc

SEQ ID NO: 295734 - RNA, 16 nt, Human herpesvirus 1
cgguaaucauaaccac

SEQ ID NO: 295735 - RNA, 19 nt, Human herpesvirus 1
cggucgaagccuacuacuc

SEQ ID NO: 295736 - RNA, 17 nt, Human herpesvirus 1
cgguuacucggcccccg

SEQ ID NO: 295737 - RNA, 13 nt, Human herpesvirus 1
cguaaacaccagg

SEQ ID NO: 295738 - RNA, 16 nt, Human herpesvirus 1
cguaacggcauaugca

SEQ ID NO: 295739 - RNA, 17 nt, Human herpesvirus 1
cguaacggcauaugcaa

SEQ ID NO: 295740 - RNA, 14 nt, Human herpesvirus 1
cguaagggggccug

SEQ ID NO: 295741 - RNA, 18 nt, Human herpesvirus 1
cguauaacgggggccaug

SEQ ID NO: 295742 - RNA, 22 nt, Human herpesvirus 1
cguauacagaacauuguuuugg

SEQ ID NO: 295743 - RNA, 11 nt, Human herpesvirus 1
cgucauaugca

SEQ ID NO: 295744 - RNA, 13 nt, Human herpesvirus 1
cgucauaugcaaa

SEQ ID NO: 295745 - RNA, 14 nt, Human herpesvirus 1
cgucauaugcaaau

SEQ ID NO: 295746 - RNA, 19 nt, Human herpesvirus 1
cguccauugacacacaagg

SEQ ID NO: 295747 - RNA, 18 nt, Human herpesvirus 1
cgucccagaauuuggcca

SEQ ID NO: 295748 - RNA, 21 nt, Human herpesvirus 1
cguccgccgagucuucggggc

SEQ ID NO: 295749 - RNA, 17 nt, Human herpesvirus 1
cguccgguuggccgcgc

SEQ ID NO: 295750 - RNA, 12 nt, Human herpesvirus 1
gccgccacgcgc

SEQ ID NO: 295751 - RNA, 22 nt, Human herpesvirus 1
gccgccagcgcggcggggcccg

SEQ ID NO: 295752 - RNA, 16 nt, Human herpesvirus 1
gccgcccguugcaggg

SEQ ID NO: 295753 - RNA, 20 nt, Human herpesvirus 1
gccgcggguauagaucgacg

SEQ ID NO: 295754 - RNA, 18 nt, Human herpesvirus 1
gccgcgguuuaccgccac

SEQ ID NO: 295755 - RNA, 14 nt, Human herpesvirus 1
gccgguauggggca

SEQ ID NO: 295756 - RNA, 24 nt, Human herpesvirus 1
gccggugguccgccuagccgcagc

SEQ ID NO: 295757 - RNA, 13 nt, Human herpesvirus 1
gccguaacccaac

SEQ ID NO: 295758 - RNA, 18 nt, Human herpesvirus 1
gccguaacccaaccaaac

SEQ ID NO: 295759 - RNA, 21 nt, Human herpesvirus 1
gccgucgggcacguacacggg

SEQ ID NO: 295760 - RNA, 16 nt, Human herpesvirus 1
gccgucgggcguccca

SEQ ID NO: 295761 - RNA, 20 nt, Human herpesvirus 1
gccgugcgauggacaccgca

SEQ ID NO: 295762 - RNA, 21 nt, Human herpesvirus 1
gccgugcggaguuaccugguc

SEQ ID NO: 295763 - RNA, 16 nt, Human herpesvirus 1
gccguucugucgggcg

SEQ ID NO: 295764 - RNA, 23 nt, Human herpesvirus 1
gccuaauuguccgcgcauccgac

SEQ ID NO: 295765 - RNA, 17 nt, Human herpesvirus 1
gccuccccuccaggugc

SEQ ID NO: 295766 - RNA, 17 nt, Human herpesvirus 1
gccuccgaccccagaca

SEQ ID NO: 295767 - RNA, 15 nt, Human herpesvirus 1
gccuccggggguccg

SEQ ID NO: 295768 - RNA, 19 nt, Human herpesvirus 1
gccucgagggucacaggaa

SEQ ID NO: 295769 - RNA, 20 nt, Human herpesvirus 1
gccucgagggucacaggaac

SEQ ID NO: 295770 - RNA, 22 nt, Human herpesvirus 1
gccucgguccaccgcauacucc

SEQ ID NO: 295771 - RNA, 18 nt, Human herpesvirus 1
gccucgugggcacuuucc

SEQ ID NO: 295772 - RNA, 14 nt, Human herpesvirus 1
gccucucacacagc

SEQ ID NO: 295773 - RNA, 17 nt, Human herpesvirus 1
gccugaccgcggagaaa

SEQ ID NO: 295774 - RNA, 19 nt, Human herpesvirus 1
gccuggcuauccggagaaa

SEQ ID NO: 295775 - RNA, 19 nt, Human herpesvirus 1
gccuucgccccacacagcc

SEQ ID NO: 295776 - RNA, 21 nt, Human herpesvirus 1
gccuucuuucgaaccgugguc

SEQ ID NO: 295777 - RNA, 22 nt, Human herpesvirus 1
gcgaauucggcuuaucguccca

SEQ ID NO: 295778 - RNA, 16 nt, Human herpesvirus 1
gcgacagcgcgaugag

SEQ ID NO: 295779 - RNA, 23 nt, Human herpesvirus 1
gcgaccgucgccgcgggccacgc

SEQ ID NO: 295780 - RNA, 20 nt, Human herpesvirus 1
gcgagauggccgccccggug

SEQ ID NO: 295781 - RNA, 18 nt, Human herpesvirus 1
gcgagguagauggccaua

SEQ ID NO: 295782 - RNA, 14 nt, Human herpesvirus 1
gcgaguuggcauug

SEQ ID NO: 295783 - RNA, 14 nt, Human herpesvirus 1
gcgauaucaggggc

SEQ ID NO: 295784 - RNA, 13 nt, Human herpesvirus 1
gcgauggacaccg

SEQ ID NO: 295785 - RNA, 21 nt, Human herpesvirus 1
gcgauguggauaaaaagccag

SEQ ID NO: 295786 - RNA, 15 nt, Human herpesvirus 1
gcgcaauugcggcca

SEQ ID NO: 295787 - RNA, 14 nt, Human herpesvirus 1
gcgcaugaucuccg

SEQ ID NO: 295788 - RNA, 22 nt, Human herpesvirus 1
gcgccacacucaccggcggacc

SEQ ID NO: 295789 - RNA, 21 nt, Human herpesvirus 1
gcgccaggucggcgaccgcca

SEQ ID NO: 295790 - RNA, 21 nt, Human herpesvirus 1
gcgccauggcgggacugggca

SEQ ID NO: 295791 - RNA, 17 nt, Human herpesvirus 1
gcgcccacuacaccagc

SEQ ID NO: 295792 - RNA, 13 nt, Human herpesvirus 1
gcgcccgcggcca

SEQ ID NO: 295793 - RNA, 13 nt, Human herpesvirus 1
gcgcccucgccac

SEQ ID NO: 295794 - RNA, 14 nt, Human herpesvirus 1
gcgccgccgacucc

SEQ ID NO: 295795 - RNA, 13 nt, Human herpesvirus 1
gcgccucccgggg

SEQ ID NO: 295796 - RNA, 12 nt, Human herpesvirus 1
gcgccuccgggg

SEQ ID NO: 295797 - RNA, 17 nt, Human herpesvirus 1
gcgccuccggggguccg

SEQ ID NO: 295798 - RNA, 15 nt, Human herpesvirus 1
gcgcgccgcgacacu

SEQ ID NO: 295799 - RNA, 16 nt, Human herpesvirus 1
gcgcgcucaaccaccg

SEQ ID NO: 295800 - RNA, 16 nt, Human herpesvirus 1
gcgcggaugacggccc

SEQ ID NO: 295801 - RNA, 14 nt, Human herpesvirus 1
gcgcucaaccaccg

SEQ ID NO: 295802 - RNA, 13 nt, Human herpesvirus 1
gcgcuugugagac

SEQ ID NO: 295803 - RNA, 23 nt, Human herpesvirus 1
gcggagaaacggccgaagccacg

SEQ ID NO: 295804 - RNA, 14 nt, Human herpesvirus 1
gcggaugacggccc

SEQ ID NO: 295805 - RNA, 12 nt, Human herpesvirus 1
gcggccaugccg

SEQ ID NO: 295806 - RNA, 17 nt, Human herpesvirus 1
gcggcgaacgggggccc

SEQ ID NO: 295807 - RNA, 22 nt, Human herpesvirus 1
gcggcugguccacacccagugg

SEQ ID NO: 295808 - RNA, 11 nt, Human herpesvirus 1
gcgggacugaa

SEQ ID NO: 295809 - RNA, 13 nt, Human herpesvirus 1
gcgggccccgggg

SEQ ID NO: 295810 - RNA, 13 nt, Human herpesvirus 1
gcgggcgccaugg

SEQ ID NO: 295811 - RNA, 17 nt, Human herpesvirus 1
gcgggguuauaggccac

SEQ ID NO: 295812 - RNA, 22 nt, Human herpesvirus 1
gcgggucgaaguuacaaacuga

SEQ ID NO: 295813 - RNA, 16 nt, Human herpesvirus 1
gcggguuggugcggug

SEQ ID NO: 295814 - RNA, 20 nt, Human herpesvirus 1
gcggugacgaacgcgagcga

SEQ ID NO: 295815 - RNA, 21 nt, Human herpesvirus 1
gcgguucgcgucccgcccacc

SEQ ID NO: 295816 - RNA, 13 nt, Human herpesvirus 1
gcgucauaugcaa

SEQ ID NO: 295817 - RNA, 14 nt, Human herpesvirus 1
gcgucauaugcaaa

SEQ ID NO: 295818 - RNA, 15 nt, Human herpesvirus 1
gcgucauaugcaaau

SEQ ID NO: 295819 - RNA, 21 nt, Human herpesvirus 1
gcguccgccaaauaaagccac

SEQ ID NO: 295820 - RNA, 14 nt, Human herpesvirus 1
gcgucgcugugaug

SEQ ID NO: 295821 - RNA, 24 nt, Human herpesvirus 1
gcgucugguuguguguguaugugg

SEQ ID NO: 295822 - RNA, 20 nt, Human herpesvirus 1
gcguuguggcggucggccaa

SEQ ID NO: 295823 - RNA, 15 nt, Human herpesvirus 1
gcguuugcacaacac

SEQ ID NO: 295824 - RNA, 20 nt, Human herpesvirus 1
gcuaauuaaauacaugccac

SEQ ID NO: 295825 - RNA, 17 nt, Human herpesvirus 1
gcucaucgcgacccugu

SEQ ID NO: 295826 - RNA, 15 nt, Human herpesvirus 1
gcucccucagcaucc

SEQ ID NO: 295827 - RNA, 12 nt, Human herpesvirus 1
gcucgaccucuc

SEQ ID NO: 295828 - RNA, 14 nt, Human herpesvirus 1
gcucgagaugggcc

SEQ ID NO: 295829 - RNA, 21 nt, Human herpesvirus 1
gcucgcucgggggggccuccg

SEQ ID NO: 295830 - RNA, 21 nt, Human herpesvirus 1
gcucgucgggguggcacagaa

SEQ ID NO: 295831 - RNA, 14 nt, Human herpesvirus 1
gcugacaaccaccu

SEQ ID NO: 295832 - RNA, 16 nt, Human herpesvirus 1
gcuggccgcucggugg

SEQ ID NO: 295833 - RNA, 19 nt, Human herpesvirus 1
gcuucagcgcgaacgacca

SEQ ID NO: 295834 - RNA, 21 nt, Human herpesvirus 1
gcuucagcgcgaacgaccaac

SEQ ID NO: 295835 - RNA, 20 nt, Human herpesvirus 1
gcuugccggucggcgggccc

SEQ ID NO: 295836 - RNA, 16 nt, Human herpesvirus 1
ggaaacccguccgggu

SEQ ID NO: 295837 - RNA, 17 nt, Human herpesvirus 1
ggaaccaugaccucucg

SEQ ID NO: 295838 - RNA, 18 nt, Human herpesvirus 1
ggacgggcucgccagcga

SEQ ID NO: 295839 - RNA, 14 nt, Human herpesvirus 1
ggacucacggccgg

SEQ ID NO: 295840 - RNA, 23 nt, Human herpesvirus 1
ggacuccgcuugcguggccgugc

SEQ ID NO: 295841 - RNA, 14 nt, Human herpesvirus 1
ggagaaacagcaca

SEQ ID NO: 295842 - RNA, 21 nt, Human herpesvirus 1
ggagacgggcgguucgccgcc

SEQ ID NO: 295843 - RNA, 17 nt, Human herpesvirus 1
ggagaucacgccuuaau

SEQ ID NO: 295844 - RNA, 20 nt, Human herpesvirus 1
ggagcgcucuugucucaggg

SEQ ID NO: 295845 - RNA, 21 nt, Human herpesvirus 1
ggagcuuucuuccggccucga

SEQ ID NO: 295846 - RNA, 12 nt, Human herpesvirus 1
ggaggacggcca

SEQ ID NO: 295847 - RNA, 18 nt, Human herpesvirus 1
ggaggcccccauccagca

SEQ ID NO: 295848 - RNA, 22 nt, Human herpesvirus 1
ggaggucguuuucaugcccggu

SEQ ID NO: 295849 - RNA, 15 nt, Human herpesvirus 1
ggagugggggugcgu

SEQ ID NO: 295850 - RNA, 17 nt, Human herpesvirus 1
ggauaaaaagccagcgc

SEQ ID NO: 295851 - RNA, 16 nt, Human herpesvirus 1
ggauggccugggcaug

SEQ ID NO: 295852 - RNA, 20 nt, Human herpesvirus 1
ggauuuggggcgcuccugau

SEQ ID NO: 295853 - RNA, 18 nt, Human herpesvirus 1
gucccguuaccaagacca

SEQ ID NO: 295854 - RNA, 23 nt, Human herpesvirus 1
gucccguuaccaagaccaaccca

SEQ ID NO: 295855 - RNA, 23 nt, Human herpesvirus 1
guccuuuuggguuucacugaaac

SEQ ID NO: 295856 - RNA, 16 nt, Human herpesvirus 1
gucgacccggggcccc

SEQ ID NO: 295857 - RNA, 20 nt, Human herpesvirus 1
gucgaccgcgcccucgccac

SEQ ID NO: 295858 - RNA, 15 nt, Human herpesvirus 1
gucgcucgucagggc

SEQ ID NO: 295859 - RNA, 14 nt, Human herpesvirus 1
gucgggaggccaca

SEQ ID NO: 295860 - RNA, 17 nt, Human herpesvirus 1
gucgggguggcacagaa

SEQ ID NO: 295861 - RNA, 19 nt, Human herpesvirus 1
gucgucgggcgccaaagcc

SEQ ID NO: 295862 - RNA, 15 nt, Human herpesvirus 1
gucguuggucagggc

SEQ ID NO: 295863 - RNA, 20 nt, Human herpesvirus 1
gucuauaucucugggcgggc

SEQ ID NO: 295864 - RNA, 21 nt, Human herpesvirus 1
gucucauugugauucuuguca

SEQ ID NO: 295865 - RNA, 16 nt, Human herpesvirus 1
gucuccgaaagccacc

SEQ ID NO: 295866 - RNA, 21 nt, Human herpesvirus 1
gucuccgaaagccaccaauag

SEQ ID NO: 295867 - RNA, 20 nt, Human herpesvirus 1
gucuguuggggacacugggu

SEQ ID NO: 295868 - RNA, 18 nt, Human herpesvirus 1
gugacacccuaccccagu

SEQ ID NO: 295869 - RNA, 13 nt, Human herpesvirus 1
gugacguuugaua

SEQ ID NO: 295870 - RNA, 20 nt, Human herpesvirus 1
gugccaauaaacccccaaac

SEQ ID NO: 295871 - RNA, 15 nt, Human herpesvirus 1
gugccaucacggcca

SEQ ID NO: 295872 - RNA, 17 nt, Human herpesvirus 1
gugccugacgccugcca

SEQ ID NO: 295873 - RNA, 16 nt, Human herpesvirus 1
gugcguugcacguagc

SEQ ID NO: 295874 - RNA, 16 nt, Human herpesvirus 1
guggauaaaaagccag

SEQ ID NO: 295875 - RNA, 17 nt, Human herpesvirus 1
guggauaaaaagccagc

SEQ ID NO: 295876 - RNA, 18 nt, Human herpesvirus 1
guggccgacaacugccug

SEQ ID NO: 295877 - RNA, 20 nt, Human herpesvirus 1
guggcgcgaggggggguccg

SEQ ID NO: 295878 - RNA, 20 nt, Human herpesvirus 1
gugguuauaugcacuuccua

SEQ ID NO: 295879 - RNA, 19 nt, Human herpesvirus 1
guguaugucuggugugugg

SEQ ID NO: 295880 - RNA, 22 nt, Human herpesvirus 1
gugucccgacauuaaccaccug

SEQ ID NO: 295881 - RNA, 21 nt, Human herpesvirus 1
gugucugggaauagagcagaa

SEQ ID NO: 295882 - RNA, 21 nt, Human herpesvirus 1
gugugaguuuguggacccaaa

SEQ ID NO: 295883 - RNA, 22 nt, Human herpesvirus 1
guguggcgcgaggggggguccg

SEQ ID NO: 295884 - RNA, 21 nt, Human herpesvirus 1
guguuauuuauuaacaucaaa

SEQ ID NO: 295885 - RNA, 9 nt, Human herpesvirus 1
guguucaca

SEQ ID NO: 295886 - RNA, 23 nt, Human herpesvirus 1
guguucguggaaccaugaccucu

SEQ ID NO: 295887 - RNA, 20 nt, Human herpesvirus 1
guguuguccuucuuugcuca

SEQ ID NO: 295888 - RNA, 20 nt, Human herpesvirus 1
guuaaaccucuggucucaua

SEQ ID NO: 295889 - RNA, 13 nt, Human herpesvirus 1
guuauaggccacg

SEQ ID NO: 295890 - RNA, 17 nt, Human herpesvirus 1
guuauaggccacgcagu

SEQ ID NO: 295891 - RNA, 22 nt, Human herpesvirus 1
guucccaccaacgucuccucca

SEQ ID NO: 295892 - RNA, 15 nt, Human herpesvirus 1
guugauaugcaucuc

SEQ ID NO: 295893 - RNA, 12 nt, Human herpesvirus 1
guuggucagggc

SEQ ID NO: 295894 - RNA, 14 nt, Human herpesvirus 1
guuguaggcgguaa

SEQ ID NO: 295895 - RNA, 20 nt, Human herpesvirus 1
guuucagggguuuuuucauc

SEQ ID NO: 295896 - RNA, 11 nt, Human herpesvirus 1
guuuccuuugc

SEQ ID NO: 295897 - RNA, 15 nt, Human herpesvirus 1
guuugcacaacacaa

SEQ ID NO: 295898 - RNA, 22 nt, Human herpesvirus 1
guuuguggggucggaaccauag

SEQ ID NO: 295899 - RNA, 23 nt, Human herpesvirus 1
guuuuaaucaauaaaagaccaca

SEQ ID NO: 295900 - RNA, 16 nt, Human herpesvirus 1
guuuucuuugugccug

SEQ ID NO: 295901 - RNA, 14 nt, Human herpesvirus 1
guuuugucacggga

SEQ ID NO: 295902 - RNA, 20 nt, Human herpesvirus 1
uaaaaaaaaacucaggggau

SEQ ID NO: 295903 - RNA, 18 nt, Human herpesvirus 1
uaaaaaaagaacauacac

SEQ ID NO: 295904 - RNA, 12 nt, Human herpesvirus 1
uaaaaaccaaaa

SEQ ID NO: 295905 - RNA, 11 nt, Human herpesvirus 1
uaaaaagccag

SEQ ID NO: 295906 - RNA, 15 nt, Human herpesvirus 1
uaaaaauaaccaaaa

SEQ ID NO: 295907 - RNA, 16 nt, Human herpesvirus 1
uaaaacggaaccaaac

SEQ ID NO: 295908 - RNA, 21 nt, Human herpesvirus 1
uaaaccagguaauaccaaaua

SEQ ID NO: 295909 - RNA, 18 nt, Human herpesvirus 1
uaaacggcaacaaccuga

SEQ ID NO: 295910 - RNA, 22 nt, Human herpesvirus 1
uaaacggcaacaaccugauuaa

SEQ ID NO: 295911 - RNA, 23 nt, Human herpesvirus 1
uaaacuugguauugcccaacacu

SEQ ID NO: 295912 - RNA, 19 nt, Human herpesvirus 1
uaaagacgguuaaugguua

SEQ ID NO: 295913 - RNA, 21 nt, Human herpesvirus 1
uaaagcaccaacagggguuca

SEQ ID NO: 295914 - RNA, 16 nt, Human herpesvirus 1
uaacacccgugguuuu

SEQ ID NO: 295915 - RNA, 20 nt, Human herpesvirus 1
uaacaugcgcacgugaugua

SEQ ID NO: 295916 - RNA, 12 nt, Human herpesvirus 1
uaacgcacugaa

SEQ ID NO: 295917 - RNA, 14 nt, Human herpesvirus 1
uaacggcauaugca

SEQ ID NO: 295918 - RNA, 15 nt, Human herpesvirus 1
uaacggcauaugcaa

SEQ ID NO: 295919 - RNA, 16 nt, Human herpesvirus 1
uaacggcauaugcaaa

SEQ ID NO: 295920 - RNA, 19 nt, Human herpesvirus 1
uaacugucuggagacccua

SEQ ID NO: 295921 - RNA, 19 nt, Human herpesvirus 1
uaagaagcacauccaggua

SEQ ID NO: 295922 - RNA, 22 nt, Human herpesvirus 1
uaagcgucccugggcccuggcc

SEQ ID NO: 295923 - RNA, 22 nt, Human herpesvirus 1
uaauaaauuuuacaaacagauu

SEQ ID NO: 295924 - RNA, 21 nt, Human herpesvirus 1
uaauaucuauauaguuugguc

SEQ ID NO: 295925 - RNA, 12 nt, Human herpesvirus 1
uacacacaggaa

SEQ ID NO: 295926 - RNA, 14 nt, Human herpesvirus 1
uacaccggccaccc

SEQ ID NO: 295927 - RNA, 17 nt, Human herpesvirus 1
uacaggggccauguugg

SEQ ID NO: 295928 - RNA, 21 nt, Human herpesvirus 1
uaccaacacaacggcaugccu

SEQ ID NO: 295929 - RNA, 23 nt, Human herpesvirus 1
uaccacaggugggugcuuuggaa

SEQ ID NO: 295930 - RNA, 15 nt, Human herpesvirus 1
uaccgccgacgccgu

SEQ ID NO: 295931 - RNA, 19 nt, Human herpesvirus 1
uagagacagccgaucucca

SEQ ID NO: 295932 - RNA, 21 nt, Human herpesvirus 1
uagauaggcaggcguuucaga

SEQ ID NO: 295933 - RNA, 12 nt, Human herpesvirus 1
uagcaccaggga

SEQ ID NO: 295934 - RNA, 11 nt, Human herpesvirus 1
uagcauaccug

SEQ ID NO: 295935 - RNA, 14 nt, Human herpesvirus 1
uagccuccccgggc

SEQ ID NO: 295936 - RNA, 15 nt, Human herpesvirus 1
uagccuccccgggcc

SEQ ID NO: 295937 - RNA, 13 nt, Human herpesvirus 1
uagcgcggccgug

SEQ ID NO: 295938 - RNA, 20 nt, Human herpesvirus 1
uagcguccgggcgcuuggca

SEQ ID NO: 295939 - RNA, 22 nt, Human herpesvirus 1
uaggaggugcugcgacacucga

SEQ ID NO: 295940 - RNA, 15 nt, Human herpesvirus 1
uaggccgggacagca

SEQ ID NO: 295941 - RNA, 20 nt, Human herpesvirus 1
uaguggaggaagaccugcuu

SEQ ID NO: 295942 - RNA, 23 nt, Human herpesvirus 1
uaucccacucccuugaauaaaca

SEQ ID NO: 295943 - RNA, 23 nt, Human herpesvirus 1
uaucuaguugauaugcaucucug

SEQ ID NO: 295944 - RNA, 18 nt, Human herpesvirus 1
uaucuuggcguacaauac

SEQ ID NO: 295945 - RNA, 14 nt, Human herpesvirus 1
uaugugauaugcua

SEQ ID NO: 295946 - RNA, 18 nt, Human herpesvirus 1
uauguuuaugggauuugg

SEQ ID NO: 295947 - RNA, 19 nt, Human herpesvirus 1
uauuaaaacggaaccaaac

SEQ ID NO: 295948 - RNA, 16 nt, Human herpesvirus 1
uauuaacucacagggg

SEQ ID NO: 295949 - RNA, 15 nt, Human herpesvirus 1
uauugacccaaaaca

SEQ ID NO: 295950 - RNA, 14 nt, Human herpesvirus 1
uauugggcgcucac

SEQ ID NO: 295951 - RNA, 15 nt, Human herpesvirus 1
uauuuacaacaaacc

SEQ ID NO: 295952 - RNA, 20 nt, Human herpesvirus 1
uauuuauuaacaucaaacac

SEQ ID NO: 295953 - RNA, 14 nt, Human herpesvirus 1
uauuuuggggacau

SEQ ID NO: 295954 - RNA, 15 nt, Human herpesvirus 1
ucaaaggcuagcaaa

SEQ ID NO: 295955 - RNA, 19 nt, Human herpesvirus 1
ucaaaggcuagcaaaugaa

SEQ ID NO: 295956 - RNA, 19 nt, Human herpesvirus 1
ucacacagcaucccccgcc

SEQ ID NO: 295957 - RNA, 21 nt, Human herpesvirus 1
ucaccccaaucccccccgacc

SEQ ID NO: 295958 - RNA, 19 nt, Human herpesvirus 1
ucaccccugucagccgcgc

SEQ ID NO: 295959 - RNA, 17 nt, Human herpesvirus 1
ucaccgguuuccgcgac

SEQ ID NO: 295960 - RNA, 22 nt, Human herpesvirus 1
ucaucccaccccccaucuuguc

SEQ ID NO: 295961 - RNA, 14 nt, Human herpesvirus 1
uccaaaauaugccu

SEQ ID NO: 295962 - RNA, 21 nt, Human herpesvirus 1
uccacccccgcccgggucccc

SEQ ID NO: 295963 - RNA, 19 nt, Human herpesvirus 1
cgucgacucuaucgcgcgc

SEQ ID NO: 295964 - RNA, 19 nt, Human herpesvirus 1
cgucgggaggccacagaaa

SEQ ID NO: 295965 - RNA, 17 nt, Human herpesvirus 1
cgucgggcgccaaagcc

SEQ ID NO: 295966 - RNA, 20 nt, Human herpesvirus 1
cgucugggaccucgggcaug

SEQ ID NO: 295967 - RNA, 19 nt, Human herpesvirus 1
cgugagucacagcgaccgc

SEQ ID NO: 295968 - RNA, 20 nt, Human herpesvirus 1
cgugggagugggggugcgug

SEQ ID NO: 295969 - RNA, 17 nt, Human herpesvirus 1
cgugguccuguggagcc

SEQ ID NO: 295970 - RNA, 16 nt, Human herpesvirus 1
cguggugcgucgggcc

SEQ ID NO: 295971 - RNA, 19 nt, Human herpesvirus 1
cgugucuuucgguggaccu

SEQ ID NO: 295972 - RNA, 23 nt, Human herpesvirus 1
cguguggaggucguuuucaugcc

SEQ ID NO: 295973 - RNA, 13 nt, Human herpesvirus 1
cgugugguucaug

SEQ ID NO: 295974 - RNA, 21 nt, Human herpesvirus 1
cguuccaaggccggugucaua

SEQ ID NO: 295975 - RNA, 19 nt, Human herpesvirus 1
cguugucuccccgauggcc

SEQ ID NO: 295976 - RNA, 12 nt, Human herpesvirus 1
cguuguuuauuc

SEQ ID NO: 295977 - RNA, 16 nt, Human herpesvirus 1
cguuucugaccugcac

SEQ ID NO: 295978 - RNA, 13 nt, Human herpesvirus 1
cuacacacaggaa

SEQ ID NO: 295979 - RNA, 18 nt, Human herpesvirus 1
cuacacgacccucgagau

SEQ ID NO: 295980 - RNA, 23 nt, Human herpesvirus 1
cuacacgacccucgagauccccg

SEQ ID NO: 295981 - RNA, 15 nt, Human herpesvirus 1
cuagccgaucccucg

SEQ ID NO: 295982 - RNA, 23 nt, Human herpesvirus 1
cuaggcaucggggguugcugucc

SEQ ID NO: 295983 - RNA, 16 nt, Human herpesvirus 1
cuaguugauaugcauc

SEQ ID NO: 295984 - RNA, 16 nt, Human herpesvirus 1
cuaugcagccccgugu

SEQ ID NO: 295985 - RNA, 14 nt, Human herpesvirus 1
cuaugguacacacg

SEQ ID NO: 295986 - RNA, 21 nt, Human herpesvirus 1
cucaagcacacacgggggagc

SEQ ID NO: 295987 - RNA, 20 nt, Human herpesvirus 1
cucacgcgcauccgcaagcu

SEQ ID NO: 295988 - RNA, 21 nt, Human herpesvirus 1
cucaggacaucgguguguccu

SEQ ID NO: 295989 - RNA, 18 nt, Human herpesvirus 1
cucagggccuccgacccc

SEQ ID NO: 295990 - RNA, 16 nt, Human herpesvirus 1
uccacgggggggagca

SEQ ID NO: 295991 - RNA, 22 nt, Human herpesvirus 1
uccagacgcacagcgagggacc

SEQ ID NO: 295992 - RNA, 16 nt, Human herpesvirus 1
uccagcauguuuuuga

SEQ ID NO: 295993 - RNA, 21 nt, Human herpesvirus 1
uccagccuccccuccaggugc

SEQ ID NO: 295994 - RNA, 17 nt, Human herpesvirus 1
uccagucaaacucccca

SEQ ID NO: 295995 - RNA, 14 nt, Human herpesvirus 1
uccaugauaaacug

SEQ ID NO: 295996 - RNA, 13 nt, Human herpesvirus 1
ucccaacccccua

SEQ ID NO: 295997 - RNA, 21 nt, Human herpesvirus 1
ucccaacccccuaagacccac

SEQ ID NO: 295998 - RNA, 19 nt, Human herpesvirus 1
ucccacaaacacaaaacac

SEQ ID NO: 295999 - RNA, 14 nt, Human herpesvirus 1
ucccacacacacaa

SEQ ID NO: 296000 - RNA, 19 nt, Human herpesvirus 1
ucccacccggagcuuucuu

SEQ ID NO: 296001 - RNA, 17 nt, Human herpesvirus 1
ucccagaauuuggccag

SEQ ID NO: 296002 - RNA, 17 nt, Human herpesvirus 1
ucccaugguaccaaaga

SEQ ID NO: 296003 - RNA, 15 nt, Human herpesvirus 1
uccccacaacaugga

SEQ ID NO: 296004 - RNA, 21 nt, Human herpesvirus 1
uccccacccacccacucccca

SEQ ID NO: 296005 - RNA, 20 nt, Human herpesvirus 1
ucccccggcacgccuggggu

SEQ ID NO: 296006 - RNA, 23 nt, Human herpesvirus 1
uccccugccccccccaccccaga

SEQ ID NO: 296007 - RNA, 15 nt, Human herpesvirus 1
ucccguccauuccca

SEQ ID NO: 296008 - RNA, 15 nt, Human herpesvirus 1
ucccuggaugcccac

SEQ ID NO: 296009 - RNA, 23 nt, Human herpesvirus 1
ucccugucgccucccaacccccu

SEQ ID NO: 296010 - RNA, 14 nt, Human herpesvirus 1
uccgacggggaccg

SEQ ID NO: 296011 - RNA, 16 nt, Human herpesvirus 1
uccgagggccgggccc

SEQ ID NO: 296012 - RNA, 18 nt, Human herpesvirus 1
uccgccaaauaaagccac

SEQ ID NO: 296013 - RNA, 20 nt, Human herpesvirus 1
uccggcagccguccagacac

SEQ ID NO: 296014 - RNA, 14 nt, Human herpesvirus 1
uccggccucgauga

SEQ ID NO: 296015 - RNA, 21 nt, Human herpesvirus 1
uccggcgccgcccgccccugg

SEQ ID NO: 296016 - RNA, 18 nt, Human herpesvirus 1
uccgguccauaaacaggc

SEQ ID NO: 296017 - RNA, 15 nt, Human herpesvirus 1
uccguggccccggcc

SEQ ID NO: 296018 - RNA, 20 nt, Human herpesvirus 1
uccucaccgagccucugugu

SEQ ID NO: 296019 - RNA, 16 nt, Human herpesvirus 1
uccucgcaaaacuggu

SEQ ID NO: 296020 - RNA, 16 nt, Human herpesvirus 1
uccugguagauaggca

SEQ ID NO: 296021 - RNA, 13 nt, Human herpesvirus 1
uccuuucccguga

SEQ ID NO: 296022 - RNA, 22 nt, Human herpesvirus 1
uccuuuuggguuucacugaaac

SEQ ID NO: 296023 - RNA, 17 nt, Human herpesvirus 1
ucgaagccuacuacucg

SEQ ID NO: 296024 - RNA, 15 nt, Human herpesvirus 1
ucgacgaccugggga

SEQ ID NO: 296025 - RNA, 13 nt, Human herpesvirus 1
ucgacgacggacg

SEQ ID NO: 296026 - RNA, 14 nt, Human herpesvirus 1
ucgagcagccgcgc

SEQ ID NO: 296027 - RNA, 17 nt, Human herpesvirus 1
ucgccacacccgcgacc

SEQ ID NO: 296028 - RNA, 14 nt, Human herpesvirus 1
ucgccacgucgacc

SEQ ID NO: 296029 - RNA, 14 nt, Human herpesvirus 1
ucgccccauacucc

SEQ ID NO: 296030 - RNA, 15 nt, Human herpesvirus 1
ucgccugcggcgacc

SEQ ID NO: 296031 - RNA, 14 nt, Human herpesvirus 1
ucgcgagggggucc

SEQ ID NO: 296032 - RNA, 11 nt, Human herpesvirus 1
ucgcucggggg

SEQ ID NO: 296033 - RNA, 23 nt, Human herpesvirus 1
ucgcucucggugcgucugggccc

SEQ ID NO: 296034 - RNA, 13 nt, Human herpesvirus 1
ucgcugugaugaa

SEQ ID NO: 296035 - RNA, 18 nt, Human herpesvirus 1
ucgcuuugugggggacca

SEQ ID NO: 296036 - RNA, 16 nt, Human herpesvirus 1
ucggaaucuccgcguc

SEQ ID NO: 296037 - RNA, 18 nt, Human herpesvirus 1
ucggacgccacacaccag

SEQ ID NO: 296038 - RNA, 16 nt, Human herpesvirus 1
ucggcauagaaaaccg

SEQ ID NO: 296039 - RNA, 19 nt, Human herpesvirus 1
ucggcauagaaaaccgcca

SEQ ID NO: 296040 - RNA, 19 nt, Human herpesvirus 1
ucggccaacacgaccaagg

SEQ ID NO: 296041 - RNA, 19 nt, Human herpesvirus 1
ucggccgccgacgaccugg

SEQ ID NO: 296042 - RNA, 20 nt, Human herpesvirus 1
ucgggaacggacgggguucc

SEQ ID NO: 296043 - RNA, 22 nt, Human herpesvirus 1
ucggggaccugcggccaacaca

SEQ ID NO: 296044 - RNA, 23 nt, Human herpesvirus 1
ucggggcggggguguccgggggc

SEQ ID NO: 296045 - RNA, 15 nt, Human herpesvirus 1
ucggguuggccaaga

SEQ ID NO: 296046 - RNA, 16 nt, Human herpesvirus 1
ucgguagcgggggacg

SEQ ID NO: 296047 - RNA, 13 nt, Human herpesvirus 1
ucgguaucgugca

SEQ ID NO: 296048 - RNA, 23 nt, Human herpesvirus 1
ucgucaaagggauacacaaacuu

SEQ ID NO: 296049 - RNA, 17 nt, Human herpesvirus 1
ucgucacccgacacuga

SEQ ID NO: 296050 - RNA, 15 nt, Human herpesvirus 1
ucgucccccucgcac

SEQ ID NO: 296051 - RNA, 14 nt, Human herpesvirus 1
ucguccccuggggc

SEQ ID NO: 296052 - RNA, 19 nt, Human herpesvirus 1
ucgucgcccuccaccaacg

SEQ ID NO: 296053 - RNA, 18 nt, Human herpesvirus 1
ucgugcguagcauaccug

SEQ ID NO: 296054 - RNA, 20 nt, Human herpesvirus 1
ucguguggacgaaaaaaagc

SEQ ID NO: 296055 - RNA, 18 nt, Human herpesvirus 1
ucuacccguguuugccca

SEQ ID NO: 296056 - RNA, 15 nt, Human herpesvirus 1
ucuagcccaguaaca

SEQ ID NO: 296057 - RNA, 20 nt, Human herpesvirus 1
ucuccgaucccaacuccuca

SEQ ID NO: 296058 - RNA, 12 nt, Human herpesvirus 1
ucuccgcccgac

SEQ ID NO: 296059 - RNA, 16 nt, Human herpesvirus 1
ucuccgucaccgcgac

SEQ ID NO: 296060 - RNA, 22 nt, Human herpesvirus 1
ucuccuccaccacccaacccca

SEQ ID NO: 296061 - RNA, 18 nt, Human herpesvirus 1
ucucgguguuuguguugu

SEQ ID NO: 296062 - RNA, 21 nt, Human herpesvirus 1
ucucugagggcuuugggucca

SEQ ID NO: 296063 - RNA, 17 nt, Human herpesvirus 1
ucucugcgcgcagucug

SEQ ID NO: 296064 - RNA, 21 nt, Human herpesvirus 1
ucucugggcgggccgugauuc

SEQ ID NO: 296065 - RNA, 14 nt, Human herpesvirus 1
ucugaucgacgacg

SEQ ID NO: 296066 - RNA, 20 nt, Human herpesvirus 1
ucugcgagauuuuucuguau

SEQ ID NO: 296067 - RNA, 15 nt, Human herpesvirus 1
ucuggccagcagggc

SEQ ID NO: 296068 - RNA, 19 nt, Human herpesvirus 1
ucugggcccgacagaccuc

SEQ ID NO: 296069 - RNA, 20 nt, Human herpesvirus 1
ucugguaguuaggacaacga

SEQ ID NO: 296070 - RNA, 15 nt, Human herpesvirus 1
ucugucgauacccca

SEQ ID NO: 296071 - RNA, 20 nt, Human herpesvirus 1
ucuuccuuuuccccacccca

SEQ ID NO: 296072 - RNA, 17 nt, Human herpesvirus 1
ucuuggcguuauuccca

SEQ ID NO: 296073 - RNA, 16 nt, Human herpesvirus 1
ugaaaaucgguccccc

SEQ ID NO: 296074 - RNA, 14 nt, Human herpesvirus 1
ugaccaccacaauc

SEQ ID NO: 296075 - RNA, 13 nt, Human herpesvirus 1
ugacccaaaacac

SEQ ID NO: 296076 - RNA, 21 nt, Human herpesvirus 1
ugaccgcccgccccucgccac

SEQ ID NO: 296077 - RNA, 15 nt, Human herpesvirus 1
ugacgccuucgaggg

SEQ ID NO: 296078 - RNA, 21 nt, Human herpesvirus 1
ugagacccaaaguuugguuca

SEQ ID NO: 296079 - RNA, 13 nt, Human herpesvirus 1
ugagcagacagac

SEQ ID NO: 296080 - RNA, 19 nt, Human herpesvirus 1
ugagggcuuuggguccaca

SEQ ID NO: 296081 - RNA, 19 nt, Human herpesvirus 1
ugaguuuguggacccaaag

SEQ ID NO: 296082 - RNA, 18 nt, Human herpesvirus 1
ugaucagacgagccgcgc

SEQ ID NO: 296083 - RNA, 14 nt, Human herpesvirus 1
ugauccgcggcgac

SEQ ID NO: 296084 - RNA, 14 nt, Human herpesvirus 1
ugauucuugucagg

SEQ ID NO: 296085 - RNA, 19 nt, Human herpesvirus 1
ugauugugucgcagggcgg

SEQ ID NO: 296086 - RNA, 13 nt, Human herpesvirus 1
ugcaaaugggaua

SEQ ID NO: 296087 - RNA, 16 nt, Human herpesvirus 1
ugcaaaugggauacau

SEQ ID NO: 296088 - RNA, 20 nt, Human herpesvirus 1
ugcacaacacaaacaucugg

SEQ ID NO: 296089 - RNA, 18 nt, Human herpesvirus 1
ugcacagccuggccgugc

SEQ ID NO: 296090 - RNA, 19 nt, Human herpesvirus 1
ugcaguagcguuguuuauu

SEQ ID NO: 296091 - RNA, 18 nt, Human herpesvirus 1
ugccacuccccacccacc

SEQ ID NO: 296092 - RNA, 20 nt, Human herpesvirus 1
ugcccgcggaccaccgggcc

SEQ ID NO: 296093 - RNA, 12 nt, Human herpesvirus 1
ugccgcuuuauc

SEQ ID NO: 296094 - RNA, 14 nt, Human herpesvirus 1
ugccguuguuccca

SEQ ID NO: 296095 - RNA, 16 nt, Human herpesvirus 1
ugccuccaccgggccc

SEQ ID NO: 296096 - RNA, 18 nt, Human herpesvirus 1
ugcgauggacaccgcaga

SEQ ID NO: 296097 - RNA, 23 nt, Human herpesvirus 1
ugcgccaggucggcgaccgccag

SEQ ID NO: 296098 - RNA, 16 nt, Human herpesvirus 1
ugcgcgauguggauaa

SEQ ID NO: 296099 - RNA, 17 nt, Human herpesvirus 1
ugcgcgauguggauaaa

SEQ ID NO: 296100 - RNA, 18 nt, Human herpesvirus 1
ugcgcguguccuuacucc

SEQ ID NO: 296101 - RNA, 17 nt, Human herpesvirus 1
ugcgggggagaaaaccg

SEQ ID NO: 296102 - RNA, 17 nt, Human herpesvirus 1
ugcgguuuaacacccgu

SEQ ID NO: 296103 - RNA, 15 nt, Human herpesvirus 1
ugcgucgggccuccc

SEQ ID NO: 296104 - RNA, 11 nt, Human herpesvirus 1
ugcgugucaaa

SEQ ID NO: 296105 - RNA, 20 nt, Human herpesvirus 1
aaacagcgacgacgucuguc

SEQ ID NO: 296106 - RNA, 16 nt, Human herpesvirus 1
aaaccacggacgggug

SEQ ID NO: 296107 - RNA, 20 nt, Human herpesvirus 1
aaaccagguaauaccaaaua

SEQ ID NO: 296108 - RNA, 20 nt, Human herpesvirus 1
aaaccguaacggcauaugca

SEQ ID NO: 296109 - RNA, 20 nt, Human herpesvirus 1
aaacgccccgcccacacaac

SEQ ID NO: 296110 - RNA, 18 nt, Human herpesvirus 1
aaacggcaacaaccugau

SEQ ID NO: 296111 - RNA, 20 nt, Human herpesvirus 1
aaacggccgaagccacgccc

SEQ ID NO: 296112 - RNA, 20 nt, Human herpesvirus 1
aaacgucagacgagcgcgcu

SEQ ID NO: 296113 - RNA, 13 nt, Human herpesvirus 1
aaacucauuugug

SEQ ID NO: 296114 - RNA, 11 nt, Human herpesvirus 1
aaagcaaagag

SEQ ID NO: 296115 - RNA, 17 nt, Human herpesvirus 1
aaagccccgggccgcgu

SEQ ID NO: 296116 - RNA, 14 nt, Human herpesvirus 1
aaagcucggguugg

SEQ ID NO: 296117 - RNA, 19 nt, Human herpesvirus 1
aaagcugugggcuaaauac

SEQ ID NO: 296118 - RNA, 16 nt, Human herpesvirus 1
aaaggcguaccaaaca

SEQ ID NO: 296119 - RNA, 23 nt, Human herpesvirus 1
aaaguuugucugcguauuccagg

SEQ ID NO: 296120 - RNA, 15 nt, Human herpesvirus 1
aaauaaaaguaucac

SEQ ID NO: 296121 - RNA, 13 nt, Human herpesvirus 1
aaauacagcaugg

SEQ ID NO: 296122 - RNA, 13 nt, Human herpesvirus 1
aaauacaugccac

SEQ ID NO: 296123 - RNA, 17 nt, Human herpesvirus 1
aaauacaugcccgggac

SEQ ID NO: 296124 - RNA, 20 nt, Human herpesvirus 1
aaauaugccugugugucgua

SEQ ID NO: 296125 - RNA, 19 nt, Human herpesvirus 1
aaaucucgucgacaaacag

SEQ ID NO: 296126 - RNA, 13 nt, Human herpesvirus 1
aacaaacaaacca

SEQ ID NO: 296127 - RNA, 13 nt, Human herpesvirus 1
aacaaaccaaaag

SEQ ID NO: 296128 - RNA, 13 nt, Human herpesvirus 1
aacaaaccacaga

SEQ ID NO: 296129 - RNA, 19 nt, Human herpesvirus 1
aacaaaccacagacacggu

SEQ ID NO: 296130 - RNA, 16 nt, Human herpesvirus 1
aacaaccugauuaagu

SEQ ID NO: 296131 - RNA, 21 nt, Human herpesvirus 1
aacaagcccgaccaccagaca

SEQ ID NO: 296132 - RNA, 17 nt, Human herpesvirus 1
aacacacccccgugacu

SEQ ID NO: 296133 - RNA, 20 nt, Human herpesvirus 1
aacaggccgcggacacccgg

SEQ ID NO: 296134 - RNA, 17 nt, Human herpesvirus 1
aaccacagacacgguua

SEQ ID NO: 296135 - RNA, 23 nt, Human herpesvirus 1
aaccaccuuccguccccugcccc

SEQ ID NO: 296136 - RNA, 15 nt, Human herpesvirus 1
aaccagguaauacca

SEQ ID NO: 296137 - RNA, 17 nt, Human herpesvirus 1
aaccagguaauaccaaa

SEQ ID NO: 296138 - RNA, 19 nt, Human herpesvirus 1
aaccauacccaaaccgacu

SEQ ID NO: 296139 - RNA, 23 nt, Human herpesvirus 1
aaccauaggaugaacaaaccacc

SEQ ID NO: 296140 - RNA, 12 nt, Human herpesvirus 1
aacccacugggg

SEQ ID NO: 296141 - RNA, 19 nt, Human herpesvirus 1
aacccacuggggucugggu

SEQ ID NO: 296142 - RNA, 14 nt, Human herpesvirus 1
aaccccagcauacc

SEQ ID NO: 296143 - RNA, 12 nt, Human herpesvirus 1
aagcuuggucag

SEQ ID NO: 296144 - RNA, 14 nt, Human herpesvirus 1
aaguuacaaacuga

SEQ ID NO: 296145 - RNA, 16 nt, Human herpesvirus 1
aauaaaaaaagaacau

SEQ ID NO: 296146 - RNA, 18 nt, Human herpesvirus 1
aauaaaaaaagaacauac

SEQ ID NO: 296147 - RNA, 16 nt, Human herpesvirus 1
aauaaaaacauugccc

SEQ ID NO: 296148 - RNA, 14 nt, Human herpesvirus 1
aauaaaaaccaaaa

SEQ ID NO: 296149 - RNA, 18 nt, Human herpesvirus 1
aauaaaagaccacaccaa

SEQ ID NO: 296150 - RNA, 20 nt, Human herpesvirus 1
aauaaaccagguaauaccaa

SEQ ID NO: 296151 - RNA, 11 nt, Human herpesvirus 1
aauaaaccucu

SEQ ID NO: 296152 - RNA, 13 nt, Human herpesvirus 1
aauaaacuguaac

SEQ ID NO: 296153 - RNA, 15 nt, Human herpesvirus 1
aauaaagccacugaa

SEQ ID NO: 296154 - RNA, 20 nt, Human herpesvirus 1
aauaccagaauaaugaccac

SEQ ID NO: 296155 - RNA, 22 nt, Human herpesvirus 1
aauaccgguagaaccaaaaccc

SEQ ID NO: 296156 - RNA, 19 nt, Human herpesvirus 1
aauacgugccgacuugccc

SEQ ID NO: 296157 - RNA, 12 nt, Human herpesvirus 1
aauccccaggac

SEQ ID NO: 296158 - RNA, 17 nt, Human herpesvirus 1
aaucccccguguuccca

SEQ ID NO: 296159 - RNA, 17 nt, Human herpesvirus 1
aaucgucggaucaugaa

SEQ ID NO: 296160 - RNA, 15 nt, Human herpesvirus 1
aaugaggagcucguc

SEQ ID NO: 296161 - RNA, 23 nt, Human herpesvirus 1
aauguuuuuauuggucaaacuca

SEQ ID NO: 296162 - RNA, 17 nt, Human herpesvirus 1
aauuaaauacaugccac

SEQ ID NO: 296163 - RNA, 19 nt, Human herpesvirus 1
acaaaaggcguaccaaaca

SEQ ID NO: 296164 - RNA, 20 nt, Human herpesvirus 1
acaaaaggcguaccaaacaa

SEQ ID NO: 296165 - RNA, 18 nt, Human herpesvirus 1
acaaacgacccaccaaua

SEQ ID NO: 296166 - RNA, 14 nt, Human herpesvirus 1
acaaacugaacaaa

SEQ ID NO: 296167 - RNA, 18 nt, Human herpesvirus 1
acaaccugauuaaguuuu

SEQ ID NO: 296168 - RNA, 16 nt, Human herpesvirus 1
acaagaaucacaauga

SEQ ID NO: 296169 - RNA, 16 nt, Human herpesvirus 1
acaauaaagcaccaac

SEQ ID NO: 296170 - RNA, 12 nt, Human herpesvirus 1
acaaugcaaaag

SEQ ID NO: 296171 - RNA, 12 nt, Human herpesvirus 1
acacacaaucac

SEQ ID NO: 296172 - RNA, 12 nt, Human herpesvirus 1
acacaggaaaga

SEQ ID NO: 296173 - RNA, 17 nt, Human herpesvirus 1
acaccacgccacaacag

SEQ ID NO: 296174 - RNA, 16 nt, Human herpesvirus 1
acacccagguaugcua

SEQ ID NO: 296175 - RNA, 13 nt, Human herpesvirus 1
acaccccccaugc

SEQ ID NO: 296176 - RNA, 18 nt, Human herpesvirus 1
acaccugcaccacccccg

SEQ ID NO: 296177 - RNA, 12 nt, Human herpesvirus 1
acacguuuaccc

SEQ ID NO: 296178 - RNA, 14 nt, Human herpesvirus 1
acacuaaccccggg

SEQ ID NO: 296179 - RNA, 20 nt, Human herpesvirus 1
acagaaacgacaucuugucg

SEQ ID NO: 296180 - RNA, 20 nt, Human herpesvirus 1
acaggagccaaugugggggg

SEQ ID NO: 296181 - RNA, 21 nt, Human herpesvirus 1
acaggccgcggacacccgggg

SEQ ID NO: 296182 - RNA, 18 nt, Human herpesvirus 1
acagggggaaaggggcgu

SEQ ID NO: 296183 - RNA, 14 nt, Human herpesvirus 1
acauacaccaaugg

SEQ ID NO: 296184 - RNA, 23 nt, Human herpesvirus 1
acauaugaucgcgggcaccccac

SEQ ID NO: 296185 - RNA, 23 nt, Human herpesvirus 1
acauccagguacccggcggcccg

SEQ ID NO: 296186 - RNA, 16 nt, Human herpesvirus 1
acaucgguguguccuu

SEQ ID NO: 296187 - RNA, 10 nt, Human herpesvirus 1
accaaaaaca

SEQ ID NO: 296188 - RNA, 14 nt, Human herpesvirus 1
accaacggcggacg

SEQ ID NO: 296189 - RNA, 14 nt, Human herpesvirus 1
accacacaccagcg

SEQ ID NO: 296190 - RNA, 17 nt, Human herpesvirus 1
accaccacugcacuccc

SEQ ID NO: 296191 - RNA, 16 nt, Human herpesvirus 1
accaccccaaauacag

SEQ ID NO: 296192 - RNA, 19 nt, Human herpesvirus 1
accacgccacaacagcccu

SEQ ID NO: 296193 - RNA, 17 nt, Human herpesvirus 1
accacugcacucccugc

SEQ ID NO: 296194 - RNA, 15 nt, Human herpesvirus 1
acccaacccccggcc

SEQ ID NO: 296195 - RNA, 23 nt, Human herpesvirus 1
acccacccgacgcgucauaugca

SEQ ID NO: 296196 - RNA, 20 nt, Human herpesvirus 1
acccaccgcgagauguccaa

SEQ ID NO: 296197 - RNA, 18 nt, Human herpesvirus 1
acccacuccccacccacc

SEQ ID NO: 296198 - RNA, 20 nt, Human herpesvirus 1
acccagaccggcaccaccga

SEQ ID NO: 296199 - RNA, 23 nt, Human herpesvirus 1
acccaggugacgccuucgagggu

SEQ ID NO: 296200 - RNA, 16 nt, Human herpesvirus 1
acccauugguguaugu

SEQ ID NO: 296201 - RNA, 17 nt, Human herpesvirus 1
acccauugguguauguu

SEQ ID NO: 296202 - RNA, 19 nt, Human herpesvirus 1
agcguccgggcgcuuggca

SEQ ID NO: 296203 - RNA, 23 nt, Human herpesvirus 1
agcguguucguggaaccaugacc

SEQ ID NO: 296204 - RNA, 12 nt, Human herpesvirus 1
agcucagcuuuu

SEQ ID NO: 296205 - RNA, 20 nt, Human herpesvirus 1
agcugcucgagaugggccag

SEQ ID NO: 296206 - RNA, 18 nt, Human herpesvirus 1
agcugggaccccggcggc

SEQ ID NO: 296207 - RNA, 23 nt, Human herpesvirus 1
agcuucagcgcgaacgaccaacu

SEQ ID NO: 296208 - RNA, 16 nt, Human herpesvirus 1
agcuuuacaaugcaaa

SEQ ID NO: 296209 - RNA, 13 nt, Human herpesvirus 1
aggaagaccugcu

SEQ ID NO: 296210 - RNA, 20 nt, Human herpesvirus 1
aggacaucgguguguccuuu

SEQ ID NO: 296211 - RNA, 11 nt, Human herpesvirus 1
aggacggccag

SEQ ID NO: 296212 - RNA, 14 nt, Human herpesvirus 1
aggaggacgucucc

SEQ ID NO: 296213 - RNA, 23 nt, Human herpesvirus 1
aggaggacgucuccaagcuuucc

SEQ ID NO: 296214 - RNA, 18 nt, Human herpesvirus 1
aggccaucgccggggacc

SEQ ID NO: 296215 - RNA, 15 nt, Human herpesvirus 1
aggcgccuccggggg

SEQ ID NO: 296216 - RNA, 13 nt, Human herpesvirus 1
aggcggccggggc

SEQ ID NO: 296217 - RNA, 23 nt, Human herpesvirus 1
aggcggccugggucuuccgcgga

SEQ ID NO: 296218 - RNA, 17 nt, Human herpesvirus 1
agggcacccaacaacac

SEQ ID NO: 296219 - RNA, 21 nt, Human herpesvirus 1
agggccuccgaccccagacau

SEQ ID NO: 296220 - RNA, 14 nt, Human herpesvirus 1
agggcgcccccgcg

SEQ ID NO: 296221 - RNA, 13 nt, Human herpesvirus 1
aggggcguggucu

SEQ ID NO: 296222 - RNA, 16 nt, Human herpesvirus 1
agggguauaacaaagu

SEQ ID NO: 296223 - RNA, 21 nt, Human herpesvirus 1
agggugguucccccccguggc

SEQ ID NO: 296224 - RNA, 15 nt, Human herpesvirus 1
aggugcugccgccgc

SEQ ID NO: 296225 - RNA, 19 nt, Human herpesvirus 1
aguaacaugcgcacgugau

SEQ ID NO: 296226 - RNA, 19 nt, Human herpesvirus 1
aguaccaccccccugugaa

SEQ ID NO: 296227 - RNA, 21 nt, Human herpesvirus 1
aguccacgggggggagcacaa

SEQ ID NO: 296228 - RNA, 22 nt, Human herpesvirus 1
aguccacgggggggagcacaag

SEQ ID NO: 296229 - RNA, 17 nt, Human herpesvirus 1
agugaaagacacgggca

SEQ ID NO: 296230 - RNA, 23 nt, Human herpesvirus 1
agugcaggugggcggacgugccg

SEQ ID NO: 296231 - RNA, 16 nt, Human herpesvirus 1
aguggcuucaugugga

SEQ ID NO: 296232 - RNA, 20 nt, Human herpesvirus 1
aguuguccggggggauccaa

SEQ ID NO: 296233 - RNA, 16 nt, Human herpesvirus 1
aguuucgaagcgcuuu

SEQ ID NO: 296234 - RNA, 17 nt, Human herpesvirus 1
aguuuguggacccaaag

SEQ ID NO: 296235 - RNA, 12 nt, Human herpesvirus 1
auaaaaagaaca

SEQ ID NO: 296236 - RNA, 19 nt, Human herpesvirus 1
auaaaagaccacaccaacg

SEQ ID NO: 296237 - RNA, 23 nt, Human herpesvirus 1
auaaaccagguaauaccaaauaa

SEQ ID NO: 296238 - RNA, 19 nt, Human herpesvirus 1
auaaagagccguaacccaa

SEQ ID NO: 296239 - RNA, 14 nt, Human herpesvirus 1
auaaggacauccac

SEQ ID NO: 296240 - RNA, 19 nt, Human herpesvirus 1
auaauaaacacacaaucac

SEQ ID NO: 296241 - RNA, 15 nt, Human herpesvirus 1
auaaugaccaccaca

SEQ ID NO: 296242 - RNA, 20 nt, Human herpesvirus 1
auagacccacaggcauccaa

SEQ ID NO: 296243 - RNA, 20 nt, Human herpesvirus 1
auagcgaauaaaaaccaaaa

SEQ ID NO: 296244 - RNA, 23 nt, Human herpesvirus 1
auaggaugaacaaaccaccccgu

SEQ ID NO: 296245 - RNA, 13 nt, Human herpesvirus 1
auaguaacgggau

SEQ ID NO: 296246 - RNA, 15 nt, Human herpesvirus 1
auauaaggccuggga

SEQ ID NO: 296247 - RNA, 16 nt, Human herpesvirus 1
auauacaguaagacau

SEQ ID NO: 296248 - RNA, 18 nt, Human herpesvirus 1
aucaaccccgcccuacac

SEQ ID NO: 296249 - RNA, 13 nt, Human herpesvirus 1
aucacgccuuaau

SEQ ID NO: 296250 - RNA, 21 nt, Human herpesvirus 1
aucacgguccauacuggccug

SEQ ID NO: 296251 - RNA, 16 nt, Human herpesvirus 1
aucagcguucacccgg

SEQ ID NO: 296252 - RNA, 23 nt, Human herpesvirus 1
aucauaaccacgcccagcgcaga

SEQ ID NO: 296253 - RNA, 13 nt, Human herpesvirus 1
auccagauuccaa

SEQ ID NO: 296254 - RNA, 17 nt, Human herpesvirus 1
auccagcacacccccau

SEQ ID NO: 296255 - RNA, 13 nt, Human herpesvirus 1
aucccaacuccuc

SEQ ID NO: 296256 - RNA, 20 nt, Human herpesvirus 1
auccgucgggaggccacaga

SEQ ID NO: 296257 - RNA, 12 nt, Human herpesvirus 1
auccuccagacg

SEQ ID NO: 296258 - RNA, 21 nt, Human herpesvirus 1
auccugggaugcggaggggga

SEQ ID NO: 296259 - RNA, 22 nt, Human herpesvirus 1
aucgcgggcgccauggcgggac

SEQ ID NO: 296260 - RNA, 18 nt, Human herpesvirus 1
aucgcucgaccucuccac

SEQ ID NO: 296261 - RNA, 17 nt, Human herpesvirus 1
augacccagaccggcac

SEQ ID NO: 296262 - RNA, 22 nt, Human herpesvirus 1
cgcgcauccgucgggaggccac

SEQ ID NO: 296263 - RNA, 13 nt, Human herpesvirus 1
cgcgccacacuca

SEQ ID NO: 296264 - RNA, 16 nt, Human herpesvirus 1
cgcgccaggcccgccg

SEQ ID NO: 296265 - RNA, 19 nt, Human herpesvirus 1
cgcgcccacuacaccagcc

SEQ ID NO: 296266 - RNA, 15 nt, Human herpesvirus 1
cgcgccccgccggcg

SEQ ID NO: 296267 - RNA, 18 nt, Human herpesvirus 1
cgcgccguuggcccccgc

SEQ ID NO: 296268 - RNA, 19 nt, Human herpesvirus 1
cgcgccguuggcccccgcc

SEQ ID NO: 296269 - RNA, 14 nt, Human herpesvirus 1
cgcgcgggccguac

SEQ ID NO: 296270 - RNA, 13 nt, Human herpesvirus 1
cgcgcgucccccg

SEQ ID NO: 296271 - RNA, 16 nt, Human herpesvirus 1
cgcgcgucccccgaga

SEQ ID NO: 296272 - RNA, 14 nt, Human herpesvirus 1
cgcgcgucgacguc

SEQ ID NO: 296273 - RNA, 17 nt, Human herpesvirus 1
cgcggagggcggccagc

SEQ ID NO: 296274 - RNA, 20 nt, Human herpesvirus 1
cgcggcauaacuccgaccgg

SEQ ID NO: 296275 - RNA, 16 nt, Human herpesvirus 1
cgcggcgacaacgcgg

SEQ ID NO: 296276 - RNA, 15 nt, Human herpesvirus 1
cgcgggaggccgccc

SEQ ID NO: 296277 - RNA, 16 nt, Human herpesvirus 1
cgcgggaggccgcccc

SEQ ID NO: 296278 - RNA, 13 nt, Human herpesvirus 1
cgcgggcgacgcc

SEQ ID NO: 296279 - RNA, 23 nt, Human herpesvirus 1
cgcggggggggcgggcucguccc

SEQ ID NO: 296280 - RNA, 13 nt, Human herpesvirus 1
cgcgucauaugca

SEQ ID NO: 296281 - RNA, 11 nt, Human herpesvirus 1
cgcgucccuga

SEQ ID NO: 296282 - RNA, 21 nt, Human herpesvirus 1
cgcgucgaugcucugccgcgc

SEQ ID NO: 296283 - RNA, 22 nt, Human herpesvirus 1
cgcuagccgaucccucgcgagg

SEQ ID NO: 296284 - RNA, 13 nt, Human herpesvirus 1
cgcucccccgugu

SEQ ID NO: 296285 - RNA, 16 nt, Human herpesvirus 1
cgcucuugucucaggg

SEQ ID NO: 296286 - RNA, 17 nt, Human herpesvirus 1
cgcugugccaucgcgcc

SEQ ID NO: 296287 - RNA, 13 nt, Human herpesvirus 1
cgcuuuaucccac

SEQ ID NO: 296288 - RNA, 13 nt, Human herpesvirus 1
cggaaaccaaaga

SEQ ID NO: 296289 - RNA, 13 nt, Human herpesvirus 1
cggaggacggcca

SEQ ID NO: 296290 - RNA, 15 nt, Human herpesvirus 1
cggaggacggccagg

SEQ ID NO: 296291 - RNA, 12 nt, Human herpesvirus 1
cggcaaggagcg

SEQ ID NO: 296292 - RNA, 23 nt, Human herpesvirus 1
cggcacguauucggacagacuca

SEQ ID NO: 296293 - RNA, 14 nt, Human herpesvirus 1
cggcacugaccaag

SEQ ID NO: 296294 - RNA, 15 nt, Human herpesvirus 1
cggcaggcgacggcg

SEQ ID NO: 296295 - RNA, 23 nt, Human herpesvirus 1
cggcauaacuccgaccggcgggu

SEQ ID NO: 296296 - RNA, 12 nt, Human herpesvirus 1
cggcauaugcaa

SEQ ID NO: 296297 - RNA, 14 nt, Human herpesvirus 1
cggccaacacgacc

SEQ ID NO: 296298 - RNA, 21 nt, Human herpesvirus 1
cggccaaccagcguccgccga

SEQ ID NO: 296299 - RNA, 21 nt, Human herpesvirus 1
cggccacgucguccggggggu

SEQ ID NO: 296300 - RNA, 16 nt, Human herpesvirus 1
cggccgcgacccaggc

SEQ ID NO: 296301 - RNA, 18 nt, Human herpesvirus 1
cggccguuucuccgcccg

SEQ ID NO: 296302 - RNA, 19 nt, Human herpesvirus 1
cggcggaccuggcgaucca

SEQ ID NO: 296303 - RNA, 14 nt, Human herpesvirus 1
cggcggccccuggc

SEQ ID NO: 296304 - RNA, 15 nt, Human herpesvirus 1
cggcggccccuggcg

SEQ ID NO: 296305 - RNA, 14 nt, Human herpesvirus 1
cggcggccgccagc

SEQ ID NO: 296306 - RNA, 14 nt, Human herpesvirus 1
cggcgggggcgggg

SEQ ID NO: 296307 - RNA, 19 nt, Human herpesvirus 1
cggcgguaaucauaaccac

SEQ ID NO: 296308 - RNA, 17 nt, Human herpesvirus 1
cggcugcuauccccggg

SEQ ID NO: 296309 - RNA, 17 nt, Human herpesvirus 1
cggcuggccgcgcccgc

SEQ ID NO: 296310 - RNA, 18 nt, Human herpesvirus 1
cggcuuugaaacugacau

SEQ ID NO: 296311 - RNA, 15 nt, Human herpesvirus 1
cgggaacgcccaaaa

SEQ ID NO: 296312 - RNA, 12 nt, Human herpesvirus 1
cgggacugaaua

SEQ ID NO: 296313 - RNA, 16 nt, Human herpesvirus 1
cgggagccagggccaa

SEQ ID NO: 296314 - RNA, 16 nt, Human herpesvirus 1
cgggagcuccgcacca

SEQ ID NO: 296315 - RNA, 15 nt, Human herpesvirus 1
cgggaggaagccaca

SEQ ID NO: 296316 - RNA, 17 nt, Human herpesvirus 1
cgggauccucggccagc

SEQ ID NO: 296317 - RNA, 23 nt, Human herpesvirus 1
cgggcaaguaugccccccuggcg

SEQ ID NO: 296318 - RNA, 16 nt, Human herpesvirus 1
cgggcacguacacggg

SEQ ID NO: 296319 - RNA, 22 nt, Human herpesvirus 1
cgggcauggccccggggcgggu

SEQ ID NO: 296320 - RNA, 21 nt, Human herpesvirus 1
cgggccgcccacuucccggua

SEQ ID NO: 296321 - RNA, 13 nt, Human herpesvirus 1
cgggcgacccaga

SEQ ID NO: 296322 - RNA, 13 nt, Human herpesvirus 1
cgggcguccgcca

SEQ ID NO: 296323 - RNA, 22 nt, Human herpesvirus 1
cgggcguucccgagcggcgcau

SEQ ID NO: 296324 - RNA, 19 nt, Human herpesvirus 1
cgggcguugggguggaucu

SEQ ID NO: 296325 - RNA, 19 nt, Human herpesvirus 1
cggggaccuugccccggcc

SEQ ID NO: 296326 - RNA, 14 nt, Human herpesvirus 1
cggggcgcuuguga

SEQ ID NO: 296327 - RNA, 22 nt, Human herpesvirus 1
cggggcggggccuuggcggccg

SEQ ID NO: 296328 - RNA, 14 nt, Human herpesvirus 1
cgggggcccugcca

SEQ ID NO: 296329 - RNA, 21 nt, Human herpesvirus 1
cggguagcuuuacaaugcaaa

SEQ ID NO: 296330 - RNA, 16 nt, Human herpesvirus 1
cgggucccgaccgaac

SEQ ID NO: 296331 - RNA, 12 nt, Human herpesvirus 1
cgggugugauag

SEQ ID NO: 296332 - RNA, 15 nt, Human herpesvirus 1
cggguucccccggca

SEQ ID NO: 296333 - RNA, 19 nt, Human herpesvirus 1
cggguuggaugaaaacacg

SEQ ID NO: 296334 - RNA, 15 nt, Human herpesvirus 1
cgguaaacaccaacu

SEQ ID NO: 296335 - RNA, 23 nt, Human herpesvirus 1
cggucaacgaggguugggggggu

SEQ ID NO: 296336 - RNA, 17 nt, Human herpesvirus 1
cgguccauuaaagacaa

SEQ ID NO: 296337 - RNA, 20 nt, Human herpesvirus 1
cggucccagggcuggcacuc

SEQ ID NO: 296338 - RNA, 17 nt, Human herpesvirus 1
cggugaauaggugcgcc

SEQ ID NO: 296339 - RNA, 20 nt, Human herpesvirus 1
cggugccaauaaacccccaa

SEQ ID NO: 296340 - RNA, 10 nt, Human herpesvirus 1
cgguggacau

SEQ ID NO: 296341 - RNA, 21 nt, Human herpesvirus 1
cgguuaaugguuaaaccucug

SEQ ID NO: 296342 - RNA, 19 nt, Human herpesvirus 1
cgguucgccgccaccagcc

SEQ ID NO: 296343 - RNA, 20 nt, Human herpesvirus 1
cguaccaaacaaacaaacca

SEQ ID NO: 296344 - RNA, 21 nt, Human herpesvirus 1
cguaccaaacaaacaaaccaa

SEQ ID NO: 296345 - RNA, 17 nt, Human herpesvirus 1
cguauaacgggggccau

SEQ ID NO: 296346 - RNA, 18 nt, Human herpesvirus 1
cgucaaagggauacacaa

SEQ ID NO: 296347 - RNA, 12 nt, Human herpesvirus 1
cgucauaugcaa

SEQ ID NO: 296348 - RNA, 16 nt, Human herpesvirus 1
cgucccggcucuccga

SEQ ID NO: 296349 - RNA, 20 nt, Human herpesvirus 1
cgucgaucuccucaaacacc

SEQ ID NO: 296350 - RNA, 19 nt, Human herpesvirus 1
cgucgccgcgggccacgcc

SEQ ID NO: 296351 - RNA, 17 nt, Human herpesvirus 1
cgucgcuagaccacgcc

SEQ ID NO: 296352 - RNA, 19 nt, Human herpesvirus 1
cgucgggguggcacagaac

SEQ ID NO: 296353 - RNA, 14 nt, Human herpesvirus 1
cgucguucgggcgg

SEQ ID NO: 296354 - RNA, 20 nt, Human herpesvirus 1
cgugcgauggacaccgcaga

SEQ ID NO: 296355 - RNA, 20 nt, Human herpesvirus 1
cgugcgugggggcccuggcg

SEQ ID NO: 296356 - RNA, 17 nt, Human herpesvirus 1
cgugcuguugggcggga

SEQ ID NO: 296357 - RNA, 21 nt, Human herpesvirus 1
cgugggugaugucggguccaa

SEQ ID NO: 296358 - RNA, 18 nt, Human herpesvirus 1
cgugguuuuuauuuacaa

SEQ ID NO: 296359 - RNA, 14 nt, Human herpesvirus 1
cgugugguacaccg

SEQ ID NO: 296360 - RNA, 13 nt, Human herpesvirus 1
cguguucagggcg

SEQ ID NO: 296361 - RNA, 14 nt, Human herpesvirus 1
cguuggucagggcg

SEQ ID NO: 296362 - RNA, 16 nt, Human herpesvirus 1
cguuugcacaacacaa

SEQ ID NO: 296363 - RNA, 14 nt, Human herpesvirus 1
cguuuguguugugg

SEQ ID NO: 296364 - RNA, 17 nt, Human herpesvirus 1
cuaacgcguuugggggu

SEQ ID NO: 296365 - RNA, 18 nt, Human herpesvirus 1
cuaauuaaauacaugcca

SEQ ID NO: 296366 - RNA, 14 nt, Human herpesvirus 1
cuacacacaggaaa

SEQ ID NO: 296367 - RNA, 11 nt, Human herpesvirus 1
cuacaccagcc

SEQ ID NO: 296368 - RNA, 20 nt, Human herpesvirus 1
cuacacccuugugugucaau

SEQ ID NO: 296369 - RNA, 13 nt, Human herpesvirus 1
cuacaggggccau

SEQ ID NO: 296370 - RNA, 18 nt, Human herpesvirus 1
cuacccgccuacccgcgc

SEQ ID NO: 296371 - RNA, 14 nt, Human herpesvirus 1
cuacgcgccggccg

SEQ ID NO: 296372 - RNA, 15 nt, Human herpesvirus 1
cuauaucucugggcg

SEQ ID NO: 296373 - RNA, 13 nt, Human herpesvirus 1
cucaaccccggcg

SEQ ID NO: 296374 - RNA, 17 nt, Human herpesvirus 1
cucaccggcggaccccc

SEQ ID NO: 296375 - RNA, 21 nt, Human herpesvirus 1
cucauacgggucggugauguc

SEQ ID NO: 296376 - RNA, 14 nt, Human herpesvirus 1
cucccaacccccua

SEQ ID NO: 296377 - RNA, 21 nt, Human herpesvirus 1
cucccaaccgcgacccuccgg

SEQ ID NO: 296378 - RNA, 15 nt, Human herpesvirus 1
gacgcgccucccggg

SEQ ID NO: 296379 - RNA, 14 nt, Human herpesvirus 1
gacgcgcggcgcga

SEQ ID NO: 296380 - RNA, 15 nt, Human herpesvirus 1
gacgcgucauaugca

SEQ ID NO: 296381 - RNA, 16 nt, Human herpesvirus 1
gacgcgucauaugcaa

SEQ ID NO: 296382 - RNA, 17 nt, Human herpesvirus 1
gacgcgucauaugcaaa

SEQ ID NO: 296383 - RNA, 17 nt, Human herpesvirus 1
gacggaccugguuacug

SEQ ID NO: 296384 - RNA, 23 nt, Human herpesvirus 1
gacggaccuuggucuggcccacg

SEQ ID NO: 296385 - RNA, 19 nt, Human herpesvirus 1
gacggccagggacgggucg

SEQ ID NO: 296386 - RNA, 16 nt, Human herpesvirus 1
gacggcgucucccggg

SEQ ID NO: 296387 - RNA, 15 nt, Human herpesvirus 1
gacucaagcacacac

SEQ ID NO: 296388 - RNA, 22 nt, Human herpesvirus 1
gacucaagcacacacgggggag

SEQ ID NO: 296389 - RNA, 18 nt, Human herpesvirus 1
gacucagggcucuacccu

SEQ ID NO: 296390 - RNA, 15 nt, Human herpesvirus 1
gacucguagccuaau

SEQ ID NO: 296391 - RNA, 15 nt, Human herpesvirus 1
gacuuccccuuccuc

SEQ ID NO: 296392 - RNA, 14 nt, Human herpesvirus 1
gagaaacggccgaa

SEQ ID NO: 296393 - RNA, 17 nt, Human herpesvirus 1
gagaccggauggaggag

SEQ ID NO: 296394 - RNA, 13 nt, Human herpesvirus 1
gagacguccuuaa

SEQ ID NO: 296395 - RNA, 18 nt, Human herpesvirus 1
gagacgucgccccugugg

SEQ ID NO: 296396 - RNA, 24 nt, Human herpesvirus 1
gagagccggccccggcaccacggg

SEQ ID NO: 296397 - RNA, 16 nt, Human herpesvirus 1
gagauggccgccccgg

SEQ ID NO: 296398 - RNA, 22 nt, Human herpesvirus 1
gagcacaaacgugcucugccac

SEQ ID NO: 296399 - RNA, 13 nt, Human herpesvirus 1
gagcacaaggggc

SEQ ID NO: 296400 - RNA, 21 nt, Human herpesvirus 1
gagccccggguuccgcgacca

SEQ ID NO: 296401 - RNA, 14 nt, Human herpesvirus 1
gagccgcgcggcca

SEQ ID NO: 296402 - RNA, 20 nt, Human herpesvirus 1
gagccguaacccaaccaaac

SEQ ID NO: 296403 - RNA, 17 nt, Human herpesvirus 1
gagccugccgccucacg

SEQ ID NO: 296404 - RNA, 14 nt, Human herpesvirus 1
gagcgcaguccacg

SEQ ID NO: 296405 - RNA, 14 nt, Human herpesvirus 1
gagcgcucuugucu

SEQ ID NO: 296406 - RNA, 15 nt, Human herpesvirus 1
gagcucagcuuuuac

SEQ ID NO: 296407 - RNA, 17 nt, Human herpesvirus 1
gaggcgauuagccagca

SEQ ID NO: 296408 - RNA, 22 nt, Human herpesvirus 1
gaggcgcauaaagggccggugg

SEQ ID NO: 296409 - RNA, 14 nt, Human herpesvirus 1
gaggcggccaacga

SEQ ID NO: 296410 - RNA, 19 nt, Human herpesvirus 1
gagggaguucccucugcgc

SEQ ID NO: 296411 - RNA, 16 nt, Human herpesvirus 1
gaggggcaccagaaac

SEQ ID NO: 296412 - RNA, 22 nt, Human herpesvirus 1
gagguggacgucggagacgagc

SEQ ID NO: 296413 - RNA, 19 nt, Human herpesvirus 1
gagguggggcgggggcccc

SEQ ID NO: 296414 - RNA, 15 nt, Human herpesvirus 1
gaguaccgcgagcuc

SEQ ID NO: 296415 - RNA, 16 nt, Human herpesvirus 1
gaguccggaacacccc

SEQ ID NO: 296416 - RNA, 13 nt, Human herpesvirus 1
gagucuggaaggg

SEQ ID NO: 296417 - RNA, 19 nt, Human herpesvirus 1
gagucuggaaggggggaaa

SEQ ID NO: 296418 - RNA, 16 nt, Human herpesvirus 1
gagucuucggggcccg

SEQ ID NO: 296419 - RNA, 20 nt, Human herpesvirus 1
gauagacccacaggcaucca

SEQ ID NO: 296420 - RNA, 17 nt, Human herpesvirus 1
gaucaccgcgggagcgg

SEQ ID NO: 296421 - RNA, 13 nt, Human herpesvirus 1
gaucagcacgcca

SEQ ID NO: 296422 - RNA, 12 nt, Human herpesvirus 1
gauccagauucc

SEQ ID NO: 296423 - RNA, 16 nt, Human herpesvirus 1
gaucccaacuccucag

SEQ ID NO: 296424 - RNA, 17 nt, Human herpesvirus 1
gaugaaaaugaaccaga

SEQ ID NO: 296425 - RNA, 13 nt, Human herpesvirus 1
gaugacucagggc

SEQ ID NO: 296426 - RNA, 20 nt, Human herpesvirus 1
gaugagcgcaguccacgggg

SEQ ID NO: 296427 - RNA, 20 nt, Human herpesvirus 1
gaugcgcguguccuuacucc

SEQ ID NO: 296428 - RNA, 20 nt, Human herpesvirus 1
gauggacccguacugcccau

SEQ ID NO: 296429 - RNA, 15 nt, Human herpesvirus 1
gauguaggcugguca

SEQ ID NO: 296430 - RNA, 20 nt, Human herpesvirus 1
gauguccugguagauaggca

SEQ ID NO: 296431 - RNA, 11 nt, Human herpesvirus 1
gauguuuacuu

SEQ ID NO: 296432 - RNA, 23 nt, Human herpesvirus 1
gauuccgguuugggguccgggag

SEQ ID NO: 296433 - RNA, 21 nt, Human herpesvirus 1
gauucgggucuacuacgaguc

SEQ ID NO: 296434 - RNA, 19 nt, Human herpesvirus 1
gcacacccccauccggugg

SEQ ID NO: 296435 - RNA, 17 nt, Human herpesvirus 1
gcacagaugggacgcca

SEQ ID NO: 296436 - RNA, 21 nt, Human herpesvirus 1
gcacauccagguacccggcgg

SEQ ID NO: 296437 - RNA, 23 nt, Human herpesvirus 1
gcacaugcgguuuaacacccgug

SEQ ID NO: 296438 - RNA, 14 nt, Human herpesvirus 1
gcaccaacaggggu

SEQ ID NO: 296439 - RNA, 20 nt, Human herpesvirus 1
gcaccacggguauaaggaca

SEQ ID NO: 296440 - RNA, 16 nt, Human herpesvirus 1
gcaccagaaaccaggu

SEQ ID NO: 296441 - RNA, 24 nt, Human herpesvirus 1
gcacccggccucucacacagcauc

SEQ ID NO: 296442 - RNA, 23 nt, Human herpesvirus 1
gcaccgggggcuaaaggguggua

SEQ ID NO: 296443 - RNA, 20 nt, Human herpesvirus 1
gcacgaguucaaccucgggu

SEQ ID NO: 296444 - RNA, 21 nt, Human herpesvirus 1
gcacggcgucgcugugaugaa

SEQ ID NO: 296445 - RNA, 18 nt, Human herpesvirus 1
gcacguauucggacagac

SEQ ID NO: 296446 - RNA, 19 nt, Human herpesvirus 1
gcacuuccuauaagacucu

SEQ ID NO: 296447 - RNA, 13 nt, Human herpesvirus 1
gcacuuuccccau

SEQ ID NO: 296448 - RNA, 15 nt, Human herpesvirus 1
gcacuuuccccaugc

SEQ ID NO: 296449 - RNA, 17 nt, Human herpesvirus 1
gcacuuuccccaugcga

SEQ ID NO: 296450 - RNA, 18 nt, Human herpesvirus 1
gcagaaacgcacgcgccg

SEQ ID NO: 296451 - RNA, 15 nt, Human herpesvirus 1
gcagccguccagaca

SEQ ID NO: 296452 - RNA, 12 nt, Human herpesvirus 1
gcagccuggucg

SEQ ID NO: 296453 - RNA, 22 nt, Human herpesvirus 1
gcagcugggaccccggcggccc

SEQ ID NO: 296454 - RNA, 19 nt, Human herpesvirus 1
gcaggauuucgcgcaggug

SEQ ID NO: 296455 - RNA, 22 nt, Human herpesvirus 1
gcaggcgucgaucuccucaaac

SEQ ID NO: 296456 - RNA, 20 nt, Human herpesvirus 1
gcauaccuggguguguuuau

SEQ ID NO: 296457 - RNA, 13 nt, Human herpesvirus 1
gcauaugcaaauu

SEQ ID NO: 296458 - RNA, 17 nt, Human herpesvirus 1
gcaucccccgucugggu

SEQ ID NO: 296459 - RNA, 13 nt, Human herpesvirus 1
gcaugcgcgggcu

SEQ ID NO: 296460 - RNA, 14 nt, Human herpesvirus 1
gcauggccccgggg

SEQ ID NO: 296461 - RNA, 18 nt, Human herpesvirus 1
gcauuuauugacccaaaa

SEQ ID NO: 296462 - RNA, 16 nt, Human herpesvirus 1
gccaaauaaagccacu

SEQ ID NO: 296463 - RNA, 22 nt, Human herpesvirus 1
gccaacaauccccaggacaccg

SEQ ID NO: 296464 - RNA, 14 nt, Human herpesvirus 1
gccaacgaggacca

SEQ ID NO: 296465 - RNA, 18 nt, Human herpesvirus 1
gccaagaaucccggccaa

SEQ ID NO: 296466 - RNA, 22 nt, Human herpesvirus 1
gccaauaucgcuagagacagcc

SEQ ID NO: 296467 - RNA, 19 nt, Human herpesvirus 1
gccaauccgugucggggag

SEQ ID NO: 296468 - RNA, 19 nt, Human herpesvirus 1
gccacagaaacaaaaccgg

SEQ ID NO: 296469 - RNA, 18 nt, Human herpesvirus 1
gccaccaauagaccagag

SEQ ID NO: 296470 - RNA, 13 nt, Human herpesvirus 1
gccacccagguga

SEQ ID NO: 296471 - RNA, 16 nt, Human herpesvirus 1
gccagcgcgggugguu

SEQ ID NO: 296472 - RNA, 19 nt, Human herpesvirus 1
gccagcguaaccuccgggg

SEQ ID NO: 296473 - RNA, 22 nt, Human herpesvirus 1
gccagcucggacaccagcagcu

SEQ ID NO: 296474 - RNA, 14 nt, Human herpesvirus 1
gccaucacggccaa

SEQ ID NO: 296475 - RNA, 17 nt, Human herpesvirus 1
gccaucgccggggaccg

SEQ ID NO: 296476 - RNA, 19 nt, Human herpesvirus 1
gccauggcgggacugggca

SEQ ID NO: 296477 - RNA, 18 nt, Human herpesvirus 1
gccauggugccgaccggg

SEQ ID NO: 296478 - RNA, 17 nt, Human herpesvirus 1
gcccacccccacccccc

SEQ ID NO: 296479 - RNA, 15 nt, Human herpesvirus 1
gcccacuacaccagc

SEQ ID NO: 296480 - RNA, 20 nt, Human herpesvirus 1
gcccagcgcagaggcggcca

SEQ ID NO: 296481 - RNA, 18 nt, Human herpesvirus 1
gccccaccggcaccaaca

SEQ ID NO: 296482 - RNA, 16 nt, Human herpesvirus 1
gcccccacccucgggu

SEQ ID NO: 296483 - RNA, 17 nt, Human herpesvirus 1
gcccccccaacggggga

SEQ ID NO: 296484 - RNA, 15 nt, Human herpesvirus 1
gcccccgcccuaaca

SEQ ID NO: 296485 - RNA, 18 nt, Human herpesvirus 1
gccccgaagagggggacc

SEQ ID NO: 296486 - RNA, 17 nt, Human herpesvirus 1
gccccugggccccggga

SEQ ID NO: 296487 - RNA, 15 nt, Human herpesvirus 1
gcccgacagaccucc

SEQ ID NO: 296488 - RNA, 18 nt, Human herpesvirus 1
gcccgcgggaggccgccc

SEQ ID NO: 296489 - RNA, 18 nt, Human herpesvirus 1
gcccggaacgaacccaaa

SEQ ID NO: 296490 - RNA, 16 nt, Human herpesvirus 1
gcccggcgaugugggu

SEQ ID NO: 296491 - RNA, 16 nt, Human herpesvirus 1
gccgaaccgaaccagc

SEQ ID NO: 296492 - RNA, 18 nt, Human herpesvirus 1
gccgacaacugccugacc

SEQ ID NO: 296493 - RNA, 17 nt, Human herpesvirus 1
ggccccacgucggucgc

SEQ ID NO: 296494 - RNA, 18 nt, Human herpesvirus 1
ggcccgcgucgggaucca

SEQ ID NO: 296495 - RNA, 17 nt, Human herpesvirus 1
ggcccgcgugcggcugg

SEQ ID NO: 296496 - RNA, 16 nt, Human herpesvirus 1
ggcccgcguuuggccu

SEQ ID NO: 296497 - RNA, 17 nt, Human herpesvirus 1
ggcccuuacggaccaga

SEQ ID NO: 296498 - RNA, 16 nt, Human herpesvirus 1
ggccgacacggucgga

SEQ ID NO: 296499 - RNA, 22 nt, Human herpesvirus 1
ggccgccagcgcggcggggccc

SEQ ID NO: 296500 - RNA, 22 nt, Human herpesvirus 1
ggccgcgcccacuacaccagcc

SEQ ID NO: 296501 - RNA, 17 nt, Human herpesvirus 1
ggccgcgcggcaacaca

SEQ ID NO: 296502 - RNA, 22 nt, Human herpesvirus 1
ggccgucgggcacguacacggg

SEQ ID NO: 296503 - RNA, 12 nt, Human herpesvirus 1
ggccucacgggg

SEQ ID NO: 296504 - RNA, 19 nt, Human herpesvirus 1
ggccucgagggucacagga

SEQ ID NO: 296505 - RNA, 20 nt, Human herpesvirus 1
ggccucgccaguuucggucg

SEQ ID NO: 296506 - RNA, 12 nt, Human herpesvirus 1
ggcgacccagau

SEQ ID NO: 296507 - RNA, 14 nt, Human herpesvirus 1
ggcgaggggcggga

SEQ ID NO: 296508 - RNA, 15 nt, Human herpesvirus 1
ggcgauaucaggggc

SEQ ID NO: 296509 - RNA, 15 nt, Human herpesvirus 1
ggcgauuagccagca

SEQ ID NO: 296510 - RNA, 21 nt, Human herpesvirus 1
ggcgccgggggacgagaaaca

SEQ ID NO: 296511 - RNA, 18 nt, Human herpesvirus 1
ggcgccuccggggguccg

SEQ ID NO: 296512 - RNA, 18 nt, Human herpesvirus 1
ggcgcucagggcggcgac

SEQ ID NO: 296513 - RNA, 14 nt, Human herpesvirus 1
ggcgcuugugagac

SEQ ID NO: 296514 - RNA, 16 nt, Human herpesvirus 1
ggcggagggugguucc

SEQ ID NO: 296515 - RNA, 16 nt, Human herpesvirus 1
ggcggccccuggcgcc

SEQ ID NO: 296516 - RNA, 17 nt, Human herpesvirus 1
ggcgguccugacggcca

SEQ ID NO: 296517 - RNA, 16 nt, Human herpesvirus 1
ggcguaccaaacaaac

SEQ ID NO: 296518 - RNA, 18 nt, Human herpesvirus 1
ggcguuguggcggucggc

SEQ ID NO: 296519 - RNA, 14 nt, Human herpesvirus 1
ggcuacaggggcca

SEQ ID NO: 296520 - RNA, 21 nt, Human herpesvirus 1
ggcucgauggcgggcgaggac

SEQ ID NO: 296521 - RNA, 22 nt, Human herpesvirus 1
gggaagucacgagguacggggc

SEQ ID NO: 296522 - RNA, 17 nt, Human herpesvirus 1
gggacgucguaaggggg

SEQ ID NO: 296523 - RNA, 21 nt, Human herpesvirus 1
gggagcgcucuugucucaggg

SEQ ID NO: 296524 - RNA, 19 nt, Human herpesvirus 1
gggagcggugacgaacgcg

SEQ ID NO: 296525 - RNA, 20 nt, Human herpesvirus 1
gggaggccgcaucgaacgca

SEQ ID NO: 296526 - RNA, 18 nt, Human herpesvirus 1
gggagggaaagcaaagag

SEQ ID NO: 296527 - RNA, 13 nt, Human herpesvirus 1
gggauacauggaa

SEQ ID NO: 296528 - RNA, 16 nt, Human herpesvirus 1
gggaucccacgucccc

SEQ ID NO: 296529 - RNA, 23 nt, Human herpesvirus 1
gggcaggcgccuccggggguccg

SEQ ID NO: 296530 - RNA, 20 nt, Human herpesvirus 1
gggcccacgaucaccgcggg

SEQ ID NO: 296531 - RNA, 23 nt, Human herpesvirus 1
gggccccuugggagagccaugcg

SEQ ID NO: 296532 - RNA, 14 nt, Human herpesvirus 1
gggcccgcgucggg

SEQ ID NO: 296533 - RNA, 15 nt, Human herpesvirus 1
gggcccuggcgcggg

SEQ ID NO: 296534 - RNA, 22 nt, Human herpesvirus 1
gggccgcggaggcccccaucca

SEQ ID NO: 296535 - RNA, 18 nt, Human herpesvirus 1
gggccgugauuccucucc

SEQ ID NO: 296536 - RNA, 18 nt, Human herpesvirus 1
gggccucgcugaccagcg

SEQ ID NO: 296537 - RNA, 17 nt, Human herpesvirus 1
gggccuggugcucgugg

SEQ ID NO: 296538 - RNA, 23 nt, Human herpesvirus 1
gggcgcauccccccuuuugcacu

SEQ ID NO: 296539 - RNA, 22 nt, Human herpesvirus 1
gggcgcguuugcacaacacaaa

SEQ ID NO: 296540 - RNA, 21 nt, Human herpesvirus 1
gggcgcuugugagacccgaag

SEQ ID NO: 296541 - RNA, 14 nt, Human herpesvirus 1
gggcggccaugccg

SEQ ID NO: 296542 - RNA, 15 nt, Human herpesvirus 1
gggcgucaccaugca

SEQ ID NO: 296543 - RNA, 14 nt, Human herpesvirus 1
gggcucagccagac

SEQ ID NO: 296544 - RNA, 23 nt, Human herpesvirus 1
gggcucuacccucuggacgcccg

SEQ ID NO: 296545 - RNA, 17 nt, Human herpesvirus 1
gggcugcgugucaaagg

SEQ ID NO: 296546 - RNA, 14 nt, Human herpesvirus 1
gggcugucauuccu

SEQ ID NO: 296547 - RNA, 12 nt, Human herpesvirus 1
ggggaggggcca

SEQ ID NO: 296548 - RNA, 22 nt, Human herpesvirus 1
ggggccgugcgauggacaccgc

SEQ ID NO: 296549 - RNA, 17 nt, Human herpesvirus 1
ggggccuuuucgccgcc

SEQ ID NO: 296550 - RNA, 10 nt, Human herpesvirus 1
ggggcgggac

SEQ ID NO: 296551 - RNA, 22 nt, Human herpesvirus 1
ggggcuggacguucgacacgcc

SEQ ID NO: 296552 - RNA, 22 nt, Human herpesvirus 1
gggggacucacuacccaccgcg

SEQ ID NO: 296553 - RNA, 18 nt, Human herpesvirus 1
gggguaugugauaugcua

SEQ ID NO: 296554 - RNA, 16 nt, Human herpesvirus 1
ggggucaggucugcgg

SEQ ID NO: 296555 - RNA, 16 nt, Human herpesvirus 1
ggggucgcggccgcga

SEQ ID NO: 296556 - RNA, 18 nt, Human herpesvirus 1
gggguucccgcugcccac

SEQ ID NO: 296557 - RNA, 20 nt, Human herpesvirus 1
gggucagcuccucgcgcggc

SEQ ID NO: 296558 - RNA, 19 nt, Human herpesvirus 1
gggucgcggccgcgaccca

SEQ ID NO: 296559 - RNA, 15 nt, Human herpesvirus 1
gggucggaaccauag

SEQ ID NO: 296560 - RNA, 16 nt, Human herpesvirus 1
ggguggaucuuagccu

SEQ ID NO: 296561 - RNA, 20 nt, Human herpesvirus 1
ggguggaucuuagccucccc

SEQ ID NO: 296562 - RNA, 16 nt, Human herpesvirus 1
gggugggggugggcau

SEQ ID NO: 296563 - RNA, 15 nt, Human herpesvirus 1
gggugguacuggugc

SEQ ID NO: 296564 - RNA, 13 nt, Human herpesvirus 1
gguaauaccaaau

SEQ ID NO: 296565 - RNA, 19 nt, Human herpesvirus 1
gguaauuaaaaacuugcaa

SEQ ID NO: 296566 - RNA, 23 nt, Human herpesvirus 1
gguacgccccaccggcaccaaca

SEQ ID NO: 296567 - RNA, 20 nt, Human herpesvirus 1
gguacggcggccaaacugaa

SEQ ID NO: 296568 - RNA, 17 nt, Human herpesvirus 1
gguauaaggacauccac

SEQ ID NO: 296569 - RNA, 14 nt, Human herpesvirus 1
ggucaaacucaggc

SEQ ID NO: 296570 - RNA, 19 nt, Human herpesvirus 1
ggucaaacucaggcaaaca

SEQ ID NO: 296571 - RNA, 14 nt, Human herpesvirus 1
gguccaaacucccg

SEQ ID NO: 296572 - RNA, 17 nt, Human herpesvirus 1
gguccaccgcauacucc

SEQ ID NO: 296573 - RNA, 17 nt, Human herpesvirus 1
ggucccgugcaacccuu

SEQ ID NO: 296574 - RNA, 15 nt, Human herpesvirus 1
ggucgccgugcuccu

SEQ ID NO: 296575 - RNA, 22 nt, Human herpesvirus 1
ggucuuuuacacagacuguccg

SEQ ID NO: 296576 - RNA, 22 nt, Human herpesvirus 1
ggucuuuuauuuuggggacaua

SEQ ID NO: 296577 - RNA, 16 nt, Human herpesvirus 1
ggugacguccaacuga

SEQ ID NO: 296578 - RNA, 20 nt, Human herpesvirus 1
ggugauguugcccgcggacc

SEQ ID NO: 296579 - RNA, 14 nt, Human herpesvirus 1
ggugcugcgacacu

SEQ ID NO: 296580 - RNA, 20 nt, Human herpesvirus 1
ggugcuguacacgggguccu

SEQ ID NO: 296581 - RNA, 16 nt, Human herpesvirus 1
ggugggugcuuuggaa

SEQ ID NO: 296582 - RNA, 14 nt, Human herpesvirus 1
gguguuuggggguu

SEQ ID NO: 296583 - RNA, 13 nt, Human herpesvirus 1
gguuaaacacaaa

SEQ ID NO: 296584 - RNA, 18 nt, Human herpesvirus 1
gguuauaugcacuuccua

SEQ ID NO: 296585 - RNA, 15 nt, Human herpesvirus 1
gguucgcgaacccuu

SEQ ID NO: 296586 - RNA, 14 nt, Human herpesvirus 1
gguuuacgcgggca

SEQ ID NO: 296587 - RNA, 17 nt, Human herpesvirus 1
guaacaugcgcacguga

SEQ ID NO: 296588 - RNA, 18 nt, Human herpesvirus 1
guaacaugcgcacgugau

SEQ ID NO: 296589 - RNA, 15 nt, Human herpesvirus 1
guaacggcauaugca

SEQ ID NO: 296590 - RNA, 16 nt, Human herpesvirus 1
guaacggcauaugcaa

SEQ ID NO: 296591 - RNA, 12 nt, Human herpesvirus 1
guaacguccuuu

SEQ ID NO: 296592 - RNA, 14 nt, Human herpesvirus 1
guaaggacacgcgc

SEQ ID NO: 296593 - RNA, 19 nt, Human herpesvirus 1
guaaucauaaccacgccca

SEQ ID NO: 296594 - RNA, 12 nt, Human herpesvirus 1
guaccaaacaaa

SEQ ID NO: 296595 - RNA, 16 nt, Human herpesvirus 1
guaccaaacaaacaaa

SEQ ID NO: 296596 - RNA, 19 nt, Human herpesvirus 1
guaccaccccccugugaac

SEQ ID NO: 296597 - RNA, 14 nt, Human herpesvirus 1
guacuucuacaccu

SEQ ID NO: 296598 - RNA, 22 nt, Human herpesvirus 1
guagcauaccuggguguguuua

SEQ ID NO: 296599 - RNA, 20 nt, Human herpesvirus 1
guagcugggugggguuugug

SEQ ID NO: 296600 - RNA, 13 nt, Human herpesvirus 1
guaggaggugcug

SEQ ID NO: 296601 - RNA, 22 nt, Human herpesvirus 1
guaucuaguugauaugcaucuc

SEQ ID NO: 296602 - RNA, 16 nt, Human herpesvirus 1
gucaaacuccccaaac

SEQ ID NO: 296603 - RNA, 10 nt, Human herpesvirus 1
gucauaugca

SEQ ID NO: 296604 - RNA, 14 nt, Human herpesvirus 1
guccauaccgacca

SEQ ID NO: 296605 - RNA, 17 nt, Human herpesvirus 1
guccauaccgaccacac

SEQ ID NO: 296606 - RNA, 19 nt, Human herpesvirus 1
guccauuaaagacaacaaa

SEQ ID NO: 296607 - RNA, 21 nt, Human herpesvirus 1
guccauuaaagacaacaaaca

SEQ ID NO: 296608 - RNA, 23 nt, Human herpesvirus 1
ucaauaccgccgacgccgucgac

SEQ ID NO: 296609 - RNA, 17 nt, Human herpesvirus 1
ucacaaugagacccaaa

SEQ ID NO: 296610 - RNA, 19 nt, Human herpesvirus 1
ucaccaugcagcgccggac

SEQ ID NO: 296611 - RNA, 23 nt, Human herpesvirus 1
ucacgcgcauccgcaagcuaugc

SEQ ID NO: 296612 - RNA, 23 nt, Human herpesvirus 1
ucaggcggcggcgcugacggacc

SEQ ID NO: 296613 - RNA, 20 nt, Human herpesvirus 1
ucagggccuccgaccccaga

SEQ ID NO: 296614 - RNA, 23 nt, Human herpesvirus 1
ucagggccuccgaccccagacau

SEQ ID NO: 296615 - RNA, 15 nt, Human herpesvirus 1
ucaggucauccuugg

SEQ ID NO: 296616 - RNA, 18 nt, Human herpesvirus 1
ucauaaacgcgggguucg

SEQ ID NO: 296617 - RNA, 14 nt, Human herpesvirus 1
ucauaaccacgccc

SEQ ID NO: 296618 - RNA, 19 nt, Human herpesvirus 1
uccacgguaggcccagcau

SEQ ID NO: 296619 - RNA, 17 nt, Human herpesvirus 1
uccaggcugucgacgcc

SEQ ID NO: 296620 - RNA, 17 nt, Human herpesvirus 1
uccaucccacaaacaca

SEQ ID NO: 296621 - RNA, 16 nt, Human herpesvirus 1
ucccagaauuuggcca

SEQ ID NO: 296622 - RNA, 23 nt, Human herpesvirus 1
ucccaucgaguauguacugcggc

SEQ ID NO: 296623 - RNA, 16 nt, Human herpesvirus 1
uccccacccacccacu

SEQ ID NO: 296624 - RNA, 20 nt, Human herpesvirus 1
ucccccauggggaaugguuu

SEQ ID NO: 296625 - RNA, 21 nt, Human herpesvirus 1
ucccccggggaccuugccccg

SEQ ID NO: 296626 - RNA, 21 nt, Human herpesvirus 1
uccccgcgcaugcucuggggu

SEQ ID NO: 296627 - RNA, 17 nt, Human herpesvirus 1
uccccggaggacggcca

SEQ ID NO: 296628 - RNA, 20 nt, Human herpesvirus 1
ucccgccacccgaaccacca

SEQ ID NO: 296629 - RNA, 21 nt, Human herpesvirus 1
ucccgcggcccuuaaugggca

SEQ ID NO: 296630 - RNA, 16 nt, Human herpesvirus 1
ucccucaggucauccu

SEQ ID NO: 296631 - RNA, 18 nt, Human herpesvirus 1
ucccuccuuagcacgauc

SEQ ID NO: 296632 - RNA, 16 nt, Human herpesvirus 1
ucccugucuguguugg

SEQ ID NO: 296633 - RNA, 12 nt, Human herpesvirus 1
uccgaccccaga

SEQ ID NO: 296634 - RNA, 19 nt, Human herpesvirus 1
uccgcaacugcuccagaaa

SEQ ID NO: 296635 - RNA, 19 nt, Human herpesvirus 1
uccgccaaauaaagccacu

SEQ ID NO: 296636 - RNA, 17 nt, Human herpesvirus 1
uccgcccgugcugccgu

SEQ ID NO: 296637 - RNA, 21 nt, Human herpesvirus 1
uccggaacaccccugggguag

SEQ ID NO: 296638 - RNA, 19 nt, Human herpesvirus 1
uccggcaauucccgcggcc

SEQ ID NO: 296639 - RNA, 12 nt, Human herpesvirus 1
uccggggguccg

SEQ ID NO: 296640 - RNA, 18 nt, Human herpesvirus 1
uccucacccucacgcgca

SEQ ID NO: 296641 - RNA, 20 nt, Human herpesvirus 1
uccucggcgggcucgggguc

SEQ ID NO: 296642 - RNA, 19 nt, Human herpesvirus 1
uccucuccgcggugucugg

SEQ ID NO: 296643 - RNA, 19 nt, Human herpesvirus 1
uccuggagacgggugagug

SEQ ID NO: 296644 - RNA, 14 nt, Human herpesvirus 1
uccuggggggucca

SEQ ID NO: 296645 - RNA, 19 nt, Human herpesvirus 1
uccugggggguccagucaa

SEQ ID NO: 296646 - RNA, 19 nt, Human herpesvirus 1
ucgaaacuuaacacaccaa

SEQ ID NO: 296647 - RNA, 19 nt, Human herpesvirus 1
ucgacucuaucgcgcgcau

SEQ ID NO: 296648 - RNA, 17 nt, Human herpesvirus 1
ucgaucuccucaaacac

SEQ ID NO: 296649 - RNA, 18 nt, Human herpesvirus 1
ucgcgaacauaagcuugc

SEQ ID NO: 296650 - RNA, 17 nt, Human herpesvirus 1
ucgcgaccaccccaaau

SEQ ID NO: 296651 - RNA, 18 nt, Human herpesvirus 1
ucgcgauuuccgacgaac

SEQ ID NO: 296652 - RNA, 13 nt, Human herpesvirus 1
ucgcggccgcgac

SEQ ID NO: 296653 - RNA, 15 nt, Human herpesvirus 1
ucgcggcuucgcggu

SEQ ID NO: 296654 - RNA, 23 nt, Human herpesvirus 1
ucgcggcuucgcgguggcggucc

SEQ ID NO: 296655 - RNA, 16 nt, Human herpesvirus 1
ucgcgguagcccggcc

SEQ ID NO: 296656 - RNA, 13 nt, Human herpesvirus 1
ucgcguagggguc

SEQ ID NO: 296657 - RNA, 22 nt, Human herpesvirus 1
ucgcguguaauacuugcgcggc

SEQ ID NO: 296658 - RNA, 20 nt, Human herpesvirus 1
ucgcguuuaagcuuggucag

SEQ ID NO: 296659 - RNA, 19 nt, Human herpesvirus 1
ucgcucccguccauuccca

SEQ ID NO: 296660 - RNA, 14 nt, Human herpesvirus 1
ucgcucucgccuuu

SEQ ID NO: 296661 - RNA, 22 nt, Human herpesvirus 1
ucggaaccaguucgcgcccgac

SEQ ID NO: 296662 - RNA, 12 nt, Human herpesvirus 1
ucggaaccauag

SEQ ID NO: 296663 - RNA, 19 nt, Human herpesvirus 1
ucgggcauggccccggggc

SEQ ID NO: 296664 - RNA, 19 nt, Human herpesvirus 1
ucgggccgucguuggucag

SEQ ID NO: 296665 - RNA, 22 nt, Human herpesvirus 1
ucgggggaguugugaucauugc

SEQ ID NO: 296666 - RNA, 20 nt, Human herpesvirus 1
ucggugcgucugggcccgac

SEQ ID NO: 296667 - RNA, 15 nt, Human herpesvirus 1
ucguuggucagggcg

SEQ ID NO: 296668 - RNA, 23 nt, Human herpesvirus 1
ucuacgcgccggccgcacccaca

SEQ ID NO: 296669 - RNA, 11 nt, Human herpesvirus 1
ucucccggggg

SEQ ID NO: 296670 - RNA, 20 nt, Human herpesvirus 1
ucuggcggguuggugcggug

SEQ ID NO: 296671 - RNA, 20 nt, Human herpesvirus 1
ucuggcguucgucgcccucc

SEQ ID NO: 296672 - RNA, 13 nt, Human herpesvirus 1
ucuucccacacac

SEQ ID NO: 296673 - RNA, 14 nt, Human herpesvirus 1
ucuugucucagggc

SEQ ID NO: 296674 - RNA, 16 nt, Human herpesvirus 1
ucuugucucagggcaa

SEQ ID NO: 296675 - RNA, 14 nt, Human herpesvirus 1
ucuuugguaccaug

SEQ ID NO: 296676 - RNA, 17 nt, Human herpesvirus 1
ugaaaacacgcauuuau

SEQ ID NO: 296677 - RNA, 15 nt, Human herpesvirus 1
ugaccaccacaaucg

SEQ ID NO: 296678 - RNA, 20 nt, Human herpesvirus 1
ugacccuaggaggccgccac

SEQ ID NO: 296679 - RNA, 20 nt, Human herpesvirus 1
ugagacccgaagacgcaaua

SEQ ID NO: 296680 - RNA, 19 nt, Human herpesvirus 1
ugauaaugaucaagcggcg

SEQ ID NO: 296681 - RNA, 23 nt, Human herpesvirus 1
ugauacuuuuauuuauuaacuca

SEQ ID NO: 296682 - RNA, 14 nt, Human herpesvirus 1
ugauagacccacag

SEQ ID NO: 296683 - RNA, 13 nt, Human herpesvirus 1
ugauccuuagggg

SEQ ID NO: 296684 - RNA, 16 nt, Human herpesvirus 1
ugauuaaaacacccca

SEQ ID NO: 296685 - RNA, 17 nt, Human herpesvirus 1
ugauucuugucagggac

SEQ ID NO: 296686 - RNA, 20 nt, Human herpesvirus 1
ugcaaaugggauacauggaa

SEQ ID NO: 296687 - RNA, 16 nt, Human herpesvirus 1
ugcacaacacaaacau

SEQ ID NO: 296688 - RNA, 14 nt, Human herpesvirus 1
ugcacccagccuuu

SEQ ID NO: 296689 - RNA, 21 nt, Human herpesvirus 1
ugcacccccgacgaggugcgc

SEQ ID NO: 296690 - RNA, 12 nt, Human herpesvirus 1
ugccauguuggg

SEQ ID NO: 296691 - RNA, 18 nt, Human herpesvirus 1
ugccccccccaccccaga

SEQ ID NO: 296692 - RNA, 20 nt, Human herpesvirus 1
ugcccgacagggccgugccc

SEQ ID NO: 296693 - RNA, 20 nt, Human herpesvirus 1
ugcccggaacgaacccaaag

SEQ ID NO: 296694 - RNA, 11 nt, Human herpesvirus 1
ugcgacacucg

SEQ ID NO: 296695 - RNA, 19 nt, Human herpesvirus 1
ugcgcacgugauguaggcu

SEQ ID NO: 296696 - RNA, 15 nt, Human herpesvirus 1
ugcgccgcaggccaa

SEQ ID NO: 296697 - RNA, 15 nt, Human herpesvirus 1
ugcgcgagcaccugc

SEQ ID NO: 296698 - RNA, 14 nt, Human herpesvirus 1
ugcgcgauguggau

SEQ ID NO: 296699 - RNA, 18 nt, Human herpesvirus 1
ugcggaaagcaagaacaa

SEQ ID NO: 296700 - RNA, 14 nt, Human herpesvirus 1
ugcggccaacacaa

SEQ ID NO: 296701 - RNA, 22 nt, Human herpesvirus 1
ugcggcuuaugaacgacugggc

SEQ ID NO: 296702 - RNA, 20 nt, Human herpesvirus 1
ugcgggcaucggaacacgcc

SEQ ID NO: 296703 - RNA, 21 nt, Human herpesvirus 1
ugcgguccggagccgcgcggc

SEQ ID NO: 296704 - RNA, 15 nt, Human herpesvirus 1
ugcuugagucugucc

SEQ ID NO: 296705 - RNA, 14 nt, Human herpesvirus 1
uggaaauagcaaca

SEQ ID NO: 296706 - RNA, 17 nt, Human herpesvirus 1
uggaccuugggccgucg

SEQ ID NO: 296707 - RNA, 15 nt, Human herpesvirus 1
uggacgcccgggcgc

SEQ ID NO: 296708 - RNA, 15 nt, Human herpesvirus 1
uggauaaggcccaac

SEQ ID NO: 296709 - RNA, 18 nt, Human herpesvirus 1
uggccagcagggcacaua

SEQ ID NO: 296710 - RNA, 18 nt, Human herpesvirus 1
uggcccacgcaaacaaca

SEQ ID NO: 296711 - RNA, 17 nt, Human herpesvirus 1
uggccgacaacugccug

SEQ ID NO: 296712 - RNA, 22 nt, Human herpesvirus 1
uggccgcgcccacuacaccagc

SEQ ID NO: 296713 - RNA, 23 nt, Human herpesvirus 1
uggccgcgcccacuacaccagcc

SEQ ID NO: 296714 - RNA, 12 nt, Human herpesvirus 1
uggcgauccaga

SEQ ID NO: 296715 - RNA, 19 nt, Human herpesvirus 1
uggcgccgccugguccccc

SEQ ID NO: 296716 - RNA, 15 nt, Human herpesvirus 1
uggcgccgggggacg

SEQ ID NO: 296717 - RNA, 19 nt, Human herpesvirus 1
uggcgcgaggggggguccg

SEQ ID NO: 296718 - RNA, 18 nt, Human herpesvirus 1
uggcgcggggguucaugc

SEQ ID NO: 296719 - RNA, 17 nt, Human herpesvirus 1
uggcuggaggcaaacac

SEQ ID NO: 296720 - RNA, 13 nt, Human herpesvirus 1
ugggacccacaga

SEQ ID NO: 296721 - RNA, 22 nt, Human herpesvirus 1
ugggagcccuccuggggggucc

SEQ ID NO: 296722 - RNA, 13 nt, Human herpesvirus 1
ugggagugggggu

SEQ ID NO: 296723 - RNA, 14 nt, Human herpesvirus 1
ugggaugggaccuu

SEQ ID NO: 296724 - RNA, 13 nt, Human herpesvirus 1
ugggccagaccaa

SEQ ID NO: 296725 - RNA, 18 nt, Human herpesvirus 1
ugggccccgggacacccc

SEQ ID NO: 296726 - RNA, 15 nt, Human herpesvirus 1
ugggcggccccggcc

SEQ ID NO: 296727 - RNA, 20 nt, Human herpesvirus 1
uggggacacuggguucuccu

SEQ ID NO: 296728 - RNA, 14 nt, Human herpesvirus 1
ugggguagugcgau

SEQ ID NO: 296729 - RNA, 17 nt, Human herpesvirus 1
ugggucuuauuugguau

SEQ ID NO: 296730 - RNA, 13 nt, Human herpesvirus 1
uggguggggagug

SEQ ID NO: 296731 - RNA, 18 nt, Human herpesvirus 1
uggguggggagugggugg

SEQ ID NO: 296732 - RNA, 16 nt, Human herpesvirus 1
uggguucuccuggaac

SEQ ID NO: 296733 - RNA, 14 nt, Human herpesvirus 1
ugguauugcccaac

SEQ ID NO: 296734 - RNA, 22 nt, Human herpesvirus 1
uggucgggccgucguuggucag

SEQ ID NO: 296735 - RNA, 22 nt, Human herpesvirus 1
uggucgucgggcgccaaagccc

SEQ ID NO: 296736 - RNA, 19 nt, Human herpesvirus 1
uggucgugcguagcauacc

SEQ ID NO: 296737 - RNA, 22 nt, Human herpesvirus 1
uggugggucguuuguucgggga

SEQ ID NO: 296738 - RNA, 21 nt, Human herpesvirus 1
ugguuuuuauuuacaacaaac

SEQ ID NO: 296739 - RNA, 17 nt, Human herpesvirus 1
uguaaccccccccaaaa

SEQ ID NO: 296740 - RNA, 20 nt, Human herpesvirus 1
uguagauucgaaaccacgga

SEQ ID NO: 296741 - RNA, 19 nt, Human herpesvirus 1
uguagccgaucuugauccc

SEQ ID NO: 296742 - RNA, 17 nt, Human herpesvirus 1
uguaucggggguuccca

SEQ ID NO: 296743 - RNA, 23 nt, Human herpesvirus 1
uguccccgccgacaagccgcgau

SEQ ID NO: 296744 - RNA, 21 nt, Human herpesvirus 1
ugucccgacauuaaccaccug

SEQ ID NO: 296745 - RNA, 12 nt, Human herpesvirus 1
uguccuuucuca

SEQ ID NO: 296746 - RNA, 23 nt, Human herpesvirus 1
uguccuuuuggguuucacugaaa

SEQ ID NO: 296747 - RNA, 17 nt, Human herpesvirus 1
ugucgcguugucucuga

SEQ ID NO: 296748 - RNA, 18 nt, Human herpesvirus 1
ugugauucuugucaggga

SEQ ID NO: 296749 - RNA, 21 nt, Human herpesvirus 1
uguggagauucgggucuacua

SEQ ID NO: 296750 - RNA, 21 nt, Human herpesvirus 1
uguggcgcgaggggggguccg

SEQ ID NO: 296751 - RNA, 18 nt, Human herpesvirus 1
uguguaaccccccccaaa

SEQ ID NO: 296752 - RNA, 21 nt, Human herpesvirus 1
uguucccauuaucccauuccu

SEQ ID NO: 296753 - RNA, 22 nt, Human herpesvirus 1
uguuucuuccuugccacucccc

SEQ ID NO: 296754 - RNA, 13 nt, Human herpesvirus 1
uuaaauacaugcc

SEQ ID NO: 296755 - RNA, 14 nt, Human herpesvirus 1
uuaaauacaugcca

SEQ ID NO: 296756 - RNA, 21 nt, Human herpesvirus 1
uuaaaucucgucgacaaacag

SEQ ID NO: 296757 - RNA, 14 nt, Human herpesvirus 1
uuaacgugguccac

SEQ ID NO: 296758 - RNA, 14 nt, Human herpesvirus 1
uuaagcuuggucag

SEQ ID NO: 296759 - RNA, 17 nt, Human herpesvirus 1
uuaugguucgugggggu

SEQ ID NO: 296760 - RNA, 20 nt, Human herpesvirus 1
uuauuuaaaaagauauacag

SEQ ID NO: 296761 - RNA, 23 nt, Human herpesvirus 1
uucccccccucgccccauacucc

SEQ ID NO: 296762 - RNA, 19 nt, Human herpesvirus 1
uuccuuuuccccaccccaa

SEQ ID NO: 296763 - RNA, 21 nt, Human herpesvirus 1
uucucuccgcccuucccgcca

SEQ ID NO: 296764 - RNA, 19 nt, Human herpesvirus 1
uugacccgggcguccgcca

SEQ ID NO: 296765 - RNA, 22 nt, Human herpesvirus 1
uugauacccuguuuaugguguc

SEQ ID NO: 296766 - RNA, 23 nt, Human herpesvirus 1
uugcccuccccccgcccccggca

SEQ ID NO: 296767 - RNA, 14 nt, Human herpesvirus 1
uugccgcguugguc

SEQ ID NO: 296768 - RNA, 15 nt, Human herpesvirus 1
uuggaugaaaacacg

SEQ ID NO: 296769 - RNA, 17 nt, Human herpesvirus 1
uuguccuucuuugcuca

SEQ ID NO: 296770 - RNA, 20 nt, Human herpesvirus 1
uuguggggucggaaccauag

SEQ ID NO: 296771 - RNA, 12 nt, Human herpesvirus 1
uugugugucaau

SEQ ID NO: 296772 - RNA, 21 nt, Human herpesvirus 1
uuguguugacuuugccucuuc

SEQ ID NO: 296773 - RNA, 14 nt, Human herpesvirus 1
uuuaagcgcugcug

SEQ ID NO: 296774 - RNA, 15 nt, Human herpesvirus 1
uuuaagcgcugcugc

SEQ ID NO: 296775 - RNA, 14 nt, Human herpesvirus 1
uuuauuaacaucaa

SEQ ID NO: 296776 - RNA, 17 nt, Human herpesvirus 1
uuuauuggucaaacuca

SEQ ID NO: 296777 - RNA, 13 nt, Human herpesvirus 1
uuucaguuucaug

SEQ ID NO: 296778 - RNA, 22 nt, Human herpesvirus 1
uuuccggcagccguccagacac

SEQ ID NO: 296779 - RNA, 20 nt, Human herpesvirus 1
uuuccuuugcgcucccgccu

SEQ ID NO: 296780 - RNA, 14 nt, Human herpesvirus 1
uuuggcaucauguc

SEQ ID NO: 296781 - RNA, 15 nt, Human herpesvirus 1
uuugggggggguuac

SEQ ID NO: 296782 - RNA, 21 nt, Human herpesvirus 1
uuuguggggucggaaccauag

SEQ ID NO: 296783 - RNA, 16 nt, Human herpesvirus 1
uuuuauuuacaacaaa

SEQ ID NO: 296784 - RNA, 15 nt, Human herpesvirus 1
uuuucuuugugccug

SEQ ID NO: 296785 - RNA, 17 nt, Human herpesvirus 1
uuuugugccuaccgcuu

SEQ ID NO: 296786 - RNA, 19 nt, Human herpesvirus 1
uuuuucguccaccaaaguc

SEQ ID NO: 296787 - RNA, 17 nt, Human herpesvirus 1
ggccaacacaacggacc

SEQ ID NO: 296788 - RNA, 22 nt, Human herpesvirus 1
ggccacgaccgcagacagccag

SEQ ID NO: 296789 - RNA, 21 nt, Human herpesvirus 1
ggccacgggcugcgugucaaa

SEQ ID NO: 296790 - RNA, 18 nt, Human herpesvirus 1
ggccacucacgcaucccc

SEQ ID NO: 296791 - RNA, 15 nt, Human herpesvirus 1
ggccagaaacccggg

SEQ ID NO: 296792 - RNA, 19 nt, Human herpesvirus 1
ggcccggaacgggaggcca

SEQ ID NO: 296793 - RNA, 18 nt, Human herpesvirus 1
ggccgaggucccgugcaa

SEQ ID NO: 296794 - RNA, 15 nt, Human herpesvirus 1
ggccgcccacuuccc

SEQ ID NO: 296795 - RNA, 20 nt, Human herpesvirus 1
ggccgcgcccacuacaccag

SEQ ID NO: 296796 - RNA, 14 nt, Human herpesvirus 1
ggccgcucgguggc

SEQ ID NO: 296797 - RNA, 14 nt, Human herpesvirus 1
ggccgugauaugcc

SEQ ID NO: 296798 - RNA, 14 nt, Human herpesvirus 1
ggccguggacggca

SEQ ID NO: 296799 - RNA, 18 nt, Human herpesvirus 1
ggccuaauuguccgcgca

SEQ ID NO: 296800 - RNA, 21 nt, Human herpesvirus 1
ggccucccggaagagccugcc

SEQ ID NO: 296801 - RNA, 20 nt, Human herpesvirus 1
ggccucgagggucacaggaa

SEQ ID NO: 296802 - RNA, 23 nt, Human herpesvirus 1
ggcgaaccccuuaaccgcccacc

SEQ ID NO: 296803 - RNA, 15 nt, Human herpesvirus 1
ggcgacaacgcgacc

SEQ ID NO: 296804 - RNA, 19 nt, Human herpesvirus 1
ggcgccacaccacgccaca

SEQ ID NO: 296805 - RNA, 23 nt, Human herpesvirus 1
ggcgccauggcgggacugggcaa

SEQ ID NO: 296806 - RNA, 22 nt, Human herpesvirus 1
ggcgcccccacccucggguucg

SEQ ID NO: 296807 - RNA, 18 nt, Human herpesvirus 1
ggcgcgaggggggguccg

SEQ ID NO: 296808 - RNA, 21 nt, Human herpesvirus 1
ggcgcguuugcacaacacaaa

SEQ ID NO: 296809 - RNA, 21 nt, Human herpesvirus 1
ggcgcuacgaccggugcguug

SEQ ID NO: 296810 - RNA, 16 nt, Human herpesvirus 1
ggcgcuccucgccgcc

SEQ ID NO: 296811 - RNA, 13 nt, Human herpesvirus 1
ggcggcaggcgcc

SEQ ID NO: 296812 - RNA, 15 nt, Human herpesvirus 1
ggcgggacugggcaa

SEQ ID NO: 296813 - RNA, 17 nt, Human herpesvirus 1
ggcgggaggaagccaca

SEQ ID NO: 296814 - RNA, 11 nt, Human herpesvirus 1
ggcguaccaaa

SEQ ID NO: 296815 - RNA, 12 nt, Human herpesvirus 1
ggcguaccaaac

SEQ ID NO: 296816 - RNA, 20 nt, Human herpesvirus 1
ggcgucucccgggggcgcuu

SEQ ID NO: 296817 - RNA, 16 nt, Human herpesvirus 1
ggcguggucuagcgac

SEQ ID NO: 296818 - RNA, 12 nt, Human herpesvirus 1
ggcuacuaccua

SEQ ID NO: 296819 - RNA, 13 nt, Human herpesvirus 1
ggcucagccagac

SEQ ID NO: 296820 - RNA, 17 nt, Human herpesvirus 1
ggcuccagucccggccc

SEQ ID NO: 296821 - RNA, 14 nt, Human herpesvirus 1
ggcucgccagcgac

SEQ ID NO: 296822 - RNA, 14 nt, Human herpesvirus 1
ggcucggggcgggg

SEQ ID NO: 296823 - RNA, 15 nt, Human herpesvirus 1
ggcuggaggcaaaca

SEQ ID NO: 296824 - RNA, 16 nt, Human herpesvirus 1
ggcuggucagcacggc

SEQ ID NO: 296825 - RNA, 14 nt, Human herpesvirus 1
ggcuguuggugauu

SEQ ID NO: 296826 - RNA, 13 nt, Human herpesvirus 1
gggaaagcaaaga

SEQ ID NO: 296827 - RNA, 18 nt, Human herpesvirus 1
gggaacacaaacuccccc

SEQ ID NO: 296828 - RNA, 11 nt, Human herpesvirus 1
gggaacccaga

SEQ ID NO: 296829 - RNA, 14 nt, Human herpesvirus 1
gggaaccggggcca

SEQ ID NO: 296830 - RNA, 15 nt, Human herpesvirus 1
gggacugcggggaua

SEQ ID NO: 296831 - RNA, 16 nt, Human herpesvirus 1
gggagcgcucuugucu

SEQ ID NO: 296832 - RNA, 12 nt, Human herpesvirus 1
gggaggggccau

SEQ ID NO: 296833 - RNA, 16 nt, Human herpesvirus 1
gggaucggacgccaca

SEQ ID NO: 296834 - RNA, 23 nt, Human herpesvirus 1
gggaucggacgccacacaccaga

SEQ ID NO: 296835 - RNA, 18 nt, Human herpesvirus 1
gggcaccacacaccagcg

SEQ ID NO: 296836 - RNA, 18 nt, Human herpesvirus 1
gggcacccaacaacaccg

SEQ ID NO: 296837 - RNA, 20 nt, Human herpesvirus 1
gggcacccaaggggccgugc

SEQ ID NO: 296838 - RNA, 20 nt, Human herpesvirus 1
gggcacccacgcccgcgacc

SEQ ID NO: 296839 - RNA, 15 nt, Human herpesvirus 1
gggcacgcggugagc

SEQ ID NO: 296840 - RNA, 20 nt, Human herpesvirus 1
gggccaaccaagagacgucg

SEQ ID NO: 296841 - RNA, 15 nt, Human herpesvirus 1
gggcccgacagaccu

SEQ ID NO: 296842 - RNA, 20 nt, Human herpesvirus 1
gggcccggcguacggccugg

SEQ ID NO: 296843 - RNA, 16 nt, Human herpesvirus 1
gggccgccacgcgcgg

SEQ ID NO: 296844 - RNA, 15 nt, Human herpesvirus 1
gggccgggcgaccca

SEQ ID NO: 296845 - RNA, 18 nt, Human herpesvirus 1
gggccucugggucugugc

SEQ ID NO: 296846 - RNA, 21 nt, Human herpesvirus 1
gggcgacccagauguuuacuu

SEQ ID NO: 296847 - RNA, 20 nt, Human herpesvirus 1
gggcgcuuggcaugcgcggg

SEQ ID NO: 296848 - RNA, 22 nt, Human herpesvirus 1
gggcgucccacacucucugggc

SEQ ID NO: 296849 - RNA, 15 nt, Human herpesvirus 1
gggcugcgugucaaa

SEQ ID NO: 296850 - RNA, 18 nt, Human herpesvirus 1
ggggcgcuuaccgccaca

SEQ ID NO: 296851 - RNA, 23 nt, Human herpesvirus 1
ggggcguuguggcggucggccaa

SEQ ID NO: 296852 - RNA, 15 nt, Human herpesvirus 1
ggggcuaaagggugg

SEQ ID NO: 296853 - RNA, 18 nt, Human herpesvirus 1
ggggucgcggccgcgacc

SEQ ID NO: 296854 - RNA, 16 nt, Human herpesvirus 1
gggguuuucucuuccc

SEQ ID NO: 296855 - RNA, 18 nt, Human herpesvirus 1
gggguuuucucuucccgc

SEQ ID NO: 296856 - RNA, 20 nt, Human herpesvirus 1
ggguccgcuguaacugcugu

SEQ ID NO: 296857 - RNA, 22 nt, Human herpesvirus 1
gggugugauagacccacaggca

SEQ ID NO: 296858 - RNA, 14 nt, Human herpesvirus 1
ggguguggcggacg

SEQ ID NO: 296859 - RNA, 17 nt, Human herpesvirus 1
ggguguguuuauugggc

SEQ ID NO: 296860 - RNA, 21 nt, Human herpesvirus 1
gguaccacaggugggugcuuu

SEQ ID NO: 296861 - RNA, 13 nt, Human herpesvirus 1
gguagauggccau

SEQ ID NO: 296862 - RNA, 17 nt, Human herpesvirus 1
gguagcugggugggguu

SEQ ID NO: 296863 - RNA, 22 nt, Human herpesvirus 1
ggucaaacucaggcaaacagaa

SEQ ID NO: 296864 - RNA, 15 nt, Human herpesvirus 1
ggucccaccugacgc

SEQ ID NO: 296865 - RNA, 19 nt, Human herpesvirus 1
ggucguuaugucgcgcggg

SEQ ID NO: 296866 - RNA, 15 nt, Human herpesvirus 1
ggugaguguggcgcg

SEQ ID NO: 296867 - RNA, 16 nt, Human herpesvirus 1
ggugaugucgggucca

SEQ ID NO: 296868 - RNA, 21 nt, Human herpesvirus 1
ggugcagaccuauguguuuca

SEQ ID NO: 296869 - RNA, 15 nt, Human herpesvirus 1
ggugccgcuccccca

SEQ ID NO: 296870 - RNA, 14 nt, Human herpesvirus 1
gguggacaugaggc

SEQ ID NO: 296871 - RNA, 21 nt, Human herpesvirus 1
gguggcccuuccuaacccaga

SEQ ID NO: 296872 - RNA, 22 nt, Human herpesvirus 1
ggugguucgucguaugggcgcu

SEQ ID NO: 296873 - RNA, 14 nt, Human herpesvirus 1
ggugucccaggacu

SEQ ID NO: 296874 - RNA, 12 nt, Human herpesvirus 1
gguguccgcggu

SEQ ID NO: 296875 - RNA, 19 nt, Human herpesvirus 1
ggugucgccugcggcgacc

SEQ ID NO: 296876 - RNA, 23 nt, Human herpesvirus 1
ggugugaguuuguggacccaaag

SEQ ID NO: 296877 - RNA, 16 nt, Human herpesvirus 1
ggugugggucgggucg

SEQ ID NO: 296878 - RNA, 14 nt, Human herpesvirus 1
gguuucuguguuca

SEQ ID NO: 296879 - RNA, 10 nt, Human herpesvirus 1
guaaccauac

SEQ ID NO: 296880 - RNA, 22 nt, Human herpesvirus 1
guaaccccgcgcauauccgggg

SEQ ID NO: 296881 - RNA, 17 nt, Human herpesvirus 1
guaacggcauaugcaaa

SEQ ID NO: 296882 - RNA, 14 nt, Human herpesvirus 1
guaacguccuuugg

SEQ ID NO: 296883 - RNA, 12 nt, Human herpesvirus 1
guaauaccaaau

SEQ ID NO: 296884 - RNA, 23 nt, Human herpesvirus 1
guagaagcgcgccgcgacacuca

SEQ ID NO: 296885 - RNA, 18 nt, Human herpesvirus 1
guagcuuuacaaugcaaa

SEQ ID NO: 296886 - RNA, 15 nt, Human herpesvirus 1
guauaaggacaucca

SEQ ID NO: 296887 - RNA, 16 nt, Human herpesvirus 1
guauaaggacauccac

SEQ ID NO: 296888 - RNA, 17 nt, Human herpesvirus 1
guauccguucgacuccu

SEQ ID NO: 296889 - RNA, 13 nt, Human herpesvirus 1
guauuauuuaccu

SEQ ID NO: 296890 - RNA, 22 nt, Human herpesvirus 1
guauucggacagacucaagcac

SEQ ID NO: 296891 - RNA, 23 nt, Human herpesvirus 1
guauucggacagacucaagcaca

SEQ ID NO: 296892 - RNA, 14 nt, Human herpesvirus 1
gucaaacucaggca

SEQ ID NO: 296893 - RNA, 23 nt, Human herpesvirus 1
gucacgagguacggggcggcccg

SEQ ID NO: 296894 - RNA, 21 nt, Human herpesvirus 1
aaaaaccuaagaaauuccaaa

SEQ ID NO: 296895 - RNA, 15 nt, Human herpesvirus 1
aaaagaccacaccaa

SEQ ID NO: 296896 - RNA, 12 nt, Human herpesvirus 1
aaaagaccccga

SEQ ID NO: 296897 - RNA, 16 nt, Human herpesvirus 1
aaaaggcguaccaaac

SEQ ID NO: 296898 - RNA, 15 nt, Human herpesvirus 1
aaaauaaaagaccaa

SEQ ID NO: 296899 - RNA, 16 nt, Human herpesvirus 1
aaaauguaaccauacc

SEQ ID NO: 296900 - RNA, 20 nt, Human herpesvirus 1
aaacaacagccgcgggucgc

SEQ ID NO: 296901 - RNA, 21 nt, Human herpesvirus 1
aaacaagcccgaccaccagac

SEQ ID NO: 296902 - RNA, 21 nt, Human herpesvirus 1
aaaccccccaucacaggucgu

SEQ ID NO: 296903 - RNA, 18 nt, Human herpesvirus 1
aaaccuaagaaauuccaa

SEQ ID NO: 296904 - RNA, 16 nt, Human herpesvirus 1
aaacgacaucuugucg

SEQ ID NO: 296905 - RNA, 14 nt, Human herpesvirus 1
aaacggaaccaaac

SEQ ID NO: 296906 - RNA, 14 nt, Human herpesvirus 1
aaacucauuaaugg

SEQ ID NO: 296907 - RNA, 18 nt, Human herpesvirus 1
aaacugauaaaacagcga

SEQ ID NO: 296908 - RNA, 16 nt, Human herpesvirus 1
aaacuuaacacaccaa

SEQ ID NO: 296909 - RNA, 15 nt, Human herpesvirus 1
aaagccaccaauaga

SEQ ID NO: 296910 - RNA, 19 nt, Human herpesvirus 1
aaaggagugguuugccguu

SEQ ID NO: 296911 - RNA, 12 nt, Human herpesvirus 1
aaauaaagccac

SEQ ID NO: 296912 - RNA, 14 nt, Human herpesvirus 1
aaauguaaccauac

SEQ ID NO: 296913 - RNA, 12 nt, Human herpesvirus 1
aacaaaccaaaa

SEQ ID NO: 296914 - RNA, 20 nt, Human herpesvirus 1
aacaaccugauuaaguuuug

SEQ ID NO: 296915 - RNA, 17 nt, Human herpesvirus 1
aacaagcccgaccacca

SEQ ID NO: 296916 - RNA, 17 nt, Human herpesvirus 1
aacacaaaacacacggg

SEQ ID NO: 296917 - RNA, 15 nt, Human herpesvirus 1
aacacaaacaucugg

SEQ ID NO: 296918 - RNA, 17 nt, Human herpesvirus 1
aacacaacggcaugccu

SEQ ID NO: 296919 - RNA, 12 nt, Human herpesvirus 1
aacaccaacuca

SEQ ID NO: 296920 - RNA, 15 nt, Human herpesvirus 1
aacagaaaaccgaaa

SEQ ID NO: 296921 - RNA, 21 nt, Human herpesvirus 1
aacaggcgcggaucaguaccg

SEQ ID NO: 296922 - RNA, 17 nt, Human herpesvirus 1
aacauaagcuugccguu

SEQ ID NO: 296923 - RNA, 14 nt, Human herpesvirus 1
aaccaccacugcac

SEQ ID NO: 296924 - RNA, 22 nt, Human herpesvirus 1
aaccaccccgcgugccaucacg

SEQ ID NO: 296925 - RNA, 17 nt, Human herpesvirus 1
aaccacccgcaccccca

SEQ ID NO: 296926 - RNA, 17 nt, Human herpesvirus 1
aacccacccgaaacggc

SEQ ID NO: 296927 - RNA, 18 nt, Human herpesvirus 1
aacccauaccggacagau

SEQ ID NO: 296928 - RNA, 21 nt, Human herpesvirus 1
aaccguaacggcauaugcaaa

SEQ ID NO: 296929 - RNA, 21 nt, Human herpesvirus 1
aaccuagggaacccagaguac

SEQ ID NO: 296930 - RNA, 16 nt, Human herpesvirus 1
aacgacaccgcccucg

SEQ ID NO: 296931 - RNA, 20 nt, Human herpesvirus 1
aacgcgacaggccaguaugg

SEQ ID NO: 296932 - RNA, 13 nt, Human herpesvirus 1
aacggaaccaaac

SEQ ID NO: 296933 - RNA, 20 nt, Human herpesvirus 1
aacggacacgcggggacacg

SEQ ID NO: 296934 - RNA, 14 nt, Human herpesvirus 1
aacggcaacaaccu

SEQ ID NO: 296935 - RNA, 21 nt, Human herpesvirus 1
aacgggacacuuguccggaga

SEQ ID NO: 296936 - RNA, 22 nt, Human herpesvirus 1
aacgggggacccgaaaccgaag

SEQ ID NO: 296937 - RNA, 16 nt, Human herpesvirus 1
aacuucaucacccccg

SEQ ID NO: 296938 - RNA, 18 nt, Human herpesvirus 1
aagaccacucccgucucg

SEQ ID NO: 296939 - RNA, 17 nt, Human herpesvirus 1
aagagccugccgccuca

SEQ ID NO: 296940 - RNA, 19 nt, Human herpesvirus 1
aagcaaagaauggauggga

SEQ ID NO: 296941 - RNA, 14 nt, Human herpesvirus 1
aagcacacacgggg

SEQ ID NO: 296942 - RNA, 15 nt, Human herpesvirus 1
aagcaccaacagggg

SEQ ID NO: 296943 - RNA, 14 nt, Human herpesvirus 1
aagcaggccaucgc

SEQ ID NO: 296944 - RNA, 15 nt, Human herpesvirus 1
aagccaccaauagac

SEQ ID NO: 296945 - RNA, 21 nt, Human herpesvirus 1
aagcccccaacaugacccaga

SEQ ID NO: 296946 - RNA, 21 nt, Human herpesvirus 1
aagcccccgggacugcgggga

SEQ ID NO: 296947 - RNA, 17 nt, Human herpesvirus 1
aagccgcucuccggaga

SEQ ID NO: 296948 - RNA, 16 nt, Human herpesvirus 1
augagccgguagugca

SEQ ID NO: 296949 - RNA, 14 nt, Human herpesvirus 1
augagcgcagucca

SEQ ID NO: 296950 - RNA, 22 nt, Human herpesvirus 1
augcgugggagugggggugcgu

SEQ ID NO: 296951 - RNA, 19 nt, Human herpesvirus 1
augcucuggggucccuguc

SEQ ID NO: 296952 - RNA, 13 nt, Human herpesvirus 1
auggccccggggc

SEQ ID NO: 296953 - RNA, 18 nt, Human herpesvirus 1
auguaaccauacccaaac

SEQ ID NO: 296954 - RNA, 15 nt, Human herpesvirus 1
augucgcgcgggccg

SEQ ID NO: 296955 - RNA, 18 nt, Human herpesvirus 1
auguggauaaaaagccag

SEQ ID NO: 296956 - RNA, 22 nt, Human herpesvirus 1
auguuuuuauuggucaaacuca

SEQ ID NO: 296957 - RNA, 18 nt, Human herpesvirus 1
auuaaaaaucgugaguca

SEQ ID NO: 296958 - RNA, 13 nt, Human herpesvirus 1
auuaaaacggaac

SEQ ID NO: 296959 - RNA, 18 nt, Human herpesvirus 1
auuaaaacggaaccaaac

SEQ ID NO: 296960 - RNA, 19 nt, Human herpesvirus 1
auuaaaacggaaccaaaca

SEQ ID NO: 296961 - RNA, 23 nt, Human herpesvirus 1
auucggacagacucaagcacaca

SEQ ID NO: 296962 - RNA, 19 nt, Human herpesvirus 1
auugcccugagacaagagc

SEQ ID NO: 296963 - RNA, 21 nt, Human herpesvirus 1
auugccgcguugguccucgug

SEQ ID NO: 296964 - RNA, 15 nt, Human herpesvirus 1
auuggcaauguuguc

SEQ ID NO: 296965 - RNA, 12 nt, Human herpesvirus 1
auugggcgggag

SEQ ID NO: 296966 - RNA, 14 nt, Human herpesvirus 1
auuuacaacaaacc

SEQ ID NO: 296967 - RNA, 22 nt, Human herpesvirus 1
auuuggccaggacguccuugua

SEQ ID NO: 296968 - RNA, 20 nt, Human herpesvirus 1
auuuggggcgcuccugaugu

SEQ ID NO: 296969 - RNA, 19 nt, Human herpesvirus 1
caaaacuggucaauaccgc

SEQ ID NO: 296970 - RNA, 15 nt, Human herpesvirus 1
caaaagaugcacaug

SEQ ID NO: 296971 - RNA, 22 nt, Human herpesvirus 1
caaaagaugcacaugcgguuua

SEQ ID NO: 296972 - RNA, 15 nt, Human herpesvirus 1
caaaaggcguaccaa

SEQ ID NO: 296973 - RNA, 18 nt, Human herpesvirus 1
caaaaggcguaccaaaca

SEQ ID NO: 296974 - RNA, 18 nt, Human herpesvirus 1
caaacucauccuccagac

SEQ ID NO: 296975 - RNA, 13 nt, Human herpesvirus 1
caaauaaagccac

SEQ ID NO: 296976 - RNA, 14 nt, Human herpesvirus 1
caaauaaagccacu

SEQ ID NO: 296977 - RNA, 19 nt, Human herpesvirus 1
caaauaaagccacugaaac

SEQ ID NO: 296978 - RNA, 11 nt, Human herpesvirus 1
caacaaacccc

SEQ ID NO: 296979 - RNA, 20 nt, Human herpesvirus 1
caacaaaccccccaucacag

SEQ ID NO: 296980 - RNA, 15 nt, Human herpesvirus 1
caacacgaccaagga

SEQ ID NO: 296981 - RNA, 16 nt, Human herpesvirus 1
caaccccaacuccaga

SEQ ID NO: 296982 - RNA, 21 nt, Human herpesvirus 1
caaccccgcccuacacuacac

SEQ ID NO: 296983 - RNA, 14 nt, Human herpesvirus 1
caacgcuccgcccc

SEQ ID NO: 296984 - RNA, 20 nt, Human herpesvirus 1
caacggcgggagcuggguua

SEQ ID NO: 296985 - RNA, 21 nt, Human herpesvirus 1
caacggggugauaaugaucaa

SEQ ID NO: 296986 - RNA, 16 nt, Human herpesvirus 1
caacuacacacaggaa

SEQ ID NO: 296987 - RNA, 20 nt, Human herpesvirus 1
caacugcuccagaaaccugu

SEQ ID NO: 296988 - RNA, 21 nt, Human herpesvirus 1
caagacccgggcgaugagcca

SEQ ID NO: 296989 - RNA, 21 nt, Human herpesvirus 1
caagagacgucgccccugugg

SEQ ID NO: 296990 - RNA, 15 nt, Human herpesvirus 1
caaggagcgccggcg

SEQ ID NO: 296991 - RNA, 21 nt, Human herpesvirus 1
caauaaacggcaacaaccuga

SEQ ID NO: 296992 - RNA, 23 nt, Human herpesvirus 1
caauaaacggcaacaaccugauu

SEQ ID NO: 296993 - RNA, 23 nt, Human herpesvirus 1
cacaacagcccugucgccgguau

SEQ ID NO: 296994 - RNA, 21 nt, Human herpesvirus 1
cacaacauccgcggcuucauc

SEQ ID NO: 296995 - RNA, 23 nt, Human herpesvirus 1
cacaaucgcgaccaccccaaaua

SEQ ID NO: 296996 - RNA, 14 nt, Human herpesvirus 1
cacacacacaaaag

SEQ ID NO: 296997 - RNA, 12 nt, Human herpesvirus 1
cacacaccagcg

SEQ ID NO: 296998 - RNA, 18 nt, Human herpesvirus 1
cacacaccccccaugcca

SEQ ID NO: 296999 - RNA, 16 nt, Human herpesvirus 1
cacacacgggggagcg

SEQ ID NO: 297000 - RNA, 15 nt, Human herpesvirus 1
cacagaaacaaaacc

SEQ ID NO: 297001 - RNA, 16 nt, Human herpesvirus 1
cacagccuggccgugc

SEQ ID NO: 297002 - RNA, 21 nt, Human herpesvirus 1
cacagcgagggacccgcgggg

SEQ ID NO: 297003 - RNA, 22 nt, Human herpesvirus 1
cacaugcgguuuaacacccgug

SEQ ID NO: 297004 - RNA, 17 nt, Human herpesvirus 1
caccaacgccgauguau

SEQ ID NO: 297005 - RNA, 21 nt, Human herpesvirus 1
caccaacgucuccuccaccac

SEQ ID NO: 297006 - RNA, 15 nt, Human herpesvirus 1
caccaagacggagua

SEQ ID NO: 297007 - RNA, 14 nt, Human herpesvirus 1
caccacacaccagc

SEQ ID NO: 297008 - RNA, 16 nt, Human herpesvirus 1
caccacgccacaacag

SEQ ID NO: 297009 - RNA, 20 nt, Human herpesvirus 1
caccacgccacaacagcccu

SEQ ID NO: 297010 - RNA, 16 nt, Human herpesvirus 1
caccacggucggguua

SEQ ID NO: 297011 - RNA, 18 nt, Human herpesvirus 1
caccagacauacaccacg

SEQ ID NO: 297012 - RNA, 23 nt, Human herpesvirus 1
caccagcgggucuuuuguguugg

SEQ ID NO: 297013 - RNA, 16 nt, Human herpesvirus 1
cacccacccaccaaga

SEQ ID NO: 297014 - RNA, 17 nt, Human herpesvirus 1
cacccacccacucccca

SEQ ID NO: 297015 - RNA, 14 nt, Human herpesvirus 1
cacccaggugacgc

SEQ ID NO: 297016 - RNA, 18 nt, Human herpesvirus 1
cacccaucggggaccugc

SEQ ID NO: 297017 - RNA, 20 nt, Human herpesvirus 1
caccccucguggccccgaca

SEQ ID NO: 297018 - RNA, 19 nt, Human herpesvirus 1
cacccgcgcaugaucuccg

SEQ ID NO: 297019 - RNA, 13 nt, Human herpesvirus 1
caccgggccgugu

SEQ ID NO: 297020 - RNA, 16 nt, Human herpesvirus 1
caccggugcgcccccc

SEQ ID NO: 297021 - RNA, 16 nt, Human herpesvirus 1
caccuggugauguugc

SEQ ID NO: 297022 - RNA, 15 nt, Human herpesvirus 1
cacgaccgcagacag

SEQ ID NO: 297023 - RNA, 14 nt, Human herpesvirus 1
cacgcacgccgccc

SEQ ID NO: 297024 - RNA, 20 nt, Human herpesvirus 1
cacgccuggggucgcggccg

SEQ ID NO: 297025 - RNA, 21 nt, Human herpesvirus 1
cacgccuggggucgcggccgc

SEQ ID NO: 297026 - RNA, 13 nt, Human herpesvirus 1
cacgcgccgccga

SEQ ID NO: 297027 - RNA, 19 nt, Human herpesvirus 1
cacggauaggggcaggcgg

SEQ ID NO: 297028 - RNA, 20 nt, Human herpesvirus 1
cacggcaaggagcgccggcg

SEQ ID NO: 297029 - RNA, 18 nt, Human herpesvirus 1
cacggcccggcgaugugg

SEQ ID NO: 297030 - RNA, 15 nt, Human herpesvirus 1
cacgggcuacccuca

SEQ ID NO: 297031 - RNA, 21 nt, Human herpesvirus 1
cacggguauaaggacauccac

SEQ ID NO: 297032 - RNA, 16 nt, Human herpesvirus 1
cacggguggccgggcg

SEQ ID NO: 297033 - RNA, 18 nt, Human herpesvirus 1
cacgucgcucgaaaacac

SEQ ID NO: 297034 - RNA, 12 nt, Human herpesvirus 1
cacuacaccagc

SEQ ID NO: 297035 - RNA, 13 nt, Human herpesvirus 1
cacuacgaucucg

SEQ ID NO: 297036 - RNA, 13 nt, Human herpesvirus 1
cacucccgucucg

SEQ ID NO: 297037 - RNA, 16 nt, Human herpesvirus 1
cacugcccgucgcgcg

SEQ ID NO: 297038 - RNA, 15 nt, Human herpesvirus 1
cacuuccccccauaa

SEQ ID NO: 297039 - RNA, 23 nt, Human herpesvirus 1
cagacgagcgcgcuuguccccga

SEQ ID NO: 297040 - RNA, 15 nt, Human herpesvirus 1
cagacucaagcacac

SEQ ID NO: 297041 - RNA, 16 nt, Human herpesvirus 1
cagacucaagcacaca

SEQ ID NO: 297042 - RNA, 11 nt, Human herpesvirus 1
cagauagagcu

SEQ ID NO: 297043 - RNA, 21 nt, Human herpesvirus 1
cagcacggcgucgcugugaug

SEQ ID NO: 297044 - RNA, 18 nt, Human herpesvirus 1
cagcacgggcggaggcgu

SEQ ID NO: 297045 - RNA, 23 nt, Human herpesvirus 1
cagcccccccaagcgcccccgcc

SEQ ID NO: 297046 - RNA, 13 nt, Human herpesvirus 1
cagccguccagac

SEQ ID NO: 297047 - RNA, 20 nt, Human herpesvirus 1
cagcgaccgcaacuucccac

SEQ ID NO: 297048 - RNA, 12 nt, Human herpesvirus 1
cagcgccgccgc

SEQ ID NO: 297049 - RNA, 19 nt, Human herpesvirus 1
cagcguauccacccccgcc

SEQ ID NO: 297050 - RNA, 18 nt, Human herpesvirus 1
caggacaccgcguguucc

SEQ ID NO: 297051 - RNA, 15 nt, Human herpesvirus 1
caggacuuccccuuc

SEQ ID NO: 297052 - RNA, 12 nt, Human herpesvirus 1
caggccccggug

SEQ ID NO: 297053 - RNA, 21 nt, Human herpesvirus 1
caggccuggcuauccggagaa

SEQ ID NO: 297054 - RNA, 22 nt, Human herpesvirus 1
caggcgcugucuccccggggcc

SEQ ID NO: 297055 - RNA, 14 nt, Human herpesvirus 1
caggcgguggagaa

SEQ ID NO: 297056 - RNA, 19 nt, Human herpesvirus 1
cagggccuccgaccccaga

SEQ ID NO: 297057 - RNA, 14 nt, Human herpesvirus 1
cagggcgcccccgc

SEQ ID NO: 297058 - RNA, 22 nt, Human herpesvirus 1
cagggcgggccgccucgggggc

SEQ ID NO: 297059 - RNA, 13 nt, Human herpesvirus 1
cagguaauaccaa

SEQ ID NO: 297060 - RNA, 22 nt, Human herpesvirus 1
caggucccccacaccaccuacu

SEQ ID NO: 297061 - RNA, 15 nt, Human herpesvirus 1
cagucaaacucccca

SEQ ID NO: 297062 - RNA, 20 nt, Human herpesvirus 1
caguggcuucauguggauaa

SEQ ID NO: 297063 - RNA, 22 nt, Human herpesvirus 1
cauaagguccguccgguccucu

SEQ ID NO: 297064 - RNA, 15 nt, Human herpesvirus 1
cauaccggacagaug

SEQ ID NO: 297065 - RNA, 22 nt, Human herpesvirus 1
cauauauacgcuuggagccagc

SEQ ID NO: 297066 - RNA, 17 nt, Human herpesvirus 1
caucaccccgcaauuug

SEQ ID NO: 297067 - RNA, 16 nt, Human herpesvirus 1
caucccacaaacacaa

SEQ ID NO: 297068 - RNA, 20 nt, Human herpesvirus 1
caucccaugguaccaaagac

SEQ ID NO: 297069 - RNA, 19 nt, Human herpesvirus 1
cauccccccuuuugcacua

SEQ ID NO: 297070 - RNA, 18 nt, Human herpesvirus 1
caucccccgucuggguuu

SEQ ID NO: 297071 - RNA, 16 nt, Human herpesvirus 1
caucgccggggaccgc

SEQ ID NO: 297072 - RNA, 17 nt, Human herpesvirus 1
caugcgccagggcgccc

SEQ ID NO: 297073 - RNA, 18 nt, Human herpesvirus 1
caugcggaaagcaagaac

SEQ ID NO: 297074 - RNA, 16 nt, Human herpesvirus 1
cauggauaacaaccac

SEQ ID NO: 297075 - RNA, 12 nt, Human herpesvirus 1
cauggccaugac

SEQ ID NO: 297076 - RNA, 14 nt, Human herpesvirus 1
caugggaugucuua

SEQ ID NO: 297077 - RNA, 14 nt, Human herpesvirus 1
cauggugccgaccg

SEQ ID NO: 297078 - RNA, 21 nt, Human herpesvirus 1
cauucauggggggguuggaga

SEQ ID NO: 297079 - RNA, 21 nt, Human herpesvirus 1
cauuuauugacccaaaacaca

SEQ ID NO: 297080 - RNA, 22 nt, Human herpesvirus 1
cauuuauugacccaaaacacac

SEQ ID NO: 297081 - RNA, 19 nt, Human herpesvirus 1
ccaaacaaacaaaccaaaa

SEQ ID NO: 297082 - RNA, 12 nt, Human herpesvirus 1
ccaaacaccccc

SEQ ID NO: 297083 - RNA, 19 nt, Human herpesvirus 1
ccaaauacagcauggcgcc

SEQ ID NO: 297084 - RNA, 16 nt, Human herpesvirus 1
ccaacacgaccaagga

SEQ ID NO: 297085 - RNA, 24 nt, Human herpesvirus 1
ccaacauaaacaacuacacacagg

SEQ ID NO: 297086 - RNA, 11 nt, Human herpesvirus 1
ccaagccggga

SEQ ID NO: 297087 - RNA, 19 nt, Human herpesvirus 1
ccaauaaacccccaaacac

SEQ ID NO: 297088 - RNA, 19 nt, Human herpesvirus 1
ccacaaacacaaaacacac

SEQ ID NO: 297089 - RNA, 19 nt, Human herpesvirus 1
ccacacucucugggcgggc

SEQ ID NO: 297090 - RNA, 15 nt, Human herpesvirus 1
ccacagacacgguua

SEQ ID NO: 297091 - RNA, 17 nt, Human herpesvirus 1
ccacccacccaccaaga

SEQ ID NO: 297092 - RNA, 14 nt, Human herpesvirus 1
ccacccacucccca

SEQ ID NO: 297093 - RNA, 13 nt, Human herpesvirus 1
ccaccccaacccc

SEQ ID NO: 297094 - RNA, 19 nt, Human herpesvirus 1
ccacccgaaacggccaacg

SEQ ID NO: 297095 - RNA, 15 nt, Human herpesvirus 1
ccacccgacaacagc

SEQ ID NO: 297096 - RNA, 21 nt, Human herpesvirus 1
ccacccggagcuuucuuccgg

SEQ ID NO: 297097 - RNA, 23 nt, Human herpesvirus 1
ccaccuuccguccccugcccccc

SEQ ID NO: 297098 - RNA, 21 nt, Human herpesvirus 1
ccacgcccgaccacacacccc

SEQ ID NO: 297099 - RNA, 20 nt, Human herpesvirus 1
ccacgggagccagggccaag

SEQ ID NO: 297100 - RNA, 19 nt, Human herpesvirus 1
ccacgggcugcgugucaaa

SEQ ID NO: 297101 - RNA, 16 nt, Human herpesvirus 1
ccacgugcacagccug

SEQ ID NO: 297102 - RNA, 12 nt, Human herpesvirus 1
ccacuacaccag

SEQ ID NO: 297103 - RNA, 13 nt, Human herpesvirus 1
ccacuacaccagc

SEQ ID NO: 297104 - RNA, 19 nt, Human herpesvirus 1
ccacucccuugaauaaaca

SEQ ID NO: 297105 - RNA, 17 nt, Human herpesvirus 1
ccagacagaaaauguaa

SEQ ID NO: 297106 - RNA, 15 nt, Human herpesvirus 1
ccagagguguucacg

SEQ ID NO: 297107 - RNA, 13 nt, Human herpesvirus 1
ccagauguuuacu

SEQ ID NO: 297108 - RNA, 20 nt, Human herpesvirus 1
ccagcaccguuaccaccgau

SEQ ID NO: 297109 - RNA, 14 nt, Human herpesvirus 1
ccagcgacccgcac

SEQ ID NO: 297110 - RNA, 16 nt, Human herpesvirus 1
ccagcgcggcggggcc

SEQ ID NO: 297111 - RNA, 15 nt, Human herpesvirus 1
ccagguaauaccaaa

SEQ ID NO: 297112 - RNA, 16 nt, Human herpesvirus 1
ccagguaauaccaaau

SEQ ID NO: 297113 - RNA, 23 nt, Human herpesvirus 1
ccaggucccccacaccaccuacu

SEQ ID NO: 297114 - RNA, 16 nt, Human herpesvirus 1
ccagguccguccagau

SEQ ID NO: 297115 - RNA, 22 nt, Human herpesvirus 1
ccauauaaagcgagucuggaag

SEQ ID NO: 297116 - RNA, 23 nt, Human herpesvirus 1
ccaucccacaaacacaaaacaca

SEQ ID NO: 297117 - RNA, 22 nt, Human herpesvirus 1
ccaucgugcgcucgcucucggu

SEQ ID NO: 297118 - RNA, 22 nt, Human herpesvirus 1
ccaucuacguugcggggcgggg

SEQ ID NO: 297119 - RNA, 14 nt, Human herpesvirus 1
ccaugcacaccagc

SEQ ID NO: 297120 - RNA, 17 nt, Human herpesvirus 1
ccauggcgggacugggc

SEQ ID NO: 297121 - RNA, 16 nt, Human herpesvirus 1
ccauggguugugguua

SEQ ID NO: 297122 - RNA, 11 nt, Human herpesvirus 1
ccaugucuccg

SEQ ID NO: 297123 - RNA, 12 nt, Human herpesvirus 1
cccaaaacacac

SEQ ID NO: 297124 - RNA, 21 nt, Human herpesvirus 1
cccaaaacacacggagcugcu

SEQ ID NO: 297125 - RNA, 22 nt, Human herpesvirus 1
cccaaacucauccuccagacgc

SEQ ID NO: 297126 - RNA, 18 nt, Human herpesvirus 1
cccaacaugacccagacc

SEQ ID NO: 297127 - RNA, 20 nt, Human herpesvirus 1
cccaacccccggccccaguu

SEQ ID NO: 297128 - RNA, 23 nt, Human herpesvirus 1
cccaacgcgcgcggaugacggcc

SEQ ID NO: 297129 - RNA, 14 nt, Human herpesvirus 1
cccacacacacaaa

SEQ ID NO: 297130 - RNA, 21 nt, Human herpesvirus 1
cccacaggcauccaacauaaa

SEQ ID NO: 297131 - RNA, 14 nt, Human herpesvirus 1
cccacccaccaaga

SEQ ID NO: 297132 - RNA, 15 nt, Human herpesvirus 1
cccaccccccacggg

SEQ ID NO: 297133 - RNA, 16 nt, Human herpesvirus 1
cccaccggcaccaaca

SEQ ID NO: 297134 - RNA, 22 nt, Human herpesvirus 1
cccacgcucuccccugcugcca

SEQ ID NO: 297135 - RNA, 17 nt, Human herpesvirus 1
cccacuggggucugggu

SEQ ID NO: 297136 - RNA, 22 nt, Human herpesvirus 1
cccagaccccgggcgcgcccuc

SEQ ID NO: 297137 - RNA, 22 nt, Human herpesvirus 1
cccagcaccguuaccaccgaua

SEQ ID NO: 297138 - RNA, 13 nt, Human herpesvirus 1
cccagcauaccua

SEQ ID NO: 297139 - RNA, 15 nt, Human herpesvirus 1
cccagcauaccuaaa

SEQ ID NO: 297140 - RNA, 14 nt, Human herpesvirus 1
cccagggcacccaa

SEQ ID NO: 297141 - RNA, 21 nt, Human herpesvirus 1
cccaguaacaugcgcacguga

SEQ ID NO: 297142 - RNA, 12 nt, Human herpesvirus 1
cccaguggguuu

SEQ ID NO: 297143 - RNA, 19 nt, Human herpesvirus 1
cccaucgaguauguacugc

SEQ ID NO: 297144 - RNA, 13 nt, Human herpesvirus 1
cccaucgcgggcg

SEQ ID NO: 297145 - RNA, 16 nt, Human herpesvirus 1
cccaucgcgggcgcca

SEQ ID NO: 297146 - RNA, 13 nt, Human herpesvirus 1
cccauuaucccau

SEQ ID NO: 297147 - RNA, 16 nt, Human herpesvirus 1
ccccacgugaucagca

SEQ ID NO: 297148 - RNA, 19 nt, Human herpesvirus 1
ccccagacgacaucagcug

SEQ ID NO: 297149 - RNA, 21 nt, Human herpesvirus 1
ccccaucgccgcggcucccgg

SEQ ID NO: 297150 - RNA, 20 nt, Human herpesvirus 1
cccccaacggugucauagau

SEQ ID NO: 297151 - RNA, 14 nt, Human herpesvirus 1
cccccaucaccccg

SEQ ID NO: 297152 - RNA, 12 nt, Human herpesvirus 1
ccccccaugucc

SEQ ID NO: 297153 - RNA, 12 nt, Human herpesvirus 1
cccccccacgcc

SEQ ID NO: 297154 - RNA, 13 nt, Human herpesvirus 1
cccccgcccgggu

SEQ ID NO: 297155 - RNA, 16 nt, Human herpesvirus 1
cccccgccucuggggu

SEQ ID NO: 297156 - RNA, 20 nt, Human herpesvirus 1
cccccggguuuucccacgcc

SEQ ID NO: 297157 - RNA, 20 nt, Human herpesvirus 1
cccccuguuugucgacgaga

SEQ ID NO: 297158 - RNA, 15 nt, Human herpesvirus 1
ccccgacagcccccc

SEQ ID NO: 297159 - RNA, 15 nt, Human herpesvirus 1
ccccgauggcccucc

SEQ ID NO: 297160 - RNA, 13 nt, Human herpesvirus 1
ccccgccacccag

SEQ ID NO: 297161 - RNA, 21 nt, Human herpesvirus 1
ccccggauaugcgcgggguua

SEQ ID NO: 297162 - RNA, 20 nt, Human herpesvirus 1
cccgaaacuucaucaccccc

SEQ ID NO: 297163 - RNA, 17 nt, Human herpesvirus 1
cccgccagcaccccggu

SEQ ID NO: 297164 - RNA, 17 nt, Human herpesvirus 1
cccgccuccgcgcagga

SEQ ID NO: 297165 - RNA, 18 nt, Human herpesvirus 1
cccggaacgaacccaaag

SEQ ID NO: 297166 - RNA, 23 nt, Human herpesvirus 1
cccggcggcgcgcucaaccaccg

SEQ ID NO: 297167 - RNA, 18 nt, Human herpesvirus 1
cccgggacccaugaagca

SEQ ID NO: 297168 - RNA, 17 nt, Human herpesvirus 1
cccggggcgggugggcc

SEQ ID NO: 297169 - RNA, 19 nt, Human herpesvirus 1
cccgugggucuagccgggc

SEQ ID NO: 297170 - RNA, 17 nt, Human herpesvirus 1
cccuaggaggccgccac

SEQ ID NO: 297171 - RNA, 15 nt, Human herpesvirus 1
cccucaaccccggcg

SEQ ID NO: 297172 - RNA, 20 nt, Human herpesvirus 1
cccuccaggcugucgacgcc

SEQ ID NO: 297173 - RNA, 17 nt, Human herpesvirus 1
cccuccgggauaccggu

SEQ ID NO: 297174 - RNA, 12 nt, Human herpesvirus 1
cccuccuggggg

SEQ ID NO: 297175 - RNA, 12 nt, Human herpesvirus 1
cccucgcacauc

SEQ ID NO: 297176 - RNA, 16 nt, Human herpesvirus 1
cccucgcacauccuca

SEQ ID NO: 297177 - RNA, 17 nt, Human herpesvirus 1
cccucgcgccacacuca

SEQ ID NO: 297178 - RNA, 20 nt, Human herpesvirus 1
cccucgcgggccucgugggc

SEQ ID NO: 297179 - RNA, 19 nt, Human herpesvirus 1
cccuggaugcccaccccca

SEQ ID NO: 297180 - RNA, 15 nt, Human herpesvirus 1
cccugugaacacaga

SEQ ID NO: 297181 - RNA, 19 nt, Human herpesvirus 1
cccuguuuauggugucguc

SEQ ID NO: 297182 - RNA, 19 nt, Human herpesvirus 1
cccuguuugucgccuggcu

SEQ ID NO: 297183 - RNA, 20 nt, Human herpesvirus 1
cccuguuugucgccuggcug

SEQ ID NO: 297184 - RNA, 22 nt, Human herpesvirus 1
cccuugaauaaacacgacauua

SEQ ID NO: 297185 - RNA, 15 nt, Human herpesvirus 1
ccgaaaggaggccag

SEQ ID NO: 297186 - RNA, 21 nt, Human herpesvirus 1
ccgaacaaacgacccaccaau

SEQ ID NO: 297187 - RNA, 23 nt, Human herpesvirus 1
ccgaaccaccacugcacucccug

SEQ ID NO: 297188 - RNA, 18 nt, Human herpesvirus 1
ccgaacugggcgaccgcc

SEQ ID NO: 297189 - RNA, 20 nt, Human herpesvirus 1
ccgaagccacgcccacuuua

SEQ ID NO: 297190 - RNA, 17 nt, Human herpesvirus 1
ccgaccccacaaacagc

SEQ ID NO: 297191 - RNA, 17 nt, Human herpesvirus 1
ccgaccggguucccccg

SEQ ID NO: 297192 - RNA, 18 nt, Human herpesvirus 1
ccgacgcgucauaugcaa

SEQ ID NO: 297193 - RNA, 20 nt, Human herpesvirus 1
ccgacgcuaaacggccgcgc

SEQ ID NO: 297194 - RNA, 23 nt, Human herpesvirus 1
ccgagaccccauugggaccaaua

SEQ ID NO: 297195 - RNA, 19 nt, Human herpesvirus 1
ccgagggcgagcucagcuu

SEQ ID NO: 297196 - RNA, 15 nt, Human herpesvirus 1
ccgagucuucggggc

SEQ ID NO: 297197 - RNA, 17 nt, Human herpesvirus 1
ccgaucgcagcguccgg

SEQ ID NO: 297198 - RNA, 16 nt, Human herpesvirus 1
ccgaugaacgcaggcg

SEQ ID NO: 297199 - RNA, 13 nt, Human herpesvirus 1
ccgcaacuuccca

SEQ ID NO: 297200 - RNA, 22 nt, Human herpesvirus 1
ccgcaauuucaccgccccagca

SEQ ID NO: 297201 - RNA, 15 nt, Human herpesvirus 1
ccgcauacuccggcc

SEQ ID NO: 297202 - RNA, 17 nt, Human herpesvirus 1
ccgccaaauaaagccac

SEQ ID NO: 297203 - RNA, 18 nt, Human herpesvirus 1
ccgccaaauaaagccacu

SEQ ID NO: 297204 - RNA, 18 nt, Human herpesvirus 1
ccgccacccgaaccacca

SEQ ID NO: 297205 - RNA, 13 nt, Human herpesvirus 1
ccgccacgcuggg

SEQ ID NO: 297206 - RNA, 19 nt, Human herpesvirus 1
ccgccauuaagacgcuggg

SEQ ID NO: 297207 - RNA, 13 nt, Human herpesvirus 1
ccgcccaaugggc

SEQ ID NO: 297208 - RNA, 20 nt, Human herpesvirus 1
ccgcccaaugggccgggccg

SEQ ID NO: 297209 - RNA, 16 nt, Human herpesvirus 1
ccgcccaccgcugggc

SEQ ID NO: 297210 - RNA, 18 nt, Human herpesvirus 1
ccgccccccccccgucac

SEQ ID NO: 297211 - RNA, 17 nt, Human herpesvirus 1
ccgcccccgcaaccagg

SEQ ID NO: 297212 - RNA, 12 nt, Human herpesvirus 1
ccgcccccggca

SEQ ID NO: 297213 - RNA, 13 nt, Human herpesvirus 1
ccgcccccggcau

SEQ ID NO: 297214 - RNA, 19 nt, Human herpesvirus 1
ccgcccuguaccgacgggc

SEQ ID NO: 297215 - RNA, 22 nt, Human herpesvirus 1
ccgccguccccuuacaguucca

SEQ ID NO: 297216 - RNA, 14 nt, Human herpesvirus 1
ccgcgaccaccccg

SEQ ID NO: 297217 - RNA, 22 nt, Human herpesvirus 1
ccgcgcaaccaacccacugggg

SEQ ID NO: 297218 - RNA, 18 nt, Human herpesvirus 1
ccgcgcauauccgggggc

SEQ ID NO: 297219 - RNA, 19 nt, Human herpesvirus 1
ccgcgcaugaucuccggac

SEQ ID NO: 297220 - RNA, 18 nt, Human herpesvirus 1
ccgcgccaggcccgccgc

SEQ ID NO: 297221 - RNA, 12 nt, Human herpesvirus 1
ccgcgcgggggc

SEQ ID NO: 297222 - RNA, 14 nt, Human herpesvirus 1
ccgcgcgucccccg

SEQ ID NO: 297223 - RNA, 19 nt, Human herpesvirus 1
ccgcgcgucccccgagacg

SEQ ID NO: 297224 - RNA, 19 nt, Human herpesvirus 1
ccgcgcuaugacggcaaua

SEQ ID NO: 297225 - RNA, 18 nt, Human herpesvirus 1
ccgcgggaggauguguuu

SEQ ID NO: 297226 - RNA, 14 nt, Human herpesvirus 1
ccgcgguccagacc

SEQ ID NO: 297227 - RNA, 19 nt, Human herpesvirus 1
ccgcgugucgcgugugguu

SEQ ID NO: 297228 - RNA, 15 nt, Human herpesvirus 1
ccgcguuuggccugc

SEQ ID NO: 297229 - RNA, 21 nt, Human herpesvirus 1
ccgcguuuggccugcggcgca

SEQ ID NO: 297230 - RNA, 14 nt, Human herpesvirus 1
ccgcuagcaccagg

SEQ ID NO: 297231 - RNA, 14 nt, Human herpesvirus 1
ccggaaaccaaaga

SEQ ID NO: 297232 - RNA, 17 nt, Human herpesvirus 1
ccggaacaccccugggg

SEQ ID NO: 297233 - RNA, 16 nt, Human herpesvirus 1
ccggagccgcgcggcc

SEQ ID NO: 297234 - RNA, 16 nt, Human herpesvirus 1
ccggagcucgcggcac

SEQ ID NO: 297235 - RNA, 16 nt, Human herpesvirus 1
ccggcaccaacaacga

SEQ ID NO: 297236 - RNA, 12 nt, Human herpesvirus 1
ccggcgccgccc

SEQ ID NO: 297237 - RNA, 22 nt, Human herpesvirus 1
ccggcggcgcuccucgccgccc

SEQ ID NO: 297238 - RNA, 15 nt, Human herpesvirus 1
ccggcgggucccgac

SEQ ID NO: 297239 - RNA, 18 nt, Human herpesvirus 1
ccgggacaccccccaugc

SEQ ID NO: 297240 - RNA, 21 nt, Human herpesvirus 1
ccgggacgcaccgugacuaag

SEQ ID NO: 297241 - RNA, 22 nt, Human herpesvirus 1
ccgggacuggguggcggggggu

SEQ ID NO: 297242 - RNA, 18 nt, Human herpesvirus 1
ccgggccucacggggucc

SEQ ID NO: 297243 - RNA, 19 nt, Human herpesvirus 1
ccggggguccgccggugag

SEQ ID NO: 297244 - RNA, 18 nt, Human herpesvirus 1
ccggguagcguacggacc

SEQ ID NO: 297245 - RNA, 22 nt, Human herpesvirus 1
ccgggucuguuggggacacugg

SEQ ID NO: 297246 - RNA, 22 nt, Human herpesvirus 1
ccgguccauaaacaggccgggu

SEQ ID NO: 297247 - RNA, 18 nt, Human herpesvirus 1
ccguaacggcauaugcaa

SEQ ID NO: 297248 - RNA, 12 nt, Human herpesvirus 1
ccguccagacac

SEQ ID NO: 297249 - RNA, 17 nt, Human herpesvirus 1
ccgucgggcacguacac

SEQ ID NO: 297250 - RNA, 18 nt, Human herpesvirus 1
ccgucguuggucagggcg

SEQ ID NO: 297251 - RNA, 19 nt, Human herpesvirus 1
ccgugauccuuaggggccg

SEQ ID NO: 297252 - RNA, 18 nt, Human herpesvirus 1
ccgugcccauuuacgugg

SEQ ID NO: 297253 - RNA, 13 nt, Human herpesvirus 1
ccguugcgccuuu

SEQ ID NO: 297254 - RNA, 12 nt, Human herpesvirus 1
ccuacaccggcc

SEQ ID NO: 297255 - RNA, 19 nt, Human herpesvirus 1
ccuaucgcucgaccucucc

SEQ ID NO: 297256 - RNA, 20 nt, Human herpesvirus 1
ccuccaggugcgccuuucag

SEQ ID NO: 297257 - RNA, 15 nt, Human herpesvirus 1
ccuccccgcacagau

SEQ ID NO: 297258 - RNA, 20 nt, Human herpesvirus 1
ccuccugggggguccaguca

SEQ ID NO: 297259 - RNA, 21 nt, Human herpesvirus 1
ccucuccgcggugucugggaa

SEQ ID NO: 297260 - RNA, 18 nt, Human herpesvirus 1
ccucugggguuugcccuc

SEQ ID NO: 297261 - RNA, 17 nt, Human herpesvirus 1
ccugagcuggcgaaccc

SEQ ID NO: 297262 - RNA, 17 nt, Human herpesvirus 1
ccugcggccaacacaac

SEQ ID NO: 297263 - RNA, 21 nt, Human herpesvirus 1
ccugcggcuggcgcggugccu

SEQ ID NO: 297264 - RNA, 18 nt, Human herpesvirus 1
ccuggaucccaacgaccc

SEQ ID NO: 297265 - RNA, 19 nt, Human herpesvirus 1
ccuggcgcggggguucaug

SEQ ID NO: 297266 - RNA, 18 nt, Human herpesvirus 1
ccugggaucccacguccc

SEQ ID NO: 297267 - RNA, 19 nt, Human herpesvirus 1
ccugguuuauuuaaaaaga

SEQ ID NO: 297268 - RNA, 15 nt, Human herpesvirus 1
ccugucgcacccaca

SEQ ID NO: 297269 - RNA, 20 nt, Human herpesvirus 1
ccugucgccucccaaccccc

SEQ ID NO: 297270 - RNA, 21 nt, Human herpesvirus 1
ccugucgccucccaacccccu

SEQ ID NO: 297271 - RNA, 21 nt, Human herpesvirus 1
ccugucggcgauaucaggggc

SEQ ID NO: 297272 - RNA, 23 nt, Human herpesvirus 1
ccuucccgccauuaagacgcugg

SEQ ID NO: 297273 - RNA, 18 nt, Human herpesvirus 1
ccuucuccgcguggguga

SEQ ID NO: 297274 - RNA, 13 nt, Human herpesvirus 1
ccuugccccggcc

SEQ ID NO: 297275 - RNA, 23 nt, Human herpesvirus 1
ccuugcggaugugcgccguguag

SEQ ID NO: 297276 - RNA, 14 nt, Human herpesvirus 1
ccuugugugucaau

SEQ ID NO: 297277 - RNA, 14 nt, Human herpesvirus 1
cgaaacuucaucac

SEQ ID NO: 297278 - RNA, 22 nt, Human herpesvirus 1
cgaacccggcccgggggacuca

SEQ ID NO: 297279 - RNA, 15 nt, Human herpesvirus 1
cgaacgcggaccccc

SEQ ID NO: 297280 - RNA, 18 nt, Human herpesvirus 1
cgaagaucgcguguaaua

SEQ ID NO: 297281 - RNA, 16 nt, Human herpesvirus 1
cgaauaaaaaccaaaa

SEQ ID NO: 297282 - RNA, 23 nt, Human herpesvirus 1
cgacaaacagggggaaaggggcg

SEQ ID NO: 297283 - RNA, 13 nt, Human herpesvirus 1
cgacacugaaaug

SEQ ID NO: 297284 - RNA, 19 nt, Human herpesvirus 1
cgacacugaaaugcccccc

SEQ ID NO: 297285 - RNA, 18 nt, Human herpesvirus 1
cgaccgucgccgcgggcc

SEQ ID NO: 297286 - RNA, 15 nt, Human herpesvirus 1
cgacgacgucugucg

SEQ ID NO: 297287 - RNA, 20 nt, Human herpesvirus 1
cgacgucaaagucgugggcg

SEQ ID NO: 297288 - RNA, 21 nt, Human herpesvirus 1
cgagaaccuagggaacccaga

SEQ ID NO: 297289 - RNA, 19 nt, Human herpesvirus 1
cgagacagaccgcaguaca

SEQ ID NO: 297290 - RNA, 23 nt, Human herpesvirus 1
cgagcuuguuuucgugggggacg

SEQ ID NO: 297291 - RNA, 21 nt, Human herpesvirus 1
cgaggacgggcgaggggcuca

SEQ ID NO: 297292 - RNA, 20 nt, Human herpesvirus 1
cgagggacccgcgggguucu

SEQ ID NO: 297293 - RNA, 18 nt, Human herpesvirus 1
cgagggucacaggaaccc

SEQ ID NO: 297294 - RNA, 21 nt, Human herpesvirus 1
cgaggucccgugcaacccuua

SEQ ID NO: 297295 - RNA, 15 nt, Human herpesvirus 1
cgaggugcgguuggg

SEQ ID NO: 297296 - RNA, 22 nt, Human herpesvirus 1
cgauagcgaauaaaaaccaaaa

SEQ ID NO: 297297 - RNA, 13 nt, Human herpesvirus 1
cgaucaccgcgac

SEQ ID NO: 297298 - RNA, 15 nt, Human herpesvirus 1
cgauccgacaugucc

SEQ ID NO: 297299 - RNA, 21 nt, Human herpesvirus 1
cgauucuuuuaucccacgcgu

SEQ ID NO: 297300 - RNA, 14 nt, Human herpesvirus 1
cgcaaacaggagcu

SEQ ID NO: 297301 - RNA, 22 nt, Human herpesvirus 1
cgcaacggggugauaaugauca

SEQ ID NO: 297302 - RNA, 17 nt, Human herpesvirus 1
cgcaacuucccacccgg

SEQ ID NO: 297303 - RNA, 15 nt, Human herpesvirus 1
cgcaauugcggccac

SEQ ID NO: 297304 - RNA, 16 nt, Human herpesvirus 1
cgcagaggcggccaga

SEQ ID NO: 297305 - RNA, 12 nt, Human herpesvirus 1
cgcagaucccag

SEQ ID NO: 297306 - RNA, 16 nt, Human herpesvirus 1
cgcagccuucucccgg

SEQ ID NO: 297307 - RNA, 20 nt, Human herpesvirus 1
cgcaguccacgggggggagc

SEQ ID NO: 297308 - RNA, 16 nt, Human herpesvirus 1
cgcauuggcucggacg

SEQ ID NO: 297309 - RNA, 12 nt, Human herpesvirus 1
cgccaaagcccc

SEQ ID NO: 297310 - RNA, 21 nt, Human herpesvirus 1
cgccaaauaaagccacugaaa

SEQ ID NO: 297311 - RNA, 15 nt, Human herpesvirus 1
cgccacgcgcggcug

SEQ ID NO: 297312 - RNA, 14 nt, Human herpesvirus 1
cgccagggcgcccc

SEQ ID NO: 297313 - RNA, 14 nt, Human herpesvirus 1
cgccaucaaccccg

SEQ ID NO: 297314 - RNA, 20 nt, Human herpesvirus 1
cgcccaaugggccgggccgc

SEQ ID NO: 297315 - RNA, 16 nt, Human herpesvirus 1
cgcccacuacaccagc

SEQ ID NO: 297316 - RNA, 21 nt, Human herpesvirus 1
cgcccagacgcccuccgagga

SEQ ID NO: 297317 - RNA, 12 nt, Human herpesvirus 1
cgcccccggcua

SEQ ID NO: 297318 - RNA, 14 nt, Human herpesvirus 1
cgcccgccccugcg

SEQ ID NO: 297319 - RNA, 17 nt, Human herpesvirus 1
cgcccggguccccgcgg

SEQ ID NO: 297320 - RNA, 22 nt, Human herpesvirus 1
cgcccgucuuuaaccucccccg

SEQ ID NO: 297321 - RNA, 21 nt, Human herpesvirus 1
cgcccucacagggcgggccgc

SEQ ID NO: 297322 - RNA, 13 nt, Human herpesvirus 1
cgccgacucccgg

SEQ ID NO: 297323 - RNA, 14 nt, Human herpesvirus 1
cgccgccaccagcc

SEQ ID NO: 297324 - RNA, 16 nt, Human herpesvirus 1
cgccgccugguccccc

SEQ ID NO: 297325 - RNA, 14 nt, Human herpesvirus 1
cgccgcgacacuca

SEQ ID NO: 297326 - RNA, 19 nt, Human herpesvirus 1
cgccgcgagauggccgccc

SEQ ID NO: 297327 - RNA, 15 nt, Human herpesvirus 1
cgccgcgccccgccg

SEQ ID NO: 297328 - RNA, 13 nt, Human herpesvirus 1
cgccggggaccgc

SEQ ID NO: 297329 - RNA, 12 nt, Human herpesvirus 1
cgccgugcuccu

SEQ ID NO: 297330 - RNA, 18 nt, Human herpesvirus 1
cgccuaccggccccuggg

SEQ ID NO: 297331 - RNA, 22 nt, Human herpesvirus 1
cgccucacggcagccccagcgc

SEQ ID NO: 297332 - RNA, 20 nt, Human herpesvirus 1
cgccucccggggggucggca

SEQ ID NO: 297333 - RNA, 16 nt, Human herpesvirus 1
cgccucggucacccca

SEQ ID NO: 297334 - RNA, 18 nt, Human herpesvirus 1
cgccuggggucgcggccg

SEQ ID NO: 297335 - RNA, 18 nt, Human herpesvirus 1
cgccuggucccccgggga

SEQ ID NO: 297336 - RNA, 18 nt, Human herpesvirus 1
cgccuuccuccacgucga

SEQ ID NO: 297337 - RNA, 21 nt, Human herpesvirus 1
cgccuuucaguuucauggcca

SEQ ID NO: 297338 - RNA, 15 nt, Human herpesvirus 1
cgcgaccaccccaaa

SEQ ID NO: 297339 - RNA, 14 nt, Human herpesvirus 1
cgcgacccaggcgg

SEQ ID NO: 297340 - RNA, 17 nt, Human herpesvirus 1
cgcgagauggccgcccc

SEQ ID NO: 297341 - RNA, 12 nt, Human herpesvirus 1
cgcgauccggcc

SEQ ID NO: 297342 - RNA, 21 nt, Human herpesvirus 1
cgcgauguggauaaaaagcca

SEQ ID NO: 297343 - RNA, 22 nt, Human herpesvirus 1
cgcgauguggauaaaaagccag

SEQ ID NO: 297344 - RNA, 17 nt, Human herpesvirus 1
cuccccacccacccacu

SEQ ID NO: 297345 - RNA, 22 nt, Human herpesvirus 1
cuccccacccacccacucccca

SEQ ID NO: 297346 - RNA, 19 nt, Human herpesvirus 1
cucccggaagagccugccg

SEQ ID NO: 297347 - RNA, 17 nt, Human herpesvirus 1
cuccgaaagccaccaau

SEQ ID NO: 297348 - RNA, 20 nt, Human herpesvirus 1
cuccgaaagccaccaauaga

SEQ ID NO: 297349 - RNA, 14 nt, Human herpesvirus 1
cuccgaccccagac

SEQ ID NO: 297350 - RNA, 18 nt, Human herpesvirus 1
cuccgaucccaacuccuc

SEQ ID NO: 297351 - RNA, 20 nt, Human herpesvirus 1
cuccuccaccacccaacccc

SEQ ID NO: 297352 - RNA, 20 nt, Human herpesvirus 1
cuccugggggguccagucaa

SEQ ID NO: 297353 - RNA, 16 nt, Human herpesvirus 1
cuccugugagaccagc

SEQ ID NO: 297354 - RNA, 14 nt, Human herpesvirus 1
cuccuuagcacgau

SEQ ID NO: 297355 - RNA, 14 nt, Human herpesvirus 1
cucgagaugagcca

SEQ ID NO: 297356 - RNA, 16 nt, Human herpesvirus 1
cucgagaugagccaga

SEQ ID NO: 297357 - RNA, 20 nt, Human herpesvirus 1
cucgcaugaagcccccaaca

SEQ ID NO: 297358 - RNA, 13 nt, Human herpesvirus 1
cucggaugacuca

SEQ ID NO: 297359 - RNA, 16 nt, Human herpesvirus 1
cucggcuccccgccgc

SEQ ID NO: 297360 - RNA, 18 nt, Human herpesvirus 1
cucgugcccucgcgggcc

SEQ ID NO: 297361 - RNA, 16 nt, Human herpesvirus 1
cucgugcguuggugug

SEQ ID NO: 297362 - RNA, 14 nt, Human herpesvirus 1
cucgugugguacac

SEQ ID NO: 297363 - RNA, 23 nt, Human herpesvirus 1
cucuaucccgcccaccgcugggc

SEQ ID NO: 297364 - RNA, 15 nt, Human herpesvirus 1
cucugucgauacccc

SEQ ID NO: 297365 - RNA, 18 nt, Human herpesvirus 1
cugaacaaacaaaccaca

SEQ ID NO: 297366 - RNA, 15 nt, Human herpesvirus 1
cugaagccguccgac

SEQ ID NO: 297367 - RNA, 15 nt, Human herpesvirus 1
cugauaaaacagcga

SEQ ID NO: 297368 - RNA, 20 nt, Human herpesvirus 1
cugauucgcgaacauaagcu

SEQ ID NO: 297369 - RNA, 13 nt, Human herpesvirus 1
cugcccauuugac

SEQ ID NO: 297370 - RNA, 20 nt, Human herpesvirus 1
cugccugacccucuccggga

SEQ ID NO: 297371 - RNA, 15 nt, Human herpesvirus 1
cugcgcggcgcccgc

SEQ ID NO: 297372 - RNA, 22 nt, Human herpesvirus 1
cugcguuuuuuugcgccggccc

SEQ ID NO: 297373 - RNA, 15 nt, Human herpesvirus 1
cuggacgcccgggcg

SEQ ID NO: 297374 - RNA, 20 nt, Human herpesvirus 1
cuggagacccuaugguacac

SEQ ID NO: 297375 - RNA, 18 nt, Human herpesvirus 1
cuggccaaucggcggccg

SEQ ID NO: 297376 - RNA, 23 nt, Human herpesvirus 1
cuggccgcgcccacuacaccagc

SEQ ID NO: 297377 - RNA, 14 nt, Human herpesvirus 1
cuggcgagcccaga

SEQ ID NO: 297378 - RNA, 22 nt, Human herpesvirus 1
cugggcgcuauaaagccgccac

SEQ ID NO: 297379 - RNA, 21 nt, Human herpesvirus 1
cuggggauugguuagacccau

SEQ ID NO: 297380 - RNA, 22 nt, Human herpesvirus 1
cugggggcacccacgcccgcga

SEQ ID NO: 297381 - RNA, 14 nt, Human herpesvirus 1
cuggguugccggcg

SEQ ID NO: 297382 - RNA, 18 nt, Human herpesvirus 1
cugguaucggccacgacc

SEQ ID NO: 297383 - RNA, 12 nt, Human herpesvirus 1
cuguaugacagc

SEQ ID NO: 297384 - RNA, 14 nt, Human herpesvirus 1
cugucggccgccga

SEQ ID NO: 297385 - RNA, 13 nt, Human herpesvirus 1
cugucuccccggg

SEQ ID NO: 297386 - RNA, 22 nt, Human herpesvirus 1
cugugggugcgcgcauggcagc

SEQ ID NO: 297387 - RNA, 15 nt, Human herpesvirus 1
cuguguucacagggg

SEQ ID NO: 297388 - RNA, 17 nt, Human herpesvirus 1
cuguguuuacacgagcg

SEQ ID NO: 297389 - RNA, 17 nt, Human herpesvirus 1
cuguuggggacacuggg

SEQ ID NO: 297390 - RNA, 21 nt, Human herpesvirus 1
cuguuugucgccuggcuggcc

SEQ ID NO: 297391 - RNA, 14 nt, Human herpesvirus 1
cuuaacacaccaaa

SEQ ID NO: 297392 - RNA, 22 nt, Human herpesvirus 1
cuuaauaaauuuuacaaacaga

SEQ ID NO: 297393 - RNA, 20 nt, Human herpesvirus 1
cuuaccacgcccgaccacac

SEQ ID NO: 297394 - RNA, 21 nt, Human herpesvirus 1
cuucacgugacaggagccaau

SEQ ID NO: 297395 - RNA, 20 nt, Human herpesvirus 1
cuucaucgcgccccucgggu

SEQ ID NO: 297396 - RNA, 21 nt, Human herpesvirus 1
cuuccggccucgaugacgucc

SEQ ID NO: 297397 - RNA, 21 nt, Human herpesvirus 1
cuucugggguguuuuaaucaa

SEQ ID NO: 297398 - RNA, 23 nt, Human herpesvirus 1
cuugacgcgucgaugcucugccg

SEQ ID NO: 297399 - RNA, 20 nt, Human herpesvirus 1
cuuggucaggagggcgcuca

SEQ ID NO: 297400 - RNA, 19 nt, Human herpesvirus 1
cuuguuccgcuucccggua

SEQ ID NO: 297401 - RNA, 23 nt, Human herpesvirus 1
cuuuaagcgcugcugcggccagu

SEQ ID NO: 297402 - RNA, 20 nt, Human herpesvirus 1
cuuuccuuucccgugacaaa

SEQ ID NO: 297403 - RNA, 16 nt, Human herpesvirus 1
cuuugguaccauggga

SEQ ID NO: 297404 - RNA, 18 nt, Human herpesvirus 1
cuuuggucccgugaaagu

SEQ ID NO: 297405 - RNA, 13 nt, Human herpesvirus 1
cuuuuguguuggc

SEQ ID NO: 297406 - RNA, 13 nt, Human herpesvirus 1
gaaaagccccggg

SEQ ID NO: 297407 - RNA, 15 nt, Human herpesvirus 1
gaaaaugaaccagac

SEQ ID NO: 297408 - RNA, 16 nt, Human herpesvirus 1
gaaaauguaaccauac

SEQ ID NO: 297409 - RNA, 19 nt, Human herpesvirus 1
gaaaccccagcauaccuaa

SEQ ID NO: 297410 - RNA, 22 nt, Human herpesvirus 1
gaaaccguaacggcauaugcaa

SEQ ID NO: 297411 - RNA, 23 nt, Human herpesvirus 1
gaaaccguaacggcauaugcaaa

SEQ ID NO: 297412 - RNA, 17 nt, Human herpesvirus 1
gaaacggccaacggacg

SEQ ID NO: 297413 - RNA, 14 nt, Human herpesvirus 1
gaaacucccgcacg

SEQ ID NO: 297414 - RNA, 11 nt, Human herpesvirus 1
gaaagccacca

SEQ ID NO: 297415 - RNA, 23 nt, Human herpesvirus 1
gaacacgggggauucucucacga

SEQ ID NO: 297416 - RNA, 12 nt, Human herpesvirus 1
gaacgacugggc

SEQ ID NO: 297417 - RNA, 13 nt, Human herpesvirus 1
gaacgacugggcc

SEQ ID NO: 297418 - RNA, 15 nt, Human herpesvirus 1
gaacggacacgcggg

SEQ ID NO: 297419 - RNA, 20 nt, Human herpesvirus 1
gaacgguaagaagcacaucc

SEQ ID NO: 297420 - RNA, 19 nt, Human herpesvirus 1
gaacuccccgggccucacg

SEQ ID NO: 297421 - RNA, 20 nt, Human herpesvirus 1
gaacucguggacgaacacgg

SEQ ID NO: 297422 - RNA, 13 nt, Human herpesvirus 1
gaagacgcaauaa

SEQ ID NO: 297423 - RNA, 12 nt, Human herpesvirus 1
gaagagccugcc

SEQ ID NO: 297424 - RNA, 13 nt, Human herpesvirus 1
gaagaggagacga

SEQ ID NO: 297425 - RNA, 19 nt, Human herpesvirus 1
gaagagggggaccccgggg

SEQ ID NO: 297426 - RNA, 12 nt, Human herpesvirus 1
gaagccacaaaa

SEQ ID NO: 297427 - RNA, 13 nt, Human herpesvirus 1
gaagccacgccca

SEQ ID NO: 297428 - RNA, 20 nt, Human herpesvirus 1
gaagguucucgaacgacaaa

SEQ ID NO: 297429 - RNA, 21 nt, Human herpesvirus 1
gaaguuacaaacugaacaaag

SEQ ID NO: 297430 - RNA, 17 nt, Human herpesvirus 1
gaaucccccguguuccc

SEQ ID NO: 297431 - RNA, 15 nt, Human herpesvirus 1
gacaacaaacaacca

SEQ ID NO: 297432 - RNA, 16 nt, Human herpesvirus 1
gacagaacugcguuug

SEQ ID NO: 297433 - RNA, 14 nt, Human herpesvirus 1
gacagggccgugcc

SEQ ID NO: 297434 - RNA, 14 nt, Human herpesvirus 1
gacauccaccaccc

SEQ ID NO: 297435 - RNA, 12 nt, Human herpesvirus 1
gacaucuugucg

SEQ ID NO: 297436 - RNA, 18 nt, Human herpesvirus 1
gacaugcgcccgcggcca

SEQ ID NO: 297437 - RNA, 22 nt, Human herpesvirus 1
gaccaaaaucaaagcguuuguc

SEQ ID NO: 297438 - RNA, 13 nt, Human herpesvirus 1
gaccaacccagcc

SEQ ID NO: 297439 - RNA, 22 nt, Human herpesvirus 1
gaccacggugucgucuguuaag

SEQ ID NO: 297440 - RNA, 23 nt, Human herpesvirus 1
gaccacucccgucucgcugcccu

SEQ ID NO: 297441 - RNA, 14 nt, Human herpesvirus 1
gaccauaaaggaaa

SEQ ID NO: 297442 - RNA, 20 nt, Human herpesvirus 1
gaccaucacccgagucucug

SEQ ID NO: 297443 - RNA, 13 nt, Human herpesvirus 1
gacccaaaacaca

SEQ ID NO: 297444 - RNA, 14 nt, Human herpesvirus 1
gacccaccgggccc

SEQ ID NO: 297445 - RNA, 11 nt, Human herpesvirus 1
gacccagaccg

SEQ ID NO: 297446 - RNA, 17 nt, Human herpesvirus 1
gacccagaccggcacca

SEQ ID NO: 297447 - RNA, 17 nt, Human herpesvirus 1
gaccccauugggaccaa

SEQ ID NO: 297448 - RNA, 15 nt, Human herpesvirus 1
gaccccuucucccca

SEQ ID NO: 297449 - RNA, 17 nt, Human herpesvirus 1
gacccgcgggguucugg

SEQ ID NO: 297450 - RNA, 14 nt, Human herpesvirus 1
gacccgugacaccc

SEQ ID NO: 297451 - RNA, 12 nt, Human herpesvirus 1
gacccucuccgg

SEQ ID NO: 297452 - RNA, 14 nt, Human herpesvirus 1
gaccgccagccgcg

SEQ ID NO: 297453 - RNA, 23 nt, Human herpesvirus 1
gaccggauggaggagccccugcc

SEQ ID NO: 297454 - RNA, 21 nt, Human herpesvirus 1
gaccguggccgacaacugccu

SEQ ID NO: 297455 - RNA, 21 nt, Human herpesvirus 1
gaccugcaccgaucgcagcgu

SEQ ID NO: 297456 - RNA, 14 nt, Human herpesvirus 1
gacgacaccguggu

SEQ ID NO: 297457 - RNA, 11 nt, Human herpesvirus 1
gacgcaauaaa

SEQ ID NO: 297458 - RNA, 21 nt, Human herpesvirus 1
gacgccgguccgcugugccau

SEQ ID NO: 297459 - RNA, 17 nt, Human herpesvirus 1
gccgacgccgucgacga

SEQ ID NO: 297460 - RNA, 22 nt, Human herpesvirus 1
gccgagucuucggggcccggcc

SEQ ID NO: 297461 - RNA, 20 nt, Human herpesvirus 1
gccgccacccaucggggacc

SEQ ID NO: 297462 - RNA, 13 nt, Human herpesvirus 1
gccgcgacacuca

SEQ ID NO: 297463 - RNA, 15 nt, Human herpesvirus 1
gccgcuuuaucccac

SEQ ID NO: 297464 - RNA, 18 nt, Human herpesvirus 1
gccggacgcgcggcgcga

SEQ ID NO: 297465 - RNA, 16 nt, Human herpesvirus 1
gccggcaugcacccca

SEQ ID NO: 297466 - RNA, 18 nt, Human herpesvirus 1
gccggcaugcaccccaga

SEQ ID NO: 297467 - RNA, 22 nt, Human herpesvirus 1
gccggcguuucugaccugcacc

SEQ ID NO: 297468 - RNA, 13 nt, Human herpesvirus 1
gccgggcgaccca

SEQ ID NO: 297469 - RNA, 15 nt, Human herpesvirus 1
gccgggcgacccaga

SEQ ID NO: 297470 - RNA, 22 nt, Human herpesvirus 1
gccguuguucccauuaucccau

SEQ ID NO: 297471 - RNA, 17 nt, Human herpesvirus 1
gccuauguucgcgggcg

SEQ ID NO: 297472 - RNA, 22 nt, Human herpesvirus 1
gccucccccugagccgcuuucc

SEQ ID NO: 297473 - RNA, 12 nt, Human herpesvirus 1
gccucccggggg

SEQ ID NO: 297474 - RNA, 17 nt, Human herpesvirus 1
gccucggucaccccaau

SEQ ID NO: 297475 - RNA, 20 nt, Human herpesvirus 1
gccucugugucagguggccc

SEQ ID NO: 297476 - RNA, 15 nt, Human herpesvirus 1
gccugaacaaacaaa

SEQ ID NO: 297477 - RNA, 17 nt, Human herpesvirus 1
gccugggguagcugggu

SEQ ID NO: 297478 - RNA, 21 nt, Human herpesvirus 1
gccugugugucguauguuuau

SEQ ID NO: 297479 - RNA, 12 nt, Human herpesvirus 1
gccuugcguuua

SEQ ID NO: 297480 - RNA, 13 nt, Human herpesvirus 1
gcgaacgggggcc

SEQ ID NO: 297481 - RNA, 17 nt, Human herpesvirus 1
gcgaauaaaaaccaaaa

SEQ ID NO: 297482 - RNA, 16 nt, Human herpesvirus 1
gcgagagcgcgggacc

SEQ ID NO: 297483 - RNA, 21 nt, Human herpesvirus 1
gcgaggggggagggggcauua

SEQ ID NO: 297484 - RNA, 20 nt, Human herpesvirus 1
gcgaggggggguccgaugaa

SEQ ID NO: 297485 - RNA, 15 nt, Human herpesvirus 1
gcgaugaggggcacc

SEQ ID NO: 297486 - RNA, 20 nt, Human herpesvirus 1
gcgauguggauaaaaagcca

SEQ ID NO: 297487 - RNA, 22 nt, Human herpesvirus 1
gcgauguggauaaaaagccagc

SEQ ID NO: 297488 - RNA, 21 nt, Human herpesvirus 1
gcgcaccuccuccgacgccca

SEQ ID NO: 297489 - RNA, 15 nt, Human herpesvirus 1
gcgcagaggcggcca

SEQ ID NO: 297490 - RNA, 18 nt, Human herpesvirus 1
gcgcagaggcggccagaa

SEQ ID NO: 297491 - RNA, 15 nt, Human herpesvirus 1
gcgcauauccggggg

SEQ ID NO: 297492 - RNA, 20 nt, Human herpesvirus 1
gcgcauccgucgggaggcca

SEQ ID NO: 297493 - RNA, 22 nt, Human herpesvirus 1
gcgcauuuaaggcguuguugug

SEQ ID NO: 297494 - RNA, 21 nt, Human herpesvirus 1
gcgccacgguggugcaguucg

SEQ ID NO: 297495 - RNA, 17 nt, Human herpesvirus 1
gcgccaggucggcgacc

SEQ ID NO: 297496 - RNA, 18 nt, Human herpesvirus 1
gcgcccucuucugcgaga

SEQ ID NO: 297497 - RNA, 16 nt, Human herpesvirus 1
gcgccggacgcgcggc

SEQ ID NO: 297498 - RNA, 14 nt, Human herpesvirus 1
gcgccggugguucg

SEQ ID NO: 297499 - RNA, 21 nt, Human herpesvirus 1
gcgccugccccgccacccagu

SEQ ID NO: 297500 - RNA, 15 nt, Human herpesvirus 1
gcgcgacggcggacc

SEQ ID NO: 297501 - RNA, 12 nt, Human herpesvirus 1
gcgcggccgugg

SEQ ID NO: 297502 - RNA, 12 nt, Human herpesvirus 1
gcgcugcugcgg

SEQ ID NO: 297503 - RNA, 16 nt, Human herpesvirus 1
gcggaaagacggucca

SEQ ID NO: 297504 - RNA, 22 nt, Human herpesvirus 1
gcggaaagacgguccacgucac

SEQ ID NO: 297505 - RNA, 12 nt, Human herpesvirus 1
gcggacacccgg

SEQ ID NO: 297506 - RNA, 15 nt, Human herpesvirus 1
gcggacccccggagg

SEQ ID NO: 297507 - RNA, 15 nt, Human herpesvirus 1
gcggacccucucuuc

SEQ ID NO: 297508 - RNA, 14 nt, Human herpesvirus 1
gcggagggcggcca

SEQ ID NO: 297509 - RNA, 19 nt, Human herpesvirus 1
gcggccacgucguccgggg

SEQ ID NO: 297510 - RNA, 13 nt, Human herpesvirus 1
gcggcuggcgcgg

SEQ ID NO: 297511 - RNA, 10 nt, Human herpesvirus 1
gcgggcgggc

SEQ ID NO: 297512 - RNA, 14 nt, Human herpesvirus 1
gcgggcggggacga

SEQ ID NO: 297513 - RNA, 22 nt, Human herpesvirus 1
gcgggcuccucgcaaaacuggu

SEQ ID NO: 297514 - RNA, 15 nt, Human herpesvirus 1
gcggggcgcuuguga

SEQ ID NO: 297515 - RNA, 24 nt, Human herpesvirus 1
gcggguccgcuguaacugcuguug

SEQ ID NO: 297516 - RNA, 21 nt, Human herpesvirus 1
gcgggugggccuugccguggu

SEQ ID NO: 297517 - RNA, 16 nt, Human herpesvirus 1
gcgguccugacggcca

SEQ ID NO: 297518 - RNA, 14 nt, Human herpesvirus 1
gcggugccugacgc

SEQ ID NO: 297519 - RNA, 18 nt, Human herpesvirus 1
gcggugcuguuuguuggg

SEQ ID NO: 297520 - RNA, 12 nt, Human herpesvirus 1
gcgguggugggg

SEQ ID NO: 297521 - RNA, 20 nt, Human herpesvirus 1
gcgguuuaccgccaccagca

SEQ ID NO: 297522 - RNA, 11 nt, Human herpesvirus 1
gcguaccaaac

SEQ ID NO: 297523 - RNA, 21 nt, Human herpesvirus 1
gcguaccaaacaaacaaacca

SEQ ID NO: 297524 - RNA, 21 nt, Human herpesvirus 1
gcguccgguuggccgcgcggc

SEQ ID NO: 297525 - RNA, 23 nt, Human herpesvirus 1
gcgucgcgacagaacugcguuug

SEQ ID NO: 297526 - RNA, 14 nt, Human herpesvirus 1
gcgugccguccgcc

SEQ ID NO: 297527 - RNA, 17 nt, Human herpesvirus 1
gcguugcgccggaccac

SEQ ID NO: 297528 - RNA, 15 nt, Human herpesvirus 1
gcguugggcccugua

SEQ ID NO: 297529 - RNA, 17 nt, Human herpesvirus 1
gcuaugcagccccgugu

SEQ ID NO: 297530 - RNA, 12 nt, Human herpesvirus 1
gcucaaccaccg

SEQ ID NO: 297531 - RNA, 17 nt, Human herpesvirus 1
gcucacgagacgcgugu

SEQ ID NO: 297532 - RNA, 15 nt, Human herpesvirus 1
gcucagccagacgcc

SEQ ID NO: 297533 - RNA, 18 nt, Human herpesvirus 1
gcuccgcaacgacagcca

SEQ ID NO: 297534 - RNA, 15 nt, Human herpesvirus 1
gcuccucgcaaaacu

SEQ ID NO: 297535 - RNA, 13 nt, Human herpesvirus 1
gcucgaccucucc

SEQ ID NO: 297536 - RNA, 20 nt, Human herpesvirus 1
gcucgauuauuugguguguu

SEQ ID NO: 297537 - RNA, 13 nt, Human herpesvirus 1
gcucgucugggac

SEQ ID NO: 297538 - RNA, 13 nt, Human herpesvirus 1
gcucgucuuggcc

SEQ ID NO: 297539 - RNA, 13 nt, Human herpesvirus 1
gcugcgacacucg

SEQ ID NO: 297540 - RNA, 22 nt, Human herpesvirus 1
gcugcgggguaaacguguuguu

SEQ ID NO: 297541 - RNA, 13 nt, Human herpesvirus 1
gcugcgugucaaa

SEQ ID NO: 297542 - RNA, 16 nt, Human herpesvirus 1
gcuggccgcgcccgcc

SEQ ID NO: 297543 - RNA, 18 nt, Human herpesvirus 1
gcuggcgcggugccugac

SEQ ID NO: 297544 - RNA, 20 nt, Human herpesvirus 1
gcuggggguccugguggcgu

SEQ ID NO: 297545 - RNA, 23 nt, Human herpesvirus 1
gcuggucgucgggcgccaaagcc

SEQ ID NO: 297546 - RNA, 14 nt, Human herpesvirus 1
gcuguccuuucuca

SEQ ID NO: 297547 - RNA, 13 nt, Human herpesvirus 1
gcugugaugaagc

SEQ ID NO: 297548 - RNA, 18 nt, Human herpesvirus 1
gcuguggccucaccugac

SEQ ID NO: 297549 - RNA, 19 nt, Human herpesvirus 1
gcuuaugaacgacugggcc

SEQ ID NO: 297550 - RNA, 20 nt, Human herpesvirus 1
gcuucggccguuucuccgcc

SEQ ID NO: 297551 - RNA, 15 nt, Human herpesvirus 1
gcuuguuuguguucc

SEQ ID NO: 297552 - RNA, 22 nt, Human herpesvirus 1
ggaaaccguaacggcauaugca

SEQ ID NO: 297553 - RNA, 22 nt, Human herpesvirus 1
ggaaacuugccggucgccgugc

SEQ ID NO: 297554 - RNA, 14 nt, Human herpesvirus 1
ggaaagacggucca

SEQ ID NO: 297555 - RNA, 21 nt, Human herpesvirus 1
ggacacuggguucuccuggaa

SEQ ID NO: 297556 - RNA, 18 nt, Human herpesvirus 1
ggacaucgguguguccuu

SEQ ID NO: 297557 - RNA, 20 nt, Human herpesvirus 1
ggacccccccaacccucguu

SEQ ID NO: 297558 - RNA, 20 nt, Human herpesvirus 1
ggacccccccucgcgccaca

SEQ ID NO: 297559 - RNA, 19 nt, Human herpesvirus 1
ggaccgccugccgcgcgga

SEQ ID NO: 297560 - RNA, 23 nt, Human herpesvirus 1
ggagcuucgcuuugugggggacc

SEQ ID NO: 297561 - RNA, 15 nt, Human herpesvirus 1
ggaggccacagcgcc

SEQ ID NO: 297562 - RNA, 14 nt, Human herpesvirus 1
ggaggccgcaucga

SEQ ID NO: 297563 - RNA, 16 nt, Human herpesvirus 1
ggagugggggugccau

SEQ ID NO: 297564 - RNA, 12 nt, Human herpesvirus 1
ggauaacaacca

SEQ ID NO: 297565 - RNA, 15 nt, Human herpesvirus 1
ggcacagaacagggc

SEQ ID NO: 297566 - RNA, 13 nt, Human herpesvirus 1
ggcaccacgggua

SEQ ID NO: 297567 - RNA, 22 nt, Human herpesvirus 1
ggcacccaaggggccgugcggg

SEQ ID NO: 297568 - RNA, 22 nt, Human herpesvirus 1
ggcaggcgccuccggggguccg

SEQ ID NO: 297569 - RNA, 11 nt, Human herpesvirus 1
ggcauaugcaa

SEQ ID NO: 297570 - RNA, 12 nt, Human herpesvirus 1
ggcauaugcaaa

SEQ ID NO: 297571 - RNA, 13 nt, Human herpesvirus 1
ggcauaugcaaau

SEQ ID NO: 297572 - RNA, 22 nt, Human herpesvirus 1
ggccacagaaacaaaaccgggu

SEQ ID NO: 297573 - RNA, 14 nt, Human herpesvirus 1
ggccaccucgccca

SEQ ID NO: 297574 - RNA, 19 nt, Human herpesvirus 1
gucccaucugugcggggag

SEQ ID NO: 297575 - RNA, 20 nt, Human herpesvirus 1
gucccccgaggccacgugua

SEQ ID NO: 297576 - RNA, 19 nt, Human herpesvirus 1
guccgccaaauaaagccac

SEQ ID NO: 297577 - RNA, 19 nt, Human herpesvirus 1
guccgcugugccaucgcgc

SEQ ID NO: 297578 - RNA, 22 nt, Human herpesvirus 1
guccugucuuggggcccaccca

SEQ ID NO: 297579 - RNA, 18 nt, Human herpesvirus 1
guccuuucucagccucau

SEQ ID NO: 297580 - RNA, 22 nt, Human herpesvirus 1
gucgaucuccucaaacaccggc

SEQ ID NO: 297581 - RNA, 20 nt, Human herpesvirus 1
gucgcaacgccgcaggggag

SEQ ID NO: 297582 - RNA, 17 nt, Human herpesvirus 1
gucggcgaccgccagcc

SEQ ID NO: 297583 - RNA, 14 nt, Human herpesvirus 1
gucgggcgccaaag

SEQ ID NO: 297584 - RNA, 15 nt, Human herpesvirus 1
gucggguuaaacaca

SEQ ID NO: 297585 - RNA, 22 nt, Human herpesvirus 1
gucgucaaagggauacacaaac

SEQ ID NO: 297586 - RNA, 19 nt, Human herpesvirus 1
gucguuuuuaaaaaaccca

SEQ ID NO: 297587 - RNA, 12 nt, Human herpesvirus 1
gucuccaaaaaa

SEQ ID NO: 297588 - RNA, 19 nt, Human herpesvirus 1
gucugggaauagagcagaa

SEQ ID NO: 297589 - RNA, 16 nt, Human herpesvirus 1
gucugguguguggcgu

SEQ ID NO: 297590 - RNA, 19 nt, Human herpesvirus 1
gucuguuggggacacuggg

SEQ ID NO: 297591 - RNA, 21 nt, Human herpesvirus 1
gucuuccgcugacaaccaccu

SEQ ID NO: 297592 - RNA, 16 nt, Human herpesvirus 1
gucuugccguggcgcc

SEQ ID NO: 297593 - RNA, 13 nt, Human herpesvirus 1
gucuuggggccca

SEQ ID NO: 297594 - RNA, 12 nt, Human herpesvirus 1
gucuuuuacaca

SEQ ID NO: 297595 - RNA, 19 nt, Human herpesvirus 1
gucuuuuacacagacuguc

SEQ ID NO: 297596 - RNA, 19 nt, Human herpesvirus 1
gugagagaaucccccgugu

SEQ ID NO: 297597 - RNA, 20 nt, Human herpesvirus 1
gugaguuuguggacccaaag

SEQ ID NO: 297598 - RNA, 16 nt, Human herpesvirus 1
gugauaguaacgggau

SEQ ID NO: 297599 - RNA, 17 nt, Human herpesvirus 1
gugaucagcacgccacc

SEQ ID NO: 297600 - RNA, 14 nt, Human herpesvirus 1
gugauccugggaug

SEQ ID NO: 297601 - RNA, 19 nt, Human herpesvirus 1
gugcccauuuacguggcug

SEQ ID NO: 297602 - RNA, 18 nt, Human herpesvirus 1
gugccccaaggagggcgc

SEQ ID NO: 297603 - RNA, 14 nt, Human herpesvirus 1
gugcguugcacgua

SEQ ID NO: 297604 - RNA, 15 nt, Human herpesvirus 1
gugcugcgacacucg

SEQ ID NO: 297605 - RNA, 17 nt, Human herpesvirus 1
gugcuuguuuguguucc

SEQ ID NO: 297606 - RNA, 14 nt, Human herpesvirus 1
guggacccaaagcc

SEQ ID NO: 297607 - RNA, 23 nt, Human herpesvirus 1
guggccccggcccccaauaaaga

SEQ ID NO: 297608 - RNA, 19 nt, Human herpesvirus 1
gugggagugggggugcgug

SEQ ID NO: 297609 - RNA, 17 nt, Human herpesvirus 1
gugguccacucgggccg

SEQ ID NO: 297610 - RNA, 19 nt, Human herpesvirus 1
guguagccgaucuugaucc

SEQ ID NO: 297611 - RNA, 15 nt, Human herpesvirus 1
gugucgcgaugucuc

SEQ ID NO: 297612 - RNA, 17 nt, Human herpesvirus 1
gugugucgcgaugucuc

SEQ ID NO: 297613 - RNA, 14 nt, Human herpesvirus 1
guguuccgugucua

SEQ ID NO: 297614 - RNA, 15 nt, Human herpesvirus 1
guguugacuuugccu

SEQ ID NO: 297615 - RNA, 12 nt, Human herpesvirus 1
guguuguucucg

SEQ ID NO: 297616 - RNA, 22 nt, Human herpesvirus 1
guuauuuauuaacaucaaacac

SEQ ID NO: 297617 - RNA, 13 nt, Human herpesvirus 1
guucccaccaacg

SEQ ID NO: 297618 - RNA, 20 nt, Human herpesvirus 1
guucggcgguugaguccgga

SEQ ID NO: 297619 - RNA, 14 nt, Human herpesvirus 1
guucucccuguuca

SEQ ID NO: 297620 - RNA, 18 nt, Human herpesvirus 1
guuguccuucuuugcuca

SEQ ID NO: 297621 - RNA, 21 nt, Human herpesvirus 1
guuuauuaaaacggaaccaaa

SEQ ID NO: 297622 - RNA, 22 nt, Human herpesvirus 1
guuuauuaaaacggaaccaaac

SEQ ID NO: 297623 - RNA, 11 nt, Human herpesvirus 1
guuucacugaa

SEQ ID NO: 297624 - RNA, 13 nt, Human herpesvirus 1
guuucuguguuca

SEQ ID NO: 297625 - RNA, 14 nt, Human herpesvirus 1
guuucuguguucac

SEQ ID NO: 297626 - RNA, 15 nt, Human herpesvirus 1
guuucuguguucaca

SEQ ID NO: 297627 - RNA, 21 nt, Human herpesvirus 1
guuucuuccuugccacucccc

SEQ ID NO: 297628 - RNA, 18 nt, Human herpesvirus 1
guuuuuaaaaaacccaca

SEQ ID NO: 297629 - RNA, 13 nt, Human herpesvirus 1
uaaaaagacagaa

SEQ ID NO: 297630 - RNA, 22 nt, Human herpesvirus 1
uaaaaauaaccaaaaacaccac

SEQ ID NO: 297631 - RNA, 17 nt, Human herpesvirus 1
uaaaacggaaccaaaca

SEQ ID NO: 297632 - RNA, 17 nt, Human herpesvirus 1
uaaacaacuacacacag

SEQ ID NO: 297633 - RNA, 17 nt, Human herpesvirus 1
uaaacacacccagguau

SEQ ID NO: 297634 - RNA, 17 nt, Human herpesvirus 1
uaaacaccaacucaauc

SEQ ID NO: 297635 - RNA, 22 nt, Human herpesvirus 1
uaaacauacgacacacaggcau

SEQ ID NO: 297636 - RNA, 20 nt, Human herpesvirus 1
uaaaccagguaauaccaaau

SEQ ID NO: 297637 - RNA, 22 nt, Human herpesvirus 1
uaaaggcgagagcgcgggaccg

SEQ ID NO: 297638 - RNA, 15 nt, Human herpesvirus 1
uaaauaaaaaccuaa

SEQ ID NO: 297639 - RNA, 23 nt, Human herpesvirus 1
uaacaucaaacacgcgcgacggg

SEQ ID NO: 297640 - RNA, 17 nt, Human herpesvirus 1
uaacaugcgcacgugau

SEQ ID NO: 297641 - RNA, 18 nt, Human herpesvirus 1
uaacaugcgcacgugaug

SEQ ID NO: 297642 - RNA, 19 nt, Human herpesvirus 1
uaacaugcgcacgugaugu

SEQ ID NO: 297643 - RNA, 12 nt, Human herpesvirus 1
uaaccauaccca

SEQ ID NO: 297644 - RNA, 16 nt, Human herpesvirus 1
uaaccccggggguccg

SEQ ID NO: 297645 - RNA, 19 nt, Human herpesvirus 1
uaagcgucccugggcccug

SEQ ID NO: 297646 - RNA, 13 nt, Human herpesvirus 1
uaagcuuggucag

SEQ ID NO: 297647 - RNA, 13 nt, Human herpesvirus 1
uaaggccugggau

SEQ ID NO: 297648 - RNA, 18 nt, Human herpesvirus 1
uaauaaacacacaaucac

SEQ ID NO: 297649 - RNA, 19 nt, Human herpesvirus 1
uaauaaauuuuacaaacag

SEQ ID NO: 297650 - RNA, 21 nt, Human herpesvirus 1
uaaucaggggaaccggggcca

SEQ ID NO: 297651 - RNA, 14 nt, Human herpesvirus 1
uaaugucguguuua

SEQ ID NO: 297652 - RNA, 18 nt, Human herpesvirus 1
uacacccuugugugucaa

SEQ ID NO: 297653 - RNA, 20 nt, Human herpesvirus 1
uacaccggccacccagguga

SEQ ID NO: 297654 - RNA, 13 nt, Human herpesvirus 1
uaccaaacaaaca

SEQ ID NO: 297655 - RNA, 14 nt, Human herpesvirus 1
uaccaaacaaacaa

SEQ ID NO: 297656 - RNA, 15 nt, Human herpesvirus 1
accccagacauuccg

SEQ ID NO: 297657 - RNA, 17 nt, Human herpesvirus 1
accccagacgacaucag

SEQ ID NO: 297658 - RNA, 14 nt, Human herpesvirus 1
acccccuuggucag

SEQ ID NO: 297659 - RNA, 14 nt, Human herpesvirus 1
accccguaccaccc

SEQ ID NO: 297660 - RNA, 20 nt, Human herpesvirus 1
acccgacgcgucauaugcaa

SEQ ID NO: 297661 - RNA, 16 nt, Human herpesvirus 1
acccgcgacccccggg

SEQ ID NO: 297662 - RNA, 21 nt, Human herpesvirus 1
acccggcccgggggacucacu

SEQ ID NO: 297663 - RNA, 12 nt, Human herpesvirus 1
accgaaccagcc

SEQ ID NO: 297664 - RNA, 23 nt, Human herpesvirus 1
accgcacucguucgguacguggu

SEQ ID NO: 297665 - RNA, 23 nt, Human herpesvirus 1
accgcagacgaaaagccccgggc

SEQ ID NO: 297666 - RNA, 15 nt, Human herpesvirus 1
accgcccaaugggcc

SEQ ID NO: 297667 - RNA, 15 nt, Human herpesvirus 1
accgcgagaugucca

SEQ ID NO: 297668 - RNA, 17 nt, Human herpesvirus 1
accgcgguucgcguccc

SEQ ID NO: 297669 - RNA, 17 nt, Human herpesvirus 1
accgcguguuccccggg

SEQ ID NO: 297670 - RNA, 22 nt, Human herpesvirus 1
accggugcgccccccaaaccau

SEQ ID NO: 297671 - RNA, 18 nt, Human herpesvirus 1
accguaacggcauaugca

SEQ ID NO: 297672 - RNA, 19 nt, Human herpesvirus 1
accguaacggcauaugcaa

SEQ ID NO: 297673 - RNA, 21 nt, Human herpesvirus 1
accguaacggcauaugcaaau

SEQ ID NO: 297674 - RNA, 20 nt, Human herpesvirus 1
accuagggaacccagaguac

SEQ ID NO: 297675 - RNA, 22 nt, Human herpesvirus 1
accuccuccgacgcccagcagc

SEQ ID NO: 297676 - RNA, 19 nt, Human herpesvirus 1
accucggaugacucagggc

SEQ ID NO: 297677 - RNA, 22 nt, Human herpesvirus 1
accugauuaaguuuugcaguag

SEQ ID NO: 297678 - RNA, 14 nt, Human herpesvirus 1
accuugccccggcc

SEQ ID NO: 297679 - RNA, 23 nt, Human herpesvirus 1
accuuggcgccggccucgagggu

SEQ ID NO: 297680 - RNA, 23 nt, Human herpesvirus 1
acgaccacggugucgucuguuaa

SEQ ID NO: 297681 - RNA, 21 nt, Human herpesvirus 1
acgacccucgagauccccggg

SEQ ID NO: 297682 - RNA, 15 nt, Human herpesvirus 1
acgacggacggccac

SEQ ID NO: 297683 - RNA, 13 nt, Human herpesvirus 1
acgagcgccagcg

SEQ ID NO: 297684 - RNA, 20 nt, Human herpesvirus 1
acgagucggugcggacacua

SEQ ID NO: 297685 - RNA, 16 nt, Human herpesvirus 1
acgauggaacgcgggg

SEQ ID NO: 297686 - RNA, 14 nt, Human herpesvirus 1
acgcacgccgcccc

SEQ ID NO: 297687 - RNA, 19 nt, Human herpesvirus 1
acgccaccgacaccgcaga

SEQ ID NO: 297688 - RNA, 14 nt, Human herpesvirus 1
acgccauacacagc

SEQ ID NO: 297689 - RNA, 13 nt, Human herpesvirus 1
acgcccauaucug

SEQ ID NO: 297690 - RNA, 15 nt, Human herpesvirus 1
acgcccgaccacaca

SEQ ID NO: 297691 - RNA, 13 nt, Human herpesvirus 1
acgccgcaccgga

SEQ ID NO: 297692 - RNA, 23 nt, Human herpesvirus 1
acgccggguagcguacggaccgc

SEQ ID NO: 297693 - RNA, 15 nt, Human herpesvirus 1
acgccucuccggggg

SEQ ID NO: 297694 - RNA, 16 nt, Human herpesvirus 1
acgcgaccgucgccgc

SEQ ID NO: 297695 - RNA, 14 nt, Human herpesvirus 1
acgcgggccccggg

SEQ ID NO: 297696 - RNA, 16 nt, Human herpesvirus 1
acgcgggccccgggga

SEQ ID NO: 297697 - RNA, 19 nt, Human herpesvirus 1
acgcgguauggcugccccc

SEQ ID NO: 297698 - RNA, 14 nt, Human herpesvirus 1
acgcgucauaugca

SEQ ID NO: 297699 - RNA, 16 nt, Human herpesvirus 1
acgcgucauaugcaaa

SEQ ID NO: 297700 - RNA, 17 nt, Human herpesvirus 1
acgcgucauaugcaaau

SEQ ID NO: 297701 - RNA, 14 nt, Human herpesvirus 1
acggaaccaaacag

SEQ ID NO: 297702 - RNA, 22 nt, Human herpesvirus 1
acggcacgucgcucgaaaacac

SEQ ID NO: 297703 - RNA, 13 nt, Human herpesvirus 1
acggccaacggac

SEQ ID NO: 297704 - RNA, 23 nt, Human herpesvirus 1
acggccccuugggugcccugggg

SEQ ID NO: 297705 - RNA, 15 nt, Human herpesvirus 1
acggccgaagccacg

SEQ ID NO: 297706 - RNA, 14 nt, Human herpesvirus 1
acggcgaccauaag

SEQ ID NO: 297707 - RNA, 13 nt, Human herpesvirus 1
acggcggaccugg

SEQ ID NO: 297708 - RNA, 14 nt, Human herpesvirus 1
acgggcuacccuca

SEQ ID NO: 297709 - RNA, 17 nt, Human herpesvirus 1
acgggcugcgugucaaa

SEQ ID NO: 297710 - RNA, 20 nt, Human herpesvirus 1
acgggggagcgcucuugucu

SEQ ID NO: 297711 - RNA, 22 nt, Human herpesvirus 1
acgggggagcgcucuugucuca

SEQ ID NO: 297712 - RNA, 20 nt, Human herpesvirus 1
acggugaauaggugcgccgc

SEQ ID NO: 297713 - RNA, 20 nt, Human herpesvirus 1
acguauucggacagacucaa

SEQ ID NO: 297714 - RNA, 23 nt, Human herpesvirus 1
acgucgccccuguggcccuggcg

SEQ ID NO: 297715 - RNA, 16 nt, Human herpesvirus 1
acgucuccaagcuuuc

SEQ ID NO: 297716 - RNA, 12 nt, Human herpesvirus 1
acuacaccagcc

SEQ ID NO: 297717 - RNA, 21 nt, Human herpesvirus 1
acuacacccuugugugucaau

SEQ ID NO: 297718 - RNA, 22 nt, Human herpesvirus 1
acuagccaggagacgggaccgc

SEQ ID NO: 297719 - RNA, 13 nt, Human herpesvirus 1
acucaagcacaca

SEQ ID NO: 297720 - RNA, 17 nt, Human herpesvirus 1
acucaggcaaacagaaa

SEQ ID NO: 297721 - RNA, 20 nt, Human herpesvirus 1
acucauuaaugggcggcccc

SEQ ID NO: 297722 - RNA, 13 nt, Human herpesvirus 1
acuccccacccac

SEQ ID NO: 297723 - RNA, 22 nt, Human herpesvirus 1
acuccccacccacccacucccc

SEQ ID NO: 297724 - RNA, 19 nt, Human herpesvirus 1
acucccgacaccaccagcu

SEQ ID NO: 297725 - RNA, 18 nt, Human herpesvirus 1
acuccugggucagcuccu

SEQ ID NO: 297726 - RNA, 15 nt, Human herpesvirus 1
acucucaguuuauca

SEQ ID NO: 297727 - RNA, 15 nt, Human herpesvirus 1
acuggccgggagcac

SEQ ID NO: 297728 - RNA, 15 nt, Human herpesvirus 1
acuggggucuggguu

SEQ ID NO: 297729 - RNA, 17 nt, Human herpesvirus 1
acuggguggcggggggu

SEQ ID NO: 297730 - RNA, 15 nt, Human herpesvirus 1
acuuaacacaccaaa

SEQ ID NO: 297731 - RNA, 16 nt, Human herpesvirus 1
acuuaacacaccaaau

SEQ ID NO: 297732 - RNA, 22 nt, Human herpesvirus 1
acuugccggucgccgugcuccu

SEQ ID NO: 297733 - RNA, 17 nt, Human herpesvirus 1
agaaaauguaaccauac

SEQ ID NO: 297734 - RNA, 21 nt, Human herpesvirus 1
agaaacaagcccgaccaccag

SEQ ID NO: 297735 - RNA, 13 nt, Human herpesvirus 1
agaaacagaccac

SEQ ID NO: 297736 - RNA, 16 nt, Human herpesvirus 1
agaaacgacaucuugu

SEQ ID NO: 297737 - RNA, 22 nt, Human herpesvirus 1
agacaucccaugguaccaaaga

SEQ ID NO: 297738 - RNA, 23 nt, Human herpesvirus 1
agacaucccaugguaccaaagac

SEQ ID NO: 297739 - RNA, 17 nt, Human herpesvirus 1
agaccaagguccgucag

SEQ ID NO: 297740 - RNA, 13 nt, Human herpesvirus 1
agaccacaccaac

SEQ ID NO: 297741 - RNA, 17 nt, Human herpesvirus 1
agaccacucccgucucg

SEQ ID NO: 297742 - RNA, 13 nt, Human herpesvirus 1
agacccaugguuu

SEQ ID NO: 297743 - RNA, 16 nt, Human herpesvirus 1
agaccccuucucccca

SEQ ID NO: 297744 - RNA, 14 nt, Human herpesvirus 1
agacgcugggacaa

SEQ ID NO: 297745 - RNA, 12 nt, Human herpesvirus 1
agacgggaccgc

SEQ ID NO: 297746 - RNA, 13 nt, Human herpesvirus 1
agacguccuuaau

SEQ ID NO: 297747 - RNA, 15 nt, Human herpesvirus 1
agacucaagcacaca

SEQ ID NO: 297748 - RNA, 14 nt, Human herpesvirus 1
agagcccacaugcg

SEQ ID NO: 297749 - RNA, 20 nt, Human herpesvirus 1
agagguacuucuacaccucc

SEQ ID NO: 297750 - RNA, 15 nt, Human herpesvirus 1
agaugacguacagca

SEQ ID NO: 297751 - RNA, 15 nt, Human herpesvirus 1
agcacaaacgugcuc

SEQ ID NO: 297752 - RNA, 20 nt, Human herpesvirus 1
agcacggcgucgcugugaug

SEQ ID NO: 297753 - RNA, 10 nt, Human herpesvirus 1
agcauaccua

SEQ ID NO: 297754 - RNA, 16 nt, Human herpesvirus 1
agcauacgcucgggcc

SEQ ID NO: 297755 - RNA, 17 nt, Human herpesvirus 1
agccacgcccacuuuau

SEQ ID NO: 297756 - RNA, 14 nt, Human herpesvirus 1
agccagcagacgcu

SEQ ID NO: 297757 - RNA, 23 nt, Human herpesvirus 1
agcccucccgaccgacaccccca

SEQ ID NO: 297758 - RNA, 21 nt, Human herpesvirus 1
agcccucucccccgcucugac

SEQ ID NO: 297759 - RNA, 23 nt, Human herpesvirus 1
agccgcgauuccgagggccgggc

SEQ ID NO: 297760 - RNA, 14 nt, Human herpesvirus 1
agccggccccggca

SEQ ID NO: 297761 - RNA, 18 nt, Human herpesvirus 1
agccuccccuccaggugc

SEQ ID NO: 297762 - RNA, 20 nt, Human herpesvirus 1
agccuguuguggcucggggc

SEQ ID NO: 297763 - RNA, 17 nt, Human herpesvirus 1
agcgaauaaaaaccaaa

SEQ ID NO: 297764 - RNA, 18 nt, Human herpesvirus 1
agcgaauaaaaaccaaaa

SEQ ID NO: 297765 - RNA, 19 nt, Human herpesvirus 1
agcgaccgcaacuucccac

SEQ ID NO: 297766 - RNA, 20 nt, Human herpesvirus 1
agcgcagaggcggccagaaa

SEQ ID NO: 297767 - RNA, 23 nt, Human herpesvirus 1
agcgccauuacccuuuacgcggu

SEQ ID NO: 297768 - RNA, 18 nt, Human herpesvirus 1
agcgcgccgcgacacuca

SEQ ID NO: 297769 - RNA, 16 nt, Human herpesvirus 1
agcggcaccaccgggg

SEQ ID NO: 297770 - RNA, 18 nt, Human herpesvirus 1
agcgggucuuuuguguug

SEQ ID NO: 297771 - RNA, 22 nt, Human herpesvirus 1
uaccaaacaaacaaaccaaaag

SEQ ID NO: 297772 - RNA, 19 nt, Human herpesvirus 1
uaccaagaccaacccagcc

SEQ ID NO: 297773 - RNA, 20 nt, Human herpesvirus 1
uaccaagaccaacccagcca

SEQ ID NO: 297774 - RNA, 18 nt, Human herpesvirus 1
uaccacaggugggugcuu

SEQ ID NO: 297775 - RNA, 23 nt, Human herpesvirus 1
uaccaccccccugugaacacaga

SEQ ID NO: 297776 - RNA, 17 nt, Human herpesvirus 1
uacccguguuugcccau

SEQ ID NO: 297777 - RNA, 17 nt, Human herpesvirus 1
uaccgguagaaccaaaa

SEQ ID NO: 297778 - RNA, 15 nt, Human herpesvirus 1
uacucgucccagaau

SEQ ID NO: 297779 - RNA, 20 nt, Human herpesvirus 1
uacucucccuccagccuccc

SEQ ID NO: 297780 - RNA, 15 nt, Human herpesvirus 1
uacugcccauuugac

SEQ ID NO: 297781 - RNA, 22 nt, Human herpesvirus 1
uagaagcgcgccgcgacacuca

SEQ ID NO: 297782 - RNA, 19 nt, Human herpesvirus 1
uagccaggagacgggaccg

SEQ ID NO: 297783 - RNA, 19 nt, Human herpesvirus 1
uagcgaauaaaaaccaaaa

SEQ ID NO: 297784 - RNA, 22 nt, Human herpesvirus 1
uagcgucgcgacagaacugcgu

SEQ ID NO: 297785 - RNA, 19 nt, Human herpesvirus 1
uaggaggugcugcgacacu

SEQ ID NO: 297786 - RNA, 19 nt, Human herpesvirus 1
uauaaaggcgagagcgcgg

SEQ ID NO: 297787 - RNA, 15 nt, Human herpesvirus 1
uauaacgggggccau

SEQ ID NO: 297788 - RNA, 14 nt, Human herpesvirus 1
uauaaggacaucca

SEQ ID NO: 297789 - RNA, 19 nt, Human herpesvirus 1
uauaaggacauccaccacc

SEQ ID NO: 297790 - RNA, 18 nt, Human herpesvirus 1
uaucauggauaacaacca

SEQ ID NO: 297791 - RNA, 13 nt, Human herpesvirus 1
uaucccacucccu

SEQ ID NO: 297792 - RNA, 23 nt, Human herpesvirus 1
uauuaaaucucgucgacaaacag

SEQ ID NO: 297793 - RNA, 19 nt, Human herpesvirus 1
uauuggucaaacucaggca

SEQ ID NO: 297794 - RNA, 15 nt, Human herpesvirus 1
uauuuauuaacauca

SEQ ID NO: 297795 - RNA, 12 nt, Human herpesvirus 1
ucaaacaaaucg

SEQ ID NO: 297796 - RNA, 17 nt, Human herpesvirus 1
ucaaagggauacacaaa

SEQ ID NO: 297797 - RNA, 12 nt, Human herpesvirus 1
ucaacaaaacug

SEQ ID NO: 297798 - RNA, 17 nt, Human herpesvirus 1
ucaaccucgggugcaua

SEQ ID NO: 297799 - RNA, 20 nt, Human herpesvirus 1
ucaauaaaagaccacaccaa

SEQ ID NO: 297800 - RNA, 21 nt, Human herpesvirus 1
ucaauaaaagaccacaccaac

SEQ ID NO: 297801 - RNA, 17 nt, Human herpesvirus 1
aaaaacgggacacuugu

SEQ ID NO: 297802 - RNA, 14 nt, Human herpesvirus 1
aaaacggaaccaaa

SEQ ID NO: 297803 - RNA, 15 nt, Human herpesvirus 1
aaaacggaaccaaac

SEQ ID NO: 297804 - RNA, 17 nt, Human herpesvirus 1
aaaacugauaaaacagc

SEQ ID NO: 297805 - RNA, 17 nt, Human herpesvirus 1
aaaaggcguaccaaaca

SEQ ID NO: 297806 - RNA, 16 nt, Human herpesvirus 1
aaaaugcaaaugggau

SEQ ID NO: 297807 - RNA, 14 nt, Human herpesvirus 1
aaaauguaaccaua

SEQ ID NO: 297808 - RNA, 14 nt, Human herpesvirus 1
accaugaccucucg

SEQ ID NO: 297809 - RNA, 10 nt, Human herpesvirus 1
acccaaagcc

SEQ ID NO: 297810 - RNA, 19 nt, Human herpesvirus 1
acccaaagcugugggcuaa

SEQ ID NO: 297811 - RNA, 14 nt, Human herpesvirus 1
acccaaaucccaua

SEQ ID NO: 297812 - RNA, 14 nt, Human herpesvirus 1
acccaaccccaacu

SEQ ID NO: 297813 - RNA, 21 nt, Human herpesvirus 1
acccaaccccaacuccagacc

SEQ ID NO: 297814 - RNA, 15 nt, Human herpesvirus 1
acccacccaccaaga

SEQ ID NO: 297815 - RNA, 16 nt, Human herpesvirus 1
acccacccaccaagac

SEQ ID NO: 297816 - RNA, 11 nt, Human herpesvirus 1
acccacccacu

SEQ ID NO: 297817 - RNA, 11 nt, Human herpesvirus 1
acccacucccc

SEQ ID NO: 297818 - RNA, 22 nt, Human herpesvirus 1
acccacuccccacccacccacu

SEQ ID NO: 297819 - RNA, 15 nt, Human herpesvirus 1
acccagguaugcuac

SEQ ID NO: 297820 - RNA, 17 nt, Human herpesvirus 1
accccagcauaccuaaa

SEQ ID NO: 297821 - RNA, 14 nt, Human herpesvirus 1
accccagggaccuc

SEQ ID NO: 297822 - RNA, 19 nt, Human herpesvirus 1
acccccgaguucccccggg

SEQ ID NO: 297823 - RNA, 18 nt, Human herpesvirus 1
accccgcaauuugcaccc

SEQ ID NO: 297824 - RNA, 20 nt, Human herpesvirus 1
acccgaaacggccaacggac

SEQ ID NO: 297825 - RNA, 21 nt, Human herpesvirus 1
acccgaaacggccaacggacg

SEQ ID NO: 297826 - RNA, 20 nt, Human herpesvirus 1
acccgacaacagcccccggg

SEQ ID NO: 297827 - RNA, 19 nt, Human herpesvirus 1
acccgacgcgucauaugca

SEQ ID NO: 297828 - RNA, 21 nt, Human herpesvirus 1
acccgacgcgucauaugcaaa

SEQ ID NO: 297829 - RNA, 20 nt, Human herpesvirus 1
acccgggccguuucccaccc

SEQ ID NO: 297830 - RNA, 21 nt, Human herpesvirus 1
acccguaaaugguugcaguga

SEQ ID NO: 297831 - RNA, 17 nt, Human herpesvirus 1
acccucucuucccucag

SEQ ID NO: 297832 - RNA, 17 nt, Human herpesvirus 1
acccuugugugucaaug

SEQ ID NO: 297833 - RNA, 23 nt, Human herpesvirus 1
accgaaacccccaaagccgccgc

SEQ ID NO: 297834 - RNA, 19 nt, Human herpesvirus 1
accgccacaggaauaccag

SEQ ID NO: 297835 - RNA, 20 nt, Human herpesvirus 1
accgccccccccccgucacc

SEQ ID NO: 297836 - RNA, 20 nt, Human herpesvirus 1
accgcguguuccccgggagc

SEQ ID NO: 297837 - RNA, 17 nt, Human herpesvirus 1
accggacucacggccgg

SEQ ID NO: 297838 - RNA, 17 nt, Human herpesvirus 1
accggccacccagguga

SEQ ID NO: 297839 - RNA, 14 nt, Human herpesvirus 1
accgguagaaccaa

SEQ ID NO: 297840 - RNA, 16 nt, Human herpesvirus 1
accgguagaaccaaaa

SEQ ID NO: 297841 - RNA, 17 nt, Human herpesvirus 1
accgguagaaccaaaac

SEQ ID NO: 297842 - RNA, 23 nt, Human herpesvirus 1
accgugacuaagcgucccugggc

SEQ ID NO: 297843 - RNA, 18 nt, Human herpesvirus 1
accguggucgaggugucu

SEQ ID NO: 297844 - RNA, 15 nt, Human herpesvirus 1
accucgaggacaccc

SEQ ID NO: 297845 - RNA, 22 nt, Human herpesvirus 1
accucggaugacucagggcucu

SEQ ID NO: 297846 - RNA, 18 nt, Human herpesvirus 1
accugcgcucccucagca

SEQ ID NO: 297847 - RNA, 22 nt, Human herpesvirus 1
accugcggccaacacaacggac

SEQ ID NO: 297848 - RNA, 23 nt, Human herpesvirus 1
accugcggccaacacaacggacc

SEQ ID NO: 297849 - RNA, 14 nt, Human herpesvirus 1
acgacaucuugucg

SEQ ID NO: 297850 - RNA, 17 nt, Human herpesvirus 1
acgacaucuugucguca

SEQ ID NO: 297851 - RNA, 15 nt, Human herpesvirus 1
acgaccgccccggcg

SEQ ID NO: 297852 - RNA, 21 nt, Human herpesvirus 1
acgagucggugcggacacuac

SEQ ID NO: 297853 - RNA, 14 nt, Human herpesvirus 1
acgaucgcaucaaa

SEQ ID NO: 297854 - RNA, 13 nt, Human herpesvirus 1
agcgcucuugucu

SEQ ID NO: 297855 - RNA, 22 nt, Human herpesvirus 1
agcggcaccaccggggccugaa

SEQ ID NO: 297856 - RNA, 15 nt, Human herpesvirus 1
agcguauccaccccc

SEQ ID NO: 297857 - RNA, 20 nt, Human herpesvirus 1
agcguccgggcgcuuggcau

SEQ ID NO: 297858 - RNA, 19 nt, Human herpesvirus 1
agcuaaucgcgauuuccga

SEQ ID NO: 297859 - RNA, 15 nt, Human herpesvirus 1
agcucagcuuuuacc

SEQ ID NO: 297860 - RNA, 16 nt, Human herpesvirus 1
agcucgcggagggcgg

SEQ ID NO: 297861 - RNA, 21 nt, Human herpesvirus 1
agcuggcaugguauaaaucac

SEQ ID NO: 297862 - RNA, 14 nt, Human herpesvirus 1
agcuugcggggcuu

SEQ ID NO: 297863 - RNA, 13 nt, Human herpesvirus 1
agcuuggucagga

SEQ ID NO: 297864 - RNA, 19 nt, Human herpesvirus 1
agcuuggucaggagggcgc

SEQ ID NO: 297865 - RNA, 15 nt, Human herpesvirus 1
agcuuuacaaugcaa

SEQ ID NO: 297866 - RNA, 22 nt, Human herpesvirus 1
agcuuucuuccggccucgauga

SEQ ID NO: 297867 - RNA, 13 nt, Human herpesvirus 1
aggaagccacaaa

SEQ ID NO: 297868 - RNA, 20 nt, Human herpesvirus 1
aggaagccacaaaaugcaaa

SEQ ID NO: 297869 - RNA, 18 nt, Human herpesvirus 1
aggacacccgcgcaugau

SEQ ID NO: 297870 - RNA, 20 nt, Human herpesvirus 1
aggacacccgcgcaugaucu

SEQ ID NO: 297871 - RNA, 17 nt, Human herpesvirus 1
aggacuuccccuuccuc

SEQ ID NO: 297872 - RNA, 20 nt, Human herpesvirus 1
aggaggugcugcgacacucg

SEQ ID NO: 297873 - RNA, 17 nt, Human herpesvirus 1
aggcaggcgucgaucuc

SEQ ID NO: 297874 - RNA, 17 nt, Human herpesvirus 1
aggcaguuaacugucug

SEQ ID NO: 297875 - RNA, 20 nt, Human herpesvirus 1
aggcauuagucccgaagacc

SEQ ID NO: 297876 - RNA, 18 nt, Human herpesvirus 1
aggccgaaacggccaugc

SEQ ID NO: 297877 - RNA, 21 nt, Human herpesvirus 1
aggccgccccgaagaggggga

SEQ ID NO: 297878 - RNA, 16 nt, Human herpesvirus 1
aggccugggaucccac

SEQ ID NO: 297879 - RNA, 20 nt, Human herpesvirus 1
aggcgcauaaagggccggug

SEQ ID NO: 297880 - RNA, 18 nt, Human herpesvirus 1
aggcgcugucuccccggg

SEQ ID NO: 297881 - RNA, 13 nt, Human herpesvirus 1
agggaacacaaac

SEQ ID NO: 297882 - RNA, 12 nt, Human herpesvirus 1
agggaacccaga

SEQ ID NO: 297883 - RNA, 19 nt, Human herpesvirus 1
agggcgcucagggcggcga

SEQ ID NO: 297884 - RNA, 15 nt, Human herpesvirus 1
agggcggccagccgc

SEQ ID NO: 297885 - RNA, 16 nt, Human herpesvirus 1
agggcggccagccgcg

SEQ ID NO: 297886 - RNA, 11 nt, Human herpesvirus 1
aggggcgggag

SEQ ID NO: 297887 - RNA, 22 nt, Human herpesvirus 1
agggggccugggguagcugggu

SEQ ID NO: 297888 - RNA, 23 nt, Human herpesvirus 1
agggggggggggcauuucagugu

SEQ ID NO: 297889 - RNA, 13 nt, Human herpesvirus 1
agguacuucuaca

SEQ ID NO: 297890 - RNA, 22 nt, Human herpesvirus 1
aggucccaccugacgccaugaa

SEQ ID NO: 297891 - RNA, 21 nt, Human herpesvirus 1
aggugcacacccgaaccacgg

SEQ ID NO: 297892 - RNA, 13 nt, Human herpesvirus 1
aguaccacccccc

SEQ ID NO: 297893 - RNA, 22 nt, Human herpesvirus 1
aguugggccgggcgacccagau

SEQ ID NO: 297894 - RNA, 19 nt, Human herpesvirus 1
aguuuguggacccaaagcc

SEQ ID NO: 297895 - RNA, 12 nt, Human herpesvirus 1
auaaaaaccaaa

SEQ ID NO: 297896 - RNA, 13 nt, Human herpesvirus 1
auaaaaaccaaaa

SEQ ID NO: 297897 - RNA, 12 nt, Human herpesvirus 1
auaaaaagccag

SEQ ID NO: 297898 - RNA, 20 nt, Human herpesvirus 1
auaaacauacgacacacagg

SEQ ID NO: 297899 - RNA, 14 nt, Human herpesvirus 1
auaaaccagguaau

SEQ ID NO: 297900 - RNA, 11 nt, Human herpesvirus 1
auaaagccacu

SEQ ID NO: 297901 - RNA, 14 nt, Human herpesvirus 1
auaaagccacugaa

SEQ ID NO: 297902 - RNA, 15 nt, Human herpesvirus 1
auaaagccacugaaa

SEQ ID NO: 297903 - RNA, 22 nt, Human herpesvirus 1
auaaagccacugaaacccgaaa

SEQ ID NO: 297904 - RNA, 13 nt, Human herpesvirus 1
auaacgcacugaa

SEQ ID NO: 297905 - RNA, 13 nt, Human herpesvirus 1
auaaggacaucca

SEQ ID NO: 297906 - RNA, 12 nt, Human herpesvirus 1
auaaggcccaac

SEQ ID NO: 297907 - RNA, 16 nt, Human herpesvirus 1
auaaugaccaccacaa

SEQ ID NO: 297908 - RNA, 23 nt, Human herpesvirus 1
auacuuuuauuuauuaacucaca

SEQ ID NO: 297909 - RNA, 17 nt, Human herpesvirus 1
auagcgaauaaaaacca

SEQ ID NO: 297910 - RNA, 10 nt, Human herpesvirus 1
aucauugccg

SEQ ID NO: 297911 - RNA, 14 nt, Human herpesvirus 1
aucccaacuccuca

SEQ ID NO: 297912 - RNA, 21 nt, Human herpesvirus 1
aucccacaaacacaaaacaca

SEQ ID NO: 297913 - RNA, 17 nt, Human herpesvirus 1
aucccaugguaccaaag

SEQ ID NO: 297914 - RNA, 16 nt, Human herpesvirus 1
aucccccgucuggguu

SEQ ID NO: 297915 - RNA, 16 nt, Human herpesvirus 1
aucccccguguuccca

SEQ ID NO: 297916 - RNA, 15 nt, Human herpesvirus 1
auccggagaaacagc

SEQ ID NO: 297917 - RNA, 11 nt, Human herpesvirus 1
aucgccagugc

SEQ ID NO: 297918 - RNA, 15 nt, Human herpesvirus 1
aucgccugucuccuc

SEQ ID NO: 297919 - RNA, 16 nt, Human herpesvirus 1
aucgcgacaucguggu

SEQ ID NO: 297920 - RNA, 18 nt, Human herpesvirus 1
aucuccugggggcaccca

SEQ ID NO: 297921 - RNA, 17 nt, Human herpesvirus 1
aucuucggcgggugucu

SEQ ID NO: 297922 - RNA, 23 nt, Human herpesvirus 1
augacagcgaccccccucaccaa

SEQ ID NO: 297923 - RNA, 22 nt, Human herpesvirus 1
augaccgcccgccccucgccac

SEQ ID NO: 297924 - RNA, 15 nt, Human herpesvirus 1
augaccucucgccgc

SEQ ID NO: 297925 - RNA, 20 nt, Human herpesvirus 1
augcaccccagagguguuca

SEQ ID NO: 297926 - RNA, 13 nt, Human herpesvirus 1
augcccgggaccc

SEQ ID NO: 297927 - RNA, 16 nt, Human herpesvirus 1
augccgcggccauggu

SEQ ID NO: 297928 - RNA, 19 nt, Human herpesvirus 1
auggaguccacgguaggcc

SEQ ID NO: 297929 - RNA, 22 nt, Human herpesvirus 1
auggcacgaguucaaccucggg

SEQ ID NO: 297930 - RNA, 15 nt, Human herpesvirus 1
auggcgggacugggc

SEQ ID NO: 297931 - RNA, 16 nt, Human herpesvirus 1
auggcgggacugggca

SEQ ID NO: 297932 - RNA, 16 nt, Human herpesvirus 1
auggcgucccaucugu

SEQ ID NO: 297933 - RNA, 17 nt, Human herpesvirus 1
augggcggccccggccg

SEQ ID NO: 297934 - RNA, 14 nt, Human herpesvirus 1
augguuaaaccucu

SEQ ID NO: 297935 - RNA, 12 nt, Human herpesvirus 1
auguaaccauac

SEQ ID NO: 297936 - RNA, 21 nt, Human herpesvirus 1
augucgcagggcgccaugcgu

SEQ ID NO: 297937 - RNA, 12 nt, Human herpesvirus 1
augucguguuua

SEQ ID NO: 297938 - RNA, 23 nt, Human herpesvirus 1
auguguguaaccccccccaaaaa

SEQ ID NO: 297939 - RNA, 17 nt, Human herpesvirus 1
auuaaaacggaaccaaa

SEQ ID NO: 297940 - RNA, 15 nt, Human herpesvirus 1
auuaaauacaugcca

SEQ ID NO: 297941 - RNA, 21 nt, Human herpesvirus 1
auuagccagcagacgcugcuc

SEQ ID NO: 297942 - RNA, 14 nt, Human herpesvirus 1
auuaucccauuccu

SEQ ID NO: 297943 - RNA, 21 nt, Human herpesvirus 1
auuauguuacgcccacccccg

SEQ ID NO: 297944 - RNA, 16 nt, Human herpesvirus 1
auucgaggggcgggag

SEQ ID NO: 297945 - RNA, 15 nt, Human herpesvirus 1
auucggacagacuca

SEQ ID NO: 297946 - RNA, 21 nt, Human herpesvirus 1
auugcgugguaugugacguca

SEQ ID NO: 297947 - RNA, 21 nt, Human herpesvirus 1
auuggcucggacgagacgaac

SEQ ID NO: 297948 - RNA, 22 nt, Human herpesvirus 1
auuggucaaacucaggcaaaca

SEQ ID NO: 297949 - RNA, 16 nt, Human herpesvirus 1
auugugauucuuguca

SEQ ID NO: 297950 - RNA, 13 nt, Human herpesvirus 1
auuuacaacaaac

SEQ ID NO: 297951 - RNA, 14 nt, Human herpesvirus 1
auuuagguaugcug

SEQ ID NO: 297952 - RNA, 23 nt, Human herpesvirus 1
auuuuccggcagccguccagaca

SEQ ID NO: 297953 - RNA, 14 nt, Human herpesvirus 1
caaaagaugcacau

SEQ ID NO: 297954 - RNA, 17 nt, Human herpesvirus 1
caaaaggcguaccaaac

SEQ ID NO: 297955 - RNA, 23 nt, Human herpesvirus 1
caaaaguuugucugcguauucca

SEQ ID NO: 297956 - RNA, 16 nt, Human herpesvirus 1
caaaauaauaaacaca

SEQ ID NO: 297957 - RNA, 12 nt, Human herpesvirus 1
caaaaucaaagc

SEQ ID NO: 297958 - RNA, 14 nt, Human herpesvirus 1
caaacaaaccaaaa

SEQ ID NO: 297959 - RNA, 22 nt, Human herpesvirus 1
caaaccaggcguggugugaguu

SEQ ID NO: 297960 - RNA, 19 nt, Human herpesvirus 1
caaacucguucguaaacac

SEQ ID NO: 297961 - RNA, 21 nt, Human herpesvirus 1
caaagcugugggcuaaauacc

SEQ ID NO: 297962 - RNA, 22 nt, Human herpesvirus 1
caaauaaaacaaggucugguag

SEQ ID NO: 297963 - RNA, 16 nt, Human herpesvirus 1
caaauaagacccauug

SEQ ID NO: 297964 - RNA, 20 nt, Human herpesvirus 1
caaauacagcauggcgccac

SEQ ID NO: 297965 - RNA, 14 nt, Human herpesvirus 1
caacaaaacugaua

SEQ ID NO: 297966 - RNA, 13 nt, Human herpesvirus 1
caacaugacccag

SEQ ID NO: 297967 - RNA, 20 nt, Human herpesvirus 1
caacccacuggggucugggu

SEQ ID NO: 297968 - RNA, 17 nt, Human herpesvirus 1
caaccccaacuccagac

SEQ ID NO: 297969 - RNA, 16 nt, Human herpesvirus 1
caaccccagggaccuc

SEQ ID NO: 297970 - RNA, 17 nt, Human herpesvirus 1
caacccuuaccugcgca

SEQ ID NO: 297971 - RNA, 19 nt, Human herpesvirus 1
caacggaccccuuaacgca

SEQ ID NO: 297972 - RNA, 20 nt, Human herpesvirus 1
caacgucuccuccaccaccc

SEQ ID NO: 297973 - RNA, 21 nt, Human herpesvirus 1
caacuucccacccggagcuuu

SEQ ID NO: 297974 - RNA, 20 nt, Human herpesvirus 1
caagaaucccggccaagagg

SEQ ID NO: 297975 - RNA, 22 nt, Human herpesvirus 1
caagagguccuggaggggggcg

SEQ ID NO: 297976 - RNA, 18 nt, Human herpesvirus 1
caagcccuacaccggcca

SEQ ID NO: 297977 - RNA, 20 nt, Human herpesvirus 1
caagcgcccccgcccuaaca

SEQ ID NO: 297978 - RNA, 21 nt, Human herpesvirus 1
caagggggggggggcauuuca

SEQ ID NO: 297979 - RNA, 16 nt, Human herpesvirus 1
caauaaaaagacagaa

SEQ ID NO: 297980 - RNA, 22 nt, Human herpesvirus 1
caauucccgcggcccuuaaugg

SEQ ID NO: 297981 - RNA, 12 nt, Human herpesvirus 1
cacaaacagccc

SEQ ID NO: 297982 - RNA, 17 nt, Human herpesvirus 1
cacaaucgcgaccaccc

SEQ ID NO: 297983 - RNA, 22 nt, Human herpesvirus 1
cacacaaaaggcguaccaaaca

SEQ ID NO: 297984 - RNA, 11 nt, Human herpesvirus 1
cacacaccagc

SEQ ID NO: 297985 - RNA, 11 nt, Human herpesvirus 1
cacacaccccc

SEQ ID NO: 297986 - RNA, 12 nt, Human herpesvirus 1
cacacccagugg

SEQ ID NO: 297987 - RNA, 16 nt, Human herpesvirus 1
cacaccccccaugcca

SEQ ID NO: 297988 - RNA, 23 nt, Human herpesvirus 1
cacacgggggagcgcucuugucu

SEQ ID NO: 297989 - RNA, 13 nt, Human herpesvirus 1
cacagaacagggc

SEQ ID NO: 297990 - RNA, 19 nt, Human herpesvirus 1
cacaggugggugcuuugga

SEQ ID NO: 297991 - RNA, 18 nt, Human herpesvirus 1
cacauaugaucgcgggca

SEQ ID NO: 297992 - RNA, 13 nt, Human herpesvirus 1
caccaacgcacga

SEQ ID NO: 297993 - RNA, 13 nt, Human herpesvirus 1
caccacacaccag

SEQ ID NO: 297994 - RNA, 18 nt, Human herpesvirus 1
caccacccaaccccaacu

SEQ ID NO: 297995 - RNA, 15 nt, Human herpesvirus 1
caccacgccacaaca

SEQ ID NO: 297996 - RNA, 15 nt, Human herpesvirus 1
caccagaaaccaggu

SEQ ID NO: 297997 - RNA, 16 nt, Human herpesvirus 1
caccagacauacacca

SEQ ID NO: 297998 - RNA, 13 nt, Human herpesvirus 1
cacccacaacauc

SEQ ID NO: 297999 - RNA, 14 nt, Human herpesvirus 1
caccccccacgggc

SEQ ID NO: 298000 - RNA, 12 nt, Human herpesvirus 1
caccccccaugc

SEQ ID NO: 298001 - RNA, 14 nt, Human herpesvirus 1
caccccccaugcca

SEQ ID NO: 298002 - RNA, 21 nt, Human herpesvirus 1
cacccgacgcgucauaugcaa

SEQ ID NO: 298003 - RNA, 17 nt, Human herpesvirus 1
cacccgcgcaugaucuc

SEQ ID NO: 298004 - RNA, 19 nt, Human herpesvirus 1
caccgauagcguccgggcg

SEQ ID NO: 298005 - RNA, 17 nt, Human herpesvirus 1
caccgcugggcgcuaua

SEQ ID NO: 298006 - RNA, 16 nt, Human herpesvirus 1
caccugaccaaccuuu

SEQ ID NO: 298007 - RNA, 19 nt, Human herpesvirus 1
cacgagcacauacauuaca

SEQ ID NO: 298008 - RNA, 17 nt, Human herpesvirus 1
cacgauggaacgcgggg

SEQ ID NO: 298009 - RNA, 16 nt, Human herpesvirus 1
cacgauuccgguuugg

SEQ ID NO: 298010 - RNA, 20 nt, Human herpesvirus 1
cacgcacgccgcccccaaca

SEQ ID NO: 298011 - RNA, 20 nt, Human herpesvirus 1
cacgcauccccaguggguuu

SEQ ID NO: 298012 - RNA, 19 nt, Human herpesvirus 1
cacgcgcguccuucuuguc

SEQ ID NO: 298013 - RNA, 16 nt, Human herpesvirus 1
cacggcgucgcuguga

SEQ ID NO: 298014 - RNA, 14 nt, Human herpesvirus 1
cacggcguggagca

SEQ ID NO: 298015 - RNA, 18 nt, Human herpesvirus 1
cacgggggggagcacaag

SEQ ID NO: 298016 - RNA, 13 nt, Human herpesvirus 1
cacuacaccagcc

SEQ ID NO: 298017 - RNA, 18 nt, Human herpesvirus 1
cacuugcggucuucugcg

SEQ ID NO: 298018 - RNA, 22 nt, Human herpesvirus 1
cagacagaaaauguaaccauac

SEQ ID NO: 298019 - RNA, 22 nt, Human herpesvirus 1
cagacgaaaagccccgggccgc

SEQ ID NO: 298020 - RNA, 16 nt, Human herpesvirus 1
cagaggcggccagaaa

SEQ ID NO: 298021 - RNA, 12 nt, Human herpesvirus 1
cagauagagcug

SEQ ID NO: 298022 - RNA, 16 nt, Human herpesvirus 1
cagcagcuccccauga

SEQ ID NO: 298023 - RNA, 15 nt, Human herpesvirus 1
cagcagguccgcggu

SEQ ID NO: 298024 - RNA, 19 nt, Human herpesvirus 1
cagcgaccgcaacuuccca

SEQ ID NO: 298025 - RNA, 20 nt, Human herpesvirus 1
cagcgcggcggggcccggcc

SEQ ID NO: 298026 - RNA, 17 nt, Human herpesvirus 1
caggaaagaugcgauac

SEQ ID NO: 298027 - RNA, 14 nt, Human herpesvirus 1
caggaagccgggga

SEQ ID NO: 298028 - RNA, 16 nt, Human herpesvirus 1
caggaauaccagaaua

SEQ ID NO: 298029 - RNA, 15 nt, Human herpesvirus 1
caggagacgggaccg

SEQ ID NO: 298030 - RNA, 17 nt, Human herpesvirus 1
caggccaaacgcgggcc

SEQ ID NO: 298031 - RNA, 17 nt, Human herpesvirus 1
caggccaucgccgggga

SEQ ID NO: 298032 - RNA, 14 nt, Human herpesvirus 1
caggcccgccgcca

SEQ ID NO: 298033 - RNA, 13 nt, Human herpesvirus 1
caggcgacggcgu

SEQ ID NO: 298034 - RNA, 18 nt, Human herpesvirus 1
caggcgccuccggggguc

SEQ ID NO: 298035 - RNA, 23 nt, Human herpesvirus 1
cagggccuggugcucgugggccu

SEQ ID NO: 298036 - RNA, 15 nt, Human herpesvirus 1
cagggcgcccccgcg

SEQ ID NO: 298037 - RNA, 16 nt, Human herpesvirus 1
cagggcgggccgccuc

SEQ ID NO: 298038 - RNA, 14 nt, Human herpesvirus 1
cagguaauaccaaa

SEQ ID NO: 298039 - RNA, 21 nt, Human herpesvirus 1
caguaacaugcgcacgugaug

SEQ ID NO: 298040 - RNA, 17 nt, Human herpesvirus 1
caguggcuccgggccaa

SEQ ID NO: 298041 - RNA, 17 nt, Human herpesvirus 1
caguggcuucaugugga

SEQ ID NO: 298042 - RNA, 15 nt, Human herpesvirus 1
caguuaaauacaugc

SEQ ID NO: 298043 - RNA, 19 nt, Human herpesvirus 1
cauaaacaacuacacacag

SEQ ID NO: 298044 - RNA, 15 nt, Human herpesvirus 1
cauaacacccaaacc

SEQ ID NO: 298045 - RNA, 14 nt, Human herpesvirus 1
cauacccaaaccga

SEQ ID NO: 298046 - RNA, 13 nt, Human herpesvirus 1
cauagaugggauc

SEQ ID NO: 298047 - RNA, 18 nt, Human herpesvirus 1
cauaggaugaacaaacca

SEQ ID NO: 298048 - RNA, 17 nt, Human herpesvirus 1
caucaaaagcccgauau

SEQ ID NO: 298049 - RNA, 19 nt, Human herpesvirus 1
cauccaacauaaacaacua

SEQ ID NO: 298050 - RNA, 15 nt, Human herpesvirus 1
cauccaccacccggc

SEQ ID NO: 298051 - RNA, 15 nt, Human herpesvirus 1
caucccacaaacaca

SEQ ID NO: 298052 - RNA, 13 nt, Human herpesvirus 1
caucccacccccc

SEQ ID NO: 298053 - RNA, 19 nt, Human herpesvirus 1
caucccaugguaccaaaga

SEQ ID NO: 298054 - RNA, 19 nt, Human herpesvirus 1
cauccgucgggaggccaca

SEQ ID NO: 298055 - RNA, 20 nt, Human herpesvirus 1
caucugagagacgaacaaau

SEQ ID NO: 298056 - RNA, 14 nt, Human herpesvirus 1
caugaaugugugua

SEQ ID NO: 298057 - RNA, 20 nt, Human herpesvirus 1
caugaauguguguaaccccc

SEQ ID NO: 298058 - RNA, 20 nt, Human herpesvirus 1
caugauaaacugagaguuau

SEQ ID NO: 298059 - RNA, 14 nt, Human herpesvirus 1
caugcccgggaccc

SEQ ID NO: 298060 - RNA, 21 nt, Human herpesvirus 1
caugcccgggacccaugaagc

SEQ ID NO: 298061 - RNA, 17 nt, Human herpesvirus 1
caugcgcacgugaugua

SEQ ID NO: 298062 - RNA, 15 nt, Human herpesvirus 1
caugggacccacaga

SEQ ID NO: 298063 - RNA, 18 nt, Human herpesvirus 1
cauuggacggggugcagu

SEQ ID NO: 298064 - RNA, 23 nt, Human herpesvirus 1
cauuuaaggcguuguuguguuga

SEQ ID NO: 298065 - RNA, 19 nt, Human herpesvirus 1
cauuuauugacccaaaaca

SEQ ID NO: 298066 - RNA, 15 nt, Human herpesvirus 1
ccaaacucauccucc

SEQ ID NO: 298067 - RNA, 14 nt, Human herpesvirus 1
ccaaauaaagccac

SEQ ID NO: 298068 - RNA, 14 nt, Human herpesvirus 1
ccaacccguguguu

SEQ ID NO: 298069 - RNA, 14 nt, Human herpesvirus 1
ccaacgacuuccuc

SEQ ID NO: 298070 - RNA, 21 nt, Human herpesvirus 1
ccaacgucuccuccaccaccc

SEQ ID NO: 298071 - RNA, 18 nt, Human herpesvirus 1
ccaacucucgcaccaucc

SEQ ID NO: 298072 - RNA, 21 nt, Human herpesvirus 1
ccaagaaucccggccaagagg

SEQ ID NO: 298073 - RNA, 14 nt, Human herpesvirus 1
ccaaggugucuccu

SEQ ID NO: 298074 - RNA, 14 nt, Human herpesvirus 1
ccaauaaacguaua

SEQ ID NO: 298075 - RNA, 18 nt, Human herpesvirus 1
ccacaaacacaaaacaca

SEQ ID NO: 298076 - RNA, 15 nt, Human herpesvirus 1
cgcaccgaggggcca

SEQ ID NO: 298077 - RNA, 22 nt, Human herpesvirus 1
cgcagcguccgguuggccgcgc

SEQ ID NO: 298078 - RNA, 19 nt, Human herpesvirus 1
cgcaggcgcugucuccccg

SEQ ID NO: 298079 - RNA, 10 nt, Human herpesvirus 1
cgccaaagcc

SEQ ID NO: 298080 - RNA, 15 nt, Human herpesvirus 1
cgccaaauaaagcca

SEQ ID NO: 298081 - RNA, 16 nt, Human herpesvirus 1
cgccaaauaaagccac

SEQ ID NO: 298082 - RNA, 14 nt, Human herpesvirus 1
cgccacaccacgcc

SEQ ID NO: 298083 - RNA, 19 nt, Human herpesvirus 1
cgccaccagcaucgcgcgc

SEQ ID NO: 298084 - RNA, 21 nt, Human herpesvirus 1
cgccacccucucuucccucag

SEQ ID NO: 298085 - RNA, 13 nt, Human herpesvirus 1
cgccagcgcggcg

SEQ ID NO: 298086 - RNA, 21 nt, Human herpesvirus 1
cgccagggcgcccccgcgcgg

SEQ ID NO: 298087 - RNA, 18 nt, Human herpesvirus 1
cgccagugcguuccggac

SEQ ID NO: 298088 - RNA, 18 nt, Human herpesvirus 1
cgccauuaagacgcuggg

SEQ ID NO: 298089 - RNA, 16 nt, Human herpesvirus 1
cgcccaccgcugggcg

SEQ ID NO: 298090 - RNA, 21 nt, Human herpesvirus 1
cgccccaucccgaggccccac

SEQ ID NO: 298091 - RNA, 23 nt, Human herpesvirus 1
cgccccccaaaccauguccggca

SEQ ID NO: 298092 - RNA, 20 nt, Human herpesvirus 1
cgccccgaagagggggaccc

SEQ ID NO: 298093 - RNA, 19 nt, Human herpesvirus 1
cgccccugcgcagauccca

SEQ ID NO: 298094 - RNA, 15 nt, Human herpesvirus 1
cgcccgccccuggcg

SEQ ID NO: 298095 - RNA, 19 nt, Human herpesvirus 1
cgcccgccccuggcgcccc

SEQ ID NO: 298096 - RNA, 16 nt, Human herpesvirus 1
cgcccggguccccgcg

SEQ ID NO: 298097 - RNA, 16 nt, Human herpesvirus 1
cgccgcgagauggccg

SEQ ID NO: 298098 - RNA, 18 nt, Human herpesvirus 1
cgccgcgccccgccggcg

SEQ ID NO: 298099 - RNA, 19 nt, Human herpesvirus 1
cgccgcugacccccaccgc

SEQ ID NO: 298100 - RNA, 16 nt, Human herpesvirus 1
cgccggacgcgcggcg

SEQ ID NO: 298101 - RNA, 21 nt, Human herpesvirus 1
cgccggguagcguacggaccg

SEQ ID NO: 298102 - RNA, 22 nt, Human herpesvirus 1
cgccgguauggggcaugaucag

SEQ ID NO: 298103 - RNA, 19 nt, Human herpesvirus 1
cgccuaccggccccugggc

SEQ ID NO: 298104 - RNA, 13 nt, Human herpesvirus 1
cgccucgggggcg

SEQ ID NO: 298105 - RNA, 22 nt, Human herpesvirus 1
cgccugcguucaucggaccccc

SEQ ID NO: 298106 - RNA, 20 nt, Human herpesvirus 1
cgccugguuugguuggguua

SEQ ID NO: 298107 - RNA, 23 nt, Human herpesvirus 1
cgccuugcggcagcgcuccgacg

SEQ ID NO: 298108 - RNA, 20 nt, Human herpesvirus 1
cgcgaccccauggccgcucc

SEQ ID NO: 298109 - RNA, 14 nt, Human herpesvirus 1
cuccagaaaccugu

SEQ ID NO: 298110 - RNA, 10 nt, Human herpesvirus 1
cuccagacca

SEQ ID NO: 298111 - RNA, 20 nt, Human herpesvirus 1
cuccagccuccccuccaggu

SEQ ID NO: 298112 - RNA, 14 nt, Human herpesvirus 1
cuccaggugcgccu

SEQ ID NO: 298113 - RNA, 14 nt, Human herpesvirus 1
cuccccgcacagau

SEQ ID NO: 298114 - RNA, 13 nt, Human herpesvirus 1
cuccgaccccaga

SEQ ID NO: 298115 - RNA, 18 nt, Human herpesvirus 1
cuccgaguucccccggca

SEQ ID NO: 298116 - RNA, 15 nt, Human herpesvirus 1
cuccggcgccgcccg

SEQ ID NO: 298117 - RNA, 19 nt, Human herpesvirus 1
cuccugggggguccaguca

SEQ ID NO: 298118 - RNA, 15 nt, Human herpesvirus 1
cucggcuccccgccg

SEQ ID NO: 298119 - RNA, 17 nt, Human herpesvirus 1
cucgggcaggugcagac

SEQ ID NO: 298120 - RNA, 16 nt, Human herpesvirus 1
cucgguggaggcgcau

SEQ ID NO: 298121 - RNA, 20 nt, Human herpesvirus 1
cucgucgggguggcacagaa

SEQ ID NO: 298122 - RNA, 20 nt, Human herpesvirus 1
cucgucugacguuugggcua

SEQ ID NO: 298123 - RNA, 12 nt, Human herpesvirus 1
cucgucuuggcc

SEQ ID NO: 298124 - RNA, 22 nt, Human herpesvirus 1
cucuaucccgcccaccgcuggg

SEQ ID NO: 298125 - RNA, 19 nt, Human herpesvirus 1
cucucccccgcucugacgg

SEQ ID NO: 298126 - RNA, 23 nt, Human herpesvirus 1
cucugaaccaaacuuugggucuc

SEQ ID NO: 298127 - RNA, 20 nt, Human herpesvirus 1
cucuucccccccaucacccc

SEQ ID NO: 298128 - RNA, 17 nt, Human herpesvirus 1
cugacgcgccccaaggc

SEQ ID NO: 298129 - RNA, 14 nt, Human herpesvirus 1
cugccaaccugauc

SEQ ID NO: 298130 - RNA, 16 nt, Human herpesvirus 1
cugccauggauuccgc

SEQ ID NO: 298131 - RNA, 20 nt, Human herpesvirus 1
cugccauggauuccgcggcc

SEQ ID NO: 298132 - RNA, 20 nt, Human herpesvirus 1
cugccccccccaccccagac

SEQ ID NO: 298133 - RNA, 22 nt, Human herpesvirus 1
cugcgcauacagaacaccggcg

SEQ ID NO: 298134 - RNA, 18 nt, Human herpesvirus 1
cugcggacaugcgcccgc

SEQ ID NO: 298135 - RNA, 22 nt, Human herpesvirus 1
cugcggacaugcgcccgcggcc

SEQ ID NO: 298136 - RNA, 12 nt, Human herpesvirus 1
cugcggccggcg

SEQ ID NO: 298137 - RNA, 15 nt, Human herpesvirus 1
cugcuguuguaggcg

SEQ ID NO: 298138 - RNA, 15 nt, Human herpesvirus 1
cuggacgucugggaa

SEQ ID NO: 298139 - RNA, 18 nt, Human herpesvirus 1
cuggacugagcagacaga

SEQ ID NO: 298140 - RNA, 14 nt, Human herpesvirus 1
cuggaggcaaacac

SEQ ID NO: 298141 - RNA, 15 nt, Human herpesvirus 1
cuggaggcaaacacg

SEQ ID NO: 298142 - RNA, 19 nt, Human herpesvirus 1
cuggccgccguaugagauc

SEQ ID NO: 298143 - RNA, 23 nt, Human herpesvirus 1
cuggcgcccccccaacgggggac

SEQ ID NO: 298144 - RNA, 14 nt, Human herpesvirus 1
cugggaauagagca

SEQ ID NO: 298145 - RNA, 17 nt, Human herpesvirus 1
cugggaauagagcagaa

SEQ ID NO: 298146 - RNA, 19 nt, Human herpesvirus 1
cugggacaaacgcuuugau

SEQ ID NO: 298147 - RNA, 14 nt, Human herpesvirus 1
cugggaccccggcg

SEQ ID NO: 298148 - RNA, 14 nt, Human herpesvirus 1
cugggcaagcccua

SEQ ID NO: 298149 - RNA, 23 nt, Human herpesvirus 1
cugggcaagcccuacaccggcca

SEQ ID NO: 298150 - RNA, 12 nt, Human herpesvirus 1
cugggccccggg

SEQ ID NO: 298151 - RNA, 20 nt, Human herpesvirus 1
cuggguuggcgucgggacca

SEQ ID NO: 298152 - RNA, 13 nt, Human herpesvirus 1
cuggucagcacgg

SEQ ID NO: 298153 - RNA, 13 nt, Human herpesvirus 1
cuggucccccggg

SEQ ID NO: 298154 - RNA, 16 nt, Human herpesvirus 1
cuggucgaggcggccg

SEQ ID NO: 298155 - RNA, 17 nt, Human herpesvirus 1
cuggugccggucgugag

SEQ ID NO: 298156 - RNA, 21 nt, Human herpesvirus 1
cugucggccgccgacgaccug

SEQ ID NO: 298157 - RNA, 12 nt, Human herpesvirus 1
cugucuguguug

SEQ ID NO: 298158 - RNA, 20 nt, Human herpesvirus 1
cuguguauggcgucccaucu

SEQ ID NO: 298159 - RNA, 18 nt, Human herpesvirus 1
cuuccgcugacaaccacc

SEQ ID NO: 298160 - RNA, 14 nt, Human herpesvirus 1
cuuccggccugggg

SEQ ID NO: 298161 - RNA, 18 nt, Human herpesvirus 1
cuuccguacccagacaau

SEQ ID NO: 298162 - RNA, 20 nt, Human herpesvirus 1
cuucgcuuuccugucggccg

SEQ ID NO: 298163 - RNA, 14 nt, Human herpesvirus 1
cuugccacucccca

SEQ ID NO: 298164 - RNA, 23 nt, Human herpesvirus 1
cuugccccccuccccgcacagau

SEQ ID NO: 298165 - RNA, 20 nt, Human herpesvirus 1
cuugcggcaagacccgggcg

SEQ ID NO: 298166 - RNA, 15 nt, Human herpesvirus 1
cuugcgggacugaau

SEQ ID NO: 298167 - RNA, 22 nt, Human herpesvirus 1
cuuggucagugccgauuccccc

SEQ ID NO: 298168 - RNA, 17 nt, Human herpesvirus 1
cuuucccgugacaaaac

SEQ ID NO: 298169 - RNA, 23 nt, Human herpesvirus 1
cuuucuucccacacacacaaaag

SEQ ID NO: 298170 - RNA, 23 nt, Human herpesvirus 1
cuuugggcgggaggaagccacaa

SEQ ID NO: 298171 - RNA, 22 nt, Human herpesvirus 1
cuuuucuuucuucccacacaca

SEQ ID NO: 298172 - RNA, 21 nt, Human herpesvirus 1
cuuuuguguuggcccuaauaa

SEQ ID NO: 298173 - RNA, 19 nt, Human herpesvirus 1
cuuuuuaucgcacgugauu

SEQ ID NO: 298174 - RNA, 23 nt, Human herpesvirus 1
gaaaaaaagcucggguuggccaa

SEQ ID NO: 298175 - RNA, 22 nt, Human herpesvirus 1
gaaacaagcccgaccaccagac

SEQ ID NO: 298176 - RNA, 21 nt, Human herpesvirus 1
gaaaccguaacggcauaugca

SEQ ID NO: 298177 - RNA, 17 nt, Human herpesvirus 1
gaaacgacaucuugucg

SEQ ID NO: 298178 - RNA, 11 nt, Human herpesvirus 1
gaaacugacau

SEQ ID NO: 298179 - RNA, 19 nt, Human herpesvirus 1
gaacacaggcgcuucauag

SEQ ID NO: 298180 - RNA, 16 nt, Human herpesvirus 1
gaacauacaccaaugg

SEQ ID NO: 298181 - RNA, 15 nt, Human herpesvirus 1
gaaccaugaccucuc

SEQ ID NO: 298182 - RNA, 14 nt, Human herpesvirus 1
gaaccgaaccagcc

SEQ ID NO: 298183 - RNA, 14 nt, Human herpesvirus 1
gaaccggggccaug

SEQ ID NO: 298184 - RNA, 19 nt, Human herpesvirus 1
gaaccuagggaacccagag

SEQ ID NO: 298185 - RNA, 18 nt, Human herpesvirus 1
gaagaggaggagggggcc

SEQ ID NO: 298186 - RNA, 18 nt, Human herpesvirus 1
gaagccacgcccacuuua

SEQ ID NO: 298187 - RNA, 13 nt, Human herpesvirus 1
gaagcccaaccca

SEQ ID NO: 298188 - RNA, 19 nt, Human herpesvirus 1
gaagcgugggaacacgggg

SEQ ID NO: 298189 - RNA, 15 nt, Human herpesvirus 1
gaauaaaaaccaaaa

SEQ ID NO: 298190 - RNA, 16 nt, Human herpesvirus 1
gacaacugccugaccc

SEQ ID NO: 298191 - RNA, 15 nt, Human herpesvirus 1
gacacuacgaucucg

SEQ ID NO: 298192 - RNA, 21 nt, Human herpesvirus 1
gacagcggggacucgggcgag

SEQ ID NO: 298193 - RNA, 16 nt, Human herpesvirus 1
gacauccaccacccgg

SEQ ID NO: 298194 - RNA, 21 nt, Human herpesvirus 1
gacaucuugucgucaaaggga

SEQ ID NO: 298195 - RNA, 16 nt, Human herpesvirus 1
gacaugaccgcccgcc

SEQ ID NO: 298196 - RNA, 16 nt, Human herpesvirus 1
gacaugggggguguuu

SEQ ID NO: 298197 - RNA, 14 nt, Human herpesvirus 1
gacauuaaccaccu

SEQ ID NO: 298198 - RNA, 16 nt, Human herpesvirus 1
gcccgccccucgccac

SEQ ID NO: 298199 - RNA, 15 nt, Human herpesvirus 1
gcccgcguaaccccg

SEQ ID NO: 298200 - RNA, 18 nt, Human herpesvirus 1
gcccggaacgggaggcca

SEQ ID NO: 298201 - RNA, 16 nt, Human herpesvirus 1
gcccgggggacucacu

SEQ ID NO: 298202 - RNA, 13 nt, Human herpesvirus 1
gcccggguccccg

SEQ ID NO: 298203 - RNA, 14 nt, Human herpesvirus 1
gcccuccaccaacg

SEQ ID NO: 298204 - RNA, 13 nt, Human herpesvirus 1
gcccuguaccgac

SEQ ID NO: 298205 - RNA, 18 nt, Human herpesvirus 1
gcccuguaugacagcggg

SEQ ID NO: 298206 - RNA, 13 nt, Human herpesvirus 1
gccgaaacggcca

SEQ ID NO: 298207 - RNA, 18 nt, Human herpesvirus 1
gccgaaacggccaugcac

SEQ ID NO: 298208 - RNA, 23 nt, Human herpesvirus 1
gccgaaacggccaugcacaccag

SEQ ID NO: 298209 - RNA, 15 nt, Human herpesvirus 1
gccgacgaccugguu

SEQ ID NO: 298210 - RNA, 18 nt, Human herpesvirus 1
gccgaggucccgugcaac

SEQ ID NO: 298211 - RNA, 15 nt, Human herpesvirus 1
gccgaugagccaccg

SEQ ID NO: 298212 - RNA, 23 nt, Human herpesvirus 1
gaccaaggggguccguuuuguca

SEQ ID NO: 298213 - RNA, 20 nt, Human herpesvirus 1
gaccacaccaacgcacgagc

SEQ ID NO: 298214 - RNA, 23 nt, Human herpesvirus 1
gaccacgccccuuucccccuguu

SEQ ID NO: 298215 - RNA, 15 nt, Human herpesvirus 1
gaccagcgcacugcc

SEQ ID NO: 298216 - RNA, 23 nt, Human herpesvirus 1
gacccagaccggcaccaccgacu

SEQ ID NO: 298217 - RNA, 20 nt, Human herpesvirus 1
gaccccacaaacagccccca

SEQ ID NO: 298218 - RNA, 20 nt, Human herpesvirus 1
gaccccauugggaccaauac

SEQ ID NO: 298219 - RNA, 23 nt, Human herpesvirus 1
gacccuaggaggccgccacgcgc

SEQ ID NO: 298220 - RNA, 15 nt, Human herpesvirus 1
gaccgcgcccucgcc

SEQ ID NO: 298221 - RNA, 21 nt, Human herpesvirus 1
gaccggcaccaccgacucucc

SEQ ID NO: 298222 - RNA, 11 nt, Human herpesvirus 1
gaccuugcccc

SEQ ID NO: 298223 - RNA, 18 nt, Human herpesvirus 1
gacgaacucguggacgaa

SEQ ID NO: 298224 - RNA, 15 nt, Human herpesvirus 1
gacgacggacggcca

SEQ ID NO: 298225 - RNA, 21 nt, Human herpesvirus 1
gacgagaaacacgguggcgcg

SEQ ID NO: 298226 - RNA, 19 nt, Human herpesvirus 1
gacgagacgaacucgugga

SEQ ID NO: 298227 - RNA, 16 nt, Human herpesvirus 1
gacgagucguuuccca

SEQ ID NO: 298228 - RNA, 23 nt, Human herpesvirus 1
gacgcaauaaacggcaacaaccu

SEQ ID NO: 298229 - RNA, 16 nt, Human herpesvirus 1
gacgccgaccgacucc

SEQ ID NO: 298230 - RNA, 14 nt, Human herpesvirus 1
gacgcugggacaaa

SEQ ID NO: 298231 - RNA, 13 nt, Human herpesvirus 1
gacggcgaccaua

SEQ ID NO: 298232 - RNA, 16 nt, Human herpesvirus 1
gacggcggaccuggcg

SEQ ID NO: 298233 - RNA, 22 nt, Human herpesvirus 1
gacgggcgguucgccgccacca

SEQ ID NO: 298234 - RNA, 12 nt, Human herpesvirus 1
gacggggaccgg

SEQ ID NO: 298235 - RNA, 12 nt, Human herpesvirus 1
gacgggugagug

SEQ ID NO: 298236 - RNA, 15 nt, Human herpesvirus 1
gacgguccacgucac

SEQ ID NO: 298237 - RNA, 17 nt, Human herpesvirus 1
gacgucgccccuguggc

SEQ ID NO: 298238 - RNA, 22 nt, Human herpesvirus 1
gacgucggaggauuacuuuaag

SEQ ID NO: 298239 - RNA, 17 nt, Human herpesvirus 1
gacguuaucucggugga

SEQ ID NO: 298240 - RNA, 14 nt, Human herpesvirus 1
gacucaagcacaca

SEQ ID NO: 298241 - RNA, 19 nt, Human herpesvirus 1
gagacaacgcgacaggcca

SEQ ID NO: 298242 - RNA, 13 nt, Human herpesvirus 1
gagacgggaccgc

SEQ ID NO: 298243 - RNA, 14 nt, Human herpesvirus 1
gagacguccuuaau

SEQ ID NO: 298244 - RNA, 18 nt, Human herpesvirus 1
gagagaaucccccguguu

SEQ ID NO: 298245 - RNA, 22 nt, Human herpesvirus 1
gagaggauaaaaggcggcgcaa

SEQ ID NO: 298246 - RNA, 15 nt, Human herpesvirus 1
gagaucacgccuuaa

SEQ ID NO: 298247 - RNA, 21 nt, Human herpesvirus 1
gagccgguagugcaggugggc

SEQ ID NO: 298248 - RNA, 14 nt, Human herpesvirus 1
gagcgcgggaccgu

SEQ ID NO: 298249 - RNA, 15 nt, Human herpesvirus 1
gagcuucgcuuugug

SEQ ID NO: 298250 - RNA, 22 nt, Human herpesvirus 1
gagcuucgcuuugugggggacc

SEQ ID NO: 298251 - RNA, 23 nt, Human herpesvirus 1
gagcuucgcuuugugggggacca

SEQ ID NO: 298252 - RNA, 16 nt, Human herpesvirus 1
gaggagggguuuggga

SEQ ID NO: 298253 - RNA, 13 nt, Human herpesvirus 1
gaggccacagcgc

SEQ ID NO: 298254 - RNA, 20 nt, Human herpesvirus 1
gaggccuuguuccgcuuccc

SEQ ID NO: 298255 - RNA, 18 nt, Human herpesvirus 1
gaggcguccauugacaca

SEQ ID NO: 298256 - RNA, 14 nt, Human herpesvirus 1
gagggaaagcaaag

SEQ ID NO: 298257 - RNA, 15 nt, Human herpesvirus 1
gaggucuccgucacc

SEQ ID NO: 298258 - RNA, 22 nt, Human herpesvirus 1
gaguccacgguaggcccagcau

SEQ ID NO: 298259 - RNA, 20 nt, Human herpesvirus 1
gaguuuguggacccaaagcc

SEQ ID NO: 298260 - RNA, 12 nt, Human herpesvirus 1
gauaaugaucaa

SEQ ID NO: 298261 - RNA, 14 nt, Human herpesvirus 1
gauagcagauguga

SEQ ID NO: 298262 - RNA, 21 nt, Human herpesvirus 1
gauagcgaauaaaaaccaaaa

SEQ ID NO: 298263 - RNA, 17 nt, Human herpesvirus 1
gauagcguauaacgggg

SEQ ID NO: 298264 - RNA, 23 nt, Human herpesvirus 1
gauaucaggggccgugauaugcc

SEQ ID NO: 298265 - RNA, 15 nt, Human herpesvirus 1
gaucccucgcgaggg

SEQ ID NO: 298266 - RNA, 15 nt, Human herpesvirus 1
gauccgcggcgacaa

SEQ ID NO: 298267 - RNA, 12 nt, Human herpesvirus 1
gaugaaaacacg

SEQ ID NO: 298268 - RNA, 15 nt, Human herpesvirus 1
gaugagccaaccucg

SEQ ID NO: 298269 - RNA, 14 nt, Human herpesvirus 1
gaugaggggcacca

SEQ ID NO: 298270 - RNA, 16 nt, Human herpesvirus 1
gaugaggggcaccaga

SEQ ID NO: 298271 - RNA, 19 nt, Human herpesvirus 1
gaugccgugccgcccguug

SEQ ID NO: 298272 - RNA, 21 nt, Human herpesvirus 1
gauggaggggcgggugugaua

SEQ ID NO: 298273 - RNA, 16 nt, Human herpesvirus 1
gaugggcuacuaccua

SEQ ID NO: 298274 - RNA, 15 nt, Human herpesvirus 1
gauuauuuggugugu

SEQ ID NO: 298275 - RNA, 23 nt, Human herpesvirus 1
gauuggcaauguugucucccggu

SEQ ID NO: 298276 - RNA, 17 nt, Human herpesvirus 1
gcaaccaacccacuggg

SEQ ID NO: 298277 - RNA, 15 nt, Human herpesvirus 1
gcaacgccgcagggg

SEQ ID NO: 298278 - RNA, 17 nt, Human herpesvirus 1
gcaauucccgcggcccu

SEQ ID NO: 298279 - RNA, 14 nt, Human herpesvirus 1
gcaauuucaccgcc

SEQ ID NO: 298280 - RNA, 15 nt, Human herpesvirus 1
gcaccacacaccagc

SEQ ID NO: 298281 - RNA, 16 nt, Human herpesvirus 1
gcaccacacaccagcg

SEQ ID NO: 298282 - RNA, 19 nt, Human herpesvirus 1
gcaccaccgacucucccac

SEQ ID NO: 298283 - RNA, 21 nt, Human herpesvirus 1
gcacgcgcgauagagucgacg

SEQ ID NO: 298284 - RNA, 14 nt, Human herpesvirus 1
gcacguacacgggu

SEQ ID NO: 298285 - RNA, 21 nt, Human herpesvirus 1
gcacguauucggacagacuca

SEQ ID NO: 298286 - RNA, 14 nt, Human herpesvirus 1
gcacucccugccgc

SEQ ID NO: 298287 - RNA, 20 nt, Human herpesvirus 1
gcacuuccuauaagacucuc

SEQ ID NO: 298288 - RNA, 18 nt, Human herpesvirus 1
gcagaccuauguguuuca

SEQ ID NO: 298289 - RNA, 17 nt, Human herpesvirus 1
gcagacgcugcuccgcc

SEQ ID NO: 298290 - RNA, 16 nt, Human herpesvirus 1
gcagccagcgcauaca

SEQ ID NO: 298291 - RNA, 23 nt, Human herpesvirus 1
gcagcguccgguuggccgcgcgg

SEQ ID NO: 298292 - RNA, 21 nt, Human herpesvirus 1
gcaggauuucgcgcaggugau

SEQ ID NO: 298293 - RNA, 21 nt, Human herpesvirus 1
gcaggcgccuccggggguccg

SEQ ID NO: 298294 - RNA, 23 nt, Human herpesvirus 1
gcaguccacgggggggagcacaa

SEQ ID NO: 298295 - RNA, 14 nt, Human herpesvirus 1
gcaugcaccccaga

SEQ ID NO: 298296 - RNA, 17 nt, Human herpesvirus 1
gcauuuauugacccaaa

SEQ ID NO: 298297 - RNA, 14 nt, Human herpesvirus 1
gccaaauaaagcca

SEQ ID NO: 298298 - RNA, 21 nt, Human herpesvirus 1
gccaaauaaagccacugaaac

SEQ ID NO: 298299 - RNA, 17 nt, Human herpesvirus 1
gccacaacagcccuguc

SEQ ID NO: 298300 - RNA, 19 nt, Human herpesvirus 1
gccaccaauagaccagagg

SEQ ID NO: 298301 - RNA, 17 nt, Human herpesvirus 1
gccacccacccaccaag

SEQ ID NO: 298302 - RNA, 19 nt, Human herpesvirus 1
gccacgggcugcgugucaa

SEQ ID NO: 298303 - RNA, 20 nt, Human herpesvirus 1
gccacgggcugcgugucaaa

SEQ ID NO: 298304 - RNA, 22 nt, Human herpesvirus 1
gccagcgcggcggggcccggcc

SEQ ID NO: 298305 - RNA, 13 nt, Human herpesvirus 1
gccaggaccgccu

SEQ ID NO: 298306 - RNA, 16 nt, Human herpesvirus 1
gccaggaccgccugcc

SEQ ID NO: 298307 - RNA, 18 nt, Human herpesvirus 1
gccaggucggcgaccgcc

SEQ ID NO: 298308 - RNA, 19 nt, Human herpesvirus 1
gccaggucggcgaccgcca

SEQ ID NO: 298309 - RNA, 16 nt, Human herpesvirus 1
gccaguccgcugcacc

SEQ ID NO: 298310 - RNA, 16 nt, Human herpesvirus 1
gccauacacagccacc

SEQ ID NO: 298311 - RNA, 17 nt, Human herpesvirus 1
gccauacacagccaccc

SEQ ID NO: 298312 - RNA, 15 nt, Human herpesvirus 1
gccaugcacaccagc

SEQ ID NO: 298313 - RNA, 18 nt, Human herpesvirus 1
gccauggcgggacugggc

SEQ ID NO: 298314 - RNA, 21 nt, Human herpesvirus 1
gccauuaagacgcugggacaa

SEQ ID NO: 298315 - RNA, 18 nt, Human herpesvirus 1
gcccaaugggccgggccg

SEQ ID NO: 298316 - RNA, 15 nt, Human herpesvirus 1
gcccagacgcccucc

SEQ ID NO: 298317 - RNA, 22 nt, Human herpesvirus 1
gcccaguaacaugcgcacguga

SEQ ID NO: 298318 - RNA, 15 nt, Human herpesvirus 1
gccccaccggcacca

SEQ ID NO: 298319 - RNA, 12 nt, Human herpesvirus 1
gccccauacucc

SEQ ID NO: 298320 - RNA, 22 nt, Human herpesvirus 1
gccccauacucccgccagcacc

SEQ ID NO: 298321 - RNA, 15 nt, Human herpesvirus 1
gcccccccaagcgcc

SEQ ID NO: 298322 - RNA, 22 nt, Human herpesvirus 1
gccccgaacccugcgguccgga

SEQ ID NO: 298323 - RNA, 20 nt, Human herpesvirus 1
gccccgauggcccuggacgc

SEQ ID NO: 298324 - RNA, 16 nt, Human herpesvirus 1
gccccgccggcgacaa

SEQ ID NO: 298325 - RNA, 23 nt, Human herpesvirus 1
gccccgggacaccccccaugcgg

SEQ ID NO: 298326 - RNA, 21 nt, Human herpesvirus 1
gccccuaucgcucgaccucuc

SEQ ID NO: 298327 - RNA, 20 nt, Human herpesvirus 1
gcccgaccgaauaaacugua

SEQ ID NO: 298328 - RNA, 22 nt, Human herpesvirus 1
ugcgugucaaaggcuagcaaau

SEQ ID NO: 298329 - RNA, 20 nt, Human herpesvirus 1
ugcuaauuaaauacaugcca

SEQ ID NO: 298330 - RNA, 18 nt, Human herpesvirus 1
ggauuuuugcugucuguu

SEQ ID NO: 298331 - RNA, 15 nt, Human herpesvirus 1
ggcaccacacaccag

SEQ ID NO: 298332 - RNA, 16 nt, Human herpesvirus 1
ggcaccacacaccagc

SEQ ID NO: 298333 - RNA, 14 nt, Human herpesvirus 1
ggcacuuuccccau

SEQ ID NO: 298334 - RNA, 16 nt, Human herpesvirus 1
ggcagcaugggaccca

SEQ ID NO: 298335 - RNA, 17 nt, Human herpesvirus 1
ggcagcgcuccgacgac

SEQ ID NO: 298336 - RNA, 21 nt, Human herpesvirus 1
ggcaggccgaaacggccaugc

SEQ ID NO: 298337 - RNA, 13 nt, Human herpesvirus 1
ggcaggcgacggc

SEQ ID NO: 298338 - RNA, 22 nt, Human herpesvirus 1
ggcaugcaccccagagguguuc

SEQ ID NO: 298339 - RNA, 11 nt, Human herpesvirus 1
ggcauggcgca

SEQ ID NO: 298340 - RNA, 14 nt, Human herpesvirus 1
gucauagaugggau

SEQ ID NO: 298341 - RNA, 11 nt, Human herpesvirus 1
gucauaugcaa

SEQ ID NO: 298342 - RNA, 12 nt, Human herpesvirus 1
gucauaugcaaa

SEQ ID NO: 298343 - RNA, 14 nt, Human herpesvirus 1
gucauaugcaaaug

SEQ ID NO: 298344 - RNA, 23 nt, Human herpesvirus 1
guccacacccaguggcuccgggc

SEQ ID NO: 298345 - RNA, 21 nt, Human herpesvirus 1
guccacgggggggagcacaag

SEQ ID NO: 298346 - RNA, 14 nt, Human herpesvirus 1
ugcugcgacacucg

SEQ ID NO: 298347 - RNA, 15 nt, Human herpesvirus 1
ugcuuguuuguguuc

SEQ ID NO: 298348 - RNA, 14 nt, Human herpesvirus 1
uggacccaaagccc

SEQ ID NO: 298349 - RNA, 20 nt, Human herpesvirus 1
uggacgaacacggggacggc

SEQ ID NO: 298350 - RNA, 17 nt, Human herpesvirus 1
uggacgccggggccuug

SEQ ID NO: 298351 - RNA, 18 nt, Human herpesvirus 1
uggacggaccugguuacu

SEQ ID NO: 298352 - RNA, 18 nt, Human herpesvirus 1
uggacugagcagacagac

SEQ ID NO: 298353 - RNA, 19 nt, Human herpesvirus 1
uggagacgggugagugucg

SEQ ID NO: 298354 - RNA, 19 nt, Human herpesvirus 1
uggagauucgggucuacua

SEQ ID NO: 298355 - RNA, 23 nt, Human herpesvirus 1
uggagcaaaacgccucccccuga

SEQ ID NO: 298356 - RNA, 15 nt, Human herpesvirus 1
uggauaaaaagccag

SEQ ID NO: 298357 - RNA, 16 nt, Human herpesvirus 1
uggauaaaaagccagc

SEQ ID NO: 298358 - RNA, 20 nt, Human herpesvirus 1
uggcccccggacccgggccg

SEQ ID NO: 298359 - RNA, 23 nt, Human herpesvirus 1
uggcgcccccccaacgggggacc

SEQ ID NO: 298360 - RNA, 15 nt, Human herpesvirus 1
uggcggccgcccaac

SEQ ID NO: 298361 - RNA, 12 nt, Human herpesvirus 1
uggcuccgggcc

SEQ ID NO: 298362 - RNA, 13 nt, Human herpesvirus 1
uggcuggccgcuc

SEQ ID NO: 298363 - RNA, 18 nt, Human herpesvirus 1
ugggacccacagaccgcc

SEQ ID NO: 298364 - RNA, 14 nt, Human herpesvirus 1
ugggaggaguucag

SEQ ID NO: 298365 - RNA, 14 nt, Human herpesvirus 1
ugggauacauggaa

SEQ ID NO: 298366 - RNA, 18 nt, Human herpesvirus 1
ugggcacuuuccccaugc

SEQ ID NO: 298367 - RNA, 13 nt, Human herpesvirus 1
ugggguccgggua

SEQ ID NO: 298368 - RNA, 23 nt, Human herpesvirus 1
ugggguccggguaaaacaacagc

SEQ ID NO: 298369 - RNA, 13 nt, Human herpesvirus 1
uggguccgggccc

SEQ ID NO: 298370 - RNA, 16 nt, Human herpesvirus 1
uggguccgugccggac

SEQ ID NO: 298371 - RNA, 14 nt, Human herpesvirus 1
uggguuucacugaa

SEQ ID NO: 298372 - RNA, 13 nt, Human herpesvirus 1
ugguagauaggca

SEQ ID NO: 298373 - RNA, 20 nt, Human herpesvirus 1
ugguaucuaguugauaugca

SEQ ID NO: 298374 - RNA, 23 nt, Human herpesvirus 1
uggucaggagggcgcucagggcg

SEQ ID NO: 298375 - RNA, 20 nt, Human herpesvirus 1
uggucuguuucucuccgccc

SEQ ID NO: 298376 - RNA, 15 nt, Human herpesvirus 1
uggugggguuucuuc

SEQ ID NO: 298377 - RNA, 21 nt, Human herpesvirus 1
ugguuccgaccccacaaacag

SEQ ID NO: 298378 - RNA, 11 nt, Human herpesvirus 1
uguaaccauac

SEQ ID NO: 298379 - RNA, 22 nt, Human herpesvirus 1
uguagggccgcggaggccccca

SEQ ID NO: 298380 - RNA, 21 nt, Human herpesvirus 1
uguaucuuuucccugucugug

SEQ ID NO: 298381 - RNA, 16 nt, Human herpesvirus 1
uguccaauccacagac

SEQ ID NO: 298382 - RNA, 20 nt, Human herpesvirus 1
ugucccucauuuuacaauaa

SEQ ID NO: 298383 - RNA, 19 nt, Human herpesvirus 1
ugucgcgugugguucaugu

SEQ ID NO: 298384 - RNA, 20 nt, Human herpesvirus 1
ugucggccgccgacgaccug

SEQ ID NO: 298385 - RNA, 14 nt, Human herpesvirus 1
ugucggcgauauca

SEQ ID NO: 298386 - RNA, 19 nt, Human herpesvirus 1
ugucggugcuguuucaggg

SEQ ID NO: 298387 - RNA, 14 nt, Human herpesvirus 1
uguggacccaaagc

SEQ ID NO: 298388 - RNA, 13 nt, Human herpesvirus 1
uguugggcgggac

SEQ ID NO: 298389 - RNA, 11 nt, Human herpesvirus 1
uguuguucucg

SEQ ID NO: 298390 - RNA, 23 nt, Human herpesvirus 1
uguuuguggggucggaaccauag

SEQ ID NO: 298391 - RNA, 14 nt, Human herpesvirus 1
uuaaagacaacaaa

SEQ ID NO: 298392 - RNA, 21 nt, Human herpesvirus 1
uuaaaugcgugguggcgacca

SEQ ID NO: 298393 - RNA, 16 nt, Human herpesvirus 1
uuaacugucuggagac

SEQ ID NO: 298394 - RNA, 15 nt, Human herpesvirus 1
uuaaguuuugcagua

SEQ ID NO: 298395 - RNA, 20 nt, Human herpesvirus 1
uuagccagcagacgcugcuc

SEQ ID NO: 298396 - RNA, 17 nt, Human herpesvirus 1
uuauucccaaacagggc

SEQ ID NO: 298397 - RNA, 18 nt, Human herpesvirus 1
uuauucccaaacagggcc

SEQ ID NO: 298398 - RNA, 15 nt, Human herpesvirus 1
uuauuggucaaacuc

SEQ ID NO: 298399 - RNA, 20 nt, Human herpesvirus 1
uuauuggucaaacucaggca

SEQ ID NO: 298400 - RNA, 20 nt, Human herpesvirus 1
uucagggcgacgccgugggc

SEQ ID NO: 298401 - RNA, 19 nt, Human herpesvirus 1
uucuucccacacacacaaa

SEQ ID NO: 298402 - RNA, 18 nt, Human herpesvirus 1
uugcccugagacaagagc

SEQ ID NO: 298403 - RNA, 23 nt, Human herpesvirus 1
uuggaaacuguccugucuugggg

SEQ ID NO: 298404 - RNA, 16 nt, Human herpesvirus 1
uugggaugggaccuua

SEQ ID NO: 298405 - RNA, 20 nt, Human herpesvirus 1
uugggcgggaggaagccaca

SEQ ID NO: 298406 - RNA, 21 nt, Human herpesvirus 1
uuggggacacuggguucuccu

SEQ ID NO: 298407 - RNA, 23 nt, Human herpesvirus 1
uuguauguccccaaaauaaaaga

SEQ ID NO: 298408 - RNA, 22 nt, Human herpesvirus 1
uuguuucccaauccgacgggga

SEQ ID NO: 298409 - RNA, 22 nt, Human herpesvirus 1
uuuacaacaaaccccccaucac

SEQ ID NO: 298410 - RNA, 13 nt, Human herpesvirus 1
uuuauuaacauca

SEQ ID NO: 298411 - RNA, 22 nt, Human herpesvirus 1
uuucggugucuaacgguccuca

SEQ ID NO: 298412 - RNA, 19 nt, Human herpesvirus 1
uuugggcguugcguggggu

SEQ ID NO: 298413 - RNA, 21 nt, Human herpesvirus 1
uuugggcguugcgugggguca

SEQ ID NO: 298414 - RNA, 13 nt, Human herpesvirus 1
uuugguucuuguc

SEQ ID NO: 298415 - RNA, 14 nt, Human herpesvirus 1
uuugguuggguuac

SEQ ID NO: 298416 - RNA, 22 nt, Human herpesvirus 1
uuuucguccaccaaagucucug

SEQ ID NO: 298417 - RNA, 22 nt, Human herpesvirus 2
aaaaaggaggguauuggccaaa

SEQ ID NO: 298418 - RNA, 13 nt, Human herpesvirus 2
aaaacaagacgua

SEQ ID NO: 298419 - RNA, 15 nt, Human herpesvirus 2
aaaacacaagcacac

SEQ ID NO: 298420 - RNA, 15 nt, Human herpesvirus 2
aaaacaccaacauac

SEQ ID NO: 298421 - RNA, 14 nt, Human herpesvirus 2
aaaaccaaggcaaa

SEQ ID NO: 298422 - RNA, 13 nt, Human herpesvirus 2
aaacaaaaacaca

SEQ ID NO: 298423 - RNA, 13 nt, Human herpesvirus 2
aaacaaaaaccuu

SEQ ID NO: 298424 - RNA, 14 nt, Human herpesvirus 2
aaaccagacacuca

SEQ ID NO: 298425 - RNA, 15 nt, Human herpesvirus 2
aaaccgccaacacca

SEQ ID NO: 298426 - RNA, 19 nt, Human herpesvirus 2
aaaccggucggcgaugucc

SEQ ID NO: 298427 - RNA, 20 nt, Human herpesvirus 2
aaacgcaaaaaaaacaagac

SEQ ID NO: 298428 - RNA, 18 nt, Human herpesvirus 2
aaacgcguccaaccgaua

SEQ ID NO: 298429 - RNA, 16 nt, Human herpesvirus 2
aaagaaagaaacacaa

SEQ ID NO: 298430 - RNA, 15 nt, Human herpesvirus 2
aaagaaauagaagaa

SEQ ID NO: 298431 - RNA, 21 nt, Human herpesvirus 2
aaagcgcuggcauuaaccaac

SEQ ID NO: 298432 - RNA, 15 nt, Human herpesvirus 2
aaaggaaacaggaau

SEQ ID NO: 298433 - RNA, 17 nt, Human herpesvirus 2
aaaggaccaaaagggaa

SEQ ID NO: 298434 - RNA, 17 nt, Human herpesvirus 2
aaaggguacacaaagcu

SEQ ID NO: 298435 - RNA, 12 nt, Human herpesvirus 2
aaaguauaccca

SEQ ID NO: 298436 - RNA, 20 nt, Human herpesvirus 2
aaagugggggggugguggug

SEQ ID NO: 298437 - RNA, 15 nt, Human herpesvirus 2
aaauaaaaagacacc

SEQ ID NO: 298438 - RNA, 22 nt, Human herpesvirus 2
aaauacauaaaacccacccucg

SEQ ID NO: 298439 - RNA, 14 nt, Human herpesvirus 2
aaaucuauugaacu

SEQ ID NO: 298440 - RNA, 15 nt, Human herpesvirus 2
aaaucuauugaccuc

SEQ ID NO: 298441 - RNA, 13 nt, Human herpesvirus 2
aacaaaaaccuug

SEQ ID NO: 298442 - RNA, 15 nt, Human herpesvirus 2
aacaaaagaaacggc

SEQ ID NO: 298443 - RNA, 13 nt, Human herpesvirus 2
aacaacaccaaac

SEQ ID NO: 298444 - RNA, 19 nt, Human herpesvirus 2
aacaacacguucgccccgc

SEQ ID NO: 298445 - RNA, 16 nt, Human herpesvirus 2
aacacaggcgcuucau

SEQ ID NO: 298446 - RNA, 14 nt, Human herpesvirus 2
aacaccaaacaauc

SEQ ID NO: 298447 - RNA, 19 nt, Human herpesvirus 2
aacaggccaucgccgggga

SEQ ID NO: 298448 - RNA, 14 nt, Human herpesvirus 2
aaccccaaaccaac

SEQ ID NO: 298449 - RNA, 18 nt, Human herpesvirus 2
aaccggucggcgaugucc

SEQ ID NO: 298450 - RNA, 14 nt, Human herpesvirus 2
aacgcccugcacac

SEQ ID NO: 298451 - RNA, 18 nt, Human herpesvirus 2
aacggucggcgaacacaa

SEQ ID NO: 298452 - RNA, 13 nt, Human herpesvirus 2
aacuaaaccacag

SEQ ID NO: 298453 - RNA, 13 nt, Human herpesvirus 2
aacucucccggcu

SEQ ID NO: 298454 - RNA, 13 nt, Human herpesvirus 2
cucaauaaagcca

SEQ ID NO: 298455 - RNA, 14 nt, Human herpesvirus 2
cucaauaaagccag

SEQ ID NO: 298456 - RNA, 19 nt, Human herpesvirus 2
cucacgggggggcugguuu

SEQ ID NO: 298457 - RNA, 20 nt, Human herpesvirus 2
cucccaauucgucaccuggc

SEQ ID NO: 298458 - RNA, 21 nt, Human herpesvirus 2
cuccccgaaagccaccaauac

SEQ ID NO: 298459 - RNA, 14 nt, Human herpesvirus 2
cuccccucuacccc

SEQ ID NO: 298460 - RNA, 21 nt, Human herpesvirus 2
cucccggccauccccggcgcc

SEQ ID NO: 298461 - RNA, 13 nt, Human herpesvirus 2
cucccucgccgcc

SEQ ID NO: 298462 - RNA, 21 nt, Human herpesvirus 2
cuccgccaugcaacgccgggc

SEQ ID NO: 298463 - RNA, 22 nt, Human herpesvirus 2
cuccgccaugcaacgccgggcg

SEQ ID NO: 298464 - RNA, 16 nt, Human herpesvirus 2
cuccucggacguccag

SEQ ID NO: 298465 - RNA, 22 nt, Human herpesvirus 2
cuccuucggugcacaagacaca

SEQ ID NO: 298466 - RNA, 21 nt, Human herpesvirus 2
cuccuuguuucgccccacgga

SEQ ID NO: 298467 - RNA, 22 nt, Human herpesvirus 2
cucgaaggagggaaacuaggac

SEQ ID NO: 298468 - RNA, 16 nt, Human herpesvirus 2
cucgauggaggcgcau

SEQ ID NO: 298469 - RNA, 20 nt, Human herpesvirus 2
cucgcccccgugccuguugg

SEQ ID NO: 298470 - RNA, 23 nt, Human herpesvirus 2
cucgucccccgaggcccccggcc

SEQ ID NO: 298471 - RNA, 16 nt, Human herpesvirus 2
cucguuccucacgggg

SEQ ID NO: 298472 - RNA, 16 nt, Human herpesvirus 2
cucucaaacaaaaaca

SEQ ID NO: 298473 - RNA, 19 nt, Human herpesvirus 2
cucucaaacaaaaacacaa

SEQ ID NO: 298474 - RNA, 21 nt, Human herpesvirus 2
cucucgccgcuccgucaaguc

SEQ ID NO: 298475 - RNA, 20 nt, Human herpesvirus 2
cucucgggggaugguggugg

SEQ ID NO: 298476 - RNA, 23 nt, Human herpesvirus 2
cucugauagcgaauaaagacaga

SEQ ID NO: 298477 - RNA, 17 nt, Human herpesvirus 2
cucugcccgaccgggcg

SEQ ID NO: 298478 - RNA, 18 nt, Human herpesvirus 2
cucuguuucgcauaugcc

SEQ ID NO: 298479 - RNA, 9 nt, Human herpesvirus 2
cucuucccc

SEQ ID NO: 298480 - RNA, 16 nt, Human herpesvirus 2
cugaauuucccgcaga

SEQ ID NO: 298481 - RNA, 12 nt, Human herpesvirus 2
cugaccacgagc

SEQ ID NO: 298482 - RNA, 16 nt, Human herpesvirus 2
cugaggggaaagcugg

SEQ ID NO: 298483 - RNA, 11 nt, Human herpesvirus 2
cugagugucug

SEQ ID NO: 298484 - RNA, 14 nt, Human herpesvirus 2
cugcccgcggacca

SEQ ID NO: 298485 - RNA, 20 nt, Human herpesvirus 2
cugccugacccucucgggca

SEQ ID NO: 298486 - RNA, 14 nt, Human herpesvirus 2
cugcgcacgacaga

SEQ ID NO: 298487 - RNA, 16 nt, Human herpesvirus 2
cugcggacuggcagcc

SEQ ID NO: 298488 - RNA, 23 nt, Human herpesvirus 2
cugcggcuggcgcggugccugac

SEQ ID NO: 298489 - RNA, 15 nt, Human herpesvirus 2
cugcggggaccagcc

SEQ ID NO: 298490 - RNA, 21 nt, Human herpesvirus 2
cugcggggcgaacguguuguu

SEQ ID NO: 298491 - RNA, 16 nt, Human herpesvirus 2
cugcgucguccagggu

SEQ ID NO: 298492 - RNA, 17 nt, Human herpesvirus 2
cugcguguuuucgggga

SEQ ID NO: 298493 - RNA, 18 nt, Human herpesvirus 2
cugcuccccaccccggag

SEQ ID NO: 298494 - RNA, 21 nt, Human herpesvirus 2
cugcucucccguaccccgccg

SEQ ID NO: 298495 - RNA, 13 nt, Human herpesvirus 2
cugcugccccgcg

SEQ ID NO: 298496 - RNA, 20 nt, Human herpesvirus 2
cuggacccagacacggugcg

SEQ ID NO: 298497 - RNA, 21 nt, Human herpesvirus 2
cuggagguggucggcggccaa

SEQ ID NO: 298498 - RNA, 16 nt, Human herpesvirus 2
cuggcacgcgccgguu

SEQ ID NO: 298499 - RNA, 21 nt, Human herpesvirus 2
cuggcauuaaccaaccaacga

SEQ ID NO: 298500 - RNA, 13 nt, Human herpesvirus 2
cuggcggcgcggc

SEQ ID NO: 298501 - RNA, 16 nt, Human herpesvirus 2
cuggcguccccaggcg

SEQ ID NO: 298502 - RNA, 16 nt, Human herpesvirus 2
cugggaacucgcccgc

SEQ ID NO: 298503 - RNA, 14 nt, Human herpesvirus 2
cugggcuuguguau

SEQ ID NO: 298504 - RNA, 14 nt, Human herpesvirus 2
cuggggaaagggaa

SEQ ID NO: 298505 - RNA, 15 nt, Human herpesvirus 2
cuggggaaagggaag

SEQ ID NO: 298506 - RNA, 17 nt, Human herpesvirus 2
cuggggcggcggcgucu

SEQ ID NO: 298507 - RNA, 14 nt, Human herpesvirus 2
cugggguacugcac

SEQ ID NO: 298508 - RNA, 15 nt, Human herpesvirus 2
cugggguacugcacu

SEQ ID NO: 298509 - RNA, 17 nt, Human herpesvirus 2
cuggguuacugcacuug

SEQ ID NO: 298510 - RNA, 21 nt, Human herpesvirus 2
cuggucacaaaaggcacggcg

SEQ ID NO: 298511 - RNA, 18 nt, Human herpesvirus 2
cugguucgucgcguggua

SEQ ID NO: 298512 - RNA, 13 nt, Human herpesvirus 2
cugucggccgcgg

SEQ ID NO: 298513 - RNA, 23 nt, Human herpesvirus 2
cugucuuuauucgcuaucagaga

SEQ ID NO: 298514 - RNA, 14 nt, Human herpesvirus 2
cuguggcccuggcg

SEQ ID NO: 298515 - RNA, 14 nt, Human herpesvirus 2
cugugugcucucaa

SEQ ID NO: 298516 - RNA, 20 nt, Human herpesvirus 2
cuguucggggcgugucuguc

SEQ ID NO: 298517 - RNA, 16 nt, Human herpesvirus 2
cuguuucgcauaugcc

SEQ ID NO: 298518 - RNA, 14 nt, Human herpesvirus 2
cuuaaaaggcaccc

SEQ ID NO: 298519 - RNA, 15 nt, Human herpesvirus 2
cuucaugggguggga

SEQ ID NO: 298520 - RNA, 15 nt, Human herpesvirus 2
cuucccaacacgccu

SEQ ID NO: 298521 - RNA, 23 nt, Human herpesvirus 2
cuucccaugacgccggccggguu

SEQ ID NO: 298522 - RNA, 15 nt, Human herpesvirus 2
cuucgcccaccgauu

SEQ ID NO: 298523 - RNA, 23 nt, Human herpesvirus 2
cuucgccgacgccuucccuguga

SEQ ID NO: 298524 - RNA, 17 nt, Human herpesvirus 2
cuucgcggcggccgcac

SEQ ID NO: 298525 - RNA, 21 nt, Human herpesvirus 2
cuucggggacuugacggucgc

SEQ ID NO: 298526 - RNA, 20 nt, Human herpesvirus 2
cuucgucguagaucgggucc

SEQ ID NO: 298527 - RNA, 21 nt, Human herpesvirus 2
cuucuccuuaaauaaacacaa

SEQ ID NO: 298528 - RNA, 10 nt, Human herpesvirus 2
cuucuucccc

SEQ ID NO: 298529 - RNA, 14 nt, Human herpesvirus 2
cuugccgcccggcg

SEQ ID NO: 298530 - RNA, 19 nt, Human herpesvirus 2
cuuggaggcccucugggac

SEQ ID NO: 298531 - RNA, 21 nt, Human herpesvirus 2
cuuguguauaaauaaaaagac

SEQ ID NO: 298532 - RNA, 21 nt, Human herpesvirus 2
cuuuaacagacucucggugau

SEQ ID NO: 298533 - RNA, 13 nt, Human herpesvirus 2
cuuuaagacagac

SEQ ID NO: 298534 - RNA, 17 nt, Human herpesvirus 2
cuuucuggccuuguuga

SEQ ID NO: 298535 - RNA, 19 nt, Human herpesvirus 2
cuuuguuguuggccuuuga

SEQ ID NO: 298536 - RNA, 17 nt, Human herpesvirus 2
cuuuuacccucacccca

SEQ ID NO: 298537 - RNA, 15 nt, Human herpesvirus 2
cuuuuucucuucccc

SEQ ID NO: 298538 - RNA, 21 nt, Human herpesvirus 2
gaaaaaccagacacucagaca

SEQ ID NO: 298539 - RNA, 20 nt, Human herpesvirus 2
gaaaaggaccaaaagggaaa

SEQ ID NO: 298540 - RNA, 18 nt, Human herpesvirus 2
gaaacacaguuccgggaa

SEQ ID NO: 298541 - RNA, 21 nt, Human herpesvirus 2
gaaacgcaaaaaaaacaagac

SEQ ID NO: 298542 - RNA, 23 nt, Human herpesvirus 2
gaaaggcccccagacgaagucac

SEQ ID NO: 298543 - RNA, 17 nt, Human herpesvirus 2
gaaaggguacacaaagc

SEQ ID NO: 298544 - RNA, 13 nt, Human herpesvirus 2
gaaauaaaggggu

SEQ ID NO: 298545 - RNA, 22 nt, Human herpesvirus 2
gaaauaauccggcgauccccaa

SEQ ID NO: 298546 - RNA, 15 nt, Human herpesvirus 2
gaacaauaaaccugu

SEQ ID NO: 298547 - RNA, 22 nt, Human herpesvirus 2
gaacccaauggccgcuccugcc

SEQ ID NO: 298548 - RNA, 23 nt, Human herpesvirus 2
gaaccgcuggcuggagaccgagc

SEQ ID NO: 298549 - RNA, 15 nt, Human herpesvirus 2
gaaccucgaccagua

SEQ ID NO: 298550 - RNA, 12 nt, Human herpesvirus 2
gaacgccccggg

SEQ ID NO: 298551 - RNA, 21 nt, Human herpesvirus 2
gaacgccucaccgcgcccggg

SEQ ID NO: 298552 - RNA, 15 nt, Human herpesvirus 2
gaacggucuccgcca

SEQ ID NO: 298553 - RNA, 24 nt, Human herpesvirus 2
gaacgugguguugggcgccggcca

SEQ ID NO: 298554 - RNA, 17 nt, Human herpesvirus 2
gaacugggguacugcac

SEQ ID NO: 298555 - RNA, 19 nt, Human herpesvirus 2
gaacugggguacugcacug

SEQ ID NO: 298556 - RNA, 16 nt, Human herpesvirus 2
gaacuggguuacugca

SEQ ID NO: 298557 - RNA, 17 nt, Human herpesvirus 2
gaacuggguuacugcac

SEQ ID NO: 298558 - RNA, 15 nt, Human herpesvirus 2
gaagauaaaccagac

SEQ ID NO: 298559 - RNA, 21 nt, Human herpesvirus 2
gaagcgccgcgcgggacccac

SEQ ID NO: 298560 - RNA, 22 nt, Human herpesvirus 2
gaaggacauucuucacuacuac

SEQ ID NO: 298561 - RNA, 11 nt, Human herpesvirus 2
gaaucugggaa

SEQ ID NO: 298562 - RNA, 22 nt, Human herpesvirus 2
gaaucugggaagacgcacgugc

SEQ ID NO: 298563 - RNA, 11 nt, Human herpesvirus 2
gacacccagau

SEQ ID NO: 298564 - RNA, 16 nt, Human herpesvirus 2
gacacgcgcccggggc

SEQ ID NO: 298565 - RNA, 13 nt, Human herpesvirus 2
gacagccccgggg

SEQ ID NO: 298566 - RNA, 14 nt, Human herpesvirus 2
gacagccccggggu

SEQ ID NO: 298567 - RNA, 14 nt, Human herpesvirus 2
gacaucaaccaccu

SEQ ID NO: 298568 - RNA, 18 nt, Human herpesvirus 2
gacaugauagagggaaca

SEQ ID NO: 298569 - RNA, 17 nt, Human herpesvirus 2
aaggaccaaaagggaaa

SEQ ID NO: 298570 - RNA, 19 nt, Human herpesvirus 2
aaggacgggaaagggaaca

SEQ ID NO: 298571 - RNA, 19 nt, Human herpesvirus 2
aaggcccggaagacuacca

SEQ ID NO: 298572 - RNA, 10 nt, Human herpesvirus 2
aagugcagua

SEQ ID NO: 298573 - RNA, 11 nt, Human herpesvirus 2
aagugcaguaa

SEQ ID NO: 298574 - RNA, 11 nt, Human herpesvirus 2
aauaaagccag

SEQ ID NO: 298575 - RNA, 21 nt, Human herpesvirus 2
aauaccacgcgacgaaccagc

SEQ ID NO: 298576 - RNA, 18 nt, Human herpesvirus 2
aauagauuucccaaacac

SEQ ID NO: 298577 - RNA, 16 nt, Human herpesvirus 2
aauccccauaccgguc

SEQ ID NO: 298578 - RNA, 14 nt, Human herpesvirus 2
aaucuauugaacuc

SEQ ID NO: 298579 - RNA, 14 nt, Human herpesvirus 2
aaucuauugaccuc

SEQ ID NO: 298580 - RNA, 18 nt, Human herpesvirus 2
aauggcuucgggccaaca

SEQ ID NO: 298581 - RNA, 14 nt, Human herpesvirus 2
acaacaccaaacaa

SEQ ID NO: 298582 - RNA, 16 nt, Human herpesvirus 2
acaacccaucccacaa

SEQ ID NO: 298583 - RNA, 12 nt, Human herpesvirus 2
acacaccaacuc

SEQ ID NO: 298584 - RNA, 12 nt, Human herpesvirus 2
acacacuuuguu

SEQ ID NO: 298585 - RNA, 14 nt, Human herpesvirus 2
acacagaaacacaa

SEQ ID NO: 298586 - RNA, 17 nt, Human herpesvirus 2
acacaggcccaccacca

SEQ ID NO: 298587 - RNA, 15 nt, Human herpesvirus 2
acacaggcgcuucau

SEQ ID NO: 298588 - RNA, 22 nt, Human herpesvirus 2
acaccagggcauaugcgaaaca

SEQ ID NO: 298589 - RNA, 16 nt, Human herpesvirus 2
acaccccccugacuca

SEQ ID NO: 298590 - RNA, 19 nt, Human herpesvirus 2
acacgcucguugguugguu

SEQ ID NO: 298591 - RNA, 18 nt, Human herpesvirus 2
acacguucgccccgcagc

SEQ ID NO: 298592 - RNA, 21 nt, Human herpesvirus 2
acagaaaccgaaucuuuucau

SEQ ID NO: 298593 - RNA, 17 nt, Human herpesvirus 2
acagacgcggugugagu

SEQ ID NO: 298594 - RNA, 15 nt, Human herpesvirus 2
acaggaagugggggu

SEQ ID NO: 298595 - RNA, 21 nt, Human herpesvirus 2
acaugauagagggaacaaaga

SEQ ID NO: 298596 - RNA, 12 nt, Human herpesvirus 2
accaaaagggaa

SEQ ID NO: 298597 - RNA, 13 nt, Human herpesvirus 2
accaaaagggaaa

SEQ ID NO: 298598 - RNA, 22 nt, Human herpesvirus 2
accaccacccccccacuuuccu

SEQ ID NO: 298599 - RNA, 16 nt, Human herpesvirus 2
accaccagcaccacca

SEQ ID NO: 298600 - RNA, 15 nt, Human herpesvirus 2
accacccaaccaacg

SEQ ID NO: 298601 - RNA, 16 nt, Human herpesvirus 2
accacggggagggggu

SEQ ID NO: 298602 - RNA, 15 nt, Human herpesvirus 2
accagcauguguguu

SEQ ID NO: 298603 - RNA, 15 nt, Human herpesvirus 2
accagggaggccaga

SEQ ID NO: 298604 - RNA, 24 nt, Human herpesvirus 2
accagggcauaugcgaaacagagc

SEQ ID NO: 298605 - RNA, 18 nt, Human herpesvirus 2
accaguaggucuguugug

SEQ ID NO: 298606 - RNA, 21 nt, Human herpesvirus 2
accaucccccgagagaugaca

SEQ ID NO: 298607 - RNA, 19 nt, Human herpesvirus 2
acccaccccccccccaacu

SEQ ID NO: 298608 - RNA, 14 nt, Human herpesvirus 2
acccacccucggug

SEQ ID NO: 298609 - RNA, 14 nt, Human herpesvirus 2
acccagaccugccg

SEQ ID NO: 298610 - RNA, 11 nt, Human herpesvirus 2
accccaaccac

SEQ ID NO: 298611 - RNA, 20 nt, Human herpesvirus 2
accccagaaccaugauccug

SEQ ID NO: 298612 - RNA, 16 nt, Human herpesvirus 2
accccccugacucagg

SEQ ID NO: 298613 - RNA, 18 nt, Human herpesvirus 2
acccccgaacagccccug

SEQ ID NO: 298614 - RNA, 17 nt, Human herpesvirus 2
accccgauagucccccg

SEQ ID NO: 298615 - RNA, 17 nt, Human herpesvirus 2
accccgcccgcuugcau

SEQ ID NO: 298616 - RNA, 18 nt, Human herpesvirus 2
accccggcguggagcgcc

SEQ ID NO: 298617 - RNA, 18 nt, Human herpesvirus 2
acccggacugcagccccg

SEQ ID NO: 298618 - RNA, 23 nt, Human herpesvirus 2
acccggcagagagauuuccccag

SEQ ID NO: 298619 - RNA, 20 nt, Human herpesvirus 2
acccuguggcgggcgcugua

SEQ ID NO: 298620 - RNA, 22 nt, Human herpesvirus 2
acccuguggcgggcgcuguaug

SEQ ID NO: 298621 - RNA, 21 nt, Human herpesvirus 2
accgacuuguuuuacauaaca

SEQ ID NO: 298622 - RNA, 20 nt, Human herpesvirus 2
accgauguucaaaaauacac

SEQ ID NO: 298623 - RNA, 13 nt, Human herpesvirus 2
accgcgaccagcg

SEQ ID NO: 298624 - RNA, 20 nt, Human herpesvirus 2
accgcggcuucuucgccgcc

SEQ ID NO: 298625 - RNA, 16 nt, Human herpesvirus 2
accgcugucgcccccg

SEQ ID NO: 298626 - RNA, 19 nt, Human herpesvirus 2
accggcgugugaugauuuc

SEQ ID NO: 298627 - RNA, 14 nt, Human herpesvirus 2
accggguuccuaua

SEQ ID NO: 298628 - RNA, 22 nt, Human herpesvirus 2
accggucgcagggagacggggu

SEQ ID NO: 298629 - RNA, 17 nt, Human herpesvirus 2
accuaauuuuuguguca

SEQ ID NO: 298630 - RNA, 21 nt, Human herpesvirus 2
accucaccccacgaugaagcg

SEQ ID NO: 298631 - RNA, 22 nt, Human herpesvirus 2
accugcgcgugcagaacaccgg

SEQ ID NO: 298632 - RNA, 20 nt, Human herpesvirus 2
accuggcucgccgugcgcug

SEQ ID NO: 298633 - RNA, 20 nt, Human herpesvirus 2
acgacugggccgaugugccc

SEQ ID NO: 298634 - RNA, 20 nt, Human herpesvirus 2
acgccaggccccccgggagc

SEQ ID NO: 298635 - RNA, 13 nt, Human herpesvirus 2
acgcccugcacac

SEQ ID NO: 298636 - RNA, 13 nt, Human herpesvirus 2
acgccgaugccca

SEQ ID NO: 298637 - RNA, 24 nt, Human herpesvirus 2
acgccuccggaagagagcgccccg

SEQ ID NO: 298638 - RNA, 20 nt, Human herpesvirus 2
acgccuucccggaacugugu

SEQ ID NO: 298639 - RNA, 17 nt, Human herpesvirus 2
acgcgaccgucgccgcc

SEQ ID NO: 298640 - RNA, 21 nt, Human herpesvirus 2
acgcgcgacugccuccacgcc

SEQ ID NO: 298641 - RNA, 19 nt, Human herpesvirus 2
acgcggcacagguggugca

SEQ ID NO: 298642 - RNA, 16 nt, Human herpesvirus 2
acgcgguauggcugcc

SEQ ID NO: 298643 - RNA, 20 nt, Human herpesvirus 2
acgcgguauggcugcccccg

SEQ ID NO: 298644 - RNA, 19 nt, Human herpesvirus 2
acgcgguauuguacccccg

SEQ ID NO: 298645 - RNA, 21 nt, Human herpesvirus 2
acgcugucgacgagucucaga

SEQ ID NO: 298646 - RNA, 17 nt, Human herpesvirus 2
acggauaccgacaguga

SEQ ID NO: 298647 - RNA, 23 nt, Human herpesvirus 2
acggccccggccgccuccccgcu

SEQ ID NO: 298648 - RNA, 20 nt, Human herpesvirus 2
acggccgggugacucgccau

SEQ ID NO: 298649 - RNA, 17 nt, Human herpesvirus 2
acggcggggccccgggc

SEQ ID NO: 298650 - RNA, 13 nt, Human herpesvirus 2
acgggcccggggc

SEQ ID NO: 298651 - RNA, 15 nt, Human herpesvirus 2
acgggcucucgccuc

SEQ ID NO: 298652 - RNA, 22 nt, Human herpesvirus 2
acggugcgugcggcccugccuc

SEQ ID NO: 298653 - RNA, 20 nt, Human herpesvirus 2
acggugcuguacaccggcuc

SEQ ID NO: 298654 - RNA, 17 nt, Human herpesvirus 2
acgucaccgggggcccc

SEQ ID NO: 298655 - RNA, 18 nt, Human herpesvirus 2
acgucggggggcacguag

SEQ ID NO: 298656 - RNA, 13 nt, Human herpesvirus 2
acgucgggguccc

SEQ ID NO: 298657 - RNA, 19 nt, Human herpesvirus 2
acgucucggcccccggggc

SEQ ID NO: 298658 - RNA, 15 nt, Human herpesvirus 2
acuaaaaacacauca

SEQ ID NO: 298659 - RNA, 15 nt, Human herpesvirus 2
acucagacacaaaag

SEQ ID NO: 298660 - RNA, 16 nt, Human herpesvirus 2
acuccaggagcuucau

SEQ ID NO: 298661 - RNA, 14 nt, Human herpesvirus 2
acugggguacugca

SEQ ID NO: 298662 - RNA, 15 nt, Human herpesvirus 2
acuggguuacugcac

SEQ ID NO: 298663 - RNA, 19 nt, Human herpesvirus 2
acugucugaaugccacgug

SEQ ID NO: 298664 - RNA, 13 nt, Human herpesvirus 2
acuuggacuccgc

SEQ ID NO: 298665 - RNA, 17 nt, Human herpesvirus 2
acuuucccccccacucc

SEQ ID NO: 298666 - RNA, 21 nt, Human herpesvirus 2
agaaacggcaagaaagacuca

SEQ ID NO: 298667 - RNA, 14 nt, Human herpesvirus 2
agaaagacucaaga

SEQ ID NO: 298668 - RNA, 13 nt, Human herpesvirus 2
agaaaggccccca

SEQ ID NO: 298669 - RNA, 16 nt, Human herpesvirus 2
agaacaauaaaccugu

SEQ ID NO: 298670 - RNA, 23 nt, Human herpesvirus 2
agcaccaccacccccccacuuuc

SEQ ID NO: 298671 - RNA, 15 nt, Human herpesvirus 2
agccuagaucuggcg

SEQ ID NO: 298672 - RNA, 18 nt, Human herpesvirus 2
agcgcguugguccggggg

SEQ ID NO: 298673 - RNA, 11 nt, Human herpesvirus 2
agcgggggccc

SEQ ID NO: 298674 - RNA, 20 nt, Human herpesvirus 2
agcgguacuucuacaccucc

SEQ ID NO: 298675 - RNA, 14 nt, Human herpesvirus 2
agcguccugcgcgu

SEQ ID NO: 298676 - RNA, 21 nt, Human herpesvirus 2
agcucgcccccgugccuguug

SEQ ID NO: 298677 - RNA, 21 nt, Human herpesvirus 2
agcucugccugcacgagcgcc

SEQ ID NO: 298678 - RNA, 14 nt, Human herpesvirus 2
aggaaagguuggug

SEQ ID NO: 298679 - RNA, 21 nt, Human herpesvirus 2
aggaacgcccgaaaccagaga

SEQ ID NO: 298680 - RNA, 20 nt, Human herpesvirus 2
aggaacugggguacugcacu

SEQ ID NO: 298681 - RNA, 19 nt, Human herpesvirus 2
aggaacuggguuacugcac

SEQ ID NO: 298682 - RNA, 23 nt, Human herpesvirus 2
aggacgucuccaagcucuccgag

SEQ ID NO: 298683 - RNA, 14 nt, Human herpesvirus 2
aggagcuucaucac

SEQ ID NO: 298684 - RNA, 13 nt, Human herpesvirus 2
aggaggggggcag

SEQ ID NO: 298685 - RNA, 19 nt, Human herpesvirus 2
aggaggggggcagugcagu

SEQ ID NO: 298686 - RNA, 18 nt, Human herpesvirus 2
aggaggggggccucgguc

SEQ ID NO: 298687 - RNA, 22 nt, Human herpesvirus 2
aggcaggggcagcucgcccccg

SEQ ID NO: 298688 - RNA, 20 nt, Human herpesvirus 2
aggcccccagacgaagucac

SEQ ID NO: 298689 - RNA, 11 nt, Human herpesvirus 2
aggcccggggg

SEQ ID NO: 298690 - RNA, 22 nt, Human herpesvirus 2
aggcccggggggggccucgguc

SEQ ID NO: 298691 - RNA, 14 nt, Human herpesvirus 2
aggcccucugggac

SEQ ID NO: 298692 - RNA, 15 nt, Human herpesvirus 2
aggcccuggcgcacc

SEQ ID NO: 298693 - RNA, 13 nt, Human herpesvirus 2
aggcguggugaua

SEQ ID NO: 298694 - RNA, 22 nt, Human herpesvirus 2
aggcguugugcgggaggggcuu

SEQ ID NO: 298695 - RNA, 21 nt, Human herpesvirus 2
agggacgcgcgcgguucugac

SEQ ID NO: 298696 - RNA, 16 nt, Human herpesvirus 2
aggggggcagugcagu

SEQ ID NO: 298697 - RNA, 22 nt, Human herpesvirus 2
aggucagcgaucgccagccgcg

SEQ ID NO: 298698 - RNA, 15 nt, Human herpesvirus 2
aguaacccaguuccu

SEQ ID NO: 298699 - RNA, 15 nt, Human herpesvirus 2
aguaccccaguuccu

SEQ ID NO: 298700 - RNA, 15 nt, Human herpesvirus 2
aguccugggugggug

SEQ ID NO: 298701 - RNA, 17 nt, Human herpesvirus 2
agucgcgccuacgagcc

SEQ ID NO: 298702 - RNA, 16 nt, Human herpesvirus 2
agucuccgaucugccc

SEQ ID NO: 298703 - RNA, 19 nt, Human herpesvirus 2
agucuggucucagacucac

SEQ ID NO: 298704 - RNA, 23 nt, Human herpesvirus 2
agugcaggugggccgacgugccg

SEQ ID NO: 298705 - RNA, 15 nt, Human herpesvirus 2
agugcaguaccccag

SEQ ID NO: 298706 - RNA, 17 nt, Human herpesvirus 2
aguucaauagauuuccc

SEQ ID NO: 298707 - RNA, 21 nt, Human herpesvirus 2
aguucaucauggauaacagcu

SEQ ID NO: 298708 - RNA, 22 nt, Human herpesvirus 2
aguugauucgcgaacacaagcu

SEQ ID NO: 298709 - RNA, 13 nt, Human herpesvirus 2
auaaaaaacacca

SEQ ID NO: 298710 - RNA, 13 nt, Human herpesvirus 2
auaaaaagacacc

SEQ ID NO: 298711 - RNA, 22 nt, Human herpesvirus 2
auaaaaagacaccgauguucaa

SEQ ID NO: 298712 - RNA, 15 nt, Human herpesvirus 2
auaaagacuguugau

SEQ ID NO: 298713 - RNA, 15 nt, Human herpesvirus 2
auaccagaagucaug

SEQ ID NO: 298714 - RNA, 13 nt, Human herpesvirus 2
auacucuguuuau

SEQ ID NO: 298715 - RNA, 20 nt, Human herpesvirus 2
auagauuucccaaacacuga

SEQ ID NO: 298716 - RNA, 18 nt, Human herpesvirus 2
auaggcugcggggcgaac

SEQ ID NO: 298717 - RNA, 20 nt, Human herpesvirus 2
auaucgugucucgugacugu

SEQ ID NO: 298718 - RNA, 13 nt, Human herpesvirus 2
aucaagcccacaa

SEQ ID NO: 298719 - RNA, 15 nt, Human herpesvirus 2
aucacauacgcacaa

SEQ ID NO: 298720 - RNA, 15 nt, Human herpesvirus 2
aucaugucuuuccac

SEQ ID NO: 298721 - RNA, 23 nt, Human herpesvirus 2
aucaugucuuuccaccaccagca

SEQ ID NO: 298722 - RNA, 12 nt, Human herpesvirus 2
auccacaagcua

SEQ ID NO: 298723 - RNA, 18 nt, Human herpesvirus 2
auccaucauccaacaaaa

SEQ ID NO: 298724 - RNA, 14 nt, Human herpesvirus 2
auccggcgaucccc

SEQ ID NO: 298725 - RNA, 15 nt, Human herpesvirus 2
auccucaaacaggcc

SEQ ID NO: 298726 - RNA, 21 nt, Human herpesvirus 2
auccuccuuagauugacucag

SEQ ID NO: 298727 - RNA, 18 nt, Human herpesvirus 2
aucgaaaggguacacaaa

SEQ ID NO: 298728 - RNA, 16 nt, Human herpesvirus 2
aucgccgcgccaacgc

SEQ ID NO: 298729 - RNA, 14 nt, Human herpesvirus 2
aucgccggggaccg

SEQ ID NO: 298730 - RNA, 20 nt, Human herpesvirus 2
aucggcgauuaacaacacca

SEQ ID NO: 298731 - RNA, 14 nt, Human herpesvirus 2
aucgguaugccguu

SEQ ID NO: 298732 - RNA, 18 nt, Human herpesvirus 2
aucgucccccgucugcca

SEQ ID NO: 298733 - RNA, 13 nt, Human herpesvirus 2
aucgugugcacga

SEQ ID NO: 298734 - RNA, 14 nt, Human herpesvirus 2
augacgccucgaug

SEQ ID NO: 298735 - RNA, 13 nt, Human herpesvirus 2
augcaaccaaauc

SEQ ID NO: 298736 - RNA, 13 nt, Human herpesvirus 2
augcccaguuuua

SEQ ID NO: 298737 - RNA, 15 nt, Human herpesvirus 2
augccuauccccggu

SEQ ID NO: 298738 - RNA, 22 nt, Human herpesvirus 2
auggaugggcggggcccggggg

SEQ ID NO: 298739 - RNA, 16 nt, Human herpesvirus 2
auggccgccccgcagu

SEQ ID NO: 298740 - RNA, 14 nt, Human herpesvirus 2
auggcguacccggg

SEQ ID NO: 298741 - RNA, 14 nt, Human herpesvirus 2
auggcucgcggggc

SEQ ID NO: 298742 - RNA, 14 nt, Human herpesvirus 2
auggggaagcccua

SEQ ID NO: 298743 - RNA, 12 nt, Human herpesvirus 2
augggggguccg

SEQ ID NO: 298744 - RNA, 20 nt, Human herpesvirus 2
auggguucggacgaaacaaa

SEQ ID NO: 298745 - RNA, 21 nt, Human herpesvirus 2
augguaauuagaaacuuuuaa

SEQ ID NO: 298746 - RNA, 19 nt, Human herpesvirus 2
auguccggggcggugauau

SEQ ID NO: 298747 - RNA, 19 nt, Human herpesvirus 2
augucuuuccaccaccagc

SEQ ID NO: 298748 - RNA, 12 nt, Human herpesvirus 2
augugccuucca

SEQ ID NO: 298749 - RNA, 22 nt, Human herpesvirus 2
augugugguauuuuuuguugua

SEQ ID NO: 298750 - RNA, 17 nt, Human herpesvirus 2
auguucaaaaauacaca

SEQ ID NO: 298751 - RNA, 15 nt, Human herpesvirus 2
auuaacaacaccaaa

SEQ ID NO: 298752 - RNA, 13 nt, Human herpesvirus 2
auuaaccaaccaa

SEQ ID NO: 298753 - RNA, 14 nt, Human herpesvirus 2
auuaaccaaccaac

SEQ ID NO: 298754 - RNA, 16 nt, Human herpesvirus 2
auuaaccaaccaacga

SEQ ID NO: 298755 - RNA, 17 nt, Human herpesvirus 2
auucgcgaacacaagcu

SEQ ID NO: 298756 - RNA, 18 nt, Human herpesvirus 2
auucgcgaacacaagcuc

SEQ ID NO: 298757 - RNA, 21 nt, Human herpesvirus 2
auugaccaaauucagggaaac

SEQ ID NO: 298758 - RNA, 13 nt, Human herpesvirus 2
auuuccccagcac

SEQ ID NO: 298759 - RNA, 17 nt, Human herpesvirus 2
caaaaacacaagcacac

SEQ ID NO: 298760 - RNA, 22 nt, Human herpesvirus 2
caaacacugaggaacuggguua

SEQ ID NO: 298761 - RNA, 21 nt, Human herpesvirus 2
caaaccuuaacuaaaccacag

SEQ ID NO: 298762 - RNA, 19 nt, Human herpesvirus 2
cgccgcgacggccccggcc

SEQ ID NO: 298763 - RNA, 22 nt, Human herpesvirus 2
cgccgcgggggaggcgcgcgcg

SEQ ID NO: 298764 - RNA, 22 nt, Human herpesvirus 2
cgccggccaaccgcgcgccgcc

SEQ ID NO: 298765 - RNA, 19 nt, Human herpesvirus 2
cgccgggaaccccggcgug

SEQ ID NO: 298766 - RNA, 18 nt, Human herpesvirus 2
cgccgggcgcgcggcgcg

SEQ ID NO: 298767 - RNA, 15 nt, Human herpesvirus 2
cgccgggucaugaac

SEQ ID NO: 298768 - RNA, 23 nt, Human herpesvirus 2
cgccgguugucuucuuuuccacc

SEQ ID NO: 298769 - RNA, 18 nt, Human herpesvirus 2
cgccuccccgcuggagcc

SEQ ID NO: 298770 - RNA, 22 nt, Human herpesvirus 2
cgccuucccugugauccgcacg

SEQ ID NO: 298771 - RNA, 14 nt, Human herpesvirus 2
cgcgaacacaagcu

SEQ ID NO: 298772 - RNA, 15 nt, Human herpesvirus 2
cgcgagggcccggcg

SEQ ID NO: 298773 - RNA, 17 nt, Human herpesvirus 2
cgcgcgcgugugugaga

SEQ ID NO: 298774 - RNA, 14 nt, Human herpesvirus 2
cgcggcccccgugg

SEQ ID NO: 298775 - RNA, 19 nt, Human herpesvirus 2
cgcggcgccaacgcgggcg

SEQ ID NO: 298776 - RNA, 22 nt, Human herpesvirus 2
cgcggcguuggcgcgcuugcac

SEQ ID NO: 298777 - RNA, 23 nt, Human herpesvirus 2
cgcgggcucguguuccggccgug

SEQ ID NO: 298778 - RNA, 14 nt, Human herpesvirus 2
cgcgucacaccaga

SEQ ID NO: 298779 - RNA, 15 nt, Human herpesvirus 2
cgcuaucacauacgc

SEQ ID NO: 298780 - RNA, 16 nt, Human herpesvirus 2
cgcuaucacauacgca

SEQ ID NO: 298781 - RNA, 15 nt, Human herpesvirus 2
cgcucggcaugcgcg

SEQ ID NO: 298782 - RNA, 17 nt, Human herpesvirus 2
cgcugcggggaccagcc

SEQ ID NO: 298783 - RNA, 15 nt, Human herpesvirus 2
cgcuggcgggagcca

SEQ ID NO: 298784 - RNA, 21 nt, Human herpesvirus 2
cggacccagucgcccauacaa

SEQ ID NO: 298785 - RNA, 12 nt, Human herpesvirus 2
cggaccuccggg

SEQ ID NO: 298786 - RNA, 15 nt, Human herpesvirus 2
cggacguccagucaa

SEQ ID NO: 298787 - RNA, 19 nt, Human herpesvirus 2
cggagagagggggggaaag

SEQ ID NO: 298788 - RNA, 21 nt, Human herpesvirus 2
cggaggaacugggguacugca

SEQ ID NO: 298789 - RNA, 14 nt, Human herpesvirus 2
cggaggcgugguga

SEQ ID NO: 298790 - RNA, 17 nt, Human herpesvirus 2
cggcaugcagcccagag

SEQ ID NO: 298791 - RNA, 15 nt, Human herpesvirus 2
cuuagauugacucag

SEQ ID NO: 298792 - RNA, 12 nt, Human herpesvirus 2
cuuauuauuaac

SEQ ID NO: 298793 - RNA, 18 nt, Human herpesvirus 2
cuucauggggugggaugu

SEQ ID NO: 298794 - RNA, 14 nt, Human herpesvirus 2
cuucccccgcccac

SEQ ID NO: 298795 - RNA, 19 nt, Human herpesvirus 2
cuucggcggggcaccggca

SEQ ID NO: 298796 - RNA, 15 nt, Human herpesvirus 2
cuuggggaaaucuau

SEQ ID NO: 298797 - RNA, 15 nt, Human herpesvirus 2
cuugggggggcgucc

SEQ ID NO: 298798 - RNA, 12 nt, Human herpesvirus 2
cuuuccacaccc

SEQ ID NO: 298799 - RNA, 22 nt, Human herpesvirus 2
cuuuccuccccucgccuguugu

SEQ ID NO: 298800 - RNA, 22 nt, Human herpesvirus 2
cuuugggccguggguacggaca

SEQ ID NO: 298801 - RNA, 23 nt, Human herpesvirus 2
gaaaaaaggaggguauuggccaa

SEQ ID NO: 298802 - RNA, 19 nt, Human herpesvirus 2
gaaaaggaccaaaagggaa

SEQ ID NO: 298803 - RNA, 21 nt, Human herpesvirus 2
gaaacgcguccaaccgauaaa

SEQ ID NO: 298804 - RNA, 17 nt, Human herpesvirus 2
gaaacggcaagaaagac

SEQ ID NO: 298805 - RNA, 17 nt, Human herpesvirus 2
gaaaucuauugaacucu

SEQ ID NO: 298806 - RNA, 17 nt, Human herpesvirus 2
gaaaucuauugaccucu

SEQ ID NO: 298807 - RNA, 18 nt, Human herpesvirus 2
gaaaucuauugaccucuc

SEQ ID NO: 298808 - RNA, 16 nt, Human herpesvirus 2
gaacaaaaacaaaaac

SEQ ID NO: 298809 - RNA, 19 nt, Human herpesvirus 2
gaacaaaaacaaaaaccuu

SEQ ID NO: 298810 - RNA, 23 nt, Human herpesvirus 2
gaacaauaaaccugugacgucaa

SEQ ID NO: 298811 - RNA, 19 nt, Human herpesvirus 2
gaacacaagcucgccguga

SEQ ID NO: 298812 - RNA, 19 nt, Human herpesvirus 2
gaacacaggcgcuucaucg

SEQ ID NO: 298813 - RNA, 16 nt, Human herpesvirus 2
gaacgccucaccgcgc

SEQ ID NO: 298814 - RNA, 16 nt, Human herpesvirus 2
gaacugggguacugca

SEQ ID NO: 298815 - RNA, 19 nt, Human herpesvirus 2
gaacuggguuacugcacuu

SEQ ID NO: 298816 - RNA, 22 nt, Human herpesvirus 2
gaagacgacccccgugucgcuc

SEQ ID NO: 298817 - RNA, 14 nt, Human herpesvirus 2
gaagacgcacgugc

SEQ ID NO: 298818 - RNA, 13 nt, Human herpesvirus 2
gaagaggcggacc

SEQ ID NO: 298819 - RNA, 17 nt, Human herpesvirus 2
gaagaggcggacccagu

SEQ ID NO: 298820 - RNA, 22 nt, Human herpesvirus 2
gaagcccgaacggaaggccucc

SEQ ID NO: 298821 - RNA, 21 nt, Human herpesvirus 2
gaaggaacgcccgaaaccaga

SEQ ID NO: 298822 - RNA, 16 nt, Human herpesvirus 2
gaaggcggacccagac

SEQ ID NO: 298823 - RNA, 14 nt, Human herpesvirus 2
gaauuccagcagcu

SEQ ID NO: 298824 - RNA, 13 nt, Human herpesvirus 2
gacacacuuuguu

SEQ ID NO: 298825 - RNA, 21 nt, Human herpesvirus 2
gacaccagcagcuugcggggc

SEQ ID NO: 298826 - RNA, 15 nt, Human herpesvirus 2
gacaccgauguucaa

SEQ ID NO: 298827 - RNA, 18 nt, Human herpesvirus 2
gacaccgauguucaaaaa

SEQ ID NO: 298828 - RNA, 20 nt, Human herpesvirus 2
gacagagucuuuuaaaagac

SEQ ID NO: 298829 - RNA, 12 nt, Human herpesvirus 2
gacagccccggg

SEQ ID NO: 298830 - RNA, 21 nt, Human herpesvirus 2
gacagguggggaacguuccau

SEQ ID NO: 298831 - RNA, 16 nt, Human herpesvirus 2
gaccaccccaaaaacc

SEQ ID NO: 298832 - RNA, 15 nt, Human herpesvirus 2
gaccagcguccugcg

SEQ ID NO: 298833 - RNA, 22 nt, Human herpesvirus 2
gaccaugaaagaaaugggguua

SEQ ID NO: 298834 - RNA, 16 nt, Human herpesvirus 2
gaccaugauccggcgg

SEQ ID NO: 298835 - RNA, 16 nt, Human herpesvirus 2
gacccgagcuccgggg

SEQ ID NO: 298836 - RNA, 14 nt, Human herpesvirus 2
gacccgccucgggc

SEQ ID NO: 298837 - RNA, 15 nt, Human herpesvirus 2
gacccguacuacccu

SEQ ID NO: 298838 - RNA, 22 nt, Human herpesvirus 2
gaccgcagucuggucgaggugg

SEQ ID NO: 298839 - RNA, 21 nt, Human herpesvirus 2
gaccgccccccccggcggggc

SEQ ID NO: 298840 - RNA, 15 nt, Human herpesvirus 2
gaccugcagccggcg

SEQ ID NO: 298841 - RNA, 15 nt, Human herpesvirus 2
gacgacggccgccca

SEQ ID NO: 298842 - RNA, 14 nt, Human herpesvirus 2
gacgcccggcccau

SEQ ID NO: 298843 - RNA, 23 nt, Human herpesvirus 2
gacgcccggcccauaaacaggcc

SEQ ID NO: 298844 - RNA, 18 nt, Human herpesvirus 2
gacgcgaugggggguccg

SEQ ID NO: 298845 - RNA, 17 nt, Human herpesvirus 2
gacgcggcacagguggu

SEQ ID NO: 298846 - RNA, 16 nt, Human herpesvirus 2
gacgcggcgauggccg

SEQ ID NO: 298847 - RNA, 12 nt, Human herpesvirus 2
gacggccgcgga

SEQ ID NO: 298848 - RNA, 17 nt, Human herpesvirus 2
gacggcggggccccggg

SEQ ID NO: 298849 - RNA, 23 nt, Human herpesvirus 2
gacgggugggccuagccgugggc

SEQ ID NO: 298850 - RNA, 12 nt, Human herpesvirus 2
gacguccagggg

SEQ ID NO: 298851 - RNA, 14 nt, Human herpesvirus 2
gacucaagacgugc

SEQ ID NO: 298852 - RNA, 20 nt, Human herpesvirus 2
gacucaagacgugcgcguga

SEQ ID NO: 298853 - RNA, 23 nt, Human herpesvirus 2
gacucacucguggaugccggggc

SEQ ID NO: 298854 - RNA, 21 nt, Human herpesvirus 2
gacuccaggagcuucaucacc

SEQ ID NO: 298855 - RNA, 20 nt, Human herpesvirus 2
gacuuccgugccccuggacu

SEQ ID NO: 298856 - RNA, 20 nt, Human herpesvirus 2
gagaaaaggaccaaaaggga

SEQ ID NO: 298857 - RNA, 20 nt, Human herpesvirus 2
gagaaacaaaagaaacggca

SEQ ID NO: 298858 - RNA, 17 nt, Human herpesvirus 2
gagaaccaaccaaaaca

SEQ ID NO: 298859 - RNA, 17 nt, Human herpesvirus 2
gagaaggaggggggccu

SEQ ID NO: 298860 - RNA, 22 nt, Human herpesvirus 2
gagaccuuuccuuaaaaggcac

SEQ ID NO: 298861 - RNA, 17 nt, Human herpesvirus 2
gagaggcccgccgcgca

SEQ ID NO: 298862 - RNA, 20 nt, Human herpesvirus 2
gagaucuuccuguaccugac

SEQ ID NO: 298863 - RNA, 19 nt, Human herpesvirus 2
gagaugucaguccucgggg

SEQ ID NO: 298864 - RNA, 16 nt, Human herpesvirus 2
gagaugugccuuccag

SEQ ID NO: 298865 - RNA, 21 nt, Human herpesvirus 2
gagcacaaacgugcucugcca

SEQ ID NO: 298866 - RNA, 20 nt, Human herpesvirus 2
gagcgccgucgggccccggg

SEQ ID NO: 298867 - RNA, 17 nt, Human herpesvirus 2
gagcucccugcggcugg

SEQ ID NO: 298868 - RNA, 13 nt, Human herpesvirus 2
gaggaaaugcaga

SEQ ID NO: 298869 - RNA, 21 nt, Human herpesvirus 2
gaggccucauccggcccgcca

SEQ ID NO: 298870 - RNA, 22 nt, Human herpesvirus 2
gaggccucauccggcccgccaa

SEQ ID NO: 298871 - RNA, 22 nt, Human herpesvirus 2
gaggggagcugggcuuguguau

SEQ ID NO: 298872 - RNA, 15 nt, Human herpesvirus 2
gaggggggugcugug

SEQ ID NO: 298873 - RNA, 19 nt, Human herpesvirus 2
gagguggcggaggggauca

SEQ ID NO: 298874 - RNA, 18 nt, Human herpesvirus 2
gagucgauugcggggacc

SEQ ID NO: 298875 - RNA, 22 nt, Human herpesvirus 2
gagucgggccccuacucgccau

SEQ ID NO: 298876 - RNA, 17 nt, Human herpesvirus 2
gaguucaauagauuucc

SEQ ID NO: 298877 - RNA, 21 nt, Human herpesvirus 2
gaguucaauagauuucccaaa

SEQ ID NO: 298878 - RNA, 18 nt, Human herpesvirus 2
gauagagggaacaaagaa

SEQ ID NO: 298879 - RNA, 18 nt, Human herpesvirus 2
gaucagcaaccaggcgcu

SEQ ID NO: 298880 - RNA, 15 nt, Human herpesvirus 2
gaucccgggcccuug

SEQ ID NO: 298881 - RNA, 17 nt, Human herpesvirus 2
gaucgcagcguccggcu

SEQ ID NO: 298882 - RNA, 17 nt, Human herpesvirus 2
gaugagccgguagugca

SEQ ID NO: 298883 - RNA, 18 nt, Human herpesvirus 2
gauggcccccacacgcga

SEQ ID NO: 298884 - RNA, 12 nt, Human herpesvirus 2
gauggugguggg

SEQ ID NO: 298885 - RNA, 15 nt, Human herpesvirus 2
gauuaacaacaccaa

SEQ ID NO: 298886 - RNA, 19 nt, Human herpesvirus 2
gauucauggacauguuaca

SEQ ID NO: 298887 - RNA, 12 nt, Human herpesvirus 2
gauugacucagc

SEQ ID NO: 298888 - RNA, 19 nt, Human herpesvirus 2
gcaaaugggauucauggac

SEQ ID NO: 298889 - RNA, 21 nt, Human herpesvirus 2
gcaacaacggcgggccccgug

SEQ ID NO: 298890 - RNA, 13 nt, Human herpesvirus 2
gcacccccgccua

SEQ ID NO: 298891 - RNA, 15 nt, Human herpesvirus 2
gcacgggcccggggc

SEQ ID NO: 298892 - RNA, 14 nt, Human herpesvirus 2
gcagagagauuucc

SEQ ID NO: 298893 - RNA, 21 nt, Human herpesvirus 2
gcaggaucucgcgcaggugau

SEQ ID NO: 298894 - RNA, 20 nt, Human herpesvirus 2
gcaguaacccaguuccucag

SEQ ID NO: 298895 - RNA, 11 nt, Human herpesvirus 2
gcagugcagua

SEQ ID NO: 298896 - RNA, 13 nt, Human herpesvirus 2
gcauccacaagcu

SEQ ID NO: 298897 - RNA, 22 nt, Human herpesvirus 2
gcaugggccgccagcagucggu

SEQ ID NO: 298898 - RNA, 17 nt, Human herpesvirus 2
gcaugggcgacaggcuu

SEQ ID NO: 298899 - RNA, 23 nt, Human herpesvirus 2
gcaugguaauuagcaacuuuuaa

SEQ ID NO: 298900 - RNA, 14 nt, Human herpesvirus 2
gcauuuguuuuucu

SEQ ID NO: 298901 - RNA, 15 nt, Human herpesvirus 2
gccaacgacuuccuc

SEQ ID NO: 298902 - RNA, 19 nt, Human herpesvirus 2
gccaccaauacaccagagc

SEQ ID NO: 298903 - RNA, 13 nt, Human herpesvirus 2
gccaccgcgccca

SEQ ID NO: 298904 - RNA, 16 nt, Human herpesvirus 2
gccacgucgggguccc

SEQ ID NO: 298905 - RNA, 14 nt, Human herpesvirus 2
ggacagccccgggg

SEQ ID NO: 298906 - RNA, 16 nt, Human herpesvirus 2
ggaccccgaccccgag

SEQ ID NO: 298907 - RNA, 23 nt, Human herpesvirus 2
ggacccgcggaggaaacgcaaaa

SEQ ID NO: 298908 - RNA, 17 nt, Human herpesvirus 2
ggacgacgaccaugggc

SEQ ID NO: 298909 - RNA, 18 nt, Human herpesvirus 2
ggacggacacggccccga

SEQ ID NO: 298910 - RNA, 18 nt, Human herpesvirus 2
ggaggaaacgcgcgcccc

SEQ ID NO: 298911 - RNA, 14 nt, Human herpesvirus 2
ggaggaaaugcaga

SEQ ID NO: 298912 - RNA, 16 nt, Human herpesvirus 2
ggaggaaggaacgaca

SEQ ID NO: 298913 - RNA, 23 nt, Human herpesvirus 2
ggaggcccucugggacacccaga

SEQ ID NO: 298914 - RNA, 21 nt, Human herpesvirus 2
ggaggcguggugauacaacac

SEQ ID NO: 298915 - RNA, 18 nt, Human herpesvirus 2
ggaggggggcagugcagu

SEQ ID NO: 298916 - RNA, 13 nt, Human herpesvirus 2
ggagucgccgccc

SEQ ID NO: 298917 - RNA, 18 nt, Human herpesvirus 2
ggaugcgggcgggaugau

SEQ ID NO: 298918 - RNA, 14 nt, Human herpesvirus 2
ggaugggggggaag

SEQ ID NO: 298919 - RNA, 18 nt, Human herpesvirus 2
ggaugugucgcggggaca

SEQ ID NO: 298920 - RNA, 14 nt, Human herpesvirus 2
ggauguuuuugcac

SEQ ID NO: 298921 - RNA, 17 nt, Human herpesvirus 2
ggcaacccccgggcguc

SEQ ID NO: 298922 - RNA, 12 nt, Human herpesvirus 2
ggcaagugcagu

SEQ ID NO: 298923 - RNA, 13 nt, Human herpesvirus 2
ggcaagugcagua

SEQ ID NO: 298924 - RNA, 21 nt, Human herpesvirus 2
ggcaccacguguccccaggga

SEQ ID NO: 298925 - RNA, 17 nt, Human herpesvirus 2
ggcauuaaccaaccaac

SEQ ID NO: 298926 - RNA, 22 nt, Human herpesvirus 2
ggccaauucuucccggagcgcc

SEQ ID NO: 298927 - RNA, 16 nt, Human herpesvirus 2
ggccagcgggggcccg

SEQ ID NO: 298928 - RNA, 22 nt, Human herpesvirus 2
ggccaggggggcaggcgggccc

SEQ ID NO: 298929 - RNA, 13 nt, Human herpesvirus 2
ggcccacuuuccc

SEQ ID NO: 298930 - RNA, 17 nt, Human herpesvirus 2
ggccccgccccgcccca

SEQ ID NO: 298931 - RNA, 21 nt, Human herpesvirus 2
ggccccuacucgccauccaac

SEQ ID NO: 298932 - RNA, 14 nt, Human herpesvirus 2
ggcccgaggcgacc

SEQ ID NO: 298933 - RNA, 21 nt, Human herpesvirus 2
ggcccgcuucauagcgcgucc

SEQ ID NO: 298934 - RNA, 16 nt, Human herpesvirus 2
ggcccggacuccgccc

SEQ ID NO: 298935 - RNA, 22 nt, Human herpesvirus 2
ggccgaacgccucaccgcgccc

SEQ ID NO: 298936 - RNA, 18 nt, Human herpesvirus 2
ggccgaaugacacaaaaa

SEQ ID NO: 298937 - RNA, 18 nt, Human herpesvirus 2
ggccgagcguaucggcca

SEQ ID NO: 298938 - RNA, 16 nt, Human herpesvirus 2
ggccgcacccacgaca

SEQ ID NO: 298939 - RNA, 21 nt, Human herpesvirus 2
ggccgcccaacccgagcgacc

SEQ ID NO: 298940 - RNA, 20 nt, Human herpesvirus 2
ggccgccgcaacacccggcg

SEQ ID NO: 298941 - RNA, 23 nt, Human herpesvirus 2
ggccgccgcaacacccggcgcca

SEQ ID NO: 298942 - RNA, 21 nt, Human herpesvirus 2
ggccgcgacaagacccggcgg

SEQ ID NO: 298943 - RNA, 19 nt, Human herpesvirus 2
ggccggcggucgcauuuuu

SEQ ID NO: 298944 - RNA, 24 nt, Human herpesvirus 2
ggccgggagcguggggcgcgcacc

SEQ ID NO: 298945 - RNA, 17 nt, Human herpesvirus 2
ggccgggugacauucac

SEQ ID NO: 298946 - RNA, 16 nt, Human herpesvirus 2
ggccucauccggcccg

SEQ ID NO: 298947 - RNA, 14 nt, Human herpesvirus 2
ggcgaccccgcccc

SEQ ID NO: 298948 - RNA, 16 nt, Human herpesvirus 2
ggcgacgggcggcugg

SEQ ID NO: 298949 - RNA, 14 nt, Human herpesvirus 2
ggcgaggggcggga

SEQ ID NO: 298950 - RNA, 23 nt, Human herpesvirus 2
ggcgcggugccugacgccggcca

SEQ ID NO: 298951 - RNA, 12 nt, Human herpesvirus 2
ggcggcggcguc

SEQ ID NO: 298952 - RNA, 19 nt, Human herpesvirus 2
ggcguggagcgccgggccu

SEQ ID NO: 298953 - RNA, 15 nt, Human herpesvirus 2
ggcgugugucucuga

SEQ ID NO: 298954 - RNA, 13 nt, Human herpesvirus 2
ggcuccuccgugu

SEQ ID NO: 298955 - RNA, 14 nt, Human herpesvirus 2
ggcugcuggugauu

SEQ ID NO: 298956 - RNA, 12 nt, Human herpesvirus 2
ggcuggcggcgc

SEQ ID NO: 298957 - RNA, 12 nt, Human herpesvirus 2
gggaaaaccaac

SEQ ID NO: 298958 - RNA, 21 nt, Human herpesvirus 2
gggaaagaaagagaaacaaaa

SEQ ID NO: 298959 - RNA, 21 nt, Human herpesvirus 2
gggagaguucaauagauuucc

SEQ ID NO: 298960 - RNA, 13 nt, Human herpesvirus 2
gggaggcgguggu

SEQ ID NO: 298961 - RNA, 23 nt, Human herpesvirus 2
gggagucgggccccuacucgcca

SEQ ID NO: 298962 - RNA, 13 nt, Human herpesvirus 2
gggcaagugcagu

SEQ ID NO: 298963 - RNA, 14 nt, Human herpesvirus 2
gggcaagugcagua

SEQ ID NO: 298964 - RNA, 12 nt, Human herpesvirus 2
gggcagugcagu

SEQ ID NO: 298965 - RNA, 13 nt, Human herpesvirus 2
gggcagugcagua

SEQ ID NO: 298966 - RNA, 23 nt, Human herpesvirus 2
gggccaaauugcgagugugguga

SEQ ID NO: 298967 - RNA, 12 nt, Human herpesvirus 2
gggcccaggucc

SEQ ID NO: 298968 - RNA, 13 nt, Human herpesvirus 2
gggccccagggcu

SEQ ID NO: 298969 - RNA, 22 nt, Human herpesvirus 2
gggccccggguucccauuggcc

SEQ ID NO: 298970 - RNA, 21 nt, Human herpesvirus 2
gggccccuacucgccauccaa

SEQ ID NO: 298971 - RNA, 17 nt, Human herpesvirus 2
gggccguucggcaggcc

SEQ ID NO: 298972 - RNA, 21 nt, Human herpesvirus 2
gggccuguucggggcgugucu

SEQ ID NO: 298973 - RNA, 17 nt, Human herpesvirus 2
gggcgcgcggcgcgagc

SEQ ID NO: 298974 - RNA, 17 nt, Human herpesvirus 2
gggcguccccggugucu

SEQ ID NO: 298975 - RNA, 14 nt, Human herpesvirus 2
gggcguccugcggc

SEQ ID NO: 298976 - RNA, 22 nt, Human herpesvirus 2
gggcguccugcggcagcgcgcc

SEQ ID NO: 298977 - RNA, 15 nt, Human herpesvirus 2
gggcguugccggggg

SEQ ID NO: 298978 - RNA, 20 nt, Human herpesvirus 2
gggcguugccgggggccaug

SEQ ID NO: 298979 - RNA, 13 nt, Human herpesvirus 2
ggggaaagaaaga

SEQ ID NO: 298980 - RNA, 20 nt, Human herpesvirus 2
ggggaagcccuacggcggcc

SEQ ID NO: 298981 - RNA, 12 nt, Human herpesvirus 2
ggggacuccccu

SEQ ID NO: 298982 - RNA, 15 nt, Human herpesvirus 2
ggggauaaaagccaa

SEQ ID NO: 298983 - RNA, 21 nt, Human herpesvirus 2
ggggcaacgagagacggccgc

SEQ ID NO: 298984 - RNA, 22 nt, Human herpesvirus 2
ggggcaccggcaccgggaccga

SEQ ID NO: 298985 - RNA, 13 nt, Human herpesvirus 2
ggggcagugcagu

SEQ ID NO: 298986 - RNA, 14 nt, Human herpesvirus 2
ggggcagugcagua

SEQ ID NO: 298987 - RNA, 14 nt, Human herpesvirus 2
ggggccugcugugg

SEQ ID NO: 298988 - RNA, 14 nt, Human herpesvirus 2
ggggcgggguuugu

SEQ ID NO: 298989 - RNA, 18 nt, Human herpesvirus 2
gggggcccgggguucugg

SEQ ID NO: 298990 - RNA, 11 nt, Human herpesvirus 2
gggggggcaag

SEQ ID NO: 298991 - RNA, 12 nt, Human herpesvirus 2
gggguacugcac

SEQ ID NO: 298992 - RNA, 21 nt, Human herpesvirus 2
ggguaauggaugggcggggcc

SEQ ID NO: 298993 - RNA, 22 nt, Human herpesvirus 2
ggguaauggaugggcggggccc

SEQ ID NO: 298994 - RNA, 14 nt, Human herpesvirus 2
gggucccuucccaa

SEQ ID NO: 298995 - RNA, 20 nt, Human herpesvirus 2
gggucugcuugccccucccc

SEQ ID NO: 298996 - RNA, 13 nt, Human herpesvirus 2
ggguucggggcca

SEQ ID NO: 298997 - RNA, 19 nt, Human herpesvirus 2
gguaauuagaaacuuuuaa

SEQ ID NO: 298998 - RNA, 16 nt, Human herpesvirus 2
gguaauuagcaacuuu

SEQ ID NO: 298999 - RNA, 16 nt, Human herpesvirus 2
gguaauuagcagcuuu

SEQ ID NO: 299000 - RNA, 11 nt, Human herpesvirus 2
gguacugcacu

SEQ ID NO: 299001 - RNA, 21 nt, Human herpesvirus 2
ggucacaaaaggcacggcgcc

SEQ ID NO: 299002 - RNA, 15 nt, Human herpesvirus 2
ggucaccggggcgcc

SEQ ID NO: 299003 - RNA, 22 nt, Human herpesvirus 2
ggucuccgccaugcaacgccgg

SEQ ID NO: 299004 - RNA, 15 nt, Human herpesvirus 2
ggugaggaagaaaga

SEQ ID NO: 299005 - RNA, 18 nt, Human herpesvirus 2
ggugcuguuucagggguu

SEQ ID NO: 299006 - RNA, 18 nt, Human herpesvirus 2
gguuauauccacuuccua

SEQ ID NO: 299007 - RNA, 19 nt, Human herpesvirus 2
gguuccccgagagcccagg

SEQ ID NO: 299008 - RNA, 16 nt, Human herpesvirus 2
guaauuagaaacuuuu

SEQ ID NO: 299009 - RNA, 22 nt, Human herpesvirus 2
guaauuagcaacuuuuaauggg

SEQ ID NO: 299010 - RNA, 17 nt, Human herpesvirus 2
guacaacacaucaguaa

SEQ ID NO: 299011 - RNA, 11 nt, Human herpesvirus 2
guagucuuccg

SEQ ID NO: 299012 - RNA, 14 nt, Human herpesvirus 2
guaucuggucuguc

SEQ ID NO: 299013 - RNA, 18 nt, Human herpesvirus 2
guaugcuaauuaaauaca

SEQ ID NO: 299014 - RNA, 15 nt, Human herpesvirus 2
gucaauagauuuccc

SEQ ID NO: 299015 - RNA, 16 nt, Human herpesvirus 2
gucaauagauuucccc

SEQ ID NO: 299016 - RNA, 19 nt, Human herpesvirus 2
gucacgcaggccgccccca

SEQ ID NO: 299017 - RNA, 18 nt, Human herpesvirus 2
gucagcucaucgcacggc

SEQ ID NO: 299018 - RNA, 20 nt, Human herpesvirus 2
gucaggaccagggacgucac

SEQ ID NO: 299019 - RNA, 20 nt, Human herpesvirus 2
gucccagaauuuagccagga

SEQ ID NO: 299020 - RNA, 16 nt, Human herpesvirus 2
uccccaccugucgugu

SEQ ID NO: 299021 - RNA, 19 nt, Human herpesvirus 2
ucccccccuacaacagugu

SEQ ID NO: 299022 - RNA, 13 nt, Human herpesvirus 2
ucccccgcggacc

SEQ ID NO: 299023 - RNA, 14 nt, Human herpesvirus 2
uccccgaaagccac

SEQ ID NO: 299024 - RNA, 14 nt, Human herpesvirus 2
uccccucgccuguu

SEQ ID NO: 299025 - RNA, 20 nt, Human herpesvirus 2
ucccgauggccgccccgcag

SEQ ID NO: 299026 - RNA, 19 nt, Human herpesvirus 2
ucccgcaagagccugccgu

SEQ ID NO: 299027 - RNA, 17 nt, Human herpesvirus 2
ucccgcccgccagugca

SEQ ID NO: 299028 - RNA, 20 nt, Human herpesvirus 2
ucccggccgccauccccgcg

SEQ ID NO: 299029 - RNA, 19 nt, Human herpesvirus 2
ucccugcggcuggcgcggu

SEQ ID NO: 299030 - RNA, 14 nt, Human herpesvirus 2
uccgcccuccgcca

SEQ ID NO: 299031 - RNA, 17 nt, Human herpesvirus 2
uccgcccuccgccagcg

SEQ ID NO: 299032 - RNA, 19 nt, Human herpesvirus 2
uccgcgccuccugcucgac

SEQ ID NO: 299033 - RNA, 22 nt, Human herpesvirus 2
uccgcgggaggcggugguuucc

SEQ ID NO: 299034 - RNA, 17 nt, Human herpesvirus 2
uccggaguuagcaaaac

SEQ ID NO: 299035 - RNA, 22 nt, Human herpesvirus 2
uccggcggccaccccgccgcag

SEQ ID NO: 299036 - RNA, 12 nt, Human herpesvirus 2
uccgggggacug

SEQ ID NO: 299037 - RNA, 15 nt, Human herpesvirus 2
uccggguaaaaaaga

SEQ ID NO: 299038 - RNA, 17 nt, Human herpesvirus 2
uccguuggggaacaaca

SEQ ID NO: 299039 - RNA, 14 nt, Human herpesvirus 2
uccucaguguuugg

SEQ ID NO: 299040 - RNA, 22 nt, Human herpesvirus 2
uccuccguguuagggaagucuc

SEQ ID NO: 299041 - RNA, 17 nt, Human herpesvirus 2
uccuuagauugacucag

SEQ ID NO: 299042 - RNA, 19 nt, Human herpesvirus 2
ucgaaaggguacacaaagc

SEQ ID NO: 299043 - RNA, 13 nt, Human herpesvirus 2
ucgagaugugccu

SEQ ID NO: 299044 - RNA, 11 nt, Human herpesvirus 2
ucgcauuugcc

SEQ ID NO: 299045 - RNA, 16 nt, Human herpesvirus 2
ucgccgacgccuuccc

SEQ ID NO: 299046 - RNA, 13 nt, Human herpesvirus 2
ucgccgccuuccg

SEQ ID NO: 299047 - RNA, 19 nt, Human herpesvirus 2
ucgcgaacgacaaaggggg

SEQ ID NO: 299048 - RNA, 12 nt, Human herpesvirus 2
ucgcuccccgcg

SEQ ID NO: 299049 - RNA, 21 nt, Human herpesvirus 2
ucggccucguggucgggggcc

SEQ ID NO: 299050 - RNA, 16 nt, Human herpesvirus 2
ucggcgauuaacaaca

SEQ ID NO: 299051 - RNA, 14 nt, Human herpesvirus 2
ucgggcggacgucc

SEQ ID NO: 299052 - RNA, 18 nt, Human herpesvirus 2
ucgggcggacguccaggg

SEQ ID NO: 299053 - RNA, 22 nt, Human herpesvirus 2
ucgggggguggcggucgcgucc

SEQ ID NO: 299054 - RNA, 20 nt, Human herpesvirus 2
ucggugccucacgguccuca

SEQ ID NO: 299055 - RNA, 15 nt, Human herpesvirus 2
ucguaucgugccugg

SEQ ID NO: 299056 - RNA, 13 nt, Human herpesvirus 2
ucgugugcacgaa

SEQ ID NO: 299057 - RNA, 15 nt, Human herpesvirus 2
ucuaacccaguaaca

SEQ ID NO: 299058 - RNA, 23 nt, Human herpesvirus 2
ucugcauuuguuuuucuagucac

SEQ ID NO: 299059 - RNA, 16 nt, Human herpesvirus 2
ucugcgucguccaggg

SEQ ID NO: 299060 - RNA, 16 nt, Human herpesvirus 2
ucugguuuuucugggg

SEQ ID NO: 299061 - RNA, 15 nt, Human herpesvirus 2
ucuguggguggugau

SEQ ID NO: 299062 - RNA, 17 nt, Human herpesvirus 2
ucuguuucgcauaugcc

SEQ ID NO: 299063 - RNA, 17 nt, Human herpesvirus 2
ucuuacccuuuucugca

SEQ ID NO: 299064 - RNA, 22 nt, Human herpesvirus 2
ucuuacccuuuucugcauuucc

SEQ ID NO: 299065 - RNA, 15 nt, Human herpesvirus 2
ucuuccuguaccuga

SEQ ID NO: 299066 - RNA, 17 nt, Human herpesvirus 2
ucuuggcguuauuucca

SEQ ID NO: 299067 - RNA, 15 nt, Human herpesvirus 2
ucuugugcaccgaag

SEQ ID NO: 299068 - RNA, 13 nt, Human herpesvirus 2
ucuuuccaccacc

SEQ ID NO: 299069 - RNA, 16 nt, Human herpesvirus 2
ugaaacguacaacaca

SEQ ID NO: 299070 - RNA, 14 nt, Human herpesvirus 2
ugagccgcgcggcc

SEQ ID NO: 299071 - RNA, 22 nt, Human herpesvirus 2
ugaggaacuggguuacugcacu

SEQ ID NO: 299072 - RNA, 19 nt, Human herpesvirus 2
ugauagagggaacaaagaa

SEQ ID NO: 299073 - RNA, 22 nt, Human herpesvirus 2
ugauuccggccgcgcuaccuca

SEQ ID NO: 299074 - RNA, 21 nt, Human herpesvirus 2
ugauugauuuuauugaccguu

SEQ ID NO: 299075 - RNA, 15 nt, Human herpesvirus 2
ugcaaccccuaccug

SEQ ID NO: 299076 - RNA, 17 nt, Human herpesvirus 2
ugcacguguuugaguca

SEQ ID NO: 299077 - RNA, 17 nt, Human herpesvirus 2
ugcaguaccccaguucc

SEQ ID NO: 299078 - RNA, 20 nt, Human herpesvirus 2
ugcaguaccccaguuccucc

SEQ ID NO: 299079 - RNA, 14 nt, Human herpesvirus 2
ugcccccaccccau

SEQ ID NO: 299080 - RNA, 15 nt, Human herpesvirus 2
ugcccgaccuguuaa

SEQ ID NO: 299081 - RNA, 20 nt, Human herpesvirus 2
ugcccucguaggcccggggg

SEQ ID NO: 299082 - RNA, 18 nt, Human herpesvirus 2
ugccggggauaaaagcca

SEQ ID NO: 299083 - RNA, 22 nt, Human herpesvirus 2
ugccguaugcuaauuaaauaca

SEQ ID NO: 299084 - RNA, 18 nt, Human herpesvirus 2
ugccguucggaccugggg

SEQ ID NO: 299085 - RNA, 20 nt, Human herpesvirus 2
ugccuccacgcccugcugua

SEQ ID NO: 299086 - RNA, 21 nt, Human herpesvirus 2
ugccuuccaguuccacggcca

SEQ ID NO: 299087 - RNA, 21 nt, Human herpesvirus 2
ugcgaucuccccgcuuacguc

SEQ ID NO: 299088 - RNA, 21 nt, Human herpesvirus 2
ugcgcauggccugcgaggugc

SEQ ID NO: 299089 - RNA, 14 nt, Human herpesvirus 2
ugcgcuuuccggcc

SEQ ID NO: 299090 - RNA, 13 nt, Human herpesvirus 2
ugcggacuggcag

SEQ ID NO: 299091 - RNA, 23 nt, Human herpesvirus 2
ugcggccgacacggucggaauuu

SEQ ID NO: 299092 - RNA, 19 nt, Human herpesvirus 2
ugcggggaccgcaccggac

SEQ ID NO: 299093 - RNA, 14 nt, Human herpesvirus 2
ugcgggugcccaug

SEQ ID NO: 299094 - RNA, 23 nt, Human herpesvirus 2
ugcguccgucucaauaaagccag

SEQ ID NO: 299095 - RNA, 14 nt, Human herpesvirus 2
ugcgucguccaggg

SEQ ID NO: 299096 - RNA, 15 nt, Human herpesvirus 2
ugcgucguccagggu

SEQ ID NO: 299097 - RNA, 15 nt, Human herpesvirus 2
uggaagaggcggacc

SEQ ID NO: 299098 - RNA, 15 nt, Human herpesvirus 2
uggaagcccccggca

SEQ ID NO: 299099 - RNA, 16 nt, Human herpesvirus 2
uggagaagggaaagga

SEQ ID NO: 299100 - RNA, 22 nt, Human herpesvirus 2
uggauagcaaacgugggaugac

SEQ ID NO: 299101 - RNA, 23 nt, Human herpesvirus 2
uggcaccguaucagcaccccacc

SEQ ID NO: 299102 - RNA, 22 nt, Human herpesvirus 2
uggcccccguacgugggguccg

SEQ ID NO: 299103 - RNA, 15 nt, Human herpesvirus 2
uggccgugcgcggcc

SEQ ID NO: 299104 - RNA, 14 nt, Human herpesvirus 2
uggcgaggggcggg

SEQ ID NO: 299105 - RNA, 14 nt, Human herpesvirus 2
uggcgcgcuugcac

SEQ ID NO: 299106 - RNA, 12 nt, Human herpesvirus 2
ugggaaaucuau

SEQ ID NO: 299107 - RNA, 17 nt, Human herpesvirus 2
ugggaugacggaggcca

SEQ ID NO: 299108 - RNA, 16 nt, Human herpesvirus 2
ugggauucauggacau

SEQ ID NO: 299109 - RNA, 21 nt, Human herpesvirus 2
ugggccgaugugcccugcaac

SEQ ID NO: 299110 - RNA, 23 nt, Human herpesvirus 2
ugggccugugggucugcgccacc

SEQ ID NO: 299111 - RNA, 14 nt, Human herpesvirus 2
uggggaaagggaag

SEQ ID NO: 299112 - RNA, 13 nt, Human herpesvirus 2
uggggaaaucuau

SEQ ID NO: 299113 - RNA, 13 nt, Human herpesvirus 2
uggggaaaucucu

SEQ ID NO: 299114 - RNA, 15 nt, Human herpesvirus 2
uggggaaaucucucu

SEQ ID NO: 299115 - RNA, 16 nt, Human herpesvirus 2
uggggagucgggcccc

SEQ ID NO: 299116 - RNA, 15 nt, Human herpesvirus 2
uggggcugaucugaa

SEQ ID NO: 299117 - RNA, 16 nt, Human herpesvirus 2
ugggggaacgcgcacc

SEQ ID NO: 299118 - RNA, 19 nt, Human herpesvirus 2
ugggggauugugggaaucc

SEQ ID NO: 299119 - RNA, 21 nt, Human herpesvirus 2
uggggggaaaauaaacaccac

SEQ ID NO: 299120 - RNA, 13 nt, Human herpesvirus 2
ugggguacugcac

SEQ ID NO: 299121 - RNA, 14 nt, Human herpesvirus 2
uggguuacugcacu

SEQ ID NO: 299122 - RNA, 20 nt, Human herpesvirus 2
ugguaauuagcaacuuuuaa

SEQ ID NO: 299123 - RNA, 14 nt, Human herpesvirus 2
uggucacccgggcg

SEQ ID NO: 299124 - RNA, 16 nt, Human herpesvirus 2
uggucgggggccacuu

SEQ ID NO: 299125 - RNA, 14 nt, Human herpesvirus 2
uggugauuaucgac

SEQ ID NO: 299126 - RNA, 15 nt, Human herpesvirus 2
uggugcugggguccg

SEQ ID NO: 299127 - RNA, 23 nt, Human herpesvirus 2
uggugggcguugccgggggccau

SEQ ID NO: 299128 - RNA, 22 nt, Human herpesvirus 2
ugguucaauaaaaaacaccaac

SEQ ID NO: 299129 - RNA, 16 nt, Human herpesvirus 2
uguacgcguaccccuu

SEQ ID NO: 299130 - RNA, 18 nt, Human herpesvirus 2
ugucgccggcgacaccca

SEQ ID NO: 299131 - RNA, 17 nt, Human herpesvirus 2
ugucgcguuuguuucuu

SEQ ID NO: 299132 - RNA, 13 nt, Human herpesvirus 2
ugucguguggugu

SEQ ID NO: 299133 - RNA, 11 nt, Human herpesvirus 2
ugucuuuccac

SEQ ID NO: 299134 - RNA, 21 nt, Human herpesvirus 2
ugugacgcgaugggggguccg

SEQ ID NO: 299135 - RNA, 21 nt, Human herpesvirus 2
agacauggggaacccccagac

SEQ ID NO: 299136 - RNA, 13 nt, Human herpesvirus 2
agacaugugcuaa

SEQ ID NO: 299137 - RNA, 15 nt, Human herpesvirus 2
agacgaaaacguacc

SEQ ID NO: 299138 - RNA, 14 nt, Human herpesvirus 2
agacguccuugaug

SEQ ID NO: 299139 - RNA, 12 nt, Human herpesvirus 2
agagagauuucc

SEQ ID NO: 299140 - RNA, 18 nt, Human herpesvirus 2
agagcucgggcuggccga

SEQ ID NO: 299141 - RNA, 13 nt, Human herpesvirus 2
agagggaacaaag

SEQ ID NO: 299142 - RNA, 18 nt, Human herpesvirus 2
agaggguucgcaaccaca

SEQ ID NO: 299143 - RNA, 14 nt, Human herpesvirus 2
agaggucaauagau

SEQ ID NO: 299144 - RNA, 21 nt, Human herpesvirus 2
agaggucaauagauuucccca

SEQ ID NO: 299145 - RNA, 22 nt, Human herpesvirus 2
agaggucaauagauuuccccaa

SEQ ID NO: 299146 - RNA, 14 nt, Human herpesvirus 2
agaguucaauagau

SEQ ID NO: 299147 - RNA, 18 nt, Human herpesvirus 2
agaugccaguggagccaa

SEQ ID NO: 299148 - RNA, 13 nt, Human herpesvirus 2
agauugacucagc

SEQ ID NO: 299149 - RNA, 20 nt, Human herpesvirus 2
agauugacucagcacacgau

SEQ ID NO: 299150 - RNA, 18 nt, Human herpesvirus 2
agauuuccccagcacgga

SEQ ID NO: 299151 - RNA, 19 nt, Human herpesvirus 2
ugcccccccucguucugcu

SEQ ID NO: 299152 - RNA, 23 nt, Human herpesvirus 2
ugcccgaccgggcggugcccauc

SEQ ID NO: 299153 - RNA, 19 nt, Human herpesvirus 2
ugccggggauaaaagccaa

SEQ ID NO: 299154 - RNA, 15 nt, Human herpesvirus 2
ugccguggacgggua

SEQ ID NO: 299155 - RNA, 23 nt, Human herpesvirus 2
ugcgcuuuccggcccucccgcac

SEQ ID NO: 299156 - RNA, 12 nt, Human herpesvirus 2
ugcgggguggug

SEQ ID NO: 299157 - RNA, 14 nt, Human herpesvirus 2
ugcguaugugauag

SEQ ID NO: 299158 - RNA, 13 nt, Human herpesvirus 2
ugcgucguccagg

SEQ ID NO: 299159 - RNA, 11 nt, Human herpesvirus 2
ugcucugccac

SEQ ID NO: 299160 - RNA, 11 nt, Human herpesvirus 2
ugcuggugauu

SEQ ID NO: 299161 - RNA, 13 nt, Human herpesvirus 2
uggacugggccgc

SEQ ID NO: 299162 - RNA, 19 nt, Human herpesvirus 2
uggagaagggaaaggaaca

SEQ ID NO: 299163 - RNA, 21 nt, Human herpesvirus 2
uggaggcgccucugcccgacc

SEQ ID NO: 299164 - RNA, 19 nt, Human herpesvirus 2
uggauaacagcuacccgca

SEQ ID NO: 299165 - RNA, 16 nt, Human herpesvirus 2
uggccgacaacugccu

SEQ ID NO: 299166 - RNA, 17 nt, Human herpesvirus 2
uggcgccuucuucgccc

SEQ ID NO: 299167 - RNA, 22 nt, Human herpesvirus 2
uggcggaaaccgacaugcaaau

SEQ ID NO: 299168 - RNA, 20 nt, Human herpesvirus 2
uggcggcagcacccagaacg

SEQ ID NO: 299169 - RNA, 22 nt, Human herpesvirus 2
uggcggccgccgcaacacccgg

SEQ ID NO: 299170 - RNA, 20 nt, Human herpesvirus 2
uggcggcuggggaaagggaa

SEQ ID NO: 299171 - RNA, 16 nt, Human herpesvirus 2
uggcgucggcggcccc

SEQ ID NO: 299172 - RNA, 23 nt, Human herpesvirus 2
ugggaaggggugggcgugucguu

SEQ ID NO: 299173 - RNA, 14 nt, Human herpesvirus 2
ugggauucauggac

SEQ ID NO: 299174 - RNA, 22 nt, Human herpesvirus 2
ugggccugugggucugcgccac

SEQ ID NO: 299175 - RNA, 16 nt, Human herpesvirus 2
ugggcggcccccggcc

SEQ ID NO: 299176 - RNA, 13 nt, Human herpesvirus 2
ugggcguccugcg

SEQ ID NO: 299177 - RNA, 22 nt, Human herpesvirus 2
ugggcgugucguugggcggccc

SEQ ID NO: 299178 - RNA, 14 nt, Human herpesvirus 2
ugggcucggcgucg

SEQ ID NO: 299179 - RNA, 12 nt, Human herpesvirus 2
uggggaaaggga

SEQ ID NO: 299180 - RNA, 13 nt, Human herpesvirus 2
uggggaaagggaa

SEQ ID NO: 299181 - RNA, 19 nt, Human herpesvirus 2
uggggacgacgggcgcccc

SEQ ID NO: 299182 - RNA, 14 nt, Human herpesvirus 2
ugggguacugcacu

SEQ ID NO: 299183 - RNA, 19 nt, Human herpesvirus 2
ugggguguuuuucuguugu

SEQ ID NO: 299184 - RNA, 15 nt, Human herpesvirus 2
uggguuaccacaaca

SEQ ID NO: 299185 - RNA, 13 nt, Human herpesvirus 2
uggguuacugcac

SEQ ID NO: 299186 - RNA, 19 nt, Human herpesvirus 2
uggguuacugcacuugccc

SEQ ID NO: 299187 - RNA, 20 nt, Human herpesvirus 2
uggguuacugcacuugcccc

SEQ ID NO: 299188 - RNA, 20 nt, Human herpesvirus 2
ugguaauuagaaacuuuuaa

SEQ ID NO: 299189 - RNA, 21 nt, Human herpesvirus 2
ugguaauuagaaacuuuuaau

SEQ ID NO: 299190 - RNA, 21 nt, Human herpesvirus 2
ugguaauuagcaacuuuuaau

SEQ ID NO: 299191 - RNA, 23 nt, Human herpesvirus 2
uggucauggcccuuggacgggug

SEQ ID NO: 299192 - RNA, 22 nt, Human herpesvirus 2
uggucgggcggacguccagggg

SEQ ID NO: 299193 - RNA, 16 nt, Human herpesvirus 2
uggugauggggguccu

SEQ ID NO: 299194 - RNA, 13 nt, Human herpesvirus 2
uggugcaguuuga

SEQ ID NO: 299195 - RNA, 14 nt, Human herpesvirus 2
ugguggccgaaaga

SEQ ID NO: 299196 - RNA, 16 nt, Human herpesvirus 2
ugguucucguaccccc

SEQ ID NO: 299197 - RNA, 17 nt, Human herpesvirus 2
uguaaaacgcgggcggg

SEQ ID NO: 299198 - RNA, 22 nt, Human herpesvirus 2
uguacaccggcucccccgcgga

SEQ ID NO: 299199 - RNA, 15 nt, Human herpesvirus 2
uguccggggcgguga

SEQ ID NO: 299200 - RNA, 20 nt, Human herpesvirus 2
ugucggccgcggacgaccug

SEQ ID NO: 299201 - RNA, 17 nt, Human herpesvirus 2
ugucgggugcccggggu

SEQ ID NO: 299202 - RNA, 17 nt, Human herpesvirus 2
ugugcccgcccccgacg

SEQ ID NO: 299203 - RNA, 20 nt, Human herpesvirus 2
ugugccggggauaaaagcca

SEQ ID NO: 299204 - RNA, 19 nt, Human herpesvirus 2
ugugcgccuuuaagacaga

SEQ ID NO: 299205 - RNA, 22 nt, Human herpesvirus 2
uguggcggucggccagcacgac

SEQ ID NO: 299206 - RNA, 23 nt, Human herpesvirus 2
uguggucgggcggacguccaggg

SEQ ID NO: 299207 - RNA, 22 nt, Human herpesvirus 2
uguguauaaauaaaaagacacc

SEQ ID NO: 299208 - RNA, 21 nt, Human herpesvirus 2
uguuacaccccccugacucag

SEQ ID NO: 299209 - RNA, 15 nt, Human herpesvirus 2
uguuggccaccaaca

SEQ ID NO: 299210 - RNA, 17 nt, Human herpesvirus 2
uguuuaaaacccggggu

SEQ ID NO: 299211 - RNA, 14 nt, Human herpesvirus 2
uguuucgcauaugc

SEQ ID NO: 299212 - RNA, 22 nt, Human herpesvirus 2
uguuugggaaaucuauugaacu

SEQ ID NO: 299213 - RNA, 23 nt, Human herpesvirus 2
uuaaauacauaaaacccacccuc

SEQ ID NO: 299214 - RNA, 15 nt, Human herpesvirus 2
uuaacaacaccaaac

SEQ ID NO: 299215 - RNA, 19 nt, Human herpesvirus 2
uuacaccccccugacucag

SEQ ID NO: 299216 - RNA, 14 nt, Human herpesvirus 2
uuagaaacuuuuaa

SEQ ID NO: 299217 - RNA, 14 nt, Human herpesvirus 2
uuagauugacucag

SEQ ID NO: 299218 - RNA, 17 nt, Human herpesvirus 2
uuagccaccgcgcccac

SEQ ID NO: 299219 - RNA, 14 nt, Human herpesvirus 2
uuaugcaucucggg

SEQ ID NO: 299220 - RNA, 21 nt, Human herpesvirus 2
uucaauaaaaaacaccaacau

SEQ ID NO: 299221 - RNA, 14 nt, Human herpesvirus 2
uucaauagauuucc

SEQ ID NO: 299222 - RNA, 20 nt, Human herpesvirus 2
uucaauagauuucccaaaca

SEQ ID NO: 299223 - RNA, 19 nt, Human herpesvirus 2
uucaccaacgacgaugcau

SEQ ID NO: 299224 - RNA, 14 nt, Human herpesvirus 2
uucaccacacagaa

SEQ ID NO: 299225 - RNA, 20 nt, Human herpesvirus 2
uucaccacacagaaacacaa

SEQ ID NO: 299226 - RNA, 19 nt, Human herpesvirus 2
uuccccagcuuucccucca

SEQ ID NO: 299227 - RNA, 14 nt, Human herpesvirus 2
uucccgguauggua

SEQ ID NO: 299228 - RNA, 17 nt, Human herpesvirus 2
uucccgguaugguaauu

SEQ ID NO: 299229 - RNA, 21 nt, Human herpesvirus 2
uuccucccccccccccaaaaa

SEQ ID NO: 299230 - RNA, 18 nt, Human herpesvirus 2
uuccuccccucgccuguu

SEQ ID NO: 299231 - RNA, 17 nt, Human herpesvirus 2
uucgccgacgccuuccc

SEQ ID NO: 299232 - RNA, 17 nt, Human herpesvirus 2
uucggacgaaacaaacu

SEQ ID NO: 299233 - RNA, 20 nt, Human herpesvirus 2
uugacuccugggucagcuca

SEQ ID NO: 299234 - RNA, 21 nt, Human herpesvirus 2
uugcaccccagaaccaugauc

SEQ ID NO: 299235 - RNA, 14 nt, Human herpesvirus 2
uugcuuuuacccac

SEQ ID NO: 299236 - RNA, 11 nt, Human herpesvirus 2
uuggccuuccc

SEQ ID NO: 299237 - RNA, 11 nt, Human herpesvirus 2
uuggggcuccc

SEQ ID NO: 299238 - RNA, 17 nt, Human herpesvirus 2
uugggucugcgucgucc

SEQ ID NO: 299239 - RNA, 17 nt, Human herpesvirus 2
uugggugggacuuggac

SEQ ID NO: 299240 - RNA, 21 nt, Human herpesvirus 2
uugguuuucccguuagcacau

SEQ ID NO: 299241 - RNA, 12 nt, Human herpesvirus 2
uugugugguuua

SEQ ID NO: 299242 - RNA, 15 nt, Human herpesvirus 2
uuguuuuucuaguca

SEQ ID NO: 299243 - RNA, 20 nt, Human herpesvirus 2
uuguuuuuuuugcguuuccu

SEQ ID NO: 299244 - RNA, 12 nt, Human herpesvirus 2
uuuaagacagac

SEQ ID NO: 299245 - RNA, 23 nt, Human herpesvirus 2
uuuccccagcacggaggaacugg

SEQ ID NO: 299246 - RNA, 23 nt, Human herpesvirus 2
uuucccucccucgccgccuuccg

SEQ ID NO: 299247 - RNA, 17 nt, Human herpesvirus 2
uuuccggcccucccgca

SEQ ID NO: 299248 - RNA, 12 nt, Human herpesvirus 2
uuucugucuuua

SEQ ID NO: 299249 - RNA, 14 nt, Human herpesvirus 2
uuugauacucuguu

SEQ ID NO: 299250 - RNA, 23 nt, Human herpesvirus 2
uuuggggcggcacuggggugaua

SEQ ID NO: 299251 - RNA, 16 nt, Human herpesvirus 2
uuugggggggggugga

SEQ ID NO: 299252 - RNA, 19 nt, Human herpesvirus 2
uuuggucguauguguggua

SEQ ID NO: 299253 - RNA, 21 nt, Human herpesvirus 2
uuuuaacgggccgccauuccc

SEQ ID NO: 299254 - RNA, 18 nt, Human herpesvirus 2
uuuugucguuccuuccuc

SEQ ID NO: 299255 - RNA, 15 nt, Human herpesvirus 2
uuuuucggugccuca

SEQ ID NO: 299256 - RNA, 21 nt, Human herpesvirus 2
cggccaacgaggaccacgugc

SEQ ID NO: 299257 - RNA, 15 nt, Human herpesvirus 2
cggccauccccggcg

SEQ ID NO: 299258 - RNA, 15 nt, Human herpesvirus 2
cggccauccugccca

SEQ ID NO: 299259 - RNA, 23 nt, Human herpesvirus 2
cggcccccggagucccccggcuc

SEQ ID NO: 299260 - RNA, 22 nt, Human herpesvirus 2
cggcccgauccgaacggcgcac

SEQ ID NO: 299261 - RNA, 18 nt, Human herpesvirus 2
cggcccgcguccccggcc

SEQ ID NO: 299262 - RNA, 12 nt, Human herpesvirus 2
cggccgccgcaa

SEQ ID NO: 299263 - RNA, 18 nt, Human herpesvirus 2
cggccggcggagccccgg

SEQ ID NO: 299264 - RNA, 21 nt, Human herpesvirus 2
cggcgaacacugccucggagg

SEQ ID NO: 299265 - RNA, 19 nt, Human herpesvirus 2
cggcgauuaacaacaccaa

SEQ ID NO: 299266 - RNA, 19 nt, Human herpesvirus 2
cggcgccaagcgccccgcg

SEQ ID NO: 299267 - RNA, 16 nt, Human herpesvirus 2
cggcgccgccccgccg

SEQ ID NO: 299268 - RNA, 20 nt, Human herpesvirus 2
cggcgcgggcggcgccgcgc

SEQ ID NO: 299269 - RNA, 16 nt, Human herpesvirus 2
cggcgucuagcucgcg

SEQ ID NO: 299270 - RNA, 15 nt, Human herpesvirus 2
cggcguuggcgcgcu

SEQ ID NO: 299271 - RNA, 14 nt, Human herpesvirus 2
cggcguuuggccaa

SEQ ID NO: 299272 - RNA, 15 nt, Human herpesvirus 2
cggcucccccgcggc

SEQ ID NO: 299273 - RNA, 14 nt, Human herpesvirus 2
cggcucguggugcu

SEQ ID NO: 299274 - RNA, 16 nt, Human herpesvirus 2
cgggaaggacgaaaua

SEQ ID NO: 299275 - RNA, 22 nt, Human herpesvirus 2
cgggacggaaaaaaagggcaaa

SEQ ID NO: 299276 - RNA, 20 nt, Human herpesvirus 2
cgggagccgcggccccgccg

SEQ ID NO: 299277 - RNA, 14 nt, Human herpesvirus 2
cgggaggggcggga

SEQ ID NO: 299278 - RNA, 21 nt, Human herpesvirus 2
cgggauccuccgccagcucgg

SEQ ID NO: 299279 - RNA, 18 nt, Human herpesvirus 2
cgggccccgugggugggu

SEQ ID NO: 299280 - RNA, 17 nt, Human herpesvirus 2
cgggccccuacucgcca

SEQ ID NO: 299281 - RNA, 19 nt, Human herpesvirus 2
cgggcccggacuccgcccc

SEQ ID NO: 299282 - RNA, 12 nt, Human herpesvirus 2
cgggcccggggc

SEQ ID NO: 299283 - RNA, 18 nt, Human herpesvirus 2
cgggccgucguuggccag

SEQ ID NO: 299284 - RNA, 14 nt, Human herpesvirus 2
cgggcgggggucgg

SEQ ID NO: 299285 - RNA, 17 nt, Human herpesvirus 2
cgggcgggggucgggcg

SEQ ID NO: 299286 - RNA, 16 nt, Human herpesvirus 2
cgggcguccccgagcg

SEQ ID NO: 299287 - RNA, 22 nt, Human herpesvirus 2
cgggcguuauaagccgccgcac

SEQ ID NO: 299288 - RNA, 15 nt, Human herpesvirus 2
cgggcugcuggugau

SEQ ID NO: 299289 - RNA, 12 nt, Human herpesvirus 2
cggggaccagcc

SEQ ID NO: 299290 - RNA, 19 nt, Human herpesvirus 2
cggggcgccccccccgacg

SEQ ID NO: 299291 - RNA, 22 nt, Human herpesvirus 2
cgggggaucugucgccggcgug

SEQ ID NO: 299292 - RNA, 17 nt, Human herpesvirus 2
cgggggcccgggguucu

SEQ ID NO: 299293 - RNA, 11 nt, Human herpesvirus 2
cgggggcgggg

SEQ ID NO: 299294 - RNA, 14 nt, Human herpesvirus 2
cggggggcacgggc

SEQ ID NO: 299295 - RNA, 21 nt, Human herpesvirus 2
cgggggggggcaagugcagua

SEQ ID NO: 299296 - RNA, 10 nt, Human herpesvirus 2
cgggggucgg

SEQ ID NO: 299297 - RNA, 14 nt, Human herpesvirus 2
cgggugcccggggu

SEQ ID NO: 299298 - RNA, 19 nt, Human herpesvirus 2
cgggugcgggaugugucgc

SEQ ID NO: 299299 - RNA, 17 nt, Human herpesvirus 2
cgguaauuagcagcuuu

SEQ ID NO: 299300 - RNA, 22 nt, Human herpesvirus 2
cgguauggcugcccccgcgcac

SEQ ID NO: 299301 - RNA, 16 nt, Human herpesvirus 2
cggucggcgaacacaa

SEQ ID NO: 299302 - RNA, 14 nt, Human herpesvirus 2
cggugaucgaggug

SEQ ID NO: 299303 - RNA, 15 nt, Human herpesvirus 2
cggugcgccccgccg

SEQ ID NO: 299304 - RNA, 23 nt, Human herpesvirus 2
cgguggcgucggcggccccggcg

SEQ ID NO: 299305 - RNA, 14 nt, Human herpesvirus 2
cguacaacacauca

SEQ ID NO: 299306 - RNA, 14 nt, Human herpesvirus 2
cguaggcccggggg

SEQ ID NO: 299307 - RNA, 14 nt, Human herpesvirus 2
cguauguugguguu

SEQ ID NO: 299308 - RNA, 15 nt, Human herpesvirus 2
cgucacgcaggccgc

SEQ ID NO: 299309 - RNA, 19 nt, Human herpesvirus 2
cgucccccacggucaggac

SEQ ID NO: 299310 - RNA, 13 nt, Human herpesvirus 2
cgucccgccacac

SEQ ID NO: 299311 - RNA, 18 nt, Human herpesvirus 2
cguccggcuggcggcgcg

SEQ ID NO: 299312 - RNA, 22 nt, Human herpesvirus 2
cguccggcuggcggcgcggcac

SEQ ID NO: 299313 - RNA, 21 nt, Human herpesvirus 2
cguccguauguuaauugcaau

SEQ ID NO: 299314 - RNA, 13 nt, Human herpesvirus 2
cguccgucucaau

SEQ ID NO: 299315 - RNA, 22 nt, Human herpesvirus 2
cguccugcggcagcgcgccgac

SEQ ID NO: 299316 - RNA, 21 nt, Human herpesvirus 2
cgucgccgaauacgacgccca

SEQ ID NO: 299317 - RNA, 23 nt, Human herpesvirus 2
cgucucaauaaagccagguuaaa

SEQ ID NO: 299318 - RNA, 19 nt, Human herpesvirus 2
cgucuccacaaaaauggga

SEQ ID NO: 299319 - RNA, 16 nt, Human herpesvirus 2
cgucucgucgccgcuc

SEQ ID NO: 299320 - RNA, 13 nt, Human herpesvirus 2
cgucuggugugac

SEQ ID NO: 299321 - RNA, 14 nt, Human herpesvirus 2
cgugcuggggaaau

SEQ ID NO: 299322 - RNA, 23 nt, Human herpesvirus 2
cgugcuggggaaaucucucugcc

SEQ ID NO: 299323 - RNA, 21 nt, Human herpesvirus 2
cguggaggggggggcugguug

SEQ ID NO: 299324 - RNA, 19 nt, Human herpesvirus 2
cguggaugccggggccgug

SEQ ID NO: 299325 - RNA, 19 nt, Human herpesvirus 2
cguggcccuccacgccgug

SEQ ID NO: 299326 - RNA, 17 nt, Human herpesvirus 2
cgugggccuguggggcc

SEQ ID NO: 299327 - RNA, 14 nt, Human herpesvirus 2
cguguacaaacacg

SEQ ID NO: 299328 - RNA, 20 nt, Human herpesvirus 2
cgugucggagcucgacgcac

SEQ ID NO: 299329 - RNA, 19 nt, Human herpesvirus 2
cgugugacuagaaaaacaa

SEQ ID NO: 299330 - RNA, 16 nt, Human herpesvirus 2
cgugugucucugaaau

SEQ ID NO: 299331 - RNA, 15 nt, Human herpesvirus 2
cguucguucgcccgg

SEQ ID NO: 299332 - RNA, 16 nt, Human herpesvirus 2
cguugccgggggccau

SEQ ID NO: 299333 - RNA, 16 nt, Human herpesvirus 2
cuaacgggaaaaccaa

SEQ ID NO: 299334 - RNA, 14 nt, Human herpesvirus 2
cuacuaccugggga

SEQ ID NO: 299335 - RNA, 20 nt, Human herpesvirus 2
cuagaaaaacaaaugcagac

SEQ ID NO: 299336 - RNA, 14 nt, Human herpesvirus 2
gacaugcaaauggg

SEQ ID NO: 299337 - RNA, 13 nt, Human herpesvirus 2
gaccaaaagggaa

SEQ ID NO: 299338 - RNA, 20 nt, Human herpesvirus 2
gaccacccuaaggaugcccg

SEQ ID NO: 299339 - RNA, 16 nt, Human herpesvirus 2
gaccaccggccgaggc

SEQ ID NO: 299340 - RNA, 21 nt, Human herpesvirus 2
gacccaccgcaccaccauacu

SEQ ID NO: 299341 - RNA, 14 nt, Human herpesvirus 2
gacccagucgccca

SEQ ID NO: 299342 - RNA, 15 nt, Human herpesvirus 2
gacccauacauuucc

SEQ ID NO: 299343 - RNA, 16 nt, Human herpesvirus 2
gaccccgaccccgagc

SEQ ID NO: 299344 - RNA, 19 nt, Human herpesvirus 2
gacccugccccccggcgcg

SEQ ID NO: 299345 - RNA, 18 nt, Human herpesvirus 2
gacccuguggcgggcgcu

SEQ ID NO: 299346 - RNA, 15 nt, Human herpesvirus 2
gaccgucgccgccgg

SEQ ID NO: 299347 - RNA, 20 nt, Human herpesvirus 2
gaccucucgccgcuccguca

SEQ ID NO: 299348 - RNA, 18 nt, Human herpesvirus 2
gaccugccccggcgcguc

SEQ ID NO: 299349 - RNA, 19 nt, Human herpesvirus 2
gacgaaaacguaccgccuu

SEQ ID NO: 299350 - RNA, 13 nt, Human herpesvirus 2
gacgaaacaaacu

SEQ ID NO: 299351 - RNA, 12 nt, Human herpesvirus 2
gacgaacaggcg

SEQ ID NO: 299352 - RNA, 22 nt, Human herpesvirus 2
gacgaugcauguucggcgucgu

SEQ ID NO: 299353 - RNA, 18 nt, Human herpesvirus 2
gacgccaggccccccggg

SEQ ID NO: 299354 - RNA, 14 nt, Human herpesvirus 2
gacgcgaggcgcgg

SEQ ID NO: 299355 - RNA, 23 nt, Human herpesvirus 2
gacgcgcgcgcccccgacccggg

SEQ ID NO: 299356 - RNA, 18 nt, Human herpesvirus 2
gacgcggggucgagcgcg

SEQ ID NO: 299357 - RNA, 16 nt, Human herpesvirus 2
gacggcaccgccgggc

SEQ ID NO: 299358 - RNA, 21 nt, Human herpesvirus 2
gacgggcgccacgguggugca

SEQ ID NO: 299359 - RNA, 14 nt, Human herpesvirus 2
gacguugugcguuu

SEQ ID NO: 299360 - RNA, 19 nt, Human herpesvirus 2
gacuccaggagcuucauca

SEQ ID NO: 299361 - RNA, 21 nt, Human herpesvirus 2
gacucggugcguuccagcgcg

SEQ ID NO: 299362 - RNA, 16 nt, Human herpesvirus 2
gagaaaaggaccaaaa

SEQ ID NO: 299363 - RNA, 21 nt, Human herpesvirus 2
gagaaaaggaccaaaagggaa

SEQ ID NO: 299364 - RNA, 13 nt, Human herpesvirus 2
gagacuucccuaa

SEQ ID NO: 299365 - RNA, 20 nt, Human herpesvirus 2
gagagggggggaaagaaaga

SEQ ID NO: 299366 - RNA, 19 nt, Human herpesvirus 2
gagaggucaauagauuucc

SEQ ID NO: 299367 - RNA, 21 nt, Human herpesvirus 2
gagccccugggggacccgacc

SEQ ID NO: 299368 - RNA, 16 nt, Human herpesvirus 2
gagccgauccggccuc

SEQ ID NO: 299369 - RNA, 15 nt, Human herpesvirus 2
gagccgcacaucccc

SEQ ID NO: 299370 - RNA, 14 nt, Human herpesvirus 2
gagccgcgcggcca

SEQ ID NO: 299371 - RNA, 14 nt, Human herpesvirus 2
gagcguaucggcca

SEQ ID NO: 299372 - RNA, 13 nt, Human herpesvirus 2
gagcuucaucacc

SEQ ID NO: 299373 - RNA, 23 nt, Human herpesvirus 2
gagcuucauuuugugggggccca

SEQ ID NO: 299374 - RNA, 23 nt, Human herpesvirus 2
gaggaaacgcaaaaaaaacaaga

SEQ ID NO: 299375 - RNA, 21 nt, Human herpesvirus 2
gaggaggggggugguggccga

SEQ ID NO: 299376 - RNA, 18 nt, Human herpesvirus 2
gaggccacucgucgccaa

SEQ ID NO: 299377 - RNA, 16 nt, Human herpesvirus 2
gaggccucauccggcc

SEQ ID NO: 299378 - RNA, 17 nt, Human herpesvirus 2
gaggcuguccgccgggc

SEQ ID NO: 299379 - RNA, 16 nt, Human herpesvirus 2
gagggcccggcgccgc

SEQ ID NO: 299380 - RNA, 18 nt, Human herpesvirus 2
gagggcccggcgccgccc

SEQ ID NO: 299381 - RNA, 23 nt, Human herpesvirus 2
gagggccgcagccauucggccgc

SEQ ID NO: 299382 - RNA, 17 nt, Human herpesvirus 2
gaggggggcagugcagu

SEQ ID NO: 299383 - RNA, 18 nt, Human herpesvirus 2
gaggggggcagugcagua

SEQ ID NO: 299384 - RNA, 23 nt, Human herpesvirus 2
gaggggggggugaggaagaaaga

SEQ ID NO: 299385 - RNA, 21 nt, Human herpesvirus 2
gagguccgucagcgccgcggc

SEQ ID NO: 299386 - RNA, 16 nt, Human herpesvirus 2
gagucugugcggcccu

SEQ ID NO: 299387 - RNA, 13 nt, Human herpesvirus 2
gagugagaaccaa

SEQ ID NO: 299388 - RNA, 12 nt, Human herpesvirus 2
gauaaaagccaa

SEQ ID NO: 299389 - RNA, 18 nt, Human herpesvirus 2
gauagaccaugaccucuc

SEQ ID NO: 299390 - RNA, 14 nt, Human herpesvirus 2
gaucccuuugugau

SEQ ID NO: 299391 - RNA, 19 nt, Human herpesvirus 2
gaucgcagcguccggcugg

SEQ ID NO: 299392 - RNA, 24 nt, Human herpesvirus 2
gaugaccucccggcccgccgacca

SEQ ID NO: 299393 - RNA, 13 nt, Human herpesvirus 2
gaugagccgguag

SEQ ID NO: 299394 - RNA, 22 nt, Human herpesvirus 2
gaugccggggccguggggcccc

SEQ ID NO: 299395 - RNA, 19 nt, Human herpesvirus 2
gaugucuaaccgaaauaaa

SEQ ID NO: 299396 - RNA, 13 nt, Human herpesvirus 2
gauguucaaaaau

SEQ ID NO: 299397 - RNA, 18 nt, Human herpesvirus 2
gauucgcgaacacaagcu

SEQ ID NO: 299398 - RNA, 22 nt, Human herpesvirus 2
gauuuccccaagagacuucccu

SEQ ID NO: 299399 - RNA, 15 nt, Human herpesvirus 2
gcaacacccggcgcc

SEQ ID NO: 299400 - RNA, 11 nt, Human herpesvirus 2
gcaagugcagu

SEQ ID NO: 299401 - RNA, 12 nt, Human herpesvirus 2
gcaagugcagua

SEQ ID NO: 299402 - RNA, 19 nt, Human herpesvirus 2
gcacaaacgugcucugcca

SEQ ID NO: 299403 - RNA, 15 nt, Human herpesvirus 2
gcacaggcccggggc

SEQ ID NO: 299404 - RNA, 19 nt, Human herpesvirus 2
gcacagguggugcacgugu

SEQ ID NO: 299405 - RNA, 15 nt, Human herpesvirus 2
gcacagugggugcuc

SEQ ID NO: 299406 - RNA, 20 nt, Human herpesvirus 2
gcacccauccaucugggagu

SEQ ID NO: 299407 - RNA, 18 nt, Human herpesvirus 2
gcaccgcgcggaccggcc

SEQ ID NO: 299408 - RNA, 20 nt, Human herpesvirus 2
gcaccgcgcggaccggcccc

SEQ ID NO: 299409 - RNA, 13 nt, Human herpesvirus 2
gcaccggggcggc

SEQ ID NO: 299410 - RNA, 15 nt, Human herpesvirus 2
gcacgacagaccucc

SEQ ID NO: 299411 - RNA, 14 nt, Human herpesvirus 2
gcacgaccagggag

SEQ ID NO: 299412 - RNA, 20 nt, Human herpesvirus 2
gcacggcguugcugcgcuga

SEQ ID NO: 299413 - RNA, 18 nt, Human herpesvirus 2
gcacgggcguccccggug

SEQ ID NO: 299414 - RNA, 20 nt, Human herpesvirus 2
gcacguaaaacacgggcgcu

SEQ ID NO: 299415 - RNA, 20 nt, Human herpesvirus 2
gcagcucauaaaaaucguga

SEQ ID NO: 299416 - RNA, 15 nt, Human herpesvirus 2
gcagcuucaccgaga

SEQ ID NO: 299417 - RNA, 15 nt, Human herpesvirus 2
gcagcuuuuaacggg

SEQ ID NO: 299418 - RNA, 15 nt, Human herpesvirus 2
gcaggaucgugugca

SEQ ID NO: 299419 - RNA, 18 nt, Human herpesvirus 2
gcaggaucgugugcacga

SEQ ID NO: 299420 - RNA, 14 nt, Human herpesvirus 2
gcaggcuggagcuc

SEQ ID NO: 299421 - RNA, 17 nt, Human herpesvirus 2
gcaguaacccaguuccu

SEQ ID NO: 299422 - RNA, 17 nt, Human herpesvirus 2
gcaguaccccaguuccu

SEQ ID NO: 299423 - RNA, 17 nt, Human herpesvirus 2
gcagugcaguaccccag

SEQ ID NO: 299424 - RNA, 18 nt, Human herpesvirus 2
gcauccgaucgaugagcc

SEQ ID NO: 299425 - RNA, 23 nt, Human herpesvirus 2
gcauccgggguuuccccggccca

SEQ ID NO: 299426 - RNA, 24 nt, Human herpesvirus 2
gcaucggaccccccaucgcgucac

SEQ ID NO: 299427 - RNA, 17 nt, Human herpesvirus 2
gcaugggcuacuaccug

SEQ ID NO: 299428 - RNA, 17 nt, Human herpesvirus 2
gccaacucgcggcaccg

SEQ ID NO: 299429 - RNA, 12 nt, Human herpesvirus 2
gccaacucuguc

SEQ ID NO: 299430 - RNA, 18 nt, Human herpesvirus 2
gccagcgggggcccgggg

SEQ ID NO: 299431 - RNA, 17 nt, Human herpesvirus 2
gccaucgccggggaccg

SEQ ID NO: 299432 - RNA, 20 nt, Human herpesvirus 2
gccaucgugcgcucgcucuc

SEQ ID NO: 299433 - RNA, 21 nt, Human herpesvirus 2
gccauucccgcuuaugguaau

SEQ ID NO: 299434 - RNA, 16 nt, Human herpesvirus 2
gccauucggccgcggc

SEQ ID NO: 299435 - RNA, 18 nt, Human herpesvirus 2
gcccaacccgagcgaccu

SEQ ID NO: 299436 - RNA, 14 nt, Human herpesvirus 2
gcccaagcggcccg

SEQ ID NO: 299437 - RNA, 20 nt, Human herpesvirus 2
gcccauacaaauuaaauaca

SEQ ID NO: 299438 - RNA, 15 nt, Human herpesvirus 2
gccccaccgucucgg

SEQ ID NO: 299439 - RNA, 20 nt, Human herpesvirus 2
gccccacgucaccgggggcc

SEQ ID NO: 299440 - RNA, 15 nt, Human herpesvirus 2
gccccagagcccccc

SEQ ID NO: 299441 - RNA, 18 nt, Human herpesvirus 2
gccccagggggcggcgcc

SEQ ID NO: 299442 - RNA, 14 nt, Human herpesvirus 2
gccccccgggagcc

SEQ ID NO: 299443 - RNA, 13 nt, Human herpesvirus 2
gccccccucggca

SEQ ID NO: 299444 - RNA, 15 nt, Human herpesvirus 2
gcccccgacgggcgc

SEQ ID NO: 299445 - RNA, 12 nt, Human herpesvirus 2
gcccccggggcc

SEQ ID NO: 299446 - RNA, 15 nt, Human herpesvirus 2
gcccccgugccuguu

SEQ ID NO: 299447 - RNA, 18 nt, Human herpesvirus 2
gccccgacaucaaccacc

SEQ ID NO: 299448 - RNA, 21 nt, Human herpesvirus 2
gccccgauauucaagcccgcg

SEQ ID NO: 299449 - RNA, 17 nt, Human herpesvirus 2
gccccgcgugcagcgcg

SEQ ID NO: 299450 - RNA, 14 nt, Human herpesvirus 2
gccccggcggcccc

SEQ ID NO: 299451 - RNA, 14 nt, Human herpesvirus 2
gcccgaccuguuaa

SEQ ID NO: 299452 - RNA, 15 nt, Human herpesvirus 2
gcccgccaacccccg

SEQ ID NO: 299453 - RNA, 19 nt, Human herpesvirus 2
gcccgccagugcaucccag

SEQ ID NO: 299454 - RNA, 20 nt, Human herpesvirus 2
gcccgccgccgcaucagucc

SEQ ID NO: 299455 - RNA, 15 nt, Human herpesvirus 2
gcccgcgaccccccg

SEQ ID NO: 299456 - RNA, 20 nt, Human herpesvirus 2
gcccgcgccgcgacggcccc

SEQ ID NO: 299457 - RNA, 19 nt, Human herpesvirus 2
gcccgcguccccggcccuc

SEQ ID NO: 299458 - RNA, 23 nt, Human herpesvirus 2
gcccggaccccucaucgccgcgc

SEQ ID NO: 299459 - RNA, 18 nt, Human herpesvirus 2
gcccggacuccgccccgg

SEQ ID NO: 299460 - RNA, 14 nt, Human herpesvirus 2
gcccggcgcucggu

SEQ ID NO: 299461 - RNA, 20 nt, Human herpesvirus 2
gcccucacgucuucgcccac

SEQ ID NO: 299462 - RNA, 19 nt, Human herpesvirus 2
gcccuccugccacgcucac

SEQ ID NO: 299463 - RNA, 17 nt, Human herpesvirus 2
gcccucgccgucuuggc

SEQ ID NO: 299464 - RNA, 20 nt, Human herpesvirus 2
gcccucucgaucccgaagcc

SEQ ID NO: 299465 - RNA, 13 nt, Human herpesvirus 2
gcccugcuguauc

SEQ ID NO: 299466 - RNA, 18 nt, Human herpesvirus 2
gcccuguacgacagcggg

SEQ ID NO: 299467 - RNA, 18 nt, Human herpesvirus 2
gccgaaaacgcccugcac

SEQ ID NO: 299468 - RNA, 21 nt, Human herpesvirus 2
gccgaccgccccccccggcgg

SEQ ID NO: 299469 - RNA, 16 nt, Human herpesvirus 2
gccgacggcggcgcac

SEQ ID NO: 299470 - RNA, 16 nt, Human herpesvirus 2
gccgacgugccgggga

SEQ ID NO: 299471 - RNA, 15 nt, Human herpesvirus 2
gccgcaacacccggc

SEQ ID NO: 299472 - RNA, 17 nt, Human herpesvirus 2
gccgccccgcaguuuca

SEQ ID NO: 299473 - RNA, 20 nt, Human herpesvirus 2
gccgccccgccgcuccgccc

SEQ ID NO: 299474 - RNA, 12 nt, Human herpesvirus 2
gccgccggccac

SEQ ID NO: 299475 - RNA, 22 nt, Human herpesvirus 2
gccgcgacaagacccggcggcg

SEQ ID NO: 299476 - RNA, 17 nt, Human herpesvirus 2
gccgcugggggggcggg

SEQ ID NO: 299477 - RNA, 13 nt, Human herpesvirus 2
gccggaccgggau

SEQ ID NO: 299478 - RNA, 18 nt, Human herpesvirus 2
gccgggcgcgcggcgcga

SEQ ID NO: 299479 - RNA, 20 nt, Human herpesvirus 2
gccggggagggcagggccgc

SEQ ID NO: 299480 - RNA, 18 nt, Human herpesvirus 2
gccggggauaaaagccaa

SEQ ID NO: 299481 - RNA, 17 nt, Human herpesvirus 2
gccggggcggccccgau

SEQ ID NO: 299482 - RNA, 15 nt, Human herpesvirus 2
gccucgggcggcgug

SEQ ID NO: 299483 - RNA, 16 nt, Human herpesvirus 2
gccucucuucuucccc

SEQ ID NO: 299484 - RNA, 16 nt, Human herpesvirus 2
gccugguggucgucgg

SEQ ID NO: 299485 - RNA, 20 nt, Human herpesvirus 2
gccugugggucugcgccacc

SEQ ID NO: 299486 - RNA, 20 nt, Human herpesvirus 2
gcgaacauaggcugcggggc

SEQ ID NO: 299487 - RNA, 19 nt, Human herpesvirus 2
gcgaaccgguagccggggc

SEQ ID NO: 299488 - RNA, 22 nt, Human herpesvirus 2
gcgaccccgccccccgacgcca

SEQ ID NO: 299489 - RNA, 23 nt, Human herpesvirus 2
gcgaccgucgccgccggccacgc

SEQ ID NO: 299490 - RNA, 20 nt, Human herpesvirus 2
gcgacugccuccacgcccug

SEQ ID NO: 299491 - RNA, 17 nt, Human herpesvirus 2
gcgagcucggcuucuac

SEQ ID NO: 299492 - RNA, 17 nt, Human herpesvirus 2
gcgaggugcgccagguc

SEQ ID NO: 299493 - RNA, 19 nt, Human herpesvirus 2
gcgauucccuucgcgaggg

SEQ ID NO: 299494 - RNA, 18 nt, Human herpesvirus 2
gcgcaggggggccgggga

SEQ ID NO: 299495 - RNA, 17 nt, Human herpesvirus 2
gcgccaacgcgggcguc

SEQ ID NO: 299496 - RNA, 19 nt, Human herpesvirus 2
gcgccagacgggccggugg

SEQ ID NO: 299497 - RNA, 19 nt, Human herpesvirus 2
gcgcccccgacccggggcc

SEQ ID NO: 299498 - RNA, 18 nt, Human herpesvirus 2
gcgccgccgcgcgggccc

SEQ ID NO: 299499 - RNA, 23 nt, Human herpesvirus 2
gcgccgcgacggccccggccgcc

SEQ ID NO: 299500 - RNA, 12 nt, Human herpesvirus 2
gcgccgggcgcg

SEQ ID NO: 299501 - RNA, 13 nt, Human herpesvirus 2
gcgccgucgcuac

SEQ ID NO: 299502 - RNA, 14 nt, Human herpesvirus 2
gcgccgucgggccc

SEQ ID NO: 299503 - RNA, 14 nt, Human herpesvirus 2
gcgccucgggcggc

SEQ ID NO: 299504 - RNA, 23 nt, Human herpesvirus 2
gcgcgacugccuccacgcccugc

SEQ ID NO: 299505 - RNA, 16 nt, Human herpesvirus 2
gcgcgcaccugcggga

SEQ ID NO: 299506 - RNA, 18 nt, Human herpesvirus 2
gcgcgcccccgacccggg

SEQ ID NO: 299507 - RNA, 11 nt, Human herpesvirus 2
gcgcgcgcccc

SEQ ID NO: 299508 - RNA, 17 nt, Human herpesvirus 2
gcgcgcgugugugagaa

SEQ ID NO: 299509 - RNA, 13 nt, Human herpesvirus 2
gcgcggcacacau

SEQ ID NO: 299510 - RNA, 22 nt, Human herpesvirus 2
gcgcuacgaccggugcuucgua

SEQ ID NO: 299511 - RNA, 13 nt, Human herpesvirus 2
gcgcugcggggac

SEQ ID NO: 299512 - RNA, 15 nt, Human herpesvirus 2
gcgcugcggggacca

SEQ ID NO: 299513 - RNA, 12 nt, Human herpesvirus 2
gcgcugcugcgc

SEQ ID NO: 299514 - RNA, 15 nt, Human herpesvirus 2
gcggacagccagggc

SEQ ID NO: 299515 - RNA, 15 nt, Human herpesvirus 2
gcggaccuuggcgca

SEQ ID NO: 299516 - RNA, 15 nt, Human herpesvirus 2
gcggacguccagggg

SEQ ID NO: 299517 - RNA, 15 nt, Human herpesvirus 2
gcggaggcgugguga

SEQ ID NO: 299518 - RNA, 17 nt, Human herpesvirus 2
gcggcacagguggugca

SEQ ID NO: 299519 - RNA, 17 nt, Human herpesvirus 2
gcggcaccgcgcggacc

SEQ ID NO: 299520 - RNA, 14 nt, Human herpesvirus 2
gcggcaugcgcgga

SEQ ID NO: 299521 - RNA, 14 nt, Human herpesvirus 2
gcggccaccccgcc

SEQ ID NO: 299522 - RNA, 13 nt, Human herpesvirus 2
gcggcccccgugg

SEQ ID NO: 299523 - RNA, 14 nt, Human herpesvirus 2
gcggcccuggagcg

SEQ ID NO: 299524 - RNA, 23 nt, Human herpesvirus 2
gcggccucuccggccucuucgaa

SEQ ID NO: 299525 - RNA, 14 nt, Human herpesvirus 2
gcggcgcacgcggu

SEQ ID NO: 299526 - RNA, 14 nt, Human herpesvirus 2
gcggcucaugaacg

SEQ ID NO: 299527 - RNA, 15 nt, Human herpesvirus 2
gcggcuugcgcgacc

SEQ ID NO: 299528 - RNA, 13 nt, Human herpesvirus 2
gcgggaggcggug

SEQ ID NO: 299529 - RNA, 14 nt, Human herpesvirus 2
gcgggaggggcggg

SEQ ID NO: 299530 - RNA, 15 nt, Human herpesvirus 2
gcgggcgcggcacac

SEQ ID NO: 299531 - RNA, 15 nt, Human herpesvirus 2
gcgggcgggggucgg

SEQ ID NO: 299532 - RNA, 14 nt, Human herpesvirus 2
gcggggcaccggca

SEQ ID NO: 299533 - RNA, 14 nt, Human herpesvirus 2
gcgggggccggggc

SEQ ID NO: 299534 - RNA, 12 nt, Human herpesvirus 2
gcgggguggugg

SEQ ID NO: 299535 - RNA, 19 nt, Human herpesvirus 2
gcgguagcggacgcacggc

SEQ ID NO: 299536 - RNA, 17 nt, Human herpesvirus 2
gcgucacagaacggcuc

SEQ ID NO: 299537 - RNA, 22 nt, Human herpesvirus 2
gcgucaugcacgccaucgcucc

SEQ ID NO: 299538 - RNA, 22 nt, Human herpesvirus 2
gcguccgucucaauaaagccag

SEQ ID NO: 299539 - RNA, 14 nt, Human herpesvirus 2
gcgucggcggcccc

SEQ ID NO: 299540 - RNA, 16 nt, Human herpesvirus 2
gcgucgggggccgggg

SEQ ID NO: 299541 - RNA, 14 nt, Human herpesvirus 2
gcgucguccagggu

SEQ ID NO: 299542 - RNA, 18 nt, Human herpesvirus 2
gcgucugaccacgagcac

SEQ ID NO: 299543 - RNA, 22 nt, Human herpesvirus 2
gcgugcguucuggcggcccugg

SEQ ID NO: 299544 - RNA, 14 nt, Human herpesvirus 2
gcguggccgcgacc

SEQ ID NO: 299545 - RNA, 17 nt, Human herpesvirus 2
gcguguguguguguuuu

SEQ ID NO: 299546 - RNA, 16 nt, Human herpesvirus 2
gcguugccgggggcca

SEQ ID NO: 299547 - RNA, 23 nt, Human herpesvirus 2
gcguugcgcuuuccggcccuccc

SEQ ID NO: 299548 - RNA, 20 nt, Human herpesvirus 2
gcuagucuccgaucugcccc

SEQ ID NO: 299549 - RNA, 14 nt, Human herpesvirus 2
gcucaucgcacggc

SEQ ID NO: 299550 - RNA, 15 nt, Human herpesvirus 2
gcucgaccagcggcc

SEQ ID NO: 299551 - RNA, 13 nt, Human herpesvirus 2
gcucgcggggccg

SEQ ID NO: 299552 - RNA, 15 nt, Human herpesvirus 2
gcucgggcuggccga

SEQ ID NO: 299553 - RNA, 13 nt, Human herpesvirus 2
gcucuccgugccc

SEQ ID NO: 299554 - RNA, 17 nt, Human herpesvirus 2
gcucucugccuccuucg

SEQ ID NO: 299555 - RNA, 18 nt, Human herpesvirus 2
gcucuguuucgcauaugc

SEQ ID NO: 299556 - RNA, 22 nt, Human herpesvirus 2
gcugccccgcgugcagcgcggg

SEQ ID NO: 299557 - RNA, 13 nt, Human herpesvirus 2
gcugcggggacca

SEQ ID NO: 299558 - RNA, 13 nt, Human herpesvirus 2
gcuggggaaaucu

SEQ ID NO: 299559 - RNA, 15 nt, Human herpesvirus 2
gcugguggccgcggu

SEQ ID NO: 299560 - RNA, 12 nt, Human herpesvirus 2
gcuguuguugua

SEQ ID NO: 299561 - RNA, 13 nt, Human herpesvirus 2
gcuuaugguaauu

SEQ ID NO: 299562 - RNA, 21 nt, Human herpesvirus 2
gcuucauuuugugggggccca

SEQ ID NO: 299563 - RNA, 21 nt, Human herpesvirus 2
gcuugccccucccccggccca

SEQ ID NO: 299564 - RNA, 23 nt, Human herpesvirus 2
gcuuugguguuuuuggcaccuug

SEQ ID NO: 299565 - RNA, 19 nt, Human herpesvirus 2
ggaaacacaguuccgggaa

SEQ ID NO: 299566 - RNA, 21 nt, Human herpesvirus 2
ggaaacgcaaaaaaaacaaga

SEQ ID NO: 299567 - RNA, 16 nt, Human herpesvirus 2
ggaaaugggggcgggg

SEQ ID NO: 299568 - RNA, 20 nt, Human herpesvirus 2
ggacacccccccccaucugc

SEQ ID NO: 299569 - RNA, 15 nt, Human herpesvirus 2
ggaccaaaagggaaa

SEQ ID NO: 299570 - RNA, 18 nt, Human herpesvirus 2
ggacccccagcccggugu

SEQ ID NO: 299571 - RNA, 14 nt, Human herpesvirus 2
ggacgacgggcgcc

SEQ ID NO: 299572 - RNA, 17 nt, Human herpesvirus 2
ggagaguucaauagauu

SEQ ID NO: 299573 - RNA, 22 nt, Human herpesvirus 2
ggaggagggggggcgggcacga

SEQ ID NO: 299574 - RNA, 14 nt, Human herpesvirus 2
ggaggcguggugau

SEQ ID NO: 299575 - RNA, 19 nt, Human herpesvirus 2
ggaggggggcagugcagua

SEQ ID NO: 299576 - RNA, 15 nt, Human herpesvirus 2
ggaugauggggacga

SEQ ID NO: 299577 - RNA, 12 nt, Human herpesvirus 2
ggaugguggugg

SEQ ID NO: 299578 - RNA, 12 nt, Human herpesvirus 2
ggauucauggac

SEQ ID NO: 299579 - RNA, 15 nt, Human herpesvirus 2
ggcaaacacaccggg

SEQ ID NO: 299580 - RNA, 17 nt, Human herpesvirus 2
ggcaacaaagggccucc

SEQ ID NO: 299581 - RNA, 20 nt, Human herpesvirus 2
ggcaacccgacggcggggcc

SEQ ID NO: 299582 - RNA, 22 nt, Human herpesvirus 2
ggcaacccgacggcggggcccc

SEQ ID NO: 299583 - RNA, 14 nt, Human herpesvirus 2
ggcaagugcaguaa

SEQ ID NO: 299584 - RNA, 15 nt, Human herpesvirus 2
ggcagagagauuucc

SEQ ID NO: 299585 - RNA, 14 nt, Human herpesvirus 2
ggcagcgcgccgac

SEQ ID NO: 299586 - RNA, 16 nt, Human herpesvirus 2
ggcaggcgcgcggguc

SEQ ID NO: 299587 - RNA, 11 nt, Human herpesvirus 2
ggcagugcagu

SEQ ID NO: 299588 - RNA, 16 nt, Human herpesvirus 2
ggcaugcgacggcguc

SEQ ID NO: 299589 - RNA, 21 nt, Human herpesvirus 2
ggccaaccucauccgcggcgc

SEQ ID NO: 299590 - RNA, 19 nt, Human herpesvirus 2
ggccaauacccuccuuuuu

SEQ ID NO: 299591 - RNA, 17 nt, Human herpesvirus 2
ggccacgucgggguccc

SEQ ID NO: 299592 - RNA, 14 nt, Human herpesvirus 2
ggccagcgggggcc

SEQ ID NO: 299593 - RNA, 17 nt, Human herpesvirus 2
ggccgccuccccgcugg

SEQ ID NO: 299594 - RNA, 18 nt, Human herpesvirus 2
ggccgcgcgcguguguga

SEQ ID NO: 299595 - RNA, 15 nt, Human herpesvirus 2
ggccgcgguggcguc

SEQ ID NO: 299596 - RNA, 16 nt, Human herpesvirus 2
ggccggcggagccccg

SEQ ID NO: 299597 - RNA, 13 nt, Human herpesvirus 2
ggccgugggcguc

SEQ ID NO: 299598 - RNA, 15 nt, Human herpesvirus 2
ggccuuugcuuccuc

SEQ ID NO: 299599 - RNA, 17 nt, Human herpesvirus 2
ggcgacgccgcggccga

SEQ ID NO: 299600 - RNA, 19 nt, Human herpesvirus 2
ggcgagaggucaauagauu

SEQ ID NO: 299601 - RNA, 20 nt, Human herpesvirus 2
ggcgauuaacaacaccaaac

SEQ ID NO: 299602 - RNA, 17 nt, Human herpesvirus 2
ggcggcccuggagcgcc

SEQ ID NO: 299603 - RNA, 16 nt, Human herpesvirus 2
ggcggcguggccgcga

SEQ ID NO: 299604 - RNA, 11 nt, Human herpesvirus 2
ggcgucugugc

SEQ ID NO: 299605 - RNA, 12 nt, Human herpesvirus 2
ggcguggugaua

SEQ ID NO: 299606 - RNA, 12 nt, Human herpesvirus 2
ggcuacuaccug

SEQ ID NO: 299607 - RNA, 16 nt, Human herpesvirus 2
ggcucgccgugcgcug

SEQ ID NO: 299608 - RNA, 13 nt, Human herpesvirus 2
ggcucgcggggcc

SEQ ID NO: 299609 - RNA, 17 nt, Human herpesvirus 2
ggcuggggaaagggaag

SEQ ID NO: 299610 - RNA, 20 nt, Human herpesvirus 2
ggcuucccgguaugguaauu

SEQ ID NO: 299611 - RNA, 19 nt, Human herpesvirus 2
gggaaaaccaaccccaaac

SEQ ID NO: 299612 - RNA, 19 nt, Human herpesvirus 2
gggaaagaaagaaacacaa

SEQ ID NO: 299613 - RNA, 14 nt, Human herpesvirus 2
gggaaaggaaagga

SEQ ID NO: 299614 - RNA, 16 nt, Human herpesvirus 2
gggaaaggaaaggaaa

SEQ ID NO: 299615 - RNA, 13 nt, Human herpesvirus 2
gggaaaucucucu

SEQ ID NO: 299616 - RNA, 15 nt, Human herpesvirus 2
gggacgacgaccaug

SEQ ID NO: 299617 - RNA, 13 nt, Human herpesvirus 2
gggacggccgggc

SEQ ID NO: 299618 - RNA, 14 nt, Human herpesvirus 2
gggaggauguguuc

SEQ ID NO: 299619 - RNA, 14 nt, Human herpesvirus 2
gggagguaucagug

SEQ ID NO: 299620 - RNA, 17 nt, Human herpesvirus 2
gggcagcgugucaaagg

SEQ ID NO: 299621 - RNA, 18 nt, Human herpesvirus 2
gggccacgucgggguccc

SEQ ID NO: 299622 - RNA, 20 nt, Human herpesvirus 2
gggccccgggugcgggaugu

SEQ ID NO: 299623 - RNA, 22 nt, Human herpesvirus 2
gggccgcccggagcggugggga

SEQ ID NO: 299624 - RNA, 22 nt, Human herpesvirus 2
gggccucucgacggagagccgg

SEQ ID NO: 299625 - RNA, 20 nt, Human herpesvirus 2
gggcgaaaaggcccggcccg

SEQ ID NO: 299626 - RNA, 15 nt, Human herpesvirus 2
gggcgcacacgccau

SEQ ID NO: 299627 - RNA, 15 nt, Human herpesvirus 2
gggcgcgcggcgcga

SEQ ID NO: 299628 - RNA, 19 nt, Human herpesvirus 2
gggcggccagccgcgcgac

SEQ ID NO: 299629 - RNA, 19 nt, Human herpesvirus 2
gggcggcguggccgcgacc

SEQ ID NO: 299630 - RNA, 14 nt, Human herpesvirus 2
gggcgugauguuuu

SEQ ID NO: 299631 - RNA, 21 nt, Human herpesvirus 2
gggcuuugguguuuuuggcac

SEQ ID NO: 299632 - RNA, 21 nt, Human herpesvirus 2
ggggaaggaaucgggcgucug

SEQ ID NO: 299633 - RNA, 20 nt, Human herpesvirus 2
ggggacacgcggcgggucgg

SEQ ID NO: 299634 - RNA, 13 nt, Human herpesvirus 2
ggggagggcgugg

SEQ ID NO: 299635 - RNA, 18 nt, Human herpesvirus 2
ggggaucagcaaccaggc

SEQ ID NO: 299636 - RNA, 21 nt, Human herpesvirus 2
ggggaucugucgccggcgugg

SEQ ID NO: 299637 - RNA, 14 nt, Human herpesvirus 2
ggggcaagugcagu

SEQ ID NO: 299638 - RNA, 15 nt, Human herpesvirus 2
ggggcaagugcagua

SEQ ID NO: 299639 - RNA, 15 nt, Human herpesvirus 2
ggggcccgccgccgc

SEQ ID NO: 299640 - RNA, 17 nt, Human herpesvirus 2
ggggcgcugguggccgc

SEQ ID NO: 299641 - RNA, 19 nt, Human herpesvirus 2
ggggcgggggugccgugga

SEQ ID NO: 299642 - RNA, 21 nt, Human herpesvirus 2
ggggcuccucagcgcggccgu

SEQ ID NO: 299643 - RNA, 14 nt, Human herpesvirus 2
gggggaaagaaaga

SEQ ID NO: 299644 - RNA, 21 nt, Human herpesvirus 2
ggggucccgccucccggccgc

SEQ ID NO: 299645 - RNA, 15 nt, Human herpesvirus 2
ggguccgacgaggcc

SEQ ID NO: 299646 - RNA, 17 nt, Human herpesvirus 2
gggugacauucaccccc

SEQ ID NO: 299647 - RNA, 16 nt, Human herpesvirus 2
gggugaggaagaaaga

SEQ ID NO: 299648 - RNA, 23 nt, Human herpesvirus 2
ggguggcggcuggggaaagggaa

SEQ ID NO: 299649 - RNA, 16 nt, Human herpesvirus 2
ggguguagggcccaac

SEQ ID NO: 299650 - RNA, 12 nt, Human herpesvirus 2
ggguuacugcac

SEQ ID NO: 299651 - RNA, 14 nt, Human herpesvirus 2
ggguuacugcacuu

SEQ ID NO: 299652 - RNA, 19 nt, Human herpesvirus 2
gguaauuagcaacuuuuaa

SEQ ID NO: 299653 - RNA, 23 nt, Human herpesvirus 2
ggucaucgucccccgucugccag

SEQ ID NO: 299654 - RNA, 20 nt, Human herpesvirus 2
gguccgagacggccaugacc

SEQ ID NO: 299655 - RNA, 19 nt, Human herpesvirus 2
gguccuggaggggggugcu

SEQ ID NO: 299656 - RNA, 21 nt, Human herpesvirus 2
ggucgcgcuuuuccgccgccg

SEQ ID NO: 299657 - RNA, 16 nt, Human herpesvirus 2
ggucggcgaacacaac

SEQ ID NO: 299658 - RNA, 12 nt, Human herpesvirus 2
ggucgggcgggc

SEQ ID NO: 299659 - RNA, 18 nt, Human herpesvirus 2
ggucucggggccguccug

SEQ ID NO: 299660 - RNA, 17 nt, Human herpesvirus 2
ggugacccacgccaaca

SEQ ID NO: 299661 - RNA, 18 nt, Human herpesvirus 2
ggugauacaacacacccc

SEQ ID NO: 299662 - RNA, 21 nt, Human herpesvirus 2
ggugcuggccaaugccucccc

SEQ ID NO: 299663 - RNA, 16 nt, Human herpesvirus 2
gguggggaacguucca

SEQ ID NO: 299664 - RNA, 23 nt, Human herpesvirus 2
ggugugacgcgaugggggguccg

SEQ ID NO: 299665 - RNA, 23 nt, Human herpesvirus 2
gguucaauaaaaaacaccaacau

SEQ ID NO: 299666 - RNA, 13 nt, Human herpesvirus 2
gguucggggccag

SEQ ID NO: 299667 - RNA, 15 nt, Human herpesvirus 2
guaauauaacuuugg

SEQ ID NO: 299668 - RNA, 16 nt, Human herpesvirus 2
guaauuagcaacuuuu

SEQ ID NO: 299669 - RNA, 16 nt, Human herpesvirus 2
guacagccuacaucac

SEQ ID NO: 299670 - RNA, 12 nt, Human herpesvirus 2
guacccucucaa

SEQ ID NO: 299671 - RNA, 15 nt, Human herpesvirus 2
guauucccccgcggg

SEQ ID NO: 299672 - RNA, 18 nt, Human herpesvirus 2
gucaauagauuuccccaa

SEQ ID NO: 299673 - RNA, 22 nt, Human herpesvirus 2
gucaauagauuuccccaagaga

SEQ ID NO: 299674 - RNA, 21 nt, Human herpesvirus 2
gucccaauaaaacccagaccc

SEQ ID NO: 299675 - RNA, 20 nt, Human herpesvirus 2
gucccuuccccaccaccaac

SEQ ID NO: 299676 - RNA, 17 nt, Human herpesvirus 2
guccgucagcgccgcgg

SEQ ID NO: 299677 - RNA, 15 nt, Human herpesvirus 2
guccguugguucguc

SEQ ID NO: 299678 - RNA, 23 nt, Human herpesvirus 2
guccuaaggcgccgacggcggcg

SEQ ID NO: 299679 - RNA, 16 nt, Human herpesvirus 2
guccugcggcagcgcg

SEQ ID NO: 299680 - RNA, 22 nt, Human herpesvirus 2
gucgacguuuauucaccacaca

SEQ ID NO: 299681 - RNA, 13 nt, Human herpesvirus 2
gucgcaugcaaau

SEQ ID NO: 299682 - RNA, 15 nt, Human herpesvirus 2
gucgcccauacaaau

SEQ ID NO: 299683 - RNA, 21 nt, Human herpesvirus 2
gucgcgcuuuuccgccgccgg

SEQ ID NO: 299684 - RNA, 15 nt, Human herpesvirus 2
gucggagaggcccgc

SEQ ID NO: 299685 - RNA, 11 nt, Human herpesvirus 2
gucgggguccc

SEQ ID NO: 299686 - RNA, 16 nt, Human herpesvirus 2
gucuaacccaguaaca

SEQ ID NO: 299687 - RNA, 15 nt, Human herpesvirus 2
gucucaauaaagcca

SEQ ID NO: 299688 - RNA, 16 nt, Human herpesvirus 2
gucucaauaaagccag

SEQ ID NO: 299689 - RNA, 18 nt, Human herpesvirus 2
gucuccggugugauuauu

SEQ ID NO: 299690 - RNA, 20 nt, Human herpesvirus 2
gucugaccacgagcacaaac

SEQ ID NO: 299691 - RNA, 15 nt, Human herpesvirus 2
gucugcgccaccggc

SEQ ID NO: 299692 - RNA, 17 nt, Human herpesvirus 2
gucugguuuuucugggg

SEQ ID NO: 299693 - RNA, 20 nt, Human herpesvirus 2
gugacgcgaugggggguccg

SEQ ID NO: 299694 - RNA, 21 nt, Human herpesvirus 2
gugacucgccauggcggccgc

SEQ ID NO: 299695 - RNA, 22 nt, Human herpesvirus 2
gugcacaagacacacacacagg

SEQ ID NO: 299696 - RNA, 19 nt, Human herpesvirus 2
gugcaguaacccaguuccu

SEQ ID NO: 299697 - RNA, 20 nt, Human herpesvirus 2
gugcaguaacccaguuccuc

SEQ ID NO: 299698 - RNA, 19 nt, Human herpesvirus 2
gugcaguaccccaguuccu

SEQ ID NO: 299699 - RNA, 21 nt, Human herpesvirus 2
gugccguuggguugggcguua

SEQ ID NO: 299700 - RNA, 18 nt, Human herpesvirus 2
gugccucacgguccucac

SEQ ID NO: 299701 - RNA, 17 nt, Human herpesvirus 2
gugcgcaugggccgcca

SEQ ID NO: 299702 - RNA, 22 nt, Human herpesvirus 2
guggaaagacaugauagaggga

SEQ ID NO: 299703 - RNA, 11 nt, Human herpesvirus 2
guggcccuccu

SEQ ID NO: 299704 - RNA, 15 nt, Human herpesvirus 2
guggcccuggcggac

SEQ ID NO: 299705 - RNA, 22 nt, Human herpesvirus 2
guggggagucgggccccuacuc

SEQ ID NO: 299706 - RNA, 22 nt, Human herpesvirus 2
gugggucugcgccaccggccug

SEQ ID NO: 299707 - RNA, 21 nt, Human herpesvirus 2
gugggugcuucggggacuuga

SEQ ID NO: 299708 - RNA, 14 nt, Human herpesvirus 2
guggucguggugcu

SEQ ID NO: 299709 - RNA, 13 nt, Human herpesvirus 2
guggugcacgugu

SEQ ID NO: 299710 - RNA, 16 nt, Human herpesvirus 2
guguaauggggccgca

SEQ ID NO: 299711 - RNA, 23 nt, Human herpesvirus 2
guguacgcgaaggcggacccaga

SEQ ID NO: 299712 - RNA, 22 nt, Human herpesvirus 2
gugugacgcgaugggggguccg

SEQ ID NO: 299713 - RNA, 19 nt, Human herpesvirus 2
gugugacuagaaaaacaaa

SEQ ID NO: 299714 - RNA, 22 nt, Human herpesvirus 2
guguggaugaagauaaaccaga

SEQ ID NO: 299715 - RNA, 18 nt, Human herpesvirus 2
guguuuaaaacccggggu

SEQ ID NO: 299716 - RNA, 15 nt, Human herpesvirus 2
guguuugggaaaucu

SEQ ID NO: 299717 - RNA, 12 nt, Human herpesvirus 2
guuacugcacuu

SEQ ID NO: 299718 - RNA, 17 nt, Human herpesvirus 2
guuauaggccacacagu

SEQ ID NO: 299719 - RNA, 19 nt, Human herpesvirus 2
guucaauagauuucccaaa

SEQ ID NO: 299720 - RNA, 17 nt, Human herpesvirus 2
guucgccccgcagccua

SEQ ID NO: 299721 - RNA, 16 nt, Human herpesvirus 2
guucggacgaaacaaa

SEQ ID NO: 299722 - RNA, 13 nt, Human herpesvirus 2
guucuccuggacg

SEQ ID NO: 299723 - RNA, 19 nt, Human herpesvirus 2
guucuuggcgcgcgcggcg

SEQ ID NO: 299724 - RNA, 15 nt, Human herpesvirus 2
guuguagggccgcgg

SEQ ID NO: 299725 - RNA, 20 nt, Human herpesvirus 2
guuucaccgccccagcacca

SEQ ID NO: 299726 - RNA, 20 nt, Human herpesvirus 2
guuucugguccgccugguca

SEQ ID NO: 299727 - RNA, 22 nt, Human herpesvirus 2
guuuuacauaacaguagggggu

SEQ ID NO: 299728 - RNA, 19 nt, Human herpesvirus 2
guuuuacgugacgucaauc

SEQ ID NO: 299729 - RNA, 15 nt, Human herpesvirus 2
guuuuucuagucaca

SEQ ID NO: 299730 - RNA, 10 nt, Human herpesvirus 2
uaaaagccaa

SEQ ID NO: 299731 - RNA, 20 nt, Human herpesvirus 2
uaaacgaucgcaacuacagu

SEQ ID NO: 299732 - RNA, 17 nt, Human herpesvirus 2
uaaagaacgagacagac

SEQ ID NO: 299733 - RNA, 13 nt, Human herpesvirus 2
uaaccaaccaacg

SEQ ID NO: 299734 - RNA, 17 nt, Human herpesvirus 2
uaagcgcugcggggacc

SEQ ID NO: 299735 - RNA, 18 nt, Human herpesvirus 2
uaagcgcugcggggacca

SEQ ID NO: 299736 - RNA, 21 nt, Human herpesvirus 2
uaagcgcugcggggaccagcc

SEQ ID NO: 299737 - RNA, 15 nt, Human herpesvirus 2
uaauaaagagugaga

SEQ ID NO: 299738 - RNA, 22 nt, Human herpesvirus 2
uaauaaagagugagaaccaacc

SEQ ID NO: 299739 - RNA, 15 nt, Human herpesvirus 2
uacaacggcauccgu

SEQ ID NO: 299740 - RNA, 21 nt, Human herpesvirus 2
uacaauaaaguuuugugaugc

SEQ ID NO: 299741 - RNA, 12 nt, Human herpesvirus 2
uacacaccaacu

SEQ ID NO: 299742 - RNA, 15 nt, Human herpesvirus 2
uaccugacgcggccc

SEQ ID NO: 299743 - RNA, 19 nt, Human herpesvirus 2
uacgaagcggacaaacccg

SEQ ID NO: 299744 - RNA, 15 nt, Human herpesvirus 2
uacugauguguugua

SEQ ID NO: 299745 - RNA, 13 nt, Human herpesvirus 2
uagaaacuuuuaa

SEQ ID NO: 299746 - RNA, 14 nt, Human herpesvirus 2
uagauugacucagc

SEQ ID NO: 299747 - RNA, 15 nt, Human herpesvirus 2
uagauuucccaaaca

SEQ ID NO: 299748 - RNA, 11 nt, Human herpesvirus 2
uagcgaugucu

SEQ ID NO: 299749 - RNA, 19 nt, Human herpesvirus 2
uagcgaugucuaaccgaaa

SEQ ID NO: 299750 - RNA, 18 nt, Human herpesvirus 2
uaggcccggggggggccu

SEQ ID NO: 299751 - RNA, 23 nt, Human herpesvirus 2
uagggaagucucuuggggaaauc

SEQ ID NO: 299752 - RNA, 13 nt, Human herpesvirus 2
uagggggggaaac

SEQ ID NO: 299753 - RNA, 16 nt, Human herpesvirus 2
uauaccuugauuuuga

SEQ ID NO: 299754 - RNA, 23 nt, Human herpesvirus 2
uauggacuuucuggccuuguuga

SEQ ID NO: 299755 - RNA, 14 nt, Human herpesvirus 2
uauuagcaucgggg

SEQ ID NO: 299756 - RNA, 17 nt, Human herpesvirus 2
ucaauaaaaaacaccaa

SEQ ID NO: 299757 - RNA, 13 nt, Human herpesvirus 2
ucaauaaagccag

SEQ ID NO: 299758 - RNA, 15 nt, Human herpesvirus 2
ucaauagauuuccca

SEQ ID NO: 299759 - RNA, 16 nt, Human herpesvirus 2
ucaauagauuucccca

SEQ ID NO: 299760 - RNA, 16 nt, Human herpesvirus 2
ucaaucaauccaucau

SEQ ID NO: 299761 - RNA, 19 nt, Human herpesvirus 2
ucacccccgggggggggca

SEQ ID NO: 299762 - RNA, 18 nt, Human herpesvirus 2
ucacgagguuuggggcgg

SEQ ID NO: 299763 - RNA, 15 nt, Human herpesvirus 2
ucaggagauaggcau

SEQ ID NO: 299764 - RNA, 14 nt, Human herpesvirus 2
ucaguccgcgcggg

SEQ ID NO: 299765 - RNA, 17 nt, Human herpesvirus 2
ucaguguuugggaaauc

SEQ ID NO: 299766 - RNA, 17 nt, Human herpesvirus 2
ucaucgggaaucucggg

SEQ ID NO: 299767 - RNA, 15 nt, Human herpesvirus 2
uccacaagcuaugca

SEQ ID NO: 299768 - RNA, 12 nt, Human herpesvirus 2
uccaccaccagc

SEQ ID NO: 299769 - RNA, 14 nt, Human herpesvirus 2
uccaccgauguauu

SEQ ID NO: 299770 - RNA, 18 nt, Human herpesvirus 2
uccacgcccugcuguauc

SEQ ID NO: 299771 - RNA, 12 nt, Human herpesvirus 2
ucccaaacacug

SEQ ID NO: 299772 - RNA, 13 nt, Human herpesvirus 2
ucccaaacacuga

SEQ ID NO: 299773 - RNA, 20 nt, Human herpesvirus 2
ucccaaacacugaggaacug

SEQ ID NO: 299774 - RNA, 17 nt, Human herpesvirus 2
ucccaauaaagugcagu

SEQ ID NO: 299775 - RNA, 13 nt, Human herpesvirus 2
ucccccgggacuu

SEQ ID NO: 299776 - RNA, 18 nt, Human herpesvirus 2
ucccccguacuauacaac

SEQ ID NO: 299777 - RNA, 16 nt, Human herpesvirus 2
uccccgaaagccacca

SEQ ID NO: 299778 - RNA, 14 nt, Human herpesvirus 2
uccccggcgccaug

SEQ ID NO: 299779 - RNA, 18 nt, Human herpesvirus 2
uccccuccgcucccgccu

SEQ ID NO: 299780 - RNA, 14 nt, Human herpesvirus 2
uccccuggggcggc

SEQ ID NO: 299781 - RNA, 22 nt, Human herpesvirus 2
ucccgauguuguguucgccgac

SEQ ID NO: 299782 - RNA, 13 nt, Human herpesvirus 2
ucccgcccgccag

SEQ ID NO: 299783 - RNA, 18 nt, Human herpesvirus 2
ucccgcccgccagugcau

SEQ ID NO: 299784 - RNA, 23 nt, Human herpesvirus 2
ucccggccgccauccccgcgcau

SEQ ID NO: 299785 - RNA, 19 nt, Human herpesvirus 2
ucccggucggggccgccag

SEQ ID NO: 299786 - RNA, 12 nt, Human herpesvirus 2
ucccuaacacgg

SEQ ID NO: 299787 - RNA, 23 nt, Human herpesvirus 2
ucccucgcgcgcauccacaagcu

SEQ ID NO: 299788 - RNA, 11 nt, Human herpesvirus 2
uccgaccugca

SEQ ID NO: 299789 - RNA, 18 nt, Human herpesvirus 2
uccgacuuccgcauacac

SEQ ID NO: 299790 - RNA, 11 nt, Human herpesvirus 2
uccggggcggu

SEQ ID NO: 299791 - RNA, 19 nt, Human herpesvirus 2
uccguauguuaauugcaau

SEQ ID NO: 299792 - RNA, 18 nt, Human herpesvirus 2
uccgucccccguacccac

SEQ ID NO: 299793 - RNA, 21 nt, Human herpesvirus 2
uccucccccccccccaaaaaa

SEQ ID NO: 299794 - RNA, 20 nt, Human herpesvirus 2
uccucccccguacuauacaa

SEQ ID NO: 299795 - RNA, 22 nt, Human herpesvirus 2
uccuccgugcuggggaaaucuc

SEQ ID NO: 299796 - RNA, 16 nt, Human herpesvirus 2
uccugccacccgaaca

SEQ ID NO: 299797 - RNA, 23 nt, Human herpesvirus 2
uccuuaaauaaacacaaaccaca

SEQ ID NO: 299798 - RNA, 23 nt, Human herpesvirus 2
uccuuccuccacccccagaaaaa

SEQ ID NO: 299799 - RNA, 20 nt, Human herpesvirus 2
uccuucggugcacaagacac

SEQ ID NO: 299800 - RNA, 17 nt, Human herpesvirus 2
ucgagaugugccuucca

SEQ ID NO: 299801 - RNA, 15 nt, Human herpesvirus 2
ucgccaucgugcgcu

SEQ ID NO: 299802 - RNA, 12 nt, Human herpesvirus 2
ucgcccauacaa

SEQ ID NO: 299803 - RNA, 15 nt, Human herpesvirus 2
ucgcccgucccggca

SEQ ID NO: 299804 - RNA, 12 nt, Human herpesvirus 2
ucgccggggacc

SEQ ID NO: 299805 - RNA, 18 nt, Human herpesvirus 2
ucgccucucuucuucccc

SEQ ID NO: 299806 - RNA, 10 nt, Human herpesvirus 2
ucgccuguug

SEQ ID NO: 299807 - RNA, 18 nt, Human herpesvirus 2
ucgcgcuuuuccgccgcc

SEQ ID NO: 299808 - RNA, 16 nt, Human herpesvirus 2
ucgcggcccggcgcca

SEQ ID NO: 299809 - RNA, 18 nt, Human herpesvirus 2
ucgcggccgcccgcgccg

SEQ ID NO: 299810 - RNA, 16 nt, Human herpesvirus 2
ucggaaagccggcccc

SEQ ID NO: 299811 - RNA, 19 nt, Human herpesvirus 2
ucggcggaaaugcgcgagc

SEQ ID NO: 299812 - RNA, 18 nt, Human herpesvirus 2
ucgggcaugggcuacuac

SEQ ID NO: 299813 - RNA, 18 nt, Human herpesvirus 2
ucgggggggaaagaaaga

SEQ ID NO: 299814 - RNA, 18 nt, Human herpesvirus 2
ucgggucuacuacgaguc

SEQ ID NO: 299815 - RNA, 19 nt, Human herpesvirus 2
ucgucgcuaucacauacgc

SEQ ID NO: 299816 - RNA, 22 nt, Human herpesvirus 2
ucguggacaucgaguccgaaga

SEQ ID NO: 299817 - RNA, 17 nt, Human herpesvirus 2
ucgugggggacgaggag

SEQ ID NO: 299818 - RNA, 19 nt, Human herpesvirus 2
ucucaaacaaaaacacaag

SEQ ID NO: 299819 - RNA, 14 nt, Human herpesvirus 2
ucuccggugugauu

SEQ ID NO: 299820 - RNA, 21 nt, Human herpesvirus 2
ucucugcguugcgucugacca

SEQ ID NO: 299821 - RNA, 10 nt, Human herpesvirus 2
ucucuucccc

SEQ ID NO: 299822 - RNA, 15 nt, Human herpesvirus 2
ucugugcgccuuuaa

SEQ ID NO: 299823 - RNA, 16 nt, Human herpesvirus 2
ucuguguggugaauaa

SEQ ID NO: 299824 - RNA, 21 nt, Human herpesvirus 2
ucuucgcgggcaggccgcggc

SEQ ID NO: 299825 - RNA, 22 nt, Human herpesvirus 2
ucuuggggaaaucuauugaccu

SEQ ID NO: 299826 - RNA, 16 nt, Human herpesvirus 2
ucuuggggucgcgaac

SEQ ID NO: 299827 - RNA, 18 nt, Human herpesvirus 2
ugaaacguacaacacauc

SEQ ID NO: 299828 - RNA, 16 nt, Human herpesvirus 2
ugacccacgccaacaa

SEQ ID NO: 299829 - RNA, 14 nt, Human herpesvirus 2
ugaccggcgccgau

SEQ ID NO: 299830 - RNA, 13 nt, Human herpesvirus 2
ugaccucucgccc

SEQ ID NO: 299831 - RNA, 13 nt, Human herpesvirus 2
ugacgacggcccc

SEQ ID NO: 299832 - RNA, 18 nt, Human herpesvirus 2
ugagaaccaaccaaaaca

SEQ ID NO: 299833 - RNA, 21 nt, Human herpesvirus 2
ugaucguagacgggcucgcca

SEQ ID NO: 299834 - RNA, 19 nt, Human herpesvirus 2
ugauucgcgaacacaagcu

SEQ ID NO: 299835 - RNA, 22 nt, Human herpesvirus 2
ugcaaaugggauucauggacau

SEQ ID NO: 299836 - RNA, 14 nt, Human herpesvirus 2
ugcaagcgggcggg

SEQ ID NO: 299837 - RNA, 17 nt, Human herpesvirus 2
ugcaauaaagugguuga

SEQ ID NO: 299838 - RNA, 23 nt, Human herpesvirus 2
ugcaauaaagugguugauuguca

SEQ ID NO: 299839 - RNA, 15 nt, Human herpesvirus 2
ugcagacaugugcua

SEQ ID NO: 299840 - RNA, 16 nt, Human herpesvirus 2
ugcaguaacccaguuc

SEQ ID NO: 299841 - RNA, 17 nt, Human herpesvirus 2
ugcaguaacccaguucc

SEQ ID NO: 299842 - RNA, 21 nt, Human herpesvirus 2
ugcaguaacccaguuccucag

SEQ ID NO: 299843 - RNA, 16 nt, Human herpesvirus 2
ugcaguaccccaguuc

SEQ ID NO: 299844 - RNA, 13 nt, Human herpesvirus 2
ugcauuuccuccc

SEQ ID NO: 299845 - RNA, 12 nt, Human herpesvirus 2
aaaaaacaccaa

SEQ ID NO: 299846 - RNA, 13 nt, Human herpesvirus 2
aaaaaaccgccaa

SEQ ID NO: 299847 - RNA, 15 nt, Human herpesvirus 2
aaaaaagaaaccggg

SEQ ID NO: 299848 - RNA, 20 nt, Human herpesvirus 2
aaaaagacaccgauguucaa

SEQ ID NO: 299849 - RNA, 15 nt, Human herpesvirus 2
aaaacaaaugcagac

SEQ ID NO: 299850 - RNA, 22 nt, Human herpesvirus 2
aaaacaaaugcagacaugugcu

SEQ ID NO: 299851 - RNA, 17 nt, Human herpesvirus 2
aaaaccgccaacaccag

SEQ ID NO: 299852 - RNA, 23 nt, Human herpesvirus 2
aaaauaaacgaucgcaacuacag

SEQ ID NO: 299853 - RNA, 13 nt, Human herpesvirus 2
aaaauacacauga

SEQ ID NO: 299854 - RNA, 11 nt, Human herpesvirus 2
aaacaaaaaca

SEQ ID NO: 299855 - RNA, 18 nt, Human herpesvirus 2
aaacaaccggacaaaagu

SEQ ID NO: 299856 - RNA, 16 nt, Human herpesvirus 2
aaacaauaaacagcua

SEQ ID NO: 299857 - RNA, 20 nt, Human herpesvirus 2
aaacccgccggggcuucgug

SEQ ID NO: 299858 - RNA, 11 nt, Human herpesvirus 2
aaacccggggu

SEQ ID NO: 299859 - RNA, 20 nt, Human herpesvirus 2
aaacggucggcgaacacaac

SEQ ID NO: 299860 - RNA, 20 nt, Human herpesvirus 2
aaacucguucguaaacacca

SEQ ID NO: 299861 - RNA, 18 nt, Human herpesvirus 2
aaagacaugauagaggga

SEQ ID NO: 299862 - RNA, 16 nt, Human herpesvirus 2
aaagagaaacaaaaga

SEQ ID NO: 299863 - RNA, 22 nt, Human herpesvirus 2
aaagcgcuggcauuaaccaacc

SEQ ID NO: 299864 - RNA, 18 nt, Human herpesvirus 2
aaauaaacacaaaccaca

SEQ ID NO: 299865 - RNA, 15 nt, Human herpesvirus 2
aaauaaacaccacaa

SEQ ID NO: 299866 - RNA, 17 nt, Human herpesvirus 2
aaauacacgacccgccu

SEQ ID NO: 299867 - RNA, 20 nt, Human herpesvirus 2
aaaucaagcgccgaccagaa

SEQ ID NO: 299868 - RNA, 15 nt, Human herpesvirus 2
aaaucuauugaacuc

SEQ ID NO: 299869 - RNA, 19 nt, Human herpesvirus 2
aacaaacucguguacaaac

SEQ ID NO: 299870 - RNA, 21 nt, Human herpesvirus 2
aacaaaugcagacaugugcua

SEQ ID NO: 299871 - RNA, 14 nt, Human herpesvirus 2
aacaacaccaaaca

SEQ ID NO: 299872 - RNA, 15 nt, Human herpesvirus 2
aacaauaaaccugug

SEQ ID NO: 299873 - RNA, 11 nt, Human herpesvirus 2
aacacaagcuc

SEQ ID NO: 299874 - RNA, 17 nt, Human herpesvirus 2
aacacacaccagcauuu

SEQ ID NO: 299875 - RNA, 17 nt, Human herpesvirus 2
aacacaggcgcuucauc

SEQ ID NO: 299876 - RNA, 23 nt, Human herpesvirus 2
aacaccguccccgagagccugau

SEQ ID NO: 299877 - RNA, 13 nt, Human herpesvirus 2
aacagcgauguug

SEQ ID NO: 299878 - RNA, 19 nt, Human herpesvirus 2
aacauuggcaagcaacuca

SEQ ID NO: 299879 - RNA, 15 nt, Human herpesvirus 2
aaccaaccaacgagc

SEQ ID NO: 299880 - RNA, 12 nt, Human herpesvirus 2
aaccaacggaca

SEQ ID NO: 299881 - RNA, 14 nt, Human herpesvirus 2
aaccacccaaccaa

SEQ ID NO: 299882 - RNA, 16 nt, Human herpesvirus 2
aacccccgacauuccc

SEQ ID NO: 299883 - RNA, 18 nt, Human herpesvirus 2
aaccgauguuauuugccu

SEQ ID NO: 299884 - RNA, 17 nt, Human herpesvirus 2
aaccggacaaaaguaua

SEQ ID NO: 299885 - RNA, 15 nt, Human herpesvirus 2
aacgcucaguucauc

SEQ ID NO: 299886 - RNA, 15 nt, Human herpesvirus 2
aacggacaaccgagc

SEQ ID NO: 299887 - RNA, 15 nt, Human herpesvirus 2
aacgucccaaacuca

SEQ ID NO: 299888 - RNA, 15 nt, Human herpesvirus 2
aacucguguacaaac

SEQ ID NO: 299889 - RNA, 20 nt, Human herpesvirus 2
aacucguucguaaacaccaa

SEQ ID NO: 299890 - RNA, 16 nt, Human herpesvirus 2
aacugggguacugcac

SEQ ID NO: 299891 - RNA, 17 nt, Human herpesvirus 2
aacuggguuacugcacu

SEQ ID NO: 299892 - RNA, 19 nt, Human herpesvirus 2
aacuggguuacugcacuug

SEQ ID NO: 299893 - RNA, 16 nt, Human herpesvirus 2
aagacacacacacagg

SEQ ID NO: 299894 - RNA, 23 nt, Human herpesvirus 2
aagacaugauagagggaacaaag

SEQ ID NO: 299895 - RNA, 17 nt, Human herpesvirus 2
aagagugagaaccaacc

SEQ ID NO: 299896 - RNA, 14 nt, Human herpesvirus 2
aagauaaaccagac

SEQ ID NO: 299897 - RNA, 13 nt, Human herpesvirus 2
aagcauccucacc

SEQ ID NO: 299898 - RNA, 14 nt, Human herpesvirus 2
aagccaccaauaca

SEQ ID NO: 299899 - RNA, 19 nt, Human herpesvirus 2
aagccaccaauacaccaga

SEQ ID NO: 299900 - RNA, 20 nt, Human herpesvirus 2
aagcccacaacccaucccac

SEQ ID NO: 299901 - RNA, 23 nt, Human herpesvirus 2
aagcccacaacccaucccacaau

SEQ ID NO: 299902 - RNA, 14 nt, Human herpesvirus 2
aagcgcugcgggga

SEQ ID NO: 299903 - RNA, 23 nt, Human herpesvirus 2
aagcgcuggcauuaaccaaccaa

SEQ ID NO: 299904 - RNA, 17 nt, Human herpesvirus 2
aaggcaaaacaauacca

SEQ ID NO: 299905 - RNA, 20 nt, Human herpesvirus 2
aaguauggugaaacgcacaa

SEQ ID NO: 299906 - RNA, 17 nt, Human herpesvirus 2
aaguggggggguggugg

SEQ ID NO: 299907 - RNA, 14 nt, Human herpesvirus 2
aauaaacauuggca

SEQ ID NO: 299908 - RNA, 12 nt, Human herpesvirus 2
aauaaagccagg

SEQ ID NO: 299909 - RNA, 19 nt, Human herpesvirus 2
aauaauccggcgaucccca

SEQ ID NO: 299910 - RNA, 22 nt, Human herpesvirus 2
aauaccacgcgacgaaccagca

SEQ ID NO: 299911 - RNA, 12 nt, Human herpesvirus 2
aauagauuuccc

SEQ ID NO: 299912 - RNA, 18 nt, Human herpesvirus 2
aaucaagcgccgaccaga

SEQ ID NO: 299913 - RNA, 13 nt, Human herpesvirus 2
aaugacacaaaaa

SEQ ID NO: 299914 - RNA, 14 nt, Human herpesvirus 2
aaugacacaaaaau

SEQ ID NO: 299915 - RNA, 13 nt, Human herpesvirus 2
aauuagcaacuuu

SEQ ID NO: 299916 - RNA, 13 nt, Human herpesvirus 2
aauuagcagcuuu

SEQ ID NO: 299917 - RNA, 18 nt, Human herpesvirus 2
acaaaaacacaagcacac

SEQ ID NO: 299918 - RNA, 16 nt, Human herpesvirus 2
acaaaugcagacaugu

SEQ ID NO: 299919 - RNA, 20 nt, Human herpesvirus 2
acaaaugcagacaugugcua

SEQ ID NO: 299920 - RNA, 15 nt, Human herpesvirus 2
acaacccaucccaca

SEQ ID NO: 299921 - RNA, 13 nt, Human herpesvirus 2
acaauaacaaaca

SEQ ID NO: 299922 - RNA, 14 nt, Human herpesvirus 2
acaauaauaaagcu

SEQ ID NO: 299923 - RNA, 13 nt, Human herpesvirus 2
acacaaaccacac

SEQ ID NO: 299924 - RNA, 17 nt, Human herpesvirus 2
acacaagcucgccguga

SEQ ID NO: 299925 - RNA, 22 nt, Human herpesvirus 2
acacgugggcggcgaaccggua

SEQ ID NO: 299926 - RNA, 17 nt, Human herpesvirus 2
acacugaggaacugggu

SEQ ID NO: 299927 - RNA, 19 nt, Human herpesvirus 2
acagcaauaaacauuggca

SEQ ID NO: 299928 - RNA, 13 nt, Human herpesvirus 2
acagccccggggu

SEQ ID NO: 299929 - RNA, 13 nt, Human herpesvirus 2
acaggcccggggc

SEQ ID NO: 299930 - RNA, 17 nt, Human herpesvirus 2
acaggcgcuucaucguc

SEQ ID NO: 299931 - RNA, 22 nt, Human herpesvirus 2
acaguuccguuggggaacaaca

SEQ ID NO: 299932 - RNA, 19 nt, Human herpesvirus 2
acaucgucuuuggugccag

SEQ ID NO: 299933 - RNA, 22 nt, Human herpesvirus 2
acauguuacaccccccugacuc

SEQ ID NO: 299934 - RNA, 20 nt, Human herpesvirus 2
accaacaacgcucaguucau

SEQ ID NO: 299935 - RNA, 17 nt, Human herpesvirus 2
accaaccccgucucccu

SEQ ID NO: 299936 - RNA, 18 nt, Human herpesvirus 2
accaacgacgaugcaugu

SEQ ID NO: 299937 - RNA, 21 nt, Human herpesvirus 2
accacacauacgaccaaauac

SEQ ID NO: 299938 - RNA, 14 nt, Human herpesvirus 2
accacccaaccaac

SEQ ID NO: 299939 - RNA, 12 nt, Human herpesvirus 2
accagacacuca

SEQ ID NO: 299940 - RNA, 9 nt, Human herpesvirus 2
accccaaac

SEQ ID NO: 299941 - RNA, 15 nt, Human herpesvirus 2
accccaguuccuccg

SEQ ID NO: 299942 - RNA, 15 nt, Human herpesvirus 2
accccccugacucag

SEQ ID NO: 299943 - RNA, 14 nt, Human herpesvirus 2
accccgauaguccc

SEQ ID NO: 299944 - RNA, 21 nt, Human herpesvirus 2
accccgccgcagcucauaaaa

SEQ ID NO: 299945 - RNA, 17 nt, Human herpesvirus 2
acccgacaacagccccu

SEQ ID NO: 299946 - RNA, 18 nt, Human herpesvirus 2
acccgacaacagccccug

SEQ ID NO: 299947 - RNA, 20 nt, Human herpesvirus 2
acccgccuaccagccccucg

SEQ ID NO: 299948 - RNA, 20 nt, Human herpesvirus 2
acccggcagagagauuuccc

SEQ ID NO: 299949 - RNA, 20 nt, Human herpesvirus 2
acccuauacgcgguauggcu

SEQ ID NO: 299950 - RNA, 17 nt, Human herpesvirus 2
acccugccccccggcgc

SEQ ID NO: 299951 - RNA, 13 nt, Human herpesvirus 2
accgcgcccgggc

SEQ ID NO: 299952 - RNA, 14 nt, Human herpesvirus 2
accgcgcgccgccg

SEQ ID NO: 299953 - RNA, 17 nt, Human herpesvirus 2
accggcucccccgcgga

SEQ ID NO: 299954 - RNA, 22 nt, Human herpesvirus 2
accgucccgcccgccagugcau

SEQ ID NO: 299955 - RNA, 23 nt, Human herpesvirus 2
accucgaccaguaggucuguugu

SEQ ID NO: 299956 - RNA, 21 nt, Human herpesvirus 2
accugcaggacuucuacggcu

SEQ ID NO: 299957 - RNA, 14 nt, Human herpesvirus 2
accugccccggcgc

SEQ ID NO: 299958 - RNA, 15 nt, Human herpesvirus 2
acgacccgccucggg

SEQ ID NO: 299959 - RNA, 23 nt, Human herpesvirus 2
acgacccgccucgggccuacgca

SEQ ID NO: 299960 - RNA, 14 nt, Human herpesvirus 2
acgacuuccucgug

SEQ ID NO: 299961 - RNA, 11 nt, Human herpesvirus 2
acgagacagac

SEQ ID NO: 299962 - RNA, 13 nt, Human herpesvirus 2
acgaggccuuccc

SEQ ID NO: 299963 - RNA, 15 nt, Human herpesvirus 2
acgcacgugcgggaa

SEQ ID NO: 299964 - RNA, 16 nt, Human herpesvirus 2
acgcaggcccucgcug

SEQ ID NO: 299965 - RNA, 15 nt, Human herpesvirus 2
acgcgaaggcggacc

SEQ ID NO: 299966 - RNA, 13 nt, Human herpesvirus 2
acgcgcgacugcc

SEQ ID NO: 299967 - RNA, 18 nt, Human herpesvirus 2
acgcggacgucggcgaug

SEQ ID NO: 299968 - RNA, 23 nt, Human herpesvirus 2
acggaggaacugggguacugcac

SEQ ID NO: 299969 - RNA, 20 nt, Human herpesvirus 2
acggauucccgcacgugcgu

SEQ ID NO: 299970 - RNA, 16 nt, Human herpesvirus 2
acggcaacccccgggc

SEQ ID NO: 299971 - RNA, 15 nt, Human herpesvirus 2
acggccagcgggggc

SEQ ID NO: 299972 - RNA, 16 nt, Human herpesvirus 2
acggcgucucccgggg

SEQ ID NO: 299973 - RNA, 17 nt, Human herpesvirus 2
acgggcaaggggccaaa

SEQ ID NO: 299974 - RNA, 17 nt, Human herpesvirus 2
acggucggcgaacacaa

SEQ ID NO: 299975 - RNA, 11 nt, Human herpesvirus 2
acguccagggg

SEQ ID NO: 299976 - RNA, 23 nt, Human herpesvirus 2
acgugacgucaaucgcccgaggc

SEQ ID NO: 299977 - RNA, 15 nt, Human herpesvirus 2
acgugcgucuuccca

SEQ ID NO: 299978 - RNA, 13 nt, Human herpesvirus 2
acgugugcccgcc

SEQ ID NO: 299979 - RNA, 16 nt, Human herpesvirus 2
acguuuauucaccaca

SEQ ID NO: 299980 - RNA, 17 nt, Human herpesvirus 2
acuccaggagcuucauc

SEQ ID NO: 299981 - RNA, 19 nt, Human herpesvirus 2
acucguucguaaacaccaa

SEQ ID NO: 299982 - RNA, 18 nt, Human herpesvirus 2
acucucccggcuccuccg

SEQ ID NO: 299983 - RNA, 23 nt, Human herpesvirus 2
acugaggaacuggguuacugcac

SEQ ID NO: 299984 - RNA, 17 nt, Human herpesvirus 2
acuggcagccgggacga

SEQ ID NO: 299985 - RNA, 15 nt, Human herpesvirus 2
acugggguacugcac

SEQ ID NO: 299986 - RNA, 14 nt, Human herpesvirus 2
acuggguuacugca

SEQ ID NO: 299987 - RNA, 16 nt, Human herpesvirus 2
acugucugaaugccac

SEQ ID NO: 299988 - RNA, 19 nt, Human herpesvirus 2
acuucauggggugggaugu

SEQ ID NO: 299989 - RNA, 23 nt, Human herpesvirus 2
acuucccccccccuacacaccaa

SEQ ID NO: 299990 - RNA, 13 nt, Human herpesvirus 2
acuucccuaacac

SEQ ID NO: 299991 - RNA, 19 nt, Human herpesvirus 2
acuucccuaacacggagga

SEQ ID NO: 299992 - RNA, 22 nt, Human herpesvirus 2
acuuuaagcgcugcggggacca

SEQ ID NO: 299993 - RNA, 16 nt, Human herpesvirus 2
agaaacaaacgcgaca

SEQ ID NO: 299994 - RNA, 14 nt, Human herpesvirus 2
agaaagaaacacaa

SEQ ID NO: 299995 - RNA, 16 nt, Human herpesvirus 2
agaagagaggcgagaa

SEQ ID NO: 299996 - RNA, 21 nt, Human herpesvirus 2
agacaccgauguucaaaaaua

SEQ ID NO: 299997 - RNA, 20 nt, Human herpesvirus 2
agacaugauagagggaacaa

SEQ ID NO: 299998 - RNA, 17 nt, Human herpesvirus 2
agacgaaggacccauac

SEQ ID NO: 299999 - RNA, 14 nt, Human herpesvirus 2
agacgaggccgcca

SEQ ID NO: 300000 - RNA, 20 nt, Human herpesvirus 2
agacgcuguuguuucugggc

SEQ ID NO: 300001 - RNA, 12 nt, Human herpesvirus 2
agacuucccuaa

SEQ ID NO: 300002 - RNA, 14 nt, Human herpesvirus 2
agagaaacaaaaga

SEQ ID NO: 300003 - RNA, 19 nt, Human herpesvirus 2
agagacgaugggagccccg

SEQ ID NO: 300004 - RNA, 20 nt, Human herpesvirus 2
agagacuucccuaacacgga

SEQ ID NO: 300005 - RNA, 15 nt, Human herpesvirus 2
agagcgggcccgggg

SEQ ID NO: 300006 - RNA, 16 nt, Human herpesvirus 2
agagcgggcccggggc

SEQ ID NO: 300007 - RNA, 23 nt, Human herpesvirus 2
agagggggggguggagugggggg

SEQ ID NO: 300008 - RNA, 20 nt, Human herpesvirus 2
agaguucaauagauuuccca

SEQ ID NO: 300009 - RNA, 19 nt, Human herpesvirus 2
agaugcugcccgcggacca

SEQ ID NO: 300010 - RNA, 18 nt, Human herpesvirus 2
agauuucccaaacacuga

SEQ ID NO: 300011 - RNA, 15 nt, Human herpesvirus 2
agcaaaaccgauaga

SEQ ID NO: 300012 - RNA, 18 nt, Human herpesvirus 2
agccaccgucccgcccgc

SEQ ID NO: 300013 - RNA, 18 nt, Human herpesvirus 2
agcccacaacccauccca

SEQ ID NO: 300014 - RNA, 19 nt, Human herpesvirus 2
agcgcugcggggaccagcc

SEQ ID NO: 300015 - RNA, 17 nt, Human herpesvirus 2
agcggcccgaggcgacc

SEQ ID NO: 300016 - RNA, 14 nt, Human herpesvirus 2
agcgggcacucugg

SEQ ID NO: 300017 - RNA, 21 nt, Human herpesvirus 2
agcgggggaggggggagaugg

SEQ ID NO: 300018 - RNA, 17 nt, Human herpesvirus 2
agcguccggcuggcggc

SEQ ID NO: 300019 - RNA, 22 nt, Human herpesvirus 2
agcgugccaacucgcggcaccg

SEQ ID NO: 300020 - RNA, 17 nt, Human herpesvirus 2
agcguggggcgcgcacc

SEQ ID NO: 300021 - RNA, 13 nt, Human herpesvirus 2
agcucccugcggc

SEQ ID NO: 300022 - RNA, 15 nt, Human herpesvirus 2
agcugcucgcgcacc

SEQ ID NO: 300023 - RNA, 16 nt, Human herpesvirus 2
agcugggcuuguguau

SEQ ID NO: 300024 - RNA, 17 nt, Human herpesvirus 2
agcugguaucggcgacc

SEQ ID NO: 300025 - RNA, 20 nt, Human herpesvirus 2
aggaaaaaaaaaacuuuaua

SEQ ID NO: 300026 - RNA, 17 nt, Human herpesvirus 2
aggaaaggaaacaggaa

SEQ ID NO: 300027 - RNA, 13 nt, Human herpesvirus 2
aggaaaugcagaa

SEQ ID NO: 300028 - RNA, 18 nt, Human herpesvirus 2
aggaacugggguacugca

SEQ ID NO: 300029 - RNA, 19 nt, Human herpesvirus 2
aggaacugggguacugcac

SEQ ID NO: 300030 - RNA, 18 nt, Human herpesvirus 2
aggaacuggguuacugca

SEQ ID NO: 300031 - RNA, 20 nt, Human herpesvirus 2
aggaacuggguuacugcacu

SEQ ID NO: 300032 - RNA, 16 nt, Human herpesvirus 2
aggaaggggugggggg

SEQ ID NO: 300033 - RNA, 23 nt, Human herpesvirus 2
aggacaguucauaggccgggagc

SEQ ID NO: 300034 - RNA, 21 nt, Human herpesvirus 2
aggacgcgcuaguacccagag

SEQ ID NO: 300035 - RNA, 20 nt, Human herpesvirus 2
aggaggggggcagugcagua

SEQ ID NO: 300036 - RNA, 18 nt, Human herpesvirus 2
aggaucgugugcacgaaa

SEQ ID NO: 300037 - RNA, 22 nt, Human herpesvirus 2
aggaucgugugcacgaaaaaga

SEQ ID NO: 300038 - RNA, 19 nt, Human herpesvirus 2
aggaucucgcgcaggugau

SEQ ID NO: 300039 - RNA, 16 nt, Human herpesvirus 2
aggccaagaugauaac

SEQ ID NO: 300040 - RNA, 16 nt, Human herpesvirus 2
aggccacucgucgcca

SEQ ID NO: 300041 - RNA, 20 nt, Human herpesvirus 2
aggcucauuguucccgccac

SEQ ID NO: 300042 - RNA, 23 nt, Human herpesvirus 2
aggcuuagucccggguccggggc

SEQ ID NO: 300043 - RNA, 12 nt, Human herpesvirus 2
agggaagucucu

SEQ ID NO: 300044 - RNA, 16 nt, Human herpesvirus 2
agggcgggccacgucg

SEQ ID NO: 300045 - RNA, 16 nt, Human herpesvirus 2
aggucaauagauuucc

SEQ ID NO: 300046 - RNA, 22 nt, Human herpesvirus 2
agguccuuggaauuccagcagc

SEQ ID NO: 300047 - RNA, 12 nt, Human herpesvirus 2
aggugcggagcc

SEQ ID NO: 300048 - RNA, 18 nt, Human herpesvirus 2
agguggggggggggaaag

SEQ ID NO: 300049 - RNA, 15 nt, Human herpesvirus 2
aguaacaaacagaga

SEQ ID NO: 300050 - RNA, 18 nt, Human herpesvirus 2
aguaacccaguuccucag

SEQ ID NO: 300051 - RNA, 21 nt, Human herpesvirus 2
aguacgggggaggaggggggu

SEQ ID NO: 300052 - RNA, 15 nt, Human herpesvirus 2
aguacucaucgggac

SEQ ID NO: 300053 - RNA, 21 nt, Human herpesvirus 2
aguccguuucgaccccuuuau

SEQ ID NO: 300054 - RNA, 20 nt, Human herpesvirus 2
agugagaaccaaccaaaaca

SEQ ID NO: 300055 - RNA, 16 nt, Human herpesvirus 2
aguggggggguggugg

SEQ ID NO: 300056 - RNA, 17 nt, Human herpesvirus 2
agugggggggugguggu

SEQ ID NO: 300057 - RNA, 11 nt, Human herpesvirus 2
agugggugcuc

SEQ ID NO: 300058 - RNA, 20 nt, Human herpesvirus 2
aguguuguccguugguuggg

SEQ ID NO: 300059 - RNA, 16 nt, Human herpesvirus 2
auaaaaaacaccaaca

SEQ ID NO: 300060 - RNA, 11 nt, Human herpesvirus 2
auaaaagccaa

SEQ ID NO: 300061 - RNA, 21 nt, Human herpesvirus 2
auaaacaaacaaccggacaaa

SEQ ID NO: 300062 - RNA, 23 nt, Human herpesvirus 2
auaaaccgauguuauuugccuau

SEQ ID NO: 300063 - RNA, 23 nt, Human herpesvirus 2
auaaaccggggccccgugcucca

SEQ ID NO: 300064 - RNA, 14 nt, Human herpesvirus 2
auaaacgccuuccc

SEQ ID NO: 300065 - RNA, 18 nt, Human herpesvirus 2
auaaagaacgagacagac

SEQ ID NO: 300066 - RNA, 21 nt, Human herpesvirus 2
auaaagagugagaaccaacca

SEQ ID NO: 300067 - RNA, 13 nt, Human herpesvirus 2
auaacaaacagac

SEQ ID NO: 300068 - RNA, 19 nt, Human herpesvirus 2
auaagaacaauaaaccugu

SEQ ID NO: 300069 - RNA, 19 nt, Human herpesvirus 2
auaauccggcgauccccaa

SEQ ID NO: 300070 - RNA, 16 nt, Human herpesvirus 2
auacaaauuaaauaca

SEQ ID NO: 300071 - RNA, 20 nt, Human herpesvirus 2
auacaacaaaaaauaccaca

SEQ ID NO: 300072 - RNA, 18 nt, Human herpesvirus 2
auaccacgcgacgaacca

SEQ ID NO: 300073 - RNA, 17 nt, Human herpesvirus 2
auagaagaaaaccacaa

SEQ ID NO: 300074 - RNA, 22 nt, Human herpesvirus 2
auagcgacgacagaacggacaa

SEQ ID NO: 300075 - RNA, 22 nt, Human herpesvirus 2
auauccuccuuagauugacuca

SEQ ID NO: 300076 - RNA, 14 nt, Human herpesvirus 2
auaugcaaccaaau

SEQ ID NO: 300077 - RNA, 14 nt, Human herpesvirus 2
auaugccgagucac

SEQ ID NO: 300078 - RNA, 18 nt, Human herpesvirus 2
aucaagcccacaacccau

SEQ ID NO: 300079 - RNA, 14 nt, Human herpesvirus 2
aucaugucuuucca

SEQ ID NO: 300080 - RNA, 11 nt, Human herpesvirus 2
auccacaagcu

SEQ ID NO: 300081 - RNA, 13 nt, Human herpesvirus 2
auccaucugggag

SEQ ID NO: 300082 - RNA, 22 nt, Human herpesvirus 2
auccuccuuagauugacucagc

SEQ ID NO: 300083 - RNA, 21 nt, Human herpesvirus 2
auccucgggugugcugcuguu

SEQ ID NO: 300084 - RNA, 13 nt, Human herpesvirus 2
aucgaaaggguac

SEQ ID NO: 300085 - RNA, 16 nt, Human herpesvirus 2
aucgcaacuacagucg

SEQ ID NO: 300086 - RNA, 20 nt, Human herpesvirus 2
aucgcuguauucccuugccc

SEQ ID NO: 300087 - RNA, 19 nt, Human herpesvirus 2
aucgggaaaacggauuccc

SEQ ID NO: 300088 - RNA, 17 nt, Human herpesvirus 2
aucgugguuauuucccc

SEQ ID NO: 300089 - RNA, 16 nt, Human herpesvirus 2
aucuauugaacucucc

SEQ ID NO: 300090 - RNA, 15 nt, Human herpesvirus 2
aucuauugaccucuc

SEQ ID NO: 300091 - RNA, 15 nt, Human herpesvirus 2
aucucucugccgggu

SEQ ID NO: 300092 - RNA, 17 nt, Human herpesvirus 2
aucuucgccgggugucu

SEQ ID NO: 300093 - RNA, 18 nt, Human herpesvirus 2
augagccgguagugcagg

SEQ ID NO: 300094 - RNA, 22 nt, Human herpesvirus 2
augcacgccaucgcucccaggu

SEQ ID NO: 300095 - RNA, 12 nt, Human herpesvirus 2
augcagcccaga

SEQ ID NO: 300096 - RNA, 22 nt, Human herpesvirus 2
auggccgcgcgcgugugugaga

SEQ ID NO: 300097 - RNA, 14 nt, Human herpesvirus 2
augggccgccagca

SEQ ID NO: 300098 - RNA, 17 nt, Human herpesvirus 2
auggggccgcaguguuu

SEQ ID NO: 300099 - RNA, 16 nt, Human herpesvirus 2
augggguagugugucc

SEQ ID NO: 300100 - RNA, 18 nt, Human herpesvirus 2
auguccggggcggugaua

SEQ ID NO: 300101 - RNA, 17 nt, Human herpesvirus 2
augucuuuccaccacca

SEQ ID NO: 300102 - RNA, 23 nt, Human herpesvirus 2
auguuacaccccccugacucagg

SEQ ID NO: 300103 - RNA, 17 nt, Human herpesvirus 2
auguuguuuucccggga

SEQ ID NO: 300104 - RNA, 16 nt, Human herpesvirus 2
auuaauaaagacuguu

SEQ ID NO: 300105 - RNA, 15 nt, Human herpesvirus 2
auuagcaacuuuuaa

SEQ ID NO: 300106 - RNA, 17 nt, Human herpesvirus 2
auucagggaaacagaaa

SEQ ID NO: 300107 - RNA, 22 nt, Human herpesvirus 2
auucccgcacgugcgucuuccc

SEQ ID NO: 300108 - RNA, 17 nt, Human herpesvirus 2
auucgaccacauaugca

SEQ ID NO: 300109 - RNA, 16 nt, Human herpesvirus 2
auucgggggucgggcg

SEQ ID NO: 300110 - RNA, 16 nt, Human herpesvirus 2
auugaaacguacaaca

SEQ ID NO: 300111 - RNA, 16 nt, Human herpesvirus 2
auuguuugguguuguu

SEQ ID NO: 300112 - RNA, 21 nt, Human herpesvirus 2
auuugucgccggcgacaccca

SEQ ID NO: 300113 - RNA, 21 nt, Human herpesvirus 2
auuuuucguuuggcaaacaca

SEQ ID NO: 300114 - RNA, 16 nt, Human herpesvirus 2
caaaaacaaaaaccuu

SEQ ID NO: 300115 - RNA, 20 nt, Human herpesvirus 2
caaacaaaaacacaagcaca

SEQ ID NO: 300116 - RNA, 20 nt, Human herpesvirus 2
caaaccccgguuggggcggg

SEQ ID NO: 300117 - RNA, 15 nt, Human herpesvirus 2
caaacgcggacaucc

SEQ ID NO: 300118 - RNA, 17 nt, Human herpesvirus 2
caaacgucccaaacuca

SEQ ID NO: 300119 - RNA, 13 nt, Human herpesvirus 2
caaccccgucucc

SEQ ID NO: 300120 - RNA, 22 nt, Human herpesvirus 2
caacccgcccucgagaugugcc

SEQ ID NO: 300121 - RNA, 14 nt, Human herpesvirus 2
caaccggacaaaag

SEQ ID NO: 300122 - RNA, 12 nt, Human herpesvirus 2
caagaugauaac

SEQ ID NO: 300123 - RNA, 13 nt, Human herpesvirus 2
caagcgggcgggg

SEQ ID NO: 300124 - RNA, 11 nt, Human herpesvirus 2
caagugcagua

SEQ ID NO: 300125 - RNA, 19 nt, Human herpesvirus 2
caauaauaaagcuuuauua

SEQ ID NO: 300126 - RNA, 18 nt, Human herpesvirus 2
caauagauuucccaaaca

SEQ ID NO: 300127 - RNA, 14 nt, Human herpesvirus 2
caauagauuucccc

SEQ ID NO: 300128 - RNA, 19 nt, Human herpesvirus 2
caauuaauaaagacuguug

SEQ ID NO: 300129 - RNA, 18 nt, Human herpesvirus 2
cacaagacacacacacag

SEQ ID NO: 300130 - RNA, 16 nt, Human herpesvirus 2
cacaggcccaccacca

SEQ ID NO: 300131 - RNA, 23 nt, Human herpesvirus 2
cacauacgcacaaacacacgggu

SEQ ID NO: 300132 - RNA, 22 nt, Human herpesvirus 2
caccaacaacgcucaguucauc

SEQ ID NO: 300133 - RNA, 12 nt, Human herpesvirus 2
caccaacauacg

SEQ ID NO: 300134 - RNA, 21 nt, Human herpesvirus 2
caccacguguccccagggagc

SEQ ID NO: 300135 - RNA, 15 nt, Human herpesvirus 2
cacccacgacauccg

SEQ ID NO: 300136 - RNA, 23 nt, Human herpesvirus 2
cacccgggccgggugacauucac

SEQ ID NO: 300137 - RNA, 19 nt, Human herpesvirus 2
cacccugcguuccgugcgg

SEQ ID NO: 300138 - RNA, 15 nt, Human herpesvirus 2
cacccugggucggga

SEQ ID NO: 300139 - RNA, 18 nt, Human herpesvirus 2
caccgagccgcugugcca

SEQ ID NO: 300140 - RNA, 13 nt, Human herpesvirus 2
caccgucccgccc

SEQ ID NO: 300141 - RNA, 20 nt, Human herpesvirus 2
cacgccaucgacccggacug

SEQ ID NO: 300142 - RNA, 12 nt, Human herpesvirus 2
cacggccccgaa

SEQ ID NO: 300143 - RNA, 22 nt, Human herpesvirus 2
cacguccguauguuaauugcaa

SEQ ID NO: 300144 - RNA, 21 nt, Human herpesvirus 2
cacguucgccccgcagccuau

SEQ ID NO: 300145 - RNA, 14 nt, Human herpesvirus 2
cacucgucgccaac

SEQ ID NO: 300146 - RNA, 21 nt, Human herpesvirus 2
cacuucgugugcuuguguuuu

SEQ ID NO: 300147 - RNA, 9 nt, Human herpesvirus 2
cacuuuccu

SEQ ID NO: 300148 - RNA, 16 nt, Human herpesvirus 2
cagacucacucgugga

SEQ ID NO: 300149 - RNA, 16 nt, Human herpesvirus 2
cagaugcgccuggugg

SEQ ID NO: 300150 - RNA, 13 nt, Human herpesvirus 2
cagcagguuuugg

SEQ ID NO: 300151 - RNA, 13 nt, Human herpesvirus 2
cagccccuggggc

SEQ ID NO: 300152 - RNA, 22 nt, Human herpesvirus 2
cagccccuggggcugucgggcg

SEQ ID NO: 300153 - RNA, 21 nt, Human herpesvirus 2
cagcccgguguguuugccaaa

SEQ ID NO: 300154 - RNA, 14 nt, Human herpesvirus 2
cagcgcguccaggu

SEQ ID NO: 300155 - RNA, 12 nt, Human herpesvirus 2
caggaauggaga

SEQ ID NO: 300156 - RNA, 17 nt, Human herpesvirus 2
caggaccagggacguca

SEQ ID NO: 300157 - RNA, 21 nt, Human herpesvirus 2
caggaggggggcagugcagua

SEQ ID NO: 300158 - RNA, 13 nt, Human herpesvirus 2
caggcccaccacc

SEQ ID NO: 300159 - RNA, 16 nt, Human herpesvirus 2
caggggggcaggcggg

SEQ ID NO: 300160 - RNA, 23 nt, Human herpesvirus 2
caggggggcuuggacugggagcc

SEQ ID NO: 300161 - RNA, 14 nt, Human herpesvirus 2
cagggguuuuuuaa

SEQ ID NO: 300162 - RNA, 21 nt, Human herpesvirus 2
caggucccaauaaaacccaga

SEQ ID NO: 300163 - RNA, 13 nt, Human herpesvirus 2
caguaacccaguu

SEQ ID NO: 300164 - RNA, 15 nt, Human herpesvirus 2
caguaccccaguucc

SEQ ID NO: 300165 - RNA, 17 nt, Human herpesvirus 2
caguaccccaguuccuc

SEQ ID NO: 300166 - RNA, 22 nt, Human herpesvirus 2
caguguuugggaaaucuauuga

SEQ ID NO: 300167 - RNA, 23 nt, Human herpesvirus 2
caguuccgggaaggcguuuauug

SEQ ID NO: 300168 - RNA, 22 nt, Human herpesvirus 2
cauaauaacgauuuuauuacuc

SEQ ID NO: 300169 - RNA, 16 nt, Human herpesvirus 2
cauacgcacaaacaca

SEQ ID NO: 300170 - RNA, 13 nt, Human herpesvirus 2
cauacgcggcgug

SEQ ID NO: 300171 - RNA, 12 nt, Human herpesvirus 2
caucaggcucau

SEQ ID NO: 300172 - RNA, 18 nt, Human herpesvirus 2
caucgaguccgaagaaga

SEQ ID NO: 300173 - RNA, 20 nt, Human herpesvirus 2
caucgccgaacggugcugua

SEQ ID NO: 300174 - RNA, 15 nt, Human herpesvirus 2
caucgcgucacacca

SEQ ID NO: 300175 - RNA, 22 nt, Human herpesvirus 2
caucuacgacccccgaacagcc

SEQ ID NO: 300176 - RNA, 23 nt, Human herpesvirus 2
caucucucgggggaugguggugg

SEQ ID NO: 300177 - RNA, 23 nt, Human herpesvirus 2
cauguuacaccccccugacucag

SEQ ID NO: 300178 - RNA, 14 nt, Human herpesvirus 2
cauguucggcgucg

SEQ ID NO: 300179 - RNA, 19 nt, Human herpesvirus 2
cauuugcccgcgggucugc

SEQ ID NO: 300180 - RNA, 14 nt, Human herpesvirus 2
ccaaacacugagga

SEQ ID NO: 300181 - RNA, 18 nt, Human herpesvirus 2
ccaacaacgcucaguuca

SEQ ID NO: 300182 - RNA, 11 nt, Human herpesvirus 2
ccaacaccagg

SEQ ID NO: 300183 - RNA, 14 nt, Human herpesvirus 2
ccaacgacggcguu

SEQ ID NO: 300184 - RNA, 18 nt, Human herpesvirus 2
ccaacgcgggcggucugg

SEQ ID NO: 300185 - RNA, 14 nt, Human herpesvirus 2
ccaauacaccagag

SEQ ID NO: 300186 - RNA, 18 nt, Human herpesvirus 2
ccacaauggggguuaugg

SEQ ID NO: 300187 - RNA, 13 nt, Human herpesvirus 2
ccacccaaccaac

SEQ ID NO: 300188 - RNA, 15 nt, Human herpesvirus 2
ccacccccaaacccc

SEQ ID NO: 300189 - RNA, 13 nt, Human herpesvirus 2
ccacccccagaaa

SEQ ID NO: 300190 - RNA, 14 nt, Human herpesvirus 2
ccacgucucgggaa

SEQ ID NO: 300191 - RNA, 14 nt, Human herpesvirus 2
ccagacgaagucac

SEQ ID NO: 300192 - RNA, 17 nt, Human herpesvirus 2
ccaggaggggggcagug

SEQ ID NO: 300193 - RNA, 22 nt, Human herpesvirus 2
ccaggaggggggcagugcagua

SEQ ID NO: 300194 - RNA, 23 nt, Human herpesvirus 2
ccaggaggggggcagugcaguac

SEQ ID NO: 300195 - RNA, 16 nt, Human herpesvirus 2
ccaggcgcugcugcgc

SEQ ID NO: 300196 - RNA, 23 nt, Human herpesvirus 2
ccauacuccgauucgaccacaua

SEQ ID NO: 300197 - RNA, 22 nt, Human herpesvirus 2
ccauccgacggcaugcagccca

SEQ ID NO: 300198 - RNA, 17 nt, Human herpesvirus 2
ccaucgacccggacugc

SEQ ID NO: 300199 - RNA, 18 nt, Human herpesvirus 2
ccaugggccccggucugu

SEQ ID NO: 300200 - RNA, 16 nt, Human herpesvirus 2
cccaagcguaccaacu

SEQ ID NO: 300201 - RNA, 13 nt, Human herpesvirus 2
cccaccaccaacc

SEQ ID NO: 300202 - RNA, 13 nt, Human herpesvirus 2
cccacggaugccg

SEQ ID NO: 300203 - RNA, 22 nt, Human herpesvirus 2
cccaggaggggggcagugcagu

SEQ ID NO: 300204 - RNA, 23 nt, Human herpesvirus 2
cccaggaggggggcagugcagua

SEQ ID NO: 300205 - RNA, 14 nt, Human herpesvirus 2
cccagucgcccaua

SEQ ID NO: 300206 - RNA, 13 nt, Human herpesvirus 2
cccauacaaauua

SEQ ID NO: 300207 - RNA, 19 nt, Human herpesvirus 2
ccccaaaccuuaacuaaac

SEQ ID NO: 300208 - RNA, 19 nt, Human herpesvirus 2
ccccaaccacccaaccaac

SEQ ID NO: 300209 - RNA, 16 nt, Human herpesvirus 2
ccccagggagccccgg

SEQ ID NO: 300210 - RNA, 15 nt, Human herpesvirus 2
cccccaggggggcuu

SEQ ID NO: 300211 - RNA, 23 nt, Human herpesvirus 2
cccccggccuuugcuuccucgcg

SEQ ID NO: 300212 - RNA, 13 nt, Human herpesvirus 2
cccccgucugcca

SEQ ID NO: 300213 - RNA, 17 nt, Human herpesvirus 2
cccccuacacaccaacu

SEQ ID NO: 300214 - RNA, 18 nt, Human herpesvirus 2
ccccgaagcggccccgac

SEQ ID NO: 300215 - RNA, 19 nt, Human herpesvirus 2
ccccgaauaccaccggcgu

SEQ ID NO: 300216 - RNA, 14 nt, Human herpesvirus 2
ccccgacgcgcgcg

SEQ ID NO: 300217 - RNA, 21 nt, Human herpesvirus 2
ccccgagagaugacacgacag

SEQ ID NO: 300218 - RNA, 13 nt, Human herpesvirus 2
ccccgcgagcacc

SEQ ID NO: 300219 - RNA, 12 nt, Human herpesvirus 2
ccccgcgccgcc

SEQ ID NO: 300220 - RNA, 19 nt, Human herpesvirus 2
ccccgcgugcagcgcgggc

SEQ ID NO: 300221 - RNA, 21 nt, Human herpesvirus 2
ccccggcguggagcgccgggc

SEQ ID NO: 300222 - RNA, 22 nt, Human herpesvirus 2
ccccgggggggggcaagugcag

SEQ ID NO: 300223 - RNA, 21 nt, Human herpesvirus 2
ccccuacgccccccucggcag

SEQ ID NO: 300224 - RNA, 16 nt, Human herpesvirus 2
ccccuccccugcguaa

SEQ ID NO: 300225 - RNA, 21 nt, Human herpesvirus 2
cccgcgggcgcgcggggacuc

SEQ ID NO: 300226 - RNA, 20 nt, Human herpesvirus 2
cccgcguauauauccgcgag

SEQ ID NO: 300227 - RNA, 20 nt, Human herpesvirus 2
cccgcguccgacacccgggc

SEQ ID NO: 300228 - RNA, 19 nt, Human herpesvirus 2
cccggacuccgccccggcg

SEQ ID NO: 300229 - RNA, 21 nt, Human herpesvirus 2
cccggcgaccgccccgcgccg

SEQ ID NO: 300230 - RNA, 23 nt, Human herpesvirus 2
cccgggggggggcaagugcagua

SEQ ID NO: 300231 - RNA, 14 nt, Human herpesvirus 2
cccgucgcuccggc

SEQ ID NO: 300232 - RNA, 13 nt, Human herpesvirus 2
cccuccacggugu

SEQ ID NO: 300233 - RNA, 17 nt, Human herpesvirus 2
cccucgagcucuucggc

SEQ ID NO: 300234 - RNA, 15 nt, Human herpesvirus 2
cccucgcacauccug

SEQ ID NO: 300235 - RNA, 17 nt, Human herpesvirus 2
cccucuacccccaccca

SEQ ID NO: 300236 - RNA, 22 nt, Human herpesvirus 2
cccucucgaucccgaagccauc

SEQ ID NO: 300237 - RNA, 19 nt, Human herpesvirus 2
cccucucuccgcaauaaac

SEQ ID NO: 300238 - RNA, 11 nt, Human herpesvirus 2
cccugacucag

SEQ ID NO: 300239 - RNA, 14 nt, Human herpesvirus 2
cccugacucaggag

SEQ ID NO: 300240 - RNA, 14 nt, Human herpesvirus 2
cccugcaaccccua

SEQ ID NO: 300241 - RNA, 15 nt, Human herpesvirus 2
cccuuuucugcauuu

SEQ ID NO: 300242 - RNA, 19 nt, Human herpesvirus 2
ccgagcguaucggccagga

SEQ ID NO: 300243 - RNA, 19 nt, Human herpesvirus 2
ccgaggaccgcguguaaua

SEQ ID NO: 300244 - RNA, 18 nt, Human herpesvirus 2
ccgaggcgccucgggggc

SEQ ID NO: 300245 - RNA, 19 nt, Human herpesvirus 2
ccgaguuguacccucucaa

SEQ ID NO: 300246 - RNA, 23 nt, Human herpesvirus 2
ccgauccggccucgggucugcuu

SEQ ID NO: 300247 - RNA, 17 nt, Human herpesvirus 2
ccgcacucgcuuuuccc

SEQ ID NO: 300248 - RNA, 22 nt, Human herpesvirus 2
ccgcagccuauguucgcgggcg

SEQ ID NO: 300249 - RNA, 13 nt, Human herpesvirus 2
ccgccaacaccag

SEQ ID NO: 300250 - RNA, 14 nt, Human herpesvirus 2
ccgcgauuccgagg

SEQ ID NO: 300251 - RNA, 24 nt, Human herpesvirus 2
ccgcgcaugguaauuagcaacuuu

SEQ ID NO: 300252 - RNA, 22 nt, Human herpesvirus 2
ccgcgguggcgucggcggcccc

SEQ ID NO: 300253 - RNA, 24 nt, Human herpesvirus 2
ccgcucgcgguaauuagcagcuuu

SEQ ID NO: 300254 - RNA, 17 nt, Human herpesvirus 2
ccgcugggggggcgggc

SEQ ID NO: 300255 - RNA, 19 nt, Human herpesvirus 2
ccgcuuuauaggacgcgcu

SEQ ID NO: 300256 - RNA, 23 nt, Human herpesvirus 2
ccggacgcggcacagguggugca

SEQ ID NO: 300257 - RNA, 22 nt, Human herpesvirus 2
ccggccaaccucauccgcggcg

SEQ ID NO: 300258 - RNA, 13 nt, Human herpesvirus 2
ccggcgccaugag

SEQ ID NO: 300259 - RNA, 18 nt, Human herpesvirus 2
ccggcggagccccggagc

SEQ ID NO: 300260 - RNA, 20 nt, Human herpesvirus 2
ccgggacgcggcauaccucc

SEQ ID NO: 300261 - RNA, 16 nt, Human herpesvirus 2
ccgggcauggguugug

SEQ ID NO: 300262 - RNA, 15 nt, Human herpesvirus 2
ccgggcccggccgcg

SEQ ID NO: 300263 - RNA, 13 nt, Human herpesvirus 2
ccggggggcgugg

SEQ ID NO: 300264 - RNA, 21 nt, Human herpesvirus 2
ccgggggggggcaagugcagu

SEQ ID NO: 300265 - RNA, 22 nt, Human herpesvirus 2
ccgggggggggcaagugcagua

SEQ ID NO: 300266 - RNA, 23 nt, Human herpesvirus 2
ccgggggggggcaagugcaguaa

SEQ ID NO: 300267 - RNA, 14 nt, Human herpesvirus 2
ccgggguucugggg

SEQ ID NO: 300268 - RNA, 17 nt, Human herpesvirus 2
ccggucucccucuuucc

SEQ ID NO: 300269 - RNA, 15 nt, Human herpesvirus 2
ccggucugugggugg

SEQ ID NO: 300270 - RNA, 22 nt, Human herpesvirus 2
ccgguuuauugaccaaauucag

SEQ ID NO: 300271 - RNA, 18 nt, Human herpesvirus 2
ccguauguuaauugcaau

SEQ ID NO: 300272 - RNA, 13 nt, Human herpesvirus 2
ccguccgaccauc

SEQ ID NO: 300273 - RNA, 23 nt, Human herpesvirus 2
ccguggacggguauaaaggccag

SEQ ID NO: 300274 - RNA, 17 nt, Human herpesvirus 2
ccguguaccucugggcc

SEQ ID NO: 300275 - RNA, 12 nt, Human herpesvirus 2
ccgugucgcucc

SEQ ID NO: 300276 - RNA, 14 nt, Human herpesvirus 2
ccguuggggaacaa

SEQ ID NO: 300277 - RNA, 14 nt, Human herpesvirus 2
ccuacgcacccucg

SEQ ID NO: 300278 - RNA, 13 nt, Human herpesvirus 2
ccuagaucuggcg

SEQ ID NO: 300279 - RNA, 22 nt, Human herpesvirus 2
ccucaguguuugggaaaucuau

SEQ ID NO: 300280 - RNA, 16 nt, Human herpesvirus 2
ccuccguguuagggaa

SEQ ID NO: 300281 - RNA, 19 nt, Human herpesvirus 2
ccucuuugggccgugggua

SEQ ID NO: 300282 - RNA, 18 nt, Human herpesvirus 2
ccugcagaugcugcccgc

SEQ ID NO: 300283 - RNA, 15 nt, Human herpesvirus 2
ccugcgaauccccca

SEQ ID NO: 300284 - RNA, 14 nt, Human herpesvirus 2
ccuggcucgccgug

SEQ ID NO: 300285 - RNA, 21 nt, Human herpesvirus 2
ccugggccgcucguuccucac

SEQ ID NO: 300286 - RNA, 21 nt, Human herpesvirus 2
ccuguacgacagcggggaccc

SEQ ID NO: 300287 - RNA, 20 nt, Human herpesvirus 2
ccuguuggagccggagcucg

SEQ ID NO: 300288 - RNA, 13 nt, Human herpesvirus 2
ccuucaccaacga

SEQ ID NO: 300289 - RNA, 20 nt, Human herpesvirus 2
ccuucccccguuacugaugu

SEQ ID NO: 300290 - RNA, 13 nt, Human herpesvirus 2
ccuuccugucggc

SEQ ID NO: 300291 - RNA, 17 nt, Human herpesvirus 2
ccuuggacgggugggcc

SEQ ID NO: 300292 - RNA, 17 nt, Human herpesvirus 2
ccuuguuuucggucugg

SEQ ID NO: 300293 - RNA, 13 nt, Human herpesvirus 2
ccuuuaagacaga

SEQ ID NO: 300294 - RNA, 14 nt, Human herpesvirus 2
ccuuuucugcauuu

SEQ ID NO: 300295 - RNA, 18 nt, Human herpesvirus 2
cgaaaggguacacaaagc

SEQ ID NO: 300296 - RNA, 14 nt, Human herpesvirus 2
cgacacccgggccc

SEQ ID NO: 300297 - RNA, 20 nt, Human herpesvirus 2
cgacagcggggacccgggcg

SEQ ID NO: 300298 - RNA, 16 nt, Human herpesvirus 2
cgacaucaaccaccuu

SEQ ID NO: 300299 - RNA, 15 nt, Human herpesvirus 2
cgaccaccccaaaaa

SEQ ID NO: 300300 - RNA, 19 nt, Human herpesvirus 2
cgacccaccgcccccgcug

SEQ ID NO: 300301 - RNA, 18 nt, Human herpesvirus 2
cgaccgccccgcgccggc

SEQ ID NO: 300302 - RNA, 18 nt, Human herpesvirus 2
cgaccgggcggugcccau

SEQ ID NO: 300303 - RNA, 18 nt, Human herpesvirus 2
cgaccuaauuuuuguguc

SEQ ID NO: 300304 - RNA, 13 nt, Human herpesvirus 2
cgaccucgucgcg

SEQ ID NO: 300305 - RNA, 16 nt, Human herpesvirus 2
cgacgcguacguggcg

SEQ ID NO: 300306 - RNA, 14 nt, Human herpesvirus 2
cgacugucgugccg

SEQ ID NO: 300307 - RNA, 17 nt, Human herpesvirus 2
cgacuuccucgugcgca

SEQ ID NO: 300308 - RNA, 16 nt, Human herpesvirus 2
cgagagcccagggaac

SEQ ID NO: 300309 - RNA, 21 nt, Human herpesvirus 2
cgagcucggcuucuaccgcuu

SEQ ID NO: 300310 - RNA, 13 nt, Human herpesvirus 2
cgaggccuguugg

SEQ ID NO: 300311 - RNA, 15 nt, Human herpesvirus 2
cgagggcgagcucgg

SEQ ID NO: 300312 - RNA, 15 nt, Human herpesvirus 2
cgaguccgaagaaga

SEQ ID NO: 300313 - RNA, 15 nt, Human herpesvirus 2
cgaucgaugagccgg

SEQ ID NO: 300314 - RNA, 15 nt, Human herpesvirus 2
cgaucgcaacuacag

SEQ ID NO: 300315 - RNA, 14 nt, Human herpesvirus 2
cgaucugccccgac

SEQ ID NO: 300316 - RNA, 23 nt, Human herpesvirus 2
cgaugcauguucggcgucgugag

SEQ ID NO: 300317 - RNA, 20 nt, Human herpesvirus 2
cgaugcuaauaaaaaacacu

SEQ ID NO: 300318 - RNA, 19 nt, Human herpesvirus 2
cgauuguuugguguuguua

SEQ ID NO: 300319 - RNA, 13 nt, Human herpesvirus 2
cgcagcggcgucc

SEQ ID NO: 300320 - RNA, 15 nt, Human herpesvirus 2
cgcauccacaagcua

SEQ ID NO: 300321 - RNA, 17 nt, Human herpesvirus 2
cgccaauaucaucgaag

SEQ ID NO: 300322 - RNA, 16 nt, Human herpesvirus 2
cgccaucgacccggac

SEQ ID NO: 300323 - RNA, 14 nt, Human herpesvirus 2
cgccaucgugcgcu

SEQ ID NO: 300324 - RNA, 21 nt, Human herpesvirus 2
cgccaugcaacgccgggcgcg

SEQ ID NO: 300325 - RNA, 17 nt, Human herpesvirus 2
cgcccaagcggcccgag

SEQ ID NO: 300326 - RNA, 16 nt, Human herpesvirus 2
cgcccccacccccgag

SEQ ID NO: 300327 - RNA, 14 nt, Human herpesvirus 2
cgccccccccggcg

SEQ ID NO: 300328 - RNA, 14 nt, Human herpesvirus 2
cgccccgcaguuuc

SEQ ID NO: 300329 - RNA, 18 nt, Human herpesvirus 2
cgcccuuccgcguccgcg

SEQ ID NO: 300330 - RNA, 17 nt, Human herpesvirus 2
cgccgacggcggcgcac

SEQ ID NO: 300331 - RNA, 12 nt, Human herpesvirus 2
cgccgccccgac

SEQ ID NO: 300332 - RNA, 14 nt, Human herpesvirus 2
cgccgcuccgcccg

SEQ ID NO: 300333 - RNA, 20 nt, Human herpesvirus 2
cgccgggcgcgcccaccggu

SEQ ID NO: 300334 - RNA, 16 nt, Human herpesvirus 2
cgccgggucaugaacg

SEQ ID NO: 300335 - RNA, 15 nt, Human herpesvirus 2
cgccucccggccgcc

SEQ ID NO: 300336 - RNA, 19 nt, Human herpesvirus 2
cgccuugugugguuuauuc

SEQ ID NO: 300337 - RNA, 15 nt, Human herpesvirus 2
cgcgaacacaagcuc

SEQ ID NO: 300338 - RNA, 11 nt, Human herpesvirus 2
cgcgaccagcg

SEQ ID NO: 300339 - RNA, 20 nt, Human herpesvirus 2
cgcgcaucucuggcuccagg

SEQ ID NO: 300340 - RNA, 23 nt, Human herpesvirus 2
cgcgcaugguaauuagcaacuuu

SEQ ID NO: 300341 - RNA, 19 nt, Human herpesvirus 2
cgcgcccccgacccggggc

SEQ ID NO: 300342 - RNA, 15 nt, Human herpesvirus 2
cgcggacgccgggcg

SEQ ID NO: 300343 - RNA, 18 nt, Human herpesvirus 2
cgcggcacagguggugca

SEQ ID NO: 300344 - RNA, 13 nt, Human herpesvirus 2
cgcgggcggcgcc

SEQ ID NO: 300345 - RNA, 11 nt, Human herpesvirus 2
cgcgggcgggg

SEQ ID NO: 300346 - RNA, 22 nt, Human herpesvirus 2
cgcgggguggggggugugugcc

SEQ ID NO: 300347 - RNA, 17 nt, Human herpesvirus 2
cgcgugcagcgcgggcg

SEQ ID NO: 300348 - RNA, 14 nt, Human herpesvirus 2
cgcucaguucauca

SEQ ID NO: 300349 - RNA, 23 nt, Human herpesvirus 2
cgcucgcgguaauuagcagcuuu

SEQ ID NO: 300350 - RNA, 13 nt, Human herpesvirus 2
cggaagacuacca

SEQ ID NO: 300351 - RNA, 15 nt, Human herpesvirus 2
cggaccccgaccccg

SEQ ID NO: 300352 - RNA, 20 nt, Human herpesvirus 2
cggacgcacggcggacacaa

SEQ ID NO: 300353 - RNA, 11 nt, Human herpesvirus 2
cggacguccag

SEQ ID NO: 300354 - RNA, 14 nt, Human herpesvirus 2
cggacguccagggg

SEQ ID NO: 300355 - RNA, 16 nt, Human herpesvirus 2
cggacugcagccccgg

SEQ ID NO: 300356 - RNA, 14 nt, Human herpesvirus 2
cggaggaacugggg

SEQ ID NO: 300357 - RNA, 15 nt, Human herpesvirus 2
cggagucccccggcu

SEQ ID NO: 300358 - RNA, 23 nt, Human herpesvirus 2
cggagucccccggcuccgaguug

SEQ ID NO: 300359 - RNA, 17 nt, Human herpesvirus 2
cggcaaccccagggcgu

SEQ ID NO: 300360 - RNA, 16 nt, Human herpesvirus 2
cggcaagaaagacuca

SEQ ID NO: 300361 - RNA, 20 nt, Human herpesvirus 2
cggcaagaccugccccggcg

SEQ ID NO: 300362 - RNA, 14 nt, Human herpesvirus 2
cggccagcacgacc

SEQ ID NO: 300363 - RNA, 21 nt, Human herpesvirus 2
cggcccgauucuuacggcgcg

SEQ ID NO: 300364 - RNA, 12 nt, Human herpesvirus 2
cggcccuggagc

SEQ ID NO: 300365 - RNA, 22 nt, Human herpesvirus 2
cggccgccgcaacacccggcgc

SEQ ID NO: 300366 - RNA, 16 nt, Human herpesvirus 2
cggccuuucccguggc

SEQ ID NO: 300367 - RNA, 19 nt, Human herpesvirus 2
cggcgauguccggggcggu

SEQ ID NO: 300368 - RNA, 14 nt, Human herpesvirus 2
cggcgggggcgggg

SEQ ID NO: 300369 - RNA, 23 nt, Human herpesvirus 2
cggcguuucugaccggcgccgau

SEQ ID NO: 300370 - RNA, 17 nt, Human herpesvirus 2
cggcuggggaaagggaa

SEQ ID NO: 300371 - RNA, 14 nt, Human herpesvirus 2
cgggaaccccggcg

SEQ ID NO: 300372 - RNA, 20 nt, Human herpesvirus 2
cgggccccaaagcgugccaa

SEQ ID NO: 300373 - RNA, 23 nt, Human herpesvirus 2
cgggcccggacuccgccccggcg

SEQ ID NO: 300374 - RNA, 17 nt, Human herpesvirus 2
cgggcgaaaaggcccgg

SEQ ID NO: 300375 - RNA, 15 nt, Human herpesvirus 2
cgggcgacgccgcgg

SEQ ID NO: 300376 - RNA, 17 nt, Human herpesvirus 2
cgggcgcgcggcgcgag

SEQ ID NO: 300377 - RNA, 13 nt, Human herpesvirus 2
cgggcgggcgggg

SEQ ID NO: 300378 - RNA, 20 nt, Human herpesvirus 2
cgggcgggggucgggcgggc

SEQ ID NO: 300379 - RNA, 22 nt, Human herpesvirus 2
cgggcguccccgagcggcgcau

SEQ ID NO: 300380 - RNA, 15 nt, Human herpesvirus 2
cgggcguccccggug

SEQ ID NO: 300381 - RNA, 13 nt, Human herpesvirus 2
cggggacgcacgg

SEQ ID NO: 300382 - RNA, 15 nt, Human herpesvirus 2
cggggauaaaagcca

SEQ ID NO: 300383 - RNA, 16 nt, Human herpesvirus 2
cggggauaaaagccaa

SEQ ID NO: 300384 - RNA, 14 nt, Human herpesvirus 2
cggggccccgggcg

SEQ ID NO: 300385 - RNA, 19 nt, Human herpesvirus 2
cgggggacgggccgcccgg

SEQ ID NO: 300386 - RNA, 18 nt, Human herpesvirus 2
cgggggcggugacgcccg

SEQ ID NO: 300387 - RNA, 20 nt, Human herpesvirus 2
cgggggggggcaagugcagu

SEQ ID NO: 300388 - RNA, 17 nt, Human herpesvirus 2
cggggguucggggccag

SEQ ID NO: 300389 - RNA, 11 nt, Human herpesvirus 2
cgggugcccau

SEQ ID NO: 300390 - RNA, 16 nt, Human herpesvirus 2
cggguuauaggccaca

SEQ ID NO: 300391 - RNA, 15 nt, Human herpesvirus 2
cggucaauaaaauca

SEQ ID NO: 300392 - RNA, 16 nt, Human herpesvirus 2
cggugggucucggggc

SEQ ID NO: 300393 - RNA, 19 nt, Human herpesvirus 2
cgguuggacgaucccgggc

SEQ ID NO: 300394 - RNA, 12 nt, Human herpesvirus 2
cguaaacaccaa

SEQ ID NO: 300395 - RNA, 15 nt, Human herpesvirus 2
cgucaacagggcgcu

SEQ ID NO: 300396 - RNA, 21 nt, Human herpesvirus 2
cguccgucucaauaaagccag

SEQ ID NO: 300397 - RNA, 22 nt, Human herpesvirus 2
cguccucacggccaacgaggac

SEQ ID NO: 300398 - RNA, 15 nt, Human herpesvirus 2
cguccugcggcucau

SEQ ID NO: 300399 - RNA, 15 nt, Human herpesvirus 2
cgucgcccuagaggc

SEQ ID NO: 300400 - RNA, 20 nt, Human herpesvirus 2
cgucgcuccggcucccggcc

SEQ ID NO: 300401 - RNA, 13 nt, Human herpesvirus 2
cgucgcucucggu

SEQ ID NO: 300402 - RNA, 13 nt, Human herpesvirus 2
cgucguccagggu

SEQ ID NO: 300403 - RNA, 21 nt, Human herpesvirus 2
cgucucccgggggcgcuuggc

SEQ ID NO: 300404 - RNA, 18 nt, Human herpesvirus 2
cgugccaacucgcggcac

SEQ ID NO: 300405 - RNA, 14 nt, Human herpesvirus 2
cgugccccccgacg

SEQ ID NO: 300406 - RNA, 19 nt, Human herpesvirus 2
cguggccgacaacugccug

SEQ ID NO: 300407 - RNA, 20 nt, Human herpesvirus 2
cgugugguuuguguuuauuu

SEQ ID NO: 300408 - RNA, 14 nt, Human herpesvirus 2
cguucccaccgcac

SEQ ID NO: 300409 - RNA, 16 nt, Human herpesvirus 2
cguucggcaggcccgc

SEQ ID NO: 300410 - RNA, 15 nt, Human herpesvirus 2
cguugcccccccggg

SEQ ID NO: 300411 - RNA, 18 nt, Human herpesvirus 2
cguuugggggcggacgug

SEQ ID NO: 300412 - RNA, 13 nt, Human herpesvirus 2
cuaaaaacacauc

SEQ ID NO: 300413 - RNA, 15 nt, Human herpesvirus 2
cuaauuaaauacaua

SEQ ID NO: 300414 - RNA, 20 nt, Human herpesvirus 2
cuaccaucgccgaacggugc

SEQ ID NO: 300415 - RNA, 22 nt, Human herpesvirus 2
cuaccgcggcuucuucgccgcc

SEQ ID NO: 300416 - RNA, 18 nt, Human herpesvirus 2
cuaucacauacgcacaaa

SEQ ID NO: 300417 - RNA, 23 nt, Human herpesvirus 2
cuaucacauacgcacaaacacac

SEQ ID NO: 300418 - RNA, 23 nt, Human herpesvirus 2
cuaucagagagugggggcgugag

SEQ ID NO: 300419 - RNA, 22 nt, Human herpesvirus 2
cuaucaugucuuuccaccacca

SEQ ID NO: 300420 - RNA, 14 nt, Human herpesvirus 2
cucagcacacgauc

SEQ ID NO: 300421 - RNA, 14 nt, Human herpesvirus 2
cuccacgcccugcu

SEQ ID NO: 300422 - RNA, 16 nt, Human herpesvirus 2
cucccagugccccgac

SEQ ID NO: 300423 - RNA, 14 nt, Human herpesvirus 2
cuccccgcuggagc

SEQ ID NO: 300424 - RNA, 16 nt, Human herpesvirus 2
cucccggcccgccgac

SEQ ID NO: 300425 - RNA, 17 nt, Human herpesvirus 2
cuccgcaauaaacgccu

SEQ ID NO: 300426 - RNA, 18 nt, Human herpesvirus 2
cuccgcaauaaacgccuu

SEQ ID NO: 300427 - RNA, 14 nt, Human herpesvirus 2
cuccgccccggcga

SEQ ID NO: 300428 - RNA, 21 nt, Human herpesvirus 2
cuccucagcgcggccgugggc

SEQ ID NO: 300429 - RNA, 15 nt, Human herpesvirus 2
cuccugccacgcuca

SEQ ID NO: 300430 - RNA, 18 nt, Human herpesvirus 2
cucgcacgucgcaugcaa

SEQ ID NO: 300431 - RNA, 18 nt, Human herpesvirus 2
cucgcccccgugccuguu

SEQ ID NO: 300432 - RNA, 14 nt, Human herpesvirus 2
cucgcggcggcucc

SEQ ID NO: 300433 - RNA, 13 nt, Human herpesvirus 2
cucggcccccggg

SEQ ID NO: 300434 - RNA, 22 nt, Human herpesvirus 2
cucggccggcggagccccggag

SEQ ID NO: 300435 - RNA, 20 nt, Human herpesvirus 2
cucgggggccgucccguaga

SEQ ID NO: 300436 - RNA, 15 nt, Human herpesvirus 2
cucucaaacaaaaac

SEQ ID NO: 300437 - RNA, 17 nt, Human herpesvirus 2
cucucaaacaaaaacac

SEQ ID NO: 300438 - RNA, 17 nt, Human herpesvirus 2
cucugccugcacgagcg

SEQ ID NO: 300439 - RNA, 15 nt, Human herpesvirus 2
cucuuggggaaaucu

SEQ ID NO: 300440 - RNA, 20 nt, Human herpesvirus 2
cucuuggggaaaucuauuga

SEQ ID NO: 300441 - RNA, 14 nt, Human herpesvirus 2
cugacccucucggg

SEQ ID NO: 300442 - RNA, 14 nt, Human herpesvirus 2
cugaggaacugggu

SEQ ID NO: 300443 - RNA, 21 nt, Human herpesvirus 2
cugaggaacuggguuacugca

SEQ ID NO: 300444 - RNA, 22 nt, Human herpesvirus 2
cugaggaacuggguuacugcac

SEQ ID NO: 300445 - RNA, 23 nt, Human herpesvirus 2
cugagugucugguuuuucugggg

SEQ ID NO: 300446 - RNA, 21 nt, Human herpesvirus 2
cugauagcgaauaaagacaga

SEQ ID NO: 300447 - RNA, 12 nt, Human herpesvirus 2
cugcacuugccc

SEQ ID NO: 300448 - RNA, 16 nt, Human herpesvirus 2
cugccggacgcggcac

SEQ ID NO: 300449 - RNA, 19 nt, Human herpesvirus 2
cugcgcauggccugcgagg

SEQ ID NO: 300450 - RNA, 22 nt, Human herpesvirus 2
cugcgcgugcagaacaccggcg

SEQ ID NO: 300451 - RNA, 13 nt, Human herpesvirus 2
cugcgucguccag

SEQ ID NO: 300452 - RNA, 20 nt, Human herpesvirus 2
cugcugccccgcgugcagcg

SEQ ID NO: 300453 - RNA, 15 nt, Human herpesvirus 2
cuggagauccccggg

SEQ ID NO: 300454 - RNA, 15 nt, Human herpesvirus 2
cuggagcucugccug

SEQ ID NO: 300455 - RNA, 22 nt, Human herpesvirus 2
cuggcuggagaccgagcucgug

SEQ ID NO: 300456 - RNA, 13 nt, Human herpesvirus 2
cugggaagacgca

SEQ ID NO: 300457 - RNA, 15 nt, Human herpesvirus 2
cugggacacccagau

SEQ ID NO: 300458 - RNA, 22 nt, Human herpesvirus 2
cuggggcuuccguugcgcgaca

SEQ ID NO: 300459 - RNA, 16 nt, Human herpesvirus 2
cugggguacugcacug

SEQ ID NO: 300460 - RNA, 15 nt, Human herpesvirus 2
cuggguuacugcacu

SEQ ID NO: 300461 - RNA, 23 nt, Human herpesvirus 2
cuggucauggcccuuggacgggu

SEQ ID NO: 300462 - RNA, 14 nt, Human herpesvirus 2
cugguuggauguuu

SEQ ID NO: 300463 - RNA, 19 nt, Human herpesvirus 2
cuguacgggcaaggggcca

SEQ ID NO: 300464 - RNA, 20 nt, Human herpesvirus 2
cugugcgccuuuaagacaga

SEQ ID NO: 300465 - RNA, 20 nt, Human herpesvirus 2
cuguucccgucgugccgguu

SEQ ID NO: 300466 - RNA, 15 nt, Human herpesvirus 2
cuuaaauaaacacaa

SEQ ID NO: 300467 - RNA, 16 nt, Human herpesvirus 2
cuuaaauaaacacaaa

SEQ ID NO: 300468 - RNA, 17 nt, Human herpesvirus 2
gccacucccgcggcccc

SEQ ID NO: 300469 - RNA, 20 nt, Human herpesvirus 2
gccacucuccugcgagcccu

SEQ ID NO: 300470 - RNA, 18 nt, Human herpesvirus 2
gccagcagaugaaucaca

SEQ ID NO: 300471 - RNA, 17 nt, Human herpesvirus 2
gccaguggagccaaacc

SEQ ID NO: 300472 - RNA, 21 nt, Human herpesvirus 2
gccauccccgcgcaugguaau

SEQ ID NO: 300473 - RNA, 23 nt, Human herpesvirus 2
gcccacccccaaaccccgguugg

SEQ ID NO: 300474 - RNA, 17 nt, Human herpesvirus 2
gcccaccggcuccaucc

SEQ ID NO: 300475 - RNA, 14 nt, Human herpesvirus 2
gccccccccagggg

SEQ ID NO: 300476 - RNA, 18 nt, Human herpesvirus 2
gccccccgcgccucgggc

SEQ ID NO: 300477 - RNA, 19 nt, Human herpesvirus 2
gcccccgcuggcgggagcc

SEQ ID NO: 300478 - RNA, 22 nt, Human herpesvirus 2
gcccccuuuacgccuuuccucc

SEQ ID NO: 300479 - RNA, 14 nt, Human herpesvirus 2
gccccgcgucggga

SEQ ID NO: 300480 - RNA, 23 nt, Human herpesvirus 2
gccccgcgugcagcgcgggcgac

SEQ ID NO: 300481 - RNA, 19 nt, Human herpesvirus 2
gccccgugcuccaacuuac

SEQ ID NO: 300482 - RNA, 17 nt, Human herpesvirus 2
gccccucccccggccca

SEQ ID NO: 300483 - RNA, 13 nt, Human herpesvirus 2
gcccgaacggaag

SEQ ID NO: 300484 - RNA, 15 nt, Human herpesvirus 2
gcccgcccgccgccc

SEQ ID NO: 300485 - RNA, 12 nt, Human herpesvirus 2
gcccgcggacca

SEQ ID NO: 300486 - RNA, 13 nt, Human herpesvirus 2
gcccgcggaccac

SEQ ID NO: 300487 - RNA, 13 nt, Human herpesvirus 2
gcccggcgccgcc

SEQ ID NO: 300488 - RNA, 19 nt, Human herpesvirus 2
gcccggggggggccucggu

SEQ ID NO: 300489 - RNA, 16 nt, Human herpesvirus 2
gcccgggguucugggg

SEQ ID NO: 300490 - RNA, 15 nt, Human herpesvirus 2
gcccuccuaucugga

SEQ ID NO: 300491 - RNA, 19 nt, Human herpesvirus 2
gcccuggacccagacacgg

SEQ ID NO: 300492 - RNA, 21 nt, Human herpesvirus 2
gccgacccgucuagcggccgg

SEQ ID NO: 300493 - RNA, 19 nt, Human herpesvirus 2
gccgacgaccugcagccgg

SEQ ID NO: 300494 - RNA, 18 nt, Human herpesvirus 2
gccgauccggccucgggu

SEQ ID NO: 300495 - RNA, 18 nt, Human herpesvirus 2
gccgccccgacucugugu

SEQ ID NO: 300496 - RNA, 18 nt, Human herpesvirus 2
gccgcgacggccccggcc

SEQ ID NO: 300497 - RNA, 16 nt, Human herpesvirus 2
gccgcucguuccucac

SEQ ID NO: 300498 - RNA, 14 nt, Human herpesvirus 2
gccggccaaccuca

SEQ ID NO: 300499 - RNA, 19 nt, Human herpesvirus 2
gccgggaaccccggcgugg

SEQ ID NO: 300500 - RNA, 20 nt, Human herpesvirus 2
gccggguuuuuggcccugua

SEQ ID NO: 300501 - RNA, 14 nt, Human herpesvirus 2
gccgguagugcagg

SEQ ID NO: 300502 - RNA, 15 nt, Human herpesvirus 2
gccgugcgcggcccc

SEQ ID NO: 300503 - RNA, 14 nt, Human herpesvirus 2
gccuccgcccuccg

SEQ ID NO: 300504 - RNA, 17 nt, Human herpesvirus 2
gccuggaucggcgucgg

SEQ ID NO: 300505 - RNA, 13 nt, Human herpesvirus 2
gcgaacacaagcu

SEQ ID NO: 300506 - RNA, 18 nt, Human herpesvirus 2
gcgaacgaacggucaaua

SEQ ID NO: 300507 - RNA, 19 nt, Human herpesvirus 2
gcgaacgaacggucaauaa

SEQ ID NO: 300508 - RNA, 14 nt, Human herpesvirus 2
gcgaacgggggauc

SEQ ID NO: 300509 - RNA, 13 nt, Human herpesvirus 2
gcgaaggcggacc

SEQ ID NO: 300510 - RNA, 12 nt, Human herpesvirus 2
gcgacacucccg

SEQ ID NO: 300511 - RNA, 18 nt, Human herpesvirus 2
gcgaccggucgcuuucca

SEQ ID NO: 300512 - RNA, 16 nt, Human herpesvirus 2
gcgaccgucgccgccg

SEQ ID NO: 300513 - RNA, 13 nt, Human herpesvirus 2
gcgacgccgcggc

SEQ ID NO: 300514 - RNA, 18 nt, Human herpesvirus 2
gcgagaaggaggggggcc

SEQ ID NO: 300515 - RNA, 22 nt, Human herpesvirus 2
gcgagaaggaggggggccucgg

SEQ ID NO: 300516 - RNA, 13 nt, Human herpesvirus 2
gcgcauggccugc

SEQ ID NO: 300517 - RNA, 15 nt, Human herpesvirus 2
gcgccaagcgccccg

SEQ ID NO: 300518 - RNA, 12 nt, Human herpesvirus 2
gcgccaccggcc

SEQ ID NO: 300519 - RNA, 17 nt, Human herpesvirus 2
gcgcccccggccgcggu

SEQ ID NO: 300520 - RNA, 15 nt, Human herpesvirus 2
gcgccccgccggggc

SEQ ID NO: 300521 - RNA, 19 nt, Human herpesvirus 2
gcgccccgcggaccccgcc

SEQ ID NO: 300522 - RNA, 23 nt, Human herpesvirus 2
gcgcccgcguccgacacccgggc

SEQ ID NO: 300523 - RNA, 17 nt, Human herpesvirus 2
gcgccgacgaccugcag

SEQ ID NO: 300524 - RNA, 13 nt, Human herpesvirus 2
gcgccgaucgcag

SEQ ID NO: 300525 - RNA, 19 nt, Human herpesvirus 2
gcgcgcccccgacccgggg

SEQ ID NO: 300526 - RNA, 13 nt, Human herpesvirus 2
gcgcggacgcggc

SEQ ID NO: 300527 - RNA, 22 nt, Human herpesvirus 2
gcgcugacggaccucgggguga

SEQ ID NO: 300528 - RNA, 15 nt, Human herpesvirus 2
gcgcuuggccgggga

SEQ ID NO: 300529 - RNA, 17 nt, Human herpesvirus 2
gcggaacccgcgggcgc

SEQ ID NO: 300530 - RNA, 20 nt, Human herpesvirus 2
gcggacaaacccgccggggc

SEQ ID NO: 300531 - RNA, 15 nt, Human herpesvirus 2
gcggacacaauaaca

SEQ ID NO: 300532 - RNA, 22 nt, Human herpesvirus 2
gcggaccccgcccgcgaccccg

SEQ ID NO: 300533 - RNA, 19 nt, Human herpesvirus 2
gcggacuggcagccgggac

SEQ ID NO: 300534 - RNA, 12 nt, Human herpesvirus 2
gcggaggcgugg

SEQ ID NO: 300535 - RNA, 14 nt, Human herpesvirus 2
gcggccauccugcc

SEQ ID NO: 300536 - RNA, 14 nt, Human herpesvirus 2
gcggccccgaccca

SEQ ID NO: 300537 - RNA, 15 nt, Human herpesvirus 2
gcggccccggcggcc

SEQ ID NO: 300538 - RNA, 23 nt, Human herpesvirus 2
gcggccccuguuggagccggagc

SEQ ID NO: 300539 - RNA, 16 nt, Human herpesvirus 2
gcggcccgaggcgacc

SEQ ID NO: 300540 - RNA, 18 nt, Human herpesvirus 2
gcggcuucuucgccgccc

SEQ ID NO: 300541 - RNA, 14 nt, Human herpesvirus 2
gcgggaagcgccgc

SEQ ID NO: 300542 - RNA, 21 nt, Human herpesvirus 2
gcgggaugugucgcggggaca

SEQ ID NO: 300543 - RNA, 21 nt, Human herpesvirus 2
gcgggcacucuggcgucccca

SEQ ID NO: 300544 - RNA, 16 nt, Human herpesvirus 2
gcgggcaggccgcggc

SEQ ID NO: 300545 - RNA, 18 nt, Human herpesvirus 2
gcgggcaggccgcggcgc

SEQ ID NO: 300546 - RNA, 15 nt, Human herpesvirus 2
gcgggcccggggccc

SEQ ID NO: 300547 - RNA, 21 nt, Human herpesvirus 2
gcgggcgggaugaugcggggc

SEQ ID NO: 300548 - RNA, 21 nt, Human herpesvirus 2
gcgggcguccccgagcggcgc

SEQ ID NO: 300549 - RNA, 22 nt, Human herpesvirus 2
gcggggacccgccagagacccu

SEQ ID NO: 300550 - RNA, 15 nt, Human herpesvirus 2
gcgggggugccgugg

SEQ ID NO: 300551 - RNA, 20 nt, Human herpesvirus 2
gcgguuuaccgcgaccagcg

SEQ ID NO: 300552 - RNA, 22 nt, Human herpesvirus 2
gcgguuuaccgcgaccagcguc

SEQ ID NO: 300553 - RNA, 21 nt, Human herpesvirus 2
gcguauaaaggcaggcgcgcg

SEQ ID NO: 300554 - RNA, 23 nt, Human herpesvirus 2
gcgucguggcauggaagcccccg

SEQ ID NO: 300555 - RNA, 17 nt, Human herpesvirus 2
gcgugccgcagaccacc

SEQ ID NO: 300556 - RNA, 15 nt, Human herpesvirus 2
gcgugcugcugagcc

SEQ ID NO: 300557 - RNA, 18 nt, Human herpesvirus 2
gcgugcuuccgcaccccc

SEQ ID NO: 300558 - RNA, 15 nt, Human herpesvirus 2
gcuaaaugacgccuc

SEQ ID NO: 300559 - RNA, 19 nt, Human herpesvirus 2
gcuaauaaaaaacacugcg

SEQ ID NO: 300560 - RNA, 16 nt, Human herpesvirus 2
gcucaugaacgacugg

SEQ ID NO: 300561 - RNA, 17 nt, Human herpesvirus 2
gcucccggcccgggccc

SEQ ID NO: 300562 - RNA, 23 nt, Human herpesvirus 2
gcuccugcgcacgacagaccucc

SEQ ID NO: 300563 - RNA, 21 nt, Human herpesvirus 2
gcucgauuguuugguguuguu

SEQ ID NO: 300564 - RNA, 22 nt, Human herpesvirus 2
gcugcccgcggaccaccgggcc

SEQ ID NO: 300565 - RNA, 22 nt, Human herpesvirus 2
gcugcggggcgaacguguuguu

SEQ ID NO: 300566 - RNA, 18 nt, Human herpesvirus 2
gcuggagcgcugguggga

SEQ ID NO: 300567 - RNA, 21 nt, Human herpesvirus 2
gcuggagcucugccugcacga

SEQ ID NO: 300568 - RNA, 14 nt, Human herpesvirus 2
gcuggcgccgccgg

SEQ ID NO: 300569 - RNA, 15 nt, Human herpesvirus 2
gcuggggaaagggaa

SEQ ID NO: 300570 - RNA, 16 nt, Human herpesvirus 2
gcuggggaaagggaag

SEQ ID NO: 300571 - RNA, 16 nt, Human herpesvirus 2
gcuguucugccgcgcg

SEQ ID NO: 300572 - RNA, 19 nt, Human herpesvirus 2
gcuuagggugugacccccc

SEQ ID NO: 300573 - RNA, 23 nt, Human herpesvirus 2
gcuucaccgagagcgccgucggg

SEQ ID NO: 300574 - RNA, 17 nt, Human herpesvirus 2
gcuucgucaacagggcg

SEQ ID NO: 300575 - RNA, 19 nt, Human herpesvirus 2
gcuuuauuaucgcacccau

SEQ ID NO: 300576 - RNA, 14 nt, Human herpesvirus 2
ggaacgcagggugc

SEQ ID NO: 300577 - RNA, 23 nt, Human herpesvirus 2
ggaacugggguacugcacugccc

SEQ ID NO: 300578 - RNA, 23 nt, Human herpesvirus 2
ggaacuggguuacugcacuugcc

SEQ ID NO: 300579 - RNA, 12 nt, Human herpesvirus 2
ggaagacuacca

SEQ ID NO: 300580 - RNA, 17 nt, Human herpesvirus 2
ggacaaaaguauaccca

SEQ ID NO: 300581 - RNA, 16 nt, Human herpesvirus 2
ggacacgcggcggguc

SEQ ID NO: 300582 - RNA, 19 nt, Human herpesvirus 2
ggacacgcuugaagggcac

SEQ ID NO: 300583 - RNA, 14 nt, Human herpesvirus 2
guccccgagcggcg

SEQ ID NO: 300584 - RNA, 23 nt, Human herpesvirus 2
gucccgacgauuagccaccgcgc

SEQ ID NO: 300585 - RNA, 21 nt, Human herpesvirus 2
gucccgccugugugcucucaa

SEQ ID NO: 300586 - RNA, 20 nt, Human herpesvirus 2
guccgcgggaagcgccgcgc

SEQ ID NO: 300587 - RNA, 21 nt, Human herpesvirus 2
guccgcuccaccgauguauuu

SEQ ID NO: 300588 - RNA, 23 nt, Human herpesvirus 2
guccggcggccaccccgccgcag

SEQ ID NO: 300589 - RNA, 18 nt, Human herpesvirus 2
guccggggcggugauaug

SEQ ID NO: 300590 - RNA, 22 nt, Human herpesvirus 2
guccugugcgggauugcguuuu

SEQ ID NO: 300591 - RNA, 20 nt, Human herpesvirus 2
guccuucgcgggggccgggg

SEQ ID NO: 300592 - RNA, 23 nt, Human herpesvirus 2
gucgagcgcgccaggaccgccug

SEQ ID NO: 300593 - RNA, 19 nt, Human herpesvirus 2
gucgcgcuuuuccgccgcc

SEQ ID NO: 300594 - RNA, 20 nt, Human herpesvirus 2
gucgcggggacagccccggg

SEQ ID NO: 300595 - RNA, 18 nt, Human herpesvirus 2
gucgcuaacgagcgcgcu

SEQ ID NO: 300596 - RNA, 17 nt, Human herpesvirus 2
gucggccagcacgacca

SEQ ID NO: 300597 - RNA, 20 nt, Human herpesvirus 2
gucggcggccccggcggccc

SEQ ID NO: 300598 - RNA, 15 nt, Human herpesvirus 2
gucguccgcggcccc

SEQ ID NO: 300599 - RNA, 16 nt, Human herpesvirus 2
gucguuggccagcgcg

SEQ ID NO: 300600 - RNA, 16 nt, Human herpesvirus 2
gucguugggcggcccc

SEQ ID NO: 300601 - RNA, 17 nt, Human herpesvirus 2
gucucaauaaagccagg

SEQ ID NO: 300602 - RNA, 20 nt, Human herpesvirus 2
gucucauaccgguccgugau

SEQ ID NO: 300603 - RNA, 13 nt, Human herpesvirus 2
gucuccgguguga

SEQ ID NO: 300604 - RNA, 15 nt, Human herpesvirus 2
gucucugaaauggcg

SEQ ID NO: 300605 - RNA, 19 nt, Human herpesvirus 2
gucucuuggggaaaucuau

SEQ ID NO: 300606 - RNA, 18 nt, Human herpesvirus 2
gucugcgucguccagggu

SEQ ID NO: 300607 - RNA, 19 nt, Human herpesvirus 2
gucugucgcgacgccgcgg

SEQ ID NO: 300608 - RNA, 16 nt, Human herpesvirus 2
gucugugcgccuuuaa

SEQ ID NO: 300609 - RNA, 23 nt, Human herpesvirus 2
gucuuccggggacacgcggcggg

SEQ ID NO: 300610 - RNA, 21 nt, Human herpesvirus 2
gucuuuccaccaccagcacca

SEQ ID NO: 300611 - RNA, 19 nt, Human herpesvirus 2
gugacuuggugcgccgccg

SEQ ID NO: 300612 - RNA, 19 nt, Human herpesvirus 2
gugcacagccuggccgugc

SEQ ID NO: 300613 - RNA, 20 nt, Human herpesvirus 2
gugcaguaccccaguuccuc

SEQ ID NO: 300614 - RNA, 17 nt, Human herpesvirus 2
gugccccacccccgagc

SEQ ID NO: 300615 - RNA, 20 nt, Human herpesvirus 2
gugccggggauaaaagccaa

SEQ ID NO: 300616 - RNA, 15 nt, Human herpesvirus 2
gugccgucgccgcgc

SEQ ID NO: 300617 - RNA, 23 nt, Human herpesvirus 2
gugccucacgguccucaccgagc

SEQ ID NO: 300618 - RNA, 14 nt, Human herpesvirus 2
gugccugacgccgg

SEQ ID NO: 300619 - RNA, 20 nt, Human herpesvirus 2
gugcgaccgggcggcgcgcc

SEQ ID NO: 300620 - RNA, 14 nt, Human herpesvirus 2
gugcgucuucccag

SEQ ID NO: 300621 - RNA, 11 nt, Human herpesvirus 2
guggcccucca

SEQ ID NO: 300622 - RNA, 13 nt, Human herpesvirus 2
guggccggcgacc

SEQ ID NO: 300623 - RNA, 16 nt, Human herpesvirus 2
guggggaacguuccau

SEQ ID NO: 300624 - RNA, 15 nt, Human herpesvirus 2
guggggggguggugg

SEQ ID NO: 300625 - RNA, 21 nt, Human herpesvirus 2
guggucgggcggacguccagg

SEQ ID NO: 300626 - RNA, 22 nt, Human herpesvirus 2
guggugcaguuugagcagccgc

SEQ ID NO: 300627 - RNA, 13 nt, Human herpesvirus 2
gugguguuuauuu

SEQ ID NO: 300628 - RNA, 21 nt, Human herpesvirus 2
guuagaaaacgacugcacuuu

SEQ ID NO: 300629 - RNA, 21 nt, Human herpesvirus 2
guucaauagauuucccaaaca

SEQ ID NO: 300630 - RNA, 20 nt, Human herpesvirus 2
guuccccgagagcccaggga

SEQ ID NO: 300631 - RNA, 12 nt, Human herpesvirus 2
guucggggccag

SEQ ID NO: 300632 - RNA, 20 nt, Human herpesvirus 2
guucugucgucgcuaucaca

SEQ ID NO: 300633 - RNA, 23 nt, Human herpesvirus 2
guugaaccggcgagggcggccuc

SEQ ID NO: 300634 - RNA, 15 nt, Human herpesvirus 2
guugccgggggccau

SEQ ID NO: 300635 - RNA, 18 nt, Human herpesvirus 2
guugcgcuuuccggcccu

SEQ ID NO: 300636 - RNA, 21 nt, Human herpesvirus 2
guuggaagaggcggacccagu

SEQ ID NO: 300637 - RNA, 19 nt, Human herpesvirus 2
guuggcgcgcuugcacaaa

SEQ ID NO: 300638 - RNA, 15 nt, Human herpesvirus 2
guuguacccucucaa

SEQ ID NO: 300639 - RNA, 18 nt, Human herpesvirus 2
guuguaguuguccgcggg

SEQ ID NO: 300640 - RNA, 19 nt, Human herpesvirus 2
guugucgggggggauccag

SEQ ID NO: 300641 - RNA, 17 nt, Human herpesvirus 2
guuuaccgcgaccagcg

SEQ ID NO: 300642 - RNA, 15 nt, Human herpesvirus 2
guuuauugaccaaau

SEQ ID NO: 300643 - RNA, 22 nt, Human herpesvirus 2
guuugcaccccagaaccaugau

SEQ ID NO: 300644 - RNA, 17 nt, Human herpesvirus 2
guuuucccguuagcaca

SEQ ID NO: 300645 - RNA, 20 nt, Human herpesvirus 2
uaaaaguugcguuaacacac

SEQ ID NO: 300646 - RNA, 23 nt, Human herpesvirus 2
uaaacgccuucccggaacugugu

SEQ ID NO: 300647 - RNA, 14 nt, Human herpesvirus 2
uaaagagugagaac

SEQ ID NO: 300648 - RNA, 13 nt, Human herpesvirus 2
uaacaacaccaaa

SEQ ID NO: 300649 - RNA, 18 nt, Human herpesvirus 2
uaacacucggcuugcugc

SEQ ID NO: 300650 - RNA, 13 nt, Human herpesvirus 2
uaacccaguuccu

SEQ ID NO: 300651 - RNA, 19 nt, Human herpesvirus 2
uaauccggcgauccccaag

SEQ ID NO: 300652 - RNA, 19 nt, Human herpesvirus 2
uacaccccccugacucagg

SEQ ID NO: 300653 - RNA, 15 nt, Human herpesvirus 2
uacagccuacaucac

SEQ ID NO: 300654 - RNA, 14 nt, Human herpesvirus 2
uaccacacauacga

SEQ ID NO: 300655 - RNA, 13 nt, Human herpesvirus 2
uaccccaguuccu

SEQ ID NO: 300656 - RNA, 21 nt, Human herpesvirus 2
uacccggcagagagauuuccc

SEQ ID NO: 300657 - RNA, 22 nt, Human herpesvirus 2
uacccggcagagagauuucccc

SEQ ID NO: 300658 - RNA, 14 nt, Human herpesvirus 2
uaccgcgaccagcg

SEQ ID NO: 300659 - RNA, 15 nt, Human herpesvirus 2
uaccgcggcuucuuc

SEQ ID NO: 300660 - RNA, 13 nt, Human herpesvirus 2
uacgaggugcugc

SEQ ID NO: 300661 - RNA, 13 nt, Human herpesvirus 2
uacggacaccccc

SEQ ID NO: 300662 - RNA, 23 nt, Human herpesvirus 2
uacgggggaggagggggguggug

SEQ ID NO: 300663 - RNA, 12 nt, Human herpesvirus 2
uacgggggcggg

SEQ ID NO: 300664 - RNA, 12 nt, Human herpesvirus 2
uacuacguggag

SEQ ID NO: 300665 - RNA, 13 nt, Human herpesvirus 2
uacuagguugucu

SEQ ID NO: 300666 - RNA, 19 nt, Human herpesvirus 2
uagaaaaacaaaugcagac

SEQ ID NO: 300667 - RNA, 13 nt, Human herpesvirus 2
uagauugacucag

SEQ ID NO: 300668 - RNA, 17 nt, Human herpesvirus 2
uagauuuccccaagaga

SEQ ID NO: 300669 - RNA, 13 nt, Human herpesvirus 2
uagcaacuuuuaa

SEQ ID NO: 300670 - RNA, 23 nt, Human herpesvirus 2
uaguccgcgccuccugcucgacc

SEQ ID NO: 300671 - RNA, 20 nt, Human herpesvirus 2
uauaagagcgggcccggggc

SEQ ID NO: 300672 - RNA, 12 nt, Human herpesvirus 2
uauaccuugauu

SEQ ID NO: 300673 - RNA, 13 nt, Human herpesvirus 2
uaucacauacgca

SEQ ID NO: 300674 - RNA, 20 nt, Human herpesvirus 2
uaugcaucucgggguucugg

SEQ ID NO: 300675 - RNA, 19 nt, Human herpesvirus 2
uauuaaugagguugcauac

SEQ ID NO: 300676 - RNA, 21 nt, Human herpesvirus 2
uauuagcaucgggggggguua

SEQ ID NO: 300677 - RNA, 23 nt, Human herpesvirus 2
uauuaugcaucucgggguucugg

SEQ ID NO: 300678 - RNA, 18 nt, Human herpesvirus 2
uauugaaacguacaacac

SEQ ID NO: 300679 - RNA, 19 nt, Human herpesvirus 2
uauugaaacguacaacaca

SEQ ID NO: 300680 - RNA, 19 nt, Human herpesvirus 2
ucaaacgcggacauccggu

SEQ ID NO: 300681 - RNA, 17 nt, Human herpesvirus 2
ucaagcgccgaccagaa

SEQ ID NO: 300682 - RNA, 18 nt, Human herpesvirus 2
ucaauaaaaaacaccaac

SEQ ID NO: 300683 - RNA, 21 nt, Human herpesvirus 2
ucaauaaaaaguaacaaacag

SEQ ID NO: 300684 - RNA, 13 nt, Human herpesvirus 2
ucaauagauuucc

SEQ ID NO: 300685 - RNA, 23 nt, Human herpesvirus 2
ucaaucgcccgaggcgcauaaag

SEQ ID NO: 300686 - RNA, 20 nt, Human herpesvirus 2
ucacaccagacggcgggacc

SEQ ID NO: 300687 - RNA, 19 nt, Human herpesvirus 2
ucacccgggcgccggggcc

SEQ ID NO: 300688 - RNA, 16 nt, Human herpesvirus 2
ucaucgaaaggguaca

SEQ ID NO: 300689 - RNA, 21 nt, Human herpesvirus 2
ucaucgaaaggguacacaaag

SEQ ID NO: 300690 - RNA, 23 nt, Human herpesvirus 2
ucaucucucgggggaugguggug

SEQ ID NO: 300691 - RNA, 19 nt, Human herpesvirus 2
ucaugucuuuccaccacca

SEQ ID NO: 300692 - RNA, 20 nt, Human herpesvirus 2
ucauuccccggauggcaugg

SEQ ID NO: 300693 - RNA, 16 nt, Human herpesvirus 2
uccaccaccagcacca

SEQ ID NO: 300694 - RNA, 21 nt, Human herpesvirus 2
uccagcagcuucccaugacgc

SEQ ID NO: 300695 - RNA, 17 nt, Human herpesvirus 2
uccccaagagacuuccc

SEQ ID NO: 300696 - RNA, 22 nt, Human herpesvirus 2
uccccaccccgcccgcuugcau

SEQ ID NO: 300697 - RNA, 16 nt, Human herpesvirus 2
ugugcgggaggggcuu

SEQ ID NO: 300698 - RNA, 11 nt, Human herpesvirus 2
uguguuucccc

SEQ ID NO: 300699 - RNA, 20 nt, Human herpesvirus 2
uguguuuugugggacugggg

SEQ ID NO: 300700 - RNA, 20 nt, Human herpesvirus 2
uguuggccaccaacaacgcu

SEQ ID NO: 300701 - RNA, 19 nt, Human herpesvirus 2
uguugggucuccgguguga

SEQ ID NO: 300702 - RNA, 17 nt, Human herpesvirus 2
uuaaaaucgugcacaga

SEQ ID NO: 300703 - RNA, 20 nt, Human herpesvirus 2
uuaaauaaacacaaaccaca

SEQ ID NO: 300704 - RNA, 16 nt, Human herpesvirus 2
uuaacaacaccaaaca

SEQ ID NO: 300705 - RNA, 15 nt, Human herpesvirus 2
uuaacuaaaccacag

SEQ ID NO: 300706 - RNA, 16 nt, Human herpesvirus 2
uuaacuaaaccacagc

SEQ ID NO: 300707 - RNA, 11 nt, Human herpesvirus 2
uuaagacagac

SEQ ID NO: 300708 - RNA, 19 nt, Human herpesvirus 2
uuacccuauacgcgguaug

SEQ ID NO: 300709 - RNA, 16 nt, Human herpesvirus 2
uuacuauccuugccuc

SEQ ID NO: 300710 - RNA, 14 nt, Human herpesvirus 2
uuagcaacuuuuaa

SEQ ID NO: 300711 - RNA, 23 nt, Human herpesvirus 2
uuagggaagucucuuggggaaau

SEQ ID NO: 300712 - RNA, 16 nt, Human herpesvirus 2
uuauaggccacacagu

SEQ ID NO: 300713 - RNA, 16 nt, Human herpesvirus 2
uucaauagauuuccca

SEQ ID NO: 300714 - RNA, 14 nt, Human herpesvirus 2
uucacuacuacgug

SEQ ID NO: 300715 - RNA, 18 nt, Human herpesvirus 2
uucccaaacacugaggaa

SEQ ID NO: 300716 - RNA, 22 nt, Human herpesvirus 2
uucccaaacacugaggaacugg

SEQ ID NO: 300717 - RNA, 17 nt, Human herpesvirus 2
uuccccgagagcccagg

SEQ ID NO: 300718 - RNA, 15 nt, Human herpesvirus 2
uucccgcuuauggua

SEQ ID NO: 300719 - RNA, 18 nt, Human herpesvirus 2
uucccgcuuaugguaauu

SEQ ID NO: 300720 - RNA, 15 nt, Human herpesvirus 2
uuccgcauacacccc

SEQ ID NO: 300721 - RNA, 19 nt, Human herpesvirus 2
uuccuccccucgccuguug

SEQ ID NO: 300722 - RNA, 11 nt, Human herpesvirus 2
uuccuccgugc

SEQ ID NO: 300723 - RNA, 23 nt, Human herpesvirus 2
uuccuccuucggugcacaagaca

SEQ ID NO: 300724 - RNA, 14 nt, Human herpesvirus 2
uucucggaauuuca

SEQ ID NO: 300725 - RNA, 23 nt, Human herpesvirus 2
uucucugcguugcgucugaccac

SEQ ID NO: 300726 - RNA, 21 nt, Human herpesvirus 2
uucuuucuggucuuccgggga

SEQ ID NO: 300727 - RNA, 14 nt, Human herpesvirus 2
uuggccaccaacaa

SEQ ID NO: 300728 - RNA, 14 nt, Human herpesvirus 2
uugggaaaucuauu

SEQ ID NO: 300729 - RNA, 15 nt, Human herpesvirus 2
uuggggaaaucuauu

SEQ ID NO: 300730 - RNA, 17 nt, Human herpesvirus 2
uuggggggggguggaaa

SEQ ID NO: 300731 - RNA, 18 nt, Human herpesvirus 2
uugguccuuuucucuggu

SEQ ID NO: 300732 - RNA, 19 nt, Human herpesvirus 2
uugugcuuuuacccucacc

SEQ ID NO: 300733 - RNA, 23 nt, Human herpesvirus 2
uuguguauaaauaaaaagacacc

SEQ ID NO: 300734 - RNA, 14 nt, Human herpesvirus 2
uuguuuucccggga

SEQ ID NO: 300735 - RNA, 18 nt, Human herpesvirus 2
uuguuuuucuagucacac

SEQ ID NO: 300736 - RNA, 13 nt, Human herpesvirus 2
uuuaucgguugga

SEQ ID NO: 300737 - RNA, 15 nt, Human herpesvirus 2
uuuauuucgguuaga

SEQ ID NO: 300738 - RNA, 14 nt, Human herpesvirus 2
uuuccaccaccagc

SEQ ID NO: 300739 - RNA, 17 nt, Human herpesvirus 2
uuucggcacccguccuc

SEQ ID NO: 300740 - RNA, 24 nt, Human herpesvirus 2
uuucucugcguugcgucugaccac

SEQ ID NO: 300741 - RNA, 20 nt, Human herpesvirus 2
uuucuuguagggcguuuauu

SEQ ID NO: 300742 - RNA, 17 nt, Human herpesvirus 2
uuucuuuuugccuccca

SEQ ID NO: 300743 - RNA, 16 nt, Human herpesvirus 2
uuuguguguugcugcg

SEQ ID NO: 300744 - RNA, 21 nt, Human herpesvirus 2
uuuuaaugggccggcguuccc

SEQ ID NO: 300745 - RNA, 19 nt, Human herpesvirus 2
uuuucuuucggccaccacc

SEQ ID NO: 300746 - RNA, 15 nt, Human herpesvirus 2
uuuuugugguguuua

SEQ ID NO: 300747 - RNA, 14 nt, Human herpesvirus 2
aacugggguacugc

SEQ ID NO: 300748 - RNA, 17 nt, Human herpesvirus 2
aacugggguacugcacu

SEQ ID NO: 300749 - RNA, 18 nt, Human herpesvirus 2
aacugggguacugcacug

SEQ ID NO: 300750 - RNA, 14 nt, Human herpesvirus 2
aacuggguuacugc

SEQ ID NO: 300751 - RNA, 16 nt, Human herpesvirus 2
aacuggguuacugcac

SEQ ID NO: 300752 - RNA, 23 nt, Human herpesvirus 2
aagacgugucccggggcccucga

SEQ ID NO: 300753 - RNA, 16 nt, Human herpesvirus 2
aagacuaccacgggga

SEQ ID NO: 300754 - RNA, 15 nt, Human herpesvirus 2
aagaggcggacccag

SEQ ID NO: 300755 - RNA, 22 nt, Human herpesvirus 2
aagcuuuauuaucgcacccauc

SEQ ID NO: 300756 - RNA, 19 nt, Human herpesvirus 2
caaaggccagcagaugaau

SEQ ID NO: 300757 - RNA, 21 nt, Human herpesvirus 2
caaagggggaauacgugcgcu

SEQ ID NO: 300758 - RNA, 18 nt, Human herpesvirus 2
caacaacgcucaguucau

SEQ ID NO: 300759 - RNA, 12 nt, Human herpesvirus 2
caacacccggcg

SEQ ID NO: 300760 - RNA, 14 nt, Human herpesvirus 2
caacaguacucauc

SEQ ID NO: 300761 - RNA, 16 nt, Human herpesvirus 2
caacccccgacauucc

SEQ ID NO: 300762 - RNA, 19 nt, Human herpesvirus 2
caaccgacucccuccgugu

SEQ ID NO: 300763 - RNA, 12 nt, Human herpesvirus 2
caaccuggcaca

SEQ ID NO: 300764 - RNA, 13 nt, Human herpesvirus 2
caacguccgggcg

SEQ ID NO: 300765 - RNA, 20 nt, Human herpesvirus 2
caagaauucccagggcacca

SEQ ID NO: 300766 - RNA, 21 nt, Human herpesvirus 2
caagacacacacacaggccca

SEQ ID NO: 300767 - RNA, 23 nt, Human herpesvirus 2
caagugcaguaacccaguuccuc

SEQ ID NO: 300768 - RNA, 19 nt, Human herpesvirus 2
caauaaaaaacaccaacau

SEQ ID NO: 300769 - RNA, 16 nt, Human herpesvirus 2
caauaaaaucaaucaa

SEQ ID NO: 300770 - RNA, 20 nt, Human herpesvirus 2
caauaaaaucaaucaaucca

SEQ ID NO: 300771 - RNA, 12 nt, Human herpesvirus 2
caauaaagccag

SEQ ID NO: 300772 - RNA, 13 nt, Human herpesvirus 2
caauagauuuccc

SEQ ID NO: 300773 - RNA, 14 nt, Human herpesvirus 2
caauagauuuccca

SEQ ID NO: 300774 - RNA, 18 nt, Human herpesvirus 2
cacaagcucgccgugaag

SEQ ID NO: 300775 - RNA, 14 nt, Human herpesvirus 2
cacacagaaacaca

SEQ ID NO: 300776 - RNA, 12 nt, Human herpesvirus 2
cacagaaacaca

SEQ ID NO: 300777 - RNA, 16 nt, Human herpesvirus 2
caccaauacaccagag

SEQ ID NO: 300778 - RNA, 14 nt, Human herpesvirus 2
caccgcaccaccau

SEQ ID NO: 300779 - RNA, 16 nt, Human herpesvirus 2
caccgcggacagccag

SEQ ID NO: 300780 - RNA, 23 nt, Human herpesvirus 2
caccgggaccgacuuguuuuaca

SEQ ID NO: 300781 - RNA, 20 nt, Human herpesvirus 2
caccuggcucgccgugcgcu

SEQ ID NO: 300782 - RNA, 13 nt, Human herpesvirus 2
cacggaggaacug

SEQ ID NO: 300783 - RNA, 16 nt, Human herpesvirus 2
cacggaggaacugggg

SEQ ID NO: 300784 - RNA, 23 nt, Human herpesvirus 2
cacggcggacacaauaacaaaca

SEQ ID NO: 300785 - RNA, 23 nt, Human herpesvirus 2
cacguccguauguuaauugcaau

SEQ ID NO: 300786 - RNA, 20 nt, Human herpesvirus 2
cacuccaccccccccucuca

SEQ ID NO: 300787 - RNA, 19 nt, Human herpesvirus 2
cagaaaaaccagacacuca

SEQ ID NO: 300788 - RNA, 16 nt, Human herpesvirus 2
cagacacucagacaca

SEQ ID NO: 300789 - RNA, 15 nt, Human herpesvirus 2
cagagagauuucccc

SEQ ID NO: 300790 - RNA, 11 nt, Human herpesvirus 2
cagcaccacca

SEQ ID NO: 300791 - RNA, 19 nt, Human herpesvirus 2
cagcacggccgggugacuc

SEQ ID NO: 300792 - RNA, 22 nt, Human herpesvirus 2
cagcacggcguugcugcgcuga

SEQ ID NO: 300793 - RNA, 17 nt, Human herpesvirus 2
cagcauccugaaccgcu

SEQ ID NO: 300794 - RNA, 19 nt, Human herpesvirus 2
cagccaccucgacccgucc

SEQ ID NO: 300795 - RNA, 16 nt, Human herpesvirus 2
cagcgcguccagguac

SEQ ID NO: 300796 - RNA, 15 nt, Human herpesvirus 2
caggagcuucaucac

SEQ ID NO: 300797 - RNA, 20 nt, Human herpesvirus 2
caggaggggggcagugcagu

SEQ ID NO: 300798 - RNA, 14 nt, Human herpesvirus 2
caggaucgugugca

SEQ ID NO: 300799 - RNA, 14 nt, Human herpesvirus 2
caggcccaccacca

SEQ ID NO: 300800 - RNA, 18 nt, Human herpesvirus 2
caggcccaccaccauccc

SEQ ID NO: 300801 - RNA, 19 nt, Human herpesvirus 2
caggcgcgcgggucccguu

SEQ ID NO: 300802 - RNA, 14 nt, Human herpesvirus 2
cagggccgcugggg

SEQ ID NO: 300803 - RNA, 22 nt, Human herpesvirus 2
cagggccuggcgauccugggcc

SEQ ID NO: 300804 - RNA, 17 nt, Human herpesvirus 2
cagggggaggugggggg

SEQ ID NO: 300805 - RNA, 17 nt, Human herpesvirus 2
cagggggcggcgccggc

SEQ ID NO: 300806 - RNA, 15 nt, Human herpesvirus 2
caguaacccaguucc

SEQ ID NO: 300807 - RNA, 13 nt, Human herpesvirus 2
caguaccccaguu

SEQ ID NO: 300808 - RNA, 14 nt, Human herpesvirus 2
cagugacaguggua

SEQ ID NO: 300809 - RNA, 19 nt, Human herpesvirus 2
cagugggugacagagucuu

SEQ ID NO: 300810 - RNA, 23 nt, Human herpesvirus 2
caguugauucgcgaacacaagcu

SEQ ID NO: 300811 - RNA, 23 nt, Human herpesvirus 2
caguuucaccgccccagcaccau

SEQ ID NO: 300812 - RNA, 21 nt, Human herpesvirus 2
cauacgcacaaacacacgggu

SEQ ID NO: 300813 - RNA, 23 nt, Human herpesvirus 2
cauauccuccuuagauugacuca

SEQ ID NO: 300814 - RNA, 22 nt, Human herpesvirus 2
cauauugacgucaacccaagug

SEQ ID NO: 300815 - RNA, 13 nt, Human herpesvirus 2
cauccacaagcua

SEQ ID NO: 300816 - RNA, 16 nt, Human herpesvirus 2
cauccccggcgccaug

SEQ ID NO: 300817 - RNA, 16 nt, Human herpesvirus 2
cauccggucgacgucc

SEQ ID NO: 300818 - RNA, 18 nt, Human herpesvirus 2
caucgucuuuggugccag

SEQ ID NO: 300819 - RNA, 16 nt, Human herpesvirus 2
caucugcggacuggca

SEQ ID NO: 300820 - RNA, 19 nt, Human herpesvirus 2
caugauagagggaacaaag

SEQ ID NO: 300821 - RNA, 20 nt, Human herpesvirus 2
caugauagagggaacaaaga

SEQ ID NO: 300822 - RNA, 15 nt, Human herpesvirus 2
caugcgacggcgucu

SEQ ID NO: 300823 - RNA, 16 nt, Human herpesvirus 2
caugggcuacuaccug

SEQ ID NO: 300824 - RNA, 19 nt, Human herpesvirus 2
caugguaauuagcaacuuu

SEQ ID NO: 300825 - RNA, 18 nt, Human herpesvirus 2
caugucuuuccaccacca

SEQ ID NO: 300826 - RNA, 22 nt, Human herpesvirus 2
cauguuacaccccccugacuca

SEQ ID NO: 300827 - RNA, 15 nt, Human herpesvirus 2
cauuaaccaaccaac

SEQ ID NO: 300828 - RNA, 14 nt, Human herpesvirus 2
cauuccccucucgc

SEQ ID NO: 300829 - RNA, 20 nt, Human herpesvirus 2
cauuucaaauaaaaggcacg

SEQ ID NO: 300830 - RNA, 17 nt, Human herpesvirus 2
cauuucugucuuuauuc

SEQ ID NO: 300831 - RNA, 11 nt, Human herpesvirus 2
ccaaaagggaa

SEQ ID NO: 300832 - RNA, 15 nt, Human herpesvirus 2
ccaauaaacguauca

SEQ ID NO: 300833 - RNA, 13 nt, Human herpesvirus 2
ccaauacaccaga

SEQ ID NO: 300834 - RNA, 18 nt, Human herpesvirus 2
ccacagcugcgccagaaa

SEQ ID NO: 300835 - RNA, 21 nt, Human herpesvirus 2
ccaccaacaacgcucaguuca

SEQ ID NO: 300836 - RNA, 15 nt, Human herpesvirus 2
ccacccaaccaacgg

SEQ ID NO: 300837 - RNA, 20 nt, Human herpesvirus 2
ccaccccccccucucaaaca

SEQ ID NO: 300838 - RNA, 22 nt, Human herpesvirus 2
ccacucgucgccaacggccagc

SEQ ID NO: 300839 - RNA, 22 nt, Human herpesvirus 2
ccagaaacccgggggcgauggu

SEQ ID NO: 300840 - RNA, 19 nt, Human herpesvirus 2
ccagaccugccguaugcua

SEQ ID NO: 300841 - RNA, 12 nt, Human herpesvirus 2
ccagacgcccgc

SEQ ID NO: 300842 - RNA, 22 nt, Human herpesvirus 2
ccagcacggaggaacuggggua

SEQ ID NO: 300843 - RNA, 17 nt, Human herpesvirus 2
ccagcagaugaaucaca

SEQ ID NO: 300844 - RNA, 19 nt, Human herpesvirus 2
ccagcgcguugguccgggg

SEQ ID NO: 300845 - RNA, 21 nt, Human herpesvirus 2
ccaggaggggggcagugcagu

SEQ ID NO: 300846 - RNA, 17 nt, Human herpesvirus 2
ccagggcaccacguguc

SEQ ID NO: 300847 - RNA, 12 nt, Human herpesvirus 2
ccagggcgucgc

SEQ ID NO: 300848 - RNA, 14 nt, Human herpesvirus 2
ccaguugaaucucg

SEQ ID NO: 300849 - RNA, 15 nt, Human herpesvirus 2
ccauaacgcgcccgc

SEQ ID NO: 300850 - RNA, 12 nt, Human herpesvirus 2
ccauacauuucc

SEQ ID NO: 300851 - RNA, 12 nt, Human herpesvirus 2
ccaucgugcgcu

SEQ ID NO: 300852 - RNA, 17 nt, Human herpesvirus 2
ccaugaccucucgccgc

SEQ ID NO: 300853 - RNA, 17 nt, Human herpesvirus 2
ccaugcaacgccgggcg

SEQ ID NO: 300854 - RNA, 17 nt, Human herpesvirus 2
cccaacagcgauguugu

SEQ ID NO: 300855 - RNA, 21 nt, Human herpesvirus 2
cccaauggcuucgggccaaca

SEQ ID NO: 300856 - RNA, 23 nt, Human herpesvirus 2
cccacgacccaccgcccccgcug

SEQ ID NO: 300857 - RNA, 17 nt, Human herpesvirus 2
cccagaaccaugauccu

SEQ ID NO: 300858 - RNA, 17 nt, Human herpesvirus 2
cccagacccucacagau

SEQ ID NO: 300859 - RNA, 18 nt, Human herpesvirus 2
cccaggaggggggcagug

SEQ ID NO: 300860 - RNA, 17 nt, Human herpesvirus 2
cccagucgcccauacaa

SEQ ID NO: 300861 - RNA, 22 nt, Human herpesvirus 2
cccauacaaauuaaauacacga

SEQ ID NO: 300862 - RNA, 17 nt, Human herpesvirus 2
cccauccaucugggagu

SEQ ID NO: 300863 - RNA, 15 nt, Human herpesvirus 2
cccauccgacggcau

SEQ ID NO: 300864 - RNA, 18 nt, Human herpesvirus 2
ccccaaagcgugccaacu

SEQ ID NO: 300865 - RNA, 16 nt, Human herpesvirus 2
ccccaagagacuuccc

SEQ ID NO: 300866 - RNA, 23 nt, Human herpesvirus 2
ccccagcccgguguguuugccaa

SEQ ID NO: 300867 - RNA, 23 nt, Human herpesvirus 2
ccccaggaggggggcagugcagu

SEQ ID NO: 300868 - RNA, 17 nt, Human herpesvirus 2
ccccauccccucccgau

SEQ ID NO: 300869 - RNA, 17 nt, Human herpesvirus 2
cccccaggaggggggca

SEQ ID NO: 300870 - RNA, 12 nt, Human herpesvirus 2
cccccauggcau

SEQ ID NO: 300871 - RNA, 13 nt, Human herpesvirus 2
cccccguggcuca

SEQ ID NO: 300872 - RNA, 14 nt, Human herpesvirus 2
ccccgcgugcagcg

SEQ ID NO: 300873 - RNA, 20 nt, Human herpesvirus 2
ccccggcccacccccaaacc

SEQ ID NO: 300874 - RNA, 15 nt, Human herpesvirus 2
ccccggcggccccgg

SEQ ID NO: 300875 - RNA, 13 nt, Human herpesvirus 2
ccccggcuccgag

SEQ ID NO: 300876 - RNA, 16 nt, Human herpesvirus 2
ccccggggccgucgcg

SEQ ID NO: 300877 - RNA, 23 nt, Human herpesvirus 2
ccccgggggggggcaagugcagu

SEQ ID NO: 300878 - RNA, 17 nt, Human herpesvirus 2
ccccgucugucgccucu

SEQ ID NO: 300879 - RNA, 12 nt, Human herpesvirus 2
ccccugacucag

SEQ ID NO: 300880 - RNA, 13 nt, Human herpesvirus 2
cccgagcuccggg

SEQ ID NO: 300881 - RNA, 22 nt, Human herpesvirus 2
cccgcacuacgacuacauccgg

SEQ ID NO: 300882 - RNA, 17 nt, Human herpesvirus 2
cccgcggaccaccgggc

SEQ ID NO: 300883 - RNA, 18 nt, Human herpesvirus 2
cccggagucccccggcuc

SEQ ID NO: 300884 - RNA, 19 nt, Human herpesvirus 2
cccggcagagagauuuccc

SEQ ID NO: 300885 - RNA, 16 nt, Human herpesvirus 2
cccgggggggggcaag

SEQ ID NO: 300886 - RNA, 22 nt, Human herpesvirus 2
cccgggggggggcaagugcagu

SEQ ID NO: 300887 - RNA, 13 nt, Human herpesvirus 2
cccggguccgggg

SEQ ID NO: 300888 - RNA, 13 nt, Human herpesvirus 2
cccgucccggcag

SEQ ID NO: 300889 - RNA, 13 nt, Human herpesvirus 2
cccgucugccagg

SEQ ID NO: 300890 - RNA, 23 nt, Human herpesvirus 2
cccuacgucaccuuugauacucu

SEQ ID NO: 300891 - RNA, 22 nt, Human herpesvirus 2
cccucgcgcgcauccacaagcu

SEQ ID NO: 300892 - RNA, 23 nt, Human herpesvirus 2
cccucguucugcugcaccggcuc

SEQ ID NO: 300893 - RNA, 19 nt, Human herpesvirus 2
cccucucaaacaaaaacac

SEQ ID NO: 300894 - RNA, 12 nt, Human herpesvirus 2
cccugacucagg

SEQ ID NO: 300895 - RNA, 15 nt, Human herpesvirus 2
cccugcggccaagcu

SEQ ID NO: 300896 - RNA, 19 nt, Human herpesvirus 2
cccuucuccuuaaauaaac

SEQ ID NO: 300897 - RNA, 13 nt, Human herpesvirus 2
ccgaaagccacca

SEQ ID NO: 300898 - RNA, 13 nt, Human herpesvirus 2
ccgaccgggcggu

SEQ ID NO: 300899 - RNA, 20 nt, Human herpesvirus 2
ccgaccuaauuuuuguguca

SEQ ID NO: 300900 - RNA, 15 nt, Human herpesvirus 2
ccgacgcucucugcc

SEQ ID NO: 300901 - RNA, 15 nt, Human herpesvirus 2
ccgagacggccauga

SEQ ID NO: 300902 - RNA, 23 nt, Human herpesvirus 2
ccgaucgaugagccgguagugca

SEQ ID NO: 300903 - RNA, 22 nt, Human herpesvirus 2
ccgauggccgccccgcaguuuc

SEQ ID NO: 300904 - RNA, 14 nt, Human herpesvirus 2
ccgccaacaccagg

SEQ ID NO: 300905 - RNA, 16 nt, Human herpesvirus 2
ccgccccgcaguuuca

SEQ ID NO: 300906 - RNA, 19 nt, Human herpesvirus 2
ccgccggggcgcacaacga

SEQ ID NO: 300907 - RNA, 23 nt, Human herpesvirus 2
ccgccgguugucuucuuuuccac

SEQ ID NO: 300908 - RNA, 16 nt, Human herpesvirus 2
ccgccuugugugguuu

SEQ ID NO: 300909 - RNA, 22 nt, Human herpesvirus 2
ccgcgaugaccucccggcccgc

SEQ ID NO: 300910 - RNA, 20 nt, Human herpesvirus 2
ccgcgcucauggccggagaa

SEQ ID NO: 300911 - RNA, 17 nt, Human herpesvirus 2
ccgcggggggcacgggc

SEQ ID NO: 300912 - RNA, 12 nt, Human herpesvirus 2
ccgcgugcagcg

SEQ ID NO: 300913 - RNA, 14 nt, Human herpesvirus 2
ccgcucguuccuca

SEQ ID NO: 300914 - RNA, 12 nt, Human herpesvirus 2
ccggacaaaagu

SEQ ID NO: 300915 - RNA, 20 nt, Human herpesvirus 2
ccggccccggucgugcgggu

SEQ ID NO: 300916 - RNA, 20 nt, Human herpesvirus 2
ccgggaagggggaaaggggg

SEQ ID NO: 300917 - RNA, 16 nt, Human herpesvirus 2
ccggggacacgcggcg

SEQ ID NO: 300918 - RNA, 17 nt, Human herpesvirus 2
ccggggauaaaagccaa

SEQ ID NO: 300919 - RNA, 16 nt, Human herpesvirus 2
ccggggggggccucgg

SEQ ID NO: 300920 - RNA, 15 nt, Human herpesvirus 2
ccggggucggugugg

SEQ ID NO: 300921 - RNA, 18 nt, Human herpesvirus 2
ccgucucaauaaagccag

SEQ ID NO: 300922 - RNA, 21 nt, Human herpesvirus 2
ccguggcccuccacgccgugg

SEQ ID NO: 300923 - RNA, 12 nt, Human herpesvirus 2
ccguggguacgg

SEQ ID NO: 300924 - RNA, 17 nt, Human herpesvirus 2
ccguucucgcauuugcc

SEQ ID NO: 300925 - RNA, 16 nt, Human herpesvirus 2
ccguuggggaacaaca

SEQ ID NO: 300926 - RNA, 13 nt, Human herpesvirus 2
ccuacacaccaac

SEQ ID NO: 300927 - RNA, 19 nt, Human herpesvirus 2
ccuauaaacucucccccgc

SEQ ID NO: 300928 - RNA, 22 nt, Human herpesvirus 2
ccuauaacccacaaacucacac

SEQ ID NO: 300929 - RNA, 19 nt, Human herpesvirus 2
ccucccccccccccaaaaa

SEQ ID NO: 300930 - RNA, 18 nt, Human herpesvirus 2
ccuccgcccuccgccagc

SEQ ID NO: 300931 - RNA, 16 nt, Human herpesvirus 2
ccuccgugcuggggaa

SEQ ID NO: 300932 - RNA, 20 nt, Human herpesvirus 2
ccuccuucggugcacaagac

SEQ ID NO: 300933 - RNA, 19 nt, Human herpesvirus 2
ccucgagcucuucggcugc

SEQ ID NO: 300934 - RNA, 23 nt, Human herpesvirus 2
ccucgugcgcaugggccgccagc

SEQ ID NO: 300935 - RNA, 20 nt, Human herpesvirus 2
ccucguggggcuggacguuu

SEQ ID NO: 300936 - RNA, 19 nt, Human herpesvirus 2
ccucucaaacaaaaacaca

SEQ ID NO: 300937 - RNA, 22 nt, Human herpesvirus 2
ccucucccacacggucggugcc

SEQ ID NO: 300938 - RNA, 23 nt, Human herpesvirus 2
ccucucugaggccucauccggcc

SEQ ID NO: 300939 - RNA, 18 nt, Human herpesvirus 2
ccucugcccgaccgggcg

SEQ ID NO: 300940 - RNA, 18 nt, Human herpesvirus 2
ccugccuccggagaaccc

SEQ ID NO: 300941 - RNA, 16 nt, Human herpesvirus 2
ccuggcucgccgugcg

SEQ ID NO: 300942 - RNA, 16 nt, Human herpesvirus 2
ccugggucgggagcag

SEQ ID NO: 300943 - RNA, 13 nt, Human herpesvirus 2
ccugugacgucaa

SEQ ID NO: 300944 - RNA, 20 nt, Human herpesvirus 2
ccuguggcgggcgcuguaug

SEQ ID NO: 300945 - RNA, 15 nt, Human herpesvirus 2
ccugugugcucucaa

SEQ ID NO: 300946 - RNA, 17 nt, Human herpesvirus 2
ccuuaaaaggcacccca

SEQ ID NO: 300947 - RNA, 17 nt, Human herpesvirus 2
ccuuaaauaaacacaaa

SEQ ID NO: 300948 - RNA, 17 nt, Human herpesvirus 2
ccuuaacuaaaccacag

SEQ ID NO: 300949 - RNA, 15 nt, Human herpesvirus 2
ccuuagauugacuca

SEQ ID NO: 300950 - RNA, 16 nt, Human herpesvirus 2
ccuuagauugacucag

SEQ ID NO: 300951 - RNA, 23 nt, Human herpesvirus 2
ccuucaccaacgacgaugcaugu

SEQ ID NO: 300952 - RNA, 18 nt, Human herpesvirus 2
ccuuguuggagcggucgc

SEQ ID NO: 300953 - RNA, 17 nt, Human herpesvirus 2
cgaaaggguacacaaag

SEQ ID NO: 300954 - RNA, 14 nt, Human herpesvirus 2
cgaacguguuguug

SEQ ID NO: 300955 - RNA, 15 nt, Human herpesvirus 2
cgaaggcggacccag

SEQ ID NO: 300956 - RNA, 18 nt, Human herpesvirus 2
cgaccagcguccugcgcg

SEQ ID NO: 300957 - RNA, 15 nt, Human herpesvirus 2
cgaccccgauagucc

SEQ ID NO: 300958 - RNA, 21 nt, Human herpesvirus 2
cgaccccgccccccgacgcca

SEQ ID NO: 300959 - RNA, 13 nt, Human herpesvirus 2
cgacgaaccagca

SEQ ID NO: 300960 - RNA, 18 nt, Human herpesvirus 2
cgacugggccgaugugcc

SEQ ID NO: 300961 - RNA, 20 nt, Human herpesvirus 2
cgagccgcugugccaggugg

SEQ ID NO: 300962 - RNA, 23 nt, Human herpesvirus 2
cgauggccgccccgcaguuucac

SEQ ID NO: 300963 - RNA, 23 nt, Human herpesvirus 2
cgauguauggcgccuucuucgcc

SEQ ID NO: 300964 - RNA, 17 nt, Human herpesvirus 2
cgauguucaaaaauaca

SEQ ID NO: 300965 - RNA, 15 nt, Human herpesvirus 2
cgauuguuugguguu

SEQ ID NO: 300966 - RNA, 18 nt, Human herpesvirus 2
cgcaacaacggcgggccc

SEQ ID NO: 300967 - RNA, 18 nt, Human herpesvirus 2
cgcacccccgccuacgcg

SEQ ID NO: 300968 - RNA, 21 nt, Human herpesvirus 2
cgcacggcggacacaauaaca

SEQ ID NO: 300969 - RNA, 19 nt, Human herpesvirus 2
cgcacgggcguccccggug

SEQ ID NO: 300970 - RNA, 22 nt, Human herpesvirus 2
cgcacguacguucugccccgcg

SEQ ID NO: 300971 - RNA, 19 nt, Human herpesvirus 2
cgcacucgcuuuucccacc

SEQ ID NO: 300972 - RNA, 18 nt, Human herpesvirus 2
cgcauacaccccacccua

SEQ ID NO: 300973 - RNA, 14 nt, Human herpesvirus 2
cgcauccacaagcu

SEQ ID NO: 300974 - RNA, 13 nt, Human herpesvirus 2
cgcaugcaaauua

SEQ ID NO: 300975 - RNA, 12 nt, Human herpesvirus 2
cgccaacgcggg

SEQ ID NO: 300976 - RNA, 16 nt, Human herpesvirus 2
cgccaagcgccccgcg

SEQ ID NO: 300977 - RNA, 16 nt, Human herpesvirus 2
cgccagagacccugcc

SEQ ID NO: 300978 - RNA, 21 nt, Human herpesvirus 2
cgccaucgcucccagguugcu

SEQ ID NO: 300979 - RNA, 17 nt, Human herpesvirus 2
cgccaugcaacgccggg

SEQ ID NO: 300980 - RNA, 21 nt, Human herpesvirus 2
cgccccccccggcggggcaug

SEQ ID NO: 300981 - RNA, 16 nt, Human herpesvirus 2
cgccccccgucccgag

SEQ ID NO: 300982 - RNA, 14 nt, Human herpesvirus 2
cgcccccucuccca

SEQ ID NO: 300983 - RNA, 23 nt, Human herpesvirus 2
cgccccgccccaccccgccccac

SEQ ID NO: 300984 - RNA, 12 nt, Human herpesvirus 2
cgcccgccccag

SEQ ID NO: 300985 - RNA, 13 nt, Human herpesvirus 2
cgcccgcgugccg

SEQ ID NO: 300986 - RNA, 23 nt, Human herpesvirus 3
aaaaauaauuccgguugugccaa

SEQ ID NO: 300987 - RNA, 11 nt, Human herpesvirus 3
aaaaauaccug

SEQ ID NO: 300988 - RNA, 17 nt, Human herpesvirus 3
aaaaauguugucugcca

SEQ ID NO: 300989 - RNA, 19 nt, Human herpesvirus 3
aaaaauguugucugccaaa

SEQ ID NO: 300990 - RNA, 15 nt, Human herpesvirus 3
aaaaauucaaaauac

SEQ ID NO: 300991 - RNA, 23 nt, Human herpesvirus 3
aaaaauuuguguuuuuaucugca

SEQ ID NO: 300992 - RNA, 16 nt, Human herpesvirus 3
aaaaccuuaccaccca

SEQ ID NO: 300993 - RNA, 15 nt, Human herpesvirus 3
aaaacgaaaaccuuc

SEQ ID NO: 300994 - RNA, 22 nt, Human herpesvirus 3
aaaacgcguuuuguaccucuac

SEQ ID NO: 300995 - RNA, 21 nt, Human herpesvirus 3
aaaacguacguuuaacccgcg

SEQ ID NO: 300996 - RNA, 19 nt, Human herpesvirus 3
aaaagcguguaaaucauca

SEQ ID NO: 300997 - RNA, 17 nt, Human herpesvirus 3
aaaaguuuacguguaua

SEQ ID NO: 300998 - RNA, 22 nt, Human herpesvirus 3
aaaauaauuccgguugugccaa

SEQ ID NO: 300999 - RNA, 16 nt, Human herpesvirus 3
aaaaucgucccauuua

SEQ ID NO: 301000 - RNA, 14 nt, Human herpesvirus 3
aaaaucuauuauca

SEQ ID NO: 301001 - RNA, 12 nt, Human herpesvirus 3
aaaaugauauac

SEQ ID NO: 301002 - RNA, 15 nt, Human herpesvirus 3
aaaauguugucugcc

SEQ ID NO: 301003 - RNA, 20 nt, Human herpesvirus 3
aaaauguugucugccaaacg

SEQ ID NO: 301004 - RNA, 17 nt, Human herpesvirus 3
aaaauucuaacaacucu

SEQ ID NO: 301005 - RNA, 15 nt, Human herpesvirus 3
aaacacacaccagac

SEQ ID NO: 301006 - RNA, 20 nt, Human herpesvirus 3
aaacacggaauccgguauac

SEQ ID NO: 301007 - RNA, 15 nt, Human herpesvirus 3
aaacagagaucucug

SEQ ID NO: 301008 - RNA, 23 nt, Human herpesvirus 3
aaacaucaaccggaacaguaucc

SEQ ID NO: 301009 - RNA, 16 nt, Human herpesvirus 3
aaaccauguuuuccca

SEQ ID NO: 301010 - RNA, 18 nt, Human herpesvirus 3
aaaccccacuaccgccag

SEQ ID NO: 301011 - RNA, 17 nt, Human herpesvirus 3
aaacccugauaaacccu

SEQ ID NO: 301012 - RNA, 17 nt, Human herpesvirus 3
aaaccggaacaccaaga

SEQ ID NO: 301013 - RNA, 15 nt, Human herpesvirus 3
aaaccguauauaaca

SEQ ID NO: 301014 - RNA, 13 nt, Human herpesvirus 3
aaacgaaaaccuu

SEQ ID NO: 301015 - RNA, 23 nt, Human herpesvirus 3
aaacguacguuuaacccgcguau

SEQ ID NO: 301016 - RNA, 23 nt, Human herpesvirus 3
aaacguagcgucccuaccaguug

SEQ ID NO: 301017 - RNA, 19 nt, Human herpesvirus 3
aaacgucguuauauucaca

SEQ ID NO: 301018 - RNA, 22 nt, Human herpesvirus 3
aaacuaauaaacgaugacacaa

SEQ ID NO: 301019 - RNA, 16 nt, Human herpesvirus 3
aaagaauuaaaaaagc

SEQ ID NO: 301020 - RNA, 18 nt, Human herpesvirus 3
aaagagccauuuccauuu

SEQ ID NO: 301021 - RNA, 24 nt, Human herpesvirus 3
aaagauucuccccccgcgauuuau

SEQ ID NO: 301022 - RNA, 12 nt, Human herpesvirus 3
aaagccugugac

SEQ ID NO: 301023 - RNA, 12 nt, Human herpesvirus 3
aaagcggacaca

SEQ ID NO: 301024 - RNA, 23 nt, Human herpesvirus 3
aaaggauauucaccauuacuaca

SEQ ID NO: 301025 - RNA, 18 nt, Human herpesvirus 3
aaaggccgagcugguaua

SEQ ID NO: 301026 - RNA, 21 nt, Human herpesvirus 3
aaagguccauuuaacaauccc

SEQ ID NO: 301027 - RNA, 19 nt, Human herpesvirus 3
aaagguuucguugcacaug

SEQ ID NO: 301028 - RNA, 21 nt, Human herpesvirus 3
aaaguauuacauucauaaaag

SEQ ID NO: 301029 - RNA, 15 nt, Human herpesvirus 3
aaagucuucaaagaa

SEQ ID NO: 301030 - RNA, 21 nt, Human herpesvirus 3
aaaguuguuggcgcaugccau

SEQ ID NO: 301031 - RNA, 14 nt, Human herpesvirus 3
aaauaacaugucac

SEQ ID NO: 301032 - RNA, 11 nt, Human herpesvirus 3
aaauacaauaa

SEQ ID NO: 301033 - RNA, 21 nt, Human herpesvirus 3
aaauaccuuuuucaugcuugu

SEQ ID NO: 301034 - RNA, 23 nt, Human herpesvirus 3
aaauacgguucaaaggcauuacc

SEQ ID NO: 301035 - RNA, 14 nt, Human herpesvirus 3
aaauaggguacaaa

SEQ ID NO: 301036 - RNA, 14 nt, Human herpesvirus 3
aaauauaaaauaac

SEQ ID NO: 301037 - RNA, 16 nt, Human herpesvirus 3
aaauaugcuauauaac

SEQ ID NO: 301038 - RNA, 23 nt, Human herpesvirus 3
aaauaugugcaucccccauugua

SEQ ID NO: 301039 - RNA, 14 nt, Human herpesvirus 3
aaauauuguauaaa

SEQ ID NO: 301040 - RNA, 19 nt, Human herpesvirus 3
aaauauuguauaaauugug

SEQ ID NO: 301041 - RNA, 16 nt, Human herpesvirus 3
aaaucacuuugauaua

SEQ ID NO: 301042 - RNA, 12 nt, Human herpesvirus 3
aaauccacacaa

SEQ ID NO: 301043 - RNA, 17 nt, Human herpesvirus 3
aaaucgguuauguauaa

SEQ ID NO: 301044 - RNA, 15 nt, Human herpesvirus 3
aaaucguccacugga

SEQ ID NO: 301045 - RNA, 13 nt, Human herpesvirus 3
aaaucguuuaaca

SEQ ID NO: 301046 - RNA, 16 nt, Human herpesvirus 3
aaaucuccgguuuuaa

SEQ ID NO: 301047 - RNA, 22 nt, Human herpesvirus 3
aaaugcggcggccguugccgca

SEQ ID NO: 301048 - RNA, 22 nt, Human herpesvirus 3
aaaugguguuuggugcacucua

SEQ ID NO: 301049 - RNA, 23 nt, Human herpesvirus 3
aaauguaguggcguagguagaug

SEQ ID NO: 301050 - RNA, 13 nt, Human herpesvirus 3
aauauuugaucca

SEQ ID NO: 301051 - RNA, 22 nt, Human herpesvirus 3
aaucaugguugguuacugugaa

SEQ ID NO: 301052 - RNA, 14 nt, Human herpesvirus 3
aaucauuaugagca

SEQ ID NO: 301053 - RNA, 20 nt, Human herpesvirus 3
aaucauuaugagcaucuaga

SEQ ID NO: 301054 - RNA, 18 nt, Human herpesvirus 3
aauccacgguauuccaaa

SEQ ID NO: 301055 - RNA, 22 nt, Human herpesvirus 3
aauccgucaacugcaacaugca

SEQ ID NO: 301056 - RNA, 21 nt, Human herpesvirus 3
aaucggugucagaaucuucau

SEQ ID NO: 301057 - RNA, 20 nt, Human herpesvirus 3
aaucguugcggguacaauac

SEQ ID NO: 301058 - RNA, 23 nt, Human herpesvirus 3
aaucguugcggguacaauacgua

SEQ ID NO: 301059 - RNA, 17 nt, Human herpesvirus 3
aaucguuuaucacugug

SEQ ID NO: 301060 - RNA, 14 nt, Human herpesvirus 3
aaucucguaaaggu

SEQ ID NO: 301061 - RNA, 15 nt, Human herpesvirus 3
aaucuuaaaccugac

SEQ ID NO: 301062 - RNA, 20 nt, Human herpesvirus 3
aaugaccgcaaugcugaugu

SEQ ID NO: 301063 - RNA, 19 nt, Human herpesvirus 3
aaugauguaaccuacacaa

SEQ ID NO: 301064 - RNA, 14 nt, Human herpesvirus 3
aaugcacugaacca

SEQ ID NO: 301065 - RNA, 17 nt, Human herpesvirus 3
aaugcacugaaccacaa

SEQ ID NO: 301066 - RNA, 16 nt, Human herpesvirus 3
aaugccagcguugcca

SEQ ID NO: 301067 - RNA, 22 nt, Human herpesvirus 3
aauggcgaccacgacagcagua

SEQ ID NO: 301068 - RNA, 20 nt, Human herpesvirus 3
aaugguguuuggugcacucu

SEQ ID NO: 301069 - RNA, 19 nt, Human herpesvirus 3
aauguaauaaaaugauaua

SEQ ID NO: 301070 - RNA, 20 nt, Human herpesvirus 3
aauguaauucgugugcaaua

SEQ ID NO: 301071 - RNA, 21 nt, Human herpesvirus 3
aauguaguggcguagguagau

SEQ ID NO: 301072 - RNA, 22 nt, Human herpesvirus 3
aaugucccaaggauagauauca

SEQ ID NO: 301073 - RNA, 21 nt, Human herpesvirus 3
aauguguauuacguuacucau

SEQ ID NO: 301074 - RNA, 16 nt, Human herpesvirus 3
aauguugucugccaaa

SEQ ID NO: 301075 - RNA, 15 nt, Human herpesvirus 3
aauuaaugcaaccau

SEQ ID NO: 301076 - RNA, 16 nt, Human herpesvirus 3
aauuaaugcaaccauc

SEQ ID NO: 301077 - RNA, 16 nt, Human herpesvirus 3
aauuaauggaguauau

SEQ ID NO: 301078 - RNA, 15 nt, Human herpesvirus 3
aauuacaacgcauau

SEQ ID NO: 301079 - RNA, 13 nt, Human herpesvirus 3
aauuaccguacaa

SEQ ID NO: 301080 - RNA, 15 nt, Human herpesvirus 3
aauuaccguacaaca

SEQ ID NO: 301081 - RNA, 17 nt, Human herpesvirus 3
aauuaccguacaacaag

SEQ ID NO: 301082 - RNA, 18 nt, Human herpesvirus 3
aauuaccguacaacaaga

SEQ ID NO: 301083 - RNA, 15 nt, Human herpesvirus 3
aauuauaacugcuac

SEQ ID NO: 301084 - RNA, 21 nt, Human herpesvirus 3
aauuccgccuauagcugucac

SEQ ID NO: 301085 - RNA, 19 nt, Human herpesvirus 3
aauuccgguugugccaaua

SEQ ID NO: 301086 - RNA, 15 nt, Human herpesvirus 3
aauucgugugcaaua

SEQ ID NO: 301087 - RNA, 23 nt, Human herpesvirus 3
aauucgugugcaauaaccucagc

SEQ ID NO: 301088 - RNA, 18 nt, Human herpesvirus 3
aauuggccguuuguauca

SEQ ID NO: 301089 - RNA, 21 nt, Human herpesvirus 3
aauuuacgugcccugagcauu

SEQ ID NO: 301090 - RNA, 15 nt, Human herpesvirus 3
aauuuauaaaacacu

SEQ ID NO: 301091 - RNA, 19 nt, Human herpesvirus 3
aauuuauauuuuuaaucau

SEQ ID NO: 301092 - RNA, 20 nt, Human herpesvirus 3
aauuugugcggcgagaauuu

SEQ ID NO: 301093 - RNA, 22 nt, Human herpesvirus 3
aauuuguguuuuuaucugcaau

SEQ ID NO: 301094 - RNA, 12 nt, Human herpesvirus 3
aauuuuacuuaa

SEQ ID NO: 301095 - RNA, 15 nt, Human herpesvirus 3
aauuuucguaagcaa

SEQ ID NO: 301096 - RNA, 18 nt, Human herpesvirus 3
aauuuugucgggacacaa

SEQ ID NO: 301097 - RNA, 23 nt, Human herpesvirus 3
acaaaaaaaaaaaaaccaaacac

SEQ ID NO: 301098 - RNA, 11 nt, Human herpesvirus 3
acaaacaaagc

SEQ ID NO: 301099 - RNA, 13 nt, Human herpesvirus 3
acaaacauucaca

SEQ ID NO: 301100 - RNA, 16 nt, Human herpesvirus 3
acaaacguguguauaa

SEQ ID NO: 301101 - RNA, 17 nt, Human herpesvirus 3
acaaauugugacguuau

SEQ ID NO: 301102 - RNA, 20 nt, Human herpesvirus 3
acaacacccgguucuaccaa

SEQ ID NO: 301103 - RNA, 18 nt, Human herpesvirus 3
acaacccguggugaauuu

SEQ ID NO: 301104 - RNA, 21 nt, Human herpesvirus 3
acaacgauuauuuucugugua

SEQ ID NO: 301105 - RNA, 22 nt, Human herpesvirus 3
acaagaacuuugcauguuuaca

SEQ ID NO: 301106 - RNA, 14 nt, Human herpesvirus 3
acaagaaguuauau

SEQ ID NO: 301107 - RNA, 12 nt, Human herpesvirus 3
acaagagugcau

SEQ ID NO: 301108 - RNA, 14 nt, Human herpesvirus 3
acaagcgguugugg

SEQ ID NO: 301109 - RNA, 15 nt, Human herpesvirus 3
acaaggauaaaacac

SEQ ID NO: 301110 - RNA, 15 nt, Human herpesvirus 3
acaauaaacauaaca

SEQ ID NO: 301111 - RNA, 19 nt, Human herpesvirus 3
acaauauuguagaacuaac

SEQ ID NO: 301112 - RNA, 23 nt, Human herpesvirus 3
acaaucagaagauauaacccggu

SEQ ID NO: 301113 - RNA, 20 nt, Human herpesvirus 3
acaaucgcccgaaaacuuug

SEQ ID NO: 301114 - RNA, 17 nt, Human herpesvirus 3
acaauugagauacacau

SEQ ID NO: 301115 - RNA, 19 nt, Human herpesvirus 3
acacacgccgguacaauua

SEQ ID NO: 301116 - RNA, 22 nt, Human herpesvirus 3
acacauuugugccgcaagcaua

SEQ ID NO: 301117 - RNA, 12 nt, Human herpesvirus 3
acacccagcugu

SEQ ID NO: 301118 - RNA, 17 nt, Human herpesvirus 3
acacccauacauauguu

SEQ ID NO: 301119 - RNA, 14 nt, Human herpesvirus 3
acaccgcugugcug

SEQ ID NO: 301120 - RNA, 16 nt, Human herpesvirus 3
acaccgcugugcugua

SEQ ID NO: 301121 - RNA, 20 nt, Human herpesvirus 3
acaccuuuuuucgauuguac

SEQ ID NO: 301122 - RNA, 13 nt, Human herpesvirus 3
acacgugcuuauu

SEQ ID NO: 301123 - RNA, 16 nt, Human herpesvirus 3
acacucuacgcauuua

SEQ ID NO: 301124 - RNA, 22 nt, Human herpesvirus 3
acagaauuuuuuacgaugauau

SEQ ID NO: 301125 - RNA, 17 nt, Human herpesvirus 3
acagacauacacuggua

SEQ ID NO: 301126 - RNA, 12 nt, Human herpesvirus 3
acagacuuuguc

SEQ ID NO: 301127 - RNA, 22 nt, Human herpesvirus 3
acagaggacgccgauaaaucca

SEQ ID NO: 301128 - RNA, 19 nt, Human herpesvirus 3
acaggacaaaccccacgca

SEQ ID NO: 301129 - RNA, 15 nt, Human herpesvirus 3
acaggcuccacaauc

SEQ ID NO: 301130 - RNA, 18 nt, Human herpesvirus 3
acagucuaacaguacgca

SEQ ID NO: 301131 - RNA, 20 nt, Human herpesvirus 3
acagugcgcuucaagucuca

SEQ ID NO: 301132 - RNA, 19 nt, Human herpesvirus 3
acauaaaaauucaaaauac

SEQ ID NO: 301133 - RNA, 19 nt, Human herpesvirus 3
acauaacauccauccgaua

SEQ ID NO: 301134 - RNA, 20 nt, Human herpesvirus 3
acauaacauccauccgauaa

SEQ ID NO: 301135 - RNA, 16 nt, Human herpesvirus 3
acauaaccgauuuacc

SEQ ID NO: 301136 - RNA, 14 nt, Human herpesvirus 3
acauacaacaugau

SEQ ID NO: 301137 - RNA, 16 nt, Human herpesvirus 3
acauaccgacaguaaa

SEQ ID NO: 301138 - RNA, 16 nt, Human herpesvirus 3
acauacuaauuuguau

SEQ ID NO: 301139 - RNA, 23 nt, Human herpesvirus 3
acauaugcgcauggaauuaaugc

SEQ ID NO: 301140 - RNA, 17 nt, Human herpesvirus 3
acaucaaccaguggaau

SEQ ID NO: 301141 - RNA, 14 nt, Human herpesvirus 3
acauccuaguacag

SEQ ID NO: 301142 - RNA, 14 nt, Human herpesvirus 3
acauccuggacaca

SEQ ID NO: 301143 - RNA, 15 nt, Human herpesvirus 3
acauccuggacacag

SEQ ID NO: 301144 - RNA, 20 nt, Human herpesvirus 3
acaugaauauauagccuuua

SEQ ID NO: 301145 - RNA, 13 nt, Human herpesvirus 3
acaugauugaugg

SEQ ID NO: 301146 - RNA, 16 nt, Human herpesvirus 3
acauggaguguguuac

SEQ ID NO: 301147 - RNA, 14 nt, Human herpesvirus 3
acauggccgugaau

SEQ ID NO: 301148 - RNA, 15 nt, Human herpesvirus 3
acauggccgugaaug

SEQ ID NO: 301149 - RNA, 23 nt, Human herpesvirus 3
acauuagaguguuuaacaaccau

SEQ ID NO: 301150 - RNA, 16 nt, Human herpesvirus 3
acauuagcaaaauugg

SEQ ID NO: 301151 - RNA, 13 nt, Human herpesvirus 3
acauucacaguaa

SEQ ID NO: 301152 - RNA, 21 nt, Human herpesvirus 3
acauuuaaaaauccauuaaag

SEQ ID NO: 301153 - RNA, 21 nt, Human herpesvirus 3
acauuuacaguaauauauuaa

SEQ ID NO: 301154 - RNA, 22 nt, Human herpesvirus 3
acauuuaucccaacugauuaca

SEQ ID NO: 301155 - RNA, 20 nt, Human herpesvirus 3
acauuugugccgcaagcaua

SEQ ID NO: 301156 - RNA, 17 nt, Human herpesvirus 3
accaacgcuuugaucuu

SEQ ID NO: 301157 - RNA, 11 nt, Human herpesvirus 3
accaacuguau

SEQ ID NO: 301158 - RNA, 22 nt, Human herpesvirus 3
accaauaugccaucaauaucag

SEQ ID NO: 301159 - RNA, 18 nt, Human herpesvirus 3
accaauugguauacacac

SEQ ID NO: 301160 - RNA, 22 nt, Human herpesvirus 3
accacaaucgcccgaaaacuuu

SEQ ID NO: 301161 - RNA, 16 nt, Human herpesvirus 3
accagaacgaucacaa

SEQ ID NO: 301162 - RNA, 14 nt, Human herpesvirus 3
accauagacuguuc

SEQ ID NO: 301163 - RNA, 13 nt, Human herpesvirus 3
accauagaugaac

SEQ ID NO: 301164 - RNA, 20 nt, Human herpesvirus 3
agauauaauuuguccauauc

SEQ ID NO: 301165 - RNA, 17 nt, Human herpesvirus 3
agaugaacuaauauucu

SEQ ID NO: 301166 - RNA, 19 nt, Human herpesvirus 3
agaugaacuaauauucuac

SEQ ID NO: 301167 - RNA, 17 nt, Human herpesvirus 3
agaugagcagcgcaguc

SEQ ID NO: 301168 - RNA, 18 nt, Human herpesvirus 3
agaugauuaucaauacuu

SEQ ID NO: 301169 - RNA, 22 nt, Human herpesvirus 3
agaugguuaauaauagugacaa

SEQ ID NO: 301170 - RNA, 12 nt, Human herpesvirus 3
agauguacaccc

SEQ ID NO: 301171 - RNA, 14 nt, Human herpesvirus 3
agauguacguguau

SEQ ID NO: 301172 - RNA, 16 nt, Human herpesvirus 3
agcaaauacaaagaca

SEQ ID NO: 301173 - RNA, 20 nt, Human herpesvirus 3
agcaauaaaacaaacauuca

SEQ ID NO: 301174 - RNA, 16 nt, Human herpesvirus 3
agcaauucccaguaaa

SEQ ID NO: 301175 - RNA, 18 nt, Human herpesvirus 3
agcacccuuuuguaaaaa

SEQ ID NO: 301176 - RNA, 18 nt, Human herpesvirus 3
agccaacacaguguucag

SEQ ID NO: 301177 - RNA, 14 nt, Human herpesvirus 3
agccauuuccauuu

SEQ ID NO: 301178 - RNA, 21 nt, Human herpesvirus 3
agcccagguacgcgucaaaaa

SEQ ID NO: 301179 - RNA, 12 nt, Human herpesvirus 3
agcccgaucccg

SEQ ID NO: 301180 - RNA, 21 nt, Human herpesvirus 3
agccguauaacccacuuuaau

SEQ ID NO: 301181 - RNA, 13 nt, Human herpesvirus 3
agccugugacaaa

SEQ ID NO: 301182 - RNA, 13 nt, Human herpesvirus 3
agccuugugaugg

SEQ ID NO: 301183 - RNA, 16 nt, Human herpesvirus 3
agcgccaaaauggaug

SEQ ID NO: 301184 - RNA, 21 nt, Human herpesvirus 3
agcgcugucgucauauuacau

SEQ ID NO: 301185 - RNA, 16 nt, Human herpesvirus 3
agcuauauaugucacc

SEQ ID NO: 301186 - RNA, 20 nt, Human herpesvirus 3
agcuauggacgcaacgcaga

SEQ ID NO: 301187 - RNA, 20 nt, Human herpesvirus 3
agcuauuaaugguacaagaa

SEQ ID NO: 301188 - RNA, 15 nt, Human herpesvirus 3
agcucuguaugcuga

SEQ ID NO: 301189 - RNA, 18 nt, Human herpesvirus 3
agcuguaaaaaccaugga

SEQ ID NO: 301190 - RNA, 17 nt, Human herpesvirus 3
agcuguccaugaugaaa

SEQ ID NO: 301191 - RNA, 20 nt, Human herpesvirus 3
agcugucccacagaacauac

SEQ ID NO: 301192 - RNA, 20 nt, Human herpesvirus 3
agcuuaacaacauauacgaa

SEQ ID NO: 301193 - RNA, 23 nt, Human herpesvirus 3
agcuugucgcgcguguaugcaca

SEQ ID NO: 301194 - RNA, 12 nt, Human herpesvirus 3
aggaaaaagagg

SEQ ID NO: 301195 - RNA, 20 nt, Human herpesvirus 3
aggacaguugguuucaggcu

SEQ ID NO: 301196 - RNA, 14 nt, Human herpesvirus 3
aggauagauaucac

SEQ ID NO: 301197 - RNA, 15 nt, Human herpesvirus 3
aggauagauaucaca

SEQ ID NO: 301198 - RNA, 19 nt, Human herpesvirus 3
aggaugugucggaaacccu

SEQ ID NO: 301199 - RNA, 16 nt, Human herpesvirus 3
aggcauaaacacggaa

SEQ ID NO: 301200 - RNA, 15 nt, Human herpesvirus 3
aggccggagugucca

SEQ ID NO: 301201 - RNA, 16 nt, Human herpesvirus 3
aggcugaggguucagu

SEQ ID NO: 301202 - RNA, 19 nt, Human herpesvirus 3
aggcugcaaaacggcugua

SEQ ID NO: 301203 - RNA, 21 nt, Human herpesvirus 3
aggcuuuaggaaucaagacag

SEQ ID NO: 301204 - RNA, 15 nt, Human herpesvirus 3
aggggaucgucagua

SEQ ID NO: 301205 - RNA, 19 nt, Human herpesvirus 3
aggggaugggggucgcaac

SEQ ID NO: 301206 - RNA, 20 nt, Human herpesvirus 3
aggggucuccagaguacagg

SEQ ID NO: 301207 - RNA, 22 nt, Human herpesvirus 3
aggggucuccagaguacagggu

SEQ ID NO: 301208 - RNA, 22 nt, Human herpesvirus 3
aggguacaaacgcgcaauguuu

SEQ ID NO: 301209 - RNA, 20 nt, Human herpesvirus 3
aggguugcgauaacugcgau

SEQ ID NO: 301210 - RNA, 18 nt, Human herpesvirus 3
agguaagaagugcauauc

SEQ ID NO: 301211 - RNA, 17 nt, Human herpesvirus 3
agguccauuuaacaauc

SEQ ID NO: 301212 - RNA, 19 nt, Human herpesvirus 3
agguccauuuaacaauccc

SEQ ID NO: 301213 - RNA, 12 nt, Human herpesvirus 3
aggucugucaug

SEQ ID NO: 301214 - RNA, 21 nt, Human herpesvirus 3
agguuaaauuuauaaaacacu

SEQ ID NO: 301215 - RNA, 17 nt, Human herpesvirus 3
agguuuauuuacuuuac

SEQ ID NO: 301216 - RNA, 23 nt, Human herpesvirus 3
agguuuauuuacuuuacaacccg

SEQ ID NO: 301217 - RNA, 15 nt, Human herpesvirus 3
aguaaauaugugcau

SEQ ID NO: 301218 - RNA, 16 nt, Human herpesvirus 3
aguaacagcgacuaug

SEQ ID NO: 301219 - RNA, 20 nt, Human herpesvirus 3
aguaacuuaacaaacauaua

SEQ ID NO: 301220 - RNA, 13 nt, Human herpesvirus 3
aguagaaaaucga

SEQ ID NO: 301221 - RNA, 20 nt, Human herpesvirus 3
aguauauuagcacuaucguc

SEQ ID NO: 301222 - RNA, 18 nt, Human herpesvirus 3
agucaaauucaacuaaug

SEQ ID NO: 301223 - RNA, 14 nt, Human herpesvirus 3
agucaauguuuaaa

SEQ ID NO: 301224 - RNA, 21 nt, Human herpesvirus 3
agucagauauuauuaacuuac

SEQ ID NO: 301225 - RNA, 22 nt, Human herpesvirus 3
agucuaacaguacgcaugugcu

SEQ ID NO: 301226 - RNA, 12 nt, Human herpesvirus 3
agucuacaauau

SEQ ID NO: 301227 - RNA, 18 nt, Human herpesvirus 3
agucuguggauuccauca

SEQ ID NO: 301228 - RNA, 13 nt, Human herpesvirus 3
agucuucugucaa

SEQ ID NO: 301229 - RNA, 19 nt, Human herpesvirus 3
agugagguguccugugauc

SEQ ID NO: 301230 - RNA, 13 nt, Human herpesvirus 3
agugcauauccag

SEQ ID NO: 301231 - RNA, 15 nt, Human herpesvirus 3
agugcuugacugugc

SEQ ID NO: 301232 - RNA, 13 nt, Human herpesvirus 3
agugucguuucca

SEQ ID NO: 301233 - RNA, 14 nt, Human herpesvirus 3
aguguucauuuuau

SEQ ID NO: 301234 - RNA, 15 nt, Human herpesvirus 3
aguguucuaaaacac

SEQ ID NO: 301235 - RNA, 16 nt, Human herpesvirus 3
aguguucuaaaacacu

SEQ ID NO: 301236 - RNA, 17 nt, Human herpesvirus 3
aguuaaaucguuuaaca

SEQ ID NO: 301237 - RNA, 18 nt, Human herpesvirus 3
aguuacacgguguauaua

SEQ ID NO: 301238 - RNA, 14 nt, Human herpesvirus 3
aguuauaugaagca

SEQ ID NO: 301239 - RNA, 14 nt, Human herpesvirus 3
aguuccguuuggaa

SEQ ID NO: 301240 - RNA, 17 nt, Human herpesvirus 3
aguucuuugaagacuuu

SEQ ID NO: 301241 - RNA, 16 nt, Human herpesvirus 3
aguugaaccaaaucca

SEQ ID NO: 301242 - RNA, 15 nt, Human herpesvirus 3
aguuuuagcgguggu

SEQ ID NO: 301243 - RNA, 15 nt, Human herpesvirus 3
auaaaaaauaauucc

SEQ ID NO: 301244 - RNA, 13 nt, Human herpesvirus 3
auaaaaacauaac

SEQ ID NO: 301245 - RNA, 12 nt, Human herpesvirus 3
auaaaaacauac

SEQ ID NO: 301246 - RNA, 13 nt, Human herpesvirus 3
auaaaaacauaca

SEQ ID NO: 301247 - RNA, 19 nt, Human herpesvirus 3
auaaaaacauacaccagaa

SEQ ID NO: 301248 - RNA, 15 nt, Human herpesvirus 3
auaaaacaaacauuc

SEQ ID NO: 301249 - RNA, 15 nt, Human herpesvirus 3
auaaaacguuuuaaa

SEQ ID NO: 301250 - RNA, 13 nt, Human herpesvirus 3
auaaaccaacucc

SEQ ID NO: 301251 - RNA, 14 nt, Human herpesvirus 3
auaaacgacacaaa

SEQ ID NO: 301252 - RNA, 21 nt, Human herpesvirus 3
auaaacugaauuuaacauagc

SEQ ID NO: 301253 - RNA, 14 nt, Human herpesvirus 3
auaaacuguuuaaa

SEQ ID NO: 301254 - RNA, 10 nt, Human herpesvirus 3
auaaagggaa

SEQ ID NO: 301255 - RNA, 15 nt, Human herpesvirus 3
auaaaguauuguaga

SEQ ID NO: 301256 - RNA, 18 nt, Human herpesvirus 3
auaaaucguuuaucacug

SEQ ID NO: 301257 - RNA, 21 nt, Human herpesvirus 3
auaaauggucuaaauacuuca

SEQ ID NO: 301258 - RNA, 15 nt, Human herpesvirus 3
auaaauguacuauaa

SEQ ID NO: 301259 - RNA, 16 nt, Human herpesvirus 3
auaaauguguauuaua

SEQ ID NO: 301260 - RNA, 17 nt, Human herpesvirus 3
auaaauuuaaaacauac

SEQ ID NO: 301261 - RNA, 16 nt, Human herpesvirus 3
auaacaccgcucugcg

SEQ ID NO: 301262 - RNA, 21 nt, Human herpesvirus 3
auaaccuguccauuugcauuu

SEQ ID NO: 301263 - RNA, 20 nt, Human herpesvirus 3
auaagcucuguaugcugaua

SEQ ID NO: 301264 - RNA, 23 nt, Human herpesvirus 3
auaagcucuguaugcugauacau

SEQ ID NO: 301265 - RNA, 21 nt, Human herpesvirus 3
auaagguguuaauaaccauau

SEQ ID NO: 301266 - RNA, 12 nt, Human herpesvirus 3
auaauaccaaac

SEQ ID NO: 301267 - RNA, 17 nt, Human herpesvirus 3
auaauaugauacauaaa

SEQ ID NO: 301268 - RNA, 23 nt, Human herpesvirus 3
auaauccuuaucuugcauguguc

SEQ ID NO: 301269 - RNA, 14 nt, Human herpesvirus 3
auaauguuggguau

SEQ ID NO: 301270 - RNA, 20 nt, Human herpesvirus 3
auaauuaaugcaaccaucag

SEQ ID NO: 301271 - RNA, 16 nt, Human herpesvirus 3
auaauuauauccauaa

SEQ ID NO: 301272 - RNA, 17 nt, Human herpesvirus 3
auaauuguucagucuaa

SEQ ID NO: 301273 - RNA, 19 nt, Human herpesvirus 3
auacaaaauaaaaacauac

SEQ ID NO: 301274 - RNA, 20 nt, Human herpesvirus 3
auacaacgggagcuuccgaa

SEQ ID NO: 301275 - RNA, 16 nt, Human herpesvirus 3
auacaauaaacauaac

SEQ ID NO: 301276 - RNA, 19 nt, Human herpesvirus 3
auacacacccaccccagau

SEQ ID NO: 301277 - RNA, 14 nt, Human herpesvirus 3
auacacacuaccuu

SEQ ID NO: 301278 - RNA, 19 nt, Human herpesvirus 3
auacacauggauaggucau

SEQ ID NO: 301279 - RNA, 18 nt, Human herpesvirus 3
auguauauacgagcaaaa

SEQ ID NO: 301280 - RNA, 12 nt, Human herpesvirus 3
augucagauaag

SEQ ID NO: 301281 - RNA, 20 nt, Human herpesvirus 3
augucgcuacuccaggcaug

SEQ ID NO: 301282 - RNA, 17 nt, Human herpesvirus 3
augucuuauuccaacgc

SEQ ID NO: 301283 - RNA, 22 nt, Human herpesvirus 3
augugcucuaaagucccauaua

SEQ ID NO: 301284 - RNA, 19 nt, Human herpesvirus 3
auguguauuacguuacuca

SEQ ID NO: 301285 - RNA, 14 nt, Human herpesvirus 3
auguuacgugaaug

SEQ ID NO: 301286 - RNA, 18 nt, Human herpesvirus 3
auguuccaauggauggca

SEQ ID NO: 301287 - RNA, 14 nt, Human herpesvirus 3
auguuccacucuac

SEQ ID NO: 301288 - RNA, 19 nt, Human herpesvirus 3
auguuccacucuacaucaa

SEQ ID NO: 301289 - RNA, 12 nt, Human herpesvirus 3
auguugauaucc

SEQ ID NO: 301290 - RNA, 15 nt, Human herpesvirus 3
auguuuaaagacagc

SEQ ID NO: 301291 - RNA, 17 nt, Human herpesvirus 3
auguuuuuuaugucaga

SEQ ID NO: 301292 - RNA, 16 nt, Human herpesvirus 3
auuaaaagccguuaaa

SEQ ID NO: 301293 - RNA, 13 nt, Human herpesvirus 3
auuaaaguauuug

SEQ ID NO: 301294 - RNA, 15 nt, Human herpesvirus 3
auuaacguugaacac

SEQ ID NO: 301295 - RNA, 15 nt, Human herpesvirus 3
auuaaugcaaccauc

SEQ ID NO: 301296 - RNA, 16 nt, Human herpesvirus 3
auuacauugcuuucaa

SEQ ID NO: 301297 - RNA, 11 nt, Human herpesvirus 3
auuacauuuaa

SEQ ID NO: 301298 - RNA, 20 nt, Human herpesvirus 3
auuaccaacuguauguaaau

SEQ ID NO: 301299 - RNA, 16 nt, Human herpesvirus 3
auuacccgauauugua

SEQ ID NO: 301300 - RNA, 16 nt, Human herpesvirus 3
auuacccuaucccagu

SEQ ID NO: 301301 - RNA, 20 nt, Human herpesvirus 3
auuaccgcccccguguuacu

SEQ ID NO: 301302 - RNA, 21 nt, Human herpesvirus 3
auuaccgguaccaugggagac

SEQ ID NO: 301303 - RNA, 15 nt, Human herpesvirus 3
auuaccguacaacaa

SEQ ID NO: 301304 - RNA, 21 nt, Human herpesvirus 3
auuacguuacucaugugucuc

SEQ ID NO: 301305 - RNA, 14 nt, Human herpesvirus 3
auuacuguacagcu

SEQ ID NO: 301306 - RNA, 22 nt, Human herpesvirus 3
auuagacggcggguuuugauaa

SEQ ID NO: 301307 - RNA, 20 nt, Human herpesvirus 3
auuauaacugcuacaacgga

SEQ ID NO: 301308 - RNA, 20 nt, Human herpesvirus 3
auuaucgggcgacaauccaa

SEQ ID NO: 301309 - RNA, 13 nt, Human herpesvirus 3
auuauguauaaua

SEQ ID NO: 301310 - RNA, 19 nt, Human herpesvirus 3
auucaagacuaacauuuau

SEQ ID NO: 301311 - RNA, 13 nt, Human herpesvirus 3
auucacaugcagu

SEQ ID NO: 301312 - RNA, 15 nt, Human herpesvirus 3
auucacgccaguuga

SEQ ID NO: 301313 - RNA, 15 nt, Human herpesvirus 3
auuccaaccgaccca

SEQ ID NO: 301314 - RNA, 22 nt, Human herpesvirus 3
auucccccggggcggucauaua

SEQ ID NO: 301315 - RNA, 17 nt, Human herpesvirus 3
auucgacgcaaaaauuc

SEQ ID NO: 301316 - RNA, 19 nt, Human herpesvirus 3
auucgccuuuuacaugauc

SEQ ID NO: 301317 - RNA, 13 nt, Human herpesvirus 3
auucgcgaauaau

SEQ ID NO: 301318 - RNA, 21 nt, Human herpesvirus 3
auucggcgcggaugcauuuau

SEQ ID NO: 301319 - RNA, 16 nt, Human herpesvirus 3
auucggguaaaacaca

SEQ ID NO: 301320 - RNA, 14 nt, Human herpesvirus 3
auucgugugcaaua

SEQ ID NO: 301321 - RNA, 15 nt, Human herpesvirus 3
auucgugugcaauaa

SEQ ID NO: 301322 - RNA, 18 nt, Human herpesvirus 3
auucuaacaacucuggag

SEQ ID NO: 301323 - RNA, 23 nt, Human herpesvirus 3
auucuacagauuuauuuuuacau

SEQ ID NO: 301324 - RNA, 15 nt, Human herpesvirus 3
auucuauuaacaaua

SEQ ID NO: 301325 - RNA, 17 nt, Human herpesvirus 3
auucuccuucuccagug

SEQ ID NO: 301326 - RNA, 22 nt, Human herpesvirus 3
auugaaggguggaauuguggag

SEQ ID NO: 301327 - RNA, 18 nt, Human herpesvirus 3
auugcagcguacaaguuu

SEQ ID NO: 301328 - RNA, 14 nt, Human herpesvirus 3
auugccguauuaac

SEQ ID NO: 301329 - RNA, 18 nt, Human herpesvirus 3
auugccguauuaaccuac

SEQ ID NO: 301330 - RNA, 19 nt, Human herpesvirus 3
auuggacugcguuauuuaa

SEQ ID NO: 301331 - RNA, 19 nt, Human herpesvirus 3
auuggcaucuuacuugaga

SEQ ID NO: 301332 - RNA, 20 nt, Human herpesvirus 3
auuggcggaagauacaggca

SEQ ID NO: 301333 - RNA, 20 nt, Human herpesvirus 3
auuggcgguauauuaauuaa

SEQ ID NO: 301334 - RNA, 19 nt, Human herpesvirus 3
auuggcuccacuccaggcg

SEQ ID NO: 301335 - RNA, 17 nt, Human herpesvirus 3
auugguugauuggguua

SEQ ID NO: 301336 - RNA, 13 nt, Human herpesvirus 3
auuguaguacagg

SEQ ID NO: 301337 - RNA, 18 nt, Human herpesvirus 3
auugucagauauuuugca

SEQ ID NO: 301338 - RNA, 15 nt, Human herpesvirus 3
auugucccgugugug

SEQ ID NO: 301339 - RNA, 14 nt, Human herpesvirus 3
auuuaaaggucuga

SEQ ID NO: 301340 - RNA, 14 nt, Human herpesvirus 3
auuuaaauguguag

SEQ ID NO: 301341 - RNA, 14 nt, Human herpesvirus 3
auuuacaaugacag

SEQ ID NO: 301342 - RNA, 13 nt, Human herpesvirus 3
auuuacuuuacaa

SEQ ID NO: 301343 - RNA, 19 nt, Human herpesvirus 3
auuuagugauuacaucaau

SEQ ID NO: 301344 - RNA, 15 nt, Human herpesvirus 3
auuuauacaagcaua

SEQ ID NO: 301345 - RNA, 14 nt, Human herpesvirus 3
auuuaugucgcuac

SEQ ID NO: 301346 - RNA, 16 nt, Human herpesvirus 3
auuuauuaaagcuguu

SEQ ID NO: 301347 - RNA, 19 nt, Human herpesvirus 3
auuucaauauuuauacaag

SEQ ID NO: 301348 - RNA, 23 nt, Human herpesvirus 3
auuucaugcuuguaaaacauauc

SEQ ID NO: 301349 - RNA, 19 nt, Human herpesvirus 3
auuuccacauaacauccau

SEQ ID NO: 301350 - RNA, 14 nt, Human herpesvirus 3
auuucuaugugcag

SEQ ID NO: 301351 - RNA, 12 nt, Human herpesvirus 3
auuucugauguu

SEQ ID NO: 301352 - RNA, 15 nt, Human herpesvirus 3
auuugcccacaccua

SEQ ID NO: 301353 - RNA, 17 nt, Human herpesvirus 3
auuugccccaaaccacu

SEQ ID NO: 301354 - RNA, 17 nt, Human herpesvirus 3
auuuggacacuacucag

SEQ ID NO: 301355 - RNA, 17 nt, Human herpesvirus 3
auuugugaagacuuuau

SEQ ID NO: 301356 - RNA, 18 nt, Human herpesvirus 3
auuugugccgcaagcaua

SEQ ID NO: 301357 - RNA, 16 nt, Human herpesvirus 3
auuuuauagacacgcu

SEQ ID NO: 301358 - RNA, 15 nt, Human herpesvirus 3
auuuuauauacaaaa

SEQ ID NO: 301359 - RNA, 22 nt, Human herpesvirus 3
auuuuauguugauauuuuccaa

SEQ ID NO: 301360 - RNA, 15 nt, Human herpesvirus 3
auuuucguaagcaau

SEQ ID NO: 301361 - RNA, 16 nt, Human herpesvirus 3
auuuugucgggacaca

SEQ ID NO: 301362 - RNA, 22 nt, Human herpesvirus 3
auuuuuaaucauuauacaccac

SEQ ID NO: 301363 - RNA, 16 nt, Human herpesvirus 3
auuuuuccucuggggu

SEQ ID NO: 301364 - RNA, 17 nt, Human herpesvirus 3
auuuuucgguguuacca

SEQ ID NO: 301365 - RNA, 13 nt, Human herpesvirus 3
auuuuuuuuacag

SEQ ID NO: 301366 - RNA, 16 nt, Human herpesvirus 3
caaaaauagcuguaaa

SEQ ID NO: 301367 - RNA, 17 nt, Human herpesvirus 3
caaaacggcuguagguc

SEQ ID NO: 301368 - RNA, 15 nt, Human herpesvirus 3
caaaauaaaacaaug

SEQ ID NO: 301369 - RNA, 22 nt, Human herpesvirus 3
caaaauguuaaacccugauaaa

SEQ ID NO: 301370 - RNA, 22 nt, Human herpesvirus 3
caaaauuaacucgcguacaaau

SEQ ID NO: 301371 - RNA, 14 nt, Human herpesvirus 3
caaaauugggacga

SEQ ID NO: 301372 - RNA, 21 nt, Human herpesvirus 3
caaacacucuacgcauuuacg

SEQ ID NO: 301373 - RNA, 15 nt, Human herpesvirus 3
caaacgcgucugugu

SEQ ID NO: 301374 - RNA, 22 nt, Human herpesvirus 3
caaacuaaagguauacuuggag

SEQ ID NO: 301375 - RNA, 14 nt, Human herpesvirus 3
caaacuugugugua

SEQ ID NO: 301376 - RNA, 22 nt, Human herpesvirus 3
caaagggccucuaacaaugcac

SEQ ID NO: 301377 - RNA, 22 nt, Human herpesvirus 3
caaauaaaaguauuacauucau

SEQ ID NO: 301378 - RNA, 15 nt, Human herpesvirus 3
caaauaacugaacau

SEQ ID NO: 301379 - RNA, 14 nt, Human herpesvirus 3
caaauuauccaaug

SEQ ID NO: 301380 - RNA, 15 nt, Human herpesvirus 3
caaauucaacuaaug

SEQ ID NO: 301381 - RNA, 16 nt, Human herpesvirus 3
caacaaggauaaaaca

SEQ ID NO: 301382 - RNA, 18 nt, Human herpesvirus 3
caacauggcuaugccauu

SEQ ID NO: 301383 - RNA, 22 nt, Human herpesvirus 3
caaccaaacgcgucuguguaua

SEQ ID NO: 301384 - RNA, 15 nt, Human herpesvirus 3
caaccagucuaguua

SEQ ID NO: 301385 - RNA, 12 nt, Human herpesvirus 3
caaccaucagau

SEQ ID NO: 301386 - RNA, 16 nt, Human herpesvirus 3
caaccaugauuugaug

SEQ ID NO: 301387 - RNA, 18 nt, Human herpesvirus 3
caaccaugauuugauguu

SEQ ID NO: 301388 - RNA, 13 nt, Human herpesvirus 3
caacgacauacau

SEQ ID NO: 301389 - RNA, 16 nt, Human herpesvirus 3
caacuaauguuguuca

SEQ ID NO: 301390 - RNA, 17 nt, Human herpesvirus 3
caacugauuacauuuca

SEQ ID NO: 301391 - RNA, 18 nt, Human herpesvirus 3
caacugauuacauuucau

SEQ ID NO: 301392 - RNA, 18 nt, Human herpesvirus 3
caagaguuuucuccaaaa

SEQ ID NO: 301393 - RNA, 18 nt, Human herpesvirus 3
caagaucaauggcgguga

SEQ ID NO: 301394 - RNA, 20 nt, Human herpesvirus 3
caauaaaacaaacauucaca

SEQ ID NO: 301395 - RNA, 22 nt, Human herpesvirus 3
caauaaaacaaacauucacagu

SEQ ID NO: 301396 - RNA, 17 nt, Human herpesvirus 3
caauacgcucgacaaua

SEQ ID NO: 301397 - RNA, 18 nt, Human herpesvirus 3
caauaucagccgcucgcu

SEQ ID NO: 301398 - RNA, 22 nt, Human herpesvirus 3
caauaugucacggagaacguau

SEQ ID NO: 301399 - RNA, 16 nt, Human herpesvirus 3
caauauuuuguuaaua

SEQ ID NO: 301400 - RNA, 16 nt, Human herpesvirus 3
caaucguaagacuguu

SEQ ID NO: 301401 - RNA, 15 nt, Human herpesvirus 3
caaugaaacaguaaa

SEQ ID NO: 301402 - RNA, 16 nt, Human herpesvirus 3
caaugaacaguuaugu

SEQ ID NO: 301403 - RNA, 13 nt, Human herpesvirus 3
caaugacagugau

SEQ ID NO: 301404 - RNA, 15 nt, Human herpesvirus 3
caaugagcgguggua

SEQ ID NO: 301405 - RNA, 15 nt, Human herpesvirus 3
caaugcacugaacca

SEQ ID NO: 301406 - RNA, 18 nt, Human herpesvirus 3
caaugcacugaaccacaa

SEQ ID NO: 301407 - RNA, 22 nt, Human herpesvirus 3
caauguuuuaauuuuauauaca

SEQ ID NO: 301408 - RNA, 17 nt, Human herpesvirus 3
caauuauaacugcuaca

SEQ ID NO: 301409 - RNA, 17 nt, Human herpesvirus 3
caauugagauacacaug

SEQ ID NO: 301410 - RNA, 12 nt, Human herpesvirus 3
caauugucugua

SEQ ID NO: 301411 - RNA, 14 nt, Human herpesvirus 3
caauuuaacauacc

SEQ ID NO: 301412 - RNA, 15 nt, Human herpesvirus 3
cacaacaaaagcuau

SEQ ID NO: 301413 - RNA, 13 nt, Human herpesvirus 3
cacaaucagaaga

SEQ ID NO: 301414 - RNA, 20 nt, Human herpesvirus 3
cacaccaauuauaacugcua

SEQ ID NO: 301415 - RNA, 16 nt, Human herpesvirus 3
cacagaacggucuuuc

SEQ ID NO: 301416 - RNA, 16 nt, Human herpesvirus 3
cacagccuuagaguca

SEQ ID NO: 301417 - RNA, 17 nt, Human herpesvirus 3
cacaguccggacaauua

SEQ ID NO: 301418 - RNA, 21 nt, Human herpesvirus 3
cacaguccggacaauuaacac

SEQ ID NO: 301419 - RNA, 23 nt, Human herpesvirus 3
cacaguuccguuuggaaacaaca

SEQ ID NO: 301420 - RNA, 22 nt, Human herpesvirus 3
cacaguuggggccgauucuccu

SEQ ID NO: 301421 - RNA, 18 nt, Human herpesvirus 3
cacauaugcacgcaucaa

SEQ ID NO: 301422 - RNA, 19 nt, Human herpesvirus 3
cacaucuacugucuugaca

SEQ ID NO: 301423 - RNA, 12 nt, Human herpesvirus 3
cacaugaauaua

SEQ ID NO: 301424 - RNA, 20 nt, Human herpesvirus 3
cacaugaauauauagccuuu

SEQ ID NO: 301425 - RNA, 15 nt, Human herpesvirus 3
cacauuacuguacag

SEQ ID NO: 301426 - RNA, 17 nt, Human herpesvirus 3
cacauuagcaaaauugg

SEQ ID NO: 301427 - RNA, 23 nt, Human herpesvirus 3
cacauuuuccccuuuagcuauag

SEQ ID NO: 301428 - RNA, 22 nt, Human herpesvirus 3
cacauuuucgguggaagcaauu

SEQ ID NO: 301429 - RNA, 18 nt, Human herpesvirus 3
caccaauuauaacugcua

SEQ ID NO: 301430 - RNA, 21 nt, Human herpesvirus 3
caccaucaucugauuugcaaa

SEQ ID NO: 301431 - RNA, 18 nt, Human herpesvirus 3
cacccccguugcuuuaau

SEQ ID NO: 301432 - RNA, 14 nt, Human herpesvirus 3
cacccccucuuaaa

SEQ ID NO: 301433 - RNA, 21 nt, Human herpesvirus 3
cacccgguaugccacauuuac

SEQ ID NO: 301434 - RNA, 18 nt, Human herpesvirus 3
caccgcugugcuguaaga

SEQ ID NO: 301435 - RNA, 14 nt, Human herpesvirus 3
caccucggccgcuu

SEQ ID NO: 301436 - RNA, 15 nt, Human herpesvirus 3
cacgaugcgcuggua

SEQ ID NO: 301437 - RNA, 15 nt, Human herpesvirus 3
cacggaacacguuau

SEQ ID NO: 301438 - RNA, 19 nt, Human herpesvirus 3
cacggaauccgguauacau

SEQ ID NO: 301439 - RNA, 23 nt, Human herpesvirus 3
cacguaauuugccccaaaccacu

SEQ ID NO: 301440 - RNA, 20 nt, Human herpesvirus 3
cacguguugcuguuguccaa

SEQ ID NO: 301441 - RNA, 21 nt, Human herpesvirus 3
cacguuuguguugugacuuga

SEQ ID NO: 301442 - RNA, 20 nt, Human herpesvirus 3
cacuaaaaucacuuugauau

SEQ ID NO: 301443 - RNA, 20 nt, Human herpesvirus 3
cacuaaauaaaauacaccuu

SEQ ID NO: 301444 - RNA, 21 nt, Human herpesvirus 3
cacucaacguuuuuggauggc

SEQ ID NO: 301445 - RNA, 15 nt, Human herpesvirus 3
cacucuacgcauuua

SEQ ID NO: 301446 - RNA, 13 nt, Human herpesvirus 3
cacugaaccacaa

SEQ ID NO: 301447 - RNA, 14 nt, Human herpesvirus 3
cacugcauuuacau

SEQ ID NO: 301448 - RNA, 23 nt, Human herpesvirus 3
cacugcauuuacaucuuguccaa

SEQ ID NO: 301449 - RNA, 12 nt, Human herpesvirus 3
cacugguggaua

SEQ ID NO: 301450 - RNA, 22 nt, Human herpesvirus 3
cacuguuccaggcgagacuuga

SEQ ID NO: 301451 - RNA, 18 nt, Human herpesvirus 3
cagaaacguuuuuaguuu

SEQ ID NO: 301452 - RNA, 15 nt, Human herpesvirus 3
cagacaagcuuauuu

SEQ ID NO: 301453 - RNA, 23 nt, Human herpesvirus 3
cagagacucugcgaugcauuaac

SEQ ID NO: 301454 - RNA, 22 nt, Human herpesvirus 3
cagagcauccgucuugcgauac

SEQ ID NO: 301455 - RNA, 21 nt, Human herpesvirus 3
cagaggguauugcuguuguuu

SEQ ID NO: 301456 - RNA, 13 nt, Human herpesvirus 3
cagauacagcaua

SEQ ID NO: 301457 - RNA, 23 nt, Human herpesvirus 3
cagauacguggaaucguaguaaa

SEQ ID NO: 301458 - RNA, 17 nt, Human herpesvirus 3
cagauauaaacaauuua

SEQ ID NO: 301459 - RNA, 21 nt, Human herpesvirus 3
cagaugaucugguaaauguua

SEQ ID NO: 301460 - RNA, 13 nt, Human herpesvirus 3
cagauguacaccc

SEQ ID NO: 301461 - RNA, 16 nt, Human herpesvirus 3
cagauuuauuuuuaca

SEQ ID NO: 301462 - RNA, 15 nt, Human herpesvirus 3
cagcaauguuuuaau

SEQ ID NO: 301463 - RNA, 13 nt, Human herpesvirus 3
cagcagucucacg

SEQ ID NO: 301464 - RNA, 23 nt, Human herpesvirus 3
cagccuuagagucauccccgugc

SEQ ID NO: 301465 - RNA, 15 nt, Human herpesvirus 3
cagcggguauuuuua

SEQ ID NO: 301466 - RNA, 22 nt, Human herpesvirus 3
cagcugugaguuuaggguuuaa

SEQ ID NO: 301467 - RNA, 14 nt, Human herpesvirus 3
cagcuuacagucca

SEQ ID NO: 301468 - RNA, 15 nt, Human herpesvirus 3
caggcgagacuugau

SEQ ID NO: 301469 - RNA, 14 nt, Human herpesvirus 3
cagggcaaugggaa

SEQ ID NO: 301470 - RNA, 13 nt, Human herpesvirus 3
caggucugucaug

SEQ ID NO: 301471 - RNA, 22 nt, Human herpesvirus 3
cagguuauccaacuguuuacau

SEQ ID NO: 301472 - RNA, 14 nt, Human herpesvirus 3
cagguuuuacuuuu

SEQ ID NO: 301473 - RNA, 13 nt, Human herpesvirus 3
caguaaaagauuc

SEQ ID NO: 301474 - RNA, 14 nt, Human herpesvirus 3
caguacgcuuuuau

SEQ ID NO: 301475 - RNA, 16 nt, Human herpesvirus 3
caguacguugcauaac

SEQ ID NO: 301476 - RNA, 21 nt, Human herpesvirus 3
caguagaggguccaucaaaca

SEQ ID NO: 301477 - RNA, 15 nt, Human herpesvirus 3
caguagauguguugc

SEQ ID NO: 301478 - RNA, 16 nt, Human herpesvirus 3
caguaguuucauguag

SEQ ID NO: 301479 - RNA, 13 nt, Human herpesvirus 3
cagucaacccauc

SEQ ID NO: 301480 - RNA, 21 nt, Human herpesvirus 3
cagucguguuuuuaauagaga

SEQ ID NO: 301481 - RNA, 18 nt, Human herpesvirus 3
cagucuaggcaaucguaa

SEQ ID NO: 301482 - RNA, 18 nt, Human herpesvirus 3
cagucugaccauuuacca

SEQ ID NO: 301483 - RNA, 19 nt, Human herpesvirus 3
cagucugcuuuauuaccaa

SEQ ID NO: 301484 - RNA, 14 nt, Human herpesvirus 3
cagugcucccaagg

SEQ ID NO: 301485 - RNA, 16 nt, Human herpesvirus 3
cagugcuugacugugc

SEQ ID NO: 301486 - RNA, 23 nt, Human herpesvirus 3
caguguuuagugggaguggagua

SEQ ID NO: 301487 - RNA, 15 nt, Human herpesvirus 3
caguuccguuuggaa

SEQ ID NO: 301488 - RNA, 14 nt, Human herpesvirus 3
caguugaaccaaau

SEQ ID NO: 301489 - RNA, 21 nt, Human herpesvirus 3
caguugacuuuguuugcugca

SEQ ID NO: 301490 - RNA, 12 nt, Human herpesvirus 3
cauaacagucua

SEQ ID NO: 301491 - RNA, 14 nt, Human herpesvirus 3
cauaaccgauuuac

SEQ ID NO: 301492 - RNA, 16 nt, Human herpesvirus 3
cauaaccgauuuaccg

SEQ ID NO: 301493 - RNA, 19 nt, Human herpesvirus 3
cauaaccgauuuaccgugu

SEQ ID NO: 301494 - RNA, 22 nt, Human herpesvirus 3
gauguacugugucucucaaaaa

SEQ ID NO: 301495 - RNA, 22 nt, Human herpesvirus 3
gaugugaaaaaggccgguugug

SEQ ID NO: 301496 - RNA, 21 nt, Human herpesvirus 3
gauguuuuuaauccaauguuu

SEQ ID NO: 301497 - RNA, 11 nt, Human herpesvirus 3
gauuacguuac

SEQ ID NO: 301498 - RNA, 17 nt, Human herpesvirus 3
gauuacuacaacggaau

SEQ ID NO: 301499 - RNA, 12 nt, Human herpesvirus 3
gauuauauccau

SEQ ID NO: 301500 - RNA, 15 nt, Human herpesvirus 3
gauucggaaugcccg

SEQ ID NO: 301501 - RNA, 20 nt, Human herpesvirus 3
gauuuaugucgcuacuccag

SEQ ID NO: 301502 - RNA, 21 nt, Human herpesvirus 3
gauuucaacggcuuccgaaaa

SEQ ID NO: 301503 - RNA, 22 nt, Human herpesvirus 3
gauuuggaaaaaaauacguuaa

SEQ ID NO: 301504 - RNA, 20 nt, Human herpesvirus 3
gauuuuaccuuauguguuau

SEQ ID NO: 301505 - RNA, 21 nt, Human herpesvirus 3
gauuuuaccuuauguguuauu

SEQ ID NO: 301506 - RNA, 15 nt, Human herpesvirus 3
gcaaagcuacacuuu

SEQ ID NO: 301507 - RNA, 16 nt, Human herpesvirus 3
gcaaagcuacacuuuu

SEQ ID NO: 301508 - RNA, 12 nt, Human herpesvirus 3
gcaacaacccau

SEQ ID NO: 301509 - RNA, 14 nt, Human herpesvirus 3
gcaacccugucauc

SEQ ID NO: 301510 - RNA, 14 nt, Human herpesvirus 3
gcaacgcagauuac

SEQ ID NO: 301511 - RNA, 23 nt, Human herpesvirus 3
gcaacgguuucuccguugcacgu

SEQ ID NO: 301512 - RNA, 18 nt, Human herpesvirus 3
gcaagcauauacacaucc

SEQ ID NO: 301513 - RNA, 20 nt, Human herpesvirus 3
gcaagcccuccgguccaugc

SEQ ID NO: 301514 - RNA, 20 nt, Human herpesvirus 3
gcaaggggaucgucaguaaa

SEQ ID NO: 301515 - RNA, 22 nt, Human herpesvirus 3
gcaaguaacagcgacuauguuu

SEQ ID NO: 301516 - RNA, 15 nt, Human herpesvirus 3
gcaauucccaguaaa

SEQ ID NO: 301517 - RNA, 14 nt, Human herpesvirus 3
gcaauugucagaua

SEQ ID NO: 301518 - RNA, 11 nt, Human herpesvirus 3
gcacucuacca

SEQ ID NO: 301519 - RNA, 18 nt, Human herpesvirus 3
gcacuuuuaaagcaucua

SEQ ID NO: 301520 - RNA, 22 nt, Human herpesvirus 3
gcaggcuuuaggaaucaagaca

SEQ ID NO: 301521 - RNA, 16 nt, Human herpesvirus 3
gcaguuauaacacggg

SEQ ID NO: 301522 - RNA, 15 nt, Human herpesvirus 3
gcauaagcucuguau

SEQ ID NO: 301523 - RNA, 23 nt, Human herpesvirus 3
gcauauacacauccuggacacag

SEQ ID NO: 301524 - RNA, 20 nt, Human herpesvirus 3
gcaucacaggggguauuuau

SEQ ID NO: 301525 - RNA, 14 nt, Human herpesvirus 3
gcaucguagguaua

SEQ ID NO: 301526 - RNA, 21 nt, Human herpesvirus 3
gcaugcgggcuugcuguucuc

SEQ ID NO: 301527 - RNA, 17 nt, Human herpesvirus 3
gcauuacagaaauguga

SEQ ID NO: 301528 - RNA, 16 nt, Human herpesvirus 3
gcauuugugucccauu

SEQ ID NO: 301529 - RNA, 18 nt, Human herpesvirus 3
gccaacauccgugaaauu

SEQ ID NO: 301530 - RNA, 21 nt, Human herpesvirus 3
gccaauaaaagcagacauccc

SEQ ID NO: 301531 - RNA, 16 nt, Human herpesvirus 3
gccacaauaacauaag

SEQ ID NO: 301532 - RNA, 15 nt, Human herpesvirus 3
gccagaagcauuuac

SEQ ID NO: 301533 - RNA, 22 nt, Human herpesvirus 3
gccagccaacacaguguucaga

SEQ ID NO: 301534 - RNA, 23 nt, Human herpesvirus 3
gccauaaacagagaucucuguua

SEQ ID NO: 301535 - RNA, 23 nt, Human herpesvirus 3
gccaucuggaguacuacacccag

SEQ ID NO: 301536 - RNA, 16 nt, Human herpesvirus 3
gccaugccgccgucaa

SEQ ID NO: 301537 - RNA, 18 nt, Human herpesvirus 3
gccauuacuaaagcuauu

SEQ ID NO: 301538 - RNA, 13 nt, Human herpesvirus 3
gcccacacaauca

SEQ ID NO: 301539 - RNA, 21 nt, Human herpesvirus 3
gcccaccucggccgcuucccg

SEQ ID NO: 301540 - RNA, 20 nt, Human herpesvirus 3
gcccccaacuuccccauaca

SEQ ID NO: 301541 - RNA, 21 nt, Human herpesvirus 3
gcccccaacuuccccauacac

SEQ ID NO: 301542 - RNA, 18 nt, Human herpesvirus 3
gcccccuggacauguguu

SEQ ID NO: 301543 - RNA, 18 nt, Human herpesvirus 3
gccccgguucggugauca

SEQ ID NO: 301544 - RNA, 15 nt, Human herpesvirus 3
gcccgaaaacuuugg

SEQ ID NO: 301545 - RNA, 14 nt, Human herpesvirus 3
gccgacaugccugg

SEQ ID NO: 301546 - RNA, 16 nt, Human herpesvirus 3
gccgcaacaacccauc

SEQ ID NO: 301547 - RNA, 17 nt, Human herpesvirus 3
gccgcuacccgaaagcc

SEQ ID NO: 301548 - RNA, 16 nt, Human herpesvirus 3
gccgcuucccgaaagc

SEQ ID NO: 301549 - RNA, 13 nt, Human herpesvirus 3
gccgucaaugcaa

SEQ ID NO: 301550 - RNA, 14 nt, Human herpesvirus 3
gccgucaaugcaac

SEQ ID NO: 301551 - RNA, 13 nt, Human herpesvirus 3
gccgucgcgccca

SEQ ID NO: 301552 - RNA, 19 nt, Human herpesvirus 3
gccguuguggaaagguaua

SEQ ID NO: 301553 - RNA, 18 nt, Human herpesvirus 3
gccucugcuucaauucca

SEQ ID NO: 301554 - RNA, 18 nt, Human herpesvirus 3
gccucuguacaacacaaa

SEQ ID NO: 301555 - RNA, 22 nt, Human herpesvirus 3
gccugcaagcgguuuagcauuu

SEQ ID NO: 301556 - RNA, 14 nt, Human herpesvirus 3
gccuuugcgaugua

SEQ ID NO: 301557 - RNA, 22 nt, Human herpesvirus 3
gccuuuuaugaauguaauacuu

SEQ ID NO: 301558 - RNA, 23 nt, Human herpesvirus 3
gcgaagcugccgucaaugcaacu

SEQ ID NO: 301559 - RNA, 20 nt, Human herpesvirus 3
gcgaauaauacacacuaccu

SEQ ID NO: 301560 - RNA, 17 nt, Human herpesvirus 3
gcgaccacgacagcagu

SEQ ID NO: 301561 - RNA, 19 nt, Human herpesvirus 3
gcgauggccgucuugaauc

SEQ ID NO: 301562 - RNA, 14 nt, Human herpesvirus 3
gcgccaaaauggau

SEQ ID NO: 301563 - RNA, 18 nt, Human herpesvirus 3
gcgggaugcaaacccauc

SEQ ID NO: 301564 - RNA, 18 nt, Human herpesvirus 3
gcgggccuucgaugcgug

SEQ ID NO: 301565 - RNA, 22 nt, Human herpesvirus 3
gcggucucccggaugaacagua

SEQ ID NO: 301566 - RNA, 19 nt, Human herpesvirus 3
gcgguugugucggucucuc

SEQ ID NO: 301567 - RNA, 19 nt, Human herpesvirus 3
gcguaaaauucgcacaccu

SEQ ID NO: 301568 - RNA, 20 nt, Human herpesvirus 3
gcguaaaauucgcacaccuu

SEQ ID NO: 301569 - RNA, 14 nt, Human herpesvirus 3
gcguacgugccuag

SEQ ID NO: 301570 - RNA, 16 nt, Human herpesvirus 3
gcguccucuguuacau

SEQ ID NO: 301571 - RNA, 14 nt, Human herpesvirus 3
gcgucuaugucgaa

SEQ ID NO: 301572 - RNA, 17 nt, Human herpesvirus 3
gcgucuguguauaucau

SEQ ID NO: 301573 - RNA, 16 nt, Human herpesvirus 3
gcguuuuguaccucua

SEQ ID NO: 301574 - RNA, 17 nt, Human herpesvirus 3
gcuaaccauaaugcaaa

SEQ ID NO: 301575 - RNA, 15 nt, Human herpesvirus 3
gcuacgucgauguga

SEQ ID NO: 301576 - RNA, 22 nt, Human herpesvirus 3
gcuacuuuauauauauguucca

SEQ ID NO: 301577 - RNA, 11 nt, Human herpesvirus 3
gcuaugccauu

SEQ ID NO: 301578 - RNA, 12 nt, Human herpesvirus 3
gcuaugccauuu

SEQ ID NO: 301579 - RNA, 19 nt, Human herpesvirus 3
gcuauuaaugguacaagaa

SEQ ID NO: 301580 - RNA, 17 nt, Human herpesvirus 3
gcuauuuucaguauuaa

SEQ ID NO: 301581 - RNA, 15 nt, Human herpesvirus 3
gcucaaucaauccaa

SEQ ID NO: 301582 - RNA, 22 nt, Human herpesvirus 3
gcucguuguaccguuugcacaa

SEQ ID NO: 301583 - RNA, 14 nt, Human herpesvirus 3
gcucuaaugcagug

SEQ ID NO: 301584 - RNA, 13 nt, Human herpesvirus 3
gcugaauuucacg

SEQ ID NO: 301585 - RNA, 12 nt, Human herpesvirus 3
gcugauacauaa

SEQ ID NO: 301586 - RNA, 13 nt, Human herpesvirus 3
gcugauacauaaa

SEQ ID NO: 301587 - RNA, 14 nt, Human herpesvirus 3
gcuggcauuuccaa

SEQ ID NO: 301588 - RNA, 19 nt, Human herpesvirus 3
gcuggcauuuccaaacaca

SEQ ID NO: 301589 - RNA, 15 nt, Human herpesvirus 3
gcuguacguaaccau

SEQ ID NO: 301590 - RNA, 18 nt, Human herpesvirus 3
gcugucgucauauuacau

SEQ ID NO: 301591 - RNA, 19 nt, Human herpesvirus 3
gcuguuagaggcauaccga

SEQ ID NO: 301592 - RNA, 14 nt, Human herpesvirus 3
gcuucaagucucaa

SEQ ID NO: 301593 - RNA, 13 nt, Human herpesvirus 3
gcuucaauuccaa

SEQ ID NO: 301594 - RNA, 16 nt, Human herpesvirus 3
gcuucaccgguauuau

SEQ ID NO: 301595 - RNA, 16 nt, Human herpesvirus 3
gcuugucaaaacauac

SEQ ID NO: 301596 - RNA, 18 nt, Human herpesvirus 3
gcuuuucccccacauaca

SEQ ID NO: 301597 - RNA, 16 nt, Human herpesvirus 3
ggaaaacuuaugucaa

SEQ ID NO: 301598 - RNA, 22 nt, Human herpesvirus 3
ggaaacccucaagaauguaauu

SEQ ID NO: 301599 - RNA, 15 nt, Human herpesvirus 3
ggaaacuauuccaaa

SEQ ID NO: 301600 - RNA, 18 nt, Human herpesvirus 3
ggaaacuguuggucuucc

SEQ ID NO: 301601 - RNA, 23 nt, Human herpesvirus 3
ggaaaguuguuggcgcaugccau

SEQ ID NO: 301602 - RNA, 11 nt, Human herpesvirus 3
ggaacaucaga

SEQ ID NO: 301603 - RNA, 21 nt, Human herpesvirus 3
ggaagcaauugcggcuuacac

SEQ ID NO: 301604 - RNA, 23 nt, Human herpesvirus 3
ggaauuaaugcaacccugucauc

SEQ ID NO: 301605 - RNA, 16 nt, Human herpesvirus 3
ggaauuacuccuuuaa

SEQ ID NO: 301606 - RNA, 19 nt, Human herpesvirus 3
ggaauuuaggaggcugcaa

SEQ ID NO: 301607 - RNA, 18 nt, Human herpesvirus 3
ggacaaaccccacgcaac

SEQ ID NO: 301608 - RNA, 13 nt, Human herpesvirus 3
ggacacuacucag

SEQ ID NO: 301609 - RNA, 16 nt, Human herpesvirus 3
guauccggaaacacac

SEQ ID NO: 301610 - RNA, 15 nt, Human herpesvirus 3
guaugccacauuuac

SEQ ID NO: 301611 - RNA, 15 nt, Human herpesvirus 3
guauuauacauaacc

SEQ ID NO: 301612 - RNA, 23 nt, Human herpesvirus 3
guauuauacauaaccgauuuacc

SEQ ID NO: 301613 - RNA, 15 nt, Human herpesvirus 3
guauuauaugucaca

SEQ ID NO: 301614 - RNA, 15 nt, Human herpesvirus 3
guauugcuguuguuu

SEQ ID NO: 301615 - RNA, 18 nt, Human herpesvirus 3
guauuuuuuuagaauaca

SEQ ID NO: 301616 - RNA, 15 nt, Human herpesvirus 3
gucaaauucaacuaa

SEQ ID NO: 301617 - RNA, 22 nt, Human herpesvirus 3
gucaacacgggcugaagaguuu

SEQ ID NO: 301618 - RNA, 22 nt, Human herpesvirus 3
gucaaccaauugguauacacac

SEQ ID NO: 301619 - RNA, 11 nt, Human herpesvirus 3
gucaauggagu

SEQ ID NO: 301620 - RNA, 14 nt, Human herpesvirus 3
gucaccaaagccaa

SEQ ID NO: 301621 - RNA, 15 nt, Human herpesvirus 3
gucagauauuuugca

SEQ ID NO: 301622 - RNA, 15 nt, Human herpesvirus 3
gucaggucugucaug

SEQ ID NO: 301623 - RNA, 17 nt, Human herpesvirus 3
guccauuuaacaauccc

SEQ ID NO: 301624 - RNA, 23 nt, Human herpesvirus 3
guccggaagaguuagcauccaaa

SEQ ID NO: 301625 - RNA, 16 nt, Human herpesvirus 3
guccuuacccauauga

SEQ ID NO: 301626 - RNA, 13 nt, Human herpesvirus 3
gucgucugaugug

SEQ ID NO: 301627 - RNA, 20 nt, Human herpesvirus 3
gucguuauauucacaugcag

SEQ ID NO: 301628 - RNA, 15 nt, Human herpesvirus 3
gucuaauaccacaga

SEQ ID NO: 301629 - RNA, 18 nt, Human herpesvirus 3
gucuaccacuaagaacuu

SEQ ID NO: 301630 - RNA, 16 nt, Human herpesvirus 3
gucugaccauuuacca

SEQ ID NO: 301631 - RNA, 15 nt, Human herpesvirus 3
gucugcuuuauuacc

SEQ ID NO: 301632 - RNA, 14 nt, Human herpesvirus 3
gucuguaauggagg

SEQ ID NO: 301633 - RNA, 20 nt, Human herpesvirus 3
gucuucugucaaguugcaug

SEQ ID NO: 301634 - RNA, 21 nt, Human herpesvirus 3
gucuucugucaaguugcaugu

SEQ ID NO: 301635 - RNA, 18 nt, Human herpesvirus 3
gucuugacaacauuuaaa

SEQ ID NO: 301636 - RNA, 14 nt, Human herpesvirus 3
gucuuuuaaauuca

SEQ ID NO: 301637 - RNA, 12 nt, Human herpesvirus 3
gugaagacuuua

SEQ ID NO: 301638 - RNA, 21 nt, Human herpesvirus 3
gugaagacuuuaugaauuugc

SEQ ID NO: 301639 - RNA, 19 nt, Human herpesvirus 3
gugacagaccggcuguuga

SEQ ID NO: 301640 - RNA, 13 nt, Human herpesvirus 3
gugaggaaaaaga

SEQ ID NO: 301641 - RNA, 15 nt, Human herpesvirus 3
gugcugucaaccaua

SEQ ID NO: 301642 - RNA, 22 nt, Human herpesvirus 3
guggaccguguucgaucccaaa

SEQ ID NO: 301643 - RNA, 13 nt, Human herpesvirus 3
guggaccuuugca

SEQ ID NO: 301644 - RNA, 12 nt, Human herpesvirus 3
guggaguuuccc

SEQ ID NO: 301645 - RNA, 13 nt, Human herpesvirus 3
gugggaguggagu

SEQ ID NO: 301646 - RNA, 12 nt, Human herpesvirus 3
gugguaccaaaa

SEQ ID NO: 301647 - RNA, 21 nt, Human herpesvirus 3
guggugccauucuccacguga

SEQ ID NO: 301648 - RNA, 22 nt, Human herpesvirus 3
guggugccauucuccacgugag

SEQ ID NO: 301649 - RNA, 17 nt, Human herpesvirus 3
guguaaaguuugaacau

SEQ ID NO: 301650 - RNA, 23 nt, Human herpesvirus 3
guguaccauagaugaacacauuu

SEQ ID NO: 301651 - RNA, 13 nt, Human herpesvirus 3
guguccugugauc

SEQ ID NO: 301652 - RNA, 21 nt, Human herpesvirus 3
gugucuacuuagcggacaugc

SEQ ID NO: 301653 - RNA, 16 nt, Human herpesvirus 3
gugugcaauaaccuca

SEQ ID NO: 301654 - RNA, 21 nt, Human herpesvirus 3
gugugcauaacguugcgguga

SEQ ID NO: 301655 - RNA, 22 nt, Human herpesvirus 3
guguuacuuggaaacacccaua

SEQ ID NO: 301656 - RNA, 20 nt, Human herpesvirus 3
guguuagacagagaauuaau

SEQ ID NO: 301657 - RNA, 18 nt, Human herpesvirus 3
guguucauauauacccau

SEQ ID NO: 301658 - RNA, 12 nt, Human herpesvirus 3
guguucauuuua

SEQ ID NO: 301659 - RNA, 19 nt, Human herpesvirus 3
guuaaauaacaugucacau

SEQ ID NO: 301660 - RNA, 20 nt, Human herpesvirus 3
guuaaauuuauaaaacacuc

SEQ ID NO: 301661 - RNA, 22 nt, Human herpesvirus 3
guuaagaggauaggugucuuca

SEQ ID NO: 301662 - RNA, 22 nt, Human herpesvirus 3
guuaauaaaaacacaaccaguc

SEQ ID NO: 301663 - RNA, 13 nt, Human herpesvirus 3
guuaauacagugu

SEQ ID NO: 301664 - RNA, 14 nt, Human herpesvirus 3
guuaauuuuacaau

SEQ ID NO: 301665 - RNA, 11 nt, Human herpesvirus 3
guuacauucuc

SEQ ID NO: 301666 - RNA, 17 nt, Human herpesvirus 3
guuaccauggugcgauu

SEQ ID NO: 301667 - RNA, 13 nt, Human herpesvirus 3
guuauauucacau

SEQ ID NO: 301668 - RNA, 14 nt, Human herpesvirus 3
guuaucaacgacau

SEQ ID NO: 301669 - RNA, 14 nt, Human herpesvirus 3
guuauuacauuuaa

SEQ ID NO: 301670 - RNA, 16 nt, Human herpesvirus 3
guuauuccggacaaua

SEQ ID NO: 301671 - RNA, 20 nt, Human herpesvirus 3
guucaaagcaacgguuucuc

SEQ ID NO: 301672 - RNA, 13 nt, Human herpesvirus 3
guucaaaggcauu

SEQ ID NO: 301673 - RNA, 23 nt, Human herpesvirus 3
guucaacaaaugcgcguuccaaa

SEQ ID NO: 301674 - RNA, 18 nt, Human herpesvirus 3
guucauuuuauuauccca

SEQ ID NO: 301675 - RNA, 15 nt, Human herpesvirus 3
guucuaaaacacugu

SEQ ID NO: 301676 - RNA, 20 nt, Human herpesvirus 3
guucuaauaaaaacaucaaa

SEQ ID NO: 301677 - RNA, 20 nt, Human herpesvirus 3
guucuaccaacgcacuguuc

SEQ ID NO: 301678 - RNA, 12 nt, Human herpesvirus 3
guucuacugacu

SEQ ID NO: 301679 - RNA, 16 nt, Human herpesvirus 3
guucuucacuggacuu

SEQ ID NO: 301680 - RNA, 19 nt, Human herpesvirus 3
guugccccgguucggugau

SEQ ID NO: 301681 - RNA, 15 nt, Human herpesvirus 3
guugcgaauguaaua

SEQ ID NO: 301682 - RNA, 14 nt, Human herpesvirus 3
guugcuaguauuuu

SEQ ID NO: 301683 - RNA, 22 nt, Human herpesvirus 3
guugggggcgggguagacugug

SEQ ID NO: 301684 - RNA, 18 nt, Human herpesvirus 3
guuguaccguuugcacaa

SEQ ID NO: 301685 - RNA, 17 nt, Human herpesvirus 3
guugugucccgacaaaa

SEQ ID NO: 301686 - RNA, 21 nt, Human herpesvirus 3
guuuaaaaauacgugcguauu

SEQ ID NO: 301687 - RNA, 18 nt, Human herpesvirus 3
guuuaacauuuugcgcau

SEQ ID NO: 301688 - RNA, 21 nt, Human herpesvirus 3
guuuacccgguauuauguaua

SEQ ID NO: 301689 - RNA, 18 nt, Human herpesvirus 3
guuuauaauccuuaucuu

SEQ ID NO: 301690 - RNA, 17 nt, Human herpesvirus 3
guuuauaucuguuacau

SEQ ID NO: 301691 - RNA, 15 nt, Human herpesvirus 3
guuuaugaacagcaa

SEQ ID NO: 301692 - RNA, 18 nt, Human herpesvirus 3
guuuauuauaaaugugua

SEQ ID NO: 301693 - RNA, 17 nt, Human herpesvirus 3
guuucaaauaacugaac

SEQ ID NO: 301694 - RNA, 20 nt, Human herpesvirus 3
guuucauauguugagucauu

SEQ ID NO: 301695 - RNA, 17 nt, Human herpesvirus 3
guuugaaguguucuaaa

SEQ ID NO: 301696 - RNA, 23 nt, Human herpesvirus 3
guuuggugcacucuaccaaaaaa

SEQ ID NO: 301697 - RNA, 23 nt, Human herpesvirus 3
guuuguaucaauaaauuuacaua

SEQ ID NO: 301698 - RNA, 16 nt, Human herpesvirus 3
guuuguauuuauacac

SEQ ID NO: 301699 - RNA, 21 nt, Human herpesvirus 3
guuuuaaaagccguucuguga

SEQ ID NO: 301700 - RNA, 14 nt, Human herpesvirus 3
guuuuaauuccaau

SEQ ID NO: 301701 - RNA, 12 nt, Human herpesvirus 3
guuuuaguaaaa

SEQ ID NO: 301702 - RNA, 22 nt, Human herpesvirus 3
guuuugaauuauuaaacuuaag

SEQ ID NO: 301703 - RNA, 15 nt, Human herpesvirus 3
guuuugguguuacau

SEQ ID NO: 301704 - RNA, 12 nt, Human herpesvirus 3
uaaaaacauaca

SEQ ID NO: 301705 - RNA, 18 nt, Human herpesvirus 3
uaaaaauguugucugcca

SEQ ID NO: 301706 - RNA, 21 nt, Human herpesvirus 3
uaaaaauguugucugccaaac

SEQ ID NO: 301707 - RNA, 13 nt, Human herpesvirus 3
uaaaacacuguca

SEQ ID NO: 301708 - RNA, 20 nt, Human herpesvirus 3
uaaaagacagucgugguuug

SEQ ID NO: 301709 - RNA, 16 nt, Human herpesvirus 3
uaaaagcguacuguuu

SEQ ID NO: 301710 - RNA, 16 nt, Human herpesvirus 3
uaaaaucacuuugaua

SEQ ID NO: 301711 - RNA, 17 nt, Human herpesvirus 3
uaaaaucacuuugauau

SEQ ID NO: 301712 - RNA, 14 nt, Human herpesvirus 3
uaaaauucuaacaa

SEQ ID NO: 301713 - RNA, 22 nt, Human herpesvirus 3
uaaacaacauggcuaugccauu

SEQ ID NO: 301714 - RNA, 15 nt, Human herpesvirus 3
uaaacauaacagucu

SEQ ID NO: 301715 - RNA, 16 nt, Human herpesvirus 3
uaaacauccacagucu

SEQ ID NO: 301716 - RNA, 13 nt, Human herpesvirus 3
uaaacgcauuaau

SEQ ID NO: 301717 - RNA, 23 nt, Human herpesvirus 3
uaaacgugcauuuuaaaaauacc

SEQ ID NO: 301718 - RNA, 22 nt, Human herpesvirus 3
uaaacguucuaauaaaaacauc

SEQ ID NO: 301719 - RNA, 10 nt, Human herpesvirus 3
uaaacuauau

SEQ ID NO: 301720 - RNA, 21 nt, Human herpesvirus 3
uaaacuguuuaaauaguacca

SEQ ID NO: 301721 - RNA, 21 nt, Human herpesvirus 3
uaaaggcacgcugugugcaua

SEQ ID NO: 301722 - RNA, 17 nt, Human herpesvirus 3
uaaagguccauuuaaca

SEQ ID NO: 301723 - RNA, 18 nt, Human herpesvirus 3
uaaauaaaaccuuaccac

SEQ ID NO: 301724 - RNA, 22 nt, Human herpesvirus 3
uagccagccaacacaguguuca

SEQ ID NO: 301725 - RNA, 22 nt, Human herpesvirus 3
uagcuguaaaaaccauggacag

SEQ ID NO: 301726 - RNA, 15 nt, Human herpesvirus 3
uaggggggguuacau

SEQ ID NO: 301727 - RNA, 22 nt, Human herpesvirus 3
uaggguaaccaucuagaugaca

SEQ ID NO: 301728 - RNA, 23 nt, Human herpesvirus 3
uaggguacaaacgcgcaauguuu

SEQ ID NO: 301729 - RNA, 14 nt, Human herpesvirus 3
uaggucaacauaca

SEQ ID NO: 301730 - RNA, 15 nt, Human herpesvirus 3
uaggucaacauacau

SEQ ID NO: 301731 - RNA, 19 nt, Human herpesvirus 3
uagguucggcaaaucuaac

SEQ ID NO: 301732 - RNA, 15 nt, Human herpesvirus 3
uagguuuugucuuaa

SEQ ID NO: 301733 - RNA, 16 nt, Human herpesvirus 3
uaguaccacgugguau

SEQ ID NO: 301734 - RNA, 21 nt, Human herpesvirus 3
uagucaauguuuaaagacagc

SEQ ID NO: 301735 - RNA, 13 nt, Human herpesvirus 3
uauaaaacacuca

SEQ ID NO: 301736 - RNA, 16 nt, Human herpesvirus 3
uauaaacguauucucu

SEQ ID NO: 301737 - RNA, 22 nt, Human herpesvirus 3
uauaaauguguauuauauguca

SEQ ID NO: 301738 - RNA, 23 nt, Human herpesvirus 3
uauaaauguguauuauaugucac

SEQ ID NO: 301739 - RNA, 12 nt, Human herpesvirus 3
uauaacauacau

SEQ ID NO: 301740 - RNA, 18 nt, Human herpesvirus 3
uauaacccggucugcuca

SEQ ID NO: 301741 - RNA, 13 nt, Human herpesvirus 3
uauaacguauaac

SEQ ID NO: 301742 - RNA, 17 nt, Human herpesvirus 3
uauaaggggcuugagau

SEQ ID NO: 301743 - RNA, 22 nt, Human herpesvirus 3
uauaauauuaacaggauuugcu

SEQ ID NO: 301744 - RNA, 13 nt, Human herpesvirus 3
uauaaucuccagu

SEQ ID NO: 301745 - RNA, 18 nt, Human herpesvirus 3
uauaaucuccagugccag

SEQ ID NO: 301746 - RNA, 23 nt, Human herpesvirus 3
uauaauuacgcaguaacgguuua

SEQ ID NO: 301747 - RNA, 14 nt, Human herpesvirus 3
uauacaaacaaagc

SEQ ID NO: 301748 - RNA, 23 nt, Human herpesvirus 3
uauacaacacgaugcgcugguau

SEQ ID NO: 301749 - RNA, 15 nt, Human herpesvirus 3
uauacaccguguaac

SEQ ID NO: 301750 - RNA, 20 nt, Human herpesvirus 3
uauacccgauaauauacaaa

SEQ ID NO: 301751 - RNA, 15 nt, Human herpesvirus 3
uauaccggaguauaa

SEQ ID NO: 301752 - RNA, 18 nt, Human herpesvirus 3
uauacguagaauuuacag

SEQ ID NO: 301753 - RNA, 23 nt, Human herpesvirus 3
uauacguuucaaauaacugaaca

SEQ ID NO: 301754 - RNA, 22 nt, Human herpesvirus 3
uauacuuggagaugcaaccaag

SEQ ID NO: 301755 - RNA, 15 nt, Human herpesvirus 3
uauagacacgcuaca

SEQ ID NO: 301756 - RNA, 22 nt, Human herpesvirus 3
uauagcccccaacuuccccaua

SEQ ID NO: 301757 - RNA, 15 nt, Human herpesvirus 3
uauauauauguucca

SEQ ID NO: 301758 - RNA, 19 nt, Human herpesvirus 3
uauauauguaacguuugua

SEQ ID NO: 301759 - RNA, 17 nt, Human herpesvirus 3
uauaucuggaacccaag

SEQ ID NO: 301760 - RNA, 21 nt, Human herpesvirus 3
uauaucuuccgugugguccau

SEQ ID NO: 301761 - RNA, 23 nt, Human herpesvirus 3
uauaugcgucauuuauuaccaca

SEQ ID NO: 301762 - RNA, 15 nt, Human herpesvirus 3
uauauggacauccau

SEQ ID NO: 301763 - RNA, 15 nt, Human herpesvirus 3
uauaugucaccaaag

SEQ ID NO: 301764 - RNA, 14 nt, Human herpesvirus 3
uauauuagcacuau

SEQ ID NO: 301765 - RNA, 13 nt, Human herpesvirus 3
uauauucacaugc

SEQ ID NO: 301766 - RNA, 15 nt, Human herpesvirus 3
uauauuuuacauaca

SEQ ID NO: 301767 - RNA, 19 nt, Human herpesvirus 3
uaucaacgacauacauuag

SEQ ID NO: 301768 - RNA, 16 nt, Human herpesvirus 3
uaucaauaaauuuaca

SEQ ID NO: 301769 - RNA, 20 nt, Human herpesvirus 3
uaucaggagauacuauggua

SEQ ID NO: 301770 - RNA, 19 nt, Human herpesvirus 3
uaucauugaagaugauuau

SEQ ID NO: 301771 - RNA, 16 nt, Human herpesvirus 3
uauccaagaugaaaua

SEQ ID NO: 301772 - RNA, 13 nt, Human herpesvirus 3
uauccaaugggga

SEQ ID NO: 301773 - RNA, 23 nt, Human herpesvirus 3
uauccauugccguauuaaccuac

SEQ ID NO: 301774 - RNA, 13 nt, Human herpesvirus 3
uaucccacaugua

SEQ ID NO: 301775 - RNA, 19 nt, Human herpesvirus 3
uaucccggauuuuauauua

SEQ ID NO: 301776 - RNA, 15 nt, Human herpesvirus 3
uaucgcaauguuuuc

SEQ ID NO: 301777 - RNA, 18 nt, Human herpesvirus 3
uaucuuccguguggucca

SEQ ID NO: 301778 - RNA, 15 nt, Human herpesvirus 3
uaucuuugcugucaa

SEQ ID NO: 301779 - RNA, 15 nt, Human herpesvirus 3
uaugacauaugcgca

SEQ ID NO: 301780 - RNA, 18 nt, Human herpesvirus 3
uaugauauaagguguuaa

SEQ ID NO: 301781 - RNA, 20 nt, Human herpesvirus 3
uaugaucauuaaacgugcau

SEQ ID NO: 301782 - RNA, 20 nt, Human herpesvirus 3
uaugaucguccuucaacaca

SEQ ID NO: 301783 - RNA, 16 nt, Human herpesvirus 3
uaugggauuauggaag

SEQ ID NO: 301784 - RNA, 20 nt, Human herpesvirus 3
uaugggauuauggaagucca

SEQ ID NO: 301785 - RNA, 21 nt, Human herpesvirus 3
uauguaaauuaugaucauuaa

SEQ ID NO: 301786 - RNA, 13 nt, Human herpesvirus 3
uaugugauucuau

SEQ ID NO: 301787 - RNA, 12 nt, Human herpesvirus 3
uauuaaagcugu

SEQ ID NO: 301788 - RNA, 16 nt, Human herpesvirus 3
uauuaaauaaacuaua

SEQ ID NO: 301789 - RNA, 14 nt, Human herpesvirus 3
uauuaaugguacaa

SEQ ID NO: 301790 - RNA, 15 nt, Human herpesvirus 3
uauuaccaacuguau

SEQ ID NO: 301791 - RNA, 21 nt, Human herpesvirus 3
uauuaucgggcgacaauccaa

SEQ ID NO: 301792 - RNA, 16 nt, Human herpesvirus 3
uauugagaaaaccaaa

SEQ ID NO: 301793 - RNA, 17 nt, Human herpesvirus 3
uauugagaaaaccaaag

SEQ ID NO: 301794 - RNA, 18 nt, Human herpesvirus 3
uauuggcuccacuccagg

SEQ ID NO: 301795 - RNA, 15 nt, Human herpesvirus 3
uauuuaaacuaaaga

SEQ ID NO: 301796 - RNA, 15 nt, Human herpesvirus 3
uauuucaugcuugua

SEQ ID NO: 301797 - RNA, 23 nt, Human herpesvirus 3
uauuucccaacgcauaaccagcg

SEQ ID NO: 301798 - RNA, 21 nt, Human herpesvirus 3
uauuuguugguuaacaccgcc

SEQ ID NO: 301799 - RNA, 13 nt, Human herpesvirus 3
uauuuuacauaca

SEQ ID NO: 301800 - RNA, 14 nt, Human herpesvirus 3
uauuuuauauaggu

SEQ ID NO: 301801 - RNA, 14 nt, Human herpesvirus 3
uauuuucaguauua

SEQ ID NO: 301802 - RNA, 15 nt, Human herpesvirus 3
uauuuugcagccaug

SEQ ID NO: 301803 - RNA, 15 nt, Human herpesvirus 3
uauuuugcauaauau

SEQ ID NO: 301804 - RNA, 12 nt, Human herpesvirus 3
ucaaaacauacu

SEQ ID NO: 301805 - RNA, 21 nt, Human herpesvirus 3
ucaaagaacucugaguucaaa

SEQ ID NO: 301806 - RNA, 14 nt, Human herpesvirus 3
ucaaauaacugaac

SEQ ID NO: 301807 - RNA, 16 nt, Human herpesvirus 3
ucaaauucaacuaaug

SEQ ID NO: 301808 - RNA, 23 nt, Human herpesvirus 3
ucaacaaaugcgcguuccaaauu

SEQ ID NO: 301809 - RNA, 14 nt, Human herpesvirus 3
ucaacgacauacau

SEQ ID NO: 301810 - RNA, 15 nt, Human herpesvirus 3
ucaacgacauacauu

SEQ ID NO: 301811 - RNA, 22 nt, Human herpesvirus 3
ucaagugagguguccugugauc

SEQ ID NO: 301812 - RNA, 12 nt, Human herpesvirus 3
ucaaguugcaug

SEQ ID NO: 301813 - RNA, 14 nt, Human herpesvirus 3
ucaauaaauguacu

SEQ ID NO: 301814 - RNA, 21 nt, Human herpesvirus 3
ucaauauuuauacaagcauaa

SEQ ID NO: 301815 - RNA, 13 nt, Human herpesvirus 3
ucaauggcgguga

SEQ ID NO: 301816 - RNA, 17 nt, Human herpesvirus 3
ucacgcucaaugaacag

SEQ ID NO: 301817 - RNA, 14 nt, Human herpesvirus 3
ucacuauaaaaaca

SEQ ID NO: 301818 - RNA, 17 nt, Human herpesvirus 3
ucacuauaaacguauuc

SEQ ID NO: 301819 - RNA, 13 nt, Human herpesvirus 3
ucagaaacacuug

SEQ ID NO: 301820 - RNA, 16 nt, Human herpesvirus 3
ucagaaagauugcagu

SEQ ID NO: 301821 - RNA, 13 nt, Human herpesvirus 3
ucagaagauauaa

SEQ ID NO: 301822 - RNA, 23 nt, Human herpesvirus 3
ucagagguauuuuauuauauucu

SEQ ID NO: 301823 - RNA, 13 nt, Human herpesvirus 3
ucaggucugucau

SEQ ID NO: 301824 - RNA, 15 nt, Human herpesvirus 3
ucaggucuguuuacc

SEQ ID NO: 301825 - RNA, 18 nt, Human herpesvirus 3
ucaguaaauuucaaugau

SEQ ID NO: 301826 - RNA, 19 nt, Human herpesvirus 3
ucagucuaaaaauaauguu

SEQ ID NO: 301827 - RNA, 15 nt, Human herpesvirus 3
ucauauauacccauc

SEQ ID NO: 301828 - RNA, 14 nt, Human herpesvirus 3
ucaucaacguuaag

SEQ ID NO: 301829 - RNA, 19 nt, Human herpesvirus 3
ucaucacccgugagauuau

SEQ ID NO: 301830 - RNA, 14 nt, Human herpesvirus 3
ucaucauacgcauu

SEQ ID NO: 301831 - RNA, 17 nt, Human herpesvirus 3
ucaucauacgcauuuac

SEQ ID NO: 301832 - RNA, 16 nt, Human herpesvirus 3
ucaucgaaaagacugu

SEQ ID NO: 301833 - RNA, 14 nt, Human herpesvirus 3
ucaucugauuugca

SEQ ID NO: 301834 - RNA, 15 nt, Human herpesvirus 3
ucaucugauuugcaa

SEQ ID NO: 301835 - RNA, 13 nt, Human herpesvirus 3
ucaugcuuguaaa

SEQ ID NO: 301836 - RNA, 12 nt, Human herpesvirus 3
ucaugcuuguca

SEQ ID NO: 301837 - RNA, 22 nt, Human herpesvirus 3
ucaugcuugucaaaacauacua

SEQ ID NO: 301838 - RNA, 23 nt, Human herpesvirus 3
ucaugcuugucaaaacauacuaa

SEQ ID NO: 301839 - RNA, 14 nt, Human herpesvirus 3
ugaauuuaacauag

SEQ ID NO: 301840 - RNA, 22 nt, Human herpesvirus 3
ugacaaaaugacaacgguuuca

SEQ ID NO: 301841 - RNA, 18 nt, Human herpesvirus 3
ugacagaccggcuguuga

SEQ ID NO: 301842 - RNA, 18 nt, Human herpesvirus 3
ugaccaacgcuuugaucu

SEQ ID NO: 301843 - RNA, 17 nt, Human herpesvirus 3
ugacccugcuaaccaua

SEQ ID NO: 301844 - RNA, 15 nt, Human herpesvirus 3
ugaccgcuauuuuca

SEQ ID NO: 301845 - RNA, 12 nt, Human herpesvirus 3
ugacuauauucc

SEQ ID NO: 301846 - RNA, 22 nt, Human herpesvirus 3
ugacuugacgcgaacaccgcug

SEQ ID NO: 301847 - RNA, 23 nt, Human herpesvirus 3
ugagauacacauggauaggucau

SEQ ID NO: 301848 - RNA, 21 nt, Human herpesvirus 3
ugagaugagcagcgcagucua

SEQ ID NO: 301849 - RNA, 14 nt, Human herpesvirus 3
ugagcaucucugga

SEQ ID NO: 301850 - RNA, 16 nt, Human herpesvirus 3
ugauacacauaugcac

SEQ ID NO: 301851 - RNA, 17 nt, Human herpesvirus 3
ugauagcgccaaaaugg

SEQ ID NO: 301852 - RNA, 17 nt, Human herpesvirus 3
ugauauaagguguuaau

SEQ ID NO: 301853 - RNA, 19 nt, Human herpesvirus 3
ugauccacguaauuugccc

SEQ ID NO: 301854 - RNA, 16 nt, Human herpesvirus 3
ugaucgcucguauaac

SEQ ID NO: 301855 - RNA, 15 nt, Human herpesvirus 3
ugaucugguaaaugu

SEQ ID NO: 301856 - RNA, 23 nt, Human herpesvirus 3
ugaugaucccaauaaacggcaua

SEQ ID NO: 301857 - RNA, 15 nt, Human herpesvirus 3
ugauggacuugaaaa

SEQ ID NO: 301858 - RNA, 22 nt, Human herpesvirus 3
ugauguucccccggcguggcaa

SEQ ID NO: 301859 - RNA, 13 nt, Human herpesvirus 3
ugauuacuacaac

SEQ ID NO: 301860 - RNA, 18 nt, Human herpesvirus 3
ugauuaucaauacuugga

SEQ ID NO: 301861 - RNA, 21 nt, Human herpesvirus 3
ugauucaagugagguguccug

SEQ ID NO: 301862 - RNA, 13 nt, Human herpesvirus 3
ugcaaccacggug

SEQ ID NO: 301863 - RNA, 16 nt, Human herpesvirus 3
ugcacaacaaaagcua

SEQ ID NO: 301864 - RNA, 19 nt, Human herpesvirus 3
ugcacugaaccacaaccaa

SEQ ID NO: 301865 - RNA, 18 nt, Human herpesvirus 3
ugcacuuuuaaagcaucu

SEQ ID NO: 301866 - RNA, 13 nt, Human herpesvirus 3
ugcauaagcucug

SEQ ID NO: 301867 - RNA, 15 nt, Human herpesvirus 3
ugcauaagcucugua

SEQ ID NO: 301868 - RNA, 14 nt, Human herpesvirus 3
ugcauauccagcaa

SEQ ID NO: 301869 - RNA, 21 nt, Human herpesvirus 3
ugcauauccagcaauguugaa

SEQ ID NO: 301870 - RNA, 19 nt, Human herpesvirus 3
ugcaucccccauuguauga

SEQ ID NO: 301871 - RNA, 18 nt, Human herpesvirus 3
ugcaucgagguuguccac

SEQ ID NO: 301872 - RNA, 22 nt, Human herpesvirus 3
ugcaucgcauaggguguuauaa

SEQ ID NO: 301873 - RNA, 13 nt, Human herpesvirus 3
ugccacauuuacc

SEQ ID NO: 301874 - RNA, 14 nt, Human herpesvirus 3
ugccauuugagaua

SEQ ID NO: 301875 - RNA, 19 nt, Human herpesvirus 3
ugccauuuggacacuacuc

SEQ ID NO: 301876 - RNA, 14 nt, Human herpesvirus 3
ugccccaaaccacu

SEQ ID NO: 301877 - RNA, 22 nt, Human herpesvirus 3
ugccgagacugacccuaugaca

SEQ ID NO: 301878 - RNA, 23 nt, Human herpesvirus 3
ugccggcgaacgugauuugccca

SEQ ID NO: 301879 - RNA, 18 nt, Human herpesvirus 3
ugccguauuuugcauaau

SEQ ID NO: 301880 - RNA, 16 nt, Human herpesvirus 3
ugccgucaaugcaacu

SEQ ID NO: 301881 - RNA, 20 nt, Human herpesvirus 3
ugccgucaaugcaacuauua

SEQ ID NO: 301882 - RNA, 20 nt, Human herpesvirus 3
ugccguggaccccuguauua

SEQ ID NO: 301883 - RNA, 22 nt, Human herpesvirus 3
ugccuaggaacgcgacaugacc

SEQ ID NO: 301884 - RNA, 22 nt, Human herpesvirus 3
ugccucggaugcaccgguccaa

SEQ ID NO: 301885 - RNA, 14 nt, Human herpesvirus 3
ugccugagguuuag

SEQ ID NO: 301886 - RNA, 21 nt, Human herpesvirus 3
ugcgaagcugccgucaaugca

SEQ ID NO: 301887 - RNA, 21 nt, Human herpesvirus 3
ugcgaauucuuagaaaagcca

SEQ ID NO: 301888 - RNA, 15 nt, Human herpesvirus 3
ugcgauguauacugg

SEQ ID NO: 301889 - RNA, 16 nt, Human herpesvirus 3
ugcgcaaaauguuaaa

SEQ ID NO: 301890 - RNA, 13 nt, Human herpesvirus 3
ugcgcagauguac

SEQ ID NO: 301891 - RNA, 17 nt, Human herpesvirus 3
ugcgccguauaugguau

SEQ ID NO: 301892 - RNA, 15 nt, Human herpesvirus 3
ugcggugcuguuuga

SEQ ID NO: 301893 - RNA, 19 nt, Human herpesvirus 3
ugcgucauuuauuaccaca

SEQ ID NO: 301894 - RNA, 16 nt, Human herpesvirus 3
ugcuacgucgauguga

SEQ ID NO: 301895 - RNA, 22 nt, Human herpesvirus 3
ugcuccugaagacuccaguaua

SEQ ID NO: 301896 - RNA, 17 nt, Human herpesvirus 3
ugcucguauauacaugu

SEQ ID NO: 301897 - RNA, 19 nt, Human herpesvirus 3
ugcucugcaaauacaauaa

SEQ ID NO: 301898 - RNA, 23 nt, Human herpesvirus 3
ugcuggguuauuuaacaucccag

SEQ ID NO: 301899 - RNA, 16 nt, Human herpesvirus 3
ugcuuauauuuuacau

SEQ ID NO: 301900 - RNA, 14 nt, Human herpesvirus 3
ugcuucaauuccaa

SEQ ID NO: 301901 - RNA, 13 nt, Human herpesvirus 3
ugcuugacugugc

SEQ ID NO: 301902 - RNA, 17 nt, Human herpesvirus 3
ugcuuggggguuuacaa

SEQ ID NO: 301903 - RNA, 17 nt, Human herpesvirus 3
ugcuuguaaaacauauc

SEQ ID NO: 301904 - RNA, 18 nt, Human herpesvirus 3
ugcuuguaaaacauauca

SEQ ID NO: 301905 - RNA, 19 nt, Human herpesvirus 3
ugcuuguaaaacauaucaa

SEQ ID NO: 301906 - RNA, 19 nt, Human herpesvirus 3
ugcuugucaaaacauacua

SEQ ID NO: 301907 - RNA, 21 nt, Human herpesvirus 3
ugcuugucaaaacauacuaau

SEQ ID NO: 301908 - RNA, 13 nt, Human herpesvirus 3
uggaaacuguugg

SEQ ID NO: 301909 - RNA, 16 nt, Human herpesvirus 3
uggaauuaauggagua

SEQ ID NO: 301910 - RNA, 16 nt, Human herpesvirus 3
uggacgcaacgcagau

SEQ ID NO: 301911 - RNA, 13 nt, Human herpesvirus 3
uggacgcauuuga

SEQ ID NO: 301912 - RNA, 23 nt, Human herpesvirus 3
uggacuguuuaacggaagaugaa

SEQ ID NO: 301913 - RNA, 16 nt, Human herpesvirus 3
uggacuuaccuuuauu

SEQ ID NO: 301914 - RNA, 22 nt, Human herpesvirus 3
uggacuugaaaaaucauuauga

SEQ ID NO: 301915 - RNA, 14 nt, Human herpesvirus 3
uggacuuuaccgga

SEQ ID NO: 301916 - RNA, 18 nt, Human herpesvirus 3
uggaguauauuagcacua

SEQ ID NO: 301917 - RNA, 18 nt, Human herpesvirus 3
uggauccggcaugcauug

SEQ ID NO: 301918 - RNA, 16 nt, Human herpesvirus 3
uggaugaagauugucc

SEQ ID NO: 301919 - RNA, 14 nt, Human herpesvirus 3
uggauuauauccau

SEQ ID NO: 301920 - RNA, 21 nt, Human herpesvirus 3
uggccuugggacaucaaccag

SEQ ID NO: 301921 - RNA, 13 nt, Human herpesvirus 3
uggcuaugccauu

SEQ ID NO: 301922 - RNA, 14 nt, Human herpesvirus 3
uggcuaugccauuu

SEQ ID NO: 301923 - RNA, 21 nt, Human herpesvirus 3
ugguacauuaaucgcugauaa

SEQ ID NO: 301924 - RNA, 23 nt, Human herpesvirus 3
uggugauucaagugagguguccu

SEQ ID NO: 301925 - RNA, 20 nt, Human herpesvirus 3
uggugcacucuaccaaaaaa

SEQ ID NO: 301926 - RNA, 21 nt, Human herpesvirus 3
uggugcgacaaaggcauuugu

SEQ ID NO: 301927 - RNA, 22 nt, Human herpesvirus 3
ugguuagagaaagcggacacau

SEQ ID NO: 301928 - RNA, 15 nt, Human herpesvirus 3
ugguuagauaccuaa

SEQ ID NO: 301929 - RNA, 14 nt, Human herpesvirus 3
uguaaaacauauca

SEQ ID NO: 301930 - RNA, 15 nt, Human herpesvirus 3
uguaaaacauaucaa

SEQ ID NO: 301931 - RNA, 15 nt, Human herpesvirus 3
uguaaaggaucucca

SEQ ID NO: 301932 - RNA, 16 nt, Human herpesvirus 3
uguaaaggaucuccac

SEQ ID NO: 301933 - RNA, 22 nt, Human herpesvirus 3
uguaacagaggacgccgauaaa

SEQ ID NO: 301934 - RNA, 20 nt, Human herpesvirus 3
uguaacaugcgcuacuaugu

SEQ ID NO: 301935 - RNA, 17 nt, Human herpesvirus 3
uguaauucgugugcaau

SEQ ID NO: 301936 - RNA, 21 nt, Human herpesvirus 3
uguaauucgugugcaauaacc

SEQ ID NO: 301937 - RNA, 20 nt, Human herpesvirus 3
uguaauuuaggaaccgaaca

SEQ ID NO: 301938 - RNA, 18 nt, Human herpesvirus 3
uguacaauugucuguaua

SEQ ID NO: 301939 - RNA, 15 nt, Human herpesvirus 3
uguaccucuaccgca

SEQ ID NO: 301940 - RNA, 15 nt, Human herpesvirus 3
uguacguaaccauau

SEQ ID NO: 301941 - RNA, 23 nt, Human herpesvirus 3
uguacuuguaaacccccaagcaa

SEQ ID NO: 301942 - RNA, 15 nt, Human herpesvirus 3
uguagucuuugaucc

SEQ ID NO: 301943 - RNA, 23 nt, Human herpesvirus 3
uguauauacaacacgaugcgcug

SEQ ID NO: 301944 - RNA, 21 nt, Human herpesvirus 3
uguaucaauaaauuuacauaa

SEQ ID NO: 301945 - RNA, 21 nt, Human herpesvirus 3
uguaugcaaccacggugauua

SEQ ID NO: 301946 - RNA, 18 nt, Human herpesvirus 3
uguaugcugauacauaaa

SEQ ID NO: 301947 - RNA, 16 nt, Human herpesvirus 3
uguauuguaguacagg

SEQ ID NO: 301948 - RNA, 22 nt, Human herpesvirus 3
uguauuuggguguugugaucua

SEQ ID NO: 301949 - RNA, 16 nt, Human herpesvirus 3
ugucaaaacauacuaa

SEQ ID NO: 301950 - RNA, 22 nt, Human herpesvirus 3
ugucaagacaguagauguguug

SEQ ID NO: 301951 - RNA, 23 nt, Human herpesvirus 3
ugucacauauuauaaacuguuua

SEQ ID NO: 301952 - RNA, 22 nt, Human herpesvirus 3
ugucagguuauccaacuguuua

SEQ ID NO: 301953 - RNA, 17 nt, Human herpesvirus 3
uuaaccgcgacagccaa

SEQ ID NO: 301954 - RNA, 19 nt, Human herpesvirus 3
uuaagacauggccgugaau

SEQ ID NO: 301955 - RNA, 20 nt, Human herpesvirus 3
uuaagacauggccgugaaug

SEQ ID NO: 301956 - RNA, 20 nt, Human herpesvirus 3
uuaauacgcggucugccgug

SEQ ID NO: 301957 - RNA, 21 nt, Human herpesvirus 3
uuaauaggcgcuacuuuauau

SEQ ID NO: 301958 - RNA, 22 nt, Human herpesvirus 3
uuaaugguggaccgguuguaug

SEQ ID NO: 301959 - RNA, 20 nt, Human herpesvirus 3
uuaauugguuggucggucaa

SEQ ID NO: 301960 - RNA, 16 nt, Human herpesvirus 3
uuaauuuuauauacaa

SEQ ID NO: 301961 - RNA, 19 nt, Human herpesvirus 3
uuacaacccguggugaauu

SEQ ID NO: 301962 - RNA, 21 nt, Human herpesvirus 3
uuacacgggaaacuauuccaa

SEQ ID NO: 301963 - RNA, 21 nt, Human herpesvirus 3
uuacaggccggaguguccaga

SEQ ID NO: 301964 - RNA, 14 nt, Human herpesvirus 3
uuacauagauacuc

SEQ ID NO: 301965 - RNA, 20 nt, Human herpesvirus 3
uuacauugcuuucaaaccaa

SEQ ID NO: 301966 - RNA, 13 nt, Human herpesvirus 3
uuaccguacaaca

SEQ ID NO: 301967 - RNA, 20 nt, Human herpesvirus 3
uuacucuauaaguauggagu

SEQ ID NO: 301968 - RNA, 20 nt, Human herpesvirus 3
uuagaguguuuaacaaccau

SEQ ID NO: 301969 - RNA, 18 nt, Human herpesvirus 3
uuagcacuaucgucucaa

SEQ ID NO: 301970 - RNA, 18 nt, Human herpesvirus 3
uuauaauccuuaucuugc

SEQ ID NO: 301971 - RNA, 13 nt, Human herpesvirus 3
uuauacguuucaa

SEQ ID NO: 301972 - RNA, 17 nt, Human herpesvirus 3
uuauauauauguuccau

SEQ ID NO: 301973 - RNA, 13 nt, Human herpesvirus 3
uuauauccaucaa

SEQ ID NO: 301974 - RNA, 16 nt, Human herpesvirus 3
uuauauuuuacauaca

SEQ ID NO: 301975 - RNA, 16 nt, Human herpesvirus 3
uuaucaacgacauaca

SEQ ID NO: 301976 - RNA, 21 nt, Human herpesvirus 3
uuaucaauuguuuaugugauu

SEQ ID NO: 301977 - RNA, 23 nt, Human herpesvirus 3
uuaucacugugcccgcauaagau

SEQ ID NO: 301978 - RNA, 23 nt, Human herpesvirus 3
uuaucauugaagaugauuaucaa

SEQ ID NO: 301979 - RNA, 16 nt, Human herpesvirus 3
uuaucucgacguccaa

SEQ ID NO: 301980 - RNA, 18 nt, Human herpesvirus 3
uuaucugcaaucauaaau

SEQ ID NO: 301981 - RNA, 23 nt, Human herpesvirus 3
uuaugaacagcaacggaugcaua

SEQ ID NO: 301982 - RNA, 12 nt, Human herpesvirus 3
uuauggguggua

SEQ ID NO: 301983 - RNA, 23 nt, Human herpesvirus 3
uuauguccugggucgguucugac

SEQ ID NO: 301984 - RNA, 19 nt, Human herpesvirus 3
uuauuccaacgcccggcga

SEQ ID NO: 301985 - RNA, 18 nt, Human herpesvirus 3
uuauucucgcuugcagcu

SEQ ID NO: 301986 - RNA, 14 nt, Human herpesvirus 3
uuauuguauauaca

SEQ ID NO: 301987 - RNA, 16 nt, Human herpesvirus 3
uuauuuagugauuaca

SEQ ID NO: 301988 - RNA, 18 nt, Human herpesvirus 3
uuauuuuuuccguauuaa

SEQ ID NO: 301989 - RNA, 19 nt, Human herpesvirus 3
uucaaacggauacuacuaa

SEQ ID NO: 301990 - RNA, 14 nt, Human herpesvirus 3
uucaaaggacauuu

SEQ ID NO: 301991 - RNA, 11 nt, Human herpesvirus 3
uucaacuaaug

SEQ ID NO: 301992 - RNA, 19 nt, Human herpesvirus 3
uucaaguaaauaugugcau

SEQ ID NO: 301993 - RNA, 21 nt, Human herpesvirus 3
uucaaguuaaauaacauguca

SEQ ID NO: 301994 - RNA, 16 nt, Human herpesvirus 3
uucaauauuuauacaa

SEQ ID NO: 301995 - RNA, 17 nt, Human herpesvirus 3
uucaauauuuauacaag

SEQ ID NO: 301996 - RNA, 19 nt, Human herpesvirus 3
uucaaugauggacuugaaa

SEQ ID NO: 301997 - RNA, 16 nt, Human herpesvirus 3
uucagcggacgcugcu

SEQ ID NO: 301998 - RNA, 16 nt, Human herpesvirus 3
uucagcuuacagucca

SEQ ID NO: 301999 - RNA, 16 nt, Human herpesvirus 3
uucaguaacuuaacaa

SEQ ID NO: 302000 - RNA, 14 nt, Human herpesvirus 3
uucagucuaaaaau

SEQ ID NO: 302001 - RNA, 21 nt, Human herpesvirus 3
uucaugcuuguaaaacauauc

SEQ ID NO: 302002 - RNA, 18 nt, Human herpesvirus 3
uucauuuuauuaucccag

SEQ ID NO: 302003 - RNA, 21 nt, Human herpesvirus 3
uuccaauauuugauccacaac

SEQ ID NO: 302004 - RNA, 16 nt, Human herpesvirus 3
uuccacccccucuuaa

SEQ ID NO: 302005 - RNA, 21 nt, Human herpesvirus 3
uucccaacgcauaaccagcga

SEQ ID NO: 302006 - RNA, 19 nt, Human herpesvirus 3
uuccccacaccguuuaccu

SEQ ID NO: 302007 - RNA, 15 nt, Human herpesvirus 3
uucccccacauacaa

SEQ ID NO: 302008 - RNA, 22 nt, Human herpesvirus 3
uuccccggaaauauaacauaca

SEQ ID NO: 302009 - RNA, 17 nt, Human herpesvirus 3
uuccccuuuagcuauag

SEQ ID NO: 302010 - RNA, 23 nt, Human herpesvirus 3
uucccgaaagcccgaucccgccg

SEQ ID NO: 302011 - RNA, 22 nt, Human herpesvirus 3
uuccgaaagcagucaacccauc

SEQ ID NO: 302012 - RNA, 15 nt, Human herpesvirus 3
uuccgaaucucguaa

SEQ ID NO: 302013 - RNA, 13 nt, Human herpesvirus 3
uucgugugcaaua

SEQ ID NO: 302014 - RNA, 19 nt, Human herpesvirus 3
uucuacaccuuugcaugac

SEQ ID NO: 302015 - RNA, 16 nt, Human herpesvirus 3
uucucaucaaagucaa

SEQ ID NO: 302016 - RNA, 11 nt, Human herpesvirus 3
uucugcauaag

SEQ ID NO: 302017 - RNA, 17 nt, Human herpesvirus 3
uucugcauaagcucugu

SEQ ID NO: 302018 - RNA, 19 nt, Human herpesvirus 3
uucuguaaaggaucuccac

SEQ ID NO: 302019 - RNA, 20 nt, Human herpesvirus 3
uugaaacgucguuauauuca

SEQ ID NO: 302020 - RNA, 15 nt, Human herpesvirus 3
uugaaccaaauccac

SEQ ID NO: 302021 - RNA, 13 nt, Human herpesvirus 3
uugaagacuuuga

SEQ ID NO: 302022 - RNA, 20 nt, Human herpesvirus 3
uugaagacuuugacuuugau

SEQ ID NO: 302023 - RNA, 21 nt, Human herpesvirus 3
uugaaggguggaauuguggag

SEQ ID NO: 302024 - RNA, 22 nt, Human herpesvirus 3
uugaaguguucuaaaacacugu

SEQ ID NO: 302025 - RNA, 12 nt, Human herpesvirus 3
aaaaaagugucu

SEQ ID NO: 302026 - RNA, 19 nt, Human herpesvirus 3
aaaaacaguacgcuuuuau

SEQ ID NO: 302027 - RNA, 13 nt, Human herpesvirus 3
aaaaacguuucug

SEQ ID NO: 302028 - RNA, 21 nt, Human herpesvirus 3
aaaaagucacuauaaacguau

SEQ ID NO: 302029 - RNA, 22 nt, Human herpesvirus 3
aaaaauaauguuggguauuuau

SEQ ID NO: 302030 - RNA, 13 nt, Human herpesvirus 3
aaaaauaccugag

SEQ ID NO: 302031 - RNA, 20 nt, Human herpesvirus 3
aaaaauaccuuuuucaugcu

SEQ ID NO: 302032 - RNA, 20 nt, Human herpesvirus 3
aaaaaugcggcggccguugc

SEQ ID NO: 302033 - RNA, 16 nt, Human herpesvirus 3
aaaacaaacauucaca

SEQ ID NO: 302034 - RNA, 16 nt, Human herpesvirus 3
aaaacacacaccagac

SEQ ID NO: 302035 - RNA, 18 nt, Human herpesvirus 3
aaaacaguacgcuuuuau

SEQ ID NO: 302036 - RNA, 16 nt, Human herpesvirus 3
aaaaccgcuauuucua

SEQ ID NO: 302037 - RNA, 12 nt, Human herpesvirus 3
aaaacgugcaug

SEQ ID NO: 302038 - RNA, 21 nt, Human herpesvirus 3
aaaacguuguguuuuaagugu

SEQ ID NO: 302039 - RNA, 13 nt, Human herpesvirus 3
aaaacguuuuaaa

SEQ ID NO: 302040 - RNA, 12 nt, Human herpesvirus 3
aaaagacugugu

SEQ ID NO: 302041 - RNA, 19 nt, Human herpesvirus 3
aaaagguuuauuuacuuua

SEQ ID NO: 302042 - RNA, 22 nt, Human herpesvirus 3
aaaaguacgcguauaucucgca

SEQ ID NO: 302043 - RNA, 22 nt, Human herpesvirus 3
aaaauaauagucaauguuuaaa

SEQ ID NO: 302044 - RNA, 18 nt, Human herpesvirus 3
aaaauguugucugccaaa

SEQ ID NO: 302045 - RNA, 18 nt, Human herpesvirus 3
aaaauuaaaacauugcug

SEQ ID NO: 302046 - RNA, 12 nt, Human herpesvirus 3
aaaauucuaaca

SEQ ID NO: 302047 - RNA, 19 nt, Human herpesvirus 3
aaaauugcgcgaguuccca

SEQ ID NO: 302048 - RNA, 13 nt, Human herpesvirus 3
aaacaaacauuca

SEQ ID NO: 302049 - RNA, 15 nt, Human herpesvirus 3
aaacaaugaaccauu

SEQ ID NO: 302050 - RNA, 14 nt, Human herpesvirus 3
aaacacaaccaguc

SEQ ID NO: 302051 - RNA, 20 nt, Human herpesvirus 3
aaacacgccgcaacaaccca

SEQ ID NO: 302052 - RNA, 21 nt, Human herpesvirus 3
aaacacggaauccgguauaca

SEQ ID NO: 302053 - RNA, 14 nt, Human herpesvirus 3
aaacauacaccgga

SEQ ID NO: 302054 - RNA, 18 nt, Human herpesvirus 3
aaacauccacagucugcu

SEQ ID NO: 302055 - RNA, 18 nt, Human herpesvirus 3
aaacaucugcauuacaga

SEQ ID NO: 302056 - RNA, 18 nt, Human herpesvirus 3
aaaccaaacacgccuuuu

SEQ ID NO: 302057 - RNA, 17 nt, Human herpesvirus 3
aaaccaauaucuuugca

SEQ ID NO: 302058 - RNA, 14 nt, Human herpesvirus 3
aaaccacuguucca

SEQ ID NO: 302059 - RNA, 13 nt, Human herpesvirus 3
aaacccacaagua

SEQ ID NO: 302060 - RNA, 14 nt, Human herpesvirus 3
aaacccccaagcaa

SEQ ID NO: 302061 - RNA, 19 nt, Human herpesvirus 3
aaacccuccggcaucucca

SEQ ID NO: 302062 - RNA, 14 nt, Human herpesvirus 3
aaacgaaaaccuuc

SEQ ID NO: 302063 - RNA, 16 nt, Human herpesvirus 3
aaacgacacaaaaaau

SEQ ID NO: 302064 - RNA, 20 nt, Human herpesvirus 3
aaacgcacacucgauuucaa

SEQ ID NO: 302065 - RNA, 16 nt, Human herpesvirus 3
aaacggauauuaacac

SEQ ID NO: 302066 - RNA, 17 nt, Human herpesvirus 3
aaacguggccauuacua

SEQ ID NO: 302067 - RNA, 23 nt, Human herpesvirus 3
aaacguucuaauaaaaacaucaa

SEQ ID NO: 302068 - RNA, 19 nt, Human herpesvirus 3
aaacuccuccuauauccca

SEQ ID NO: 302069 - RNA, 16 nt, Human herpesvirus 3
aaacucuguuguauca

SEQ ID NO: 302070 - RNA, 19 nt, Human herpesvirus 3
aaacugaauuuaacauagc

SEQ ID NO: 302071 - RNA, 16 nt, Human herpesvirus 3
aaagaaaacauugcag

SEQ ID NO: 302072 - RNA, 18 nt, Human herpesvirus 3
aaagaauuaaaaaagccg

SEQ ID NO: 302073 - RNA, 21 nt, Human herpesvirus 3
aaagacagcccgugugauguu

SEQ ID NO: 302074 - RNA, 18 nt, Human herpesvirus 3
aaagccguucugugaguu

SEQ ID NO: 302075 - RNA, 13 nt, Human herpesvirus 3
aaagcggacacau

SEQ ID NO: 302076 - RNA, 21 nt, Human herpesvirus 3
aaaggcauuugugucccauuu

SEQ ID NO: 302077 - RNA, 16 nt, Human herpesvirus 3
aaagggccucuaacaa

SEQ ID NO: 302078 - RNA, 22 nt, Human herpesvirus 3
aaaggguggacguuuuuccaca

SEQ ID NO: 302079 - RNA, 14 nt, Human herpesvirus 3
aaagguauauguca

SEQ ID NO: 302080 - RNA, 19 nt, Human herpesvirus 3
aaagguccauuuaacaauc

SEQ ID NO: 302081 - RNA, 16 nt, Human herpesvirus 3
aaaguauuacauucau

SEQ ID NO: 302082 - RNA, 22 nt, Human herpesvirus 3
aaaguuguuggcgcaugccauu

SEQ ID NO: 302083 - RNA, 23 nt, Human herpesvirus 3
aaaguuguuggcgcaugccauug

SEQ ID NO: 302084 - RNA, 15 nt, Human herpesvirus 3
aaauaaacguauaaa

SEQ ID NO: 302085 - RNA, 21 nt, Human herpesvirus 3
aaauaaauuuaaaacauacac

SEQ ID NO: 302086 - RNA, 15 nt, Human herpesvirus 3
aaauaacgccuuaaa

SEQ ID NO: 302087 - RNA, 20 nt, Human herpesvirus 3
aaauacacccgccaugagca

SEQ ID NO: 302088 - RNA, 21 nt, Human herpesvirus 3
aaauaccuauuucaugcuugu

SEQ ID NO: 302089 - RNA, 19 nt, Human herpesvirus 3
aaauaccuuuuucaugcuu

SEQ ID NO: 302090 - RNA, 17 nt, Human herpesvirus 3
aaauacgucccuaaguu

SEQ ID NO: 302091 - RNA, 21 nt, Human herpesvirus 3
aaauacgucccuaaguuugcc

SEQ ID NO: 302092 - RNA, 13 nt, Human herpesvirus 3
aaauacuaagccu

SEQ ID NO: 302093 - RNA, 21 nt, Human herpesvirus 3
aaauacuaagccucuguacaa

SEQ ID NO: 302094 - RNA, 16 nt, Human herpesvirus 3
aaauacuuccaucuac

SEQ ID NO: 302095 - RNA, 23 nt, Human herpesvirus 3
aaauauaaauuuuuugugucguu

SEQ ID NO: 302096 - RNA, 14 nt, Human herpesvirus 3
aaaucgucccauuu

SEQ ID NO: 302097 - RNA, 13 nt, Human herpesvirus 3
aaaugauauacac

SEQ ID NO: 302098 - RNA, 13 nt, Human herpesvirus 3
aaauguguaguuc

SEQ ID NO: 302099 - RNA, 21 nt, Human herpesvirus 3
aaauguguauuauaugucaca

SEQ ID NO: 302100 - RNA, 19 nt, Human herpesvirus 3
aaauuaacccaagacgaca

SEQ ID NO: 302101 - RNA, 17 nt, Human herpesvirus 3
aaauuaccguacaacaa

SEQ ID NO: 302102 - RNA, 13 nt, Human herpesvirus 3
aaauucaacuaau

SEQ ID NO: 302103 - RNA, 18 nt, Human herpesvirus 3
aaauucgcacaccuuccu

SEQ ID NO: 302104 - RNA, 18 nt, Human herpesvirus 3
aaauugcgcgaguuccca

SEQ ID NO: 302105 - RNA, 20 nt, Human herpesvirus 3
aaauugggggauuugggaga

SEQ ID NO: 302106 - RNA, 21 nt, Human herpesvirus 3
aaauugggggauuugggagaa

SEQ ID NO: 302107 - RNA, 16 nt, Human herpesvirus 3
aaauuuaaaacauaca

SEQ ID NO: 302108 - RNA, 14 nt, Human herpesvirus 3
aacaaaacccacgu

SEQ ID NO: 302109 - RNA, 20 nt, Human herpesvirus 3
aacaaacacucuacgcauuu

SEQ ID NO: 302110 - RNA, 21 nt, Human herpesvirus 3
aacaaagccugccgccugcaa

SEQ ID NO: 302111 - RNA, 20 nt, Human herpesvirus 3
aacaacgcguacgugccuag

SEQ ID NO: 302112 - RNA, 24 nt, Human herpesvirus 3
aacaagacgcgugaaauguaacua

SEQ ID NO: 302113 - RNA, 23 nt, Human herpesvirus 3
aacaaucccggggguacuugcac

SEQ ID NO: 302114 - RNA, 20 nt, Human herpesvirus 3
aacaauugagauacacaugg

SEQ ID NO: 302115 - RNA, 14 nt, Human herpesvirus 3
aacacaucuacugu

SEQ ID NO: 302116 - RNA, 21 nt, Human herpesvirus 3
aacacaucuacugucuugaca

SEQ ID NO: 302117 - RNA, 21 nt, Human herpesvirus 3
aacacccauacauauguucca

SEQ ID NO: 302118 - RNA, 18 nt, Human herpesvirus 3
aacaccgccccaccauca

SEQ ID NO: 302119 - RNA, 21 nt, Human herpesvirus 3
aacaccuguuuacacuugaau

SEQ ID NO: 302120 - RNA, 19 nt, Human herpesvirus 3
aacacgccgcaacaaccca

SEQ ID NO: 302121 - RNA, 13 nt, Human herpesvirus 3
aacacguaauugu

SEQ ID NO: 302122 - RNA, 15 nt, Human herpesvirus 3
aacagcgacuauguu

SEQ ID NO: 302123 - RNA, 15 nt, Human herpesvirus 3
aacaggauuugcuua

SEQ ID NO: 302124 - RNA, 21 nt, Human herpesvirus 3
aacaggcguguuuauguacau

SEQ ID NO: 302125 - RNA, 17 nt, Human herpesvirus 3
aacagucuaacaguacg

SEQ ID NO: 302126 - RNA, 21 nt, Human herpesvirus 3
aacauccauccgauaauacca

SEQ ID NO: 302127 - RNA, 12 nt, Human herpesvirus 3
aacauccgugaa

SEQ ID NO: 302128 - RNA, 15 nt, Human herpesvirus 3
aacauccuaguacag

SEQ ID NO: 302129 - RNA, 14 nt, Human herpesvirus 3
aacaugcauggaau

SEQ ID NO: 302130 - RNA, 13 nt, Human herpesvirus 3
aacauggcuacaa

SEQ ID NO: 302131 - RNA, 15 nt, Human herpesvirus 3
aacauggcuaugcca

SEQ ID NO: 302132 - RNA, 17 nt, Human herpesvirus 3
aacauggcuaugccauu

SEQ ID NO: 302133 - RNA, 14 nt, Human herpesvirus 3
aacauuuaucccaa

SEQ ID NO: 302134 - RNA, 20 nt, Human herpesvirus 3
aacauuugcgaugccguuua

SEQ ID NO: 302135 - RNA, 17 nt, Human herpesvirus 3
aaccaaacgacuccagc

SEQ ID NO: 302136 - RNA, 19 nt, Human herpesvirus 3
aaccaaagacgacuaugua

SEQ ID NO: 302137 - RNA, 12 nt, Human herpesvirus 3
aaccaacucgga

SEQ ID NO: 302138 - RNA, 14 nt, Human herpesvirus 3
aaccacaaccaagc

SEQ ID NO: 302139 - RNA, 17 nt, Human herpesvirus 3
aaccagcguuccgcgga

SEQ ID NO: 302140 - RNA, 21 nt, Human herpesvirus 3
aaccauaauuaucugucuugg

SEQ ID NO: 302141 - RNA, 17 nt, Human herpesvirus 3
aaccauagacuguucua

SEQ ID NO: 302142 - RNA, 18 nt, Human herpesvirus 3
aaccauagacuguucuac

SEQ ID NO: 302143 - RNA, 21 nt, Human herpesvirus 3
aaccgauuaugucaacauggc

SEQ ID NO: 302144 - RNA, 17 nt, Human herpesvirus 3
aaccgauuuaccguguu

SEQ ID NO: 302145 - RNA, 15 nt, Human herpesvirus 3
aaccuuaccacccau

SEQ ID NO: 302146 - RNA, 18 nt, Human herpesvirus 3
aacgacacaaaaaauuua

SEQ ID NO: 302147 - RNA, 17 nt, Human herpesvirus 3
aacgagagauccaauac

SEQ ID NO: 302148 - RNA, 15 nt, Human herpesvirus 3
aacgaucacaacaga

SEQ ID NO: 302149 - RNA, 16 nt, Human herpesvirus 3
aacgauuuuacagaaa

SEQ ID NO: 302150 - RNA, 14 nt, Human herpesvirus 3
aacgcgcaauguuu

SEQ ID NO: 302151 - RNA, 15 nt, Human herpesvirus 3
aacgcguacgugccu

SEQ ID NO: 302152 - RNA, 15 nt, Human herpesvirus 3
aacgcuggcauuucc

SEQ ID NO: 302153 - RNA, 23 nt, Human herpesvirus 3
aacgcuguuguugcuaguauuuu

SEQ ID NO: 302154 - RNA, 23 nt, Human herpesvirus 3
aagguauuuuuuuagaauacaau

SEQ ID NO: 302155 - RNA, 21 nt, Human herpesvirus 3
aagguguauuuuauuuaguga

SEQ ID NO: 302156 - RNA, 15 nt, Human herpesvirus 3
aagguguuucagugg

SEQ ID NO: 302157 - RNA, 21 nt, Human herpesvirus 3
aagguuaaauuuauaaaacac

SEQ ID NO: 302158 - RNA, 20 nt, Human herpesvirus 3
aagguuuauuuacuuuacaa

SEQ ID NO: 302159 - RNA, 21 nt, Human herpesvirus 3
aaguaccgggauaucucauac

SEQ ID NO: 302160 - RNA, 18 nt, Human herpesvirus 3
aaguagagcccacacaau

SEQ ID NO: 302161 - RNA, 15 nt, Human herpesvirus 3
aaguauuacauucau

SEQ ID NO: 302162 - RNA, 12 nt, Human herpesvirus 3
aaguauuuuccu

SEQ ID NO: 302163 - RNA, 21 nt, Human herpesvirus 3
aagucagauauuauuaacuua

SEQ ID NO: 302164 - RNA, 13 nt, Human herpesvirus 3
aagugacuauauu

SEQ ID NO: 302165 - RNA, 14 nt, Human herpesvirus 3
aagugcauauccag

SEQ ID NO: 302166 - RNA, 15 nt, Human herpesvirus 3
aaguuauaugaagca

SEQ ID NO: 302167 - RNA, 23 nt, Human herpesvirus 3
aauaaaagcccuguagagcgcau

SEQ ID NO: 302168 - RNA, 16 nt, Human herpesvirus 3
aauaaaaugauauaca

SEQ ID NO: 302169 - RNA, 15 nt, Human herpesvirus 3
aauaaacgaugacac

SEQ ID NO: 302170 - RNA, 22 nt, Human herpesvirus 3
aauaaacgaugacacaacccgc

SEQ ID NO: 302171 - RNA, 14 nt, Human herpesvirus 3
aauaacauaaccaa

SEQ ID NO: 302172 - RNA, 17 nt, Human herpesvirus 3
aauaauacacacuaccu

SEQ ID NO: 302173 - RNA, 18 nt, Human herpesvirus 3
aauaauuccgguugugcc

SEQ ID NO: 302174 - RNA, 22 nt, Human herpesvirus 3
aauaauuccgguugugccaaua

SEQ ID NO: 302175 - RNA, 16 nt, Human herpesvirus 3
aauacaauaaacauaa

SEQ ID NO: 302176 - RNA, 14 nt, Human herpesvirus 3
aauacacacuaccu

SEQ ID NO: 302177 - RNA, 15 nt, Human herpesvirus 3
aauaccuauuucaug

SEQ ID NO: 302178 - RNA, 15 nt, Human herpesvirus 3
aauaccuuuuucaug

SEQ ID NO: 302179 - RNA, 17 nt, Human herpesvirus 3
aauaccuuuuucaugcu

SEQ ID NO: 302180 - RNA, 20 nt, Human herpesvirus 3
aauaccuuuuucaugcuugu

SEQ ID NO: 302181 - RNA, 22 nt, Human herpesvirus 3
aauaccuuuuucaugcuuguca

SEQ ID NO: 302182 - RNA, 22 nt, Human herpesvirus 3
aauacuaagccucuguacaaca

SEQ ID NO: 302183 - RNA, 14 nt, Human herpesvirus 3
aauagagaguuaau

SEQ ID NO: 302184 - RNA, 22 nt, Human herpesvirus 3
aauagagcgccuaaauaugcua

SEQ ID NO: 302185 - RNA, 11 nt, Human herpesvirus 3
aauaggugaua

SEQ ID NO: 302186 - RNA, 15 nt, Human herpesvirus 3
aauaguuuugguaca

SEQ ID NO: 302187 - RNA, 16 nt, Human herpesvirus 3
aauauaaauaacauaa

SEQ ID NO: 302188 - RNA, 20 nt, Human herpesvirus 3
aauauaaauaacauaaccaa

SEQ ID NO: 302189 - RNA, 19 nt, Human herpesvirus 3
aauauauggcgccauccau

SEQ ID NO: 302190 - RNA, 22 nt, Human herpesvirus 3
aauauuaaaagccgccaagccu

SEQ ID NO: 302191 - RNA, 22 nt, Human herpesvirus 3
aauauuguagaacuaacucagc

SEQ ID NO: 302192 - RNA, 17 nt, Human herpesvirus 3
aaucaauccaaggaugu

SEQ ID NO: 302193 - RNA, 18 nt, Human herpesvirus 3
aaucagagaagcuauaca

SEQ ID NO: 302194 - RNA, 15 nt, Human herpesvirus 3
aaucaguugggauaa

SEQ ID NO: 302195 - RNA, 12 nt, Human herpesvirus 3
aauccaauguuu

SEQ ID NO: 302196 - RNA, 18 nt, Human herpesvirus 3
aauccaauguuugauauc

SEQ ID NO: 302197 - RNA, 17 nt, Human herpesvirus 3
aauccgguauacaugaa

SEQ ID NO: 302198 - RNA, 22 nt, Human herpesvirus 3
aauccuagaagcguuaccacag

SEQ ID NO: 302199 - RNA, 14 nt, Human herpesvirus 3
aauccuuaucuugc

SEQ ID NO: 302200 - RNA, 15 nt, Human herpesvirus 3
aauccuuaucuugca

SEQ ID NO: 302201 - RNA, 16 nt, Human herpesvirus 3
aauccuuaucuugcau

SEQ ID NO: 302202 - RNA, 21 nt, Human herpesvirus 3
aaucgcgauguuuuuaaucca

SEQ ID NO: 302203 - RNA, 20 nt, Human herpesvirus 3
aaucgcguuguuuccugugu

SEQ ID NO: 302204 - RNA, 23 nt, Human herpesvirus 3
aaucguacgauuagaaccaacuc

SEQ ID NO: 302205 - RNA, 18 nt, Human herpesvirus 3
aaucguaguaaaacggaa

SEQ ID NO: 302206 - RNA, 14 nt, Human herpesvirus 3
aaucuauuaucagg

SEQ ID NO: 302207 - RNA, 15 nt, Human herpesvirus 3
aaugauauacacaga

SEQ ID NO: 302208 - RNA, 15 nt, Human herpesvirus 3
aaugauggacuugaa

SEQ ID NO: 302209 - RNA, 16 nt, Human herpesvirus 3
aaugcaacccugucau

SEQ ID NO: 302210 - RNA, 17 nt, Human herpesvirus 3
aaugcaacccugucauc

SEQ ID NO: 302211 - RNA, 16 nt, Human herpesvirus 3
aaugcacugaaccaca

SEQ ID NO: 302212 - RNA, 22 nt, Human herpesvirus 3
aaugccauuuggacacuacuca

SEQ ID NO: 302213 - RNA, 16 nt, Human herpesvirus 3
aauggaguuaccacgg

SEQ ID NO: 302214 - RNA, 22 nt, Human herpesvirus 3
aauggaucagaaagauugcagu

SEQ ID NO: 302215 - RNA, 12 nt, Human herpesvirus 3
aauggugauuca

SEQ ID NO: 302216 - RNA, 22 nt, Human herpesvirus 3
aaugguguuuggugcacucuac

SEQ ID NO: 302217 - RNA, 18 nt, Human herpesvirus 3
aauguuaaacccugauaa

SEQ ID NO: 302218 - RNA, 19 nt, Human herpesvirus 3
aauguuaaacccugauaaa

SEQ ID NO: 302219 - RNA, 17 nt, Human herpesvirus 3
aauguugucugccaaac

SEQ ID NO: 302220 - RNA, 16 nt, Human herpesvirus 3
aauguuuuaguagaaa

SEQ ID NO: 302221 - RNA, 21 nt, Human herpesvirus 3
aauguuuugaaauacuaauau

SEQ ID NO: 302222 - RNA, 12 nt, Human herpesvirus 3
aauuaacacaga

SEQ ID NO: 302223 - RNA, 22 nt, Human herpesvirus 3
aauuaacccaagacgacauuaa

SEQ ID NO: 302224 - RNA, 22 nt, Human herpesvirus 3
aauuaaugcaacccugucauca

SEQ ID NO: 302225 - RNA, 13 nt, Human herpesvirus 3
aauuauauccaua

SEQ ID NO: 302226 - RNA, 18 nt, Human herpesvirus 3
acacaaucagaagauaua

SEQ ID NO: 302227 - RNA, 20 nt, Human herpesvirus 3
acacacgccgguacaauuac

SEQ ID NO: 302228 - RNA, 11 nt, Human herpesvirus 3
acacacuaccu

SEQ ID NO: 302229 - RNA, 20 nt, Human herpesvirus 3
acacaguccggacaauuaac

SEQ ID NO: 302230 - RNA, 15 nt, Human herpesvirus 3
acacauuacguucuc

SEQ ID NO: 302231 - RNA, 14 nt, Human herpesvirus 3
acacauugucauac

SEQ ID NO: 302232 - RNA, 23 nt, Human herpesvirus 3
acaccagaaucucuucauaugua

SEQ ID NO: 302233 - RNA, 14 nt, Human herpesvirus 3
acacccgacuuccu

SEQ ID NO: 302234 - RNA, 13 nt, Human herpesvirus 3
acacgacaccgcu

SEQ ID NO: 302235 - RNA, 20 nt, Human herpesvirus 3
acacgccgcaacaacccauc

SEQ ID NO: 302236 - RNA, 20 nt, Human herpesvirus 3
acacggaauccgguauacau

SEQ ID NO: 302237 - RNA, 14 nt, Human herpesvirus 3
acacgggucauccc

SEQ ID NO: 302238 - RNA, 20 nt, Human herpesvirus 3
acacucacguuuguguugug

SEQ ID NO: 302239 - RNA, 17 nt, Human herpesvirus 3
acacucuacgcauuuac

SEQ ID NO: 302240 - RNA, 17 nt, Human herpesvirus 3
acagagaucucuguuac

SEQ ID NO: 302241 - RNA, 20 nt, Human herpesvirus 3
acagcggauaucgucuaaua

SEQ ID NO: 302242 - RNA, 20 nt, Human herpesvirus 3
acaguccggacaauuaacac

SEQ ID NO: 302243 - RNA, 20 nt, Human herpesvirus 3
acaguggcggauaacugccu

SEQ ID NO: 302244 - RNA, 21 nt, Human herpesvirus 3
acauaaacacagagucuguau

SEQ ID NO: 302245 - RNA, 14 nt, Human herpesvirus 3
acauagauacucca

SEQ ID NO: 302246 - RNA, 23 nt, Human herpesvirus 3
acauauguuccacucuacaucaa

SEQ ID NO: 302247 - RNA, 19 nt, Human herpesvirus 3
acaucaaccggaacaguau

SEQ ID NO: 302248 - RNA, 12 nt, Human herpesvirus 3
acaucaacgcga

SEQ ID NO: 302249 - RNA, 12 nt, Human herpesvirus 3
acauccgugaaa

SEQ ID NO: 302250 - RNA, 22 nt, Human herpesvirus 3
acauccuuuaaucccgccuuua

SEQ ID NO: 302251 - RNA, 15 nt, Human herpesvirus 3
acaucgcugaugcca

SEQ ID NO: 302252 - RNA, 17 nt, Human herpesvirus 3
acaucgcugaugccaga

SEQ ID NO: 302253 - RNA, 12 nt, Human herpesvirus 3
acaucgugcuug

SEQ ID NO: 302254 - RNA, 21 nt, Human herpesvirus 3
acaucgugcuugaauugccau

SEQ ID NO: 302255 - RNA, 19 nt, Human herpesvirus 3
acaucguuuguuucuuuau

SEQ ID NO: 302256 - RNA, 23 nt, Human herpesvirus 3
acaugaauauauagccuuuauaa

SEQ ID NO: 302257 - RNA, 13 nt, Human herpesvirus 3
acaugagugugug

SEQ ID NO: 302258 - RNA, 16 nt, Human herpesvirus 3
acaugauccacguaau

SEQ ID NO: 302259 - RNA, 14 nt, Human herpesvirus 3
acaugcaguuaaaa

SEQ ID NO: 302260 - RNA, 22 nt, Human herpesvirus 3
acaugccuggcuuaacagugcc

SEQ ID NO: 302261 - RNA, 17 nt, Human herpesvirus 3
acauggcuaugccauuu

SEQ ID NO: 302262 - RNA, 16 nt, Human herpesvirus 3
acauugcggaucccaa

SEQ ID NO: 302263 - RNA, 17 nt, Human herpesvirus 3
acauuguugguucuacu

SEQ ID NO: 302264 - RNA, 21 nt, Human herpesvirus 3
acauuuaauguuuuaguagaa

SEQ ID NO: 302265 - RNA, 22 nt, Human herpesvirus 3
acauuuaccgcggauagcauaa

SEQ ID NO: 302266 - RNA, 16 nt, Human herpesvirus 3
accaauugguauacac

SEQ ID NO: 302267 - RNA, 17 nt, Human herpesvirus 3
accacaaccaagcuaug

SEQ ID NO: 302268 - RNA, 20 nt, Human herpesvirus 3
accaccacaaucgcccgaaa

SEQ ID NO: 302269 - RNA, 19 nt, Human herpesvirus 3
accacgugguauuaugaac

SEQ ID NO: 302270 - RNA, 13 nt, Human herpesvirus 3
accacguguugcu

SEQ ID NO: 302271 - RNA, 19 nt, Human herpesvirus 3
accacguguugcuguuguc

SEQ ID NO: 302272 - RNA, 22 nt, Human herpesvirus 3
accacguguugcuguuguccaa

SEQ ID NO: 302273 - RNA, 15 nt, Human herpesvirus 3
accacuaagaacuuu

SEQ ID NO: 302274 - RNA, 16 nt, Human herpesvirus 3
accacuaagaacuuua

SEQ ID NO: 302275 - RNA, 18 nt, Human herpesvirus 3
accacuguuccaggcgag

SEQ ID NO: 302276 - RNA, 21 nt, Human herpesvirus 3
accaguaaaaagaugauacac

SEQ ID NO: 302277 - RNA, 16 nt, Human herpesvirus 3
accauagacuguucua

SEQ ID NO: 302278 - RNA, 14 nt, Human herpesvirus 3
accauauauggaca

SEQ ID NO: 302279 - RNA, 23 nt, Human herpesvirus 3
accaucaucugauuugcaaacau

SEQ ID NO: 302280 - RNA, 20 nt, Human herpesvirus 3
accaucgggggggacuugca

SEQ ID NO: 302281 - RNA, 13 nt, Human herpesvirus 3
accaucuggacag

SEQ ID NO: 302282 - RNA, 15 nt, Human herpesvirus 3
accaugauuugaugu

SEQ ID NO: 302283 - RNA, 21 nt, Human herpesvirus 3
accaugauuugauguuuuuau

SEQ ID NO: 302284 - RNA, 20 nt, Human herpesvirus 3
accauuacuacauugaacaa

SEQ ID NO: 302285 - RNA, 23 nt, Human herpesvirus 3
acccaagguguaaauacugcccc

SEQ ID NO: 302286 - RNA, 23 nt, Human herpesvirus 3
acccaauagccgccagauguaca

SEQ ID NO: 302287 - RNA, 19 nt, Human herpesvirus 3
acccaccccacaugaauau

SEQ ID NO: 302288 - RNA, 21 nt, Human herpesvirus 3
acccagcuguccggacuccag

SEQ ID NO: 302289 - RNA, 17 nt, Human herpesvirus 3
acccauaugaccuguaa

SEQ ID NO: 302290 - RNA, 15 nt, Human herpesvirus 3
accccaagaguuuuc

SEQ ID NO: 302291 - RNA, 12 nt, Human herpesvirus 3
accccacaugaa

SEQ ID NO: 302292 - RNA, 12 nt, Human herpesvirus 3
acccccucuuaa

SEQ ID NO: 302293 - RNA, 21 nt, Human herpesvirus 3
accccuugauuuuaucaauug

SEQ ID NO: 302294 - RNA, 13 nt, Human herpesvirus 3
acccuacgacuuc

SEQ ID NO: 302295 - RNA, 14 nt, Human herpesvirus 3
acccucaaacacgg

SEQ ID NO: 302296 - RNA, 21 nt, Human herpesvirus 3
acccugauaaacccugauaaa

SEQ ID NO: 302297 - RNA, 18 nt, Human herpesvirus 3
accgacccagacgugucu

SEQ ID NO: 302298 - RNA, 16 nt, Human herpesvirus 3
accgcaaugcugaugu

SEQ ID NO: 302299 - RNA, 12 nt, Human herpesvirus 3
accggaguauaa

SEQ ID NO: 302300 - RNA, 18 nt, Human herpesvirus 3
accgguaccaugggagac

SEQ ID NO: 302301 - RNA, 17 nt, Human herpesvirus 3
accgguccaacacuccg

SEQ ID NO: 302302 - RNA, 13 nt, Human herpesvirus 3
accguacaacaag

SEQ ID NO: 302303 - RNA, 23 nt, Human herpesvirus 3
accguauauaacaauugagauac

SEQ ID NO: 302304 - RNA, 19 nt, Human herpesvirus 3
agauaauucaugguugugg

SEQ ID NO: 302305 - RNA, 19 nt, Human herpesvirus 3
agauacaggcaacugcaaa

SEQ ID NO: 302306 - RNA, 12 nt, Human herpesvirus 3
agauacguggaa

SEQ ID NO: 302307 - RNA, 14 nt, Human herpesvirus 3
agauacuaugguaa

SEQ ID NO: 302308 - RNA, 20 nt, Human herpesvirus 3
agauacuccacggggucuac

SEQ ID NO: 302309 - RNA, 18 nt, Human herpesvirus 3
agaucaauaugucacgga

SEQ ID NO: 302310 - RNA, 17 nt, Human herpesvirus 3
agaugaaauaguuucau

SEQ ID NO: 302311 - RNA, 23 nt, Human herpesvirus 3
agaugguuaauaauagugacaaa

SEQ ID NO: 302312 - RNA, 19 nt, Human herpesvirus 3
agcaaaauaaaacaaugaa

SEQ ID NO: 302313 - RNA, 17 nt, Human herpesvirus 3
agcaaguuuaacauuuc

SEQ ID NO: 302314 - RNA, 17 nt, Human herpesvirus 3
agcaauaaaauggauau

SEQ ID NO: 302315 - RNA, 18 nt, Human herpesvirus 3
agcaauucccaguaaaca

SEQ ID NO: 302316 - RNA, 21 nt, Human herpesvirus 3
agcaauucccaguaaacaaca

SEQ ID NO: 302317 - RNA, 16 nt, Human herpesvirus 3
agcauaaggaaaugca

SEQ ID NO: 302318 - RNA, 15 nt, Human herpesvirus 3
agcauuugcgaauuc

SEQ ID NO: 302319 - RNA, 17 nt, Human herpesvirus 3
agcccgauaacauggaa

SEQ ID NO: 302320 - RNA, 15 nt, Human herpesvirus 3
agccgcggccagugc

SEQ ID NO: 302321 - RNA, 21 nt, Human herpesvirus 3
agccuauaaauucuacaacau

SEQ ID NO: 302322 - RNA, 15 nt, Human herpesvirus 3
agccuugugaugggu

SEQ ID NO: 302323 - RNA, 11 nt, Human herpesvirus 3
agcgccaaaau

SEQ ID NO: 302324 - RNA, 19 nt, Human herpesvirus 3
agcgccguuauagcagggg

SEQ ID NO: 302325 - RNA, 20 nt, Human herpesvirus 3
acggauauuaacacgauuaa

SEQ ID NO: 302326 - RNA, 17 nt, Human herpesvirus 3
acggccauguuugccga

SEQ ID NO: 302327 - RNA, 23 nt, Human herpesvirus 3
acggcuuuuaauuugaagacacc

SEQ ID NO: 302328 - RNA, 23 nt, Human herpesvirus 3
acggucgcguguacgaaaaccgc

SEQ ID NO: 302329 - RNA, 14 nt, Human herpesvirus 3
acgguuugugcacu

SEQ ID NO: 302330 - RNA, 21 nt, Human herpesvirus 3
acguaauuugccccaaaccac

SEQ ID NO: 302331 - RNA, 17 nt, Human herpesvirus 3
acguacguuuaacccgc

SEQ ID NO: 302332 - RNA, 21 nt, Human herpesvirus 3
acguccggguuaauuuuacaa

SEQ ID NO: 302333 - RNA, 13 nt, Human herpesvirus 3
acgugauuugccc

SEQ ID NO: 302334 - RNA, 18 nt, Human herpesvirus 3
acgugcccugagcauuuc

SEQ ID NO: 302335 - RNA, 20 nt, Human herpesvirus 3
acguggaaucguaguaaaac

SEQ ID NO: 302336 - RNA, 18 nt, Human herpesvirus 3
acgugguaccaaaaacac

SEQ ID NO: 302337 - RNA, 18 nt, Human herpesvirus 3
acguuuguguugugacuu

SEQ ID NO: 302338 - RNA, 13 nt, Human herpesvirus 3
acguuuuaguaaa

SEQ ID NO: 302339 - RNA, 17 nt, Human herpesvirus 3
acguuuuuggauggccu

SEQ ID NO: 302340 - RNA, 19 nt, Human herpesvirus 3
acguuuuuuuuguuagguu

SEQ ID NO: 302341 - RNA, 22 nt, Human herpesvirus 3
acuaagccucuguacaacacaa

SEQ ID NO: 302342 - RNA, 21 nt, Human herpesvirus 3
acuaauauucuacagauuuau

SEQ ID NO: 302343 - RNA, 11 nt, Human herpesvirus 3
acuaauguugu

SEQ ID NO: 302344 - RNA, 20 nt, Human herpesvirus 3
acuacacccaguacguugca

SEQ ID NO: 302345 - RNA, 21 nt, Human herpesvirus 3
acuacacccaguacguugcau

SEQ ID NO: 302346 - RNA, 21 nt, Human herpesvirus 3
acuauaaacguauucucuaca

SEQ ID NO: 302347 - RNA, 14 nt, Human herpesvirus 3
acuauaaguuaaca

SEQ ID NO: 302348 - RNA, 14 nt, Human herpesvirus 3
acuauguagguaag

SEQ ID NO: 302349 - RNA, 14 nt, Human herpesvirus 3
acuauuugugaaga

SEQ ID NO: 302350 - RNA, 19 nt, Human herpesvirus 3
acuauuugugaagacuuua

SEQ ID NO: 302351 - RNA, 20 nt, Human herpesvirus 3
acuauuugugaagacuuuau

SEQ ID NO: 302352 - RNA, 14 nt, Human herpesvirus 3
acucccuccaaucg

SEQ ID NO: 302353 - RNA, 21 nt, Human herpesvirus 3
acuccuuuaaauuuuacuuaa

SEQ ID NO: 302354 - RNA, 13 nt, Human herpesvirus 3
acucgcguacaaa

SEQ ID NO: 302355 - RNA, 14 nt, Human herpesvirus 3
acucuacgcauuua

SEQ ID NO: 302356 - RNA, 15 nt, Human herpesvirus 3
acucuacgcauuuac

SEQ ID NO: 302357 - RNA, 16 nt, Human herpesvirus 3
acucucacugcuauag

SEQ ID NO: 302358 - RNA, 18 nt, Human herpesvirus 3
acucugcgaugcauuaac

SEQ ID NO: 302359 - RNA, 21 nt, Human herpesvirus 3
acugacuuuucaucauacgca

SEQ ID NO: 302360 - RNA, 12 nt, Human herpesvirus 3
acugcagauaca

SEQ ID NO: 302361 - RNA, 16 nt, Human herpesvirus 3
acuguauguaaauuau

SEQ ID NO: 302362 - RNA, 18 nt, Human herpesvirus 3
acugugaagcguuauacg

SEQ ID NO: 302363 - RNA, 22 nt, Human herpesvirus 3
acuguuccaggcgagacuugau

SEQ ID NO: 302364 - RNA, 15 nt, Human herpesvirus 3
acuguucuacugacu

SEQ ID NO: 302365 - RNA, 15 nt, Human herpesvirus 3
acuguuuacauagau

SEQ ID NO: 302366 - RNA, 16 nt, Human herpesvirus 3
acuguuugacaguucg

SEQ ID NO: 302367 - RNA, 22 nt, Human herpesvirus 3
acuuaagacauggccgugaaug

SEQ ID NO: 302368 - RNA, 20 nt, Human herpesvirus 3
acuuacccuccguaucccug

SEQ ID NO: 302369 - RNA, 13 nt, Human herpesvirus 3
acuuauuaugcaa

SEQ ID NO: 302370 - RNA, 19 nt, Human herpesvirus 3
acuugaaaaaucauuauga

SEQ ID NO: 302371 - RNA, 22 nt, Human herpesvirus 3
acuugaaaaaucauuaugagca

SEQ ID NO: 302372 - RNA, 16 nt, Human herpesvirus 3
acuugauacccucaaa

SEQ ID NO: 302373 - RNA, 21 nt, Human herpesvirus 3
acuugauacccucaaacacgg

SEQ ID NO: 302374 - RNA, 16 nt, Human herpesvirus 3
acuuuaauuccucuaa

SEQ ID NO: 302375 - RNA, 15 nt, Human herpesvirus 3
acuuuacaacccgug

SEQ ID NO: 302376 - RNA, 16 nt, Human herpesvirus 3
acuuuacaacccgugg

SEQ ID NO: 302377 - RNA, 22 nt, Human herpesvirus 3
acuuuggcggucauuuccacaa

SEQ ID NO: 302378 - RNA, 18 nt, Human herpesvirus 3
acuuuuaaacgccagugg

SEQ ID NO: 302379 - RNA, 21 nt, Human herpesvirus 3
acuuuucaucauacgcauuua

SEQ ID NO: 302380 - RNA, 22 nt, Human herpesvirus 3
acuuuucaucauacgcauuuac

SEQ ID NO: 302381 - RNA, 13 nt, Human herpesvirus 3
agaaaacauugca

SEQ ID NO: 302382 - RNA, 23 nt, Human herpesvirus 3
agaaaagccagcugaagucugug

SEQ ID NO: 302383 - RNA, 14 nt, Human herpesvirus 3
agaaagauugcagu

SEQ ID NO: 302384 - RNA, 15 nt, Human herpesvirus 3
agaaagcggacacau

SEQ ID NO: 302385 - RNA, 19 nt, Human herpesvirus 3
agaacauacgucucggggu

SEQ ID NO: 302386 - RNA, 14 nt, Human herpesvirus 3
agaacgaucacaac

SEQ ID NO: 302387 - RNA, 14 nt, Human herpesvirus 3
agaacguuuaucag

SEQ ID NO: 302388 - RNA, 12 nt, Human herpesvirus 3
agaagacaucac

SEQ ID NO: 302389 - RNA, 15 nt, Human herpesvirus 3
agaagcaacaugaca

SEQ ID NO: 302390 - RNA, 21 nt, Human herpesvirus 3
agaagccccaacgaguguaug

SEQ ID NO: 302391 - RNA, 16 nt, Human herpesvirus 3
agaagggggauuuaca

SEQ ID NO: 302392 - RNA, 15 nt, Human herpesvirus 3
agaagugcauaucca

SEQ ID NO: 302393 - RNA, 14 nt, Human herpesvirus 3
agaauuaaaaaagc

SEQ ID NO: 302394 - RNA, 15 nt, Human herpesvirus 3
agacauggccgugaa

SEQ ID NO: 302395 - RNA, 14 nt, Human herpesvirus 3
agacgacauuaaac

SEQ ID NO: 302396 - RNA, 16 nt, Human herpesvirus 3
agacggcggguuuuga

SEQ ID NO: 302397 - RNA, 18 nt, Human herpesvirus 3
agacguccacacagccuc

SEQ ID NO: 302398 - RNA, 15 nt, Human herpesvirus 3
agacuaacauuuauc

SEQ ID NO: 302399 - RNA, 20 nt, Human herpesvirus 3
agacucugcgaugcauuaac

SEQ ID NO: 302400 - RNA, 16 nt, Human herpesvirus 3
agacuuugacuuugau

SEQ ID NO: 302401 - RNA, 24 nt, Human herpesvirus 3
agagaaagcggacacauuugugcc

SEQ ID NO: 302402 - RNA, 20 nt, Human herpesvirus 3
agagaagcuauacacaaguc

SEQ ID NO: 302403 - RNA, 15 nt, Human herpesvirus 3
agagcccacacaauc

SEQ ID NO: 302404 - RNA, 19 nt, Human herpesvirus 3
agagcgccuaaauaugcua

SEQ ID NO: 302405 - RNA, 16 nt, Human herpesvirus 3
agagcucccauuccaa

SEQ ID NO: 302406 - RNA, 14 nt, Human herpesvirus 3
agagcuguccauga

SEQ ID NO: 302407 - RNA, 23 nt, Human herpesvirus 3
agaggguauugcuguuguuuaua

SEQ ID NO: 302408 - RNA, 14 nt, Human herpesvirus 3
agagggugcugguu

SEQ ID NO: 302409 - RNA, 12 nt, Human herpesvirus 3
agaguacagggu

SEQ ID NO: 302410 - RNA, 20 nt, Human herpesvirus 3
agagucacgccccauuacaa

SEQ ID NO: 302411 - RNA, 22 nt, Human herpesvirus 3
agaguuagcauccaaauuaacc

SEQ ID NO: 302412 - RNA, 19 nt, Human herpesvirus 3
agauaagacccggugauca

SEQ ID NO: 302413 - RNA, 18 nt, Human herpesvirus 3
auaaccuguccauuugca

SEQ ID NO: 302414 - RNA, 17 nt, Human herpesvirus 3
auaacguugcggugaua

SEQ ID NO: 302415 - RNA, 18 nt, Human herpesvirus 3
auaacguugcggugauau

SEQ ID NO: 302416 - RNA, 15 nt, Human herpesvirus 3
auaagacccggugau

SEQ ID NO: 302417 - RNA, 22 nt, Human herpesvirus 3
auaagauguacugugucucuca

SEQ ID NO: 302418 - RNA, 18 nt, Human herpesvirus 3
auaagggagucuacaaua

SEQ ID NO: 302419 - RNA, 14 nt, Human herpesvirus 3
auaaguauggagug

SEQ ID NO: 302420 - RNA, 21 nt, Human herpesvirus 3
auaaguggggguuuaauuuca

SEQ ID NO: 302421 - RNA, 14 nt, Human herpesvirus 3
auaauacacacuac

SEQ ID NO: 302422 - RNA, 15 nt, Human herpesvirus 3
auaauacacacuacc

SEQ ID NO: 302423 - RNA, 13 nt, Human herpesvirus 3
auaauagucaaug

SEQ ID NO: 302424 - RNA, 13 nt, Human herpesvirus 3
auaauaugauaca

SEQ ID NO: 302425 - RNA, 15 nt, Human herpesvirus 3
auaauauuuacacgu

SEQ ID NO: 302426 - RNA, 15 nt, Human herpesvirus 3
auaauggcugcugaa

SEQ ID NO: 302427 - RNA, 20 nt, Human herpesvirus 3
auaauggcugcugaagcuga

SEQ ID NO: 302428 - RNA, 22 nt, Human herpesvirus 3
auaauguuggguauuuauaauu

SEQ ID NO: 302429 - RNA, 19 nt, Human herpesvirus 3
auaauuccgguugugccaa

SEQ ID NO: 302430 - RNA, 18 nt, Human herpesvirus 3
auacaacacgaugcgcug

SEQ ID NO: 302431 - RNA, 13 nt, Human herpesvirus 3
auacaacaugauc

SEQ ID NO: 302432 - RNA, 19 nt, Human herpesvirus 3
auacaacgggagcuuccga

SEQ ID NO: 302433 - RNA, 13 nt, Human herpesvirus 3
auacaagcauaac

SEQ ID NO: 302434 - RNA, 16 nt, Human herpesvirus 3
auacaagcuccuguga

SEQ ID NO: 302435 - RNA, 12 nt, Human herpesvirus 3
auacaagguguu

SEQ ID NO: 302436 - RNA, 13 nt, Human herpesvirus 3
auacaagguguuu

SEQ ID NO: 302437 - RNA, 22 nt, Human herpesvirus 3
auacaaucgucuuuuaaauuca

SEQ ID NO: 302438 - RNA, 16 nt, Human herpesvirus 3
auacacauccuggaca

SEQ ID NO: 302439 - RNA, 16 nt, Human herpesvirus 3
auaccauauauggaca

SEQ ID NO: 302440 - RNA, 16 nt, Human herpesvirus 3
auaccgccuuuaauua

SEQ ID NO: 302441 - RNA, 17 nt, Human herpesvirus 3
auaccuauuucaugcuu

SEQ ID NO: 302442 - RNA, 17 nt, Human herpesvirus 3
auacgaucagaugauaa

SEQ ID NO: 302443 - RNA, 12 nt, Human herpesvirus 3
auacgaugauuu

SEQ ID NO: 302444 - RNA, 14 nt, Human herpesvirus 3
auacgucucggggu

SEQ ID NO: 302445 - RNA, 16 nt, Human herpesvirus 3
auacguuucaaauaac

SEQ ID NO: 302446 - RNA, 23 nt, Human herpesvirus 3
auacuaagccucuguacaacaca

SEQ ID NO: 302447 - RNA, 21 nt, Human herpesvirus 3
auacuagcauauguucagcag

SEQ ID NO: 302448 - RNA, 20 nt, Human herpesvirus 3
auacuaugguaaaaaccgcu

SEQ ID NO: 302449 - RNA, 15 nt, Human herpesvirus 3
auacuuggagaugca

SEQ ID NO: 302450 - RNA, 22 nt, Human herpesvirus 3
auacuuggagaugcaaccaagg

SEQ ID NO: 302451 - RNA, 22 nt, Human herpesvirus 3
auagcaggggucuccagaguac

SEQ ID NO: 302452 - RNA, 17 nt, Human herpesvirus 3
auagccgccagauguac

SEQ ID NO: 302453 - RNA, 22 nt, Human herpesvirus 3
auagccgccagauguacaccca

SEQ ID NO: 302454 - RNA, 17 nt, Human herpesvirus 3
auaguuauuguauauac

SEQ ID NO: 302455 - RNA, 14 nt, Human herpesvirus 3
auauaaauaacaua

SEQ ID NO: 302456 - RNA, 13 nt, Human herpesvirus 3
auauaacauacau

SEQ ID NO: 302457 - RNA, 22 nt, Human herpesvirus 3
auauacaaaauaaaaacauaca

SEQ ID NO: 302458 - RNA, 17 nt, Human herpesvirus 3
auauacguagaauuuac

SEQ ID NO: 302459 - RNA, 18 nt, Human herpesvirus 3
auauauggcgccauccau

SEQ ID NO: 302460 - RNA, 21 nt, Human herpesvirus 3
auaucgucuaauaccacagac

SEQ ID NO: 302461 - RNA, 12 nt, Human herpesvirus 3
auaucucauacu

SEQ ID NO: 302462 - RNA, 17 nt, Human herpesvirus 3
auaucuguuacauuucg

SEQ ID NO: 302463 - RNA, 19 nt, Human herpesvirus 3
auaugaagcaaggggaucg

SEQ ID NO: 302464 - RNA, 14 nt, Human herpesvirus 3
auaugauacauaaa

SEQ ID NO: 302465 - RNA, 22 nt, Human herpesvirus 3
auauguaacguuuguaaaccac

SEQ ID NO: 302466 - RNA, 20 nt, Human herpesvirus 3
auauguucagcagcuuaaca

SEQ ID NO: 302467 - RNA, 18 nt, Human herpesvirus 3
auauguuccacucuacau

SEQ ID NO: 302468 - RNA, 16 nt, Human herpesvirus 3
auauuaacacgauuaa

SEQ ID NO: 302469 - RNA, 16 nt, Human herpesvirus 3
auauucacaugcaguu

SEQ ID NO: 302470 - RNA, 16 nt, Human herpesvirus 3
auauucuacagauuua

SEQ ID NO: 302471 - RNA, 18 nt, Human herpesvirus 3
auauuuauacaagcauaa

SEQ ID NO: 302472 - RNA, 20 nt, Human herpesvirus 3
auauuuauacaagcauaaca

SEQ ID NO: 302473 - RNA, 15 nt, Human herpesvirus 3
auauuuuacauacaa

SEQ ID NO: 302474 - RNA, 20 nt, Human herpesvirus 3
auauuuuuaaucauuauaca

SEQ ID NO: 302475 - RNA, 12 nt, Human herpesvirus 3
aucaauauguca

SEQ ID NO: 302476 - RNA, 17 nt, Human herpesvirus 3
aucacaacagacaagcu

SEQ ID NO: 302477 - RNA, 18 nt, Human herpesvirus 3
aucacaggggguauuuau

SEQ ID NO: 302478 - RNA, 22 nt, Human herpesvirus 3
aucaccgggucuuaucuauaua

SEQ ID NO: 302479 - RNA, 14 nt, Human herpesvirus 3
aucacuuugauaua

SEQ ID NO: 302480 - RNA, 22 nt, Human herpesvirus 3
aucagaaagauugcagucauuu

SEQ ID NO: 302481 - RNA, 20 nt, Human herpesvirus 3
aucagaagauauaacccggu

SEQ ID NO: 302482 - RNA, 15 nt, Human herpesvirus 3
aucagagaagcuaua

SEQ ID NO: 302483 - RNA, 20 nt, Human herpesvirus 3
aucagagaagcuauacacaa

SEQ ID NO: 302484 - RNA, 16 nt, Human herpesvirus 3
aucagaucaucugaca

SEQ ID NO: 302485 - RNA, 14 nt, Human herpesvirus 3
aucaguugggauaa

SEQ ID NO: 302486 - RNA, 17 nt, Human herpesvirus 3
aucaucgaaaagacugu

SEQ ID NO: 302487 - RNA, 19 nt, Human herpesvirus 3
aucaucgaaaagacugugu

SEQ ID NO: 302488 - RNA, 16 nt, Human herpesvirus 3
aucauuaaacgugcau

SEQ ID NO: 302489 - RNA, 17 nt, Human herpesvirus 3
auccaacuguuuacaua

SEQ ID NO: 302490 - RNA, 16 nt, Human herpesvirus 3
auccacgguauuccaa

SEQ ID NO: 302491 - RNA, 20 nt, Human herpesvirus 3
auccauccgauaauaccaaa

SEQ ID NO: 302492 - RNA, 17 nt, Human herpesvirus 3
auccauugccguauuaa

SEQ ID NO: 302493 - RNA, 16 nt, Human herpesvirus 3
aucccaaauuuuaaac

SEQ ID NO: 302494 - RNA, 13 nt, Human herpesvirus 3
aucccacauguau

SEQ ID NO: 302495 - RNA, 13 nt, Human herpesvirus 3
aucccccuucaaa

SEQ ID NO: 302496 - RNA, 20 nt, Human herpesvirus 3
aucccgccuuuaucucccua

SEQ ID NO: 302497 - RNA, 23 nt, Human herpesvirus 3
auccgagugaaucuuaaaccuga

SEQ ID NO: 302498 - RNA, 21 nt, Human herpesvirus 3
auccgucaacugcaacaugca

SEQ ID NO: 302499 - RNA, 16 nt, Human herpesvirus 3
auccguuauggaguuc

SEQ ID NO: 302500 - RNA, 20 nt, Human herpesvirus 3
auccuagaagcguuaccaca

SEQ ID NO: 302501 - RNA, 13 nt, Human herpesvirus 3
auccuggacacag

SEQ ID NO: 302502 - RNA, 18 nt, Human herpesvirus 3
auccuuaaaauaaaaggu

SEQ ID NO: 302503 - RNA, 16 nt, Human herpesvirus 3
aucgaaaaaaggugua

SEQ ID NO: 302504 - RNA, 16 nt, Human herpesvirus 3
aucggaagaugacuuu

SEQ ID NO: 302505 - RNA, 19 nt, Human herpesvirus 3
aucggcggcagaugaucug

SEQ ID NO: 302506 - RNA, 20 nt, Human herpesvirus 3
aucggcguccucuguuacau

SEQ ID NO: 302507 - RNA, 22 nt, Human herpesvirus 3
aucguaugccucggaugcaccg

SEQ ID NO: 302508 - RNA, 16 nt, Human herpesvirus 3
aucgucaaaaauagcu

SEQ ID NO: 302509 - RNA, 17 nt, Human herpesvirus 3
aucgucuaauaccacag

SEQ ID NO: 302510 - RNA, 15 nt, Human herpesvirus 3
aucucccguuuuuau

SEQ ID NO: 302511 - RNA, 20 nt, Human herpesvirus 3
aucucgacguccaaguccaa

SEQ ID NO: 302512 - RNA, 23 nt, Human herpesvirus 3
aucugaucguauugcuggguuau

SEQ ID NO: 302513 - RNA, 13 nt, Human herpesvirus 3
aucuggaaggcau

SEQ ID NO: 302514 - RNA, 16 nt, Human herpesvirus 3
aucuuacguaacacca

SEQ ID NO: 302515 - RNA, 20 nt, Human herpesvirus 3
augaacaaacacucuacgca

SEQ ID NO: 302516 - RNA, 22 nt, Human herpesvirus 3
augaacaaacacucuacgcauu

SEQ ID NO: 302517 - RNA, 19 nt, Human herpesvirus 3
augacacgaauaggugaua

SEQ ID NO: 302518 - RNA, 24 nt, Human herpesvirus 3
augacggcccccuggacauguguu

SEQ ID NO: 302519 - RNA, 14 nt, Human herpesvirus 3
augacuuugaagac

SEQ ID NO: 302520 - RNA, 14 nt, Human herpesvirus 3
augagaguuuacaa

SEQ ID NO: 302521 - RNA, 17 nt, Human herpesvirus 3
augagcagcgcagucua

SEQ ID NO: 302522 - RNA, 22 nt, Human herpesvirus 3
cagauucaagacuaacauuuau

SEQ ID NO: 302523 - RNA, 20 nt, Human herpesvirus 3
cagauuuccccggaaauaua

SEQ ID NO: 302524 - RNA, 13 nt, Human herpesvirus 3
cagcaaguuuaac

SEQ ID NO: 302525 - RNA, 18 nt, Human herpesvirus 3
cagcaaguuuaacauuuc

SEQ ID NO: 302526 - RNA, 12 nt, Human herpesvirus 3
cagccagccaaa

SEQ ID NO: 302527 - RNA, 22 nt, Human herpesvirus 3
cagcuaaccugucgagcaugug

SEQ ID NO: 302528 - RNA, 15 nt, Human herpesvirus 3
cgggcuuuuccccca

SEQ ID NO: 302529 - RNA, 22 nt, Human herpesvirus 3
cgggcuuuucccccacauacaa

SEQ ID NO: 302530 - RNA, 14 nt, Human herpesvirus 3
cgggugaguguacg

SEQ ID NO: 302531 - RNA, 19 nt, Human herpesvirus 3
cgggugaguguacguaaua

SEQ ID NO: 302532 - RNA, 19 nt, Human herpesvirus 3
cgguccaacacuccgccga

SEQ ID NO: 302533 - RNA, 19 nt, Human herpesvirus 3
cgguuucuccguugcacgu

SEQ ID NO: 302534 - RNA, 17 nt, Human herpesvirus 3
cguaauauaacagaauu

SEQ ID NO: 302535 - RNA, 13 nt, Human herpesvirus 3
cguacaaauuucu

SEQ ID NO: 302536 - RNA, 12 nt, Human herpesvirus 3
cguacaacaaga

SEQ ID NO: 302537 - RNA, 20 nt, Human herpesvirus 3
cguaugaaucccgauuugga

SEQ ID NO: 302538 - RNA, 13 nt, Human herpesvirus 3
cguauuguguaau

SEQ ID NO: 302539 - RNA, 19 nt, Human herpesvirus 3
cgucaaaaauagcuguaaa

SEQ ID NO: 302540 - RNA, 17 nt, Human herpesvirus 3
cgucagaagguucacua

SEQ ID NO: 302541 - RNA, 14 nt, Human herpesvirus 3
cgucagggggugga

SEQ ID NO: 302542 - RNA, 13 nt, Human herpesvirus 3
cgucccauuuaaa

SEQ ID NO: 302543 - RNA, 20 nt, Human herpesvirus 3
cguccgauguuccaauggau

SEQ ID NO: 302544 - RNA, 20 nt, Human herpesvirus 3
cgucgaguuccgauguugga

SEQ ID NO: 302545 - RNA, 16 nt, Human herpesvirus 3
cgucucaaaacuuaag

SEQ ID NO: 302546 - RNA, 14 nt, Human herpesvirus 3
cgucucggggugua

SEQ ID NO: 302547 - RNA, 16 nt, Human herpesvirus 3
cgucuguguauaucau

SEQ ID NO: 302548 - RNA, 16 nt, Human herpesvirus 3
cgugacagaaacauca

SEQ ID NO: 302549 - RNA, 18 nt, Human herpesvirus 3
cgugguaccaaaaacaca

SEQ ID NO: 302550 - RNA, 16 nt, Human herpesvirus 3
cgugguauuaugaaca

SEQ ID NO: 302551 - RNA, 15 nt, Human herpesvirus 3
cgugguuagauaccu

SEQ ID NO: 302552 - RNA, 18 nt, Human herpesvirus 3
cguguuaaacaaacagaa

SEQ ID NO: 302553 - RNA, 23 nt, Human herpesvirus 3
cguuacuacauggaguguguuac

SEQ ID NO: 302554 - RNA, 21 nt, Human herpesvirus 3
cguuagaggcuuaaucgugcc

SEQ ID NO: 302555 - RNA, 17 nt, Human herpesvirus 3
cguucuaauaaaaacau

SEQ ID NO: 302556 - RNA, 13 nt, Human herpesvirus 3
cguugaacaccau

SEQ ID NO: 302557 - RNA, 23 nt, Human herpesvirus 3
cguuguaccguuugcacaaucca

SEQ ID NO: 302558 - RNA, 11 nt, Human herpesvirus 3
cguugugauau

SEQ ID NO: 302559 - RNA, 16 nt, Human herpesvirus 3
cguuguggaaagguau

SEQ ID NO: 302560 - RNA, 16 nt, Human herpesvirus 3
cguuguucugcauaag

SEQ ID NO: 302561 - RNA, 20 nt, Human herpesvirus 3
cguuuauaucuguuacauuu

SEQ ID NO: 302562 - RNA, 15 nt, Human herpesvirus 3
cguuugcacaaucca

SEQ ID NO: 302563 - RNA, 22 nt, Human herpesvirus 3
cguuuguauuuauacaccucua

SEQ ID NO: 302564 - RNA, 14 nt, Human herpesvirus 3
cguuuuaaaagccg

SEQ ID NO: 302565 - RNA, 19 nt, Human herpesvirus 3
cguuuuaguaaaauaccau

SEQ ID NO: 302566 - RNA, 20 nt, Human herpesvirus 3
cguuuuaugagaguuuacaa

SEQ ID NO: 302567 - RNA, 15 nt, Human herpesvirus 3
cguuuuuauacguau

SEQ ID NO: 302568 - RNA, 14 nt, Human herpesvirus 3
cuaaaacacuguca

SEQ ID NO: 302569 - RNA, 21 nt, Human herpesvirus 3
cuaaacguggccauuacuaaa

SEQ ID NO: 302570 - RNA, 22 nt, Human herpesvirus 3
cuaaacguggccauuacuaaag

SEQ ID NO: 302571 - RNA, 22 nt, Human herpesvirus 3
cuaaagcuauuaaugguacaag

SEQ ID NO: 302572 - RNA, 17 nt, Human herpesvirus 3
cuaaagguauacuugga

SEQ ID NO: 302573 - RNA, 20 nt, Human herpesvirus 3
cuaaauuacaaaaauuugag

SEQ ID NO: 302574 - RNA, 15 nt, Human herpesvirus 3
cuaacauuuauccca

SEQ ID NO: 302575 - RNA, 16 nt, Human herpesvirus 3
cuaaccauaaugcaaa

SEQ ID NO: 302576 - RNA, 18 nt, Human herpesvirus 3
cuaacgugauuacuacaa

SEQ ID NO: 302577 - RNA, 23 nt, Human herpesvirus 3
cuaacguuuuaguaaaauaccau

SEQ ID NO: 302578 - RNA, 22 nt, Human herpesvirus 3
cuaagucagauauuauuaacuu

SEQ ID NO: 302579 - RNA, 17 nt, Human herpesvirus 3
cuaauaaaaacaucaaa

SEQ ID NO: 302580 - RNA, 18 nt, Human herpesvirus 3
cuaauaaacgaugacaca

SEQ ID NO: 302581 - RNA, 20 nt, Human herpesvirus 3
cuaauauucuacagauuuau

SEQ ID NO: 302582 - RNA, 23 nt, Human herpesvirus 3
cuaauuuguauuuuuaaucauua

SEQ ID NO: 302583 - RNA, 18 nt, Human herpesvirus 3
cuacaacggaaaauguag

SEQ ID NO: 302584 - RNA, 16 nt, Human herpesvirus 3
cuacaccuuugcauga

SEQ ID NO: 302585 - RNA, 15 nt, Human herpesvirus 3
cuacagaagacauca

SEQ ID NO: 302586 - RNA, 13 nt, Human herpesvirus 3
cuacagauuuauu

SEQ ID NO: 302587 - RNA, 16 nt, Human herpesvirus 3
cuacgugguaccaaaa

SEQ ID NO: 302588 - RNA, 16 nt, Human herpesvirus 3
cuacucccacccacug

SEQ ID NO: 302589 - RNA, 19 nt, Human herpesvirus 3
cuagaacgugcguuauacu

SEQ ID NO: 302590 - RNA, 20 nt, Human herpesvirus 3
cuagaagaugguuaauaaua

SEQ ID NO: 302591 - RNA, 18 nt, Human herpesvirus 3
cuagaagcguuaccacag

SEQ ID NO: 302592 - RNA, 22 nt, Human herpesvirus 3
cuagaagcguuaccacaguucc

SEQ ID NO: 302593 - RNA, 16 nt, Human herpesvirus 3
cuagauuuuaccuuau

SEQ ID NO: 302594 - RNA, 22 nt, Human herpesvirus 3
cuagauuuuaccuuauguguua

SEQ ID NO: 302595 - RNA, 20 nt, Human herpesvirus 3
cuauaaaaacauaacaccag

SEQ ID NO: 302596 - RNA, 22 nt, Human herpesvirus 3
cuauaucccacgauaaaugguc

SEQ ID NO: 302597 - RNA, 13 nt, Human herpesvirus 3
cuaugccauuuga

SEQ ID NO: 302598 - RNA, 17 nt, Human herpesvirus 3
cuaugccauuugagaua

SEQ ID NO: 302599 - RNA, 12 nt, Human herpesvirus 3
cuauguaccauu

SEQ ID NO: 302600 - RNA, 15 nt, Human herpesvirus 3
cuauuaaugguacaa

SEQ ID NO: 302601 - RNA, 15 nt, Human herpesvirus 3
cuauuuucaguauua

SEQ ID NO: 302602 - RNA, 13 nt, Human herpesvirus 3
cucaauacuuguc

SEQ ID NO: 302603 - RNA, 12 nt, Human herpesvirus 3
cucacugcuaua

SEQ ID NO: 302604 - RNA, 22 nt, Human herpesvirus 3
cucagcugugaguuuaggguuu

SEQ ID NO: 302605 - RNA, 20 nt, Human herpesvirus 3
cuccaaucgcguuaccaaac

SEQ ID NO: 302606 - RNA, 15 nt, Human herpesvirus 3
cuccaucacgauaaa

SEQ ID NO: 302607 - RNA, 20 nt, Human herpesvirus 3
cucccucauaauaugauaca

SEQ ID NO: 302608 - RNA, 21 nt, Human herpesvirus 3
cucccuguugcgguuguuguc

SEQ ID NO: 302609 - RNA, 22 nt, Human herpesvirus 3
cuccguuacgggggugugguua

SEQ ID NO: 302610 - RNA, 15 nt, Human herpesvirus 3
cucguauauacaugu

SEQ ID NO: 302611 - RNA, 12 nt, Human herpesvirus 3
cucgugggacua

SEQ ID NO: 302612 - RNA, 18 nt, Human herpesvirus 3
cucguguagucuuugauc

SEQ ID NO: 302613 - RNA, 14 nt, Human herpesvirus 3
cucuaacaaugcac

SEQ ID NO: 302614 - RNA, 22 nt, Human herpesvirus 3
cucuaauggaguaacuguccca

SEQ ID NO: 302615 - RNA, 13 nt, Human herpesvirus 3
cucuacgcauuua

SEQ ID NO: 302616 - RNA, 21 nt, Human herpesvirus 3
cucugauucggguaaaacaca

SEQ ID NO: 302617 - RNA, 17 nt, Human herpesvirus 3
cucugcgaugcauuaac

SEQ ID NO: 302618 - RNA, 17 nt, Human herpesvirus 3
cucugcuucaauuccaa

SEQ ID NO: 302619 - RNA, 11 nt, Human herpesvirus 3
cucuguuacau

SEQ ID NO: 302620 - RNA, 13 nt, Human herpesvirus 3
cucuguuguauca

SEQ ID NO: 302621 - RNA, 14 nt, Human herpesvirus 3
cucuguuguaucac

SEQ ID NO: 302622 - RNA, 14 nt, Human herpesvirus 3
cucuuauauaugua

SEQ ID NO: 302623 - RNA, 15 nt, Human herpesvirus 3
cucuuauauauguaa

SEQ ID NO: 302624 - RNA, 13 nt, Human herpesvirus 3
cucuucaauguug

SEQ ID NO: 302625 - RNA, 19 nt, Human herpesvirus 3
cugaaaaucgucccauuua

SEQ ID NO: 302626 - RNA, 23 nt, Human herpesvirus 3
cugaagcugacgaagagaacugu

SEQ ID NO: 302627 - RNA, 20 nt, Human herpesvirus 3
cugacgaagagaacugugaa

SEQ ID NO: 302628 - RNA, 23 nt, Human herpesvirus 3
cugaggguucaguaacuuaacaa

SEQ ID NO: 302629 - RNA, 15 nt, Human herpesvirus 3
cugaguucaaagcaa

SEQ ID NO: 302630 - RNA, 17 nt, Human herpesvirus 3
cugaguucaaagcaacg

SEQ ID NO: 302631 - RNA, 13 nt, Human herpesvirus 3
cugauaaacccug

SEQ ID NO: 302632 - RNA, 17 nt, Human herpesvirus 3
cugaugccagaagcauu

SEQ ID NO: 302633 - RNA, 20 nt, Human herpesvirus 3
cugccguggaccccuguauu

SEQ ID NO: 302634 - RNA, 13 nt, Human herpesvirus 3
cugcuaaccauag

SEQ ID NO: 302635 - RNA, 16 nt, Human herpesvirus 3
cugcucugcaaauaca

SEQ ID NO: 302636 - RNA, 23 nt, Human herpesvirus 3
cuggagaaccgcgucuaugucga

SEQ ID NO: 302637 - RNA, 13 nt, Human herpesvirus 3
cuggaguacuaca

SEQ ID NO: 302638 - RNA, 21 nt, Human herpesvirus 3
cugggguauccggaaacacac

SEQ ID NO: 302639 - RNA, 15 nt, Human herpesvirus 3
cuggguuauuuaaca

SEQ ID NO: 302640 - RNA, 18 nt, Human herpesvirus 3
cuggguugcgacauaccg

SEQ ID NO: 302641 - RNA, 18 nt, Human herpesvirus 3
cuguaggucaacauacau

SEQ ID NO: 302642 - RNA, 15 nt, Human herpesvirus 3
cuguaugcugauaca

SEQ ID NO: 302643 - RNA, 18 nt, Human herpesvirus 3
cuguauugagaaaaccaa

SEQ ID NO: 302644 - RNA, 14 nt, Human herpesvirus 3
cugucaucagacau

SEQ ID NO: 302645 - RNA, 18 nt, Human herpesvirus 3
cugucgucauauuacauu

SEQ ID NO: 302646 - RNA, 16 nt, Human herpesvirus 3
cugucuugguuuauaa

SEQ ID NO: 302647 - RNA, 16 nt, Human herpesvirus 3
cugugggacagcuaac

SEQ ID NO: 302648 - RNA, 23 nt, Human herpesvirus 3
cugugggggccacaauaacauaa

SEQ ID NO: 302649 - RNA, 14 nt, Human herpesvirus 3
cuguuacauucuca

SEQ ID NO: 302650 - RNA, 21 nt, Human herpesvirus 3
cuguuagaauaguaaauaccu

SEQ ID NO: 302651 - RNA, 19 nt, Human herpesvirus 3
cuguucuuuaagacgucca

SEQ ID NO: 302652 - RNA, 11 nt, Human herpesvirus 3
cuguuuacacu

SEQ ID NO: 302653 - RNA, 13 nt, Human herpesvirus 3
cuguuuguuguua

SEQ ID NO: 302654 - RNA, 15 nt, Human herpesvirus 3
cuguuuuuacccuau

SEQ ID NO: 302655 - RNA, 23 nt, Human herpesvirus 3
cuuaaaggccgagcugguauaca

SEQ ID NO: 302656 - RNA, 12 nt, Human herpesvirus 3
cuuaacaaacau

SEQ ID NO: 302657 - RNA, 13 nt, Human herpesvirus 3
cuuaacaaacaua

SEQ ID NO: 302658 - RNA, 16 nt, Human herpesvirus 3
cuuaacaaacauauaa

SEQ ID NO: 302659 - RNA, 11 nt, Human herpesvirus 3
cuuacaccccc

SEQ ID NO: 302660 - RNA, 14 nt, Human herpesvirus 3
cuuagaucaauaug

SEQ ID NO: 302661 - RNA, 17 nt, Human herpesvirus 3
cuucaacacacccauac

SEQ ID NO: 302662 - RNA, 23 nt, Human herpesvirus 3
cuucaacacacccauacagugac

SEQ ID NO: 302663 - RNA, 21 nt, Human herpesvirus 3
cuucaaguuaaauaacauguc

SEQ ID NO: 302664 - RNA, 12 nt, Human herpesvirus 3
cuucacuggacu

SEQ ID NO: 302665 - RNA, 14 nt, Human herpesvirus 3
cuucaguacuuaaa

SEQ ID NO: 302666 - RNA, 15 nt, Human herpesvirus 3
cuucccgaaagcccg

SEQ ID NO: 302667 - RNA, 16 nt, Human herpesvirus 3
cuuccgcuaagucaga

SEQ ID NO: 302668 - RNA, 17 nt, Human herpesvirus 3
cuucggaugacuuugca

SEQ ID NO: 302669 - RNA, 18 nt, Human herpesvirus 3
cuucggaugacuuugcau

SEQ ID NO: 302670 - RNA, 19 nt, Human herpesvirus 3
cuucuugaagcguuuccag

SEQ ID NO: 302671 - RNA, 12 nt, Human herpesvirus 3
cuugaauugcca

SEQ ID NO: 302672 - RNA, 14 nt, Human herpesvirus 3
cuugacaacauuua

SEQ ID NO: 302673 - RNA, 15 nt, Human herpesvirus 3
cuugacaacauuuaa

SEQ ID NO: 302674 - RNA, 11 nt, Human herpesvirus 3
cuugacugugc

SEQ ID NO: 302675 - RNA, 17 nt, Human herpesvirus 3
cuugacugugcucccug

SEQ ID NO: 302676 - RNA, 20 nt, Human herpesvirus 3
cuugauacccucaaacacgg

SEQ ID NO: 302677 - RNA, 20 nt, Human herpesvirus 3
cuugaucgcggggguugugc

SEQ ID NO: 302678 - RNA, 17 nt, Human herpesvirus 3
cuuggaaacacccauac

SEQ ID NO: 302679 - RNA, 20 nt, Human herpesvirus 3
cuuggggguuuacaaguaca

SEQ ID NO: 302680 - RNA, 19 nt, Human herpesvirus 3
cuugguaaaaacuuuacag

SEQ ID NO: 302681 - RNA, 20 nt, Human herpesvirus 3
cuugguaaaaacuuuacaga

SEQ ID NO: 302682 - RNA, 14 nt, Human herpesvirus 3
cuuguaaaacauau

SEQ ID NO: 302683 - RNA, 16 nt, Human herpesvirus 3
cuuguaaaacauauca

SEQ ID NO: 302684 - RNA, 14 nt, Human herpesvirus 3
cuugucaaaacaua

SEQ ID NO: 302685 - RNA, 15 nt, Human herpesvirus 3
cuugucaaaacauac

SEQ ID NO: 302686 - RNA, 19 nt, Human herpesvirus 3
cuugucgcgcguguaugca

SEQ ID NO: 302687 - RNA, 20 nt, Human herpesvirus 3
cuuuaauaggcgcuacuuua

SEQ ID NO: 302688 - RNA, 20 nt, Human herpesvirus 3
cuuuacaagauauaauuugu

SEQ ID NO: 302689 - RNA, 18 nt, Human herpesvirus 3
cuuuauauauauguucca

SEQ ID NO: 302690 - RNA, 16 nt, Human herpesvirus 3
cuuuaucucccuaaaa

SEQ ID NO: 302691 - RNA, 20 nt, Human herpesvirus 3
cuuuaucugaaaagaccgac

SEQ ID NO: 302692 - RNA, 13 nt, Human herpesvirus 3
cuuugacuuugau

SEQ ID NO: 302693 - RNA, 20 nt, Human herpesvirus 3
cuuuggaccacggcuaauaa

SEQ ID NO: 302694 - RNA, 21 nt, Human herpesvirus 3
cuuuggaccacggcuaauaaa

SEQ ID NO: 302695 - RNA, 21 nt, Human herpesvirus 3
cuuugucgcucuaaugcagug

SEQ ID NO: 302696 - RNA, 18 nt, Human herpesvirus 3
cuuuuaaagcaucuauau

SEQ ID NO: 302697 - RNA, 21 nt, Human herpesvirus 3
cuuuuaaagcaucuauaugau

SEQ ID NO: 302698 - RNA, 20 nt, Human herpesvirus 3
cuuuuacaugauccacguaa

SEQ ID NO: 302699 - RNA, 18 nt, Human herpesvirus 3
cuuuucccccacauacaa

SEQ ID NO: 302700 - RNA, 22 nt, Human herpesvirus 3
cuuuuguuuguggacuuaccuu

SEQ ID NO: 302701 - RNA, 21 nt, Human herpesvirus 3
gaaaaauaauagucaauguuu

SEQ ID NO: 302702 - RNA, 23 nt, Human herpesvirus 3
gaaaaucgacaucguuuguuucu

SEQ ID NO: 302703 - RNA, 18 nt, Human herpesvirus 3
gaaaaucgucccauuuaa

SEQ ID NO: 302704 - RNA, 16 nt, Human herpesvirus 3
gaaacuuaauacagag

SEQ ID NO: 302705 - RNA, 18 nt, Human herpesvirus 3
gaaagcagucaacccauc

SEQ ID NO: 302706 - RNA, 15 nt, Human herpesvirus 3
gaaagguauauguca

SEQ ID NO: 302707 - RNA, 20 nt, Human herpesvirus 3
gaaauaacggucgcguguac

SEQ ID NO: 302708 - RNA, 19 nt, Human herpesvirus 3
gaaaucguccacuuaucca

SEQ ID NO: 302709 - RNA, 18 nt, Human herpesvirus 3
gaaaugccuuaaacaucc

SEQ ID NO: 302710 - RNA, 19 nt, Human herpesvirus 3
gaaaugccuuaaacaucca

SEQ ID NO: 302711 - RNA, 23 nt, Human herpesvirus 3
gaaauguaaucaguugggauaaa

SEQ ID NO: 302712 - RNA, 12 nt, Human herpesvirus 3
gaacaaacacuc

SEQ ID NO: 302713 - RNA, 20 nt, Human herpesvirus 3
gaaccgacccaggacauaaa

SEQ ID NO: 302714 - RNA, 23 nt, Human herpesvirus 3
gaaccgccgguggucuuguuuga

SEQ ID NO: 302715 - RNA, 21 nt, Human herpesvirus 3
gaacgucgucgucugauguga

SEQ ID NO: 302716 - RNA, 22 nt, Human herpesvirus 3
gaacguuuccuagccacaccca

SEQ ID NO: 302717 - RNA, 15 nt, Human herpesvirus 3
gaacuacugaacucc

SEQ ID NO: 302718 - RNA, 20 nt, Human herpesvirus 3
gaacucugaguucaaagcaa

SEQ ID NO: 302719 - RNA, 13 nt, Human herpesvirus 3
gaagacuccagua

SEQ ID NO: 302720 - RNA, 19 nt, Human herpesvirus 3
gaagacuuugacuuugaug

SEQ ID NO: 302721 - RNA, 15 nt, Human herpesvirus 3
gaagagaacugugaa

SEQ ID NO: 302722 - RNA, 16 nt, Human herpesvirus 3
gaagauaggguguaua

SEQ ID NO: 302723 - RNA, 14 nt, Human herpesvirus 3
gaagaugaacuaau

SEQ ID NO: 302724 - RNA, 16 nt, Human herpesvirus 3
gaagcuauacacaagu

SEQ ID NO: 302725 - RNA, 16 nt, Human herpesvirus 3
gaagcugccgucaaug

SEQ ID NO: 302726 - RNA, 15 nt, Human herpesvirus 3
gaagugcauauccag

SEQ ID NO: 302727 - RNA, 22 nt, Human herpesvirus 3
gaaguguucuaaaacacuguca

SEQ ID NO: 302728 - RNA, 16 nt, Human herpesvirus 3
gaauaaacgacacaaa

SEQ ID NO: 302729 - RNA, 13 nt, Human herpesvirus 3
gaauaauacacac

SEQ ID NO: 302730 - RNA, 21 nt, Human herpesvirus 3
gaauaccaaaaagaauuaaaa

SEQ ID NO: 302731 - RNA, 23 nt, Human herpesvirus 3
gaaucgcuuauuuaaacuaaaga

SEQ ID NO: 302732 - RNA, 18 nt, Human herpesvirus 3
gaauguaauaaaaugaua

SEQ ID NO: 302733 - RNA, 21 nt, Human herpesvirus 3
gaauguaauaaaaugauauac

SEQ ID NO: 302734 - RNA, 21 nt, Human herpesvirus 3
gaauguaauucgugugcaaua

SEQ ID NO: 302735 - RNA, 18 nt, Human herpesvirus 3
gaauucuuagaaaagcca

SEQ ID NO: 302736 - RNA, 14 nt, Human herpesvirus 3
gacaaacgugugua

SEQ ID NO: 302737 - RNA, 12 nt, Human herpesvirus 3
gacaacauuuaa

SEQ ID NO: 302738 - RNA, 20 nt, Human herpesvirus 3
gacaagaacuuugcauguuu

SEQ ID NO: 302739 - RNA, 22 nt, Human herpesvirus 3
gacacaaaaaauuuauauuuaa

SEQ ID NO: 302740 - RNA, 20 nt, Human herpesvirus 3
gacacaguccggacaauuaa

SEQ ID NO: 302741 - RNA, 22 nt, Human herpesvirus 3
gacaccacguguugcuguuguc

SEQ ID NO: 302742 - RNA, 12 nt, Human herpesvirus 3
gacaccaugacg

SEQ ID NO: 302743 - RNA, 23 nt, Human herpesvirus 3
gacagauucaagacuaacauuua

SEQ ID NO: 302744 - RNA, 17 nt, Human herpesvirus 3
gacagugcuugacugug

SEQ ID NO: 302745 - RNA, 19 nt, Human herpesvirus 3
gacagugcuugacugugcu

SEQ ID NO: 302746 - RNA, 20 nt, Human herpesvirus 3
gacagugcuugacugugcuc

SEQ ID NO: 302747 - RNA, 22 nt, Human herpesvirus 3
gacaguggcggauaacugccug

SEQ ID NO: 302748 - RNA, 16 nt, Human herpesvirus 3
gacauaauuaaugcaa

SEQ ID NO: 302749 - RNA, 22 nt, Human herpesvirus 3
gacauaauuaaugcaaccauca

SEQ ID NO: 302750 - RNA, 19 nt, Human herpesvirus 3
gcgccaauaaaagcagaca

SEQ ID NO: 302751 - RNA, 15 nt, Human herpesvirus 3
gcgcccaccucggcc

SEQ ID NO: 302752 - RNA, 14 nt, Human herpesvirus 3
gcgcccggcggacc

SEQ ID NO: 302753 - RNA, 20 nt, Human herpesvirus 3
gcgcccggcggaccccggga

SEQ ID NO: 302754 - RNA, 14 nt, Human herpesvirus 3
gcgcggaugcauuu

SEQ ID NO: 302755 - RNA, 14 nt, Human herpesvirus 3
gcggaugcauuuau

SEQ ID NO: 302756 - RNA, 20 nt, Human herpesvirus 3
gcguaugaaauguaaucagu

SEQ ID NO: 302757 - RNA, 21 nt, Human herpesvirus 3
gcguguauacaaacaaagccu

SEQ ID NO: 302758 - RNA, 15 nt, Human herpesvirus 3
gcguguaugcacaac

SEQ ID NO: 302759 - RNA, 24 nt, Human herpesvirus 3
gcguuguucugcauaagcucugua

SEQ ID NO: 302760 - RNA, 15 nt, Human herpesvirus 3
gcuagaacgugcguu

SEQ ID NO: 302761 - RNA, 18 nt, Human herpesvirus 3
gcuauuggcuccacucca

SEQ ID NO: 302762 - RNA, 21 nt, Human herpesvirus 3
gcucccauuccaaaugcgcaa

SEQ ID NO: 302763 - RNA, 21 nt, Human herpesvirus 3
gcuccugugaggcuauuauau

SEQ ID NO: 302764 - RNA, 14 nt, Human herpesvirus 3
gcucguauauacau

SEQ ID NO: 302765 - RNA, 23 nt, Human herpesvirus 3
gcucguuuuaugagaguuuacaa

SEQ ID NO: 302766 - RNA, 15 nt, Human herpesvirus 3
gcucugcaaauacaa

SEQ ID NO: 302767 - RNA, 16 nt, Human herpesvirus 3
gcucuguaugcugaua

SEQ ID NO: 302768 - RNA, 19 nt, Human herpesvirus 3
gcugccgucaaugcaacua

SEQ ID NO: 302769 - RNA, 14 nt, Human herpesvirus 3
gcugcugaagcuga

SEQ ID NO: 302770 - RNA, 12 nt, Human herpesvirus 3
gcuguacaccgc

SEQ ID NO: 302771 - RNA, 20 nt, Human herpesvirus 3
gcuguauugagaaaaccaaa

SEQ ID NO: 302772 - RNA, 21 nt, Human herpesvirus 3
gcugucgucauauuacauuaa

SEQ ID NO: 302773 - RNA, 18 nt, Human herpesvirus 3
gcuguuguugcuaguauu

SEQ ID NO: 302774 - RNA, 23 nt, Human herpesvirus 3
gcuuacaguccaguggacaguaa

SEQ ID NO: 302775 - RNA, 20 nt, Human herpesvirus 3
gcuuauauuuuacauacaaa

SEQ ID NO: 302776 - RNA, 18 nt, Human herpesvirus 3
gcuucaccagagucuucu

SEQ ID NO: 302777 - RNA, 17 nt, Human herpesvirus 3
gcuuccgaaagcaguca

SEQ ID NO: 302778 - RNA, 14 nt, Human herpesvirus 3
gcuugaauugccau

SEQ ID NO: 302779 - RNA, 15 nt, Human herpesvirus 3
gcuugagaugagcag

SEQ ID NO: 302780 - RNA, 14 nt, Human herpesvirus 3
gcuugcagcuuguc

SEQ ID NO: 302781 - RNA, 14 nt, Human herpesvirus 3
gcuugcuguucuca

SEQ ID NO: 302782 - RNA, 13 nt, Human herpesvirus 3
ccacgcuacaucc

SEQ ID NO: 302783 - RNA, 22 nt, Human herpesvirus 3
ccacguagcaaagcuacacuuu

SEQ ID NO: 302784 - RNA, 16 nt, Human herpesvirus 3
ccacgugagcuugcaa

SEQ ID NO: 302785 - RNA, 13 nt, Human herpesvirus 3
ccacuuacaggac

SEQ ID NO: 302786 - RNA, 12 nt, Human herpesvirus 3
ccagaacgccau

SEQ ID NO: 302787 - RNA, 23 nt, Human herpesvirus 3
ccagaagaacuagcuaccguuag

SEQ ID NO: 302788 - RNA, 15 nt, Human herpesvirus 3
ccagaaucucuucau

SEQ ID NO: 302789 - RNA, 19 nt, Human herpesvirus 3
ccagauauaaacaauuuac

SEQ ID NO: 302790 - RNA, 18 nt, Human herpesvirus 3
ccagcuguccggacucca

SEQ ID NO: 302791 - RNA, 17 nt, Human herpesvirus 3
ccaggcgaggacuccac

SEQ ID NO: 302792 - RNA, 12 nt, Human herpesvirus 3
guaaaguuugaa

SEQ ID NO: 302793 - RNA, 19 nt, Human herpesvirus 3
guaacaugcgcuacuaugu

SEQ ID NO: 302794 - RNA, 13 nt, Human herpesvirus 3
guaaccuacacaa

SEQ ID NO: 302795 - RNA, 13 nt, Human herpesvirus 3
guaacguuuguaa

SEQ ID NO: 302796 - RNA, 15 nt, Human herpesvirus 3
guaauagauucgccu

SEQ ID NO: 302797 - RNA, 15 nt, Human herpesvirus 3
guaaucucacuguuu

SEQ ID NO: 302798 - RNA, 21 nt, Human herpesvirus 3
guacacgauucggaaugcccg

SEQ ID NO: 302799 - RNA, 20 nt, Human herpesvirus 3
guaccaguaaaaagaugaua

SEQ ID NO: 302800 - RNA, 14 nt, Human herpesvirus 3
guaccaugggagac

SEQ ID NO: 302801 - RNA, 22 nt, Human herpesvirus 3
guaccauuugauacguuguuca

SEQ ID NO: 302802 - RNA, 23 nt, Human herpesvirus 3
guaccauuugauacguuguucau

SEQ ID NO: 302803 - RNA, 21 nt, Human herpesvirus 3
guaccccaaggcccauauccc

SEQ ID NO: 302804 - RNA, 15 nt, Human herpesvirus 3
guaccguuugcacaa

SEQ ID NO: 302805 - RNA, 19 nt, Human herpesvirus 3
guacguguaugcuguuauc

SEQ ID NO: 302806 - RNA, 14 nt, Human herpesvirus 3
guacuacacccagu

SEQ ID NO: 302807 - RNA, 22 nt, Human herpesvirus 3
guacuuguaaacccccaagcaa

SEQ ID NO: 302808 - RNA, 12 nt, Human herpesvirus 3
guagacuguggc

SEQ ID NO: 302809 - RNA, 19 nt, Human herpesvirus 3
guagagcccacacaaucag

SEQ ID NO: 302810 - RNA, 15 nt, Human herpesvirus 3
guagcaucggauauu

SEQ ID NO: 302811 - RNA, 23 nt, Human herpesvirus 3
guagccagccaacacaguguuca

SEQ ID NO: 302812 - RNA, 12 nt, Human herpesvirus 3
guaguacagggc

SEQ ID NO: 302813 - RNA, 22 nt, Human herpesvirus 3
guauacacacccaccccagaua

SEQ ID NO: 302814 - RNA, 21 nt, Human herpesvirus 3
guauaucauuuuauuacauuc

SEQ ID NO: 302815 - RNA, 15 nt, Human herpesvirus 3
guauaugagccguau

SEQ ID NO: 302816 - RNA, 20 nt, Human herpesvirus 3
guauaugguaugucugucau

SEQ ID NO: 302817 - RNA, 17 nt, Human herpesvirus 3
guauaugucaacauuua

SEQ ID NO: 302818 - RNA, 15 nt, Human herpesvirus 3
guauccgaagccuuu

SEQ ID NO: 302819 - RNA, 17 nt, Human herpesvirus 3
guaugaucguccuucaa

SEQ ID NO: 302820 - RNA, 22 nt, Human herpesvirus 3
guauuacagacauacacuggua

SEQ ID NO: 302821 - RNA, 23 nt, Human herpesvirus 3
guauuacagacauacacugguaa

SEQ ID NO: 302822 - RNA, 21 nt, Human herpesvirus 3
guauucucuacaauacuuuau

SEQ ID NO: 302823 - RNA, 21 nt, Human herpesvirus 3
guauucuguaaaggaucucca

SEQ ID NO: 302824 - RNA, 19 nt, Human herpesvirus 3
gucaaaaagccugugacaa

SEQ ID NO: 302825 - RNA, 16 nt, Human herpesvirus 3
gucaaaacauacuaau

SEQ ID NO: 302826 - RNA, 23 nt, Human herpesvirus 3
gucaaagucuucaaagaacucug

SEQ ID NO: 302827 - RNA, 20 nt, Human herpesvirus 3
gucagauauuuugcagccau

SEQ ID NO: 302828 - RNA, 19 nt, Human herpesvirus 3
guuuuaaguccuguaacau

SEQ ID NO: 302829 - RNA, 13 nt, Human herpesvirus 3
guuuuaguagaaa

SEQ ID NO: 302830 - RNA, 20 nt, Human herpesvirus 3
guuuucguuuugguguuaca

SEQ ID NO: 302831 - RNA, 22 nt, Human herpesvirus 3
guuuucguuuugguguuacauc

SEQ ID NO: 302832 - RNA, 21 nt, Human herpesvirus 3
guuuuuauuagaacguuuauc

SEQ ID NO: 302833 - RNA, 11 nt, Human herpesvirus 3
uaaaaaagccg

SEQ ID NO: 302834 - RNA, 18 nt, Human herpesvirus 3
uaaaaacauaacaccaga

SEQ ID NO: 302835 - RNA, 16 nt, Human herpesvirus 3
uaaaaacggauauuaa

SEQ ID NO: 302836 - RNA, 13 nt, Human herpesvirus 3
uaaaaacuuuaca

SEQ ID NO: 302837 - RNA, 17 nt, Human herpesvirus 3
uaaaaagaugauacaca

SEQ ID NO: 302838 - RNA, 13 nt, Human herpesvirus 3
uaaaaauguaaua

SEQ ID NO: 302839 - RNA, 15 nt, Human herpesvirus 3
uaaaacaaacauuca

SEQ ID NO: 302840 - RNA, 16 nt, Human herpesvirus 3
uaaaacaaugaaccau

SEQ ID NO: 302841 - RNA, 23 nt, Human herpesvirus 3
uaaaacaggcguguuuauguaca

SEQ ID NO: 302842 - RNA, 14 nt, Human herpesvirus 3
uaaaagacuaauaa

SEQ ID NO: 302843 - RNA, 14 nt, Human herpesvirus 3
uaaaagccguuaaa

SEQ ID NO: 302844 - RNA, 21 nt, Human herpesvirus 3
uaaaagguuuauuuacuuuac

SEQ ID NO: 302845 - RNA, 17 nt, Human herpesvirus 3
uaaaaguacuacugcug

SEQ ID NO: 302846 - RNA, 13 nt, Human herpesvirus 3
uaaaaguuacacu

SEQ ID NO: 302847 - RNA, 19 nt, Human herpesvirus 3
uaaaaugauauacacagac

SEQ ID NO: 302848 - RNA, 18 nt, Human herpesvirus 3
uaaaauucgcacaccuuc

SEQ ID NO: 302849 - RNA, 21 nt, Human herpesvirus 3
uaaaauuuggaaacacuccca

SEQ ID NO: 302850 - RNA, 21 nt, Human herpesvirus 3
uaaacaacauggcuaugccau

SEQ ID NO: 302851 - RNA, 23 nt, Human herpesvirus 3
uaaacagagaucucuguuacuua

SEQ ID NO: 302852 - RNA, 16 nt, Human herpesvirus 3
uaaacauaacagucua

SEQ ID NO: 302853 - RNA, 17 nt, Human herpesvirus 3
uaaacauccacagucug

SEQ ID NO: 302854 - RNA, 17 nt, Human herpesvirus 3
uaaacguauucuauuaa

SEQ ID NO: 302855 - RNA, 15 nt, Human herpesvirus 3
uaaagagccauuucc

SEQ ID NO: 302856 - RNA, 15 nt, Human herpesvirus 3
uaaagguuuauuccg

SEQ ID NO: 302857 - RNA, 22 nt, Human herpesvirus 3
uaaagguuuauuccggagccua

SEQ ID NO: 302858 - RNA, 23 nt, Human herpesvirus 3
uaaagucguuuauaucuguuaca

SEQ ID NO: 302859 - RNA, 20 nt, Human herpesvirus 3
uaaauaccuauuucaugcuu

SEQ ID NO: 302860 - RNA, 23 nt, Human herpesvirus 3
uaaauaguaccacgugguauuau

SEQ ID NO: 302861 - RNA, 13 nt, Human herpesvirus 3
uaaauaugcuaua

SEQ ID NO: 302862 - RNA, 14 nt, Human herpesvirus 3
uaaauaugugcauc

SEQ ID NO: 302863 - RNA, 13 nt, Human herpesvirus 3
uaaauauuacccc

SEQ ID NO: 302864 - RNA, 17 nt, Human herpesvirus 3
uaaaucguuuaucacug

SEQ ID NO: 302865 - RNA, 14 nt, Human herpesvirus 3
uaaauguacuauaa

SEQ ID NO: 302866 - RNA, 13 nt, Human herpesvirus 3
uaaauguguauua

SEQ ID NO: 302867 - RNA, 20 nt, Human herpesvirus 3
uaaauguguauuauauguca

SEQ ID NO: 302868 - RNA, 16 nt, Human herpesvirus 3
uaaauguugucaagac

SEQ ID NO: 302869 - RNA, 23 nt, Human herpesvirus 3
ugcgaagcugccgucaaugcaac

SEQ ID NO: 302870 - RNA, 14 nt, Human herpesvirus 3
ugcgaugcauuaac

SEQ ID NO: 302871 - RNA, 19 nt, Human herpesvirus 3
ugcgggcuugcuguucuca

SEQ ID NO: 302872 - RNA, 11 nt, Human herpesvirus 3
ugcgugauauu

SEQ ID NO: 302873 - RNA, 16 nt, Human herpesvirus 3
ugcguuucugucgaug

SEQ ID NO: 302874 - RNA, 21 nt, Human herpesvirus 3
ugcuaaccauagacuguucua

SEQ ID NO: 302875 - RNA, 22 nt, Human herpesvirus 3
ugcuaaccauagacuguucuac

SEQ ID NO: 302876 - RNA, 20 nt, Human herpesvirus 3
ugcuacgucgaugugaucca

SEQ ID NO: 302877 - RNA, 13 nt, Human herpesvirus 3
ugcucauggaauu

SEQ ID NO: 302878 - RNA, 15 nt, Human herpesvirus 3
ugcucugcaaauaca

SEQ ID NO: 302879 - RNA, 22 nt, Human herpesvirus 3
ugcugauacauaaacacagagu

SEQ ID NO: 302880 - RNA, 18 nt, Human herpesvirus 3
ugcugggggacgacguga

SEQ ID NO: 302881 - RNA, 11 nt, Human herpesvirus 3
ugcuguucuca

SEQ ID NO: 302882 - RNA, 23 nt, Human herpesvirus 3
ugcuuggggguuuacaaguacaa

SEQ ID NO: 302883 - RNA, 20 nt, Human herpesvirus 3
ugcuuguaaaacauaucaau

SEQ ID NO: 302884 - RNA, 17 nt, Human herpesvirus 3
ugcuugucaaaacauac

SEQ ID NO: 302885 - RNA, 20 nt, Human herpesvirus 3
ugcuuuauuaccaacuguau

SEQ ID NO: 302886 - RNA, 23 nt, Human herpesvirus 3
uggaaacaacaacacagccuuag

SEQ ID NO: 302887 - RNA, 12 nt, Human herpesvirus 3
uggaaaugugcu

SEQ ID NO: 302888 - RNA, 16 nt, Human herpesvirus 3
uggaaucguaguaaaa

SEQ ID NO: 302889 - RNA, 21 nt, Human herpesvirus 3
uggaaucguaguaaaacggaa

SEQ ID NO: 302890 - RNA, 17 nt, Human herpesvirus 3
uggaaugggagcucuuu

SEQ ID NO: 302891 - RNA, 15 nt, Human herpesvirus 3
uggaauuaaugcaac

SEQ ID NO: 302892 - RNA, 20 nt, Human herpesvirus 3
uggacagugcuugacugugc

SEQ ID NO: 302893 - RNA, 18 nt, Human herpesvirus 3
uggacaucgcugaugcca

SEQ ID NO: 302894 - RNA, 21 nt, Human herpesvirus 3
uggacauugcggaucccaaaa

SEQ ID NO: 302895 - RNA, 19 nt, Human herpesvirus 3
uggacuguuuaacggaaga

SEQ ID NO: 302896 - RNA, 20 nt, Human herpesvirus 3
uggagaaccgcgucuauguc

SEQ ID NO: 302897 - RNA, 16 nt, Human herpesvirus 3
uggagaugcaaccaag

SEQ ID NO: 302898 - RNA, 15 nt, Human herpesvirus 3
uggagcguacugcag

SEQ ID NO: 302899 - RNA, 17 nt, Human herpesvirus 3
uggagcguacugcagau

SEQ ID NO: 302900 - RNA, 22 nt, Human herpesvirus 3
uggauauagcgcugucgucaua

SEQ ID NO: 302901 - RNA, 22 nt, Human herpesvirus 3
uggauaugggauuauggaaguc

SEQ ID NO: 302902 - RNA, 15 nt, Human herpesvirus 3
uggcauuaaacccac

SEQ ID NO: 302903 - RNA, 14 nt, Human herpesvirus 3
uggcgcaugccauu

SEQ ID NO: 302904 - RNA, 18 nt, Human herpesvirus 3
uggcuaugccauuugaga

SEQ ID NO: 302905 - RNA, 20 nt, Human herpesvirus 3
uggcuaugccauuugagaua

SEQ ID NO: 302906 - RNA, 18 nt, Human herpesvirus 3
ugggaagccguaaucaau

SEQ ID NO: 302907 - RNA, 14 nt, Human herpesvirus 3
ugggacuacaagca

SEQ ID NO: 302908 - RNA, 18 nt, Human herpesvirus 3
ugggcgggauuacauugc

SEQ ID NO: 302909 - RNA, 23 nt, Human herpesvirus 3
ugggguucggaauuaucacggga

SEQ ID NO: 302910 - RNA, 23 nt, Human herpesvirus 3
ugggucugccguauuuugcauaa

SEQ ID NO: 302911 - RNA, 19 nt, Human herpesvirus 3
ugggugcaugggauuuuaa

SEQ ID NO: 302912 - RNA, 18 nt, Human herpesvirus 3
ugguacaagaaaccaugu

SEQ ID NO: 302913 - RNA, 20 nt, Human herpesvirus 3
ugguagcaauucccaguaaa

SEQ ID NO: 302914 - RNA, 15 nt, Human herpesvirus 3
ugguauauuuguaug

SEQ ID NO: 302915 - RNA, 20 nt, Human herpesvirus 3
uggucuuccuugggcuguua

SEQ ID NO: 302916 - RNA, 14 nt, Human herpesvirus 3
uggucuuguuugaa

SEQ ID NO: 302917 - RNA, 11 nt, Human herpesvirus 3
ugguguuacau

SEQ ID NO: 302918 - RNA, 15 nt, Human herpesvirus 3
ugguuuuuauugacu

SEQ ID NO: 302919 - RNA, 17 nt, Human herpesvirus 3
uguaaaauaaacugaau

SEQ ID NO: 302920 - RNA, 16 nt, Human herpesvirus 3
uguaaccuacacaaca

SEQ ID NO: 302921 - RNA, 17 nt, Human herpesvirus 3
uguaaucaguugggaua

SEQ ID NO: 302922 - RNA, 18 nt, Human herpesvirus 3
uguaauucgugugcaaua

SEQ ID NO: 302923 - RNA, 16 nt, Human herpesvirus 3
uguaccguuugcacaa

SEQ ID NO: 302924 - RNA, 20 nt, Human herpesvirus 3
uguacgcuccagaacgccau

SEQ ID NO: 302925 - RNA, 16 nt, Human herpesvirus 3
uguagcaucggauauu

SEQ ID NO: 302926 - RNA, 12 nt, Human herpesvirus 3
uguaguacaggg

SEQ ID NO: 302927 - RNA, 13 nt, Human herpesvirus 3
uguaguacagggc

SEQ ID NO: 302928 - RNA, 16 nt, Human herpesvirus 3
uguauaaggggcuuga

SEQ ID NO: 302929 - RNA, 22 nt, Human herpesvirus 3
uguauaauaaaaagucacuaua

SEQ ID NO: 302930 - RNA, 23 nt, Human herpesvirus 3
uguauauagauaagacccgguga

SEQ ID NO: 302931 - RNA, 19 nt, Human herpesvirus 3
uguaucaauaaauuuacau

SEQ ID NO: 302932 - RNA, 12 nt, Human herpesvirus 3
uguaucuguaug

SEQ ID NO: 302933 - RNA, 15 nt, Human herpesvirus 3
uguaucuuugcuguc

SEQ ID NO: 302934 - RNA, 15 nt, Human herpesvirus 3
uguaugcacaacaaa

SEQ ID NO: 302935 - RNA, 23 nt, Human herpesvirus 3
uguaugcacaacaaaagcuauau

SEQ ID NO: 302936 - RNA, 21 nt, Human herpesvirus 3
uguauguaaaauaaacugaau

SEQ ID NO: 302937 - RNA, 17 nt, Human herpesvirus 3
uguauuauaugucacau

SEQ ID NO: 302938 - RNA, 15 nt, Human herpesvirus 3
uguauuguaguacag

SEQ ID NO: 302939 - RNA, 21 nt, Human herpesvirus 3
uguauuuuauuuagugauuac

SEQ ID NO: 302940 - RNA, 14 nt, Human herpesvirus 3
ugucaaaacauacu

SEQ ID NO: 302941 - RNA, 22 nt, Human herpesvirus 3
uccacgcgcgugucuauaguca

SEQ ID NO: 302942 - RNA, 15 nt, Human herpesvirus 3
uccacgggucaugca

SEQ ID NO: 302943 - RNA, 15 nt, Human herpesvirus 3
uccacuuauccaaca

SEQ ID NO: 302944 - RNA, 17 nt, Human herpesvirus 3
uccacuuauccaacaaa

SEQ ID NO: 302945 - RNA, 19 nt, Human herpesvirus 3
uccacuuauccaacaaauu

SEQ ID NO: 302946 - RNA, 13 nt, Human herpesvirus 3
uccagaguacagg

SEQ ID NO: 302947 - RNA, 15 nt, Human herpesvirus 3
uccagaguacagggu

SEQ ID NO: 302948 - RNA, 21 nt, Human herpesvirus 3
uccagauugucccguguguga

SEQ ID NO: 302949 - RNA, 13 nt, Human herpesvirus 3
uccagcaucaucu

SEQ ID NO: 302950 - RNA, 22 nt, Human herpesvirus 3
uccauuaaaaguuuacguguau

SEQ ID NO: 302951 - RNA, 17 nt, Human herpesvirus 3
uccauuaaagagccauu

SEQ ID NO: 302952 - RNA, 19 nt, Human herpesvirus 3
ucccccacauacaacauga

SEQ ID NO: 302953 - RNA, 22 nt, Human herpesvirus 3
uccccggaaauauaacauacau

SEQ ID NO: 302954 - RNA, 14 nt, Human herpesvirus 3
uccccguacccgcu

SEQ ID NO: 302955 - RNA, 20 nt, Human herpesvirus 3
ucccgucauagcaaauacaa

SEQ ID NO: 302956 - RNA, 21 nt, Human herpesvirus 3
ucccgucauagcaaauacaaa

SEQ ID NO: 302957 - RNA, 13 nt, Human herpesvirus 3
uccgaaagcaguc

SEQ ID NO: 302958 - RNA, 21 nt, Human herpesvirus 3
uccgaucgguuagaugcauau

SEQ ID NO: 302959 - RNA, 18 nt, Human herpesvirus 3
uccgauguuccaauggau

SEQ ID NO: 302960 - RNA, 16 nt, Human herpesvirus 3
uccggcaucuccauca

SEQ ID NO: 302961 - RNA, 15 nt, Human herpesvirus 3
uccgugggguguuua

SEQ ID NO: 302962 - RNA, 14 nt, Human herpesvirus 3
uccguuauggaguu

SEQ ID NO: 302963 - RNA, 19 nt, Human herpesvirus 3
uccuagaagcguuaccaca

SEQ ID NO: 302964 - RNA, 13 nt, Human herpesvirus 3
uccuuaaaauaaa

SEQ ID NO: 302965 - RNA, 16 nt, Human herpesvirus 3
uccuucaacacaccca

SEQ ID NO: 302966 - RNA, 18 nt, Human herpesvirus 3
uccuuggacuaacaaagu

SEQ ID NO: 302967 - RNA, 16 nt, Human herpesvirus 3
uccuuucaauauucca

SEQ ID NO: 302968 - RNA, 13 nt, Human herpesvirus 3
ucgagcuucacug

SEQ ID NO: 302969 - RNA, 10 nt, Human herpesvirus 3
ucgauuucaa

SEQ ID NO: 302970 - RNA, 20 nt, Human herpesvirus 3
ucgcaugccccccucccuca

SEQ ID NO: 302971 - RNA, 22 nt, Human herpesvirus 3
ucgcgauguuuuuaauccaaug

SEQ ID NO: 302972 - RNA, 16 nt, Human herpesvirus 3
ucgcgguccguuucau

SEQ ID NO: 302973 - RNA, 18 nt, Human herpesvirus 3
ucgcguguacgaaaaccg

SEQ ID NO: 302974 - RNA, 16 nt, Human herpesvirus 3
ucgcuguuagaggcau

SEQ ID NO: 302975 - RNA, 23 nt, Human herpesvirus 3
ucggaaacccucaagaauguaau

SEQ ID NO: 302976 - RNA, 20 nt, Human herpesvirus 3
ucggaugacuuugcauugga

SEQ ID NO: 302977 - RNA, 17 nt, Human herpesvirus 3
ucggcgcggaugcauuu

SEQ ID NO: 302978 - RNA, 20 nt, Human herpesvirus 3
ucggcguccucuguuacauu

SEQ ID NO: 302979 - RNA, 22 nt, Human herpesvirus 3
ucgggcuuuucccccacauaca

SEQ ID NO: 302980 - RNA, 20 nt, Human herpesvirus 3
ucggguaaaacacacaccag

SEQ ID NO: 302981 - RNA, 14 nt, Human herpesvirus 3
ucggucugauagcg

SEQ ID NO: 302982 - RNA, 16 nt, Human herpesvirus 3
ucgguuagaugcauau

SEQ ID NO: 302983 - RNA, 19 nt, Human herpesvirus 3
ucgucguucgaauccuaga

SEQ ID NO: 302984 - RNA, 12 nt, Human herpesvirus 3
ucgugugcaaua

SEQ ID NO: 302985 - RNA, 15 nt, Human herpesvirus 3
ucguuauauucacau

SEQ ID NO: 302986 - RNA, 14 nt, Human herpesvirus 3
ucguuuaucacugu

SEQ ID NO: 302987 - RNA, 18 nt, Human herpesvirus 3
ucguuuugguguuacauc

SEQ ID NO: 302988 - RNA, 18 nt, Human herpesvirus 3
ucguuuuugcauaugaca

SEQ ID NO: 302989 - RNA, 13 nt, Human herpesvirus 3
ucuaaaacacugu

SEQ ID NO: 302990 - RNA, 22 nt, Human herpesvirus 3
ucuaaacguggccauuacuaaa

SEQ ID NO: 302991 - RNA, 23 nt, Human herpesvirus 3
ucuaacaaugcacugaaccacaa

SEQ ID NO: 302992 - RNA, 16 nt, Human herpesvirus 3
ucuaauaaaaacauca

SEQ ID NO: 302993 - RNA, 22 nt, Human herpesvirus 3
ucuaauaaaaacaucaaaucau

SEQ ID NO: 302994 - RNA, 22 nt, Human herpesvirus 3
ucuacaccuaacuuuacuguua

SEQ ID NO: 302995 - RNA, 13 nt, Human herpesvirus 3
ucuacagauuuau

SEQ ID NO: 302996 - RNA, 22 nt, Human herpesvirus 3
ucuacagcacccuuuuguaaaa

SEQ ID NO: 302997 - RNA, 15 nt, Human herpesvirus 3
ucuacgugguaccaa

SEQ ID NO: 302998 - RNA, 23 nt, Human herpesvirus 3
ucuagaugauguugauauccaag

SEQ ID NO: 302999 - RNA, 17 nt, Human herpesvirus 3
ucuauaaguauggagug

SEQ ID NO: 303000 - RNA, 18 nt, Human herpesvirus 3
ucuauaaguggggguuua

SEQ ID NO: 303001 - RNA, 17 nt, Human herpesvirus 3
ucuauaugauucaagua

SEQ ID NO: 303002 - RNA, 14 nt, Human herpesvirus 3
ucuaucgcacauca

SEQ ID NO: 303003 - RNA, 14 nt, Human herpesvirus 3
ucucaaaacuuaag

SEQ ID NO: 303004 - RNA, 14 nt, Human herpesvirus 3
ucuccaaccauuca

SEQ ID NO: 303005 - RNA, 19 nt, Human herpesvirus 3
ucuccauuacgcaucacag

SEQ ID NO: 303006 - RNA, 14 nt, Human herpesvirus 3
ucucccggaugaac

SEQ ID NO: 303007 - RNA, 12 nt, Human herpesvirus 3
ucuccgguuuua

SEQ ID NO: 303008 - RNA, 22 nt, Human herpesvirus 3
ucucgacguccaaguccaauca

SEQ ID NO: 303009 - RNA, 12 nt, Human herpesvirus 3
ucucguaaaggu

SEQ ID NO: 303010 - RNA, 16 nt, Human herpesvirus 3
ucucguacguccauga

SEQ ID NO: 303011 - RNA, 23 nt, Human herpesvirus 3
ucucuggaauaaaacguuuuaaa

SEQ ID NO: 303012 - RNA, 14 nt, Human herpesvirus 3
ucucuggaccccca

SEQ ID NO: 303013 - RNA, 11 nt, Human herpesvirus 3
ucucuucauau

SEQ ID NO: 303014 - RNA, 20 nt, Human herpesvirus 3
ucugauucggguaaaacaca

SEQ ID NO: 303015 - RNA, 21 nt, Human herpesvirus 3
ucugcaaucauaaaugcaagu

SEQ ID NO: 303016 - RNA, 23 nt, Human herpesvirus 3
ucugcgaagcugccgucaaugca

SEQ ID NO: 303017 - RNA, 21 nt, Human herpesvirus 3
ucuggaguacuacacccagua

SEQ ID NO: 303018 - RNA, 21 nt, Human herpesvirus 3
ucuguaauggaggugaacaga

SEQ ID NO: 303019 - RNA, 12 nt, Human herpesvirus 3
ucuguacaacac

SEQ ID NO: 303020 - RNA, 14 nt, Human herpesvirus 3
ucuguuacauuucg

SEQ ID NO: 303021 - RNA, 18 nt, Human herpesvirus 3
ucuuaacgggguuauuau

SEQ ID NO: 303022 - RNA, 15 nt, Human herpesvirus 3
ucuuaacguugauga

SEQ ID NO: 303023 - RNA, 14 nt, Human herpesvirus 3
ucuuacuugagauu

SEQ ID NO: 303024 - RNA, 17 nt, Human herpesvirus 3
ucuucauccccugauga

SEQ ID NO: 303025 - RNA, 14 nt, Human herpesvirus 3
ucuugcguaccaua

SEQ ID NO: 303026 - RNA, 22 nt, Human herpesvirus 3
ucuuguccaacuguaucuguau

SEQ ID NO: 303027 - RNA, 22 nt, Human herpesvirus 3
ucuuuaagacguccacacagcc

SEQ ID NO: 303028 - RNA, 22 nt, Human herpesvirus 3
ucuuuaauaggcgcuacuuuau

SEQ ID NO: 303029 - RNA, 21 nt, Human herpesvirus 3
ucuuugaucccagcaacccca

SEQ ID NO: 303030 - RNA, 14 nt, Human herpesvirus 3
ucuuuuacaacgua

SEQ ID NO: 303031 - RNA, 13 nt, Human herpesvirus 3
ugaaaaaucauua

SEQ ID NO: 303032 - RNA, 19 nt, Human herpesvirus 3
ugaaaaccuggguguguua

SEQ ID NO: 303033 - RNA, 20 nt, Human herpesvirus 3
ugaaaaucgucccauuuaaa

SEQ ID NO: 303034 - RNA, 13 nt, Human herpesvirus 3
ugaaacaguaaaa

SEQ ID NO: 303035 - RNA, 14 nt, Human herpesvirus 3
ugaaacgucguuau

SEQ ID NO: 303036 - RNA, 19 nt, Human herpesvirus 3
ugaaacgucguuauauuca

SEQ ID NO: 303037 - RNA, 20 nt, Human herpesvirus 3
ugaaacgucguuauauucac

SEQ ID NO: 303038 - RNA, 22 nt, Human herpesvirus 3
ugaaacgucguuauauucacau

SEQ ID NO: 303039 - RNA, 16 nt, Human herpesvirus 3
ugaaagagcuguccau

SEQ ID NO: 303040 - RNA, 19 nt, Human herpesvirus 3
ugaaagagcuguccaugau

SEQ ID NO: 303041 - RNA, 11 nt, Human herpesvirus 3
ugaaagcuacc

SEQ ID NO: 303042 - RNA, 21 nt, Human herpesvirus 3
ugaacagcaacggaugcauag

SEQ ID NO: 303043 - RNA, 17 nt, Human herpesvirus 3
ugaacaguuuauaauca

SEQ ID NO: 303044 - RNA, 12 nt, Human herpesvirus 3
ugaaccacaacc

SEQ ID NO: 303045 - RNA, 15 nt, Human herpesvirus 3
ugaacgguaccccaa

SEQ ID NO: 303046 - RNA, 17 nt, Human herpesvirus 3
ugaagaaggacaguugg

SEQ ID NO: 303047 - RNA, 16 nt, Human herpesvirus 3
ugaagacuccaguaua

SEQ ID NO: 303048 - RNA, 17 nt, Human herpesvirus 3
ugaagacuccaguauac

SEQ ID NO: 303049 - RNA, 20 nt, Human herpesvirus 3
ugaaguguucuaaaacacug

SEQ ID NO: 303050 - RNA, 17 nt, Human herpesvirus 3
ugaaugggaucuuccgc

SEQ ID NO: 303051 - RNA, 16 nt, Human herpesvirus 3
ugaauuauuaaacuua

SEQ ID NO: 303052 - RNA, 20 nt, Human herpesvirus 3
ugaauuucacguauugugua

SEQ ID NO: 303053 - RNA, 14 nt, Human herpesvirus 3
ugacaaaaugacaa

SEQ ID NO: 303054 - RNA, 19 nt, Human herpesvirus 3
ugacaaauucccccggggc

SEQ ID NO: 303055 - RNA, 14 nt, Human herpesvirus 3
ugacaacauuuaaa

SEQ ID NO: 303056 - RNA, 19 nt, Human herpesvirus 3
ugaccaacgcuuugaucuu

SEQ ID NO: 303057 - RNA, 18 nt, Human herpesvirus 3
ugacccaccccacaugaa

SEQ ID NO: 303058 - RNA, 22 nt, Human herpesvirus 3
uagucggaaguccggcgugucc

SEQ ID NO: 303059 - RNA, 18 nt, Human herpesvirus 3
uagugauuacaucaauac

SEQ ID NO: 303060 - RNA, 11 nt, Human herpesvirus 3
uauaaaacacu

SEQ ID NO: 303061 - RNA, 12 nt, Human herpesvirus 3
uauaaaacacuc

SEQ ID NO: 303062 - RNA, 21 nt, Human herpesvirus 3
uauaaacggccgaaaacggag

SEQ ID NO: 303063 - RNA, 16 nt, Human herpesvirus 3
uauaaauguguauuau

SEQ ID NO: 303064 - RNA, 24 nt, Human herpesvirus 3
uauaaauguguauuauaugucaca

SEQ ID NO: 303065 - RNA, 18 nt, Human herpesvirus 3
uauaaauucuacaacauu

SEQ ID NO: 303066 - RNA, 14 nt, Human herpesvirus 3
uauaacggcgauca

SEQ ID NO: 303067 - RNA, 14 nt, Human herpesvirus 3
uauaagggagucua

SEQ ID NO: 303068 - RNA, 22 nt, Human herpesvirus 3
uauaaguggggguuuaauuuca

SEQ ID NO: 303069 - RNA, 22 nt, Human herpesvirus 3
uauaaucaguugcuaccaaaca

SEQ ID NO: 303070 - RNA, 16 nt, Human herpesvirus 3
uauacaagcauaacau

SEQ ID NO: 303071 - RNA, 23 nt, Human herpesvirus 3
uauacaccaccccuugauuuuau

SEQ ID NO: 303072 - RNA, 19 nt, Human herpesvirus 3
uauacauaaccgauuuacc

SEQ ID NO: 303073 - RNA, 15 nt, Human herpesvirus 3
uauacccgauaauau

SEQ ID NO: 303074 - RNA, 19 nt, Human herpesvirus 3
uauacgcucuucugauauu

SEQ ID NO: 303075 - RNA, 17 nt, Human herpesvirus 3
uauacguagaauuuaca

SEQ ID NO: 303076 - RNA, 19 nt, Human herpesvirus 3
uauacuacuuauuaugcaa

SEQ ID NO: 303077 - RNA, 13 nt, Human herpesvirus 3
uauagcugucacu

SEQ ID NO: 303078 - RNA, 21 nt, Human herpesvirus 3
uauagucaaauucaacuaaug

SEQ ID NO: 303079 - RNA, 18 nt, Human herpesvirus 3
uauauaacaauugagaua

SEQ ID NO: 303080 - RNA, 19 nt, Human herpesvirus 3
uauauaagggagucuacaa

SEQ ID NO: 303081 - RNA, 23 nt, Human herpesvirus 3
uauauacaaaauaaaaacauaca

SEQ ID NO: 303082 - RNA, 21 nt, Human herpesvirus 3
uauauacaacacgaugcgcug

SEQ ID NO: 303083 - RNA, 17 nt, Human herpesvirus 3
uauauaugucaccaaag

SEQ ID NO: 303084 - RNA, 12 nt, Human herpesvirus 3
uauauguucaac

SEQ ID NO: 303085 - RNA, 13 nt, Human herpesvirus 3
uauauguucaaca

SEQ ID NO: 303086 - RNA, 17 nt, Human herpesvirus 3
uauauuuuacauacaaa

SEQ ID NO: 303087 - RNA, 18 nt, Human herpesvirus 3
uauauuuuauguugauau

SEQ ID NO: 303088 - RNA, 15 nt, Human herpesvirus 3
uaucaacgacauaca

SEQ ID NO: 303089 - RNA, 21 nt, Human herpesvirus 3
uaucauugaagaugauuauca

SEQ ID NO: 303090 - RNA, 22 nt, Human herpesvirus 3
uaucauugaagaugauuaucaa

SEQ ID NO: 303091 - RNA, 14 nt, Human herpesvirus 3
uauccaagaugaaa

SEQ ID NO: 303092 - RNA, 21 nt, Human herpesvirus 3
uaucccccuucaaacggauac

SEQ ID NO: 303093 - RNA, 15 nt, Human herpesvirus 3
uaucccggauuuuau

SEQ ID NO: 303094 - RNA, 22 nt, Human herpesvirus 3
uaucccguuuaauuguacccau

SEQ ID NO: 303095 - RNA, 17 nt, Human herpesvirus 3
uauccugcgcagaugua

SEQ ID NO: 303096 - RNA, 17 nt, Human herpesvirus 3
uaucggcggcagaugau

SEQ ID NO: 303097 - RNA, 21 nt, Human herpesvirus 3
uaucgggcgacaauccaauag

SEQ ID NO: 303098 - RNA, 15 nt, Human herpesvirus 3
uaucuggaacccaag

SEQ ID NO: 303099 - RNA, 21 nt, Human herpesvirus 3
uaucuggaacccaagguguaa

SEQ ID NO: 303100 - RNA, 14 nt, Human herpesvirus 3
uaucuuugcaauuc

SEQ ID NO: 303101 - RNA, 15 nt, Human herpesvirus 3
uaugaacgccuguga

SEQ ID NO: 303102 - RNA, 15 nt, Human herpesvirus 3
uaugagaguuuacaa

SEQ ID NO: 303103 - RNA, 14 nt, Human herpesvirus 3
uaugcgucauuuau

SEQ ID NO: 303104 - RNA, 14 nt, Human herpesvirus 3
uauguaccauuuga

SEQ ID NO: 303105 - RNA, 19 nt, Human herpesvirus 3
uauuaacaccuguuuacac

SEQ ID NO: 303106 - RNA, 20 nt, Human herpesvirus 3
uauuaacaggauuugcuuau

SEQ ID NO: 303107 - RNA, 12 nt, Human herpesvirus 3
uauuacauuuaa

SEQ ID NO: 303108 - RNA, 16 nt, Human herpesvirus 3
uauuauaaauguguau

SEQ ID NO: 303109 - RNA, 14 nt, Human herpesvirus 3
uauuauacauaacc

SEQ ID NO: 303110 - RNA, 16 nt, Human herpesvirus 3
uauuauaugucacaua

SEQ ID NO: 303111 - RNA, 22 nt, Human herpesvirus 3
uauuaucaggagauacuauggu

SEQ ID NO: 303112 - RNA, 22 nt, Human herpesvirus 3
uauucaccauuacuacauugaa

SEQ ID NO: 303113 - RNA, 23 nt, Human herpesvirus 3
uauuccgcccggauaauguccua

SEQ ID NO: 303114 - RNA, 17 nt, Human herpesvirus 3
uguuaauaaccauauau

SEQ ID NO: 303115 - RNA, 14 nt, Human herpesvirus 3
uguucuaaaacacu

SEQ ID NO: 303116 - RNA, 18 nt, Human herpesvirus 3
uguucuauuucccaacgc

SEQ ID NO: 303117 - RNA, 19 nt, Human herpesvirus 3
uguugcgguuguuguccag

SEQ ID NO: 303118 - RNA, 17 nt, Human herpesvirus 3
uguuggcgcaugccauu

SEQ ID NO: 303119 - RNA, 17 nt, Human herpesvirus 3
uguugguuaacaccgcc

SEQ ID NO: 303120 - RNA, 13 nt, Human herpesvirus 3
uguugucugccaa

SEQ ID NO: 303121 - RNA, 18 nt, Human herpesvirus 3
uguugugucccgacaaaa

SEQ ID NO: 303122 - RNA, 15 nt, Human herpesvirus 3
uguuuaacaaccaua

SEQ ID NO: 303123 - RNA, 16 nt, Human herpesvirus 3
uguuuaacaaccauaa

SEQ ID NO: 303124 - RNA, 13 nt, Human herpesvirus 3
uguuuaagaacau

SEQ ID NO: 303125 - RNA, 17 nt, Human herpesvirus 3
uguuuacggcagucuga

SEQ ID NO: 303126 - RNA, 20 nt, Human herpesvirus 3
uguuuaugugauucuauauu

SEQ ID NO: 303127 - RNA, 16 nt, Human herpesvirus 3
uguuugccgagacuga

SEQ ID NO: 303128 - RNA, 23 nt, Human herpesvirus 3
uguuuguuuaacacgacaccgcu

SEQ ID NO: 303129 - RNA, 18 nt, Human herpesvirus 3
uguuuuaauuccaauauu

SEQ ID NO: 303130 - RNA, 12 nt, Human herpesvirus 3
uuaaaaaagccg

SEQ ID NO: 303131 - RNA, 18 nt, Human herpesvirus 3
uuaaaaauauuacgagac

SEQ ID NO: 303132 - RNA, 19 nt, Human herpesvirus 3
uuaaaacaaguggaugaua

SEQ ID NO: 303133 - RNA, 24 nt, Human herpesvirus 3
uuaaacaaauacgaucagaugaua

SEQ ID NO: 303134 - RNA, 23 nt, Human herpesvirus 3
uuaaacaacauggcuaugccauu

SEQ ID NO: 303135 - RNA, 17 nt, Human herpesvirus 3
uuaaacccacauuuucc

SEQ ID NO: 303136 - RNA, 17 nt, Human herpesvirus 3
uuaaagagccauuucca

SEQ ID NO: 303137 - RNA, 21 nt, Human herpesvirus 3
uuaaauaacaugucacaucau

SEQ ID NO: 303138 - RNA, 20 nt, Human herpesvirus 3
uuaaauaguaccacguggua

SEQ ID NO: 303139 - RNA, 14 nt, Human herpesvirus 3
uuaacaaaauaguc

SEQ ID NO: 303140 - RNA, 22 nt, Human herpesvirus 3
uuaacacgacaccgcuuaacaa

SEQ ID NO: 303141 - RNA, 21 nt, Human herpesvirus 3
uuaacaggauuugcuuauacu

SEQ ID NO: 303142 - RNA, 22 nt, Human herpesvirus 3
uuaagaaucuccuaacuauaag

SEQ ID NO: 303143 - RNA, 19 nt, Human herpesvirus 3
uuaagacguccacacagcc

SEQ ID NO: 303144 - RNA, 15 nt, Human herpesvirus 3
uuaauaaaaacacaa

SEQ ID NO: 303145 - RNA, 17 nt, Human herpesvirus 3
uuaauacgguucaugac

SEQ ID NO: 303146 - RNA, 20 nt, Human herpesvirus 3
uuaauaggcauaaacacgga

SEQ ID NO: 303147 - RNA, 16 nt, Human herpesvirus 3
uuaauccgcgcucaau

SEQ ID NO: 303148 - RNA, 23 nt, Human herpesvirus 3
uuaaucgaacauuguugguucua

SEQ ID NO: 303149 - RNA, 19 nt, Human herpesvirus 3
uuaaugcaaccaucagauc

SEQ ID NO: 303150 - RNA, 12 nt, Human herpesvirus 3
uuaauguaucug

SEQ ID NO: 303151 - RNA, 14 nt, Human herpesvirus 3
uuaauuaauggaua

SEQ ID NO: 303152 - RNA, 15 nt, Human herpesvirus 3
uuaauuguacccauc

SEQ ID NO: 303153 - RNA, 17 nt, Human herpesvirus 3
uuaauuuuacaauauca

SEQ ID NO: 303154 - RNA, 15 nt, Human herpesvirus 3
uuacaugauccacgu

SEQ ID NO: 303155 - RNA, 16 nt, Human herpesvirus 3
uuaccacccauaaaaa

SEQ ID NO: 303156 - RNA, 14 nt, Human herpesvirus 3
uuaccguacaacaa

SEQ ID NO: 303157 - RNA, 23 nt, Human herpesvirus 3
uuaccguguuuacggcagucuga

SEQ ID NO: 303158 - RNA, 17 nt, Human herpesvirus 3
uuacguauguaccagua

SEQ ID NO: 303159 - RNA, 13 nt, Human herpesvirus 3
uuacuacauugaa

SEQ ID NO: 303160 - RNA, 16 nt, Human herpesvirus 3
uuacuacauugaacaa

SEQ ID NO: 303161 - RNA, 15 nt, Human herpesvirus 3
uuacugugaauguuu

SEQ ID NO: 303162 - RNA, 11 nt, Human herpesvirus 3
uuacuuuacaa

SEQ ID NO: 303163 - RNA, 23 nt, Human herpesvirus 3
uuagaggcauaccgaaugcgauu

SEQ ID NO: 303164 - RNA, 16 nt, Human herpesvirus 3
uuagaggguagagggu

SEQ ID NO: 303165 - RNA, 15 nt, Human herpesvirus 3
uuagaguguuuaaca

SEQ ID NO: 303166 - RNA, 17 nt, Human herpesvirus 3
uuagauuuaaaaccaau

SEQ ID NO: 303167 - RNA, 14 nt, Human herpesvirus 3
uuagcauccaaauu

SEQ ID NO: 303168 - RNA, 21 nt, Human herpesvirus 3
uuauaaaucguuuaucacugu

SEQ ID NO: 303169 - RNA, 23 nt, Human herpesvirus 3
uuauaaauguguauuauauguca

SEQ ID NO: 303170 - RNA, 13 nt, Human herpesvirus 3
uuauaacugcuac

SEQ ID NO: 303171 - RNA, 19 nt, Human herpesvirus 3
uuauaacugcuacaacgga

SEQ ID NO: 303172 - RNA, 20 nt, Human herpesvirus 3
uuauaacuuuaaggaucgcu

SEQ ID NO: 303173 - RNA, 19 nt, Human herpesvirus 3
uuauaaucuccagugccag

SEQ ID NO: 303174 - RNA, 21 nt, Human herpesvirus 3
uuauacccgauaauauacaaa

SEQ ID NO: 303175 - RNA, 22 nt, Human herpesvirus 3
uuauagacacgcuacagaagac

SEQ ID NO: 303176 - RNA, 11 nt, Human herpesvirus 3
uuauauacaaa

SEQ ID NO: 303177 - RNA, 10 nt, Human herpesvirus 3
uuauauccau

SEQ ID NO: 303178 - RNA, 13 nt, Human herpesvirus 3
uuauaugucacau

SEQ ID NO: 303179 - RNA, 19 nt, Human herpesvirus 3
uuauauucacaugcaguua

SEQ ID NO: 303180 - RNA, 17 nt, Human herpesvirus 3
uuaucaacgacauacau

SEQ ID NO: 303181 - RNA, 20 nt, Human herpesvirus 3
uuaucaacgacauacauuag

SEQ ID NO: 303182 - RNA, 15 nt, Human herpesvirus 3
uuaucccacauguau

SEQ ID NO: 303183 - RNA, 13 nt, Human herpesvirus 3
uuaucuauauaca

SEQ ID NO: 303184 - RNA, 17 nt, Human herpesvirus 3
uuaugaacagcaacgga

SEQ ID NO: 303185 - RNA, 14 nt, Human herpesvirus 3
uuaugaacaguuua

SEQ ID NO: 303186 - RNA, 14 nt, Human herpesvirus 3
uuaugagaguuuac

SEQ ID NO: 303187 - RNA, 21 nt, Human herpesvirus 3
uuaugaugguaguuaccaaag

SEQ ID NO: 303188 - RNA, 12 nt, Human herpesvirus 3
uuauuacauucg

SEQ ID NO: 303189 - RNA, 20 nt, Human herpesvirus 3
uuauuucaauauuuauacaa

SEQ ID NO: 303190 - RNA, 16 nt, Human herpesvirus 3
uucaaaggacauuuau

SEQ ID NO: 303191 - RNA, 12 nt, Human herpesvirus 3
uucaaaggcauu

SEQ ID NO: 303192 - RNA, 18 nt, Human herpesvirus 3
uucaagucucaaugaaac

SEQ ID NO: 303193 - RNA, 20 nt, Human herpesvirus 3
uucaauaaauguacuauaau

SEQ ID NO: 303194 - RNA, 22 nt, Human herpesvirus 3
uucaauauuuauacaagcauaa

SEQ ID NO: 303195 - RNA, 13 nt, Human herpesvirus 3
uucacaugcaguu

SEQ ID NO: 303196 - RNA, 22 nt, Human herpesvirus 3
uucaccagagucuucugucaag

SEQ ID NO: 303197 - RNA, 21 nt, Human herpesvirus 3
uucaccgguauuauacauaac

SEQ ID NO: 303198 - RNA, 21 nt, Human herpesvirus 3
uucacgccaguugacuuuguu

SEQ ID NO: 303199 - RNA, 20 nt, Human herpesvirus 3
uucacuaaaaucacuuugau

SEQ ID NO: 303200 - RNA, 15 nt, Human herpesvirus 3
uucacuggacuuuac

SEQ ID NO: 303201 - RNA, 20 nt, Human herpesvirus 3
uucacuggacuuuaccggau

SEQ ID NO: 303202 - RNA, 18 nt, Human herpesvirus 3
uucagaacgauuuuacag

SEQ ID NO: 303203 - RNA, 23 nt, Human herpesvirus 3
uucaguaacuuaacaaacauaua

SEQ ID NO: 303204 - RNA, 13 nt, Human herpesvirus 3
uucaguacuuaaa

SEQ ID NO: 303205 - RNA, 19 nt, Human herpesvirus 3
uucgaggaaaacuuauguc

SEQ ID NO: 303206 - RNA, 18 nt, Human herpesvirus 3
uucggcgcggaugcauuu

SEQ ID NO: 303207 - RNA, 20 nt, Human herpesvirus 3
uucggcgcggaugcauuuau

SEQ ID NO: 303208 - RNA, 14 nt, Human herpesvirus 3
uucgguugguggua

SEQ ID NO: 303209 - RNA, 22 nt, Human herpesvirus 3
uucguaagcaauaaaauggaua

SEQ ID NO: 303210 - RNA, 18 nt, Human herpesvirus 3
uucguuuugguguuacau

SEQ ID NO: 303211 - RNA, 12 nt, Human herpesvirus 3
uucuaaaacacu

SEQ ID NO: 303212 - RNA, 14 nt, Human herpesvirus 3
uucuaaaacacugu

SEQ ID NO: 303213 - RNA, 18 nt, Human herpesvirus 3
uucuaccaacgcacuguu

SEQ ID NO: 303214 - RNA, 14 nt, Human herpesvirus 3
uucucuaacgcaau

SEQ ID NO: 303215 - RNA, 19 nt, Human herpesvirus 3
uucugcauaagcucuguau

SEQ ID NO: 303216 - RNA, 15 nt, Human herpesvirus 3
uucuuagaaaagcca

SEQ ID NO: 303217 - RNA, 18 nt, Human herpesvirus 3
uucuugaagcguuuccag

SEQ ID NO: 303218 - RNA, 12 nt, Human herpesvirus 3
uucuuguucccg

SEQ ID NO: 303219 - RNA, 15 nt, Human herpesvirus 3
uucuuguucccgcac

SEQ ID NO: 303220 - RNA, 20 nt, Human herpesvirus 3
uugaagacaucgaugaagua

SEQ ID NO: 303221 - RNA, 19 nt, Human herpesvirus 3
uugaagauaggguguauac

SEQ ID NO: 303222 - RNA, 23 nt, Human herpesvirus 3
uugaaguuuucagcaaguuuaac

SEQ ID NO: 303223 - RNA, 22 nt, Human herpesvirus 3
uugagauagagguauuguuacc

SEQ ID NO: 303224 - RNA, 14 nt, Human herpesvirus 3
uugagauuuggaua

SEQ ID NO: 303225 - RNA, 15 nt, Human herpesvirus 3
uugauaaagggaauc

SEQ ID NO: 303226 - RNA, 11 nt, Human herpesvirus 3
uugauggaugu

SEQ ID NO: 303227 - RNA, 19 nt, Human herpesvirus 3
uugcauaauauuuacacgu

SEQ ID NO: 303228 - RNA, 22 nt, Human herpesvirus 3
uugcaucguggaccguguucga

SEQ ID NO: 303229 - RNA, 23 nt, Human herpesvirus 3
uugcauuacccuaucccaguauu

SEQ ID NO: 303230 - RNA, 20 nt, Human herpesvirus 3
uugccacgccgggggaacau

SEQ ID NO: 303231 - RNA, 19 nt, Human herpesvirus 3
uugccaucuuccacggguc

SEQ ID NO: 303232 - RNA, 22 nt, Human herpesvirus 3
uugcgaauucuuagaaaagcca

SEQ ID NO: 303233 - RNA, 13 nt, Human herpesvirus 3
uugcgacauaccg

SEQ ID NO: 303234 - RNA, 14 nt, Human herpesvirus 3
uugcgugauauuau

SEQ ID NO: 303235 - RNA, 11 nt, Human herpesvirus 3
uugcuguucuc

SEQ ID NO: 303236 - RNA, 14 nt, Human herpesvirus 3
uugcuguuguccaa

SEQ ID NO: 303237 - RNA, 20 nt, Human herpesvirus 3
uugcuuuaauacgacuuuua

SEQ ID NO: 303238 - RNA, 14 nt, Human herpesvirus 3
uuggacuaacaaag

SEQ ID NO: 303239 - RNA, 22 nt, Human herpesvirus 3
uugggacuccaagggacccgca

SEQ ID NO: 303240 - RNA, 16 nt, Human herpesvirus 3
uuggguguugugaucu

SEQ ID NO: 303241 - RNA, 23 nt, Human herpesvirus 3
uugguuagagaaagcggacacau

SEQ ID NO: 303242 - RNA, 15 nt, Human herpesvirus 3
uuguaaaacauauca

SEQ ID NO: 303243 - RNA, 19 nt, Human herpesvirus 3
uuguacaauugucuguaua

SEQ ID NO: 303244 - RNA, 18 nt, Human herpesvirus 3
uuguaccucuaccgcacc

SEQ ID NO: 303245 - RNA, 12 nt, Human herpesvirus 3
uuguaguacagg

SEQ ID NO: 303246 - RNA, 19 nt, Human herpesvirus 3
uuguauuguaguacagggc

SEQ ID NO: 303247 - RNA, 14 nt, Human herpesvirus 3
uuguccaacuguau

SEQ ID NO: 303248 - RNA, 19 nt, Human herpesvirus 3
uuguccacgcgcgugucua

SEQ ID NO: 303249 - RNA, 15 nt, Human herpesvirus 3
uuguggaguuuccca

SEQ ID NO: 303250 - RNA, 21 nt, Human herpesvirus 3
uuguggauccggcaugcauug

SEQ ID NO: 303251 - RNA, 13 nt, Human herpesvirus 3
uuguggugaagaa

SEQ ID NO: 303252 - RNA, 19 nt, Human herpesvirus 3
uuguucugggaacacguaa

SEQ ID NO: 303253 - RNA, 23 nt, Human herpesvirus 3
uuguucuggguugcgacauaccg

SEQ ID NO: 303254 - RNA, 19 nt, Human herpesvirus 3
uuguuggcgcaugccauug

SEQ ID NO: 303255 - RNA, 19 nt, Human herpesvirus 3
uuguuuaacacgacaccgc

SEQ ID NO: 303256 - RNA, 17 nt, Human herpesvirus 3
uuuaaauuuuacuuaau

SEQ ID NO: 303257 - RNA, 13 nt, Human herpesvirus 3
uuuaacaaccaua

SEQ ID NO: 303258 - RNA, 20 nt, Human herpesvirus 3
uuuaacauaccccaggccuu

SEQ ID NO: 303259 - RNA, 20 nt, Human herpesvirus 3
uuuaacggaagaugaacuaa

SEQ ID NO: 303260 - RNA, 20 nt, Human herpesvirus 3
uuuaagacguccacacagcc

SEQ ID NO: 303261 - RNA, 14 nt, Human herpesvirus 3
uuuacgucugccca

SEQ ID NO: 303262 - RNA, 14 nt, Human herpesvirus 3
uuuagaauuuccaa

SEQ ID NO: 303263 - RNA, 13 nt, Human herpesvirus 3
uuuauaaaacacu

SEQ ID NO: 303264 - RNA, 18 nt, Human herpesvirus 3
uuuauaauuaugugucua

SEQ ID NO: 303265 - RNA, 22 nt, Human herpesvirus 3
uuuauacccccgacacgcggcc

SEQ ID NO: 303266 - RNA, 15 nt, Human herpesvirus 3
uuuauacguauguca

SEQ ID NO: 303267 - RNA, 14 nt, Human herpesvirus 3
uuuauauacaaaau

SEQ ID NO: 303268 - RNA, 19 nt, Human herpesvirus 3
uuuauaucuguuacauuuc

SEQ ID NO: 303269 - RNA, 20 nt, Human herpesvirus 3
uuuauauucacgccaguuga

SEQ ID NO: 303270 - RNA, 17 nt, Human herpesvirus 3
uuuaucaggguuuaaca

SEQ ID NO: 303271 - RNA, 20 nt, Human herpesvirus 3
uuuaucauugaagaugauua

SEQ ID NO: 303272 - RNA, 13 nt, Human herpesvirus 3
uuuauguccuggg

SEQ ID NO: 303273 - RNA, 12 nt, Human herpesvirus 3
uuuauuaccaca

SEQ ID NO: 303274 - RNA, 13 nt, Human herpesvirus 3
uuuauuaucccag

SEQ ID NO: 303275 - RNA, 14 nt, Human herpesvirus 3
uuuauuuacuuuac

SEQ ID NO: 303276 - RNA, 21 nt, Human herpesvirus 3
uuucaauauuuauacaagcau

SEQ ID NO: 303277 - RNA, 19 nt, Human herpesvirus 3
uuucaugcuuguaaaacau

SEQ ID NO: 303278 - RNA, 20 nt, Human herpesvirus 3
uuucaugcuugucaaaacau

SEQ ID NO: 303279 - RNA, 21 nt, Human herpesvirus 3
uuucaugcuugucaaaacaua

SEQ ID NO: 303280 - RNA, 16 nt, Human herpesvirus 3
uuucccccacauacaa

SEQ ID NO: 303281 - RNA, 14 nt, Human herpesvirus 3
uuuccgaauuuugc

SEQ ID NO: 303282 - RNA, 17 nt, Human herpesvirus 3
uuuccuagccacaccca

SEQ ID NO: 303283 - RNA, 18 nt, Human herpesvirus 3
uuucguuuugguguuaca

SEQ ID NO: 303284 - RNA, 17 nt, Human herpesvirus 3
uuucucgugggacuaca

SEQ ID NO: 303285 - RNA, 15 nt, Human herpesvirus 3
uuugaugagaaugua

SEQ ID NO: 303286 - RNA, 20 nt, Human herpesvirus 3
uuugauuacgcguugugaua

SEQ ID NO: 303287 - RNA, 21 nt, Human herpesvirus 3
uuugauuacgcguugugauau

SEQ ID NO: 303288 - RNA, 15 nt, Human herpesvirus 3
uuugccccaaaccac

SEQ ID NO: 303289 - RNA, 18 nt, Human herpesvirus 3
uuugccccaaaccacugu

SEQ ID NO: 303290 - RNA, 19 nt, Human herpesvirus 3
uuugcgcguuccuuuucca

SEQ ID NO: 303291 - RNA, 16 nt, Human herpesvirus 3
uuugcucguauauaca

SEQ ID NO: 303292 - RNA, 20 nt, Human herpesvirus 3
uuuguuucuuuaucaguuga

SEQ ID NO: 303293 - RNA, 13 nt, Human herpesvirus 3
uuuguuuugauca

SEQ ID NO: 303294 - RNA, 18 nt, Human herpesvirus 3
uuuuaauuuuauauacaa

SEQ ID NO: 303295 - RNA, 21 nt, Human herpesvirus 3
uuuuacaggccggagugucca

SEQ ID NO: 303296 - RNA, 16 nt, Human herpesvirus 3
uuuuaccuuauguguu

SEQ ID NO: 303297 - RNA, 23 nt, Human herpesvirus 3
uuuuaguaguguugaauggugau

SEQ ID NO: 303298 - RNA, 13 nt, Human herpesvirus 3
uuuuauuacauuc

SEQ ID NO: 303299 - RNA, 22 nt, Human herpesvirus 3
uuuucagcaaguuuaacauuuc

SEQ ID NO: 303300 - RNA, 15 nt, Human herpesvirus 3
uuuucaugcuuguca

SEQ ID NO: 303301 - RNA, 22 nt, Human herpesvirus 3
uuuucaugcuugucaaaacaua

SEQ ID NO: 303302 - RNA, 15 nt, Human herpesvirus 3
uuuucugcucaugga

SEQ ID NO: 303303 - RNA, 22 nt, Human herpesvirus 3
aacaaacacucuacgcauuuac

SEQ ID NO: 303304 - RNA, 11 nt, Human herpesvirus 3
aacaaccauaa

SEQ ID NO: 303305 - RNA, 20 nt, Human herpesvirus 3
aacaacucgugucucuggaa

SEQ ID NO: 303306 - RNA, 22 nt, Human herpesvirus 3
aacaacucucuuauauauguaa

SEQ ID NO: 303307 - RNA, 20 nt, Human herpesvirus 3
aacaacucuggagucuccaa

SEQ ID NO: 303308 - RNA, 22 nt, Human herpesvirus 3
aacaaucccggggguacuugca

SEQ ID NO: 303309 - RNA, 14 nt, Human herpesvirus 3
aacaaugaaccauu

SEQ ID NO: 303310 - RNA, 15 nt, Human herpesvirus 3
aacaaugaaccauua

SEQ ID NO: 303311 - RNA, 20 nt, Human herpesvirus 3
aacaaugcacugaaccacaa

SEQ ID NO: 303312 - RNA, 12 nt, Human herpesvirus 3
aacacaaccagu

SEQ ID NO: 303313 - RNA, 13 nt, Human herpesvirus 3
aacacaaccaguc

SEQ ID NO: 303314 - RNA, 13 nt, Human herpesvirus 3
aacacacccauac

SEQ ID NO: 303315 - RNA, 15 nt, Human herpesvirus 3
aacacauuacguucu

SEQ ID NO: 303316 - RNA, 15 nt, Human herpesvirus 3
aacacguaauuguca

SEQ ID NO: 303317 - RNA, 18 nt, Human herpesvirus 3
aacacucuacgcauuuac

SEQ ID NO: 303318 - RNA, 19 nt, Human herpesvirus 3
aacagaggacgccgauaaa

SEQ ID NO: 303319 - RNA, 22 nt, Human herpesvirus 3
aacagauuuccccggaaauaua

SEQ ID NO: 303320 - RNA, 14 nt, Human herpesvirus 3
aacagcaccaauau

SEQ ID NO: 303321 - RNA, 15 nt, Human herpesvirus 3
aacaggcuccacaau

SEQ ID NO: 303322 - RNA, 16 nt, Human herpesvirus 3
aacaguacgcuuuuau

SEQ ID NO: 303323 - RNA, 23 nt, Human herpesvirus 3
aacauaagacguugcauaugcau

SEQ ID NO: 303324 - RNA, 14 nt, Human herpesvirus 3
aacauccacagucu

SEQ ID NO: 303325 - RNA, 18 nt, Human herpesvirus 3
aacauccuaguacagaua

SEQ ID NO: 303326 - RNA, 19 nt, Human herpesvirus 3
aaccacggugauuaauggu

SEQ ID NO: 303327 - RNA, 22 nt, Human herpesvirus 3
aaccauagacuguucuacugac

SEQ ID NO: 303328 - RNA, 21 nt, Human herpesvirus 3
aaccauagaggugugugcaca

SEQ ID NO: 303329 - RNA, 21 nt, Human herpesvirus 3
aaccauguuuucccaugucua

SEQ ID NO: 303330 - RNA, 18 nt, Human herpesvirus 3
aacccaagacgacauuaa

SEQ ID NO: 303331 - RNA, 20 nt, Human herpesvirus 3
aacccaagguguaaauacug

SEQ ID NO: 303332 - RNA, 13 nt, Human herpesvirus 3
aacccacauuuuc

SEQ ID NO: 303333 - RNA, 22 nt, Human herpesvirus 3
aacccaucgacccguuauaauc

SEQ ID NO: 303334 - RNA, 17 nt, Human herpesvirus 3
aaccccacgcaacauuu

SEQ ID NO: 303335 - RNA, 14 nt, Human herpesvirus 3
aacccccaagcaau

SEQ ID NO: 303336 - RNA, 15 nt, Human herpesvirus 3
aacccccgugacucc

SEQ ID NO: 303337 - RNA, 20 nt, Human herpesvirus 3
aaccccugcgacucgcucua

SEQ ID NO: 303338 - RNA, 17 nt, Human herpesvirus 3
aaccgauuaugucaaca

SEQ ID NO: 303339 - RNA, 21 nt, Human herpesvirus 3
aaccggguggguggcauuaaa

SEQ ID NO: 303340 - RNA, 22 nt, Human herpesvirus 3
aaccuggucaccguguggacau

SEQ ID NO: 303341 - RNA, 22 nt, Human herpesvirus 3
aaccuucgcggggaaacgauua

SEQ ID NO: 303342 - RNA, 16 nt, Human herpesvirus 3
aacgaugccugagguu

SEQ ID NO: 303343 - RNA, 20 nt, Human herpesvirus 3
aacgccaguggaccuuugca

SEQ ID NO: 303344 - RNA, 21 nt, Human herpesvirus 3
aacgccaguggaccuuugcaa

SEQ ID NO: 303345 - RNA, 13 nt, Human herpesvirus 3
aacgcugcugaca

SEQ ID NO: 303346 - RNA, 19 nt, Human herpesvirus 3
aacgcuggcauuuccaaac

SEQ ID NO: 303347 - RNA, 22 nt, Human herpesvirus 3
aacgcuggcauuuccaaacaca

SEQ ID NO: 303348 - RNA, 19 nt, Human herpesvirus 3
aacguaugggcguguucau

SEQ ID NO: 303349 - RNA, 14 nt, Human herpesvirus 3
aacguauucucuac

SEQ ID NO: 303350 - RNA, 15 nt, Human herpesvirus 3
aacgucauccaugcu

SEQ ID NO: 303351 - RNA, 16 nt, Human herpesvirus 3
aacgugauuacuacaa

SEQ ID NO: 303352 - RNA, 17 nt, Human herpesvirus 3
aacguugaacaccauuu

SEQ ID NO: 303353 - RNA, 21 nt, Human herpesvirus 3
aacuaauaaacgaugacacaa

SEQ ID NO: 303354 - RNA, 14 nt, Human herpesvirus 3
aacuauuccaaaau

SEQ ID NO: 303355 - RNA, 17 nt, Human herpesvirus 3
aacucaugugggaaaua

SEQ ID NO: 303356 - RNA, 20 nt, Human herpesvirus 3
aacucugaguucaaagcaac

SEQ ID NO: 303357 - RNA, 15 nt, Human herpesvirus 3
aacucuuuucccaaa

SEQ ID NO: 303358 - RNA, 14 nt, Human herpesvirus 3
aacugauuacauuu

SEQ ID NO: 303359 - RNA, 20 nt, Human herpesvirus 3
aacugcaaacacgcaauugu

SEQ ID NO: 303360 - RNA, 16 nt, Human herpesvirus 3
aacugcuacaacggaa

SEQ ID NO: 303361 - RNA, 22 nt, Human herpesvirus 3
aacuuaaauaaaaccuuaccac

SEQ ID NO: 303362 - RNA, 17 nt, Human herpesvirus 3
aacuuaacaaacauaua

SEQ ID NO: 303363 - RNA, 16 nt, Human herpesvirus 3
aacuuaauacagaguc

SEQ ID NO: 303364 - RNA, 15 nt, Human herpesvirus 3
aacuucaguacuuaa

SEQ ID NO: 303365 - RNA, 14 nt, Human herpesvirus 3
aacuuccccauaca

SEQ ID NO: 303366 - RNA, 20 nt, Human herpesvirus 3
aacuuugcauguuuacaaac

SEQ ID NO: 303367 - RNA, 19 nt, Human herpesvirus 3
aagaaauacuuccaucuac

SEQ ID NO: 303368 - RNA, 17 nt, Human herpesvirus 3
aagacaucgaugaagua

SEQ ID NO: 303369 - RNA, 20 nt, Human herpesvirus 3
aagacuguuggguggugcca

SEQ ID NO: 303370 - RNA, 23 nt, Human herpesvirus 3
aagacuguuggguggugccauuc

SEQ ID NO: 303371 - RNA, 13 nt, Human herpesvirus 3
aagagaacuguga

SEQ ID NO: 303372 - RNA, 14 nt, Human herpesvirus 3
aagagcuguccaug

SEQ ID NO: 303373 - RNA, 15 nt, Human herpesvirus 3
aagaggccccaaggu

SEQ ID NO: 303374 - RNA, 21 nt, Human herpesvirus 3
aagaguuagcauccaaauuaa

SEQ ID NO: 303375 - RNA, 22 nt, Human herpesvirus 3
aagauauaacccggucugcuca

SEQ ID NO: 303376 - RNA, 15 nt, Human herpesvirus 3
aagaucaauggcggu

SEQ ID NO: 303377 - RNA, 17 nt, Human herpesvirus 3
aagaugaaauaguuuca

SEQ ID NO: 303378 - RNA, 22 nt, Human herpesvirus 3
aagcaaggggaucgucaguaaa

SEQ ID NO: 303379 - RNA, 14 nt, Human herpesvirus 3
aagcaauaccaaga

SEQ ID NO: 303380 - RNA, 21 nt, Human herpesvirus 3
aagcauauacacauccuggac

SEQ ID NO: 303381 - RNA, 18 nt, Human herpesvirus 3
aagcccacacgcggguga

SEQ ID NO: 303382 - RNA, 19 nt, Human herpesvirus 3
aagccucuguacaacacaa

SEQ ID NO: 303383 - RNA, 15 nt, Human herpesvirus 3
aagcguguaaaucau

SEQ ID NO: 303384 - RNA, 22 nt, Human herpesvirus 3
aaggaaaugccuuaaacaucca

SEQ ID NO: 303385 - RNA, 18 nt, Human herpesvirus 3
aaggaauacaucauuccg

SEQ ID NO: 303386 - RNA, 18 nt, Human herpesvirus 3
aaggacacgaucuaaagc

SEQ ID NO: 303387 - RNA, 22 nt, Human herpesvirus 3
aaggcauugggcccuccggggc

SEQ ID NO: 303388 - RNA, 19 nt, Human herpesvirus 3
aaggcgacgguauauuaca

SEQ ID NO: 303389 - RNA, 22 nt, Human herpesvirus 3
aaggcguaaaauucgcacaccu

SEQ ID NO: 303390 - RNA, 19 nt, Human herpesvirus 3
aaggcgugaaagcuaccac

SEQ ID NO: 303391 - RNA, 16 nt, Human herpesvirus 3
aagggagucuacaaua

SEQ ID NO: 303392 - RNA, 13 nt, Human herpesvirus 3
aaggguacgccac

SEQ ID NO: 303393 - RNA, 13 nt, Human herpesvirus 3
aagguguaaauac

SEQ ID NO: 303394 - RNA, 18 nt, Human herpesvirus 3
aagucacuauaaacguau

SEQ ID NO: 303395 - RNA, 13 nt, Human herpesvirus 3
aagucguuuauau

SEQ ID NO: 303396 - RNA, 21 nt, Human herpesvirus 3
aaguguucuaaaacacuguca

SEQ ID NO: 303397 - RNA, 19 nt, Human herpesvirus 3
aaguuguuggcgcaugcca

SEQ ID NO: 303398 - RNA, 18 nt, Human herpesvirus 3
aauaaaaagucacuauaa

SEQ ID NO: 303399 - RNA, 22 nt, Human herpesvirus 3
aauaaaagguuuauuuacuuua

SEQ ID NO: 303400 - RNA, 12 nt, Human herpesvirus 3
aauaacugaaca

SEQ ID NO: 303401 - RNA, 20 nt, Human herpesvirus 3
aauaauuccgguugugccaa

SEQ ID NO: 303402 - RNA, 21 nt, Human herpesvirus 3
aauaauuccgguugugccaau

SEQ ID NO: 303403 - RNA, 23 nt, Human herpesvirus 3
aauaauuccgguugugccaauac

SEQ ID NO: 303404 - RNA, 17 nt, Human herpesvirus 3
aauaauuuuaaggcaag

SEQ ID NO: 303405 - RNA, 18 nt, Human herpesvirus 3
aauacaaagacaauuauu

SEQ ID NO: 303406 - RNA, 14 nt, Human herpesvirus 3
aauaccuauuucau

SEQ ID NO: 303407 - RNA, 17 nt, Human herpesvirus 3
aauaccuauuucaugcu

SEQ ID NO: 303408 - RNA, 20 nt, Human herpesvirus 3
aauaccuauuucaugcuugu

SEQ ID NO: 303409 - RNA, 21 nt, Human herpesvirus 3
aauaccuauuucaugcuugua

SEQ ID NO: 303410 - RNA, 18 nt, Human herpesvirus 3
aauacuaagccucuguac

SEQ ID NO: 303411 - RNA, 23 nt, Human herpesvirus 3
aauagugacaaacguguguauaa

SEQ ID NO: 303412 - RNA, 15 nt, Human herpesvirus 3
aauauaaauaacaua

SEQ ID NO: 303413 - RNA, 16 nt, Human herpesvirus 3
aauaugauacauaaaa

SEQ ID NO: 303414 - RNA, 13 nt, Human herpesvirus 3
aauaugccaucaa

SEQ ID NO: 303415 - RNA, 23 nt, Human herpesvirus 3
aauauuaacaggauuugcuuaua

SEQ ID NO: 303416 - RNA, 16 nt, Human herpesvirus 3
aauauuguagaacuaa

SEQ ID NO: 303417 - RNA, 23 nt, Human herpesvirus 3
accauauauaagggagucuacaa

SEQ ID NO: 303418 - RNA, 22 nt, Human herpesvirus 3
accauuuuauagacacgcuaca

SEQ ID NO: 303419 - RNA, 20 nt, Human herpesvirus 3
acccaauagccgccagaugu

SEQ ID NO: 303420 - RNA, 22 nt, Human herpesvirus 3
acccaccccagauauuguccaa

SEQ ID NO: 303421 - RNA, 19 nt, Human herpesvirus 3
acccaguacguugcauaac

SEQ ID NO: 303422 - RNA, 18 nt, Human herpesvirus 3
acccauacauauguucca

SEQ ID NO: 303423 - RNA, 19 nt, Human herpesvirus 3
accccaaggcccauauccc

SEQ ID NO: 303424 - RNA, 17 nt, Human herpesvirus 3
accccaguaaucucacu

SEQ ID NO: 303425 - RNA, 13 nt, Human herpesvirus 3
acccggucugcuc

SEQ ID NO: 303426 - RNA, 14 nt, Human herpesvirus 3
acccuacgacuucu

SEQ ID NO: 303427 - RNA, 20 nt, Human herpesvirus 3
acccuauaggcuuuaacccu

SEQ ID NO: 303428 - RNA, 15 nt, Human herpesvirus 3
acccugcgucaucga

SEQ ID NO: 303429 - RNA, 15 nt, Human herpesvirus 3
acccugcuaaccaua

SEQ ID NO: 303430 - RNA, 19 nt, Human herpesvirus 3
acccugggauguuuuacag

SEQ ID NO: 303431 - RNA, 21 nt, Human herpesvirus 3
acccugucaucagacaugauu

SEQ ID NO: 303432 - RNA, 23 nt, Human herpesvirus 3
accgauguuguggagaacuuauc

SEQ ID NO: 303433 - RNA, 15 nt, Human herpesvirus 3
accgcgacagccaau

SEQ ID NO: 303434 - RNA, 17 nt, Human herpesvirus 3
accgcgggucaauggag

SEQ ID NO: 303435 - RNA, 16 nt, Human herpesvirus 3
accgcuauuucuacac

SEQ ID NO: 303436 - RNA, 15 nt, Human herpesvirus 3
accggaucaugaaca

SEQ ID NO: 303437 - RNA, 20 nt, Human herpesvirus 3
accggguggguggcauuaaa

SEQ ID NO: 303438 - RNA, 21 nt, Human herpesvirus 3
accgguggaauuaauggagua

SEQ ID NO: 303439 - RNA, 15 nt, Human herpesvirus 3
accuaacuuuacugu

SEQ ID NO: 303440 - RNA, 20 nt, Human herpesvirus 3
accuaguauuuacguaugua

SEQ ID NO: 303441 - RNA, 19 nt, Human herpesvirus 3
accucggccgcuucccgaa

SEQ ID NO: 303442 - RNA, 21 nt, Human herpesvirus 3
accuguuagaauaguaaauac

SEQ ID NO: 303443 - RNA, 12 nt, Human herpesvirus 3
accuguuuacac

SEQ ID NO: 303444 - RNA, 14 nt, Human herpesvirus 3
acgaaggcacggaa

SEQ ID NO: 303445 - RNA, 18 nt, Human herpesvirus 3
acgagagcaguccauggu

SEQ ID NO: 303446 - RNA, 20 nt, Human herpesvirus 3
acgauaaauggucuaaauac

SEQ ID NO: 303447 - RNA, 19 nt, Human herpesvirus 3
acgauacgccgaacggcca

SEQ ID NO: 303448 - RNA, 22 nt, Human herpesvirus 3
acgauuaacguugaacaccauu

SEQ ID NO: 303449 - RNA, 23 nt, Human herpesvirus 3
acgcaugcgggcuugcuguucuc

SEQ ID NO: 303450 - RNA, 15 nt, Human herpesvirus 3
acgcauuugaugaau

SEQ ID NO: 303451 - RNA, 15 nt, Human herpesvirus 3
acgccgcaacaaccc

SEQ ID NO: 303452 - RNA, 16 nt, Human herpesvirus 3
acgccgcaacaaccca

SEQ ID NO: 303453 - RNA, 19 nt, Human herpesvirus 3
acgccuggccccuugaacc

SEQ ID NO: 303454 - RNA, 18 nt, Human herpesvirus 3
acgcggcgggcuguugua

SEQ ID NO: 303455 - RNA, 21 nt, Human herpesvirus 3
acgcguaaaucuuaugauggu

SEQ ID NO: 303456 - RNA, 14 nt, Human herpesvirus 3
acgcucaauacuug

SEQ ID NO: 303457 - RNA, 13 nt, Human herpesvirus 3
acgcuuugaucuu

SEQ ID NO: 303458 - RNA, 19 nt, Human herpesvirus 3
acggcaacaauggcgacca

SEQ ID NO: 303459 - RNA, 17 nt, Human herpesvirus 3
acgguauauuacaaaga

SEQ ID NO: 303460 - RNA, 15 nt, Human herpesvirus 3
acgguucaaaggcau

SEQ ID NO: 303461 - RNA, 23 nt, Human herpesvirus 3
acguaauagauucgccuuuuaca

SEQ ID NO: 303462 - RNA, 20 nt, Human herpesvirus 3
acguagcaaagcuacacuuu

SEQ ID NO: 303463 - RNA, 21 nt, Human herpesvirus 3
acguccacacagccucaggag

SEQ ID NO: 303464 - RNA, 22 nt, Human herpesvirus 3
acguccgauguuccaauggaug

SEQ ID NO: 303465 - RNA, 17 nt, Human herpesvirus 3
acgucguuauauucaca

SEQ ID NO: 303466 - RNA, 15 nt, Human herpesvirus 3
acgugauuacuacaa

SEQ ID NO: 303467 - RNA, 14 nt, Human herpesvirus 3
acgugauuugccca

SEQ ID NO: 303468 - RNA, 15 nt, Human herpesvirus 3
acgugcaugcguuuu

SEQ ID NO: 303469 - RNA, 12 nt, Human herpesvirus 3
acguucaccaaa

SEQ ID NO: 303470 - RNA, 22 nt, Human herpesvirus 3
acguucuaauaaaaacaucaaa

SEQ ID NO: 303471 - RNA, 16 nt, Human herpesvirus 3
acguuuguaaaccacu

SEQ ID NO: 303472 - RNA, 21 nt, Human herpesvirus 3
acguuuguguugugacuugac

SEQ ID NO: 303473 - RNA, 17 nt, Human herpesvirus 3
acuaaagguauacuugg

SEQ ID NO: 303474 - RNA, 18 nt, Human herpesvirus 3
acuaaagguauacuugga

SEQ ID NO: 303475 - RNA, 15 nt, Human herpesvirus 3
acuaauauaaauaac

SEQ ID NO: 303476 - RNA, 14 nt, Human herpesvirus 3
acuaauauucuaca

SEQ ID NO: 303477 - RNA, 16 nt, Human herpesvirus 3
acuaauguuguucaga

SEQ ID NO: 303478 - RNA, 19 nt, Human herpesvirus 3
acuacaugcggugcuguuu

SEQ ID NO: 303479 - RNA, 16 nt, Human herpesvirus 3
acuacauggagugugu

SEQ ID NO: 303480 - RNA, 18 nt, Human herpesvirus 3
acuacauggaguguguua

SEQ ID NO: 303481 - RNA, 19 nt, Human herpesvirus 3
acuacauggaguguguuac

SEQ ID NO: 303482 - RNA, 18 nt, Human herpesvirus 3
acuacugcugcaagcccu

SEQ ID NO: 303483 - RNA, 14 nt, Human herpesvirus 3
acuauaugcguuuu

SEQ ID NO: 303484 - RNA, 16 nt, Human herpesvirus 3
acuauauuccgagggu

SEQ ID NO: 303485 - RNA, 18 nt, Human herpesvirus 3
acuaugguaaaaaccgcu

SEQ ID NO: 303486 - RNA, 18 nt, Human herpesvirus 3
acuauuugugaagacuuu

SEQ ID NO: 303487 - RNA, 17 nt, Human herpesvirus 3
acuccacggggucuaca

SEQ ID NO: 303488 - RNA, 22 nt, Human herpesvirus 3
acugaacauuuuucgguguuac

SEQ ID NO: 303489 - RNA, 17 nt, Human herpesvirus 3
acugaauuuaacauagc

SEQ ID NO: 303490 - RNA, 19 nt, Human herpesvirus 3
acugccguaaacacgguaa

SEQ ID NO: 303491 - RNA, 15 nt, Human herpesvirus 3
acugcuacaacggaa

SEQ ID NO: 303492 - RNA, 19 nt, Human herpesvirus 3
acugguguucuauuuccca

SEQ ID NO: 303493 - RNA, 20 nt, Human herpesvirus 3
acugguguucuauuucccaa

SEQ ID NO: 303494 - RNA, 17 nt, Human herpesvirus 3
acuguacagcugagaug

SEQ ID NO: 303495 - RNA, 20 nt, Human herpesvirus 3
acugugaagcguuauacgug

SEQ ID NO: 303496 - RNA, 15 nt, Human herpesvirus 3
acugugucucucaaa

SEQ ID NO: 303497 - RNA, 23 nt, Human herpesvirus 3
acuguuccaggcgagacuugaua

SEQ ID NO: 303498 - RNA, 23 nt, Human herpesvirus 3
acuguuuaaaaauacgugcguau

SEQ ID NO: 303499 - RNA, 18 nt, Human herpesvirus 3
acuguuuaaauaguacca

SEQ ID NO: 303500 - RNA, 16 nt, Human herpesvirus 3
acuuaacaaacauaua

SEQ ID NO: 303501 - RNA, 14 nt, Human herpesvirus 3
acuucaguacuuaa

SEQ ID NO: 303502 - RNA, 20 nt, Human herpesvirus 3
acuucuugaagcguuuccag

SEQ ID NO: 303503 - RNA, 16 nt, Human herpesvirus 3
acuugcaccacaccau

SEQ ID NO: 303504 - RNA, 20 nt, Human herpesvirus 3
acuugcauuacccuauccca

SEQ ID NO: 303505 - RNA, 19 nt, Human herpesvirus 3
acuugggcggagacaauua

SEQ ID NO: 303506 - RNA, 22 nt, Human herpesvirus 3
acuuguaaacccccaagcaaua

SEQ ID NO: 303507 - RNA, 22 nt, Human herpesvirus 3
acuuuacaacccguggugaauu

SEQ ID NO: 303508 - RNA, 14 nt, Human herpesvirus 3
acuuuuaaacgcca

SEQ ID NO: 303509 - RNA, 18 nt, Human herpesvirus 3
agaaagauugcagucauu

SEQ ID NO: 303510 - RNA, 15 nt, Human herpesvirus 3
agaaagcgauuuuau

SEQ ID NO: 303511 - RNA, 24 nt, Human herpesvirus 3
agaacacacgccgguacaauuacc

SEQ ID NO: 303512 - RNA, 18 nt, Human herpesvirus 3
agaaccgacccaggacau

SEQ ID NO: 303513 - RNA, 16 nt, Human herpesvirus 3
agaagcguuaccacag

SEQ ID NO: 303514 - RNA, 14 nt, Human herpesvirus 3
agaagguucacuaa

SEQ ID NO: 303515 - RNA, 12 nt, Human herpesvirus 3
agaagguuuaaa

SEQ ID NO: 303516 - RNA, 20 nt, Human herpesvirus 3
agaauauuccgaccguaaua

SEQ ID NO: 303517 - RNA, 22 nt, Human herpesvirus 3
agaauauuccgaccguaauaug

SEQ ID NO: 303518 - RNA, 22 nt, Human herpesvirus 3
agaauguaauucgugugcaaua

SEQ ID NO: 303519 - RNA, 13 nt, Human herpesvirus 3
agacaccaugacg

SEQ ID NO: 303520 - RNA, 21 nt, Human herpesvirus 3
agacagcccgugugauguuac

SEQ ID NO: 303521 - RNA, 22 nt, Human herpesvirus 3
agacaucccucguuuauggaaa

SEQ ID NO: 303522 - RNA, 17 nt, Human herpesvirus 3
agacauggccgugaaug

SEQ ID NO: 303523 - RNA, 14 nt, Human herpesvirus 3
agacguauguucug

SEQ ID NO: 303524 - RNA, 18 nt, Human herpesvirus 3
agacugacccuaugacau

SEQ ID NO: 303525 - RNA, 18 nt, Human herpesvirus 3
agagauccaauacaucaa

SEQ ID NO: 303526 - RNA, 17 nt, Human herpesvirus 3
agagcaguccaugguuu

SEQ ID NO: 303527 - RNA, 23 nt, Human herpesvirus 3
agagcccacacaaucagaagaua

SEQ ID NO: 303528 - RNA, 20 nt, Human herpesvirus 3
agauacagcauauaauccac

SEQ ID NO: 303529 - RNA, 21 nt, Human herpesvirus 3
agauacuaugguaaaaaccgc

SEQ ID NO: 303530 - RNA, 15 nt, Human herpesvirus 3
agauaggguguauac

SEQ ID NO: 303531 - RNA, 15 nt, Human herpesvirus 3
auacacauugucaua

SEQ ID NO: 303532 - RNA, 17 nt, Human herpesvirus 3
auacacauugucauacu

SEQ ID NO: 303533 - RNA, 16 nt, Human herpesvirus 3
auacaggcaacugcaa

SEQ ID NO: 303534 - RNA, 13 nt, Human herpesvirus 3
auacauauguucc

SEQ ID NO: 303535 - RNA, 15 nt, Human herpesvirus 3
auaccgacaguaaaa

SEQ ID NO: 303536 - RNA, 17 nt, Human herpesvirus 3
auaccuuuuucaugcuu

SEQ ID NO: 303537 - RNA, 20 nt, Human herpesvirus 3
auaccuuuuucaugcuuguc

SEQ ID NO: 303538 - RNA, 23 nt, Human herpesvirus 3
auacgacuuuuaaacgccagugg

SEQ ID NO: 303539 - RNA, 17 nt, Human herpesvirus 3
auacgccgacaugccug

SEQ ID NO: 303540 - RNA, 18 nt, Human herpesvirus 3
auacgguucaugacauua

SEQ ID NO: 303541 - RNA, 22 nt, Human herpesvirus 3
auacguacaucuuucagguuga

SEQ ID NO: 303542 - RNA, 17 nt, Human herpesvirus 3
auacuaagccucuguac

SEQ ID NO: 303543 - RNA, 18 nt, Human herpesvirus 3
auacuaagccucuguaca

SEQ ID NO: 303544 - RNA, 16 nt, Human herpesvirus 3
auacuuggacuguuua

SEQ ID NO: 303545 - RNA, 17 nt, Human herpesvirus 3
auagacuguucuacuga

SEQ ID NO: 303546 - RNA, 13 nt, Human herpesvirus 3
auagauacuccac

SEQ ID NO: 303547 - RNA, 20 nt, Human herpesvirus 3
auagcgccaaaauggaugca

SEQ ID NO: 303548 - RNA, 16 nt, Human herpesvirus 3
auagcuguaaaaacca

SEQ ID NO: 303549 - RNA, 23 nt, Human herpesvirus 3
auagcuguaaaaaccauggacag

SEQ ID NO: 303550 - RNA, 12 nt, Human herpesvirus 3
auagcugucacu

SEQ ID NO: 303551 - RNA, 22 nt, Human herpesvirus 3
auaggguugcgauaacugcgau

SEQ ID NO: 303552 - RNA, 14 nt, Human herpesvirus 3
auaguaaauaccua

SEQ ID NO: 303553 - RNA, 18 nt, Human herpesvirus 3
auauaacaauugagauac

SEQ ID NO: 303554 - RNA, 23 nt, Human herpesvirus 3
auauaagguguuaauaaccauau

SEQ ID NO: 303555 - RNA, 15 nt, Human herpesvirus 3
auauaauauuaacag

SEQ ID NO: 303556 - RNA, 20 nt, Human herpesvirus 3
auauacaaaauaaaaacaua

SEQ ID NO: 303557 - RNA, 20 nt, Human herpesvirus 3
auauacgcucuucugauauu

SEQ ID NO: 303558 - RNA, 16 nt, Human herpesvirus 3
auauagugugucucca

SEQ ID NO: 303559 - RNA, 14 nt, Human herpesvirus 3
auauauauguucca

SEQ ID NO: 303560 - RNA, 17 nt, Human herpesvirus 3
auaucauuuuauuacau

SEQ ID NO: 303561 - RNA, 14 nt, Human herpesvirus 3
auauccugcgcaga

SEQ ID NO: 303562 - RNA, 19 nt, Human herpesvirus 3
auaucgucuaauaccacag

SEQ ID NO: 303563 - RNA, 17 nt, Human herpesvirus 3
auaucuggaacccaagg

SEQ ID NO: 303564 - RNA, 13 nt, Human herpesvirus 3
auaucuguuacau

SEQ ID NO: 303565 - RNA, 16 nt, Human herpesvirus 3
auaucuguuacauuuc

SEQ ID NO: 303566 - RNA, 12 nt, Human herpesvirus 3
auaugacauaug

SEQ ID NO: 303567 - RNA, 22 nt, Human herpesvirus 3
auaugacggcccccuggacaug

SEQ ID NO: 303568 - RNA, 15 nt, Human herpesvirus 3
auaugauucaaguaa

SEQ ID NO: 303569 - RNA, 15 nt, Human herpesvirus 3
auaugcgcauggaau

SEQ ID NO: 303570 - RNA, 18 nt, Human herpesvirus 3
auaugguaugucugucau

SEQ ID NO: 303571 - RNA, 15 nt, Human herpesvirus 3
auaugucacauauua

SEQ ID NO: 303572 - RNA, 17 nt, Human herpesvirus 3
auauuaacacgauuaac

SEQ ID NO: 303573 - RNA, 16 nt, Human herpesvirus 3
auauuaccccgccaua

SEQ ID NO: 303574 - RNA, 20 nt, Human herpesvirus 3
auauuaccccgccauaaaca

SEQ ID NO: 303575 - RNA, 13 nt, Human herpesvirus 3
auauuagcacuau

SEQ ID NO: 303576 - RNA, 14 nt, Human herpesvirus 3
auauuagcacuauc

SEQ ID NO: 303577 - RNA, 14 nt, Human herpesvirus 3
auauuggauuugaa

SEQ ID NO: 303578 - RNA, 16 nt, Human herpesvirus 3
auauuguagaacuaac

SEQ ID NO: 303579 - RNA, 20 nt, Human herpesvirus 3
auauuguauuguaguacagg

SEQ ID NO: 303580 - RNA, 19 nt, Human herpesvirus 3
auauuuuugucuaccacua

SEQ ID NO: 303581 - RNA, 18 nt, Human herpesvirus 3
aucaaccggaacaguauc

SEQ ID NO: 303582 - RNA, 14 nt, Human herpesvirus 3
aucaacgacauaca

SEQ ID NO: 303583 - RNA, 13 nt, Human herpesvirus 3
aucagagaagcua

SEQ ID NO: 303584 - RNA, 13 nt, Human herpesvirus 3
aucauaagcgcag

SEQ ID NO: 303585 - RNA, 15 nt, Human herpesvirus 3
aucauacgcauuuac

SEQ ID NO: 303586 - RNA, 21 nt, Human herpesvirus 3
aucaugguugguuacugugaa

SEQ ID NO: 303587 - RNA, 12 nt, Human herpesvirus 3
auccaacaaauu

SEQ ID NO: 303588 - RNA, 18 nt, Human herpesvirus 3
auccaauuaaagcccaca

SEQ ID NO: 303589 - RNA, 17 nt, Human herpesvirus 3
auccacgguauuccaaa

SEQ ID NO: 303590 - RNA, 19 nt, Human herpesvirus 3
auccauuuuuccucugggg

SEQ ID NO: 303591 - RNA, 17 nt, Human herpesvirus 3
aucccacauguauaaaa

SEQ ID NO: 303592 - RNA, 17 nt, Human herpesvirus 3
aucccccgaucucuggu

SEQ ID NO: 303593 - RNA, 15 nt, Human herpesvirus 3
auccggcaugcauug

SEQ ID NO: 303594 - RNA, 16 nt, Human herpesvirus 3
aucgcggggguugugc

SEQ ID NO: 303595 - RNA, 18 nt, Human herpesvirus 3
aucggauauuggauuuga

SEQ ID NO: 303596 - RNA, 18 nt, Human herpesvirus 3
aucgggcgacaauccaau

SEQ ID NO: 303597 - RNA, 13 nt, Human herpesvirus 3
aucguagguauaa

SEQ ID NO: 303598 - RNA, 15 nt, Human herpesvirus 3
aucgucccauuuaaa

SEQ ID NO: 303599 - RNA, 22 nt, Human herpesvirus 3
aucguccuucaacacacccaua

SEQ ID NO: 303600 - RNA, 23 nt, Human herpesvirus 3
aucuaauaacaauuuaacauacc

SEQ ID NO: 303601 - RNA, 12 nt, Human herpesvirus 3
aucuauauacac

SEQ ID NO: 303602 - RNA, 18 nt, Human herpesvirus 3
aucucuucauauguaauu

SEQ ID NO: 303603 - RNA, 13 nt, Human herpesvirus 3
aucugcauuacag

SEQ ID NO: 303604 - RNA, 15 nt, Human herpesvirus 3
aucugcauuacagaa

SEQ ID NO: 303605 - RNA, 15 nt, Human herpesvirus 3
aucugguaaauguua

SEQ ID NO: 303606 - RNA, 21 nt, Human herpesvirus 3
aucuucacgcucaaugaacag

SEQ ID NO: 303607 - RNA, 18 nt, Human herpesvirus 3
augaaaaaagugucuguc

SEQ ID NO: 303608 - RNA, 14 nt, Human herpesvirus 3
augaaauaguuuca

SEQ ID NO: 303609 - RNA, 16 nt, Human herpesvirus 3
augaacagcaacggau

SEQ ID NO: 303610 - RNA, 19 nt, Human herpesvirus 3
augaacagcaacggaugca

SEQ ID NO: 303611 - RNA, 11 nt, Human herpesvirus 3
augaacuaaua

SEQ ID NO: 303612 - RNA, 18 nt, Human herpesvirus 3
augaacugccaauauaca

SEQ ID NO: 303613 - RNA, 20 nt, Human herpesvirus 3
augaagauagguuagaacac

SEQ ID NO: 303614 - RNA, 20 nt, Human herpesvirus 3
augaagcuauuggcuccacu

SEQ ID NO: 303615 - RNA, 21 nt, Human herpesvirus 3
augacaacgguuucauguccc

SEQ ID NO: 303616 - RNA, 18 nt, Human herpesvirus 3
augagcggugguaugauc

SEQ ID NO: 303617 - RNA, 17 nt, Human herpesvirus 3
augaggggaaggauuaa

SEQ ID NO: 303618 - RNA, 15 nt, Human herpesvirus 3
augaggguggcagaa

SEQ ID NO: 303619 - RNA, 19 nt, Human herpesvirus 3
augaucugguaaauguuaa

SEQ ID NO: 303620 - RNA, 15 nt, Human herpesvirus 3
augauguaaccuaca

SEQ ID NO: 303621 - RNA, 18 nt, Human herpesvirus 3
augauguaaccuacacaa

SEQ ID NO: 303622 - RNA, 22 nt, Human herpesvirus 3
augcaaccaucagaucaucuga

SEQ ID NO: 303623 - RNA, 14 nt, Human herpesvirus 3
augcaacccuguca

SEQ ID NO: 303624 - RNA, 19 nt, Human herpesvirus 3
augcacaacaaaagcuaua

SEQ ID NO: 303625 - RNA, 20 nt, Human herpesvirus 3
augcacaacaaaagcuauau

SEQ ID NO: 303626 - RNA, 14 nt, Human herpesvirus 3
augcagucggguca

SEQ ID NO: 303627 - RNA, 19 nt, Human herpesvirus 3
augcagucgggucauuaua

SEQ ID NO: 303628 - RNA, 16 nt, Human herpesvirus 3
augcaucguagguaua

SEQ ID NO: 303629 - RNA, 15 nt, Human herpesvirus 3
augccagaagcauuu

SEQ ID NO: 303630 - RNA, 15 nt, Human herpesvirus 3
augccucggaugcac

SEQ ID NO: 303631 - RNA, 20 nt, Human herpesvirus 3
augcgggcuugcuguucuca

SEQ ID NO: 303632 - RNA, 21 nt, Human herpesvirus 3
augcgggcuugcuguucucau

SEQ ID NO: 303633 - RNA, 15 nt, Human herpesvirus 3
augcugauacauaaa

SEQ ID NO: 303634 - RNA, 20 nt, Human herpesvirus 3
auggaaucgucuaacauuaa

SEQ ID NO: 303635 - RNA, 15 nt, Human herpesvirus 3
auggaauuaaugcaa

SEQ ID NO: 303636 - RNA, 20 nt, Human herpesvirus 3
auggcgaccacgacagcagu

SEQ ID NO: 303637 - RNA, 20 nt, Human herpesvirus 3
augggcgggauuacauugcu

SEQ ID NO: 303638 - RNA, 14 nt, Human herpesvirus 3
augguaaaaaccgc

SEQ ID NO: 303639 - RNA, 19 nt, Human herpesvirus 3
auggucagacugccguaaa

SEQ ID NO: 303640 - RNA, 22 nt, Human herpesvirus 3
auggugaaagagcuguccauga

SEQ ID NO: 303641 - RNA, 20 nt, Human herpesvirus 3
augguuaauaauagugacaa

SEQ ID NO: 303642 - RNA, 22 nt, Human herpesvirus 3
auguaauaaaaugauauacaca

SEQ ID NO: 303643 - RNA, 20 nt, Human herpesvirus 3
auguacugugucucucaaaa

SEQ ID NO: 303644 - RNA, 23 nt, Human herpesvirus 3
auguaguggcguagguagaugca

SEQ ID NO: 303645 - RNA, 19 nt, Human herpesvirus 3
auguauaaaauucuaacaa

SEQ ID NO: 303646 - RNA, 22 nt, Human herpesvirus 3
caagcaauaaaacaaacauuca

SEQ ID NO: 303647 - RNA, 22 nt, Human herpesvirus 3
caagcuauggacgcaacgcaga

SEQ ID NO: 303648 - RNA, 15 nt, Human herpesvirus 3
caaggcccauauccc

SEQ ID NO: 303649 - RNA, 15 nt, Human herpesvirus 3
caaggucugucccuu

SEQ ID NO: 303650 - RNA, 17 nt, Human herpesvirus 3
caagguguaaauacugc

SEQ ID NO: 303651 - RNA, 18 nt, Human herpesvirus 3
caaguaaauaugugcauc

SEQ ID NO: 303652 - RNA, 20 nt, Human herpesvirus 3
caaguagagcccacacaauc

SEQ ID NO: 303653 - RNA, 22 nt, Human herpesvirus 3
caagugagguguccugugaucg

SEQ ID NO: 303654 - RNA, 19 nt, Human herpesvirus 3
caaguggaugauauuuuaa

SEQ ID NO: 303655 - RNA, 21 nt, Human herpesvirus 3
caaguggucguuuguauuuaa

SEQ ID NO: 303656 - RNA, 15 nt, Human herpesvirus 3
caaguuuaacauuuc

SEQ ID NO: 303657 - RNA, 18 nt, Human herpesvirus 3
caauaaaacaaacauuca

SEQ ID NO: 303658 - RNA, 15 nt, Human herpesvirus 3
caucauacgcauuua

SEQ ID NO: 303659 - RNA, 15 nt, Human herpesvirus 3
caucaucugauuugc

SEQ ID NO: 303660 - RNA, 17 nt, Human herpesvirus 3
caucaucugauuugcaa

SEQ ID NO: 303661 - RNA, 16 nt, Human herpesvirus 3
cauccacagucugcuu

SEQ ID NO: 303662 - RNA, 22 nt, Human herpesvirus 3
cauccucgcgguccguuucaua

SEQ ID NO: 303663 - RNA, 14 nt, Human herpesvirus 3
cauccugcucugca

SEQ ID NO: 303664 - RNA, 15 nt, Human herpesvirus 3
caucgaaaagacugu

SEQ ID NO: 303665 - RNA, 15 nt, Human herpesvirus 3
caucgagguugucca

SEQ ID NO: 303666 - RNA, 23 nt, Human herpesvirus 3
caucgucaaaaauagcuguaaaa

SEQ ID NO: 303667 - RNA, 14 nt, Human herpesvirus 3
caucgucucgugua

SEQ ID NO: 303668 - RNA, 13 nt, Human herpesvirus 3
caucuauaugauu

SEQ ID NO: 303669 - RNA, 16 nt, Human herpesvirus 3
caucugauuugcaaac

SEQ ID NO: 303670 - RNA, 14 nt, Human herpesvirus 3
caugaacaaacacu

SEQ ID NO: 303671 - RNA, 19 nt, Human herpesvirus 3
caugacaacggaaaacacg

SEQ ID NO: 303672 - RNA, 16 nt, Human herpesvirus 3
caugaugaaaaccugg

SEQ ID NO: 303673 - RNA, 16 nt, Human herpesvirus 3
caugauugauggaugu

SEQ ID NO: 303674 - RNA, 17 nt, Human herpesvirus 3
caugcauggaaucacca

SEQ ID NO: 303675 - RNA, 20 nt, Human herpesvirus 3
caugcuuguaaaacauauca

SEQ ID NO: 303676 - RNA, 15 nt, Human herpesvirus 3
caugcuugucaaaac

SEQ ID NO: 303677 - RNA, 15 nt, Human herpesvirus 3
cauggaguguguuac

SEQ ID NO: 303678 - RNA, 15 nt, Human herpesvirus 3
cauggcuaugccauu

SEQ ID NO: 303679 - RNA, 20 nt, Human herpesvirus 3
cauggcuaugccauuugaga

SEQ ID NO: 303680 - RNA, 22 nt, Human herpesvirus 3
cauggguuuuuagaauuuccaa

SEQ ID NO: 303681 - RNA, 23 nt, Human herpesvirus 3
caugugacuaaacacgcccauug

SEQ ID NO: 303682 - RNA, 17 nt, Human herpesvirus 3
cauguuuucccaugucu

SEQ ID NO: 303683 - RNA, 22 nt, Human herpesvirus 3
cauuaaaaguuuacguguauau

SEQ ID NO: 303684 - RNA, 22 nt, Human herpesvirus 3
cauuaagccuguuaauaaaaua

SEQ ID NO: 303685 - RNA, 15 nt, Human herpesvirus 3
cauuaaucgcugaua

SEQ ID NO: 303686 - RNA, 18 nt, Human herpesvirus 3
cauuacagaaaugugagg

SEQ ID NO: 303687 - RNA, 21 nt, Human herpesvirus 3
cauuauaaaccgauuauguca

SEQ ID NO: 303688 - RNA, 12 nt, Human herpesvirus 3
cauuaugagcau

SEQ ID NO: 303689 - RNA, 20 nt, Human herpesvirus 3
cauuccaacuggaaaugugc

SEQ ID NO: 303690 - RNA, 21 nt, Human herpesvirus 3
cauucgcaacacaucuacugu

SEQ ID NO: 303691 - RNA, 12 nt, Human herpesvirus 3
cauugcuuucaa

SEQ ID NO: 303692 - RNA, 21 nt, Human herpesvirus 3
cauuuaaagucguuuauaucu

SEQ ID NO: 303693 - RNA, 18 nt, Human herpesvirus 3
cauuuaacaaucccgggg

SEQ ID NO: 303694 - RNA, 18 nt, Human herpesvirus 3
cauuuauuaccacauccu

SEQ ID NO: 303695 - RNA, 19 nt, Human herpesvirus 3
cauuucaauaaauguacua

SEQ ID NO: 303696 - RNA, 20 nt, Human herpesvirus 3
cauuuccaaacacauuacgu

SEQ ID NO: 303697 - RNA, 21 nt, Human herpesvirus 3
cauuugauacguuguucaugg

SEQ ID NO: 303698 - RNA, 20 nt, Human herpesvirus 3
cauuuuuauuuguuuugaau

SEQ ID NO: 303699 - RNA, 11 nt, Human herpesvirus 3
ccaaaaacaca

SEQ ID NO: 303700 - RNA, 15 nt, Human herpesvirus 3
ccaaacagcaccaau

SEQ ID NO: 303701 - RNA, 17 nt, Human herpesvirus 3
ccaaacagcaccaauau

SEQ ID NO: 303702 - RNA, 14 nt, Human herpesvirus 3
ccaaaccacuguuc

SEQ ID NO: 303703 - RNA, 14 nt, Human herpesvirus 3
ccaacacaguguuc

SEQ ID NO: 303704 - RNA, 13 nt, Human herpesvirus 3
ccaacgaguguau

SEQ ID NO: 303705 - RNA, 18 nt, Human herpesvirus 3
ccaacgcacuguucuuua

SEQ ID NO: 303706 - RNA, 16 nt, Human herpesvirus 3
ccaacgguuggcuuaa

SEQ ID NO: 303707 - RNA, 17 nt, Human herpesvirus 3
ccaacgguuggcuuaaa

SEQ ID NO: 303708 - RNA, 22 nt, Human herpesvirus 3
ccaacuccuguuuuugcaaggc

SEQ ID NO: 303709 - RNA, 16 nt, Human herpesvirus 3
ccaacucuuuucccaa

SEQ ID NO: 303710 - RNA, 13 nt, Human herpesvirus 3
ccaacugauuaca

SEQ ID NO: 303711 - RNA, 21 nt, Human herpesvirus 3
ccaacugauuacauuucauac

SEQ ID NO: 303712 - RNA, 15 nt, Human herpesvirus 3
ccaagacgacauuaa

SEQ ID NO: 303713 - RNA, 16 nt, Human herpesvirus 3
ccaagcgcucuucaau

SEQ ID NO: 303714 - RNA, 21 nt, Human herpesvirus 3
ccaauagccgccagauguaca

SEQ ID NO: 303715 - RNA, 13 nt, Human herpesvirus 3
ccacagucugcuu

SEQ ID NO: 303716 - RNA, 15 nt, Human herpesvirus 3
ccacccccucuuaaa

SEQ ID NO: 303717 - RNA, 16 nt, Human herpesvirus 3
ccacguagcaaagcua

SEQ ID NO: 303718 - RNA, 14 nt, Human herpesvirus 3
ccacgugguauuau

SEQ ID NO: 303719 - RNA, 14 nt, Human herpesvirus 3
ccacuuacaggaca

SEQ ID NO: 303720 - RNA, 20 nt, Human herpesvirus 3
ccagaaacgccccuccuaaa

SEQ ID NO: 303721 - RNA, 16 nt, Human herpesvirus 3
ccagaacgaucacaac

SEQ ID NO: 303722 - RNA, 16 nt, Human herpesvirus 3
ccagaagaacuagcua

SEQ ID NO: 303723 - RNA, 21 nt, Human herpesvirus 3
ccagaagcauuuacaccgugg

SEQ ID NO: 303724 - RNA, 12 nt, Human herpesvirus 3
ccagaguacagg

SEQ ID NO: 303725 - RNA, 14 nt, Human herpesvirus 3
ccagaguacagggu

SEQ ID NO: 303726 - RNA, 21 nt, Human herpesvirus 3
ccagaguacaggguaucuaag

SEQ ID NO: 303727 - RNA, 15 nt, Human herpesvirus 3
ccagcguugccacgc

SEQ ID NO: 303728 - RNA, 19 nt, Human herpesvirus 3
ccaguauaccggaguauaa

SEQ ID NO: 303729 - RNA, 18 nt, Human herpesvirus 3
ccagucuaguuacauuuc

SEQ ID NO: 303730 - RNA, 16 nt, Human herpesvirus 3
ccauacauauguucca

SEQ ID NO: 303731 - RNA, 15 nt, Human herpesvirus 3
ccauagacuguucua

SEQ ID NO: 303732 - RNA, 22 nt, Human herpesvirus 3
ccauauauaagggagucuacaa

SEQ ID NO: 303733 - RNA, 17 nt, Human herpesvirus 3
ccauaugaccuguaaua

SEQ ID NO: 303734 - RNA, 22 nt, Human herpesvirus 3
ccaucuaauaacaauuuaacau

SEQ ID NO: 303735 - RNA, 17 nt, Human herpesvirus 3
ccaugaugaaaaccugg

SEQ ID NO: 303736 - RNA, 19 nt, Human herpesvirus 3
ccaugucuacgugguacca

SEQ ID NO: 303737 - RNA, 19 nt, Human herpesvirus 3
ccauuaaagagccauuucc

SEQ ID NO: 303738 - RNA, 17 nt, Human herpesvirus 3
ccauuacuacauugaac

SEQ ID NO: 303739 - RNA, 19 nt, Human herpesvirus 3
cccaacgaguguaugcgua

SEQ ID NO: 303740 - RNA, 20 nt, Human herpesvirus 3
cccaacugauuacauuucau

SEQ ID NO: 303741 - RNA, 13 nt, Human herpesvirus 3
cccacauuacugu

SEQ ID NO: 303742 - RNA, 18 nt, Human herpesvirus 3
cccaccaucaucugauuu

SEQ ID NO: 303743 - RNA, 14 nt, Human herpesvirus 3
cccacuguuugauc

SEQ ID NO: 303744 - RNA, 13 nt, Human herpesvirus 3
cccaguaaucuca

SEQ ID NO: 303745 - RNA, 14 nt, Human herpesvirus 3
cccaguaaucucac

SEQ ID NO: 303746 - RNA, 13 nt, Human herpesvirus 3
cccauacagugac

SEQ ID NO: 303747 - RNA, 14 nt, Human herpesvirus 3
cccauccuuaaaau

SEQ ID NO: 303748 - RNA, 21 nt, Human herpesvirus 3
cccauccuuaaaauaaaaggu

SEQ ID NO: 303749 - RNA, 12 nt, Human herpesvirus 3
ccccaagaguuu

SEQ ID NO: 303750 - RNA, 14 nt, Human herpesvirus 3
cccccgcgauuuau

SEQ ID NO: 303751 - RNA, 15 nt, Human herpesvirus 3
cccccguugcuuuaa

SEQ ID NO: 303752 - RNA, 14 nt, Human herpesvirus 3
cccgaaagcccgau

SEQ ID NO: 303753 - RNA, 17 nt, Human herpesvirus 3
cccgccauaaacagaga

SEQ ID NO: 303754 - RNA, 22 nt, Human herpesvirus 3
cccggcggaaacaucugcauua

SEQ ID NO: 303755 - RNA, 11 nt, Human herpesvirus 3
cccgguauuau

SEQ ID NO: 303756 - RNA, 15 nt, Human herpesvirus 3
cccuaucguuuauuu

SEQ ID NO: 303757 - RNA, 13 nt, Human herpesvirus 3
cccucggacauaa

SEQ ID NO: 303758 - RNA, 21 nt, Human herpesvirus 3
cccugcuaaccauagacuguu

SEQ ID NO: 303759 - RNA, 22 nt, Human herpesvirus 3
cccuucaaacggauacuacuaa

SEQ ID NO: 303760 - RNA, 11 nt, Human herpesvirus 3
ccgacaugcac

SEQ ID NO: 303761 - RNA, 20 nt, Human herpesvirus 3
ccgagaagggggauuuacaa

SEQ ID NO: 303762 - RNA, 22 nt, Human herpesvirus 3
ccgagacugacccuaugacaug

SEQ ID NO: 303763 - RNA, 14 nt, Human herpesvirus 3
ccgauaauaccaaa

SEQ ID NO: 303764 - RNA, 23 nt, Human herpesvirus 3
ccgauauuguauuguaguacagg

SEQ ID NO: 303765 - RNA, 16 nt, Human herpesvirus 3
ccgauguuccaaugga

SEQ ID NO: 303766 - RNA, 19 nt, Human herpesvirus 3
ccgcaucgucucguguagu

SEQ ID NO: 303767 - RNA, 20 nt, Human herpesvirus 3
ccgcucgcugagcuccagau

SEQ ID NO: 303768 - RNA, 18 nt, Human herpesvirus 3
ccggaaauauaacauaca

SEQ ID NO: 303769 - RNA, 18 nt, Human herpesvirus 3
ccggacaauuaacacaga

SEQ ID NO: 303770 - RNA, 13 nt, Human herpesvirus 3
ccggcaugcauug

SEQ ID NO: 303771 - RNA, 15 nt, Human herpesvirus 3
ccggcucacagagcu

SEQ ID NO: 303772 - RNA, 19 nt, Human herpesvirus 3
ccggguggguggcauuaaa

SEQ ID NO: 303773 - RNA, 16 nt, Human herpesvirus 3
ccggguuuuacguuaa

SEQ ID NO: 303774 - RNA, 16 nt, Human herpesvirus 3
ccgucaaugcaacuau

SEQ ID NO: 303775 - RNA, 19 nt, Human herpesvirus 3
ccgugugguaugaaucucu

SEQ ID NO: 303776 - RNA, 22 nt, Human herpesvirus 3
ccguguuacuuggaaacaccca

SEQ ID NO: 303777 - RNA, 14 nt, Human herpesvirus 3
ccuacacaacaccc

SEQ ID NO: 303778 - RNA, 19 nt, Human herpesvirus 3
ccuagaagcguuaccacag

SEQ ID NO: 303779 - RNA, 19 nt, Human herpesvirus 3
ccuaguauuuacguaugua

SEQ ID NO: 303780 - RNA, 13 nt, Human herpesvirus 3
ccuauuucaugcu

SEQ ID NO: 303781 - RNA, 15 nt, Human herpesvirus 3
ccucauucguuuagc

SEQ ID NO: 303782 - RNA, 23 nt, Human herpesvirus 3
ccuccguuacgggggugugguua

SEQ ID NO: 303783 - RNA, 20 nt, Human herpesvirus 3
ccucggaugcaccgguccaa

SEQ ID NO: 303784 - RNA, 18 nt, Human herpesvirus 3
ccucggccgcuucccgaa

SEQ ID NO: 303785 - RNA, 16 nt, Human herpesvirus 3
ccucuguacaacacaa

SEQ ID NO: 303786 - RNA, 17 nt, Human herpesvirus 3
ccucuguacaacacaaa

SEQ ID NO: 303787 - RNA, 14 nt, Human herpesvirus 3
ccugagguuuagca

SEQ ID NO: 303788 - RNA, 21 nt, Human herpesvirus 3
ccugcaagcgguuuagcauuu

SEQ ID NO: 303789 - RNA, 19 nt, Human herpesvirus 3
ccugcuaaccauagacugu

SEQ ID NO: 303790 - RNA, 17 nt, Human herpesvirus 3
ccugcucugcaaauaca

SEQ ID NO: 303791 - RNA, 15 nt, Human herpesvirus 3
ccuggacauugcgga

SEQ ID NO: 303792 - RNA, 14 nt, Human herpesvirus 3
ccuguccauuugca

SEQ ID NO: 303793 - RNA, 13 nt, Human herpesvirus 3
ccuuaaaauuugu

SEQ ID NO: 303794 - RNA, 16 nt, Human herpesvirus 3
ccuuaaacaacauggc

SEQ ID NO: 303795 - RNA, 13 nt, Human herpesvirus 3
ccuuauguguuau

SEQ ID NO: 303796 - RNA, 20 nt, Human herpesvirus 3
ccuugggacaucaaccagug

SEQ ID NO: 303797 - RNA, 24 nt, Human herpesvirus 3
ccuuuacaagauauaauuugucca

SEQ ID NO: 303798 - RNA, 21 nt, Human herpesvirus 3
ccuuuagcuauagauaauuca

SEQ ID NO: 303799 - RNA, 13 nt, Human herpesvirus 3
ccuuuuucaugcu

SEQ ID NO: 303800 - RNA, 14 nt, Human herpesvirus 3
ccuuuuucaugcuu

SEQ ID NO: 303801 - RNA, 17 nt, Human herpesvirus 3
ccuuuuucaugcuuguc

SEQ ID NO: 303802 - RNA, 12 nt, Human herpesvirus 3
cgaaaagacugu

SEQ ID NO: 303803 - RNA, 13 nt, Human herpesvirus 3
cgaaaagacugug

SEQ ID NO: 303804 - RNA, 14 nt, Human herpesvirus 3
cgaaaagacugugu

SEQ ID NO: 303805 - RNA, 20 nt, Human herpesvirus 3
cgaagcugccgucaaugcaa

SEQ ID NO: 303806 - RNA, 18 nt, Human herpesvirus 3
cgaaggcgggaauuucca

SEQ ID NO: 303807 - RNA, 15 nt, Human herpesvirus 3
cgaaucguugguuag

SEQ ID NO: 303808 - RNA, 14 nt, Human herpesvirus 3
cgacaauccaauag

SEQ ID NO: 303809 - RNA, 16 nt, Human herpesvirus 3
cgacagcaguaagggu

SEQ ID NO: 303810 - RNA, 18 nt, Human herpesvirus 3
cgaccccaagaguuuucu

SEQ ID NO: 303811 - RNA, 15 nt, Human herpesvirus 3
cgacgugagggugac

SEQ ID NO: 303812 - RNA, 23 nt, Human herpesvirus 3
cgagaagggggauuuacaaugac

SEQ ID NO: 303813 - RNA, 18 nt, Human herpesvirus 3
cgauagaauuuucacucu

SEQ ID NO: 303814 - RNA, 21 nt, Human herpesvirus 3
cgaucauacgccgacaugccu

SEQ ID NO: 303815 - RNA, 15 nt, Human herpesvirus 3
cgaugaaguaguggc

SEQ ID NO: 303816 - RNA, 17 nt, Human herpesvirus 3
cgauggggaucuuccaa

SEQ ID NO: 303817 - RNA, 18 nt, Human herpesvirus 3
cgauguuccaauggaugg

SEQ ID NO: 303818 - RNA, 22 nt, Human herpesvirus 3
cgauguuuuuaauccaauguuu

SEQ ID NO: 303819 - RNA, 17 nt, Human herpesvirus 3
cgauuuuaucauugaag

SEQ ID NO: 303820 - RNA, 11 nt, Human herpesvirus 3
cgcaugccauu

SEQ ID NO: 303821 - RNA, 12 nt, Human herpesvirus 3
cgcaugccauug

SEQ ID NO: 303822 - RNA, 23 nt, Human herpesvirus 3
cgcaugcgggcuugcuguucuca

SEQ ID NO: 303823 - RNA, 15 nt, Human herpesvirus 3
cgcccccguguuacu

SEQ ID NO: 303824 - RNA, 15 nt, Human herpesvirus 3
cgccgauaaauccac

SEQ ID NO: 303825 - RNA, 13 nt, Human herpesvirus 3
cgccuaguuauuc

SEQ ID NO: 303826 - RNA, 17 nt, Human herpesvirus 3
cgccuccacugcauuua

SEQ ID NO: 303827 - RNA, 19 nt, Human herpesvirus 3
cgccuggccccuugaacca

SEQ ID NO: 303828 - RNA, 21 nt, Human herpesvirus 3
cgccuggccccuugaaccacu

SEQ ID NO: 303829 - RNA, 17 nt, Human herpesvirus 3
cgcgaauaaacgacaca

SEQ ID NO: 303830 - RNA, 14 nt, Human herpesvirus 3
cgcgcggacuguuu

SEQ ID NO: 303831 - RNA, 14 nt, Human herpesvirus 3
cgcggcuucuguaa

SEQ ID NO: 303832 - RNA, 12 nt, Human herpesvirus 3
cgcguacgugcc

SEQ ID NO: 303833 - RNA, 16 nt, Human herpesvirus 3
cgcgugagggauggau

SEQ ID NO: 303834 - RNA, 18 nt, Human herpesvirus 3
cgcuaagucagauauuau

SEQ ID NO: 303835 - RNA, 17 nt, Human herpesvirus 3
cgcuacccgaaagcccg

SEQ ID NO: 303836 - RNA, 14 nt, Human herpesvirus 3
cgcuggcauuucca

SEQ ID NO: 303837 - RNA, 21 nt, Human herpesvirus 3
cgcugucgucauauuacauua

SEQ ID NO: 303838 - RNA, 17 nt, Human herpesvirus 3
cggaagaugaacuaaua

SEQ ID NO: 303839 - RNA, 18 nt, Human herpesvirus 3
cggacaauuaacacagaa

SEQ ID NO: 303840 - RNA, 15 nt, Human herpesvirus 3
cggagguuauugucc

SEQ ID NO: 303841 - RNA, 22 nt, Human herpesvirus 3
cggaguaaccggggcauccugc

SEQ ID NO: 303842 - RNA, 21 nt, Human herpesvirus 3
cggauagcauaaggaaaugca

SEQ ID NO: 303843 - RNA, 20 nt, Human herpesvirus 3
cggaugccgacgucguuuga

SEQ ID NO: 303844 - RNA, 20 nt, Human herpesvirus 3
cggccgcuacccgaaagccc

SEQ ID NO: 303845 - RNA, 20 nt, Human herpesvirus 3
cggccgcuucccgaaagccc

SEQ ID NO: 303846 - RNA, 21 nt, Human herpesvirus 3
cggcgagaauuucuaugugca

SEQ ID NO: 303847 - RNA, 23 nt, Human herpesvirus 3
cggcguccucuguuacauucuca

SEQ ID NO: 303848 - RNA, 18 nt, Human herpesvirus 3
cggcgugucccaaacagc

SEQ ID NO: 303849 - RNA, 22 nt, Human herpesvirus 3
cggcuuuuaauuugaagacacc

SEQ ID NO: 303850 - RNA, 23 nt, Human herpesvirus 3
cgggagcuuccgaaagcagucaa

SEQ ID NO: 303851 - RNA, 20 nt, Human herpesvirus 3
cgggauuacauugcuuucaa

SEQ ID NO: 303852 - RNA, 15 nt, Human herpesvirus 3
cgggcuguuguaaag

SEQ ID NO: 303853 - RNA, 17 nt, Human herpesvirus 3
cgggcuugcuguucuca

SEQ ID NO: 303854 - RNA, 15 nt, Human herpesvirus 3
cgggguagacugugg

SEQ ID NO: 303855 - RNA, 23 nt, Human herpesvirus 3
cgguaccccaaggcccauauccc

SEQ ID NO: 303856 - RNA, 22 nt, Human herpesvirus 3
cggucgcguguacgaaaaccgc

SEQ ID NO: 303857 - RNA, 21 nt, Human herpesvirus 3
cggugaucaccgaaccggggc

SEQ ID NO: 303858 - RNA, 19 nt, Human herpesvirus 3
cgguggaauuaauggagua

SEQ ID NO: 303859 - RNA, 17 nt, Human herpesvirus 3
cgguucaaaggcauuac

SEQ ID NO: 303860 - RNA, 20 nt, Human herpesvirus 3
cgguuguggacgcauuugau

SEQ ID NO: 303861 - RNA, 22 nt, Human herpesvirus 3
cguaauuugccccaaaccacug

SEQ ID NO: 303862 - RNA, 17 nt, Human herpesvirus 3
cguauuggcgagccauu

SEQ ID NO: 303863 - RNA, 14 nt, Human herpesvirus 3
cgucaacugcaaca

SEQ ID NO: 303864 - RNA, 14 nt, Human herpesvirus 3
cguccgauguucca

SEQ ID NO: 303865 - RNA, 21 nt, Human herpesvirus 3
cguccgauguuccaauggaug

SEQ ID NO: 303866 - RNA, 18 nt, Human herpesvirus 3
cguccucuguuacauucu

SEQ ID NO: 303867 - RNA, 13 nt, Human herpesvirus 3
cgucuaacauuaa

SEQ ID NO: 303868 - RNA, 14 nt, Human herpesvirus 3
cgugaggaaaaaga

SEQ ID NO: 303869 - RNA, 18 nt, Human herpesvirus 3
cgugguuauuacauuuaa

SEQ ID NO: 303870 - RNA, 15 nt, Human herpesvirus 3
cguguauaagagggc

SEQ ID NO: 303871 - RNA, 11 nt, Human herpesvirus 3
cgugugcaaua

SEQ ID NO: 303872 - RNA, 19 nt, Human herpesvirus 3
cguuauauuuuacauacaa

SEQ ID NO: 303873 - RNA, 23 nt, Human herpesvirus 3
cguucgaauccuagaagcguuac

SEQ ID NO: 303874 - RNA, 13 nt, Human herpesvirus 3
cguugcauaaccu

SEQ ID NO: 303875 - RNA, 17 nt, Human herpesvirus 3
cguuguguggauuuauc

SEQ ID NO: 303876 - RNA, 20 nt, Human herpesvirus 3
cguuuccuagccacacccac

SEQ ID NO: 303877 - RNA, 20 nt, Human herpesvirus 3
cguuuguguugugacuugac

SEQ ID NO: 303878 - RNA, 16 nt, Human herpesvirus 3
cguuuugguguuacau

SEQ ID NO: 303879 - RNA, 12 nt, Human herpesvirus 3
cguuuuuccaca

SEQ ID NO: 303880 - RNA, 12 nt, Human herpesvirus 3
cuaaaacacugu

SEQ ID NO: 303881 - RNA, 16 nt, Human herpesvirus 3
cuaaaauuuggaaaca

SEQ ID NO: 303882 - RNA, 21 nt, Human herpesvirus 3
cuaaauuacaaaaauuugaga

SEQ ID NO: 303883 - RNA, 11 nt, Human herpesvirus 3
cuaacauuuau

SEQ ID NO: 303884 - RNA, 20 nt, Human herpesvirus 3
cuaaccauagacuguucuac

SEQ ID NO: 303885 - RNA, 22 nt, Human herpesvirus 3
cuaacguuuuaguaaaauacca

SEQ ID NO: 303886 - RNA, 16 nt, Human herpesvirus 3
cuaacucagcugugag

SEQ ID NO: 303887 - RNA, 17 nt, Human herpesvirus 3
cuaauaaaaauguaaua

SEQ ID NO: 303888 - RNA, 20 nt, Human herpesvirus 3
cuaauaacaauuuaacauac

SEQ ID NO: 303889 - RNA, 21 nt, Human herpesvirus 3
cuaauauaaauaacauaacca

SEQ ID NO: 303890 - RNA, 14 nt, Human herpesvirus 3
cuaauguuguucag

SEQ ID NO: 303891 - RNA, 20 nt, Human herpesvirus 3
cuacaacggaaaauguagug

SEQ ID NO: 303892 - RNA, 23 nt, Human herpesvirus 3
cuacaagcaagcguuaucacguc

SEQ ID NO: 303893 - RNA, 19 nt, Human herpesvirus 3
cuacacccaguacguugca

SEQ ID NO: 303894 - RNA, 15 nt, Human herpesvirus 3
cuacaucgugcuuga

SEQ ID NO: 303895 - RNA, 17 nt, Human herpesvirus 3
cuacaugcggugcuguu

SEQ ID NO: 303896 - RNA, 15 nt, Human herpesvirus 3
cuacgugguaccaaa

SEQ ID NO: 303897 - RNA, 15 nt, Human herpesvirus 3
cuagaacgugcguua

SEQ ID NO: 303898 - RNA, 23 nt, Human herpesvirus 3
cuagaugauguugauauccaaga

SEQ ID NO: 303899 - RNA, 23 nt, Human herpesvirus 3
cuagauuuuaccuuauguguuau

SEQ ID NO: 303900 - RNA, 18 nt, Human herpesvirus 3
cuaggaacgcgacaugac

SEQ ID NO: 303901 - RNA, 14 nt, Human herpesvirus 3
cuaguuacauuuca

SEQ ID NO: 303902 - RNA, 21 nt, Human herpesvirus 3
cuauaaaaacauaacaccaga

SEQ ID NO: 303903 - RNA, 21 nt, Human herpesvirus 3
cuauagucaaauucaacuaau

SEQ ID NO: 303904 - RNA, 15 nt, Human herpesvirus 3
cuaugccauuugaga

SEQ ID NO: 303905 - RNA, 14 nt, Human herpesvirus 3
cuauuccaaaaugg

SEQ ID NO: 303906 - RNA, 16 nt, Human herpesvirus 3
cuauuggucguaaggg

SEQ ID NO: 303907 - RNA, 23 nt, Human herpesvirus 3
cuauuucaugcuuguaaaacaua

SEQ ID NO: 303908 - RNA, 20 nt, Human herpesvirus 3
cucauaauaugauacauaaa

SEQ ID NO: 303909 - RNA, 20 nt, Human herpesvirus 3
cucaugugggaaauacgucc

SEQ ID NO: 303910 - RNA, 13 nt, Human herpesvirus 3
cuccagaacgcca

SEQ ID NO: 303911 - RNA, 14 nt, Human herpesvirus 3
cuccagaguacagg

SEQ ID NO: 303912 - RNA, 20 nt, Human herpesvirus 3
cucccauuccaaaugcgcaa

SEQ ID NO: 303913 - RNA, 24 nt, Human herpesvirus 3
cucccuguugcgguuguuguccag

SEQ ID NO: 303914 - RNA, 19 nt, Human herpesvirus 3
cuccguaucccugucuuca

SEQ ID NO: 303915 - RNA, 13 nt, Human herpesvirus 3
cuccuaacuauaa

SEQ ID NO: 303916 - RNA, 19 nt, Human herpesvirus 3
cucgaaggcgggaauuucc

SEQ ID NO: 303917 - RNA, 12 nt, Human herpesvirus 3
cucgacguccaa

SEQ ID NO: 303918 - RNA, 18 nt, Human herpesvirus 3
cucgacguccaaguccaa

SEQ ID NO: 303919 - RNA, 19 nt, Human herpesvirus 3
cucgaugugauacaaugag

SEQ ID NO: 303920 - RNA, 19 nt, Human herpesvirus 3
cucgccuccacugcauuua

SEQ ID NO: 303921 - RNA, 16 nt, Human herpesvirus 3
cucgcggcuucuguaa

SEQ ID NO: 303922 - RNA, 21 nt, Human herpesvirus 3
cucggcguauguggguaggua

SEQ ID NO: 303923 - RNA, 22 nt, Human herpesvirus 3
cucgugucuuuuuuugaugucu

SEQ ID NO: 303924 - RNA, 22 nt, Human herpesvirus 3
cucuaacaaugcacugaaccac

SEQ ID NO: 303925 - RNA, 17 nt, Human herpesvirus 3
cucucuaacccaacucu

SEQ ID NO: 303926 - RNA, 15 nt, Human herpesvirus 3
cucuguacaacacaa

SEQ ID NO: 303927 - RNA, 16 nt, Human herpesvirus 3
cucuguuacauucuca

SEQ ID NO: 303928 - RNA, 14 nt, Human herpesvirus 3
cucuucaauguugc

SEQ ID NO: 303929 - RNA, 23 nt, Human herpesvirus 3
cucuugcguaccauaauguuuuc

SEQ ID NO: 303930 - RNA, 17 nt, Human herpesvirus 3
cugaagacuccaguaua

SEQ ID NO: 303931 - RNA, 14 nt, Human herpesvirus 3
cugaccauuuacca

SEQ ID NO: 303932 - RNA, 18 nt, Human herpesvirus 3
cugaccauuuaccagugu

SEQ ID NO: 303933 - RNA, 17 nt, Human herpesvirus 3
cugacgaagagaacugu

SEQ ID NO: 303934 - RNA, 19 nt, Human herpesvirus 3
cugagaagcaacaugacaa

SEQ ID NO: 303935 - RNA, 19 nt, Human herpesvirus 3
cugagauguugggucagaa

SEQ ID NO: 303936 - RNA, 13 nt, Human herpesvirus 3
cugauacuagcau

SEQ ID NO: 303937 - RNA, 14 nt, Human herpesvirus 3
cugauagcgccaaa

SEQ ID NO: 303938 - RNA, 19 nt, Human herpesvirus 3
cugauagcgccaaaaugga

SEQ ID NO: 303939 - RNA, 22 nt, Human herpesvirus 3
cugcaaggcucaucaacguuaa

SEQ ID NO: 303940 - RNA, 15 nt, Human herpesvirus 3
cugcagacaccauga

SEQ ID NO: 303941 - RNA, 20 nt, Human herpesvirus 3
cugcauaagcucuguaugcu

SEQ ID NO: 303942 - RNA, 19 nt, Human herpesvirus 3
cugcauuacagaaauguga

SEQ ID NO: 303943 - RNA, 19 nt, Human herpesvirus 3
cugccaauauacacggaca

SEQ ID NO: 303944 - RNA, 20 nt, Human herpesvirus 3
cugcgaagcugccgucaaug

SEQ ID NO: 303945 - RNA, 19 nt, Human herpesvirus 3
cugcgcagauguacgugua

SEQ ID NO: 303946 - RNA, 14 nt, Human herpesvirus 3
cugcuaaccauaga

SEQ ID NO: 303947 - RNA, 20 nt, Human herpesvirus 3
cugcuuuauuaccaacugua

SEQ ID NO: 303948 - RNA, 18 nt, Human herpesvirus 3
cuggaaaugugcugucaa

SEQ ID NO: 303949 - RNA, 20 nt, Human herpesvirus 3
cuggauaugggauuauggaa

SEQ ID NO: 303950 - RNA, 18 nt, Human herpesvirus 3
cuggcauuuccaaacaca

SEQ ID NO: 303951 - RNA, 16 nt, Human herpesvirus 3
cuggcuuaacagugcc

SEQ ID NO: 303952 - RNA, 20 nt, Human herpesvirus 3
cugggaacacguaauuguca

SEQ ID NO: 303953 - RNA, 21 nt, Human herpesvirus 3
cuguaaaaaccauggacaguc

SEQ ID NO: 303954 - RNA, 13 nt, Human herpesvirus 3
cugucaaccauag

SEQ ID NO: 303955 - RNA, 14 nt, Human herpesvirus 3
cugucaaguugcau

SEQ ID NO: 303956 - RNA, 13 nt, Human herpesvirus 3
cugucagaaacac

SEQ ID NO: 303957 - RNA, 14 nt, Human herpesvirus 3
cugucuguggggga

SEQ ID NO: 303958 - RNA, 22 nt, Human herpesvirus 3
cugugacaaauucccccggggc

SEQ ID NO: 303959 - RNA, 21 nt, Human herpesvirus 3
cugugaggcuauuauauuucc

SEQ ID NO: 303960 - RNA, 14 nt, Human herpesvirus 3
cuguuaauaaaaua

SEQ ID NO: 303961 - RNA, 19 nt, Human herpesvirus 3
cuguuaauaaaauauugua

SEQ ID NO: 303962 - RNA, 22 nt, Human herpesvirus 3
cuguuccaggcgagacuugaua

SEQ ID NO: 303963 - RNA, 13 nt, Human herpesvirus 3
cuguuggguggug

SEQ ID NO: 303964 - RNA, 21 nt, Human herpesvirus 3
cuguuuaaaaauacgugcgua

SEQ ID NO: 303965 - RNA, 19 nt, Human herpesvirus 3
cuuaaaggccgagcuggua

SEQ ID NO: 303966 - RNA, 22 nt, Human herpesvirus 3
cuuaacagugccagugcuccca

SEQ ID NO: 303967 - RNA, 14 nt, Human herpesvirus 3
cuuaacgagagauc

SEQ ID NO: 303968 - RNA, 14 nt, Human herpesvirus 3
cuuaaggcggugac

SEQ ID NO: 303969 - RNA, 13 nt, Human herpesvirus 3
cuuagaaaagcca

SEQ ID NO: 303970 - RNA, 13 nt, Human herpesvirus 3
cuuagaucaauau

SEQ ID NO: 303971 - RNA, 17 nt, Human herpesvirus 3
cuuagaucaauauguca

SEQ ID NO: 303972 - RNA, 18 nt, Human herpesvirus 3
cuucaaagaacucugagu

SEQ ID NO: 303973 - RNA, 20 nt, Human herpesvirus 3
cuucaagggcgaccacguga

SEQ ID NO: 303974 - RNA, 13 nt, Human herpesvirus 3
cuucaaguuaaau

SEQ ID NO: 303975 - RNA, 12 nt, Human herpesvirus 3
cuucaccagagu

SEQ ID NO: 303976 - RNA, 22 nt, Human herpesvirus 3
cuuccgaaaacaguugauguau

SEQ ID NO: 303977 - RNA, 18 nt, Human herpesvirus 3
cuuccgcuaagucagaua

SEQ ID NO: 303978 - RNA, 15 nt, Human herpesvirus 3
cuuccguguggucca

SEQ ID NO: 303979 - RNA, 18 nt, Human herpesvirus 3
cuugaaucugucuuuacg

SEQ ID NO: 303980 - RNA, 16 nt, Human herpesvirus 3
cuugcaccacaccauc

SEQ ID NO: 303981 - RNA, 13 nt, Human herpesvirus 3
cuuggagaugcaa

SEQ ID NO: 303982 - RNA, 13 nt, Human herpesvirus 3
cuuguaaaacaua

SEQ ID NO: 303983 - RNA, 16 nt, Human herpesvirus 3
cuugucaaaacauacu

SEQ ID NO: 303984 - RNA, 17 nt, Human herpesvirus 3
cuugucaaaacauacua

SEQ ID NO: 303985 - RNA, 21 nt, Human herpesvirus 3
cuugucgcgcguguaugcaca

SEQ ID NO: 303986 - RNA, 23 nt, Human herpesvirus 3
cuugucgcgcguguaugcacaac

SEQ ID NO: 303987 - RNA, 18 nt, Human herpesvirus 3
cuuuaauuaccucuguca

SEQ ID NO: 303988 - RNA, 15 nt, Human herpesvirus 3
cuuuaauuccucuaa

SEQ ID NO: 303989 - RNA, 21 nt, Human herpesvirus 3
cuuuacaacccguggugaauu

SEQ ID NO: 303990 - RNA, 16 nt, Human herpesvirus 3
cuuuacagaggguauu

SEQ ID NO: 303991 - RNA, 17 nt, Human herpesvirus 3
cuuuaucucccuaaaac

SEQ ID NO: 303992 - RNA, 14 nt, Human herpesvirus 3
cuuucaaaccaaua

SEQ ID NO: 303993 - RNA, 21 nt, Human herpesvirus 3
cuuucagguugaacugcuacg

SEQ ID NO: 303994 - RNA, 22 nt, Human herpesvirus 3
cuuugaagacuuugacuuugau

SEQ ID NO: 303995 - RNA, 17 nt, Human herpesvirus 3
cuuugguuauacgggga

SEQ ID NO: 303996 - RNA, 19 nt, Human herpesvirus 3
cuuuuaauuugaagacacc

SEQ ID NO: 303997 - RNA, 12 nt, Human herpesvirus 3
cuuuuacaugau

SEQ ID NO: 303998 - RNA, 21 nt, Human herpesvirus 3
cuuuucaucauacgcauuuac

SEQ ID NO: 303999 - RNA, 14 nt, Human herpesvirus 3
cuuuucccaaaagg

SEQ ID NO: 304000 - RNA, 21 nt, Human herpesvirus 3
cuuuucccaaaaggauauuca

SEQ ID NO: 304001 - RNA, 22 nt, Human herpesvirus 3
gaaaaaaaaaaaacaacgauua

SEQ ID NO: 304002 - RNA, 17 nt, Human herpesvirus 3
gaaaccauguuuuccca

SEQ ID NO: 304003 - RNA, 20 nt, Human herpesvirus 3
gaaacccucaagaauguaau

SEQ ID NO: 304004 - RNA, 21 nt, Human herpesvirus 3
gaaacgcuuugaagcuguuuu

SEQ ID NO: 304005 - RNA, 21 nt, Human herpesvirus 3
gaaagagcuguccaugaugaa

SEQ ID NO: 304006 - RNA, 13 nt, Human herpesvirus 3
gaaagauugcagu

SEQ ID NO: 304007 - RNA, 17 nt, Human herpesvirus 3
gaaagauugcagucauu

SEQ ID NO: 304008 - RNA, 23 nt, Human herpesvirus 3
gaaaguuguuggcgcaugccauu

SEQ ID NO: 304009 - RNA, 16 nt, Human herpesvirus 3
gaaauaaaaacuaaaa

SEQ ID NO: 304010 - RNA, 12 nt, Human herpesvirus 3
gaaauaguuuca

SEQ ID NO: 304011 - RNA, 15 nt, Human herpesvirus 3
gaaauauaacauaca

SEQ ID NO: 304012 - RNA, 22 nt, Human herpesvirus 3
gaaaucguccacuuauccaaca

SEQ ID NO: 304013 - RNA, 16 nt, Human herpesvirus 3
gaaaugcaauauuacu

SEQ ID NO: 304014 - RNA, 14 nt, Human herpesvirus 3
gaaaugugcuguca

SEQ ID NO: 304015 - RNA, 18 nt, Human herpesvirus 3
gaacacguuaucggucaa

SEQ ID NO: 304016 - RNA, 19 nt, Human herpesvirus 3
gaacagcaacggaugcaua

SEQ ID NO: 304017 - RNA, 22 nt, Human herpesvirus 3
gaaccgaacauccuaguacaga

SEQ ID NO: 304018 - RNA, 18 nt, Human herpesvirus 3
gaacgaucacaacagaca

SEQ ID NO: 304019 - RNA, 22 nt, Human herpesvirus 3
gaacgugauuugcccacaccua

SEQ ID NO: 304020 - RNA, 15 nt, Human herpesvirus 3
gaacuaauauucuac

SEQ ID NO: 304021 - RNA, 14 nt, Human herpesvirus 3
gaacucgccuccac

SEQ ID NO: 304022 - RNA, 16 nt, Human herpesvirus 3
gaagaaggacaguugg

SEQ ID NO: 304023 - RNA, 13 nt, Human herpesvirus 3
gaagacaacguau

SEQ ID NO: 304024 - RNA, 16 nt, Human herpesvirus 3
gaagacuuugacuuug

SEQ ID NO: 304025 - RNA, 13 nt, Human herpesvirus 3
gaagaugaacuaa

SEQ ID NO: 304026 - RNA, 13 nt, Human herpesvirus 3
gaagcauuuacac

SEQ ID NO: 304027 - RNA, 19 nt, Human herpesvirus 3
gaagccccaacgaguguau

SEQ ID NO: 304028 - RNA, 20 nt, Human herpesvirus 3
gaaguguucuaaaacacugu

SEQ ID NO: 304029 - RNA, 18 nt, Human herpesvirus 3
gaauaauacacacuaccu

SEQ ID NO: 304030 - RNA, 21 nt, Human herpesvirus 3
gaauaauuuuaaggcaaggaa

SEQ ID NO: 304031 - RNA, 16 nt, Human herpesvirus 3
gaauaguaaauaccua

SEQ ID NO: 304032 - RNA, 21 nt, Human herpesvirus 3
gaauauuccgaccguaauaug

SEQ ID NO: 304033 - RNA, 18 nt, Human herpesvirus 3
gaaucgucuaacauuaac

SEQ ID NO: 304034 - RNA, 16 nt, Human herpesvirus 3
gaaucuuaaaccugac

SEQ ID NO: 304035 - RNA, 22 nt, Human herpesvirus 3
gaaugcgauucgcggcaguuau

SEQ ID NO: 304036 - RNA, 23 nt, Human herpesvirus 3
gaaugcgauucgcggcaguuaua

SEQ ID NO: 304037 - RNA, 15 nt, Human herpesvirus 3
gaauuaaaaaagccg

SEQ ID NO: 304038 - RNA, 20 nt, Human herpesvirus 3
gaauuacaacgcauauuucc

SEQ ID NO: 304039 - RNA, 21 nt, Human herpesvirus 3
gaauugaugaucccaauaaac

SEQ ID NO: 304040 - RNA, 17 nt, Human herpesvirus 3
gaauuguggaguuuccc

SEQ ID NO: 304041 - RNA, 16 nt, Human herpesvirus 3
gaauuuacaguguucu

SEQ ID NO: 304042 - RNA, 20 nt, Human herpesvirus 3
gaauuuacaguguucuccug

SEQ ID NO: 304043 - RNA, 16 nt, Human herpesvirus 3
gaauuucuaugugcag

SEQ ID NO: 304044 - RNA, 16 nt, Human herpesvirus 3
gacacaaaaaauuuau

SEQ ID NO: 304045 - RNA, 18 nt, Human herpesvirus 3
gacacaguccggacaauu

SEQ ID NO: 304046 - RNA, 19 nt, Human herpesvirus 3
gacaccacguguugcuguu

SEQ ID NO: 304047 - RNA, 18 nt, Human herpesvirus 3
gacaccgcuuaacaaaaa

SEQ ID NO: 304048 - RNA, 19 nt, Human herpesvirus 3
gacacgcucucgcuguuag

SEQ ID NO: 304049 - RNA, 18 nt, Human herpesvirus 3
gacagugcuugacugugc

SEQ ID NO: 304050 - RNA, 21 nt, Human herpesvirus 3
gacaugauugauggauguuua

SEQ ID NO: 304051 - RNA, 15 nt, Human herpesvirus 3
gacaugcacugcauc

SEQ ID NO: 304052 - RNA, 16 nt, Human herpesvirus 3
gacauggccgugaaug

SEQ ID NO: 304053 - RNA, 14 nt, Human herpesvirus 3
gaccacgugagcuu

SEQ ID NO: 304054 - RNA, 17 nt, Human herpesvirus 3
gaccauuuaccagugua

SEQ ID NO: 304055 - RNA, 12 nt, Human herpesvirus 3
gaccccugucac

SEQ ID NO: 304056 - RNA, 19 nt, Human herpesvirus 3
gaccgcuggaugaagauug

SEQ ID NO: 304057 - RNA, 14 nt, Human herpesvirus 3
gacgaccccuguca

SEQ ID NO: 304058 - RNA, 23 nt, Human herpesvirus 3
gacguagccguagccuugugaug

SEQ ID NO: 304059 - RNA, 17 nt, Human herpesvirus 3
gacguuauauaucccaa

SEQ ID NO: 304060 - RNA, 16 nt, Human herpesvirus 3
gacucugcgaugcauu

SEQ ID NO: 304061 - RNA, 21 nt, Human herpesvirus 3
gacugccguaaacacgguaaa

SEQ ID NO: 304062 - RNA, 15 nt, Human herpesvirus 3
gacuuaguacgauag

SEQ ID NO: 304063 - RNA, 19 nt, Human herpesvirus 3
gacuugacgcgaacaccgc

SEQ ID NO: 304064 - RNA, 22 nt, Human herpesvirus 3
gacuuuucaucauacgcauuua

SEQ ID NO: 304065 - RNA, 12 nt, Human herpesvirus 3
gagaacaccaga

SEQ ID NO: 304066 - RNA, 12 nt, Human herpesvirus 3
gagaacugugaa

SEQ ID NO: 304067 - RNA, 23 nt, Human herpesvirus 3
gagacuugucauguuggacaaag

SEQ ID NO: 304068 - RNA, 13 nt, Human herpesvirus 3
gagauagacccag

SEQ ID NO: 304069 - RNA, 17 nt, Human herpesvirus 3
gagcaguccaugguuuu

SEQ ID NO: 304070 - RNA, 22 nt, Human herpesvirus 3
gagcgcauuggcaucuuacuug

SEQ ID NO: 304071 - RNA, 21 nt, Human herpesvirus 3
gagcggucuguguaccgccau

SEQ ID NO: 304072 - RNA, 16 nt, Human herpesvirus 3
gagcguacugcagaua

SEQ ID NO: 304073 - RNA, 23 nt, Human herpesvirus 3
gagcucccauuccaaaugcgcaa

SEQ ID NO: 304074 - RNA, 17 nt, Human herpesvirus 3
gaggcgugucacgacaa

SEQ ID NO: 304075 - RNA, 22 nt, Human herpesvirus 3
gagguaaccgguuugaagccac

SEQ ID NO: 304076 - RNA, 17 nt, Human herpesvirus 3
gaguacuacacccagua

SEQ ID NO: 304077 - RNA, 18 nt, Human herpesvirus 3
gagucauuuucauagacg

SEQ ID NO: 304078 - RNA, 13 nt, Human herpesvirus 3
gagugguaauauu

SEQ ID NO: 304079 - RNA, 14 nt, Human herpesvirus 3
gagugguaauauua

SEQ ID NO: 304080 - RNA, 20 nt, Human herpesvirus 3
gaguguguuacucaaccagc

SEQ ID NO: 304081 - RNA, 17 nt, Human herpesvirus 3
gauacacauugucauac

SEQ ID NO: 304082 - RNA, 13 nt, Human herpesvirus 3
gauacauaaacac

SEQ ID NO: 304083 - RNA, 21 nt, Human herpesvirus 3
gauacccccgcgcaccaggcu

SEQ ID NO: 304084 - RNA, 20 nt, Human herpesvirus 3
gauacccucaaacacggguu

SEQ ID NO: 304085 - RNA, 15 nt, Human herpesvirus 3
gauacguuguucaug

SEQ ID NO: 304086 - RNA, 16 nt, Human herpesvirus 3
gauauaagguguuaau

SEQ ID NO: 304087 - RNA, 15 nt, Human herpesvirus 3
gauauaauuugucca

SEQ ID NO: 304088 - RNA, 23 nt, Human herpesvirus 3
gauaucacaccaauuauaacugc

SEQ ID NO: 304089 - RNA, 12 nt, Human herpesvirus 3
gauaucuuaacg

SEQ ID NO: 304090 - RNA, 14 nt, Human herpesvirus 3
gaucacaacagaca

SEQ ID NO: 304091 - RNA, 23 nt, Human herpesvirus 3
gaucccgccgucgcgcccaccuc

SEQ ID NO: 304092 - RNA, 16 nt, Human herpesvirus 3
gauccggcaugcauug

SEQ ID NO: 304093 - RNA, 17 nt, Human herpesvirus 3
gaucgcggggguugugc

SEQ ID NO: 304094 - RNA, 23 nt, Human herpesvirus 3
gaugacuuugcauuggaagucac

SEQ ID NO: 304095 - RNA, 15 nt, Human herpesvirus 3
gaugagaauguaaca

SEQ ID NO: 304096 - RNA, 15 nt, Human herpesvirus 3
gaugauuaucaauac

SEQ ID NO: 304097 - RNA, 22 nt, Human herpesvirus 3
gaugguuaauaauagugacaaa

SEQ ID NO: 304098 - RNA, 23 nt, Human herpesvirus 3
gaugguuguucucggucuggaau

SEQ ID NO: 304099 - RNA, 14 nt, Human herpesvirus 3
ggacauaugucugc

SEQ ID NO: 304100 - RNA, 14 nt, Human herpesvirus 3
ggacuuuaccggau

SEQ ID NO: 304101 - RNA, 21 nt, Human herpesvirus 3
ggacuuuaccggaucaugaac

SEQ ID NO: 304102 - RNA, 15 nt, Human herpesvirus 3
ggaguguccagauau

SEQ ID NO: 304103 - RNA, 15 nt, Human herpesvirus 3
ggauaaaacacggga

SEQ ID NO: 304104 - RNA, 15 nt, Human herpesvirus 3
ggauaggugucuuca

SEQ ID NO: 304105 - RNA, 17 nt, Human herpesvirus 3
ggauauuaaucgaacau

SEQ ID NO: 304106 - RNA, 22 nt, Human herpesvirus 3
ggaucagaaagauugcagucau

SEQ ID NO: 304107 - RNA, 22 nt, Human herpesvirus 3
ggaugcaccgguccaacacucc

SEQ ID NO: 304108 - RNA, 14 nt, Human herpesvirus 3
ggauuugggagaaa

SEQ ID NO: 304109 - RNA, 16 nt, Human herpesvirus 3
ggcaaauaggguacaa

SEQ ID NO: 304110 - RNA, 22 nt, Human herpesvirus 3
ggcacgcgggcuguauugagaa

SEQ ID NO: 304111 - RNA, 13 nt, Human herpesvirus 3
ggcagaagguuua

SEQ ID NO: 304112 - RNA, 16 nt, Human herpesvirus 3
ggcauaccgaaugcga

SEQ ID NO: 304113 - RNA, 17 nt, Human herpesvirus 3
ggcauaccgaaugcgau

SEQ ID NO: 304114 - RNA, 18 nt, Human herpesvirus 3
ggcauaccgaaugcgauu

SEQ ID NO: 304115 - RNA, 18 nt, Human herpesvirus 3
ggccagcguaauacaugc

SEQ ID NO: 304116 - RNA, 21 nt, Human herpesvirus 3
ggccgcuacccgaaagcccga

SEQ ID NO: 304117 - RNA, 22 nt, Human herpesvirus 3
ggccgcuacccgaaagcccgau

SEQ ID NO: 304118 - RNA, 17 nt, Human herpesvirus 3
ggccuugggacaucaac

SEQ ID NO: 304119 - RNA, 13 nt, Human herpesvirus 3
ggcgaccacguga

SEQ ID NO: 304120 - RNA, 13 nt, Human herpesvirus 3
ggcgagacuugau

SEQ ID NO: 304121 - RNA, 18 nt, Human herpesvirus 3
ggcgucaggucugucaug

SEQ ID NO: 304122 - RNA, 18 nt, Human herpesvirus 3
ggcgugucacgacaaaaa

SEQ ID NO: 304123 - RNA, 21 nt, Human herpesvirus 3
ggcguguuuuuuugucauaaa

SEQ ID NO: 304124 - RNA, 20 nt, Human herpesvirus 3
ggcuggcgugguuauuacau

SEQ ID NO: 304125 - RNA, 18 nt, Human herpesvirus 3
ggcuguaggucaacauac

SEQ ID NO: 304126 - RNA, 23 nt, Human herpesvirus 3
ggcuguauugagaaaaccaaaga

SEQ ID NO: 304127 - RNA, 20 nt, Human herpesvirus 3
ggcuuaaaacguacguuuaa

SEQ ID NO: 304128 - RNA, 20 nt, Human herpesvirus 3
ggcuuaacgagagauccaau

SEQ ID NO: 304129 - RNA, 15 nt, Human herpesvirus 3
ggcuugagaugagca

SEQ ID NO: 304130 - RNA, 20 nt, Human herpesvirus 3
ggcuuuucccccacauacaa

SEQ ID NO: 304131 - RNA, 14 nt, Human herpesvirus 3
gggacgacgugagg

SEQ ID NO: 304132 - RNA, 15 nt, Human herpesvirus 3
gggagcaaacuaaag

SEQ ID NO: 304133 - RNA, 18 nt, Human herpesvirus 3
gggagccgcggccagugc

SEQ ID NO: 304134 - RNA, 17 nt, Human herpesvirus 3
gggaggugggguguuaa

SEQ ID NO: 304135 - RNA, 13 nt, Human herpesvirus 3
gggaucauuccaa

SEQ ID NO: 304136 - RNA, 12 nt, Human herpesvirus 3
gggaucuuccaa

SEQ ID NO: 304137 - RNA, 14 nt, Human herpesvirus 3
gggauuugggagaa

SEQ ID NO: 304138 - RNA, 18 nt, Human herpesvirus 3
gggcaaaugaugaagcua

SEQ ID NO: 304139 - RNA, 21 nt, Human herpesvirus 3
ggggcgggguagacuguggca

SEQ ID NO: 304140 - RNA, 17 nt, Human herpesvirus 3
gggguggaucacuccaa

SEQ ID NO: 304141 - RNA, 21 nt, Human herpesvirus 3
ggguacaaacgcgcaauguuu

SEQ ID NO: 304142 - RNA, 13 nt, Human herpesvirus 3
gggucaauggagu

SEQ ID NO: 304143 - RNA, 19 nt, Human herpesvirus 3
ggguuuaacauuuugcgca

SEQ ID NO: 304144 - RNA, 20 nt, Human herpesvirus 3
ggguuuaacauuuugcgcau

SEQ ID NO: 304145 - RNA, 19 nt, Human herpesvirus 3
gguaaccaucuagaugaca

SEQ ID NO: 304146 - RNA, 18 nt, Human herpesvirus 3
gguacaagaaaccauguu

SEQ ID NO: 304147 - RNA, 20 nt, Human herpesvirus 3
gguacauuaaucgcugauaa

SEQ ID NO: 304148 - RNA, 15 nt, Human herpesvirus 3
gguaccaaaaacaca

SEQ ID NO: 304149 - RNA, 13 nt, Human herpesvirus 3
ggucaacauacau

SEQ ID NO: 304150 - RNA, 13 nt, Human herpesvirus 3
gguccaucaaaca

SEQ ID NO: 304151 - RNA, 13 nt, Human herpesvirus 3
ggucugccguauu

SEQ ID NO: 304152 - RNA, 20 nt, Human herpesvirus 3
ggucuuccuugggcuguuag

SEQ ID NO: 304153 - RNA, 14 nt, Human herpesvirus 3
ggugaagaaggaca

SEQ ID NO: 304154 - RNA, 19 nt, Human herpesvirus 3
ggugagaauaccaaaaaga

SEQ ID NO: 304155 - RNA, 15 nt, Human herpesvirus 3
ggugaguguacguaa

SEQ ID NO: 304156 - RNA, 21 nt, Human herpesvirus 3
ggugccauucuccacgugagg

SEQ ID NO: 304157 - RNA, 19 nt, Human herpesvirus 3
gguguauuuuauuuaguga

SEQ ID NO: 304158 - RNA, 21 nt, Human herpesvirus 3
gguguauuuuauuuagugauu

SEQ ID NO: 304159 - RNA, 12 nt, Human herpesvirus 3
ggugugguuaug

SEQ ID NO: 304160 - RNA, 13 nt, Human herpesvirus 3
gguguuggugugg

SEQ ID NO: 304161 - RNA, 13 nt, Human herpesvirus 3
gguguuucagugg

SEQ ID NO: 304162 - RNA, 17 nt, Human herpesvirus 3
gguuaauaauagugaca

SEQ ID NO: 304163 - RNA, 14 nt, Human herpesvirus 3
gguuagaugcauau

SEQ ID NO: 304164 - RNA, 13 nt, Human herpesvirus 3
gguucuucacugg

SEQ ID NO: 304165 - RNA, 15 nt, Human herpesvirus 3
gguugcgauaacugc

SEQ ID NO: 304166 - RNA, 17 nt, Human herpesvirus 3
gguuguguuuuuauuaa

SEQ ID NO: 304167 - RNA, 19 nt, Human herpesvirus 3
gguuuaacauuuugcgcau

SEQ ID NO: 304168 - RNA, 12 nt, Human herpesvirus 3
gguuuaauuuca

SEQ ID NO: 304169 - RNA, 14 nt, Human herpesvirus 3
gguuuagcauuuua

SEQ ID NO: 304170 - RNA, 17 nt, Human herpesvirus 3
gguuucuccguugcacg

SEQ ID NO: 304171 - RNA, 18 nt, Human herpesvirus 3
gguuucuccguugcacgu

SEQ ID NO: 304172 - RNA, 14 nt, Human herpesvirus 3
gguuugcaaccuua

SEQ ID NO: 304173 - RNA, 22 nt, Human herpesvirus 3
gguuuucguuuugguguuacau

SEQ ID NO: 304174 - RNA, 17 nt, Human herpesvirus 3
guaaaaaccauggacag

SEQ ID NO: 304175 - RNA, 19 nt, Human herpesvirus 3
guaaaaacggauauuaaca

SEQ ID NO: 304176 - RNA, 14 nt, Human herpesvirus 3
guaaaaacuuuaca

SEQ ID NO: 304177 - RNA, 17 nt, Human herpesvirus 3
guaaaauaccauuguac

SEQ ID NO: 304178 - RNA, 18 nt, Human herpesvirus 3
guaaaauaccauuguaca

SEQ ID NO: 304179 - RNA, 21 nt, Human herpesvirus 3
guaaaauugcgcgaguuccca

SEQ ID NO: 304180 - RNA, 14 nt, Human herpesvirus 3
guaaaccguauaua

SEQ ID NO: 304181 - RNA, 19 nt, Human herpesvirus 3
guaaacguccgauguucca

SEQ ID NO: 304182 - RNA, 17 nt, Human herpesvirus 3
guaaagguccauuuaac

SEQ ID NO: 304183 - RNA, 20 nt, Human herpesvirus 3
guaacagcgacuauguuugc

SEQ ID NO: 304184 - RNA, 22 nt, Human herpesvirus 3
guaacgguuuacccgguauuau

SEQ ID NO: 304185 - RNA, 21 nt, Human herpesvirus 3
guaacuuaacaaacauauaau

SEQ ID NO: 304186 - RNA, 18 nt, Human herpesvirus 3
guaagaagugcauaucca

SEQ ID NO: 304187 - RNA, 22 nt, Human herpesvirus 3
guaagugcggcuucaccagagu

SEQ ID NO: 304188 - RNA, 15 nt, Human herpesvirus 3
guaauaaaaugauau

SEQ ID NO: 304189 - RNA, 17 nt, Human herpesvirus 3
guaauucgugugcaaua

SEQ ID NO: 304190 - RNA, 21 nt, Human herpesvirus 3
guaauuugccccaaaccacug

SEQ ID NO: 304191 - RNA, 15 nt, Human herpesvirus 3
guacagauacgugga

SEQ ID NO: 304192 - RNA, 13 nt, Human herpesvirus 3
guacaucuuucag

SEQ ID NO: 304193 - RNA, 17 nt, Human herpesvirus 3
guacauuaaaguauuug

SEQ ID NO: 304194 - RNA, 14 nt, Human herpesvirus 3
guaccaaaaacaca

SEQ ID NO: 304195 - RNA, 17 nt, Human herpesvirus 3
guaccaaaaacacaguu

SEQ ID NO: 304196 - RNA, 12 nt, Human herpesvirus 3
guaccacguggu

SEQ ID NO: 304197 - RNA, 15 nt, Human herpesvirus 3
guaccacgugguauu

SEQ ID NO: 304198 - RNA, 18 nt, Human herpesvirus 3
guacugcagauacagcau

SEQ ID NO: 304199 - RNA, 19 nt, Human herpesvirus 3
guacugcagauacagcaua

SEQ ID NO: 304200 - RNA, 16 nt, Human herpesvirus 3
guagaauuuacagugu

SEQ ID NO: 304201 - RNA, 11 nt, Human herpesvirus 3
guagacugugg

SEQ ID NO: 304202 - RNA, 12 nt, Human herpesvirus 3
guagccagccaa

SEQ ID NO: 304203 - RNA, 15 nt, Human herpesvirus 3
guaggaauaaacugu

SEQ ID NO: 304204 - RNA, 19 nt, Human herpesvirus 3
guaggggaugggggucgca

SEQ ID NO: 304205 - RNA, 15 nt, Human herpesvirus 3
guaggucaacauaca

SEQ ID NO: 304206 - RNA, 14 nt, Human herpesvirus 3
guauaaaaacacgc

SEQ ID NO: 304207 - RNA, 18 nt, Human herpesvirus 3
guauaaaaacacgcaugc

SEQ ID NO: 304208 - RNA, 17 nt, Human herpesvirus 3
guauaaaauucuaacaa

SEQ ID NO: 304209 - RNA, 15 nt, Human herpesvirus 3
guauaauaccgguga

SEQ ID NO: 304210 - RNA, 20 nt, Human herpesvirus 3
guauacacacccaccccaga

SEQ ID NO: 304211 - RNA, 14 nt, Human herpesvirus 3
guauaucauuuuau

SEQ ID NO: 304212 - RNA, 18 nt, Human herpesvirus 3
guauauuaugcguuuaau

SEQ ID NO: 304213 - RNA, 22 nt, Human herpesvirus 3
guaucaauaaauuuacauaacc

SEQ ID NO: 304214 - RNA, 15 nt, Human herpesvirus 3
uaaauaaacuauaug

SEQ ID NO: 304215 - RNA, 13 nt, Human herpesvirus 3
uaaauaacauguc

SEQ ID NO: 304216 - RNA, 15 nt, Human herpesvirus 3
uaaauaacaugucac

SEQ ID NO: 304217 - RNA, 22 nt, Human herpesvirus 3
uaaauaguaccacgugguauua

SEQ ID NO: 304218 - RNA, 15 nt, Human herpesvirus 3
uaaauaugcuauaua

SEQ ID NO: 304219 - RNA, 23 nt, Human herpesvirus 3
uaaauaugcuauauaacgccucc

SEQ ID NO: 304220 - RNA, 23 nt, Human herpesvirus 3
uaaauauuaccccagagauugug

SEQ ID NO: 304221 - RNA, 17 nt, Human herpesvirus 3
uaaauuucaaugaugga

SEQ ID NO: 304222 - RNA, 14 nt, Human herpesvirus 3
uaacaaacauauaa

SEQ ID NO: 304223 - RNA, 21 nt, Human herpesvirus 3
uaacaauugagauacacaugg

SEQ ID NO: 304224 - RNA, 23 nt, Human herpesvirus 3
uaacagaauuuuuuacgaugaua

SEQ ID NO: 304225 - RNA, 19 nt, Human herpesvirus 3
uaacagcccgauaacaugg

SEQ ID NO: 304226 - RNA, 23 nt, Human herpesvirus 3
uaacaggaccugugcaagacgau

SEQ ID NO: 304227 - RNA, 18 nt, Human herpesvirus 3
uaacaggauuugcuuaua

SEQ ID NO: 304228 - RNA, 21 nt, Human herpesvirus 3
uaacauaccccaggccuugaa

SEQ ID NO: 304229 - RNA, 14 nt, Human herpesvirus 3
uaaccauaaugcaa

SEQ ID NO: 304230 - RNA, 16 nt, Human herpesvirus 3
uaacccggucugcuca

SEQ ID NO: 304231 - RNA, 20 nt, Human herpesvirus 3
uaaccggguggguggcauua

SEQ ID NO: 304232 - RNA, 13 nt, Human herpesvirus 3
uaaccuacacaac

SEQ ID NO: 304233 - RNA, 21 nt, Human herpesvirus 3
uaaccugucgagcaugugcaa

SEQ ID NO: 304234 - RNA, 20 nt, Human herpesvirus 3
uaacgucgaccggugacuac

SEQ ID NO: 304235 - RNA, 17 nt, Human herpesvirus 3
uaacgugauuacuacaa

SEQ ID NO: 304236 - RNA, 18 nt, Human herpesvirus 3
uaacuuaacaaacauaua

SEQ ID NO: 304237 - RNA, 17 nt, Human herpesvirus 3
uaagaagugcauaucca

SEQ ID NO: 304238 - RNA, 18 nt, Human herpesvirus 3
uaagaagugcauauccag

SEQ ID NO: 304239 - RNA, 23 nt, Human herpesvirus 3
uaagacccaaugucccaaggaua

SEQ ID NO: 304240 - RNA, 17 nt, Human herpesvirus 3
uaagacguccacacagc

SEQ ID NO: 304241 - RNA, 19 nt, Human herpesvirus 3
uaagacguccacacagccu

SEQ ID NO: 304242 - RNA, 18 nt, Human herpesvirus 3
uaagccucuguacaacac

SEQ ID NO: 304243 - RNA, 22 nt, Human herpesvirus 3
uaaggcaaggaaaagguuuugg

SEQ ID NO: 304244 - RNA, 14 nt, Human herpesvirus 3
uaaguccuguaaca

SEQ ID NO: 304245 - RNA, 17 nt, Human herpesvirus 3
uaaguuuuugugucuag

SEQ ID NO: 304246 - RNA, 18 nt, Human herpesvirus 3
uaauaaaaacacaaccag

SEQ ID NO: 304247 - RNA, 19 nt, Human herpesvirus 3
uaauaaaauauuguauaaa

SEQ ID NO: 304248 - RNA, 14 nt, Human herpesvirus 3
uaauacaugcuuug

SEQ ID NO: 304249 - RNA, 21 nt, Human herpesvirus 3
uaauacaugcuuugguuauac

SEQ ID NO: 304250 - RNA, 21 nt, Human herpesvirus 3
uaauacgguucaugacauuau

SEQ ID NO: 304251 - RNA, 20 nt, Human herpesvirus 3
uaauauauggcgccauccau

SEQ ID NO: 304252 - RNA, 16 nt, Human herpesvirus 3
uaauauucuacagauu

SEQ ID NO: 304253 - RNA, 14 nt, Human herpesvirus 3
uaaucaauuugacg

SEQ ID NO: 304254 - RNA, 17 nt, Human herpesvirus 3
uaauccaauguuugaua

SEQ ID NO: 304255 - RNA, 15 nt, Human herpesvirus 3
uaauccuuaucuugc

SEQ ID NO: 304256 - RNA, 13 nt, Human herpesvirus 3
uaaucgaacauug

SEQ ID NO: 304257 - RNA, 14 nt, Human herpesvirus 3
uaaugguacaagaa

SEQ ID NO: 304258 - RNA, 20 nt, Human herpesvirus 3
uaaugguacaagaaaccaug

SEQ ID NO: 304259 - RNA, 19 nt, Human herpesvirus 3
uaauuaaugcaaccaucag

SEQ ID NO: 304260 - RNA, 13 nt, Human herpesvirus 3
uaauuauauccau

SEQ ID NO: 304261 - RNA, 19 nt, Human herpesvirus 3
uaauuccgguugugccaau

SEQ ID NO: 304262 - RNA, 13 nt, Human herpesvirus 3
uaauucgugugca

SEQ ID NO: 304263 - RNA, 16 nt, Human herpesvirus 3
uaauucgugugcaaua

SEQ ID NO: 304264 - RNA, 23 nt, Human herpesvirus 3
uaauucgugugcaauaaccucag

SEQ ID NO: 304265 - RNA, 14 nt, Human herpesvirus 3
uaauuguacccauc

SEQ ID NO: 304266 - RNA, 24 nt, Human herpesvirus 3
uaauuuaggaaccgaacauccuag

SEQ ID NO: 304267 - RNA, 20 nt, Human herpesvirus 3
uaauuugaagacaccuaucc

SEQ ID NO: 304268 - RNA, 18 nt, Human herpesvirus 3
uaauuugccccaaaccac

SEQ ID NO: 304269 - RNA, 16 nt, Human herpesvirus 3
uaauuuuacaauauca

SEQ ID NO: 304270 - RNA, 17 nt, Human herpesvirus 3
uaauuuucguaagcaau

SEQ ID NO: 304271 - RNA, 14 nt, Human herpesvirus 3
uacaagcauaacau

SEQ ID NO: 304272 - RNA, 20 nt, Human herpesvirus 3
uacaauauuguagaacuaac

SEQ ID NO: 304273 - RNA, 17 nt, Human herpesvirus 3
uacaaugagcgguggua

SEQ ID NO: 304274 - RNA, 22 nt, Human herpesvirus 3
uacaaugcgccguauaugguau

SEQ ID NO: 304275 - RNA, 17 nt, Human herpesvirus 3
uacaauugucuguauau

SEQ ID NO: 304276 - RNA, 18 nt, Human herpesvirus 3
uacacauccuggacacag

SEQ ID NO: 304277 - RNA, 21 nt, Human herpesvirus 3
uacacauccuggacacagucc

SEQ ID NO: 304278 - RNA, 19 nt, Human herpesvirus 3
uacacccccguugcuuuaa

SEQ ID NO: 304279 - RNA, 23 nt, Human herpesvirus 3
uacaccuaacuuuacuguuaggg

SEQ ID NO: 304280 - RNA, 21 nt, Human herpesvirus 3
uacacgggaaacuauuccaaa

SEQ ID NO: 304281 - RNA, 13 nt, Human herpesvirus 3
uacacgguguaua

SEQ ID NO: 304282 - RNA, 21 nt, Human herpesvirus 3
uacagauuuauuuuuacauuu

SEQ ID NO: 304283 - RNA, 22 nt, Human herpesvirus 3
uacagcauauaauccacgguau

SEQ ID NO: 304284 - RNA, 17 nt, Human herpesvirus 3
uacagcugccgggaaaa

SEQ ID NO: 304285 - RNA, 21 nt, Human herpesvirus 3
uacauaaacacagagucugua

SEQ ID NO: 304286 - RNA, 16 nt, Human herpesvirus 3
uacauaaccgauuuac

SEQ ID NO: 304287 - RNA, 20 nt, Human herpesvirus 3
uacauacaaacuugugugua

SEQ ID NO: 304288 - RNA, 13 nt, Human herpesvirus 3
uacauacaaguga

SEQ ID NO: 304289 - RNA, 16 nt, Human herpesvirus 3
uacauagauacuccac

SEQ ID NO: 304290 - RNA, 16 nt, Human herpesvirus 3
uacauauguuccacuc

SEQ ID NO: 304291 - RNA, 15 nt, Human herpesvirus 3
uacaugaacugccaa

SEQ ID NO: 304292 - RNA, 16 nt, Human herpesvirus 3
uacaugauccacguaa

SEQ ID NO: 304293 - RNA, 16 nt, Human herpesvirus 3
uacauuaaucgcugau

SEQ ID NO: 304294 - RNA, 23 nt, Human herpesvirus 3
uacauuagaguguuuaacaacca

SEQ ID NO: 304295 - RNA, 18 nt, Human herpesvirus 3
uacauucgcaacacaucu

SEQ ID NO: 304296 - RNA, 20 nt, Human herpesvirus 3
uacauucucaucaaagucaa

SEQ ID NO: 304297 - RNA, 21 nt, Human herpesvirus 3
uaccacgugguauuaugaaca

SEQ ID NO: 304298 - RNA, 15 nt, Human herpesvirus 3
uaccauagaugaaca

SEQ ID NO: 304299 - RNA, 16 nt, Human herpesvirus 3
uaccaugggagacuug

SEQ ID NO: 304300 - RNA, 20 nt, Human herpesvirus 3
uaccccaaggcccauauccc

SEQ ID NO: 304301 - RNA, 17 nt, Human herpesvirus 3
uacccgauaauauacaa

SEQ ID NO: 304302 - RNA, 16 nt, Human herpesvirus 3
uacccuauaggcuuua

SEQ ID NO: 304303 - RNA, 15 nt, Human herpesvirus 3
uacccucaaacacgg

SEQ ID NO: 304304 - RNA, 13 nt, Human herpesvirus 3
uaccguacaacaa

SEQ ID NO: 304305 - RNA, 23 nt, Human herpesvirus 3
uaccucggccgcuacccgaaagc

SEQ ID NO: 304306 - RNA, 15 nt, Human herpesvirus 3
uacgaaaacgugcau

SEQ ID NO: 304307 - RNA, 11 nt, Human herpesvirus 3
uacgcacauua

SEQ ID NO: 304308 - RNA, 18 nt, Human herpesvirus 3
uacgcaugugcugucgua

SEQ ID NO: 304309 - RNA, 14 nt, Human herpesvirus 3
uacgccgacaugcc

SEQ ID NO: 304310 - RNA, 15 nt, Human herpesvirus 3
uacgccgacaugccu

SEQ ID NO: 304311 - RNA, 16 nt, Human herpesvirus 3
uacgccgacaugccug

SEQ ID NO: 304312 - RNA, 21 nt, Human herpesvirus 3
uacgcggguuuuuguaaaggg

SEQ ID NO: 304313 - RNA, 22 nt, Human herpesvirus 3
uacgcggguuuuuguaaagggg

SEQ ID NO: 304314 - RNA, 19 nt, Human herpesvirus 3
uacguagaauuuacagugu

SEQ ID NO: 304315 - RNA, 21 nt, Human herpesvirus 3
uacguuauccguuauggaguu

SEQ ID NO: 304316 - RNA, 16 nt, Human herpesvirus 3
uacguuucaaauaacu

SEQ ID NO: 304317 - RNA, 14 nt, Human herpesvirus 3
uacuaauauaaaua

SEQ ID NO: 304318 - RNA, 23 nt, Human herpesvirus 3
uacuccuuuaaauuuuacuuaau

SEQ ID NO: 304319 - RNA, 22 nt, Human herpesvirus 3
uagaaucggagacucgugguca

SEQ ID NO: 304320 - RNA, 19 nt, Human herpesvirus 3
uagaauuuacaguguucuc

SEQ ID NO: 304321 - RNA, 15 nt, Human herpesvirus 3
uagaauuuucacucu

SEQ ID NO: 304322 - RNA, 10 nt, Human herpesvirus 3
uagacugugg

SEQ ID NO: 304323 - RNA, 12 nt, Human herpesvirus 3
uagacuguucua

SEQ ID NO: 304324 - RNA, 18 nt, Human herpesvirus 3
uagagaaagcggacacau

SEQ ID NO: 304325 - RNA, 18 nt, Human herpesvirus 3
uagaguguuuaacaacca

SEQ ID NO: 304326 - RNA, 20 nt, Human herpesvirus 3
uagauaucacaccaauuaua

SEQ ID NO: 304327 - RNA, 11 nt, Human herpesvirus 3
uagcauuuuaa

SEQ ID NO: 304328 - RNA, 15 nt, Human herpesvirus 3
ucauuaaacgugcau

SEQ ID NO: 304329 - RNA, 22 nt, Human herpesvirus 3
ucauuacgacacggaaacguuc

SEQ ID NO: 304330 - RNA, 20 nt, Human herpesvirus 3
uccaaaugauguaaccuaca

SEQ ID NO: 304331 - RNA, 18 nt, Human herpesvirus 3
uccacaauuuaacaaacc

SEQ ID NO: 304332 - RNA, 15 nt, Human herpesvirus 3
uccacagauuccucc

SEQ ID NO: 304333 - RNA, 16 nt, Human herpesvirus 3
uccacagucugcuuua

SEQ ID NO: 304334 - RNA, 15 nt, Human herpesvirus 3
uccacauaacaucca

SEQ ID NO: 304335 - RNA, 15 nt, Human herpesvirus 3
uccacucuacaucaa

SEQ ID NO: 304336 - RNA, 15 nt, Human herpesvirus 3
uccacugcauuuaca

SEQ ID NO: 304337 - RNA, 13 nt, Human herpesvirus 3
uccacuuacagga

SEQ ID NO: 304338 - RNA, 12 nt, Human herpesvirus 3
uccacuuaucca

SEQ ID NO: 304339 - RNA, 12 nt, Human herpesvirus 3
uccagaguacag

SEQ ID NO: 304340 - RNA, 23 nt, Human herpesvirus 3
uccaggcauggggggaguguuuc

SEQ ID NO: 304341 - RNA, 17 nt, Human herpesvirus 3
uccaggcgagacuugau

SEQ ID NO: 304342 - RNA, 19 nt, Human herpesvirus 3
uccaggcgaggacuccaca

SEQ ID NO: 304343 - RNA, 22 nt, Human herpesvirus 3
uccauaggggggguuacauaaa

SEQ ID NO: 304344 - RNA, 20 nt, Human herpesvirus 3
uccaugggccaauccgucaa

SEQ ID NO: 304345 - RNA, 14 nt, Human herpesvirus 3
uccauuuaacaauc

SEQ ID NO: 304346 - RNA, 20 nt, Human herpesvirus 3
ucccaaggauagauaucaca

SEQ ID NO: 304347 - RNA, 21 nt, Human herpesvirus 3
ucccaauacacccgacuuccu

SEQ ID NO: 304348 - RNA, 12 nt, Human herpesvirus 3
ucccacauguau

SEQ ID NO: 304349 - RNA, 15 nt, Human herpesvirus 3
ucccacauguauaaa

SEQ ID NO: 304350 - RNA, 14 nt, Human herpesvirus 3
ucccauuuaaaguc

SEQ ID NO: 304351 - RNA, 14 nt, Human herpesvirus 3
ucccccacauacaa

SEQ ID NO: 304352 - RNA, 22 nt, Human herpesvirus 3
ucccccgaucucugguauacuu

SEQ ID NO: 304353 - RNA, 16 nt, Human herpesvirus 3
uccccugaugaugguu

SEQ ID NO: 304354 - RNA, 14 nt, Human herpesvirus 3
ucccgaaagcccga

SEQ ID NO: 304355 - RNA, 16 nt, Human herpesvirus 3
ucccgccuuuaucucc

SEQ ID NO: 304356 - RNA, 23 nt, Human herpesvirus 3
ucccgcuaacgugauuacuacaa

SEQ ID NO: 304357 - RNA, 20 nt, Human herpesvirus 3
ucccguguccccucugguau

SEQ ID NO: 304358 - RNA, 23 nt, Human herpesvirus 3
ucccuguugcgguuguuguccag

SEQ ID NO: 304359 - RNA, 21 nt, Human herpesvirus 3
uccgagggucgccuguaauau

SEQ ID NO: 304360 - RNA, 15 nt, Human herpesvirus 3
uccgauaauaccaaa

SEQ ID NO: 304361 - RNA, 16 nt, Human herpesvirus 3
uccgauguuccaaugg

SEQ ID NO: 304362 - RNA, 21 nt, Human herpesvirus 3
uccgccuauagcugucacugu

SEQ ID NO: 304363 - RNA, 14 nt, Human herpesvirus 3
uccgcgcucaauca

SEQ ID NO: 304364 - RNA, 14 nt, Human herpesvirus 3
uccggcaucuccau

SEQ ID NO: 304365 - RNA, 14 nt, Human herpesvirus 3
uccggcaugcauug

SEQ ID NO: 304366 - RNA, 21 nt, Human herpesvirus 3
uccgguauacaugaacugcca

SEQ ID NO: 304367 - RNA, 14 nt, Human herpesvirus 3
uccgucaacugcaa

SEQ ID NO: 304368 - RNA, 23 nt, Human herpesvirus 3
uccgugaaauuucuacgcacauu

SEQ ID NO: 304369 - RNA, 20 nt, Human herpesvirus 3
uccuagccacacccacaaag

SEQ ID NO: 304370 - RNA, 13 nt, Human herpesvirus 3
uccucuguuacau

SEQ ID NO: 304371 - RNA, 14 nt, Human herpesvirus 3
uccugugucuuuaa

SEQ ID NO: 304372 - RNA, 15 nt, Human herpesvirus 3
uccuuacccauauga

SEQ ID NO: 304373 - RNA, 15 nt, Human herpesvirus 3
ucgaaaaaaggugua

SEQ ID NO: 304374 - RNA, 21 nt, Human herpesvirus 3
ucgaaggcgggaauuuccaca

SEQ ID NO: 304375 - RNA, 18 nt, Human herpesvirus 3
ucgacccguuauaaucuc

SEQ ID NO: 304376 - RNA, 22 nt, Human herpesvirus 3
ucgaucauacgccgacaugccu

SEQ ID NO: 304377 - RNA, 21 nt, Human herpesvirus 3
ucgauuagucuguaauggagg

SEQ ID NO: 304378 - RNA, 18 nt, Human herpesvirus 3
ucgcaacacaucuacugu

SEQ ID NO: 304379 - RNA, 12 nt, Human herpesvirus 3
ucgcccccgugg

SEQ ID NO: 304380 - RNA, 22 nt, Human herpesvirus 3
ucgccuuaaccgcgacagccaa

SEQ ID NO: 304381 - RNA, 17 nt, Human herpesvirus 3
ucgcucguauaacagcu

SEQ ID NO: 304382 - RNA, 21 nt, Human herpesvirus 3
ucggcgauggccgucuugaau

SEQ ID NO: 304383 - RNA, 18 nt, Human herpesvirus 3
ucggucuggaauaauaua

SEQ ID NO: 304384 - RNA, 20 nt, Human herpesvirus 3
ucguugguuagaaagcgauu

SEQ ID NO: 304385 - RNA, 21 nt, Human herpesvirus 3
ucguuuaacaaaauagucuac

SEQ ID NO: 304386 - RNA, 12 nt, Human herpesvirus 3
ucuaaaacacug

SEQ ID NO: 304387 - RNA, 15 nt, Human herpesvirus 3
ucuaaaacacuguca

SEQ ID NO: 304388 - RNA, 20 nt, Human herpesvirus 3
ucuaacaguacgcaugugcu

SEQ ID NO: 304389 - RNA, 24 nt, Human herpesvirus 3
ucuaacguuuuaguaaaauaccau

SEQ ID NO: 304390 - RNA, 22 nt, Human herpesvirus 3
ucuaaguaccgggauaucucau

SEQ ID NO: 304391 - RNA, 14 nt, Human herpesvirus 3
ucuacaacauuggc

SEQ ID NO: 304392 - RNA, 18 nt, Human herpesvirus 3
ucuacgcacauuagcaaa

SEQ ID NO: 304393 - RNA, 13 nt, Human herpesvirus 3
ucuacgcauuuac

SEQ ID NO: 304394 - RNA, 22 nt, Human herpesvirus 3
ucuacgugguaccaaaaacaca

SEQ ID NO: 304395 - RNA, 21 nt, Human herpesvirus 3
ucuagaugacacgaauaggug

SEQ ID NO: 304396 - RNA, 18 nt, Human herpesvirus 3
ucuaucggaugacucuau

SEQ ID NO: 304397 - RNA, 11 nt, Human herpesvirus 3
ucuaugugcag

SEQ ID NO: 304398 - RNA, 13 nt, Human herpesvirus 3
ucuauuaucagga

SEQ ID NO: 304399 - RNA, 16 nt, Human herpesvirus 3
ucucaucaaagucaaa

SEQ ID NO: 304400 - RNA, 17 nt, Human herpesvirus 3
ucuccaaaugauguaac

SEQ ID NO: 304401 - RNA, 17 nt, Human herpesvirus 3
ucuccacguagcaaagc

SEQ ID NO: 304402 - RNA, 17 nt, Human herpesvirus 3
ucuccagaguacagggu

SEQ ID NO: 304403 - RNA, 16 nt, Human herpesvirus 3
ucuccagugccaguga

SEQ ID NO: 304404 - RNA, 16 nt, Human herpesvirus 3
ucuccauuacgcauca

SEQ ID NO: 304405 - RNA, 18 nt, Human herpesvirus 3
ucuccccccgcgauuuau

SEQ ID NO: 304406 - RNA, 17 nt, Human herpesvirus 3
ucucgugggacuacaag

SEQ ID NO: 304407 - RNA, 13 nt, Human herpesvirus 3
ucugaccauuuac

SEQ ID NO: 304408 - RNA, 19 nt, Human herpesvirus 3
ucugagaagcaacaugaca

SEQ ID NO: 304409 - RNA, 16 nt, Human herpesvirus 3
ucugaguucaaagcaa

SEQ ID NO: 304410 - RNA, 23 nt, Human herpesvirus 3
ucugauagcgccaaaauggaugc

SEQ ID NO: 304411 - RNA, 22 nt, Human herpesvirus 3
ucugauucggguaaaacacaca

SEQ ID NO: 304412 - RNA, 20 nt, Human herpesvirus 3
ucugccguggaccccuguau

SEQ ID NO: 304413 - RNA, 17 nt, Human herpesvirus 3
ucuggagucuccaaaug

SEQ ID NO: 304414 - RNA, 13 nt, Human herpesvirus 3
ucuguaauggagg

SEQ ID NO: 304415 - RNA, 20 nt, Human herpesvirus 3
ucugucauguuuaagaacau

SEQ ID NO: 304416 - RNA, 18 nt, Human herpesvirus 3
ucugugggggaguggggu

SEQ ID NO: 304417 - RNA, 15 nt, Human herpesvirus 3
ucuguuacauucuca

SEQ ID NO: 304418 - RNA, 13 nt, Human herpesvirus 3
ucuguuacauuuc

SEQ ID NO: 304419 - RNA, 20 nt, Human herpesvirus 3
ucuuaaaauauaaaauaacc

SEQ ID NO: 304420 - RNA, 14 nt, Human herpesvirus 3
ucuuaacguugaug

SEQ ID NO: 304421 - RNA, 14 nt, Human herpesvirus 3
ucuucauauguaau

SEQ ID NO: 304422 - RNA, 21 nt, Human herpesvirus 3
ucuuccucuuuggaccacggc

SEQ ID NO: 304423 - RNA, 15 nt, Human herpesvirus 3
ucuugcguaccauaa

SEQ ID NO: 304424 - RNA, 17 nt, Human herpesvirus 3
ucuugcguaccauaaug

SEQ ID NO: 304425 - RNA, 22 nt, Human herpesvirus 3
ucuugcgucuguuuugggguca

SEQ ID NO: 304426 - RNA, 15 nt, Human herpesvirus 3
ucuuguuugaacgac

SEQ ID NO: 304427 - RNA, 19 nt, Human herpesvirus 3
ucuuucagguugaacugcu

SEQ ID NO: 304428 - RNA, 13 nt, Human herpesvirus 3
ugaaaacguaaua

SEQ ID NO: 304429 - RNA, 15 nt, Human herpesvirus 3
ugaaaagaccgacag

SEQ ID NO: 304430 - RNA, 17 nt, Human herpesvirus 3
ugaaacgucguuauauu

SEQ ID NO: 304431 - RNA, 18 nt, Human herpesvirus 3
ugaaagagcuguccauga

SEQ ID NO: 304432 - RNA, 14 nt, Human herpesvirus 3
ugaaagcuaccacc

SEQ ID NO: 304433 - RNA, 16 nt, Human herpesvirus 3
ugaaauauaucuuccg

SEQ ID NO: 304434 - RNA, 13 nt, Human herpesvirus 3
ugaaauguaauca

SEQ ID NO: 304435 - RNA, 13 nt, Human herpesvirus 3
ugaacaaacacuc

SEQ ID NO: 304436 - RNA, 15 nt, Human herpesvirus 3
ugaacaagagugcau

SEQ ID NO: 304437 - RNA, 13 nt, Human herpesvirus 3
ugaaccaaaucca

SEQ ID NO: 304438 - RNA, 17 nt, Human herpesvirus 3
ugaagacaaacuggaua

SEQ ID NO: 304439 - RNA, 20 nt, Human herpesvirus 3
ugaagacuuugacuuugaug

SEQ ID NO: 304440 - RNA, 22 nt, Human herpesvirus 3
ugaaguguucuaaaacacuguc

SEQ ID NO: 304441 - RNA, 16 nt, Human herpesvirus 3
ugaaugggaucuuccg

SEQ ID NO: 304442 - RNA, 18 nt, Human herpesvirus 3
ugaauuauuaaacuuaag

SEQ ID NO: 304443 - RNA, 18 nt, Human herpesvirus 3
ugucccauuuugugauuu

SEQ ID NO: 304444 - RNA, 21 nt, Human herpesvirus 3
ugucccgcuaacgugauuacu

SEQ ID NO: 304445 - RNA, 16 nt, Human herpesvirus 3
uguccgacaugcacug

SEQ ID NO: 304446 - RNA, 22 nt, Human herpesvirus 3
ugucgaugauacacauaugcac

SEQ ID NO: 304447 - RNA, 19 nt, Human herpesvirus 3
ugucggaaacccucaagaa

SEQ ID NO: 304448 - RNA, 21 nt, Human herpesvirus 3
ugucuacuuagcggacaugcu

SEQ ID NO: 304449 - RNA, 17 nt, Human herpesvirus 3
ugugacguuauauaucc

SEQ ID NO: 304450 - RNA, 18 nt, Human herpesvirus 3
ugugauacuacaucgugc

SEQ ID NO: 304451 - RNA, 15 nt, Human herpesvirus 3
ugugauaugagggga

SEQ ID NO: 304452 - RNA, 22 nt, Human herpesvirus 3
uguggagcguacugcagauaca

SEQ ID NO: 304453 - RNA, 14 nt, Human herpesvirus 3
ugugggaaacauca

SEQ ID NO: 304454 - RNA, 14 nt, Human herpesvirus 3
ugugggacagcuaa

SEQ ID NO: 304455 - RNA, 18 nt, Human herpesvirus 3
ugugucccauuuugugau

SEQ ID NO: 304456 - RNA, 20 nt, Human herpesvirus 3
uguguuuuaauuccaauauu

SEQ ID NO: 304457 - RNA, 14 nt, Human herpesvirus 3
uguguuuuuauuaa

SEQ ID NO: 304458 - RNA, 14 nt, Human herpesvirus 3
uguuaaacccugau

SEQ ID NO: 304459 - RNA, 18 nt, Human herpesvirus 3
uguuacgugaaugggauc

SEQ ID NO: 304460 - RNA, 19 nt, Human herpesvirus 3
uguuacuuggaaacaccca

SEQ ID NO: 304461 - RNA, 17 nt, Human herpesvirus 3
uguuagggauacaagcu

SEQ ID NO: 304462 - RNA, 22 nt, Human herpesvirus 3
uguuauaaaucguuuaucacug

SEQ ID NO: 304463 - RNA, 16 nt, Human herpesvirus 3
uguuaucgauuguccc

SEQ ID NO: 304464 - RNA, 22 nt, Human herpesvirus 3
uguucccgcacacguuuacacg

SEQ ID NO: 304465 - RNA, 13 nt, Human herpesvirus 3
uguucuauuuccc

SEQ ID NO: 304466 - RNA, 14 nt, Human herpesvirus 3
uguucuauuuccca

SEQ ID NO: 304467 - RNA, 15 nt, Human herpesvirus 3
uguucuauuucccaa

SEQ ID NO: 304468 - RNA, 18 nt, Human herpesvirus 3
uguucucauuucuagguu

SEQ ID NO: 304469 - RNA, 18 nt, Human herpesvirus 3
uguucuccugcaggccau

SEQ ID NO: 304470 - RNA, 15 nt, Human herpesvirus 3
uguucugcauaagcu

SEQ ID NO: 304471 - RNA, 16 nt, Human herpesvirus 3
uguugcuguuguccaa

SEQ ID NO: 304472 - RNA, 18 nt, Human herpesvirus 3
uguuguaaagcagacuga

SEQ ID NO: 304473 - RNA, 15 nt, Human herpesvirus 3
uguuguugcuaguau

SEQ ID NO: 304474 - RNA, 15 nt, Human herpesvirus 3
uguuuacacuugaau

SEQ ID NO: 304475 - RNA, 18 nt, Human herpesvirus 3
uguuucacgcuuccuuaa

SEQ ID NO: 304476 - RNA, 15 nt, Human herpesvirus 3
uguuuugaauuauua

SEQ ID NO: 304477 - RNA, 21 nt, Human herpesvirus 3
uuaaacaacauggcuaugcca

SEQ ID NO: 304478 - RNA, 20 nt, Human herpesvirus 3
uuaaacauccacagucugcu

SEQ ID NO: 304479 - RNA, 18 nt, Human herpesvirus 3
uuaaacccacaaguaccc

SEQ ID NO: 304480 - RNA, 18 nt, Human herpesvirus 3
uuaaacguauucuauuaa

SEQ ID NO: 304481 - RNA, 17 nt, Human herpesvirus 3
uuaaagcaucuauauga

SEQ ID NO: 304482 - RNA, 13 nt, Human herpesvirus 3
uuaacaaacauau

SEQ ID NO: 304483 - RNA, 15 nt, Human herpesvirus 3
uugaauggugauuca

SEQ ID NO: 304484 - RNA, 14 nt, Human herpesvirus 3
uugacaacauuuaa

SEQ ID NO: 304485 - RNA, 13 nt, Human herpesvirus 3
uugcagcguacaa

SEQ ID NO: 304486 - RNA, 19 nt, Human herpesvirus 3
uugcggaccccagagcauu

SEQ ID NO: 304487 - RNA, 15 nt, Human herpesvirus 3
uugcggaucccaaaa

SEQ ID NO: 304488 - RNA, 16 nt, Human herpesvirus 3
uugcgguuguugucca

SEQ ID NO: 304489 - RNA, 13 nt, Human herpesvirus 3
uugcuguucucau

SEQ ID NO: 304490 - RNA, 13 nt, Human herpesvirus 3
uugcuguugucca

SEQ ID NO: 304491 - RNA, 15 nt, Human herpesvirus 3
uugcuuucaaaccaa

SEQ ID NO: 304492 - RNA, 16 nt, Human herpesvirus 3
uugcuuucaaaccaau

SEQ ID NO: 304493 - RNA, 15 nt, Human herpesvirus 3
uuggagcuacacgug

SEQ ID NO: 304494 - RNA, 18 nt, Human herpesvirus 3
uuggcaucuuacuugaga

SEQ ID NO: 304495 - RNA, 15 nt, Human herpesvirus 3
uuggcgcaugccauu

SEQ ID NO: 304496 - RNA, 16 nt, Human herpesvirus 3
uuggcgcaugccauug

SEQ ID NO: 304497 - RNA, 15 nt, Human herpesvirus 3
uuggcggaagauaca

SEQ ID NO: 304498 - RNA, 13 nt, Human herpesvirus 3
uugggacaucaac

SEQ ID NO: 304499 - RNA, 22 nt, Human herpesvirus 3
uugggggcgggguagacugugg

SEQ ID NO: 304500 - RNA, 22 nt, Human herpesvirus 3
uuggguauuuauaauuaccgcc

SEQ ID NO: 304501 - RNA, 19 nt, Human herpesvirus 3
uugguaaaaacuuuacaga

SEQ ID NO: 304502 - RNA, 14 nt, Human herpesvirus 3
uuggugauguagca

SEQ ID NO: 304503 - RNA, 14 nt, Human herpesvirus 3
uugguuacugugaa

SEQ ID NO: 304504 - RNA, 22 nt, Human herpesvirus 3
uuguaaaaacggauauuaacac

SEQ ID NO: 304505 - RNA, 20 nt, Human herpesvirus 3
uuguaaaacauaucaauuua

SEQ ID NO: 304506 - RNA, 14 nt, Human herpesvirus 3
uuguaguacagggc

SEQ ID NO: 304507 - RNA, 12 nt, Human herpesvirus 3
uugucaaaacau

SEQ ID NO: 304508 - RNA, 13 nt, Human herpesvirus 3
uugucaaaacaua

SEQ ID NO: 304509 - RNA, 14 nt, Human herpesvirus 3
uugucaaaacauac

SEQ ID NO: 304510 - RNA, 15 nt, Human herpesvirus 3
uugucaaaacauacu

SEQ ID NO: 304511 - RNA, 9 nt, Human herpesvirus 3
uugucauaa

SEQ ID NO: 304512 - RNA, 20 nt, Human herpesvirus 3
uuguccaacuguaucuguau

SEQ ID NO: 304513 - RNA, 16 nt, Human herpesvirus 3
uuguggacgcauuuga

SEQ ID NO: 304514 - RNA, 14 nt, Human herpesvirus 3
uuguggacuuaccu

SEQ ID NO: 304515 - RNA, 17 nt, Human herpesvirus 3
uuguggaguuucccaua

SEQ ID NO: 304516 - RNA, 19 nt, Human herpesvirus 3
uuguggauccggcaugcau

SEQ ID NO: 304517 - RNA, 16 nt, Human herpesvirus 3
uugugucggucucucc

SEQ ID NO: 304518 - RNA, 21 nt, Human herpesvirus 3
uuguuggcgcaugccauuggc

SEQ ID NO: 304519 - RNA, 14 nt, Human herpesvirus 3
uuguugugucccga

SEQ ID NO: 304520 - RNA, 23 nt, Human herpesvirus 3
uuuaaaaauaccugaguguugcu

SEQ ID NO: 304521 - RNA, 17 nt, Human herpesvirus 3
uuuaacccgcguauuau

SEQ ID NO: 304522 - RNA, 15 nt, Human herpesvirus 3
uuuaagugacuauau

SEQ ID NO: 304523 - RNA, 18 nt, Human herpesvirus 3
uuuaauacccagcuaaaa

SEQ ID NO: 304524 - RNA, 15 nt, Human herpesvirus 3
uuuaaucggugucag

SEQ ID NO: 304525 - RNA, 14 nt, Human herpesvirus 3
uuuaccaguguaug

SEQ ID NO: 304526 - RNA, 18 nt, Human herpesvirus 3
uuuacguauguaccagua

SEQ ID NO: 304527 - RNA, 17 nt, Human herpesvirus 3
uuuacguguauaucuaa

SEQ ID NO: 304528 - RNA, 19 nt, Human herpesvirus 3
uuuagcuauagauaauuca

SEQ ID NO: 304529 - RNA, 15 nt, Human herpesvirus 3
uuuaggaaucaagac

SEQ ID NO: 304530 - RNA, 16 nt, Human herpesvirus 3
uuuaggguuuaaaggu

SEQ ID NO: 304531 - RNA, 18 nt, Human herpesvirus 3
uuuauacguaugucauca

SEQ ID NO: 304532 - RNA, 22 nt, Human herpesvirus 3
uuuauauauauguuccaucuaa

SEQ ID NO: 304533 - RNA, 21 nt, Human herpesvirus 3
uuuaucaauuguuuaugugau

SEQ ID NO: 304534 - RNA, 19 nt, Human herpesvirus 3
uuuauuaaagcuguuucuc

SEQ ID NO: 304535 - RNA, 16 nt, Human herpesvirus 3
uuucaaaccaauaucu

SEQ ID NO: 304536 - RNA, 21 nt, Human herpesvirus 3
uuucaauaaauguacuauaau

SEQ ID NO: 304537 - RNA, 13 nt, Human herpesvirus 3
uuucauauguuga

SEQ ID NO: 304538 - RNA, 12 nt, Human herpesvirus 3
uuucaugcuugu

SEQ ID NO: 304539 - RNA, 14 nt, Human herpesvirus 3
uuucauuaggauga

SEQ ID NO: 304540 - RNA, 20 nt, Human herpesvirus 3
uuuccaaauaacgccuuaaa

SEQ ID NO: 304541 - RNA, 19 nt, Human herpesvirus 3
uuucccaaaaggauauuca

SEQ ID NO: 304542 - RNA, 17 nt, Human herpesvirus 3
uuuccgcuguacaccgc

SEQ ID NO: 304543 - RNA, 15 nt, Human herpesvirus 3
uuucugcucauggaa

SEQ ID NO: 304544 - RNA, 15 nt, Human herpesvirus 3
uuugaagacuuugac

SEQ ID NO: 304545 - RNA, 21 nt, Human herpesvirus 3
uuugaaguguucuaaaacacu

SEQ ID NO: 304546 - RNA, 20 nt, Human herpesvirus 3
uuugaaucaucguaaacgua

SEQ ID NO: 304547 - RNA, 22 nt, Human herpesvirus 3
uuugaguuaagagggcguauga

SEQ ID NO: 304548 - RNA, 20 nt, Human herpesvirus 3
uuugcaauuccgucucugau

SEQ ID NO: 304549 - RNA, 15 nt, Human herpesvirus 3
uuuggaaacacuccc

SEQ ID NO: 304550 - RNA, 21 nt, Human herpesvirus 3
uuuguaaagggguuguuauca

SEQ ID NO: 304551 - RNA, 20 nt, Human herpesvirus 3
uuugucgcucuaaugcagug

SEQ ID NO: 304552 - RNA, 19 nt, Human herpesvirus 3
uuuguguugugacuugacg

SEQ ID NO: 304553 - RNA, 19 nt, Human herpesvirus 3
uuuuaaagcaucuauauga

SEQ ID NO: 304554 - RNA, 14 nt, Human herpesvirus 3
uuuuaaauguuguc

SEQ ID NO: 304555 - RNA, 16 nt, Human herpesvirus 3
uuuuaaauguugucaa

SEQ ID NO: 304556 - RNA, 14 nt, Human herpesvirus 3
uuuuaauuccaaua

SEQ ID NO: 304557 - RNA, 22 nt, Human herpesvirus 3
uuuuacaggccggaguguccag

SEQ ID NO: 304558 - RNA, 16 nt, Human herpesvirus 3
uuuuagaauacaaucg

SEQ ID NO: 304559 - RNA, 13 nt, Human herpesvirus 3
uuuuaucauugaa

SEQ ID NO: 304560 - RNA, 14 nt, Human herpesvirus 3
uuuuaugagaguuu

SEQ ID NO: 304561 - RNA, 15 nt, Human herpesvirus 3
uuuuauuuuaaggau

SEQ ID NO: 304562 - RNA, 20 nt, Human herpesvirus 3
uuuucaucauacgcauuuac

SEQ ID NO: 304563 - RNA, 17 nt, Human herpesvirus 3
uuuucccccacauacaa

SEQ ID NO: 304564 - RNA, 16 nt, Human herpesvirus 3
uuuucuuaacauugua

SEQ ID NO: 304565 - RNA, 14 nt, Human herpesvirus 3
uuuugcaaggcgua

SEQ ID NO: 304566 - RNA, 16 nt, Human herpesvirus 3
uuuugucgggacacaa

SEQ ID NO: 304567 - RNA, 19 nt, Human herpesvirus 3
uuuuguuuccgaauuuugc

SEQ ID NO: 304568 - RNA, 17 nt, Human herpesvirus 3
uuuuucggguacauagu

SEQ ID NO: 304569 - RNA, 19 nt, Human herpesvirus 3
uuuuugcaucagccuccac

SEQ ID NO: 304570 - RNA, 20 nt, Human herpesvirus 3
uuuuuucccguccccaaaug

SEQ ID NO: 304571 - RNA, 17 nt, Human herpesvirus 3
cauaagacguugcauau

SEQ ID NO: 304572 - RNA, 18 nt, Human herpesvirus 3
cauaagacguugcauaug

SEQ ID NO: 304573 - RNA, 20 nt, Human herpesvirus 3
cauaagacguugcauaugca

SEQ ID NO: 304574 - RNA, 19 nt, Human herpesvirus 3
cauaauuaaugcaaccauc

SEQ ID NO: 304575 - RNA, 13 nt, Human herpesvirus 3
cauacaucauaaa

SEQ ID NO: 304576 - RNA, 16 nt, Human herpesvirus 3
cauacaucauaaaccc

SEQ ID NO: 304577 - RNA, 15 nt, Human herpesvirus 3
cauaccgacaguaaa

SEQ ID NO: 304578 - RNA, 13 nt, Human herpesvirus 3
cauacgcauuuac

SEQ ID NO: 304579 - RNA, 14 nt, Human herpesvirus 3
cauacgcauuuacg

SEQ ID NO: 304580 - RNA, 21 nt, Human herpesvirus 3
cauacgcgaauaaacgacaca

SEQ ID NO: 304581 - RNA, 14 nt, Human herpesvirus 3
cauagcguggguuu

SEQ ID NO: 304582 - RNA, 14 nt, Human herpesvirus 3
cauauacacauccu

SEQ ID NO: 304583 - RNA, 18 nt, Human herpesvirus 3
cauauauacccaucguca

SEQ ID NO: 304584 - RNA, 16 nt, Human herpesvirus 3
cauauauggacaucca

SEQ ID NO: 304585 - RNA, 13 nt, Human herpesvirus 3
cauauaugggaaa

SEQ ID NO: 304586 - RNA, 19 nt, Human herpesvirus 3
cauauccagcaauguugaa

SEQ ID NO: 304587 - RNA, 12 nt, Human herpesvirus 3
caucaaagucaa

SEQ ID NO: 304588 - RNA, 19 nt, Human herpesvirus 3
aacggaagaugaacuaaua

SEQ ID NO: 304589 - RNA, 17 nt, Human herpesvirus 3
aacggguuuugggugca

SEQ ID NO: 304590 - RNA, 19 nt, Human herpesvirus 3
aacggucgcguguacgaaa

SEQ ID NO: 304591 - RNA, 19 nt, Human herpesvirus 3
aacguauucuauuaacaau

SEQ ID NO: 304592 - RNA, 16 nt, Human herpesvirus 3
aacguauucucuacaa

SEQ ID NO: 304593 - RNA, 23 nt, Human herpesvirus 3
aacguggccauuacuaaagcuau

SEQ ID NO: 304594 - RNA, 13 nt, Human herpesvirus 3
aacguuaucuuua

SEQ ID NO: 304595 - RNA, 15 nt, Human herpesvirus 3
aacguuuuaguaaaa

SEQ ID NO: 304596 - RNA, 21 nt, Human herpesvirus 3
aacguuuuaguaaaauaccau

SEQ ID NO: 304597 - RNA, 20 nt, Human herpesvirus 3
aacuaauauucuacagauuu

SEQ ID NO: 304598 - RNA, 18 nt, Human herpesvirus 3
aacucgccuccacugcau

SEQ ID NO: 304599 - RNA, 13 nt, Human herpesvirus 3
aacucucuuauau

SEQ ID NO: 304600 - RNA, 15 nt, Human herpesvirus 3
aacucuguuguauca

SEQ ID NO: 304601 - RNA, 12 nt, Human herpesvirus 3
aacugaauuuaa

SEQ ID NO: 304602 - RNA, 14 nt, Human herpesvirus 3
aacugaauuuaaca

SEQ ID NO: 304603 - RNA, 16 nt, Human herpesvirus 3
aacugauuacauuuca

SEQ ID NO: 304604 - RNA, 20 nt, Human herpesvirus 3
aacugccaauauacacggac

SEQ ID NO: 304605 - RNA, 19 nt, Human herpesvirus 3
aacuuaacaaacauauaau

SEQ ID NO: 304606 - RNA, 17 nt, Human herpesvirus 3
aacuuguguguaccaua

SEQ ID NO: 304607 - RNA, 14 nt, Human herpesvirus 3
aagaaaacauugca

SEQ ID NO: 304608 - RNA, 15 nt, Human herpesvirus 3
aagaaaacauugcag

SEQ ID NO: 304609 - RNA, 17 nt, Human herpesvirus 3
aagacaaacuggauaca

SEQ ID NO: 304610 - RNA, 16 nt, Human herpesvirus 3
aagacguccacacagc

SEQ ID NO: 304611 - RNA, 16 nt, Human herpesvirus 3
aagacuaacauuuauc

SEQ ID NO: 304612 - RNA, 16 nt, Human herpesvirus 3
aagacuccaguauacc

SEQ ID NO: 304613 - RNA, 16 nt, Human herpesvirus 3
aagacuuuaugaauuu

SEQ ID NO: 304614 - RNA, 19 nt, Human herpesvirus 3
aagacuuugacuuugauga

SEQ ID NO: 304615 - RNA, 16 nt, Human herpesvirus 3
aagauaggguguauac

SEQ ID NO: 304616 - RNA, 17 nt, Human herpesvirus 3
aagauaggguguauacg

SEQ ID NO: 304617 - RNA, 17 nt, Human herpesvirus 3
aagaugauuaucaauac

SEQ ID NO: 304618 - RNA, 13 nt, Human herpesvirus 3
aagauguacugug

SEQ ID NO: 304619 - RNA, 15 nt, Human herpesvirus 3
aagccaacgucgcca

SEQ ID NO: 304620 - RNA, 13 nt, Human herpesvirus 3
aagccguucugug

SEQ ID NO: 304621 - RNA, 13 nt, Human herpesvirus 3
aagccucuguaca

SEQ ID NO: 304622 - RNA, 21 nt, Human herpesvirus 3
aagcgcuccgcccuaaauuac

SEQ ID NO: 304623 - RNA, 15 nt, Human herpesvirus 3
aagcguuaccacagu

SEQ ID NO: 304624 - RNA, 14 nt, Human herpesvirus 3
aagcuaccaccaca

SEQ ID NO: 304625 - RNA, 14 nt, Human herpesvirus 3
aagcuauacacaag

SEQ ID NO: 304626 - RNA, 20 nt, Human herpesvirus 3
aagcuauuggcuccacucca

SEQ ID NO: 304627 - RNA, 18 nt, Human herpesvirus 3
aagcucuguaugcugaua

SEQ ID NO: 304628 - RNA, 15 nt, Human herpesvirus 3
aagcugccgucaaug

SEQ ID NO: 304629 - RNA, 22 nt, Human herpesvirus 3
aaggaucuccacguagcaaagc

SEQ ID NO: 304630 - RNA, 20 nt, Human herpesvirus 3
aaggcacgcugugugcauaa

SEQ ID NO: 304631 - RNA, 15 nt, Human herpesvirus 3
aaggcccauaucccc

SEQ ID NO: 304632 - RNA, 18 nt, Human herpesvirus 3
aaggcgugaaagcuacca

SEQ ID NO: 304633 - RNA, 23 nt, Human herpesvirus 3
accgugggagccgcggccagugc

SEQ ID NO: 304634 - RNA, 16 nt, Human herpesvirus 3
accguuuuaguagugu

SEQ ID NO: 304635 - RNA, 15 nt, Human herpesvirus 3
accugaguguugcua

SEQ ID NO: 304636 - RNA, 15 nt, Human herpesvirus 3
accuggucaccgugu

SEQ ID NO: 304637 - RNA, 17 nt, Human herpesvirus 3
accuuaacucaaccgcc

SEQ ID NO: 304638 - RNA, 17 nt, Human herpesvirus 3
accuuccgguaccccau

SEQ ID NO: 304639 - RNA, 18 nt, Human herpesvirus 3
accuuccgguaccccaua

SEQ ID NO: 304640 - RNA, 20 nt, Human herpesvirus 3
acgaaccuucggaugacuuu

SEQ ID NO: 304641 - RNA, 23 nt, Human herpesvirus 3
acgaaccuucggaugacuuugca

SEQ ID NO: 304642 - RNA, 17 nt, Human herpesvirus 3
acgaacuuaaagagccg

SEQ ID NO: 304643 - RNA, 21 nt, Human herpesvirus 3
acgaacuugggcggagacaau

SEQ ID NO: 304644 - RNA, 18 nt, Human herpesvirus 3
acgacgugagggugaccg

SEQ ID NO: 304645 - RNA, 21 nt, Human herpesvirus 3
acgacuuuuaaacgccagugg

SEQ ID NO: 304646 - RNA, 13 nt, Human herpesvirus 3
acgagaauauucc

SEQ ID NO: 304647 - RNA, 13 nt, Human herpesvirus 3
acgagagauccaa

SEQ ID NO: 304648 - RNA, 14 nt, Human herpesvirus 3
acgccccauuacaa

SEQ ID NO: 304649 - RNA, 14 nt, Human herpesvirus 3
acgccgacaugccu

SEQ ID NO: 304650 - RNA, 22 nt, Human herpesvirus 3
acgccgcccacgagugaucgau

SEQ ID NO: 304651 - RNA, 21 nt, Human herpesvirus 3
acgccuggccccuugaaccac

SEQ ID NO: 304652 - RNA, 13 nt, Human herpesvirus 3
acgccugugaaau

SEQ ID NO: 304653 - RNA, 14 nt, Human herpesvirus 3
acgcguacgugccu

SEQ ID NO: 304654 - RNA, 16 nt, Human herpesvirus 3
acgcguacgugccuag

SEQ ID NO: 304655 - RNA, 16 nt, Human herpesvirus 3
acgcgucuguguauau

SEQ ID NO: 304656 - RNA, 18 nt, Human herpesvirus 3
acgcuacagaagacauca

SEQ ID NO: 304657 - RNA, 12 nt, Human herpesvirus 3
acgcuacauccg

SEQ ID NO: 304658 - RNA, 15 nt, Human herpesvirus 3
acgcuggcauuucca

SEQ ID NO: 304659 - RNA, 20 nt, Human herpesvirus 3
acggaacacguuaucgguca

SEQ ID NO: 304660 - RNA, 15 nt, Human herpesvirus 3
acggaagaugaacua

SEQ ID NO: 304661 - RNA, 17 nt, Human herpesvirus 3
acggaaggcgugaaagc

SEQ ID NO: 304662 - RNA, 11 nt, Human herpesvirus 3
agcggacacau

SEQ ID NO: 304663 - RNA, 22 nt, Human herpesvirus 3
agcggugucguguuaaacaaac

SEQ ID NO: 304664 - RNA, 21 nt, Human herpesvirus 3
agcguacugcagauacagcau

SEQ ID NO: 304665 - RNA, 16 nt, Human herpesvirus 3
agcuauagauaauuca

SEQ ID NO: 304666 - RNA, 16 nt, Human herpesvirus 3
agcucguuuuaugaga

SEQ ID NO: 304667 - RNA, 14 nt, Human herpesvirus 3
agcugccgggaaaa

SEQ ID NO: 304668 - RNA, 16 nt, Human herpesvirus 3
agcugccgucaaugca

SEQ ID NO: 304669 - RNA, 21 nt, Human herpesvirus 3
agcuguaaaaaccauggacag

SEQ ID NO: 304670 - RNA, 21 nt, Human herpesvirus 3
agcuguccaugaugaaaaccu

SEQ ID NO: 304671 - RNA, 23 nt, Human herpesvirus 3
agcuguccggacuccagcaucau

SEQ ID NO: 304672 - RNA, 14 nt, Human herpesvirus 3
agcugugaguuuag

SEQ ID NO: 304673 - RNA, 19 nt, Human herpesvirus 3
agcuuccgaaagcagucaa

SEQ ID NO: 304674 - RNA, 12 nt, Human herpesvirus 3
agcuugcaaguu

SEQ ID NO: 304675 - RNA, 22 nt, Human herpesvirus 3
aggaccccccgaugauucagac

SEQ ID NO: 304676 - RNA, 14 nt, Human herpesvirus 3
aggauggguuguug

SEQ ID NO: 304677 - RNA, 16 nt, Human herpesvirus 3
aggcgaggacuccaca

SEQ ID NO: 304678 - RNA, 13 nt, Human herpesvirus 3
aggcuccacaauc

SEQ ID NO: 304679 - RNA, 19 nt, Human herpesvirus 3
aggcuguacguaaccauau

SEQ ID NO: 304680 - RNA, 17 nt, Human herpesvirus 3
agggggaaggaaaugcc

SEQ ID NO: 304681 - RNA, 21 nt, Human herpesvirus 3
aggggggggcgcgucugccac

SEQ ID NO: 304682 - RNA, 15 nt, Human herpesvirus 3
agggggggguuccgu

SEQ ID NO: 304683 - RNA, 20 nt, Human herpesvirus 3
aggguacaaacgcgcaaugu

SEQ ID NO: 304684 - RNA, 15 nt, Human herpesvirus 3
aggguagagggugcu

SEQ ID NO: 304685 - RNA, 15 nt, Human herpesvirus 3
aggguaucuaaguac

SEQ ID NO: 304686 - RNA, 15 nt, Human herpesvirus 3
agguaagaagugcau

SEQ ID NO: 304687 - RNA, 20 nt, Human herpesvirus 3
agguaagaagugcauaucca

SEQ ID NO: 304688 - RNA, 18 nt, Human herpesvirus 3
agguauaugucaacauuu

SEQ ID NO: 304689 - RNA, 21 nt, Human herpesvirus 3
agguauaugucaacauuuaca

SEQ ID NO: 304690 - RNA, 13 nt, Human herpesvirus 3
agguauggaguuc

SEQ ID NO: 304691 - RNA, 14 nt, Human herpesvirus 3
aggucaacauacau

SEQ ID NO: 304692 - RNA, 18 nt, Human herpesvirus 3
aggucuacagcacccuuu

SEQ ID NO: 304693 - RNA, 13 nt, Human herpesvirus 3
aggucugucaugu

SEQ ID NO: 304694 - RNA, 17 nt, Human herpesvirus 3
aggugaacagauuuccc

SEQ ID NO: 304695 - RNA, 17 nt, Human herpesvirus 3
aggugggggguguugcg

SEQ ID NO: 304696 - RNA, 16 nt, Human herpesvirus 3
agguguaaauacugcc

SEQ ID NO: 304697 - RNA, 14 nt, Human herpesvirus 3
agguuacauggggu

SEQ ID NO: 304698 - RNA, 20 nt, Human herpesvirus 3
agguuauccaacuguuuaca

SEQ ID NO: 304699 - RNA, 19 nt, Human herpesvirus 3
agguucuugggacuccaag

SEQ ID NO: 304700 - RNA, 23 nt, Human herpesvirus 3
agguuuucguuuugguguuacau

SEQ ID NO: 304701 - RNA, 21 nt, Human herpesvirus 3
aguaaaaauguugucugccaa

SEQ ID NO: 304702 - RNA, 17 nt, Human herpesvirus 3
aguaaacaacaguagga

SEQ ID NO: 304703 - RNA, 19 nt, Human herpesvirus 3
aguaaacguccgauguucc

SEQ ID NO: 304704 - RNA, 20 nt, Human herpesvirus 3
aguaaacguccgauguucca

SEQ ID NO: 304705 - RNA, 21 nt, Human herpesvirus 3
aguaaauaccuauuucaugcu

SEQ ID NO: 304706 - RNA, 15 nt, Human herpesvirus 3
aguaacagcccgaua

SEQ ID NO: 304707 - RNA, 20 nt, Human herpesvirus 3
aguaaccggggcauccugcu

SEQ ID NO: 304708 - RNA, 19 nt, Human herpesvirus 3
aguaacugucccaauacac

SEQ ID NO: 304709 - RNA, 15 nt, Human herpesvirus 3
aguaacuuaacaaac

SEQ ID NO: 304710 - RNA, 19 nt, Human herpesvirus 3
aguaacuuaacaaacauau

SEQ ID NO: 304711 - RNA, 10 nt, Human herpesvirus 3
aguacagggc

SEQ ID NO: 304712 - RNA, 15 nt, Human herpesvirus 3
aguacaggguaucua

SEQ ID NO: 304713 - RNA, 21 nt, Human herpesvirus 3
aguacaggguaucuaaguacc

SEQ ID NO: 304714 - RNA, 16 nt, Human herpesvirus 3
aguaccacgugguauu

SEQ ID NO: 304715 - RNA, 19 nt, Human herpesvirus 3
aguaccgggauaucucaua

SEQ ID NO: 304716 - RNA, 15 nt, Human herpesvirus 3
aguacguugcauaac

SEQ ID NO: 304717 - RNA, 14 nt, Human herpesvirus 3
aguacuacacccag

SEQ ID NO: 304718 - RNA, 16 nt, Human herpesvirus 3
aguacuacacccagua

SEQ ID NO: 304719 - RNA, 16 nt, Human herpesvirus 3
aguagagcccacacaa

SEQ ID NO: 304720 - RNA, 17 nt, Human herpesvirus 3
aguauaccggaguauaa

SEQ ID NO: 304721 - RNA, 17 nt, Human herpesvirus 3
aguauuuuccuuaugua

SEQ ID NO: 304722 - RNA, 21 nt, Human herpesvirus 3
aguauuuuccuuauguaaaag

SEQ ID NO: 304723 - RNA, 15 nt, Human herpesvirus 3
agucaaagucuucaa

SEQ ID NO: 304724 - RNA, 14 nt, Human herpesvirus 3
agucaaauucaacu

SEQ ID NO: 304725 - RNA, 21 nt, Human herpesvirus 3
agucacgccccauuacaacaa

SEQ ID NO: 304726 - RNA, 16 nt, Human herpesvirus 3
aguccaguggacagua

SEQ ID NO: 304727 - RNA, 21 nt, Human herpesvirus 3
aguccggacaauuaacacaga

SEQ ID NO: 304728 - RNA, 15 nt, Human herpesvirus 3
agucgcaacgcugcu

SEQ ID NO: 304729 - RNA, 12 nt, Human herpesvirus 3
agucgucagggg

SEQ ID NO: 304730 - RNA, 15 nt, Human herpesvirus 3
agucugaccauuuac

SEQ ID NO: 304731 - RNA, 16 nt, Human herpesvirus 3
agucugaccauuuacc

SEQ ID NO: 304732 - RNA, 19 nt, Human herpesvirus 3
agucuguaucgcuaucaga

SEQ ID NO: 304733 - RNA, 16 nt, Human herpesvirus 3
agugaucgauguaaca

SEQ ID NO: 304734 - RNA, 16 nt, Human herpesvirus 3
agugcuugacugugcu

SEQ ID NO: 304735 - RNA, 13 nt, Human herpesvirus 3
aguggggguuuaa

SEQ ID NO: 304736 - RNA, 17 nt, Human herpesvirus 3
aguguacgcggaucuuu

SEQ ID NO: 304737 - RNA, 15 nt, Human herpesvirus 3
aguguccagauauaa

SEQ ID NO: 304738 - RNA, 16 nt, Human herpesvirus 3
aguguuuaacaaccau

SEQ ID NO: 304739 - RNA, 20 nt, Human herpesvirus 3
aguuaugauauaagguguua

SEQ ID NO: 304740 - RNA, 17 nt, Human herpesvirus 3
aguuauuguauauacaa

SEQ ID NO: 304741 - RNA, 17 nt, Human herpesvirus 3
aguugaaccaaauccac

SEQ ID NO: 304742 - RNA, 20 nt, Human herpesvirus 3
aguuguuggcgcaugccauu

SEQ ID NO: 304743 - RNA, 15 nt, Human herpesvirus 3
aguuuaggguuuaaa

SEQ ID NO: 304744 - RNA, 16 nt, Human herpesvirus 3
aguuuuuaaaguugca

SEQ ID NO: 304745 - RNA, 16 nt, Human herpesvirus 3
auaaaaacacaaccag

SEQ ID NO: 304746 - RNA, 17 nt, Human herpesvirus 3
auaaaagcagacauccc

SEQ ID NO: 304747 - RNA, 20 nt, Human herpesvirus 3
auaaacaagucaauauuaca

SEQ ID NO: 304748 - RNA, 15 nt, Human herpesvirus 3
auaaaccaacuccug

SEQ ID NO: 304749 - RNA, 21 nt, Human herpesvirus 3
auaaacccuccggcaucucca

SEQ ID NO: 304750 - RNA, 20 nt, Human herpesvirus 3
auaaacccugauaaacguuc

SEQ ID NO: 304751 - RNA, 20 nt, Human herpesvirus 3
auaaaccgauuaugucaaca

SEQ ID NO: 304752 - RNA, 15 nt, Human herpesvirus 3
auaaacgaugacaca

SEQ ID NO: 304753 - RNA, 13 nt, Human herpesvirus 3
auaaacguauaaa

SEQ ID NO: 304754 - RNA, 12 nt, Human herpesvirus 3
auaaacuauaug

SEQ ID NO: 304755 - RNA, 17 nt, Human herpesvirus 3
auaaacugaauuuaaca

SEQ ID NO: 304756 - RNA, 14 nt, Human herpesvirus 3
auaaauaacauaac

SEQ ID NO: 304757 - RNA, 18 nt, Human herpesvirus 3
auaaaucuuacguaacac

SEQ ID NO: 304758 - RNA, 16 nt, Human herpesvirus 3
aauuaucugucuuggu

SEQ ID NO: 304759 - RNA, 22 nt, Human herpesvirus 3
aauuccgccuauagcugucacu

SEQ ID NO: 304760 - RNA, 20 nt, Human herpesvirus 3
aauucggcgcggaugcauuu

SEQ ID NO: 304761 - RNA, 22 nt, Human herpesvirus 3
aauucggcgcggaugcauuuau

SEQ ID NO: 304762 - RNA, 17 nt, Human herpesvirus 3
aauucuuagaaaagcca

SEQ ID NO: 304763 - RNA, 14 nt, Human herpesvirus 3
aauuguacccaucu

SEQ ID NO: 304764 - RNA, 13 nt, Human herpesvirus 3
aauugucuguaua

SEQ ID NO: 304765 - RNA, 15 nt, Human herpesvirus 3
aauuguucugggaac

SEQ ID NO: 304766 - RNA, 17 nt, Human herpesvirus 3
aauuguucugggaacac

SEQ ID NO: 304767 - RNA, 22 nt, Human herpesvirus 3
aauuuaacauaccccaggccuu

SEQ ID NO: 304768 - RNA, 14 nt, Human herpesvirus 3
aauuuauaaaacac

SEQ ID NO: 304769 - RNA, 19 nt, Human herpesvirus 3
aauuucuacgcacauuagc

SEQ ID NO: 304770 - RNA, 21 nt, Human herpesvirus 3
aauuucuacgcacauuagcaa

SEQ ID NO: 304771 - RNA, 17 nt, Human herpesvirus 3
aauuugccccaaaccac

SEQ ID NO: 304772 - RNA, 18 nt, Human herpesvirus 3
aauuugccccaaaccacu

SEQ ID NO: 304773 - RNA, 22 nt, Human herpesvirus 3
aauuugccccaaaccacuguuc

SEQ ID NO: 304774 - RNA, 19 nt, Human herpesvirus 3
aauuuguauuuuuaaucau

SEQ ID NO: 304775 - RNA, 16 nt, Human herpesvirus 3
aauuuuuauacguuuc

SEQ ID NO: 304776 - RNA, 20 nt, Human herpesvirus 3
acaaaacgcguuuuguaccu

SEQ ID NO: 304777 - RNA, 13 nt, Human herpesvirus 3
acaaacacucuac

SEQ ID NO: 304778 - RNA, 21 nt, Human herpesvirus 3
acaaacacucuacgcauuuac

SEQ ID NO: 304779 - RNA, 18 nt, Human herpesvirus 3
acaaauuucugauguucc

SEQ ID NO: 304780 - RNA, 18 nt, Human herpesvirus 3
acaacauggcuaugccau

SEQ ID NO: 304781 - RNA, 21 nt, Human herpesvirus 3
acaacgucuagaacuguguau

SEQ ID NO: 304782 - RNA, 16 nt, Human herpesvirus 3
acaacucgugucucug

SEQ ID NO: 304783 - RNA, 19 nt, Human herpesvirus 3
acaacucuggagucuccaa

SEQ ID NO: 304784 - RNA, 13 nt, Human herpesvirus 3
acaagaaaccaug

SEQ ID NO: 304785 - RNA, 17 nt, Human herpesvirus 3
acaagaaguuauaugaa

SEQ ID NO: 304786 - RNA, 19 nt, Human herpesvirus 3
acaagauauaauuugucca

SEQ ID NO: 304787 - RNA, 14 nt, Human herpesvirus 3
acaaguacaaccca

SEQ ID NO: 304788 - RNA, 14 nt, Human herpesvirus 3
acaauaacauaagg

SEQ ID NO: 304789 - RNA, 13 nt, Human herpesvirus 3
acaauaucacguc

SEQ ID NO: 304790 - RNA, 22 nt, Human herpesvirus 3
acaaucgcccgaaaacuuuggu

SEQ ID NO: 304791 - RNA, 14 nt, Human herpesvirus 3
acaaugacagugau

SEQ ID NO: 304792 - RNA, 22 nt, Human herpesvirus 3
acaauuauuagcguaauauaac

SEQ ID NO: 304793 - RNA, 21 nt, Human herpesvirus 3
acaauugagauacacauggau

SEQ ID NO: 304794 - RNA, 13 nt, Human herpesvirus 3
acacaaccagucu

SEQ ID NO: 304795 - RNA, 22 nt, Human herpesvirus 3
acacaaccagucuaguuacauu

SEQ ID NO: 304796 - RNA, 17 nt, Human herpesvirus 3
auaaauguacuauaauu

SEQ ID NO: 304797 - RNA, 21 nt, Human herpesvirus 3
auaaauuguguuuauaacgua

SEQ ID NO: 304798 - RNA, 19 nt, Human herpesvirus 3
auaacaauuuaacauaccc

SEQ ID NO: 304799 - RNA, 18 nt, Human herpesvirus 3
auaacagucuaacaguac

SEQ ID NO: 304800 - RNA, 15 nt, Human herpesvirus 3
auaacauaaccaaua

SEQ ID NO: 304801 - RNA, 19 nt, Human herpesvirus 3
auaacauacaucauaaacc

SEQ ID NO: 304802 - RNA, 15 nt, Human herpesvirus 3
auaacaugggauuuc

SEQ ID NO: 304803 - RNA, 23 nt, Human herpesvirus 3
auaaccggguggguggcauuaaa

SEQ ID NO: 304804 - RNA, 13 nt, Human herpesvirus 3
caaacauucacag

SEQ ID NO: 304805 - RNA, 19 nt, Human herpesvirus 3
caaaccccacgcaacauuu

SEQ ID NO: 304806 - RNA, 21 nt, Human herpesvirus 3
caaaccguuuguuuugaucac

SEQ ID NO: 304807 - RNA, 18 nt, Human herpesvirus 3
caaacgcgucuguguaua

SEQ ID NO: 304808 - RNA, 15 nt, Human herpesvirus 3
caaacguguguauaa

SEQ ID NO: 304809 - RNA, 20 nt, Human herpesvirus 3
caaacuccuccuauauccca

SEQ ID NO: 304810 - RNA, 18 nt, Human herpesvirus 3
caaagaacucugaguuca

SEQ ID NO: 304811 - RNA, 20 nt, Human herpesvirus 3
caaagcuacacuuuuugcau

SEQ ID NO: 304812 - RNA, 20 nt, Human herpesvirus 3
caaauaaaaguauuacauuc

SEQ ID NO: 304813 - RNA, 23 nt, Human herpesvirus 3
caaauaaaaguauuacauucaua

SEQ ID NO: 304814 - RNA, 16 nt, Human herpesvirus 3
caaauaacgccuuaaa

SEQ ID NO: 304815 - RNA, 14 nt, Human herpesvirus 3
caaauaacugaaca

SEQ ID NO: 304816 - RNA, 22 nt, Human herpesvirus 3
caaaucaugguugguuacugug

SEQ ID NO: 304817 - RNA, 12 nt, Human herpesvirus 3
caacaacccauc

SEQ ID NO: 304818 - RNA, 21 nt, Human herpesvirus 3
caacaacccauccuuaaaaua

SEQ ID NO: 304819 - RNA, 21 nt, Human herpesvirus 3
caacaaccgucgucuaucgca

SEQ ID NO: 304820 - RNA, 17 nt, Human herpesvirus 3
caacacaucuacugucu

SEQ ID NO: 304821 - RNA, 19 nt, Human herpesvirus 3
caacacccgguucuaccaa

SEQ ID NO: 304822 - RNA, 22 nt, Human herpesvirus 3
caacacgggcugaagaguuucu

SEQ ID NO: 304823 - RNA, 18 nt, Human herpesvirus 3
caacaggcuccacaaucg

SEQ ID NO: 304824 - RNA, 14 nt, Human herpesvirus 3
caacauggcuacaa

SEQ ID NO: 304825 - RNA, 17 nt, Human herpesvirus 3
caacauuuacaguaaua

SEQ ID NO: 304826 - RNA, 21 nt, Human herpesvirus 3
caaccacaccgguggaauuaa

SEQ ID NO: 304827 - RNA, 18 nt, Human herpesvirus 3
caaccauucagcuuacag

SEQ ID NO: 304828 - RNA, 17 nt, Human herpesvirus 3
caacccauccgagugaa

SEQ ID NO: 304829 - RNA, 22 nt, Human herpesvirus 3
caaccuggucaccguguggaca

SEQ ID NO: 304830 - RNA, 16 nt, Human herpesvirus 3
caaccuucaaguuaaa

SEQ ID NO: 304831 - RNA, 13 nt, Human herpesvirus 3
caacgcagauuac

SEQ ID NO: 304832 - RNA, 19 nt, Human herpesvirus 3
caacgcguacgugccuagg

SEQ ID NO: 304833 - RNA, 18 nt, Human herpesvirus 3
caacgcuggcauuuccaa

SEQ ID NO: 304834 - RNA, 16 nt, Human herpesvirus 3
caacgguuggcuuaaa

SEQ ID NO: 304835 - RNA, 12 nt, Human herpesvirus 3
caacugauuaca

SEQ ID NO: 304836 - RNA, 20 nt, Human herpesvirus 3
caacugcaaacacgcaauug

SEQ ID NO: 304837 - RNA, 15 nt, Human herpesvirus 3
caacuuccccauaca

SEQ ID NO: 304838 - RNA, 18 nt, Human herpesvirus 3
caacuuccccauacacua

SEQ ID NO: 304839 - RNA, 23 nt, Human herpesvirus 3
caacuuuugcuuauauuuuacau

SEQ ID NO: 304840 - RNA, 20 nt, Human herpesvirus 3
caagaacuuugcauguuuac

SEQ ID NO: 304841 - RNA, 13 nt, Human herpesvirus 3
caagaaguuauau

SEQ ID NO: 304842 - RNA, 17 nt, Human herpesvirus 3
caagacuaacauuuauc

SEQ ID NO: 304843 - RNA, 12 nt, Human herpesvirus 3
caagaguuuucu

SEQ ID NO: 304844 - RNA, 18 nt, Human herpesvirus 3
caagaugaaauaguuuca

SEQ ID NO: 304845 - RNA, 18 nt, Human herpesvirus 3
caagcccuccgguccaug

SEQ ID NO: 304846 - RNA, 15 nt, Human herpesvirus 3
caagcgguuuagcau

SEQ ID NO: 304847 - RNA, 15 nt, Human herpesvirus 3
caaggauagauauca

SEQ ID NO: 304848 - RNA, 17 nt, Human herpesvirus 3
caaggauagauaucaca

SEQ ID NO: 304849 - RNA, 14 nt, Human herpesvirus 3
caagguauccccca

SEQ ID NO: 304850 - RNA, 20 nt, Human herpesvirus 3
caagucaauauuacauauuc

SEQ ID NO: 304851 - RNA, 13 nt, Human herpesvirus 3
caaguccaaucaa

SEQ ID NO: 304852 - RNA, 16 nt, Human herpesvirus 3
caagucgcaacgcugc

SEQ ID NO: 304853 - RNA, 18 nt, Human herpesvirus 3
caaguggaugauauuuua

SEQ ID NO: 304854 - RNA, 18 nt, Human herpesvirus 3
caaguuaaauaacauguc

SEQ ID NO: 304855 - RNA, 14 nt, Human herpesvirus 3
caaguugcauguua

SEQ ID NO: 304856 - RNA, 21 nt, Human herpesvirus 3
caaguuuauacguacaucuuu

SEQ ID NO: 304857 - RNA, 21 nt, Human herpesvirus 3
caauaaaacaaacauucacag

SEQ ID NO: 304858 - RNA, 15 nt, Human herpesvirus 3
caauaaaauggauau

SEQ ID NO: 304859 - RNA, 23 nt, Human herpesvirus 3
caauaaacggcauagacgcacag

SEQ ID NO: 304860 - RNA, 19 nt, Human herpesvirus 3
caauacacccgacuuccua

SEQ ID NO: 304861 - RNA, 15 nt, Human herpesvirus 3
caauauuuuguuaau

SEQ ID NO: 304862 - RNA, 12 nt, Human herpesvirus 3
caaucaauccaa

SEQ ID NO: 304863 - RNA, 15 nt, Human herpesvirus 3
caaucaauccaagga

SEQ ID NO: 304864 - RNA, 16 nt, Human herpesvirus 3
caauccgucaacugca

SEQ ID NO: 304865 - RNA, 19 nt, Human herpesvirus 3
caauccgucaacugcaaca

SEQ ID NO: 304866 - RNA, 18 nt, Human herpesvirus 3
caaucgaaaaaaggugua

SEQ ID NO: 304867 - RNA, 21 nt, Human herpesvirus 3
caaugagaugagaaaaauaau

SEQ ID NO: 304868 - RNA, 19 nt, Human herpesvirus 3
caaugccauuuggacacua

SEQ ID NO: 304869 - RNA, 12 nt, Human herpesvirus 3
caauuaacacag

SEQ ID NO: 304870 - RNA, 13 nt, Human herpesvirus 3
caauuaacacaga

SEQ ID NO: 304871 - RNA, 22 nt, Human herpesvirus 3
cacaacgucuagaacuguguau

SEQ ID NO: 304872 - RNA, 20 nt, Human herpesvirus 3
cacacaccagacguguaccg

SEQ ID NO: 304873 - RNA, 19 nt, Human herpesvirus 3
cacacgacacgauaccccc

SEQ ID NO: 304874 - RNA, 18 nt, Human herpesvirus 3
cacacgggccguguggua

SEQ ID NO: 304875 - RNA, 18 nt, Human herpesvirus 3
cacaguccggacaauuaa

SEQ ID NO: 304876 - RNA, 12 nt, Human herpesvirus 3
cacauugucaua

SEQ ID NO: 304877 - RNA, 13 nt, Human herpesvirus 3
cacauugucauac

SEQ ID NO: 304878 - RNA, 12 nt, Human herpesvirus 3
caccaaagccaa

SEQ ID NO: 304879 - RNA, 15 nt, Human herpesvirus 3
caccacguguugcug

SEQ ID NO: 304880 - RNA, 18 nt, Human herpesvirus 3
cacccaguacguugcaua

SEQ ID NO: 304881 - RNA, 18 nt, Human herpesvirus 3
caccccagauauugucca

SEQ ID NO: 304882 - RNA, 13 nt, Human herpesvirus 3
cacccgccaugag

SEQ ID NO: 304883 - RNA, 14 nt, Human herpesvirus 3
cacccgccaugagc

SEQ ID NO: 304884 - RNA, 12 nt, Human herpesvirus 3
caccgguauuau

SEQ ID NO: 304885 - RNA, 14 nt, Human herpesvirus 3
caccgguccaacac

SEQ ID NO: 304886 - RNA, 15 nt, Human herpesvirus 3
cacgaauaggugaua

SEQ ID NO: 304887 - RNA, 12 nt, Human herpesvirus 3
cacgacaccgcu

SEQ ID NO: 304888 - RNA, 17 nt, Human herpesvirus 3
cacggccaggcaagcca

SEQ ID NO: 304889 - RNA, 18 nt, Human herpesvirus 3
cacgggaaacuauuccaa

SEQ ID NO: 304890 - RNA, 14 nt, Human herpesvirus 3
cacgguauuccaaa

SEQ ID NO: 304891 - RNA, 19 nt, Human herpesvirus 3
cacgugagcuugcaaguua

SEQ ID NO: 304892 - RNA, 13 nt, Human herpesvirus 3
cacgugguauuau

SEQ ID NO: 304893 - RNA, 15 nt, Human herpesvirus 3
cacguuaucggucaa

SEQ ID NO: 304894 - RNA, 22 nt, Human herpesvirus 3
cacguuuguguugugacuugac

SEQ ID NO: 304895 - RNA, 23 nt, Human herpesvirus 3
cacguuuguguugugacuugacg

SEQ ID NO: 304896 - RNA, 16 nt, Human herpesvirus 3
cacucuacgcauuuac

SEQ ID NO: 304897 - RNA, 20 nt, Human herpesvirus 3
cacugaaccacaaccaagcu

SEQ ID NO: 304898 - RNA, 24 nt, Human herpesvirus 3
cacugcauuuacaucuuguccaac

SEQ ID NO: 304899 - RNA, 13 nt, Human herpesvirus 3
cacuggacuuuac

SEQ ID NO: 304900 - RNA, 18 nt, Human herpesvirus 3
cagaaacaucaaccggaa

SEQ ID NO: 304901 - RNA, 19 nt, Human herpesvirus 3
cagaaacgccccuccuaaa

SEQ ID NO: 304902 - RNA, 22 nt, Human herpesvirus 3
cagaaacguuuuuaguuuuuau

SEQ ID NO: 304903 - RNA, 15 nt, Human herpesvirus 3
cagaaagauugcagu

SEQ ID NO: 304904 - RNA, 20 nt, Human herpesvirus 3
cagaacgaucacaacagaca

SEQ ID NO: 304905 - RNA, 21 nt, Human herpesvirus 3
cagaacgaucacaacagacaa

SEQ ID NO: 304906 - RNA, 14 nt, Human herpesvirus 3
cagacaccaugacg

SEQ ID NO: 304907 - RNA, 23 nt, Human herpesvirus 3
cagacaguggcggauaacugccu

SEQ ID NO: 304908 - RNA, 13 nt, Human herpesvirus 3
cagacaucccucg

SEQ ID NO: 304909 - RNA, 12 nt, Human herpesvirus 3
cagaguacaggg

SEQ ID NO: 304910 - RNA, 16 nt, Human herpesvirus 3
cagagucuucugucaa

SEQ ID NO: 304911 - RNA, 19 nt, Human herpesvirus 3
cagauauuuugcagccaug

SEQ ID NO: 304912 - RNA, 16 nt, Human herpesvirus 3
cagaugauaacagccu

SEQ ID NO: 304913 - RNA, 23 nt, Human herpesvirus 3
cagaugguuuaucucgacgucca

SEQ ID NO: 304914 - RNA, 17 nt, Human herpesvirus 3
cagauguacguguaugc

SEQ ID NO: 304915 - RNA, 21 nt, Human herpesvirus 3
cagcuuacaguccaguggaca

SEQ ID NO: 304916 - RNA, 17 nt, Human herpesvirus 3
caggagauacuauggua

SEQ ID NO: 304917 - RNA, 22 nt, Human herpesvirus 3
caggccggaguguccagauaua

SEQ ID NO: 304918 - RNA, 21 nt, Human herpesvirus 3
caggcgcguuuguuugucucg

SEQ ID NO: 304919 - RNA, 20 nt, Human herpesvirus 3
caggcuguacguaaccauau

SEQ ID NO: 304920 - RNA, 12 nt, Human herpesvirus 3
cagggcaauggg

SEQ ID NO: 304921 - RNA, 20 nt, Human herpesvirus 3
caggucaaaacgcugaccca

SEQ ID NO: 304922 - RNA, 17 nt, Human herpesvirus 3
cagguuuuacuuuucgu

SEQ ID NO: 304923 - RNA, 22 nt, Human herpesvirus 3
caguaaaaauguugucugccaa

SEQ ID NO: 304924 - RNA, 23 nt, Human herpesvirus 3
caguaaaaauguugucugccaaa

SEQ ID NO: 304925 - RNA, 13 nt, Human herpesvirus 3
caguaacuuaaca

SEQ ID NO: 304926 - RNA, 14 nt, Human herpesvirus 3
caguaacuuaacaa

SEQ ID NO: 304927 - RNA, 15 nt, Human herpesvirus 3
caguaacuuaacaaa

SEQ ID NO: 304928 - RNA, 18 nt, Human herpesvirus 3
caguaacuuaacaaacau

SEQ ID NO: 304929 - RNA, 16 nt, Human herpesvirus 3
caguacgcaugugcug

SEQ ID NO: 304930 - RNA, 19 nt, Human herpesvirus 3
caguagauguguugcgaau

SEQ ID NO: 304931 - RNA, 17 nt, Human herpesvirus 3
cagucauuuuuuuuaca

SEQ ID NO: 304932 - RNA, 22 nt, Human herpesvirus 3
caguccggacaauuaacacaga

SEQ ID NO: 304933 - RNA, 18 nt, Human herpesvirus 3
cagugcgcuucaagucuc

SEQ ID NO: 304934 - RNA, 16 nt, Human herpesvirus 3
cauaaaaaauaauucc

SEQ ID NO: 304935 - RNA, 22 nt, Human herpesvirus 3
cauaaacccuccggcaucucca

SEQ ID NO: 304936 - RNA, 23 nt, Human herpesvirus 3
cauaaauauuaccccgccauaaa

SEQ ID NO: 304937 - RNA, 18 nt, Human herpesvirus 3
cauaacaccagaaucucu

SEQ ID NO: 304938 - RNA, 18 nt, Human herpesvirus 3
cauaacagucuaacagua

SEQ ID NO: 304939 - RNA, 16 nt, Human herpesvirus 3
cauaagacguugcaua

SEQ ID NO: 304940 - RNA, 17 nt, Human herpesvirus 3
cauaaggaaaugcaaua

SEQ ID NO: 304941 - RNA, 18 nt, Human herpesvirus 3
cauaauaugauacauaaa

SEQ ID NO: 304942 - RNA, 14 nt, Human herpesvirus 3
cauaaugcaaauac

SEQ ID NO: 304943 - RNA, 16 nt, Human herpesvirus 3
cauacgccgacaugcc

SEQ ID NO: 304944 - RNA, 18 nt, Human herpesvirus 3
cauacgccgacaugccug

SEQ ID NO: 304945 - RNA, 14 nt, Human herpesvirus 3
cauaggguugcgau

SEQ ID NO: 304946 - RNA, 22 nt, Human herpesvirus 3
cauaggguugcgauaacugcga

SEQ ID NO: 304947 - RNA, 15 nt, Human herpesvirus 3
cauauauacccaucg

SEQ ID NO: 304948 - RNA, 17 nt, Human herpesvirus 3
cauauauggacauccau

SEQ ID NO: 304949 - RNA, 14 nt, Human herpesvirus 3
cauaugcauaucau

SEQ ID NO: 304950 - RNA, 18 nt, Human herpesvirus 3
cauaugcauaucauaaau

SEQ ID NO: 304951 - RNA, 19 nt, Human herpesvirus 3
cauauguuccacucuacau

SEQ ID NO: 304952 - RNA, 21 nt, Human herpesvirus 3
caucaaagucaaagucuucaa

SEQ ID NO: 304953 - RNA, 19 nt, Human herpesvirus 3
caucacaggggguauuuau

SEQ ID NO: 304954 - RNA, 17 nt, Human herpesvirus 3
caucaccgaacauggac

SEQ ID NO: 304955 - RNA, 24 nt, Human herpesvirus 3
cauccaaauuaacccaagacgaca

SEQ ID NO: 304956 - RNA, 21 nt, Human herpesvirus 3
cauccauccgauaauaccaaa

SEQ ID NO: 304957 - RNA, 17 nt, Human herpesvirus 3
cauccaugggccaaucc

SEQ ID NO: 304958 - RNA, 18 nt, Human herpesvirus 3
cauccgauaauaccaaac

SEQ ID NO: 304959 - RNA, 22 nt, Human herpesvirus 3
cauccgauaauaccaaacccca

SEQ ID NO: 304960 - RNA, 17 nt, Human herpesvirus 3
cauccguccaaacagug

SEQ ID NO: 304961 - RNA, 17 nt, Human herpesvirus 3
cauccugcucugcaaau

SEQ ID NO: 304962 - RNA, 14 nt, Human herpesvirus 3
cauccuggacacag

SEQ ID NO: 304963 - RNA, 17 nt, Human herpesvirus 3
caucgacguucaccaaa

SEQ ID NO: 304964 - RNA, 16 nt, Human herpesvirus 3
caucguggaccguguu

SEQ ID NO: 304965 - RNA, 14 nt, Human herpesvirus 3
caucuuacuugaga

SEQ ID NO: 304966 - RNA, 16 nt, Human herpesvirus 3
caucuuacuugagauu

SEQ ID NO: 304967 - RNA, 22 nt, Human herpesvirus 3
caucuuccacgggucaugcagg

SEQ ID NO: 304968 - RNA, 21 nt, Human herpesvirus 3
caugcgggcuugcuguucuca

SEQ ID NO: 304969 - RNA, 21 nt, Human herpesvirus 3
caugcguuuuuuauuuuuaca

SEQ ID NO: 304970 - RNA, 15 nt, Human herpesvirus 3
caugcucgacagguu

SEQ ID NO: 304971 - RNA, 17 nt, Human herpesvirus 3
caugcuuguaaaacaua

SEQ ID NO: 304972 - RNA, 21 nt, Human herpesvirus 3
caugcuuguaaaacauaucaa

SEQ ID NO: 304973 - RNA, 12 nt, Human herpesvirus 3
caugcuugucaa

SEQ ID NO: 304974 - RNA, 18 nt, Human herpesvirus 3
caugcuugucaaaacaua

SEQ ID NO: 304975 - RNA, 21 nt, Human herpesvirus 3
caugcuugucaaaacauacua

SEQ ID NO: 304976 - RNA, 16 nt, Human herpesvirus 3
cauggcuaugccauuu

SEQ ID NO: 304977 - RNA, 20 nt, Human herpesvirus 3
caugguugugggaaacauca

SEQ ID NO: 304978 - RNA, 23 nt, Human herpesvirus 3
cauguauaaaauucuaacaacuc

SEQ ID NO: 304979 - RNA, 19 nt, Human herpesvirus 3
cauguauaauaaaaaguca

SEQ ID NO: 304980 - RNA, 19 nt, Human herpesvirus 3
cauuaaaaguuuacgugua

SEQ ID NO: 304981 - RNA, 22 nt, Human herpesvirus 3
cauuaacaacgcguacgugccu

SEQ ID NO: 304982 - RNA, 22 nt, Human herpesvirus 3
cauuaacccacgggguccccac

SEQ ID NO: 304983 - RNA, 13 nt, Human herpesvirus 3
cauuaauaagucg

SEQ ID NO: 304984 - RNA, 14 nt, Human herpesvirus 3
cauuaaucgcugau

SEQ ID NO: 304985 - RNA, 14 nt, Human herpesvirus 3
cauuacuacauuga

SEQ ID NO: 304986 - RNA, 22 nt, Human herpesvirus 3
cauuagaguguuuaacaaccau

SEQ ID NO: 304987 - RNA, 16 nt, Human herpesvirus 3
cauuagcaaaauuggg

SEQ ID NO: 304988 - RNA, 15 nt, Human herpesvirus 3
cauuccaacuggaaa

SEQ ID NO: 304989 - RNA, 22 nt, Human herpesvirus 3
cauuccaacuggaaaugugcug

SEQ ID NO: 304990 - RNA, 18 nt, Human herpesvirus 3
cauugaacaagagugcau

SEQ ID NO: 304991 - RNA, 15 nt, Human herpesvirus 3
cauugaagaugauua

SEQ ID NO: 304992 - RNA, 17 nt, Human herpesvirus 3
cauugaagaugauuauc

SEQ ID NO: 304993 - RNA, 19 nt, Human herpesvirus 3
cauugccguauuaaccuac

SEQ ID NO: 304994 - RNA, 13 nt, Human herpesvirus 3
cauugcuucaaug

SEQ ID NO: 304995 - RNA, 17 nt, Human herpesvirus 3
cauuguugguucuacug

SEQ ID NO: 304996 - RNA, 16 nt, Human herpesvirus 3
cauuuaaaaauccauu

SEQ ID NO: 304997 - RNA, 12 nt, Human herpesvirus 3
cauuuaacaauc

SEQ ID NO: 304998 - RNA, 20 nt, Human herpesvirus 3
cauuucaauaaauguacuau

SEQ ID NO: 304999 - RNA, 16 nt, Human herpesvirus 3
cauuugauacguuguu

SEQ ID NO: 305000 - RNA, 23 nt, Human herpesvirus 3
cauuugugccgcaagcauauaca

SEQ ID NO: 305001 - RNA, 14 nt, Human herpesvirus 3
cauuuuacaguaaa

SEQ ID NO: 305002 - RNA, 18 nt, Human herpesvirus 3
cauuuuccccuuuagcua

SEQ ID NO: 305003 - RNA, 17 nt, Human herpesvirus 3
ccaaaaacacaguugau

SEQ ID NO: 305004 - RNA, 22 nt, Human herpesvirus 3
ccaaaaagaauuaaaaaagccg

SEQ ID NO: 305005 - RNA, 17 nt, Human herpesvirus 3
ccaaaauggaugcaaga

SEQ ID NO: 305006 - RNA, 19 nt, Human herpesvirus 3
ccaacgcuuugaucuucaa

SEQ ID NO: 305007 - RNA, 18 nt, Human herpesvirus 3
ccaacugauuacauuuca

SEQ ID NO: 305008 - RNA, 19 nt, Human herpesvirus 3
ccaacugauuacauuucau

SEQ ID NO: 305009 - RNA, 18 nt, Human herpesvirus 3
ccaacuguuuacauagau

SEQ ID NO: 305010 - RNA, 17 nt, Human herpesvirus 3
ccaagcuauggacgcaa

SEQ ID NO: 305011 - RNA, 16 nt, Human herpesvirus 3
ccaaggauagauauca

SEQ ID NO: 305012 - RNA, 18 nt, Human herpesvirus 3
ccaauaaacggcauagac

SEQ ID NO: 305013 - RNA, 12 nt, Human herpesvirus 3
ccaauagaaacu

SEQ ID NO: 305014 - RNA, 11 nt, Human herpesvirus 3
ccacaaccaag

SEQ ID NO: 305015 - RNA, 16 nt, Human herpesvirus 3
ccacauacaacaugau

SEQ ID NO: 305016 - RNA, 21 nt, Human herpesvirus 3
ccacauuuuccccuuuagcua

SEQ ID NO: 305017 - RNA, 16 nt, Human herpesvirus 3
ccaccaucaucugauu

SEQ ID NO: 305018 - RNA, 15 nt, Human herpesvirus 3
ccaccucggccgcuu

SEQ ID NO: 305019 - RNA, 14 nt, Human herpesvirus 3
ccacgacagcagua

SEQ ID NO: 305020 - RNA, 22 nt, Human herpesvirus 3
ccacgacagcaguaagggugag

SEQ ID NO: 305021 - RNA, 21 nt, Human herpesvirus 3
augaggguggcagaagguuua

SEQ ID NO: 305022 - RNA, 13 nt, Human herpesvirus 3
augauaacagccu

SEQ ID NO: 305023 - RNA, 14 nt, Human herpesvirus 3
augaucccaauaaa

SEQ ID NO: 305024 - RNA, 19 nt, Human herpesvirus 3
augauguaaccuacacaac

SEQ ID NO: 305025 - RNA, 17 nt, Human herpesvirus 3
augauuaucaauacuug

SEQ ID NO: 305026 - RNA, 13 nt, Human herpesvirus 3
augccacauuuac

SEQ ID NO: 305027 - RNA, 17 nt, Human herpesvirus 3
augccagaagcauuuac

SEQ ID NO: 305028 - RNA, 18 nt, Human herpesvirus 3
augccagaagcauuuaca

SEQ ID NO: 305029 - RNA, 13 nt, Human herpesvirus 3
augccauuugaga

SEQ ID NO: 305030 - RNA, 21 nt, Human herpesvirus 3
augccauuuggacacuacuca

SEQ ID NO: 305031 - RNA, 16 nt, Human herpesvirus 3
augcgcaaaauguuaa

SEQ ID NO: 305032 - RNA, 21 nt, Human herpesvirus 3
augcguuuuuuauuuuuacaa

SEQ ID NO: 305033 - RNA, 14 nt, Human herpesvirus 3
augcuguuuuuacc

SEQ ID NO: 305034 - RNA, 17 nt, Human herpesvirus 3
augcuuguaaaacauau

SEQ ID NO: 305035 - RNA, 21 nt, Human herpesvirus 3
auggaauuacaacgcauauuu

SEQ ID NO: 305036 - RNA, 15 nt, Human herpesvirus 3
auggacuugaaaaau

SEQ ID NO: 305037 - RNA, 21 nt, Human herpesvirus 3
auggaucagaaagauugcagu

SEQ ID NO: 305038 - RNA, 18 nt, Human herpesvirus 3
auggccaacauccgugaa

SEQ ID NO: 305039 - RNA, 23 nt, Human herpesvirus 3
auggccucugcuucaauuccaac

SEQ ID NO: 305040 - RNA, 13 nt, Human herpesvirus 3
auggcuugucguc

SEQ ID NO: 305041 - RNA, 20 nt, Human herpesvirus 3
augggguuaggcggguucuu

SEQ ID NO: 305042 - RNA, 15 nt, Human herpesvirus 3
augguaguuaccaaa

SEQ ID NO: 305043 - RNA, 22 nt, Human herpesvirus 3
augguguuuggugcacucuacc

SEQ ID NO: 305044 - RNA, 22 nt, Human herpesvirus 3
augguuaauaauagugacaaac

SEQ ID NO: 305045 - RNA, 18 nt, Human herpesvirus 3
augguugguuacugugaa

SEQ ID NO: 305046 - RNA, 14 nt, Human herpesvirus 3
auguaaccuacaca

SEQ ID NO: 305047 - RNA, 12 nt, Human herpesvirus 3
auguacguguau

SEQ ID NO: 305048 - RNA, 17 nt, Human herpesvirus 3
auguagcaucggauauu

SEQ ID NO: 305049 - RNA, 18 nt, Human herpesvirus 3
auguggagcguacugcag

SEQ ID NO: 305050 - RNA, 17 nt, Human herpesvirus 3
auguguaguucauaguc

SEQ ID NO: 305051 - RNA, 19 nt, Human herpesvirus 3
auguguauuauaugucaca

SEQ ID NO: 305052 - RNA, 19 nt, Human herpesvirus 3
auguugaacgguaccccaa

SEQ ID NO: 305053 - RNA, 23 nt, Human herpesvirus 3
auuaaacgugcauuuuaaaaaua

SEQ ID NO: 305054 - RNA, 15 nt, Human herpesvirus 3
auuaaauaaacuaua

SEQ ID NO: 305055 - RNA, 19 nt, Human herpesvirus 3
auuaacaggauuugcuuau

SEQ ID NO: 305056 - RNA, 20 nt, Human herpesvirus 3
auuaacaggauuugcuuaua

SEQ ID NO: 305057 - RNA, 23 nt, Human herpesvirus 3
auuaacaggauuugcuuauacuu

SEQ ID NO: 305058 - RNA, 21 nt, Human herpesvirus 3
auuaagaaucuccuaacuaua

SEQ ID NO: 305059 - RNA, 21 nt, Human herpesvirus 3
auuaaugcaacccugucauca

SEQ ID NO: 305060 - RNA, 15 nt, Human herpesvirus 3
auuacauauucuguu

SEQ ID NO: 305061 - RNA, 17 nt, Human herpesvirus 3
auuacgcguugugauau

SEQ ID NO: 305062 - RNA, 17 nt, Human herpesvirus 3
auuacuaaagcuauuaa

SEQ ID NO: 305063 - RNA, 16 nt, Human herpesvirus 3
auuacuacauugaaca

SEQ ID NO: 305064 - RNA, 15 nt, Human herpesvirus 3
auuagaacguuuauc

SEQ ID NO: 305065 - RNA, 20 nt, Human herpesvirus 3
auuagcacuaucgucucaaa

SEQ ID NO: 305066 - RNA, 14 nt, Human herpesvirus 3
auuauaacugcuac

SEQ ID NO: 305067 - RNA, 11 nt, Human herpesvirus 3
auuauauccau

SEQ ID NO: 305068 - RNA, 23 nt, Human herpesvirus 3
auuauuaccgguaccaugggaga

SEQ ID NO: 305069 - RNA, 16 nt, Human herpesvirus 3
auuauuuucuguguau

SEQ ID NO: 305070 - RNA, 16 nt, Human herpesvirus 3
auucaaaggacauuua

SEQ ID NO: 305071 - RNA, 12 nt, Human herpesvirus 3
auucaacuaaug

SEQ ID NO: 305072 - RNA, 19 nt, Human herpesvirus 3
auuccaaccgacccagacg

SEQ ID NO: 305073 - RNA, 23 nt, Human herpesvirus 3
auuccgagggucgccuguaauau

SEQ ID NO: 305074 - RNA, 22 nt, Human herpesvirus 3
auuccgcccgaaucaaccacac

SEQ ID NO: 305075 - RNA, 15 nt, Human herpesvirus 3
auuccgguugugcca

SEQ ID NO: 305076 - RNA, 18 nt, Human herpesvirus 3
auucgacgcaaaaauuca

SEQ ID NO: 305077 - RNA, 17 nt, Human herpesvirus 3
auucgcaacacaucuac

SEQ ID NO: 305078 - RNA, 19 nt, Human herpesvirus 3
auucggcgcggaugcauuu

SEQ ID NO: 305079 - RNA, 14 nt, Human herpesvirus 3
auucuacagauuua

SEQ ID NO: 305080 - RNA, 22 nt, Human herpesvirus 3
auucuauauuaauaaaagacua

SEQ ID NO: 305081 - RNA, 15 nt, Human herpesvirus 3
auucucccaaaacau

SEQ ID NO: 305082 - RNA, 17 nt, Human herpesvirus 3
auucuuagaaaagccag

SEQ ID NO: 305083 - RNA, 15 nt, Human herpesvirus 3
auugagaaaaccaaa

SEQ ID NO: 305084 - RNA, 20 nt, Human herpesvirus 3
auugcagcguacaaguuuaa

SEQ ID NO: 305085 - RNA, 13 nt, Human herpesvirus 3
auuggauuugaaa

SEQ ID NO: 305086 - RNA, 17 nt, Human herpesvirus 3
auuggcaucuuacuuga

SEQ ID NO: 305087 - RNA, 14 nt, Human herpesvirus 3
auugguauacacac

SEQ ID NO: 305088 - RNA, 15 nt, Human herpesvirus 3
auuggucaagaucca

SEQ ID NO: 305089 - RNA, 16 nt, Human herpesvirus 3
auuguagaacuaacuc

SEQ ID NO: 305090 - RNA, 22 nt, Human herpesvirus 3
auuguagcgcaaguaacagcga

SEQ ID NO: 305091 - RNA, 15 nt, Human herpesvirus 3
auuguaguacagggc

SEQ ID NO: 305092 - RNA, 20 nt, Human herpesvirus 3
auuguauuguaguacagggc

SEQ ID NO: 305093 - RNA, 14 nt, Human herpesvirus 3
auugucccgugugu

SEQ ID NO: 305094 - RNA, 17 nt, Human herpesvirus 3
auuguguuuauaacgua

SEQ ID NO: 305095 - RNA, 14 nt, Human herpesvirus 3
auuuaaaacauaca

SEQ ID NO: 305096 - RNA, 14 nt, Human herpesvirus 3
auuuaaacuaaaga

SEQ ID NO: 305097 - RNA, 19 nt, Human herpesvirus 3
auuuacaaugacagugaua

SEQ ID NO: 305098 - RNA, 13 nt, Human herpesvirus 3
auuuacaccgugg

SEQ ID NO: 305099 - RNA, 14 nt, Human herpesvirus 3
auuuauaaaacacu

SEQ ID NO: 305100 - RNA, 15 nt, Human herpesvirus 3
auuuauaaaacacuc

SEQ ID NO: 305101 - RNA, 16 nt, Human herpesvirus 3
auuuauaaaacacuca

SEQ ID NO: 305102 - RNA, 21 nt, Human herpesvirus 3
auuuaucccaacugauuacau

SEQ ID NO: 305103 - RNA, 23 nt, Human herpesvirus 3
auuuaucggcguccucuguuaca

SEQ ID NO: 305104 - RNA, 21 nt, Human herpesvirus 3
auuucaugcuuguaaaacaua

SEQ ID NO: 305105 - RNA, 17 nt, Human herpesvirus 3
auuuccaaacacauuac

SEQ ID NO: 305106 - RNA, 17 nt, Human herpesvirus 3
auuuccacuuacaggac

SEQ ID NO: 305107 - RNA, 23 nt, Human herpesvirus 3
auuucuacaccuuugcaugacaa

SEQ ID NO: 305108 - RNA, 19 nt, Human herpesvirus 3
auuugacggugcccuggga

SEQ ID NO: 305109 - RNA, 18 nt, Human herpesvirus 3
auuugccccaaaccacug

SEQ ID NO: 305110 - RNA, 22 nt, Human herpesvirus 3
auuugcgaugccguuuaugucc

SEQ ID NO: 305111 - RNA, 15 nt, Human herpesvirus 3
auuugcuaccagacg

SEQ ID NO: 305112 - RNA, 15 nt, Human herpesvirus 3
auuuuaaaaauaccu

SEQ ID NO: 305113 - RNA, 22 nt, Human herpesvirus 3
auuuuaagguauggaguucgga

SEQ ID NO: 305114 - RNA, 15 nt, Human herpesvirus 3
auuuuacagaaaaua

SEQ ID NO: 305115 - RNA, 13 nt, Human herpesvirus 3
auuuuacauacaa

SEQ ID NO: 305116 - RNA, 11 nt, Human herpesvirus 3
auuuuacuuaa

SEQ ID NO: 305117 - RNA, 22 nt, Human herpesvirus 3
auuuuacuuaauguacccacaa

SEQ ID NO: 305118 - RNA, 22 nt, Human herpesvirus 3
auuuugcgcgauauucucccaa

SEQ ID NO: 305119 - RNA, 17 nt, Human herpesvirus 3
auuuugcucguauauac

SEQ ID NO: 305120 - RNA, 22 nt, Human herpesvirus 3
auuuugcucguauauacauguu

SEQ ID NO: 305121 - RNA, 22 nt, Human herpesvirus 3
auuuuuaauacgguucaugaca

SEQ ID NO: 305122 - RNA, 20 nt, Human herpesvirus 3
auuuuuaaucauuaagcaua

SEQ ID NO: 305123 - RNA, 24 nt, Human herpesvirus 3
auuuuuaaucauuaagcauauuua

SEQ ID NO: 305124 - RNA, 22 nt, Human herpesvirus 3
caaaaaaaaaaaaaccaaacac

SEQ ID NO: 305125 - RNA, 19 nt, Human herpesvirus 3
caaaaaagcguguaaauca

SEQ ID NO: 305126 - RNA, 23 nt, Human herpesvirus 3
caaaaauucaucugccguuucau

SEQ ID NO: 305127 - RNA, 20 nt, Human herpesvirus 3
caaaacauaagacguugcau

SEQ ID NO: 305128 - RNA, 21 nt, Human herpesvirus 3
caaaacggcuguaggucaaca

SEQ ID NO: 305129 - RNA, 20 nt, Human herpesvirus 3
caaaauggaucagaaagauu

SEQ ID NO: 305130 - RNA, 12 nt, Human herpesvirus 3
caaaauggaugc

SEQ ID NO: 305131 - RNA, 16 nt, Human herpesvirus 3
caaaauggaugcaaga

SEQ ID NO: 305132 - RNA, 13 nt, Human herpesvirus 3
caaacaaagccug

SEQ ID NO: 305133 - RNA, 13 nt, Human herpesvirus 3
caaacacauuacg

SEQ ID NO: 305134 - RNA, 22 nt, Human herpesvirus 3
caaacacgcaauugucagauau

SEQ ID NO: 305135 - RNA, 18 nt, Human herpesvirus 3
caaacacucuacgcauuu

SEQ ID NO: 305136 - RNA, 23 nt, Human herpesvirus 3
caaacagcaccaauaugccauca

SEQ ID NO: 305137 - RNA, 18 nt, Human herpesvirus 3
uaaauuuaaaacauacac

SEQ ID NO: 305138 - RNA, 16 nt, Human herpesvirus 3
uaacaacucucuuaua

SEQ ID NO: 305139 - RNA, 15 nt, Human herpesvirus 3
uaacaccuguuuaca

SEQ ID NO: 305140 - RNA, 16 nt, Human herpesvirus 3
uaacagcgacuauguu

SEQ ID NO: 305141 - RNA, 17 nt, Human herpesvirus 3
uaacagucuaacaguac

SEQ ID NO: 305142 - RNA, 14 nt, Human herpesvirus 3
uaacauaaccaaua

SEQ ID NO: 305143 - RNA, 18 nt, Human herpesvirus 3
uaacauaccccaggccuu

SEQ ID NO: 305144 - RNA, 20 nt, Human herpesvirus 3
uaacaucccagcggggauca

SEQ ID NO: 305145 - RNA, 18 nt, Human herpesvirus 3
uaacaugcgcuacuaugu

SEQ ID NO: 305146 - RNA, 22 nt, Human herpesvirus 3
uaacauuaacgcgcuacaacaa

SEQ ID NO: 305147 - RNA, 19 nt, Human herpesvirus 3
uaacauuuaucccaacuga

SEQ ID NO: 305148 - RNA, 15 nt, Human herpesvirus 3
uaacauuuugcgcau

SEQ ID NO: 305149 - RNA, 18 nt, Human herpesvirus 3
uaaccauagacuguucua

SEQ ID NO: 305150 - RNA, 18 nt, Human herpesvirus 3
uaaccaucuagaugacac

SEQ ID NO: 305151 - RNA, 19 nt, Human herpesvirus 3
uaacccaagacgacauuaa

SEQ ID NO: 305152 - RNA, 19 nt, Human herpesvirus 3
uaacccccgaggcaguuca

SEQ ID NO: 305153 - RNA, 13 nt, Human herpesvirus 3
uaaccgauuuacc

SEQ ID NO: 305154 - RNA, 23 nt, Human herpesvirus 3
uaaccggcgaacuucaguacuua

SEQ ID NO: 305155 - RNA, 22 nt, Human herpesvirus 3
uaaccggguggguggcauuaaa

SEQ ID NO: 305156 - RNA, 16 nt, Human herpesvirus 3
uaaccuguccauuugc

SEQ ID NO: 305157 - RNA, 20 nt, Human herpesvirus 3
uaacggaagaugaacuaaua

SEQ ID NO: 305158 - RNA, 16 nt, Human herpesvirus 3
uaacguugaacaccau

SEQ ID NO: 305159 - RNA, 13 nt, Human herpesvirus 3
uaacucagcugug

SEQ ID NO: 305160 - RNA, 13 nt, Human herpesvirus 3
uaacuuaacaaac

SEQ ID NO: 305161 - RNA, 17 nt, Human herpesvirus 3
uaacuuaacaaacauau

SEQ ID NO: 305162 - RNA, 17 nt, Human herpesvirus 3
uaacuugggucagacag

SEQ ID NO: 305163 - RNA, 14 nt, Human herpesvirus 3
uaacuuuacuguua

SEQ ID NO: 305164 - RNA, 16 nt, Human herpesvirus 3
uaagacguugcauaug

SEQ ID NO: 305165 - RNA, 20 nt, Human herpesvirus 3
uaagaggauaggugucuuca

SEQ ID NO: 305166 - RNA, 16 nt, Human herpesvirus 3
uaagauguacuguguc

SEQ ID NO: 305167 - RNA, 17 nt, Human herpesvirus 3
uaagccucuguacaaca

SEQ ID NO: 305168 - RNA, 17 nt, Human herpesvirus 3
uaagggagucuacaaua

SEQ ID NO: 305169 - RNA, 14 nt, Human herpesvirus 3
uaagugacuauauu

SEQ ID NO: 305170 - RNA, 14 nt, Human herpesvirus 3
uaaguggggguuua

SEQ ID NO: 305171 - RNA, 19 nt, Human herpesvirus 3
uaauaaauaaacguauaaa

SEQ ID NO: 305172 - RNA, 17 nt, Human herpesvirus 3
uaauaauuauauccaua

SEQ ID NO: 305173 - RNA, 12 nt, Human herpesvirus 3
uaauagucaaug

SEQ ID NO: 305174 - RNA, 20 nt, Human herpesvirus 3
uaauauaaauaacauaacca

SEQ ID NO: 305175 - RNA, 19 nt, Human herpesvirus 3
uaauauauggcgccaucca

SEQ ID NO: 305176 - RNA, 19 nt, Human herpesvirus 3
uaauauuaacaggauuugc

SEQ ID NO: 305177 - RNA, 20 nt, Human herpesvirus 3
uaaucaguugcuaccaaaca

SEQ ID NO: 305178 - RNA, 15 nt, Human herpesvirus 3
uaaucauuaagcaua

SEQ ID NO: 305179 - RNA, 13 nt, Human herpesvirus 3
uaauccaauguuu

SEQ ID NO: 305180 - RNA, 18 nt, Human herpesvirus 3
uaauccacgguauuccaa

SEQ ID NO: 305181 - RNA, 15 nt, Human herpesvirus 3
uaaucccgccuuuau

SEQ ID NO: 305182 - RNA, 15 nt, Human herpesvirus 3
uaaucuccagugcca

SEQ ID NO: 305183 - RNA, 19 nt, Human herpesvirus 3
uaaugcaacccugucauca

SEQ ID NO: 305184 - RNA, 14 nt, Human herpesvirus 3
uaauuauauccaua

SEQ ID NO: 305185 - RNA, 16 nt, Human herpesvirus 3
uaauuccgccuauagc

SEQ ID NO: 305186 - RNA, 17 nt, Human herpesvirus 3
uaauuccgguugugcca

SEQ ID NO: 305187 - RNA, 23 nt, Human herpesvirus 3
uaauucggcgcggaugcauuuau

SEQ ID NO: 305188 - RNA, 22 nt, Human herpesvirus 3
uaauucgugugcaauaaccuca

SEQ ID NO: 305189 - RNA, 19 nt, Human herpesvirus 3
uaauuugccccaaaccacu

SEQ ID NO: 305190 - RNA, 20 nt, Human herpesvirus 3
uaauuugccccaaaccacug

SEQ ID NO: 305191 - RNA, 19 nt, Human herpesvirus 3
uaauuuugucgggacacaa

SEQ ID NO: 305192 - RNA, 13 nt, Human herpesvirus 3
uacaaaaauuuga

SEQ ID NO: 305193 - RNA, 20 nt, Human herpesvirus 3
uacaaacuuguguguaccau

SEQ ID NO: 305194 - RNA, 16 nt, Human herpesvirus 3
uacaaauuucugaugu

SEQ ID NO: 305195 - RNA, 23 nt, Human herpesvirus 3
uacaacaaccgucgucuaucgca

SEQ ID NO: 305196 - RNA, 22 nt, Human herpesvirus 3
uacaacauuggcggaagauaca

SEQ ID NO: 305197 - RNA, 16 nt, Human herpesvirus 3
uacaauacguaaaugu

SEQ ID NO: 305198 - RNA, 23 nt, Human herpesvirus 3
uacacccgguaugccacauuuac

SEQ ID NO: 305199 - RNA, 16 nt, Human herpesvirus 3
uacaccuuugcaugac

SEQ ID NO: 305200 - RNA, 19 nt, Human herpesvirus 3
uacagacauacacugguaa

SEQ ID NO: 305201 - RNA, 16 nt, Human herpesvirus 3
uacagcugccgggaaa

SEQ ID NO: 305202 - RNA, 15 nt, Human herpesvirus 3
uacaggcaacugcaa

SEQ ID NO: 305203 - RNA, 23 nt, Human herpesvirus 3
uacaggccggaguguccagauau

SEQ ID NO: 305204 - RNA, 23 nt, Human herpesvirus 3
uacaguaaacguccgauguucca

SEQ ID NO: 305205 - RNA, 17 nt, Human herpesvirus 3
uacauaaccgauuuacc

SEQ ID NO: 305206 - RNA, 21 nt, Human herpesvirus 3
uacauauguuccacucuacau

SEQ ID NO: 305207 - RNA, 12 nt, Human herpesvirus 3
uacaucuuucag

SEQ ID NO: 305208 - RNA, 14 nt, Human herpesvirus 3
uacauugaacaaga

SEQ ID NO: 305209 - RNA, 15 nt, Human herpesvirus 3
uacauugcuuucaaa

SEQ ID NO: 305210 - RNA, 19 nt, Human herpesvirus 3
uacauugcuuucaaaccaa

SEQ ID NO: 305211 - RNA, 21 nt, Human herpesvirus 3
uacauugcuuucaaaccaaua

SEQ ID NO: 305212 - RNA, 12 nt, Human herpesvirus 3
uaccaacuguau

SEQ ID NO: 305213 - RNA, 15 nt, Human herpesvirus 3
uaccaacuguaugua

SEQ ID NO: 305214 - RNA, 23 nt, Human herpesvirus 3
uaccaacuguauguaaauuauga

SEQ ID NO: 305215 - RNA, 19 nt, Human herpesvirus 3
uaccacggcgauuauaugu

SEQ ID NO: 305216 - RNA, 18 nt, Human herpesvirus 3
uaccacuaagaacuuuau

SEQ ID NO: 305217 - RNA, 23 nt, Human herpesvirus 3
uacccgaaagcccgaucccgccg

SEQ ID NO: 305218 - RNA, 20 nt, Human herpesvirus 3
uaccggaucaugaacaaaca

SEQ ID NO: 305219 - RNA, 11 nt, Human herpesvirus 3
uaccggugaag

SEQ ID NO: 305220 - RNA, 15 nt, Human herpesvirus 3
uaccuauuucaugcu

SEQ ID NO: 305221 - RNA, 14 nt, Human herpesvirus 3
uaccucugucaggu

SEQ ID NO: 305222 - RNA, 15 nt, Human herpesvirus 3
uaccuuuuucaugcu

SEQ ID NO: 305223 - RNA, 21 nt, Human herpesvirus 3
uacgcuuuuauccgguguaug

SEQ ID NO: 305224 - RNA, 17 nt, Human herpesvirus 3
uacguguaugcuguuau

SEQ ID NO: 305225 - RNA, 21 nt, Human herpesvirus 3
uacuaagccucuguacaacac

SEQ ID NO: 305226 - RNA, 14 nt, Human herpesvirus 3
uacuacaacggaau

SEQ ID NO: 305227 - RNA, 20 nt, Human herpesvirus 3
uacuacauggaguguguuac

SEQ ID NO: 305228 - RNA, 16 nt, Human herpesvirus 3
uacuacuaauauugcc

SEQ ID NO: 305229 - RNA, 13 nt, Human herpesvirus 3
uacuauuugugaa

SEQ ID NO: 305230 - RNA, 22 nt, Human herpesvirus 3
uacuggggaggggcaggcugua

SEQ ID NO: 305231 - RNA, 16 nt, Human herpesvirus 3
uacuuagcggacaugc

SEQ ID NO: 305232 - RNA, 20 nt, Human herpesvirus 3
uacuuggagaugcaaccaag

SEQ ID NO: 305233 - RNA, 17 nt, Human herpesvirus 3
uagaaagcgauuuuauc

SEQ ID NO: 305234 - RNA, 13 nt, Human herpesvirus 3
uagaacguuuauc

SEQ ID NO: 305235 - RNA, 16 nt, Human herpesvirus 3
uagacuguucuacuga

SEQ ID NO: 305236 - RNA, 22 nt, Human herpesvirus 3
uagacuguuuuucugcucaugg

SEQ ID NO: 305237 - RNA, 12 nt, Human herpesvirus 3
uagauaccuaag

SEQ ID NO: 305238 - RNA, 17 nt, Human herpesvirus 3
uagcaauucccaguaaa

SEQ ID NO: 305239 - RNA, 15 nt, Human herpesvirus 3
uagccacacccacaa

SEQ ID NO: 305240 - RNA, 18 nt, Human herpesvirus 3
uagccacacccacaaagg

SEQ ID NO: 305241 - RNA, 15 nt, Human herpesvirus 3
uagccgccagaugua

SEQ ID NO: 305242 - RNA, 21 nt, Human herpesvirus 3
uagccgucagaagguucacua

SEQ ID NO: 305243 - RNA, 23 nt, Human herpesvirus 3
uagcuaccguuagaggcuuaauc

SEQ ID NO: 305244 - RNA, 19 nt, Human herpesvirus 3
uaggaacgcgacaugaccg

SEQ ID NO: 305245 - RNA, 18 nt, Human herpesvirus 3
uagguaagaagugcauau

SEQ ID NO: 305246 - RNA, 21 nt, Human herpesvirus 3
uagguaagaagugcauaucca

SEQ ID NO: 305247 - RNA, 22 nt, Human herpesvirus 3
uagguaagaagugcauauccag

SEQ ID NO: 305248 - RNA, 12 nt, Human herpesvirus 3
uagguagaugca

SEQ ID NO: 305249 - RNA, 14 nt, Human herpesvirus 3
uagguagaugcauc

SEQ ID NO: 305250 - RNA, 13 nt, Human herpesvirus 3
uagguuacauggg

SEQ ID NO: 305251 - RNA, 17 nt, Human herpesvirus 3
uaguaaaauaccauugu

SEQ ID NO: 305252 - RNA, 19 nt, Human herpesvirus 3
uagucaaauucaacuaaug

SEQ ID NO: 305253 - RNA, 20 nt, Human herpesvirus 3
uaguccuuacccauaugacc

SEQ ID NO: 305254 - RNA, 16 nt, Human herpesvirus 3
ccaguacguugcauaa

SEQ ID NO: 305255 - RNA, 13 nt, Human herpesvirus 3
ccauacagugacc

SEQ ID NO: 305256 - RNA, 19 nt, Human herpesvirus 3
ccauagaggugugugcaca

SEQ ID NO: 305257 - RNA, 18 nt, Human herpesvirus 3
ccaucagaucaucugaca

SEQ ID NO: 305258 - RNA, 22 nt, Human herpesvirus 3
ccaucaucugauuugcaaacau

SEQ ID NO: 305259 - RNA, 14 nt, Human herpesvirus 3
ccauguggguuggg

SEQ ID NO: 305260 - RNA, 15 nt, Human herpesvirus 3
ccauuacgcaucaca

SEQ ID NO: 305261 - RNA, 23 nt, Human herpesvirus 3
ccauuauuuuaauuacaucgcaa

SEQ ID NO: 305262 - RNA, 12 nt, Human herpesvirus 3
ccauuugagaua

SEQ ID NO: 305263 - RNA, 15 nt, Human herpesvirus 3
cccaaccugcaaggc

SEQ ID NO: 305264 - RNA, 14 nt, Human herpesvirus 3
cccaacgaguguau

SEQ ID NO: 305265 - RNA, 20 nt, Human herpesvirus 3
cccaacgaguguaugcguau

SEQ ID NO: 305266 - RNA, 18 nt, Human herpesvirus 3
cccaacugauuacauuuc

SEQ ID NO: 305267 - RNA, 19 nt, Human herpesvirus 3
cccaacuggcgucuacugu

SEQ ID NO: 305268 - RNA, 20 nt, Human herpesvirus 3
cccaaggauagauaucacac

SEQ ID NO: 305269 - RNA, 13 nt, Human herpesvirus 3
cccacacaaucag

SEQ ID NO: 305270 - RNA, 11 nt, Human herpesvirus 3
cccacauacaa

SEQ ID NO: 305271 - RNA, 11 nt, Human herpesvirus 3
cccacauguau

SEQ ID NO: 305272 - RNA, 23 nt, Human herpesvirus 3
cccacgauaaauggucuaaauac

SEQ ID NO: 305273 - RNA, 15 nt, Human herpesvirus 3
cccauuguaugaauu

SEQ ID NO: 305274 - RNA, 14 nt, Human herpesvirus 3
cccauuuugugauu

SEQ ID NO: 305275 - RNA, 19 nt, Human herpesvirus 3
cccauuuugugauuuuagc

SEQ ID NO: 305276 - RNA, 14 nt, Human herpesvirus 3
ccccaacgacguuu

SEQ ID NO: 305277 - RNA, 19 nt, Human herpesvirus 3
ccccaggccuugaaauaua

SEQ ID NO: 305278 - RNA, 20 nt, Human herpesvirus 3
ccccgacacgcggccuguau

SEQ ID NO: 305279 - RNA, 18 nt, Human herpesvirus 3
ccccguguuacuuggaaa

SEQ ID NO: 305280 - RNA, 20 nt, Human herpesvirus 3
cccgugguuagauaccuaag

SEQ ID NO: 305281 - RNA, 22 nt, Human herpesvirus 3
cccuguugcgguuguuguccag

SEQ ID NO: 305282 - RNA, 17 nt, Human herpesvirus 3
ccgaaucucguaaaggu

SEQ ID NO: 305283 - RNA, 19 nt, Human herpesvirus 3
ccgagaagggggauuuaca

SEQ ID NO: 305284 - RNA, 15 nt, Human herpesvirus 3
ccgauaauaccaaac

SEQ ID NO: 305285 - RNA, 23 nt, Human herpesvirus 3
ccgccaacaggcuccacaaucgu

SEQ ID NO: 305286 - RNA, 15 nt, Human herpesvirus 3
ccgccagauguacac

SEQ ID NO: 305287 - RNA, 16 nt, Human herpesvirus 3
ccgcccuaaauuacaa

SEQ ID NO: 305288 - RNA, 20 nt, Human herpesvirus 3
ccggcgaacgugauuugccc

SEQ ID NO: 305289 - RNA, 14 nt, Human herpesvirus 3
ccgggauaucucau

SEQ ID NO: 305290 - RNA, 20 nt, Human herpesvirus 3
ccgggaucguggccuuggga

SEQ ID NO: 305291 - RNA, 15 nt, Human herpesvirus 3
ccgguacacagcauu

SEQ ID NO: 305292 - RNA, 18 nt, Human herpesvirus 3
ccgguaugccacauuuac

SEQ ID NO: 305293 - RNA, 13 nt, Human herpesvirus 3
ccguacaacaaga

SEQ ID NO: 305294 - RNA, 20 nt, Human herpesvirus 3
ccguuauauuuuacauacaa

SEQ ID NO: 305295 - RNA, 23 nt, Human herpesvirus 3
ccguuuaauuguacccaucuuca

SEQ ID NO: 305296 - RNA, 17 nt, Human herpesvirus 3
ccguuuggaaacaacaa

SEQ ID NO: 305297 - RNA, 16 nt, Human herpesvirus 3
ccuauaaauucuacaa

SEQ ID NO: 305298 - RNA, 14 nt, Human herpesvirus 3
ccuauuucaugcuu

SEQ ID NO: 305299 - RNA, 17 nt, Human herpesvirus 3
ccuauuucaugcuugua

SEQ ID NO: 305300 - RNA, 16 nt, Human herpesvirus 3
ccucccccggcucaca

SEQ ID NO: 305301 - RNA, 14 nt, Human herpesvirus 3
ccucuaacaaugca

SEQ ID NO: 305302 - RNA, 18 nt, Human herpesvirus 3
ccucugcuucaauuccaa

SEQ ID NO: 305303 - RNA, 14 nt, Human herpesvirus 3
ccugaguguugcua

SEQ ID NO: 305304 - RNA, 17 nt, Human herpesvirus 3
ccugaguguugcuauug

SEQ ID NO: 305305 - RNA, 15 nt, Human herpesvirus 3
ccuggacacaguccg

SEQ ID NO: 305306 - RNA, 16 nt, Human herpesvirus 3
ccuggccccuugaacc

SEQ ID NO: 305307 - RNA, 13 nt, Human herpesvirus 3
ccuggcuuaacag

SEQ ID NO: 305308 - RNA, 20 nt, Human herpesvirus 3
ccuggcuuaacagugccagu

SEQ ID NO: 305309 - RNA, 15 nt, Human herpesvirus 3
ccuguaauauagugu

SEQ ID NO: 305310 - RNA, 13 nt, Human herpesvirus 3
ccugugucuuuaa

SEQ ID NO: 305311 - RNA, 15 nt, Human herpesvirus 3
ccuguugguggguga

SEQ ID NO: 305312 - RNA, 21 nt, Human herpesvirus 3
ccuuacccauaugaccuguaa

SEQ ID NO: 305313 - RNA, 18 nt, Human herpesvirus 3
ccuuugcgauguauacug

SEQ ID NO: 305314 - RNA, 12 nt, Human herpesvirus 3
ccuuuuacauga

SEQ ID NO: 305315 - RNA, 15 nt, Human herpesvirus 3
cgaaaucguccacug

SEQ ID NO: 305316 - RNA, 16 nt, Human herpesvirus 3
cgaacgugauuugccc

SEQ ID NO: 305317 - RNA, 16 nt, Human herpesvirus 3
cgaagagaacugugaa

SEQ ID NO: 305318 - RNA, 17 nt, Human herpesvirus 3
cgaagcugccgucaaug

SEQ ID NO: 305319 - RNA, 19 nt, Human herpesvirus 3
cgaauucuuagaaaagcca

SEQ ID NO: 305320 - RNA, 20 nt, Human herpesvirus 3
cgagagauccaauacaucaa

SEQ ID NO: 305321 - RNA, 15 nt, Human herpesvirus 3
cgaguuuguggggga

SEQ ID NO: 305322 - RNA, 20 nt, Human herpesvirus 3
cgauggggaucuuccaauau

SEQ ID NO: 305323 - RNA, 17 nt, Human herpesvirus 3
cgaugugauacaaugag

SEQ ID NO: 305324 - RNA, 14 nt, Human herpesvirus 3
cgauuagucuguaa

SEQ ID NO: 305325 - RNA, 17 nt, Human herpesvirus 3
cgcaacgcugcugacaa

SEQ ID NO: 305326 - RNA, 20 nt, Human herpesvirus 3
cgcauggccaagguuuugga

SEQ ID NO: 305327 - RNA, 13 nt, Human herpesvirus 3
cgccaaaauggau

SEQ ID NO: 305328 - RNA, 15 nt, Human herpesvirus 3
cgcccuaaauuacaa

SEQ ID NO: 305329 - RNA, 16 nt, Human herpesvirus 3
cgccuccacugcauuu

SEQ ID NO: 305330 - RNA, 21 nt, Human herpesvirus 3
cgccuuuaauuaccucuguca

SEQ ID NO: 305331 - RNA, 17 nt, Human herpesvirus 3
cgccuuuuaugaaugua

SEQ ID NO: 305332 - RNA, 22 nt, Human herpesvirus 3
cgcgacccugggauguuuuaca

SEQ ID NO: 305333 - RNA, 16 nt, Human herpesvirus 3
cgcgggucaauggagu

SEQ ID NO: 305334 - RNA, 13 nt, Human herpesvirus 3
cgcgucaaaaagc

SEQ ID NO: 305335 - RNA, 16 nt, Human herpesvirus 3
cgcuacccgaaagccc

SEQ ID NO: 305336 - RNA, 23 nt, Human herpesvirus 3
cgcuagaacgugcguuauacuug

SEQ ID NO: 305337 - RNA, 18 nt, Human herpesvirus 3
cgcuauuuucaguauuaa

SEQ ID NO: 305338 - RNA, 13 nt, Human herpesvirus 3
cgcugugugcaua

SEQ ID NO: 305339 - RNA, 16 nt, Human herpesvirus 3
cgcuucccgaaagccc

SEQ ID NO: 305340 - RNA, 17 nt, Human herpesvirus 3
cggaaauauaacauaca

SEQ ID NO: 305341 - RNA, 23 nt, Human herpesvirus 3
cggaagauacaggcaacugcaaa

SEQ ID NO: 305342 - RNA, 16 nt, Human herpesvirus 3
cggaagaugacuuuga

SEQ ID NO: 305343 - RNA, 15 nt, Human herpesvirus 3
cggaugcauaggguu

SEQ ID NO: 305344 - RNA, 14 nt, Human herpesvirus 3
cggcagaugaucug

SEQ ID NO: 305345 - RNA, 12 nt, Human herpesvirus 3
cggcaugcauug

SEQ ID NO: 305346 - RNA, 16 nt, Human herpesvirus 3
cggccuguauaugauc

SEQ ID NO: 305347 - RNA, 16 nt, Human herpesvirus 3
cggcgaagacaacgua

SEQ ID NO: 305348 - RNA, 16 nt, Human herpesvirus 3
cggcgcggaugcauuu

SEQ ID NO: 305349 - RNA, 14 nt, Human herpesvirus 3
cggcguccucuguu

SEQ ID NO: 305350 - RNA, 18 nt, Human herpesvirus 3
cggcguccucuguuacau

SEQ ID NO: 305351 - RNA, 21 nt, Human herpesvirus 3
cggcguccucuguuacauucu

SEQ ID NO: 305352 - RNA, 17 nt, Human herpesvirus 3
cggcuucuguaaggggg

SEQ ID NO: 305353 - RNA, 17 nt, Human herpesvirus 3
cgggaugcaaacccauc

SEQ ID NO: 305354 - RNA, 22 nt, Human herpesvirus 3
cgggcuguauugagaaaaccaa

SEQ ID NO: 305355 - RNA, 20 nt, Human herpesvirus 3
gacauaugucugcucuucua

SEQ ID NO: 305356 - RNA, 14 nt, Human herpesvirus 3
gacaucaaccagug

SEQ ID NO: 305357 - RNA, 17 nt, Human herpesvirus 3
gacaucgcugaugccag

SEQ ID NO: 305358 - RNA, 13 nt, Human herpesvirus 3
gacaugcacugca

SEQ ID NO: 305359 - RNA, 20 nt, Human herpesvirus 3
gaccaacgcuuugaucuuca

SEQ ID NO: 305360 - RNA, 17 nt, Human herpesvirus 3
gacccugcuaaccauag

SEQ ID NO: 305361 - RNA, 22 nt, Human herpesvirus 3
gacgaaccuucggaugacuuug

SEQ ID NO: 305362 - RNA, 17 nt, Human herpesvirus 3
gacgcgaacaccgcugu

SEQ ID NO: 305363 - RNA, 18 nt, Human herpesvirus 3
gacguuauacaagguguu

SEQ ID NO: 305364 - RNA, 16 nt, Human herpesvirus 3
gacguuuuuccacaau

SEQ ID NO: 305365 - RNA, 13 nt, Human herpesvirus 3
gacuaacauuuau

SEQ ID NO: 305366 - RNA, 12 nt, Human herpesvirus 3
gacuacaagcaa

SEQ ID NO: 305367 - RNA, 17 nt, Human herpesvirus 3
gacuccagcaucaucug

SEQ ID NO: 305368 - RNA, 16 nt, Human herpesvirus 3
gacuuccuauauacag

SEQ ID NO: 305369 - RNA, 16 nt, Human herpesvirus 3
gagaaagcggacacau

SEQ ID NO: 305370 - RNA, 16 nt, Human herpesvirus 3
gagaaauguacccaua

SEQ ID NO: 305371 - RNA, 18 nt, Human herpesvirus 3
gagaauuucuaugugcag

SEQ ID NO: 305372 - RNA, 21 nt, Human herpesvirus 3
gagacucugcgaugcauuaac

SEQ ID NO: 305373 - RNA, 22 nt, Human herpesvirus 3
gagacuugucauguuggacaaa

SEQ ID NO: 305374 - RNA, 19 nt, Human herpesvirus 3
gagcccacacaaucagaag

SEQ ID NO: 305375 - RNA, 17 nt, Human herpesvirus 3
gagcuccagaugcgauu

SEQ ID NO: 305376 - RNA, 15 nt, Human herpesvirus 3
gaggauaggugucuu

SEQ ID NO: 305377 - RNA, 19 nt, Human herpesvirus 3
gaggaugaggguggcagaa

SEQ ID NO: 305378 - RNA, 15 nt, Human herpesvirus 3
gaggccuacgaggcu

SEQ ID NO: 305379 - RNA, 19 nt, Human herpesvirus 3
gaggguggcagaagguuua

SEQ ID NO: 305380 - RNA, 18 nt, Human herpesvirus 3
gaguauauuaugcguuua

SEQ ID NO: 305381 - RNA, 20 nt, Human herpesvirus 3
gagugaaucuuaaaccugac

SEQ ID NO: 305382 - RNA, 22 nt, Human herpesvirus 3
gagugaucgauguaacaccaaa

SEQ ID NO: 305383 - RNA, 15 nt, Human herpesvirus 3
gaguguaugcguauu

SEQ ID NO: 305384 - RNA, 16 nt, Human herpesvirus 3
gaguguuuaacaacca

SEQ ID NO: 305385 - RNA, 22 nt, Human herpesvirus 3
gaguuaauuuugucgggacaca

SEQ ID NO: 305386 - RNA, 19 nt, Human herpesvirus 3
gaguuccgauguuggacaa

SEQ ID NO: 305387 - RNA, 18 nt, Human herpesvirus 3
gauaaauguuagucuuga

SEQ ID NO: 305388 - RNA, 13 nt, Human herpesvirus 3
gauacguggaauc

SEQ ID NO: 305389 - RNA, 21 nt, Human herpesvirus 3
gauacuacaucgugcuugaau

SEQ ID NO: 305390 - RNA, 22 nt, Human herpesvirus 3
gauagauaucacaccaauuaua

SEQ ID NO: 305391 - RNA, 20 nt, Human herpesvirus 3
gauagcauaaggaaaugcaa

SEQ ID NO: 305392 - RNA, 19 nt, Human herpesvirus 3
gauagcgccaaaauggaug

SEQ ID NO: 305393 - RNA, 18 nt, Human herpesvirus 3
gauauucaccauuacuac

SEQ ID NO: 305394 - RNA, 21 nt, Human herpesvirus 3
gauauuguauuguaguacagg

SEQ ID NO: 305395 - RNA, 19 nt, Human herpesvirus 3
gaucaccgggucuuaucua

SEQ ID NO: 305396 - RNA, 13 nt, Human herpesvirus 3
gaucacuccaaac

SEQ ID NO: 305397 - RNA, 18 nt, Human herpesvirus 3
gaucaugaacaaacacuc

SEQ ID NO: 305398 - RNA, 21 nt, Human herpesvirus 3
gaucauuuucuuaacauugua

SEQ ID NO: 305399 - RNA, 15 nt, Human herpesvirus 3
gauccggcaugcauu

SEQ ID NO: 305400 - RNA, 18 nt, Human herpesvirus 3
gaucggcgcucuguguuu

SEQ ID NO: 305401 - RNA, 16 nt, Human herpesvirus 3
gaugacacaacccgca

SEQ ID NO: 305402 - RNA, 11 nt, Human herpesvirus 3
gaugacuuuga

SEQ ID NO: 305403 - RNA, 18 nt, Human herpesvirus 3
gaugacuuugcauuggaa

SEQ ID NO: 305404 - RNA, 15 nt, Human herpesvirus 3
gaugaucccaauaaa

SEQ ID NO: 305405 - RNA, 21 nt, Human herpesvirus 3
gaugcaccgguccaacacucc

SEQ ID NO: 305406 - RNA, 21 nt, Human herpesvirus 3
gauggacuugaaaaaucauua

SEQ ID NO: 305407 - RNA, 16 nt, Human herpesvirus 3
gauguaaccuacacaa

SEQ ID NO: 305408 - RNA, 16 nt, Human herpesvirus 3
gauguauucuggugau

SEQ ID NO: 305409 - RNA, 23 nt, Human herpesvirus 3
gaugugauacaaugagcgguggu

SEQ ID NO: 305410 - RNA, 19 nt, Human herpesvirus 3
gaugugucggaaacccuca

SEQ ID NO: 305411 - RNA, 16 nt, Human herpesvirus 3
gauguuccaauggaug

SEQ ID NO: 305412 - RNA, 22 nt, Human herpesvirus 3
gauuaagaaucuccuaacuaua

SEQ ID NO: 305413 - RNA, 13 nt, Human herpesvirus 3
gauuacauuucau

SEQ ID NO: 305414 - RNA, 17 nt, Human herpesvirus 3
gauuacgcucaauacuu

SEQ ID NO: 305415 - RNA, 19 nt, Human herpesvirus 3
gauuagucuguaauggagg

SEQ ID NO: 305416 - RNA, 16 nt, Human herpesvirus 3
gauuauuuucugugua

SEQ ID NO: 305417 - RNA, 17 nt, Human herpesvirus 3
gauucaaaggacauuua

SEQ ID NO: 305418 - RNA, 22 nt, Human herpesvirus 3
gauucaagugagguguccugug

SEQ ID NO: 305419 - RNA, 21 nt, Human herpesvirus 3
gauucgcggcaguuauaacac

SEQ ID NO: 305420 - RNA, 21 nt, Human herpesvirus 3
gauucuccccccgcgauuuau

SEQ ID NO: 305421 - RNA, 20 nt, Human herpesvirus 3
gcaaauacaauaaacauaac

SEQ ID NO: 305422 - RNA, 16 nt, Human herpesvirus 3
gcaacacaucuacugu

SEQ ID NO: 305423 - RNA, 18 nt, Human herpesvirus 3
gcaacacaucuacugucu

SEQ ID NO: 305424 - RNA, 16 nt, Human herpesvirus 3
gcaacaugcauggaau

SEQ ID NO: 305425 - RNA, 22 nt, Human herpesvirus 3
gcaaccaucagaucaucugaca

SEQ ID NO: 305426 - RNA, 16 nt, Human herpesvirus 3
gcaaguuuaacauuuc

SEQ ID NO: 305427 - RNA, 23 nt, Human herpesvirus 3
gcaauauuacuuaaaacguugug

SEQ ID NO: 305428 - RNA, 13 nt, Human herpesvirus 3
gcaauucccagua

SEQ ID NO: 305429 - RNA, 17 nt, Human herpesvirus 3
gcaauuccgucucugau

SEQ ID NO: 305430 - RNA, 16 nt, Human herpesvirus 3
gcaauugcggcuuaca

SEQ ID NO: 305431 - RNA, 16 nt, Human herpesvirus 3
gcacaacaaaagcuau

SEQ ID NO: 305432 - RNA, 19 nt, Human herpesvirus 3
gcacaacaaaagcuauaua

SEQ ID NO: 305433 - RNA, 17 nt, Human herpesvirus 3
gcacaauccacagauuc

SEQ ID NO: 305434 - RNA, 19 nt, Human herpesvirus 3
gcacaucauccguccaaac

SEQ ID NO: 305435 - RNA, 13 nt, Human herpesvirus 3
gcacauuagcaaa

SEQ ID NO: 305436 - RNA, 16 nt, Human herpesvirus 3
gcaccaauaugccauc

SEQ ID NO: 305437 - RNA, 19 nt, Human herpesvirus 3
gcacugaaccacaaccaag

SEQ ID NO: 305438 - RNA, 15 nt, Human herpesvirus 3
gcagauacagcauau

SEQ ID NO: 305439 - RNA, 16 nt, Human herpesvirus 3
gcagauacagcauaua

SEQ ID NO: 305440 - RNA, 22 nt, Human herpesvirus 3
gcagaugaucugguaaauguua

SEQ ID NO: 305441 - RNA, 15 nt, Human herpesvirus 3
gcagguuuuacuuuu

SEQ ID NO: 305442 - RNA, 19 nt, Human herpesvirus 3
gcauaacguugcggugaua

SEQ ID NO: 305443 - RNA, 15 nt, Human herpesvirus 3
gcauaagauguacug

SEQ ID NO: 305444 - RNA, 16 nt, Human herpesvirus 3
gcauaagauguacugu

SEQ ID NO: 305445 - RNA, 11 nt, Human herpesvirus 3
gcaugccauug

SEQ ID NO: 305446 - RNA, 23 nt, Human herpesvirus 3
gcauuaacaacgcguacgugccu

SEQ ID NO: 305447 - RNA, 19 nt, Human herpesvirus 3
gcauuacccgauauuguau

SEQ ID NO: 305448 - RNA, 14 nt, Human herpesvirus 3
gcauuuccaaacac

SEQ ID NO: 305449 - RNA, 13 nt, Human herpesvirus 3
gcauuugaugaau

SEQ ID NO: 305450 - RNA, 12 nt, Human herpesvirus 3
gccacauuuacc

SEQ ID NO: 305451 - RNA, 14 nt, Human herpesvirus 3
gccaggcaagccaa

SEQ ID NO: 305452 - RNA, 14 nt, Human herpesvirus 3
gccauaaacagaga

SEQ ID NO: 305453 - RNA, 14 nt, Human herpesvirus 3
gccaugagcaucuc

SEQ ID NO: 305454 - RNA, 15 nt, Human herpesvirus 3
gccccaaaccacugu

SEQ ID NO: 305455 - RNA, 14 nt, Human herpesvirus 3
gcccguuguguuuu

SEQ ID NO: 305456 - RNA, 13 nt, Human herpesvirus 3
gcccuaaauuaca

SEQ ID NO: 305457 - RNA, 23 nt, Human herpesvirus 3
gcccucucgcggcccccucgaga

SEQ ID NO: 305458 - RNA, 13 nt, Human herpesvirus 3
gccgcaacaaccc

SEQ ID NO: 305459 - RNA, 16 nt, Human herpesvirus 3
gccgcgggcggugauc

SEQ ID NO: 305460 - RNA, 17 nt, Human herpesvirus 3
gccgcuucccgaaagcc

SEQ ID NO: 305461 - RNA, 13 nt, Human herpesvirus 3
gccgguacacagc

SEQ ID NO: 305462 - RNA, 15 nt, Human herpesvirus 3
gccuugggacaucaa

SEQ ID NO: 305463 - RNA, 15 nt, Human herpesvirus 3
gccuuuccgugacag

SEQ ID NO: 305464 - RNA, 18 nt, Human herpesvirus 3
gcgaacgugauuugccca

SEQ ID NO: 305465 - RNA, 18 nt, Human herpesvirus 3
gcgaagcugccgucaaug

SEQ ID NO: 305466 - RNA, 12 nt, Human herpesvirus 3
gcgcaugccauu

SEQ ID NO: 305467 - RNA, 13 nt, Human herpesvirus 3
gcgcaugccauug

SEQ ID NO: 305468 - RNA, 22 nt, Human herpesvirus 3
gcuuggggguuuacaaguacaa

SEQ ID NO: 305469 - RNA, 16 nt, Human herpesvirus 3
gcuuguaaaacauauc

SEQ ID NO: 305470 - RNA, 15 nt, Human herpesvirus 3
ggaaaaucuauuauc

SEQ ID NO: 305471 - RNA, 14 nt, Human herpesvirus 3
ggaaaguuguuggc

SEQ ID NO: 305472 - RNA, 22 nt, Human herpesvirus 3
ggaaaguuguuggcgcaugcca

SEQ ID NO: 305473 - RNA, 16 nt, Human herpesvirus 3
ggaagaugaacuaaua

SEQ ID NO: 305474 - RNA, 15 nt, Human herpesvirus 3
ggaaggaaaugccuu

SEQ ID NO: 305475 - RNA, 14 nt, Human herpesvirus 3
ggaaucgucuaaca

SEQ ID NO: 305476 - RNA, 16 nt, Human herpesvirus 3
ggaaucuacggauacg

SEQ ID NO: 305477 - RNA, 10 nt, Human herpesvirus 3
ggacaguagu

SEQ ID NO: 305478 - RNA, 11 nt, Human herpesvirus 3
ggacaguaguu

SEQ ID NO: 305479 - RNA, 23 nt, Human herpesvirus 3
ggacaguuaauaaaccuguggug

SEQ ID NO: 305480 - RNA, 15 nt, Human herpesvirus 3
ggacaguugguuuca

SEQ ID NO: 305481 - RNA, 14 nt, Human herpesvirus 3
ggacauaaacggca

SEQ ID NO: 305482 - RNA, 20 nt, Human herpesvirus 3
ggagggggaaggaaaugccu

SEQ ID NO: 305483 - RNA, 16 nt, Human herpesvirus 3
ggaggucuacagcacc

SEQ ID NO: 305484 - RNA, 13 nt, Human herpesvirus 3
ggagugggguguu

SEQ ID NO: 305485 - RNA, 18 nt, Human herpesvirus 3
ggaguucaaaagaauuuu

SEQ ID NO: 305486 - RNA, 19 nt, Human herpesvirus 3
ggaucauuccaacuggaaa

SEQ ID NO: 305487 - RNA, 17 nt, Human herpesvirus 3
ggauccggcaugcauug

SEQ ID NO: 305488 - RNA, 15 nt, Human herpesvirus 3
ggauucagaugguuu

SEQ ID NO: 305489 - RNA, 20 nt, Human herpesvirus 3
ggauuuuuaaauguugucaa

SEQ ID NO: 305490 - RNA, 18 nt, Human herpesvirus 3
ggcacgcugugugcauaa

SEQ ID NO: 305491 - RNA, 12 nt, Human herpesvirus 3
ggccgcuucccg

SEQ ID NO: 305492 - RNA, 21 nt, Human herpesvirus 3
ggccgcuucccgaaagcccga

SEQ ID NO: 305493 - RNA, 22 nt, Human herpesvirus 3
ggccgcuucccgaaagcccgau

SEQ ID NO: 305494 - RNA, 15 nt, Human herpesvirus 3
ggcgcggaugcauuu

SEQ ID NO: 305495 - RNA, 17 nt, Human herpesvirus 3
ggcgcugaagggugcau

SEQ ID NO: 305496 - RNA, 16 nt, Human herpesvirus 3
ggcguagguagaugca

SEQ ID NO: 305497 - RNA, 17 nt, Human herpesvirus 3
ggcguccucuguuacau

SEQ ID NO: 305498 - RNA, 16 nt, Human herpesvirus 3
ggcguuucguuuguau

SEQ ID NO: 305499 - RNA, 20 nt, Human herpesvirus 3
ggcuaacuguuugacaguuc

SEQ ID NO: 305500 - RNA, 12 nt, Human herpesvirus 3
ggcuaugccauu

SEQ ID NO: 305501 - RNA, 13 nt, Human herpesvirus 3
ggcuaugccauuu

SEQ ID NO: 305502 - RNA, 19 nt, Human herpesvirus 3
ggcuguauugagaaaacca

SEQ ID NO: 305503 - RNA, 21 nt, Human herpesvirus 3
ggcuuaaucgugccaauuauu

SEQ ID NO: 305504 - RNA, 23 nt, Human herpesvirus 3
ggcuuacacccccguugcuuuaa

SEQ ID NO: 305505 - RNA, 21 nt, Human herpesvirus 3
gggacccgcagcccagguacg

SEQ ID NO: 305506 - RNA, 14 nt, Human herpesvirus 3
gggagaacaccaga

SEQ ID NO: 305507 - RNA, 20 nt, Human herpesvirus 3
gggauuuccacuuacaggac

SEQ ID NO: 305508 - RNA, 22 nt, Human herpesvirus 3
gggcgggauuacauugcuuuca

SEQ ID NO: 305509 - RNA, 14 nt, Human herpesvirus 3
ggggacgacgugag

SEQ ID NO: 305510 - RNA, 16 nt, Human herpesvirus 3
ggggaugggggucgca

SEQ ID NO: 305511 - RNA, 20 nt, Human herpesvirus 3
ggguaaaacacacaccagac

SEQ ID NO: 305512 - RNA, 22 nt, Human herpesvirus 3
gggucaagaucaauggcgguga

SEQ ID NO: 305513 - RNA, 20 nt, Human herpesvirus 3
ggguccaucaaacacacaga

SEQ ID NO: 305514 - RNA, 13 nt, Human herpesvirus 3
gggucgguucuga

SEQ ID NO: 305515 - RNA, 20 nt, Human herpesvirus 3
gggucuccagaguacagggu

SEQ ID NO: 305516 - RNA, 19 nt, Human herpesvirus 3
ggguugcgauaacugcgau

SEQ ID NO: 305517 - RNA, 21 nt, Human herpesvirus 3
ggguugggauuacgaaccaua

SEQ ID NO: 305518 - RNA, 20 nt, Human herpesvirus 3
gguacaaacgcgcaauguuu

SEQ ID NO: 305519 - RNA, 16 nt, Human herpesvirus 3
gguaccaaaaacacag

SEQ ID NO: 305520 - RNA, 13 nt, Human herpesvirus 3
gguagacuguggc

SEQ ID NO: 305521 - RNA, 18 nt, Human herpesvirus 3
gguauacaugaacugcca

SEQ ID NO: 305522 - RNA, 19 nt, Human herpesvirus 3
gguaucaucuauugacgaa

SEQ ID NO: 305523 - RNA, 19 nt, Human herpesvirus 3
gguaucguuagaugcccuc

SEQ ID NO: 305524 - RNA, 20 nt, Human herpesvirus 3
gguauuccaaacgaaggcac

SEQ ID NO: 305525 - RNA, 20 nt, Human herpesvirus 3
ggucaaguuuauacguacau

SEQ ID NO: 305526 - RNA, 16 nt, Human herpesvirus 3
ggucguuuguauuuaa

SEQ ID NO: 305527 - RNA, 15 nt, Human herpesvirus 3
ggucugucauguuua

SEQ ID NO: 305528 - RNA, 18 nt, Human herpesvirus 3
ggugaccggcgggguccc

SEQ ID NO: 305529 - RNA, 16 nt, Human herpesvirus 3
ggugacguuccggggu

SEQ ID NO: 305530 - RNA, 18 nt, Human herpesvirus 3
ggugaugaaaucagagaa

SEQ ID NO: 305531 - RNA, 20 nt, Human herpesvirus 3
ggugcaucgcauaggguguu

SEQ ID NO: 305532 - RNA, 13 nt, Human herpesvirus 3
ggugcaugggauu

SEQ ID NO: 305533 - RNA, 21 nt, Human herpesvirus 3
ggugcgauuuaaccaccaaaa

SEQ ID NO: 305534 - RNA, 12 nt, Human herpesvirus 3
gguggcauuaaa

SEQ ID NO: 305535 - RNA, 22 nt, Human herpesvirus 3
gguguauacggugggggugccu

SEQ ID NO: 305536 - RNA, 19 nt, Human herpesvirus 3
gguguugugaucuauuaac

SEQ ID NO: 305537 - RNA, 17 nt, Human herpesvirus 3
gguguuucagugguauu

SEQ ID NO: 305538 - RNA, 23 nt, Human herpesvirus 3
gguuauuauggaaucgucuaaca

SEQ ID NO: 305539 - RNA, 17 nt, Human herpesvirus 3
gguucagcggacgcugc

SEQ ID NO: 305540 - RNA, 16 nt, Human herpesvirus 3
gguucaguaacuuaac

SEQ ID NO: 305541 - RNA, 21 nt, Human herpesvirus 3
gguucaguaacuuaacaaaca

SEQ ID NO: 305542 - RNA, 14 nt, Human herpesvirus 3
gguucaugacauua

SEQ ID NO: 305543 - RNA, 15 nt, Human herpesvirus 3
guaaaaacuuuacag

SEQ ID NO: 305544 - RNA, 15 nt, Human herpesvirus 3
guaaaacauaucaau

SEQ ID NO: 305545 - RNA, 14 nt, Human herpesvirus 3
guaaaauaaacuga

SEQ ID NO: 305546 - RNA, 18 nt, Human herpesvirus 3
guaaaauaaacugaauuu

SEQ ID NO: 305547 - RNA, 24 nt, Human herpesvirus 3
guaaaggcacgcugugugcauaac

SEQ ID NO: 305548 - RNA, 19 nt, Human herpesvirus 3
uauuccggagccuaaauac

SEQ ID NO: 305549 - RNA, 17 nt, Human herpesvirus 3
uauucuacagauuuauu

SEQ ID NO: 305550 - RNA, 16 nt, Human herpesvirus 3
uauucuuuuggggaca

SEQ ID NO: 305551 - RNA, 19 nt, Human herpesvirus 3
uauugagaaaaccaaagac

SEQ ID NO: 305552 - RNA, 19 nt, Human herpesvirus 3
uauuggucaagauccauac

SEQ ID NO: 305553 - RNA, 13 nt, Human herpesvirus 3
uauuuagugauua

SEQ ID NO: 305554 - RNA, 20 nt, Human herpesvirus 3
uauuuauacaccucuacggg

SEQ ID NO: 305555 - RNA, 11 nt, Human herpesvirus 3
uauuucccaac

SEQ ID NO: 305556 - RNA, 13 nt, Human herpesvirus 3
uauuuucugugua

SEQ ID NO: 305557 - RNA, 22 nt, Human herpesvirus 3
uauuuuuaaucauuaagcauau

SEQ ID NO: 305558 - RNA, 21 nt, Human herpesvirus 3
ucaaacgaugccugagguuua

SEQ ID NO: 305559 - RNA, 14 nt, Human herpesvirus 3
ucaaagucuucaaa

SEQ ID NO: 305560 - RNA, 16 nt, Human herpesvirus 3
ucaaagucuucaaaga

SEQ ID NO: 305561 - RNA, 22 nt, Human herpesvirus 3
ucaacacgggcugaagaguuuc

SEQ ID NO: 305562 - RNA, 11 nt, Human herpesvirus 3
ucaacauacau

SEQ ID NO: 305563 - RNA, 18 nt, Human herpesvirus 3
ucaacauuuacaguaaua

SEQ ID NO: 305564 - RNA, 15 nt, Human herpesvirus 3
ucaaccaauugguau

SEQ ID NO: 305565 - RNA, 18 nt, Human herpesvirus 3
ucaacgcucuuugggauu

SEQ ID NO: 305566 - RNA, 18 nt, Human herpesvirus 3
ucaauauuuauacaagca

SEQ ID NO: 305567 - RNA, 15 nt, Human herpesvirus 3
ucaaugaaacaguaa

SEQ ID NO: 305568 - RNA, 12 nt, Human herpesvirus 3
ucaaugcaacua

SEQ ID NO: 305569 - RNA, 19 nt, Human herpesvirus 3
ucacaaauuacuuacccuc

SEQ ID NO: 305570 - RNA, 13 nt, Human herpesvirus 3
ucacaacagacaa

SEQ ID NO: 305571 - RNA, 21 nt, Human herpesvirus 3
ucacacaccccaguaaucuca

SEQ ID NO: 305572 - RNA, 13 nt, Human herpesvirus 3
ucaccaaagccaa

SEQ ID NO: 305573 - RNA, 15 nt, Human herpesvirus 3
ucaccgaacauggac

SEQ ID NO: 305574 - RNA, 15 nt, Human herpesvirus 3
ucaccgauugggcaa

SEQ ID NO: 305575 - RNA, 19 nt, Human herpesvirus 3
ucaccgauugggcaaauga

SEQ ID NO: 305576 - RNA, 23 nt, Human herpesvirus 3
ucacguuuguguugugacuugac

SEQ ID NO: 305577 - RNA, 19 nt, Human herpesvirus 3
ucagaaagauugcagucau

SEQ ID NO: 305578 - RNA, 12 nt, Human herpesvirus 3
ucagaagauaua

SEQ ID NO: 305579 - RNA, 23 nt, Human herpesvirus 3
ucagacugccguaaacacgguaa

SEQ ID NO: 305580 - RNA, 14 nt, Human herpesvirus 3
ucagagaagcuaua

SEQ ID NO: 305581 - RNA, 18 nt, Human herpesvirus 3
ucagagaagcuauacaca

SEQ ID NO: 305582 - RNA, 15 nt, Human herpesvirus 3
ucagaucaucugaca

SEQ ID NO: 305583 - RNA, 19 nt, Human herpesvirus 3
ucagcaaguuuaacauuuc

SEQ ID NO: 305584 - RNA, 14 nt, Human herpesvirus 3
ucaggucugucaug

SEQ ID NO: 305585 - RNA, 15 nt, Human herpesvirus 3
ucaggucugucaugu

SEQ ID NO: 305586 - RNA, 18 nt, Human herpesvirus 3
ucaguaacuuaacaaaca

SEQ ID NO: 305587 - RNA, 13 nt, Human herpesvirus 3
ucauaauaugaua

SEQ ID NO: 305588 - RNA, 14 nt, Human herpesvirus 3
ucauacgcauuuac

SEQ ID NO: 305589 - RNA, 20 nt, Human herpesvirus 3
ucauauauacccaucgucaa

SEQ ID NO: 305590 - RNA, 16 nt, Human herpesvirus 3
ucauccguccaaacag

SEQ ID NO: 305591 - RNA, 17 nt, Human herpesvirus 3
ucaugcuuguaaaacau

SEQ ID NO: 305592 - RNA, 21 nt, Human herpesvirus 3
ucaugcuuguaaaacauauca

SEQ ID NO: 305593 - RNA, 13 nt, Human herpesvirus 3
ucaugcuugucaa

SEQ ID NO: 305594 - RNA, 18 nt, Human herpesvirus 3
ucaugcuugucaaaacau

SEQ ID NO: 305595 - RNA, 21 nt, Human herpesvirus 3
ucaugcuugucaaaacauacu

SEQ ID NO: 305596 - RNA, 12 nt, Human herpesvirus 3
ucauuaagcaua

SEQ ID NO: 305597 - RNA, 17 nt, Human herpesvirus 3
ucauuaugagcaucuag

SEQ ID NO: 305598 - RNA, 15 nt, Human herpesvirus 3
ucauugaagaugauu

SEQ ID NO: 305599 - RNA, 17 nt, Human herpesvirus 3
ucauuuauuaccacauc

SEQ ID NO: 305600 - RNA, 17 nt, Human herpesvirus 3
ucauuuucauagacgua

SEQ ID NO: 305601 - RNA, 18 nt, Human herpesvirus 3
uccaaaugcgcaaaaugu

SEQ ID NO: 305602 - RNA, 21 nt, Human herpesvirus 3
uccaaauuaacccaagacgac

SEQ ID NO: 305603 - RNA, 22 nt, Human herpesvirus 3
uccaaccgacccagacgugucu

SEQ ID NO: 305604 - RNA, 19 nt, Human herpesvirus 3
uccaacuguaucuguaugu

SEQ ID NO: 305605 - RNA, 24 nt, Human herpesvirus 3
uccaacuguuuacauagauacucc

SEQ ID NO: 305606 - RNA, 13 nt, Human herpesvirus 3
uccaauacaucaa

SEQ ID NO: 305607 - RNA, 22 nt, Human herpesvirus 3
uccaaucaaaaaagcguguaaa

SEQ ID NO: 305608 - RNA, 11 nt, Human herpesvirus 3
uccacagucug

SEQ ID NO: 305609 - RNA, 19 nt, Human herpesvirus 3
ugacccaccccacaugaau

SEQ ID NO: 305610 - RNA, 13 nt, Human herpesvirus 3
ugacccuaugaca

SEQ ID NO: 305611 - RNA, 20 nt, Human herpesvirus 3
ugacccuaugacaugguuaa

SEQ ID NO: 305612 - RNA, 18 nt, Human herpesvirus 3
ugacggcccccuggacau

SEQ ID NO: 305613 - RNA, 16 nt, Human herpesvirus 3
ugacucccuccaaucg

SEQ ID NO: 305614 - RNA, 19 nt, Human herpesvirus 3
ugacuuugaugagaaugua

SEQ ID NO: 305615 - RNA, 13 nt, Human herpesvirus 3
ugagaauguaaca

SEQ ID NO: 305616 - RNA, 16 nt, Human herpesvirus 3
ugagauguugggucag

SEQ ID NO: 305617 - RNA, 18 nt, Human herpesvirus 3
ugagccguauaacccacu

SEQ ID NO: 305618 - RNA, 14 nt, Human herpesvirus 3
ugagggauggaugu

SEQ ID NO: 305619 - RNA, 18 nt, Human herpesvirus 3
ugagggauggaugucuua

SEQ ID NO: 305620 - RNA, 22 nt, Human herpesvirus 3
ugagggugaccggcgggguccc

SEQ ID NO: 305621 - RNA, 12 nt, Human herpesvirus 3
ugauaaagggaa

SEQ ID NO: 305622 - RNA, 18 nt, Human herpesvirus 3
ugauaacagccuuuacuc

SEQ ID NO: 305623 - RNA, 18 nt, Human herpesvirus 3
ugauauaagguguuaaua

SEQ ID NO: 305624 - RNA, 20 nt, Human herpesvirus 3
ugaucaccgggucuuaucua

SEQ ID NO: 305625 - RNA, 19 nt, Human herpesvirus 3
ugaucguccuucaacacac

SEQ ID NO: 305626 - RNA, 13 nt, Human herpesvirus 3
ugaugaaaaccug

SEQ ID NO: 305627 - RNA, 15 nt, Human herpesvirus 3
ugaugaaaaccuggg

SEQ ID NO: 305628 - RNA, 15 nt, Human herpesvirus 3
ugauguagcaucgga

SEQ ID NO: 305629 - RNA, 19 nt, Human herpesvirus 3
ugauucggguaaaacacac

SEQ ID NO: 305630 - RNA, 22 nt, Human herpesvirus 3
ugauucuauauuaauaaaagac

SEQ ID NO: 305631 - RNA, 17 nt, Human herpesvirus 3
ugauuugcaaacauauc

SEQ ID NO: 305632 - RNA, 12 nt, Human herpesvirus 3
ugauuugcccac

SEQ ID NO: 305633 - RNA, 16 nt, Human herpesvirus 3
ugcaacaugcauggaa

SEQ ID NO: 305634 - RNA, 17 nt, Human herpesvirus 3
ugcacaacaaaagcuau

SEQ ID NO: 305635 - RNA, 20 nt, Human herpesvirus 3
ugcacaacaaaagcuauaua

SEQ ID NO: 305636 - RNA, 22 nt, Human herpesvirus 3
ugcacaauccacagauuccucc

SEQ ID NO: 305637 - RNA, 15 nt, Human herpesvirus 3
ugcaccgguccaaca

SEQ ID NO: 305638 - RNA, 21 nt, Human herpesvirus 3
ugcacgcaucaaucugagaag

SEQ ID NO: 305639 - RNA, 16 nt, Human herpesvirus 3
ugcagcgcgcaaauua

SEQ ID NO: 305640 - RNA, 19 nt, Human herpesvirus 3
ugcauaucauaaauauuac

SEQ ID NO: 305641 - RNA, 17 nt, Human herpesvirus 3
ugcauauccagcaaugu

SEQ ID NO: 305642 - RNA, 16 nt, Human herpesvirus 3
ugcauaugacauaugc

SEQ ID NO: 305643 - RNA, 19 nt, Human herpesvirus 3
ugcauguguccguauguca

SEQ ID NO: 305644 - RNA, 22 nt, Human herpesvirus 3
ugcauguuaacgucgacguuau

SEQ ID NO: 305645 - RNA, 22 nt, Human herpesvirus 3
ugcauguuggcucggucugaua

SEQ ID NO: 305646 - RNA, 23 nt, Human herpesvirus 3
ugcauuuauuaucgggcgacaau

SEQ ID NO: 305647 - RNA, 18 nt, Human herpesvirus 3
ugcauuuuaaaaauaccu

SEQ ID NO: 305648 - RNA, 16 nt, Human herpesvirus 3
ugccagaagcauuuac

SEQ ID NO: 305649 - RNA, 22 nt, Human herpesvirus 3
ugccaucuuccacgggucaugc

SEQ ID NO: 305650 - RNA, 22 nt, Human herpesvirus 3
ugccgaaauuaccguacaacaa

SEQ ID NO: 305651 - RNA, 23 nt, Human herpesvirus 3
ugccgaaauuaccguacaacaag

SEQ ID NO: 305652 - RNA, 19 nt, Human herpesvirus 3
ugcgaagcugccgucaaug

SEQ ID NO: 305653 - RNA, 15 nt, Human herpesvirus 3
uucauauauacccau

SEQ ID NO: 305654 - RNA, 16 nt, Human herpesvirus 3
uucauauauacccauc

SEQ ID NO: 305655 - RNA, 15 nt, Human herpesvirus 3
uucaugcuuguaaaa

SEQ ID NO: 305656 - RNA, 22 nt, Human herpesvirus 3
uucaugcuuguaaaacauauca

SEQ ID NO: 305657 - RNA, 16 nt, Human herpesvirus 3
uucaugcuugucaaaa

SEQ ID NO: 305658 - RNA, 22 nt, Human herpesvirus 3
uucaugcuugucaaaacauacu

SEQ ID NO: 305659 - RNA, 23 nt, Human herpesvirus 3
uucaugcuugucaaaacauacua

SEQ ID NO: 305660 - RNA, 16 nt, Human herpesvirus 3
uuccaaauuaucccgu

SEQ ID NO: 305661 - RNA, 16 nt, Human herpesvirus 3
uuccaaccgacccaga

SEQ ID NO: 305662 - RNA, 13 nt, Human herpesvirus 3
uuccaacuggaaa

SEQ ID NO: 305663 - RNA, 19 nt, Human herpesvirus 3
uuccaacuggaaaugugcu

SEQ ID NO: 305664 - RNA, 13 nt, Human herpesvirus 3
uuccaauggaugg

SEQ ID NO: 305665 - RNA, 19 nt, Human herpesvirus 3
uuccacgggucaugcaggc

SEQ ID NO: 305666 - RNA, 15 nt, Human herpesvirus 3
uuccacuuacaggac

SEQ ID NO: 305667 - RNA, 18 nt, Human herpesvirus 3
uuccaggcgagacuugau

SEQ ID NO: 305668 - RNA, 22 nt, Human herpesvirus 3
uuccaggcugaggguucaguaa

SEQ ID NO: 305669 - RNA, 18 nt, Human herpesvirus 3
uucccaaaaggauauuca

SEQ ID NO: 305670 - RNA, 15 nt, Human herpesvirus 3
uuccuuuuccagcga

SEQ ID NO: 305671 - RNA, 14 nt, Human herpesvirus 3
uucgaauuguucug

SEQ ID NO: 305672 - RNA, 14 nt, Human herpesvirus 3
uuuugcauaugaca

SEQ ID NO: 305673 - RNA, 20 nt, Human herpesvirus 3
uuuugcuccugaagacucca

SEQ ID NO: 305674 - RNA, 15 nt, Human herpesvirus 3
ugucaaaacauacua

SEQ ID NO: 305675 - RNA, 20 nt, Human herpesvirus 3
ugucaacauggcuacaagga

SEQ ID NO: 305676 - RNA, 20 nt, Human herpesvirus 3
ugucaauaauaauuauaucc

SEQ ID NO: 305677 - RNA, 21 nt, Human herpesvirus 3
ugucaauaauaauuauaucca

SEQ ID NO: 305678 - RNA, 14 nt, Human herpesvirus 3
ugucaccaaagcca

SEQ ID NO: 305679 - RNA, 15 nt, Human herpesvirus 3
ugucacgacaaaaac

SEQ ID NO: 305680 - RNA, 15 nt, Human herpesvirus 3
uguccccucugguau

SEQ ID NO: 305681 - RNA, 18 nt, Human herpesvirus 3
uguccccucugguauauu

SEQ ID NO: 305682 - RNA, 14 nt, Human herpesvirus 3
ugucgcgcguguau

SEQ ID NO: 305683 - RNA, 17 nt, Human herpesvirus 3
ugucgcgcguguaugca

SEQ ID NO: 305684 - RNA, 19 nt, Human herpesvirus 3
ugucgucauauuacauuaa

SEQ ID NO: 305685 - RNA, 18 nt, Human herpesvirus 3
ugucuacgugguaccaaa

SEQ ID NO: 305686 - RNA, 16 nt, Human herpesvirus 3
ugucuccaaccauuca

SEQ ID NO: 305687 - RNA, 12 nt, Human herpesvirus 3
ugucugccaaac

SEQ ID NO: 305688 - RNA, 13 nt, Human herpesvirus 3
ugugacguuauau

SEQ ID NO: 305689 - RNA, 21 nt, Human herpesvirus 3
ugugaucuauuaacaggaccu

SEQ ID NO: 305690 - RNA, 14 nt, Human herpesvirus 3
ugugcaucccccau

SEQ ID NO: 305691 - RNA, 21 nt, Human herpesvirus 3
ugugcccgcauaagauguacu

SEQ ID NO: 305692 - RNA, 20 nt, Human herpesvirus 3
uguggaaagguauaugucaa

SEQ ID NO: 305693 - RNA, 15 nt, Human herpesvirus 3
uguggacgcauuuga

SEQ ID NO: 305694 - RNA, 12 nt, Human herpesvirus 3
uguggauuuauc

SEQ ID NO: 305695 - RNA, 23 nt, Human herpesvirus 3
uguguaccauagaugaacacauu

SEQ ID NO: 305696 - RNA, 16 nt, Human herpesvirus 3
uguguaccgccauuau

SEQ ID NO: 305697 - RNA, 23 nt, Human herpesvirus 3
uguguguaccauagaugaacaca

SEQ ID NO: 305698 - RNA, 18 nt, Human herpesvirus 3
uguguuuuuaucugcaau

SEQ ID NO: 305699 - RNA, 17 nt, Human herpesvirus 3
uguuaacgucgacguua

SEQ ID NO: 305700 - RNA, 14 nt, Human herpesvirus 3
gucccaaugagaug

SEQ ID NO: 305701 - RNA, 15 nt, Human herpesvirus 3
gucccauuuugugau

SEQ ID NO: 305702 - RNA, 17 nt, Human herpesvirus 3
gucccauuuugugauuu

SEQ ID NO: 305703 - RNA, 17 nt, Human herpesvirus 3
guccccucugguauauu

SEQ ID NO: 305704 - RNA, 18 nt, Human herpesvirus 3
guccucuguuacauucuc

SEQ ID NO: 305705 - RNA, 20 nt, Human herpesvirus 3
guccuucaacacacccauac

SEQ ID NO: 305706 - RNA, 12 nt, Human herpesvirus 3
gucggucucucc

SEQ ID NO: 305707 - RNA, 15 nt, Human herpesvirus 3
gucguuauauucaca

SEQ ID NO: 305708 - RNA, 23 nt, Human herpesvirus 3
gucuacgugguaccaaaaacaca

SEQ ID NO: 305709 - RNA, 16 nt, Human herpesvirus 3
gucuccaaccauucag

SEQ ID NO: 305710 - RNA, 15 nt, Human herpesvirus 3
gucuccagaguacag

SEQ ID NO: 305711 - RNA, 15 nt, Human herpesvirus 3
gucugacgugguaag

SEQ ID NO: 305712 - RNA, 22 nt, Human herpesvirus 3
gucugauagcgccaaaauggau

SEQ ID NO: 305713 - RNA, 22 nt, Human herpesvirus 3
gucugcucuucuacgagaauau

SEQ ID NO: 305714 - RNA, 22 nt, Human herpesvirus 3
gucuggaauaauauauggcgcc

SEQ ID NO: 305715 - RNA, 23 nt, Human herpesvirus 3
gucuugcgauacgaugauuuuca

SEQ ID NO: 305716 - RNA, 14 nt, Human herpesvirus 3
gugacagacuuugu

SEQ ID NO: 305717 - RNA, 21 nt, Human herpesvirus 3
gugacccugcuaaccauagac

SEQ ID NO: 305718 - RNA, 18 nt, Human herpesvirus 3
gugagguguccugugauc

SEQ ID NO: 305719 - RNA, 21 nt, Human herpesvirus 3
gugauacaaugagcgguggua

SEQ ID NO: 305720 - RNA, 17 nt, Human herpesvirus 3
gugauauuauauacugg

SEQ ID NO: 305721 - RNA, 22 nt, Human herpesvirus 3
gugcauauccagcaauguugaa

SEQ ID NO: 305722 - RNA, 20 nt, Human herpesvirus 3
gugcaucccccauuguauga

SEQ ID NO: 305723 - RNA, 14 nt, Human herpesvirus 3
gugcgggguuggug

SEQ ID NO: 305724 - RNA, 13 nt, Human herpesvirus 3
gugcggucucccg

SEQ ID NO: 305725 - RNA, 22 nt, Human herpesvirus 3
gugcguauuggcgagccauuuu

SEQ ID NO: 305726 - RNA, 21 nt, Human herpesvirus 3
guggaauuaauggaguauauu

SEQ ID NO: 305727 - RNA, 19 nt, Human herpesvirus 3
guggagcguacugcagaua

SEQ ID NO: 305728 - RNA, 18 nt, Human herpesvirus 3
guggauccggcaugcauu

SEQ ID NO: 305729 - RNA, 19 nt, Human herpesvirus 3
guggauccggcaugcauug

SEQ ID NO: 305730 - RNA, 19 nt, Human herpesvirus 3
guggauuauauccaucaag

SEQ ID NO: 305731 - RNA, 13 nt, Human herpesvirus 3
guguaaaucauca

SEQ ID NO: 305732 - RNA, 19 nt, Human herpesvirus 3
gugucccauuuugugauuu

SEQ ID NO: 305733 - RNA, 19 nt, Human herpesvirus 3
guguccccucugguauauu

SEQ ID NO: 305734 - RNA, 15 nt, Human herpesvirus 3
gugugcaauaaccuc

SEQ ID NO: 305735 - RNA, 15 nt, Human herpesvirus 3
guguucgaucccaaa

SEQ ID NO: 305736 - RNA, 19 nt, Human herpesvirus 3
guguugcggggaugauccc

SEQ ID NO: 305737 - RNA, 22 nt, Human herpesvirus 3
guguuuauuauaaauguguauu

SEQ ID NO: 305738 - RNA, 12 nt, Human herpesvirus 3
guuaacaccgcc

SEQ ID NO: 305739 - RNA, 16 nt, Human herpesvirus 3
guuaacagcagucuca

SEQ ID NO: 305740 - RNA, 16 nt, Human herpesvirus 3
guuaauacaguguuua

SEQ ID NO: 305741 - RNA, 22 nt, Human herpesvirus 3
guuacucaugugucuccauuac

SEQ ID NO: 305742 - RNA, 13 nt, Human herpesvirus 3
guuagacagagaa

SEQ ID NO: 305743 - RNA, 14 nt, Human herpesvirus 3
guuagaugcauauu

SEQ ID NO: 305744 - RNA, 17 nt, Human herpesvirus 3
guuauaaguaugcaguc

SEQ ID NO: 305745 - RNA, 17 nt, Human herpesvirus 3
guuauauuuuacauaca

SEQ ID NO: 305746 - RNA, 18 nt, Human herpesvirus 3
guuauccaacuguuuaca

SEQ ID NO: 305747 - RNA, 17 nt, Human herpesvirus 3
guuaugauauaaggugu

SEQ ID NO: 305748 - RNA, 19 nt, Human herpesvirus 3
guuaugcuuuuuaugcaua

SEQ ID NO: 305749 - RNA, 15 nt, Human herpesvirus 3
guuauggacuaggca

SEQ ID NO: 305750 - RNA, 22 nt, Human herpesvirus 3
guuccaaauuauccaaugggga

SEQ ID NO: 305751 - RNA, 19 nt, Human herpesvirus 3
guucccgcacacguuuaca

SEQ ID NO: 305752 - RNA, 14 nt, Human herpesvirus 3
guucuaaaacacug

SEQ ID NO: 305753 - RNA, 19 nt, Human herpesvirus 3
guucuaccaacgcacuguu

SEQ ID NO: 305754 - RNA, 13 nt, Human herpesvirus 3
guucuacugacuu

SEQ ID NO: 305755 - RNA, 19 nt, Human herpesvirus 3
guucucguacguccaugac

SEQ ID NO: 305756 - RNA, 18 nt, Human herpesvirus 3
guucuuugaagacuuuga

SEQ ID NO: 305757 - RNA, 21 nt, Human herpesvirus 3
guugccgcauuagacaaccuu

SEQ ID NO: 305758 - RNA, 17 nt, Human herpesvirus 3
guugcgauaacugcgau

SEQ ID NO: 305759 - RNA, 13 nt, Human herpesvirus 3
guugcggugauau

SEQ ID NO: 305760 - RNA, 16 nt, Human herpesvirus 3
guugcgguuguugucc

SEQ ID NO: 305761 - RNA, 13 nt, Human herpesvirus 3
guugcuguugucc

SEQ ID NO: 305762 - RNA, 16 nt, Human herpesvirus 3
guuggcgcaugccauu

SEQ ID NO: 305763 - RNA, 23 nt, Human herpesvirus 3
guugggggcgggguagacugugg

SEQ ID NO: 305764 - RNA, 15 nt, Human herpesvirus 3
guugguuaacaccgc

SEQ ID NO: 305765 - RNA, 15 nt, Human herpesvirus 3
guugguuacugugaa

SEQ ID NO: 305766 - RNA, 17 nt, Human herpesvirus 3
guuguaccguuugcaca

SEQ ID NO: 305767 - RNA, 20 nt, Human herpesvirus 3
guuguuguccagaagacccc

SEQ ID NO: 305768 - RNA, 20 nt, Human herpesvirus 3
guuguuuccugugucuuuaa

SEQ ID NO: 305769 - RNA, 15 nt, Human herpesvirus 3
guuuacacuugaauc

SEQ ID NO: 305770 - RNA, 22 nt, Human herpesvirus 3
guuuaccugcgguauucuguaa

SEQ ID NO: 305771 - RNA, 19 nt, Human herpesvirus 3
guuuauaauggcugcugaa

SEQ ID NO: 305772 - RNA, 18 nt, Human herpesvirus 3
guuuaucaggguuuaaca

SEQ ID NO: 305773 - RNA, 17 nt, Human herpesvirus 3
guuuaucccacauguau

SEQ ID NO: 305774 - RNA, 17 nt, Human herpesvirus 3
guuuaucccccuucaaa

SEQ ID NO: 305775 - RNA, 16 nt, Human herpesvirus 3
guuuguuuugaucaca

SEQ ID NO: 305776 - RNA, 13 nt, Human herpesvirus 4 (Epstein-Barr virus)
ccaugacaucaca

SEQ ID NO: 305777 - RNA, 17 nt, Human herpesvirus 4 (Epstein-Barr virus)
ccaugagugccaugugu

SEQ ID NO: 305778 - RNA, 14 nt, Human herpesvirus 4 (Epstein-Barr virus)
ccaugcucagggcc

SEQ ID NO: 305779 - RNA, 17 nt, Human herpesvirus 4 (Epstein-Barr virus)
ccauggagaacguccac

SEQ ID NO: 305780 - RNA, 17 nt, Human herpesvirus 4 (Epstein-Barr virus)
ccauggucgaugaacaa

SEQ ID NO: 305781 - RNA, 18 nt, Human herpesvirus 4 (Epstein-Barr virus)
ccauguaacaagaacugg

SEQ ID NO: 305782 - RNA, 22 nt, Human herpesvirus 4 (Epstein-Barr virus)
ccaugucggcuaaugccaugca

SEQ ID NO: 305783 - RNA, 20 nt, Human herpesvirus 4 (Epstein-Barr virus)
ccauugacgcaaguuuugcc

SEQ ID NO: 305784 - RNA, 19 nt, Human herpesvirus 4 (Epstein-Barr virus)
cccaaaacuauaccaaagc

SEQ ID NO: 305785 - RNA, 12 nt, Human herpesvirus 4 (Epstein-Barr virus)
cccaaaccaaau

SEQ ID NO: 305786 - RNA, 17 nt, Human herpesvirus 4 (Epstein-Barr virus)
cccaacaaugugaaccu

SEQ ID NO: 305787 - RNA, 22 nt, Human herpesvirus 4 (Epstein-Barr virus)
cccaaggaaggcuugccaaaau

SEQ ID NO: 305788 - RNA, 23 nt, Human herpesvirus 4 (Epstein-Barr virus)
cccacugugccuaaacgugaugg

SEQ ID NO: 305789 - RNA, 22 nt, Human herpesvirus 4 (Epstein-Barr virus)
cccagaggaggacaugugcaug

SEQ ID NO: 305790 - RNA, 18 nt, Human herpesvirus 4 (Epstein-Barr virus)
cccagagugcuccggcug

SEQ ID NO: 305791 - RNA, 14 nt, Human herpesvirus 4 (Epstein-Barr virus)
cccagcccuccgca

SEQ ID NO: 305792 - RNA, 23 nt, Human herpesvirus 4 (Epstein-Barr virus)
cccaggaucagaaucaaaaucag

SEQ ID NO: 305793 - RNA, 14 nt, Human herpesvirus 4 (Epstein-Barr virus)
cccagggucacugg

SEQ ID NO: 305794 - RNA, 16 nt, Human herpesvirus 4 (Epstein-Barr virus)
ccccaccccggcgcca

SEQ ID NO: 305795 - RNA, 17 nt, Human herpesvirus 4 (Epstein-Barr virus)
ccccagucccaacccaa

SEQ ID NO: 305796 - RNA, 16 nt, Human herpesvirus 4 (Epstein-Barr virus)
cccccaucuuugaggg

SEQ ID NO: 305797 - RNA, 12 nt, Human herpesvirus 4 (Epstein-Barr virus)
cccccgaaagaa

SEQ ID NO: 305798 - RNA, 22 nt, Human herpesvirus 4 (Epstein-Barr virus)
cccccggcuggccgccguggcc

SEQ ID NO: 305799 - RNA, 23 nt, Human herpesvirus 4 (Epstein-Barr virus)
ccccuauaaccacaacugcuauu

SEQ ID NO: 305800 - RNA, 13 nt, Human herpesvirus 4 (Epstein-Barr virus)
ccccucugauauu

SEQ ID NO: 305801 - RNA, 16 nt, Human herpesvirus 4 (Epstein-Barr virus)
ccccuggcuuccacuc

SEQ ID NO: 305802 - RNA, 20 nt, Human herpesvirus 4 (Epstein-Barr virus)
ccccuguuagcuauuugauc

SEQ ID NO: 305803 - RNA, 18 nt, Human herpesvirus 4 (Epstein-Barr virus)
ccccuuucgacugucauu

SEQ ID NO: 305804 - RNA, 16 nt, Human herpesvirus 4 (Epstein-Barr virus)
cccgacccagccacuu

SEQ ID NO: 305805 - RNA, 22 nt, Human herpesvirus 4 (Epstein-Barr virus)
cccgaucagagccccaugcuua

SEQ ID NO: 305806 - RNA, 13 nt, Human herpesvirus 4 (Epstein-Barr virus)
cccgccaagcacg

SEQ ID NO: 305807 - RNA, 13 nt, Human herpesvirus 4 (Epstein-Barr virus)
cccgcuagauggc

SEQ ID NO: 305808 - RNA, 14 nt, Human herpesvirus 4 (Epstein-Barr virus)
cccggucccagcgg

SEQ ID NO: 305809 - RNA, 16 nt, Human herpesvirus 4 (Epstein-Barr virus)
cccguuaucacaucug

SEQ ID NO: 305810 - RNA, 15 nt, Human herpesvirus 4 (Epstein-Barr virus)
cccuaauucagccac

SEQ ID NO: 305811 - RNA, 15 nt, Human herpesvirus 4 (Epstein-Barr virus)
cccuaggccugccac

SEQ ID NO: 305812 - RNA, 15 nt, Human herpesvirus 4 (Epstein-Barr virus)
cccuauaaccacaac

SEQ ID NO: 305813 - RNA, 15 nt, Human herpesvirus 4 (Epstein-Barr virus)
cccucacgggccauc

SEQ ID NO: 305814 - RNA, 21 nt, Human herpesvirus 4 (Epstein-Barr virus)
cccucagucacgggacauuaa

SEQ ID NO: 305815 - RNA, 15 nt, Human herpesvirus 4 (Epstein-Barr virus)
cccucauugugcuga

SEQ ID NO: 305816 - RNA, 20 nt, Human herpesvirus 4 (Epstein-Barr virus)
cccucgguggugggcugcug

SEQ ID NO: 305817 - RNA, 23 nt, Human herpesvirus 4 (Epstein-Barr virus)
cccucgguggugggcugcugagg

SEQ ID NO: 305818 - RNA, 23 nt, Human herpesvirus 4 (Epstein-Barr virus)
cccugagaugugaauugggaugg

SEQ ID NO: 305819 - RNA, 21 nt, Human herpesvirus 4 (Epstein-Barr virus)
cccugaguucuacaaugccag

SEQ ID NO: 305820 - RNA, 19 nt, Human herpesvirus 4 (Epstein-Barr virus)
cccugauaaugucuucaau

SEQ ID NO: 305821 - RNA, 22 nt, Human herpesvirus 4 (Epstein-Barr virus)
cccugcagaguaauugcagugg

SEQ ID NO: 305822 - RNA, 14 nt, Human herpesvirus 4 (Epstein-Barr virus)
cccuggaggccuca

SEQ ID NO: 305823 - RNA, 21 nt, Human herpesvirus 4 (Epstein-Barr virus)
cccuggaggccucaggcaaca

SEQ ID NO: 305824 - RNA, 13 nt, Human herpesvirus 4 (Epstein-Barr virus)
cccugggcucuca

SEQ ID NO: 305825 - RNA, 17 nt, Human herpesvirus 4 (Epstein-Barr virus)
cccugggggccuguguc

SEQ ID NO: 305826 - RNA, 21 nt, Human herpesvirus 4 (Epstein-Barr virus)
cccugugcuucuaccaagacu

SEQ ID NO: 305827 - RNA, 18 nt, Human herpesvirus 4 (Epstein-Barr virus)
cccuuauuauugauguga

SEQ ID NO: 305828 - RNA, 18 nt, Human herpesvirus 4 (Epstein-Barr virus)
cccuucgccccuaucuua

SEQ ID NO: 305829 - RNA, 19 nt, Human herpesvirus 4 (Epstein-Barr virus)
cccuucgccccuaucuuaa

SEQ ID NO: 305830 - RNA, 18 nt, Human herpesvirus 4 (Epstein-Barr virus)
cccuugguauugcgcugg

SEQ ID NO: 305831 - RNA, 22 nt, Human herpesvirus 4 (Epstein-Barr virus)
ccgacgaggcccugcaagccaa

SEQ ID NO: 305832 - RNA, 11 nt, Human herpesvirus 4 (Epstein-Barr virus)
ccgaggcaccc

SEQ ID NO: 305833 - RNA, 21 nt, Human herpesvirus 4 (Epstein-Barr virus)
ccgagucaguuacacacacag

SEQ ID NO: 305834 - RNA, 18 nt, Human herpesvirus 4 (Epstein-Barr virus)
ccgccguaaucuguggug

SEQ ID NO: 305835 - RNA, 22 nt, Human herpesvirus 4 (Epstein-Barr virus)
ccgccuggugguggguguccuc

SEQ ID NO: 305836 - RNA, 21 nt, Human herpesvirus 4 (Epstein-Barr virus)
ccgcugcgcaaacggacucaa

SEQ ID NO: 305837 - RNA, 13 nt, Human herpesvirus 4 (Epstein-Barr virus)
ccggcacaccaga

SEQ ID NO: 305838 - RNA, 15 nt, Human herpesvirus 4 (Epstein-Barr virus)
agaaaguaaccacau

SEQ ID NO: 305839 - RNA, 20 nt, Human herpesvirus 4 (Epstein-Barr virus)
agaaauugggugaccacuga

SEQ ID NO: 305840 - RNA, 16 nt, Human herpesvirus 4 (Epstein-Barr virus)
agaacaucacugccac

SEQ ID NO: 305841 - RNA, 20 nt, Human herpesvirus 4 (Epstein-Barr virus)
agaacugggaugaacccugg

SEQ ID NO: 305842 - RNA, 23 nt, Human herpesvirus 4 (Epstein-Barr virus)
agaagaauguccaaaaggucaaa

SEQ ID NO: 305843 - RNA, 16 nt, Human herpesvirus 4 (Epstein-Barr virus)
agaagacuccugccug

SEQ ID NO: 305844 - RNA, 18 nt, Human herpesvirus 4 (Epstein-Barr virus)
agaagcgccgguacuugu

SEQ ID NO: 305845 - RNA, 19 nt, Human herpesvirus 4 (Epstein-Barr virus)
agaagucggccacagggga

SEQ ID NO: 305846 - RNA, 21 nt, Human herpesvirus 4 (Epstein-Barr virus)
agaaguggaaacccucaguca

SEQ ID NO: 305847 - RNA, 13 nt, Human herpesvirus 4 (Epstein-Barr virus)
agaaguugguggu

SEQ ID NO: 305848 - RNA, 17 nt, Human herpesvirus 4 (Epstein-Barr virus)
agaaguugguggugggg

SEQ ID NO: 305849 - RNA, 22 nt, Human herpesvirus 4 (Epstein-Barr virus)
agaaucuccugugcuucagcag

SEQ ID NO: 305850 - RNA, 14 nt, Human herpesvirus 4 (Epstein-Barr virus)
agaauguccaaaag

SEQ ID NO: 305851 - RNA, 21 nt, Human herpesvirus 4 (Epstein-Barr virus)
agacacaccuaaauuuagcac

SEQ ID NO: 305852 - RNA, 14 nt, Human herpesvirus 4 (Epstein-Barr virus)
agacacaucuggac

SEQ ID NO: 305853 - RNA, 19 nt, Human herpesvirus 4 (Epstein-Barr virus)
agacaccuggcccacugga

SEQ ID NO: 305854 - RNA, 16 nt, Human herpesvirus 4 (Epstein-Barr virus)
agacagguaacucacu

SEQ ID NO: 305855 - RNA, 16 nt, Human herpesvirus 4 (Epstein-Barr virus)
agacagucacauugca

SEQ ID NO: 305856 - RNA, 19 nt, Human herpesvirus 4 (Epstein-Barr virus)
agacagucacauugcaucg

SEQ ID NO: 305857 - RNA, 17 nt, Human herpesvirus 4 (Epstein-Barr virus)
agaccacuggcuggauu

SEQ ID NO: 305858 - RNA, 21 nt, Human herpesvirus 4 (Epstein-Barr virus)
agaccaguuuuucggauccca

SEQ ID NO: 305859 - RNA, 17 nt, Human herpesvirus 4 (Epstein-Barr virus)
agaccuaauaaaggccu

SEQ ID NO: 305860 - RNA, 16 nt, Human herpesvirus 4 (Epstein-Barr virus)
agaccugugugcugua

SEQ ID NO: 305861 - RNA, 14 nt, Human herpesvirus 4 (Epstein-Barr virus)
agacgagcugcgac

SEQ ID NO: 305862 - RNA, 17 nt, Human herpesvirus 4 (Epstein-Barr virus)
agacgagucugacuaca

SEQ ID NO: 305863 - RNA, 21 nt, Human herpesvirus 4 (Epstein-Barr virus)
agacggucccggacuacgugu

SEQ ID NO: 305864 - RNA, 17 nt, Human herpesvirus 4 (Epstein-Barr virus)
agacuaugcauacacug

SEQ ID NO: 305865 - RNA, 19 nt, Human herpesvirus 4 (Epstein-Barr virus)
agacuaugcauacacugaa

SEQ ID NO: 305866 - RNA, 17 nt, Human herpesvirus 4 (Epstein-Barr virus)
agacuccacaccaaaua

SEQ ID NO: 305867 - RNA, 15 nt, Human herpesvirus 4 (Epstein-Barr virus)
agacuggcaacuccu

SEQ ID NO: 305868 - RNA, 17 nt, Human herpesvirus 4 (Epstein-Barr virus)
agacuggcaacuccucu

SEQ ID NO: 305869 - RNA, 20 nt, Human herpesvirus 4 (Epstein-Barr virus)
agacuuaugcuaacauuuua

SEQ ID NO: 305870 - RNA, 23 nt, Human herpesvirus 4 (Epstein-Barr virus)
agacuuggccuuggggguggugg

SEQ ID NO: 305871 - RNA, 17 nt, Human herpesvirus 4 (Epstein-Barr virus)
agagacgagcugcgaca

SEQ ID NO: 305872 - RNA, 19 nt, Human herpesvirus 4 (Epstein-Barr virus)
agagaucuggggccaagga

SEQ ID NO: 305873 - RNA, 22 nt, Human herpesvirus 4 (Epstein-Barr virus)
agagccuacccaugaccaacau

SEQ ID NO: 305874 - RNA, 17 nt, Human herpesvirus 4 (Epstein-Barr virus)
agagcggguggaggagc

SEQ ID NO: 305875 - RNA, 15 nt, Human herpesvirus 4 (Epstein-Barr virus)
agaggauggcacggu

SEQ ID NO: 305876 - RNA, 22 nt, Human herpesvirus 4 (Epstein-Barr virus)
agaggcccgggggccuuguccg

SEQ ID NO: 305877 - RNA, 15 nt, Human herpesvirus 4 (Epstein-Barr virus)
agaggccugcaccag

SEQ ID NO: 305878 - RNA, 22 nt, Human herpesvirus 4 (Epstein-Barr virus)
agaggugcucaaggcagucucc

SEQ ID NO: 305879 - RNA, 23 nt, Human herpesvirus 4 (Epstein-Barr virus)
agaggugcucaaggcagucucca

SEQ ID NO: 305880 - RNA, 15 nt, Human herpesvirus 4 (Epstein-Barr virus)
agagucccuccucac

SEQ ID NO: 305881 - RNA, 23 nt, Human herpesvirus 4 (Epstein-Barr virus)
agagucccuccucaccacucgaa

SEQ ID NO: 305882 - RNA, 20 nt, Human herpesvirus 4 (Epstein-Barr virus)
agaguucccggcugcucccg

SEQ ID NO: 305883 - RNA, 18 nt, Human herpesvirus 4 (Epstein-Barr virus)
agaguuuaagcagcacug

SEQ ID NO: 305884 - RNA, 20 nt, Human herpesvirus 4 (Epstein-Barr virus)
agaguuuaagcagcacugaa

SEQ ID NO: 305885 - RNA, 17 nt, Human herpesvirus 4 (Epstein-Barr virus)
agauagccggccaggca

SEQ ID NO: 305886 - RNA, 17 nt, Human herpesvirus 4 (Epstein-Barr virus)
agaugaaagucuauacg

SEQ ID NO: 305887 - RNA, 18 nt, Human herpesvirus 4 (Epstein-Barr virus)
agaugaacacccccauac

SEQ ID NO: 305888 - RNA, 22 nt, Human herpesvirus 4 (Epstein-Barr virus)
agaugauaaugaugaggagcac

SEQ ID NO: 305889 - RNA, 18 nt, Human herpesvirus 4 (Epstein-Barr virus)
agauggcgccguuugacu

SEQ ID NO: 305890 - RNA, 19 nt, Human herpesvirus 4 (Epstein-Barr virus)
agauggcgugguccacgag

SEQ ID NO: 305891 - RNA, 16 nt, Human herpesvirus 4 (Epstein-Barr virus)
agaugggugcauuuca

SEQ ID NO: 305892 - RNA, 17 nt, Human herpesvirus 4 (Epstein-Barr virus)
agauguaaaauuuacac

SEQ ID NO: 305893 - RNA, 18 nt, Human herpesvirus 4 (Epstein-Barr virus)
agauguuauccacaccau

SEQ ID NO: 305894 - RNA, 23 nt, Human herpesvirus 4 (Epstein-Barr virus)
agauguuauccacaccaucccaa

SEQ ID NO: 305895 - RNA, 23 nt, Human herpesvirus 4 (Epstein-Barr virus)
agauucagacgagucugacuaca

SEQ ID NO: 305896 - RNA, 17 nt, Human herpesvirus 4 (Epstein-Barr virus)
agauuuucccacugugc

SEQ ID NO: 305897 - RNA, 19 nt, Human herpesvirus 4 (Epstein-Barr virus)
agcaaccaauguaucccaa

SEQ ID NO: 305898 - RNA, 19 nt, Human herpesvirus 4 (Epstein-Barr virus)
agcaacccccggcucucag

SEQ ID NO: 305899 - RNA, 20 nt, Human herpesvirus 4 (Epstein-Barr virus)
agcaacccccggcucucagg

SEQ ID NO: 305900 - RNA, 21 nt, Human herpesvirus 4 (Epstein-Barr virus)
agcaacccccggcucucaggc

SEQ ID NO: 305901 - RNA, 19 nt, Human herpesvirus 4 (Epstein-Barr virus)
agcaagauccuucuggcac

SEQ ID NO: 305902 - RNA, 16 nt, Human herpesvirus 4 (Epstein-Barr virus)
agcaaucagacaugcg

SEQ ID NO: 305903 - RNA, 20 nt, Human herpesvirus 4 (Epstein-Barr virus)
agcacuuugaaagaugucaa

SEQ ID NO: 305904 - RNA, 13 nt, Human herpesvirus 4 (Epstein-Barr virus)
agcagaaggccau

SEQ ID NO: 305905 - RNA, 17 nt, Human herpesvirus 4 (Epstein-Barr virus)
agcagauagccggccag

SEQ ID NO: 305906 - RNA, 19 nt, Human herpesvirus 4 (Epstein-Barr virus)
agcagauuuccgucagcca

SEQ ID NO: 305907 - RNA, 12 nt, Human herpesvirus 4 (Epstein-Barr virus)
agcagcacugaa

SEQ ID NO: 305908 - RNA, 13 nt, Human herpesvirus 4 (Epstein-Barr virus)
agcagcacugaau

SEQ ID NO: 305909 - RNA, 11 nt, Human herpesvirus 4 (Epstein-Barr virus)
agcaggagcuu

SEQ ID NO: 305910 - RNA, 22 nt, Human herpesvirus 4 (Epstein-Barr virus)
agcaggaggggcaggagcagga

SEQ ID NO: 305911 - RNA, 13 nt, Human herpesvirus 4 (Epstein-Barr virus)
agcaggggugaug

SEQ ID NO: 305912 - RNA, 22 nt, Human herpesvirus 4 (Epstein-Barr virus)
agcaguuguuuuuguggcauug

SEQ ID NO: 305913 - RNA, 15 nt, Human herpesvirus 4 (Epstein-Barr virus)
agcaucacagguuau

SEQ ID NO: 305914 - RNA, 19 nt, Human herpesvirus 4 (Epstein-Barr virus)
agcaucagaugagacuuug

SEQ ID NO: 305915 - RNA, 22 nt, Human herpesvirus 4 (Epstein-Barr virus)
agccacacccaccuaugccaau

SEQ ID NO: 305916 - RNA, 14 nt, Human herpesvirus 4 (Epstein-Barr virus)
agccacgacauuga

SEQ ID NO: 305917 - RNA, 22 nt, Human herpesvirus 4 (Epstein-Barr virus)
ccagcuuugagcuaaugccaua

SEQ ID NO: 305918 - RNA, 20 nt, Human herpesvirus 4 (Epstein-Barr virus)
ccaggaggaggacgugagug

SEQ ID NO: 305919 - RNA, 15 nt, Human herpesvirus 4 (Epstein-Barr virus)
ccaggcccacugcaa

SEQ ID NO: 305920 - RNA, 23 nt, Human herpesvirus 4 (Epstein-Barr virus)
ccaggcgccgcagggguggugga

SEQ ID NO: 305921 - RNA, 19 nt, Human herpesvirus 4 (Epstein-Barr virus)
ccaggggggaccuuaacau

SEQ ID NO: 305922 - RNA, 21 nt, Human herpesvirus 4 (Epstein-Barr virus)
ccaggucgaccaccucaacau

SEQ ID NO: 305923 - RNA, 13 nt, Human herpesvirus 4 (Epstein-Barr virus)
ccaguaugcaguc

SEQ ID NO: 305924 - RNA, 18 nt, Human herpesvirus 4 (Epstein-Barr virus)
ccagucccaacccaaaac

SEQ ID NO: 305925 - RNA, 13 nt, Human herpesvirus 4 (Epstein-Barr virus)
ccagucuauccag

SEQ ID NO: 305926 - RNA, 18 nt, Human herpesvirus 4 (Epstein-Barr virus)
ccagugccuccgccugag

SEQ ID NO: 305927 - RNA, 21 nt, Human herpesvirus 4 (Epstein-Barr virus)
ccaguggcaugggaccgggag

SEQ ID NO: 305928 - RNA, 20 nt, Human herpesvirus 4 (Epstein-Barr virus)
ccagugggguaaaugcaccu

SEQ ID NO: 305929 - RNA, 13 nt, Human herpesvirus 4 (Epstein-Barr virus)
ccagugugccagu

SEQ ID NO: 305930 - RNA, 23 nt, Human herpesvirus 4 (Epstein-Barr virus)
ccaguuucuuuccgcgguggugg

SEQ ID NO: 305931 - RNA, 21 nt, Human herpesvirus 4 (Epstein-Barr virus)
ccauaccugcacggcccucca

SEQ ID NO: 305932 - RNA, 16 nt, Human herpesvirus 4 (Epstein-Barr virus)
ccauagaccaguuuuu

SEQ ID NO: 305933 - RNA, 14 nt, Human herpesvirus 4 (Epstein-Barr virus)
ccaucaccugggua

SEQ ID NO: 305934 - RNA, 17 nt, Human herpesvirus 4 (Epstein-Barr virus)
ccaucagggccaggcug

SEQ ID NO: 305935 - RNA, 16 nt, Human herpesvirus 4 (Epstein-Barr virus)
ccaucgcaagcuccuu

SEQ ID NO: 305936 - RNA, 18 nt, Human herpesvirus 4 (Epstein-Barr virus)
ccaucuugagcgccgugg

SEQ ID NO: 305937 - RNA, 17 nt, Human herpesvirus 4 (Epstein-Barr virus)
ccaugaaucugacucua

SEQ ID NO: 305938 - RNA, 12 nt, Human herpesvirus 4 (Epstein-Barr virus)
ccaugacaucac

SEQ ID NO: 305939 - RNA, 21 nt, Human herpesvirus 4 (Epstein-Barr virus)
ccuaggcacggccucgugcaa

SEQ ID NO: 305940 - RNA, 21 nt, Human herpesvirus 4 (Epstein-Barr virus)
ccuauaugcucucgcacucuu

SEQ ID NO: 305941 - RNA, 20 nt, Human herpesvirus 4 (Epstein-Barr virus)
ccuaucacagggacaucuac

SEQ ID NO: 305942 - RNA, 20 nt, Human herpesvirus 4 (Epstein-Barr virus)
ccuaugccaauccaugccaa

SEQ ID NO: 305943 - RNA, 18 nt, Human herpesvirus 4 (Epstein-Barr virus)
ccucaaaguccugcacua

SEQ ID NO: 305944 - RNA, 12 nt, Human herpesvirus 4 (Epstein-Barr virus)
ccucaaccacaa

SEQ ID NO: 305945 - RNA, 14 nt, Human herpesvirus 4 (Epstein-Barr virus)
ccucacgaucuuca

SEQ ID NO: 305946 - RNA, 20 nt, Human herpesvirus 4 (Epstein-Barr virus)
ccucagucacgggacauuaa

SEQ ID NO: 305947 - RNA, 17 nt, Human herpesvirus 4 (Epstein-Barr virus)
ccucagucuuugcaauu

SEQ ID NO: 305948 - RNA, 20 nt, Human herpesvirus 4 (Epstein-Barr virus)
ccucauagacacaccuaaau

SEQ ID NO: 305949 - RNA, 14 nt, Human herpesvirus 4 (Epstein-Barr virus)
ccuccacggggaca

SEQ ID NO: 305950 - RNA, 18 nt, Human herpesvirus 4 (Epstein-Barr virus)
ccuccagcguggucauaa

SEQ ID NO: 305951 - RNA, 12 nt, Human herpesvirus 4 (Epstein-Barr virus)
ccucccagucua

SEQ ID NO: 305952 - RNA, 16 nt, Human herpesvirus 4 (Epstein-Barr virus)
ccucccagucuaucca

SEQ ID NO: 305953 - RNA, 11 nt, Human herpesvirus 4 (Epstein-Barr virus)
ccucccggggu

SEQ ID NO: 305954 - RNA, 17 nt, Human herpesvirus 4 (Epstein-Barr virus)
ccuccgcauccuaggca

SEQ ID NO: 305955 - RNA, 22 nt, Human herpesvirus 4 (Epstein-Barr virus)
ccuccuaucacagggacaucua

SEQ ID NO: 305956 - RNA, 23 nt, Human herpesvirus 4 (Epstein-Barr virus)
ccuccucuuuuagaaacuaugca

SEQ ID NO: 305957 - RNA, 21 nt, Human herpesvirus 4 (Epstein-Barr virus)
ccucgccuugagggcaaagac

SEQ ID NO: 305958 - RNA, 14 nt, Human herpesvirus 4 (Epstein-Barr virus)
ccucuaucgucuca

SEQ ID NO: 305959 - RNA, 15 nt, Human herpesvirus 4 (Epstein-Barr virus)
ccucugggguccagg

SEQ ID NO: 305960 - RNA, 19 nt, Human herpesvirus 4 (Epstein-Barr virus)
ccucuuacaccagaggcca

SEQ ID NO: 305961 - RNA, 22 nt, Human herpesvirus 4 (Epstein-Barr virus)
ccucuuacaccagaggccacaa

SEQ ID NO: 305962 - RNA, 17 nt, Human herpesvirus 4 (Epstein-Barr virus)
ccucuuguguucuugcc

SEQ ID NO: 305963 - RNA, 19 nt, Human herpesvirus 4 (Epstein-Barr virus)
ccucuuguguucuugccgc

SEQ ID NO: 305964 - RNA, 23 nt, Human herpesvirus 4 (Epstein-Barr virus)
ccucuuuuagaaacuaugcauga

SEQ ID NO: 305965 - RNA, 19 nt, Human herpesvirus 4 (Epstein-Barr virus)
ccugagacagaggugcuca

SEQ ID NO: 305966 - RNA, 18 nt, Human herpesvirus 4 (Epstein-Barr virus)
ccugagccugagccacac

SEQ ID NO: 305967 - RNA, 11 nt, Human herpesvirus 4 (Epstein-Barr virus)
ccugagcugcc

SEQ ID NO: 305968 - RNA, 22 nt, Human herpesvirus 4 (Epstein-Barr virus)
ccugauuugcucuucgugcucu

SEQ ID NO: 305969 - RNA, 14 nt, Human herpesvirus 4 (Epstein-Barr virus)
ccugcaaacugaca

SEQ ID NO: 305970 - RNA, 15 nt, Human herpesvirus 4 (Epstein-Barr virus)
ccugcacacauuuca

SEQ ID NO: 305971 - RNA, 19 nt, Human herpesvirus 4 (Epstein-Barr virus)
ccugcacagaucugaccac

SEQ ID NO: 305972 - RNA, 15 nt, Human herpesvirus 4 (Epstein-Barr virus)
ccugcccucccacuu

SEQ ID NO: 305973 - RNA, 17 nt, Human herpesvirus 4 (Epstein-Barr virus)
ccugccucucuuaugcc

SEQ ID NO: 305974 - RNA, 17 nt, Human herpesvirus 4 (Epstein-Barr virus)
ccugccugcaugcuuag

SEQ ID NO: 305975 - RNA, 16 nt, Human herpesvirus 4 (Epstein-Barr virus)
ccugcgucucauuccc

SEQ ID NO: 305976 - RNA, 17 nt, Human herpesvirus 4 (Epstein-Barr virus)
ccugcucucgaugauug

SEQ ID NO: 305977 - RNA, 13 nt, Human herpesvirus 4 (Epstein-Barr virus)
ccugcugcuagug

SEQ ID NO: 305978 - RNA, 20 nt, Human herpesvirus 4 (Epstein-Barr virus)
ccuggaggccucaggcaaca

SEQ ID NO: 305979 - RNA, 14 nt, Human herpesvirus 4 (Epstein-Barr virus)
ccuggccagcaccc

SEQ ID NO: 305980 - RNA, 17 nt, Human herpesvirus 4 (Epstein-Barr virus)
ccugggcucucaggaac

SEQ ID NO: 305981 - RNA, 15 nt, Human herpesvirus 4 (Epstein-Barr virus)
ccuggggcaacagac

SEQ ID NO: 305982 - RNA, 12 nt, Human herpesvirus 4 (Epstein-Barr virus)
ccuggugccaga

SEQ ID NO: 305983 - RNA, 13 nt, Human herpesvirus 4 (Epstein-Barr virus)
ccugguguugcua

SEQ ID NO: 305984 - RNA, 22 nt, Human herpesvirus 4 (Epstein-Barr virus)
ccuguguucuccccacgggaaa

SEQ ID NO: 305985 - RNA, 13 nt, Human herpesvirus 4 (Epstein-Barr virus)
ccuguuugcuuua

SEQ ID NO: 305986 - RNA, 14 nt, Human herpesvirus 4 (Epstein-Barr virus)
ccuuaaauucaccu

SEQ ID NO: 305987 - RNA, 20 nt, Human herpesvirus 4 (Epstein-Barr virus)
ccuuaaucuagcucacuuuc

SEQ ID NO: 305988 - RNA, 19 nt, Human herpesvirus 4 (Epstein-Barr virus)
ccuucagaagaauguccaa

SEQ ID NO: 305989 - RNA, 16 nt, Human herpesvirus 4 (Epstein-Barr virus)
ccuuccagacuaugca

SEQ ID NO: 305990 - RNA, 14 nt, Human herpesvirus 4 (Epstein-Barr virus)
ccuuccuguguucu

SEQ ID NO: 305991 - RNA, 15 nt, Human herpesvirus 4 (Epstein-Barr virus)
ccuucucaugcuccu

SEQ ID NO: 305992 - RNA, 16 nt, Human herpesvirus 4 (Epstein-Barr virus)
ccuucuccaucuccau

SEQ ID NO: 305993 - RNA, 12 nt, Human herpesvirus 4 (Epstein-Barr virus)
ccuucucugaug

SEQ ID NO: 305994 - RNA, 13 nt, Human herpesvirus 4 (Epstein-Barr virus)
ccuucucugaugg

SEQ ID NO: 305995 - RNA, 22 nt, Human herpesvirus 4 (Epstein-Barr virus)
ccuucuggcacgacuguuccua

SEQ ID NO: 305996 - RNA, 22 nt, Human herpesvirus 4 (Epstein-Barr virus)
ccuugagcccauucucguccau

SEQ ID NO: 305997 - RNA, 16 nt, Human herpesvirus 4 (Epstein-Barr virus)
ccuugagggcaaagac

SEQ ID NO: 305998 - RNA, 15 nt, Human herpesvirus 4 (Epstein-Barr virus)
ccuugaggugccaca

SEQ ID NO: 305999 - RNA, 18 nt, Human herpesvirus 4 (Epstein-Barr virus)
cgugcgcggaaucaggac

SEQ ID NO: 306000 - RNA, 17 nt, Human herpesvirus 4 (Epstein-Barr virus)
cgugcgugaucaugagg

SEQ ID NO: 306001 - RNA, 21 nt, Human herpesvirus 4 (Epstein-Barr virus)
cguggcauccuucagauucag

SEQ ID NO: 306002 - RNA, 12 nt, Human herpesvirus 4 (Epstein-Barr virus)
cgugguggcauu

SEQ ID NO: 306003 - RNA, 11 nt, Human herpesvirus 4 (Epstein-Barr virus)
cgugugcaccc

SEQ ID NO: 306004 - RNA, 19 nt, Human herpesvirus 4 (Epstein-Barr virus)
cguuggaugcaguccuccg

SEQ ID NO: 306005 - RNA, 16 nt, Human herpesvirus 4 (Epstein-Barr virus)
cguuuauucagcaauu

SEQ ID NO: 306006 - RNA, 21 nt, Human herpesvirus 4 (Epstein-Barr virus)
cguuugugauucccagaaaga

SEQ ID NO: 306007 - RNA, 16 nt, Human herpesvirus 4 (Epstein-Barr virus)
cuaaaaccuacaugaa

SEQ ID NO: 306008 - RNA, 21 nt, Human herpesvirus 4 (Epstein-Barr virus)
cuaaacgugauggugcugguc

SEQ ID NO: 306009 - RNA, 14 nt, Human herpesvirus 4 (Epstein-Barr virus)
cuaaaggcgcaguc

SEQ ID NO: 306010 - RNA, 21 nt, Human herpesvirus 4 (Epstein-Barr virus)
cuaaaggcgcaguccgccaug

SEQ ID NO: 306011 - RNA, 12 nt, Human herpesvirus 4 (Epstein-Barr virus)
cuaaauuugcug

SEQ ID NO: 306012 - RNA, 22 nt, Human herpesvirus 4 (Epstein-Barr virus)
cuaacgggaggaaaugaaccca

SEQ ID NO: 306013 - RNA, 19 nt, Human herpesvirus 4 (Epstein-Barr virus)
cuaacggucgaaacccacc

SEQ ID NO: 306014 - RNA, 15 nt, Human herpesvirus 4 (Epstein-Barr virus)
cuaacuuggcaucuc

SEQ ID NO: 306015 - RNA, 16 nt, Human herpesvirus 4 (Epstein-Barr virus)
cuaacuuggcaucucu

SEQ ID NO: 306016 - RNA, 19 nt, Human herpesvirus 4 (Epstein-Barr virus)
cuaagccaggauaaucagg

SEQ ID NO: 306017 - RNA, 15 nt, Human herpesvirus 4 (Epstein-Barr virus)
cuaagguccaucccg

SEQ ID NO: 306018 - RNA, 19 nt, Human herpesvirus 4 (Epstein-Barr virus)
cuaauguaccucauagaca

SEQ ID NO: 306019 - RNA, 11 nt, Human herpesvirus 4 (Epstein-Barr virus)
cuaauguggug

SEQ ID NO: 306020 - RNA, 20 nt, Human herpesvirus 4 (Epstein-Barr virus)
cuacaaaaguacacuagcug

SEQ ID NO: 306021 - RNA, 18 nt, Human herpesvirus 4 (Epstein-Barr virus)
cuacaaguuaauuuacaa

SEQ ID NO: 306022 - RNA, 16 nt, Human herpesvirus 4 (Epstein-Barr virus)
cuacaauaaacccaau

SEQ ID NO: 306023 - RNA, 23 nt, Human herpesvirus 4 (Epstein-Barr virus)
cuacaccaccccaccauaugaug

SEQ ID NO: 306024 - RNA, 16 nt, Human herpesvirus 4 (Epstein-Barr virus)
cuacaccgaucaccag

SEQ ID NO: 306025 - RNA, 20 nt, Human herpesvirus 4 (Epstein-Barr virus)
cuacacucuggggucucagg

SEQ ID NO: 306026 - RNA, 21 nt, Human herpesvirus 4 (Epstein-Barr virus)
cuacacucuggggucucaggc

SEQ ID NO: 306027 - RNA, 21 nt, Human herpesvirus 4 (Epstein-Barr virus)
cugcgccugagcugccuggug

SEQ ID NO: 306028 - RNA, 17 nt, Human herpesvirus 4 (Epstein-Barr virus)
cugcgugagaugaacac

SEQ ID NO: 306029 - RNA, 16 nt, Human herpesvirus 4 (Epstein-Barr virus)
cugcuccagugccucc

SEQ ID NO: 306030 - RNA, 21 nt, Human herpesvirus 4 (Epstein-Barr virus)
cugcucccgccucagggaucg

SEQ ID NO: 306031 - RNA, 19 nt, Human herpesvirus 4 (Epstein-Barr virus)
cugcucuucaaccuuggca

SEQ ID NO: 306032 - RNA, 14 nt, Human herpesvirus 4 (Epstein-Barr virus)
cugcugaggguugg

SEQ ID NO: 306033 - RNA, 12 nt, Human herpesvirus 4 (Epstein-Barr virus)
cugcugcugcuu

SEQ ID NO: 306034 - RNA, 16 nt, Human herpesvirus 4 (Epstein-Barr virus)
cugcuggacuccgagg

SEQ ID NO: 306035 - RNA, 19 nt, Human herpesvirus 4 (Epstein-Barr virus)
cugcuggccgagcuggagg

SEQ ID NO: 306036 - RNA, 21 nt, Human herpesvirus 4 (Epstein-Barr virus)
cugcugguuuggagaaaacgg

SEQ ID NO: 306037 - RNA, 13 nt, Human herpesvirus 4 (Epstein-Barr virus)
cugcuuuuagccu

SEQ ID NO: 306038 - RNA, 22 nt, Human herpesvirus 4 (Epstein-Barr virus)
cuggaacggugggaagcucagc

SEQ ID NO: 306039 - RNA, 15 nt, Human herpesvirus 4 (Epstein-Barr virus)
cuggacacaggacua

SEQ ID NO: 306040 - RNA, 16 nt, Human herpesvirus 4 (Epstein-Barr virus)
cuggacauagaggggc

SEQ ID NO: 306041 - RNA, 21 nt, Human herpesvirus 4 (Epstein-Barr virus)
cuggaccagaaggcuccggcg

SEQ ID NO: 306042 - RNA, 14 nt, Human herpesvirus 4 (Epstein-Barr virus)
cuggacccccggag

SEQ ID NO: 306043 - RNA, 18 nt, Human herpesvirus 4 (Epstein-Barr virus)
cuggacccccggagucug

SEQ ID NO: 306044 - RNA, 23 nt, Human herpesvirus 4 (Epstein-Barr virus)
cuggacucucuguuucuguacaa

SEQ ID NO: 306045 - RNA, 14 nt, Human herpesvirus 4 (Epstein-Barr virus)
cuggacugugguau

SEQ ID NO: 306046 - RNA, 15 nt, Human herpesvirus 4 (Epstein-Barr virus)
cuggagaucuucuca

SEQ ID NO: 306047 - RNA, 14 nt, Human herpesvirus 4 (Epstein-Barr virus)
cuggagcuggugca

SEQ ID NO: 306048 - RNA, 19 nt, Human herpesvirus 4 (Epstein-Barr virus)
cuggaggccucaggcaaca

SEQ ID NO: 306049 - RNA, 22 nt, Human herpesvirus 4 (Epstein-Barr virus)
cuggcagggggccgggcgcgcu

SEQ ID NO: 306050 - RNA, 20 nt, Human herpesvirus 4 (Epstein-Barr virus)
cuggccaucugucuugucac

SEQ ID NO: 306051 - RNA, 16 nt, Human herpesvirus 4 (Epstein-Barr virus)
cuggccauggccgaga

SEQ ID NO: 306052 - RNA, 19 nt, Human herpesvirus 4 (Epstein-Barr virus)
cuggcccacuggaugcagg

SEQ ID NO: 306053 - RNA, 23 nt, Human herpesvirus 4 (Epstein-Barr virus)
cuggccggccgcccccugaccuc

SEQ ID NO: 306054 - RNA, 19 nt, Human herpesvirus 4 (Epstein-Barr virus)
cuggcuuccacucacggga

SEQ ID NO: 306055 - RNA, 21 nt, Human herpesvirus 4 (Epstein-Barr virus)
cugggagggccaucgcaagcu

SEQ ID NO: 306056 - RNA, 15 nt, Human herpesvirus 4 (Epstein-Barr virus)
cugggaggugcugag

SEQ ID NO: 306057 - RNA, 21 nt, Human herpesvirus 4 (Epstein-Barr virus)
cuggggccaaggacccccgcg

SEQ ID NO: 306058 - RNA, 19 nt, Human herpesvirus 4 (Epstein-Barr virus)
cucaugcuccuauggacac

SEQ ID NO: 306059 - RNA, 22 nt, Human herpesvirus 4 (Epstein-Barr virus)
cucauuacuuguucuuuuguaa

SEQ ID NO: 306060 - RNA, 15 nt, Human herpesvirus 4 (Epstein-Barr virus)
cucauuauugcucuc

SEQ ID NO: 306061 - RNA, 17 nt, Human herpesvirus 4 (Epstein-Barr virus)
cucauucccccaugaga

SEQ ID NO: 306062 - RNA, 20 nt, Human herpesvirus 4 (Epstein-Barr virus)
cucauuuugugugccuccuc

SEQ ID NO: 306063 - RNA, 23 nt, Human herpesvirus 4 (Epstein-Barr virus)
cuccaacgagggcagacaccacc

SEQ ID NO: 306064 - RNA, 18 nt, Human herpesvirus 4 (Epstein-Barr virus)
cuccauguccuguggugu

SEQ ID NO: 306065 - RNA, 23 nt, Human herpesvirus 4 (Epstein-Barr virus)
cucccacggaccccccucugaug

SEQ ID NO: 306066 - RNA, 15 nt, Human herpesvirus 4 (Epstein-Barr virus)
cucccacugucacug

SEQ ID NO: 306067 - RNA, 14 nt, Human herpesvirus 4 (Epstein-Barr virus)
cucccccagaucac

SEQ ID NO: 306068 - RNA, 18 nt, Human herpesvirus 4 (Epstein-Barr virus)
cuccccugacgcuguggc

SEQ ID NO: 306069 - RNA, 17 nt, Human herpesvirus 4 (Epstein-Barr virus)
cucccugacgguggugg

SEQ ID NO: 306070 - RNA, 17 nt, Human herpesvirus 4 (Epstein-Barr virus)
cuccgagaggaugaucc

SEQ ID NO: 306071 - RNA, 14 nt, Human herpesvirus 4 (Epstein-Barr virus)
cuccuaucacaggg

SEQ ID NO: 306072 - RNA, 15 nt, Human herpesvirus 4 (Epstein-Barr virus)
cuccuaucacaggga

SEQ ID NO: 306073 - RNA, 22 nt, Human herpesvirus 4 (Epstein-Barr virus)
cuccuaucacagggacaucuac

SEQ ID NO: 306074 - RNA, 15 nt, Human herpesvirus 4 (Epstein-Barr virus)
cuccuccagcagugg

SEQ ID NO: 306075 - RNA, 17 nt, Human herpesvirus 4 (Epstein-Barr virus)
cuccuuaaauucaccua

SEQ ID NO: 306076 - RNA, 15 nt, Human herpesvirus 4 (Epstein-Barr virus)
cucgagccauuugag

SEQ ID NO: 306077 - RNA, 23 nt, Human herpesvirus 4 (Epstein-Barr virus)
cucgccaucuacccaacagucuu

SEQ ID NO: 306078 - RNA, 21 nt, Human herpesvirus 4 (Epstein-Barr virus)
cucgcguuggaaaacauuagc

SEQ ID NO: 306079 - RNA, 16 nt, Human herpesvirus 4 (Epstein-Barr virus)
cucgcuggcucgccuc

SEQ ID NO: 306080 - RNA, 13 nt, Human herpesvirus 4 (Epstein-Barr virus)
cucggauagggga

SEQ ID NO: 306081 - RNA, 14 nt, Human herpesvirus 4 (Epstein-Barr virus)
cucggccacacagu

SEQ ID NO: 306082 - RNA, 18 nt, Human herpesvirus 4 (Epstein-Barr virus)
cucuaacuuggcaucucu

SEQ ID NO: 306083 - RNA, 19 nt, Human herpesvirus 4 (Epstein-Barr virus)
cucuacugccuuguccacu

SEQ ID NO: 306084 - RNA, 17 nt, Human herpesvirus 4 (Epstein-Barr virus)
cucuauugguugaucuc

SEQ ID NO: 306085 - RNA, 18 nt, Human herpesvirus 4 (Epstein-Barr virus)
cucuauugguugaucucc

SEQ ID NO: 306086 - RNA, 16 nt, Human herpesvirus 4 (Epstein-Barr virus)
cucucagcacuuugcc

SEQ ID NO: 306087 - RNA, 11 nt, Human herpesvirus 4 (Epstein-Barr virus)
cugguacagga

SEQ ID NO: 306088 - RNA, 17 nt, Human herpesvirus 4 (Epstein-Barr virus)
cuggucaccagcuucga

SEQ ID NO: 306089 - RNA, 21 nt, Human herpesvirus 4 (Epstein-Barr virus)
cuggugagaaguugguggugg

SEQ ID NO: 306090 - RNA, 12 nt, Human herpesvirus 4 (Epstein-Barr virus)
cuggugccuugg

SEQ ID NO: 306091 - RNA, 21 nt, Human herpesvirus 4 (Epstein-Barr virus)
cuggugcgguuauaacugcca

SEQ ID NO: 306092 - RNA, 15 nt, Human herpesvirus 4 (Epstein-Barr virus)
cuguacauacugcaa

SEQ ID NO: 306093 - RNA, 21 nt, Human herpesvirus 4 (Epstein-Barr virus)
cuguaguggccuucucugaug

SEQ ID NO: 306094 - RNA, 21 nt, Human herpesvirus 4 (Epstein-Barr virus)
cuguaugguauucuacuuuaa

SEQ ID NO: 306095 - RNA, 18 nt, Human herpesvirus 4 (Epstein-Barr virus)
cuguauuuacaaacacua

SEQ ID NO: 306096 - RNA, 20 nt, Human herpesvirus 4 (Epstein-Barr virus)
cuguauuuacaaacacuaca

SEQ ID NO: 306097 - RNA, 13 nt, Human herpesvirus 4 (Epstein-Barr virus)
cugucacaccagu

SEQ ID NO: 306098 - RNA, 15 nt, Human herpesvirus 4 (Epstein-Barr virus)
cuguccaagugcuau

SEQ ID NO: 306099 - RNA, 23 nt, Human herpesvirus 4 (Epstein-Barr virus)
cugucccuggagcuggugcaccu

SEQ ID NO: 306100 - RNA, 21 nt, Human herpesvirus 4 (Epstein-Barr virus)
cugucuuuccucuuauuacau

SEQ ID NO: 306101 - RNA, 17 nt, Human herpesvirus 4 (Epstein-Barr virus)
cugugacuacaccauca

SEQ ID NO: 306102 - RNA, 15 nt, Human herpesvirus 4 (Epstein-Barr virus)
cugugccauggugcc

SEQ ID NO: 306103 - RNA, 17 nt, Human herpesvirus 4 (Epstein-Barr virus)
cuguggagagaggcaaa

SEQ ID NO: 306104 - RNA, 15 nt, Human herpesvirus 4 (Epstein-Barr virus)
cuguggccccggcug

SEQ ID NO: 306105 - RNA, 19 nt, Human herpesvirus 4 (Epstein-Barr virus)
cugugguaaccggugggcu

SEQ ID NO: 306106 - RNA, 12 nt, Human herpesvirus 4 (Epstein-Barr virus)
cuguggugugcu

SEQ ID NO: 306107 - RNA, 14 nt, Human herpesvirus 4 (Epstein-Barr virus)
cuguguacgugccu

SEQ ID NO: 306108 - RNA, 17 nt, Human herpesvirus 4 (Epstein-Barr virus)
cugugucuucugucucg

SEQ ID NO: 306109 - RNA, 15 nt, Human herpesvirus 4 (Epstein-Barr virus)
cugugugcccggggg

SEQ ID NO: 306110 - RNA, 19 nt, Human herpesvirus 4 (Epstein-Barr virus)
cuguguuucccgacgccaa

SEQ ID NO: 306111 - RNA, 17 nt, Human herpesvirus 4 (Epstein-Barr virus)
cuguuauggccaugaua

SEQ ID NO: 306112 - RNA, 18 nt, Human herpesvirus 4 (Epstein-Barr virus)
cuguuccuauaugcucuc

SEQ ID NO: 306113 - RNA, 16 nt, Human herpesvirus 4 (Epstein-Barr virus)
cuguuccuucugcucc

SEQ ID NO: 306114 - RNA, 15 nt, Human herpesvirus 4 (Epstein-Barr virus)
cuguuugcuuuaugg

SEQ ID NO: 306115 - RNA, 23 nt, Human herpesvirus 4 (Epstein-Barr virus)
cuguuuguccagcagggccuuga

SEQ ID NO: 306116 - RNA, 17 nt, Human herpesvirus 4 (Epstein-Barr virus)
cuuaaccgcuacaaguu

SEQ ID NO: 306117 - RNA, 14 nt, Human herpesvirus 4 (Epstein-Barr virus)
cuuacagcacauuu

SEQ ID NO: 306118 - RNA, 16 nt, Human herpesvirus 4 (Epstein-Barr virus)
cuuaccugcgucuguu

SEQ ID NO: 306119 - RNA, 16 nt, Human herpesvirus 4 (Epstein-Barr virus)
cuuagcccagaggcgc

SEQ ID NO: 306120 - RNA, 24 nt, Human herpesvirus 4 (Epstein-Barr virus)
cuuauuauugaugugacuugugau

SEQ ID NO: 306121 - RNA, 18 nt, Human herpesvirus 4 (Epstein-Barr virus)
cuucagaagaauguccaa

SEQ ID NO: 306122 - RNA, 14 nt, Human herpesvirus 4 (Epstein-Barr virus)
cuucagauucagac

SEQ ID NO: 306123 - RNA, 23 nt, Human herpesvirus 4 (Epstein-Barr virus)
cuucagugaccggacgggucuca

SEQ ID NO: 306124 - RNA, 15 nt, Human herpesvirus 4 (Epstein-Barr virus)
cuucauguccacuga

SEQ ID NO: 306125 - RNA, 21 nt, Human herpesvirus 4 (Epstein-Barr virus)
cuucauguccacugagcaaga

SEQ ID NO: 306126 - RNA, 13 nt, Human herpesvirus 4 (Epstein-Barr virus)
cuuccaacgcauc

SEQ ID NO: 306127 - RNA, 13 nt, Human herpesvirus 4 (Epstein-Barr virus)
cuuccacaccauc

SEQ ID NO: 306128 - RNA, 22 nt, Human herpesvirus 4 (Epstein-Barr virus)
cuuccacccccuggagccagcg

SEQ ID NO: 306129 - RNA, 14 nt, Human herpesvirus 4 (Epstein-Barr virus)
cuuccagacuaugc

SEQ ID NO: 306130 - RNA, 15 nt, Human herpesvirus 4 (Epstein-Barr virus)
cuuccagacuaugca

SEQ ID NO: 306131 - RNA, 14 nt, Human herpesvirus 4 (Epstein-Barr virus)
cuuccagagcucua

SEQ ID NO: 306132 - RNA, 18 nt, Human herpesvirus 4 (Epstein-Barr virus)
cuucccuguuugcuuuau

SEQ ID NO: 306133 - RNA, 22 nt, Human herpesvirus 4 (Epstein-Barr virus)
cuuccuagccuucuuccuagac

SEQ ID NO: 306134 - RNA, 15 nt, Human herpesvirus 4 (Epstein-Barr virus)
cuuccuguguucucc

SEQ ID NO: 306135 - RNA, 13 nt, Human herpesvirus 4 (Epstein-Barr virus)
cuucgcauuacac

SEQ ID NO: 306136 - RNA, 21 nt, Human herpesvirus 4 (Epstein-Barr virus)
cuucuccaucuccaucagggc

SEQ ID NO: 306137 - RNA, 12 nt, Human herpesvirus 4 (Epstein-Barr virus)
cuucucugcucg

SEQ ID NO: 306138 - RNA, 11 nt, Human herpesvirus 4 (Epstein-Barr virus)
cuucugaagau

SEQ ID NO: 306139 - RNA, 19 nt, Human herpesvirus 4 (Epstein-Barr virus)
cuucugcagaaggccauug

SEQ ID NO: 306140 - RNA, 12 nt, Human herpesvirus 4 (Epstein-Barr virus)
cuucugcugcug

SEQ ID NO: 306141 - RNA, 18 nt, Human herpesvirus 4 (Epstein-Barr virus)
gaaaggcuauaugagcua

SEQ ID NO: 306142 - RNA, 16 nt, Human herpesvirus 4 (Epstein-Barr virus)
gaaagggcauguggug

SEQ ID NO: 306143 - RNA, 15 nt, Human herpesvirus 4 (Epstein-Barr virus)
gaaaggguacccggg

SEQ ID NO: 306144 - RNA, 16 nt, Human herpesvirus 4 (Epstein-Barr virus)
gaacacggagaucuca

SEQ ID NO: 306145 - RNA, 15 nt, Human herpesvirus 4 (Epstein-Barr virus)
gaacacuccacagau

SEQ ID NO: 306146 - RNA, 23 nt, Human herpesvirus 4 (Epstein-Barr virus)
gaacagcuucgcaaguuccucaa

SEQ ID NO: 306147 - RNA, 23 nt, Human herpesvirus 4 (Epstein-Barr virus)
gaacccagggguggcaguggaug

SEQ ID NO: 306148 - RNA, 19 nt, Human herpesvirus 4 (Epstein-Barr virus)
gaaccugagccugagccac

SEQ ID NO: 306149 - RNA, 10 nt, Human herpesvirus 4 (Epstein-Barr virus)
gaacgugaca

SEQ ID NO: 306150 - RNA, 21 nt, Human herpesvirus 4 (Epstein-Barr virus)
gaacuccgcccaggucuugcc

SEQ ID NO: 306151 - RNA, 22 nt, Human herpesvirus 4 (Epstein-Barr virus)
gaacuccgcccaggucuugcca

SEQ ID NO: 306152 - RNA, 18 nt, Human herpesvirus 4 (Epstein-Barr virus)
gaacugacgcuccaggau

SEQ ID NO: 306153 - RNA, 14 nt, Human herpesvirus 4 (Epstein-Barr virus)
gaacuuucuugaac

SEQ ID NO: 306154 - RNA, 16 nt, Human herpesvirus 4 (Epstein-Barr virus)
gaagacuccugccuga

SEQ ID NO: 306155 - RNA, 19 nt, Human herpesvirus 4 (Epstein-Barr virus)
gaagaguaccccagugacg

SEQ ID NO: 306156 - RNA, 17 nt, Human herpesvirus 4 (Epstein-Barr virus)
gaagauggccucaaagu

SEQ ID NO: 306157 - RNA, 20 nt, Human herpesvirus 4 (Epstein-Barr virus)
gaagauugucacagcugcug

SEQ ID NO: 306158 - RNA, 21 nt, Human herpesvirus 4 (Epstein-Barr virus)
gaagauuuggcgucuaugcuu

SEQ ID NO: 306159 - RNA, 23 nt, Human herpesvirus 4 (Epstein-Barr virus)
gaagcaacccccggcucucaggc

SEQ ID NO: 306160 - RNA, 22 nt, Human herpesvirus 4 (Epstein-Barr virus)
gaagcccucuggacuuccaugu

SEQ ID NO: 306161 - RNA, 16 nt, Human herpesvirus 4 (Epstein-Barr virus)
gaagcgagacaguacu

SEQ ID NO: 306162 - RNA, 16 nt, Human herpesvirus 4 (Epstein-Barr virus)
gaagcggucucagaca

SEQ ID NO: 306163 - RNA, 15 nt, Human herpesvirus 4 (Epstein-Barr virus)
gaagcuggacgugaa

SEQ ID NO: 306164 - RNA, 21 nt, Human herpesvirus 4 (Epstein-Barr virus)
gaagcuugugaacuuuaacau

SEQ ID NO: 306165 - RNA, 15 nt, Human herpesvirus 4 (Epstein-Barr virus)
gaaggagagcuggau

SEQ ID NO: 306166 - RNA, 21 nt, Human herpesvirus 4 (Epstein-Barr virus)
gaaggcuagacgcagcugugu

SEQ ID NO: 306167 - RNA, 14 nt, Human herpesvirus 4 (Epstein-Barr virus)
gaagugguugccau

SEQ ID NO: 306168 - RNA, 14 nt, Human herpesvirus 4 (Epstein-Barr virus)
gaauaaggcucuga

SEQ ID NO: 306169 - RNA, 19 nt, Human herpesvirus 4 (Epstein-Barr virus)
gaauaaggcucugaagcaa

SEQ ID NO: 306170 - RNA, 16 nt, Human herpesvirus 4 (Epstein-Barr virus)
gaauaaucaaccugua

SEQ ID NO: 306171 - RNA, 19 nt, Human herpesvirus 4 (Epstein-Barr virus)
gaauacccugcauggccag

SEQ ID NO: 306172 - RNA, 22 nt, Human herpesvirus 4 (Epstein-Barr virus)
gaaugacgggaaaguaaccuca

SEQ ID NO: 306173 - RNA, 23 nt, Human herpesvirus 4 (Epstein-Barr virus)
gaaugacgggaaaguaaccucag

SEQ ID NO: 306174 - RNA, 15 nt, Human herpesvirus 4 (Epstein-Barr virus)
gaauguaacacuacu

SEQ ID NO: 306175 - RNA, 21 nt, Human herpesvirus 4 (Epstein-Barr virus)
gaauuagggccuuuucccuca

SEQ ID NO: 306176 - RNA, 18 nt, Human herpesvirus 4 (Epstein-Barr virus)
gaauugcuguuuuugcca

SEQ ID NO: 306177 - RNA, 14 nt, Human herpesvirus 4 (Epstein-Barr virus)
gaauuggguuaaga

SEQ ID NO: 306178 - RNA, 15 nt, Human herpesvirus 4 (Epstein-Barr virus)
gacaacggcauuccc

SEQ ID NO: 306179 - RNA, 16 nt, Human herpesvirus 4 (Epstein-Barr virus)
gacaacggcauucccg

SEQ ID NO: 306180 - RNA, 15 nt, Human herpesvirus 4 (Epstein-Barr virus)
gacaagacagucaca

SEQ ID NO: 306181 - RNA, 15 nt, Human herpesvirus 4 (Epstein-Barr virus)
gacaaggaguaccug

SEQ ID NO: 306182 - RNA, 20 nt, Human herpesvirus 4 (Epstein-Barr virus)
gacaaggcaggcgcuguuau

SEQ ID NO: 306183 - RNA, 20 nt, Human herpesvirus 4 (Epstein-Barr virus)
gacaaggcaguagaggacac

SEQ ID NO: 306184 - RNA, 19 nt, Human herpesvirus 4 (Epstein-Barr virus)
gacaaugagcggggagaua

SEQ ID NO: 306185 - RNA, 13 nt, Human herpesvirus 4 (Epstein-Barr virus)
gacacacauggca

SEQ ID NO: 306186 - RNA, 14 nt, Human herpesvirus 4 (Epstein-Barr virus)
gacacacgagccau

SEQ ID NO: 306187 - RNA, 12 nt, Human herpesvirus 4 (Epstein-Barr virus)
gacaccaacaca

SEQ ID NO: 306188 - RNA, 19 nt, Human herpesvirus 4 (Epstein-Barr virus)
gacagaaauugggugacca

SEQ ID NO: 306189 - RNA, 21 nt, Human herpesvirus 4 (Epstein-Barr virus)
gacagauuugggagggaccac

SEQ ID NO: 306190 - RNA, 19 nt, Human herpesvirus 4 (Epstein-Barr virus)
gacagcgagagguaaugau

SEQ ID NO: 306191 - RNA, 16 nt, Human herpesvirus 4 (Epstein-Barr virus)
gacaguaacacagggu

SEQ ID NO: 306192 - RNA, 15 nt, Human herpesvirus 4 (Epstein-Barr virus)
gacaugguguagaca

SEQ ID NO: 306193 - RNA, 21 nt, Human herpesvirus 4 (Epstein-Barr virus)
gagacaacggccgagaucucu

SEQ ID NO: 306194 - RNA, 23 nt, Human herpesvirus 4 (Epstein-Barr virus)
gagacacacguggcuuccagaga

SEQ ID NO: 306195 - RNA, 18 nt, Human herpesvirus 4 (Epstein-Barr virus)
gagacuggaacuguacua

SEQ ID NO: 306196 - RNA, 18 nt, Human herpesvirus 4 (Epstein-Barr virus)
gagacuggcaacuccucu

SEQ ID NO: 306197 - RNA, 17 nt, Human herpesvirus 4 (Epstein-Barr virus)
gagacuuaugcuaacau

SEQ ID NO: 306198 - RNA, 22 nt, Human herpesvirus 4 (Epstein-Barr virus)
gagaggauggcacgguccagaa

SEQ ID NO: 306199 - RNA, 18 nt, Human herpesvirus 4 (Epstein-Barr virus)
gagagggaugggcuugau

SEQ ID NO: 306200 - RNA, 21 nt, Human herpesvirus 4 (Epstein-Barr virus)
gagagguccauggcugcaccg

SEQ ID NO: 306201 - RNA, 17 nt, Human herpesvirus 4 (Epstein-Barr virus)
gagauagggaccagagg

SEQ ID NO: 306202 - RNA, 16 nt, Human herpesvirus 4 (Epstein-Barr virus)
gagaugauaaugauga

SEQ ID NO: 306203 - RNA, 12 nt, Human herpesvirus 4 (Epstein-Barr virus)
gagaugauucau

SEQ ID NO: 306204 - RNA, 23 nt, Human herpesvirus 4 (Epstein-Barr virus)
gagauugguaccagaagagucau

SEQ ID NO: 306205 - RNA, 20 nt, Human herpesvirus 4 (Epstein-Barr virus)
gagauuguuuacaucugccc

SEQ ID NO: 306206 - RNA, 16 nt, Human herpesvirus 4 (Epstein-Barr virus)
gagcagaaggccaugg

SEQ ID NO: 306207 - RNA, 17 nt, Human herpesvirus 4 (Epstein-Barr virus)
gagcaugagcuccucuc

SEQ ID NO: 306208 - RNA, 12 nt, Human herpesvirus 4 (Epstein-Barr virus)
gagcaugaucag

SEQ ID NO: 306209 - RNA, 16 nt, Human herpesvirus 4 (Epstein-Barr virus)
gagcccauucucgucc

SEQ ID NO: 306210 - RNA, 15 nt, Human herpesvirus 4 (Epstein-Barr virus)
gagcccgacgaacuc

SEQ ID NO: 306211 - RNA, 24 nt, Human herpesvirus 4 (Epstein-Barr virus)
gagccgugucuccugacgccaaug

SEQ ID NO: 306212 - RNA, 22 nt, Human herpesvirus 4 (Epstein-Barr virus)
gagccugccggaguuuucuccc

SEQ ID NO: 306213 - RNA, 14 nt, Human herpesvirus 4 (Epstein-Barr virus)
gagcgcaucgucuc

SEQ ID NO: 306214 - RNA, 22 nt, Human herpesvirus 4 (Epstein-Barr virus)
gagcggcugugagcgcacguga

SEQ ID NO: 306215 - RNA, 19 nt, Human herpesvirus 4 (Epstein-Barr virus)
gagcggguggaggagcucc

SEQ ID NO: 306216 - RNA, 18 nt, Human herpesvirus 4 (Epstein-Barr virus)
gagcgugugcacccggcu

SEQ ID NO: 306217 - RNA, 15 nt, Human herpesvirus 4 (Epstein-Barr virus)
gagcuccgugagcag

SEQ ID NO: 306218 - RNA, 16 nt, Human herpesvirus 4 (Epstein-Barr virus)
gagcuccgugggccca

SEQ ID NO: 306219 - RNA, 21 nt, Human herpesvirus 4 (Epstein-Barr virus)
gagcucuacaaccccuuccac

SEQ ID NO: 306220 - RNA, 24 nt, Human herpesvirus 4 (Epstein-Barr virus)
gagcuguguuucccgacgccaaug

SEQ ID NO: 306221 - RNA, 21 nt, Human herpesvirus 4 (Epstein-Barr virus)
gaggaaaggcuauaugagcua

SEQ ID NO: 306222 - RNA, 13 nt, Human herpesvirus 4 (Epstein-Barr virus)
gaggaacggugau

SEQ ID NO: 306223 - RNA, 14 nt, Human herpesvirus 4 (Epstein-Barr virus)
gaggaaggccacaa

SEQ ID NO: 306224 - RNA, 15 nt, Human herpesvirus 4 (Epstein-Barr virus)
gaggacuaauguucu

SEQ ID NO: 306225 - RNA, 17 nt, Human herpesvirus 4 (Epstein-Barr virus)
gaggagauccgccagga

SEQ ID NO: 306226 - RNA, 18 nt, Human herpesvirus 4 (Epstein-Barr virus)
gaggaggcuggugccuug

SEQ ID NO: 306227 - RNA, 14 nt, Human herpesvirus 4 (Epstein-Barr virus)
gaggaugagaccag

SEQ ID NO: 306228 - RNA, 21 nt, Human herpesvirus 4 (Epstein-Barr virus)
gaggauggaaagggcaugugg

SEQ ID NO: 306229 - RNA, 15 nt, Human herpesvirus 4 (Epstein-Barr virus)
gaggcauaacggugg

SEQ ID NO: 306230 - RNA, 21 nt, Human herpesvirus 4 (Epstein-Barr virus)
gaggccagagacgagcugcga

SEQ ID NO: 306231 - RNA, 22 nt, Human herpesvirus 4 (Epstein-Barr virus)
gaggccccggccgccgugucau

SEQ ID NO: 306232 - RNA, 21 nt, Human herpesvirus 4 (Epstein-Barr virus)
gaggccuuuuuggcguggugg

SEQ ID NO: 306233 - RNA, 23 nt, Human herpesvirus 4 (Epstein-Barr virus)
gaggccuuuuuggcgugguggca

SEQ ID NO: 306234 - RNA, 14 nt, Human herpesvirus 4 (Epstein-Barr virus)
gaggcggaagacca

SEQ ID NO: 306235 - RNA, 18 nt, Human herpesvirus 4 (Epstein-Barr virus)
gaggcggaagaccaggag

SEQ ID NO: 306236 - RNA, 11 nt, Human herpesvirus 4 (Epstein-Barr virus)
gaggcugcuaa

SEQ ID NO: 306237 - RNA, 18 nt, Human herpesvirus 4 (Epstein-Barr virus)
gagggacaguaccacaag

SEQ ID NO: 306238 - RNA, 22 nt, Human herpesvirus 4 (Epstein-Barr virus)
gagggcagcgaagaacacucca

SEQ ID NO: 306239 - RNA, 22 nt, Human herpesvirus 4 (Epstein-Barr virus)
gagggccugcggggaaaccaac

SEQ ID NO: 306240 - RNA, 21 nt, Human herpesvirus 4 (Epstein-Barr virus)
gauggcccugaucugggagau

SEQ ID NO: 306241 - RNA, 22 nt, Human herpesvirus 4 (Epstein-Barr virus)
gauggccucaaaguccugcacu

SEQ ID NO: 306242 - RNA, 22 nt, Human herpesvirus 4 (Epstein-Barr virus)
gauggccuggagagcaugcagg

SEQ ID NO: 306243 - RNA, 21 nt, Human herpesvirus 4 (Epstein-Barr virus)
gauuaggagcagggcccagug

SEQ ID NO: 306244 - RNA, 11 nt, Human herpesvirus 4 (Epstein-Barr virus)
gauuaggcacu

SEQ ID NO: 306245 - RNA, 19 nt, Human herpesvirus 4 (Epstein-Barr virus)
gauuaggcacuggacacac

SEQ ID NO: 306246 - RNA, 21 nt, Human herpesvirus 4 (Epstein-Barr virus)
gauucagacgagucugacuac

SEQ ID NO: 306247 - RNA, 17 nt, Human herpesvirus 4 (Epstein-Barr virus)
gauucuacgcuacucuc

SEQ ID NO: 306248 - RNA, 21 nt, Human herpesvirus 4 (Epstein-Barr virus)
gauucuggccaugaaucugac

SEQ ID NO: 306249 - RNA, 13 nt, Human herpesvirus 4 (Epstein-Barr virus)
gauugccaagaug

SEQ ID NO: 306250 - RNA, 18 nt, Human herpesvirus 4 (Epstein-Barr virus)
gauugccucuuguguucu

SEQ ID NO: 306251 - RNA, 17 nt, Human herpesvirus 4 (Epstein-Barr virus)
gauuucgucagccgcuu

SEQ ID NO: 306252 - RNA, 16 nt, Human herpesvirus 4 (Epstein-Barr virus)
gauuuugggcacacuu

SEQ ID NO: 306253 - RNA, 18 nt, Human herpesvirus 4 (Epstein-Barr virus)
gauuuugggcacacuuaa

SEQ ID NO: 306254 - RNA, 13 nt, Human herpesvirus 4 (Epstein-Barr virus)
gcaaaaauaugca

SEQ ID NO: 306255 - RNA, 19 nt, Human herpesvirus 4 (Epstein-Barr virus)
gcaaaacccccgugcgaug

SEQ ID NO: 306256 - RNA, 18 nt, Human herpesvirus 4 (Epstein-Barr virus)
gcaaaacucacaggacau

SEQ ID NO: 306257 - RNA, 18 nt, Human herpesvirus 4 (Epstein-Barr virus)
gcaaacauacaggaggaa

SEQ ID NO: 306258 - RNA, 16 nt, Human herpesvirus 4 (Epstein-Barr virus)
gcaaaugucaccgaag

SEQ ID NO: 306259 - RNA, 23 nt, Human herpesvirus 4 (Epstein-Barr virus)
gcaacaauagaaguggaaacccu

SEQ ID NO: 306260 - RNA, 22 nt, Human herpesvirus 4 (Epstein-Barr virus)
gcaaccaggcccacugcaaguu

SEQ ID NO: 306261 - RNA, 17 nt, Human herpesvirus 4 (Epstein-Barr virus)
gcaagauccuucuggca

SEQ ID NO: 306262 - RNA, 18 nt, Human herpesvirus 4 (Epstein-Barr virus)
gcaagcuccuuugccuug

SEQ ID NO: 306263 - RNA, 19 nt, Human herpesvirus 4 (Epstein-Barr virus)
gcaaggacgggggugggca

SEQ ID NO: 306264 - RNA, 17 nt, Human herpesvirus 4 (Epstein-Barr virus)
gcaaugcccacccacua

SEQ ID NO: 306265 - RNA, 17 nt, Human herpesvirus 4 (Epstein-Barr virus)
gcaauugggcauaccca

SEQ ID NO: 306266 - RNA, 18 nt, Human herpesvirus 4 (Epstein-Barr virus)
gcaauugggcauacccau

SEQ ID NO: 306267 - RNA, 13 nt, Human herpesvirus 4 (Epstein-Barr virus)
gcacagaucugac

SEQ ID NO: 306268 - RNA, 21 nt, Human herpesvirus 4 (Epstein-Barr virus)
gcacagaucugaccacggccc

SEQ ID NO: 306269 - RNA, 15 nt, Human herpesvirus 4 (Epstein-Barr virus)
gcaccaacacaacca

SEQ ID NO: 306270 - RNA, 23 nt, Human herpesvirus 4 (Epstein-Barr virus)
gcaccaacacaaccacggugaca

SEQ ID NO: 306271 - RNA, 15 nt, Human herpesvirus 4 (Epstein-Barr virus)
gcaccauagcauguc

SEQ ID NO: 306272 - RNA, 18 nt, Human herpesvirus 4 (Epstein-Barr virus)
gcaccauagcaugucaca

SEQ ID NO: 306273 - RNA, 14 nt, Human herpesvirus 4 (Epstein-Barr virus)
gcacccucaacaag

SEQ ID NO: 306274 - RNA, 15 nt, Human herpesvirus 4 (Epstein-Barr virus)
gcaccggucucgucc

SEQ ID NO: 306275 - RNA, 14 nt, Human herpesvirus 4 (Epstein-Barr virus)
gcaccgucagccac

SEQ ID NO: 306276 - RNA, 22 nt, Human herpesvirus 4 (Epstein-Barr virus)
gcaccuggacauagaggggcau

SEQ ID NO: 306277 - RNA, 19 nt, Human herpesvirus 4 (Epstein-Barr virus)
gcaccuguguccugggcaa

SEQ ID NO: 306278 - RNA, 22 nt, Human herpesvirus 4 (Epstein-Barr virus)
gcaccuugacuguaaucacugg

SEQ ID NO: 306279 - RNA, 19 nt, Human herpesvirus 4 (Epstein-Barr virus)
gcacugaauuuauacccag

SEQ ID NO: 306280 - RNA, 22 nt, Human herpesvirus 4 (Epstein-Barr virus)
gcacugaauuuauacccaguga

SEQ ID NO: 306281 - RNA, 20 nt, Human herpesvirus 4 (Epstein-Barr virus)
gcacugcuagcgucacugau

SEQ ID NO: 306282 - RNA, 13 nt, Human herpesvirus 4 (Epstein-Barr virus)
gcacuuugccagc

SEQ ID NO: 306283 - RNA, 14 nt, Human herpesvirus 4 (Epstein-Barr virus)
gcagaaggccaugg

SEQ ID NO: 306284 - RNA, 21 nt, Human herpesvirus 4 (Epstein-Barr virus)
gcuaauguaccucauagacac

SEQ ID NO: 306285 - RNA, 22 nt, Human herpesvirus 4 (Epstein-Barr virus)
gcuacacucuggggucucaggc

SEQ ID NO: 306286 - RNA, 15 nt, Human herpesvirus 4 (Epstein-Barr virus)
gcuaccagagucuau

SEQ ID NO: 306287 - RNA, 20 nt, Human herpesvirus 4 (Epstein-Barr virus)
gcuaccuccuaucacaggga

SEQ ID NO: 306288 - RNA, 17 nt, Human herpesvirus 4 (Epstein-Barr virus)
gcuacgaagaguacgug

SEQ ID NO: 306289 - RNA, 20 nt, Human herpesvirus 4 (Epstein-Barr virus)
gcuacgcgggccacaggugc

SEQ ID NO: 306290 - RNA, 22 nt, Human herpesvirus 4 (Epstein-Barr virus)
gcuagccuccgcgcuaaucgcu

SEQ ID NO: 306291 - RNA, 14 nt, Human herpesvirus 4 (Epstein-Barr virus)
gcuagcgucacuga

SEQ ID NO: 306292 - RNA, 18 nt, Human herpesvirus 4 (Epstein-Barr virus)
gcuaggugccgacaccgg

SEQ ID NO: 306293 - RNA, 23 nt, Human herpesvirus 4 (Epstein-Barr virus)
gcuauauucaccuugaggugcca

SEQ ID NO: 306294 - RNA, 17 nt, Human herpesvirus 4 (Epstein-Barr virus)
gcuauucugagcaccaa

SEQ ID NO: 306295 - RNA, 20 nt, Human herpesvirus 4 (Epstein-Barr virus)
gcuauucugagcaccaacac

SEQ ID NO: 306296 - RNA, 22 nt, Human herpesvirus 4 (Epstein-Barr virus)
gcuauucugagcaccaacacaa

SEQ ID NO: 306297 - RNA, 11 nt, Human herpesvirus 4 (Epstein-Barr virus)
gcucacauugu

SEQ ID NO: 306298 - RNA, 16 nt, Human herpesvirus 4 (Epstein-Barr virus)
gcucaccccugugcag

SEQ ID NO: 306299 - RNA, 18 nt, Human herpesvirus 4 (Epstein-Barr virus)
gcucagccccuuggcaca

SEQ ID NO: 306300 - RNA, 18 nt, Human herpesvirus 4 (Epstein-Barr virus)
gcuccauguccuguggug

SEQ ID NO: 306301 - RNA, 12 nt, Human herpesvirus 4 (Epstein-Barr virus)
gcuccucuccaa

SEQ ID NO: 306302 - RNA, 18 nt, Human herpesvirus 4 (Epstein-Barr virus)
gcucgcggaagagcccaa

SEQ ID NO: 306303 - RNA, 16 nt, Human herpesvirus 4 (Epstein-Barr virus)
gcucucagcacuuugc

SEQ ID NO: 306304 - RNA, 22 nt, Human herpesvirus 4 (Epstein-Barr virus)
gcucucagcacuuugccagcaa

SEQ ID NO: 306305 - RNA, 14 nt, Human herpesvirus 4 (Epstein-Barr virus)
gcucucgcacucuu

SEQ ID NO: 306306 - RNA, 15 nt, Human herpesvirus 4 (Epstein-Barr virus)
gcucucguugccaaa

SEQ ID NO: 306307 - RNA, 17 nt, Human herpesvirus 4 (Epstein-Barr virus)
gcucucguugccaaaac

SEQ ID NO: 306308 - RNA, 18 nt, Human herpesvirus 4 (Epstein-Barr virus)
gcucucuaucuacaacaa

SEQ ID NO: 306309 - RNA, 13 nt, Human herpesvirus 4 (Epstein-Barr virus)
gcucugcacagga

SEQ ID NO: 306310 - RNA, 15 nt, Human herpesvirus 4 (Epstein-Barr virus)
gcucugcgccagccc

SEQ ID NO: 306311 - RNA, 18 nt, Human herpesvirus 4 (Epstein-Barr virus)
gcucuucauguccacuga

SEQ ID NO: 306312 - RNA, 19 nt, Human herpesvirus 4 (Epstein-Barr virus)
gcucuucauguccacugag

SEQ ID NO: 306313 - RNA, 17 nt, Human herpesvirus 4 (Epstein-Barr virus)
gcugacauauguacaau

SEQ ID NO: 306314 - RNA, 17 nt, Human herpesvirus 4 (Epstein-Barr virus)
gcugacggaaaucugcu

SEQ ID NO: 306315 - RNA, 17 nt, Human herpesvirus 4 (Epstein-Barr virus)
gcugagaaccugcugcu

SEQ ID NO: 306316 - RNA, 18 nt, Human herpesvirus 4 (Epstein-Barr virus)
gcugagaaccugcugcua

SEQ ID NO: 306317 - RNA, 12 nt, Human herpesvirus 4 (Epstein-Barr virus)
gcugagaccaug

SEQ ID NO: 306318 - RNA, 14 nt, Human herpesvirus 4 (Epstein-Barr virus)
gcugauggaggccu

SEQ ID NO: 306319 - RNA, 17 nt, Human herpesvirus 4 (Epstein-Barr virus)
gcugcagguaaaccuuc

SEQ ID NO: 306320 - RNA, 14 nt, Human herpesvirus 4 (Epstein-Barr virus)
gcugccgucccagg

SEQ ID NO: 306321 - RNA, 15 nt, Human herpesvirus 4 (Epstein-Barr virus)
gcugcgguggugcgc

SEQ ID NO: 306322 - RNA, 19 nt, Human herpesvirus 4 (Epstein-Barr virus)
gcuggacggggguggcgga

SEQ ID NO: 306323 - RNA, 19 nt, Human herpesvirus 4 (Epstein-Barr virus)
gcuggacgucuuguccuug

SEQ ID NO: 306324 - RNA, 21 nt, Human herpesvirus 4 (Epstein-Barr virus)
gcuggagauuuucccacugug

SEQ ID NO: 306325 - RNA, 12 nt, Human herpesvirus 4 (Epstein-Barr virus)
gcuggauggugu

SEQ ID NO: 306326 - RNA, 11 nt, Human herpesvirus 4 (Epstein-Barr virus)
gcuggcaaaga

SEQ ID NO: 306327 - RNA, 17 nt, Human herpesvirus 4 (Epstein-Barr virus)
gcuggcccaccuaaaga

SEQ ID NO: 306328 - RNA, 17 nt, Human herpesvirus 4 (Epstein-Barr virus)
gcuggccgccguggcca

SEQ ID NO: 306329 - RNA, 19 nt, Human herpesvirus 4 (Epstein-Barr virus)
gcugggacugccuggggaa

SEQ ID NO: 306330 - RNA, 17 nt, Human herpesvirus 4 (Epstein-Barr virus)
gcugugacuacaccauc

SEQ ID NO: 306331 - RNA, 16 nt, Human herpesvirus 4 (Epstein-Barr virus)
gcugugguaaccggug

SEQ ID NO: 306332 - RNA, 18 nt, Human herpesvirus 4 (Epstein-Barr virus)
gcuguguacgugccucag

SEQ ID NO: 306333 - RNA, 13 nt, Human herpesvirus 4 (Epstein-Barr virus)
gcuguugaggcaa

SEQ ID NO: 306334 - RNA, 15 nt, Human herpesvirus 4 (Epstein-Barr virus)
gcuguuuugcagcug

SEQ ID NO: 306335 - RNA, 16 nt, Human herpesvirus 4 (Epstein-Barr virus)
gcuuaaaaaugugcag

SEQ ID NO: 306336 - RNA, 18 nt, Human herpesvirus 4 (Epstein-Barr virus)
gcuuacucaauccauuau

SEQ ID NO: 306337 - RNA, 18 nt, Human herpesvirus 4 (Epstein-Barr virus)
gcuucgcaaguuccucaa

SEQ ID NO: 306338 - RNA, 15 nt, Human herpesvirus 4 (Epstein-Barr virus)
gcuucuaccaagacu

SEQ ID NO: 306339 - RNA, 11 nt, Human herpesvirus 4 (Epstein-Barr virus)
gcuugauggcc

SEQ ID NO: 306340 - RNA, 10 nt, Human herpesvirus 4 (Epstein-Barr virus)
gcuugccaaa

SEQ ID NO: 306341 - RNA, 11 nt, Human herpesvirus 4 (Epstein-Barr virus)
gcuugccaaaa

SEQ ID NO: 306342 - RNA, 22 nt, Human herpesvirus 4 (Epstein-Barr virus)
gcuugugaucauggaaaccacu

SEQ ID NO: 306343 - RNA, 20 nt, Human herpesvirus 4 (Epstein-Barr virus)
gcuuuagccuggccuccuua

SEQ ID NO: 306344 - RNA, 18 nt, Human herpesvirus 4 (Epstein-Barr virus)
gcuuuccaguucccccca

SEQ ID NO: 306345 - RNA, 16 nt, Human herpesvirus 4 (Epstein-Barr virus)
gcuuugccggcaucca

SEQ ID NO: 306346 - RNA, 17 nt, Human herpesvirus 4 (Epstein-Barr virus)
gcuuuucuccucagucu

SEQ ID NO: 306347 - RNA, 15 nt, Human herpesvirus 4 (Epstein-Barr virus)
ggaaaagggcccagg

SEQ ID NO: 306348 - RNA, 15 nt, Human herpesvirus 4 (Epstein-Barr virus)
ggaaaaucucgcuca

SEQ ID NO: 306349 - RNA, 19 nt, Human herpesvirus 4 (Epstein-Barr virus)
ggaaaaucucgcucagagc

SEQ ID NO: 306350 - RNA, 17 nt, Human herpesvirus 4 (Epstein-Barr virus)
ggaaagggcauguggug

SEQ ID NO: 306351 - RNA, 13 nt, Human herpesvirus 4 (Epstein-Barr virus)
ggaacaggagcag

SEQ ID NO: 306352 - RNA, 19 nt, Human herpesvirus 4 (Epstein-Barr virus)
ggaacggugauuaggcacu

SEQ ID NO: 306353 - RNA, 23 nt, Human herpesvirus 4 (Epstein-Barr virus)
ggaacuccgcccaggucuugcca

SEQ ID NO: 306354 - RNA, 20 nt, Human herpesvirus 4 (Epstein-Barr virus)
ggaagagaggggcagggaaa

SEQ ID NO: 306355 - RNA, 16 nt, Human herpesvirus 4 (Epstein-Barr virus)
ggaagggcaccguggg

SEQ ID NO: 306356 - RNA, 16 nt, Human herpesvirus 4 (Epstein-Barr virus)
ggaauaacaagggaag

SEQ ID NO: 306357 - RNA, 13 nt, Human herpesvirus 4 (Epstein-Barr virus)
ggacaacagguca

SEQ ID NO: 306358 - RNA, 12 nt, Human herpesvirus 4 (Epstein-Barr virus)
ggacaacuguca

SEQ ID NO: 306359 - RNA, 14 nt, Human herpesvirus 4 (Epstein-Barr virus)
ggacacacauggca

SEQ ID NO: 306360 - RNA, 19 nt, Human herpesvirus 4 (Epstein-Barr virus)
ggacagggcggcgaugaac

SEQ ID NO: 306361 - RNA, 16 nt, Human herpesvirus 4 (Epstein-Barr virus)
ggacauagaggggcau

SEQ ID NO: 306362 - RNA, 19 nt, Human herpesvirus 4 (Epstein-Barr virus)
ggacauagaggggcaugcu

SEQ ID NO: 306363 - RNA, 12 nt, Human herpesvirus 4 (Epstein-Barr virus)
ggacauguuugg

SEQ ID NO: 306364 - RNA, 15 nt, Human herpesvirus 4 (Epstein-Barr virus)
ggaccccccucugau

SEQ ID NO: 306365 - RNA, 14 nt, Human herpesvirus 4 (Epstein-Barr virus)
ggacgagguccugg

SEQ ID NO: 306366 - RNA, 21 nt, Human herpesvirus 4 (Epstein-Barr virus)
ggacguuggcgggacuggcac

SEQ ID NO: 306367 - RNA, 14 nt, Human herpesvirus 4 (Epstein-Barr virus)
ggacuacgugucca

SEQ ID NO: 306368 - RNA, 17 nt, Human herpesvirus 4 (Epstein-Barr virus)
ggacucggccacacagu

SEQ ID NO: 306369 - RNA, 18 nt, Human herpesvirus 4 (Epstein-Barr virus)
ggacugcgggugucucaa

SEQ ID NO: 306370 - RNA, 22 nt, Human herpesvirus 4 (Epstein-Barr virus)
ggacugugguauccaccuagaa

SEQ ID NO: 306371 - RNA, 14 nt, Human herpesvirus 4 (Epstein-Barr virus)
ggacuuccaugucu

SEQ ID NO: 306372 - RNA, 17 nt, Human herpesvirus 4 (Epstein-Barr virus)
ggagaaaguaaccacau

SEQ ID NO: 306373 - RNA, 20 nt, Human herpesvirus 4 (Epstein-Barr virus)
ggcagacaccaccugcucgu

SEQ ID NO: 306374 - RNA, 14 nt, Human herpesvirus 4 (Epstein-Barr virus)
ggcagcuauauuca

SEQ ID NO: 306375 - RNA, 15 nt, Human herpesvirus 4 (Epstein-Barr virus)
ggcaggcuacaacag

SEQ ID NO: 306376 - RNA, 18 nt, Human herpesvirus 4 (Epstein-Barr virus)
ggcaggcuacaacaggcu

SEQ ID NO: 306377 - RNA, 23 nt, Human herpesvirus 4 (Epstein-Barr virus)
ggcagguccgugagaacuuucuu

SEQ ID NO: 306378 - RNA, 22 nt, Human herpesvirus 4 (Epstein-Barr virus)
ggcaguccuugugucucuauca

SEQ ID NO: 306379 - RNA, 20 nt, Human herpesvirus 4 (Epstein-Barr virus)
ggcagugauaagucaugaca

SEQ ID NO: 306380 - RNA, 21 nt, Human herpesvirus 4 (Epstein-Barr virus)
ggcauccagugcgucagcaac

SEQ ID NO: 306381 - RNA, 13 nt, Human herpesvirus 4 (Epstein-Barr virus)
ggcauccuucaga

SEQ ID NO: 306382 - RNA, 19 nt, Human herpesvirus 4 (Epstein-Barr virus)
ggcaugacgucaacuuuac

SEQ ID NO: 306383 - RNA, 15 nt, Human herpesvirus 4 (Epstein-Barr virus)
ggcauuaauguccag

SEQ ID NO: 306384 - RNA, 18 nt, Human herpesvirus 4 (Epstein-Barr virus)
ggcauuaauguccagugg

SEQ ID NO: 306385 - RNA, 14 nt, Human herpesvirus 4 (Epstein-Barr virus)
ggcauucccgugcu

SEQ ID NO: 306386 - RNA, 15 nt, Human herpesvirus 4 (Epstein-Barr virus)
ggccaccaacguccc

SEQ ID NO: 306387 - RNA, 19 nt, Human herpesvirus 4 (Epstein-Barr virus)
ggccaccuucuccaucucc

SEQ ID NO: 306388 - RNA, 21 nt, Human herpesvirus 4 (Epstein-Barr virus)
ggccaccuucuccaucuccau

SEQ ID NO: 306389 - RNA, 22 nt, Human herpesvirus 4 (Epstein-Barr virus)
ggccagcauucuaucagcuuaa

SEQ ID NO: 306390 - RNA, 15 nt, Human herpesvirus 4 (Epstein-Barr virus)
ggccagguacaggac

SEQ ID NO: 306391 - RNA, 15 nt, Human herpesvirus 4 (Epstein-Barr virus)
ggccaucgcaagcuc

SEQ ID NO: 306392 - RNA, 19 nt, Human herpesvirus 4 (Epstein-Barr virus)
ggccaugauacucaucugu

SEQ ID NO: 306393 - RNA, 23 nt, Human herpesvirus 4 (Epstein-Barr virus)
ggccaugauacucaucugugaga

SEQ ID NO: 306394 - RNA, 16 nt, Human herpesvirus 4 (Epstein-Barr virus)
ggcccagagugcuccg

SEQ ID NO: 306395 - RNA, 17 nt, Human herpesvirus 4 (Epstein-Barr virus)
ggcccagcccuccucag

SEQ ID NO: 306396 - RNA, 23 nt, Human herpesvirus 4 (Epstein-Barr virus)
ggcccaguugacggacgugccca

SEQ ID NO: 306397 - RNA, 19 nt, Human herpesvirus 4 (Epstein-Barr virus)
ggccccggcaccauagcau

SEQ ID NO: 306398 - RNA, 13 nt, Human herpesvirus 4 (Epstein-Barr virus)
ggcccgucccucu

SEQ ID NO: 306399 - RNA, 17 nt, Human herpesvirus 4 (Epstein-Barr virus)
ggcccuaauucagccac

SEQ ID NO: 306400 - RNA, 14 nt, Human herpesvirus 4 (Epstein-Barr virus)
ggccgccguggcca

SEQ ID NO: 306401 - RNA, 20 nt, Human herpesvirus 4 (Epstein-Barr virus)
ggccgcugccaggccgccau

SEQ ID NO: 306402 - RNA, 20 nt, Human herpesvirus 4 (Epstein-Barr virus)
ggccgcuuugccggcaucca

SEQ ID NO: 306403 - RNA, 18 nt, Human herpesvirus 4 (Epstein-Barr virus)
ggccgucuggcagggggc

SEQ ID NO: 306404 - RNA, 15 nt, Human herpesvirus 4 (Epstein-Barr virus)
ggccgugcauggcag

SEQ ID NO: 306405 - RNA, 18 nt, Human herpesvirus 4 (Epstein-Barr virus)
ggccuccauccagugggg

SEQ ID NO: 306406 - RNA, 21 nt, Human herpesvirus 4 (Epstein-Barr virus)
ggccucccagucuauccagga

SEQ ID NO: 306407 - RNA, 13 nt, Human herpesvirus 4 (Epstein-Barr virus)
ggccucgugcaac

SEQ ID NO: 306408 - RNA, 15 nt, Human herpesvirus 4 (Epstein-Barr virus)
ggccucuggggucca

SEQ ID NO: 306409 - RNA, 13 nt, Human herpesvirus 4 (Epstein-Barr virus)
ggccugcaccagu

SEQ ID NO: 306410 - RNA, 18 nt, Human herpesvirus 4 (Epstein-Barr virus)
ggccuuacuccccuaccc

SEQ ID NO: 306411 - RNA, 15 nt, Human herpesvirus 4 (Epstein-Barr virus)
ggccuuguucuuuga

SEQ ID NO: 306412 - RNA, 15 nt, Human herpesvirus 4 (Epstein-Barr virus)
ggccuuuucccucau

SEQ ID NO: 306413 - RNA, 23 nt, Human herpesvirus 4 (Epstein-Barr virus)
ggcgaagggugggggugggugca

SEQ ID NO: 306414 - RNA, 20 nt, Human herpesvirus 4 (Epstein-Barr virus)
ggcgacaguaacacagggug

SEQ ID NO: 306415 - RNA, 13 nt, Human herpesvirus 4 (Epstein-Barr virus)
ggcgagacuugga

SEQ ID NO: 306416 - RNA, 20 nt, Human herpesvirus 4 (Epstein-Barr virus)
ggcgauaccuugggcaucau

SEQ ID NO: 306417 - RNA, 14 nt, Human herpesvirus 4 (Epstein-Barr virus)
ggcggcguggagcu

SEQ ID NO: 306418 - RNA, 19 nt, Human herpesvirus 4 (Epstein-Barr virus)
ggcggucaccgaugagaca

SEQ ID NO: 306419 - RNA, 19 nt, Human herpesvirus 4 (Epstein-Barr virus)
ggcuaugaagaagauugaa

SEQ ID NO: 306420 - RNA, 21 nt, Human herpesvirus 4 (Epstein-Barr virus)
ggcuaugguaguggcugggau

SEQ ID NO: 306421 - RNA, 17 nt, Human herpesvirus 4 (Epstein-Barr virus)
ggcuauggucauggcca

SEQ ID NO: 306422 - RNA, 18 nt, Human herpesvirus 4 (Epstein-Barr virus)
ggcucacauuguccucac

SEQ ID NO: 306423 - RNA, 23 nt, Human herpesvirus 4 (Epstein-Barr virus)
ggcucaggaucagggccaagaca

SEQ ID NO: 306424 - RNA, 20 nt, Human herpesvirus 4 (Epstein-Barr virus)
ggcugacacagacuuggccu

SEQ ID NO: 306425 - RNA, 12 nt, Human herpesvirus 4 (Epstein-Barr virus)
ggcugagaccau

SEQ ID NO: 306426 - RNA, 15 nt, Human herpesvirus 4 (Epstein-Barr virus)
ggcugcgguggugcg

SEQ ID NO: 306427 - RNA, 18 nt, Human herpesvirus 4 (Epstein-Barr virus)
ggcugggauaacaguaag

SEQ ID NO: 306428 - RNA, 23 nt, Human herpesvirus 4 (Epstein-Barr virus)
ggcugggauaacaguaagaugca

SEQ ID NO: 306429 - RNA, 14 nt, Human herpesvirus 4 (Epstein-Barr virus)
ggcuucagcaucaa

SEQ ID NO: 306430 - RNA, 13 nt, Human herpesvirus 4 (Epstein-Barr virus)
ggcuugauggccc

SEQ ID NO: 306431 - RNA, 22 nt, Human herpesvirus 4 (Epstein-Barr virus)
gggaaaaagaauagcuucugca

SEQ ID NO: 306432 - RNA, 20 nt, Human herpesvirus 4 (Epstein-Barr virus)
gggaaaauaguuccagguga

SEQ ID NO: 306433 - RNA, 14 nt, Human herpesvirus 4 (Epstein-Barr virus)
gggacaacagguca

SEQ ID NO: 306434 - RNA, 20 nt, Human herpesvirus 4 (Epstein-Barr virus)
gggacaacugucacaccagu

SEQ ID NO: 306435 - RNA, 22 nt, Human herpesvirus 4 (Epstein-Barr virus)
gggacauuaaccucaaccacaa

SEQ ID NO: 306436 - RNA, 20 nt, Human herpesvirus 4 (Epstein-Barr virus)
gggaccuacaggacaagaca

SEQ ID NO: 306437 - RNA, 17 nt, Human herpesvirus 4 (Epstein-Barr virus)
gggacuucuucagggga

SEQ ID NO: 306438 - RNA, 12 nt, Human herpesvirus 4 (Epstein-Barr virus)
gggagaugacca

SEQ ID NO: 306439 - RNA, 21 nt, Human herpesvirus 4 (Epstein-Barr virus)
gggagauguuauccacaccau

SEQ ID NO: 306440 - RNA, 21 nt, Human herpesvirus 4 (Epstein-Barr virus)
gggagguggccacacugggga

SEQ ID NO: 306441 - RNA, 17 nt, Human herpesvirus 4 (Epstein-Barr virus)
gggaggugggggcugcc

SEQ ID NO: 306442 - RNA, 11 nt, Human herpesvirus 4 (Epstein-Barr virus)
gggaugagcug

SEQ ID NO: 306443 - RNA, 14 nt, Human herpesvirus 4 (Epstein-Barr virus)
gggaugagcuggag

SEQ ID NO: 306444 - RNA, 17 nt, Human herpesvirus 4 (Epstein-Barr virus)
gggcacucgcccacuaa

SEQ ID NO: 306445 - RNA, 19 nt, Human herpesvirus 4 (Epstein-Barr virus)
gggcauacccauguuguca

SEQ ID NO: 306446 - RNA, 14 nt, Human herpesvirus 4 (Epstein-Barr virus)
gggccaagguggua

SEQ ID NO: 306447 - RNA, 14 nt, Human herpesvirus 4 (Epstein-Barr virus)
gggccagcauucua

SEQ ID NO: 306448 - RNA, 18 nt, Human herpesvirus 4 (Epstein-Barr virus)
gggcggaagggcaccgug

SEQ ID NO: 306449 - RNA, 14 nt, Human herpesvirus 4 (Epstein-Barr virus)
gggcggcucaggau

SEQ ID NO: 306450 - RNA, 18 nt, Human herpesvirus 4 (Epstein-Barr virus)
gggcggugaucagggaga

SEQ ID NO: 306451 - RNA, 20 nt, Human herpesvirus 4 (Epstein-Barr virus)
gggcuccuacgcgcuaccuc

SEQ ID NO: 306452 - RNA, 12 nt, Human herpesvirus 4 (Epstein-Barr virus)
gggcucucagga

SEQ ID NO: 306453 - RNA, 12 nt, Human herpesvirus 4 (Epstein-Barr virus)
ggggacuugagu

SEQ ID NO: 306454 - RNA, 14 nt, Human herpesvirus 4 (Epstein-Barr virus)
ggggagaugaccau

SEQ ID NO: 306455 - RNA, 19 nt, Human herpesvirus 4 (Epstein-Barr virus)
ggggagaugaccaugaugg

SEQ ID NO: 306456 - RNA, 13 nt, Human herpesvirus 4 (Epstein-Barr virus)
ggggccuuguccg

SEQ ID NO: 306457 - RNA, 15 nt, Human herpesvirus 4 (Epstein-Barr virus)
gggggacuugaguua

SEQ ID NO: 306458 - RNA, 21 nt, Human herpesvirus 4 (Epstein-Barr virus)
gggggcaggauuccccaauga

SEQ ID NO: 306459 - RNA, 15 nt, Human herpesvirus 4 (Epstein-Barr virus)
gggggugggugcaag

SEQ ID NO: 306460 - RNA, 20 nt, Human herpesvirus 4 (Epstein-Barr virus)
gggguauucucagaugcagu

SEQ ID NO: 306461 - RNA, 19 nt, Human herpesvirus 4 (Epstein-Barr virus)
ggggugaugaaaacagagg

SEQ ID NO: 306462 - RNA, 11 nt, Human herpesvirus 4 (Epstein-Barr virus)
ggggugccaag

SEQ ID NO: 306463 - RNA, 23 nt, Human herpesvirus 4 (Epstein-Barr virus)
gggguggcgaaucugacauuucu

SEQ ID NO: 306464 - RNA, 22 nt, Human herpesvirus 4 (Epstein-Barr virus)
ggguaguagcacugguggugga

SEQ ID NO: 306465 - RNA, 14 nt, Human herpesvirus 4 (Epstein-Barr virus)
gggucagguguacu

SEQ ID NO: 306466 - RNA, 18 nt, Human herpesvirus 4 (Epstein-Barr virus)
ggguccaggagucugcug

SEQ ID NO: 306467 - RNA, 20 nt, Human herpesvirus 4 (Epstein-Barr virus)
ggguccuagcacaaaccagu

SEQ ID NO: 306468 - RNA, 13 nt, Human herpesvirus 4 (Epstein-Barr virus)
gggugggcgguga

SEQ ID NO: 306469 - RNA, 11 nt, Human herpesvirus 4 (Epstein-Barr virus)
ggguggugaug

SEQ ID NO: 306470 - RNA, 18 nt, Human herpesvirus 4 (Epstein-Barr virus)
ggguguagugggugggca

SEQ ID NO: 306471 - RNA, 18 nt, Human herpesvirus 4 (Epstein-Barr virus)
ggguuggccuuuugcacc

SEQ ID NO: 306472 - RNA, 18 nt, Human herpesvirus 4 (Epstein-Barr virus)
gguagauagguggucgca

SEQ ID NO: 306473 - RNA, 14 nt, Human herpesvirus 4 (Epstein-Barr virus)
gguaugggggcccg

SEQ ID NO: 306474 - RNA, 19 nt, Human herpesvirus 4 (Epstein-Barr virus)
ggucaccgcgaccaagacu

SEQ ID NO: 306475 - RNA, 13 nt, Human herpesvirus 4 (Epstein-Barr virus)
gguccagggucca

SEQ ID NO: 306476 - RNA, 19 nt, Human herpesvirus 4 (Epstein-Barr virus)
gguccauggcugcaccgau

SEQ ID NO: 306477 - RNA, 14 nt, Human herpesvirus 4 (Epstein-Barr virus)
gguccggucuugca

SEQ ID NO: 306478 - RNA, 15 nt, Human herpesvirus 4 (Epstein-Barr virus)
gguccggucuugcag

SEQ ID NO: 306479 - RNA, 15 nt, Human herpesvirus 4 (Epstein-Barr virus)
gguccuagcacaaac

SEQ ID NO: 306480 - RNA, 21 nt, Human herpesvirus 4 (Epstein-Barr virus)
ggucgugaaauaaaagcuucu

SEQ ID NO: 306481 - RNA, 20 nt, Human herpesvirus 4 (Epstein-Barr virus)
ggugaagauggccucaaagu

SEQ ID NO: 306482 - RNA, 12 nt, Human herpesvirus 4 (Epstein-Barr virus)
ggugauaacuga

SEQ ID NO: 306483 - RNA, 18 nt, Human herpesvirus 4 (Epstein-Barr virus)
ggugccaagauaauggau

SEQ ID NO: 306484 - RNA, 22 nt, Human herpesvirus 4 (Epstein-Barr virus)
ggugccagacucucuucaguga

SEQ ID NO: 306485 - RNA, 14 nt, Human herpesvirus 4 (Epstein-Barr virus)
ggugccuugcucuc

SEQ ID NO: 306486 - RNA, 19 nt, Human herpesvirus 4 (Epstein-Barr virus)
ggugcugccagagccucug

SEQ ID NO: 306487 - RNA, 21 nt, Human herpesvirus 4 (Epstein-Barr virus)
gguggcacacauuacggugcu

SEQ ID NO: 306488 - RNA, 14 nt, Human herpesvirus 4 (Epstein-Barr virus)
gguggcaguggaug

SEQ ID NO: 306489 - RNA, 17 nt, Human herpesvirus 4 (Epstein-Barr virus)
gguggcauuaaugucca

SEQ ID NO: 306490 - RNA, 14 nt, Human herpesvirus 4 (Epstein-Barr virus)
ggugggguggugua

SEQ ID NO: 306491 - RNA, 14 nt, Human herpesvirus 4 (Epstein-Barr virus)
gguggucauguuuc

SEQ ID NO: 306492 - RNA, 15 nt, Human herpesvirus 4 (Epstein-Barr virus)
gguggucauguuucc

SEQ ID NO: 306493 - RNA, 15 nt, Human herpesvirus 4 (Epstein-Barr virus)
ggugguuuccaucau

SEQ ID NO: 306494 - RNA, 17 nt, Human herpesvirus 4 (Epstein-Barr virus)
gguguagugggugggca

SEQ ID NO: 306495 - RNA, 22 nt, Human herpesvirus 4 (Epstein-Barr virus)
ggugucucaagcuacucaauga

SEQ ID NO: 306496 - RNA, 16 nt, Human herpesvirus 4 (Epstein-Barr virus)
gguguugcaguaugua

SEQ ID NO: 306497 - RNA, 22 nt, Human herpesvirus 4 (Epstein-Barr virus)
gguuacugcacagaacaucacu

SEQ ID NO: 306498 - RNA, 14 nt, Human herpesvirus 4 (Epstein-Barr virus)
gguuauaacugcca

SEQ ID NO: 306499 - RNA, 13 nt, Human herpesvirus 4 (Epstein-Barr virus)
gguuauuuugccu

SEQ ID NO: 306500 - RNA, 20 nt, Human herpesvirus 4 (Epstein-Barr virus)
gguugagcugagcgugugca

SEQ ID NO: 306501 - RNA, 16 nt, Human herpesvirus 4 (Epstein-Barr virus)
gguuuaaggaaugaac

SEQ ID NO: 306502 - RNA, 19 nt, Human herpesvirus 4 (Epstein-Barr virus)
gguuuugcagucgcugcug

SEQ ID NO: 306503 - RNA, 17 nt, Human herpesvirus 4 (Epstein-Barr virus)
guaaaaagcgggccuga

SEQ ID NO: 306504 - RNA, 13 nt, Human herpesvirus 4 (Epstein-Barr virus)
guaaaacugccac

SEQ ID NO: 306505 - RNA, 15 nt, Human herpesvirus 4 (Epstein-Barr virus)
guaaaacugccacau

SEQ ID NO: 306506 - RNA, 21 nt, Human herpesvirus 4 (Epstein-Barr virus)
guaaaauuuacaccugaccca

SEQ ID NO: 306507 - RNA, 14 nt, Human herpesvirus 4 (Epstein-Barr virus)
guaaccacauauac

SEQ ID NO: 306508 - RNA, 16 nt, Human herpesvirus 4 (Epstein-Barr virus)
guaaggccgcugccag

SEQ ID NO: 306509 - RNA, 16 nt, Human herpesvirus 4 (Epstein-Barr virus)
guggaacagaugcugu

SEQ ID NO: 306510 - RNA, 23 nt, Human herpesvirus 4 (Epstein-Barr virus)
guggacaaggcaguagaggacac

SEQ ID NO: 306511 - RNA, 20 nt, Human herpesvirus 4 (Epstein-Barr virus)
guggacgggggaauaaucaa

SEQ ID NO: 306512 - RNA, 23 nt, Human herpesvirus 4 (Epstein-Barr virus)
gugggaaaauaguuccaggugac

SEQ ID NO: 306513 - RNA, 17 nt, Human herpesvirus 4 (Epstein-Barr virus)
gugggaggcgaauguag

SEQ ID NO: 306514 - RNA, 12 nt, Human herpesvirus 4 (Epstein-Barr virus)
gugggguggugu

SEQ ID NO: 306515 - RNA, 13 nt, Human herpesvirus 4 (Epstein-Barr virus)
gugggguggugua

SEQ ID NO: 306516 - RNA, 17 nt, Human herpesvirus 4 (Epstein-Barr virus)
gugggugucagaccuga

SEQ ID NO: 306517 - RNA, 20 nt, Human herpesvirus 4 (Epstein-Barr virus)
guggguguccucuacugccu

SEQ ID NO: 306518 - RNA, 21 nt, Human herpesvirus 4 (Epstein-Barr virus)
guggguguccucuacugccuu

SEQ ID NO: 306519 - RNA, 17 nt, Human herpesvirus 4 (Epstein-Barr virus)
guggucaccgcgaccaa

SEQ ID NO: 306520 - RNA, 19 nt, Human herpesvirus 4 (Epstein-Barr virus)
guggucaccgcgaccaaga

SEQ ID NO: 306521 - RNA, 20 nt, Human herpesvirus 4 (Epstein-Barr virus)
gugguccacgagcggcgugu

SEQ ID NO: 306522 - RNA, 22 nt, Human herpesvirus 4 (Epstein-Barr virus)
guggucuccuucuuuaucucca

SEQ ID NO: 306523 - RNA, 13 nt, Human herpesvirus 4 (Epstein-Barr virus)
gugguggaugugc

SEQ ID NO: 306524 - RNA, 15 nt, Human herpesvirus 4 (Epstein-Barr virus)
guggugggggcuaug

SEQ ID NO: 306525 - RNA, 16 nt, Human herpesvirus 4 (Epstein-Barr virus)
gugucaauaauuucag

SEQ ID NO: 306526 - RNA, 22 nt, Human herpesvirus 4 (Epstein-Barr virus)
gugucucaagcuacucaaugag

SEQ ID NO: 306527 - RNA, 22 nt, Human herpesvirus 4 (Epstein-Barr virus)
gugucuccugacgccaaugcca

SEQ ID NO: 306528 - RNA, 14 nt, Human herpesvirus 4 (Epstein-Barr virus)
gugugccuccucaa

SEQ ID NO: 306529 - RNA, 21 nt, Human herpesvirus 4 (Epstein-Barr virus)
gugugcuuuccaccgguggua

SEQ ID NO: 306530 - RNA, 23 nt, Human herpesvirus 4 (Epstein-Barr virus)
guguggaaaaucucgcucagagc

SEQ ID NO: 306531 - RNA, 15 nt, Human herpesvirus 4 (Epstein-Barr virus)
guguggagacuagcu

SEQ ID NO: 306532 - RNA, 16 nt, Human herpesvirus 4 (Epstein-Barr virus)
guguggagacuagcua

SEQ ID NO: 306533 - RNA, 11 nt, Human herpesvirus 4 (Epstein-Barr virus)
guguucuugcc

SEQ ID NO: 306534 - RNA, 16 nt, Human herpesvirus 4 (Epstein-Barr virus)
guguuuccagacacca

SEQ ID NO: 306535 - RNA, 22 nt, Human herpesvirus 4 (Epstein-Barr virus)
guuaaggcuguugacaugagca

SEQ ID NO: 306536 - RNA, 12 nt, Human herpesvirus 4 (Epstein-Barr virus)
guuaauuuacaa

SEQ ID NO: 306537 - RNA, 13 nt, Human herpesvirus 4 (Epstein-Barr virus)
guuaccacaggua

SEQ ID NO: 306538 - RNA, 19 nt, Human herpesvirus 4 (Epstein-Barr virus)
guuacuucuuuugcucuua

SEQ ID NO: 306539 - RNA, 12 nt, Human herpesvirus 4 (Epstein-Barr virus)
guuagaguccaa

SEQ ID NO: 306540 - RNA, 21 nt, Human herpesvirus 4 (Epstein-Barr virus)
guuagugugccucuguuauga

SEQ ID NO: 306541 - RNA, 15 nt, Human herpesvirus 4 (Epstein-Barr virus)
guuccacaaugccca

SEQ ID NO: 306542 - RNA, 13 nt, Human herpesvirus 4 (Epstein-Barr virus)
guuccacaguaau

SEQ ID NO: 306543 - RNA, 21 nt, Human herpesvirus 4 (Epstein-Barr virus)
guucccuucucccacccugua

SEQ ID NO: 306544 - RNA, 14 nt, Human herpesvirus 4 (Epstein-Barr virus)
guuccuggccaugg

SEQ ID NO: 306545 - RNA, 14 nt, Human herpesvirus 4 (Epstein-Barr virus)
guuccuucugcucc

SEQ ID NO: 306546 - RNA, 21 nt, Human herpesvirus 4 (Epstein-Barr virus)
guucucgugcaagcagcaccu

SEQ ID NO: 306547 - RNA, 19 nt, Human herpesvirus 4 (Epstein-Barr virus)
guucucuaacuguguccca

SEQ ID NO: 306548 - RNA, 15 nt, Human herpesvirus 4 (Epstein-Barr virus)
guuggcauucuacua

SEQ ID NO: 306549 - RNA, 17 nt, Human herpesvirus 4 (Epstein-Barr virus)
guuggcuucugcugcug

SEQ ID NO: 306550 - RNA, 17 nt, Human herpesvirus 4 (Epstein-Barr virus)
guugucggagguggaga

SEQ ID NO: 306551 - RNA, 12 nt, Human herpesvirus 4 (Epstein-Barr virus)
guuuaaccugga

SEQ ID NO: 306552 - RNA, 13 nt, Human herpesvirus 4 (Epstein-Barr virus)
guuuaaccuggag

SEQ ID NO: 306553 - RNA, 15 nt, Human herpesvirus 4 (Epstein-Barr virus)
guuuaagcagcacug

SEQ ID NO: 306554 - RNA, 13 nt, Human herpesvirus 4 (Epstein-Barr virus)
guuuacaucugcc

SEQ ID NO: 306555 - RNA, 20 nt, Human herpesvirus 4 (Epstein-Barr virus)
guuucccgacgccaaugcua

SEQ ID NO: 306556 - RNA, 22 nt, Human herpesvirus 4 (Epstein-Barr virus)
guuucuggcgauuuuaaucugg

SEQ ID NO: 306557 - RNA, 12 nt, Human herpesvirus 4 (Epstein-Barr virus)
guuucuguacaa

SEQ ID NO: 306558 - RNA, 18 nt, Human herpesvirus 4 (Epstein-Barr virus)
guuugggggaguuggcau

SEQ ID NO: 306559 - RNA, 20 nt, Human herpesvirus 4 (Epstein-Barr virus)
guuuucuggacacaggacua

SEQ ID NO: 306560 - RNA, 23 nt, Human herpesvirus 4 (Epstein-Barr virus)
guuuugcagucgcugcugcagcu

SEQ ID NO: 306561 - RNA, 17 nt, Human herpesvirus 4 (Epstein-Barr virus)
guuuuuacccaucacac

SEQ ID NO: 306562 - RNA, 18 nt, Human herpesvirus 4 (Epstein-Barr virus)
uaaaaaaccaaacuaaca

SEQ ID NO: 306563 - RNA, 13 nt, Human herpesvirus 4 (Epstein-Barr virus)
uaaaaaugugcag

SEQ ID NO: 306564 - RNA, 18 nt, Human herpesvirus 4 (Epstein-Barr virus)
uaaaauuuacaccugacc

SEQ ID NO: 306565 - RNA, 23 nt, Human herpesvirus 4 (Epstein-Barr virus)
uaaaauuuacaccugacccauac

SEQ ID NO: 306566 - RNA, 19 nt, Human herpesvirus 4 (Epstein-Barr virus)
uaaacagggguauguggug

SEQ ID NO: 306567 - RNA, 14 nt, Human herpesvirus 4 (Epstein-Barr virus)
uaaacauugcaccu

SEQ ID NO: 306568 - RNA, 15 nt, Human herpesvirus 4 (Epstein-Barr virus)
uaaacauugcaccuu

SEQ ID NO: 306569 - RNA, 14 nt, Human herpesvirus 4 (Epstein-Barr virus)
uaaaccaguagugc

SEQ ID NO: 306570 - RNA, 20 nt, Human herpesvirus 4 (Epstein-Barr virus)
uaaagauuugauugagauca

SEQ ID NO: 306571 - RNA, 16 nt, Human herpesvirus 4 (Epstein-Barr virus)
uaaagcuugaccagug

SEQ ID NO: 306572 - RNA, 23 nt, Human herpesvirus 4 (Epstein-Barr virus)
uaaaggcgcaguccgccaugacc

SEQ ID NO: 306573 - RNA, 19 nt, Human herpesvirus 4 (Epstein-Barr virus)
uaaaguuggucaggcugac

SEQ ID NO: 306574 - RNA, 13 nt, Human herpesvirus 4 (Epstein-Barr virus)
uaacacagggugg

SEQ ID NO: 306575 - RNA, 17 nt, Human herpesvirus 4 (Epstein-Barr virus)
uaacaggacauguuugg

SEQ ID NO: 306576 - RNA, 15 nt, Human herpesvirus 4 (Epstein-Barr virus)
uaaccacaacugcua

SEQ ID NO: 306577 - RNA, 13 nt, Human herpesvirus 4 (Epstein-Barr virus)
uaaccacauauac

SEQ ID NO: 306578 - RNA, 22 nt, Human herpesvirus 4 (Epstein-Barr virus)
uaaccaugccaucucugauuau

SEQ ID NO: 306579 - RNA, 14 nt, Human herpesvirus 4 (Epstein-Barr virus)
uaaccccuaccucg

SEQ ID NO: 306580 - RNA, 21 nt, Human herpesvirus 4 (Epstein-Barr virus)
uaacccuguagucaccugcac

SEQ ID NO: 306581 - RNA, 19 nt, Human herpesvirus 4 (Epstein-Barr virus)
uaaccuuaacaccugcagc

SEQ ID NO: 306582 - RNA, 14 nt, Human herpesvirus 4 (Epstein-Barr virus)
uaacgcagguccug

SEQ ID NO: 306583 - RNA, 16 nt, Human herpesvirus 4 (Epstein-Barr virus)
uaacugugguuuccau

SEQ ID NO: 306584 - RNA, 19 nt, Human herpesvirus 4 (Epstein-Barr virus)
uaagaagcuacaccggcca

SEQ ID NO: 306585 - RNA, 15 nt, Human herpesvirus 4 (Epstein-Barr virus)
uaagcagcacugaau

SEQ ID NO: 306586 - RNA, 17 nt, Human herpesvirus 4 (Epstein-Barr virus)
uaagcagcacugaauuu

SEQ ID NO: 306587 - RNA, 16 nt, Human herpesvirus 4 (Epstein-Barr virus)
uaaggcucugaagcaa

SEQ ID NO: 306588 - RNA, 22 nt, Human herpesvirus 4 (Epstein-Barr virus)
uaaggcucugaagcaacagguc

SEQ ID NO: 306589 - RNA, 14 nt, Human herpesvirus 4 (Epstein-Barr virus)
uaaggcuguugaca

SEQ ID NO: 306590 - RNA, 18 nt, Human herpesvirus 4 (Epstein-Barr virus)
uaauacggguaguagcac

SEQ ID NO: 306591 - RNA, 22 nt, Human herpesvirus 4 (Epstein-Barr virus)
uaaucgcagcucuaacuuggca

SEQ ID NO: 306592 - RNA, 19 nt, Human herpesvirus 4 (Epstein-Barr virus)
uaaucuggauguauuacca

SEQ ID NO: 306593 - RNA, 21 nt, Human herpesvirus 4 (Epstein-Barr virus)
uaaucuggauguauuaccaug

SEQ ID NO: 306594 - RNA, 15 nt, Human herpesvirus 4 (Epstein-Barr virus)
uaaugacuaugagga

SEQ ID NO: 306595 - RNA, 19 nt, Human herpesvirus 4 (Epstein-Barr virus)
uaaugauguccaguucccu

SEQ ID NO: 306596 - RNA, 19 nt, Human herpesvirus 4 (Epstein-Barr virus)
uaauggccguccucuggac

SEQ ID NO: 306597 - RNA, 22 nt, Human herpesvirus 4 (Epstein-Barr virus)
guaaguaauuuguugccguugg

SEQ ID NO: 306598 - RNA, 16 nt, Human herpesvirus 4 (Epstein-Barr virus)
guaaucauuaccucuc

SEQ ID NO: 306599 - RNA, 16 nt, Human herpesvirus 4 (Epstein-Barr virus)
guacaggaccaugucg

SEQ ID NO: 306600 - RNA, 20 nt, Human herpesvirus 4 (Epstein-Barr virus)
guacauaauguaugccaugg

SEQ ID NO: 306601 - RNA, 22 nt, Human herpesvirus 4 (Epstein-Barr virus)
guaccagaagagucauacucaa

SEQ ID NO: 306602 - RNA, 13 nt, Human herpesvirus 4 (Epstein-Barr virus)
guacgugccucag

SEQ ID NO: 306603 - RNA, 19 nt, Human herpesvirus 4 (Epstein-Barr virus)
guacuaaauuugcugacau

SEQ ID NO: 306604 - RNA, 23 nt, Human herpesvirus 4 (Epstein-Barr virus)
guacuuuuauuuauugcaucaca

SEQ ID NO: 306605 - RNA, 14 nt, Human herpesvirus 4 (Epstein-Barr virus)
guagacagauccca

SEQ ID NO: 306606 - RNA, 20 nt, Human herpesvirus 4 (Epstein-Barr virus)
guagauggcgagacucuuga

SEQ ID NO: 306607 - RNA, 23 nt, Human herpesvirus 4 (Epstein-Barr virus)
guaugccauggccauucgacagg

SEQ ID NO: 306608 - RNA, 17 nt, Human herpesvirus 4 (Epstein-Barr virus)
guauucucagaugcagu

SEQ ID NO: 306609 - RNA, 20 nt, Human herpesvirus 4 (Epstein-Barr virus)
guauugcucucguugccaaa

SEQ ID NO: 306610 - RNA, 14 nt, Human herpesvirus 4 (Epstein-Barr virus)
guauugggacuuga

SEQ ID NO: 306611 - RNA, 24 nt, Human herpesvirus 4 (Epstein-Barr virus)
guauuggguguggagacuagcuau

SEQ ID NO: 306612 - RNA, 14 nt, Human herpesvirus 4 (Epstein-Barr virus)
guauuuacaaacac

SEQ ID NO: 306613 - RNA, 16 nt, Human herpesvirus 4 (Epstein-Barr virus)
guauuuacaaacacua

SEQ ID NO: 306614 - RNA, 21 nt, Human herpesvirus 4 (Epstein-Barr virus)
gucaaaauucgcgaugcuaua

SEQ ID NO: 306615 - RNA, 22 nt, Human herpesvirus 4 (Epstein-Barr virus)
gucaaaauucgcgaugcuauaa

SEQ ID NO: 306616 - RNA, 15 nt, Human herpesvirus 4 (Epstein-Barr virus)
gucaaaguucuuugu

SEQ ID NO: 306617 - RNA, 13 nt, Human herpesvirus 4 (Epstein-Barr virus)
gucacaccagucc

SEQ ID NO: 306618 - RNA, 20 nt, Human herpesvirus 4 (Epstein-Barr virus)
gucacaccccacggccaugc

SEQ ID NO: 306619 - RNA, 22 nt, Human herpesvirus 4 (Epstein-Barr virus)
gucacaccccacggccaugcua

SEQ ID NO: 306620 - RNA, 22 nt, Human herpesvirus 4 (Epstein-Barr virus)
gucaccacuaagguuacugcac

SEQ ID NO: 306621 - RNA, 21 nt, Human herpesvirus 4 (Epstein-Barr virus)
gucaccauuuucguccuccca

SEQ ID NO: 306622 - RNA, 20 nt, Human herpesvirus 4 (Epstein-Barr virus)
gucaccuuccagacuaugca

SEQ ID NO: 306623 - RNA, 19 nt, Human herpesvirus 4 (Epstein-Barr virus)
gucacuccagccaucaugc

SEQ ID NO: 306624 - RNA, 17 nt, Human herpesvirus 4 (Epstein-Barr virus)
gucacugagaaucuccu

SEQ ID NO: 306625 - RNA, 21 nt, Human herpesvirus 4 (Epstein-Barr virus)
gucagaaaaucgcagcagggu

SEQ ID NO: 306626 - RNA, 19 nt, Human herpesvirus 4 (Epstein-Barr virus)
gucagaccugaagacuguu

SEQ ID NO: 306627 - RNA, 19 nt, Human herpesvirus 4 (Epstein-Barr virus)
gucagauugccuucuguua

SEQ ID NO: 306628 - RNA, 13 nt, Human herpesvirus 4 (Epstein-Barr virus)
gucagauuuugca

SEQ ID NO: 306629 - RNA, 22 nt, Human herpesvirus 4 (Epstein-Barr virus)
gucagccacacaaucagccggg

SEQ ID NO: 306630 - RNA, 19 nt, Human herpesvirus 4 (Epstein-Barr virus)
gucagcuguguacgugccu

SEQ ID NO: 306631 - RNA, 15 nt, Human herpesvirus 4 (Epstein-Barr virus)
gucaggcugacgucc

SEQ ID NO: 306632 - RNA, 18 nt, Human herpesvirus 4 (Epstein-Barr virus)
gucaguuacacacacagu

SEQ ID NO: 306633 - RNA, 16 nt, Human herpesvirus 4 (Epstein-Barr virus)
gucauuuagaaaccuu

SEQ ID NO: 306634 - RNA, 19 nt, Human herpesvirus 4 (Epstein-Barr virus)
guccagacgcgauggcaca

SEQ ID NO: 306635 - RNA, 17 nt, Human herpesvirus 4 (Epstein-Barr virus)
guccaggguccaggaga

SEQ ID NO: 306636 - RNA, 13 nt, Human herpesvirus 4 (Epstein-Barr virus)
gucccucuugucc

SEQ ID NO: 306637 - RNA, 14 nt, Human herpesvirus 4 (Epstein-Barr virus)
guccggucuugcag

SEQ ID NO: 306638 - RNA, 16 nt, Human herpesvirus 4 (Epstein-Barr virus)
guccuagcacaaacca

SEQ ID NO: 306639 - RNA, 15 nt, Human herpesvirus 4 (Epstein-Barr virus)
guccucuacugccuu

SEQ ID NO: 306640 - RNA, 16 nt, Human herpesvirus 4 (Epstein-Barr virus)
guccucuaucgucuca

SEQ ID NO: 306641 - RNA, 20 nt, Human herpesvirus 4 (Epstein-Barr virus)
guccugucucuuuguguucu

SEQ ID NO: 306642 - RNA, 15 nt, Human herpesvirus 4 (Epstein-Barr virus)
guccuuguccaggag

SEQ ID NO: 306643 - RNA, 18 nt, Human herpesvirus 4 (Epstein-Barr virus)
guccuugugucucuauca

SEQ ID NO: 306644 - RNA, 23 nt, Human herpesvirus 4 (Epstein-Barr virus)
gucgacccuccugucaccaccuc

SEQ ID NO: 306645 - RNA, 21 nt, Human herpesvirus 4 (Epstein-Barr virus)
gucgaugggcagcuauauuca

SEQ ID NO: 306646 - RNA, 17 nt, Human herpesvirus 4 (Epstein-Barr virus)
gucgcugcugcagcuau

SEQ ID NO: 306647 - RNA, 21 nt, Human herpesvirus 4 (Epstein-Barr virus)
gucggcuaaugccaugcagcg

SEQ ID NO: 306648 - RNA, 23 nt, Human herpesvirus 4 (Epstein-Barr virus)
gucuaccucuguuccuucugcuc

SEQ ID NO: 306649 - RNA, 22 nt, Human herpesvirus 4 (Epstein-Barr virus)
gucuacgaccuugaccacgacu

SEQ ID NO: 306650 - RNA, 20 nt, Human herpesvirus 4 (Epstein-Barr virus)
gucuacucgaccagcacgug

SEQ ID NO: 306651 - RNA, 10 nt, Human herpesvirus 4 (Epstein-Barr virus)
gucucagagg

SEQ ID NO: 306652 - RNA, 17 nt, Human herpesvirus 4 (Epstein-Barr virus)
gucucgccaucuaccca

SEQ ID NO: 306653 - RNA, 21 nt, Human herpesvirus 4 (Epstein-Barr virus)
gucucucuuugagggggccaa

SEQ ID NO: 306654 - RNA, 15 nt, Human herpesvirus 4 (Epstein-Barr virus)
gucucuuucuggcca

SEQ ID NO: 306655 - RNA, 16 nt, Human herpesvirus 4 (Epstein-Barr virus)
gucucuuucuggccaa

SEQ ID NO: 306656 - RNA, 20 nt, Human herpesvirus 4 (Epstein-Barr virus)
gucucuuucuggccaaccug

SEQ ID NO: 306657 - RNA, 13 nt, Human herpesvirus 4 (Epstein-Barr virus)
gucugauugcacc

SEQ ID NO: 306658 - RNA, 19 nt, Human herpesvirus 4 (Epstein-Barr virus)
gucuuagggcgccagggau

SEQ ID NO: 306659 - RNA, 12 nt, Human herpesvirus 4 (Epstein-Barr virus)
gucuucugucuc

SEQ ID NO: 306660 - RNA, 20 nt, Human herpesvirus 4 (Epstein-Barr virus)
gucuuguccuuggugugcac

SEQ ID NO: 306661 - RNA, 19 nt, Human herpesvirus 4 (Epstein-Barr virus)
gucuuuccucuuauuacau

SEQ ID NO: 306662 - RNA, 12 nt, Human herpesvirus 4 (Epstein-Barr virus)
gucuuugccaac

SEQ ID NO: 306663 - RNA, 16 nt, Human herpesvirus 4 (Epstein-Barr virus)
gucuuugccaaccugc

SEQ ID NO: 306664 - RNA, 18 nt, Human herpesvirus 4 (Epstein-Barr virus)
gugaagucgguguccagg

SEQ ID NO: 306665 - RNA, 11 nt, Human herpesvirus 4 (Epstein-Barr virus)
gugaccacuga

SEQ ID NO: 306666 - RNA, 14 nt, Human herpesvirus 4 (Epstein-Barr virus)
gugacuggugcuug

SEQ ID NO: 306667 - RNA, 22 nt, Human herpesvirus 4 (Epstein-Barr virus)
gugagacaccuggcccacugga

SEQ ID NO: 306668 - RNA, 12 nt, Human herpesvirus 4 (Epstein-Barr virus)
gugagccacgua

SEQ ID NO: 306669 - RNA, 23 nt, Human herpesvirus 4 (Epstein-Barr virus)
gugagccccacaaacaccagugu

SEQ ID NO: 306670 - RNA, 23 nt, Human herpesvirus 4 (Epstein-Barr virus)
gugagguguuguguccuguaugg

SEQ ID NO: 306671 - RNA, 23 nt, Human herpesvirus 4 (Epstein-Barr virus)
gugagugacacugaugagucuga

SEQ ID NO: 306672 - RNA, 14 nt, Human herpesvirus 4 (Epstein-Barr virus)
gugauaacugacag

SEQ ID NO: 306673 - RNA, 12 nt, Human herpesvirus 4 (Epstein-Barr virus)
gugaucauggaa

SEQ ID NO: 306674 - RNA, 17 nt, Human herpesvirus 4 (Epstein-Barr virus)
gugaugaaaacagaggc

SEQ ID NO: 306675 - RNA, 14 nt, Human herpesvirus 4 (Epstein-Barr virus)
gugcauggcagcag

SEQ ID NO: 306676 - RNA, 17 nt, Human herpesvirus 4 (Epstein-Barr virus)
gugccaagauaauggau

SEQ ID NO: 306677 - RNA, 19 nt, Human herpesvirus 4 (Epstein-Barr virus)
gugccauguggcaucguca

SEQ ID NO: 306678 - RNA, 17 nt, Human herpesvirus 4 (Epstein-Barr virus)
gugccucgucuaccucu

SEQ ID NO: 306679 - RNA, 12 nt, Human herpesvirus 4 (Epstein-Barr virus)
gugccugagaca

SEQ ID NO: 306680 - RNA, 18 nt, Human herpesvirus 4 (Epstein-Barr virus)
gugcgcaacgccggccug

SEQ ID NO: 306681 - RNA, 17 nt, Human herpesvirus 4 (Epstein-Barr virus)
gugcuggaugagguuag

SEQ ID NO: 306682 - RNA, 17 nt, Human herpesvirus 4 (Epstein-Barr virus)
gugcuuuccaccggugg

SEQ ID NO: 306683 - RNA, 16 nt, Human herpesvirus 4 (Epstein-Barr virus)
gugcuuugucuuugcc

SEQ ID NO: 306684 - RNA, 15 nt, Human herpesvirus 4 (Epstein-Barr virus)
uaauucagccaccuc

SEQ ID NO: 306685 - RNA, 20 nt, Human herpesvirus 4 (Epstein-Barr virus)
uaauucucuucuguuugcau

SEQ ID NO: 306686 - RNA, 17 nt, Human herpesvirus 4 (Epstein-Barr virus)
uacaaacacuacaauaa

SEQ ID NO: 306687 - RNA, 22 nt, Human herpesvirus 4 (Epstein-Barr virus)
uacaaugccaggggggaccuua

SEQ ID NO: 306688 - RNA, 17 nt, Human herpesvirus 4 (Epstein-Barr virus)
uacaauguuccuucuca

SEQ ID NO: 306689 - RNA, 15 nt, Human herpesvirus 4 (Epstein-Barr virus)
uacaccagucccuug

SEQ ID NO: 306690 - RNA, 20 nt, Human herpesvirus 4 (Epstein-Barr virus)
uacaccgagcagaaggccau

SEQ ID NO: 306691 - RNA, 19 nt, Human herpesvirus 4 (Epstein-Barr virus)
uacacucuggggucucagg

SEQ ID NO: 306692 - RNA, 20 nt, Human herpesvirus 4 (Epstein-Barr virus)
uacacucuggggucucaggc

SEQ ID NO: 306693 - RNA, 22 nt, Human herpesvirus 4 (Epstein-Barr virus)
uacacucuggggucucaggccu

SEQ ID NO: 306694 - RNA, 20 nt, Human herpesvirus 4 (Epstein-Barr virus)
uacagauagauggcacucuu

SEQ ID NO: 306695 - RNA, 18 nt, Human herpesvirus 4 (Epstein-Barr virus)
uacagcuacaccgaucac

SEQ ID NO: 306696 - RNA, 16 nt, Human herpesvirus 4 (Epstein-Barr virus)
uacaggacaagacagu

SEQ ID NO: 306697 - RNA, 20 nt, Human herpesvirus 4 (Epstein-Barr virus)
uacaggacaagacagucaca

SEQ ID NO: 306698 - RNA, 21 nt, Human herpesvirus 4 (Epstein-Barr virus)
uacaggacaagacagucacau

SEQ ID NO: 306699 - RNA, 19 nt, Human herpesvirus 4 (Epstein-Barr virus)
uacaggaggaaaggcuaua

SEQ ID NO: 306700 - RNA, 16 nt, Human herpesvirus 4 (Epstein-Barr virus)
uacaucugcccggcua

SEQ ID NO: 306701 - RNA, 17 nt, Human herpesvirus 4 (Epstein-Barr virus)
uaccaaagcuaacugua

SEQ ID NO: 306702 - RNA, 14 nt, Human herpesvirus 4 (Epstein-Barr virus)
uaccaggugccuuu

SEQ ID NO: 306703 - RNA, 16 nt, Human herpesvirus 4 (Epstein-Barr virus)
uaccaugagugccaug

SEQ ID NO: 306704 - RNA, 18 nt, Human herpesvirus 4 (Epstein-Barr virus)
uacccaaaccaaauguag

SEQ ID NO: 306705 - RNA, 16 nt, Human herpesvirus 4 (Epstein-Barr virus)
uacccaacagucuuca

SEQ ID NO: 306706 - RNA, 15 nt, Human herpesvirus 4 (Epstein-Barr virus)
uaccccaaaacuaua

SEQ ID NO: 306707 - RNA, 21 nt, Human herpesvirus 4 (Epstein-Barr virus)
uaccccaaaacuauaccaaag

SEQ ID NO: 306708 - RNA, 14 nt, Human herpesvirus 4 (Epstein-Barr virus)
uaccgagauguaca

SEQ ID NO: 306709 - RNA, 18 nt, Human herpesvirus 4 (Epstein-Barr virus)
uaccucauagacacaccu

SEQ ID NO: 306710 - RNA, 15 nt, Human herpesvirus 4 (Epstein-Barr virus)
uaccuggugagcaau

SEQ ID NO: 306711 - RNA, 12 nt, Human herpesvirus 4 (Epstein-Barr virus)
uaccuugggcau

SEQ ID NO: 306712 - RNA, 19 nt, Human herpesvirus 4 (Epstein-Barr virus)
uacgugcgugaucaugagg

SEQ ID NO: 306713 - RNA, 20 nt, Human herpesvirus 4 (Epstein-Barr virus)
uacuaugacaccuaucugua

SEQ ID NO: 306714 - RNA, 18 nt, Human herpesvirus 4 (Epstein-Barr virus)
uacucaucugugagacaa

SEQ ID NO: 306715 - RNA, 16 nt, Human herpesvirus 4 (Epstein-Barr virus)
uacucgaccagcacgu

SEQ ID NO: 306716 - RNA, 17 nt, Human herpesvirus 4 (Epstein-Barr virus)
ucagccccaucuuccag

SEQ ID NO: 306717 - RNA, 16 nt, Human herpesvirus 4 (Epstein-Barr virus)
ucagcuccagggccag

SEQ ID NO: 306718 - RNA, 17 nt, Human herpesvirus 4 (Epstein-Barr virus)
ucagcuucgaggucucc

SEQ ID NO: 306719 - RNA, 15 nt, Human herpesvirus 4 (Epstein-Barr virus)
ucaggaccauggaug

SEQ ID NO: 306720 - RNA, 15 nt, Human herpesvirus 4 (Epstein-Barr virus)
ucaggagacacggcu

SEQ ID NO: 306721 - RNA, 16 nt, Human herpesvirus 4 (Epstein-Barr virus)
ucaggcaacaacuaug

SEQ ID NO: 306722 - RNA, 21 nt, Human herpesvirus 4 (Epstein-Barr virus)
ucaggccucccagucuaucca

SEQ ID NO: 306723 - RNA, 15 nt, Human herpesvirus 4 (Epstein-Barr virus)
ucagggccgugcaug

SEQ ID NO: 306724 - RNA, 16 nt, Human herpesvirus 4 (Epstein-Barr virus)
ucagggccgugcaugg

SEQ ID NO: 306725 - RNA, 20 nt, Human herpesvirus 4 (Epstein-Barr virus)
ucagguaccccaaaacuaua

SEQ ID NO: 306726 - RNA, 16 nt, Human herpesvirus 4 (Epstein-Barr virus)
ucaguggaugcaucgu

SEQ ID NO: 306727 - RNA, 13 nt, Human herpesvirus 4 (Epstein-Barr virus)
ucauaauggugcc

SEQ ID NO: 306728 - RNA, 15 nt, Human herpesvirus 4 (Epstein-Barr virus)
ucauaauggugccug

SEQ ID NO: 306729 - RNA, 14 nt, Human herpesvirus 4 (Epstein-Barr virus)
ucauagacacaccu

SEQ ID NO: 306730 - RNA, 17 nt, Human herpesvirus 4 (Epstein-Barr virus)
ucauaucggaugccuca

SEQ ID NO: 306731 - RNA, 16 nt, Human herpesvirus 4 (Epstein-Barr virus)
ucauauguaugccuug

SEQ ID NO: 306732 - RNA, 21 nt, Human herpesvirus 4 (Epstein-Barr virus)
ucauauguaugccuuggcaug

SEQ ID NO: 306733 - RNA, 22 nt, Human herpesvirus 4 (Epstein-Barr virus)
ucauauguaugccuuggcauga

SEQ ID NO: 306734 - RNA, 21 nt, Human herpesvirus 4 (Epstein-Barr virus)
ucauccgccacccccguccag

SEQ ID NO: 306735 - RNA, 23 nt, Human herpesvirus 4 (Epstein-Barr virus)
ucauccugcucauuauugcucuc

SEQ ID NO: 306736 - RNA, 18 nt, Human herpesvirus 4 (Epstein-Barr virus)
ucaugcagggugcacaga

SEQ ID NO: 306737 - RNA, 21 nt, Human herpesvirus 4 (Epstein-Barr virus)
ucaugcuccuauggacacuug

SEQ ID NO: 306738 - RNA, 15 nt, Human herpesvirus 4 (Epstein-Barr virus)
ucauggccagcuuug

SEQ ID NO: 306739 - RNA, 14 nt, Human herpesvirus 4 (Epstein-Barr virus)
ucaugguauuccag

SEQ ID NO: 306740 - RNA, 19 nt, Human herpesvirus 4 (Epstein-Barr virus)
ucaugucgagcaugagcuc

SEQ ID NO: 306741 - RNA, 17 nt, Human herpesvirus 4 (Epstein-Barr virus)
ucauguuuuuggcaugu

SEQ ID NO: 306742 - RNA, 13 nt, Human herpesvirus 4 (Epstein-Barr virus)
ucauuauugcucu

SEQ ID NO: 306743 - RNA, 19 nt, Human herpesvirus 4 (Epstein-Barr virus)
ucauuuagaaaccuugccu

SEQ ID NO: 306744 - RNA, 19 nt, Human herpesvirus 4 (Epstein-Barr virus)
uccaacgcauccaccauca

SEQ ID NO: 306745 - RNA, 21 nt, Human herpesvirus 4 (Epstein-Barr virus)
uccaacuccggcccacgccau

SEQ ID NO: 306746 - RNA, 22 nt, Human herpesvirus 4 (Epstein-Barr virus)
uccaauccgaaagcacuuugaa

SEQ ID NO: 306747 - RNA, 15 nt, Human herpesvirus 4 (Epstein-Barr virus)
uccacaccauccaca

SEQ ID NO: 306748 - RNA, 22 nt, Human herpesvirus 4 (Epstein-Barr virus)
uccacaccauccacagccccac

SEQ ID NO: 306749 - RNA, 20 nt, Human herpesvirus 4 (Epstein-Barr virus)
uccacagccccacucuugcc

SEQ ID NO: 306750 - RNA, 21 nt, Human herpesvirus 4 (Epstein-Barr virus)
uccacagccccacucuugccu

SEQ ID NO: 306751 - RNA, 15 nt, Human herpesvirus 4 (Epstein-Barr virus)
uccaccagcuucuca

SEQ ID NO: 306752 - RNA, 19 nt, Human herpesvirus 4 (Epstein-Barr virus)
uccaccagcuucucaaagg

SEQ ID NO: 306753 - RNA, 16 nt, Human herpesvirus 4 (Epstein-Barr virus)
uccaccaucaauguca

SEQ ID NO: 306754 - RNA, 15 nt, Human herpesvirus 4 (Epstein-Barr virus)
uccacggggacacgc

SEQ ID NO: 306755 - RNA, 15 nt, Human herpesvirus 4 (Epstein-Barr virus)
uccacucccagucca

SEQ ID NO: 306756 - RNA, 22 nt, Human herpesvirus 4 (Epstein-Barr virus)
uccagacuaugcauacacugaa

SEQ ID NO: 306757 - RNA, 19 nt, Human herpesvirus 4 (Epstein-Barr virus)
uccagaguucccggcugcu

SEQ ID NO: 306758 - RNA, 22 nt, Human herpesvirus 4 (Epstein-Barr virus)
uccagccacgcaggauguucac

SEQ ID NO: 306759 - RNA, 13 nt, Human herpesvirus 4 (Epstein-Barr virus)
uccaggggccaca

SEQ ID NO: 306760 - RNA, 17 nt, Human herpesvirus 4 (Epstein-Barr virus)
uccaggguccaggagaa

SEQ ID NO: 306761 - RNA, 23 nt, Human herpesvirus 4 (Epstein-Barr virus)
uccaggugacagcagcagugugu

SEQ ID NO: 306762 - RNA, 16 nt, Human herpesvirus 4 (Epstein-Barr virus)
uccaggugugcuucuu

SEQ ID NO: 306763 - RNA, 14 nt, Human herpesvirus 4 (Epstein-Barr virus)
uccagguguggaaa

SEQ ID NO: 306764 - RNA, 21 nt, Human herpesvirus 4 (Epstein-Barr virus)
uccagugggguaaaugcaccu

SEQ ID NO: 306765 - RNA, 22 nt, Human herpesvirus 4 (Epstein-Barr virus)
uccagugggguaaaugcaccuu

SEQ ID NO: 306766 - RNA, 19 nt, Human herpesvirus 4 (Epstein-Barr virus)
uccaucggauaaacagggg

SEQ ID NO: 306767 - RNA, 23 nt, Human herpesvirus 4 (Epstein-Barr virus)
uccauguacaacuaccugucuga

SEQ ID NO: 306768 - RNA, 22 nt, Human herpesvirus 4 (Epstein-Barr virus)
uccauguccuguggugugcuuu

SEQ ID NO: 306769 - RNA, 14 nt, Human herpesvirus 4 (Epstein-Barr virus)
uccauuucauugcg

SEQ ID NO: 306770 - RNA, 15 nt, Human herpesvirus 4 (Epstein-Barr virus)
ucccaaaccaugaca

SEQ ID NO: 306771 - RNA, 17 nt, Human herpesvirus 4 (Epstein-Barr virus)
uccuaaaaaaugcaaca

SEQ ID NO: 306772 - RNA, 18 nt, Human herpesvirus 4 (Epstein-Barr virus)
uccuaaaaaaugcaacaa

SEQ ID NO: 306773 - RNA, 12 nt, Human herpesvirus 4 (Epstein-Barr virus)
uccuagcacaaa

SEQ ID NO: 306774 - RNA, 24 nt, Human herpesvirus 4 (Epstein-Barr virus)
uccucaccacucgaaacuauggca

SEQ ID NO: 306775 - RNA, 22 nt, Human herpesvirus 4 (Epstein-Barr virus)
uccucagaaaacucugcaugga

SEQ ID NO: 306776 - RNA, 12 nt, Human herpesvirus 4 (Epstein-Barr virus)
uccucccggggu

SEQ ID NO: 306777 - RNA, 20 nt, Human herpesvirus 4 (Epstein-Barr virus)
uccucgcaaaagauggacuu

SEQ ID NO: 306778 - RNA, 21 nt, Human herpesvirus 4 (Epstein-Barr virus)
uccucgcaaaagauggacuug

SEQ ID NO: 306779 - RNA, 15 nt, Human herpesvirus 4 (Epstein-Barr virus)
uccucuaccugguca

SEQ ID NO: 306780 - RNA, 13 nt, Human herpesvirus 4 (Epstein-Barr virus)
uccuguguucucc

SEQ ID NO: 306781 - RNA, 22 nt, Human herpesvirus 4 (Epstein-Barr virus)
uccuguguucuccccacgggaa

SEQ ID NO: 306782 - RNA, 15 nt, Human herpesvirus 4 (Epstein-Barr virus)
uccuucucaugcucc

SEQ ID NO: 306783 - RNA, 12 nt, Human herpesvirus 4 (Epstein-Barr virus)
uccuucugcucc

SEQ ID NO: 306784 - RNA, 13 nt, Human herpesvirus 4 (Epstein-Barr virus)
ucgaaacuauggc

SEQ ID NO: 306785 - RNA, 14 nt, Human herpesvirus 4 (Epstein-Barr virus)
ucgaaacuauggca

SEQ ID NO: 306786 - RNA, 17 nt, Human herpesvirus 4 (Epstein-Barr virus)
ucgacacacgagccaua

SEQ ID NO: 306787 - RNA, 13 nt, Human herpesvirus 4 (Epstein-Barr virus)
ucgaccagcacgu

SEQ ID NO: 306788 - RNA, 22 nt, Human herpesvirus 4 (Epstein-Barr virus)
ucgagauuguuuacaucugccc

SEQ ID NO: 306789 - RNA, 14 nt, Human herpesvirus 4 (Epstein-Barr virus)
ucgagcaugagcuc

SEQ ID NO: 306790 - RNA, 21 nt, Human herpesvirus 4 (Epstein-Barr virus)
ucgaugauugagaaugccaag

SEQ ID NO: 306791 - RNA, 17 nt, Human herpesvirus 4 (Epstein-Barr virus)
ucgcccacuaaccuuaa

SEQ ID NO: 306792 - RNA, 16 nt, Human herpesvirus 4 (Epstein-Barr virus)
ucgccccuaucuuaac

SEQ ID NO: 306793 - RNA, 14 nt, Human herpesvirus 4 (Epstein-Barr virus)
ucgcggaagagccc

SEQ ID NO: 306794 - RNA, 19 nt, Human herpesvirus 4 (Epstein-Barr virus)
ucgcggagagggaugggcu

SEQ ID NO: 306795 - RNA, 17 nt, Human herpesvirus 4 (Epstein-Barr virus)
ucggaaaucuguugacg

SEQ ID NO: 306796 - RNA, 21 nt, Human herpesvirus 4 (Epstein-Barr virus)
ucggcaucggguccuagcaca

SEQ ID NO: 306797 - RNA, 20 nt, Human herpesvirus 4 (Epstein-Barr virus)
ucggccuagacccggggccc

SEQ ID NO: 306798 - RNA, 23 nt, Human herpesvirus 4 (Epstein-Barr virus)
ucggcuagccugacuaaggguga

SEQ ID NO: 306799 - RNA, 22 nt, Human herpesvirus 4 (Epstein-Barr virus)
ucgggcaagauggagaggcaaa

SEQ ID NO: 306800 - RNA, 23 nt, Human herpesvirus 4 (Epstein-Barr virus)
ucgguggcagugauguucugugc

SEQ ID NO: 306801 - RNA, 18 nt, Human herpesvirus 4 (Epstein-Barr virus)
ucggugggcgguccucca

SEQ ID NO: 306802 - RNA, 19 nt, Human herpesvirus 4 (Epstein-Barr virus)
ucguagagaucaggccaaa

SEQ ID NO: 306803 - RNA, 20 nt, Human herpesvirus 4 (Epstein-Barr virus)
ucgucagagagguugcgcug

SEQ ID NO: 306804 - RNA, 19 nt, Human herpesvirus 4 (Epstein-Barr virus)
ucgugcaagcagcaccugu

SEQ ID NO: 306805 - RNA, 11 nt, Human herpesvirus 4 (Epstein-Barr virus)
ucguuguucag

SEQ ID NO: 306806 - RNA, 20 nt, Human herpesvirus 4 (Epstein-Barr virus)
ucuaaugauguccaguuccc

SEQ ID NO: 306807 - RNA, 16 nt, Human herpesvirus 4 (Epstein-Barr virus)
ucuacaaccccuucca

SEQ ID NO: 306808 - RNA, 13 nt, Human herpesvirus 4 (Epstein-Barr virus)
ucuacaaugccag

SEQ ID NO: 306809 - RNA, 22 nt, Human herpesvirus 4 (Epstein-Barr virus)
ucuacaaugccaggggggaccu

SEQ ID NO: 306810 - RNA, 23 nt, Human herpesvirus 4 (Epstein-Barr virus)
ucuaccucuguuccuucugcucc

SEQ ID NO: 306811 - RNA, 15 nt, Human herpesvirus 4 (Epstein-Barr virus)
ucuaguuaccacagg

SEQ ID NO: 306812 - RNA, 16 nt, Human herpesvirus 4 (Epstein-Barr virus)
ucuaguuaccacaggu

SEQ ID NO: 306813 - RNA, 18 nt, Human herpesvirus 4 (Epstein-Barr virus)
ucucaaagagggugucaa

SEQ ID NO: 306814 - RNA, 13 nt, Human herpesvirus 4 (Epstein-Barr virus)
ucucagaugcagu

SEQ ID NO: 306815 - RNA, 16 nt, Human herpesvirus 4 (Epstein-Barr virus)
ucucagcacuuugcca

SEQ ID NO: 306816 - RNA, 20 nt, Human herpesvirus 4 (Epstein-Barr virus)
ucucagucccaccacaaagg

SEQ ID NO: 306817 - RNA, 15 nt, Human herpesvirus 4 (Epstein-Barr virus)
ucucauacaguuugu

SEQ ID NO: 306818 - RNA, 15 nt, Human herpesvirus 4 (Epstein-Barr virus)
ucuccacucccaguc

SEQ ID NO: 306819 - RNA, 16 nt, Human herpesvirus 4 (Epstein-Barr virus)
ucuccacucccagucc

SEQ ID NO: 306820 - RNA, 19 nt, Human herpesvirus 4 (Epstein-Barr virus)
ucuccugacgccaaugcca

SEQ ID NO: 306821 - RNA, 17 nt, Human herpesvirus 4 (Epstein-Barr virus)
ucuccugauuugcucuu

SEQ ID NO: 306822 - RNA, 16 nt, Human herpesvirus 4 (Epstein-Barr virus)
ucucuaaagauuugau

SEQ ID NO: 306823 - RNA, 21 nt, Human herpesvirus 4 (Epstein-Barr virus)
ucucucgcgugauuuccauag

SEQ ID NO: 306824 - RNA, 18 nt, Human herpesvirus 4 (Epstein-Barr virus)
ucucuucuguuugcauug

SEQ ID NO: 306825 - RNA, 12 nt, Human herpesvirus 4 (Epstein-Barr virus)
ucugacauuucu

SEQ ID NO: 306826 - RNA, 23 nt, Human herpesvirus 4 (Epstein-Barr virus)
ucugacuacucagaugaagacga

SEQ ID NO: 306827 - RNA, 16 nt, Human herpesvirus 4 (Epstein-Barr virus)
ucugagcaccaacaca

SEQ ID NO: 306828 - RNA, 16 nt, Human herpesvirus 4 (Epstein-Barr virus)
ucugagggcagugaua

SEQ ID NO: 306829 - RNA, 16 nt, Human herpesvirus 4 (Epstein-Barr virus)
ucugccgggaggugcu

SEQ ID NO: 306830 - RNA, 23 nt, Human herpesvirus 4 (Epstein-Barr virus)
ucugccuggccggcuaucugcuu

SEQ ID NO: 306831 - RNA, 23 nt, Human herpesvirus 4 (Epstein-Barr virus)
ucuggaggaaauauugcagucaa

SEQ ID NO: 306832 - RNA, 14 nt, Human herpesvirus 4 (Epstein-Barr virus)
ugcacuauauucuc

SEQ ID NO: 306833 - RNA, 21 nt, Human herpesvirus 4 (Epstein-Barr virus)
ugcacuccaagugcaacaauc

SEQ ID NO: 306834 - RNA, 22 nt, Human herpesvirus 4 (Epstein-Barr virus)
ugcaggacacgugacauguccg

SEQ ID NO: 306835 - RNA, 22 nt, Human herpesvirus 4 (Epstein-Barr virus)
ugcaggaccuagaaugugguaa

SEQ ID NO: 306836 - RNA, 14 nt, Human herpesvirus 4 (Epstein-Barr virus)
ugcaguauguacag

SEQ ID NO: 306837 - RNA, 13 nt, Human herpesvirus 4 (Epstein-Barr virus)
ugcauacacugaa

SEQ ID NO: 306838 - RNA, 14 nt, Human herpesvirus 4 (Epstein-Barr virus)
ugcaucacaaguca

SEQ ID NO: 306839 - RNA, 19 nt, Human herpesvirus 4 (Epstein-Barr virus)
ugcaucacaagucacauca

SEQ ID NO: 306840 - RNA, 14 nt, Human herpesvirus 4 (Epstein-Barr virus)
ugcaucuuaccccu

SEQ ID NO: 306841 - RNA, 17 nt, Human herpesvirus 4 (Epstein-Barr virus)
ugcauggcagcagacaa

SEQ ID NO: 306842 - RNA, 18 nt, Human herpesvirus 4 (Epstein-Barr virus)
ugcauggccaggcccgac

SEQ ID NO: 306843 - RNA, 22 nt, Human herpesvirus 4 (Epstein-Barr virus)
ugccaacuuugagcugggcaaa

SEQ ID NO: 306844 - RNA, 18 nt, Human herpesvirus 4 (Epstein-Barr virus)
ugccaagagccccuccau

SEQ ID NO: 306845 - RNA, 15 nt, Human herpesvirus 4 (Epstein-Barr virus)
ugccaauccaugcca

SEQ ID NO: 306846 - RNA, 16 nt, Human herpesvirus 4 (Epstein-Barr virus)
ugccaauccaugccaa

SEQ ID NO: 306847 - RNA, 18 nt, Human herpesvirus 4 (Epstein-Barr virus)
ugccaauccaugccaaug

SEQ ID NO: 306848 - RNA, 18 nt, Human herpesvirus 4 (Epstein-Barr virus)
ugccacagagcaucagau

SEQ ID NO: 306849 - RNA, 17 nt, Human herpesvirus 4 (Epstein-Barr virus)
ugccacgugggucucau

SEQ ID NO: 306850 - RNA, 20 nt, Human herpesvirus 4 (Epstein-Barr virus)
ugccacgugggucucauggg

SEQ ID NO: 306851 - RNA, 13 nt, Human herpesvirus 4 (Epstein-Barr virus)
ugccagagccucu

SEQ ID NO: 306852 - RNA, 17 nt, Human herpesvirus 4 (Epstein-Barr virus)
ugccagagcuguguuuc

SEQ ID NO: 306853 - RNA, 13 nt, Human herpesvirus 4 (Epstein-Barr virus)
ugccaggccuguc

SEQ ID NO: 306854 - RNA, 19 nt, Human herpesvirus 4 (Epstein-Barr virus)
ugccauggugccaagcuca

SEQ ID NO: 306855 - RNA, 19 nt, Human herpesvirus 4 (Epstein-Barr virus)
ugccauuguuuaccgccau

SEQ ID NO: 306856 - RNA, 11 nt, Human herpesvirus 4 (Epstein-Barr virus)
ugcccauccau

SEQ ID NO: 306857 - RNA, 20 nt, Human herpesvirus 4 (Epstein-Barr virus)
ugccccaaucgcgugccaaa

SEQ ID NO: 306858 - RNA, 12 nt, Human herpesvirus 4 (Epstein-Barr virus)
ugcccccggggg

SEQ ID NO: 306859 - RNA, 14 nt, Human herpesvirus 4 (Epstein-Barr virus)
ugcccuggaggccu

SEQ ID NO: 306860 - RNA, 22 nt, Human herpesvirus 4 (Epstein-Barr virus)
ugcccuggaggccucaggcaac

SEQ ID NO: 306861 - RNA, 22 nt, Human herpesvirus 4 (Epstein-Barr virus)
ugccggagggacaguaccacaa

SEQ ID NO: 306862 - RNA, 15 nt, Human herpesvirus 4 (Epstein-Barr virus)
ugccgugaaugcacg

SEQ ID NO: 306863 - RNA, 20 nt, Human herpesvirus 4 (Epstein-Barr virus)
ugccuaaacgugauggugcu

SEQ ID NO: 306864 - RNA, 16 nt, Human herpesvirus 4 (Epstein-Barr virus)
ugccucugggugcuga

SEQ ID NO: 306865 - RNA, 23 nt, Human herpesvirus 4 (Epstein-Barr virus)
ugccuggggaaaauguacccauc

SEQ ID NO: 306866 - RNA, 12 nt, Human herpesvirus 4 (Epstein-Barr virus)
ugccuugcucuc

SEQ ID NO: 306867 - RNA, 13 nt, Human herpesvirus 4 (Epstein-Barr virus)
ugccuugcucuca

SEQ ID NO: 306868 - RNA, 14 nt, Human herpesvirus 4 (Epstein-Barr virus)
ugccuugcucucag

SEQ ID NO: 306869 - RNA, 17 nt, Human herpesvirus 4 (Epstein-Barr virus)
ugcgaaaauucagucau

SEQ ID NO: 306870 - RNA, 23 nt, Human herpesvirus 4 (Epstein-Barr virus)
ugcgagaaaaugagccaugacua

SEQ ID NO: 306871 - RNA, 13 nt, Human herpesvirus 4 (Epstein-Barr virus)
ugcgagggggccu

SEQ ID NO: 306872 - RNA, 21 nt, Human herpesvirus 4 (Epstein-Barr virus)
ugcgagggggccuggugccag

SEQ ID NO: 306873 - RNA, 14 nt, Human herpesvirus 4 (Epstein-Barr virus)
ugcgucucauuccc

SEQ ID NO: 306874 - RNA, 16 nt, Human herpesvirus 4 (Epstein-Barr virus)
ugcuagcgucacugau

SEQ ID NO: 306875 - RNA, 16 nt, Human herpesvirus 4 (Epstein-Barr virus)
ugcuauaaaccagacc

SEQ ID NO: 306876 - RNA, 16 nt, Human herpesvirus 4 (Epstein-Barr virus)
ugcuaugaccaugccc

SEQ ID NO: 306877 - RNA, 23 nt, Human herpesvirus 4 (Epstein-Barr virus)
ugcuaugaccaugcccagacuca

SEQ ID NO: 306878 - RNA, 23 nt, Human herpesvirus 4 (Epstein-Barr virus)
ugcuauucugagcaccaacacaa

SEQ ID NO: 306879 - RNA, 15 nt, Human herpesvirus 4 (Epstein-Barr virus)
ugcuccagugccucc

SEQ ID NO: 306880 - RNA, 22 nt, Human herpesvirus 4 (Epstein-Barr virus)
ugcucgucugcaccccagugga

SEQ ID NO: 306881 - RNA, 21 nt, Human herpesvirus 4 (Epstein-Barr virus)
ugcucucagcacuuugccagc

SEQ ID NO: 306882 - RNA, 15 nt, Human herpesvirus 4 (Epstein-Barr virus)
ugcucucguugccaa

SEQ ID NO: 306883 - RNA, 17 nt, Human herpesvirus 4 (Epstein-Barr virus)
ugcucucguugccaaaa

SEQ ID NO: 306884 - RNA, 22 nt, Human herpesvirus 4 (Epstein-Barr virus)
ugcucuguguuuuuugccuggu

SEQ ID NO: 306885 - RNA, 14 nt, Human herpesvirus 4 (Epstein-Barr virus)
ugcucuuaaccauu

SEQ ID NO: 306886 - RNA, 21 nt, Human herpesvirus 4 (Epstein-Barr virus)
ugcugccagagccucugccac

SEQ ID NO: 306887 - RNA, 21 nt, Human herpesvirus 4 (Epstein-Barr virus)
ugcuguauuuacaaacacuac

SEQ ID NO: 306888 - RNA, 23 nt, Human herpesvirus 4 (Epstein-Barr virus)
ugcuguauuuacaaacacuacaa

SEQ ID NO: 306889 - RNA, 24 nt, Human herpesvirus 4 (Epstein-Barr virus)
ugcuguugguguauuucuggccau

SEQ ID NO: 306890 - RNA, 12 nt, Human herpesvirus 4 (Epstein-Barr virus)
ugcuugugaagg

SEQ ID NO: 306891 - RNA, 15 nt, Human herpesvirus 4 (Epstein-Barr virus)
ugcuuugucuuugcc

SEQ ID NO: 306892 - RNA, 15 nt, Human herpesvirus 4 (Epstein-Barr virus)
ugcuuuucuccucag

SEQ ID NO: 306893 - RNA, 18 nt, Human herpesvirus 4 (Epstein-Barr virus)
uggaaacacccauuccag

SEQ ID NO: 306894 - RNA, 21 nt, Human herpesvirus 4 (Epstein-Barr virus)
uggaacauuugaggaggcaca

SEQ ID NO: 306895 - RNA, 16 nt, Human herpesvirus 4 (Epstein-Barr virus)
uggaacgcuccagcuu

SEQ ID NO: 306896 - RNA, 19 nt, Human herpesvirus 4 (Epstein-Barr virus)
uggaaucauuugaaggaca

SEQ ID NO: 306897 - RNA, 20 nt, Human herpesvirus 4 (Epstein-Barr virus)
uggacaacgacacagugaug

SEQ ID NO: 306898 - RNA, 17 nt, Human herpesvirus 4 (Epstein-Barr virus)
gccagagacgagcugcg

SEQ ID NO: 306899 - RNA, 14 nt, Human herpesvirus 4 (Epstein-Barr virus)
gccagagcuguguu

SEQ ID NO: 306900 - RNA, 17 nt, Human herpesvirus 4 (Epstein-Barr virus)
gccagcauggcagccgg

SEQ ID NO: 306901 - RNA, 11 nt, Human herpesvirus 4 (Epstein-Barr virus)
gccagccaccc

SEQ ID NO: 306902 - RNA, 15 nt, Human herpesvirus 4 (Epstein-Barr virus)
gccagcgccuugauc

SEQ ID NO: 306903 - RNA, 14 nt, Human herpesvirus 4 (Epstein-Barr virus)
gccaggaccuggau

SEQ ID NO: 306904 - RNA, 14 nt, Human herpesvirus 4 (Epstein-Barr virus)
gccaggauaaucag

SEQ ID NO: 306905 - RNA, 20 nt, Human herpesvirus 4 (Epstein-Barr virus)
gccaggcagaggaaggccac

SEQ ID NO: 306906 - RNA, 22 nt, Human herpesvirus 4 (Epstein-Barr virus)
gccaggcccgaccugccaaaga

SEQ ID NO: 306907 - RNA, 16 nt, Human herpesvirus 4 (Epstein-Barr virus)
gccaggcucggcaccu

SEQ ID NO: 306908 - RNA, 14 nt, Human herpesvirus 4 (Epstein-Barr virus)
gccaggggggaccu

SEQ ID NO: 306909 - RNA, 22 nt, Human herpesvirus 4 (Epstein-Barr virus)
gccaggggggaccuuaacaucc

SEQ ID NO: 306910 - RNA, 10 nt, Human herpesvirus 4 (Epstein-Barr virus)
gccagucucc

SEQ ID NO: 306911 - RNA, 14 nt, Human herpesvirus 4 (Epstein-Barr virus)
gccagucuccgggu

SEQ ID NO: 306912 - RNA, 13 nt, Human herpesvirus 4 (Epstein-Barr virus)
gccauaccugcac

SEQ ID NO: 306913 - RNA, 18 nt, Human herpesvirus 4 (Epstein-Barr virus)
gccaucuaucuguacuuu

SEQ ID NO: 306914 - RNA, 21 nt, Human herpesvirus 4 (Epstein-Barr virus)
gccaucucugauuauagcucu

SEQ ID NO: 306915 - RNA, 20 nt, Human herpesvirus 4 (Epstein-Barr virus)
gccaucugucuugucaccau

SEQ ID NO: 306916 - RNA, 11 nt, Human herpesvirus 4 (Epstein-Barr virus)
gccaugaaucu

SEQ ID NO: 306917 - RNA, 18 nt, Human herpesvirus 4 (Epstein-Barr virus)
gccaugaaucugacucua

SEQ ID NO: 306918 - RNA, 15 nt, Human herpesvirus 4 (Epstein-Barr virus)
gccaugacuagcgca

SEQ ID NO: 306919 - RNA, 21 nt, Human herpesvirus 4 (Epstein-Barr virus)
gccaugauacucaucugugag

SEQ ID NO: 306920 - RNA, 17 nt, Human herpesvirus 4 (Epstein-Barr virus)
gccaugcucagggccac

SEQ ID NO: 306921 - RNA, 11 nt, Human herpesvirus 4 (Epstein-Barr virus)
gccauggugcc

SEQ ID NO: 306922 - RNA, 22 nt, Human herpesvirus 4 (Epstein-Barr virus)
gccauuguuuaccgccaucgca

SEQ ID NO: 306923 - RNA, 16 nt, Human herpesvirus 4 (Epstein-Barr virus)
gcccacgucaaggccc

SEQ ID NO: 306924 - RNA, 15 nt, Human herpesvirus 4 (Epstein-Barr virus)
gcccagaggaggccc

SEQ ID NO: 306925 - RNA, 19 nt, Human herpesvirus 4 (Epstein-Barr virus)
gcccagggucacuggcuua

SEQ ID NO: 306926 - RNA, 15 nt, Human herpesvirus 4 (Epstein-Barr virus)
gcccaguaugcaguc

SEQ ID NO: 306927 - RNA, 19 nt, Human herpesvirus 4 (Epstein-Barr virus)
gcccauucucguccaucuc

SEQ ID NO: 306928 - RNA, 21 nt, Human herpesvirus 4 (Epstein-Barr virus)
gcccauucucguccaucucga

SEQ ID NO: 306929 - RNA, 17 nt, Human herpesvirus 4 (Epstein-Barr virus)
gccccacgaccucggga

SEQ ID NO: 306930 - RNA, 21 nt, Human herpesvirus 4 (Epstein-Barr virus)
gccccagccacacuggcucuc

SEQ ID NO: 306931 - RNA, 17 nt, Human herpesvirus 4 (Epstein-Barr virus)
gccccuaggccugccac

SEQ ID NO: 306932 - RNA, 23 nt, Human herpesvirus 4 (Epstein-Barr virus)
gccccuaucuuaacccaauuccc

SEQ ID NO: 306933 - RNA, 20 nt, Human herpesvirus 4 (Epstein-Barr virus)
gcccuagccguccuguccaa

SEQ ID NO: 306934 - RNA, 20 nt, Human herpesvirus 4 (Epstein-Barr virus)
gcccuccucagaaaacucug

SEQ ID NO: 306935 - RNA, 16 nt, Human herpesvirus 4 (Epstein-Barr virus)
gcccucgguggugggc

SEQ ID NO: 306936 - RNA, 17 nt, Human herpesvirus 4 (Epstein-Barr virus)
gccgaagcagauggcga

SEQ ID NO: 306937 - RNA, 20 nt, Human herpesvirus 4 (Epstein-Barr virus)
gccgacuucuggaacauuug

SEQ ID NO: 306938 - RNA, 23 nt, Human herpesvirus 4 (Epstein-Barr virus)
gccgcaccacgggaggcggugca

SEQ ID NO: 306939 - RNA, 17 nt, Human herpesvirus 4 (Epstein-Barr virus)
gccgcagggguggugga

SEQ ID NO: 306940 - RNA, 16 nt, Human herpesvirus 4 (Epstein-Barr virus)
gccgcccccugaccuc

SEQ ID NO: 306941 - RNA, 21 nt, Human herpesvirus 4 (Epstein-Barr virus)
uggacacccaccacacagcau

SEQ ID NO: 306942 - RNA, 14 nt, Human herpesvirus 4 (Epstein-Barr virus)
uggaccucaaagaa

SEQ ID NO: 306943 - RNA, 14 nt, Human herpesvirus 4 (Epstein-Barr virus)
uggacgucccuuug

SEQ ID NO: 306944 - RNA, 19 nt, Human herpesvirus 4 (Epstein-Barr virus)
uggagaagcuggacgugaa

SEQ ID NO: 306945 - RNA, 15 nt, Human herpesvirus 4 (Epstein-Barr virus)
uggaggcccccggcu

SEQ ID NO: 306946 - RNA, 12 nt, Human herpesvirus 4 (Epstein-Barr virus)
uggagggccgau

SEQ ID NO: 306947 - RNA, 17 nt, Human herpesvirus 4 (Epstein-Barr virus)
uggaugcaucguaguca

SEQ ID NO: 306948 - RNA, 22 nt, Human herpesvirus 4 (Epstein-Barr virus)
uggaugguguuggagacgguga

SEQ ID NO: 306949 - RNA, 20 nt, Human herpesvirus 4 (Epstein-Barr virus)
uggauuacuggucuuuuaug

SEQ ID NO: 306950 - RNA, 22 nt, Human herpesvirus 4 (Epstein-Barr virus)
uggauugaguaagcauggggcu

SEQ ID NO: 306951 - RNA, 17 nt, Human herpesvirus 4 (Epstein-Barr virus)
uggcaacgaccagucau

SEQ ID NO: 306952 - RNA, 13 nt, Human herpesvirus 4 (Epstein-Barr virus)
uggcagggggccg

SEQ ID NO: 306953 - RNA, 23 nt, Human herpesvirus 4 (Epstein-Barr virus)
uggcagugauguucugugcagua

SEQ ID NO: 306954 - RNA, 13 nt, Human herpesvirus 4 (Epstein-Barr virus)
uggcaguguccuc

SEQ ID NO: 306955 - RNA, 16 nt, Human herpesvirus 4 (Epstein-Barr virus)
uggcauguguacuugu

SEQ ID NO: 306956 - RNA, 13 nt, Human herpesvirus 4 (Epstein-Barr virus)
uggccaaccugcc

SEQ ID NO: 306957 - RNA, 20 nt, Human herpesvirus 4 (Epstein-Barr virus)
uggccaacgcaggcacggcc

SEQ ID NO: 306958 - RNA, 15 nt, Human herpesvirus 4 (Epstein-Barr virus)
uggccacacugggga

SEQ ID NO: 306959 - RNA, 20 nt, Human herpesvirus 4 (Epstein-Barr virus)
uguccaagugcuaugaccau

SEQ ID NO: 306960 - RNA, 19 nt, Human herpesvirus 4 (Epstein-Barr virus)
ugucccuuucaguggucac

SEQ ID NO: 306961 - RNA, 15 nt, Human herpesvirus 4 (Epstein-Barr virus)
uguccuguaugguau

SEQ ID NO: 306962 - RNA, 13 nt, Human herpesvirus 4 (Epstein-Barr virus)
uguccuguggugu

SEQ ID NO: 306963 - RNA, 20 nt, Human herpesvirus 4 (Epstein-Barr virus)
ugucucaagcuacucaauga

SEQ ID NO: 306964 - RNA, 13 nt, Human herpesvirus 4 (Epstein-Barr virus)
ugucuuuccucuu

SEQ ID NO: 306965 - RNA, 17 nt, Human herpesvirus 4 (Epstein-Barr virus)
ugucuuugccaaccugc

SEQ ID NO: 306966 - RNA, 22 nt, Human herpesvirus 4 (Epstein-Barr virus)
ugucuuugccaaccugcucucu

SEQ ID NO: 306967 - RNA, 18 nt, Human herpesvirus 4 (Epstein-Barr virus)
ugugaccgucuacaucaa

SEQ ID NO: 306968 - RNA, 13 nt, Human herpesvirus 4 (Epstein-Barr virus)
ugugacuacacca

SEQ ID NO: 306969 - RNA, 15 nt, Human herpesvirus 4 (Epstein-Barr virus)
ugugacuggugcuug

SEQ ID NO: 306970 - RNA, 19 nt, Human herpesvirus 4 (Epstein-Barr virus)
ugugaucauggaaaccacu

SEQ ID NO: 306971 - RNA, 23 nt, Human herpesvirus 4 (Epstein-Barr virus)
ugugaugcaauaaauaaaaguac

SEQ ID NO: 306972 - RNA, 18 nt, Human herpesvirus 4 (Epstein-Barr virus)
ugugauucccagaaagaa

SEQ ID NO: 306973 - RNA, 16 nt, Human herpesvirus 4 (Epstein-Barr virus)
ugugccauggugccaa

SEQ ID NO: 306974 - RNA, 14 nt, Human herpesvirus 4 (Epstein-Barr virus)
ugugcuguacaugg

SEQ ID NO: 306975 - RNA, 21 nt, Human herpesvirus 4 (Epstein-Barr virus)
aacugcuauucugagcaccaa

SEQ ID NO: 306976 - RNA, 21 nt, Human herpesvirus 4 (Epstein-Barr virus)
aacuguacuaaauuugcugac

SEQ ID NO: 306977 - RNA, 16 nt, Human herpesvirus 4 (Epstein-Barr virus)
aacugucacaccaguc

SEQ ID NO: 306978 - RNA, 18 nt, Human herpesvirus 4 (Epstein-Barr virus)
aacugucacaccaguccc

SEQ ID NO: 306979 - RNA, 20 nt, Human herpesvirus 4 (Epstein-Barr virus)
aacuuccaacgcauccacca

SEQ ID NO: 306980 - RNA, 18 nt, Human herpesvirus 4 (Epstein-Barr virus)
aacuuggaggcugcuaag

SEQ ID NO: 306981 - RNA, 17 nt, Human herpesvirus 4 (Epstein-Barr virus)
aacuugggggcaggcua

SEQ ID NO: 306982 - RNA, 14 nt, Human herpesvirus 4 (Epstein-Barr virus)
aacuuuacuuuuau

SEQ ID NO: 306983 - RNA, 17 nt, Human herpesvirus 4 (Epstein-Barr virus)
aagaacaaggccaagaa

SEQ ID NO: 306984 - RNA, 17 nt, Human herpesvirus 4 (Epstein-Barr virus)
aagaacacuccacagau

SEQ ID NO: 306985 - RNA, 23 nt, Human herpesvirus 4 (Epstein-Barr virus)
aagaacugggaugaacccugggg

SEQ ID NO: 306986 - RNA, 20 nt, Human herpesvirus 4 (Epstein-Barr virus)
aagaagcccaccuaugugac

SEQ ID NO: 306987 - RNA, 20 nt, Human herpesvirus 4 (Epstein-Barr virus)
aagacagucacauugcaucg

SEQ ID NO: 306988 - RNA, 16 nt, Human herpesvirus 4 (Epstein-Barr virus)
aagacauagagauggu

SEQ ID NO: 306989 - RNA, 20 nt, Human herpesvirus 4 (Epstein-Barr virus)
aagacauggccgcccgccug

SEQ ID NO: 306990 - RNA, 13 nt, Human herpesvirus 4 (Epstein-Barr virus)
aagacccaucuga

SEQ ID NO: 306991 - RNA, 14 nt, Human herpesvirus 4 (Epstein-Barr virus)
aagacuauguucuc

SEQ ID NO: 306992 - RNA, 17 nt, Human herpesvirus 4 (Epstein-Barr virus)
aagagaggggcagggaa

SEQ ID NO: 306993 - RNA, 12 nt, Human herpesvirus 4 (Epstein-Barr virus)
aagaggacgagg

SEQ ID NO: 306994 - RNA, 22 nt, Human herpesvirus 4 (Epstein-Barr virus)
aagagggggugauaaccaugga

SEQ ID NO: 306995 - RNA, 23 nt, Human herpesvirus 4 (Epstein-Barr virus)
aagagucucgccaucuacccaac

SEQ ID NO: 306996 - RNA, 19 nt, Human herpesvirus 4 (Epstein-Barr virus)
aagaguuuaagcagcacug

SEQ ID NO: 306997 - RNA, 21 nt, Human herpesvirus 4 (Epstein-Barr virus)
aagaguuuaagcagcacugaa

SEQ ID NO: 306998 - RNA, 16 nt, Human herpesvirus 4 (Epstein-Barr virus)
aagaugauggacccaa

SEQ ID NO: 306999 - RNA, 14 nt, Human herpesvirus 4 (Epstein-Barr virus)
aagauggauuugaa

SEQ ID NO: 307000 - RNA, 12 nt, Human herpesvirus 4 (Epstein-Barr virus)
aagaugucaaac

SEQ ID NO: 307001 - RNA, 17 nt, Human herpesvirus 4 (Epstein-Barr virus)
aagaugucaaacauggu

SEQ ID NO: 307002 - RNA, 18 nt, Human herpesvirus 4 (Epstein-Barr virus)
aagauugucacagcugcu

SEQ ID NO: 307003 - RNA, 19 nt, Human herpesvirus 4 (Epstein-Barr virus)
aagcaaacggccuggcauu

SEQ ID NO: 307004 - RNA, 20 nt, Human herpesvirus 4 (Epstein-Barr virus)
aagcaacccccggcucucag

SEQ ID NO: 307005 - RNA, 16 nt, Human herpesvirus 4 (Epstein-Barr virus)
aagcaggggugaugaa

SEQ ID NO: 307006 - RNA, 17 nt, Human herpesvirus 4 (Epstein-Barr virus)
aagcaggggugaugaaa

SEQ ID NO: 307007 - RNA, 16 nt, Human herpesvirus 4 (Epstein-Barr virus)
aagcugcaccuggaca

SEQ ID NO: 307008 - RNA, 15 nt, Human herpesvirus 4 (Epstein-Barr virus)
aagcuuaugagcgau

SEQ ID NO: 307009 - RNA, 22 nt, Human herpesvirus 4 (Epstein-Barr virus)
aagcuuuugaccaagcuaccag

SEQ ID NO: 307010 - RNA, 17 nt, Human herpesvirus 4 (Epstein-Barr virus)
aaggaaggcuugccaaa

SEQ ID NO: 307011 - RNA, 18 nt, Human herpesvirus 4 (Epstein-Barr virus)
aaggaaggcuugccaaaa

SEQ ID NO: 307012 - RNA, 22 nt, Human herpesvirus 4 (Epstein-Barr virus)
aaggacagggggacucuagaca

SEQ ID NO: 307013 - RNA, 12 nt, Human herpesvirus 4 (Epstein-Barr virus)
aaggcagucucc

SEQ ID NO: 307014 - RNA, 16 nt, Human herpesvirus 4 (Epstein-Barr virus)
aaggcggugggaucau

SEQ ID NO: 307015 - RNA, 19 nt, Human herpesvirus 4 (Epstein-Barr virus)
aaggcggugggaucaugaa

SEQ ID NO: 307016 - RNA, 12 nt, Human herpesvirus 4 (Epstein-Barr virus)
aaggcuguugac

SEQ ID NO: 307017 - RNA, 14 nt, Human herpesvirus 4 (Epstein-Barr virus)
aaggcuugccaaaa

SEQ ID NO: 307018 - RNA, 18 nt, Human herpesvirus 4 (Epstein-Barr virus)
aagggacucaauggcauu

SEQ ID NO: 307019 - RNA, 14 nt, Human herpesvirus 4 (Epstein-Barr virus)
aagggcgccaucua

SEQ ID NO: 307020 - RNA, 16 nt, Human herpesvirus 4 (Epstein-Barr virus)
aagggggcauccuccg

SEQ ID NO: 307021 - RNA, 17 nt, Human herpesvirus 4 (Epstein-Barr virus)
aagguaaacaagcugac

SEQ ID NO: 307022 - RNA, 13 nt, Human herpesvirus 4 (Epstein-Barr virus)
aaggugucaauaa

SEQ ID NO: 307023 - RNA, 14 nt, Human herpesvirus 4 (Epstein-Barr virus)
aagguuacugcaca

SEQ ID NO: 307024 - RNA, 23 nt, Human herpesvirus 4 (Epstein-Barr virus)
aaguccugcacuauauucuccag

SEQ ID NO: 307025 - RNA, 15 nt, Human herpesvirus 4 (Epstein-Barr virus)
aagugguucagugga

SEQ ID NO: 307026 - RNA, 22 nt, Human herpesvirus 4 (Epstein-Barr virus)
aauaaaaagaauguaacacuac

SEQ ID NO: 307027 - RNA, 19 nt, Human herpesvirus 4 (Epstein-Barr virus)
aauaaacccaaugugcaaa

SEQ ID NO: 307028 - RNA, 13 nt, Human herpesvirus 4 (Epstein-Barr virus)
aauagcuucugca

SEQ ID NO: 307029 - RNA, 18 nt, Human herpesvirus 4 (Epstein-Barr virus)
aauauauuuuccauuuca

SEQ ID NO: 307030 - RNA, 14 nt, Human herpesvirus 4 (Epstein-Barr virus)
aauauccccaaagu

SEQ ID NO: 307031 - RNA, 21 nt, Human herpesvirus 4 (Epstein-Barr virus)
aauauuaauaaauaucuuccu

SEQ ID NO: 307032 - RNA, 16 nt, Human herpesvirus 4 (Epstein-Barr virus)
aauauugccagcgccu

SEQ ID NO: 307033 - RNA, 23 nt, Human herpesvirus 4 (Epstein-Barr virus)
aaucaccgccguaaucuguggug

SEQ ID NO: 307034 - RNA, 15 nt, Human herpesvirus 4 (Epstein-Barr virus)
aaucagaaauuugca

SEQ ID NO: 307035 - RNA, 16 nt, Human herpesvirus 4 (Epstein-Barr virus)
aaucagaaauuugcac

SEQ ID NO: 307036 - RNA, 18 nt, Human herpesvirus 4 (Epstein-Barr virus)
aauccauuaucuuggcac

SEQ ID NO: 307037 - RNA, 19 nt, Human herpesvirus 4 (Epstein-Barr virus)
aauccgaaagcacuuugaa

SEQ ID NO: 307038 - RNA, 15 nt, Human herpesvirus 4 (Epstein-Barr virus)
aaucugacauuucuc

SEQ ID NO: 307039 - RNA, 12 nt, Human herpesvirus 4 (Epstein-Barr virus)
aaucugacucua

SEQ ID NO: 307040 - RNA, 13 nt, Human herpesvirus 4 (Epstein-Barr virus)
aaucugacucuaa

SEQ ID NO: 307041 - RNA, 12 nt, Human herpesvirus 4 (Epstein-Barr virus)
aaucuguugacg

SEQ ID NO: 307042 - RNA, 10 nt, Human herpesvirus 4 (Epstein-Barr virus)
aaucuuguug

SEQ ID NO: 307043 - RNA, 15 nt, Human herpesvirus 4 (Epstein-Barr virus)
aaugacccacuccag

SEQ ID NO: 307044 - RNA, 12 nt, Human herpesvirus 4 (Epstein-Barr virus)
aaugacuaugag

SEQ ID NO: 307045 - RNA, 15 nt, Human herpesvirus 4 (Epstein-Barr virus)
aaugagagccaaaaa

SEQ ID NO: 307046 - RNA, 18 nt, Human herpesvirus 4 (Epstein-Barr virus)
aaugauguccaguucccu

SEQ ID NO: 307047 - RNA, 22 nt, Human herpesvirus 4 (Epstein-Barr virus)
aaugcaacaauagaaguggaaa

SEQ ID NO: 307048 - RNA, 23 nt, Human herpesvirus 4 (Epstein-Barr virus)
aaugcaccuugacuguaaucacu

SEQ ID NO: 307049 - RNA, 15 nt, Human herpesvirus 4 (Epstein-Barr virus)
aaugcagguuugacu

SEQ ID NO: 307050 - RNA, 14 nt, Human herpesvirus 4 (Epstein-Barr virus)
aaugcccccggggg

SEQ ID NO: 307051 - RNA, 14 nt, Human herpesvirus 4 (Epstein-Barr virus)
aauguaucccaaau

SEQ ID NO: 307052 - RNA, 21 nt, Human herpesvirus 4 (Epstein-Barr virus)
aaugucaaggcucugcacagg

SEQ ID NO: 307053 - RNA, 22 nt, Human herpesvirus 4 (Epstein-Barr virus)
aaugucaaggcucugcacagga

SEQ ID NO: 307054 - RNA, 13 nt, Human herpesvirus 4 (Epstein-Barr virus)
aaugucaccacua

SEQ ID NO: 307055 - RNA, 14 nt, Human herpesvirus 4 (Epstein-Barr virus)
aaugugcagggauu

SEQ ID NO: 307056 - RNA, 22 nt, Human herpesvirus 4 (Epstein-Barr virus)
aauguuacccucauugugcuga

SEQ ID NO: 307057 - RNA, 20 nt, Human herpesvirus 4 (Epstein-Barr virus)
aauguuacuucuuuugcucu

SEQ ID NO: 307058 - RNA, 21 nt, Human herpesvirus 4 (Epstein-Barr virus)
aauguuacuucuuuugcucuu

SEQ ID NO: 307059 - RNA, 13 nt, Human herpesvirus 4 (Epstein-Barr virus)
aauucacaucuca

SEQ ID NO: 307060 - RNA, 14 nt, Human herpesvirus 4 (Epstein-Barr virus)
aauucacaucucag

SEQ ID NO: 307061 - RNA, 13 nt, Human herpesvirus 4 (Epstein-Barr virus)
aauucaccuaaga

SEQ ID NO: 307062 - RNA, 13 nt, Human herpesvirus 4 (Epstein-Barr virus)
aauucuccugccu

SEQ ID NO: 307063 - RNA, 21 nt, Human herpesvirus 4 (Epstein-Barr virus)
aaaaaggccggcugacaugga

SEQ ID NO: 307064 - RNA, 20 nt, Human herpesvirus 4 (Epstein-Barr virus)
aaaaagguuuagcuauucca

SEQ ID NO: 307065 - RNA, 19 nt, Human herpesvirus 4 (Epstein-Barr virus)
aaaacauuagcgacauuua

SEQ ID NO: 307066 - RNA, 16 nt, Human herpesvirus 4 (Epstein-Barr virus)
aaaacccccgugcgau

SEQ ID NO: 307067 - RNA, 23 nt, Human herpesvirus 4 (Epstein-Barr virus)
aaaaccggcgagacuuggaccaa

SEQ ID NO: 307068 - RNA, 16 nt, Human herpesvirus 4 (Epstein-Barr virus)
aaaacucugcauggag

SEQ ID NO: 307069 - RNA, 15 nt, Human herpesvirus 4 (Epstein-Barr virus)
aaaacuugagucucu

SEQ ID NO: 307070 - RNA, 15 nt, Human herpesvirus 4 (Epstein-Barr virus)
aaaauaguuccaggu

SEQ ID NO: 307071 - RNA, 20 nt, Human herpesvirus 4 (Epstein-Barr virus)
aaaauuggugccuugcucuc

SEQ ID NO: 307072 - RNA, 21 nt, Human herpesvirus 4 (Epstein-Barr virus)
aaaauuggugccuugcucuca

SEQ ID NO: 307073 - RNA, 22 nt, Human herpesvirus 4 (Epstein-Barr virus)
aaaauuuacaccugacccauac

SEQ ID NO: 307074 - RNA, 13 nt, Human herpesvirus 4 (Epstein-Barr virus)
aaacaaaaccacu

SEQ ID NO: 307075 - RNA, 11 nt, Human herpesvirus 4 (Epstein-Barr virus)
aaacaccagug

SEQ ID NO: 307076 - RNA, 14 nt, Human herpesvirus 4 (Epstein-Barr virus)
aaacacccauucca

SEQ ID NO: 307077 - RNA, 12 nt, Human herpesvirus 4 (Epstein-Barr virus)
aaacacuacaau

SEQ ID NO: 307078 - RNA, 11 nt, Human herpesvirus 4 (Epstein-Barr virus)
aaacaguuuau

SEQ ID NO: 307079 - RNA, 20 nt, Human herpesvirus 4 (Epstein-Barr virus)
aaacccucagucacgggaca

SEQ ID NO: 307080 - RNA, 17 nt, Human herpesvirus 4 (Epstein-Barr virus)
aaacgagcccaaacucu

SEQ ID NO: 307081 - RNA, 14 nt, Human herpesvirus 4 (Epstein-Barr virus)
aaacucacaggaca

SEQ ID NO: 307082 - RNA, 16 nt, Human herpesvirus 4 (Epstein-Barr virus)
aaacucugcauggaga

SEQ ID NO: 307083 - RNA, 23 nt, Human herpesvirus 4 (Epstein-Barr virus)
aaacucugcauggagaagcugga

SEQ ID NO: 307084 - RNA, 19 nt, Human herpesvirus 4 (Epstein-Barr virus)
aaacugagaacagucauca

SEQ ID NO: 307085 - RNA, 18 nt, Human herpesvirus 4 (Epstein-Barr virus)
aaacugugccauggugcc

SEQ ID NO: 307086 - RNA, 15 nt, Human herpesvirus 4 (Epstein-Barr virus)
aaagagccaugguga

SEQ ID NO: 307087 - RNA, 20 nt, Human herpesvirus 4 (Epstein-Barr virus)
aaagccagcgcacccgggga

SEQ ID NO: 307088 - RNA, 23 nt, Human herpesvirus 4 (Epstein-Barr virus)
aaagccagcgcacccggggaacc

SEQ ID NO: 307089 - RNA, 22 nt, Human herpesvirus 4 (Epstein-Barr virus)
aaagcgggccugaguccaacau

SEQ ID NO: 307090 - RNA, 14 nt, Human herpesvirus 4 (Epstein-Barr virus)
aaagggcauguggu

SEQ ID NO: 307091 - RNA, 22 nt, Human herpesvirus 4 (Epstein-Barr virus)
aaaguaaccacauauacuggag

SEQ ID NO: 307092 - RNA, 13 nt, Human herpesvirus 4 (Epstein-Barr virus)
aaagugcauacac

SEQ ID NO: 307093 - RNA, 18 nt, Human herpesvirus 4 (Epstein-Barr virus)
aaauaguuccaggugaca

SEQ ID NO: 307094 - RNA, 13 nt, Human herpesvirus 4 (Epstein-Barr virus)
aaaucucaguccc

SEQ ID NO: 307095 - RNA, 23 nt, Human herpesvirus 4 (Epstein-Barr virus)
aaaucucagucccaccacaaagg

SEQ ID NO: 307096 - RNA, 22 nt, Human herpesvirus 4 (Epstein-Barr virus)
aaaugaacccagggguggcagu

SEQ ID NO: 307097 - RNA, 19 nt, Human herpesvirus 4 (Epstein-Barr virus)
aaaugugcagcuucuccag

SEQ ID NO: 307098 - RNA, 23 nt, Human herpesvirus 4 (Epstein-Barr virus)
aaauguuacuucuuuugcucuua

SEQ ID NO: 307099 - RNA, 17 nt, Human herpesvirus 4 (Epstein-Barr virus)
aaauucgcgaugcuaua

SEQ ID NO: 307100 - RNA, 18 nt, Human herpesvirus 4 (Epstein-Barr virus)
aaauuggugccuugcucu

SEQ ID NO: 307101 - RNA, 21 nt, Human herpesvirus 4 (Epstein-Barr virus)
aacaaagcccgaugcccaguu

SEQ ID NO: 307102 - RNA, 21 nt, Human herpesvirus 4 (Epstein-Barr virus)
aacaacuuccaacgcauccac

SEQ ID NO: 307103 - RNA, 16 nt, Human herpesvirus 4 (Epstein-Barr virus)
aacaagcuaccgauga

SEQ ID NO: 307104 - RNA, 23 nt, Human herpesvirus 4 (Epstein-Barr virus)
aacaagcuaccgaugauucuggc

SEQ ID NO: 307105 - RNA, 16 nt, Human herpesvirus 4 (Epstein-Barr virus)
aacaaggagugccucu

SEQ ID NO: 307106 - RNA, 22 nt, Human herpesvirus 4 (Epstein-Barr virus)
aacaaucuggacucucuguuuc

SEQ ID NO: 307107 - RNA, 18 nt, Human herpesvirus 4 (Epstein-Barr virus)
aacacagacugcgaucug

SEQ ID NO: 307108 - RNA, 17 nt, Human herpesvirus 4 (Epstein-Barr virus)
aacacagcucuggcagu

SEQ ID NO: 307109 - RNA, 12 nt, Human herpesvirus 4 (Epstein-Barr virus)
aacacagggugg

SEQ ID NO: 307110 - RNA, 18 nt, Human herpesvirus 4 (Epstein-Barr virus)
aacaccaguguccagaga

SEQ ID NO: 307111 - RNA, 22 nt, Human herpesvirus 4 (Epstein-Barr virus)
aacacggcaccgucagccacac

SEQ ID NO: 307112 - RNA, 14 nt, Human herpesvirus 4 (Epstein-Barr virus)
aacacuacaauaaa

SEQ ID NO: 307113 - RNA, 10 nt, Human herpesvirus 4 (Epstein-Barr virus)
aacacuccac

SEQ ID NO: 307114 - RNA, 23 nt, Human herpesvirus 4 (Epstein-Barr virus)
aacagcuucgcaaguuccucaac

SEQ ID NO: 307115 - RNA, 16 nt, Human herpesvirus 4 (Epstein-Barr virus)
aacagggguauguggu

SEQ ID NO: 307116 - RNA, 23 nt, Human herpesvirus 4 (Epstein-Barr virus)
aacauauucccccacguguucuc

SEQ ID NO: 307117 - RNA, 15 nt, Human herpesvirus 4 (Epstein-Barr virus)
aacaucucuuguaau

SEQ ID NO: 307118 - RNA, 16 nt, Human herpesvirus 4 (Epstein-Barr virus)
aacauuuuaaacaugc

SEQ ID NO: 307119 - RNA, 15 nt, Human herpesvirus 4 (Epstein-Barr virus)
aaccaaacuaacauc

SEQ ID NO: 307120 - RNA, 13 nt, Human herpesvirus 4 (Epstein-Barr virus)
aaccacaacugcu

SEQ ID NO: 307121 - RNA, 16 nt, Human herpesvirus 4 (Epstein-Barr virus)
aaccacauauacugga

SEQ ID NO: 307122 - RNA, 13 nt, Human herpesvirus 4 (Epstein-Barr virus)
aaccacggugaca

SEQ ID NO: 307123 - RNA, 17 nt, Human herpesvirus 4 (Epstein-Barr virus)
aaccacggugacauuca

SEQ ID NO: 307124 - RNA, 19 nt, Human herpesvirus 4 (Epstein-Barr virus)
aaccagcuggucaucagcc

SEQ ID NO: 307125 - RNA, 22 nt, Human herpesvirus 4 (Epstein-Barr virus)
aaccagcuggucaucagccgcu

SEQ ID NO: 307126 - RNA, 17 nt, Human herpesvirus 4 (Epstein-Barr virus)
aacccccggcucucagg

SEQ ID NO: 307127 - RNA, 18 nt, Human herpesvirus 4 (Epstein-Barr virus)
aacccccggcucucaggc

SEQ ID NO: 307128 - RNA, 16 nt, Human herpesvirus 4 (Epstein-Barr virus)
aacccccgugcgauga

SEQ ID NO: 307129 - RNA, 13 nt, Human herpesvirus 4 (Epstein-Barr virus)
aacccuagccacc

SEQ ID NO: 307130 - RNA, 20 nt, Human herpesvirus 4 (Epstein-Barr virus)
aacccuugcccucuccagca

SEQ ID NO: 307131 - RNA, 21 nt, Human herpesvirus 4 (Epstein-Barr virus)
aacccuugcccucuccagcaa

SEQ ID NO: 307132 - RNA, 23 nt, Human herpesvirus 4 (Epstein-Barr virus)
aaccucaaccacaaaaugggggu

SEQ ID NO: 307133 - RNA, 15 nt, Human herpesvirus 4 (Epstein-Barr virus)
aaccugcucucucug

SEQ ID NO: 307134 - RNA, 16 nt, Human herpesvirus 4 (Epstein-Barr virus)
aaccuggagucugcau

SEQ ID NO: 307135 - RNA, 19 nt, Human herpesvirus 4 (Epstein-Barr virus)
aaccuggagucugcauguc

SEQ ID NO: 307136 - RNA, 13 nt, Human herpesvirus 4 (Epstein-Barr virus)
aacgaaagugcuu

SEQ ID NO: 307137 - RNA, 16 nt, Human herpesvirus 4 (Epstein-Barr virus)
aacgacacagugauga

SEQ ID NO: 307138 - RNA, 16 nt, Human herpesvirus 4 (Epstein-Barr virus)
aacgcauccaccauca

SEQ ID NO: 307139 - RNA, 18 nt, Human herpesvirus 4 (Epstein-Barr virus)
aacggcgagcagggugaa

SEQ ID NO: 307140 - RNA, 18 nt, Human herpesvirus 4 (Epstein-Barr virus)
aacggugauuaggcacug

SEQ ID NO: 307141 - RNA, 21 nt, Human herpesvirus 4 (Epstein-Barr virus)
aacgugacaggcacaacggcu

SEQ ID NO: 307142 - RNA, 16 nt, Human herpesvirus 4 (Epstein-Barr virus)
aacgugauggugcugg

SEQ ID NO: 307143 - RNA, 23 nt, Human herpesvirus 4 (Epstein-Barr virus)
aacguggucuccuucuuuaucuc

SEQ ID NO: 307144 - RNA, 20 nt, Human herpesvirus 4 (Epstein-Barr virus)
aacuaccugucugauugcac

SEQ ID NO: 307145 - RNA, 17 nt, Human herpesvirus 4 (Epstein-Barr virus)
aacucacaggacauguu

SEQ ID NO: 307146 - RNA, 22 nt, Human herpesvirus 4 (Epstein-Barr virus)
aacuccaacgagggcagacacc

SEQ ID NO: 307147 - RNA, 18 nt, Human herpesvirus 4 (Epstein-Barr virus)
aacuccggcccacgccau

SEQ ID NO: 307148 - RNA, 16 nt, Human herpesvirus 4 (Epstein-Barr virus)
aacugacacacaggcc

SEQ ID NO: 307149 - RNA, 19 nt, Human herpesvirus 4 (Epstein-Barr virus)
aauugauugaugaguuaaa

SEQ ID NO: 307150 - RNA, 21 nt, Human herpesvirus 4 (Epstein-Barr virus)
aauugucaauaaagauggauu

SEQ ID NO: 307151 - RNA, 15 nt, Human herpesvirus 4 (Epstein-Barr virus)
aauugucacugagaa

SEQ ID NO: 307152 - RNA, 14 nt, Human herpesvirus 4 (Epstein-Barr virus)
aauuugcacuuucu

SEQ ID NO: 307153 - RNA, 13 nt, Human herpesvirus 4 (Epstein-Barr virus)
aauuugcugacau

SEQ ID NO: 307154 - RNA, 13 nt, Human herpesvirus 4 (Epstein-Barr virus)
acaaacaccagug

SEQ ID NO: 307155 - RNA, 20 nt, Human herpesvirus 4 (Epstein-Barr virus)
acaaccacggugacauucac

SEQ ID NO: 307156 - RNA, 14 nt, Human herpesvirus 4 (Epstein-Barr virus)
acaaccccuuccac

SEQ ID NO: 307157 - RNA, 14 nt, Human herpesvirus 4 (Epstein-Barr virus)
acaacggcauuccc

SEQ ID NO: 307158 - RNA, 14 nt, Human herpesvirus 4 (Epstein-Barr virus)
acaacuauguguau

SEQ ID NO: 307159 - RNA, 19 nt, Human herpesvirus 4 (Epstein-Barr virus)
acaacugcuauucugagca

SEQ ID NO: 307160 - RNA, 12 nt, Human herpesvirus 4 (Epstein-Barr virus)
acaacugucaca

SEQ ID NO: 307161 - RNA, 15 nt, Human herpesvirus 4 (Epstein-Barr virus)
acaagacagucacau

SEQ ID NO: 307162 - RNA, 19 nt, Human herpesvirus 4 (Epstein-Barr virus)
acaagcuaccgaugauucu

SEQ ID NO: 307163 - RNA, 14 nt, Human herpesvirus 4 (Epstein-Barr virus)
acaagucacaucaa

SEQ ID NO: 307164 - RNA, 23 nt, Human herpesvirus 4 (Epstein-Barr virus)
acaaguggcgguggaacacggca

SEQ ID NO: 307165 - RNA, 21 nt, Human herpesvirus 4 (Epstein-Barr virus)
acaauacacccaucuggaguu

SEQ ID NO: 307166 - RNA, 14 nt, Human herpesvirus 4 (Epstein-Barr virus)
acaauagaagugga

SEQ ID NO: 307167 - RNA, 16 nt, Human herpesvirus 4 (Epstein-Barr virus)
acaauguuccuucuca

SEQ ID NO: 307168 - RNA, 19 nt, Human herpesvirus 4 (Epstein-Barr virus)
acaauuuuagaugagguag

SEQ ID NO: 307169 - RNA, 22 nt, Human herpesvirus 4 (Epstein-Barr virus)
acacaaccacggugacauucac

SEQ ID NO: 307170 - RNA, 14 nt, Human herpesvirus 4 (Epstein-Barr virus)
acacacacaguagc

SEQ ID NO: 307171 - RNA, 16 nt, Human herpesvirus 4 (Epstein-Barr virus)
acacacgagccauaga

SEQ ID NO: 307172 - RNA, 18 nt, Human herpesvirus 4 (Epstein-Barr virus)
acacacgagccauagacc

SEQ ID NO: 307173 - RNA, 13 nt, Human herpesvirus 4 (Epstein-Barr virus)
acacagacugcga

SEQ ID NO: 307174 - RNA, 15 nt, Human herpesvirus 4 (Epstein-Barr virus)
acacagccugacucu

SEQ ID NO: 307175 - RNA, 21 nt, Human herpesvirus 4 (Epstein-Barr virus)
acacaggacaacggcauuccc

SEQ ID NO: 307176 - RNA, 18 nt, Human herpesvirus 4 (Epstein-Barr virus)
acacagugaugaacacca

SEQ ID NO: 307177 - RNA, 19 nt, Human herpesvirus 4 (Epstein-Barr virus)
acacauggccggguuugau

SEQ ID NO: 307178 - RNA, 18 nt, Human herpesvirus 4 (Epstein-Barr virus)
acacauuacggugcugga

SEQ ID NO: 307179 - RNA, 15 nt, Human herpesvirus 4 (Epstein-Barr virus)
acaccaccccaccau

SEQ ID NO: 307180 - RNA, 14 nt, Human herpesvirus 4 (Epstein-Barr virus)
acaccagucccuug

SEQ ID NO: 307181 - RNA, 22 nt, Human herpesvirus 4 (Epstein-Barr virus)
acaccaucccaauucacaucuc

SEQ ID NO: 307182 - RNA, 16 nt, Human herpesvirus 4 (Epstein-Barr virus)
acacccacccugcaca

SEQ ID NO: 307183 - RNA, 18 nt, Human herpesvirus 4 (Epstein-Barr virus)
acacccccacuuuuccaa

SEQ ID NO: 307184 - RNA, 14 nt, Human herpesvirus 4 (Epstein-Barr virus)
acaccccugagaac

SEQ ID NO: 307185 - RNA, 20 nt, Human herpesvirus 4 (Epstein-Barr virus)
acaccgagcagaaggccaug

SEQ ID NO: 307186 - RNA, 17 nt, Human herpesvirus 4 (Epstein-Barr virus)
acaccggggugccaaga

SEQ ID NO: 307187 - RNA, 13 nt, Human herpesvirus 4 (Epstein-Barr virus)
acaccuaucugua

SEQ ID NO: 307188 - RNA, 12 nt, Human herpesvirus 4 (Epstein-Barr virus)
acacgagccaua

SEQ ID NO: 307189 - RNA, 21 nt, Human herpesvirus 4 (Epstein-Barr virus)
acacgccugucauucuaucaa

SEQ ID NO: 307190 - RNA, 21 nt, Human herpesvirus 4 (Epstein-Barr virus)
acacugaugagucugacuacu

SEQ ID NO: 307191 - RNA, 18 nt, Human herpesvirus 4 (Epstein-Barr virus)
acagaaauugggugacca

SEQ ID NO: 307192 - RNA, 21 nt, Human herpesvirus 4 (Epstein-Barr virus)
acagaggaggcuggugccuug

SEQ ID NO: 307193 - RNA, 13 nt, Human herpesvirus 4 (Epstein-Barr virus)
acagaggcuggau

SEQ ID NO: 307194 - RNA, 13 nt, Human herpesvirus 4 (Epstein-Barr virus)
acagaucugacca

SEQ ID NO: 307195 - RNA, 18 nt, Human herpesvirus 4 (Epstein-Barr virus)
acagauggagagauuuca

SEQ ID NO: 307196 - RNA, 15 nt, Human herpesvirus 4 (Epstein-Barr virus)
acagauugucuucca

SEQ ID NO: 307197 - RNA, 16 nt, Human herpesvirus 4 (Epstein-Barr virus)
acagauugucuuccac

SEQ ID NO: 307198 - RNA, 21 nt, Human herpesvirus 4 (Epstein-Barr virus)
acagauugucuuccacaccau

SEQ ID NO: 307199 - RNA, 16 nt, Human herpesvirus 4 (Epstein-Barr virus)
acagccccacucuugc

SEQ ID NO: 307200 - RNA, 17 nt, Human herpesvirus 4 (Epstein-Barr virus)
acagccccacucuugcc

SEQ ID NO: 307201 - RNA, 18 nt, Human herpesvirus 4 (Epstein-Barr virus)
acagccccacucuugccu

SEQ ID NO: 307202 - RNA, 18 nt, Human herpesvirus 4 (Epstein-Barr virus)
acagcucuggcaguuaua

SEQ ID NO: 307203 - RNA, 18 nt, Human herpesvirus 4 (Epstein-Barr virus)
acagcugacggugggcau

SEQ ID NO: 307204 - RNA, 20 nt, Human herpesvirus 4 (Epstein-Barr virus)
acagcuucgcaaguuccuca

SEQ ID NO: 307205 - RNA, 14 nt, Human herpesvirus 4 (Epstein-Barr virus)
acaggcauugcuaa

SEQ ID NO: 307206 - RNA, 22 nt, Human herpesvirus 4 (Epstein-Barr virus)
acagggacaucuacguguucca

SEQ ID NO: 307207 - RNA, 21 nt, Human herpesvirus 4 (Epstein-Barr virus)
acagggguauguggugccaug

SEQ ID NO: 307208 - RNA, 22 nt, Human herpesvirus 4 (Epstein-Barr virus)
acaggugggacaaaaugggguc

SEQ ID NO: 307209 - RNA, 12 nt, Human herpesvirus 4 (Epstein-Barr virus)
acaguaccacaa

SEQ ID NO: 307210 - RNA, 15 nt, Human herpesvirus 4 (Epstein-Barr virus)
acaguaccacaagcu

SEQ ID NO: 307211 - RNA, 21 nt, Human herpesvirus 4 (Epstein-Barr virus)
acagucacauugcaucgcuca

SEQ ID NO: 307212 - RNA, 14 nt, Human herpesvirus 4 (Epstein-Barr virus)
acaguuuauugaua

SEQ ID NO: 307213 - RNA, 15 nt, Human herpesvirus 4 (Epstein-Barr virus)
acauaaacaugguuu

SEQ ID NO: 307214 - RNA, 19 nt, Human herpesvirus 4 (Epstein-Barr virus)
acauaauguaugccauggc

SEQ ID NO: 307215 - RNA, 20 nt, Human herpesvirus 4 (Epstein-Barr virus)
acauaauguaugccauggcc

SEQ ID NO: 307216 - RNA, 18 nt, Human herpesvirus 4 (Epstein-Barr virus)
acaucagacccaacaaag

SEQ ID NO: 307217 - RNA, 15 nt, Human herpesvirus 4 (Epstein-Barr virus)
acaucauuagcccag

SEQ ID NO: 307218 - RNA, 21 nt, Human herpesvirus 4 (Epstein-Barr virus)
acaucucagggacaacagguc

SEQ ID NO: 307219 - RNA, 22 nt, Human herpesvirus 4 (Epstein-Barr virus)
acauguuugggggaguuggcau

SEQ ID NO: 307220 - RNA, 19 nt, Human herpesvirus 4 (Epstein-Barr virus)
acauuaaagccuccucgca

SEQ ID NO: 307221 - RNA, 19 nt, Human herpesvirus 4 (Epstein-Barr virus)
acauuaaccucaaccacaa

SEQ ID NO: 307222 - RNA, 19 nt, Human herpesvirus 4 (Epstein-Barr virus)
acauucacugggacaacug

SEQ ID NO: 307223 - RNA, 12 nt, Human herpesvirus 4 (Epstein-Barr virus)
acauugaugaac

SEQ ID NO: 307224 - RNA, 21 nt, Human herpesvirus 4 (Epstein-Barr virus)
acauuugaggaggcacacaaa

SEQ ID NO: 307225 - RNA, 12 nt, Human herpesvirus 4 (Epstein-Barr virus)
accaaacuaaca

SEQ ID NO: 307226 - RNA, 17 nt, Human herpesvirus 4 (Epstein-Barr virus)
accaaagcuaacuguac

SEQ ID NO: 307227 - RNA, 18 nt, Human herpesvirus 4 (Epstein-Barr virus)
accaaagcuaacuguaca

SEQ ID NO: 307228 - RNA, 17 nt, Human herpesvirus 4 (Epstein-Barr virus)
accaagaccaauaccca

SEQ ID NO: 307229 - RNA, 13 nt, Human herpesvirus 4 (Epstein-Barr virus)
accaagacucaau

SEQ ID NO: 307230 - RNA, 18 nt, Human herpesvirus 4 (Epstein-Barr virus)
accaagggcagggcaaug

SEQ ID NO: 307231 - RNA, 12 nt, Human herpesvirus 4 (Epstein-Barr virus)
accaaugccaaa

SEQ ID NO: 307232 - RNA, 22 nt, Human herpesvirus 4 (Epstein-Barr virus)
accaaugccaaagcugaagaac

SEQ ID NO: 307233 - RNA, 19 nt, Human herpesvirus 4 (Epstein-Barr virus)
accaauguaucccaaauaa

SEQ ID NO: 307234 - RNA, 14 nt, Human herpesvirus 4 (Epstein-Barr virus)
accacaacugcuau

SEQ ID NO: 307235 - RNA, 22 nt, Human herpesvirus 4 (Epstein-Barr virus)
accacacccccacuuuuccaac

SEQ ID NO: 307236 - RNA, 15 nt, Human herpesvirus 4 (Epstein-Barr virus)
accacauauacugga

SEQ ID NO: 307237 - RNA, 16 nt, Human herpesvirus 4 (Epstein-Barr virus)
accaccucccugauaa

SEQ ID NO: 307238 - RNA, 16 nt, Human herpesvirus 4 (Epstein-Barr virus)
accacgccugcuucac

SEQ ID NO: 307239 - RNA, 21 nt, Human herpesvirus 4 (Epstein-Barr virus)
accacuaagguuacugcacag

SEQ ID NO: 307240 - RNA, 19 nt, Human herpesvirus 4 (Epstein-Barr virus)
accacucgaaacuauggca

SEQ ID NO: 307241 - RNA, 18 nt, Human herpesvirus 4 (Epstein-Barr virus)
accagaaggcuccggcgg

SEQ ID NO: 307242 - RNA, 14 nt, Human herpesvirus 4 (Epstein-Barr virus)
accagacauggugu

SEQ ID NO: 307243 - RNA, 17 nt, Human herpesvirus 4 (Epstein-Barr virus)
accagcacgucgucaga

SEQ ID NO: 307244 - RNA, 12 nt, Human herpesvirus 4 (Epstein-Barr virus)
accagcacgugg

SEQ ID NO: 307245 - RNA, 13 nt, Human herpesvirus 4 (Epstein-Barr virus)
accagcccgggga

SEQ ID NO: 307246 - RNA, 20 nt, Human herpesvirus 4 (Epstein-Barr virus)
accagcccuuuuuccagugg

SEQ ID NO: 307247 - RNA, 15 nt, Human herpesvirus 4 (Epstein-Barr virus)
accagcuggucauca

SEQ ID NO: 307248 - RNA, 16 nt, Human herpesvirus 4 (Epstein-Barr virus)
accagcuucucaaagg

SEQ ID NO: 307249 - RNA, 20 nt, Human herpesvirus 4 (Epstein-Barr virus)
accaucaaugucaccacuaa

SEQ ID NO: 307250 - RNA, 22 nt, Human herpesvirus 4 (Epstein-Barr virus)
accaugcgaccggguagaccac

SEQ ID NO: 307251 - RNA, 15 nt, Human herpesvirus 4 (Epstein-Barr virus)
accaugcucaguggc

SEQ ID NO: 307252 - RNA, 22 nt, Human herpesvirus 4 (Epstein-Barr virus)
accauggacaacgacacaguga

SEQ ID NO: 307253 - RNA, 16 nt, Human herpesvirus 4 (Epstein-Barr virus)
accauggucgaugaac

SEQ ID NO: 307254 - RNA, 14 nt, Human herpesvirus 4 (Epstein-Barr virus)
acccaacagucuuc

SEQ ID NO: 307255 - RNA, 17 nt, Human herpesvirus 4 (Epstein-Barr virus)
acccaacagucuucagg

SEQ ID NO: 307256 - RNA, 14 nt, Human herpesvirus 4 (Epstein-Barr virus)
acccaccacacagc

SEQ ID NO: 307257 - RNA, 21 nt, Human herpesvirus 4 (Epstein-Barr virus)
acccacuacaccccugagaac

SEQ ID NO: 307258 - RNA, 17 nt, Human herpesvirus 4 (Epstein-Barr virus)
acccacuccagugcgag

SEQ ID NO: 307259 - RNA, 16 nt, Human herpesvirus 4 (Epstein-Barr virus)
acccagggguggcagu

SEQ ID NO: 307260 - RNA, 20 nt, Human herpesvirus 4 (Epstein-Barr virus)
acccagggguggcaguggau

SEQ ID NO: 307261 - RNA, 15 nt, Human herpesvirus 4 (Epstein-Barr virus)
acccagguggucuua

SEQ ID NO: 307262 - RNA, 22 nt, Human herpesvirus 4 (Epstein-Barr virus)
acccaucuggaguucaaccuaa

SEQ ID NO: 307263 - RNA, 15 nt, Human herpesvirus 4 (Epstein-Barr virus)
acccaugaccaacau

SEQ ID NO: 307264 - RNA, 15 nt, Human herpesvirus 4 (Epstein-Barr virus)
acccauguugucacg

SEQ ID NO: 307265 - RNA, 22 nt, Human herpesvirus 4 (Epstein-Barr virus)
acccauguugucacgucacuca

SEQ ID NO: 307266 - RNA, 13 nt, Human herpesvirus 4 (Epstein-Barr virus)
accccagucccaa

SEQ ID NO: 307267 - RNA, 18 nt, Human herpesvirus 4 (Epstein-Barr virus)
accccagucccaacccaa

SEQ ID NO: 307268 - RNA, 14 nt, Human herpesvirus 4 (Epstein-Barr virus)
accccccucugaug

SEQ ID NO: 307269 - RNA, 15 nt, Human herpesvirus 4 (Epstein-Barr virus)
accccccucugaugg

SEQ ID NO: 307270 - RNA, 13 nt, Human herpesvirus 4 (Epstein-Barr virus)
acccccgcgucac

SEQ ID NO: 307271 - RNA, 15 nt, Human herpesvirus 4 (Epstein-Barr virus)
acccccggcucucag

SEQ ID NO: 307272 - RNA, 14 nt, Human herpesvirus 4 (Epstein-Barr virus)
acccccgugcgaug

SEQ ID NO: 307273 - RNA, 15 nt, Human herpesvirus 4 (Epstein-Barr virus)
accccuggcuuccac

SEQ ID NO: 307274 - RNA, 18 nt, Human herpesvirus 4 (Epstein-Barr virus)
accccuggcuuccacuca

SEQ ID NO: 307275 - RNA, 18 nt, Human herpesvirus 4 (Epstein-Barr virus)
acccggaccaaugccaaa

SEQ ID NO: 307276 - RNA, 15 nt, Human herpesvirus 4 (Epstein-Barr virus)
acccucauugugcug

SEQ ID NO: 307277 - RNA, 17 nt, Human herpesvirus 4 (Epstein-Barr virus)
acccucauugugcugaa

SEQ ID NO: 307278 - RNA, 18 nt, Human herpesvirus 4 (Epstein-Barr virus)
acccucauugugcugaag

SEQ ID NO: 307279 - RNA, 14 nt, Human herpesvirus 4 (Epstein-Barr virus)
acccugcauggcca

SEQ ID NO: 307280 - RNA, 15 nt, Human herpesvirus 4 (Epstein-Barr virus)
acccugcauggccag

SEQ ID NO: 307281 - RNA, 16 nt, Human herpesvirus 4 (Epstein-Barr virus)
acccuggggcaacaga

SEQ ID NO: 307282 - RNA, 18 nt, Human herpesvirus 4 (Epstein-Barr virus)
acccuuuccuaagaccua

SEQ ID NO: 307283 - RNA, 16 nt, Human herpesvirus 4 (Epstein-Barr virus)
accgagcagaaggcca

SEQ ID NO: 307284 - RNA, 17 nt, Human herpesvirus 4 (Epstein-Barr virus)
accgagcagaaggccau

SEQ ID NO: 307285 - RNA, 15 nt, Human herpesvirus 4 (Epstein-Barr virus)
accgaugagauugcc

SEQ ID NO: 307286 - RNA, 18 nt, Human herpesvirus 4 (Epstein-Barr virus)
accgccgguuaacuuuaa

SEQ ID NO: 307287 - RNA, 22 nt, Human herpesvirus 4 (Epstein-Barr virus)
accgccuggugguggguguccu

SEQ ID NO: 307288 - RNA, 18 nt, Human herpesvirus 4 (Epstein-Barr virus)
accgcgaccaagacucaa

SEQ ID NO: 307289 - RNA, 17 nt, Human herpesvirus 4 (Epstein-Barr virus)
accggagccaccacagc

SEQ ID NO: 307290 - RNA, 13 nt, Human herpesvirus 4 (Epstein-Barr virus)
accggagccugcc

SEQ ID NO: 307291 - RNA, 22 nt, Human herpesvirus 4 (Epstein-Barr virus)
accgggggaucgcugaaucuag

SEQ ID NO: 307292 - RNA, 14 nt, Human herpesvirus 4 (Epstein-Barr virus)
accguaccaugagu

SEQ ID NO: 307293 - RNA, 14 nt, Human herpesvirus 4 (Epstein-Barr virus)
accgucagccacac

SEQ ID NO: 307294 - RNA, 22 nt, Human herpesvirus 4 (Epstein-Barr virus)
accguggagccgggcuucagca

SEQ ID NO: 307295 - RNA, 24 nt, Human herpesvirus 4 (Epstein-Barr virus)
accuaagaaugggagcaaccagcu

SEQ ID NO: 307296 - RNA, 23 nt, Human herpesvirus 4 (Epstein-Barr virus)
accuacaccaccccaccauauga

SEQ ID NO: 307297 - RNA, 18 nt, Human herpesvirus 4 (Epstein-Barr virus)
accuacaggacaagacag

SEQ ID NO: 307298 - RNA, 14 nt, Human herpesvirus 4 (Epstein-Barr virus)
accuaucuguaugu

SEQ ID NO: 307299 - RNA, 12 nt, Human herpesvirus 4 (Epstein-Barr virus)
accuaugccaau

SEQ ID NO: 307300 - RNA, 19 nt, Human herpesvirus 4 (Epstein-Barr virus)
accuaugccaauccaugcc

SEQ ID NO: 307301 - RNA, 21 nt, Human herpesvirus 4 (Epstein-Barr virus)
accuaugccaauccaugccaa

SEQ ID NO: 307302 - RNA, 23 nt, Human herpesvirus 4 (Epstein-Barr virus)
accuaugugaccgucuacaucaa

SEQ ID NO: 307303 - RNA, 13 nt, Human herpesvirus 4 (Epstein-Barr virus)
accucaaccacaa

SEQ ID NO: 307304 - RNA, 19 nt, Human herpesvirus 4 (Epstein-Barr virus)
accuccgggcccacgucaa

SEQ ID NO: 307305 - RNA, 21 nt, Human herpesvirus 4 (Epstein-Barr virus)
accuccuaaaaccuacaugaa

SEQ ID NO: 307306 - RNA, 20 nt, Human herpesvirus 4 (Epstein-Barr virus)
accucuguuccuucugcucc

SEQ ID NO: 307307 - RNA, 20 nt, Human herpesvirus 4 (Epstein-Barr virus)
accucuuucccauuagcaag

SEQ ID NO: 307308 - RNA, 21 nt, Human herpesvirus 4 (Epstein-Barr virus)
accugcacgagaccccugggc

SEQ ID NO: 307309 - RNA, 18 nt, Human herpesvirus 4 (Epstein-Barr virus)
accugcgucucauuccca

SEQ ID NO: 307310 - RNA, 20 nt, Human herpesvirus 4 (Epstein-Barr virus)
accugcgucucauucccaag

SEQ ID NO: 307311 - RNA, 16 nt, Human herpesvirus 4 (Epstein-Barr virus)
accuggagacuacuaa

SEQ ID NO: 307312 - RNA, 17 nt, Human herpesvirus 4 (Epstein-Barr virus)
accuuccagacuaugca

SEQ ID NO: 307313 - RNA, 15 nt, Human herpesvirus 4 (Epstein-Barr virus)
accuucuccaucucc

SEQ ID NO: 307314 - RNA, 16 nt, Human herpesvirus 4 (Epstein-Barr virus)
accuugaggugccaca

SEQ ID NO: 307315 - RNA, 23 nt, Human herpesvirus 4 (Epstein-Barr virus)
accuugccggccaccuuugcuau

SEQ ID NO: 307316 - RNA, 16 nt, Human herpesvirus 4 (Epstein-Barr virus)
accuuggcaguguccu

SEQ ID NO: 307317 - RNA, 22 nt, Human herpesvirus 4 (Epstein-Barr virus)
accuuggccgguggcuguggac

SEQ ID NO: 307318 - RNA, 13 nt, Human herpesvirus 4 (Epstein-Barr virus)
accuugggcauca

SEQ ID NO: 307319 - RNA, 23 nt, Human herpesvirus 4 (Epstein-Barr virus)
acgagaccccugggcucucagga

SEQ ID NO: 307320 - RNA, 14 nt, Human herpesvirus 4 (Epstein-Barr virus)
acgagagcaugcca

SEQ ID NO: 307321 - RNA, 11 nt, Human herpesvirus 4 (Epstein-Barr virus)
acgagcaugaa

SEQ ID NO: 307322 - RNA, 17 nt, Human herpesvirus 4 (Epstein-Barr virus)
acgaggaucccgcaggu

SEQ ID NO: 307323 - RNA, 18 nt, Human herpesvirus 4 (Epstein-Barr virus)
acgaggcccugcaagcca

SEQ ID NO: 307324 - RNA, 16 nt, Human herpesvirus 4 (Epstein-Barr virus)
acgagggcagacacca

SEQ ID NO: 307325 - RNA, 23 nt, Human herpesvirus 4 (Epstein-Barr virus)
acgaggggcucgaauaugaugag

SEQ ID NO: 307326 - RNA, 20 nt, Human herpesvirus 4 (Epstein-Barr virus)
acgcaauaaaguuuacuuuc

SEQ ID NO: 307327 - RNA, 14 nt, Human herpesvirus 4 (Epstein-Barr virus)
acgcaggauguuca

SEQ ID NO: 307328 - RNA, 15 nt, Human herpesvirus 4 (Epstein-Barr virus)
acgcauccaccauca

SEQ ID NO: 307329 - RNA, 19 nt, Human herpesvirus 4 (Epstein-Barr virus)
acgcguuuauucagcaauu

SEQ ID NO: 307330 - RNA, 18 nt, Human herpesvirus 4 (Epstein-Barr virus)
acgcuuccacccccugga

SEQ ID NO: 307331 - RNA, 16 nt, Human herpesvirus 4 (Epstein-Barr virus)
acggccguagcccagu

SEQ ID NO: 307332 - RNA, 15 nt, Human herpesvirus 4 (Epstein-Barr virus)
acggccucgugcaac

SEQ ID NO: 307333 - RNA, 11 nt, Human herpesvirus 4 (Epstein-Barr virus)
acgggccaucu

SEQ ID NO: 307334 - RNA, 16 nt, Human herpesvirus 4 (Epstein-Barr virus)
acggggggcuggcgaa

SEQ ID NO: 307335 - RNA, 18 nt, Human herpesvirus 4 (Epstein-Barr virus)
acgggggugggcggugau

SEQ ID NO: 307336 - RNA, 20 nt, Human herpesvirus 4 (Epstein-Barr virus)
acggguaguagcacuggugg

SEQ ID NO: 307337 - RNA, 22 nt, Human herpesvirus 4 (Epstein-Barr virus)
acggugccgcuccuuugcggca

SEQ ID NO: 307338 - RNA, 15 nt, Human herpesvirus 4 (Epstein-Barr virus)
acgguuagugugccu

SEQ ID NO: 307339 - RNA, 19 nt, Human herpesvirus 4 (Epstein-Barr virus)
acgucaaggcccggaugau

SEQ ID NO: 307340 - RNA, 13 nt, Human herpesvirus 4 (Epstein-Barr virus)
acgugagugacac

SEQ ID NO: 307341 - RNA, 14 nt, Human herpesvirus 4 (Epstein-Barr virus)
acgugauggugcug

SEQ ID NO: 307342 - RNA, 22 nt, Human herpesvirus 4 (Epstein-Barr virus)
acguggacgggggaauaaucaa

SEQ ID NO: 307343 - RNA, 22 nt, Human herpesvirus 4 (Epstein-Barr virus)
acguguucuccgagaggaugau

SEQ ID NO: 307344 - RNA, 15 nt, Human herpesvirus 4 (Epstein-Barr virus)
acguuccuggccaug

SEQ ID NO: 307345 - RNA, 18 nt, Human herpesvirus 4 (Epstein-Barr virus)
acguuugaguccaaacag

SEQ ID NO: 307346 - RNA, 16 nt, Human herpesvirus 4 (Epstein-Barr virus)
acuaaacauugcaccu

SEQ ID NO: 307347 - RNA, 18 nt, Human herpesvirus 4 (Epstein-Barr virus)
acuaaccaugccaucucu

SEQ ID NO: 307348 - RNA, 18 nt, Human herpesvirus 4 (Epstein-Barr virus)
acuaaccuuaacaccugc

SEQ ID NO: 307349 - RNA, 16 nt, Human herpesvirus 4 (Epstein-Barr virus)
acuaagguuacugcac

SEQ ID NO: 307350 - RNA, 12 nt, Human herpesvirus 4 (Epstein-Barr virus)
acuacaccaguc

SEQ ID NO: 307351 - RNA, 12 nt, Human herpesvirus 4 (Epstein-Barr virus)
acuacaccauca

SEQ ID NO: 307352 - RNA, 22 nt, Human herpesvirus 4 (Epstein-Barr virus)
acuacaccgagcagaaggccau

SEQ ID NO: 307353 - RNA, 15 nt, Human herpesvirus 4 (Epstein-Barr virus)
acuacccgcaaugaa

SEQ ID NO: 307354 - RNA, 19 nt, Human herpesvirus 4 (Epstein-Barr virus)
acuagcuguuugcucuauu

SEQ ID NO: 307355 - RNA, 17 nt, Human herpesvirus 4 (Epstein-Barr virus)
acuaucacccauggcca

SEQ ID NO: 307356 - RNA, 18 nt, Human herpesvirus 4 (Epstein-Barr virus)
acuaucacccauggccag

SEQ ID NO: 307357 - RNA, 22 nt, Human herpesvirus 4 (Epstein-Barr virus)
acuaucacguguaacuugacgu

SEQ ID NO: 307358 - RNA, 16 nt, Human herpesvirus 4 (Epstein-Barr virus)
acucaacguggucucc

SEQ ID NO: 307359 - RNA, 24 nt, Human herpesvirus 4 (Epstein-Barr virus)
acucaccaagauuguuccagguca

SEQ ID NO: 307360 - RNA, 23 nt, Human herpesvirus 4 (Epstein-Barr virus)
acucagcuccgcgcucaacaccu

SEQ ID NO: 307361 - RNA, 16 nt, Human herpesvirus 4 (Epstein-Barr virus)
acucaggccaccgucu

SEQ ID NO: 307362 - RNA, 18 nt, Human herpesvirus 4 (Epstein-Barr virus)
acucaucugugagacaag

SEQ ID NO: 307363 - RNA, 19 nt, Human herpesvirus 4 (Epstein-Barr virus)
acucaucugugagacaagc

SEQ ID NO: 307364 - RNA, 12 nt, Human herpesvirus 4 (Epstein-Barr virus)
acucauggugug

SEQ ID NO: 307365 - RNA, 22 nt, Human herpesvirus 4 (Epstein-Barr virus)
acuccagugcgaggaacuggcu

SEQ ID NO: 307366 - RNA, 17 nt, Human herpesvirus 4 (Epstein-Barr virus)
acuccucuuacaccaga

SEQ ID NO: 307367 - RNA, 17 nt, Human herpesvirus 4 (Epstein-Barr virus)
acucgaaacuauggcag

SEQ ID NO: 307368 - RNA, 23 nt, Human herpesvirus 4 (Epstein-Barr virus)
acucgaagcggucucagacacca

SEQ ID NO: 307369 - RNA, 15 nt, Human herpesvirus 4 (Epstein-Barr virus)
acucuggggucucag

SEQ ID NO: 307370 - RNA, 16 nt, Human herpesvirus 4 (Epstein-Barr virus)
acucuucuauaacccu

SEQ ID NO: 307371 - RNA, 12 nt, Human herpesvirus 4 (Epstein-Barr virus)
acucuugccucg

SEQ ID NO: 307372 - RNA, 21 nt, Human herpesvirus 4 (Epstein-Barr virus)
acugaaucuccaccuguguaa

SEQ ID NO: 307373 - RNA, 16 nt, Human herpesvirus 4 (Epstein-Barr virus)
acugacgcuccaggau

SEQ ID NO: 307374 - RNA, 17 nt, Human herpesvirus 4 (Epstein-Barr virus)
acugagaacagucauca

SEQ ID NO: 307375 - RNA, 22 nt, Human herpesvirus 4 (Epstein-Barr virus)
acugagcaagauccuucuggca

SEQ ID NO: 307376 - RNA, 21 nt, Human herpesvirus 4 (Epstein-Barr virus)
acugcacagaacaucacugcc

SEQ ID NO: 307377 - RNA, 20 nt, Human herpesvirus 4 (Epstein-Barr virus)
acugcauccaacgcuuccac

SEQ ID NO: 307378 - RNA, 12 nt, Human herpesvirus 4 (Epstein-Barr virus)
acugccuugucc

SEQ ID NO: 307379 - RNA, 12 nt, Human herpesvirus 4 (Epstein-Barr virus)
acugcgaugagg

SEQ ID NO: 307380 - RNA, 19 nt, Human herpesvirus 4 (Epstein-Barr virus)
acugcgggugucucaagcu

SEQ ID NO: 307381 - RNA, 17 nt, Human herpesvirus 4 (Epstein-Barr virus)
acugcuagcgucacuga

SEQ ID NO: 307382 - RNA, 17 nt, Human herpesvirus 4 (Epstein-Barr virus)
acuggaacuguacuaaa

SEQ ID NO: 307383 - RNA, 19 nt, Human herpesvirus 4 (Epstein-Barr virus)
acuggaugcaggaccuaga

SEQ ID NO: 307384 - RNA, 17 nt, Human herpesvirus 4 (Epstein-Barr virus)
acugggacaacugucac

SEQ ID NO: 307385 - RNA, 17 nt, Human herpesvirus 4 (Epstein-Barr virus)
acugggaugaacccugg

SEQ ID NO: 307386 - RNA, 14 nt, Human herpesvirus 4 (Epstein-Barr virus)
acuggggugcagac

SEQ ID NO: 307387 - RNA, 14 nt, Human herpesvirus 4 (Epstein-Barr virus)
acuggucaccagcu

SEQ ID NO: 307388 - RNA, 14 nt, Human herpesvirus 4 (Epstein-Barr virus)
acugucacugugca

SEQ ID NO: 307389 - RNA, 16 nt, Human herpesvirus 4 (Epstein-Barr virus)
acugugccauggugcc

SEQ ID NO: 307390 - RNA, 19 nt, Human herpesvirus 4 (Epstein-Barr virus)
acugugguauccaccuaga

SEQ ID NO: 307391 - RNA, 17 nt, Human herpesvirus 4 (Epstein-Barr virus)
acugugucccacuccac

SEQ ID NO: 307392 - RNA, 13 nt, Human herpesvirus 4 (Epstein-Barr virus)
acuuaacuugacu

SEQ ID NO: 307393 - RNA, 14 nt, Human herpesvirus 4 (Epstein-Barr virus)
acuuacagcacauu

SEQ ID NO: 307394 - RNA, 16 nt, Human herpesvirus 4 (Epstein-Barr virus)
acuuauuggagaugcu

SEQ ID NO: 307395 - RNA, 16 nt, Human herpesvirus 4 (Epstein-Barr virus)
acuucagcuccagggc

SEQ ID NO: 307396 - RNA, 12 nt, Human herpesvirus 4 (Epstein-Barr virus)
acuuccaacgca

SEQ ID NO: 307397 - RNA, 14 nt, Human herpesvirus 4 (Epstein-Barr virus)
acuucguagcuuug

SEQ ID NO: 307398 - RNA, 17 nt, Human herpesvirus 4 (Epstein-Barr virus)
acuucucauuagucagg

SEQ ID NO: 307399 - RNA, 19 nt, Human herpesvirus 4 (Epstein-Barr virus)
acuucucuagagccaggcu

SEQ ID NO: 307400 - RNA, 12 nt, Human herpesvirus 4 (Epstein-Barr virus)
acuucugaagau

SEQ ID NO: 307401 - RNA, 17 nt, Human herpesvirus 4 (Epstein-Barr virus)
acuucuuuugcucuuaa

SEQ ID NO: 307402 - RNA, 14 nt, Human herpesvirus 4 (Epstein-Barr virus)
acuuggcaucucuu

SEQ ID NO: 307403 - RNA, 16 nt, Human herpesvirus 4 (Epstein-Barr virus)
acuuggccuugggggu

SEQ ID NO: 307404 - RNA, 22 nt, Human herpesvirus 4 (Epstein-Barr virus)
acuugggcacggagagugcccu

SEQ ID NO: 307405 - RNA, 22 nt, Human herpesvirus 4 (Epstein-Barr virus)
acuuguccucuaucgucucaua

SEQ ID NO: 307406 - RNA, 21 nt, Human herpesvirus 4 (Epstein-Barr virus)
acuuguucuuuuguaaucgca

SEQ ID NO: 307407 - RNA, 13 nt, Human herpesvirus 4 (Epstein-Barr virus)
acuuuaacauuga

SEQ ID NO: 307408 - RNA, 21 nt, Human herpesvirus 4 (Epstein-Barr virus)
acuuuauugacuacaccaguc

SEQ ID NO: 307409 - RNA, 16 nt, Human herpesvirus 4 (Epstein-Barr virus)
acuuugaaagauguca

SEQ ID NO: 307410 - RNA, 19 nt, Human herpesvirus 4 (Epstein-Barr virus)
acuuugccagcaacuuaua

SEQ ID NO: 307411 - RNA, 17 nt, Human herpesvirus 4 (Epstein-Barr virus)
agaaagagccaugguga

SEQ ID NO: 307412 - RNA, 20 nt, Human herpesvirus 4 (Epstein-Barr virus)
agaaaggcuggccguguuca

SEQ ID NO: 307413 - RNA, 18 nt, Human herpesvirus 4 (Epstein-Barr virus)
acacccacggaagcccuc

SEQ ID NO: 307414 - RNA, 19 nt, Human herpesvirus 4 (Epstein-Barr virus)
acacccaucuggaguucaa

SEQ ID NO: 307415 - RNA, 15 nt, Human herpesvirus 4 (Epstein-Barr virus)
acaccccacggccau

SEQ ID NO: 307416 - RNA, 19 nt, Human herpesvirus 4 (Epstein-Barr virus)
acaccgagcagaaggccau

SEQ ID NO: 307417 - RNA, 12 nt, Human herpesvirus 4 (Epstein-Barr virus)
acaccgucaaca

SEQ ID NO: 307418 - RNA, 16 nt, Human herpesvirus 4 (Epstein-Barr virus)
acaccugacccauacc

SEQ ID NO: 307419 - RNA, 16 nt, Human herpesvirus 4 (Epstein-Barr virus)
acacgccagagacaag

SEQ ID NO: 307420 - RNA, 14 nt, Human herpesvirus 4 (Epstein-Barr virus)
acacggcucuguca

SEQ ID NO: 307421 - RNA, 15 nt, Human herpesvirus 4 (Epstein-Barr virus)
acacggucuggucac

SEQ ID NO: 307422 - RNA, 21 nt, Human herpesvirus 4 (Epstein-Barr virus)
acacgguuauggcagagcuuu

SEQ ID NO: 307423 - RNA, 15 nt, Human herpesvirus 4 (Epstein-Barr virus)
acacgugacaugucc

SEQ ID NO: 307424 - RNA, 12 nt, Human herpesvirus 4 (Epstein-Barr virus)
acacuacaauaa

SEQ ID NO: 307425 - RNA, 18 nt, Human herpesvirus 4 (Epstein-Barr virus)
acacuacaauaaacccaa

SEQ ID NO: 307426 - RNA, 18 nt, Human herpesvirus 4 (Epstein-Barr virus)
acacucuggggucucagg

SEQ ID NO: 307427 - RNA, 19 nt, Human herpesvirus 4 (Epstein-Barr virus)
acacucuggggucucaggc

SEQ ID NO: 307428 - RNA, 15 nt, Human herpesvirus 4 (Epstein-Barr virus)
acacuuaacuugacu

SEQ ID NO: 307429 - RNA, 21 nt, Human herpesvirus 4 (Epstein-Barr virus)
acagaaauugggugaccacug

SEQ ID NO: 307430 - RNA, 22 nt, Human herpesvirus 4 (Epstein-Barr virus)
acagagcaucagaugagacuuu

SEQ ID NO: 307431 - RNA, 22 nt, Human herpesvirus 4 (Epstein-Barr virus)
acagaggaggcuggugccuugg

SEQ ID NO: 307432 - RNA, 19 nt, Human herpesvirus 4 (Epstein-Barr virus)
acagaggcuggaugcagcg

SEQ ID NO: 307433 - RNA, 20 nt, Human herpesvirus 4 (Epstein-Barr virus)
acagccgcgguugucaucau

SEQ ID NO: 307434 - RNA, 19 nt, Human herpesvirus 4 (Epstein-Barr virus)
acaggacaagacagucaca

SEQ ID NO: 307435 - RNA, 21 nt, Human herpesvirus 4 (Epstein-Barr virus)
acaggacaagaugucacucuu

SEQ ID NO: 307436 - RNA, 22 nt, Human herpesvirus 4 (Epstein-Barr virus)
acaggacauguuugggggaguu

SEQ ID NO: 307437 - RNA, 18 nt, Human herpesvirus 4 (Epstein-Barr virus)
acagggguauguggugcc

SEQ ID NO: 307438 - RNA, 20 nt, Human herpesvirus 4 (Epstein-Barr virus)
acaggguggggguggacaug

SEQ ID NO: 307439 - RNA, 19 nt, Human herpesvirus 4 (Epstein-Barr virus)
acaggucgcguaggucuau

SEQ ID NO: 307440 - RNA, 11 nt, Human herpesvirus 4 (Epstein-Barr virus)
acaggugccag

SEQ ID NO: 307441 - RNA, 16 nt, Human herpesvirus 4 (Epstein-Barr virus)
acaguaacacagggug

SEQ ID NO: 307442 - RNA, 17 nt, Human herpesvirus 4 (Epstein-Barr virus)
acaguaacacagggugg

SEQ ID NO: 307443 - RNA, 19 nt, Human herpesvirus 4 (Epstein-Barr virus)
acaguacucggcuagccug

SEQ ID NO: 307444 - RNA, 21 nt, Human herpesvirus 4 (Epstein-Barr virus)
acaguagccgaauaucuggag

SEQ ID NO: 307445 - RNA, 23 nt, Human herpesvirus 4 (Epstein-Barr virus)
acagucaucaguaaaucugucuc

SEQ ID NO: 307446 - RNA, 13 nt, Human herpesvirus 4 (Epstein-Barr virus)
acagucuucaggu

SEQ ID NO: 307447 - RNA, 15 nt, Human herpesvirus 4 (Epstein-Barr virus)
acaguggguguugcg

SEQ ID NO: 307448 - RNA, 14 nt, Human herpesvirus 4 (Epstein-Barr virus)
acauaaacaugguu

SEQ ID NO: 307449 - RNA, 13 nt, Human herpesvirus 4 (Epstein-Barr virus)
acauauacuggag

SEQ ID NO: 307450 - RNA, 20 nt, Human herpesvirus 4 (Epstein-Barr virus)
acuaaacauugcaccuugcc

SEQ ID NO: 307451 - RNA, 17 nt, Human herpesvirus 4 (Epstein-Barr virus)
acuaaccuuaacaccug

SEQ ID NO: 307452 - RNA, 11 nt, Human herpesvirus 4 (Epstein-Barr virus)
acuacaccauc

SEQ ID NO: 307453 - RNA, 19 nt, Human herpesvirus 4 (Epstein-Barr virus)
acuaccugucugauugcac

SEQ ID NO: 307454 - RNA, 19 nt, Human herpesvirus 4 (Epstein-Barr virus)
acuacgagggccucuggca

SEQ ID NO: 307455 - RNA, 22 nt, Human herpesvirus 4 (Epstein-Barr virus)
acuagcgccccuauaaccacaa

SEQ ID NO: 307456 - RNA, 17 nt, Human herpesvirus 4 (Epstein-Barr virus)
acuagcuguuugcucua

SEQ ID NO: 307457 - RNA, 21 nt, Human herpesvirus 4 (Epstein-Barr virus)
acuauaccaaagcuaacugua

SEQ ID NO: 307458 - RNA, 14 nt, Human herpesvirus 4 (Epstein-Barr virus)
acuaucacguguaa

SEQ ID NO: 307459 - RNA, 18 nt, Human herpesvirus 4 (Epstein-Barr virus)
acuauccaggucuugccg

SEQ ID NO: 307460 - RNA, 20 nt, Human herpesvirus 4 (Epstein-Barr virus)
acuaugcaugagccacaggc

SEQ ID NO: 307461 - RNA, 14 nt, Human herpesvirus 4 (Epstein-Barr virus)
acucaagagaucag

SEQ ID NO: 307462 - RNA, 16 nt, Human herpesvirus 4 (Epstein-Barr virus)
acucaagagaucagca

SEQ ID NO: 307463 - RNA, 23 nt, Human herpesvirus 4 (Epstein-Barr virus)
acucaauggcauucagauuucua

SEQ ID NO: 307464 - RNA, 13 nt, Human herpesvirus 4 (Epstein-Barr virus)
acucacaggacau

SEQ ID NO: 307465 - RNA, 17 nt, Human herpesvirus 4 (Epstein-Barr virus)
acucacaggacauguuu

SEQ ID NO: 307466 - RNA, 22 nt, Human herpesvirus 4 (Epstein-Barr virus)
acucagaccccgaggcugaugu

SEQ ID NO: 307467 - RNA, 18 nt, Human herpesvirus 4 (Epstein-Barr virus)
acuccaagugcaacaauc

SEQ ID NO: 307468 - RNA, 20 nt, Human herpesvirus 4 (Epstein-Barr virus)
acuccagccaucaugcugaa

SEQ ID NO: 307469 - RNA, 20 nt, Human herpesvirus 4 (Epstein-Barr virus)
acucccacauucguacaucu

SEQ ID NO: 307470 - RNA, 14 nt, Human herpesvirus 4 (Epstein-Barr virus)
acuccccucuccau

SEQ ID NO: 307471 - RNA, 16 nt, Human herpesvirus 4 (Epstein-Barr virus)
acucgaaacuauggca

SEQ ID NO: 307472 - RNA, 19 nt, Human herpesvirus 4 (Epstein-Barr virus)
acucgaaacuauggcagac

SEQ ID NO: 307473 - RNA, 19 nt, Human herpesvirus 4 (Epstein-Barr virus)
acucggcuagccugacuaa

SEQ ID NO: 307474 - RNA, 12 nt, Human herpesvirus 4 (Epstein-Barr virus)
acucuccacucc

SEQ ID NO: 307475 - RNA, 20 nt, Human herpesvirus 4 (Epstein-Barr virus)
acucuccacucccaguccau

SEQ ID NO: 307476 - RNA, 20 nt, Human herpesvirus 4 (Epstein-Barr virus)
acucucuguuucuguacaau

SEQ ID NO: 307477 - RNA, 15 nt, Human herpesvirus 4 (Epstein-Barr virus)
acucucuucagugac

SEQ ID NO: 307478 - RNA, 16 nt, Human herpesvirus 4 (Epstein-Barr virus)
acucuggggucucagg

SEQ ID NO: 307479 - RNA, 11 nt, Human herpesvirus 4 (Epstein-Barr virus)
acucuugccuc

SEQ ID NO: 307480 - RNA, 23 nt, Human herpesvirus 4 (Epstein-Barr virus)
acugcacagaacaucacugccac

SEQ ID NO: 307481 - RNA, 23 nt, Human herpesvirus 4 (Epstein-Barr virus)
acugcgagggggccuggugccag

SEQ ID NO: 307482 - RNA, 21 nt, Human herpesvirus 4 (Epstein-Barr virus)
acugcgaugagggccuuccag

SEQ ID NO: 307483 - RNA, 18 nt, Human herpesvirus 4 (Epstein-Barr virus)
acugcuagcgucacugau

SEQ ID NO: 307484 - RNA, 20 nt, Human herpesvirus 4 (Epstein-Barr virus)
acuggcaaagggcaugcuug

SEQ ID NO: 307485 - RNA, 16 nt, Human herpesvirus 4 (Epstein-Barr virus)
acuggcuggauucuac

SEQ ID NO: 307486 - RNA, 18 nt, Human herpesvirus 4 (Epstein-Barr virus)
acugggacaacugucaca

SEQ ID NO: 307487 - RNA, 20 nt, Human herpesvirus 4 (Epstein-Barr virus)
acuggucuuuuaugagccau

SEQ ID NO: 307488 - RNA, 16 nt, Human herpesvirus 4 (Epstein-Barr virus)
acuguaaucacuggca

SEQ ID NO: 307489 - RNA, 20 nt, Human herpesvirus 4 (Epstein-Barr virus)
acugucacaccagucccaac

SEQ ID NO: 307490 - RNA, 18 nt, Human herpesvirus 4 (Epstein-Barr virus)
acuguuccuauaugcucu

SEQ ID NO: 307491 - RNA, 12 nt, Human herpesvirus 4 (Epstein-Barr virus)
acuuauagcaug

SEQ ID NO: 307492 - RNA, 15 nt, Human herpesvirus 4 (Epstein-Barr virus)
acccacggaagcccu

SEQ ID NO: 307493 - RNA, 14 nt, Human herpesvirus 4 (Epstein-Barr virus)
acccagccacuuac

SEQ ID NO: 307494 - RNA, 22 nt, Human herpesvirus 4 (Epstein-Barr virus)
acccagccacuuacagcacauu

SEQ ID NO: 307495 - RNA, 21 nt, Human herpesvirus 4 (Epstein-Barr virus)
acccagggguggcaguggaug

SEQ ID NO: 307496 - RNA, 17 nt, Human herpesvirus 4 (Epstein-Barr virus)
acccaucuggaguucaa

SEQ ID NO: 307497 - RNA, 23 nt, Human herpesvirus 4 (Epstein-Barr virus)
accccaaggaaggcuugccaaaa

SEQ ID NO: 307498 - RNA, 17 nt, Human herpesvirus 4 (Epstein-Barr virus)
accccagacaggagaug

SEQ ID NO: 307499 - RNA, 17 nt, Human herpesvirus 4 (Epstein-Barr virus)
accccccucugauggug

SEQ ID NO: 307500 - RNA, 19 nt, Human herpesvirus 4 (Epstein-Barr virus)
acccccggcucucaggccu

SEQ ID NO: 307501 - RNA, 16 nt, Human herpesvirus 4 (Epstein-Barr virus)
acccccuggagccagc

SEQ ID NO: 307502 - RNA, 17 nt, Human herpesvirus 4 (Epstein-Barr virus)
accccuggcuuccacuc

SEQ ID NO: 307503 - RNA, 21 nt, Human herpesvirus 4 (Epstein-Barr virus)
accccuggggcggcgaugucg

SEQ ID NO: 307504 - RNA, 23 nt, Human herpesvirus 4 (Epstein-Barr virus)
acccucagucacgggacauuaac

SEQ ID NO: 307505 - RNA, 16 nt, Human herpesvirus 4 (Epstein-Barr virus)
acccucauugugcuga

SEQ ID NO: 307506 - RNA, 14 nt, Human herpesvirus 4 (Epstein-Barr virus)
acccugguacagga

SEQ ID NO: 307507 - RNA, 11 nt, Human herpesvirus 4 (Epstein-Barr virus)
acccuguaguc

SEQ ID NO: 307508 - RNA, 18 nt, Human herpesvirus 4 (Epstein-Barr virus)
acccuguagucaccugca

SEQ ID NO: 307509 - RNA, 20 nt, Human herpesvirus 4 (Epstein-Barr virus)
acccuugcccucuccagcaa

SEQ ID NO: 307510 - RNA, 15 nt, Human herpesvirus 4 (Epstein-Barr virus)
accggggaggccagg

SEQ ID NO: 307511 - RNA, 19 nt, Human herpesvirus 4 (Epstein-Barr virus)
accguaccaugagugccau

SEQ ID NO: 307512 - RNA, 19 nt, Human herpesvirus 4 (Epstein-Barr virus)
accgucuacaucaauggaa

SEQ ID NO: 307513 - RNA, 23 nt, Human herpesvirus 4 (Epstein-Barr virus)
accuaaagagagaucuggggcca

SEQ ID NO: 307514 - RNA, 15 nt, Human herpesvirus 4 (Epstein-Barr virus)
accuaaauuuagcac

SEQ ID NO: 307515 - RNA, 13 nt, Human herpesvirus 4 (Epstein-Barr virus)
accuacaggacaa

SEQ ID NO: 307516 - RNA, 21 nt, Human herpesvirus 4 (Epstein-Barr virus)
accuacaggacaagacaguca

SEQ ID NO: 307517 - RNA, 22 nt, Human herpesvirus 4 (Epstein-Barr virus)
accuacaugaauguuacccuca

SEQ ID NO: 307518 - RNA, 20 nt, Human herpesvirus 4 (Epstein-Barr virus)
accuaugccaauccaugcca

SEQ ID NO: 307519 - RNA, 13 nt, Human herpesvirus 4 (Epstein-Barr virus)
accucaacauauu

SEQ ID NO: 307520 - RNA, 17 nt, Human herpesvirus 4 (Epstein-Barr virus)
accucauagacacaccu

SEQ ID NO: 307521 - RNA, 14 nt, Human herpesvirus 4 (Epstein-Barr virus)
accuccccuguggc

SEQ ID NO: 307522 - RNA, 14 nt, Human herpesvirus 4 (Epstein-Barr virus)
accucccugauaau

SEQ ID NO: 307523 - RNA, 22 nt, Human herpesvirus 4 (Epstein-Barr virus)
accuccuaucacagggacaucu

SEQ ID NO: 307524 - RNA, 17 nt, Human herpesvirus 4 (Epstein-Barr virus)
accuccucgaaggugca

SEQ ID NO: 307525 - RNA, 16 nt, Human herpesvirus 4 (Epstein-Barr virus)
accugagccugagcca

SEQ ID NO: 307526 - RNA, 19 nt, Human herpesvirus 4 (Epstein-Barr virus)
accugagccugagccacac

SEQ ID NO: 307527 - RNA, 13 nt, Human herpesvirus 4 (Epstein-Barr virus)
accugaugaguca

SEQ ID NO: 307528 - RNA, 19 nt, Human herpesvirus 4 (Epstein-Barr virus)
accugcagggcuucacuag

SEQ ID NO: 307529 - RNA, 17 nt, Human herpesvirus 4 (Epstein-Barr virus)
accugcucucucuggag

SEQ ID NO: 307530 - RNA, 20 nt, Human herpesvirus 4 (Epstein-Barr virus)
accuggacauagaggggcau

SEQ ID NO: 307531 - RNA, 18 nt, Human herpesvirus 4 (Epstein-Barr virus)
aaaaacuugagucucucg

SEQ ID NO: 307532 - RNA, 18 nt, Human herpesvirus 4 (Epstein-Barr virus)
aaaaaugcaacaauagaa

SEQ ID NO: 307533 - RNA, 15 nt, Human herpesvirus 4 (Epstein-Barr virus)
aaaaccaaacuaaca

SEQ ID NO: 307534 - RNA, 23 nt, Human herpesvirus 4 (Epstein-Barr virus)
aaaacccugaccaucacaugggg

SEQ ID NO: 307535 - RNA, 15 nt, Human herpesvirus 4 (Epstein-Barr virus)
aaaacgaaagugcuu

SEQ ID NO: 307536 - RNA, 16 nt, Human herpesvirus 4 (Epstein-Barr virus)
aaaacuauaccaaagc

SEQ ID NO: 307537 - RNA, 19 nt, Human herpesvirus 4 (Epstein-Barr virus)
aaaacucacaggacauguu

SEQ ID NO: 307538 - RNA, 21 nt, Human herpesvirus 4 (Epstein-Barr virus)
aaaagggcccagggucacugg

SEQ ID NO: 307539 - RNA, 23 nt, Human herpesvirus 4 (Epstein-Barr virus)
aaaccggcgagacuuggaccaag

SEQ ID NO: 307540 - RNA, 13 nt, Human herpesvirus 4 (Epstein-Barr virus)
aaaccuugccuac

SEQ ID NO: 307541 - RNA, 16 nt, Human herpesvirus 4 (Epstein-Barr virus)
aaacuacaggcccggg

SEQ ID NO: 307542 - RNA, 18 nt, Human herpesvirus 4 (Epstein-Barr virus)
aaacucacaggacauguu

SEQ ID NO: 307543 - RNA, 14 nt, Human herpesvirus 4 (Epstein-Barr virus)
aaacucugcaugga

SEQ ID NO: 307544 - RNA, 16 nt, Human herpesvirus 4 (Epstein-Barr virus)
aaacugguggacucua

SEQ ID NO: 307545 - RNA, 16 nt, Human herpesvirus 4 (Epstein-Barr virus)
aaagaacaaggccaag

SEQ ID NO: 307546 - RNA, 14 nt, Human herpesvirus 4 (Epstein-Barr virus)
aaagacuauguucu

SEQ ID NO: 307547 - RNA, 20 nt, Human herpesvirus 4 (Epstein-Barr virus)
aaagagguaaaacugccaca

SEQ ID NO: 307548 - RNA, 22 nt, Human herpesvirus 4 (Epstein-Barr virus)
aaagauggauuugaaaguggua

SEQ ID NO: 307549 - RNA, 13 nt, Human herpesvirus 4 (Epstein-Barr virus)
aaaguaaccacau

SEQ ID NO: 307550 - RNA, 19 nt, Human herpesvirus 4 (Epstein-Barr virus)
aaaguaaccacauauacug

SEQ ID NO: 307551 - RNA, 10 nt, Human herpesvirus 4 (Epstein-Barr virus)
aaagugcaua

SEQ ID NO: 307552 - RNA, 21 nt, Human herpesvirus 4 (Epstein-Barr virus)
aagggagacguuugaguccaa

SEQ ID NO: 307553 - RNA, 20 nt, Human herpesvirus 4 (Epstein-Barr virus)
aaggucagaaaaucgcagca

SEQ ID NO: 307554 - RNA, 22 nt, Human herpesvirus 4 (Epstein-Barr virus)
aaggugucaauaauuucaguga

SEQ ID NO: 307555 - RNA, 22 nt, Human herpesvirus 4 (Epstein-Barr virus)
aagguuacugcacagaacauca

SEQ ID NO: 307556 - RNA, 13 nt, Human herpesvirus 4 (Epstein-Barr virus)
aagguugugcugu

SEQ ID NO: 307557 - RNA, 18 nt, Human herpesvirus 4 (Epstein-Barr virus)
aagguuuagcuauuccac

SEQ ID NO: 307558 - RNA, 20 nt, Human herpesvirus 4 (Epstein-Barr virus)
aagguuuagcuauuccacca

SEQ ID NO: 307559 - RNA, 23 nt, Human herpesvirus 4 (Epstein-Barr virus)
aagguuuagcuauuccaccaaca

SEQ ID NO: 307560 - RNA, 12 nt, Human herpesvirus 4 (Epstein-Barr virus)
aaguaaccacau

SEQ ID NO: 307561 - RNA, 13 nt, Human herpesvirus 4 (Epstein-Barr virus)
aaguaaccacaua

SEQ ID NO: 307562 - RNA, 15 nt, Human herpesvirus 4 (Epstein-Barr virus)
aaguaauuuguugcc

SEQ ID NO: 307563 - RNA, 23 nt, Human herpesvirus 4 (Epstein-Barr virus)
aaguaccagcccuuuuuccagug

SEQ ID NO: 307564 - RNA, 19 nt, Human herpesvirus 4 (Epstein-Barr virus)
aagucgguguccaggugug

SEQ ID NO: 307565 - RNA, 23 nt, Human herpesvirus 4 (Epstein-Barr virus)
aagucgguguccagguguggaaa

SEQ ID NO: 307566 - RNA, 18 nt, Human herpesvirus 4 (Epstein-Barr virus)
aagugagggggccugaga

SEQ ID NO: 307567 - RNA, 16 nt, Human herpesvirus 4 (Epstein-Barr virus)
aagugcuaugaccaug

SEQ ID NO: 307568 - RNA, 22 nt, Human herpesvirus 4 (Epstein-Barr virus)
aaguuacgccuaaaggcgcagu

SEQ ID NO: 307569 - RNA, 16 nt, Human herpesvirus 4 (Epstein-Barr virus)
aaguuagaguccaaug

SEQ ID NO: 307570 - RNA, 13 nt, Human herpesvirus 4 (Epstein-Barr virus)
aaguugguggugg

SEQ ID NO: 307571 - RNA, 22 nt, Human herpesvirus 4 (Epstein-Barr virus)
aauacacccaucuggaguucaa

SEQ ID NO: 307572 - RNA, 17 nt, Human herpesvirus 4 (Epstein-Barr virus)
aauacccugcauggcca

SEQ ID NO: 307573 - RNA, 17 nt, Human herpesvirus 4 (Epstein-Barr virus)
aauagcaugucagcucc

SEQ ID NO: 307574 - RNA, 14 nt, Human herpesvirus 4 (Epstein-Barr virus)
aauagcuucugcag

SEQ ID NO: 307575 - RNA, 23 nt, Human herpesvirus 4 (Epstein-Barr virus)
aauaguuccaggugacagcagca

SEQ ID NO: 307576 - RNA, 21 nt, Human herpesvirus 4 (Epstein-Barr virus)
aauaugcaaugcccacccacu

SEQ ID NO: 307577 - RNA, 13 nt, Human herpesvirus 4 (Epstein-Barr virus)
aaucaacuacaag

SEQ ID NO: 307578 - RNA, 15 nt, Human herpesvirus 4 (Epstein-Barr virus)
aaucaccguuccuca

SEQ ID NO: 307579 - RNA, 19 nt, Human herpesvirus 4 (Epstein-Barr virus)
aaucagaaauuugcacuuu

SEQ ID NO: 307580 - RNA, 21 nt, Human herpesvirus 4 (Epstein-Barr virus)
aauccagcuucucguagagau

SEQ ID NO: 307581 - RNA, 17 nt, Human herpesvirus 4 (Epstein-Barr virus)
aauccauuaucuuggca

SEQ ID NO: 307582 - RNA, 21 nt, Human herpesvirus 4 (Epstein-Barr virus)
aaucgcagcucuaacuuggca

SEQ ID NO: 307583 - RNA, 13 nt, Human herpesvirus 4 (Epstein-Barr virus)
aaucuccugugcu

SEQ ID NO: 307584 - RNA, 16 nt, Human herpesvirus 4 (Epstein-Barr virus)
aaucugacauuucuca

SEQ ID NO: 307585 - RNA, 11 nt, Human herpesvirus 4 (Epstein-Barr virus)
aaucuguggug

SEQ ID NO: 307586 - RNA, 14 nt, Human herpesvirus 4 (Epstein-Barr virus)
aaucuguggugggc

SEQ ID NO: 307587 - RNA, 13 nt, Human herpesvirus 4 (Epstein-Barr virus)
cagauuuugcaau

SEQ ID NO: 307588 - RNA, 13 nt, Human herpesvirus 4 (Epstein-Barr virus)
cagcaaaaccagc

SEQ ID NO: 307589 - RNA, 15 nt, Human herpesvirus 4 (Epstein-Barr virus)
cagcaaucucggcug

SEQ ID NO: 307590 - RNA, 13 nt, Human herpesvirus 4 (Epstein-Barr virus)
cagcacuuugcca

SEQ ID NO: 307591 - RNA, 15 nt, Human herpesvirus 4 (Epstein-Barr virus)
cagcacuuugccagc

SEQ ID NO: 307592 - RNA, 14 nt, Human herpesvirus 4 (Epstein-Barr virus)
cagccaccggccaa

SEQ ID NO: 307593 - RNA, 16 nt, Human herpesvirus 4 (Epstein-Barr virus)
cagccacgcaggaugu

SEQ ID NO: 307594 - RNA, 20 nt, Human herpesvirus 4 (Epstein-Barr virus)
cagccacgcaggauguucac

SEQ ID NO: 307595 - RNA, 16 nt, Human herpesvirus 4 (Epstein-Barr virus)
cagccagagagaucau

SEQ ID NO: 307596 - RNA, 17 nt, Human herpesvirus 4 (Epstein-Barr virus)
cagccccacucuugccu

SEQ ID NO: 307597 - RNA, 13 nt, Human herpesvirus 4 (Epstein-Barr virus)
cagcccuccucag

SEQ ID NO: 307598 - RNA, 20 nt, Human herpesvirus 4 (Epstein-Barr virus)
cagccgucgauaccggguca

SEQ ID NO: 307599 - RNA, 20 nt, Human herpesvirus 4 (Epstein-Barr virus)
cagccuacucuccacuccca

SEQ ID NO: 307600 - RNA, 15 nt, Human herpesvirus 4 (Epstein-Barr virus)
cagccucacugaugg

SEQ ID NO: 307601 - RNA, 15 nt, Human herpesvirus 4 (Epstein-Barr virus)
cagccugacucucau

SEQ ID NO: 307602 - RNA, 16 nt, Human herpesvirus 4 (Epstein-Barr virus)
cagccuguuuguccag

SEQ ID NO: 307603 - RNA, 13 nt, Human herpesvirus 4 (Epstein-Barr virus)
cagcgaagaacac

SEQ ID NO: 307604 - RNA, 16 nt, Human herpesvirus 4 (Epstein-Barr virus)
cagcgaagaacacucc

SEQ ID NO: 307605 - RNA, 14 nt, Human herpesvirus 4 (Epstein-Barr virus)
cagcgcacccgggg

SEQ ID NO: 307606 - RNA, 17 nt, Human herpesvirus 4 (Epstein-Barr virus)
cagcgccuugaucuucu

SEQ ID NO: 307607 - RNA, 14 nt, Human herpesvirus 4 (Epstein-Barr virus)
cagcuacacucugg

SEQ ID NO: 307608 - RNA, 22 nt, Human herpesvirus 4 (Epstein-Barr virus)
cagcuacacucuggggucucag

SEQ ID NO: 307609 - RNA, 18 nt, Human herpesvirus 4 (Epstein-Barr virus)
cagcuccgugguccugag

SEQ ID NO: 307610 - RNA, 21 nt, Human herpesvirus 4 (Epstein-Barr virus)
cagcugacggugggcaugaca

SEQ ID NO: 307611 - RNA, 14 nt, Human herpesvirus 4 (Epstein-Barr virus)
cagcuggauguaca

SEQ ID NO: 307612 - RNA, 13 nt, Human herpesvirus 4 (Epstein-Barr virus)
cagcuggcccacc

SEQ ID NO: 307613 - RNA, 19 nt, Human herpesvirus 4 (Epstein-Barr virus)
cagcuguguacgugccuca

SEQ ID NO: 307614 - RNA, 16 nt, Human herpesvirus 4 (Epstein-Barr virus)
cagcuucgagagccac

SEQ ID NO: 307615 - RNA, 18 nt, Human herpesvirus 4 (Epstein-Barr virus)
caauuccucgcaaaagau

SEQ ID NO: 307616 - RNA, 14 nt, Human herpesvirus 4 (Epstein-Barr virus)
caauuuccaaaaau

SEQ ID NO: 307617 - RNA, 20 nt, Human herpesvirus 4 (Epstein-Barr virus)
cacaaccacggugacauuca

SEQ ID NO: 307618 - RNA, 17 nt, Human herpesvirus 4 (Epstein-Barr virus)
cacaacggcugugacua

SEQ ID NO: 307619 - RNA, 18 nt, Human herpesvirus 4 (Epstein-Barr virus)
cacaacggcugugacuac

SEQ ID NO: 307620 - RNA, 24 nt, Human herpesvirus 4 (Epstein-Barr virus)
cacaacugcuauucugagcaccaa

SEQ ID NO: 307621 - RNA, 23 nt, Human herpesvirus 4 (Epstein-Barr virus)
cacacacaguagccgaauaucug

SEQ ID NO: 307622 - RNA, 17 nt, Human herpesvirus 4 (Epstein-Barr virus)
cacacagccugacucuc

SEQ ID NO: 307623 - RNA, 22 nt, Human herpesvirus 4 (Epstein-Barr virus)
cacacauuucagguaccccaaa

SEQ ID NO: 307624 - RNA, 13 nt, Human herpesvirus 4 (Epstein-Barr virus)
cacaccaguccca

SEQ ID NO: 307625 - RNA, 13 nt, Human herpesvirus 4 (Epstein-Barr virus)
cacagaacaucac

SEQ ID NO: 307626 - RNA, 14 nt, Human herpesvirus 4 (Epstein-Barr virus)
cacagaacaucacu

SEQ ID NO: 307627 - RNA, 18 nt, Human herpesvirus 4 (Epstein-Barr virus)
cacagaacaucacugcca

SEQ ID NO: 307628 - RNA, 14 nt, Human herpesvirus 4 (Epstein-Barr virus)
cacagacugcgauc

SEQ ID NO: 307629 - RNA, 20 nt, Human herpesvirus 4 (Epstein-Barr virus)
cacagagcaucagaugagac

SEQ ID NO: 307630 - RNA, 22 nt, Human herpesvirus 4 (Epstein-Barr virus)
cacagaggaggcuggugccuug

SEQ ID NO: 307631 - RNA, 16 nt, Human herpesvirus 4 (Epstein-Barr virus)
cacagccugacucuca

SEQ ID NO: 307632 - RNA, 14 nt, Human herpesvirus 4 (Epstein-Barr virus)
cacaggacauguuu

SEQ ID NO: 307633 - RNA, 15 nt, Human herpesvirus 4 (Epstein-Barr virus)
cacaggcauugcuaa

SEQ ID NO: 307634 - RNA, 17 nt, Human herpesvirus 4 (Epstein-Barr virus)
cacagguuauuuugccu

SEQ ID NO: 307635 - RNA, 13 nt, Human herpesvirus 4 (Epstein-Barr virus)
cacauaaacaugg

SEQ ID NO: 307636 - RNA, 14 nt, Human herpesvirus 4 (Epstein-Barr virus)
cacaucuggaccag

SEQ ID NO: 307637 - RNA, 17 nt, Human herpesvirus 4 (Epstein-Barr virus)
cacaucuggaccagaag

SEQ ID NO: 307638 - RNA, 15 nt, Human herpesvirus 4 (Epstein-Barr virus)
cacauggggcauuag

SEQ ID NO: 307639 - RNA, 14 nt, Human herpesvirus 4 (Epstein-Barr virus)
caccaacacaacca

SEQ ID NO: 307640 - RNA, 16 nt, Human herpesvirus 4 (Epstein-Barr virus)
caccacgaugacuccc

SEQ ID NO: 307641 - RNA, 15 nt, Human herpesvirus 4 (Epstein-Barr virus)
caccagccccagcca

SEQ ID NO: 307642 - RNA, 22 nt, Human herpesvirus 4 (Epstein-Barr virus)
caccagcuaacaggacauguuu

SEQ ID NO: 307643 - RNA, 12 nt, Human herpesvirus 4 (Epstein-Barr virus)
cacccacuacac

SEQ ID NO: 307644 - RNA, 22 nt, Human herpesvirus 4 (Epstein-Barr virus)
cacccuggccgugcuggaugag

SEQ ID NO: 307645 - RNA, 13 nt, Human herpesvirus 4 (Epstein-Barr virus)
auucugagcacca

SEQ ID NO: 307646 - RNA, 14 nt, Human herpesvirus 4 (Epstein-Barr virus)
auucugagcaccaa

SEQ ID NO: 307647 - RNA, 17 nt, Human herpesvirus 4 (Epstein-Barr virus)
auucugagcaccaacac

SEQ ID NO: 307648 - RNA, 14 nt, Human herpesvirus 4 (Epstein-Barr virus)
auucuggccaugaa

SEQ ID NO: 307649 - RNA, 17 nt, Human herpesvirus 4 (Epstein-Barr virus)
auucuggccaugaaucu

SEQ ID NO: 307650 - RNA, 15 nt, Human herpesvirus 4 (Epstein-Barr virus)
auugacuacaccagu

SEQ ID NO: 307651 - RNA, 12 nt, Human herpesvirus 4 (Epstein-Barr virus)
auugaugaacug

SEQ ID NO: 307652 - RNA, 15 nt, Human herpesvirus 4 (Epstein-Barr virus)
auugaugaguuaaag

SEQ ID NO: 307653 - RNA, 18 nt, Human herpesvirus 4 (Epstein-Barr virus)
auugcucucguugccaaa

SEQ ID NO: 307654 - RNA, 19 nt, Human herpesvirus 4 (Epstein-Barr virus)
auugcuguuuuugccaaau

SEQ ID NO: 307655 - RNA, 16 nt, Human herpesvirus 4 (Epstein-Barr virus)
auuggaaaagggccca

SEQ ID NO: 307656 - RNA, 21 nt, Human herpesvirus 4 (Epstein-Barr virus)
auuggcaugggcgggacaauc

SEQ ID NO: 307657 - RNA, 19 nt, Human herpesvirus 4 (Epstein-Barr virus)
auuggcgucgggaaacaca

SEQ ID NO: 307658 - RNA, 22 nt, Human herpesvirus 4 (Epstein-Barr virus)
auugggcauacccauguuguca

SEQ ID NO: 307659 - RNA, 14 nt, Human herpesvirus 4 (Epstein-Barr virus)
auugggugaccacu

SEQ ID NO: 307660 - RNA, 18 nt, Human herpesvirus 4 (Epstein-Barr virus)
auugguaccagaagaguc

SEQ ID NO: 307661 - RNA, 21 nt, Human herpesvirus 4 (Epstein-Barr virus)
auugguaccagaagagucaua

SEQ ID NO: 307662 - RNA, 13 nt, Human herpesvirus 4 (Epstein-Barr virus)
auugucacugaga

SEQ ID NO: 307663 - RNA, 16 nt, Human herpesvirus 4 (Epstein-Barr virus)
auuguguauugcucuc

SEQ ID NO: 307664 - RNA, 17 nt, Human herpesvirus 4 (Epstein-Barr virus)
auuguuuacaucugccc

SEQ ID NO: 307665 - RNA, 18 nt, Human herpesvirus 4 (Epstein-Barr virus)
auuuaaaaggggcagcaa

SEQ ID NO: 307666 - RNA, 17 nt, Human herpesvirus 4 (Epstein-Barr virus)
auuuagaaaccuugccu

SEQ ID NO: 307667 - RNA, 16 nt, Human herpesvirus 4 (Epstein-Barr virus)
auuuauacccagugag

SEQ ID NO: 307668 - RNA, 16 nt, Human herpesvirus 4 (Epstein-Barr virus)
auuuauugcaucacaa

SEQ ID NO: 307669 - RNA, 14 nt, Human herpesvirus 4 (Epstein-Barr virus)
auuucauccucaga

SEQ ID NO: 307670 - RNA, 18 nt, Human herpesvirus 4 (Epstein-Barr virus)
auuucucauaauggugcc

SEQ ID NO: 307671 - RNA, 19 nt, Human herpesvirus 4 (Epstein-Barr virus)
auuugaggaggcacacaaa

SEQ ID NO: 307672 - RNA, 22 nt, Human herpesvirus 4 (Epstein-Barr virus)
auuugaucuuugacugacacau

SEQ ID NO: 307673 - RNA, 22 nt, Human herpesvirus 4 (Epstein-Barr virus)
auuuggaggaagaguaccccag

SEQ ID NO: 307674 - RNA, 22 nt, Human herpesvirus 4 (Epstein-Barr virus)
auuuggugcuuugucuuugcca

SEQ ID NO: 307675 - RNA, 11 nt, Human herpesvirus 4 (Epstein-Barr virus)
auuuguugccg

SEQ ID NO: 307676 - RNA, 13 nt, Human herpesvirus 4 (Epstein-Barr virus)
auuuuaaucugga

SEQ ID NO: 307677 - RNA, 20 nt, Human herpesvirus 4 (Epstein-Barr virus)
augagauugccaagaugcaa

SEQ ID NO: 307678 - RNA, 15 nt, Human herpesvirus 4 (Epstein-Barr virus)
augagcauggaagac

SEQ ID NO: 307679 - RNA, 12 nt, Human herpesvirus 4 (Epstein-Barr virus)
augagcuacucu

SEQ ID NO: 307680 - RNA, 13 nt, Human herpesvirus 4 (Epstein-Barr virus)
augagcuccucuc

SEQ ID NO: 307681 - RNA, 14 nt, Human herpesvirus 4 (Epstein-Barr virus)
augagcuccucucc

SEQ ID NO: 307682 - RNA, 20 nt, Human herpesvirus 4 (Epstein-Barr virus)
augaggaauucuuccagaug

SEQ ID NO: 307683 - RNA, 16 nt, Human herpesvirus 4 (Epstein-Barr virus)
augagucugacuacuc

SEQ ID NO: 307684 - RNA, 15 nt, Human herpesvirus 4 (Epstein-Barr virus)
augagugccaugugu

SEQ ID NO: 307685 - RNA, 15 nt, Human herpesvirus 4 (Epstein-Barr virus)
augauacucaucugu

SEQ ID NO: 307686 - RNA, 14 nt, Human herpesvirus 4 (Epstein-Barr virus)
augauccuguacaa

SEQ ID NO: 307687 - RNA, 19 nt, Human herpesvirus 4 (Epstein-Barr virus)
augauugaggcaauggcca

SEQ ID NO: 307688 - RNA, 13 nt, Human herpesvirus 4 (Epstein-Barr virus)
augcaaugcccac

SEQ ID NO: 307689 - RNA, 15 nt, Human herpesvirus 4 (Epstein-Barr virus)
augcagguuugacuu

SEQ ID NO: 307690 - RNA, 23 nt, Human herpesvirus 4 (Epstein-Barr virus)
augcagugggugaggcggugccu

SEQ ID NO: 307691 - RNA, 14 nt, Human herpesvirus 4 (Epstein-Barr virus)
augcauacacugaa

SEQ ID NO: 307692 - RNA, 15 nt, Human herpesvirus 4 (Epstein-Barr virus)
augcaucguagucag

SEQ ID NO: 307693 - RNA, 18 nt, Human herpesvirus 4 (Epstein-Barr virus)
augccaauccaugccaau

SEQ ID NO: 307694 - RNA, 19 nt, Human herpesvirus 4 (Epstein-Barr virus)
augcccagacucaucucaa

SEQ ID NO: 307695 - RNA, 23 nt, Human herpesvirus 4 (Epstein-Barr virus)
augccucuacgccccagaugaaa

SEQ ID NO: 307696 - RNA, 16 nt, Human herpesvirus 4 (Epstein-Barr virus)
augcgccgucauucca

SEQ ID NO: 307697 - RNA, 17 nt, Human herpesvirus 4 (Epstein-Barr virus)
augcgccgucauuccau

SEQ ID NO: 307698 - RNA, 22 nt, Human herpesvirus 4 (Epstein-Barr virus)
augcggagggucagauuuugca

SEQ ID NO: 307699 - RNA, 13 nt, Human herpesvirus 4 (Epstein-Barr virus)
augcuaucuugua

SEQ ID NO: 307700 - RNA, 22 nt, Human herpesvirus 4 (Epstein-Barr virus)
augcuauuggguuaacgggugg

SEQ ID NO: 307701 - RNA, 19 nt, Human herpesvirus 4 (Epstein-Barr virus)
augcucuggcgacuuggug

SEQ ID NO: 307702 - RNA, 23 nt, Human herpesvirus 4 (Epstein-Barr virus)
augcugaauauugccagcgccuu

SEQ ID NO: 307703 - RNA, 17 nt, Human herpesvirus 4 (Epstein-Barr virus)
augcuguaccugaugag

SEQ ID NO: 307704 - RNA, 21 nt, Human herpesvirus 4 (Epstein-Barr virus)
augcuguaccugaugagucac

SEQ ID NO: 307705 - RNA, 17 nt, Human herpesvirus 4 (Epstein-Barr virus)
auggagagguuugagaa

SEQ ID NO: 307706 - RNA, 23 nt, Human herpesvirus 4 (Epstein-Barr virus)
auggaugugaaugcccccggggg

SEQ ID NO: 307707 - RNA, 23 nt, Human herpesvirus 4 (Epstein-Barr virus)
auggcaaaggucccaggccuuag

SEQ ID NO: 307708 - RNA, 20 nt, Human herpesvirus 4 (Epstein-Barr virus)
auggcagccgggucgugaaa

SEQ ID NO: 307709 - RNA, 14 nt, Human herpesvirus 4 (Epstein-Barr virus)
auggccagcuuuga

SEQ ID NO: 307710 - RNA, 24 nt, Human herpesvirus 4 (Epstein-Barr virus)
auggccauucgacaggccauuaga

SEQ ID NO: 307711 - RNA, 16 nt, Human herpesvirus 4 (Epstein-Barr virus)
aggcaguagaggacac

SEQ ID NO: 307712 - RNA, 13 nt, Human herpesvirus 4 (Epstein-Barr virus)
aggcagucuccac

SEQ ID NO: 307713 - RNA, 23 nt, Human herpesvirus 4 (Epstein-Barr virus)
aggcauuuacgguuagugugccu

SEQ ID NO: 307714 - RNA, 15 nt, Human herpesvirus 4 (Epstein-Barr virus)
aggccagagacgagc

SEQ ID NO: 307715 - RNA, 17 nt, Human herpesvirus 4 (Epstein-Barr virus)
aggccagguagcccagc

SEQ ID NO: 307716 - RNA, 19 nt, Human herpesvirus 4 (Epstein-Barr virus)
aggcccgaccugccaaaga

SEQ ID NO: 307717 - RNA, 16 nt, Human herpesvirus 4 (Epstein-Barr virus)
aggcccggaugaucuc

SEQ ID NO: 307718 - RNA, 19 nt, Human herpesvirus 4 (Epstein-Barr virus)
aggccucacgaucuucaag

SEQ ID NO: 307719 - RNA, 15 nt, Human herpesvirus 4 (Epstein-Barr virus)
aggccucccagucua

SEQ ID NO: 307720 - RNA, 20 nt, Human herpesvirus 4 (Epstein-Barr virus)
aggccucccagucuauccag

SEQ ID NO: 307721 - RNA, 21 nt, Human herpesvirus 4 (Epstein-Barr virus)
aggccugccacgugggucuca

SEQ ID NO: 307722 - RNA, 20 nt, Human herpesvirus 4 (Epstein-Barr virus)
aggccuugguuucagccuca

SEQ ID NO: 307723 - RNA, 23 nt, Human herpesvirus 4 (Epstein-Barr virus)
aggccuuuuuggcgugguggcau

SEQ ID NO: 307724 - RNA, 22 nt, Human herpesvirus 4 (Epstein-Barr virus)
aggcgcuguuauggccaugaua

SEQ ID NO: 307725 - RNA, 13 nt, Human herpesvirus 4 (Epstein-Barr virus)
aggcggugccugu

SEQ ID NO: 307726 - RNA, 19 nt, Human herpesvirus 4 (Epstein-Barr virus)
aggcgguuagggaggacac

SEQ ID NO: 307727 - RNA, 16 nt, Human herpesvirus 4 (Epstein-Barr virus)
aggcuacaacaggcug

SEQ ID NO: 307728 - RNA, 18 nt, Human herpesvirus 4 (Epstein-Barr virus)
aggcuccuggaucugggg

SEQ ID NO: 307729 - RNA, 14 nt, Human herpesvirus 4 (Epstein-Barr virus)
aggcucugcacagg

SEQ ID NO: 307730 - RNA, 14 nt, Human herpesvirus 4 (Epstein-Barr virus)
aggcuggugccuug

SEQ ID NO: 307731 - RNA, 12 nt, Human herpesvirus 4 (Epstein-Barr virus)
aggcuugccaaa

SEQ ID NO: 307732 - RNA, 14 nt, Human herpesvirus 4 (Epstein-Barr virus)
aggcuugccaaaau

SEQ ID NO: 307733 - RNA, 19 nt, Human herpesvirus 4 (Epstein-Barr virus)
agggaaaaagguuuagcua

SEQ ID NO: 307734 - RNA, 16 nt, Human herpesvirus 4 (Epstein-Barr virus)
agggcagacaccaccu

SEQ ID NO: 307735 - RNA, 14 nt, Human herpesvirus 4 (Epstein-Barr virus)
agggcgccagggau

SEQ ID NO: 307736 - RNA, 16 nt, Human herpesvirus 4 (Epstein-Barr virus)
agggcggcgaugaacg

SEQ ID NO: 307737 - RNA, 24 nt, Human herpesvirus 4 (Epstein-Barr virus)
agggcucugaccgacgggcaucuu

SEQ ID NO: 307738 - RNA, 16 nt, Human herpesvirus 4 (Epstein-Barr virus)
aggggauuccugucca

SEQ ID NO: 307739 - RNA, 14 nt, Human herpesvirus 4 (Epstein-Barr virus)
aggggcaaccugaa

SEQ ID NO: 307740 - RNA, 23 nt, Human herpesvirus 4 (Epstein-Barr virus)
agggggauccggaggggaccacu

SEQ ID NO: 307741 - RNA, 19 nt, Human herpesvirus 4 (Epstein-Barr virus)
agggggugccugugccucg

SEQ ID NO: 307742 - RNA, 14 nt, Human herpesvirus 4 (Epstein-Barr virus)
agggguauguggug

SEQ ID NO: 307743 - RNA, 20 nt, Human herpesvirus 4 (Epstein-Barr virus)
agggguauguggugccaugu

SEQ ID NO: 307744 - RNA, 12 nt, Human herpesvirus 4 (Epstein-Barr virus)
agggguggugga

SEQ ID NO: 307745 - RNA, 15 nt, Human herpesvirus 4 (Epstein-Barr virus)
agggucaacaggugg

SEQ ID NO: 307746 - RNA, 18 nt, Human herpesvirus 4 (Epstein-Barr virus)
agggucagauuuugcaau

SEQ ID NO: 307747 - RNA, 20 nt, Human herpesvirus 4 (Epstein-Barr virus)
aggguggucaccgcgaccaa

SEQ ID NO: 307748 - RNA, 16 nt, Human herpesvirus 4 (Epstein-Barr virus)
agguaaaacugccaca

SEQ ID NO: 307749 - RNA, 22 nt, Human herpesvirus 4 (Epstein-Barr virus)
agguaacucacuaaacauugca

SEQ ID NO: 307750 - RNA, 15 nt, Human herpesvirus 4 (Epstein-Barr virus)
aguuacacacacagu

SEQ ID NO: 307751 - RNA, 16 nt, Human herpesvirus 4 (Epstein-Barr virus)
aguuagaguccaauga

SEQ ID NO: 307752 - RNA, 22 nt, Human herpesvirus 4 (Epstein-Barr virus)
aguucaaccuaauuacauggua

SEQ ID NO: 307753 - RNA, 13 nt, Human herpesvirus 4 (Epstein-Barr virus)
aguuccaggugac

SEQ ID NO: 307754 - RNA, 22 nt, Human herpesvirus 4 (Epstein-Barr virus)
aguugaaauaucuagcacggca

SEQ ID NO: 307755 - RNA, 20 nt, Human herpesvirus 4 (Epstein-Barr virus)
aguuggcauuggcgucagga

SEQ ID NO: 307756 - RNA, 16 nt, Human herpesvirus 4 (Epstein-Barr virus)
aguugguggugggggc

SEQ ID NO: 307757 - RNA, 19 nt, Human herpesvirus 4 (Epstein-Barr virus)
aguuuaagcagcacugaau

SEQ ID NO: 307758 - RNA, 20 nt, Human herpesvirus 4 (Epstein-Barr virus)
aguuuaagcagcacugaauu

SEQ ID NO: 307759 - RNA, 20 nt, Human herpesvirus 4 (Epstein-Barr virus)
aguuugauacucaccaagau

SEQ ID NO: 307760 - RNA, 13 nt, Human herpesvirus 4 (Epstein-Barr virus)
auaaaaaaccaaa

SEQ ID NO: 307761 - RNA, 16 nt, Human herpesvirus 4 (Epstein-Barr virus)
auaaaacccugaccau

SEQ ID NO: 307762 - RNA, 13 nt, Human herpesvirus 4 (Epstein-Barr virus)
auaaacaauuaca

SEQ ID NO: 307763 - RNA, 18 nt, Human herpesvirus 4 (Epstein-Barr virus)
auaaacccaaugugcaaa

SEQ ID NO: 307764 - RNA, 12 nt, Human herpesvirus 4 (Epstein-Barr virus)
auaaagcuugac

SEQ ID NO: 307765 - RNA, 14 nt, Human herpesvirus 4 (Epstein-Barr virus)
auaaagucgaugua

SEQ ID NO: 307766 - RNA, 21 nt, Human herpesvirus 4 (Epstein-Barr virus)
auaaauccccaguagacauca

SEQ ID NO: 307767 - RNA, 22 nt, Human herpesvirus 4 (Epstein-Barr virus)
auaaauuaagagucccuccuca

SEQ ID NO: 307768 - RNA, 13 nt, Human herpesvirus 4 (Epstein-Barr virus)
auaacaagggaag

SEQ ID NO: 307769 - RNA, 14 nt, Human herpesvirus 4 (Epstein-Barr virus)
auaaugacuaugag

SEQ ID NO: 307770 - RNA, 19 nt, Human herpesvirus 4 (Epstein-Barr virus)
auaaugggagggagccugc

SEQ ID NO: 307771 - RNA, 11 nt, Human herpesvirus 4 (Epstein-Barr virus)
auaauggugcc

SEQ ID NO: 307772 - RNA, 19 nt, Human herpesvirus 4 (Epstein-Barr virus)
auaaugucuucaauagaca

SEQ ID NO: 307773 - RNA, 15 nt, Human herpesvirus 4 (Epstein-Barr virus)
auacacccaucugga

SEQ ID NO: 307774 - RNA, 19 nt, Human herpesvirus 4 (Epstein-Barr virus)
auacagcagcuggauguac

SEQ ID NO: 307775 - RNA, 16 nt, Human herpesvirus 4 (Epstein-Barr virus)
auacaugucucagagg

SEQ ID NO: 307776 - RNA, 16 nt, Human herpesvirus 4 (Epstein-Barr virus)
auaccaggugccuuuu

SEQ ID NO: 307777 - RNA, 14 nt, Human herpesvirus 4 (Epstein-Barr virus)
auaccgagauguac

SEQ ID NO: 307778 - RNA, 14 nt, Human herpesvirus 4 (Epstein-Barr virus)
auacggcuuuccag

SEQ ID NO: 307779 - RNA, 16 nt, Human herpesvirus 4 (Epstein-Barr virus)
auacucaucugugaga

SEQ ID NO: 307780 - RNA, 13 nt, Human herpesvirus 4 (Epstein-Barr virus)
auagaaguggaaa

SEQ ID NO: 307781 - RNA, 17 nt, Human herpesvirus 4 (Epstein-Barr virus)
auagaauuguuaguuua

SEQ ID NO: 307782 - RNA, 23 nt, Human herpesvirus 4 (Epstein-Barr virus)
auagccucgcgacucgugggaaa

SEQ ID NO: 307783 - RNA, 14 nt, Human herpesvirus 4 (Epstein-Barr virus)
auagcucugcacag

SEQ ID NO: 307784 - RNA, 15 nt, Human herpesvirus 4 (Epstein-Barr virus)
auauagcucugcaca

SEQ ID NO: 307785 - RNA, 18 nt, Human herpesvirus 4 (Epstein-Barr virus)
auaugaaaauguguauuc

SEQ ID NO: 307786 - RNA, 18 nt, Human herpesvirus 4 (Epstein-Barr virus)
auaugcucucgcacucuu

SEQ ID NO: 307787 - RNA, 20 nt, Human herpesvirus 4 (Epstein-Barr virus)
agagaucuggggccaaggac

SEQ ID NO: 307788 - RNA, 16 nt, Human herpesvirus 4 (Epstein-Barr virus)
agagauuucauccuca

SEQ ID NO: 307789 - RNA, 13 nt, Human herpesvirus 4 (Epstein-Barr virus)
agagccacauucu

SEQ ID NO: 307790 - RNA, 19 nt, Human herpesvirus 4 (Epstein-Barr virus)
agagccucugccacaaggc

SEQ ID NO: 307791 - RNA, 19 nt, Human herpesvirus 4 (Epstein-Barr virus)
agagcggguggaggagcuc

SEQ ID NO: 307792 - RNA, 22 nt, Human herpesvirus 4 (Epstein-Barr virus)
agagcuggaugguguuggagac

SEQ ID NO: 307793 - RNA, 20 nt, Human herpesvirus 4 (Epstein-Barr virus)
agaggaugagaccaguggca

SEQ ID NO: 307794 - RNA, 21 nt, Human herpesvirus 4 (Epstein-Barr virus)
agaggccucugggguccagga

SEQ ID NO: 307795 - RNA, 13 nt, Human herpesvirus 4 (Epstein-Barr virus)
agaggccugcacc

SEQ ID NO: 307796 - RNA, 13 nt, Human herpesvirus 4 (Epstein-Barr virus)
agagggugucaaa

SEQ ID NO: 307797 - RNA, 16 nt, Human herpesvirus 4 (Epstein-Barr virus)
agagguaaaacugcca

SEQ ID NO: 307798 - RNA, 15 nt, Human herpesvirus 4 (Epstein-Barr virus)
agaguaauugcagug

SEQ ID NO: 307799 - RNA, 15 nt, Human herpesvirus 4 (Epstein-Barr virus)
agagucccugcgcca

SEQ ID NO: 307800 - RNA, 21 nt, Human herpesvirus 4 (Epstein-Barr virus)
agagugccgggcccgggacag

SEQ ID NO: 307801 - RNA, 23 nt, Human herpesvirus 4 (Epstein-Barr virus)
agaucagcaaccuugggggcaaa

SEQ ID NO: 307802 - RNA, 13 nt, Human herpesvirus 4 (Epstein-Barr virus)
agauccaacuccg

SEQ ID NO: 307803 - RNA, 16 nt, Human herpesvirus 4 (Epstein-Barr virus)
agauccuucuggcacg

SEQ ID NO: 307804 - RNA, 22 nt, Human herpesvirus 4 (Epstein-Barr virus)
agauccuucuggcacgacuguu

SEQ ID NO: 307805 - RNA, 19 nt, Human herpesvirus 4 (Epstein-Barr virus)
agaucucagaauugucacu

SEQ ID NO: 307806 - RNA, 24 nt, Human herpesvirus 4 (Epstein-Barr virus)
agaucucagaauugucacugagaa

SEQ ID NO: 307807 - RNA, 11 nt, Human herpesvirus 4 (Epstein-Barr virus)
agaucuucuca

SEQ ID NO: 307808 - RNA, 17 nt, Human herpesvirus 4 (Epstein-Barr virus)
agaucuucucaccgugg

SEQ ID NO: 307809 - RNA, 18 nt, Human herpesvirus 4 (Epstein-Barr virus)
agaugaccaugauggugc

SEQ ID NO: 307810 - RNA, 19 nt, Human herpesvirus 4 (Epstein-Barr virus)
agaugaccaugauggugca

SEQ ID NO: 307811 - RNA, 17 nt, Human herpesvirus 4 (Epstein-Barr virus)
agaugauggacccaaac

SEQ ID NO: 307812 - RNA, 19 nt, Human herpesvirus 4 (Epstein-Barr virus)
agaugcaacagaggauugg

SEQ ID NO: 307813 - RNA, 19 nt, Human herpesvirus 4 (Epstein-Barr virus)
agaugcaccgggaugagcu

SEQ ID NO: 307814 - RNA, 13 nt, Human herpesvirus 4 (Epstein-Barr virus)
agauggcacucuu

SEQ ID NO: 307815 - RNA, 23 nt, Human herpesvirus 4 (Epstein-Barr virus)
agaugugccugggcuaucguccu

SEQ ID NO: 307816 - RNA, 22 nt, Human herpesvirus 4 (Epstein-Barr virus)
agauugguaccagaagagucau

SEQ ID NO: 307817 - RNA, 13 nt, Human herpesvirus 4 (Epstein-Barr virus)
agauugucuucca

SEQ ID NO: 307818 - RNA, 15 nt, Human herpesvirus 4 (Epstein-Barr virus)
agcaaucagacaugc

SEQ ID NO: 307819 - RNA, 20 nt, Human herpesvirus 4 (Epstein-Barr virus)
agcacaaaccagucuacgac

SEQ ID NO: 307820 - RNA, 16 nt, Human herpesvirus 4 (Epstein-Barr virus)
agcacauuuuguucua

SEQ ID NO: 307821 - RNA, 15 nt, Human herpesvirus 4 (Epstein-Barr virus)
agcaccggagccacc

SEQ ID NO: 307822 - RNA, 15 nt, Human herpesvirus 4 (Epstein-Barr virus)
agcagaaaggccaua

SEQ ID NO: 307823 - RNA, 17 nt, Human herpesvirus 4 (Epstein-Barr virus)
agcagaagacuccugcc

SEQ ID NO: 307824 - RNA, 18 nt, Human herpesvirus 4 (Epstein-Barr virus)
agcagaagacuccugccu

SEQ ID NO: 307825 - RNA, 21 nt, Human herpesvirus 4 (Epstein-Barr virus)
agcagacuccgaauaucccca

SEQ ID NO: 307826 - RNA, 16 nt, Human herpesvirus 4 (Epstein-Barr virus)
agcagcagugugugaa

SEQ ID NO: 307827 - RNA, 22 nt, Human herpesvirus 4 (Epstein-Barr virus)
agcagcugaggggcaaccugaa

SEQ ID NO: 307828 - RNA, 14 nt, Human herpesvirus 4 (Epstein-Barr virus)
agcaggggugauga

SEQ ID NO: 307829 - RNA, 13 nt, Human herpesvirus 4 (Epstein-Barr virus)
agcagggugaaca

SEQ ID NO: 307830 - RNA, 20 nt, Human herpesvirus 4 (Epstein-Barr virus)
agcaggugagggugccauug

SEQ ID NO: 307831 - RNA, 16 nt, Human herpesvirus 4 (Epstein-Barr virus)
uuaaccucaaccacaa

SEQ ID NO: 307832 - RNA, 16 nt, Human herpesvirus 4 (Epstein-Barr virus)
uuaacuuuaacaagac

SEQ ID NO: 307833 - RNA, 15 nt, Human herpesvirus 4 (Epstein-Barr virus)
uuaaggcuguugaca

SEQ ID NO: 307834 - RNA, 20 nt, Human herpesvirus 4 (Epstein-Barr virus)
uuacagcacauuuuguucua

SEQ ID NO: 307835 - RNA, 13 nt, Human herpesvirus 4 (Epstein-Barr virus)
uuacugcacagaa

SEQ ID NO: 307836 - RNA, 12 nt, Human herpesvirus 4 (Epstein-Barr virus)
uuacuggucuuu

SEQ ID NO: 307837 - RNA, 17 nt, Human herpesvirus 4 (Epstein-Barr virus)
uuagacagguaacucac

SEQ ID NO: 307838 - RNA, 19 nt, Human herpesvirus 4 (Epstein-Barr virus)
uuaggagacgcccucaauc

SEQ ID NO: 307839 - RNA, 15 nt, Human herpesvirus 4 (Epstein-Barr virus)
uuagggcauccacga

SEQ ID NO: 307840 - RNA, 12 nt, Human herpesvirus 4 (Epstein-Barr virus)
uuauaacugcca

SEQ ID NO: 307841 - RNA, 14 nt, Human herpesvirus 4 (Epstein-Barr virus)
uuauaacugccaga

SEQ ID NO: 307842 - RNA, 14 nt, Human herpesvirus 4 (Epstein-Barr virus)
uuauacccagugag

SEQ ID NO: 307843 - RNA, 18 nt, Human herpesvirus 4 (Epstein-Barr virus)
uuauagcucuggcacugc

SEQ ID NO: 307844 - RNA, 17 nt, Human herpesvirus 4 (Epstein-Barr virus)
uuauaugaaaaugugua

SEQ ID NO: 307845 - RNA, 23 nt, Human herpesvirus 4 (Epstein-Barr virus)
uuaugggcaaaacucacaggaca

SEQ ID NO: 307846 - RNA, 19 nt, Human herpesvirus 4 (Epstein-Barr virus)
uuauucuugauugccucuu

SEQ ID NO: 307847 - RNA, 12 nt, Human herpesvirus 4 (Epstein-Barr virus)
uuauugcauuag

SEQ ID NO: 307848 - RNA, 13 nt, Human herpesvirus 4 (Epstein-Barr virus)
uuauuuaccacac

SEQ ID NO: 307849 - RNA, 20 nt, Human herpesvirus 4 (Epstein-Barr virus)
uucaagagucucgccaucua

SEQ ID NO: 307850 - RNA, 19 nt, Human herpesvirus 4 (Epstein-Barr virus)
uucaccuugaggugccaca

SEQ ID NO: 307851 - RNA, 20 nt, Human herpesvirus 4 (Epstein-Barr virus)
uucacugggacaacugucac

SEQ ID NO: 307852 - RNA, 18 nt, Human herpesvirus 4 (Epstein-Barr virus)
uucaggccgguuuugcag

SEQ ID NO: 307853 - RNA, 22 nt, Human herpesvirus 4 (Epstein-Barr virus)
uucagguaccccaaaacuauac

SEQ ID NO: 307854 - RNA, 16 nt, Human herpesvirus 4 (Epstein-Barr virus)
uucaguaaaccaguag

SEQ ID NO: 307855 - RNA, 15 nt, Human herpesvirus 4 (Epstein-Barr virus)
uucauguccacugag

SEQ ID NO: 307856 - RNA, 14 nt, Human herpesvirus 4 (Epstein-Barr virus)
uuccaucggauaaa

SEQ ID NO: 307857 - RNA, 22 nt, Human herpesvirus 4 (Epstein-Barr virus)
uucccaaguguuuccagacacc

SEQ ID NO: 307858 - RNA, 20 nt, Human herpesvirus 4 (Epstein-Barr virus)
uucccacugugccuaaacgu

SEQ ID NO: 307859 - RNA, 17 nt, Human herpesvirus 4 (Epstein-Barr virus)
uuccccuccccagugau

SEQ ID NO: 307860 - RNA, 19 nt, Human herpesvirus 4 (Epstein-Barr virus)
uucccuaagcagcugaggg

SEQ ID NO: 307861 - RNA, 18 nt, Human herpesvirus 4 (Epstein-Barr virus)
uucccuguuugcuuuaug

SEQ ID NO: 307862 - RNA, 15 nt, Human herpesvirus 4 (Epstein-Barr virus)
uuccuauaugcucuc

SEQ ID NO: 307863 - RNA, 13 nt, Human herpesvirus 4 (Epstein-Barr virus)
uuccuucucaugc

SEQ ID NO: 307864 - RNA, 17 nt, Human herpesvirus 4 (Epstein-Barr virus)
uuccuucucaugcuccu

SEQ ID NO: 307865 - RNA, 21 nt, Human herpesvirus 4 (Epstein-Barr virus)
uucgugagcagggcuucgucc

SEQ ID NO: 307866 - RNA, 22 nt, Human herpesvirus 4 (Epstein-Barr virus)
uucucagggguguagugggugg

SEQ ID NO: 307867 - RNA, 16 nt, Human herpesvirus 4 (Epstein-Barr virus)
uucucauaauggugcc

SEQ ID NO: 307868 - RNA, 12 nt, Human herpesvirus 4 (Epstein-Barr virus)
uucuccaucucc

SEQ ID NO: 307869 - RNA, 14 nt, Human herpesvirus 4 (Epstein-Barr virus)
uucuccaucuccau

SEQ ID NO: 307870 - RNA, 19 nt, Human herpesvirus 4 (Epstein-Barr virus)
uucucccccagaucacggc

SEQ ID NO: 307871 - RNA, 17 nt, Human herpesvirus 4 (Epstein-Barr virus)
uucuccucagucuuugc

SEQ ID NO: 307872 - RNA, 17 nt, Human herpesvirus 4 (Epstein-Barr virus)
uucuccugauuugcucu

SEQ ID NO: 307873 - RNA, 14 nt, Human herpesvirus 4 (Epstein-Barr virus)
uucugagcaccaac

SEQ ID NO: 307874 - RNA, 16 nt, Human herpesvirus 4 (Epstein-Barr virus)
uucugcuccagugccu

SEQ ID NO: 307875 - RNA, 17 nt, Human herpesvirus 4 (Epstein-Barr virus)
uucuugaccuugaugua

SEQ ID NO: 307876 - RNA, 13 nt, Human herpesvirus 4 (Epstein-Barr virus)
uucuuuagggcau

SEQ ID NO: 307877 - RNA, 13 nt, Human herpesvirus 4 (Epstein-Barr virus)
uucuuuugcucuu

SEQ ID NO: 307878 - RNA, 18 nt, Human herpesvirus 4 (Epstein-Barr virus)
uugaaagaugucaaacau

SEQ ID NO: 307879 - RNA, 17 nt, Human herpesvirus 4 (Epstein-Barr virus)
uugaccaguguguacau

SEQ ID NO: 307880 - RNA, 21 nt, Human herpesvirus 4 (Epstein-Barr virus)
uugaccaguguguacauucca

SEQ ID NO: 307881 - RNA, 22 nt, Human herpesvirus 4 (Epstein-Barr virus)
uugaccaguguguacauuccag

SEQ ID NO: 307882 - RNA, 17 nt, Human herpesvirus 4 (Epstein-Barr virus)
uugacuacaauguuccu

SEQ ID NO: 307883 - RNA, 20 nt, Human herpesvirus 4 (Epstein-Barr virus)
uugacuguaaucacuggcaa

SEQ ID NO: 307884 - RNA, 13 nt, Human herpesvirus 4 (Epstein-Barr virus)
uugagaagcagcu

SEQ ID NO: 307885 - RNA, 19 nt, Human herpesvirus 4 (Epstein-Barr virus)
uugaggaacauggauguga

SEQ ID NO: 307886 - RNA, 14 nt, Human herpesvirus 4 (Epstein-Barr virus)
uugagggcaaagac

SEQ ID NO: 307887 - RNA, 12 nt, Human herpesvirus 4 (Epstein-Barr virus)
uugagggggcca

SEQ ID NO: 307888 - RNA, 15 nt, Human herpesvirus 4 (Epstein-Barr virus)
uugaggugccacaga

SEQ ID NO: 307889 - RNA, 17 nt, Human herpesvirus 4 (Epstein-Barr virus)
uugaucuuugacugaca

SEQ ID NO: 307890 - RNA, 18 nt, Human herpesvirus 4 (Epstein-Barr virus)
uugauugagaucagaaaa

SEQ ID NO: 307891 - RNA, 23 nt, Human herpesvirus 4 (Epstein-Barr virus)
uugcacccaacauagauacuuga

SEQ ID NO: 307892 - RNA, 11 nt, Human herpesvirus 4 (Epstein-Barr virus)
uugcacuccaa

SEQ ID NO: 307893 - RNA, 19 nt, Human herpesvirus 4 (Epstein-Barr virus)
uugccacccaggguaagag

SEQ ID NO: 307894 - RNA, 16 nt, Human herpesvirus 4 (Epstein-Barr virus)
uugcccucuccagcaa

SEQ ID NO: 307895 - RNA, 17 nt, Human herpesvirus 4 (Epstein-Barr virus)
uugcucucguugccaaa

SEQ ID NO: 307896 - RNA, 19 nt, Human herpesvirus 4 (Epstein-Barr virus)
uugcugacauauguacaau

SEQ ID NO: 307897 - RNA, 21 nt, Human herpesvirus 4 (Epstein-Barr virus)
uugcuugccuuuuugccacau

SEQ ID NO: 307898 - RNA, 23 nt, Human herpesvirus 4 (Epstein-Barr virus)
uuggcaucaucagcgccguccac

SEQ ID NO: 307899 - RNA, 21 nt, Human herpesvirus 4 (Epstein-Barr virus)
uuggcccgucccucuuguccc

SEQ ID NO: 307900 - RNA, 14 nt, Human herpesvirus 4 (Epstein-Barr virus)
uuggccuuuugcac

SEQ ID NO: 307901 - RNA, 22 nt, Human herpesvirus 4 (Epstein-Barr virus)
uuggcgucuaugcuuaaccgcu

SEQ ID NO: 307902 - RNA, 16 nt, Human herpesvirus 4 (Epstein-Barr virus)
uuggcgugguggcauu

SEQ ID NO: 307903 - RNA, 15 nt, Human herpesvirus 4 (Epstein-Barr virus)
uuggcuucugcugcu

SEQ ID NO: 307904 - RNA, 21 nt, Human herpesvirus 4 (Epstein-Barr virus)
uuggggagcggggguucucca

SEQ ID NO: 307905 - RNA, 15 nt, Human herpesvirus 4 (Epstein-Barr virus)
uugguaauacgggua

SEQ ID NO: 307906 - RNA, 11 nt, Human herpesvirus 4 (Epstein-Barr virus)
uugguccaggg

SEQ ID NO: 307907 - RNA, 17 nt, Human herpesvirus 4 (Epstein-Barr virus)
uugguguauuucuggcc

SEQ ID NO: 307908 - RNA, 18 nt, Human herpesvirus 4 (Epstein-Barr virus)
uuguaaucgcagcucuaa

SEQ ID NO: 307909 - RNA, 19 nt, Human herpesvirus 4 (Epstein-Barr virus)
uugucacgucacucagcuc

SEQ ID NO: 307910 - RNA, 13 nt, Human herpesvirus 4 (Epstein-Barr virus)
uugucacugagaa

SEQ ID NO: 307911 - RNA, 13 nt, Human herpesvirus 4 (Epstein-Barr virus)
uuguccaggagac

SEQ ID NO: 307912 - RNA, 20 nt, Human herpesvirus 4 (Epstein-Barr virus)
uugucccugagaugugaauu

SEQ ID NO: 307913 - RNA, 20 nt, Human herpesvirus 4 (Epstein-Barr virus)
uugucuacaucccauaccua

SEQ ID NO: 307914 - RNA, 22 nt, Human herpesvirus 4 (Epstein-Barr virus)
uugugaacuuuaacauugauga

SEQ ID NO: 307915 - RNA, 15 nt, Human herpesvirus 4 (Epstein-Barr virus)
uugugauucccagaa

SEQ ID NO: 307916 - RNA, 14 nt, Human herpesvirus 4 (Epstein-Barr virus)
uuguguccuguaug

SEQ ID NO: 307917 - RNA, 19 nt, Human herpesvirus 4 (Epstein-Barr virus)
uuuaaacaugcucuuugau

SEQ ID NO: 307918 - RNA, 12 nt, Human herpesvirus 4 (Epstein-Barr virus)
uuuaaucuggau

SEQ ID NO: 307919 - RNA, 22 nt, Human herpesvirus 4 (Epstein-Barr virus)
uuuacaauaaaaugaaaccuuu

SEQ ID NO: 307920 - RNA, 19 nt, Human herpesvirus 4 (Epstein-Barr virus)
uuuacagugguucuccuga

SEQ ID NO: 307921 - RNA, 16 nt, Human herpesvirus 4 (Epstein-Barr virus)
uuuaccagugugccag

SEQ ID NO: 307922 - RNA, 13 nt, Human herpesvirus 4 (Epstein-Barr virus)
uuuaccccagucc

SEQ ID NO: 307923 - RNA, 14 nt, Human herpesvirus 4 (Epstein-Barr virus)
uuuauacccaguga

SEQ ID NO: 307924 - RNA, 18 nt, Human herpesvirus 4 (Epstein-Barr virus)
uuuauacccagugaguau

SEQ ID NO: 307925 - RNA, 16 nt, Human herpesvirus 4 (Epstein-Barr virus)
uuuccaacccuaacac

SEQ ID NO: 307926 - RNA, 18 nt, Human herpesvirus 4 (Epstein-Barr virus)
uuucccgacgccaaugcu

SEQ ID NO: 307927 - RNA, 19 nt, Human herpesvirus 4 (Epstein-Barr virus)
uuuccgaaccuugucuuca

SEQ ID NO: 307928 - RNA, 16 nt, Human herpesvirus 4 (Epstein-Barr virus)
uuuccgucagccaggg

SEQ ID NO: 307929 - RNA, 18 nt, Human herpesvirus 4 (Epstein-Barr virus)
uuuccgucagccagggug

SEQ ID NO: 307930 - RNA, 14 nt, Human herpesvirus 4 (Epstein-Barr virus)
uuuccuaagaccua

SEQ ID NO: 307931 - RNA, 20 nt, Human herpesvirus 4 (Epstein-Barr virus)
uuuccuagaaacugugccau

SEQ ID NO: 307932 - RNA, 22 nt, Human herpesvirus 4 (Epstein-Barr virus)
uuucggcgccgcccgggggcca

SEQ ID NO: 307933 - RNA, 16 nt, Human herpesvirus 4 (Epstein-Barr virus)
uuucucccccagauca

SEQ ID NO: 307934 - RNA, 18 nt, Human herpesvirus 4 (Epstein-Barr virus)
uuucuggccaaccugccu

SEQ ID NO: 307935 - RNA, 22 nt, Human herpesvirus 4 (Epstein-Barr virus)
uuucuggcgauuuuaaucugga

SEQ ID NO: 307936 - RNA, 14 nt, Human herpesvirus 4 (Epstein-Barr virus)
uuucuggugagcca

SEQ ID NO: 307937 - RNA, 13 nt, Human herpesvirus 4 (Epstein-Barr virus)
uuucuuugcuuca

SEQ ID NO: 307938 - RNA, 21 nt, Human herpesvirus 4 (Epstein-Barr virus)
uuugaaagugguagugucucu

SEQ ID NO: 307939 - RNA, 23 nt, Human herpesvirus 4 (Epstein-Barr virus)
uuugaacaucagacccaacaaag

SEQ ID NO: 307940 - RNA, 18 nt, Human herpesvirus 4 (Epstein-Barr virus)
uuugaccaagcuaccaga

SEQ ID NO: 307941 - RNA, 20 nt, Human herpesvirus 4 (Epstein-Barr virus)
uuugacugacacauaaacau

SEQ ID NO: 307942 - RNA, 14 nt, Human herpesvirus 4 (Epstein-Barr virus)
uuugcaauuugccu

SEQ ID NO: 307943 - RNA, 17 nt, Human herpesvirus 4 (Epstein-Barr virus)
uuugccacauguuuucu

SEQ ID NO: 307944 - RNA, 19 nt, Human herpesvirus 4 (Epstein-Barr virus)
uuugcuuaaaaaugugcag

SEQ ID NO: 307945 - RNA, 12 nt, Human herpesvirus 4 (Epstein-Barr virus)
uuuggaggacag

SEQ ID NO: 307946 - RNA, 16 nt, Human herpesvirus 4 (Epstein-Barr virus)
uuugggaacacggaga

SEQ ID NO: 307947 - RNA, 19 nt, Human herpesvirus 4 (Epstein-Barr virus)
uuugggguauucucagaug

SEQ ID NO: 307948 - RNA, 18 nt, Human herpesvirus 4 (Epstein-Barr virus)
uuuguaaucgcagcucua

SEQ ID NO: 307949 - RNA, 20 nt, Human herpesvirus 4 (Epstein-Barr virus)
uuugugauucccagaaagaa

SEQ ID NO: 307950 - RNA, 16 nt, Human herpesvirus 4 (Epstein-Barr virus)
ucauuagcggccugaa

SEQ ID NO: 307951 - RNA, 12 nt, Human herpesvirus 4 (Epstein-Barr virus)
ucauugugcuga

SEQ ID NO: 307952 - RNA, 23 nt, Human herpesvirus 4 (Epstein-Barr virus)
ucauuugaaggacagggggacuc

SEQ ID NO: 307953 - RNA, 18 nt, Human herpesvirus 4 (Epstein-Barr virus)
uccaacauuaaagccucc

SEQ ID NO: 307954 - RNA, 23 nt, Human herpesvirus 4 (Epstein-Barr virus)
uccaacgagggcagacaccaccu

SEQ ID NO: 307955 - RNA, 21 nt, Human herpesvirus 4 (Epstein-Barr virus)
ugaaccuuauggagaugugcg

SEQ ID NO: 307956 - RNA, 21 nt, Human herpesvirus 4 (Epstein-Barr virus)
ugaacgccuacgcagaggcca

SEQ ID NO: 307957 - RNA, 22 nt, Human herpesvirus 4 (Epstein-Barr virus)
ugaacgccuacgcagaggccau

SEQ ID NO: 307958 - RNA, 19 nt, Human herpesvirus 4 (Epstein-Barr virus)
ugaagaagauugaagacaa

SEQ ID NO: 307959 - RNA, 13 nt, Human herpesvirus 4 (Epstein-Barr virus)
ugaagacaagguu

SEQ ID NO: 307960 - RNA, 22 nt, Human herpesvirus 4 (Epstein-Barr virus)
ugaagauugucacagcugcugg

SEQ ID NO: 307961 - RNA, 12 nt, Human herpesvirus 4 (Epstein-Barr virus)
ugaagcuugcug

SEQ ID NO: 307962 - RNA, 22 nt, Human herpesvirus 4 (Epstein-Barr virus)
ugaagguaaacaagcugacaga

SEQ ID NO: 307963 - RNA, 16 nt, Human herpesvirus 4 (Epstein-Barr virus)
ugaagucgguguccag

SEQ ID NO: 307964 - RNA, 22 nt, Human herpesvirus 4 (Epstein-Barr virus)
ugaauuccccugccugcaugcu

SEQ ID NO: 307965 - RNA, 20 nt, Human herpesvirus 4 (Epstein-Barr virus)
ugaauugcuguuuuugccaa

SEQ ID NO: 307966 - RNA, 16 nt, Human herpesvirus 4 (Epstein-Barr virus)
ugacacugaugagucu

SEQ ID NO: 307967 - RNA, 14 nt, Human herpesvirus 4 (Epstein-Barr virus)
ugacauauguacaa

SEQ ID NO: 307968 - RNA, 22 nt, Human herpesvirus 4 (Epstein-Barr virus)
ugacauucacugggacaacugu

SEQ ID NO: 307969 - RNA, 16 nt, Human herpesvirus 4 (Epstein-Barr virus)
ugacauuucucauaau

SEQ ID NO: 307970 - RNA, 22 nt, Human herpesvirus 4 (Epstein-Barr virus)
ugaccacugagggaguguucca

SEQ ID NO: 307971 - RNA, 20 nt, Human herpesvirus 4 (Epstein-Barr virus)
ugaccaguguguacauucca

SEQ ID NO: 307972 - RNA, 19 nt, Human herpesvirus 4 (Epstein-Barr virus)
ugaccaucacauggggcau

SEQ ID NO: 307973 - RNA, 11 nt, Human herpesvirus 4 (Epstein-Barr virus)
ugaccaugaug

SEQ ID NO: 307974 - RNA, 21 nt, Human herpesvirus 4 (Epstein-Barr virus)
ugacccauaccaggugccuuu

SEQ ID NO: 307975 - RNA, 15 nt, Human herpesvirus 4 (Epstein-Barr virus)
ugaccugacuggcag

SEQ ID NO: 307976 - RNA, 13 nt, Human herpesvirus 4 (Epstein-Barr virus)
ugaccuugaugua

SEQ ID NO: 307977 - RNA, 20 nt, Human herpesvirus 4 (Epstein-Barr virus)
ugaccuugauguacuuuccu

SEQ ID NO: 307978 - RNA, 12 nt, Human herpesvirus 4 (Epstein-Barr virus)
ugacgaagaccc

SEQ ID NO: 307979 - RNA, 19 nt, Human herpesvirus 4 (Epstein-Barr virus)
ugacgaagacccaucugag

SEQ ID NO: 307980 - RNA, 13 nt, Human herpesvirus 4 (Epstein-Barr virus)
ugacggugguggg

SEQ ID NO: 307981 - RNA, 19 nt, Human herpesvirus 4 (Epstein-Barr virus)
ugacuaagggugaggcuau

SEQ ID NO: 307982 - RNA, 14 nt, Human herpesvirus 4 (Epstein-Barr virus)
ugacuacaccauca

SEQ ID NO: 307983 - RNA, 17 nt, Human herpesvirus 4 (Epstein-Barr virus)
ugacuggcagaaaggcu

SEQ ID NO: 307984 - RNA, 21 nt, Human herpesvirus 4 (Epstein-Barr virus)
ugagaagcagcucuucuacua

SEQ ID NO: 307985 - RNA, 18 nt, Human herpesvirus 4 (Epstein-Barr virus)
ugagaaucugggcuggga

SEQ ID NO: 307986 - RNA, 12 nt, Human herpesvirus 4 (Epstein-Barr virus)
ugagaaugccaa

SEQ ID NO: 307987 - RNA, 17 nt, Human herpesvirus 4 (Epstein-Barr virus)
ugagacagaggugcuca

SEQ ID NO: 307988 - RNA, 20 nt, Human herpesvirus 4 (Epstein-Barr virus)
ugagcaagauccuucuggca

SEQ ID NO: 307989 - RNA, 22 nt, Human herpesvirus 4 (Epstein-Barr virus)
ugagcccauucucguccaucuc

SEQ ID NO: 307990 - RNA, 23 nt, Human herpesvirus 4 (Epstein-Barr virus)
ugagcccauucucguccaucucg

SEQ ID NO: 307991 - RNA, 18 nt, Human herpesvirus 4 (Epstein-Barr virus)
ugagccgcuuacagcucg

SEQ ID NO: 307992 - RNA, 18 nt, Human herpesvirus 4 (Epstein-Barr virus)
ugaggacccaccuuuuaa

SEQ ID NO: 307993 - RNA, 22 nt, Human herpesvirus 4 (Epstein-Barr virus)
ugaggcaaaagacuauguucuc

SEQ ID NO: 307994 - RNA, 13 nt, Human herpesvirus 4 (Epstein-Barr virus)
ugaggccacgcuu

SEQ ID NO: 307995 - RNA, 20 nt, Human herpesvirus 4 (Epstein-Barr virus)
ugagggaguguuccacagua

SEQ ID NO: 307996 - RNA, 23 nt, Human herpesvirus 4 (Epstein-Barr virus)
ugagggggcggucaccgaugaga

SEQ ID NO: 307997 - RNA, 13 nt, Human herpesvirus 4 (Epstein-Barr virus)
ugaggugccacag

SEQ ID NO: 307998 - RNA, 19 nt, Human herpesvirus 4 (Epstein-Barr virus)
ugaggugggcugacacaga

SEQ ID NO: 307999 - RNA, 12 nt, Human herpesvirus 4 (Epstein-Barr virus)
ugaguccaaaca

SEQ ID NO: 308000 - RNA, 13 nt, Human herpesvirus 4 (Epstein-Barr virus)
ugagucugacuac

SEQ ID NO: 308001 - RNA, 18 nt, Human herpesvirus 4 (Epstein-Barr virus)
ugaguucuacaaugccag

SEQ ID NO: 308002 - RNA, 12 nt, Human herpesvirus 4 (Epstein-Barr virus)
ugauaacugaca

SEQ ID NO: 308003 - RNA, 16 nt, Human herpesvirus 4 (Epstein-Barr virus)
ugauaagucaugacaa

SEQ ID NO: 308004 - RNA, 21 nt, Human herpesvirus 4 (Epstein-Barr virus)
ugauaagucaugacaauuuua

SEQ ID NO: 308005 - RNA, 16 nt, Human herpesvirus 4 (Epstein-Barr virus)
ugauacucaccaagau

SEQ ID NO: 308006 - RNA, 22 nt, Human herpesvirus 4 (Epstein-Barr virus)
ugauagcagaagacuccugccu

SEQ ID NO: 308007 - RNA, 19 nt, Human herpesvirus 4 (Epstein-Barr virus)
ugaucauggaaaccacuca

SEQ ID NO: 308008 - RNA, 14 nt, Human herpesvirus 4 (Epstein-Barr virus)
ugauccuguacaaa

SEQ ID NO: 308009 - RNA, 19 nt, Human herpesvirus 4 (Epstein-Barr virus)
ugaucuuugacugacacau

SEQ ID NO: 308010 - RNA, 16 nt, Human herpesvirus 4 (Epstein-Barr virus)
ugaugagucugacuac

SEQ ID NO: 308011 - RNA, 14 nt, Human herpesvirus 4 (Epstein-Barr virus)
ugaugguaucagac

SEQ ID NO: 308012 - RNA, 18 nt, Human herpesvirus 4 (Epstein-Barr virus)
ugauguagcuauacuuuc

SEQ ID NO: 308013 - RNA, 17 nt, Human herpesvirus 4 (Epstein-Barr virus)
ugaugugacuugugaug

SEQ ID NO: 308014 - RNA, 20 nt, Human herpesvirus 4 (Epstein-Barr virus)
ugaugugacuugugaugcaa

SEQ ID NO: 308015 - RNA, 23 nt, Human herpesvirus 4 (Epstein-Barr virus)
ugauguguguuuuuacccaucac

SEQ ID NO: 308016 - RNA, 20 nt, Human herpesvirus 4 (Epstein-Barr virus)
ugcaacaauagaaguggaaa

SEQ ID NO: 308017 - RNA, 15 nt, Human herpesvirus 4 (Epstein-Barr virus)
ugcaagcagcaccug

SEQ ID NO: 308018 - RNA, 14 nt, Human herpesvirus 4 (Epstein-Barr virus)
ugcacacauuucag

SEQ ID NO: 308019 - RNA, 20 nt, Human herpesvirus 4 (Epstein-Barr virus)
ugcacccuggccgugcugga

SEQ ID NO: 308020 - RNA, 15 nt, Human herpesvirus 4 (Epstein-Barr virus)
ugcaccuugacugua

SEQ ID NO: 308021 - RNA, 19 nt, Human herpesvirus 4 (Epstein-Barr virus)
ugcaccuugacuguaauca

SEQ ID NO: 308022 - RNA, 22 nt, Human herpesvirus 4 (Epstein-Barr virus)
ugcaccuugccggccaccuuug

SEQ ID NO: 308023 - RNA, 14 nt, Human herpesvirus 4 (Epstein-Barr virus)
ugcagcuggcccac

SEQ ID NO: 308024 - RNA, 19 nt, Human herpesvirus 4 (Epstein-Barr virus)
ugcaggacacgugacaugu

SEQ ID NO: 308025 - RNA, 20 nt, Human herpesvirus 4 (Epstein-Barr virus)
ugcaggaccuagaauguggu

SEQ ID NO: 308026 - RNA, 24 nt, Human herpesvirus 4 (Epstein-Barr virus)
ugcagggugcacagacuagcgagg

SEQ ID NO: 308027 - RNA, 17 nt, Human herpesvirus 4 (Epstein-Barr virus)
ugcauccaacgcuucca

SEQ ID NO: 308028 - RNA, 11 nt, Human herpesvirus 4 (Epstein-Barr virus)
ugcauuucacc

SEQ ID NO: 308029 - RNA, 19 nt, Human herpesvirus 4 (Epstein-Barr virus)
ugcauuuccugcccuccca

SEQ ID NO: 308030 - RNA, 12 nt, Human herpesvirus 4 (Epstein-Barr virus)
ugccaaccugcu

SEQ ID NO: 308031 - RNA, 20 nt, Human herpesvirus 4 (Epstein-Barr virus)
ugccaagagccccuccauag

SEQ ID NO: 308032 - RNA, 14 nt, Human herpesvirus 4 (Epstein-Barr virus)
ugccacaaggccag

SEQ ID NO: 308033 - RNA, 13 nt, Human herpesvirus 4 (Epstein-Barr virus)
ugccacagagcau

SEQ ID NO: 308034 - RNA, 15 nt, Human herpesvirus 4 (Epstein-Barr virus)
ugccagacucucuuc

SEQ ID NO: 308035 - RNA, 12 nt, Human herpesvirus 4 (Epstein-Barr virus)
ugccagccucag

SEQ ID NO: 308036 - RNA, 20 nt, Human herpesvirus 4 (Epstein-Barr virus)
ugccagcgccuugaucuucu

SEQ ID NO: 308037 - RNA, 15 nt, Human herpesvirus 4 (Epstein-Barr virus)
ugccaucgggacaga

SEQ ID NO: 308038 - RNA, 12 nt, Human herpesvirus 4 (Epstein-Barr virus)
ugccauggugcc

SEQ ID NO: 308039 - RNA, 14 nt, Human herpesvirus 4 (Epstein-Barr virus)
ugccauggugccaa

SEQ ID NO: 308040 - RNA, 21 nt, Human herpesvirus 4 (Epstein-Barr virus)
ugcccucuccagcaaccaaug

SEQ ID NO: 308041 - RNA, 17 nt, Human herpesvirus 4 (Epstein-Barr virus)
ugcccuggaggccucag

SEQ ID NO: 308042 - RNA, 17 nt, Human herpesvirus 4 (Epstein-Barr virus)
ugccgccgccuccgccg

SEQ ID NO: 308043 - RNA, 22 nt, Human herpesvirus 4 (Epstein-Barr virus)
ugccgcggugcuguugggccuu

SEQ ID NO: 308044 - RNA, 19 nt, Human herpesvirus 4 (Epstein-Barr virus)
ugccgcuccuuugcggcau

SEQ ID NO: 308045 - RNA, 20 nt, Human herpesvirus 4 (Epstein-Barr virus)
ugccuaaucaccguuccuca

SEQ ID NO: 308046 - RNA, 16 nt, Human herpesvirus 4 (Epstein-Barr virus)
ugccucucuuaugccu

SEQ ID NO: 308047 - RNA, 17 nt, Human herpesvirus 4 (Epstein-Barr virus)
ugccucugggugcugag

SEQ ID NO: 308048 - RNA, 16 nt, Human herpesvirus 4 (Epstein-Barr virus)
ugccugagacagaggu

SEQ ID NO: 308049 - RNA, 21 nt, Human herpesvirus 4 (Epstein-Barr virus)
ugccuggccggcuaucugcuu

SEQ ID NO: 308050 - RNA, 13 nt, Human herpesvirus 4 (Epstein-Barr virus)
ugccuggggaaaa

SEQ ID NO: 308051 - RNA, 18 nt, Human herpesvirus 4 (Epstein-Barr virus)
ugccuguggccccggcug

SEQ ID NO: 308052 - RNA, 17 nt, Human herpesvirus 4 (Epstein-Barr virus)
ugccuuuuguacaagcu

SEQ ID NO: 308053 - RNA, 21 nt, Human herpesvirus 4 (Epstein-Barr virus)
ugccuuuuguacaagcuuuug

SEQ ID NO: 308054 - RNA, 12 nt, Human herpesvirus 4 (Epstein-Barr virus)
ugcgaaacuugg

SEQ ID NO: 308055 - RNA, 23 nt, Human herpesvirus 4 (Epstein-Barr virus)
ugcgaaacuugggggcaggcuac

SEQ ID NO: 308056 - RNA, 16 nt, Human herpesvirus 4 (Epstein-Barr virus)
ugcgguuauaacugcc

SEQ ID NO: 308057 - RNA, 19 nt, Human herpesvirus 4 (Epstein-Barr virus)
ugcgguuauaacugccaga

SEQ ID NO: 308058 - RNA, 15 nt, Human herpesvirus 4 (Epstein-Barr virus)
ugcguaaucauuacc

SEQ ID NO: 308059 - RNA, 18 nt, Human herpesvirus 4 (Epstein-Barr virus)
ugcguaaucauuaccucu

SEQ ID NO: 308060 - RNA, 16 nt, Human herpesvirus 4 (Epstein-Barr virus)
ugcuaagccaggauaa

SEQ ID NO: 308061 - RNA, 15 nt, Human herpesvirus 4 (Epstein-Barr virus)
ugcuagcgucacuga

SEQ ID NO: 308062 - RNA, 17 nt, Human herpesvirus 4 (Epstein-Barr virus)
ugcucaaggcagucucc

SEQ ID NO: 308063 - RNA, 19 nt, Human herpesvirus 4 (Epstein-Barr virus)
ugcucagguuucugggcau

SEQ ID NO: 308064 - RNA, 22 nt, Human herpesvirus 4 (Epstein-Barr virus)
ugcuccaccagcuucucaaagg

SEQ ID NO: 308065 - RNA, 20 nt, Human herpesvirus 4 (Epstein-Barr virus)
ugcucucagcacuuugccag

SEQ ID NO: 308066 - RNA, 14 nt, Human herpesvirus 4 (Epstein-Barr virus)
ugcucucguugcca

SEQ ID NO: 308067 - RNA, 18 nt, Human herpesvirus 4 (Epstein-Barr virus)
ugcucucguugccaaaac

SEQ ID NO: 308068 - RNA, 13 nt, Human herpesvirus 4 (Epstein-Barr virus)
ugcucucuaucua

SEQ ID NO: 308069 - RNA, 21 nt, Human herpesvirus 4 (Epstein-Barr virus)
ugcucucucuggagaucuucu

SEQ ID NO: 308070 - RNA, 14 nt, Human herpesvirus 4 (Epstein-Barr virus)
ugcugaauauugcc

SEQ ID NO: 308071 - RNA, 15 nt, Human herpesvirus 4 (Epstein-Barr virus)
ugcugacauauguac

SEQ ID NO: 308072 - RNA, 12 nt, Human herpesvirus 4 (Epstein-Barr virus)
ugcuguacaugg

SEQ ID NO: 308073 - RNA, 15 nt, Human herpesvirus 4 (Epstein-Barr virus)
ugcuucgcauuacac

SEQ ID NO: 308074 - RNA, 17 nt, Human herpesvirus 4 (Epstein-Barr virus)
ugcuugggcaugcugua

SEQ ID NO: 308075 - RNA, 14 nt, Human herpesvirus 4 (Epstein-Barr virus)
ugcuugugaucaug

SEQ ID NO: 308076 - RNA, 17 nt, Human herpesvirus 4 (Epstein-Barr virus)
ugcuuugucuuugccaa

SEQ ID NO: 308077 - RNA, 20 nt, Human herpesvirus 4 (Epstein-Barr virus)
uggaaagggcaugugguggc

SEQ ID NO: 308078 - RNA, 20 nt, Human herpesvirus 4 (Epstein-Barr virus)
uggaacucgaagcggucuca

SEQ ID NO: 308079 - RNA, 15 nt, Human herpesvirus 4 (Epstein-Barr virus)
uggacacacauggca

SEQ ID NO: 308080 - RNA, 14 nt, Human herpesvirus 4 (Epstein-Barr virus)
uggacacaggacua

SEQ ID NO: 308081 - RNA, 23 nt, Human herpesvirus 4 (Epstein-Barr virus)
uggacagguacuaacacgcaaua

SEQ ID NO: 308082 - RNA, 12 nt, Human herpesvirus 4 (Epstein-Barr virus)
uggacaucuagu

SEQ ID NO: 308083 - RNA, 16 nt, Human herpesvirus 4 (Epstein-Barr virus)
uggaccucaaagaaga

SEQ ID NO: 308084 - RNA, 17 nt, Human herpesvirus 4 (Epstein-Barr virus)
uggacgaggacggggaa

SEQ ID NO: 308085 - RNA, 15 nt, Human herpesvirus 4 (Epstein-Barr virus)
uggacgugaaccucc

SEQ ID NO: 308086 - RNA, 21 nt, Human herpesvirus 4 (Epstein-Barr virus)
uggacucuauugguugaucuc

SEQ ID NO: 308087 - RNA, 13 nt, Human herpesvirus 4 (Epstein-Barr virus)
uggacugugguau

SEQ ID NO: 308088 - RNA, 19 nt, Human herpesvirus 4 (Epstein-Barr virus)
uggagaaaguaaccacaua

SEQ ID NO: 308089 - RNA, 18 nt, Human herpesvirus 4 (Epstein-Barr virus)
uggagacuacuaagcuaa

SEQ ID NO: 308090 - RNA, 13 nt, Human herpesvirus 4 (Epstein-Barr virus)
uggagaggcaaac

SEQ ID NO: 308091 - RNA, 15 nt, Human herpesvirus 4 (Epstein-Barr virus)
uggagcuguaacugu

SEQ ID NO: 308092 - RNA, 18 nt, Human herpesvirus 4 (Epstein-Barr virus)
uggaugcaggaccuagaa

SEQ ID NO: 308093 - RNA, 15 nt, Human herpesvirus 4 (Epstein-Barr virus)
uggauguacagcuac

SEQ ID NO: 308094 - RNA, 22 nt, Human herpesvirus 4 (Epstein-Barr virus)
uggauucccgacggcaugccua

SEQ ID NO: 308095 - RNA, 23 nt, Human herpesvirus 4 (Epstein-Barr virus)
uggcaacuccucuuacaccagag

SEQ ID NO: 308096 - RNA, 19 nt, Human herpesvirus 4 (Epstein-Barr virus)
uggcacgacuguuccuaua

SEQ ID NO: 308097 - RNA, 13 nt, Human herpesvirus 4 (Epstein-Barr virus)
uggcacucauggu

SEQ ID NO: 308098 - RNA, 21 nt, Human herpesvirus 4 (Epstein-Barr virus)
uggcacucaugguacggugau

SEQ ID NO: 308099 - RNA, 18 nt, Human herpesvirus 4 (Epstein-Barr virus)
uggcacucuuaccuuccu

SEQ ID NO: 308100 - RNA, 21 nt, Human herpesvirus 4 (Epstein-Barr virus)
uggcacugcuagcgucacuga

SEQ ID NO: 308101 - RNA, 19 nt, Human herpesvirus 4 (Epstein-Barr virus)
uggcagaaucaccagagcc

SEQ ID NO: 308102 - RNA, 21 nt, Human herpesvirus 4 (Epstein-Barr virus)
uggcagcagacaaggacaggu

SEQ ID NO: 308103 - RNA, 19 nt, Human herpesvirus 4 (Epstein-Barr virus)
uggcauuggacgucccuuu

SEQ ID NO: 308104 - RNA, 19 nt, Human herpesvirus 4 (Epstein-Barr virus)
uggccaccuucuccaucuc

SEQ ID NO: 308105 - RNA, 20 nt, Human herpesvirus 4 (Epstein-Barr virus)
uggccaccuucuccaucucc

SEQ ID NO: 308106 - RNA, 14 nt, Human herpesvirus 4 (Epstein-Barr virus)
uggccagcuuugag

SEQ ID NO: 308107 - RNA, 18 nt, Human herpesvirus 4 (Epstein-Barr virus)
uggccaucugucuuguca

SEQ ID NO: 308108 - RNA, 16 nt, Human herpesvirus 4 (Epstein-Barr virus)
uggccaugaaucugac

SEQ ID NO: 308109 - RNA, 15 nt, Human herpesvirus 4 (Epstein-Barr virus)
uggcccaccuaaaga

SEQ ID NO: 308110 - RNA, 16 nt, Human herpesvirus 4 (Epstein-Barr virus)
uggccccggcuggcca

SEQ ID NO: 308111 - RNA, 20 nt, Human herpesvirus 4 (Epstein-Barr virus)
uggccggcagccuggcucaa

SEQ ID NO: 308112 - RNA, 16 nt, Human herpesvirus 4 (Epstein-Barr virus)
uggccgugcuggauga

SEQ ID NO: 308113 - RNA, 15 nt, Human herpesvirus 4 (Epstein-Barr virus)
uggccguguucacug

SEQ ID NO: 308114 - RNA, 21 nt, Human herpesvirus 4 (Epstein-Barr virus)
uggccucgucaggagggcaga

SEQ ID NO: 308115 - RNA, 21 nt, Human herpesvirus 4 (Epstein-Barr virus)
uggccugcguaaucauuaccu

SEQ ID NO: 308116 - RNA, 14 nt, Human herpesvirus 4 (Epstein-Barr virus)
uggccuucuuccua

SEQ ID NO: 308117 - RNA, 19 nt, Human herpesvirus 4 (Epstein-Barr virus)
uggccuucuuccuagccuu

SEQ ID NO: 308118 - RNA, 18 nt, Human herpesvirus 4 (Epstein-Barr virus)
uggccuuggggguggugg

SEQ ID NO: 308119 - RNA, 12 nt, Human herpesvirus 4 (Epstein-Barr virus)
uggcgcggguga

SEQ ID NO: 308120 - RNA, 13 nt, Human herpesvirus 4 (Epstein-Barr virus)
uggcgggucaucc

SEQ ID NO: 308121 - RNA, 19 nt, Human herpesvirus 4 (Epstein-Barr virus)
uggcgucucaggcuaugaa

SEQ ID NO: 308122 - RNA, 15 nt, Human herpesvirus 4 (Epstein-Barr virus)
uggcgugguggcauu

SEQ ID NO: 308123 - RNA, 22 nt, Human herpesvirus 4 (Epstein-Barr virus)
uggcucacgaagcgagacagua

SEQ ID NO: 308124 - RNA, 22 nt, Human herpesvirus 4 (Epstein-Barr virus)
uggcucgccuggagucugagaa

SEQ ID NO: 308125 - RNA, 15 nt, Human herpesvirus 4 (Epstein-Barr virus)
uggcuugggcugugg

SEQ ID NO: 308126 - RNA, 22 nt, Human herpesvirus 4 (Epstein-Barr virus)
ugggaccggggccuuggcauca

SEQ ID NO: 308127 - RNA, 20 nt, Human herpesvirus 4 (Epstein-Barr virus)
ugggaugaacccuggggcaa

SEQ ID NO: 308128 - RNA, 21 nt, Human herpesvirus 4 (Epstein-Barr virus)
ugggcaaaacucacaggacau

SEQ ID NO: 308129 - RNA, 21 nt, Human herpesvirus 4 (Epstein-Barr virus)
ugggcacacuuaacuugacua

SEQ ID NO: 308130 - RNA, 20 nt, Human herpesvirus 4 (Epstein-Barr virus)
ugggcauacccauguuguca

SEQ ID NO: 308131 - RNA, 21 nt, Human herpesvirus 4 (Epstein-Barr virus)
ugggcgcgugcacauauaccg

SEQ ID NO: 308132 - RNA, 19 nt, Human herpesvirus 4 (Epstein-Barr virus)
ugggcuaacgggaggaaau

SEQ ID NO: 308133 - RNA, 16 nt, Human herpesvirus 4 (Epstein-Barr virus)
ugggcuucgggggccu

SEQ ID NO: 308134 - RNA, 23 nt, Human herpesvirus 4 (Epstein-Barr virus)
uggggcauuaggcgacucugcau

SEQ ID NO: 308135 - RNA, 19 nt, Human herpesvirus 4 (Epstein-Barr virus)
uggggccaccggggaggcc

SEQ ID NO: 308136 - RNA, 19 nt, Human herpesvirus 4 (Epstein-Barr virus)
ugggggccuggacuguggu

SEQ ID NO: 308137 - RNA, 13 nt, Human herpesvirus 4 (Epstein-Barr virus)
ugggggugggugc

SEQ ID NO: 308138 - RNA, 19 nt, Human herpesvirus 4 (Epstein-Barr virus)
ugggguauucucagaugca

SEQ ID NO: 308139 - RNA, 18 nt, Human herpesvirus 4 (Epstein-Barr virus)
ugggucauuggcaaaaag

SEQ ID NO: 308140 - RNA, 13 nt, Human herpesvirus 4 (Epstein-Barr virus)
ugggugaccacug

SEQ ID NO: 308141 - RNA, 20 nt, Human herpesvirus 4 (Epstein-Barr virus)
ugggugcaagaauuggggcu

SEQ ID NO: 308142 - RNA, 14 nt, Human herpesvirus 4 (Epstein-Barr virus)
ugggugcauuucac

SEQ ID NO: 308143 - RNA, 18 nt, Human herpesvirus 4 (Epstein-Barr virus)
ugggugucagaccugaag

SEQ ID NO: 308144 - RNA, 14 nt, Human herpesvirus 4 (Epstein-Barr virus)
uggguuauugacau

SEQ ID NO: 308145 - RNA, 22 nt, Human herpesvirus 4 (Epstein-Barr virus)
ugguaaguuuucccuuccuuua

SEQ ID NO: 308146 - RNA, 19 nt, Human herpesvirus 4 (Epstein-Barr virus)
ugguacggugauaacugac

SEQ ID NO: 308147 - RNA, 15 nt, Human herpesvirus 4 (Epstein-Barr virus)
uggucauguuucccu

SEQ ID NO: 308148 - RNA, 18 nt, Human herpesvirus 4 (Epstein-Barr virus)
uggucauguuucccucca

SEQ ID NO: 308149 - RNA, 19 nt, Human herpesvirus 4 (Epstein-Barr virus)
ugguccaggguccaggaga

SEQ ID NO: 308150 - RNA, 21 nt, Human herpesvirus 4 (Epstein-Barr virus)
uggucuccuuguugaccucua

SEQ ID NO: 308151 - RNA, 18 nt, Human herpesvirus 4 (Epstein-Barr virus)
uggugccaccaucuggca

SEQ ID NO: 308152 - RNA, 15 nt, Human herpesvirus 4 (Epstein-Barr virus)
uggugccuugcucuc

SEQ ID NO: 308153 - RNA, 17 nt, Human herpesvirus 4 (Epstein-Barr virus)
uggugcgguuauaacug

SEQ ID NO: 308154 - RNA, 20 nt, Human herpesvirus 4 (Epstein-Barr virus)
uggugcgguuauaacugcca

SEQ ID NO: 308155 - RNA, 15 nt, Human herpesvirus 4 (Epstein-Barr virus)
ugguggaggaggacc

SEQ ID NO: 308156 - RNA, 12 nt, Human herpesvirus 4 (Epstein-Barr virus)
ugguggauugcu

SEQ ID NO: 308157 - RNA, 19 nt, Human herpesvirus 4 (Epstein-Barr virus)
ugguggccugggaggugcu

SEQ ID NO: 308158 - RNA, 13 nt, Human herpesvirus 4 (Epstein-Barr virus)
uggugggaggccc

SEQ ID NO: 308159 - RNA, 14 nt, Human herpesvirus 4 (Epstein-Barr virus)
uggugggggcuaug

SEQ ID NO: 308160 - RNA, 14 nt, Human herpesvirus 4 (Epstein-Barr virus)
ugguggguguccuc

SEQ ID NO: 308161 - RNA, 17 nt, Human herpesvirus 4 (Epstein-Barr virus)
ugguggguguccucuac

SEQ ID NO: 308162 - RNA, 16 nt, Human herpesvirus 4 (Epstein-Barr virus)
ugguguccggagaccc

SEQ ID NO: 308163 - RNA, 20 nt, Human herpesvirus 4 (Epstein-Barr virus)
ugguguccucccggggucca

SEQ ID NO: 308164 - RNA, 12 nt, Human herpesvirus 4 (Epstein-Barr virus)
uguaaaacuugg

SEQ ID NO: 308165 - RNA, 23 nt, Human herpesvirus 4 (Epstein-Barr virus)
uguaaaacuuggaggcugcuaag

SEQ ID NO: 308166 - RNA, 16 nt, Human herpesvirus 4 (Epstein-Barr virus)
uguaaaauuuacaccu

SEQ ID NO: 308167 - RNA, 18 nt, Human herpesvirus 4 (Epstein-Barr virus)
uguaaaauuuacaccuga

SEQ ID NO: 308168 - RNA, 12 nt, Human herpesvirus 4 (Epstein-Barr virus)
uguaacauuuaa

SEQ ID NO: 308169 - RNA, 22 nt, Human herpesvirus 4 (Epstein-Barr virus)
uguaaucgcagcucuaacuugg

SEQ ID NO: 308170 - RNA, 21 nt, Human herpesvirus 4 (Epstein-Barr virus)
uguacaaacccaacaauguga

SEQ ID NO: 308171 - RNA, 15 nt, Human herpesvirus 4 (Epstein-Barr virus)
uguacaauggggcca

SEQ ID NO: 308172 - RNA, 15 nt, Human herpesvirus 4 (Epstein-Barr virus)
uguacgggaacauca

SEQ ID NO: 308173 - RNA, 15 nt, Human herpesvirus 4 (Epstein-Barr virus)
uguacuaaauuugcu

SEQ ID NO: 308174 - RNA, 19 nt, Human herpesvirus 4 (Epstein-Barr virus)
uguacuaaauuugcugaca

SEQ ID NO: 308175 - RNA, 17 nt, Human herpesvirus 4 (Epstein-Barr virus)
uguagguguagguaccg

SEQ ID NO: 308176 - RNA, 21 nt, Human herpesvirus 4 (Epstein-Barr virus)
uguauaccgaugagauugcca

SEQ ID NO: 308177 - RNA, 13 nt, Human herpesvirus 4 (Epstein-Barr virus)
uguaucccaaaua

SEQ ID NO: 308178 - RNA, 20 nt, Human herpesvirus 4 (Epstein-Barr virus)
uguauuaccauggacaacga

SEQ ID NO: 308179 - RNA, 12 nt, Human herpesvirus 4 (Epstein-Barr virus)
uguauugcucuc

SEQ ID NO: 308180 - RNA, 23 nt, Human herpesvirus 4 (Epstein-Barr virus)
ugucaccacuaagguuacugcac

SEQ ID NO: 308181 - RNA, 17 nt, Human herpesvirus 4 (Epstein-Barr virus)
ugucacugagaaucucc

SEQ ID NO: 308182 - RNA, 17 nt, Human herpesvirus 4 (Epstein-Barr virus)
uguccagcagggccuug

SEQ ID NO: 308183 - RNA, 15 nt, Human herpesvirus 4 (Epstein-Barr virus)
uguccucaccaagga

SEQ ID NO: 308184 - RNA, 21 nt, Human herpesvirus 4 (Epstein-Barr virus)
uguccuggccgggcgccugcu

SEQ ID NO: 308185 - RNA, 18 nt, Human herpesvirus 4 (Epstein-Barr virus)
ugucuacaucccauaccu

SEQ ID NO: 308186 - RNA, 22 nt, Human herpesvirus 4 (Epstein-Barr virus)
ugucucaagcuacucaaugaga

SEQ ID NO: 308187 - RNA, 12 nt, Human herpesvirus 4 (Epstein-Barr virus)
ugucucagaggc

SEQ ID NO: 308188 - RNA, 17 nt, Human herpesvirus 4 (Epstein-Barr virus)
ugucucuaacaguucac

SEQ ID NO: 308189 - RNA, 22 nt, Human herpesvirus 4 (Epstein-Barr virus)
ugucucucuuugagggggccaa

SEQ ID NO: 308190 - RNA, 22 nt, Human herpesvirus 4 (Epstein-Barr virus)
ugucuguaaacuauggaggccc

SEQ ID NO: 308191 - RNA, 14 nt, Human herpesvirus 4 (Epstein-Barr virus)
ugucuguaaucucu

SEQ ID NO: 308192 - RNA, 15 nt, Human herpesvirus 4 (Epstein-Barr virus)
ugucuguaaucucua

SEQ ID NO: 308193 - RNA, 16 nt, Human herpesvirus 4 (Epstein-Barr virus)
ugucuguaaucucuaa

SEQ ID NO: 308194 - RNA, 14 nt, Human herpesvirus 4 (Epstein-Barr virus)
ugugaacuuuaaca

SEQ ID NO: 308195 - RNA, 22 nt, Human herpesvirus 4 (Epstein-Barr virus)
ugugaacuuuaacauugaugaa

SEQ ID NO: 308196 - RNA, 18 nt, Human herpesvirus 4 (Epstein-Barr virus)
ugugaauauggcugcgga

SEQ ID NO: 308197 - RNA, 15 nt, Human herpesvirus 4 (Epstein-Barr virus)
ugugaccgucuacau

SEQ ID NO: 308198 - RNA, 13 nt, Human herpesvirus 4 (Epstein-Barr virus)
ugugagacaagcc

SEQ ID NO: 308199 - RNA, 19 nt, Human herpesvirus 4 (Epstein-Barr virus)
ugugccucgucuaccucug

SEQ ID NO: 308200 - RNA, 18 nt, Human herpesvirus 4 (Epstein-Barr virus)
uguggagccguggccuuu

SEQ ID NO: 308201 - RNA, 19 nt, Human herpesvirus 4 (Epstein-Barr virus)
uguggccccggcuggccau

SEQ ID NO: 308202 - RNA, 15 nt, Human herpesvirus 4 (Epstein-Barr virus)
ugugggacugggagg

SEQ ID NO: 308203 - RNA, 23 nt, Human herpesvirus 4 (Epstein-Barr virus)
uguguauugcucucguugccaaa

SEQ ID NO: 308204 - RNA, 12 nt, Human herpesvirus 4 (Epstein-Barr virus)
uguguucuugcc

SEQ ID NO: 308205 - RNA, 20 nt, Human herpesvirus 4 (Epstein-Barr virus)
uguguuuuuacccaucacac

SEQ ID NO: 308206 - RNA, 16 nt, Human herpesvirus 4 (Epstein-Barr virus)
uguucccuaagcagcu

SEQ ID NO: 308207 - RNA, 17 nt, Human herpesvirus 4 (Epstein-Barr virus)
uguuccuauaugcucuc

SEQ ID NO: 308208 - RNA, 18 nt, Human herpesvirus 4 (Epstein-Barr virus)
uguuccuucucaugcucc

SEQ ID NO: 308209 - RNA, 18 nt, Human herpesvirus 4 (Epstein-Barr virus)
uguucgcacuccuaugca

SEQ ID NO: 308210 - RNA, 16 nt, Human herpesvirus 4 (Epstein-Barr virus)
uguucuacuccuggca

SEQ ID NO: 308211 - RNA, 13 nt, Human herpesvirus 4 (Epstein-Barr virus)
uguuuacaucugc

SEQ ID NO: 308212 - RNA, 13 nt, Human herpesvirus 4 (Epstein-Barr virus)
uguuucuggugag

SEQ ID NO: 308213 - RNA, 14 nt, Human herpesvirus 4 (Epstein-Barr virus)
uguuuguacuucuu

SEQ ID NO: 308214 - RNA, 19 nt, Human herpesvirus 4 (Epstein-Barr virus)
uguuuguccagcagggccu

SEQ ID NO: 308215 - RNA, 20 nt, Human herpesvirus 4 (Epstein-Barr virus)
uuaaacugaaucuccaccug

SEQ ID NO: 308216 - RNA, 15 nt, Human herpesvirus 4 (Epstein-Barr virus)
gguagugucucucuc

SEQ ID NO: 308217 - RNA, 22 nt, Human herpesvirus 4 (Epstein-Barr virus)
gguauucucagaugcagugggu

SEQ ID NO: 308218 - RNA, 19 nt, Human herpesvirus 4 (Epstein-Barr virus)
ggucacagaccagccccuc

SEQ ID NO: 308219 - RNA, 13 nt, Human herpesvirus 4 (Epstein-Barr virus)
ggucaccccagau

SEQ ID NO: 308220 - RNA, 17 nt, Human herpesvirus 4 (Epstein-Barr virus)
ggucaccccagaugccg

SEQ ID NO: 308221 - RNA, 19 nt, Human herpesvirus 4 (Epstein-Barr virus)
ggucagauuuugcaauaua

SEQ ID NO: 308222 - RNA, 22 nt, Human herpesvirus 4 (Epstein-Barr virus)
ggucaggucgcggaccaggguc

SEQ ID NO: 308223 - RNA, 16 nt, Human herpesvirus 4 (Epstein-Barr virus)
gguccaagguugugcu

SEQ ID NO: 308224 - RNA, 18 nt, Human herpesvirus 4 (Epstein-Barr virus)
gguccaagguugugcugu

SEQ ID NO: 308225 - RNA, 16 nt, Human herpesvirus 4 (Epstein-Barr virus)
uaaccaugccaucucu

SEQ ID NO: 308226 - RNA, 17 nt, Human herpesvirus 4 (Epstein-Barr virus)
uaaccccuaccucggca

SEQ ID NO: 308227 - RNA, 16 nt, Human herpesvirus 4 (Epstein-Barr virus)
uaaccucaaccacaaa

SEQ ID NO: 308228 - RNA, 15 nt, Human herpesvirus 4 (Epstein-Barr virus)
uaaccuggagucugc

SEQ ID NO: 308229 - RNA, 13 nt, Human herpesvirus 4 (Epstein-Barr virus)
uaacggguggaag

SEQ ID NO: 308230 - RNA, 14 nt, Human herpesvirus 4 (Epstein-Barr virus)
uaacucacuaaaca

SEQ ID NO: 308231 - RNA, 14 nt, Human herpesvirus 4 (Epstein-Barr virus)
uaacuguacauacu

SEQ ID NO: 308232 - RNA, 19 nt, Human herpesvirus 4 (Epstein-Barr virus)
uaacugugucccacuccac

SEQ ID NO: 308233 - RNA, 22 nt, Human herpesvirus 4 (Epstein-Barr virus)
uaagaaugggagcaaccagcug

SEQ ID NO: 308234 - RNA, 17 nt, Human herpesvirus 4 (Epstein-Barr virus)
uaagagucccuccucac

SEQ ID NO: 308235 - RNA, 21 nt, Human herpesvirus 4 (Epstein-Barr virus)
uaagaugcauacgcugaguga

SEQ ID NO: 308236 - RNA, 13 nt, Human herpesvirus 4 (Epstein-Barr virus)
uaagcagcacuga

SEQ ID NO: 308237 - RNA, 18 nt, Human herpesvirus 4 (Epstein-Barr virus)
uaaggaaugaacacucau

SEQ ID NO: 308238 - RNA, 18 nt, Human herpesvirus 4 (Epstein-Barr virus)
uaaucagaaauuugcacu

SEQ ID NO: 308239 - RNA, 18 nt, Human herpesvirus 4 (Epstein-Barr virus)
uaaucucuaaagauuuga

SEQ ID NO: 308240 - RNA, 18 nt, Human herpesvirus 4 (Epstein-Barr virus)
uaaugauuacgcaggcca

SEQ ID NO: 308241 - RNA, 15 nt, Human herpesvirus 4 (Epstein-Barr virus)
uaauguaccucauag

SEQ ID NO: 308242 - RNA, 19 nt, Human herpesvirus 4 (Epstein-Barr virus)
uaauguaccucauagacac

SEQ ID NO: 308243 - RNA, 18 nt, Human herpesvirus 4 (Epstein-Barr virus)
uaaugucuucaauagaca

SEQ ID NO: 308244 - RNA, 12 nt, Human herpesvirus 4 (Epstein-Barr virus)
uaaugugguggg

SEQ ID NO: 308245 - RNA, 12 nt, Human herpesvirus 4 (Epstein-Barr virus)
uaauugcagugg

SEQ ID NO: 308246 - RNA, 17 nt, Human herpesvirus 4 (Epstein-Barr virus)
uaauuguguauugcucu

SEQ ID NO: 308247 - RNA, 23 nt, Human herpesvirus 4 (Epstein-Barr virus)
uacaacaggcugcugaaaaccgg

SEQ ID NO: 308248 - RNA, 17 nt, Human herpesvirus 4 (Epstein-Barr virus)
uacaagcuuuugaccaa

SEQ ID NO: 308249 - RNA, 14 nt, Human herpesvirus 4 (Epstein-Barr virus)
uacaccccugagaa

SEQ ID NO: 308250 - RNA, 21 nt, Human herpesvirus 4 (Epstein-Barr virus)
uacaccgagcagaaggccaug

SEQ ID NO: 308251 - RNA, 14 nt, Human herpesvirus 4 (Epstein-Barr virus)
uacagauagauggc

SEQ ID NO: 308252 - RNA, 20 nt, Human herpesvirus 4 (Epstein-Barr virus)
uacagcagcuggauguacag

SEQ ID NO: 308253 - RNA, 23 nt, Human herpesvirus 4 (Epstein-Barr virus)
uacagcagcuggauguacagcua

SEQ ID NO: 308254 - RNA, 12 nt, Human herpesvirus 4 (Epstein-Barr virus)
uacaugucucag

SEQ ID NO: 308255 - RNA, 13 nt, Human herpesvirus 4 (Epstein-Barr virus)
uacaugucucaga

SEQ ID NO: 308256 - RNA, 18 nt, Human herpesvirus 4 (Epstein-Barr virus)
uaccaaagcuaacuguac

SEQ ID NO: 308257 - RNA, 15 nt, Human herpesvirus 4 (Epstein-Barr virus)
uaccagagucuauca

SEQ ID NO: 308258 - RNA, 23 nt, Human herpesvirus 4 (Epstein-Barr virus)
uaccagcccuuuuuccaguggca

SEQ ID NO: 308259 - RNA, 16 nt, Human herpesvirus 4 (Epstein-Barr virus)
uaccaggcauacagca

SEQ ID NO: 308260 - RNA, 19 nt, Human herpesvirus 4 (Epstein-Barr virus)
uaccaugagugccaugugu

SEQ ID NO: 308261 - RNA, 14 nt, Human herpesvirus 4 (Epstein-Barr virus)
uacccaaaccaaau

SEQ ID NO: 308262 - RNA, 20 nt, Human herpesvirus 4 (Epstein-Barr virus)
uacccaaaccaaauguagag

SEQ ID NO: 308263 - RNA, 17 nt, Human herpesvirus 4 (Epstein-Barr virus)
uacccagaggaggacau

SEQ ID NO: 308264 - RNA, 19 nt, Human herpesvirus 4 (Epstein-Barr virus)
uacccaucacacaacaaca

SEQ ID NO: 308265 - RNA, 14 nt, Human herpesvirus 4 (Epstein-Barr virus)
uaccccagugacga

SEQ ID NO: 308266 - RNA, 15 nt, Human herpesvirus 4 (Epstein-Barr virus)
uaccgagauguacau

SEQ ID NO: 308267 - RNA, 14 nt, Human herpesvirus 4 (Epstein-Barr virus)
uaccuuccuguguu

SEQ ID NO: 308268 - RNA, 18 nt, Human herpesvirus 4 (Epstein-Barr virus)
uaccuuccuguguucucc

SEQ ID NO: 308269 - RNA, 21 nt, Human herpesvirus 4 (Epstein-Barr virus)
uacgaugaggaauucuuccag

SEQ ID NO: 308270 - RNA, 14 nt, Human herpesvirus 4 (Epstein-Barr virus)
uacgcgggccacag

SEQ ID NO: 308271 - RNA, 13 nt, Human herpesvirus 4 (Epstein-Barr virus)
uacggcuuuccag

SEQ ID NO: 308272 - RNA, 19 nt, Human herpesvirus 4 (Epstein-Barr virus)
uacggugauaacugacaga

SEQ ID NO: 308273 - RNA, 17 nt, Human herpesvirus 4 (Epstein-Barr virus)
uacguguccauguacaa

SEQ ID NO: 308274 - RNA, 15 nt, Human herpesvirus 4 (Epstein-Barr virus)
uacuaacacgcaaua

SEQ ID NO: 308275 - RNA, 21 nt, Human herpesvirus 4 (Epstein-Barr virus)
uacuaugacaccuaucuguau

SEQ ID NO: 308276 - RNA, 21 nt, Human herpesvirus 4 (Epstein-Barr virus)
uacucagaugaagacgaggag

SEQ ID NO: 308277 - RNA, 16 nt, Human herpesvirus 4 (Epstein-Barr virus)
uacuccuggcauacuu

SEQ ID NO: 308278 - RNA, 21 nt, Human herpesvirus 4 (Epstein-Barr virus)
uacucggcuagccugacuaag

SEQ ID NO: 308279 - RNA, 18 nt, Human herpesvirus 4 (Epstein-Barr virus)
uacugcacagaacaucac

SEQ ID NO: 308280 - RNA, 20 nt, Human herpesvirus 4 (Epstein-Barr virus)
uacugcccagccuacucucc

SEQ ID NO: 308281 - RNA, 22 nt, Human herpesvirus 4 (Epstein-Barr virus)
uacugcgaugagggccuuccag

SEQ ID NO: 308282 - RNA, 19 nt, Human herpesvirus 4 (Epstein-Barr virus)
uacuuauuggagaugcucu

SEQ ID NO: 308283 - RNA, 22 nt, Human herpesvirus 4 (Epstein-Barr virus)
uacuuguccgggcuccaugucc

SEQ ID NO: 308284 - RNA, 13 nt, Human herpesvirus 4 (Epstein-Barr virus)
uacuuguccucau

SEQ ID NO: 308285 - RNA, 23 nt, Human herpesvirus 4 (Epstein-Barr virus)
uagaauaucgggcguuggcccau

SEQ ID NO: 308286 - RNA, 20 nt, Human herpesvirus 4 (Epstein-Barr virus)
uagaauccagccaguggucu

SEQ ID NO: 308287 - RNA, 13 nt, Human herpesvirus 4 (Epstein-Barr virus)
uagaaugugguaa

SEQ ID NO: 308288 - RNA, 13 nt, Human herpesvirus 4 (Epstein-Barr virus)
uagagacacuauc

SEQ ID NO: 308289 - RNA, 23 nt, Human herpesvirus 4 (Epstein-Barr virus)
uagcacgucccaaaccaugacau

SEQ ID NO: 308290 - RNA, 14 nt, Human herpesvirus 4 (Epstein-Barr virus)
uagcagaagacucc

SEQ ID NO: 308291 - RNA, 18 nt, Human herpesvirus 4 (Epstein-Barr virus)
uagcuauuccaccaacac

SEQ ID NO: 308292 - RNA, 16 nt, Human herpesvirus 4 (Epstein-Barr virus)
uagcucuggcacugcu

SEQ ID NO: 308293 - RNA, 20 nt, Human herpesvirus 4 (Epstein-Barr virus)
uagcucuggcacugcuagcg

SEQ ID NO: 308294 - RNA, 18 nt, Human herpesvirus 4 (Epstein-Barr virus)
uagcugucuuuccucuua

SEQ ID NO: 308295 - RNA, 15 nt, Human herpesvirus 4 (Epstein-Barr virus)
uagcuguuugcucua

SEQ ID NO: 308296 - RNA, 14 nt, Human herpesvirus 4 (Epstein-Barr virus)
uagcuugggaacac

SEQ ID NO: 308297 - RNA, 16 nt, Human herpesvirus 4 (Epstein-Barr virus)
uaggaauuauuuacca

SEQ ID NO: 308298 - RNA, 15 nt, Human herpesvirus 4 (Epstein-Barr virus)
uaggagacgcccuca

SEQ ID NO: 308299 - RNA, 12 nt, Human herpesvirus 4 (Epstein-Barr virus)
uagggaggacac

SEQ ID NO: 308300 - RNA, 15 nt, Human herpesvirus 4 (Epstein-Barr virus)
uagggguaacccugu

SEQ ID NO: 308301 - RNA, 18 nt, Human herpesvirus 4 (Epstein-Barr virus)
uaguagcacugguggugg

SEQ ID NO: 308302 - RNA, 22 nt, Human herpesvirus 4 (Epstein-Barr virus)
uaguaugaaggcuggcaaagau

SEQ ID NO: 308303 - RNA, 14 nt, Human herpesvirus 4 (Epstein-Barr virus)
uaguugguccaggg

SEQ ID NO: 308304 - RNA, 17 nt, Human herpesvirus 4 (Epstein-Barr virus)
uaguugguccagggucc

SEQ ID NO: 308305 - RNA, 18 nt, Human herpesvirus 4 (Epstein-Barr virus)
uauagcucugcacaggcu

SEQ ID NO: 308306 - RNA, 13 nt, Human herpesvirus 4 (Epstein-Barr virus)
uauagcucuggca

SEQ ID NO: 308307 - RNA, 17 nt, Human herpesvirus 4 (Epstein-Barr virus)
uauagcucuggcacugc

SEQ ID NO: 308308 - RNA, 14 nt, Human herpesvirus 4 (Epstein-Barr virus)
uaucacaggacaag

SEQ ID NO: 308309 - RNA, 18 nt, Human herpesvirus 4 (Epstein-Barr virus)
uaucacagggacaucuac

SEQ ID NO: 308310 - RNA, 16 nt, Human herpesvirus 4 (Epstein-Barr virus)
uaucacaucaagcaga

SEQ ID NO: 308311 - RNA, 18 nt, Human herpesvirus 4 (Epstein-Barr virus)
uaucaccguaccaugagu

SEQ ID NO: 308312 - RNA, 15 nt, Human herpesvirus 4 (Epstein-Barr virus)
uaucagaauuagcau

SEQ ID NO: 308313 - RNA, 13 nt, Human herpesvirus 4 (Epstein-Barr virus)
uaucuuugcugaa

SEQ ID NO: 308314 - RNA, 19 nt, Human herpesvirus 4 (Epstein-Barr virus)
uaugaaggcuggcaaagau

SEQ ID NO: 308315 - RNA, 13 nt, Human herpesvirus 4 (Epstein-Barr virus)
uaugaccaugccc

SEQ ID NO: 308316 - RNA, 15 nt, Human herpesvirus 4 (Epstein-Barr virus)
uaugagcgauuuuau

SEQ ID NO: 308317 - RNA, 23 nt, Human herpesvirus 4 (Epstein-Barr virus)
uaugauagcagaagacuccugcc

SEQ ID NO: 308318 - RNA, 17 nt, Human herpesvirus 4 (Epstein-Barr virus)
uaugaugaggacucuga

SEQ ID NO: 308319 - RNA, 15 nt, Human herpesvirus 4 (Epstein-Barr virus)
uaugcauacacugaa

SEQ ID NO: 308320 - RNA, 19 nt, Human herpesvirus 4 (Epstein-Barr virus)
uaugccaauccaugccaau

SEQ ID NO: 308321 - RNA, 17 nt, Human herpesvirus 4 (Epstein-Barr virus)
uaugggcaaaacucaca

SEQ ID NO: 308322 - RNA, 19 nt, Human herpesvirus 4 (Epstein-Barr virus)
uauguaugccuuggcauga

SEQ ID NO: 308323 - RNA, 18 nt, Human herpesvirus 4 (Epstein-Barr virus)
uauguauugggacuugaa

SEQ ID NO: 308324 - RNA, 12 nt, Human herpesvirus 4 (Epstein-Barr virus)
uauuccagauga

SEQ ID NO: 308325 - RNA, 19 nt, Human herpesvirus 4 (Epstein-Barr virus)
uauucccccgcacuaaaga

SEQ ID NO: 308326 - RNA, 19 nt, Human herpesvirus 4 (Epstein-Barr virus)
uauucugagcaccaacaca

SEQ ID NO: 308327 - RNA, 23 nt, Human herpesvirus 4 (Epstein-Barr virus)
uauugguaaaacaagggauauga

SEQ ID NO: 308328 - RNA, 13 nt, Human herpesvirus 4 (Epstein-Barr virus)
ucaaacauggugu

SEQ ID NO: 308329 - RNA, 23 nt, Human herpesvirus 4 (Epstein-Barr virus)
ucaaaggccucggcgcauagcgu

SEQ ID NO: 308330 - RNA, 19 nt, Human herpesvirus 4 (Epstein-Barr virus)
ucaaauaccgagauguaca

SEQ ID NO: 308331 - RNA, 21 nt, Human herpesvirus 4 (Epstein-Barr virus)
ucaaauaccgagauguacaua

SEQ ID NO: 308332 - RNA, 23 nt, Human herpesvirus 4 (Epstein-Barr virus)
ucaagagucucgccaucuaccca

SEQ ID NO: 308333 - RNA, 21 nt, Human herpesvirus 4 (Epstein-Barr virus)
ucaagaguuuaagcagcacug

SEQ ID NO: 308334 - RNA, 16 nt, Human herpesvirus 4 (Epstein-Barr virus)
ucaagcagaaaggcca

SEQ ID NO: 308335 - RNA, 16 nt, Human herpesvirus 4 (Epstein-Barr virus)
ucaagcuacucaauga

SEQ ID NO: 308336 - RNA, 23 nt, Human herpesvirus 4 (Epstein-Barr virus)
ucaaggaaacaaaaccacugacc

SEQ ID NO: 308337 - RNA, 20 nt, Human herpesvirus 4 (Epstein-Barr virus)
ucaaggugucaauaauuuca

SEQ ID NO: 308338 - RNA, 15 nt, Human herpesvirus 4 (Epstein-Barr virus)
ucaauggaacccuag

SEQ ID NO: 308339 - RNA, 21 nt, Human herpesvirus 4 (Epstein-Barr virus)
ucacaccccacggccaugcua

SEQ ID NO: 308340 - RNA, 23 nt, Human herpesvirus 4 (Epstein-Barr virus)
ucacaccccacggccaugcuauc

SEQ ID NO: 308341 - RNA, 23 nt, Human herpesvirus 4 (Epstein-Barr virus)
ucacagaggaggcuggugccuug

SEQ ID NO: 308342 - RNA, 17 nt, Human herpesvirus 4 (Epstein-Barr virus)
ucacaggacauguuugg

SEQ ID NO: 308343 - RNA, 19 nt, Human herpesvirus 4 (Epstein-Barr virus)
ucacagguuauuuugccug

SEQ ID NO: 308344 - RNA, 23 nt, Human herpesvirus 4 (Epstein-Barr virus)
ucacaucaagcagaaaggccaua

SEQ ID NO: 308345 - RNA, 21 nt, Human herpesvirus 4 (Epstein-Barr virus)
ucacauuguccucaccaagga

SEQ ID NO: 308346 - RNA, 20 nt, Human herpesvirus 4 (Epstein-Barr virus)
ucaccaagauuguuccaggu

SEQ ID NO: 308347 - RNA, 21 nt, Human herpesvirus 4 (Epstein-Barr virus)
ucaccacuaagguuacugcac

SEQ ID NO: 308348 - RNA, 22 nt, Human herpesvirus 4 (Epstein-Barr virus)
ucaccacuaagguuacugcaca

SEQ ID NO: 308349 - RNA, 12 nt, Human herpesvirus 4 (Epstein-Barr virus)
ucaccacucgaa

SEQ ID NO: 308350 - RNA, 13 nt, Human herpesvirus 4 (Epstein-Barr virus)
ucaccacucgaaa

SEQ ID NO: 308351 - RNA, 21 nt, Human herpesvirus 4 (Epstein-Barr virus)
ucaccacucgaaacuauggca

SEQ ID NO: 308352 - RNA, 13 nt, Human herpesvirus 4 (Epstein-Barr virus)
ucacccgacaaug

SEQ ID NO: 308353 - RNA, 21 nt, Human herpesvirus 4 (Epstein-Barr virus)
ucaccuaagaaugggagcaac

SEQ ID NO: 308354 - RNA, 23 nt, Human herpesvirus 4 (Epstein-Barr virus)
ucaccuuccagacuaugcauaca

SEQ ID NO: 308355 - RNA, 15 nt, Human herpesvirus 4 (Epstein-Barr virus)
ucacgcgaagggaaa

SEQ ID NO: 308356 - RNA, 24 nt, Human herpesvirus 4 (Epstein-Barr virus)
ucacggggccgugcaccugccauc

SEQ ID NO: 308357 - RNA, 15 nt, Human herpesvirus 4 (Epstein-Barr virus)
ucacuaaacauugca

SEQ ID NO: 308358 - RNA, 16 nt, Human herpesvirus 4 (Epstein-Barr virus)
ucacuaaacauugcac

SEQ ID NO: 308359 - RNA, 15 nt, Human herpesvirus 4 (Epstein-Barr virus)
ucacuaaggcagucc

SEQ ID NO: 308360 - RNA, 19 nt, Human herpesvirus 4 (Epstein-Barr virus)
ucacuccagccaucaugcu

SEQ ID NO: 308361 - RNA, 20 nt, Human herpesvirus 4 (Epstein-Barr virus)
ucacugauuuugggcacacu

SEQ ID NO: 308362 - RNA, 18 nt, Human herpesvirus 4 (Epstein-Barr virus)
ucacuggcaaagggcaug

SEQ ID NO: 308363 - RNA, 19 nt, Human herpesvirus 4 (Epstein-Barr virus)
ucacuuccucugcuuuucu

SEQ ID NO: 308364 - RNA, 15 nt, Human herpesvirus 4 (Epstein-Barr virus)
ucacuuucaguggau

SEQ ID NO: 308365 - RNA, 14 nt, Human herpesvirus 4 (Epstein-Barr virus)
ucagacaccaacac

SEQ ID NO: 308366 - RNA, 16 nt, Human herpesvirus 4 (Epstein-Barr virus)
ucagacccaacaaagc

SEQ ID NO: 308367 - RNA, 15 nt, Human herpesvirus 4 (Epstein-Barr virus)
ucagaccuacgccau

SEQ ID NO: 308368 - RNA, 14 nt, Human herpesvirus 4 (Epstein-Barr virus)
ucagagccccaugc

SEQ ID NO: 308369 - RNA, 20 nt, Human herpesvirus 4 (Epstein-Barr virus)
ucagauagccggaccuccua

SEQ ID NO: 308370 - RNA, 19 nt, Human herpesvirus 4 (Epstein-Barr virus)
ucagcaacugcguccucua

SEQ ID NO: 308371 - RNA, 21 nt, Human herpesvirus 4 (Epstein-Barr virus)
ucagcaacugcguccucuacc

SEQ ID NO: 308372 - RNA, 20 nt, Human herpesvirus 4 (Epstein-Barr virus)
ucagcaguagcuugggaaca

SEQ ID NO: 308373 - RNA, 14 nt, Human herpesvirus 4 (Epstein-Barr virus)
ucagcaucaauguc

SEQ ID NO: 308374 - RNA, 21 nt, Human herpesvirus 4 (Epstein-Barr virus)
ucagcccccccugugcuucua

SEQ ID NO: 308375 - RNA, 14 nt, Human herpesvirus 4 (Epstein-Barr virus)
ucagcgccguccac

SEQ ID NO: 308376 - RNA, 20 nt, Human herpesvirus 4 (Epstein-Barr virus)
ucagcgccguccacggccgu

SEQ ID NO: 308377 - RNA, 15 nt, Human herpesvirus 4 (Epstein-Barr virus)
ucagcuuaacgggaa

SEQ ID NO: 308378 - RNA, 20 nt, Human herpesvirus 4 (Epstein-Barr virus)
ucaggaccugggagggccau

SEQ ID NO: 308379 - RNA, 21 nt, Human herpesvirus 4 (Epstein-Barr virus)
ucaggagacacggcucuguca

SEQ ID NO: 308380 - RNA, 17 nt, Human herpesvirus 4 (Epstein-Barr virus)
ucaggccucccagucua

SEQ ID NO: 308381 - RNA, 23 nt, Human herpesvirus 4 (Epstein-Barr virus)
ucaggccucccagucuauccagg

SEQ ID NO: 308382 - RNA, 14 nt, Human herpesvirus 4 (Epstein-Barr virus)
ucaguaaaucuguc

SEQ ID NO: 308383 - RNA, 21 nt, Human herpesvirus 4 (Epstein-Barr virus)
ucagucauaucggaugccuca

SEQ ID NO: 308384 - RNA, 14 nt, Human herpesvirus 4 (Epstein-Barr virus)
ucagucuuugcaau

SEQ ID NO: 308385 - RNA, 14 nt, Human herpesvirus 4 (Epstein-Barr virus)
ucaguggaugcauc

SEQ ID NO: 308386 - RNA, 20 nt, Human herpesvirus 4 (Epstein-Barr virus)
ucaguggucaccgguggugg

SEQ ID NO: 308387 - RNA, 17 nt, Human herpesvirus 4 (Epstein-Barr virus)
ucaguucuggugaugcu

SEQ ID NO: 308388 - RNA, 16 nt, Human herpesvirus 4 (Epstein-Barr virus)
ucauaauggugccuga

SEQ ID NO: 308389 - RNA, 13 nt, Human herpesvirus 4 (Epstein-Barr virus)
ucaucaucgggaa

SEQ ID NO: 308390 - RNA, 21 nt, Human herpesvirus 4 (Epstein-Barr virus)
ucaugcagggugcacagacua

SEQ ID NO: 308391 - RNA, 18 nt, Human herpesvirus 4 (Epstein-Barr virus)
ucaugcugaauauugcca

SEQ ID NO: 308392 - RNA, 16 nt, Human herpesvirus 4 (Epstein-Barr virus)
ucauguuuuuggcaug

SEQ ID NO: 308393 - RNA, 22 nt, Human herpesvirus 4 (Epstein-Barr virus)
ucauguuuuuggcauguguacu

SEQ ID NO: 308394 - RNA, 12 nt, Human herpesvirus 4 (Epstein-Barr virus)
gcuggugccuug

SEQ ID NO: 308395 - RNA, 19 nt, Human herpesvirus 4 (Epstein-Barr virus)
gcuguggccgaguggcaga

SEQ ID NO: 308396 - RNA, 23 nt, Human herpesvirus 4 (Epstein-Barr virus)
gcuguggccgaguggcagaauca

SEQ ID NO: 308397 - RNA, 21 nt, Human herpesvirus 4 (Epstein-Barr virus)
gcuuacagccagagagaucau

SEQ ID NO: 308398 - RNA, 19 nt, Human herpesvirus 4 (Epstein-Barr virus)
gcuucagcaucaaugucaa

SEQ ID NO: 308399 - RNA, 23 nt, Human herpesvirus 4 (Epstein-Barr virus)
gcuuccacccccuggagccagcg

SEQ ID NO: 308400 - RNA, 12 nt, Human herpesvirus 4 (Epstein-Barr virus)
gcuucucaaagg

SEQ ID NO: 308401 - RNA, 15 nt, Human herpesvirus 4 (Epstein-Barr virus)
gcuugaccagugugu

SEQ ID NO: 308402 - RNA, 15 nt, Human herpesvirus 4 (Epstein-Barr virus)
gcuugggcuguggua

SEQ ID NO: 308403 - RNA, 20 nt, Human herpesvirus 4 (Epstein-Barr virus)
gcuuuuaacucuuaaaacuu

SEQ ID NO: 308404 - RNA, 14 nt, Human herpesvirus 4 (Epstein-Barr virus)
gcuuuucuccucag

SEQ ID NO: 308405 - RNA, 17 nt, Human herpesvirus 4 (Epstein-Barr virus)
ggaaaauauauugcaaa

SEQ ID NO: 308406 - RNA, 19 nt, Human herpesvirus 4 (Epstein-Barr virus)
ggaaaccugcgaaacuugg

SEQ ID NO: 308407 - RNA, 21 nt, Human herpesvirus 4 (Epstein-Barr virus)
ggaagagaggggcagggaaac

SEQ ID NO: 308408 - RNA, 20 nt, Human herpesvirus 4 (Epstein-Barr virus)
ggaagcccucuggacuucca

SEQ ID NO: 308409 - RNA, 16 nt, Human herpesvirus 4 (Epstein-Barr virus)
ggaaggccacaaagag

SEQ ID NO: 308410 - RNA, 14 nt, Human herpesvirus 4 (Epstein-Barr virus)
ggaaugaacacuca

SEQ ID NO: 308411 - RNA, 13 nt, Human herpesvirus 4 (Epstein-Barr virus)
ggaauucuuccag

SEQ ID NO: 308412 - RNA, 19 nt, Human herpesvirus 4 (Epstein-Barr virus)
ggacaacugucacaccagu

SEQ ID NO: 308413 - RNA, 18 nt, Human herpesvirus 4 (Epstein-Barr virus)
ggacagcgccacauacac

SEQ ID NO: 308414 - RNA, 20 nt, Human herpesvirus 4 (Epstein-Barr virus)
ggacauagaggggcaugcuu

SEQ ID NO: 308415 - RNA, 18 nt, Human herpesvirus 4 (Epstein-Barr virus)
ggacccggaccaaugcca

SEQ ID NO: 308416 - RNA, 14 nt, Human herpesvirus 4 (Epstein-Barr virus)
ggaccgaacugaug

SEQ ID NO: 308417 - RNA, 19 nt, Human herpesvirus 4 (Epstein-Barr virus)
ggaccgggagccucagugu

SEQ ID NO: 308418 - RNA, 12 nt, Human herpesvirus 4 (Epstein-Barr virus)
ggacgucccuuu

SEQ ID NO: 308419 - RNA, 15 nt, Human herpesvirus 4 (Epstein-Barr virus)
ggacuggcacggugg

SEQ ID NO: 308420 - RNA, 22 nt, Human herpesvirus 4 (Epstein-Barr virus)
ggagacacggcucugucaguua

SEQ ID NO: 308421 - RNA, 16 nt, Human herpesvirus 4 (Epstein-Barr virus)
ggagacggugaccuga

SEQ ID NO: 308422 - RNA, 13 nt, Human herpesvirus 4 (Epstein-Barr virus)
ggagagcuggaug

SEQ ID NO: 308423 - RNA, 22 nt, Human herpesvirus 4 (Epstein-Barr virus)
ggagaugagauagaggaccgga

SEQ ID NO: 308424 - RNA, 16 nt, Human herpesvirus 4 (Epstein-Barr virus)
ggagcagggcccagug

SEQ ID NO: 308425 - RNA, 15 nt, Human herpesvirus 4 (Epstein-Barr virus)
ggaggacacugccaa

SEQ ID NO: 308426 - RNA, 21 nt, Human herpesvirus 4 (Epstein-Barr virus)
ggaggaccugguggugacauu

SEQ ID NO: 308427 - RNA, 15 nt, Human herpesvirus 4 (Epstein-Barr virus)
ggaggagacuggcaa

SEQ ID NO: 308428 - RNA, 13 nt, Human herpesvirus 4 (Epstein-Barr virus)
ggaggccccggcc

SEQ ID NO: 308429 - RNA, 16 nt, Human herpesvirus 4 (Epstein-Barr virus)
ggaggccucaggcaac

SEQ ID NO: 308430 - RNA, 23 nt, Human herpesvirus 4 (Epstein-Barr virus)
ggaggcguccgccccgaugcgga

SEQ ID NO: 308431 - RNA, 23 nt, Human herpesvirus 4 (Epstein-Barr virus)
ggagggcagcgaagaacacucca

SEQ ID NO: 308432 - RNA, 18 nt, Human herpesvirus 4 (Epstein-Barr virus)
ggagucuggacguggcug

SEQ ID NO: 308433 - RNA, 12 nt, Human herpesvirus 4 (Epstein-Barr virus)
ggaguugaugaa

SEQ ID NO: 308434 - RNA, 21 nt, Human herpesvirus 4 (Epstein-Barr virus)
ggauccaaggugaccccuguu

SEQ ID NO: 308435 - RNA, 19 nt, Human herpesvirus 4 (Epstein-Barr virus)
ggaugaacccuggggcaac

SEQ ID NO: 308436 - RNA, 18 nt, Human herpesvirus 4 (Epstein-Barr virus)
ggaugaagauccaacucc

SEQ ID NO: 308437 - RNA, 17 nt, Human herpesvirus 4 (Epstein-Barr virus)
ggaugacaccauggccu

SEQ ID NO: 308438 - RNA, 13 nt, Human herpesvirus 4 (Epstein-Barr virus)
ggaugcaucuaag

SEQ ID NO: 308439 - RNA, 16 nt, Human herpesvirus 4 (Epstein-Barr virus)
ggauggggucauuuau

SEQ ID NO: 308440 - RNA, 20 nt, Human herpesvirus 4 (Epstein-Barr virus)
ggauuccuguccaugaccac

SEQ ID NO: 308441 - RNA, 17 nt, Human herpesvirus 4 (Epstein-Barr virus)
ggcaaaaauaugcaaug

SEQ ID NO: 308442 - RNA, 17 nt, Human herpesvirus 4 (Epstein-Barr virus)
ggcaacuccucuuacac

SEQ ID NO: 308443 - RNA, 19 nt, Human herpesvirus 4 (Epstein-Barr virus)
ggcaagauggagaggcaaa

SEQ ID NO: 308444 - RNA, 19 nt, Human herpesvirus 4 (Epstein-Barr virus)
ggcacaacggcugugacua

SEQ ID NO: 308445 - RNA, 18 nt, Human herpesvirus 4 (Epstein-Barr virus)
ggcacacgccagagacaa

SEQ ID NO: 308446 - RNA, 16 nt, Human herpesvirus 4 (Epstein-Barr virus)
ggcacacuuaacuuga

SEQ ID NO: 308447 - RNA, 18 nt, Human herpesvirus 4 (Epstein-Barr virus)
ggcaccauagcaugucac

SEQ ID NO: 308448 - RNA, 16 nt, Human herpesvirus 4 (Epstein-Barr virus)
ggcaccgaucaucucg

SEQ ID NO: 308449 - RNA, 23 nt, Human herpesvirus 4 (Epstein-Barr virus)
ggcaccgucagccacacaaucag

SEQ ID NO: 308450 - RNA, 11 nt, Human herpesvirus 4 (Epstein-Barr virus)
ggcaccuuuaa

SEQ ID NO: 308451 - RNA, 15 nt, Human herpesvirus 4 (Epstein-Barr virus)
ggcacgagauggccc

SEQ ID NO: 308452 - RNA, 17 nt, Human herpesvirus 4 (Epstein-Barr virus)
ggcacggagagugcccu

SEQ ID NO: 308453 - RNA, 20 nt, Human herpesvirus 4 (Epstein-Barr virus)
ggcacugcuagcgucacuga

SEQ ID NO: 308454 - RNA, 13 nt, Human herpesvirus 4 (Epstein-Barr virus)
ggcagacaccacc

SEQ ID NO: 308455 - RNA, 15 nt, Human herpesvirus 4 (Epstein-Barr virus)
ggcagcaaucucggc

SEQ ID NO: 308456 - RNA, 20 nt, Human herpesvirus 4 (Epstein-Barr virus)
ggcaggcgcuguuauggcca

SEQ ID NO: 308457 - RNA, 21 nt, Human herpesvirus 4 (Epstein-Barr virus)
ggcaguccuugugucucuauc

SEQ ID NO: 308458 - RNA, 17 nt, Human herpesvirus 4 (Epstein-Barr virus)
ggcaucaugcagggugc

SEQ ID NO: 308459 - RNA, 13 nt, Human herpesvirus 4 (Epstein-Barr virus)
ggcaucaugcgug

SEQ ID NO: 308460 - RNA, 12 nt, Human herpesvirus 4 (Epstein-Barr virus)
ggcauguguacu

SEQ ID NO: 308461 - RNA, 16 nt, Human herpesvirus 4 (Epstein-Barr virus)
ggcauguguacuuguc

SEQ ID NO: 308462 - RNA, 15 nt, Human herpesvirus 4 (Epstein-Barr virus)
ggccacacuggggac

SEQ ID NO: 308463 - RNA, 12 nt, Human herpesvirus 4 (Epstein-Barr virus)
ggccacaggugc

SEQ ID NO: 308464 - RNA, 22 nt, Human herpesvirus 4 (Epstein-Barr virus)
ggccaccggggaggccagguag

SEQ ID NO: 308465 - RNA, 16 nt, Human herpesvirus 4 (Epstein-Barr virus)
ggccagagacgagcug

SEQ ID NO: 308466 - RNA, 11 nt, Human herpesvirus 4 (Epstein-Barr virus)
ggccagucucc

SEQ ID NO: 308467 - RNA, 19 nt, Human herpesvirus 4 (Epstein-Barr virus)
ggccaugaaucugacucua

SEQ ID NO: 308468 - RNA, 18 nt, Human herpesvirus 4 (Epstein-Barr virus)
ggccauucgacaggccau

SEQ ID NO: 308469 - RNA, 14 nt, Human herpesvirus 4 (Epstein-Barr virus)
ggcccaccuaaaga

SEQ ID NO: 308470 - RNA, 12 nt, Human herpesvirus 4 (Epstein-Barr virus)
ggcccacugcag

SEQ ID NO: 308471 - RNA, 13 nt, Human herpesvirus 4 (Epstein-Barr virus)
ggcccacuggaug

SEQ ID NO: 308472 - RNA, 22 nt, Human herpesvirus 4 (Epstein-Barr virus)
ggcccaggaccuuggccggugg

SEQ ID NO: 308473 - RNA, 18 nt, Human herpesvirus 4 (Epstein-Barr virus)
ggcccgaccugccaaaga

SEQ ID NO: 308474 - RNA, 15 nt, Human herpesvirus 4 (Epstein-Barr virus)
ggcccgcuucauuca

SEQ ID NO: 308475 - RNA, 15 nt, Human herpesvirus 4 (Epstein-Barr virus)
ggcccggaugaucuc

SEQ ID NO: 308476 - RNA, 12 nt, Human herpesvirus 4 (Epstein-Barr virus)
ggcccgucuuac

SEQ ID NO: 308477 - RNA, 21 nt, Human herpesvirus 4 (Epstein-Barr virus)
ggcccuagccguccuguccaa

SEQ ID NO: 308478 - RNA, 17 nt, Human herpesvirus 4 (Epstein-Barr virus)
ggccgacgaggcccugc

SEQ ID NO: 308479 - RNA, 19 nt, Human herpesvirus 4 (Epstein-Barr virus)
ggccgagaagcuugugaac

SEQ ID NO: 308480 - RNA, 14 nt, Human herpesvirus 4 (Epstein-Barr virus)
ggccgaguggcaga

SEQ ID NO: 308481 - RNA, 23 nt, Human herpesvirus 4 (Epstein-Barr virus)
ggccgccaugcucagggccacgg

SEQ ID NO: 308482 - RNA, 21 nt, Human herpesvirus 4 (Epstein-Barr virus)
cuggcgacuuggugccaccau

SEQ ID NO: 308483 - RNA, 23 nt, Human herpesvirus 4 (Epstein-Barr virus)
cuggcgacuuggugccaccaucu

SEQ ID NO: 308484 - RNA, 22 nt, Human herpesvirus 4 (Epstein-Barr virus)
cugggacaacugucacaccagu

SEQ ID NO: 308485 - RNA, 14 nt, Human herpesvirus 4 (Epstein-Barr virus)
cugggacugccugg

SEQ ID NO: 308486 - RNA, 21 nt, Human herpesvirus 4 (Epstein-Barr virus)
cugggacugccuggggaaaau

SEQ ID NO: 308487 - RNA, 24 nt, Human herpesvirus 4 (Epstein-Barr virus)
cugggagguagauagguggucgca

SEQ ID NO: 308488 - RNA, 22 nt, Human herpesvirus 4 (Epstein-Barr virus)
cugggcacuucguagcuuugau

SEQ ID NO: 308489 - RNA, 12 nt, Human herpesvirus 4 (Epstein-Barr virus)
cuggggcauuaa

SEQ ID NO: 308490 - RNA, 14 nt, Human herpesvirus 4 (Epstein-Barr virus)
cuggggucucaggc

SEQ ID NO: 308491 - RNA, 14 nt, Human herpesvirus 4 (Epstein-Barr virus)
cugguacguuggcu

SEQ ID NO: 308492 - RNA, 18 nt, Human herpesvirus 4 (Epstein-Barr virus)
cuggugguggguguccuc

SEQ ID NO: 308493 - RNA, 14 nt, Human herpesvirus 4 (Epstein-Barr virus)
cuguaaucacuggc

SEQ ID NO: 308494 - RNA, 16 nt, Human herpesvirus 4 (Epstein-Barr virus)
cuguaaucacuggcaa

SEQ ID NO: 308495 - RNA, 18 nt, Human herpesvirus 4 (Epstein-Barr virus)
cuguagcgccgcgguuuc

SEQ ID NO: 308496 - RNA, 12 nt, Human herpesvirus 4 (Epstein-Barr virus)
cuguaugguauu

SEQ ID NO: 308497 - RNA, 21 nt, Human herpesvirus 4 (Epstein-Barr virus)
cugucacaccagucccaacaa

SEQ ID NO: 308498 - RNA, 23 nt, Human herpesvirus 4 (Epstein-Barr virus)
cugucacaccagucccaacaacu

SEQ ID NO: 308499 - RNA, 19 nt, Human herpesvirus 4 (Epstein-Barr virus)
cugucauucuaucaauuaa

SEQ ID NO: 308500 - RNA, 17 nt, Human herpesvirus 4 (Epstein-Barr virus)
cugucucuuucuggcca

SEQ ID NO: 308501 - RNA, 14 nt, Human herpesvirus 4 (Epstein-Barr virus)
cugucuugucacca

SEQ ID NO: 308502 - RNA, 18 nt, Human herpesvirus 4 (Epstein-Barr virus)
cugugacuacaccaucac

SEQ ID NO: 308503 - RNA, 21 nt, Human herpesvirus 4 (Epstein-Barr virus)
cugugacuggugcuuguggug

SEQ ID NO: 308504 - RNA, 22 nt, Human herpesvirus 4 (Epstein-Barr virus)
cuguggccgaguggcagaauca

SEQ ID NO: 308505 - RNA, 12 nt, Human herpesvirus 4 (Epstein-Barr virus)
cuguggugggcu

SEQ ID NO: 308506 - RNA, 20 nt, Human herpesvirus 4 (Epstein-Barr virus)
cuguguaaccucacuguaau

SEQ ID NO: 308507 - RNA, 16 nt, Human herpesvirus 4 (Epstein-Barr virus)
cugugucccacuccac

SEQ ID NO: 308508 - RNA, 23 nt, Human herpesvirus 4 (Epstein-Barr virus)
cugugugcccggggguggaggcu

SEQ ID NO: 308509 - RNA, 18 nt, Human herpesvirus 4 (Epstein-Barr virus)
cuguuaugaaaugcaggu

SEQ ID NO: 308510 - RNA, 16 nt, Human herpesvirus 4 (Epstein-Barr virus)
cuguuugcucuauucg

SEQ ID NO: 308511 - RNA, 22 nt, Human herpesvirus 4 (Epstein-Barr virus)
cuuaaggccgagucaguuacac

SEQ ID NO: 308512 - RNA, 14 nt, Human herpesvirus 4 (Epstein-Barr virus)
cuuaaucuagcuca

SEQ ID NO: 308513 - RNA, 21 nt, Human herpesvirus 4 (Epstein-Barr virus)
cuuacagcacauuuuguucua

SEQ ID NO: 308514 - RNA, 14 nt, Human herpesvirus 4 (Epstein-Barr virus)
cuuacagccagaga

SEQ ID NO: 308515 - RNA, 16 nt, Human herpesvirus 4 (Epstein-Barr virus)
cuuacugcccagccua

SEQ ID NO: 308516 - RNA, 14 nt, Human herpesvirus 4 (Epstein-Barr virus)
cuuagacugagcca

SEQ ID NO: 308517 - RNA, 18 nt, Human herpesvirus 4 (Epstein-Barr virus)
cuuagggcgccagggauc

SEQ ID NO: 308518 - RNA, 20 nt, Human herpesvirus 4 (Epstein-Barr virus)
cuuauuuggacaucuagugg

SEQ ID NO: 308519 - RNA, 21 nt, Human herpesvirus 4 (Epstein-Barr virus)
cuucaagagucucgccaucua

SEQ ID NO: 308520 - RNA, 11 nt, Human herpesvirus 4 (Epstein-Barr virus)
cuucauucacg

SEQ ID NO: 308521 - RNA, 21 nt, Human herpesvirus 4 (Epstein-Barr virus)
cuuccaacgcauccaccauca

SEQ ID NO: 308522 - RNA, 17 nt, Human herpesvirus 4 (Epstein-Barr virus)
cuuccagacuaugcaua

SEQ ID NO: 308523 - RNA, 15 nt, Human herpesvirus 4 (Epstein-Barr virus)
cuuccagagcucuac

SEQ ID NO: 308524 - RNA, 21 nt, Human herpesvirus 4 (Epstein-Barr virus)
cuucguagcuuugaugaggcu

SEQ ID NO: 308525 - RNA, 11 nt, Human herpesvirus 4 (Epstein-Barr virus)
cuucucaaagg

SEQ ID NO: 308526 - RNA, 15 nt, Human herpesvirus 4 (Epstein-Barr virus)
cuucucaugcuccua

SEQ ID NO: 308527 - RNA, 22 nt, Human herpesvirus 4 (Epstein-Barr virus)
cuucucccucagagucuacucg

SEQ ID NO: 308528 - RNA, 22 nt, Human herpesvirus 4 (Epstein-Barr virus)
cuucucguagagaucaggccaa

SEQ ID NO: 308529 - RNA, 14 nt, Human herpesvirus 4 (Epstein-Barr virus)
cuucucugacaaau

SEQ ID NO: 308530 - RNA, 15 nt, Human herpesvirus 4 (Epstein-Barr virus)
cuucugaaaaagccu

SEQ ID NO: 308531 - RNA, 15 nt, Human herpesvirus 4 (Epstein-Barr virus)
cuucuggaccgugcc

SEQ ID NO: 308532 - RNA, 21 nt, Human herpesvirus 4 (Epstein-Barr virus)
cuucuggcacgacuguuccua

SEQ ID NO: 308533 - RNA, 17 nt, Human herpesvirus 4 (Epstein-Barr virus)
cuucuguuaaggcuguu

SEQ ID NO: 308534 - RNA, 14 nt, Human herpesvirus 4 (Epstein-Barr virus)
cuucuguuugcauu

SEQ ID NO: 308535 - RNA, 23 nt, Human herpesvirus 4 (Epstein-Barr virus)
cuucuucaggggaaucucugcca

SEQ ID NO: 308536 - RNA, 14 nt, Human herpesvirus 4 (Epstein-Barr virus)
cuucuuuaucucca

SEQ ID NO: 308537 - RNA, 14 nt, Human herpesvirus 4 (Epstein-Barr virus)
cuucuuuugcucuu

SEQ ID NO: 308538 - RNA, 21 nt, Human herpesvirus 4 (Epstein-Barr virus)
cuugaccaguguguacauucc

SEQ ID NO: 308539 - RNA, 14 nt, Human herpesvirus 4 (Epstein-Barr virus)
cuugagggcaaaga

SEQ ID NO: 308540 - RNA, 15 nt, Human herpesvirus 4 (Epstein-Barr virus)
cuugagggcaaagac

SEQ ID NO: 308541 - RNA, 14 nt, Human herpesvirus 4 (Epstein-Barr virus)
cuugaggugccaca

SEQ ID NO: 308542 - RNA, 17 nt, Human herpesvirus 4 (Epstein-Barr virus)
cuugaucuucuucuccc

SEQ ID NO: 308543 - RNA, 20 nt, Human herpesvirus 4 (Epstein-Barr virus)
cuugauguacuuuccuagaa

SEQ ID NO: 308544 - RNA, 17 nt, Human herpesvirus 4 (Epstein-Barr virus)
cuugcccucuccagcaa

SEQ ID NO: 308545 - RNA, 10 nt, Human herpesvirus 4 (Epstein-Barr virus)
cuugcuccac

SEQ ID NO: 308546 - RNA, 15 nt, Human herpesvirus 4 (Epstein-Barr virus)
cuugcuccaccagcu

SEQ ID NO: 308547 - RNA, 21 nt, Human herpesvirus 4 (Epstein-Barr virus)
cuugcucucagcacuuugcca

SEQ ID NO: 308548 - RNA, 15 nt, Human herpesvirus 4 (Epstein-Barr virus)
cuugcugccguuauu

SEQ ID NO: 308549 - RNA, 15 nt, Human herpesvirus 4 (Epstein-Barr virus)
cuuggaaacacccau

SEQ ID NO: 308550 - RNA, 22 nt, Human herpesvirus 4 (Epstein-Barr virus)
cuuggaccaagggcagggcaau

SEQ ID NO: 308551 - RNA, 14 nt, Human herpesvirus 4 (Epstein-Barr virus)
cuuggaggcugcua

SEQ ID NO: 308552 - RNA, 17 nt, Human herpesvirus 4 (Epstein-Barr virus)
cuuggggguggugggcu

SEQ ID NO: 308553 - RNA, 19 nt, Human herpesvirus 4 (Epstein-Barr virus)
cuugguaaucuguacggga

SEQ ID NO: 308554 - RNA, 16 nt, Human herpesvirus 4 (Epstein-Barr virus)
cuuggucaagguguca

SEQ ID NO: 308555 - RNA, 15 nt, Human herpesvirus 4 (Epstein-Barr virus)
cuuggugugcacgaa

SEQ ID NO: 308556 - RNA, 22 nt, Human herpesvirus 4 (Epstein-Barr virus)
cuugucuacaucccauaccuac

SEQ ID NO: 308557 - RNA, 22 nt, Human herpesvirus 4 (Epstein-Barr virus)
cuuguucuuggcggacaucauu

SEQ ID NO: 308558 - RNA, 22 nt, Human herpesvirus 4 (Epstein-Barr virus)
cuuguuucucagagagcauuuc

SEQ ID NO: 308559 - RNA, 14 nt, Human herpesvirus 4 (Epstein-Barr virus)
cuuuaacauugaug

SEQ ID NO: 308560 - RNA, 13 nt, Human herpesvirus 4 (Epstein-Barr virus)
cuuuaccaccuca

SEQ ID NO: 308561 - RNA, 14 nt, Human herpesvirus 4 (Epstein-Barr virus)
cuuuaccaccucaa

SEQ ID NO: 308562 - RNA, 12 nt, Human herpesvirus 4 (Epstein-Barr virus)
cuuuccaguucc

SEQ ID NO: 308563 - RNA, 16 nt, Human herpesvirus 4 (Epstein-Barr virus)
cuuuccgcgguggugg

SEQ ID NO: 308564 - RNA, 19 nt, Human herpesvirus 4 (Epstein-Barr virus)
cuuuccuaagaccuaauaa

SEQ ID NO: 308565 - RNA, 22 nt, Human herpesvirus 4 (Epstein-Barr virus)
cuuuccuagaaacugugccaug

SEQ ID NO: 308566 - RNA, 15 nt, Human herpesvirus 4 (Epstein-Barr virus)
cuuugaaagauguca

SEQ ID NO: 308567 - RNA, 15 nt, Human herpesvirus 4 (Epstein-Barr virus)
cuuugccggcaucca

SEQ ID NO: 308568 - RNA, 19 nt, Human herpesvirus 4 (Epstein-Barr virus)
cuuugggguauucucagau

SEQ ID NO: 308569 - RNA, 14 nt, Human herpesvirus 4 (Epstein-Barr virus)
cuuugucuuugcca

SEQ ID NO: 308570 - RNA, 21 nt, Human herpesvirus 4 (Epstein-Barr virus)
gcagacaaggacaggugccag

SEQ ID NO: 308571 - RNA, 23 nt, Human herpesvirus 4 (Epstein-Barr virus)
gcagacaaggacaggugccagau

SEQ ID NO: 308572 - RNA, 14 nt, Human herpesvirus 4 (Epstein-Barr virus)
gcagagagccacau

SEQ ID NO: 308573 - RNA, 16 nt, Human herpesvirus 4 (Epstein-Barr virus)
gcagcagcuacacucu

SEQ ID NO: 308574 - RNA, 20 nt, Human herpesvirus 4 (Epstein-Barr virus)
gcagcuggcccaccuaaaga

SEQ ID NO: 308575 - RNA, 14 nt, Human herpesvirus 4 (Epstein-Barr virus)
gcaggacacgugac

SEQ ID NO: 308576 - RNA, 20 nt, Human herpesvirus 4 (Epstein-Barr virus)
gcaggacacgugacaugucc

SEQ ID NO: 308577 - RNA, 21 nt, Human herpesvirus 4 (Epstein-Barr virus)
gcaggagaugggugcauuuca

SEQ ID NO: 308578 - RNA, 20 nt, Human herpesvirus 4 (Epstein-Barr virus)
gcaggagcaggaggggcagg

SEQ ID NO: 308579 - RNA, 14 nt, Human herpesvirus 4 (Epstein-Barr virus)
gcagggguggugga

SEQ ID NO: 308580 - RNA, 12 nt, Human herpesvirus 4 (Epstein-Barr virus)
gcagggugaaca

SEQ ID NO: 308581 - RNA, 14 nt, Human herpesvirus 4 (Epstein-Barr virus)
gcagguaaaccuuc

SEQ ID NO: 308582 - RNA, 23 nt, Human herpesvirus 4 (Epstein-Barr virus)
gcagguaagaagcuacaccggcc

SEQ ID NO: 308583 - RNA, 11 nt, Human herpesvirus 4 (Epstein-Barr virus)
gcagugauaag

SEQ ID NO: 308584 - RNA, 21 nt, Human herpesvirus 4 (Epstein-Barr virus)
gcaguggauggggucauuuau

SEQ ID NO: 308585 - RNA, 17 nt, Human herpesvirus 4 (Epstein-Barr virus)
gcauauuuucagaccca

SEQ ID NO: 308586 - RNA, 20 nt, Human herpesvirus 4 (Epstein-Barr virus)
gcaucacagguuauuuugcc

SEQ ID NO: 308587 - RNA, 14 nt, Human herpesvirus 4 (Epstein-Barr virus)
gcauccaccaucaa

SEQ ID NO: 308588 - RNA, 19 nt, Human herpesvirus 4 (Epstein-Barr virus)
gcauccggugccugagaca

SEQ ID NO: 308589 - RNA, 19 nt, Human herpesvirus 4 (Epstein-Barr virus)
gcaucgacacacgagccau

SEQ ID NO: 308590 - RNA, 21 nt, Human herpesvirus 4 (Epstein-Barr virus)
gcaucgcucaccccugugcag

SEQ ID NO: 308591 - RNA, 15 nt, Human herpesvirus 4 (Epstein-Barr virus)
gcaucuaagguccau

SEQ ID NO: 308592 - RNA, 22 nt, Human herpesvirus 4 (Epstein-Barr virus)
gcaucuuaucagagaggccucu

SEQ ID NO: 308593 - RNA, 18 nt, Human herpesvirus 4 (Epstein-Barr virus)
gcaugagcuccucuccaa

SEQ ID NO: 308594 - RNA, 15 nt, Human herpesvirus 4 (Epstein-Barr virus)
gcaugcuugggcaug

SEQ ID NO: 308595 - RNA, 19 nt, Human herpesvirus 4 (Epstein-Barr virus)
gcauuaauguccagugggg

SEQ ID NO: 308596 - RNA, 21 nt, Human herpesvirus 4 (Epstein-Barr virus)
gcauucccgugcuuuuugcca

SEQ ID NO: 308597 - RNA, 15 nt, Human herpesvirus 4 (Epstein-Barr virus)
gcauucuacuaggaa

SEQ ID NO: 308598 - RNA, 17 nt, Human herpesvirus 4 (Epstein-Barr virus)
gcauucuacuaggaaac

SEQ ID NO: 308599 - RNA, 20 nt, Human herpesvirus 4 (Epstein-Barr virus)
gccaaccugcucucucugga

SEQ ID NO: 308600 - RNA, 22 nt, Human herpesvirus 4 (Epstein-Barr virus)
gccaacucccccaaacaugucc

SEQ ID NO: 308601 - RNA, 20 nt, Human herpesvirus 4 (Epstein-Barr virus)
gccaaggacccccgcgucac

SEQ ID NO: 308602 - RNA, 15 nt, Human herpesvirus 4 (Epstein-Barr virus)
gccaaggugugcaug

SEQ ID NO: 308603 - RNA, 16 nt, Human herpesvirus 4 (Epstein-Barr virus)
gccaauccaugccaau

SEQ ID NO: 308604 - RNA, 13 nt, Human herpesvirus 4 (Epstein-Barr virus)
gccacacagccug

SEQ ID NO: 308605 - RNA, 17 nt, Human herpesvirus 4 (Epstein-Barr virus)
gccacacuggcucucug

SEQ ID NO: 308606 - RNA, 22 nt, Human herpesvirus 4 (Epstein-Barr virus)
gccacacuggcucucugccucu

SEQ ID NO: 308607 - RNA, 12 nt, Human herpesvirus 4 (Epstein-Barr virus)
gccacaggggag

SEQ ID NO: 308608 - RNA, 17 nt, Human herpesvirus 4 (Epstein-Barr virus)
gccaccaucuggcagcu

SEQ ID NO: 308609 - RNA, 19 nt, Human herpesvirus 4 (Epstein-Barr virus)
gccacgcaggauguucacg

SEQ ID NO: 308610 - RNA, 15 nt, Human herpesvirus 4 (Epstein-Barr virus)
gccagagacgagcug

SEQ ID NO: 308611 - RNA, 20 nt, Human herpesvirus 4 (Epstein-Barr virus)
gccagcaaaaccagcccggg

SEQ ID NO: 308612 - RNA, 18 nt, Human herpesvirus 4 (Epstein-Barr virus)
gccagcauggcagccggg

SEQ ID NO: 308613 - RNA, 16 nt, Human herpesvirus 4 (Epstein-Barr virus)
gccagcuaacugccua

SEQ ID NO: 308614 - RNA, 21 nt, Human herpesvirus 4 (Epstein-Barr virus)
gccaggaccccuaucacgggg

SEQ ID NO: 308615 - RNA, 20 nt, Human herpesvirus 4 (Epstein-Barr virus)
gccaggaccuggaugcugua

SEQ ID NO: 308616 - RNA, 19 nt, Human herpesvirus 4 (Epstein-Barr virus)
gccaggccgccaugcucag

SEQ ID NO: 308617 - RNA, 22 nt, Human herpesvirus 4 (Epstein-Barr virus)
gccaucaugcugaauauugcca

SEQ ID NO: 308618 - RNA, 17 nt, Human herpesvirus 4 (Epstein-Barr virus)
gccaucuacccaacagu

SEQ ID NO: 308619 - RNA, 20 nt, Human herpesvirus 4 (Epstein-Barr virus)
gccaucuacccaacagucuu

SEQ ID NO: 308620 - RNA, 18 nt, Human herpesvirus 4 (Epstein-Barr virus)
gccaucugucuugucacc

SEQ ID NO: 308621 - RNA, 16 nt, Human herpesvirus 4 (Epstein-Barr virus)
gccaugcuaucuugua

SEQ ID NO: 308622 - RNA, 13 nt, Human herpesvirus 4 (Epstein-Barr virus)
gccaugcucaggg

SEQ ID NO: 308623 - RNA, 17 nt, Human herpesvirus 4 (Epstein-Barr virus)
gccauucgacaggccau

SEQ ID NO: 308624 - RNA, 18 nt, Human herpesvirus 4 (Epstein-Barr virus)
gccauuguuuaccgccau

SEQ ID NO: 308625 - RNA, 22 nt, Human herpesvirus 4 (Epstein-Barr virus)
gcccaacagcaccgcggcaaaa

SEQ ID NO: 308626 - RNA, 16 nt, Human herpesvirus 4 (Epstein-Barr virus)
gcccaccuaugugacc

SEQ ID NO: 308627 - RNA, 14 nt, Human herpesvirus 4 (Epstein-Barr virus)
gcccacgccauacc

SEQ ID NO: 308628 - RNA, 18 nt, Human herpesvirus 4 (Epstein-Barr virus)
gcccacuaaccuuaacac

SEQ ID NO: 308629 - RNA, 16 nt, Human herpesvirus 4 (Epstein-Barr virus)
gcccagcccuccucag

SEQ ID NO: 308630 - RNA, 23 nt, Human herpesvirus 4 (Epstein-Barr virus)
gcccagguaccuuccuguguucu

SEQ ID NO: 308631 - RNA, 19 nt, Human herpesvirus 4 (Epstein-Barr virus)
gcccaguaugcagucucaa

SEQ ID NO: 308632 - RNA, 20 nt, Human herpesvirus 4 (Epstein-Barr virus)
gcccauucucguccaucucg

SEQ ID NO: 308633 - RNA, 23 nt, Human herpesvirus 4 (Epstein-Barr virus)
gccccuauaaccacaacugcuau

SEQ ID NO: 308634 - RNA, 17 nt, Human herpesvirus 4 (Epstein-Barr virus)
gccccugauugcugaga

SEQ ID NO: 308635 - RNA, 16 nt, Human herpesvirus 4 (Epstein-Barr virus)
gcccgcuucauucacg

SEQ ID NO: 308636 - RNA, 16 nt, Human herpesvirus 4 (Epstein-Barr virus)
gcccuaauucagccac

SEQ ID NO: 308637 - RNA, 14 nt, Human herpesvirus 4 (Epstein-Barr virus)
gcccucccacuuuu

SEQ ID NO: 308638 - RNA, 19 nt, Human herpesvirus 4 (Epstein-Barr virus)
gcccuccucagaaaacucu

SEQ ID NO: 308639 - RNA, 18 nt, Human herpesvirus 4 (Epstein-Barr virus)
gcccucgagccauuugag

SEQ ID NO: 308640 - RNA, 16 nt, Human herpesvirus 4 (Epstein-Barr virus)
gcccucuuccgugccu

SEQ ID NO: 308641 - RNA, 22 nt, Human herpesvirus 4 (Epstein-Barr virus)
gcccuggaggccucaggcaaca

SEQ ID NO: 308642 - RNA, 21 nt, Human herpesvirus 4 (Epstein-Barr virus)
gcccuggcccaccgguuucca

SEQ ID NO: 308643 - RNA, 15 nt, Human herpesvirus 4 (Epstein-Barr virus)
gccgaagaagggagg

SEQ ID NO: 308644 - RNA, 14 nt, Human herpesvirus 4 (Epstein-Barr virus)
gccgcaccacggga

SEQ ID NO: 308645 - RNA, 15 nt, Human herpesvirus 4 (Epstein-Barr virus)
gccgcggccaucacc

SEQ ID NO: 308646 - RNA, 20 nt, Human herpesvirus 4 (Epstein-Barr virus)
gccgcuaguugguccagggu

SEQ ID NO: 308647 - RNA, 17 nt, Human herpesvirus 4 (Epstein-Barr virus)
gccgcuuacagccagag

SEQ ID NO: 308648 - RNA, 20 nt, Human herpesvirus 4 (Epstein-Barr virus)
gccggggccuccauccagug

SEQ ID NO: 308649 - RNA, 18 nt, Human herpesvirus 4 (Epstein-Barr virus)
gccggguucucaggggug

SEQ ID NO: 308650 - RNA, 21 nt, Human herpesvirus 4 (Epstein-Barr virus)
gccuaauggccguccucugga

SEQ ID NO: 308651 - RNA, 23 nt, Human herpesvirus 4 (Epstein-Barr virus)
gccuaauuguguauugcucucgu

SEQ ID NO: 308652 - RNA, 18 nt, Human herpesvirus 4 (Epstein-Barr virus)
gccuacgcagaggccauc

SEQ ID NO: 308653 - RNA, 15 nt, Human herpesvirus 4 (Epstein-Barr virus)
gccucagauagccgg

SEQ ID NO: 308654 - RNA, 13 nt, Human herpesvirus 4 (Epstein-Barr virus)
gccuccuggccag

SEQ ID NO: 308655 - RNA, 17 nt, Human herpesvirus 4 (Epstein-Barr virus)
gccuccuggccagcacc

SEQ ID NO: 308656 - RNA, 14 nt, Human herpesvirus 4 (Epstein-Barr virus)
gccucucaucugga

SEQ ID NO: 308657 - RNA, 16 nt, Human herpesvirus 4 (Epstein-Barr virus)
gccucugggugcugag

SEQ ID NO: 308658 - RNA, 14 nt, Human herpesvirus 4 (Epstein-Barr virus)
gccucuuguguucu

SEQ ID NO: 308659 - RNA, 23 nt, Human herpesvirus 4 (Epstein-Barr virus)
gccugccggaguuuucuccccca

SEQ ID NO: 308660 - RNA, 20 nt, Human herpesvirus 4 (Epstein-Barr virus)
gccugcggggaaaccaacga

SEQ ID NO: 308661 - RNA, 14 nt, Human herpesvirus 4 (Epstein-Barr virus)
gccugcuccaccgc

SEQ ID NO: 308662 - RNA, 18 nt, Human herpesvirus 4 (Epstein-Barr virus)
gccuggagagcaugcagg

SEQ ID NO: 308663 - RNA, 17 nt, Human herpesvirus 4 (Epstein-Barr virus)
gccuggugccagacucu

SEQ ID NO: 308664 - RNA, 12 nt, Human herpesvirus 4 (Epstein-Barr virus)
gccugugccucg

SEQ ID NO: 308665 - RNA, 22 nt, Human herpesvirus 4 (Epstein-Barr virus)
gccugugccucgucuaccucug

SEQ ID NO: 308666 - RNA, 22 nt, Human herpesvirus 4 (Epstein-Barr virus)
gccuguuuguccagcagggccu

SEQ ID NO: 308667 - RNA, 13 nt, Human herpesvirus 4 (Epstein-Barr virus)
gccuucucugaug

SEQ ID NO: 308668 - RNA, 14 nt, Human herpesvirus 4 (Epstein-Barr virus)
gccuucucugaugg

SEQ ID NO: 308669 - RNA, 13 nt, Human herpesvirus 4 (Epstein-Barr virus)
gccuugaucuucu

SEQ ID NO: 308670 - RNA, 13 nt, Human herpesvirus 4 (Epstein-Barr virus)
gccuugcucucag

SEQ ID NO: 308671 - RNA, 15 nt, Human herpesvirus 4 (Epstein-Barr virus)
gccuuggcaucauca

SEQ ID NO: 308672 - RNA, 22 nt, Human herpesvirus 4 (Epstein-Barr virus)
gccuuggcuauggucauggcca

SEQ ID NO: 308673 - RNA, 19 nt, Human herpesvirus 4 (Epstein-Barr virus)
gcgaaaacgaaagugcuug

SEQ ID NO: 308674 - RNA, 16 nt, Human herpesvirus 4 (Epstein-Barr virus)
gcgaccggcagauccc

SEQ ID NO: 308675 - RNA, 17 nt, Human herpesvirus 4 (Epstein-Barr virus)
gcgagcaugaucaggac

SEQ ID NO: 308676 - RNA, 15 nt, Human herpesvirus 4 (Epstein-Barr virus)
gcgaggaacuggcuc

SEQ ID NO: 308677 - RNA, 21 nt, Human herpesvirus 4 (Epstein-Barr virus)
gcgagggggccuggugccaga

SEQ ID NO: 308678 - RNA, 19 nt, Human herpesvirus 4 (Epstein-Barr virus)
gcgagguuaagcugcaccu

SEQ ID NO: 308679 - RNA, 14 nt, Human herpesvirus 4 (Epstein-Barr virus)
gcgaugaggcggug

SEQ ID NO: 308680 - RNA, 19 nt, Human herpesvirus 4 (Epstein-Barr virus)
gcgaugagggccuuccaga

SEQ ID NO: 308681 - RNA, 13 nt, Human herpesvirus 4 (Epstein-Barr virus)
gcgcacccgggga

SEQ ID NO: 308682 - RNA, 20 nt, Human herpesvirus 4 (Epstein-Barr virus)
gcgccagagcggcauccuca

SEQ ID NO: 308683 - RNA, 23 nt, Human herpesvirus 4 (Epstein-Barr virus)
gcgccccuauaaccacaacugcu

SEQ ID NO: 308684 - RNA, 18 nt, Human herpesvirus 4 (Epstein-Barr virus)
gcgccgcagggguggugg

SEQ ID NO: 308685 - RNA, 22 nt, Human herpesvirus 4 (Epstein-Barr virus)
gcgccgccagcauggcagccgg

SEQ ID NO: 308686 - RNA, 22 nt, Human herpesvirus 4 (Epstein-Barr virus)
gcgccugagcugccuggugaga

SEQ ID NO: 308687 - RNA, 13 nt, Human herpesvirus 4 (Epstein-Barr virus)
gcgccugcuccac

SEQ ID NO: 308688 - RNA, 22 nt, Human herpesvirus 4 (Epstein-Barr virus)
gcgcuccguccuuguccaggag

SEQ ID NO: 308689 - RNA, 13 nt, Human herpesvirus 4 (Epstein-Barr virus)
gcggaugcggcgg

SEQ ID NO: 308690 - RNA, 13 nt, Human herpesvirus 4 (Epstein-Barr virus)
gcggcggcggagg

SEQ ID NO: 308691 - RNA, 14 nt, Human herpesvirus 4 (Epstein-Barr virus)
gcggcuacaucuac

SEQ ID NO: 308692 - RNA, 14 nt, Human herpesvirus 4 (Epstein-Barr virus)
gcggcuggaugccc

SEQ ID NO: 308693 - RNA, 13 nt, Human herpesvirus 4 (Epstein-Barr virus)
gcgucauuucuuc

SEQ ID NO: 308694 - RNA, 17 nt, Human herpesvirus 4 (Epstein-Barr virus)
gcguccuuugggaacac

SEQ ID NO: 308695 - RNA, 18 nt, Human herpesvirus 4 (Epstein-Barr virus)
gcgucucaggcuaugaag

SEQ ID NO: 308696 - RNA, 20 nt, Human herpesvirus 4 (Epstein-Barr virus)
gcgucucaggcuaugaagaa

SEQ ID NO: 308697 - RNA, 12 nt, Human herpesvirus 4 (Epstein-Barr virus)
gcuaacaggaca

SEQ ID NO: 308698 - RNA, 13 nt, Human herpesvirus 4 (Epstein-Barr virus)
gcuaacaggacau

SEQ ID NO: 308699 - RNA, 13 nt, Human herpesvirus 4 (Epstein-Barr virus)
gcuaacuguacau

SEQ ID NO: 308700 - RNA, 17 nt, Human herpesvirus 4 (Epstein-Barr virus)
gcuaaugccaugcagcg

SEQ ID NO: 308701 - RNA, 22 nt, Human herpesvirus 4 (Epstein-Barr virus)
gcuacguccucgugagucugcu

SEQ ID NO: 308702 - RNA, 19 nt, Human herpesvirus 4 (Epstein-Barr virus)
gcuacuuuguguuccuaaa

SEQ ID NO: 308703 - RNA, 17 nt, Human herpesvirus 4 (Epstein-Barr virus)
gcuagucacacccgugg

SEQ ID NO: 308704 - RNA, 17 nt, Human herpesvirus 4 (Epstein-Barr virus)
gcuaguugguccagggu

SEQ ID NO: 308705 - RNA, 22 nt, Human herpesvirus 4 (Epstein-Barr virus)
gcuaugaccaugcccagacuca

SEQ ID NO: 308706 - RNA, 20 nt, Human herpesvirus 4 (Epstein-Barr virus)
gcuauguggaaaugagggaa

SEQ ID NO: 308707 - RNA, 14 nt, Human herpesvirus 4 (Epstein-Barr virus)
gcucaaacgcugcu

SEQ ID NO: 308708 - RNA, 18 nt, Human herpesvirus 4 (Epstein-Barr virus)
gcucaaagaaguuaccug

SEQ ID NO: 308709 - RNA, 12 nt, Human herpesvirus 4 (Epstein-Barr virus)
gcucacauuguc

SEQ ID NO: 308710 - RNA, 20 nt, Human herpesvirus 4 (Epstein-Barr virus)
gcucacauuguccucaccaa

SEQ ID NO: 308711 - RNA, 21 nt, Human herpesvirus 4 (Epstein-Barr virus)
gcucacgaagcgagacaguac

SEQ ID NO: 308712 - RNA, 21 nt, Human herpesvirus 4 (Epstein-Barr virus)
gcucagcuuggggccaccggg

SEQ ID NO: 308713 - RNA, 22 nt, Human herpesvirus 4 (Epstein-Barr virus)
gcucaugcacaccuuggcgggu

SEQ ID NO: 308714 - RNA, 13 nt, Human herpesvirus 4 (Epstein-Barr virus)
gcuccagugccuc

SEQ ID NO: 308715 - RNA, 14 nt, Human herpesvirus 4 (Epstein-Barr virus)
gcuccagugccucc

SEQ ID NO: 308716 - RNA, 20 nt, Human herpesvirus 4 (Epstein-Barr virus)
gcuccguccuuguccaggag

SEQ ID NO: 308717 - RNA, 17 nt, Human herpesvirus 4 (Epstein-Barr virus)
gcuccgugggcccagag

SEQ ID NO: 308718 - RNA, 15 nt, Human herpesvirus 4 (Epstein-Barr virus)
gcuccgugguccuga

SEQ ID NO: 308719 - RNA, 19 nt, Human herpesvirus 4 (Epstein-Barr virus)
gcuccuauggacacuuggu

SEQ ID NO: 308720 - RNA, 20 nt, Human herpesvirus 4 (Epstein-Barr virus)
gcuccuauggacacuuggua

SEQ ID NO: 308721 - RNA, 13 nt, Human herpesvirus 4 (Epstein-Barr virus)
gcucgccccuggu

SEQ ID NO: 308722 - RNA, 19 nt, Human herpesvirus 4 (Epstein-Barr virus)
gcucggcauuccuaggaga

SEQ ID NO: 308723 - RNA, 14 nt, Human herpesvirus 4 (Epstein-Barr virus)
gcucuaacuuggca

SEQ ID NO: 308724 - RNA, 16 nt, Human herpesvirus 4 (Epstein-Barr virus)
gcucucguugccaaaa

SEQ ID NO: 308725 - RNA, 19 nt, Human herpesvirus 4 (Epstein-Barr virus)
gcucucuaucuacaacaaa

SEQ ID NO: 308726 - RNA, 20 nt, Human herpesvirus 4 (Epstein-Barr virus)
gcucucucuggagaucuucu

SEQ ID NO: 308727 - RNA, 14 nt, Human herpesvirus 4 (Epstein-Barr virus)
gcucuggcacugcu

SEQ ID NO: 308728 - RNA, 15 nt, Human herpesvirus 4 (Epstein-Barr virus)
gcucuggcacugcua

SEQ ID NO: 308729 - RNA, 19 nt, Human herpesvirus 4 (Epstein-Barr virus)
gcucuucaaccuuggcagu

SEQ ID NO: 308730 - RNA, 15 nt, Human herpesvirus 4 (Epstein-Barr virus)
gcugaaccagaauaa

SEQ ID NO: 308731 - RNA, 11 nt, Human herpesvirus 4 (Epstein-Barr virus)
ccugugccucg

SEQ ID NO: 308732 - RNA, 18 nt, Human herpesvirus 4 (Epstein-Barr virus)
ccugugcuucagcaguag

SEQ ID NO: 308733 - RNA, 15 nt, Human herpesvirus 4 (Epstein-Barr virus)
ccuuaaucuagcuca

SEQ ID NO: 308734 - RNA, 17 nt, Human herpesvirus 4 (Epstein-Barr virus)
ccuuauuuggacaucua

SEQ ID NO: 308735 - RNA, 21 nt, Human herpesvirus 4 (Epstein-Barr virus)
ccuucgauuuuacgaugaagg

SEQ ID NO: 308736 - RNA, 18 nt, Human herpesvirus 4 (Epstein-Barr virus)
ccuucgccccuaucuuaa

SEQ ID NO: 308737 - RNA, 14 nt, Human herpesvirus 4 (Epstein-Barr virus)
ccuucuccaucucc

SEQ ID NO: 308738 - RNA, 17 nt, Human herpesvirus 4 (Epstein-Barr virus)
ccuugcucucagcacuu

SEQ ID NO: 308739 - RNA, 22 nt, Human herpesvirus 4 (Epstein-Barr virus)
ccuugcucucagcacuuugcca

SEQ ID NO: 308740 - RNA, 16 nt, Human herpesvirus 4 (Epstein-Barr virus)
ccuuggcaguguccuc

SEQ ID NO: 308741 - RNA, 19 nt, Human herpesvirus 4 (Epstein-Barr virus)
ccuuuauaugaaaaugugu

SEQ ID NO: 308742 - RNA, 20 nt, Human herpesvirus 4 (Epstein-Barr virus)
ccuuucgacugucauuuaca

SEQ ID NO: 308743 - RNA, 14 nt, Human herpesvirus 4 (Epstein-Barr virus)
ccuuugcggcauca

SEQ ID NO: 308744 - RNA, 19 nt, Human herpesvirus 4 (Epstein-Barr virus)
ccuuugcuaucuuugcuga

SEQ ID NO: 308745 - RNA, 23 nt, Human herpesvirus 4 (Epstein-Barr virus)
ccuuugcuaucuuugcugaagau

SEQ ID NO: 308746 - RNA, 16 nt, Human herpesvirus 4 (Epstein-Barr virus)
cgaagaacacuccaca

SEQ ID NO: 308747 - RNA, 14 nt, Human herpesvirus 4 (Epstein-Barr virus)
cgaagcuagugcag

SEQ ID NO: 308748 - RNA, 20 nt, Human herpesvirus 4 (Epstein-Barr virus)
cgaauauccccaaagucaag

SEQ ID NO: 308749 - RNA, 23 nt, Human herpesvirus 4 (Epstein-Barr virus)
cgaccccaaggaaggcuugccaa

SEQ ID NO: 308750 - RNA, 15 nt, Human herpesvirus 4 (Epstein-Barr virus)
cgaccugccaaagau

SEQ ID NO: 308751 - RNA, 17 nt, Human herpesvirus 4 (Epstein-Barr virus)
cgacgagcgggauagca

SEQ ID NO: 308752 - RNA, 16 nt, Human herpesvirus 4 (Epstein-Barr virus)
cgacgcggagaggucc

SEQ ID NO: 308753 - RNA, 22 nt, Human herpesvirus 4 (Epstein-Barr virus)
cgugucauuuagaaaccuugcc

SEQ ID NO: 308754 - RNA, 18 nt, Human herpesvirus 4 (Epstein-Barr virus)
cguuggcgggacuggcac

SEQ ID NO: 308755 - RNA, 17 nt, Human herpesvirus 4 (Epstein-Barr virus)
cguuugaguccaaacag

SEQ ID NO: 308756 - RNA, 23 nt, Human herpesvirus 4 (Epstein-Barr virus)
cuaaauuugcugacauauguaca

SEQ ID NO: 308757 - RNA, 16 nt, Human herpesvirus 4 (Epstein-Barr virus)
cuaacugugucccacu

SEQ ID NO: 308758 - RNA, 20 nt, Human herpesvirus 4 (Epstein-Barr virus)
cuaacuuggcaucucuuuua

SEQ ID NO: 308759 - RNA, 19 nt, Human herpesvirus 4 (Epstein-Barr virus)
cuaaugcauccgcaccaca

SEQ ID NO: 308760 - RNA, 20 nt, Human herpesvirus 4 (Epstein-Barr virus)
cuaauggccguccucuggac

SEQ ID NO: 308761 - RNA, 20 nt, Human herpesvirus 4 (Epstein-Barr virus)
cuaauguaccucauagacac

SEQ ID NO: 308762 - RNA, 18 nt, Human herpesvirus 4 (Epstein-Barr virus)
cuaauucagccaccuccc

SEQ ID NO: 308763 - RNA, 19 nt, Human herpesvirus 4 (Epstein-Barr virus)
cuaauuguguauugcucuc

SEQ ID NO: 308764 - RNA, 23 nt, Human herpesvirus 4 (Epstein-Barr virus)
cuaauuucuaccuaucagagggu

SEQ ID NO: 308765 - RNA, 17 nt, Human herpesvirus 4 (Epstein-Barr virus)
cuacaacucagccccau

SEQ ID NO: 308766 - RNA, 15 nt, Human herpesvirus 4 (Epstein-Barr virus)
cuacaauaaacccaa

SEQ ID NO: 308767 - RNA, 14 nt, Human herpesvirus 4 (Epstein-Barr virus)
cuacaauguuccuu

SEQ ID NO: 308768 - RNA, 12 nt, Human herpesvirus 4 (Epstein-Barr virus)
cuacaccccuga

SEQ ID NO: 308769 - RNA, 22 nt, Human herpesvirus 4 (Epstein-Barr virus)
cuacaccgagcagaaggccaug

SEQ ID NO: 308770 - RNA, 16 nt, Human herpesvirus 4 (Epstein-Barr virus)
cuacaucccauaccua

SEQ ID NO: 308771 - RNA, 20 nt, Human herpesvirus 4 (Epstein-Barr virus)
cuacaugaauguuacccuca

SEQ ID NO: 308772 - RNA, 21 nt, Human herpesvirus 4 (Epstein-Barr virus)
cuaccgaugauucuggccaug

SEQ ID NO: 308773 - RNA, 15 nt, Human herpesvirus 4 (Epstein-Barr virus)
cuaccggcgagcaug

SEQ ID NO: 308774 - RNA, 18 nt, Human herpesvirus 4 (Epstein-Barr virus)
cuaccugucugauugcac

SEQ ID NO: 308775 - RNA, 14 nt, Human herpesvirus 4 (Epstein-Barr virus)
cuaccuuccacgac

SEQ ID NO: 308776 - RNA, 16 nt, Human herpesvirus 4 (Epstein-Barr virus)
cuacgcagaggccauc

SEQ ID NO: 308777 - RNA, 21 nt, Human herpesvirus 4 (Epstein-Barr virus)
cuacgcagaggccaucauggc

SEQ ID NO: 308778 - RNA, 14 nt, Human herpesvirus 4 (Epstein-Barr virus)
cuacgcgggccaca

SEQ ID NO: 308779 - RNA, 16 nt, Human herpesvirus 4 (Epstein-Barr virus)
cuacucagaugaagac

SEQ ID NO: 308780 - RNA, 22 nt, Human herpesvirus 4 (Epstein-Barr virus)
cuacucagaugaagacgaggag

SEQ ID NO: 308781 - RNA, 15 nt, Human herpesvirus 4 (Epstein-Barr virus)
cuacuugcucagguu

SEQ ID NO: 308782 - RNA, 17 nt, Human herpesvirus 4 (Epstein-Barr virus)
cuagaaacugugccaug

SEQ ID NO: 308783 - RNA, 22 nt, Human herpesvirus 4 (Epstein-Barr virus)
cuagaaacugugccauggugcc

SEQ ID NO: 308784 - RNA, 14 nt, Human herpesvirus 4 (Epstein-Barr virus)
cuagaaugugguaa

SEQ ID NO: 308785 - RNA, 17 nt, Human herpesvirus 4 (Epstein-Barr virus)
cuagaccucauccugcu

SEQ ID NO: 308786 - RNA, 21 nt, Human herpesvirus 4 (Epstein-Barr virus)
cuagcgccccuauaaccacaa

SEQ ID NO: 308787 - RNA, 14 nt, Human herpesvirus 4 (Epstein-Barr virus)
cuagcgucacugau

SEQ ID NO: 308788 - RNA, 14 nt, Human herpesvirus 4 (Epstein-Barr virus)
cuagcucacuuuca

SEQ ID NO: 308789 - RNA, 22 nt, Human herpesvirus 4 (Epstein-Barr virus)
cuagcuuauuuuuugguugugc

SEQ ID NO: 308790 - RNA, 14 nt, Human herpesvirus 4 (Epstein-Barr virus)
cuaggccugccacg

SEQ ID NO: 308791 - RNA, 19 nt, Human herpesvirus 4 (Epstein-Barr virus)
cuauaaccacaacugcuau

SEQ ID NO: 308792 - RNA, 21 nt, Human herpesvirus 4 (Epstein-Barr virus)
cuauaccaaagcuaacuguac

SEQ ID NO: 308793 - RNA, 24 nt, Human herpesvirus 4 (Epstein-Barr virus)
cuauauccuagagggacagcugac

SEQ ID NO: 308794 - RNA, 17 nt, Human herpesvirus 4 (Epstein-Barr virus)
cuaucacagggacaucu

SEQ ID NO: 308795 - RNA, 18 nt, Human herpesvirus 4 (Epstein-Barr virus)
cuaucacagggacaucua

SEQ ID NO: 308796 - RNA, 10 nt, Human herpesvirus 4 (Epstein-Barr virus)
cuaugccaau

SEQ ID NO: 308797 - RNA, 19 nt, Human herpesvirus 4 (Epstein-Barr virus)
cuauggaggcccccggcug

SEQ ID NO: 308798 - RNA, 11 nt, Human herpesvirus 4 (Epstein-Barr virus)
cuauggcgcgu

SEQ ID NO: 308799 - RNA, 19 nt, Human herpesvirus 4 (Epstein-Barr virus)
cuauggggccugugacugg

SEQ ID NO: 308800 - RNA, 20 nt, Human herpesvirus 4 (Epstein-Barr virus)
cuauucugagcaccaacaca

SEQ ID NO: 308801 - RNA, 16 nt, Human herpesvirus 4 (Epstein-Barr virus)
cuauugguugaucucc

SEQ ID NO: 308802 - RNA, 18 nt, Human herpesvirus 4 (Epstein-Barr virus)
cucaagcuacucaaugag

SEQ ID NO: 308803 - RNA, 20 nt, Human herpesvirus 4 (Epstein-Barr virus)
cucaaggcagucuccaccuu

SEQ ID NO: 308804 - RNA, 24 nt, Human herpesvirus 4 (Epstein-Barr virus)
cucaagggaggagugcugcaggua

SEQ ID NO: 308805 - RNA, 18 nt, Human herpesvirus 4 (Epstein-Barr virus)
cucaaggggcacgagaug

SEQ ID NO: 308806 - RNA, 16 nt, Human herpesvirus 4 (Epstein-Barr virus)
cucacaggacauguuu

SEQ ID NO: 308807 - RNA, 17 nt, Human herpesvirus 4 (Epstein-Barr virus)
cucacauuguccucacc

SEQ ID NO: 308808 - RNA, 22 nt, Human herpesvirus 4 (Epstein-Barr virus)
cucaccacucgaaacuauggca

SEQ ID NO: 308809 - RNA, 20 nt, Human herpesvirus 4 (Epstein-Barr virus)
cucaccgggaacgcccagua

SEQ ID NO: 308810 - RNA, 20 nt, Human herpesvirus 4 (Epstein-Barr virus)
cucacgaucuucaagagucu

SEQ ID NO: 308811 - RNA, 17 nt, Human herpesvirus 4 (Epstein-Barr virus)
cucagaggaggaggaug

SEQ ID NO: 308812 - RNA, 23 nt, Human herpesvirus 4 (Epstein-Barr virus)
cucagcacuuugccagcaacuua

SEQ ID NO: 308813 - RNA, 18 nt, Human herpesvirus 4 (Epstein-Barr virus)
cucagccccaucuuccag

SEQ ID NO: 308814 - RNA, 17 nt, Human herpesvirus 4 (Epstein-Barr virus)
cucagcuccgcgcucaa

SEQ ID NO: 308815 - RNA, 17 nt, Human herpesvirus 4 (Epstein-Barr virus)
cucaggaucagggccaa

SEQ ID NO: 308816 - RNA, 16 nt, Human herpesvirus 4 (Epstein-Barr virus)
cucagucccaccacaa

SEQ ID NO: 308817 - RNA, 15 nt, Human herpesvirus 4 (Epstein-Barr virus)
cucagucuuugcaau

SEQ ID NO: 308818 - RNA, 17 nt, Human herpesvirus 4 (Epstein-Barr virus)
cucauaauggugccuga

SEQ ID NO: 308819 - RNA, 16 nt, Human herpesvirus 4 (Epstein-Barr virus)
cucauacaguuuguua

SEQ ID NO: 308820 - RNA, 19 nt, Human herpesvirus 4 (Epstein-Barr virus)
cucaucuggaacgguggga

SEQ ID NO: 308821 - RNA, 20 nt, Human herpesvirus 4 (Epstein-Barr virus)
cucaugggggaaugagggaa

SEQ ID NO: 308822 - RNA, 16 nt, Human herpesvirus 4 (Epstein-Barr virus)
cucaugguacggugau

SEQ ID NO: 308823 - RNA, 21 nt, Human herpesvirus 4 (Epstein-Barr virus)
cucauucccccaugagaccca

SEQ ID NO: 308824 - RNA, 13 nt, Human herpesvirus 4 (Epstein-Barr virus)
cucauugugcuga

SEQ ID NO: 308825 - RNA, 14 nt, Human herpesvirus 4 (Epstein-Barr virus)
cucauugugcugaa

SEQ ID NO: 308826 - RNA, 17 nt, Human herpesvirus 4 (Epstein-Barr virus)
cucauuuugugugccuc

SEQ ID NO: 308827 - RNA, 13 nt, Human herpesvirus 4 (Epstein-Barr virus)
cuccaacgaggau

SEQ ID NO: 308828 - RNA, 17 nt, Human herpesvirus 4 (Epstein-Barr virus)
cuccaagcggcacagau

SEQ ID NO: 308829 - RNA, 19 nt, Human herpesvirus 4 (Epstein-Barr virus)
cuccaagcggcacagauua

SEQ ID NO: 308830 - RNA, 17 nt, Human herpesvirus 4 (Epstein-Barr virus)
cuccaccagcuucucaa

SEQ ID NO: 308831 - RNA, 21 nt, Human herpesvirus 4 (Epstein-Barr virus)
cuccaccgccgguuaacuuua

SEQ ID NO: 308832 - RNA, 15 nt, Human herpesvirus 4 (Epstein-Barr virus)
cuccacucccagucc

SEQ ID NO: 308833 - RNA, 14 nt, Human herpesvirus 4 (Epstein-Barr virus)
cuccagcaaccaau

SEQ ID NO: 308834 - RNA, 15 nt, Human herpesvirus 4 (Epstein-Barr virus)
cuccaucagggccag

SEQ ID NO: 308835 - RNA, 17 nt, Human herpesvirus 4 (Epstein-Barr virus)
cucccacuuuuacccca

SEQ ID NO: 308836 - RNA, 21 nt, Human herpesvirus 4 (Epstein-Barr virus)
cucccacuuuuaccccagucc

SEQ ID NO: 308837 - RNA, 21 nt, Human herpesvirus 4 (Epstein-Barr virus)
cucccugauaaugucuucaau

SEQ ID NO: 308838 - RNA, 13 nt, Human herpesvirus 4 (Epstein-Barr virus)
cuccgugguccug

SEQ ID NO: 308839 - RNA, 22 nt, Human herpesvirus 4 (Epstein-Barr virus)
cuccuaaaaccuacaugaaugu

SEQ ID NO: 308840 - RNA, 20 nt, Human herpesvirus 4 (Epstein-Barr virus)
cuccuauggacacuugguaa

SEQ ID NO: 308841 - RNA, 13 nt, Human herpesvirus 4 (Epstein-Barr virus)
cuccucuccaaau

SEQ ID NO: 308842 - RNA, 15 nt, Human herpesvirus 4 (Epstein-Barr virus)
cuccugccugaauca

SEQ ID NO: 308843 - RNA, 21 nt, Human herpesvirus 4 (Epstein-Barr virus)
cuccugccugccucugcucug

SEQ ID NO: 308844 - RNA, 14 nt, Human herpesvirus 4 (Epstein-Barr virus)
cuccuuugccuugu

SEQ ID NO: 308845 - RNA, 14 nt, Human herpesvirus 4 (Epstein-Barr virus)
cucgaaacuauggc

SEQ ID NO: 308846 - RNA, 15 nt, Human herpesvirus 4 (Epstein-Barr virus)
cucgaagcggucuca

SEQ ID NO: 308847 - RNA, 21 nt, Human herpesvirus 4 (Epstein-Barr virus)
cucgaugauugagaaugccaa

SEQ ID NO: 308848 - RNA, 15 nt, Human herpesvirus 4 (Epstein-Barr virus)
cucgcucagcccacu

SEQ ID NO: 308849 - RNA, 11 nt, Human herpesvirus 4 (Epstein-Barr virus)
cucgguggugg

SEQ ID NO: 308850 - RNA, 15 nt, Human herpesvirus 4 (Epstein-Barr virus)
cucguccaucucgau

SEQ ID NO: 308851 - RNA, 18 nt, Human herpesvirus 4 (Epstein-Barr virus)
cucguuaaaccaauagca

SEQ ID NO: 308852 - RNA, 18 nt, Human herpesvirus 4 (Epstein-Barr virus)
cucuaacugugucccacu

SEQ ID NO: 308853 - RNA, 14 nt, Human herpesvirus 4 (Epstein-Barr virus)
cucucagcacuuug

SEQ ID NO: 308854 - RNA, 17 nt, Human herpesvirus 4 (Epstein-Barr virus)
cucucagcacuuugcca

SEQ ID NO: 308855 - RNA, 21 nt, Human herpesvirus 4 (Epstein-Barr virus)
cucucagcacuuugccagcaa

SEQ ID NO: 308856 - RNA, 12 nt, Human herpesvirus 4 (Epstein-Barr virus)
cucucauguacu

SEQ ID NO: 308857 - RNA, 15 nt, Human herpesvirus 4 (Epstein-Barr virus)
cucuccagcaaccaa

SEQ ID NO: 308858 - RNA, 19 nt, Human herpesvirus 4 (Epstein-Barr virus)
cucucgcacucuuguugcu

SEQ ID NO: 308859 - RNA, 15 nt, Human herpesvirus 4 (Epstein-Barr virus)
cucucguugccaaaa

SEQ ID NO: 308860 - RNA, 22 nt, Human herpesvirus 4 (Epstein-Barr virus)
cucucucccccgggcgcugccu

SEQ ID NO: 308861 - RNA, 22 nt, Human herpesvirus 4 (Epstein-Barr virus)
cucucucuggagaucuucucac

SEQ ID NO: 308862 - RNA, 16 nt, Human herpesvirus 4 (Epstein-Barr virus)
cucugaaaaugaugaa

SEQ ID NO: 308863 - RNA, 22 nt, Human herpesvirus 4 (Epstein-Barr virus)
cucugaagcaacagguccucag

SEQ ID NO: 308864 - RNA, 21 nt, Human herpesvirus 4 (Epstein-Barr virus)
cucugaaggauccaugcaagu

SEQ ID NO: 308865 - RNA, 15 nt, Human herpesvirus 4 (Epstein-Barr virus)
cucuggagaucuucu

SEQ ID NO: 308866 - RNA, 17 nt, Human herpesvirus 4 (Epstein-Barr virus)
cucuggagaucuucuca

SEQ ID NO: 308867 - RNA, 16 nt, Human herpesvirus 4 (Epstein-Barr virus)
cucuguuucuguacaa

SEQ ID NO: 308868 - RNA, 13 nt, Human herpesvirus 4 (Epstein-Barr virus)
cucuuacaccaga

SEQ ID NO: 308869 - RNA, 22 nt, Human herpesvirus 4 (Epstein-Barr virus)
cucuuacaccagaggccacaaa

SEQ ID NO: 308870 - RNA, 18 nt, Human herpesvirus 4 (Epstein-Barr virus)
cucuucaaccuuggcagu

SEQ ID NO: 308871 - RNA, 22 nt, Human herpesvirus 4 (Epstein-Barr virus)
cucuugccucggcgcugggacu

SEQ ID NO: 308872 - RNA, 14 nt, Human herpesvirus 4 (Epstein-Barr virus)
cucuuuuacagugg

SEQ ID NO: 308873 - RNA, 19 nt, Human herpesvirus 4 (Epstein-Barr virus)
cucuuuuagaaacuaugca

SEQ ID NO: 308874 - RNA, 16 nt, Human herpesvirus 4 (Epstein-Barr virus)
cugaagaugauggacc

SEQ ID NO: 308875 - RNA, 19 nt, Human herpesvirus 4 (Epstein-Barr virus)
cugaauuuauacccaguga

SEQ ID NO: 308876 - RNA, 22 nt, Human herpesvirus 4 (Epstein-Barr virus)
cugaauuuauacccagugagua

SEQ ID NO: 308877 - RNA, 16 nt, Human herpesvirus 4 (Epstein-Barr virus)
cugacacagacuuggc

SEQ ID NO: 308878 - RNA, 11 nt, Human herpesvirus 4 (Epstein-Barr virus)
cugacauuucu

SEQ ID NO: 308879 - RNA, 14 nt, Human herpesvirus 4 (Epstein-Barr virus)
cugacgaggggcca

SEQ ID NO: 308880 - RNA, 14 nt, Human herpesvirus 4 (Epstein-Barr virus)
cugacgccaaugcc

SEQ ID NO: 308881 - RNA, 14 nt, Human herpesvirus 4 (Epstein-Barr virus)
cugacgcuccagga

SEQ ID NO: 308882 - RNA, 17 nt, Human herpesvirus 4 (Epstein-Barr virus)
cugacggaaaucugcuc

SEQ ID NO: 308883 - RNA, 13 nt, Human herpesvirus 4 (Epstein-Barr virus)
cugacgguggugg

SEQ ID NO: 308884 - RNA, 12 nt, Human herpesvirus 4 (Epstein-Barr virus)
cugacuaagggu

SEQ ID NO: 308885 - RNA, 13 nt, Human herpesvirus 4 (Epstein-Barr virus)
cugacuacucaga

SEQ ID NO: 308886 - RNA, 18 nt, Human herpesvirus 4 (Epstein-Barr virus)
cugagacagaggugcuca

SEQ ID NO: 308887 - RNA, 22 nt, Human herpesvirus 4 (Epstein-Barr virus)
cugagagccggggguugcuuca

SEQ ID NO: 308888 - RNA, 12 nt, Human herpesvirus 4 (Epstein-Barr virus)
cugagaugugaa

SEQ ID NO: 308889 - RNA, 17 nt, Human herpesvirus 4 (Epstein-Barr virus)
cugagccugagccacac

SEQ ID NO: 308890 - RNA, 13 nt, Human herpesvirus 4 (Epstein-Barr virus)
cugagcgaugccu

SEQ ID NO: 308891 - RNA, 18 nt, Human herpesvirus 4 (Epstein-Barr virus)
cugagcgcacggccucaa

SEQ ID NO: 308892 - RNA, 17 nt, Human herpesvirus 4 (Epstein-Barr virus)
cugaguucuacaaugcc

SEQ ID NO: 308893 - RNA, 18 nt, Human herpesvirus 4 (Epstein-Barr virus)
cugaugagucugacuacu

SEQ ID NO: 308894 - RNA, 22 nt, Human herpesvirus 4 (Epstein-Barr virus)
cugauggccuggagagcaugca

SEQ ID NO: 308895 - RNA, 14 nt, Human herpesvirus 4 (Epstein-Barr virus)
cugauuuugggcac

SEQ ID NO: 308896 - RNA, 16 nt, Human herpesvirus 4 (Epstein-Barr virus)
cugcacagaacaucac

SEQ ID NO: 308897 - RNA, 17 nt, Human herpesvirus 4 (Epstein-Barr virus)
cugcacagaacaucacu

SEQ ID NO: 308898 - RNA, 21 nt, Human herpesvirus 4 (Epstein-Barr virus)
cugcacagaacaucacugcca

SEQ ID NO: 308899 - RNA, 19 nt, Human herpesvirus 4 (Epstein-Barr virus)
cugcacggcccuccagcgu

SEQ ID NO: 308900 - RNA, 22 nt, Human herpesvirus 4 (Epstein-Barr virus)
cugcaggacacgugacaugucc

SEQ ID NO: 308901 - RNA, 15 nt, Human herpesvirus 4 (Epstein-Barr virus)
cugcccccugucucu

SEQ ID NO: 308902 - RNA, 22 nt, Human herpesvirus 4 (Epstein-Barr virus)
cugccuaacggucgaaacccac

SEQ ID NO: 308903 - RNA, 22 nt, Human herpesvirus 4 (Epstein-Barr virus)
cugcggagauggaugacaccau

SEQ ID NO: 308904 - RNA, 19 nt, Human herpesvirus 4 (Epstein-Barr virus)
cugcggcggcggaggcggc

SEQ ID NO: 308905 - RNA, 13 nt, Human herpesvirus 4 (Epstein-Barr virus)
cugcgguggugcg

SEQ ID NO: 308906 - RNA, 16 nt, Human herpesvirus 4 (Epstein-Barr virus)
cugcguagaugagccu

SEQ ID NO: 308907 - RNA, 22 nt, Human herpesvirus 4 (Epstein-Barr virus)
gacaucugggaguguagaggug

SEQ ID NO: 308908 - RNA, 15 nt, Human herpesvirus 4 (Epstein-Barr virus)
gacaugagcauggaa

SEQ ID NO: 308909 - RNA, 18 nt, Human herpesvirus 4 (Epstein-Barr virus)
gacaugagcauggaagac

SEQ ID NO: 308910 - RNA, 19 nt, Human herpesvirus 4 (Epstein-Barr virus)
gacaugcagacuccagguu

SEQ ID NO: 308911 - RNA, 22 nt, Human herpesvirus 4 (Epstein-Barr virus)
gacauguuuggggaguuagcau

SEQ ID NO: 308912 - RNA, 18 nt, Human herpesvirus 4 (Epstein-Barr virus)
gacauuaaccucaaccac

SEQ ID NO: 308913 - RNA, 16 nt, Human herpesvirus 4 (Epstein-Barr virus)
gacauucacugggaca

SEQ ID NO: 308914 - RNA, 23 nt, Human herpesvirus 4 (Epstein-Barr virus)
gacauucacugggacaacuguca

SEQ ID NO: 308915 - RNA, 13 nt, Human herpesvirus 4 (Epstein-Barr virus)
gaccaagcuacca

SEQ ID NO: 308916 - RNA, 14 nt, Human herpesvirus 4 (Epstein-Barr virus)
gaccaaugccaaag

SEQ ID NO: 308917 - RNA, 22 nt, Human herpesvirus 4 (Epstein-Barr virus)
gaccaaugccaaagcugaagaa

SEQ ID NO: 308918 - RNA, 17 nt, Human herpesvirus 4 (Epstein-Barr virus)
gaccaggucgaccaccu

SEQ ID NO: 308919 - RNA, 21 nt, Human herpesvirus 4 (Epstein-Barr virus)
gaccaggucgaccaccucaac

SEQ ID NO: 308920 - RNA, 19 nt, Human herpesvirus 4 (Epstein-Barr virus)
gaccaguguguacauucca

SEQ ID NO: 308921 - RNA, 21 nt, Human herpesvirus 4 (Epstein-Barr virus)
gaccaguuuuucggaucccag

SEQ ID NO: 308922 - RNA, 17 nt, Human herpesvirus 4 (Epstein-Barr virus)
gaccaugcccagacuca

SEQ ID NO: 308923 - RNA, 19 nt, Human herpesvirus 4 (Epstein-Barr virus)
gaggcuggugccuuggcuu

SEQ ID NO: 308924 - RNA, 21 nt, Human herpesvirus 4 (Epstein-Barr virus)
gagggaaaagagacugcgaaa

SEQ ID NO: 308925 - RNA, 16 nt, Human herpesvirus 4 (Epstein-Barr virus)
gagggacaguaccaca

SEQ ID NO: 308926 - RNA, 16 nt, Human herpesvirus 4 (Epstein-Barr virus)
gagggccgauaucaca

SEQ ID NO: 308927 - RNA, 13 nt, Human herpesvirus 4 (Epstein-Barr virus)
gaggggaggcggg

SEQ ID NO: 308928 - RNA, 17 nt, Human herpesvirus 4 (Epstein-Barr virus)
gagggggcgaaggcgug

SEQ ID NO: 308929 - RNA, 21 nt, Human herpesvirus 4 (Epstein-Barr virus)
gaggguggucaccgcgaccaa

SEQ ID NO: 308930 - RNA, 18 nt, Human herpesvirus 4 (Epstein-Barr virus)
gagguaauuagcacggua

SEQ ID NO: 308931 - RNA, 11 nt, Human herpesvirus 4 (Epstein-Barr virus)
gaggugccaca

SEQ ID NO: 308932 - RNA, 16 nt, Human herpesvirus 4 (Epstein-Barr virus)
gagguggccacacugg

SEQ ID NO: 308933 - RNA, 15 nt, Human herpesvirus 4 (Epstein-Barr virus)
gaguaauugcagugg

SEQ ID NO: 308934 - RNA, 11 nt, Human herpesvirus 4 (Epstein-Barr virus)
gaguaccccag

SEQ ID NO: 308935 - RNA, 21 nt, Human herpesvirus 4 (Epstein-Barr virus)
gaguaccugcgucucauuccc

SEQ ID NO: 308936 - RNA, 19 nt, Human herpesvirus 4 (Epstein-Barr virus)
gagucaguuacacacacag

SEQ ID NO: 308937 - RNA, 15 nt, Human herpesvirus 4 (Epstein-Barr virus)
gaguccaaggcccaa

SEQ ID NO: 308938 - RNA, 14 nt, Human herpesvirus 4 (Epstein-Barr virus)
gagucccugcgcca

SEQ ID NO: 308939 - RNA, 19 nt, Human herpesvirus 4 (Epstein-Barr virus)
gagucucgccaucuaccca

SEQ ID NO: 308940 - RNA, 21 nt, Human herpesvirus 4 (Epstein-Barr virus)
gagucucgccaucuacccaac

SEQ ID NO: 308941 - RNA, 22 nt, Human herpesvirus 4 (Epstein-Barr virus)
gagugacacugaugagucugac

SEQ ID NO: 308942 - RNA, 19 nt, Human herpesvirus 4 (Epstein-Barr virus)
gagugccucugggugcuga

SEQ ID NO: 308943 - RNA, 18 nt, Human herpesvirus 4 (Epstein-Barr virus)
gauaauguacagacuacc

SEQ ID NO: 308944 - RNA, 13 nt, Human herpesvirus 4 (Epstein-Barr virus)
gauaaugucuuca

SEQ ID NO: 308945 - RNA, 16 nt, Human herpesvirus 4 (Epstein-Barr virus)
gauacucaccaagauu

SEQ ID NO: 308946 - RNA, 12 nt, Human herpesvirus 4 (Epstein-Barr virus)
gauagauggcac

SEQ ID NO: 308947 - RNA, 20 nt, Human herpesvirus 4 (Epstein-Barr virus)
gauaucccugcugucucuga

SEQ ID NO: 308948 - RNA, 13 nt, Human herpesvirus 4 (Epstein-Barr virus)
gauaugaaggugu

SEQ ID NO: 308949 - RNA, 23 nt, Human herpesvirus 4 (Epstein-Barr virus)
gaucaccccgaguccaaggccca

SEQ ID NO: 308950 - RNA, 15 nt, Human herpesvirus 4 (Epstein-Barr virus)
gauccaacuccggcc

SEQ ID NO: 308951 - RNA, 20 nt, Human herpesvirus 4 (Epstein-Barr virus)
gauccggaggggaccacuag

SEQ ID NO: 308952 - RNA, 15 nt, Human herpesvirus 4 (Epstein-Barr virus)
gaucucuugcgccca

SEQ ID NO: 308953 - RNA, 17 nt, Human herpesvirus 4 (Epstein-Barr virus)
gaucuuugacugacaca

SEQ ID NO: 308954 - RNA, 14 nt, Human herpesvirus 4 (Epstein-Barr virus)
gaugaacaccacca

SEQ ID NO: 308955 - RNA, 19 nt, Human herpesvirus 4 (Epstein-Barr virus)
gaugaacuggucaccagcu

SEQ ID NO: 308956 - RNA, 21 nt, Human herpesvirus 4 (Epstein-Barr virus)
gaugaauugcuguuuuugcca

SEQ ID NO: 308957 - RNA, 19 nt, Human herpesvirus 4 (Epstein-Barr virus)
gaugagucugacuacucag

SEQ ID NO: 308958 - RNA, 16 nt, Human herpesvirus 4 (Epstein-Barr virus)
gaugauggacccaaac

SEQ ID NO: 308959 - RNA, 18 nt, Human herpesvirus 4 (Epstein-Barr virus)
gaugauugagaaugccaa

SEQ ID NO: 308960 - RNA, 17 nt, Human herpesvirus 4 (Epstein-Barr virus)
gaugcaacagaggauug

SEQ ID NO: 308961 - RNA, 19 nt, Human herpesvirus 4 (Epstein-Barr virus)
gaugcaccgggaugagcug

SEQ ID NO: 308962 - RNA, 20 nt, Human herpesvirus 4 (Epstein-Barr virus)
gauggaaagggcauguggug

SEQ ID NO: 308963 - RNA, 24 nt, Human herpesvirus 4 (Epstein-Barr virus)
gauggccuggagagcaugcagguc

SEQ ID NO: 308964 - RNA, 23 nt, Human herpesvirus 4 (Epstein-Barr virus)
gauggcgacuuuguuuagggaca

SEQ ID NO: 308965 - RNA, 18 nt, Human herpesvirus 4 (Epstein-Barr virus)
gauggcgagacucuugaa

SEQ ID NO: 308966 - RNA, 17 nt, Human herpesvirus 4 (Epstein-Barr virus)
gaugggugcauuucacc

SEQ ID NO: 308967 - RNA, 23 nt, Human herpesvirus 4 (Epstein-Barr virus)
gaugucaaacauggugucuguaa

SEQ ID NO: 308968 - RNA, 21 nt, Human herpesvirus 4 (Epstein-Barr virus)
gauguuauccacaccauccca

SEQ ID NO: 308969 - RNA, 18 nt, Human herpesvirus 4 (Epstein-Barr virus)
gauuaggagcagggccca

SEQ ID NO: 308970 - RNA, 19 nt, Human herpesvirus 4 (Epstein-Barr virus)
gauuaggagcagggcccag

SEQ ID NO: 308971 - RNA, 20 nt, Human herpesvirus 4 (Epstein-Barr virus)
gauuaggcacuggacacaca

SEQ ID NO: 308972 - RNA, 18 nt, Human herpesvirus 4 (Epstein-Barr virus)
gauuccuguccaugacca

SEQ ID NO: 308973 - RNA, 15 nt, Human herpesvirus 4 (Epstein-Barr virus)
gauugagaaugccaa

SEQ ID NO: 308974 - RNA, 22 nt, Human herpesvirus 4 (Epstein-Barr virus)
gauugcugagaaccugcugcua

SEQ ID NO: 308975 - RNA, 17 nt, Human herpesvirus 4 (Epstein-Barr virus)
gauuggaaaagggccca

SEQ ID NO: 308976 - RNA, 18 nt, Human herpesvirus 4 (Epstein-Barr virus)
gauuggaaaagggcccag

SEQ ID NO: 308977 - RNA, 22 nt, Human herpesvirus 4 (Epstein-Barr virus)
gauuuauuaccugucucucuuu

SEQ ID NO: 308978 - RNA, 23 nt, Human herpesvirus 4 (Epstein-Barr virus)
gauuugaaagugguagugucucu

SEQ ID NO: 308979 - RNA, 19 nt, Human herpesvirus 4 (Epstein-Barr virus)
gauuugggagggaccacgc

SEQ ID NO: 308980 - RNA, 13 nt, Human herpesvirus 4 (Epstein-Barr virus)
gauuuugggcaca

SEQ ID NO: 308981 - RNA, 19 nt, Human herpesvirus 4 (Epstein-Barr virus)
gauuuugggcacacuuaac

SEQ ID NO: 308982 - RNA, 16 nt, Human herpesvirus 4 (Epstein-Barr virus)
gcaaaaauaugcaaug

SEQ ID NO: 308983 - RNA, 17 nt, Human herpesvirus 4 (Epstein-Barr virus)
gcaaaacucacaggaca

SEQ ID NO: 308984 - RNA, 23 nt, Human herpesvirus 4 (Epstein-Barr virus)
gcaaagacccccccaagccucuc

SEQ ID NO: 308985 - RNA, 15 nt, Human herpesvirus 4 (Epstein-Barr virus)
gcaaagggcaugcuu

SEQ ID NO: 308986 - RNA, 17 nt, Human herpesvirus 4 (Epstein-Barr virus)
gcaaccagcuggucauc

SEQ ID NO: 308987 - RNA, 20 nt, Human herpesvirus 4 (Epstein-Barr virus)
gcaacccccggcucucaggc

SEQ ID NO: 308988 - RNA, 21 nt, Human herpesvirus 4 (Epstein-Barr virus)
gcaacuccucuuacaccagag

SEQ ID NO: 308989 - RNA, 21 nt, Human herpesvirus 4 (Epstein-Barr virus)
gcaagaacccccugcaggaca

SEQ ID NO: 308990 - RNA, 14 nt, Human herpesvirus 4 (Epstein-Barr virus)
gcaagcagcaccug

SEQ ID NO: 308991 - RNA, 19 nt, Human herpesvirus 4 (Epstein-Barr virus)
gcaagcuccuuugccuugu

SEQ ID NO: 308992 - RNA, 16 nt, Human herpesvirus 4 (Epstein-Barr virus)
gcaaucagacaugcga

SEQ ID NO: 308993 - RNA, 14 nt, Human herpesvirus 4 (Epstein-Barr virus)
gcaauugggcauac

SEQ ID NO: 308994 - RNA, 14 nt, Human herpesvirus 4 (Epstein-Barr virus)
gcacaaaccagucu

SEQ ID NO: 308995 - RNA, 13 nt, Human herpesvirus 4 (Epstein-Barr virus)
cccucuccagcaa

SEQ ID NO: 308996 - RNA, 18 nt, Human herpesvirus 4 (Epstein-Barr virus)
cccucuguuucuucaucu

SEQ ID NO: 308997 - RNA, 21 nt, Human herpesvirus 4 (Epstein-Barr virus)
cccugcacacauuucagguac

SEQ ID NO: 308998 - RNA, 12 nt, Human herpesvirus 4 (Epstein-Barr virus)
cccugccugcau

SEQ ID NO: 308999 - RNA, 17 nt, Human herpesvirus 4 (Epstein-Barr virus)
cccugccugcaugcuua

SEQ ID NO: 309000 - RNA, 16 nt, Human herpesvirus 4 (Epstein-Barr virus)
cccuggagcuggugca

SEQ ID NO: 309001 - RNA, 19 nt, Human herpesvirus 4 (Epstein-Barr virus)
cccuggaggccucaggcaa

SEQ ID NO: 309002 - RNA, 12 nt, Human herpesvirus 4 (Epstein-Barr virus)
cccuggcccacc

SEQ ID NO: 309003 - RNA, 19 nt, Human herpesvirus 4 (Epstein-Barr virus)
cccuggccgugcuggauga

SEQ ID NO: 309004 - RNA, 16 nt, Human herpesvirus 4 (Epstein-Barr virus)
cccuggggcaacagac

SEQ ID NO: 309005 - RNA, 21 nt, Human herpesvirus 4 (Epstein-Barr virus)
cccuguuagcuauuugaucuu

SEQ ID NO: 309006 - RNA, 17 nt, Human herpesvirus 4 (Epstein-Barr virus)
cccuuccuuuaacucau

SEQ ID NO: 309007 - RNA, 17 nt, Human herpesvirus 4 (Epstein-Barr virus)
cccuugguauugcgcug

SEQ ID NO: 309008 - RNA, 13 nt, Human herpesvirus 4 (Epstein-Barr virus)
ccgagaagcuugu

SEQ ID NO: 309009 - RNA, 16 nt, Human herpesvirus 4 (Epstein-Barr virus)
ccgagaggaugauccu

SEQ ID NO: 309010 - RNA, 16 nt, Human herpesvirus 4 (Epstein-Barr virus)
ccgaggcugagggggc

SEQ ID NO: 309011 - RNA, 23 nt, Human herpesvirus 4 (Epstein-Barr virus)
ccgauggccccggucaccccaga

SEQ ID NO: 309012 - RNA, 15 nt, Human herpesvirus 4 (Epstein-Barr virus)
ccgccaugcucaggg

SEQ ID NO: 309013 - RNA, 18 nt, Human herpesvirus 4 (Epstein-Barr virus)
ccgcccgggggccagucu

SEQ ID NO: 309014 - RNA, 16 nt, Human herpesvirus 4 (Epstein-Barr virus)
ccgcugaagccaggcu

SEQ ID NO: 309015 - RNA, 12 nt, Human herpesvirus 4 (Epstein-Barr virus)
ccgcugccaggc

SEQ ID NO: 309016 - RNA, 15 nt, Human herpesvirus 4 (Epstein-Barr virus)
ccggagccaccacag

SEQ ID NO: 309017 - RNA, 16 nt, Human herpesvirus 4 (Epstein-Barr virus)
ccggagccugccggag

SEQ ID NO: 309018 - RNA, 20 nt, Human herpesvirus 4 (Epstein-Barr virus)
ccggagggacaguaccacaa

SEQ ID NO: 309019 - RNA, 19 nt, Human herpesvirus 4 (Epstein-Barr virus)
caucaacuucagcuccagg

SEQ ID NO: 309020 - RNA, 23 nt, Human herpesvirus 4 (Epstein-Barr virus)
caucaauaauaagggcgccaucu

SEQ ID NO: 309021 - RNA, 15 nt, Human herpesvirus 4 (Epstein-Barr virus)
caucaaugucaccac

SEQ ID NO: 309022 - RNA, 18 nt, Human herpesvirus 4 (Epstein-Barr virus)
caucaugcagggugcaca

SEQ ID NO: 309023 - RNA, 22 nt, Human herpesvirus 4 (Epstein-Barr virus)
cauccaccaucaaugucaccac

SEQ ID NO: 309024 - RNA, 14 nt, Human herpesvirus 4 (Epstein-Barr virus)
caucccaauucaca

SEQ ID NO: 309025 - RNA, 22 nt, Human herpesvirus 4 (Epstein-Barr virus)
caucccaauucacaucucaggg

SEQ ID NO: 309026 - RNA, 21 nt, Human herpesvirus 4 (Epstein-Barr virus)
caucccggcccucuuccgugc

SEQ ID NO: 309027 - RNA, 20 nt, Human herpesvirus 4 (Epstein-Barr virus)
cauccugaagcgaagcagcu

SEQ ID NO: 309028 - RNA, 22 nt, Human herpesvirus 4 (Epstein-Barr virus)
cauccugcucauuauugcucuc

SEQ ID NO: 309029 - RNA, 19 nt, Human herpesvirus 4 (Epstein-Barr virus)
caucgacacacgagccaua

SEQ ID NO: 309030 - RNA, 19 nt, Human herpesvirus 4 (Epstein-Barr virus)
caucggguccuagcacaaa

SEQ ID NO: 309031 - RNA, 13 nt, Human herpesvirus 4 (Epstein-Barr virus)
caucuaaugaugu

SEQ ID NO: 309032 - RNA, 22 nt, Human herpesvirus 4 (Epstein-Barr virus)
caucuacccaacagucuucagg

SEQ ID NO: 309033 - RNA, 21 nt, Human herpesvirus 4 (Epstein-Barr virus)
caucucugauuauagcucugg

SEQ ID NO: 309034 - RNA, 16 nt, Human herpesvirus 4 (Epstein-Barr virus)
caucuuaucagagagg

SEQ ID NO: 309035 - RNA, 24 nt, Human herpesvirus 4 (Epstein-Barr virus)
caucuuggcccgucccucuugucc

SEQ ID NO: 309036 - RNA, 15 nt, Human herpesvirus 4 (Epstein-Barr virus)
caugaaucugacucu

SEQ ID NO: 309037 - RNA, 16 nt, Human herpesvirus 4 (Epstein-Barr virus)
caugaaucugacucua

SEQ ID NO: 309038 - RNA, 16 nt, Human herpesvirus 4 (Epstein-Barr virus)
caugaauguuacccuc

SEQ ID NO: 309039 - RNA, 17 nt, Human herpesvirus 4 (Epstein-Barr virus)
caugaauguuacccuca

SEQ ID NO: 309040 - RNA, 20 nt, Human herpesvirus 4 (Epstein-Barr virus)
caugaccaacaugagggcac

SEQ ID NO: 309041 - RNA, 20 nt, Human herpesvirus 4 (Epstein-Barr virus)
caugagaaaauacuucucua

SEQ ID NO: 309042 - RNA, 18 nt, Human herpesvirus 4 (Epstein-Barr virus)
caugagcuccucuccaaa

SEQ ID NO: 309043 - RNA, 13 nt, Human herpesvirus 4 (Epstein-Barr virus)
caugagugccaug

SEQ ID NO: 309044 - RNA, 17 nt, Human herpesvirus 4 (Epstein-Barr virus)
caugaucaggacccugg

SEQ ID NO: 309045 - RNA, 15 nt, Human herpesvirus 4 (Epstein-Barr virus)
agccacgacauugau

SEQ ID NO: 309046 - RNA, 20 nt, Human herpesvirus 4 (Epstein-Barr virus)
agccagagaggcccacugca

SEQ ID NO: 309047 - RNA, 21 nt, Human herpesvirus 4 (Epstein-Barr virus)
agcccauucucguccaucucg

SEQ ID NO: 309048 - RNA, 23 nt, Human herpesvirus 4 (Epstein-Barr virus)
agcccauucucguccaucucgau

SEQ ID NO: 309049 - RNA, 17 nt, Human herpesvirus 4 (Epstein-Barr virus)
agccccaauucuugcac

SEQ ID NO: 309050 - RNA, 15 nt, Human herpesvirus 4 (Epstein-Barr virus)
agccccacucuugcc

SEQ ID NO: 309051 - RNA, 15 nt, Human herpesvirus 4 (Epstein-Barr virus)
agccccaucuuccag

SEQ ID NO: 309052 - RNA, 15 nt, Human herpesvirus 4 (Epstein-Barr virus)
agcccgccagccacc

SEQ ID NO: 309053 - RNA, 21 nt, Human herpesvirus 4 (Epstein-Barr virus)
augcucaguggccgucuggca

SEQ ID NO: 309054 - RNA, 20 nt, Human herpesvirus 4 (Epstein-Barr virus)
augcucucgcacucuuguug

SEQ ID NO: 309055 - RNA, 16 nt, Human herpesvirus 4 (Epstein-Barr virus)
augcugaauauugcca

SEQ ID NO: 309056 - RNA, 15 nt, Human herpesvirus 4 (Epstein-Barr virus)
auggaaaccacucag

SEQ ID NO: 309057 - RNA, 18 nt, Human herpesvirus 4 (Epstein-Barr virus)
auggagggcagcgaagaa

SEQ ID NO: 309058 - RNA, 19 nt, Human herpesvirus 4 (Epstein-Barr virus)
auggaugacaccauggccu

SEQ ID NO: 309059 - RNA, 20 nt, Human herpesvirus 4 (Epstein-Barr virus)
auggcacacgccagagacaa

SEQ ID NO: 309060 - RNA, 23 nt, Human herpesvirus 4 (Epstein-Barr virus)
auggccaugauacucaucuguga

SEQ ID NO: 309061 - RNA, 19 nt, Human herpesvirus 4 (Epstein-Barr virus)
auggccauucgacaggcca

SEQ ID NO: 309062 - RNA, 17 nt, Human herpesvirus 4 (Epstein-Barr virus)
auggcgccguuugacug

SEQ ID NO: 309063 - RNA, 17 nt, Human herpesvirus 4 (Epstein-Barr virus)
auggcggggccuugucu

SEQ ID NO: 309064 - RNA, 19 nt, Human herpesvirus 4 (Epstein-Barr virus)
augggaauaacaagggaag

SEQ ID NO: 309065 - RNA, 19 nt, Human herpesvirus 4 (Epstein-Barr virus)
augggcaaaacucacagga

SEQ ID NO: 309066 - RNA, 23 nt, Human herpesvirus 4 (Epstein-Barr virus)
augggcgggacaaucgcaauaua

SEQ ID NO: 309067 - RNA, 19 nt, Human herpesvirus 4 (Epstein-Barr virus)
auggggccaggacgcugcu

SEQ ID NO: 309068 - RNA, 20 nt, Human herpesvirus 4 (Epstein-Barr virus)
auggggguggcgaaucugac

SEQ ID NO: 309069 - RNA, 15 nt, Human herpesvirus 4 (Epstein-Barr virus)
auggggguuggagaa

SEQ ID NO: 309070 - RNA, 18 nt, Human herpesvirus 4 (Epstein-Barr virus)
augguacggugauaacug

SEQ ID NO: 309071 - RNA, 20 nt, Human herpesvirus 4 (Epstein-Barr virus)
augguacggugauaacugac

SEQ ID NO: 309072 - RNA, 20 nt, Human herpesvirus 4 (Epstein-Barr virus)
auggugcagaggaugagacc

SEQ ID NO: 309073 - RNA, 13 nt, Human herpesvirus 4 (Epstein-Barr virus)
auguccacugagc

SEQ ID NO: 309074 - RNA, 14 nt, Human herpesvirus 4 (Epstein-Barr virus)
augucuacgacaua

SEQ ID NO: 309075 - RNA, 18 nt, Human herpesvirus 4 (Epstein-Barr virus)
augugaccgucuacauca

SEQ ID NO: 309076 - RNA, 15 nt, Human herpesvirus 4 (Epstein-Barr virus)
auguggcaucgucau

SEQ ID NO: 309077 - RNA, 19 nt, Human herpesvirus 4 (Epstein-Barr virus)
auguggugccauguggcau

SEQ ID NO: 309078 - RNA, 22 nt, Human herpesvirus 4 (Epstein-Barr virus)
auguucccggcacaccagacau

SEQ ID NO: 309079 - RNA, 19 nt, Human herpesvirus 4 (Epstein-Barr virus)
auguuuggguuauugacau

SEQ ID NO: 309080 - RNA, 17 nt, Human herpesvirus 4 (Epstein-Barr virus)
auuaaccucaaccacaa

SEQ ID NO: 309081 - RNA, 14 nt, Human herpesvirus 4 (Epstein-Barr virus)
auuaacuaagcuua

SEQ ID NO: 309082 - RNA, 13 nt, Human herpesvirus 4 (Epstein-Barr virus)
auuacggugcugg

SEQ ID NO: 309083 - RNA, 23 nt, Human herpesvirus 4 (Epstein-Barr virus)
auuacuggucuuuuaugagccau

SEQ ID NO: 309084 - RNA, 23 nt, Human herpesvirus 4 (Epstein-Barr virus)
auuagagugccgggcccgggaca

SEQ ID NO: 309085 - RNA, 14 nt, Human herpesvirus 4 (Epstein-Barr virus)
auuaggcacuggac

SEQ ID NO: 309086 - RNA, 18 nt, Human herpesvirus 4 (Epstein-Barr virus)
auuaggcacuggacacac

SEQ ID NO: 309087 - RNA, 20 nt, Human herpesvirus 4 (Epstein-Barr virus)
auuagggccuuuucccucau

SEQ ID NO: 309088 - RNA, 18 nt, Human herpesvirus 4 (Epstein-Barr virus)
auuagggguaacccugua

SEQ ID NO: 309089 - RNA, 16 nt, Human herpesvirus 4 (Epstein-Barr virus)
auucagacgagucuga

SEQ ID NO: 309090 - RNA, 20 nt, Human herpesvirus 4 (Epstein-Barr virus)
auucagacgagucugacuac

SEQ ID NO: 309091 - RNA, 22 nt, Human herpesvirus 4 (Epstein-Barr virus)
auucccagccccaauucuugca

SEQ ID NO: 309092 - RNA, 14 nt, Human herpesvirus 4 (Epstein-Barr virus)
auuccuguccauga

SEQ ID NO: 309093 - RNA, 21 nt, Human herpesvirus 4 (Epstein-Barr virus)
auucgacaggccauuagagau

SEQ ID NO: 309094 - RNA, 16 nt, Human herpesvirus 4 (Epstein-Barr virus)
auucgcgaugcuauaa

SEQ ID NO: 309095 - RNA, 19 nt, Human herpesvirus 4 (Epstein-Barr virus)
auucguacaucuccaggcg

SEQ ID NO: 309096 - RNA, 22 nt, Human herpesvirus 4 (Epstein-Barr virus)
auucuaugggaauaacaaggga

SEQ ID NO: 309097 - RNA, 14 nt, Human herpesvirus 4 (Epstein-Barr virus)
auucucagaugcag

SEQ ID NO: 309098 - RNA, 18 nt, Human herpesvirus 4 (Epstein-Barr virus)
auucucuucuguuugcau

SEQ ID NO: 309099 - RNA, 15 nt, Human herpesvirus 4 (Epstein-Barr virus)
auucugagcaccaac

SEQ ID NO: 309100 - RNA, 23 nt, Human herpesvirus 4 (Epstein-Barr virus)
auucugagcaccaacacaaccac

SEQ ID NO: 309101 - RNA, 13 nt, Human herpesvirus 4 (Epstein-Barr virus)
auugaucacuacu

SEQ ID NO: 309102 - RNA, 22 nt, Human herpesvirus 4 (Epstein-Barr virus)
auugccucuuguguucuugccg

SEQ ID NO: 309103 - RNA, 19 nt, Human herpesvirus 4 (Epstein-Barr virus)
auugcgccgccuaaugcau

SEQ ID NO: 309104 - RNA, 16 nt, Human herpesvirus 4 (Epstein-Barr virus)
auugcucucguugcca

SEQ ID NO: 309105 - RNA, 17 nt, Human herpesvirus 4 (Epstein-Barr virus)
auugcuguuuuugccaa

SEQ ID NO: 309106 - RNA, 19 nt, Human herpesvirus 4 (Epstein-Barr virus)
auuggcugcaaagggaccc

SEQ ID NO: 309107 - RNA, 13 nt, Human herpesvirus 4 (Epstein-Barr virus)
auugggacuugaa

SEQ ID NO: 309108 - RNA, 15 nt, Human herpesvirus 4 (Epstein-Barr virus)
auuguguuccaggca

SEQ ID NO: 309109 - RNA, 19 nt, Human herpesvirus 4 (Epstein-Barr virus)
auuuaaaaggggcagcaau

SEQ ID NO: 309110 - RNA, 16 nt, Human herpesvirus 4 (Epstein-Barr virus)
auuuacaaacacuaca

SEQ ID NO: 309111 - RNA, 17 nt, Human herpesvirus 4 (Epstein-Barr virus)
auuuacaaacacuacaa

SEQ ID NO: 309112 - RNA, 16 nt, Human herpesvirus 4 (Epstein-Barr virus)
auuuagaaaccuugcc

SEQ ID NO: 309113 - RNA, 21 nt, Human herpesvirus 4 (Epstein-Barr virus)
auuucaaauaccgagauguac

SEQ ID NO: 309114 - RNA, 16 nt, Human herpesvirus 4 (Epstein-Barr virus)
auuucagguaccccaa

SEQ ID NO: 309115 - RNA, 18 nt, Human herpesvirus 4 (Epstein-Barr virus)
auuucauccucagaggag

SEQ ID NO: 309116 - RNA, 15 nt, Human herpesvirus 4 (Epstein-Barr virus)
auuuccuacaacuca

SEQ ID NO: 309117 - RNA, 17 nt, Human herpesvirus 4 (Epstein-Barr virus)
auuucuaguuaccacag

SEQ ID NO: 309118 - RNA, 21 nt, Human herpesvirus 4 (Epstein-Barr virus)
auuucucauaauggugccuga

SEQ ID NO: 309119 - RNA, 21 nt, Human herpesvirus 4 (Epstein-Barr virus)
auuucuggccaucugucuugu

SEQ ID NO: 309120 - RNA, 18 nt, Human herpesvirus 4 (Epstein-Barr virus)
auuugaggaggcacacaa

SEQ ID NO: 309121 - RNA, 19 nt, Human herpesvirus 4 (Epstein-Barr virus)
auuugcucuucgugcucuu

SEQ ID NO: 309122 - RNA, 21 nt, Human herpesvirus 4 (Epstein-Barr virus)
auuugcugacauauguacaau

SEQ ID NO: 309123 - RNA, 16 nt, Human herpesvirus 4 (Epstein-Barr virus)
auuugggagggaccac

SEQ ID NO: 309124 - RNA, 14 nt, Human herpesvirus 4 (Epstein-Barr virus)
auuuuaaucuggau

SEQ ID NO: 309125 - RNA, 14 nt, Human herpesvirus 4 (Epstein-Barr virus)
auuuuauucuacau

SEQ ID NO: 309126 - RNA, 20 nt, Human herpesvirus 4 (Epstein-Barr virus)
auuuugcaaacaaacuucaa

SEQ ID NO: 309127 - RNA, 17 nt, Human herpesvirus 4 (Epstein-Barr virus)
auuuugggcacacuuaa

SEQ ID NO: 309128 - RNA, 14 nt, Human herpesvirus 4 (Epstein-Barr virus)
auuuugugugccuc

SEQ ID NO: 309129 - RNA, 20 nt, Human herpesvirus 4 (Epstein-Barr virus)
caaaacucacaggacauguu

SEQ ID NO: 309130 - RNA, 18 nt, Human herpesvirus 4 (Epstein-Barr virus)
caaaacugguggacucua

SEQ ID NO: 309131 - RNA, 21 nt, Human herpesvirus 4 (Epstein-Barr virus)
caaaacugguggacucuauug

SEQ ID NO: 309132 - RNA, 19 nt, Human herpesvirus 4 (Epstein-Barr virus)
caaaaugaggaacggugau

SEQ ID NO: 309133 - RNA, 21 nt, Human herpesvirus 4 (Epstein-Barr virus)
caaaauuggugccuugcucuc

SEQ ID NO: 309134 - RNA, 18 nt, Human herpesvirus 4 (Epstein-Barr virus)
caaacauggugucuguaa

SEQ ID NO: 309135 - RNA, 11 nt, Human herpesvirus 4 (Epstein-Barr virus)
caaacaugucc

SEQ ID NO: 309136 - RNA, 16 nt, Human herpesvirus 4 (Epstein-Barr virus)
caaaccaugacaucac

SEQ ID NO: 309137 - RNA, 17 nt, Human herpesvirus 4 (Epstein-Barr virus)
caaaccaugacaucaca

SEQ ID NO: 309138 - RNA, 17 nt, Human herpesvirus 4 (Epstein-Barr virus)
caaacccccuccccugu

SEQ ID NO: 309139 - RNA, 18 nt, Human herpesvirus 4 (Epstein-Barr virus)
caaacccuggccgccgga

SEQ ID NO: 309140 - RNA, 20 nt, Human herpesvirus 4 (Epstein-Barr virus)
caaacccuggccgccggaug

SEQ ID NO: 309141 - RNA, 15 nt, Human herpesvirus 4 (Epstein-Barr virus)
caaauucuacgauga

SEQ ID NO: 309142 - RNA, 15 nt, Human herpesvirus 4 (Epstein-Barr virus)
caaauugauugauga

SEQ ID NO: 309143 - RNA, 16 nt, Human herpesvirus 4 (Epstein-Barr virus)
caacaaagaacuuuga

SEQ ID NO: 309144 - RNA, 13 nt, Human herpesvirus 4 (Epstein-Barr virus)
caacaacuaugug

SEQ ID NO: 309145 - RNA, 16 nt, Human herpesvirus 4 (Epstein-Barr virus)
caacaacuauguguau

SEQ ID NO: 309146 - RNA, 18 nt, Human herpesvirus 4 (Epstein-Barr virus)
caacauuaaagccuccuc

SEQ ID NO: 309147 - RNA, 17 nt, Human herpesvirus 4 (Epstein-Barr virus)
caaccaauguaucccaa

SEQ ID NO: 309148 - RNA, 19 nt, Human herpesvirus 4 (Epstein-Barr virus)
caacccccggcucucaggc

SEQ ID NO: 309149 - RNA, 19 nt, Human herpesvirus 4 (Epstein-Barr virus)
caaccugcucucucuggag

SEQ ID NO: 309150 - RNA, 22 nt, Human herpesvirus 4 (Epstein-Barr virus)
caacgucccugaguucuacaau

SEQ ID NO: 309151 - RNA, 22 nt, Human herpesvirus 4 (Epstein-Barr virus)
caacguccgugagagccuaccc

SEQ ID NO: 309152 - RNA, 18 nt, Human herpesvirus 4 (Epstein-Barr virus)
caacuacaagcagcuaga

SEQ ID NO: 309153 - RNA, 20 nt, Human herpesvirus 4 (Epstein-Barr virus)
caacucccccaaacaugucc

SEQ ID NO: 309154 - RNA, 19 nt, Human herpesvirus 4 (Epstein-Barr virus)
caacuccucuuacaccaga

SEQ ID NO: 309155 - RNA, 22 nt, Human herpesvirus 4 (Epstein-Barr virus)
caacugcuauucugagcaccaa

SEQ ID NO: 309156 - RNA, 14 nt, Human herpesvirus 4 (Epstein-Barr virus)
caagaagaagccca

SEQ ID NO: 309157 - RNA, 18 nt, Human herpesvirus 4 (Epstein-Barr virus)
caagacagucacauugca

SEQ ID NO: 309158 - RNA, 19 nt, Human herpesvirus 4 (Epstein-Barr virus)
caagacagucacauugcau

SEQ ID NO: 309159 - RNA, 21 nt, Human herpesvirus 4 (Epstein-Barr virus)
caagaguuuaagcagcacuga

SEQ ID NO: 309160 - RNA, 23 nt, Human herpesvirus 4 (Epstein-Barr virus)
caagcucagccccuuggcacaag

SEQ ID NO: 309161 - RNA, 20 nt, Human herpesvirus 4 (Epstein-Barr virus)
caaggaaacaaaaccacuga

SEQ ID NO: 309162 - RNA, 17 nt, Human herpesvirus 4 (Epstein-Barr virus)
caaggaaggcuugccaa

SEQ ID NO: 309163 - RNA, 18 nt, Human herpesvirus 4 (Epstein-Barr virus)
caaggaaggcuugccaaa

SEQ ID NO: 309164 - RNA, 20 nt, Human herpesvirus 4 (Epstein-Barr virus)
caaggaaggcuugccaaaau

SEQ ID NO: 309165 - RNA, 15 nt, Human herpesvirus 4 (Epstein-Barr virus)
caaggacaggugcca

SEQ ID NO: 309166 - RNA, 23 nt, Human herpesvirus 4 (Epstein-Barr virus)
caaggagugccucugggugcuga

SEQ ID NO: 309167 - RNA, 21 nt, Human herpesvirus 4 (Epstein-Barr virus)
caaggccggaggcagacaccc

SEQ ID NO: 309168 - RNA, 19 nt, Human herpesvirus 4 (Epstein-Barr virus)
caagggcagggcaauggga

SEQ ID NO: 309169 - RNA, 14 nt, Human herpesvirus 4 (Epstein-Barr virus)
caaggugugcauga

SEQ ID NO: 309170 - RNA, 22 nt, Human herpesvirus 4 (Epstein-Barr virus)
caagguucggaaaucuguugac

SEQ ID NO: 309171 - RNA, 19 nt, Human herpesvirus 4 (Epstein-Barr virus)
caagugcuaugaccaugcc

SEQ ID NO: 309172 - RNA, 20 nt, Human herpesvirus 4 (Epstein-Barr virus)
caaguguuuccagacaccag

SEQ ID NO: 309173 - RNA, 18 nt, Human herpesvirus 4 (Epstein-Barr virus)
caauaaaaugaaaccuuu

SEQ ID NO: 309174 - RNA, 16 nt, Human herpesvirus 4 (Epstein-Barr virus)
caauaauuucagugaa

SEQ ID NO: 309175 - RNA, 17 nt, Human herpesvirus 4 (Epstein-Barr virus)
caauacacccaucugga

SEQ ID NO: 309176 - RNA, 13 nt, Human herpesvirus 4 (Epstein-Barr virus)
caauccaugccaa

SEQ ID NO: 309177 - RNA, 21 nt, Human herpesvirus 4 (Epstein-Barr virus)
caaucuggacucucuguuucu

SEQ ID NO: 309178 - RNA, 15 nt, Human herpesvirus 4 (Epstein-Barr virus)
caaugacccacucca

SEQ ID NO: 309179 - RNA, 18 nt, Human herpesvirus 4 (Epstein-Barr virus)
caaugacccacuccagug

SEQ ID NO: 309180 - RNA, 15 nt, Human herpesvirus 4 (Epstein-Barr virus)
caaugauugaggcaa

SEQ ID NO: 309181 - RNA, 22 nt, Human herpesvirus 4 (Epstein-Barr virus)
caauguuccuucucaugcuccu

SEQ ID NO: 309182 - RNA, 15 nt, Human herpesvirus 4 (Epstein-Barr virus)
caauuaaacaaggga

SEQ ID NO: 309183 - RNA, 17 nt, Human herpesvirus 4 (Epstein-Barr virus)
caauucuugcacccacc

SEQ ID NO: 309184 - RNA, 22 nt, Human herpesvirus 4 (Epstein-Barr virus)
cacaaacaccaguguccagaga

SEQ ID NO: 309185 - RNA, 18 nt, Human herpesvirus 4 (Epstein-Barr virus)
cacaaccacggugacauu

SEQ ID NO: 309186 - RNA, 16 nt, Human herpesvirus 4 (Epstein-Barr virus)
cacacaaaaugaggaa

SEQ ID NO: 309187 - RNA, 20 nt, Human herpesvirus 4 (Epstein-Barr virus)
cacacaaaaugaggaacggu

SEQ ID NO: 309188 - RNA, 19 nt, Human herpesvirus 4 (Epstein-Barr virus)
cacacauuacggugcugga

SEQ ID NO: 309189 - RNA, 13 nt, Human herpesvirus 4 (Epstein-Barr virus)
cacaccagacaug

SEQ ID NO: 309190 - RNA, 17 nt, Human herpesvirus 4 (Epstein-Barr virus)
cacacccaccuaugcca

SEQ ID NO: 309191 - RNA, 19 nt, Human herpesvirus 4 (Epstein-Barr virus)
cacacccaccuaugccaau

SEQ ID NO: 309192 - RNA, 13 nt, Human herpesvirus 4 (Epstein-Barr virus)
cacacgagccaua

SEQ ID NO: 309193 - RNA, 19 nt, Human herpesvirus 4 (Epstein-Barr virus)
cacacguggcuuccagaga

SEQ ID NO: 309194 - RNA, 19 nt, Human herpesvirus 4 (Epstein-Barr virus)
cacagaacaucacugccac

SEQ ID NO: 309195 - RNA, 20 nt, Human herpesvirus 4 (Epstein-Barr virus)
cacagauggagagauuucau

SEQ ID NO: 309196 - RNA, 20 nt, Human herpesvirus 4 (Epstein-Barr virus)
cacagauuagaagaugaugc

SEQ ID NO: 309197 - RNA, 15 nt, Human herpesvirus 4 (Epstein-Barr virus)
cacauagaauuguua

SEQ ID NO: 309198 - RNA, 24 nt, Human herpesvirus 4 (Epstein-Barr virus)
cacaucucagggacaacaggucaa

SEQ ID NO: 309199 - RNA, 22 nt, Human herpesvirus 4 (Epstein-Barr virus)
cacauguuuucuggacacagga

SEQ ID NO: 309200 - RNA, 17 nt, Human herpesvirus 4 (Epstein-Barr virus)
cacauucuggaacucga

SEQ ID NO: 309201 - RNA, 16 nt, Human herpesvirus 4 (Epstein-Barr virus)
caccaacacaaccacg

SEQ ID NO: 309202 - RNA, 17 nt, Human herpesvirus 4 (Epstein-Barr virus)
caccaacacgaccccaa

SEQ ID NO: 309203 - RNA, 18 nt, Human herpesvirus 4 (Epstein-Barr virus)
caccacuaagguuacugc

SEQ ID NO: 309204 - RNA, 14 nt, Human herpesvirus 4 (Epstein-Barr virus)
caccagaggccaca

SEQ ID NO: 309205 - RNA, 18 nt, Human herpesvirus 4 (Epstein-Barr virus)
caccagaggccacaaaag

SEQ ID NO: 309206 - RNA, 21 nt, Human herpesvirus 4 (Epstein-Barr virus)
caccagcuaacaggacauguu

SEQ ID NO: 309207 - RNA, 20 nt, Human herpesvirus 4 (Epstein-Barr virus)
caccagucccaacaacuucc

SEQ ID NO: 309208 - RNA, 16 nt, Human herpesvirus 4 (Epstein-Barr virus)
caccauagcaugucac

SEQ ID NO: 309209 - RNA, 22 nt, Human herpesvirus 4 (Epstein-Barr virus)
caccauagcaugucacacauuc

SEQ ID NO: 309210 - RNA, 14 nt, Human herpesvirus 4 (Epstein-Barr virus)
caccaucaauguca

SEQ ID NO: 309211 - RNA, 15 nt, Human herpesvirus 4 (Epstein-Barr virus)
caccaucaaugucac

SEQ ID NO: 309212 - RNA, 17 nt, Human herpesvirus 4 (Epstein-Barr virus)
caccaucccaauucaca

SEQ ID NO: 309213 - RNA, 17 nt, Human herpesvirus 4 (Epstein-Barr virus)
cacccaccuaugccaau

SEQ ID NO: 309214 - RNA, 16 nt, Human herpesvirus 4 (Epstein-Barr virus)
cacccacggaagcccu

SEQ ID NO: 309215 - RNA, 14 nt, Human herpesvirus 4 (Epstein-Barr virus)
caccccacggccau

SEQ ID NO: 309216 - RNA, 22 nt, Human herpesvirus 4 (Epstein-Barr virus)
cacccgacaaugagcggggaga

SEQ ID NO: 309217 - RNA, 17 nt, Human herpesvirus 4 (Epstein-Barr virus)
cacccggacccggacca

SEQ ID NO: 309218 - RNA, 13 nt, Human herpesvirus 4 (Epstein-Barr virus)
caccgaugagaca

SEQ ID NO: 309219 - RNA, 23 nt, Human herpesvirus 4 (Epstein-Barr virus)
caccgggaacgcccaguaugcag

SEQ ID NO: 309220 - RNA, 15 nt, Human herpesvirus 4 (Epstein-Barr virus)
caccgggaugagcug

SEQ ID NO: 309221 - RNA, 16 nt, Human herpesvirus 4 (Epstein-Barr virus)
caccggggugccaaga

SEQ ID NO: 309222 - RNA, 22 nt, Human herpesvirus 4 (Epstein-Barr virus)
caccguggcagacacacgugua

SEQ ID NO: 309223 - RNA, 19 nt, Human herpesvirus 4 (Epstein-Barr virus)
caccuaagaaugggagcaa

SEQ ID NO: 309224 - RNA, 14 nt, Human herpesvirus 4 (Epstein-Barr virus)
caccuaugugaccg

SEQ ID NO: 309225 - RNA, 14 nt, Human herpesvirus 4 (Epstein-Barr virus)
caccucaacauauu

SEQ ID NO: 309226 - RNA, 17 nt, Human herpesvirus 4 (Epstein-Barr virus)
caccugcacagaucuga

SEQ ID NO: 309227 - RNA, 18 nt, Human herpesvirus 4 (Epstein-Barr virus)
caccuggguacccaaacc

SEQ ID NO: 309228 - RNA, 18 nt, Human herpesvirus 4 (Epstein-Barr virus)
caccuguguaaccucacu

SEQ ID NO: 309229 - RNA, 22 nt, Human herpesvirus 4 (Epstein-Barr virus)
caccuguguaaccucacuguaa

SEQ ID NO: 309230 - RNA, 16 nt, Human herpesvirus 4 (Epstein-Barr virus)
caccuucuccaucucc

SEQ ID NO: 309231 - RNA, 23 nt, Human herpesvirus 4 (Epstein-Barr virus)
caccuugacuguaaucacuggca

SEQ ID NO: 309232 - RNA, 16 nt, Human herpesvirus 4 (Epstein-Barr virus)
caccuugaggugccac

SEQ ID NO: 309233 - RNA, 17 nt, Human herpesvirus 4 (Epstein-Barr virus)
caccuugaggugccaca

SEQ ID NO: 309234 - RNA, 15 nt, Human herpesvirus 4 (Epstein-Barr virus)
caccuuggcggguca

SEQ ID NO: 309235 - RNA, 16 nt, Human herpesvirus 4 (Epstein-Barr virus)
cacgacauugaucacu

SEQ ID NO: 309236 - RNA, 22 nt, Human herpesvirus 4 (Epstein-Barr virus)
cacgaucuucaagagucucgcc

SEQ ID NO: 309237 - RNA, 14 nt, Human herpesvirus 4 (Epstein-Barr virus)
cacgccagagacaa

SEQ ID NO: 309238 - RNA, 14 nt, Human herpesvirus 4 (Epstein-Barr virus)
cacgcgaagggaaa

SEQ ID NO: 309239 - RNA, 23 nt, Human herpesvirus 4 (Epstein-Barr virus)
cacggaagcccucuggacuucca

SEQ ID NO: 309240 - RNA, 17 nt, Human herpesvirus 4 (Epstein-Barr virus)
cacggccaugcuaucuu

SEQ ID NO: 309241 - RNA, 20 nt, Human herpesvirus 4 (Epstein-Barr virus)
cacggcccacgucuuuacca

SEQ ID NO: 309242 - RNA, 12 nt, Human herpesvirus 4 (Epstein-Barr virus)
cacggccucaaa

SEQ ID NO: 309243 - RNA, 23 nt, Human herpesvirus 4 (Epstein-Barr virus)
cacggggccgugcaccugccauc

SEQ ID NO: 309244 - RNA, 15 nt, Human herpesvirus 4 (Epstein-Barr virus)
cacggugacauucac

SEQ ID NO: 309245 - RNA, 23 nt, Human herpesvirus 4 (Epstein-Barr virus)
cacgguggcuugggcugugguaa

SEQ ID NO: 309246 - RNA, 18 nt, Human herpesvirus 4 (Epstein-Barr virus)
cacuaagguuacugcaca

SEQ ID NO: 309247 - RNA, 21 nt, Human herpesvirus 4 (Epstein-Barr virus)
cacuaagguuacugcacagaa

SEQ ID NO: 309248 - RNA, 16 nt, Human herpesvirus 4 (Epstein-Barr virus)
cacuaucacccauggc

SEQ ID NO: 309249 - RNA, 16 nt, Human herpesvirus 4 (Epstein-Barr virus)
cacucacgggacgcag

SEQ ID NO: 309250 - RNA, 14 nt, Human herpesvirus 4 (Epstein-Barr virus)
cacuccaagugcaa

SEQ ID NO: 309251 - RNA, 12 nt, Human herpesvirus 4 (Epstein-Barr virus)
cacuccacagau

SEQ ID NO: 309252 - RNA, 17 nt, Human herpesvirus 4 (Epstein-Barr virus)
cacuccuaugcauuucc

SEQ ID NO: 309253 - RNA, 16 nt, Human herpesvirus 4 (Epstein-Barr virus)
cacucuggggucucag

SEQ ID NO: 309254 - RNA, 14 nt, Human herpesvirus 4 (Epstein-Barr virus)
cacucuuguugcua

SEQ ID NO: 309255 - RNA, 22 nt, Human herpesvirus 4 (Epstein-Barr virus)
cacugaugagucugacuacuca

SEQ ID NO: 309256 - RNA, 18 nt, Human herpesvirus 4 (Epstein-Barr virus)
cacugcuagcgucacuga

SEQ ID NO: 309257 - RNA, 18 nt, Human herpesvirus 4 (Epstein-Barr virus)
cacuggacacacauggca

SEQ ID NO: 309258 - RNA, 16 nt, Human herpesvirus 4 (Epstein-Barr virus)
cacuggcaaagggcau

SEQ ID NO: 309259 - RNA, 12 nt, Human herpesvirus 4 (Epstein-Barr virus)
cacugguggugg

SEQ ID NO: 309260 - RNA, 19 nt, Human herpesvirus 4 (Epstein-Barr virus)
cagaaaggccauaaucucu

SEQ ID NO: 309261 - RNA, 15 nt, Human herpesvirus 4 (Epstein-Barr virus)
cagaagacuccugcc

SEQ ID NO: 309262 - RNA, 12 nt, Human herpesvirus 4 (Epstein-Barr virus)
cagaagagucau

SEQ ID NO: 309263 - RNA, 20 nt, Human herpesvirus 4 (Epstein-Barr virus)
cagaaggcuccggcggcagu

SEQ ID NO: 309264 - RNA, 21 nt, Human herpesvirus 4 (Epstein-Barr virus)
cagaagggucagcacagccag

SEQ ID NO: 309265 - RNA, 12 nt, Human herpesvirus 4 (Epstein-Barr virus)
cagaaugugcag

SEQ ID NO: 309266 - RNA, 15 nt, Human herpesvirus 4 (Epstein-Barr virus)
cagaauugucacuga

SEQ ID NO: 309267 - RNA, 18 nt, Human herpesvirus 4 (Epstein-Barr virus)
cagaauugucacugagaa

SEQ ID NO: 309268 - RNA, 13 nt, Human herpesvirus 4 (Epstein-Barr virus)
cagacgacuccca

SEQ ID NO: 309269 - RNA, 16 nt, Human herpesvirus 4 (Epstein-Barr virus)
cagagagccacauucu

SEQ ID NO: 309270 - RNA, 20 nt, Human herpesvirus 4 (Epstein-Barr virus)
cagagaggcccacugcagua

SEQ ID NO: 309271 - RNA, 13 nt, Human herpesvirus 4 (Epstein-Barr virus)
cagagccucugcc

SEQ ID NO: 309272 - RNA, 20 nt, Human herpesvirus 4 (Epstein-Barr virus)
cagaggacuaauguucucua

SEQ ID NO: 309273 - RNA, 22 nt, Human herpesvirus 4 (Epstein-Barr virus)
cagaggacuaauguucucuaac

SEQ ID NO: 309274 - RNA, 21 nt, Human herpesvirus 4 (Epstein-Barr virus)
cagaggaggcuggugccuugg

SEQ ID NO: 309275 - RNA, 14 nt, Human herpesvirus 4 (Epstein-Barr virus)
cagaggccacaaaa

SEQ ID NO: 309276 - RNA, 22 nt, Human herpesvirus 4 (Epstein-Barr virus)
cagaugccgugaaugcacgcca

SEQ ID NO: 309277 - RNA, 19 nt, Human herpesvirus 4 (Epstein-Barr virus)
cagauuuccgaaccuuguc

SEQ ID NO: 309278 - RNA, 13 nt, Human herpesvirus 4 (Epstein-Barr virus)
cagcacaagugau

SEQ ID NO: 309279 - RNA, 14 nt, Human herpesvirus 4 (Epstein-Barr virus)
cagcacuuugccag

SEQ ID NO: 309280 - RNA, 20 nt, Human herpesvirus 4 (Epstein-Barr virus)
cagcagggccuugagcccau

SEQ ID NO: 309281 - RNA, 22 nt, Human herpesvirus 4 (Epstein-Barr virus)
cagcagguaauaaagcuugacc

SEQ ID NO: 309282 - RNA, 13 nt, Human herpesvirus 4 (Epstein-Barr virus)
cagcaucacaggu

SEQ ID NO: 309283 - RNA, 13 nt, Human herpesvirus 4 (Epstein-Barr virus)
cagcauucuauca

SEQ ID NO: 309284 - RNA, 18 nt, Human herpesvirus 4 (Epstein-Barr virus)
cagcauucuaucagcuua

SEQ ID NO: 309285 - RNA, 15 nt, Human herpesvirus 4 (Epstein-Barr virus)
cagccagagagauca

SEQ ID NO: 309286 - RNA, 24 nt, Human herpesvirus 4 (Epstein-Barr virus)
cagccagagaggcccacugcagua

SEQ ID NO: 309287 - RNA, 15 nt, Human herpesvirus 4 (Epstein-Barr virus)
cagccccuuggcaca

SEQ ID NO: 309288 - RNA, 22 nt, Human herpesvirus 4 (Epstein-Barr virus)
cagccgcgguugucaucaucau

SEQ ID NO: 309289 - RNA, 14 nt, Human herpesvirus 4 (Epstein-Barr virus)
cagccuacaaaagu

SEQ ID NO: 309290 - RNA, 21 nt, Human herpesvirus 4 (Epstein-Barr virus)
cagccuacaaaaguacacuag

SEQ ID NO: 309291 - RNA, 14 nt, Human herpesvirus 4 (Epstein-Barr virus)
cagccucacugaug

SEQ ID NO: 309292 - RNA, 18 nt, Human herpesvirus 4 (Epstein-Barr virus)
cagcgaagaacacuccac

SEQ ID NO: 309293 - RNA, 22 nt, Human herpesvirus 4 (Epstein-Barr virus)
cagcgccuugaucuucuucucc

SEQ ID NO: 309294 - RNA, 17 nt, Human herpesvirus 4 (Epstein-Barr virus)
cagcgcuggcuccaggg

SEQ ID NO: 309295 - RNA, 18 nt, Human herpesvirus 4 (Epstein-Barr virus)
cagcuaacaggacauguu

SEQ ID NO: 309296 - RNA, 16 nt, Human herpesvirus 4 (Epstein-Barr virus)
cagcucuggcaguuau

SEQ ID NO: 309297 - RNA, 19 nt, Human herpesvirus 4 (Epstein-Barr virus)
cagcuggcccaccuaaaga

SEQ ID NO: 309298 - RNA, 23 nt, Human herpesvirus 4 (Epstein-Barr virus)
cagcuguguacgugccucagaua

SEQ ID NO: 309299 - RNA, 15 nt, Human herpesvirus 4 (Epstein-Barr virus)
cagcuuaacgggaag

SEQ ID NO: 309300 - RNA, 15 nt, Human herpesvirus 4 (Epstein-Barr virus)
cagcuucgaggucuc

SEQ ID NO: 309301 - RNA, 20 nt, Human herpesvirus 4 (Epstein-Barr virus)
cagcuuggggccaccgggga

SEQ ID NO: 309302 - RNA, 16 nt, Human herpesvirus 4 (Epstein-Barr virus)
caggacacgugacaug

SEQ ID NO: 309303 - RNA, 12 nt, Human herpesvirus 4 (Epstein-Barr virus)
caggacauguuu

SEQ ID NO: 309304 - RNA, 20 nt, Human herpesvirus 4 (Epstein-Barr virus)
caggaggaggagggggacaa

SEQ ID NO: 309305 - RNA, 22 nt, Human herpesvirus 4 (Epstein-Barr virus)
caggaggaggagggggacaaga

SEQ ID NO: 309306 - RNA, 22 nt, Human herpesvirus 4 (Epstein-Barr virus)
caggagguacaugggccacugc

SEQ ID NO: 309307 - RNA, 21 nt, Human herpesvirus 4 (Epstein-Barr virus)
caggaucagggccaagacaua

SEQ ID NO: 309308 - RNA, 17 nt, Human herpesvirus 4 (Epstein-Barr virus)
caggauuccccaaugau

SEQ ID NO: 309309 - RNA, 20 nt, Human herpesvirus 4 (Epstein-Barr virus)
caggauuccccaaugauuga

SEQ ID NO: 309310 - RNA, 19 nt, Human herpesvirus 4 (Epstein-Barr virus)
caggcaacaacuaugugua

SEQ ID NO: 309311 - RNA, 22 nt, Human herpesvirus 4 (Epstein-Barr virus)
caggccaaauggagacugcaaa

SEQ ID NO: 309312 - RNA, 20 nt, Human herpesvirus 4 (Epstein-Barr virus)
caggcccgaccugccaaaga

SEQ ID NO: 309313 - RNA, 20 nt, Human herpesvirus 4 (Epstein-Barr virus)
caggcuacaacaggcugcug

SEQ ID NO: 309314 - RNA, 22 nt, Human herpesvirus 4 (Epstein-Barr virus)
caggcuacaacaggcugcugaa

SEQ ID NO: 309315 - RNA, 17 nt, Human herpesvirus 4 (Epstein-Barr virus)
agcccuuuuuccagugg

SEQ ID NO: 309316 - RNA, 15 nt, Human herpesvirus 4 (Epstein-Barr virus)
agccggggguugcuu

SEQ ID NO: 309317 - RNA, 12 nt, Human herpesvirus 4 (Epstein-Barr virus)
agccuacccaug

SEQ ID NO: 309318 - RNA, 15 nt, Human herpesvirus 4 (Epstein-Barr virus)
agccuacccaugacc

SEQ ID NO: 309319 - RNA, 23 nt, Human herpesvirus 4 (Epstein-Barr virus)
agccucugccacaaggccagcua

SEQ ID NO: 309320 - RNA, 14 nt, Human herpesvirus 4 (Epstein-Barr virus)
agccugagccacac

SEQ ID NO: 309321 - RNA, 17 nt, Human herpesvirus 4 (Epstein-Barr virus)
agccugaggaacaucua

SEQ ID NO: 309322 - RNA, 21 nt, Human herpesvirus 4 (Epstein-Barr virus)
agcgaagaacacuccacagau

SEQ ID NO: 309323 - RNA, 23 nt, Human herpesvirus 4 (Epstein-Barr virus)
agcgcugggggugucaacaaaga

SEQ ID NO: 309324 - RNA, 14 nt, Human herpesvirus 4 (Epstein-Barr virus)
agcgggauagcagg

SEQ ID NO: 309325 - RNA, 22 nt, Human herpesvirus 4 (Epstein-Barr virus)
agcgucgcauacggcuuuccag

SEQ ID NO: 309326 - RNA, 13 nt, Human herpesvirus 4 (Epstein-Barr virus)
agcuaacuguaca

SEQ ID NO: 309327 - RNA, 16 nt, Human herpesvirus 4 (Epstein-Barr virus)
agcuaacuguacauac

SEQ ID NO: 309328 - RNA, 21 nt, Human herpesvirus 4 (Epstein-Barr virus)
agcuaaugccauagucacgga

SEQ ID NO: 309329 - RNA, 17 nt, Human herpesvirus 4 (Epstein-Barr virus)
agcuacaccgaucacca

SEQ ID NO: 309330 - RNA, 18 nt, Human herpesvirus 4 (Epstein-Barr virus)
agcuacaccggccagugg

SEQ ID NO: 309331 - RNA, 22 nt, Human herpesvirus 4 (Epstein-Barr virus)
agcuacacucuggggucucagg

SEQ ID NO: 309332 - RNA, 17 nt, Human herpesvirus 4 (Epstein-Barr virus)
agcucacuuucagugga

SEQ ID NO: 309333 - RNA, 21 nt, Human herpesvirus 4 (Epstein-Barr virus)
agcucacuuucaguggaugca

SEQ ID NO: 309334 - RNA, 16 nt, Human herpesvirus 4 (Epstein-Barr virus)
agcuccuuugccuugu

SEQ ID NO: 309335 - RNA, 15 nt, Human herpesvirus 4 (Epstein-Barr virus)
agcucuaacuuggca

SEQ ID NO: 309336 - RNA, 23 nt, Human herpesvirus 4 (Epstein-Barr virus)
agcugccuggugagaaguuggug

SEQ ID NO: 309337 - RNA, 22 nt, Human herpesvirus 4 (Epstein-Barr virus)
agcuguguuucccgacgccaau

SEQ ID NO: 309338 - RNA, 20 nt, Human herpesvirus 4 (Epstein-Barr virus)
agcuuauuuuuugguugugc

SEQ ID NO: 309339 - RNA, 15 nt, Human herpesvirus 4 (Epstein-Barr virus)
agcuucgagagccac

SEQ ID NO: 309340 - RNA, 17 nt, Human herpesvirus 4 (Epstein-Barr virus)
agcuucgcaaguuccuc

SEQ ID NO: 309341 - RNA, 17 nt, Human herpesvirus 4 (Epstein-Barr virus)
agcuuuugaccaagcua

SEQ ID NO: 309342 - RNA, 13 nt, Human herpesvirus 4 (Epstein-Barr virus)
aggaacggugauu

SEQ ID NO: 309343 - RNA, 14 nt, Human herpesvirus 4 (Epstein-Barr virus)
aggaaggcuugcca

SEQ ID NO: 309344 - RNA, 17 nt, Human herpesvirus 4 (Epstein-Barr virus)
aggacaagacagucaca

SEQ ID NO: 309345 - RNA, 18 nt, Human herpesvirus 4 (Epstein-Barr virus)
aggacacgugacaugucc

SEQ ID NO: 309346 - RNA, 15 nt, Human herpesvirus 4 (Epstein-Barr virus)
aggacacugccaagg

SEQ ID NO: 309347 - RNA, 14 nt, Human herpesvirus 4 (Epstein-Barr virus)
aggacaugugcaug

SEQ ID NO: 309348 - RNA, 19 nt, Human herpesvirus 4 (Epstein-Barr virus)
aggacccccgcgucacugu

SEQ ID NO: 309349 - RNA, 16 nt, Human herpesvirus 4 (Epstein-Barr virus)
aggacgcugcugucca

SEQ ID NO: 309350 - RNA, 21 nt, Human herpesvirus 4 (Epstein-Barr virus)
aggacucugaaaaugaugaau

SEQ ID NO: 309351 - RNA, 21 nt, Human herpesvirus 4 (Epstein-Barr virus)
aggagacacggcucugucagu

SEQ ID NO: 309352 - RNA, 22 nt, Human herpesvirus 4 (Epstein-Barr virus)
aggagcccgggccagcauucua

SEQ ID NO: 309353 - RNA, 17 nt, Human herpesvirus 4 (Epstein-Barr virus)
aggagcgggaggggcag

SEQ ID NO: 309354 - RNA, 23 nt, Human herpesvirus 4 (Epstein-Barr virus)
aggaggaccugguggugacauug

SEQ ID NO: 309355 - RNA, 14 nt, Human herpesvirus 4 (Epstein-Barr virus)
aggaggaggggcag

SEQ ID NO: 309356 - RNA, 18 nt, Human herpesvirus 4 (Epstein-Barr virus)
aggaggcuggugccuugg

SEQ ID NO: 309357 - RNA, 13 nt, Human herpesvirus 4 (Epstein-Barr virus)
aggaggggggcag

SEQ ID NO: 309358 - RNA, 19 nt, Human herpesvirus 4 (Epstein-Barr virus)
aggagguaauuagcacggu

SEQ ID NO: 309359 - RNA, 18 nt, Human herpesvirus 4 (Epstein-Barr virus)
aggaggugagguggugcu

SEQ ID NO: 309360 - RNA, 16 nt, Human herpesvirus 4 (Epstein-Barr virus)
aggagugccucugggu

SEQ ID NO: 309361 - RNA, 15 nt, Human herpesvirus 4 (Epstein-Barr virus)
aggaucagggccaag

SEQ ID NO: 309362 - RNA, 18 nt, Human herpesvirus 4 (Epstein-Barr virus)
aggaugagaccaguggca

SEQ ID NO: 309363 - RNA, 16 nt, Human herpesvirus 4 (Epstein-Barr virus)
aggaugauccuguaca

SEQ ID NO: 309364 - RNA, 16 nt, Human herpesvirus 4 (Epstein-Barr virus)
aggauggaaagggcau

SEQ ID NO: 309365 - RNA, 22 nt, Human herpesvirus 4 (Epstein-Barr virus)
aggauggaaagggcauguggug

SEQ ID NO: 309366 - RNA, 15 nt, Human herpesvirus 4 (Epstein-Barr virus)
aggauggcacggucc

SEQ ID NO: 309367 - RNA, 21 nt, Human herpesvirus 4 (Epstein-Barr virus)
aggauggcccugcaaacugac

SEQ ID NO: 309368 - RNA, 19 nt, Human herpesvirus 4 (Epstein-Barr virus)
aggcacaacggcugugacu

SEQ ID NO: 309369 - RNA, 14 nt, Human herpesvirus 4 (Epstein-Barr virus)
aggcagcucaacuc

SEQ ID NO: 309370 - RNA, 21 nt, Human herpesvirus 4 (Epstein-Barr virus)
aggcaggcgcuguuauggcca

SEQ ID NO: 309371 - RNA, 19 nt, Human herpesvirus 4 (Epstein-Barr virus)
aggcaguagaggacaccca

SEQ ID NO: 309372 - RNA, 23 nt, Human herpesvirus 4 (Epstein-Barr virus)
aggcauacagcagcuggauguac

SEQ ID NO: 309373 - RNA, 15 nt, Human herpesvirus 4 (Epstein-Barr virus)
aggccaacucagacc

SEQ ID NO: 309374 - RNA, 17 nt, Human herpesvirus 4 (Epstein-Barr virus)
aggccagcuaacugccu

SEQ ID NO: 309375 - RNA, 19 nt, Human herpesvirus 4 (Epstein-Barr virus)
aggcccgggggccuugucc

SEQ ID NO: 309376 - RNA, 23 nt, Human herpesvirus 4 (Epstein-Barr virus)
aggccgccuauggggccugugac

SEQ ID NO: 309377 - RNA, 12 nt, Human herpesvirus 4 (Epstein-Barr virus)
aggccgcugcca

SEQ ID NO: 309378 - RNA, 18 nt, Human herpesvirus 4 (Epstein-Barr virus)
aggccucacgaucuucaa

SEQ ID NO: 309379 - RNA, 19 nt, Human herpesvirus 4 (Epstein-Barr virus)
aggccucccagucuaucca

SEQ ID NO: 309380 - RNA, 20 nt, Human herpesvirus 4 (Epstein-Barr virus)
aggcgacaguaacacagggu

SEQ ID NO: 309381 - RNA, 24 nt, Human herpesvirus 4 (Epstein-Barr virus)
aggcgguuagggaggacacugcca

SEQ ID NO: 309382 - RNA, 15 nt, Human herpesvirus 4 (Epstein-Barr virus)
aggcuauaugagcua

SEQ ID NO: 309383 - RNA, 17 nt, Human herpesvirus 4 (Epstein-Barr virus)
aggcucugcacaggagg

SEQ ID NO: 309384 - RNA, 19 nt, Human herpesvirus 4 (Epstein-Barr virus)
aggcugcuaagccaggaua

SEQ ID NO: 309385 - RNA, 15 nt, Human herpesvirus 4 (Epstein-Barr virus)
aggcuggaugcagcg

SEQ ID NO: 309386 - RNA, 20 nt, Human herpesvirus 4 (Epstein-Barr virus)
aggcuggccguguucacugc

SEQ ID NO: 309387 - RNA, 15 nt, Human herpesvirus 4 (Epstein-Barr virus)
aggcuggugccuugg

SEQ ID NO: 309388 - RNA, 18 nt, Human herpesvirus 4 (Epstein-Barr virus)
aggcuuggaaacacccau

SEQ ID NO: 309389 - RNA, 17 nt, Human herpesvirus 4 (Epstein-Barr virus)
agggaaacgcaaaugcc

SEQ ID NO: 309390 - RNA, 13 nt, Human herpesvirus 4 (Epstein-Barr virus)
agggacuuguccu

SEQ ID NO: 309391 - RNA, 22 nt, Human herpesvirus 4 (Epstein-Barr virus)
agggagaacaauuccccgggga

SEQ ID NO: 309392 - RNA, 20 nt, Human herpesvirus 4 (Epstein-Barr virus)
agggagacguuugaguccaa

SEQ ID NO: 309393 - RNA, 14 nt, Human herpesvirus 4 (Epstein-Barr virus)
agggaggacacugc

SEQ ID NO: 309394 - RNA, 15 nt, Human herpesvirus 4 (Epstein-Barr virus)
agggauaugaaggug

SEQ ID NO: 309395 - RNA, 15 nt, Human herpesvirus 4 (Epstein-Barr virus)
agggauugggcuugg

SEQ ID NO: 309396 - RNA, 16 nt, Human herpesvirus 4 (Epstein-Barr virus)
agggcaccgugggaaa

SEQ ID NO: 309397 - RNA, 21 nt, Human herpesvirus 4 (Epstein-Barr virus)
agggcacucgcccacuaaccu

SEQ ID NO: 309398 - RNA, 13 nt, Human herpesvirus 4 (Epstein-Barr virus)
agggcauguggug

SEQ ID NO: 309399 - RNA, 21 nt, Human herpesvirus 4 (Epstein-Barr virus)
agggccacggcgugccagagg

SEQ ID NO: 309400 - RNA, 15 nt, Human herpesvirus 4 (Epstein-Barr virus)
agggccagagaacug

SEQ ID NO: 309401 - RNA, 23 nt, Human herpesvirus 4 (Epstein-Barr virus)
agggcccagugcacccagguggu

SEQ ID NO: 309402 - RNA, 22 nt, Human herpesvirus 4 (Epstein-Barr virus)
agggccugcggggaaaccaacg

SEQ ID NO: 309403 - RNA, 16 nt, Human herpesvirus 4 (Epstein-Barr virus)
aggggaaucucugcca

SEQ ID NO: 309404 - RNA, 14 nt, Human herpesvirus 4 (Epstein-Barr virus)
aggggcaggagcag

SEQ ID NO: 309405 - RNA, 18 nt, Human herpesvirus 4 (Epstein-Barr virus)
agggggacaagagcacaa

SEQ ID NO: 309406 - RNA, 21 nt, Human herpesvirus 4 (Epstein-Barr virus)
agggucacuggcuuaugcgug

SEQ ID NO: 309407 - RNA, 17 nt, Human herpesvirus 4 (Epstein-Barr virus)
agggucagauuuugcaa

SEQ ID NO: 309408 - RNA, 12 nt, Human herpesvirus 4 (Epstein-Barr virus)
agggugcacaga

SEQ ID NO: 309409 - RNA, 22 nt, Human herpesvirus 4 (Epstein-Barr virus)
aggguugguguccucccggggu

SEQ ID NO: 309410 - RNA, 17 nt, Human herpesvirus 4 (Epstein-Barr virus)
agguacaggaccuggaa

SEQ ID NO: 309411 - RNA, 17 nt, Human herpesvirus 4 (Epstein-Barr virus)
aggucaaagaacaaggc

SEQ ID NO: 309412 - RNA, 13 nt, Human herpesvirus 4 (Epstein-Barr virus)
aggucaaggccaa

SEQ ID NO: 309413 - RNA, 14 nt, Human herpesvirus 4 (Epstein-Barr virus)
agguccgugagaac

SEQ ID NO: 309414 - RNA, 22 nt, Human herpesvirus 4 (Epstein-Barr virus)
aggucgaccaccucaacauauu

SEQ ID NO: 309415 - RNA, 15 nt, Human herpesvirus 4 (Epstein-Barr virus)
aggucuucucugaca

SEQ ID NO: 309416 - RNA, 24 nt, Human herpesvirus 4 (Epstein-Barr virus)
aggugcagcuggcccaccuaaaga

SEQ ID NO: 309417 - RNA, 16 nt, Human herpesvirus 4 (Epstein-Barr virus)
aggugcccgggugcgu

SEQ ID NO: 309418 - RNA, 17 nt, Human herpesvirus 4 (Epstein-Barr virus)
agguggccacacugggg

SEQ ID NO: 309419 - RNA, 19 nt, Human herpesvirus 4 (Epstein-Barr virus)
agguggucauguuucccuc

SEQ ID NO: 309420 - RNA, 22 nt, Human herpesvirus 4 (Epstein-Barr virus)
agguggucauguuucccuccaa

SEQ ID NO: 309421 - RNA, 20 nt, Human herpesvirus 4 (Epstein-Barr virus)
agguggugcuugugaaggua

SEQ ID NO: 309422 - RNA, 22 nt, Human herpesvirus 4 (Epstein-Barr virus)
agguguacgcccuggcgguuga

SEQ ID NO: 309423 - RNA, 19 nt, Human herpesvirus 4 (Epstein-Barr virus)
aggugucacgugaccuuuu

SEQ ID NO: 309424 - RNA, 12 nt, Human herpesvirus 4 (Epstein-Barr virus)
aggugugcauga

SEQ ID NO: 309425 - RNA, 17 nt, Human herpesvirus 4 (Epstein-Barr virus)
agguguuguguccugua

SEQ ID NO: 309426 - RNA, 16 nt, Human herpesvirus 4 (Epstein-Barr virus)
agguuacugcacagaa

SEQ ID NO: 309427 - RNA, 19 nt, Human herpesvirus 4 (Epstein-Barr virus)
agguuagcguggacaguuu

SEQ ID NO: 309428 - RNA, 20 nt, Human herpesvirus 4 (Epstein-Barr virus)
agguucggaaaucuguugac

SEQ ID NO: 309429 - RNA, 15 nt, Human herpesvirus 4 (Epstein-Barr virus)
aguaacacagggugg

SEQ ID NO: 309430 - RNA, 11 nt, Human herpesvirus 4 (Epstein-Barr virus)
aguaaccacau

SEQ ID NO: 309431 - RNA, 13 nt, Human herpesvirus 4 (Epstein-Barr virus)
aguaccacaagcu

SEQ ID NO: 309432 - RNA, 14 nt, Human herpesvirus 4 (Epstein-Barr virus)
aguaccccagugac

SEQ ID NO: 309433 - RNA, 15 nt, Human herpesvirus 4 (Epstein-Barr virus)
aguaccccagugacg

SEQ ID NO: 309434 - RNA, 19 nt, Human herpesvirus 4 (Epstein-Barr virus)
aguaccugcgucucauucc

SEQ ID NO: 309435 - RNA, 22 nt, Human herpesvirus 4 (Epstein-Barr virus)
aguaccuguccauucacagggg

SEQ ID NO: 309436 - RNA, 19 nt, Human herpesvirus 4 (Epstein-Barr virus)
agucacaccccacggccau

SEQ ID NO: 309437 - RNA, 23 nt, Human herpesvirus 4 (Epstein-Barr virus)
agucacaccccacggccaugcua

SEQ ID NO: 309438 - RNA, 22 nt, Human herpesvirus 4 (Epstein-Barr virus)
agucacgggacauuaaccucaa

SEQ ID NO: 309439 - RNA, 14 nt, Human herpesvirus 4 (Epstein-Barr virus)
agucagauugccuu

SEQ ID NO: 309440 - RNA, 12 nt, Human herpesvirus 4 (Epstein-Barr virus)
agucaguuacac

SEQ ID NO: 309441 - RNA, 22 nt, Human herpesvirus 4 (Epstein-Barr virus)
agucauacucaagagaucagca

SEQ ID NO: 309442 - RNA, 22 nt, Human herpesvirus 4 (Epstein-Barr virus)
aguccaaacagcuaauuucuac

SEQ ID NO: 309443 - RNA, 18 nt, Human herpesvirus 4 (Epstein-Barr virus)
agucccaacaacuuccaa

SEQ ID NO: 309444 - RNA, 13 nt, Human herpesvirus 4 (Epstein-Barr virus)
agucgaagcucuu

SEQ ID NO: 309445 - RNA, 20 nt, Human herpesvirus 4 (Epstein-Barr virus)
agucggugggcgguccucca

SEQ ID NO: 309446 - RNA, 22 nt, Human herpesvirus 4 (Epstein-Barr virus)
agucuacucgaccagcacgugg

SEQ ID NO: 309447 - RNA, 15 nt, Human herpesvirus 4 (Epstein-Barr virus)
agucuaucaggaccu

SEQ ID NO: 309448 - RNA, 15 nt, Human herpesvirus 4 (Epstein-Barr virus)
agucuucaggucuga

SEQ ID NO: 309449 - RNA, 13 nt, Human herpesvirus 4 (Epstein-Barr virus)
agugacacugaug

SEQ ID NO: 309450 - RNA, 22 nt, Human herpesvirus 4 (Epstein-Barr virus)
agugagccccacaaacaccagu

SEQ ID NO: 309451 - RNA, 12 nt, Human herpesvirus 4 (Epstein-Barr virus)
agugcaacaauc

SEQ ID NO: 309452 - RNA, 15 nt, Human herpesvirus 4 (Epstein-Barr virus)
agugcacccaggugg

SEQ ID NO: 309453 - RNA, 14 nt, Human herpesvirus 4 (Epstein-Barr virus)
agugcuaugaccau

SEQ ID NO: 309454 - RNA, 17 nt, Human herpesvirus 4 (Epstein-Barr virus)
agugcuaugaccaugcc

SEQ ID NO: 309455 - RNA, 23 nt, Human herpesvirus 4 (Epstein-Barr virus)
agugcugggagguagauaggugg

SEQ ID NO: 309456 - RNA, 18 nt, Human herpesvirus 4 (Epstein-Barr virus)
aguggaaacccucaguca

SEQ ID NO: 309457 - RNA, 16 nt, Human herpesvirus 4 (Epstein-Barr virus)
aguggagcgaagcuag

SEQ ID NO: 309458 - RNA, 13 nt, Human herpesvirus 4 (Epstein-Barr virus)
aguggaugcaucu

SEQ ID NO: 309459 - RNA, 18 nt, Human herpesvirus 4 (Epstein-Barr virus)
agugggguaaaugcaccu

SEQ ID NO: 309460 - RNA, 14 nt, Human herpesvirus 4 (Epstein-Barr virus)
aguguguacauucc

SEQ ID NO: 309461 - RNA, 18 nt, Human herpesvirus 4 (Epstein-Barr virus)
aguuaccacagguagaau

SEQ ID NO: 309462 - RNA, 16 nt, Human herpesvirus 4 (Epstein-Barr virus)
aguucuacaaugccag

SEQ ID NO: 309463 - RNA, 19 nt, Human herpesvirus 4 (Epstein-Barr virus)
aguugaugaaaggggccga

SEQ ID NO: 309464 - RNA, 20 nt, Human herpesvirus 4 (Epstein-Barr virus)
aguugguccaggguccagga

SEQ ID NO: 309465 - RNA, 18 nt, Human herpesvirus 4 (Epstein-Barr virus)
aguuuaagcagcacugaa

SEQ ID NO: 309466 - RNA, 17 nt, Human herpesvirus 4 (Epstein-Barr virus)
aguuuccuucuugaccu

SEQ ID NO: 309467 - RNA, 19 nt, Human herpesvirus 4 (Epstein-Barr virus)
aguuucuuuccgcgguggu

SEQ ID NO: 309468 - RNA, 20 nt, Human herpesvirus 4 (Epstein-Barr virus)
aguuucuuuccgcgguggug

SEQ ID NO: 309469 - RNA, 21 nt, Human herpesvirus 4 (Epstein-Barr virus)
aguuucuuuccgcgguggugg

SEQ ID NO: 309470 - RNA, 22 nt, Human herpesvirus 4 (Epstein-Barr virus)
aguuucuuuccgcggugguggc

SEQ ID NO: 309471 - RNA, 18 nt, Human herpesvirus 4 (Epstein-Barr virus)
aguuuucccuuccuuuaa

SEQ ID NO: 309472 - RNA, 19 nt, Human herpesvirus 4 (Epstein-Barr virus)
auaaaaaaccaaacuaaca

SEQ ID NO: 309473 - RNA, 21 nt, Human herpesvirus 4 (Epstein-Barr virus)
auaaaacccugaccaucacau

SEQ ID NO: 309474 - RNA, 23 nt, Human herpesvirus 4 (Epstein-Barr virus)
auaaauuaagagucccuccucac

SEQ ID NO: 309475 - RNA, 17 nt, Human herpesvirus 4 (Epstein-Barr virus)
auaaccacaacugcuau

SEQ ID NO: 309476 - RNA, 21 nt, Human herpesvirus 4 (Epstein-Barr virus)
auaacccuuuccuaagaccua

SEQ ID NO: 309477 - RNA, 23 nt, Human herpesvirus 4 (Epstein-Barr virus)
auaaccgcaccagcuaacaggac

SEQ ID NO: 309478 - RNA, 21 nt, Human herpesvirus 4 (Epstein-Barr virus)
auaaccuggagucugcauguc

SEQ ID NO: 309479 - RNA, 18 nt, Human herpesvirus 4 (Epstein-Barr virus)
auaaggcucugaagcaac

SEQ ID NO: 309480 - RNA, 23 nt, Human herpesvirus 4 (Epstein-Barr virus)
auaaggcucugaagcaacagguc

SEQ ID NO: 309481 - RNA, 13 nt, Human herpesvirus 4 (Epstein-Barr virus)
auaaucucaaaga

SEQ ID NO: 309482 - RNA, 13 nt, Human herpesvirus 4 (Epstein-Barr virus)
auaaugacuauga

SEQ ID NO: 309483 - RNA, 15 nt, Human herpesvirus 4 (Epstein-Barr virus)
auacaaaaacuugag

SEQ ID NO: 309484 - RNA, 21 nt, Human herpesvirus 4 (Epstein-Barr virus)
auacacccaucuggaguucaa

SEQ ID NO: 309485 - RNA, 20 nt, Human herpesvirus 4 (Epstein-Barr virus)
auaccaaagcuaacuguaca

SEQ ID NO: 309486 - RNA, 15 nt, Human herpesvirus 4 (Epstein-Barr virus)
auaccaggugccuuu

SEQ ID NO: 309487 - RNA, 19 nt, Human herpesvirus 4 (Epstein-Barr virus)
auaccgagauguacauaau

SEQ ID NO: 309488 - RNA, 15 nt, Human herpesvirus 4 (Epstein-Barr virus)
auacgucgaugggca

SEQ ID NO: 309489 - RNA, 14 nt, Human herpesvirus 4 (Epstein-Barr virus)
auacucaucuguga

SEQ ID NO: 309490 - RNA, 17 nt, Human herpesvirus 4 (Epstein-Barr virus)
auagcucuggcacugcu

SEQ ID NO: 309491 - RNA, 18 nt, Human herpesvirus 4 (Epstein-Barr virus)
auagcucuggcacugcua

SEQ ID NO: 309492 - RNA, 18 nt, Human herpesvirus 4 (Epstein-Barr virus)
auagucacggaugcugca

SEQ ID NO: 309493 - RNA, 23 nt, Human herpesvirus 4 (Epstein-Barr virus)
auaguuccaggugacagcagcag

SEQ ID NO: 309494 - RNA, 17 nt, Human herpesvirus 4 (Epstein-Barr virus)
auauauuuuccauuuca

SEQ ID NO: 309495 - RNA, 13 nt, Human herpesvirus 4 (Epstein-Barr virus)
auauccccaaagu

SEQ ID NO: 309496 - RNA, 18 nt, Human herpesvirus 4 (Epstein-Barr virus)
auauccuagagggacagc

SEQ ID NO: 309497 - RNA, 15 nt, Human herpesvirus 4 (Epstein-Barr virus)
auaucuggaggucuu

SEQ ID NO: 309498 - RNA, 19 nt, Human herpesvirus 4 (Epstein-Barr virus)
auaugaugaggacucugaa

SEQ ID NO: 309499 - RNA, 15 nt, Human herpesvirus 4 (Epstein-Barr virus)
auauuaauaaauauc

SEQ ID NO: 309500 - RNA, 13 nt, Human herpesvirus 4 (Epstein-Barr virus)
auauuuuccauuu

SEQ ID NO: 309501 - RNA, 17 nt, Human herpesvirus 4 (Epstein-Barr virus)
aucaagcagaaaggcca

SEQ ID NO: 309502 - RNA, 21 nt, Human herpesvirus 4 (Epstein-Barr virus)
aucaccgccguaaucuguggu

SEQ ID NO: 309503 - RNA, 17 nt, Human herpesvirus 4 (Epstein-Barr virus)
aucaccguaccaugagu

SEQ ID NO: 309504 - RNA, 19 nt, Human herpesvirus 4 (Epstein-Barr virus)
aucacuacuacaccgagca

SEQ ID NO: 309505 - RNA, 15 nt, Human herpesvirus 4 (Epstein-Barr virus)
aucagaaauuugcac

SEQ ID NO: 309506 - RNA, 18 nt, Human herpesvirus 4 (Epstein-Barr virus)
aucagaaucaaaaucaga

SEQ ID NO: 309507 - RNA, 16 nt, Human herpesvirus 4 (Epstein-Barr virus)
aucagaauuagcauca

SEQ ID NO: 309508 - RNA, 15 nt, Human herpesvirus 4 (Epstein-Barr virus)
aucagaccacccgga

SEQ ID NO: 309509 - RNA, 13 nt, Human herpesvirus 4 (Epstein-Barr virus)
aucaggacccugg

SEQ ID NO: 309510 - RNA, 12 nt, Human herpesvirus 4 (Epstein-Barr virus)
aucagggccagg

SEQ ID NO: 309511 - RNA, 15 nt, Human herpesvirus 4 (Epstein-Barr virus)
aucaugcagggugca

SEQ ID NO: 309512 - RNA, 17 nt, Human herpesvirus 4 (Epstein-Barr virus)
aucaugcagggugcaca

SEQ ID NO: 309513 - RNA, 19 nt, Human herpesvirus 4 (Epstein-Barr virus)
aucaugcagggugcacaga

SEQ ID NO: 309514 - RNA, 21 nt, Human herpesvirus 4 (Epstein-Barr virus)
aucaugucugacgaggggcca

SEQ ID NO: 309515 - RNA, 22 nt, Human herpesvirus 4 (Epstein-Barr virus)
aucaugucugacgaggggccag

SEQ ID NO: 309516 - RNA, 12 nt, Human herpesvirus 4 (Epstein-Barr virus)
aucauuagccca

SEQ ID NO: 309517 - RNA, 13 nt, Human herpesvirus 4 (Epstein-Barr virus)
auccacaccaucc

SEQ ID NO: 309518 - RNA, 17 nt, Human herpesvirus 4 (Epstein-Barr virus)
auccauuaucuuggcac

SEQ ID NO: 309519 - RNA, 14 nt, Human herpesvirus 4 (Epstein-Barr virus)
aucccaauucacau

SEQ ID NO: 309520 - RNA, 19 nt, Human herpesvirus 4 (Epstein-Barr virus)
auccccuuaaucuagcuca

SEQ ID NO: 309521 - RNA, 14 nt, Human herpesvirus 4 (Epstein-Barr virus)
auccuagagggaca

SEQ ID NO: 309522 - RNA, 13 nt, Human herpesvirus 4 (Epstein-Barr virus)
auccuucagauuc

SEQ ID NO: 309523 - RNA, 15 nt, Human herpesvirus 4 (Epstein-Barr virus)
auccuucagauucag

SEQ ID NO: 309524 - RNA, 13 nt, Human herpesvirus 4 (Epstein-Barr virus)
aucggaugccuca

SEQ ID NO: 309525 - RNA, 22 nt, Human herpesvirus 4 (Epstein-Barr virus)
aucgggacagauugucuuccac

SEQ ID NO: 309526 - RNA, 21 nt, Human herpesvirus 4 (Epstein-Barr virus)
aucgggcguuggcccauaaaa

SEQ ID NO: 309527 - RNA, 19 nt, Human herpesvirus 4 (Epstein-Barr virus)
aucgucucauacaguuugu

SEQ ID NO: 309528 - RNA, 14 nt, Human herpesvirus 4 (Epstein-Barr virus)
aucuccaccugugu

SEQ ID NO: 309529 - RNA, 18 nt, Human herpesvirus 4 (Epstein-Barr virus)
aucuccaucagggccagg

SEQ ID NO: 309530 - RNA, 21 nt, Human herpesvirus 4 (Epstein-Barr virus)
aucucgcuggcucgccucauc

SEQ ID NO: 309531 - RNA, 17 nt, Human herpesvirus 4 (Epstein-Barr virus)
aucucuaaagauuugau

SEQ ID NO: 309532 - RNA, 22 nt, Human herpesvirus 4 (Epstein-Barr virus)
aucugcuucuggaccgugccau

SEQ ID NO: 309533 - RNA, 18 nt, Human herpesvirus 4 (Epstein-Barr virus)
aucuggcuggggcauuaa

SEQ ID NO: 309534 - RNA, 13 nt, Human herpesvirus 4 (Epstein-Barr virus)
aucugggcagcca

SEQ ID NO: 309535 - RNA, 19 nt, Human herpesvirus 4 (Epstein-Barr virus)
aucugguggcccagcaacu

SEQ ID NO: 309536 - RNA, 13 nt, Human herpesvirus 4 (Epstein-Barr virus)
aucugucuuguca

SEQ ID NO: 309537 - RNA, 16 nt, Human herpesvirus 4 (Epstein-Barr virus)
aucuuaggagcccggg

SEQ ID NO: 309538 - RNA, 15 nt, Human herpesvirus 4 (Epstein-Barr virus)
aucuuugcugaagau

SEQ ID NO: 309539 - RNA, 23 nt, Human herpesvirus 4 (Epstein-Barr virus)
aucuuugcugaagaugauggacc

SEQ ID NO: 309540 - RNA, 22 nt, Human herpesvirus 4 (Epstein-Barr virus)
augaaaacagaggcuggaugca

SEQ ID NO: 309541 - RNA, 23 nt, Human herpesvirus 4 (Epstein-Barr virus)
augaacaccaccacgaugacucc

SEQ ID NO: 309542 - RNA, 17 nt, Human herpesvirus 4 (Epstein-Barr virus)
augaacacucauggugu

SEQ ID NO: 309543 - RNA, 16 nt, Human herpesvirus 4 (Epstein-Barr virus)
augaacccuggggcaa

SEQ ID NO: 309544 - RNA, 21 nt, Human herpesvirus 4 (Epstein-Barr virus)
augaacccuggggcaacagac

SEQ ID NO: 309545 - RNA, 15 nt, Human herpesvirus 4 (Epstein-Barr virus)
augaaggcuggcaaa

SEQ ID NO: 309546 - RNA, 16 nt, Human herpesvirus 4 (Epstein-Barr virus)
augaaggugucauuga

SEQ ID NO: 309547 - RNA, 14 nt, Human herpesvirus 4 (Epstein-Barr virus)
augaaucugacucu

SEQ ID NO: 309548 - RNA, 20 nt, Human herpesvirus 4 (Epstein-Barr virus)
augaccaacaugagggcacc

SEQ ID NO: 309549 - RNA, 12 nt, Human herpesvirus 4 (Epstein-Barr virus)
augaccaugaug

SEQ ID NO: 309550 - RNA, 17 nt, Human herpesvirus 4 (Epstein-Barr virus)
augaccaugauggugca

SEQ ID NO: 309551 - RNA, 18 nt, Human herpesvirus 4 (Epstein-Barr virus)
augacgucaacuuuacuu

SEQ ID NO: 309552 - RNA, 16 nt, Human herpesvirus 4 (Epstein-Barr virus)
augaggacucugaaaa

SEQ ID NO: 309553 - RNA, 15 nt, Human herpesvirus 4 (Epstein-Barr virus)
augagggccuuccag

SEQ ID NO: 309554 - RNA, 17 nt, Human herpesvirus 4 (Epstein-Barr virus)
augagucugacuacuca

SEQ ID NO: 309555 - RNA, 18 nt, Human herpesvirus 4 (Epstein-Barr virus)
augagucugacuacucag

SEQ ID NO: 309556 - RNA, 22 nt, Human herpesvirus 4 (Epstein-Barr virus)
augauacucaucugugagacaa

SEQ ID NO: 309557 - RNA, 17 nt, Human herpesvirus 4 (Epstein-Barr virus)
augaugaggacucugaa

SEQ ID NO: 309558 - RNA, 20 nt, Human herpesvirus 4 (Epstein-Barr virus)
augaugaggacucugaaaau

SEQ ID NO: 309559 - RNA, 21 nt, Human herpesvirus 4 (Epstein-Barr virus)
augauggccacgacuauccag

SEQ ID NO: 309560 - RNA, 17 nt, Human herpesvirus 4 (Epstein-Barr virus)
augauugagaaugccaa

SEQ ID NO: 309561 - RNA, 12 nt, Human herpesvirus 4 (Epstein-Barr virus)
augcaaguggau

SEQ ID NO: 309562 - RNA, 14 nt, Human herpesvirus 4 (Epstein-Barr virus)
augcacgccaacag

SEQ ID NO: 309563 - RNA, 21 nt, Human herpesvirus 4 (Epstein-Barr virus)
augcagcgcccugucccugga

SEQ ID NO: 309564 - RNA, 13 nt, Human herpesvirus 4 (Epstein-Barr virus)
augcaguccuccg

SEQ ID NO: 309565 - RNA, 13 nt, Human herpesvirus 4 (Epstein-Barr virus)
augcauacacuga

SEQ ID NO: 309566 - RNA, 23 nt, Human herpesvirus 4 (Epstein-Barr virus)
augccaacucccccaaacauguc

SEQ ID NO: 309567 - RNA, 17 nt, Human herpesvirus 4 (Epstein-Barr virus)
augccaccgugaaguua

SEQ ID NO: 309568 - RNA, 17 nt, Human herpesvirus 4 (Epstein-Barr virus)
augcccaccagccagcg

SEQ ID NO: 309569 - RNA, 13 nt, Human herpesvirus 4 (Epstein-Barr virus)
augcccagacuca

SEQ ID NO: 309570 - RNA, 20 nt, Human herpesvirus 4 (Epstein-Barr virus)
augccgcuuacagccagaga

SEQ ID NO: 309571 - RNA, 18 nt, Human herpesvirus 4 (Epstein-Barr virus)
augccucacgcgaaggga

SEQ ID NO: 309572 - RNA, 20 nt, Human herpesvirus 4 (Epstein-Barr virus)
augccucccccuuuacccau

SEQ ID NO: 309573 - RNA, 19 nt, Human herpesvirus 4 (Epstein-Barr virus)
augccuguggccccggcug

SEQ ID NO: 309574 - RNA, 20 nt, Human herpesvirus 4 (Epstein-Barr virus)
augcgccagagcggcauccu

SEQ ID NO: 309575 - RNA, 20 nt, Human herpesvirus 4 (Epstein-Barr virus)
augcuauuggguuaacgggu

SEQ ID NO: 309576 - RNA, 21 nt, Human herpesvirus 4 (Epstein-Barr virus)
augcuauuggguuaacgggug

SEQ ID NO: 309577 - RNA, 12 nt, Human herpesvirus 4 (Epstein-Barr virus)
cagggacaucua

SEQ ID NO: 309578 - RNA, 15 nt, Human herpesvirus 4 (Epstein-Barr virus)
cagggccaagacaua

SEQ ID NO: 309579 - RNA, 13 nt, Human herpesvirus 4 (Epstein-Barr virus)
cagggcccagugc

SEQ ID NO: 309580 - RNA, 14 nt, Human herpesvirus 4 (Epstein-Barr virus)
cagggccgugcaug

SEQ ID NO: 309581 - RNA, 14 nt, Human herpesvirus 4 (Epstein-Barr virus)
caggggugaugaaa

SEQ ID NO: 309582 - RNA, 19 nt, Human herpesvirus 4 (Epstein-Barr virus)
caggguggcuacuugcuca

SEQ ID NO: 309583 - RNA, 24 nt, Human herpesvirus 4 (Epstein-Barr virus)
cagguaacucacuaaacauugcac

SEQ ID NO: 309584 - RNA, 18 nt, Human herpesvirus 4 (Epstein-Barr virus)
caggugagggugccauug

SEQ ID NO: 309585 - RNA, 21 nt, Human herpesvirus 4 (Epstein-Barr virus)
caggugccuuuuguacaagcu

SEQ ID NO: 309586 - RNA, 13 nt, Human herpesvirus 4 (Epstein-Barr virus)
caggugggacaaa

SEQ ID NO: 309587 - RNA, 18 nt, Human herpesvirus 4 (Epstein-Barr virus)
cagguguacgcccuggcg

SEQ ID NO: 309588 - RNA, 24 nt, Human herpesvirus 4 (Epstein-Barr virus)
cagguuugacuucauauguaugcc

SEQ ID NO: 309589 - RNA, 17 nt, Human herpesvirus 4 (Epstein-Barr virus)
caguaaaccaguagugc

SEQ ID NO: 309590 - RNA, 16 nt, Human herpesvirus 4 (Epstein-Barr virus)
caguaaaucugucucu

SEQ ID NO: 309591 - RNA, 18 nt, Human herpesvirus 4 (Epstein-Barr virus)
caguagcuugggaacacc

SEQ ID NO: 309592 - RNA, 12 nt, Human herpesvirus 4 (Epstein-Barr virus)
caguaugcaguc

SEQ ID NO: 309593 - RNA, 22 nt, Human herpesvirus 4 (Epstein-Barr virus)
cagucaccuuccagacuaugca

SEQ ID NO: 309594 - RNA, 16 nt, Human herpesvirus 4 (Epstein-Barr virus)
cagucacgggacauua

SEQ ID NO: 309595 - RNA, 17 nt, Human herpesvirus 4 (Epstein-Barr virus)
cagucacgggacauuaa

SEQ ID NO: 309596 - RNA, 23 nt, Human herpesvirus 4 (Epstein-Barr virus)
caguccacagccaccggccaagg

SEQ ID NO: 309597 - RNA, 22 nt, Human herpesvirus 4 (Epstein-Barr virus)
caguccaggggccacacagccu

SEQ ID NO: 309598 - RNA, 18 nt, Human herpesvirus 4 (Epstein-Barr virus)
cagucccaacccaaaacc

SEQ ID NO: 309599 - RNA, 14 nt, Human herpesvirus 4 (Epstein-Barr virus)
caguggacaaggca

SEQ ID NO: 309600 - RNA, 23 nt, Human herpesvirus 4 (Epstein-Barr virus)
caguggagcgaagcuagugcagg

SEQ ID NO: 309601 - RNA, 17 nt, Human herpesvirus 4 (Epstein-Barr virus)
caguggccgucuggcag

SEQ ID NO: 309602 - RNA, 21 nt, Human herpesvirus 4 (Epstein-Barr virus)
cagugggugaggcggugccug

SEQ ID NO: 309603 - RNA, 19 nt, Human herpesvirus 4 (Epstein-Barr virus)
caguggucaccgguggugg

SEQ ID NO: 309604 - RNA, 16 nt, Human herpesvirus 4 (Epstein-Barr virus)
caguuaucaccguacc

SEQ ID NO: 309605 - RNA, 14 nt, Human herpesvirus 4 (Epstein-Barr virus)
cauaauggugccug

SEQ ID NO: 309606 - RNA, 19 nt, Human herpesvirus 4 (Epstein-Barr virus)
cauaauggugccugaggga

SEQ ID NO: 309607 - RNA, 16 nt, Human herpesvirus 4 (Epstein-Barr virus)
cauaauguaugccaug

SEQ ID NO: 309608 - RNA, 15 nt, Human herpesvirus 4 (Epstein-Barr virus)
cauacagcagcugga

SEQ ID NO: 309609 - RNA, 23 nt, Human herpesvirus 4 (Epstein-Barr virus)
cauacaggaggaaaggcuauaug

SEQ ID NO: 309610 - RNA, 21 nt, Human herpesvirus 4 (Epstein-Barr virus)
cauaccaggugccuuuuguac

SEQ ID NO: 309611 - RNA, 17 nt, Human herpesvirus 4 (Epstein-Barr virus)
cauagaggggcaugcuu

SEQ ID NO: 309612 - RNA, 22 nt, Human herpesvirus 4 (Epstein-Barr virus)
cauagucacggaugcugcagag

SEQ ID NO: 309613 - RNA, 21 nt, Human herpesvirus 4 (Epstein-Barr virus)
cauauacuggagaugauucau

SEQ ID NO: 309614 - RNA, 23 nt, Human herpesvirus 4 (Epstein-Barr virus)
cauaugaugacgccgagaccuau

SEQ ID NO: 309615 - RNA, 19 nt, Human herpesvirus 4 (Epstein-Barr virus)
cauauguaugccuuggcau

SEQ ID NO: 309616 - RNA, 22 nt, Human herpesvirus 4 (Epstein-Barr virus)
cauauuuucagacccaccaugg

SEQ ID NO: 309617 - RNA, 19 nt, Human herpesvirus 4 (Epstein-Barr virus)
caucaauggaacccuagcc

SEQ ID NO: 309618 - RNA, 14 nt, Human herpesvirus 4 (Epstein-Barr virus)
caucacaagucaca

SEQ ID NO: 309619 - RNA, 16 nt, Human herpesvirus 4 (Epstein-Barr virus)
caucacaagucacauc

SEQ ID NO: 309620 - RNA, 18 nt, Human herpesvirus 4 (Epstein-Barr virus)
caucaccuggguacccaa

SEQ ID NO: 309621 - RNA, 22 nt, Human herpesvirus 4 (Epstein-Barr virus)
caucaugcagggugcacagacu

SEQ ID NO: 309622 - RNA, 15 nt, Human herpesvirus 4 (Epstein-Barr virus)
caucauuagcccagc

SEQ ID NO: 309623 - RNA, 20 nt, Human herpesvirus 4 (Epstein-Barr virus)
cauccaccaucaaugucacc

SEQ ID NO: 309624 - RNA, 21 nt, Human herpesvirus 4 (Epstein-Barr virus)
cauccaccaucaaugucacca

SEQ ID NO: 309625 - RNA, 16 nt, Human herpesvirus 4 (Epstein-Barr virus)
caucccaauucacauc

SEQ ID NO: 309626 - RNA, 12 nt, Human herpesvirus 4 (Epstein-Barr virus)
cauccccagccc

SEQ ID NO: 309627 - RNA, 16 nt, Human herpesvirus 4 (Epstein-Barr virus)
cauccuucagauucag

SEQ ID NO: 309628 - RNA, 21 nt, Human herpesvirus 4 (Epstein-Barr virus)
cauccuuuauaugaaaaugug

SEQ ID NO: 309629 - RNA, 12 nt, Human herpesvirus 4 (Epstein-Barr virus)
caucgcacgggg

SEQ ID NO: 309630 - RNA, 20 nt, Human herpesvirus 4 (Epstein-Barr virus)
caucggguccuagcacaaac

SEQ ID NO: 309631 - RNA, 23 nt, Human herpesvirus 4 (Epstein-Barr virus)
caucuacccaacagucuucaggu

SEQ ID NO: 309632 - RNA, 21 nt, Human herpesvirus 4 (Epstein-Barr virus)
caucucuuuuacagugguucu

SEQ ID NO: 309633 - RNA, 17 nt, Human herpesvirus 4 (Epstein-Barr virus)
caucugagggcagugau

SEQ ID NO: 309634 - RNA, 14 nt, Human herpesvirus 4 (Epstein-Barr virus)
caucugcccggcua

SEQ ID NO: 309635 - RNA, 20 nt, Human herpesvirus 4 (Epstein-Barr virus)
caucuggcuggggcauuaac

SEQ ID NO: 309636 - RNA, 14 nt, Human herpesvirus 4 (Epstein-Barr virus)
caucuuaucagaga

SEQ ID NO: 309637 - RNA, 18 nt, Human herpesvirus 4 (Epstein-Barr virus)
caugaauguuacccucau

SEQ ID NO: 309638 - RNA, 13 nt, Human herpesvirus 4 (Epstein-Barr virus)
caugacacaggac

SEQ ID NO: 309639 - RNA, 15 nt, Human herpesvirus 4 (Epstein-Barr virus)
caugacacaggacaa

SEQ ID NO: 309640 - RNA, 23 nt, Human herpesvirus 4 (Epstein-Barr virus)
caugagaaaauacuucucuagag

SEQ ID NO: 309641 - RNA, 14 nt, Human herpesvirus 4 (Epstein-Barr virus)
caugagggcaccga

SEQ ID NO: 309642 - RNA, 22 nt, Human herpesvirus 4 (Epstein-Barr virus)
caugagggcaccgaucaucucg

SEQ ID NO: 309643 - RNA, 13 nt, Human herpesvirus 4 (Epstein-Barr virus)
caugauacucauc

SEQ ID NO: 309644 - RNA, 23 nt, Human herpesvirus 4 (Epstein-Barr virus)
caugccaaugggggaggagagac

SEQ ID NO: 309645 - RNA, 18 nt, Human herpesvirus 4 (Epstein-Barr virus)
caugccaccgugaaguua

SEQ ID NO: 309646 - RNA, 15 nt, Human herpesvirus 4 (Epstein-Barr virus)
caugccaucucugau

SEQ ID NO: 309647 - RNA, 14 nt, Human herpesvirus 4 (Epstein-Barr virus)
caugcccagacuca

SEQ ID NO: 309648 - RNA, 20 nt, Human herpesvirus 4 (Epstein-Barr virus)
caugccuaauggccguccuc

SEQ ID NO: 309649 - RNA, 17 nt, Human herpesvirus 4 (Epstein-Barr virus)
caugcuguaccugauga

SEQ ID NO: 309650 - RNA, 13 nt, Human herpesvirus 4 (Epstein-Barr virus)
caugcuuacucaa

SEQ ID NO: 309651 - RNA, 15 nt, Human herpesvirus 4 (Epstein-Barr virus)
cauggagaagcugga

SEQ ID NO: 309652 - RNA, 23 nt, Human herpesvirus 4 (Epstein-Barr virus)
cauggaugugaaugcccccgggg

SEQ ID NO: 309653 - RNA, 22 nt, Human herpesvirus 4 (Epstein-Barr virus)
cauggccauucgacaggccauu

SEQ ID NO: 309654 - RNA, 19 nt, Human herpesvirus 4 (Epstein-Barr virus)
caugggcgggacaaucgca

SEQ ID NO: 309655 - RNA, 20 nt, Human herpesvirus 4 (Epstein-Barr virus)
caugggggaaaccugcgaaa

SEQ ID NO: 309656 - RNA, 19 nt, Human herpesvirus 4 (Epstein-Barr virus)
cauggugucuguaaucucu

SEQ ID NO: 309657 - RNA, 13 nt, Human herpesvirus 4 (Epstein-Barr virus)
cauguaacaagaa

SEQ ID NO: 309658 - RNA, 13 nt, Human herpesvirus 4 (Epstein-Barr virus)
cauguccacugag

SEQ ID NO: 309659 - RNA, 20 nt, Human herpesvirus 4 (Epstein-Barr virus)
caugucgagcaugagcuccu

SEQ ID NO: 309660 - RNA, 14 nt, Human herpesvirus 4 (Epstein-Barr virus)
caugucuguuguuu

SEQ ID NO: 309661 - RNA, 22 nt, Human herpesvirus 4 (Epstein-Barr virus)
cauguucgcacuccuaugcauu

SEQ ID NO: 309662 - RNA, 15 nt, Human herpesvirus 4 (Epstein-Barr virus)
cauguuucccuccaa

SEQ ID NO: 309663 - RNA, 14 nt, Human herpesvirus 4 (Epstein-Barr virus)
cauguuuuuggcau

SEQ ID NO: 309664 - RNA, 16 nt, Human herpesvirus 4 (Epstein-Barr virus)
cauguuuuuggcaugu

SEQ ID NO: 309665 - RNA, 13 nt, Human herpesvirus 4 (Epstein-Barr virus)
cauuaaccucaac

SEQ ID NO: 309666 - RNA, 16 nt, Human herpesvirus 4 (Epstein-Barr virus)
cauuacaccaucccau

SEQ ID NO: 309667 - RNA, 17 nt, Human herpesvirus 4 (Epstein-Barr virus)
cauuaggcgacucugca

SEQ ID NO: 309668 - RNA, 22 nt, Human herpesvirus 4 (Epstein-Barr virus)
cauuccaguuuccuucuugacc

SEQ ID NO: 309669 - RNA, 15 nt, Human herpesvirus 4 (Epstein-Barr virus)
cauucgacaggccau

SEQ ID NO: 309670 - RNA, 16 nt, Human herpesvirus 4 (Epstein-Barr virus)
cauucgacaggccauu

SEQ ID NO: 309671 - RNA, 17 nt, Human herpesvirus 4 (Epstein-Barr virus)
cauucucguccaucucg

SEQ ID NO: 309672 - RNA, 19 nt, Human herpesvirus 4 (Epstein-Barr virus)
cauugacgcaaguuuugcc

SEQ ID NO: 309673 - RNA, 15 nt, Human herpesvirus 4 (Epstein-Barr virus)
cauugagguaaaaag

SEQ ID NO: 309674 - RNA, 13 nt, Human herpesvirus 4 (Epstein-Barr virus)
cauugcaccuugc

SEQ ID NO: 309675 - RNA, 12 nt, Human herpesvirus 4 (Epstein-Barr virus)
cauugugcugaa

SEQ ID NO: 309676 - RNA, 17 nt, Human herpesvirus 4 (Epstein-Barr virus)
cauuucagguaccccaa

SEQ ID NO: 309677 - RNA, 16 nt, Human herpesvirus 4 (Epstein-Barr virus)
cauuuucguccuccca

SEQ ID NO: 309678 - RNA, 14 nt, Human herpesvirus 4 (Epstein-Barr virus)
ccaaaccaugacau

SEQ ID NO: 309679 - RNA, 15 nt, Human herpesvirus 4 (Epstein-Barr virus)
ccaaagcuaacugua

SEQ ID NO: 309680 - RNA, 16 nt, Human herpesvirus 4 (Epstein-Barr virus)
ccaaagcuaacuguac

SEQ ID NO: 309681 - RNA, 17 nt, Human herpesvirus 4 (Epstein-Barr virus)
ccaaagcuaacuguaca

SEQ ID NO: 309682 - RNA, 23 nt, Human herpesvirus 4 (Epstein-Barr virus)
ccaaagcuaacuguacauacugc

SEQ ID NO: 309683 - RNA, 15 nt, Human herpesvirus 4 (Epstein-Barr virus)
ccaaagucaagggaa

SEQ ID NO: 309684 - RNA, 23 nt, Human herpesvirus 4 (Epstein-Barr virus)
ccaacagcgaccggcagaucccg

SEQ ID NO: 309685 - RNA, 13 nt, Human herpesvirus 4 (Epstein-Barr virus)
ccaacagucuuca

SEQ ID NO: 309686 - RNA, 23 nt, Human herpesvirus 4 (Epstein-Barr virus)
ccaagacucccugacgguggugg

SEQ ID NO: 309687 - RNA, 14 nt, Human herpesvirus 4 (Epstein-Barr virus)
ccaagauaauggau

SEQ ID NO: 309688 - RNA, 17 nt, Human herpesvirus 4 (Epstein-Barr virus)
ccaagggcagggcaaug

SEQ ID NO: 309689 - RNA, 19 nt, Human herpesvirus 4 (Epstein-Barr virus)
ccaaggugugcaugagcac

SEQ ID NO: 309690 - RNA, 13 nt, Human herpesvirus 4 (Epstein-Barr virus)
ccaaguguuucca

SEQ ID NO: 309691 - RNA, 15 nt, Human herpesvirus 4 (Epstein-Barr virus)
ccaauccaugccaau

SEQ ID NO: 309692 - RNA, 11 nt, Human herpesvirus 4 (Epstein-Barr virus)
ccaaugccaaa

SEQ ID NO: 309693 - RNA, 14 nt, Human herpesvirus 4 (Epstein-Barr virus)
ccaauguaucccaa

SEQ ID NO: 309694 - RNA, 18 nt, Human herpesvirus 4 (Epstein-Barr virus)
ccaauguaucccaaauaa

SEQ ID NO: 309695 - RNA, 18 nt, Human herpesvirus 4 (Epstein-Barr virus)
ccaauucuugcacccacc

SEQ ID NO: 309696 - RNA, 15 nt, Human herpesvirus 4 (Epstein-Barr virus)
ccacacagugggcuu

SEQ ID NO: 309697 - RNA, 16 nt, Human herpesvirus 4 (Epstein-Barr virus)
ccacagagcaucagau

SEQ ID NO: 309698 - RNA, 22 nt, Human herpesvirus 4 (Epstein-Barr virus)
ccacagauggagagauuucauc

SEQ ID NO: 309699 - RNA, 19 nt, Human herpesvirus 4 (Epstein-Barr virus)
ccacaggggagguggcuga

SEQ ID NO: 309700 - RNA, 16 nt, Human herpesvirus 4 (Epstein-Barr virus)
ccacauauacuggaga

SEQ ID NO: 309701 - RNA, 23 nt, Human herpesvirus 4 (Epstein-Barr virus)
ccaccaucaaugucaccacuaag

SEQ ID NO: 309702 - RNA, 21 nt, Human herpesvirus 4 (Epstein-Barr virus)
ccaccauggaaucauuugaag

SEQ ID NO: 309703 - RNA, 22 nt, Human herpesvirus 4 (Epstein-Barr virus)
ccaccgccgguuaacuuuaaca

SEQ ID NO: 309704 - RNA, 17 nt, Human herpesvirus 4 (Epstein-Barr virus)
ccaccgccuuaaggccg

SEQ ID NO: 309705 - RNA, 16 nt, Human herpesvirus 4 (Epstein-Barr virus)
ccaccggggaggccag

SEQ ID NO: 309706 - RNA, 14 nt, Human herpesvirus 4 (Epstein-Barr virus)
ccaccucaacauau

SEQ ID NO: 309707 - RNA, 15 nt, Human herpesvirus 4 (Epstein-Barr virus)
ccaccucaacauauu

SEQ ID NO: 309708 - RNA, 19 nt, Human herpesvirus 4 (Epstein-Barr virus)
ccacgucuuuaccaccuca

SEQ ID NO: 309709 - RNA, 22 nt, Human herpesvirus 4 (Epstein-Barr virus)
ccacuaagguuacugcacagaa

SEQ ID NO: 309710 - RNA, 13 nt, Human herpesvirus 4 (Epstein-Barr virus)
ccacucagacucu

SEQ ID NO: 309711 - RNA, 15 nt, Human herpesvirus 4 (Epstein-Barr virus)
ccacucagacucucc

SEQ ID NO: 309712 - RNA, 21 nt, Human herpesvirus 4 (Epstein-Barr virus)
ccacuuuuaccccagucccaa

SEQ ID NO: 309713 - RNA, 22 nt, Human herpesvirus 4 (Epstein-Barr virus)
ccagaaagaagugggaccuaca

SEQ ID NO: 309714 - RNA, 22 nt, Human herpesvirus 4 (Epstein-Barr virus)
ccagaaggcuccggcggcagug

SEQ ID NO: 309715 - RNA, 22 nt, Human herpesvirus 4 (Epstein-Barr virus)
ccagaagucggccacaggggag

SEQ ID NO: 309716 - RNA, 21 nt, Human herpesvirus 4 (Epstein-Barr virus)
ccagaccugugugcuguauuu

SEQ ID NO: 309717 - RNA, 22 nt, Human herpesvirus 4 (Epstein-Barr virus)
ccagacgcgauggcacacgcca

SEQ ID NO: 309718 - RNA, 14 nt, Human herpesvirus 4 (Epstein-Barr virus)
ccagacuaugcaua

SEQ ID NO: 309719 - RNA, 21 nt, Human herpesvirus 4 (Epstein-Barr virus)
ccagaggacuaauguucucua

SEQ ID NO: 309720 - RNA, 16 nt, Human herpesvirus 4 (Epstein-Barr virus)
ccagaggccacaaaag

SEQ ID NO: 309721 - RNA, 19 nt, Human herpesvirus 4 (Epstein-Barr virus)
ccagaguucccggcugcuc

SEQ ID NO: 309722 - RNA, 21 nt, Human herpesvirus 4 (Epstein-Barr virus)
ccagaugcaccgggaugagcu

SEQ ID NO: 309723 - RNA, 16 nt, Human herpesvirus 4 (Epstein-Barr virus)
ccagcagggccuugag

SEQ ID NO: 309724 - RNA, 20 nt, Human herpesvirus 4 (Epstein-Barr virus)
ccagccacuuacagcacauu

SEQ ID NO: 309725 - RNA, 14 nt, Human herpesvirus 4 (Epstein-Barr virus)
ccagcccuccucag

SEQ ID NO: 309726 - RNA, 23 nt, Human herpesvirus 4 (Epstein-Barr virus)
ccagccuguuuguccagcagggc

SEQ ID NO: 309727 - RNA, 16 nt, Human herpesvirus 4 (Epstein-Barr virus)
ccagcgcaagcuugcu

SEQ ID NO: 309728 - RNA, 16 nt, Human herpesvirus 4 (Epstein-Barr virus)
ccagcuggucaucagc

SEQ ID NO: 309729 - RNA, 22 nt, Human herpesvirus 4 (Epstein-Barr virus)
ccagcuucugaggcggcugugg

SEQ ID NO: 309730 - RNA, 22 nt, Human herpesvirus 4 (Epstein-Barr virus)
ccggcuacgcgggccacaggug

SEQ ID NO: 309731 - RNA, 12 nt, Human herpesvirus 4 (Epstein-Barr virus)
ccgggaggugcu

SEQ ID NO: 309732 - RNA, 16 nt, Human herpesvirus 4 (Epstein-Barr virus)
ccgggcagguccguga

SEQ ID NO: 309733 - RNA, 14 nt, Human herpesvirus 4 (Epstein-Barr virus)
ccgggccagcauuc

SEQ ID NO: 309734 - RNA, 19 nt, Human herpesvirus 4 (Epstein-Barr virus)
ccggggcccgcuucauuca

SEQ ID NO: 309735 - RNA, 13 nt, Human herpesvirus 4 (Epstein-Barr virus)
ccgggggccaguc

SEQ ID NO: 309736 - RNA, 20 nt, Human herpesvirus 4 (Epstein-Barr virus)
ccggucccagcggaugcggc

SEQ ID NO: 309737 - RNA, 18 nt, Human herpesvirus 4 (Epstein-Barr virus)
ccgucacuccagccauca

SEQ ID NO: 309738 - RNA, 13 nt, Human herpesvirus 4 (Epstein-Barr virus)
ccgucagccacac

SEQ ID NO: 309739 - RNA, 14 nt, Human herpesvirus 4 (Epstein-Barr virus)
ccgugaaugcacgc

SEQ ID NO: 309740 - RNA, 17 nt, Human herpesvirus 4 (Epstein-Barr virus)
ccgugaaugcacgccaa

SEQ ID NO: 309741 - RNA, 14 nt, Human herpesvirus 4 (Epstein-Barr virus)
ccgugagaacuuuc

SEQ ID NO: 309742 - RNA, 15 nt, Human herpesvirus 4 (Epstein-Barr virus)
ccgugcuuuuugcca

SEQ ID NO: 309743 - RNA, 14 nt, Human herpesvirus 4 (Epstein-Barr virus)
ccguggcagacaca

SEQ ID NO: 309744 - RNA, 17 nt, Human herpesvirus 4 (Epstein-Barr virus)
ccgugguccugaggggc

SEQ ID NO: 309745 - RNA, 24 nt, Human herpesvirus 4 (Epstein-Barr virus)
ccguugguuucagcgcaucgacac

SEQ ID NO: 309746 - RNA, 16 nt, Human herpesvirus 4 (Epstein-Barr virus)
ccuaaugcauccgcac

SEQ ID NO: 309747 - RNA, 23 nt, Human herpesvirus 4 (Epstein-Barr virus)
ccuacaggacaagacagucacau

SEQ ID NO: 309748 - RNA, 17 nt, Human herpesvirus 4 (Epstein-Barr virus)
ccuacaugaauguuacc

SEQ ID NO: 309749 - RNA, 18 nt, Human herpesvirus 4 (Epstein-Barr virus)
ccuacaugaauguuaccc

SEQ ID NO: 309750 - RNA, 22 nt, Human herpesvirus 4 (Epstein-Barr virus)
ccuacaugaauguuacccucau

SEQ ID NO: 309751 - RNA, 22 nt, Human herpesvirus 4 (Epstein-Barr virus)
ccuacucuccacucccagucca

SEQ ID NO: 309752 - RNA, 12 nt, Human herpesvirus 4 (Epstein-Barr virus)
ccuacugguugu

SEQ ID NO: 309753 - RNA, 23 nt, Human herpesvirus 4 (Epstein-Barr virus)
ccuagaaacugugccauggugcc

SEQ ID NO: 309754 - RNA, 19 nt, Human herpesvirus 4 (Epstein-Barr virus)
ccuagcacaaaccagucua

SEQ ID NO: 309755 - RNA, 21 nt, Human herpesvirus 4 (Epstein-Barr virus)
ccuagcuuauuuuuugguugu

SEQ ID NO: 309756 - RNA, 12 nt, Human herpesvirus 4 (Epstein-Barr virus)
ccuugaucuucu

SEQ ID NO: 309757 - RNA, 17 nt, Human herpesvirus 4 (Epstein-Barr virus)
ccuugaucuucuucucc

SEQ ID NO: 309758 - RNA, 15 nt, Human herpesvirus 4 (Epstein-Barr virus)
ccuugcucucagcac

SEQ ID NO: 309759 - RNA, 20 nt, Human herpesvirus 4 (Epstein-Barr virus)
ccuugcucucagcacuuugc

SEQ ID NO: 309760 - RNA, 21 nt, Human herpesvirus 4 (Epstein-Barr virus)
ccuuggcuauggucauggcca

SEQ ID NO: 309761 - RNA, 13 nt, Human herpesvirus 4 (Epstein-Barr virus)
ccuugggggccug

SEQ ID NO: 309762 - RNA, 19 nt, Human herpesvirus 4 (Epstein-Barr virus)
ccuugguuucagccucacu

SEQ ID NO: 309763 - RNA, 21 nt, Human herpesvirus 4 (Epstein-Barr virus)
ccuugugucucuaucaaggaa

SEQ ID NO: 309764 - RNA, 16 nt, Human herpesvirus 4 (Epstein-Barr virus)
ccuuugcuaucuuugc

SEQ ID NO: 309765 - RNA, 11 nt, Human herpesvirus 4 (Epstein-Barr virus)
ccuuuugcacc

SEQ ID NO: 309766 - RNA, 16 nt, Human herpesvirus 4 (Epstein-Barr virus)
ccuuuuguacaagcuu

SEQ ID NO: 309767 - RNA, 15 nt, Human herpesvirus 4 (Epstein-Barr virus)
cgaagaacacuccac

SEQ ID NO: 309768 - RNA, 23 nt, Human herpesvirus 4 (Epstein-Barr virus)
cgaagacccaucugagggcagug

SEQ ID NO: 309769 - RNA, 14 nt, Human herpesvirus 4 (Epstein-Barr virus)
cgaaucugacauuu

SEQ ID NO: 309770 - RNA, 16 nt, Human herpesvirus 4 (Epstein-Barr virus)
cgaaucugacauuucu

SEQ ID NO: 309771 - RNA, 22 nt, Human herpesvirus 4 (Epstein-Barr virus)
cgacacagugaugaacaccacc

SEQ ID NO: 309772 - RNA, 17 nt, Human herpesvirus 4 (Epstein-Barr virus)
cgacaccggggugccaa

SEQ ID NO: 309773 - RNA, 14 nt, Human herpesvirus 4 (Epstein-Barr virus)
cgaccagucauguc

SEQ ID NO: 309774 - RNA, 14 nt, Human herpesvirus 4 (Epstein-Barr virus)
cgaccugccaaaga

SEQ ID NO: 309775 - RNA, 13 nt, Human herpesvirus 4 (Epstein-Barr virus)
cgacugucauuua

SEQ ID NO: 309776 - RNA, 19 nt, Human herpesvirus 4 (Epstein-Barr virus)
cgacuuggugccaccaucu

SEQ ID NO: 309777 - RNA, 22 nt, Human herpesvirus 4 (Epstein-Barr virus)
cgagaaaugcgccgucauucca

SEQ ID NO: 309778 - RNA, 17 nt, Human herpesvirus 4 (Epstein-Barr virus)
cgagaaggaggagacug

SEQ ID NO: 309779 - RNA, 16 nt, Human herpesvirus 4 (Epstein-Barr virus)
cgagaccuauguauaa

SEQ ID NO: 309780 - RNA, 15 nt, Human herpesvirus 4 (Epstein-Barr virus)
cgagcagaaggccau

SEQ ID NO: 309781 - RNA, 22 nt, Human herpesvirus 4 (Epstein-Barr virus)
cgagcaugagcuccucuccaaa

SEQ ID NO: 309782 - RNA, 17 nt, Human herpesvirus 4 (Epstein-Barr virus)
cgagccauagaccaguu

SEQ ID NO: 309783 - RNA, 19 nt, Human herpesvirus 4 (Epstein-Barr virus)
cgaggaggcggaagaccag

SEQ ID NO: 309784 - RNA, 13 nt, Human herpesvirus 4 (Epstein-Barr virus)
cgaggcugauguc

SEQ ID NO: 309785 - RNA, 19 nt, Human herpesvirus 4 (Epstein-Barr virus)
cgagggggccuggugccag

SEQ ID NO: 309786 - RNA, 16 nt, Human herpesvirus 4 (Epstein-Barr virus)
cgauuuuaucacagga

SEQ ID NO: 309787 - RNA, 19 nt, Human herpesvirus 4 (Epstein-Barr virus)
cgcaagggagacguuugag

SEQ ID NO: 309788 - RNA, 15 nt, Human herpesvirus 4 (Epstein-Barr virus)
cgcacgugacagauu

SEQ ID NO: 309789 - RNA, 18 nt, Human herpesvirus 4 (Epstein-Barr virus)
cgcacucuuguugcuagc

SEQ ID NO: 309790 - RNA, 22 nt, Human herpesvirus 4 (Epstein-Barr virus)
cgcaguccgccaugaccagcag

SEQ ID NO: 309791 - RNA, 16 nt, Human herpesvirus 4 (Epstein-Barr virus)
cgcauagcgugaaguc

SEQ ID NO: 309792 - RNA, 15 nt, Human herpesvirus 4 (Epstein-Barr virus)
cgcauccaccaucaa

SEQ ID NO: 309793 - RNA, 15 nt, Human herpesvirus 4 (Epstein-Barr virus)
cgcaucgucuccagc

SEQ ID NO: 309794 - RNA, 16 nt, Human herpesvirus 4 (Epstein-Barr virus)
cgccagccaccccaga

SEQ ID NO: 309795 - RNA, 19 nt, Human herpesvirus 4 (Epstein-Barr virus)
cgccaggaccuggaugcug

SEQ ID NO: 309796 - RNA, 13 nt, Human herpesvirus 4 (Epstein-Barr virus)
cgccaucuaccca

SEQ ID NO: 309797 - RNA, 13 nt, Human herpesvirus 4 (Epstein-Barr virus)
cgccguuugacug

SEQ ID NO: 309798 - RNA, 21 nt, Human herpesvirus 4 (Epstein-Barr virus)
cgccucuugucggacgaggag

SEQ ID NO: 309799 - RNA, 12 nt, Human herpesvirus 4 (Epstein-Barr virus)
cgcgcuccgucc

SEQ ID NO: 309800 - RNA, 14 nt, Human herpesvirus 4 (Epstein-Barr virus)
cgcggagaggucca

SEQ ID NO: 309801 - RNA, 17 nt, Human herpesvirus 4 (Epstein-Barr virus)
cgcggcccggaggcugc

SEQ ID NO: 309802 - RNA, 17 nt, Human herpesvirus 4 (Epstein-Barr virus)
cgcggcuggaugcccuc

SEQ ID NO: 309803 - RNA, 18 nt, Human herpesvirus 4 (Epstein-Barr virus)
cgcgguuucagcaucaca

SEQ ID NO: 309804 - RNA, 19 nt, Human herpesvirus 4 (Epstein-Barr virus)
cgcguccuuugggaacacg

SEQ ID NO: 309805 - RNA, 21 nt, Human herpesvirus 4 (Epstein-Barr virus)
cgcgugggguccggucuugca

SEQ ID NO: 309806 - RNA, 22 nt, Human herpesvirus 4 (Epstein-Barr virus)
cgcuccguccuuguccaggaga

SEQ ID NO: 309807 - RNA, 22 nt, Human herpesvirus 4 (Epstein-Barr virus)
cgcucuguuugaaacacaguuu

SEQ ID NO: 309808 - RNA, 15 nt, Human herpesvirus 4 (Epstein-Barr virus)
cgcugcguggcacca

SEQ ID NO: 309809 - RNA, 16 nt, Human herpesvirus 4 (Epstein-Barr virus)
cgcuguuuugcagcug

SEQ ID NO: 309810 - RNA, 20 nt, Human herpesvirus 4 (Epstein-Barr virus)
cgcuuggagucgaagcucuu

SEQ ID NO: 309811 - RNA, 21 nt, Human herpesvirus 4 (Epstein-Barr virus)
cggaagagcccaaaaccuguu

SEQ ID NO: 309812 - RNA, 15 nt, Human herpesvirus 4 (Epstein-Barr virus)
cggaccaaugccaaa

SEQ ID NO: 309813 - RNA, 12 nt, Human herpesvirus 4 (Epstein-Barr virus)
cggaccuccuaa

SEQ ID NO: 309814 - RNA, 16 nt, Human herpesvirus 4 (Epstein-Barr virus)
cggagaaauccagcuu

SEQ ID NO: 309815 - RNA, 15 nt, Human herpesvirus 4 (Epstein-Barr virus)
cggaggcagacaccc

SEQ ID NO: 309816 - RNA, 21 nt, Human herpesvirus 4 (Epstein-Barr virus)
cggauaaacagggguaugugg

SEQ ID NO: 309817 - RNA, 20 nt, Human herpesvirus 4 (Epstein-Barr virus)
cggccaagguccugggccuc

SEQ ID NO: 309818 - RNA, 12 nt, Human herpesvirus 4 (Epstein-Barr virus)
cggccaccuuug

SEQ ID NO: 309819 - RNA, 11 nt, Human herpesvirus 4 (Epstein-Barr virus)
cggccccgugc

SEQ ID NO: 309820 - RNA, 17 nt, Human herpesvirus 4 (Epstein-Barr virus)
cggcgaugucggggcug

SEQ ID NO: 309821 - RNA, 20 nt, Human herpesvirus 4 (Epstein-Barr virus)
cggcuuuccaguucccccca

SEQ ID NO: 309822 - RNA, 22 nt, Human herpesvirus 4 (Epstein-Barr virus)
cgggaacgcccaguaugcaguc

SEQ ID NO: 309823 - RNA, 23 nt, Human herpesvirus 4 (Epstein-Barr virus)
cgggacauuaaccucaaccacaa

SEQ ID NO: 309824 - RNA, 14 nt, Human herpesvirus 4 (Epstein-Barr virus)
cgggccacaggugc

SEQ ID NO: 309825 - RNA, 20 nt, Human herpesvirus 4 (Epstein-Barr virus)
cggggaaaagagagcugaug

SEQ ID NO: 309826 - RNA, 15 nt, Human herpesvirus 4 (Epstein-Barr virus)
cggggcaugcugccc

SEQ ID NO: 309827 - RNA, 14 nt, Human herpesvirus 4 (Epstein-Barr virus)
cggucaccccagau

SEQ ID NO: 309828 - RNA, 22 nt, Human herpesvirus 4 (Epstein-Barr virus)
cggucucagacaccaacacaga

SEQ ID NO: 309829 - RNA, 15 nt, Human herpesvirus 4 (Epstein-Barr virus)
cggugauaacugaca

SEQ ID NO: 309830 - RNA, 14 nt, Human herpesvirus 4 (Epstein-Barr virus)
cggugaucagggag

SEQ ID NO: 309831 - RNA, 15 nt, Human herpesvirus 4 (Epstein-Barr virus)
cgguguccaggugug

SEQ ID NO: 309832 - RNA, 22 nt, Human herpesvirus 4 (Epstein-Barr virus)
cgguuauggcagagcuuugccc

SEQ ID NO: 309833 - RNA, 15 nt, Human herpesvirus 4 (Epstein-Barr virus)
cguaacuugucuaca

SEQ ID NO: 309834 - RNA, 18 nt, Human herpesvirus 4 (Epstein-Barr virus)
cguaccaugagugccaug

SEQ ID NO: 309835 - RNA, 16 nt, Human herpesvirus 4 (Epstein-Barr virus)
cguagccuauuugcac

SEQ ID NO: 309836 - RNA, 21 nt, Human herpesvirus 4 (Epstein-Barr virus)
cgucacuccagccaucaugcu

SEQ ID NO: 309837 - RNA, 14 nt, Human herpesvirus 4 (Epstein-Barr virus)
cgucauuucuucca

SEQ ID NO: 309838 - RNA, 19 nt, Human herpesvirus 4 (Epstein-Barr virus)
cguccaccccaccccggcg

SEQ ID NO: 309839 - RNA, 10 nt, Human herpesvirus 4 (Epstein-Barr virus)
cguccaucuc

SEQ ID NO: 309840 - RNA, 21 nt, Human herpesvirus 4 (Epstein-Barr virus)
cguccucccaacauggggcaa

SEQ ID NO: 309841 - RNA, 14 nt, Human herpesvirus 4 (Epstein-Barr virus)
cgucuccagcggcu

SEQ ID NO: 309842 - RNA, 23 nt, Human herpesvirus 4 (Epstein-Barr virus)
cgugagagccuacccaugaccaa

SEQ ID NO: 309843 - RNA, 18 nt, Human herpesvirus 4 (Epstein-Barr virus)
cgugcaagcagcaccugu

SEQ ID NO: 309844 - RNA, 21 nt, Human herpesvirus 4 (Epstein-Barr virus)
cucucaucuggaacgguggga

SEQ ID NO: 309845 - RNA, 17 nt, Human herpesvirus 4 (Epstein-Barr virus)
cucucgaggucugcgau

SEQ ID NO: 309846 - RNA, 23 nt, Human herpesvirus 4 (Epstein-Barr virus)
cucucgaugauugagaaugccaa

SEQ ID NO: 309847 - RNA, 14 nt, Human herpesvirus 4 (Epstein-Barr virus)
cucucguugccaaa

SEQ ID NO: 309848 - RNA, 17 nt, Human herpesvirus 4 (Epstein-Barr virus)
cucucuggagaucuucu

SEQ ID NO: 309849 - RNA, 19 nt, Human herpesvirus 4 (Epstein-Barr virus)
cucucuggagaucuucuca

SEQ ID NO: 309850 - RNA, 19 nt, Human herpesvirus 4 (Epstein-Barr virus)
cucucuguuucuguacaau

SEQ ID NO: 309851 - RNA, 19 nt, Human herpesvirus 4 (Epstein-Barr virus)
cucugaaggauccaugcaa

SEQ ID NO: 309852 - RNA, 21 nt, Human herpesvirus 4 (Epstein-Barr virus)
cucugcaucagcaucgcuuaa

SEQ ID NO: 309853 - RNA, 21 nt, Human herpesvirus 4 (Epstein-Barr virus)
cucugcuuuucuccucagucu

SEQ ID NO: 309854 - RNA, 15 nt, Human herpesvirus 4 (Epstein-Barr virus)
cucuggcacugcuag

SEQ ID NO: 309855 - RNA, 13 nt, Human herpesvirus 4 (Epstein-Barr virus)
cucugggugcuga

SEQ ID NO: 309856 - RNA, 18 nt, Human herpesvirus 4 (Epstein-Barr virus)
cucuguguuuuuugccug

SEQ ID NO: 309857 - RNA, 19 nt, Human herpesvirus 4 (Epstein-Barr virus)
cucuguguuuuuugccugg

SEQ ID NO: 309858 - RNA, 16 nt, Human herpesvirus 4 (Epstein-Barr virus)
cucuuaaccauugaca

SEQ ID NO: 309859 - RNA, 13 nt, Human herpesvirus 4 (Epstein-Barr virus)
cucuuaugccugu

SEQ ID NO: 309860 - RNA, 17 nt, Human herpesvirus 4 (Epstein-Barr virus)
cucuucauguccacuga

SEQ ID NO: 309861 - RNA, 16 nt, Human herpesvirus 4 (Epstein-Barr virus)
cucuucuguuugcauu

SEQ ID NO: 309862 - RNA, 22 nt, Human herpesvirus 4 (Epstein-Barr virus)
cucuuguuucggguaggggagu

SEQ ID NO: 309863 - RNA, 21 nt, Human herpesvirus 4 (Epstein-Barr virus)
cucuuugagggggccaaaagg

SEQ ID NO: 309864 - RNA, 15 nt, Human herpesvirus 4 (Epstein-Barr virus)
cucuuuuacaguggu

SEQ ID NO: 309865 - RNA, 16 nt, Human herpesvirus 4 (Epstein-Barr virus)
cucuuuuacagugguu

SEQ ID NO: 309866 - RNA, 21 nt, Human herpesvirus 4 (Epstein-Barr virus)
cugaaucuaguaugaaggcug

SEQ ID NO: 309867 - RNA, 14 nt, Human herpesvirus 4 (Epstein-Barr virus)
cugacacacaggcc

SEQ ID NO: 309868 - RNA, 14 nt, Human herpesvirus 4 (Epstein-Barr virus)
cugacacauaaaca

SEQ ID NO: 309869 - RNA, 16 nt, Human herpesvirus 4 (Epstein-Barr virus)
cugacagagccguguc

SEQ ID NO: 309870 - RNA, 13 nt, Human herpesvirus 4 (Epstein-Barr virus)
cugacauuucuca

SEQ ID NO: 309871 - RNA, 23 nt, Human herpesvirus 4 (Epstein-Barr virus)
cugacauuucucauaauggugcc

SEQ ID NO: 309872 - RNA, 15 nt, Human herpesvirus 4 (Epstein-Barr virus)
cugaccaucacaugg

SEQ ID NO: 309873 - RNA, 23 nt, Human herpesvirus 4 (Epstein-Barr virus)
cugacccauaccaggugccuuuu

SEQ ID NO: 309874 - RNA, 15 nt, Human herpesvirus 4 (Epstein-Barr virus)
cugacgccaaugcca

SEQ ID NO: 309875 - RNA, 14 nt, Human herpesvirus 4 (Epstein-Barr virus)
cugacucucaugua

SEQ ID NO: 309876 - RNA, 17 nt, Human herpesvirus 4 (Epstein-Barr virus)
cugagcaccaacacaac

SEQ ID NO: 309877 - RNA, 16 nt, Human herpesvirus 4 (Epstein-Barr virus)
cugagccugagccaca

SEQ ID NO: 309878 - RNA, 20 nt, Human herpesvirus 4 (Epstein-Barr virus)
cugagcuggacgagguccug

SEQ ID NO: 309879 - RNA, 22 nt, Human herpesvirus 4 (Epstein-Barr virus)
cugagcuggacgagguccugga

SEQ ID NO: 309880 - RNA, 18 nt, Human herpesvirus 4 (Epstein-Barr virus)
cugaggggcggugggcgc

SEQ ID NO: 309881 - RNA, 19 nt, Human herpesvirus 4 (Epstein-Barr virus)
cugaguucuacaaugccag

SEQ ID NO: 309882 - RNA, 13 nt, Human herpesvirus 4 (Epstein-Barr virus)
cugcaaacugaca

SEQ ID NO: 309883 - RNA, 13 nt, Human herpesvirus 4 (Epstein-Barr virus)
cugcaagccaaga

SEQ ID NO: 309884 - RNA, 16 nt, Human herpesvirus 4 (Epstein-Barr virus)
cugcagagagccacau

SEQ ID NO: 309885 - RNA, 17 nt, Human herpesvirus 4 (Epstein-Barr virus)
cugcagagguucaggga

SEQ ID NO: 309886 - RNA, 21 nt, Human herpesvirus 4 (Epstein-Barr virus)
cugccaagguugaagagcaga

SEQ ID NO: 309887 - RNA, 14 nt, Human herpesvirus 4 (Epstein-Barr virus)
cugccacauuggac

SEQ ID NO: 309888 - RNA, 16 nt, Human herpesvirus 4 (Epstein-Barr virus)
cugccacauuggacac

SEQ ID NO: 309889 - RNA, 15 nt, Human herpesvirus 4 (Epstein-Barr virus)
cugccagagccucug

SEQ ID NO: 309890 - RNA, 16 nt, Human herpesvirus 4 (Epstein-Barr virus)
cugccagagcuguguu

SEQ ID NO: 309891 - RNA, 17 nt, Human herpesvirus 4 (Epstein-Barr virus)
cugccaucgggacagau

SEQ ID NO: 309892 - RNA, 19 nt, Human herpesvirus 4 (Epstein-Barr virus)
cugcccagccuacucucca

SEQ ID NO: 309893 - RNA, 11 nt, Human herpesvirus 4 (Epstein-Barr virus)
cugcccggcua

SEQ ID NO: 309894 - RNA, 17 nt, Human herpesvirus 4 (Epstein-Barr virus)
cugcccucccacuuuua

SEQ ID NO: 309895 - RNA, 15 nt, Human herpesvirus 4 (Epstein-Barr virus)
cugccgcgauguacc

SEQ ID NO: 309896 - RNA, 17 nt, Human herpesvirus 4 (Epstein-Barr virus)
cugccucugcucuggua

SEQ ID NO: 309897 - RNA, 14 nt, Human herpesvirus 4 (Epstein-Barr virus)
cugccugcaugcuu

SEQ ID NO: 309898 - RNA, 13 nt, Human herpesvirus 4 (Epstein-Barr virus)
cugccuuguccac

SEQ ID NO: 309899 - RNA, 14 nt, Human herpesvirus 4 (Epstein-Barr virus)
cugcgaaaauucag

SEQ ID NO: 309900 - RNA, 23 nt, Human herpesvirus 4 (Epstein-Barr virus)
cugcgagggggccuggugccaga

SEQ ID NO: 309901 - RNA, 22 nt, Human herpesvirus 4 (Epstein-Barr virus)
cuacacucuggggucucaggcc

SEQ ID NO: 309902 - RNA, 21 nt, Human herpesvirus 4 (Epstein-Barr virus)
cuacaggacaagacagucaca

SEQ ID NO: 309903 - RNA, 17 nt, Human herpesvirus 4 (Epstein-Barr virus)
cuacccaacagucuuca

SEQ ID NO: 309904 - RNA, 14 nt, Human herpesvirus 4 (Epstein-Barr virus)
cuacccucuuaggg

SEQ ID NO: 309905 - RNA, 13 nt, Human herpesvirus 4 (Epstein-Barr virus)
cuaccggcgagca

SEQ ID NO: 309906 - RNA, 16 nt, Human herpesvirus 4 (Epstein-Barr virus)
cuacgaccuugaccac

SEQ ID NO: 309907 - RNA, 15 nt, Human herpesvirus 4 (Epstein-Barr virus)
cuacgcagaggccau

SEQ ID NO: 309908 - RNA, 23 nt, Human herpesvirus 4 (Epstein-Barr virus)
cuacugguugucggagguggaga

SEQ ID NO: 309909 - RNA, 17 nt, Human herpesvirus 4 (Epstein-Barr virus)
cuacuugcucagguuuc

SEQ ID NO: 309910 - RNA, 17 nt, Human herpesvirus 4 (Epstein-Barr virus)
cuagaaagagccauggu

SEQ ID NO: 309911 - RNA, 13 nt, Human herpesvirus 4 (Epstein-Barr virus)
cuagccuucuucc

SEQ ID NO: 309912 - RNA, 16 nt, Human herpesvirus 4 (Epstein-Barr virus)
cuagcgucacugauuu

SEQ ID NO: 309913 - RNA, 20 nt, Human herpesvirus 4 (Epstein-Barr virus)
cuaggaauuauuuaccacac

SEQ ID NO: 309914 - RNA, 23 nt, Human herpesvirus 4 (Epstein-Barr virus)
cuaguaugaaggcuggcaaagau

SEQ ID NO: 309915 - RNA, 20 nt, Human herpesvirus 4 (Epstein-Barr virus)
cuagucacacccguggaggu

SEQ ID NO: 309916 - RNA, 17 nt, Human herpesvirus 4 (Epstein-Barr virus)
cuaguugguccaggguc

SEQ ID NO: 309917 - RNA, 18 nt, Human herpesvirus 4 (Epstein-Barr virus)
cuaguugguccagggucc

SEQ ID NO: 309918 - RNA, 22 nt, Human herpesvirus 4 (Epstein-Barr virus)
cuaguugguccaggguccagga

SEQ ID NO: 309919 - RNA, 13 nt, Human herpesvirus 4 (Epstein-Barr virus)
cuauaaccacaac

SEQ ID NO: 309920 - RNA, 14 nt, Human herpesvirus 4 (Epstein-Barr virus)
cuauaaccacaacu

SEQ ID NO: 309921 - RNA, 15 nt, Human herpesvirus 4 (Epstein-Barr virus)
cuauaaccacaacug

SEQ ID NO: 309922 - RNA, 16 nt, Human herpesvirus 4 (Epstein-Barr virus)
cuauaacccuuuccua

SEQ ID NO: 309923 - RNA, 12 nt, Human herpesvirus 4 (Epstein-Barr virus)
cuaucacaggga

SEQ ID NO: 309924 - RNA, 22 nt, Human herpesvirus 4 (Epstein-Barr virus)
cuaucaggaccugggagggcca

SEQ ID NO: 309925 - RNA, 17 nt, Human herpesvirus 4 (Epstein-Barr virus)
cuauccaggucuugccg

SEQ ID NO: 309926 - RNA, 22 nt, Human herpesvirus 4 (Epstein-Barr virus)
cuaucguccuccguccagccac

SEQ ID NO: 309927 - RNA, 20 nt, Human herpesvirus 4 (Epstein-Barr virus)
cuauggagggcagcgaagaa

SEQ ID NO: 309928 - RNA, 11 nt, Human herpesvirus 4 (Epstein-Barr virus)
cuauguucucu

SEQ ID NO: 309929 - RNA, 15 nt, Human herpesvirus 4 (Epstein-Barr virus)
cuauuccaccaacac

SEQ ID NO: 309930 - RNA, 16 nt, Human herpesvirus 4 (Epstein-Barr virus)
cuauucugagcaccaa

SEQ ID NO: 309931 - RNA, 15 nt, Human herpesvirus 4 (Epstein-Barr virus)
cuauugguugaucuc

SEQ ID NO: 309932 - RNA, 22 nt, Human herpesvirus 4 (Epstein-Barr virus)
cucaacaagcuaccgaugauuc

SEQ ID NO: 309933 - RNA, 19 nt, Human herpesvirus 4 (Epstein-Barr virus)
cucaacaaggagugccucu

SEQ ID NO: 309934 - RNA, 15 nt, Human herpesvirus 4 (Epstein-Barr virus)
cucaaggcagucucc

SEQ ID NO: 309935 - RNA, 22 nt, Human herpesvirus 4 (Epstein-Barr virus)
cucaauggcauucagauuucua

SEQ ID NO: 309936 - RNA, 13 nt, Human herpesvirus 4 (Epstein-Barr virus)
cucacgaucuuca

SEQ ID NO: 309937 - RNA, 16 nt, Human herpesvirus 4 (Epstein-Barr virus)
cucacgcgaagggaaa

SEQ ID NO: 309938 - RNA, 16 nt, Human herpesvirus 4 (Epstein-Barr virus)
cucacuaaacauugca

SEQ ID NO: 309939 - RNA, 13 nt, Human herpesvirus 4 (Epstein-Barr virus)
cucacugauggua

SEQ ID NO: 309940 - RNA, 17 nt, Human herpesvirus 4 (Epstein-Barr virus)
cucagacaccaacacag

SEQ ID NO: 309941 - RNA, 19 nt, Human herpesvirus 4 (Epstein-Barr virus)
cucagagcugggaagaaug

SEQ ID NO: 309942 - RNA, 15 nt, Human herpesvirus 4 (Epstein-Barr virus)
cucagagucuacucg

SEQ ID NO: 309943 - RNA, 13 nt, Human herpesvirus 4 (Epstein-Barr virus)
cucagcacuuugc

SEQ ID NO: 309944 - RNA, 15 nt, Human herpesvirus 4 (Epstein-Barr virus)
cucagcacuuugcca

SEQ ID NO: 309945 - RNA, 19 nt, Human herpesvirus 4 (Epstein-Barr virus)
cucagcacuuugccagcaa

SEQ ID NO: 309946 - RNA, 16 nt, Human herpesvirus 4 (Epstein-Barr virus)
cucagccccuuggcac

SEQ ID NO: 309947 - RNA, 21 nt, Human herpesvirus 4 (Epstein-Barr virus)
cucagccccuuggcacaagag

SEQ ID NO: 309948 - RNA, 22 nt, Human herpesvirus 4 (Epstein-Barr virus)
cucagcgucaggagagggccag

SEQ ID NO: 309949 - RNA, 22 nt, Human herpesvirus 4 (Epstein-Barr virus)
cucaggaucagggccaagacau

SEQ ID NO: 309950 - RNA, 19 nt, Human herpesvirus 4 (Epstein-Barr virus)
cucaggcaacaacuaugug

SEQ ID NO: 309951 - RNA, 18 nt, Human herpesvirus 4 (Epstein-Barr virus)
cucaggccucccagucua

SEQ ID NO: 309952 - RNA, 16 nt, Human herpesvirus 4 (Epstein-Barr virus)
cucaggcuaugaagaa

SEQ ID NO: 309953 - RNA, 13 nt, Human herpesvirus 4 (Epstein-Barr virus)
cucaguggccguc

SEQ ID NO: 309954 - RNA, 14 nt, Human herpesvirus 4 (Epstein-Barr virus)
cucauaauggugcc

SEQ ID NO: 309955 - RNA, 23 nt, Human herpesvirus 4 (Epstein-Barr virus)
cucauacaguuuguuaguauugu

SEQ ID NO: 309956 - RNA, 13 nt, Human herpesvirus 4 (Epstein-Barr virus)
cucauagacacac

SEQ ID NO: 309957 - RNA, 12 nt, Human herpesvirus 4 (Epstein-Barr virus)
cucauccuggcc

SEQ ID NO: 309958 - RNA, 16 nt, Human herpesvirus 4 (Epstein-Barr virus)
cucaucugugagacaa

SEQ ID NO: 309959 - RNA, 23 nt, Human herpesvirus 4 (Epstein-Barr virus)
cucaugcgccagagcggcauccu

SEQ ID NO: 309960 - RNA, 23 nt, Human herpesvirus 4 (Epstein-Barr virus)
cuucugguugauaaucucaaaga

SEQ ID NO: 309961 - RNA, 13 nt, Human herpesvirus 4 (Epstein-Barr virus)
cuucuguuugcau

SEQ ID NO: 309962 - RNA, 15 nt, Human herpesvirus 4 (Epstein-Barr virus)
cuucuguuugcauug

SEQ ID NO: 309963 - RNA, 22 nt, Human herpesvirus 4 (Epstein-Barr virus)
cuugaagaucgugaggccugag

SEQ ID NO: 309964 - RNA, 22 nt, Human herpesvirus 4 (Epstein-Barr virus)
cuugaccaguguguacauucca

SEQ ID NO: 309965 - RNA, 18 nt, Human herpesvirus 4 (Epstein-Barr virus)
cuugacuguaaucacugg

SEQ ID NO: 309966 - RNA, 13 nt, Human herpesvirus 4 (Epstein-Barr virus)
cuugaggugggcu

SEQ ID NO: 309967 - RNA, 20 nt, Human herpesvirus 4 (Epstein-Barr virus)
cuugagucucucgaggucug

SEQ ID NO: 309968 - RNA, 19 nt, Human herpesvirus 4 (Epstein-Barr virus)
cuugauggcccugaucugg

SEQ ID NO: 309969 - RNA, 14 nt, Human herpesvirus 4 (Epstein-Barr virus)
cuugauguacuuuc

SEQ ID NO: 309970 - RNA, 15 nt, Human herpesvirus 4 (Epstein-Barr virus)
cuugauguacuuucc

SEQ ID NO: 309971 - RNA, 16 nt, Human herpesvirus 4 (Epstein-Barr virus)
cuugcucucagcacuu

SEQ ID NO: 309972 - RNA, 22 nt, Human herpesvirus 4 (Epstein-Barr virus)
cuugcucucagcacuuugccag

SEQ ID NO: 309973 - RNA, 16 nt, Human herpesvirus 4 (Epstein-Barr virus)
cuuggaggcugcuaag

SEQ ID NO: 309974 - RNA, 15 nt, Human herpesvirus 4 (Epstein-Barr virus)
cuuggcaguguccuc

SEQ ID NO: 309975 - RNA, 14 nt, Human herpesvirus 4 (Epstein-Barr virus)
cuugggcuguggua

SEQ ID NO: 309976 - RNA, 14 nt, Human herpesvirus 4 (Epstein-Barr virus)
cuugggggcaaagc

SEQ ID NO: 309977 - RNA, 14 nt, Human herpesvirus 4 (Epstein-Barr virus)
cuuggggguggugg

SEQ ID NO: 309978 - RNA, 18 nt, Human herpesvirus 4 (Epstein-Barr virus)
cuugugaugcaauaaaua

SEQ ID NO: 309979 - RNA, 13 nt, Human herpesvirus 4 (Epstein-Barr virus)
cuugugucucuau

SEQ ID NO: 309980 - RNA, 20 nt, Human herpesvirus 4 (Epstein-Barr virus)
cuugugucucuaucaaggaa

SEQ ID NO: 309981 - RNA, 19 nt, Human herpesvirus 4 (Epstein-Barr virus)
cuuuauugacuacaccagu

SEQ ID NO: 309982 - RNA, 21 nt, Human herpesvirus 4 (Epstein-Barr virus)
cuuucaguggaugcaucguag

SEQ ID NO: 309983 - RNA, 20 nt, Human herpesvirus 4 (Epstein-Barr virus)
cuuugaagugguugccaugg

SEQ ID NO: 309984 - RNA, 18 nt, Human herpesvirus 4 (Epstein-Barr virus)
cuuugagcugggcaaaga

SEQ ID NO: 309985 - RNA, 13 nt, Human herpesvirus 4 (Epstein-Barr virus)
cuuugcggcauca

SEQ ID NO: 309986 - RNA, 20 nt, Human herpesvirus 4 (Epstein-Barr virus)
cuuuugcaacgccuuuuucc

SEQ ID NO: 309987 - RNA, 20 nt, Human herpesvirus 4 (Epstein-Barr virus)
cuuuuuccaguggcauggga

SEQ ID NO: 309988 - RNA, 14 nt, Human herpesvirus 4 (Epstein-Barr virus)
cuuuuuggugaaau

SEQ ID NO: 309989 - RNA, 16 nt, Human herpesvirus 4 (Epstein-Barr virus)
gaaaacagaggcugga

SEQ ID NO: 309990 - RNA, 19 nt, Human herpesvirus 4 (Epstein-Barr virus)
gaaaacauuagcgacauuu

SEQ ID NO: 309991 - RNA, 22 nt, Human herpesvirus 4 (Epstein-Barr virus)
gaaaacugccuccuccucuuuu

SEQ ID NO: 309992 - RNA, 18 nt, Human herpesvirus 4 (Epstein-Barr virus)
gaaaccugcgaaacuugg

SEQ ID NO: 309993 - RNA, 18 nt, Human herpesvirus 4 (Epstein-Barr virus)
gaaagagccauggugaga

SEQ ID NO: 309994 - RNA, 20 nt, Human herpesvirus 4 (Epstein-Barr virus)
gagggcgcucugcgccagcc

SEQ ID NO: 309995 - RNA, 13 nt, Human herpesvirus 4 (Epstein-Barr virus)
gaggggaccacua

SEQ ID NO: 309996 - RNA, 13 nt, Human herpesvirus 4 (Epstein-Barr virus)
gaggggcgguggg

SEQ ID NO: 309997 - RNA, 21 nt, Human herpesvirus 4 (Epstein-Barr virus)
gagguacaugggccacugcag

SEQ ID NO: 309998 - RNA, 23 nt, Human herpesvirus 4 (Epstein-Barr virus)
gaggucugcgaugaggcgguggg

SEQ ID NO: 309999 - RNA, 20 nt, Human herpesvirus 4 (Epstein-Barr virus)
gagguggugcuugugaaggu

SEQ ID NO: 310000 - RNA, 17 nt, Human herpesvirus 4 (Epstein-Barr virus)
gagguuaagcugcaccu

SEQ ID NO: 310001 - RNA, 14 nt, Human herpesvirus 4 (Epstein-Barr virus)
gagucccuccucac

SEQ ID NO: 310002 - RNA, 21 nt, Human herpesvirus 4 (Epstein-Barr virus)
gagucuacucgaccagcacgu

SEQ ID NO: 310003 - RNA, 15 nt, Human herpesvirus 4 (Epstein-Barr virus)
gagucugacuacuca

SEQ ID NO: 310004 - RNA, 17 nt, Human herpesvirus 4 (Epstein-Barr virus)
gagucuggacguggcug

SEQ ID NO: 310005 - RNA, 18 nt, Human herpesvirus 4 (Epstein-Barr virus)
gaguggcagaaucaccag

SEQ ID NO: 310006 - RNA, 17 nt, Human herpesvirus 4 (Epstein-Barr virus)
gaguguuccacaguaau

SEQ ID NO: 310007 - RNA, 20 nt, Human herpesvirus 4 (Epstein-Barr virus)
gaguugaugaaaggggccga

SEQ ID NO: 310008 - RNA, 19 nt, Human herpesvirus 4 (Epstein-Barr virus)
gaguuuaagcagcacugaa

SEQ ID NO: 310009 - RNA, 20 nt, Human herpesvirus 4 (Epstein-Barr virus)
gaguuuaagcagcacugaau

SEQ ID NO: 310010 - RNA, 14 nt, Human herpesvirus 4 (Epstein-Barr virus)
gauaagaaacacgc

SEQ ID NO: 310011 - RNA, 20 nt, Human herpesvirus 4 (Epstein-Barr virus)
gauacucaucugugagacaa

SEQ ID NO: 310012 - RNA, 17 nt, Human herpesvirus 4 (Epstein-Barr virus)
gauagggaccagaggac

SEQ ID NO: 310013 - RNA, 16 nt, Human herpesvirus 4 (Epstein-Barr virus)
gauauagcucugcaca

SEQ ID NO: 310014 - RNA, 20 nt, Human herpesvirus 4 (Epstein-Barr virus)
gauauagcucugcacaggcu

SEQ ID NO: 310015 - RNA, 21 nt, Human herpesvirus 4 (Epstein-Barr virus)
gauaucccugcugucucugaa

SEQ ID NO: 310016 - RNA, 19 nt, Human herpesvirus 4 (Epstein-Barr virus)
gaucacuacuacaccgagc

SEQ ID NO: 310017 - RNA, 13 nt, Human herpesvirus 4 (Epstein-Barr virus)
gaucagagcccca

SEQ ID NO: 310018 - RNA, 17 nt, Human herpesvirus 4 (Epstein-Barr virus)
gaucagggccaagacau

SEQ ID NO: 310019 - RNA, 23 nt, Human herpesvirus 4 (Epstein-Barr virus)
gaucaucucgcuggcucgccuca

SEQ ID NO: 310020 - RNA, 15 nt, Human herpesvirus 4 (Epstein-Barr virus)
gaucauggaaaccac

SEQ ID NO: 310021 - RNA, 21 nt, Human herpesvirus 4 (Epstein-Barr virus)
gaucucagaauugucacugag

SEQ ID NO: 310022 - RNA, 17 nt, Human herpesvirus 4 (Epstein-Barr virus)
gaugaacuggucaccag

SEQ ID NO: 310023 - RNA, 18 nt, Human herpesvirus 4 (Epstein-Barr virus)
gaugaccaugauggugca

SEQ ID NO: 310024 - RNA, 23 nt, Human herpesvirus 4 (Epstein-Barr virus)
gaugacccgccaaggugugcaug

SEQ ID NO: 310025 - RNA, 13 nt, Human herpesvirus 4 (Epstein-Barr virus)
gaugagauugcca

SEQ ID NO: 310026 - RNA, 17 nt, Human herpesvirus 4 (Epstein-Barr virus)
gaugaggaauucuucca

SEQ ID NO: 310027 - RNA, 16 nt, Human herpesvirus 4 (Epstein-Barr virus)
gaugagucugacuacu

SEQ ID NO: 310028 - RNA, 18 nt, Human herpesvirus 4 (Epstein-Barr virus)
gaugagucugacuacuca

SEQ ID NO: 310029 - RNA, 15 nt, Human herpesvirus 4 (Epstein-Barr virus)
gaugcaacagaggau

SEQ ID NO: 310030 - RNA, 18 nt, Human herpesvirus 4 (Epstein-Barr virus)
gaugcagcgcaucaggcg

SEQ ID NO: 310031 - RNA, 18 nt, Human herpesvirus 4 (Epstein-Barr virus)
gaugcccaccagccagcg

SEQ ID NO: 310032 - RNA, 21 nt, Human herpesvirus 4 (Epstein-Barr virus)
gaugccucacgcgaagggaaa

SEQ ID NO: 310033 - RNA, 20 nt, Human herpesvirus 4 (Epstein-Barr virus)
gauggcacacgccagagaca

SEQ ID NO: 310034 - RNA, 17 nt, Human herpesvirus 4 (Epstein-Barr virus)
gacauguccgggugcau

SEQ ID NO: 310035 - RNA, 16 nt, Human herpesvirus 4 (Epstein-Barr virus)
gacauguuucugguga

SEQ ID NO: 310036 - RNA, 22 nt, Human herpesvirus 4 (Epstein-Barr virus)
gacauuucucauaauggugccu

SEQ ID NO: 310037 - RNA, 20 nt, Human herpesvirus 4 (Epstein-Barr virus)
gacauuuuauuuacagccau

SEQ ID NO: 310038 - RNA, 17 nt, Human herpesvirus 4 (Epstein-Barr virus)
gaccaagcuaccagagu

SEQ ID NO: 310039 - RNA, 12 nt, Human herpesvirus 4 (Epstein-Barr virus)
gaccaaugccaa

SEQ ID NO: 310040 - RNA, 13 nt, Human herpesvirus 4 (Epstein-Barr virus)
gaccaaugccaaa

SEQ ID NO: 310041 - RNA, 14 nt, Human herpesvirus 4 (Epstein-Barr virus)
gaccagcacguggg

SEQ ID NO: 310042 - RNA, 13 nt, Human herpesvirus 4 (Epstein-Barr virus)
gaccaugcucagu

SEQ ID NO: 310043 - RNA, 22 nt, Human herpesvirus 4 (Epstein-Barr virus)
gacccaccauggaaucauuuga

SEQ ID NO: 310044 - RNA, 15 nt, Human herpesvirus 4 (Epstein-Barr virus)
gacccagccacuuac

SEQ ID NO: 310045 - RNA, 14 nt, Human herpesvirus 4 (Epstein-Barr virus)
gacccauaccaggu

SEQ ID NO: 310046 - RNA, 20 nt, Human herpesvirus 4 (Epstein-Barr virus)
gacccauaccaggugccuuu

SEQ ID NO: 310047 - RNA, 20 nt, Human herpesvirus 4 (Epstein-Barr virus)
gacccggaccaaugccaaag

SEQ ID NO: 310048 - RNA, 12 nt, Human herpesvirus 4 (Epstein-Barr virus)
gacccuccuguc

SEQ ID NO: 310049 - RNA, 20 nt, Human herpesvirus 4 (Epstein-Barr virus)
gacccuccugucaccaccuc

SEQ ID NO: 310050 - RNA, 20 nt, Human herpesvirus 4 (Epstein-Barr virus)
gaccugggagggccaucgca

SEQ ID NO: 310051 - RNA, 22 nt, Human herpesvirus 4 (Epstein-Barr virus)
gaccuuaacauccgagaccucc

SEQ ID NO: 310052 - RNA, 19 nt, Human herpesvirus 4 (Epstein-Barr virus)
gacgagcaugaaacccggg

SEQ ID NO: 310053 - RNA, 12 nt, Human herpesvirus 4 (Epstein-Barr virus)
gacgccaaugcc

SEQ ID NO: 310054 - RNA, 22 nt, Human herpesvirus 4 (Epstein-Barr virus)
gacgcgacauguuucuggugag

SEQ ID NO: 310055 - RNA, 20 nt, Human herpesvirus 4 (Epstein-Barr virus)
gacgcgauggcacacgccag

SEQ ID NO: 310056 - RNA, 16 nt, Human herpesvirus 4 (Epstein-Barr virus)
gacgggucucgcguga

SEQ ID NO: 310057 - RNA, 19 nt, Human herpesvirus 4 (Epstein-Barr virus)
gacggugggcaugacacag

SEQ ID NO: 310058 - RNA, 18 nt, Human herpesvirus 4 (Epstein-Barr virus)
gacguuugaguccaaaca

SEQ ID NO: 310059 - RNA, 19 nt, Human herpesvirus 4 (Epstein-Barr virus)
gacuaaccaugccaucucu

SEQ ID NO: 310060 - RNA, 20 nt, Human herpesvirus 4 (Epstein-Barr virus)
gacuacaauguuccuucuca

SEQ ID NO: 310061 - RNA, 13 nt, Human herpesvirus 4 (Epstein-Barr virus)
gacuacaccauca

SEQ ID NO: 310062 - RNA, 14 nt, Human herpesvirus 4 (Epstein-Barr virus)
gacuacaccaucac

SEQ ID NO: 310063 - RNA, 21 nt, Human herpesvirus 4 (Epstein-Barr virus)
gacuagcgccccuauaaccac

SEQ ID NO: 310064 - RNA, 20 nt, Human herpesvirus 4 (Epstein-Barr virus)
gacuccacaccaaauaaaca

SEQ ID NO: 310065 - RNA, 23 nt, Human herpesvirus 4 (Epstein-Barr virus)
gacucccacauucguacaucucc

SEQ ID NO: 310066 - RNA, 15 nt, Human herpesvirus 4 (Epstein-Barr virus)
gacuccgaauauccc

SEQ ID NO: 310067 - RNA, 20 nt, Human herpesvirus 4 (Epstein-Barr virus)
gacucuauugguugaucucc

SEQ ID NO: 310068 - RNA, 13 nt, Human herpesvirus 4 (Epstein-Barr virus)
gacugucauuuac

SEQ ID NO: 310069 - RNA, 21 nt, Human herpesvirus 4 (Epstein-Barr virus)
gacuucgggggcgacugccgc

SEQ ID NO: 310070 - RNA, 13 nt, Human herpesvirus 4 (Epstein-Barr virus)
gcagacaccaccu

SEQ ID NO: 310071 - RNA, 22 nt, Human herpesvirus 4 (Epstein-Barr virus)
gcagacuccgaauauccccaaa

SEQ ID NO: 310072 - RNA, 14 nt, Human herpesvirus 4 (Epstein-Barr virus)
gcagcgcaucaggc

SEQ ID NO: 310073 - RNA, 23 nt, Human herpesvirus 4 (Epstein-Barr virus)
gcagcuccgcccucacgggccau

SEQ ID NO: 310074 - RNA, 21 nt, Human herpesvirus 4 (Epstein-Barr virus)
gcagcucuaacuuggcaucuc

SEQ ID NO: 310075 - RNA, 17 nt, Human herpesvirus 4 (Epstein-Barr virus)
gcaggacacgugacaug

SEQ ID NO: 310076 - RNA, 19 nt, Human herpesvirus 4 (Epstein-Barr virus)
gcaggacacgugacauguc

SEQ ID NO: 310077 - RNA, 20 nt, Human herpesvirus 4 (Epstein-Barr virus)
gcaggagcaggagcgggagg

SEQ ID NO: 310078 - RNA, 17 nt, Human herpesvirus 4 (Epstein-Barr virus)
gcaggaggaggggcagg

SEQ ID NO: 310079 - RNA, 14 nt, Human herpesvirus 4 (Epstein-Barr virus)
gcaggaggggcagg

SEQ ID NO: 310080 - RNA, 14 nt, Human herpesvirus 4 (Epstein-Barr virus)
gcaggauguucacg

SEQ ID NO: 310081 - RNA, 22 nt, Human herpesvirus 4 (Epstein-Barr virus)
gcaggcuacaacaggcugcuga

SEQ ID NO: 310082 - RNA, 18 nt, Human herpesvirus 4 (Epstein-Barr virus)
gcaggcucaggccgccgc

SEQ ID NO: 310083 - RNA, 14 nt, Human herpesvirus 4 (Epstein-Barr virus)
gcagggugcacaga

SEQ ID NO: 310084 - RNA, 13 nt, Human herpesvirus 4 (Epstein-Barr virus)
gcaguacuagcau

SEQ ID NO: 310085 - RNA, 15 nt, Human herpesvirus 4 (Epstein-Barr virus)
gcagugauaagucau

SEQ ID NO: 310086 - RNA, 16 nt, Human herpesvirus 4 (Epstein-Barr virus)
gcagugauaagucaug

SEQ ID NO: 310087 - RNA, 18 nt, Human herpesvirus 4 (Epstein-Barr virus)
gcagugggugaggcggug

SEQ ID NO: 310088 - RNA, 15 nt, Human herpesvirus 4 (Epstein-Barr virus)
gcauacgcugaguga

SEQ ID NO: 310089 - RNA, 13 nt, Human herpesvirus 4 (Epstein-Barr virus)
gcaucacaaguca

SEQ ID NO: 310090 - RNA, 15 nt, Human herpesvirus 4 (Epstein-Barr virus)
gcaucacaagucaca

SEQ ID NO: 310091 - RNA, 19 nt, Human herpesvirus 4 (Epstein-Barr virus)
gcaucacaagucacaucaa

SEQ ID NO: 310092 - RNA, 19 nt, Human herpesvirus 4 (Epstein-Barr virus)
gcauccaccaucaauguca

SEQ ID NO: 310093 - RNA, 17 nt, Human herpesvirus 4 (Epstein-Barr virus)
gcaucgucuccagcggc

SEQ ID NO: 310094 - RNA, 20 nt, Human herpesvirus 4 (Epstein-Barr virus)
gcaugcuugggcaugcugua

SEQ ID NO: 310095 - RNA, 19 nt, Human herpesvirus 4 (Epstein-Barr virus)
gcauggcggccuggcagcg

SEQ ID NO: 310096 - RNA, 17 nt, Human herpesvirus 4 (Epstein-Barr virus)
gcauguguacuuguccu

SEQ ID NO: 310097 - RNA, 17 nt, Human herpesvirus 4 (Epstein-Barr virus)
gcauuggggggguggca

SEQ ID NO: 310098 - RNA, 20 nt, Human herpesvirus 4 (Epstein-Barr virus)
gccaacuuugagcugggcaa

SEQ ID NO: 310099 - RNA, 21 nt, Human herpesvirus 4 (Epstein-Barr virus)
gccaagguugaagagcagauu

SEQ ID NO: 310100 - RNA, 19 nt, Human herpesvirus 4 (Epstein-Barr virus)
gccacacagccugacucuc

SEQ ID NO: 310101 - RNA, 21 nt, Human herpesvirus 4 (Epstein-Barr virus)
gccacacccaccuaugccaau

SEQ ID NO: 310102 - RNA, 16 nt, Human herpesvirus 4 (Epstein-Barr virus)
gccacaggcauugcua

SEQ ID NO: 310103 - RNA, 15 nt, Human herpesvirus 4 (Epstein-Barr virus)
gccacaggugccuga

SEQ ID NO: 310104 - RNA, 18 nt, Human herpesvirus 4 (Epstein-Barr virus)
gccacauguuuucuggac

SEQ ID NO: 310105 - RNA, 18 nt, Human herpesvirus 4 (Epstein-Barr virus)
gccaccaacgucccugag

SEQ ID NO: 310106 - RNA, 17 nt, Human herpesvirus 4 (Epstein-Barr virus)
gccaccuucuccaucuc

SEQ ID NO: 310107 - RNA, 19 nt, Human herpesvirus 4 (Epstein-Barr virus)
gccaccuucuccaucucca

SEQ ID NO: 310108 - RNA, 23 nt, Human herpesvirus 4 (Epstein-Barr virus)
gccacgcaagggagacguuugag

SEQ ID NO: 310109 - RNA, 14 nt, Human herpesvirus 4 (Epstein-Barr virus)
gccacggcgugcca

SEQ ID NO: 310110 - RNA, 19 nt, Human herpesvirus 4 (Epstein-Barr virus)
gccacgugggucucauggg

SEQ ID NO: 310111 - RNA, 14 nt, Human herpesvirus 4 (Epstein-Barr virus)
gccacuuacagcac

SEQ ID NO: 310112 - RNA, 14 nt, Human herpesvirus 4 (Epstein-Barr virus)
gccagacucucuuc

SEQ ID NO: 310113 - RNA, 15 nt, Human herpesvirus 4 (Epstein-Barr virus)
gccgcccgggggcca

SEQ ID NO: 310114 - RNA, 14 nt, Human herpesvirus 4 (Epstein-Barr virus)
gccgccuccgccgc

SEQ ID NO: 310115 - RNA, 17 nt, Human herpesvirus 4 (Epstein-Barr virus)
gccggaggcagacaccc

SEQ ID NO: 310116 - RNA, 19 nt, Human herpesvirus 4 (Epstein-Barr virus)
gccuaaacgugauggugcu

SEQ ID NO: 310117 - RNA, 18 nt, Human herpesvirus 4 (Epstein-Barr virus)
gccuccuggccagcaccc

SEQ ID NO: 310118 - RNA, 20 nt, Human herpesvirus 4 (Epstein-Barr virus)
gccucggcggggaacgugac

SEQ ID NO: 310119 - RNA, 20 nt, Human herpesvirus 4 (Epstein-Barr virus)
gccucucaaaggccuuggac

SEQ ID NO: 310120 - RNA, 23 nt, Human herpesvirus 4 (Epstein-Barr virus)
gccucuguuaugaaaugcagguu

SEQ ID NO: 310121 - RNA, 16 nt, Human herpesvirus 4 (Epstein-Barr virus)
gccugacucucaugua

SEQ ID NO: 310122 - RNA, 22 nt, Human herpesvirus 4 (Epstein-Barr virus)
gccugagacagaggugcucaag

SEQ ID NO: 310123 - RNA, 15 nt, Human herpesvirus 4 (Epstein-Barr virus)
gccugccucugcucu

SEQ ID NO: 310124 - RNA, 17 nt, Human herpesvirus 4 (Epstein-Barr virus)
gccugucauugagguaa

SEQ ID NO: 310125 - RNA, 17 nt, Human herpesvirus 4 (Epstein-Barr virus)
gccugugugcccggggg

SEQ ID NO: 310126 - RNA, 16 nt, Human herpesvirus 4 (Epstein-Barr virus)
gccuugagggcaaaga

SEQ ID NO: 310127 - RNA, 14 nt, Human herpesvirus 4 (Epstein-Barr virus)
gccuuggacucggg

SEQ ID NO: 310128 - RNA, 18 nt, Human herpesvirus 4 (Epstein-Barr virus)
gccuuggggguggugggc

SEQ ID NO: 310129 - RNA, 16 nt, Human herpesvirus 4 (Epstein-Barr virus)
gcgaagaacacuccac

SEQ ID NO: 310130 - RNA, 17 nt, Human herpesvirus 4 (Epstein-Barr virus)
gcgaaucugacauuucu

SEQ ID NO: 310131 - RNA, 16 nt, Human herpesvirus 4 (Epstein-Barr virus)
gcgacucugcaucagc

SEQ ID NO: 310132 - RNA, 18 nt, Human herpesvirus 4 (Epstein-Barr virus)
gcgaugaacgccuacgca

SEQ ID NO: 310133 - RNA, 14 nt, Human herpesvirus 4 (Epstein-Barr virus)
gcgcaacgccggcc

SEQ ID NO: 310134 - RNA, 20 nt, Human herpesvirus 4 (Epstein-Barr virus)
gcgcaacgccggccugcugg

SEQ ID NO: 310135 - RNA, 13 nt, Human herpesvirus 4 (Epstein-Barr virus)
gcgcacgugacag

SEQ ID NO: 310136 - RNA, 13 nt, Human herpesvirus 4 (Epstein-Barr virus)
gcgcgcuccgucc

SEQ ID NO: 310137 - RNA, 22 nt, Human herpesvirus 4 (Epstein-Barr virus)
gcgcuaccuccuaucacaggga

SEQ ID NO: 310138 - RNA, 16 nt, Human herpesvirus 4 (Epstein-Barr virus)
gcgcuguuauggccau

SEQ ID NO: 310139 - RNA, 17 nt, Human herpesvirus 4 (Epstein-Barr virus)
gcggacuacaaggcauu

SEQ ID NO: 310140 - RNA, 17 nt, Human herpesvirus 4 (Epstein-Barr virus)
gcggagagggaugggcu

SEQ ID NO: 310141 - RNA, 22 nt, Human herpesvirus 4 (Epstein-Barr virus)
gcggcaaaaauaugcaaugccc

SEQ ID NO: 310142 - RNA, 23 nt, Human herpesvirus 4 (Epstein-Barr virus)
gcggcaucauguuuuuggcaugu

SEQ ID NO: 310143 - RNA, 15 nt, Human herpesvirus 4 (Epstein-Barr virus)
gcggcucacauuguc

SEQ ID NO: 310144 - RNA, 16 nt, Human herpesvirus 4 (Epstein-Barr virus)
gcggcuggaugcccuc

SEQ ID NO: 310145 - RNA, 16 nt, Human herpesvirus 4 (Epstein-Barr virus)
gcggcugugagcgcac

SEQ ID NO: 310146 - RNA, 20 nt, Human herpesvirus 4 (Epstein-Barr virus)
gcggcugugagcgcacguga

SEQ ID NO: 310147 - RNA, 21 nt, Human herpesvirus 4 (Epstein-Barr virus)
gcgggugaugguacggaugau

SEQ ID NO: 310148 - RNA, 15 nt, Human herpesvirus 4 (Epstein-Barr virus)
gcgguccuccacggg

SEQ ID NO: 310149 - RNA, 15 nt, Human herpesvirus 4 (Epstein-Barr virus)
gcgguuauaacugcc

SEQ ID NO: 310150 - RNA, 20 nt, Human herpesvirus 4 (Epstein-Barr virus)
gcgucaggaaguacagccgg

SEQ ID NO: 310151 - RNA, 19 nt, Human herpesvirus 4 (Epstein-Barr virus)
gcgucaggagacacggcuc

SEQ ID NO: 310152 - RNA, 22 nt, Human herpesvirus 4 (Epstein-Barr virus)
gcguccagacgcgauggcacac

SEQ ID NO: 310153 - RNA, 19 nt, Human herpesvirus 4 (Epstein-Barr virus)
gcgucgggaaacacagcuc

SEQ ID NO: 310154 - RNA, 16 nt, Human herpesvirus 4 (Epstein-Barr virus)
gcgugauuuccauagg

SEQ ID NO: 310155 - RNA, 17 nt, Human herpesvirus 4 (Epstein-Barr virus)
gcuaacaggacauguuu

SEQ ID NO: 310156 - RNA, 19 nt, Human herpesvirus 4 (Epstein-Barr virus)
gcuaacuguacauacugca

SEQ ID NO: 310157 - RNA, 14 nt, Human herpesvirus 4 (Epstein-Barr virus)
gcuaauguaccuca

SEQ ID NO: 310158 - RNA, 15 nt, Human herpesvirus 4 (Epstein-Barr virus)
ggagacacaucugga

SEQ ID NO: 310159 - RNA, 20 nt, Human herpesvirus 4 (Epstein-Barr virus)
ggagacacaucuggaccaga

SEQ ID NO: 310160 - RNA, 19 nt, Human herpesvirus 4 (Epstein-Barr virus)
ggagacccgagucucugcu

SEQ ID NO: 310161 - RNA, 18 nt, Human herpesvirus 4 (Epstein-Barr virus)
ggagacguuugaguccaa

SEQ ID NO: 310162 - RNA, 20 nt, Human herpesvirus 4 (Epstein-Barr virus)
ggagagggaugggcuugaug

SEQ ID NO: 310163 - RNA, 19 nt, Human herpesvirus 4 (Epstein-Barr virus)
ggagauaauguacagacua

SEQ ID NO: 310164 - RNA, 18 nt, Human herpesvirus 4 (Epstein-Barr virus)
ggagaugggugcauuuca

SEQ ID NO: 310165 - RNA, 14 nt, Human herpesvirus 4 (Epstein-Barr virus)
ggagcaaccagcug

SEQ ID NO: 310166 - RNA, 18 nt, Human herpesvirus 4 (Epstein-Barr virus)
ggagcaaccagcugguca

SEQ ID NO: 310167 - RNA, 21 nt, Human herpesvirus 4 (Epstein-Barr virus)
ggagccaccacagcacaagug

SEQ ID NO: 310168 - RNA, 15 nt, Human herpesvirus 4 (Epstein-Barr virus)
ggagcuugaggccag

SEQ ID NO: 310169 - RNA, 15 nt, Human herpesvirus 4 (Epstein-Barr virus)
ggaggaagauggcgu

SEQ ID NO: 310170 - RNA, 13 nt, Human herpesvirus 4 (Epstein-Barr virus)
ggaggacacugcc

SEQ ID NO: 310171 - RNA, 14 nt, Human herpesvirus 4 (Epstein-Barr virus)
ggaggacagcgugg

SEQ ID NO: 310172 - RNA, 17 nt, Human herpesvirus 4 (Epstein-Barr virus)
ggaggaccuggugguga

SEQ ID NO: 310173 - RNA, 19 nt, Human herpesvirus 4 (Epstein-Barr virus)
ggaggagacuggcaacucc

SEQ ID NO: 310174 - RNA, 22 nt, Human herpesvirus 4 (Epstein-Barr virus)
ggaggccuucugcguccagacg

SEQ ID NO: 310175 - RNA, 12 nt, Human herpesvirus 4 (Epstein-Barr virus)
ggaggcugcuaa

SEQ ID NO: 310176 - RNA, 16 nt, Human herpesvirus 4 (Epstein-Barr virus)
ggaggucuucucugac

SEQ ID NO: 310177 - RNA, 22 nt, Human herpesvirus 4 (Epstein-Barr virus)
ggaguaccugcgucucauuccc

SEQ ID NO: 310178 - RNA, 17 nt, Human herpesvirus 4 (Epstein-Barr virus)
ggagucugguugcuacg

SEQ ID NO: 310179 - RNA, 18 nt, Human herpesvirus 4 (Epstein-Barr virus)
ggaguguuccacaguaau

SEQ ID NO: 310180 - RNA, 22 nt, Human herpesvirus 4 (Epstein-Barr virus)
ggauaaacagggguauguggug

SEQ ID NO: 310181 - RNA, 22 nt, Human herpesvirus 4 (Epstein-Barr virus)
ggauagccucgcgacucguggg

SEQ ID NO: 310182 - RNA, 19 nt, Human herpesvirus 4 (Epstein-Barr virus)
ggaucagaaucaaaaucag

SEQ ID NO: 310183 - RNA, 17 nt, Human herpesvirus 4 (Epstein-Barr virus)
ggauccggaggggacca

SEQ ID NO: 310184 - RNA, 17 nt, Human herpesvirus 4 (Epstein-Barr virus)
ggaugcaggaccuagaa

SEQ ID NO: 310185 - RNA, 16 nt, Human herpesvirus 4 (Epstein-Barr virus)
ggauggaaagggcaug

SEQ ID NO: 310186 - RNA, 21 nt, Human herpesvirus 4 (Epstein-Barr virus)
ggauggcccugcaaacugaca

SEQ ID NO: 310187 - RNA, 20 nt, Human herpesvirus 4 (Epstein-Barr virus)
ggcaaagcaggggugaugaa

SEQ ID NO: 310188 - RNA, 14 nt, Human herpesvirus 4 (Epstein-Barr virus)
ggcaaagggcaugc

SEQ ID NO: 310189 - RNA, 17 nt, Human herpesvirus 4 (Epstein-Barr virus)
ggcacaacggcugugac

SEQ ID NO: 310190 - RNA, 18 nt, Human herpesvirus 4 (Epstein-Barr virus)
ggcacacauuacggugcu

SEQ ID NO: 310191 - RNA, 12 nt, Human herpesvirus 4 (Epstein-Barr virus)
ggcacaccagac

SEQ ID NO: 310192 - RNA, 20 nt, Human herpesvirus 4 (Epstein-Barr virus)
ggcacgaaacaugguguaug

SEQ ID NO: 310193 - RNA, 21 nt, Human herpesvirus 4 (Epstein-Barr virus)
ggcacguuuaccagugugcca

SEQ ID NO: 310194 - RNA, 22 nt, Human herpesvirus 4 (Epstein-Barr virus)
ggcacucgcccacuaaccuuaa

SEQ ID NO: 310195 - RNA, 21 nt, Human herpesvirus 4 (Epstein-Barr virus)
ggcagaaugaccgugcaugca

SEQ ID NO: 310196 - RNA, 16 nt, Human herpesvirus 4 (Epstein-Barr virus)
ggcagacacacgugua

SEQ ID NO: 310197 - RNA, 15 nt, Human herpesvirus 4 (Epstein-Barr virus)
uacucuccacuccca

SEQ ID NO: 310198 - RNA, 13 nt, Human herpesvirus 4 (Epstein-Barr virus)
uacucucuagaga

SEQ ID NO: 310199 - RNA, 13 nt, Human herpesvirus 4 (Epstein-Barr virus)
uacuuuuugccac

SEQ ID NO: 310200 - RNA, 21 nt, Human herpesvirus 4 (Epstein-Barr virus)
uagaaaagagagcggcuguga

SEQ ID NO: 310201 - RNA, 14 nt, Human herpesvirus 4 (Epstein-Barr virus)
uagaaaccuugccu

SEQ ID NO: 310202 - RNA, 13 nt, Human herpesvirus 4 (Epstein-Barr virus)
uagaaacuaugca

SEQ ID NO: 310203 - RNA, 21 nt, Human herpesvirus 4 (Epstein-Barr virus)
uagaaacuaugcaugagccac

SEQ ID NO: 310204 - RNA, 16 nt, Human herpesvirus 4 (Epstein-Barr virus)
uagaaacugugccaug

SEQ ID NO: 310205 - RNA, 16 nt, Human herpesvirus 4 (Epstein-Barr virus)
uagaauuguuaguuua

SEQ ID NO: 310206 - RNA, 14 nt, Human herpesvirus 4 (Epstein-Barr virus)
uagagaucaggcca

SEQ ID NO: 310207 - RNA, 21 nt, Human herpesvirus 4 (Epstein-Barr virus)
uagauggcgagacucuugaag

SEQ ID NO: 310208 - RNA, 22 nt, Human herpesvirus 4 (Epstein-Barr virus)
uagcacgucccaaaccaugaca

SEQ ID NO: 310209 - RNA, 15 nt, Human herpesvirus 4 (Epstein-Barr virus)
uagcagaagacuccu

SEQ ID NO: 310210 - RNA, 18 nt, Human herpesvirus 4 (Epstein-Barr virus)
uagcccagcgucaggaag

SEQ ID NO: 310211 - RNA, 14 nt, Human herpesvirus 4 (Epstein-Barr virus)
uagccccgggccca

SEQ ID NO: 310212 - RNA, 23 nt, Human herpesvirus 4 (Epstein-Barr virus)
uagccuaauuguguauugcucuc

SEQ ID NO: 310213 - RNA, 18 nt, Human herpesvirus 4 (Epstein-Barr virus)
uagccuauuugcacguug

SEQ ID NO: 310214 - RNA, 16 nt, Human herpesvirus 4 (Epstein-Barr virus)
uagccuccgcgcuaau

SEQ ID NO: 310215 - RNA, 19 nt, Human herpesvirus 4 (Epstein-Barr virus)
uagcgacauuuaccuggug

SEQ ID NO: 310216 - RNA, 18 nt, Human herpesvirus 4 (Epstein-Barr virus)
uagcgaggauaaucuggg

SEQ ID NO: 310217 - RNA, 22 nt, Human herpesvirus 4 (Epstein-Barr virus)
uagcgccgcgguuucagcauca

SEQ ID NO: 310218 - RNA, 23 nt, Human herpesvirus 4 (Epstein-Barr virus)
uagcggccgaagaagggagggcc

SEQ ID NO: 310219 - RNA, 17 nt, Human herpesvirus 4 (Epstein-Barr virus)
uagcuugggaacaccgg

SEQ ID NO: 310220 - RNA, 16 nt, Human herpesvirus 4 (Epstein-Barr virus)
uaggagacgcccucaa

SEQ ID NO: 310221 - RNA, 21 nt, Human herpesvirus 4 (Epstein-Barr virus)
uagggagguggccacacuggg

SEQ ID NO: 310222 - RNA, 19 nt, Human herpesvirus 4 (Epstein-Barr virus)
uagggggaggggggaaucu

SEQ ID NO: 310223 - RNA, 22 nt, Human herpesvirus 4 (Epstein-Barr virus)
uagucaccugcacagaucugac

SEQ ID NO: 310224 - RNA, 18 nt, Human herpesvirus 4 (Epstein-Barr virus)
uaguggccuucucugaug

SEQ ID NO: 310225 - RNA, 14 nt, Human herpesvirus 4 (Epstein-Barr virus)
uaguuaccacaggu

SEQ ID NO: 310226 - RNA, 15 nt, Human herpesvirus 4 (Epstein-Barr virus)
uauaaaacccugacc

SEQ ID NO: 310227 - RNA, 18 nt, Human herpesvirus 4 (Epstein-Barr virus)
uauaaccacaacugcuau

SEQ ID NO: 310228 - RNA, 14 nt, Human herpesvirus 4 (Epstein-Barr virus)
uauaaugacuauga

SEQ ID NO: 310229 - RNA, 22 nt, Human herpesvirus 4 (Epstein-Barr virus)
uauaugaaaauguguauucucu

SEQ ID NO: 310230 - RNA, 16 nt, Human herpesvirus 4 (Epstein-Barr virus)
uauccaggucuugccg

SEQ ID NO: 310231 - RNA, 16 nt, Human herpesvirus 4 (Epstein-Barr virus)
uaugaaaauguguauu

SEQ ID NO: 310232 - RNA, 18 nt, Human herpesvirus 4 (Epstein-Barr virus)
uaugaugaggacucugaa

SEQ ID NO: 310233 - RNA, 19 nt, Human herpesvirus 4 (Epstein-Barr virus)
uaugcaaugcccacccacu

SEQ ID NO: 310234 - RNA, 16 nt, Human herpesvirus 4 (Epstein-Barr virus)
uaugcaugagccacag

SEQ ID NO: 310235 - RNA, 18 nt, Human herpesvirus 4 (Epstein-Barr virus)
uauuaauaaagugcauac

SEQ ID NO: 310236 - RNA, 18 nt, Human herpesvirus 4 (Epstein-Barr virus)
uauuaccugucucucuuu

SEQ ID NO: 310237 - RNA, 22 nt, Human herpesvirus 4 (Epstein-Barr virus)
uauucaccuugaggugccacag

SEQ ID NO: 310238 - RNA, 13 nt, Human herpesvirus 4 (Epstein-Barr virus)
uauugcaucacaa

SEQ ID NO: 310239 - RNA, 20 nt, Human herpesvirus 4 (Epstein-Barr virus)
uauugcaucacaagucacau

SEQ ID NO: 310240 - RNA, 18 nt, Human herpesvirus 4 (Epstein-Barr virus)
uauugcucucguugccaa

SEQ ID NO: 310241 - RNA, 19 nt, Human herpesvirus 4 (Epstein-Barr virus)
uauugcucucguugccaaa

SEQ ID NO: 310242 - RNA, 19 nt, Human herpesvirus 4 (Epstein-Barr virus)
uauuuaccuuuuugccaau

SEQ ID NO: 310243 - RNA, 18 nt, Human herpesvirus 4 (Epstein-Barr virus)
uauuucugacaucccagu

SEQ ID NO: 310244 - RNA, 21 nt, Human herpesvirus 4 (Epstein-Barr virus)
uauuuggacgagagcaugcca

SEQ ID NO: 310245 - RNA, 14 nt, Human herpesvirus 4 (Epstein-Barr virus)
ucaaagaacaaggc

SEQ ID NO: 310246 - RNA, 16 nt, Human herpesvirus 4 (Epstein-Barr virus)
ucaaaguccugcacua

SEQ ID NO: 310247 - RNA, 18 nt, Human herpesvirus 4 (Epstein-Barr virus)
ucaaccuaauuacauggu

SEQ ID NO: 310248 - RNA, 21 nt, Human herpesvirus 4 (Epstein-Barr virus)
ucaacguccgugagagccuac

SEQ ID NO: 310249 - RNA, 16 nt, Human herpesvirus 4 (Epstein-Barr virus)
ucaacuuuacuuuuau

SEQ ID NO: 310250 - RNA, 15 nt, Human herpesvirus 4 (Epstein-Barr virus)
ucaagagucucgcca

SEQ ID NO: 310251 - RNA, 22 nt, Human herpesvirus 4 (Epstein-Barr virus)
ucaagaguuuaagcagcacuga

SEQ ID NO: 310252 - RNA, 17 nt, Human herpesvirus 4 (Epstein-Barr virus)
ucaaggcucugcacagg

SEQ ID NO: 310253 - RNA, 22 nt, Human herpesvirus 4 (Epstein-Barr virus)
ucaauaauaagggcgccaucua

SEQ ID NO: 310254 - RNA, 18 nt, Human herpesvirus 4 (Epstein-Barr virus)
ucaauccauuaucuuggc

SEQ ID NO: 310255 - RNA, 19 nt, Human herpesvirus 4 (Epstein-Barr virus)
ucaaugagagggacuugga

SEQ ID NO: 310256 - RNA, 13 nt, Human herpesvirus 4 (Epstein-Barr virus)
ucacaagucacau

SEQ ID NO: 310257 - RNA, 16 nt, Human herpesvirus 4 (Epstein-Barr virus)
ucacaagucacaucaa

SEQ ID NO: 310258 - RNA, 22 nt, Human herpesvirus 4 (Epstein-Barr virus)
ucacagaggaggcuggugccuu

SEQ ID NO: 310259 - RNA, 23 nt, Human herpesvirus 4 (Epstein-Barr virus)
ucacaggacauguuuggggaguu

SEQ ID NO: 310260 - RNA, 18 nt, Human herpesvirus 4 (Epstein-Barr virus)
ucacagguuauuuugccu

SEQ ID NO: 310261 - RNA, 14 nt, Human herpesvirus 4 (Epstein-Barr virus)
ucacaucaagcaga

SEQ ID NO: 310262 - RNA, 17 nt, Human herpesvirus 4 (Epstein-Barr virus)
ucacaucucagggacaa

SEQ ID NO: 310263 - RNA, 22 nt, Human herpesvirus 4 (Epstein-Barr virus)
ucaccaagauuguuccagguca

SEQ ID NO: 310264 - RNA, 21 nt, Human herpesvirus 4 (Epstein-Barr virus)
ucaccagacgacucccacauu

SEQ ID NO: 310265 - RNA, 20 nt, Human herpesvirus 4 (Epstein-Barr virus)
ucaccagcuucgagagccac

SEQ ID NO: 310266 - RNA, 16 nt, Human herpesvirus 4 (Epstein-Barr virus)
ucaccguaccaugagu

SEQ ID NO: 310267 - RNA, 17 nt, Human herpesvirus 4 (Epstein-Barr virus)
ucaccuggguacccaaa

SEQ ID NO: 310268 - RNA, 19 nt, Human herpesvirus 4 (Epstein-Barr virus)
ucaccuuccagacuaugca

SEQ ID NO: 310269 - RNA, 22 nt, Human herpesvirus 4 (Epstein-Barr virus)
ucaccuugaggugccacagagc

SEQ ID NO: 310270 - RNA, 20 nt, Human herpesvirus 4 (Epstein-Barr virus)
ucacgaagcgagacaguacu

SEQ ID NO: 310271 - RNA, 19 nt, Human herpesvirus 4 (Epstein-Barr virus)
ucacgaucuucaagagucu

SEQ ID NO: 310272 - RNA, 22 nt, Human herpesvirus 4 (Epstein-Barr virus)
ucacgggacgcagaaugugcag

SEQ ID NO: 310273 - RNA, 18 nt, Human herpesvirus 4 (Epstein-Barr virus)
ucacuaaacauugcaccu

SEQ ID NO: 310274 - RNA, 18 nt, Human herpesvirus 4 (Epstein-Barr virus)
ucacugggacaacuguca

SEQ ID NO: 310275 - RNA, 21 nt, Human herpesvirus 4 (Epstein-Barr virus)
ucacugggacaacugucacac

SEQ ID NO: 310276 - RNA, 20 nt, Human herpesvirus 4 (Epstein-Barr virus)
ucacuuucaguggaugcauc

SEQ ID NO: 310277 - RNA, 20 nt, Human herpesvirus 4 (Epstein-Barr virus)
ucagaaaacucugcauggag

SEQ ID NO: 310278 - RNA, 22 nt, Human herpesvirus 4 (Epstein-Barr virus)
ucagaagaauguccaaaagguc

SEQ ID NO: 310279 - RNA, 17 nt, Human herpesvirus 4 (Epstein-Barr virus)
ucagaauugucacugag

SEQ ID NO: 310280 - RNA, 17 nt, Human herpesvirus 4 (Epstein-Barr virus)
ucagacgagucugacua

SEQ ID NO: 310281 - RNA, 18 nt, Human herpesvirus 4 (Epstein-Barr virus)
ucagacgagucugacuac

SEQ ID NO: 310282 - RNA, 23 nt, Human herpesvirus 4 (Epstein-Barr virus)
ucagcaacugcguccucuaccug

SEQ ID NO: 310283 - RNA, 16 nt, Human herpesvirus 4 (Epstein-Barr virus)
ucagcacuuugccagc

SEQ ID NO: 310284 - RNA, 18 nt, Human herpesvirus 4 (Epstein-Barr virus)
ucuggcacgacuguuccu

SEQ ID NO: 310285 - RNA, 16 nt, Human herpesvirus 4 (Epstein-Barr virus)
ucuggccaaccugccu

SEQ ID NO: 310286 - RNA, 16 nt, Human herpesvirus 4 (Epstein-Barr virus)
ucuggccaugaaucug

SEQ ID NO: 310287 - RNA, 20 nt, Human herpesvirus 4 (Epstein-Barr virus)
ucuggcgauuuuaaucugga

SEQ ID NO: 310288 - RNA, 21 nt, Human herpesvirus 4 (Epstein-Barr virus)
ucugguugauaaucucaaaga

SEQ ID NO: 310289 - RNA, 17 nt, Human herpesvirus 4 (Epstein-Barr virus)
ucuguauaccgaugaga

SEQ ID NO: 310290 - RNA, 22 nt, Human herpesvirus 4 (Epstein-Barr virus)
ucugucucggccuccuggccag

SEQ ID NO: 310291 - RNA, 20 nt, Human herpesvirus 4 (Epstein-Barr virus)
ucugucucuaacaguucacu

SEQ ID NO: 310292 - RNA, 14 nt, Human herpesvirus 4 (Epstein-Barr virus)
ucugugagacaagc

SEQ ID NO: 310293 - RNA, 13 nt, Human herpesvirus 4 (Epstein-Barr virus)
ucuguggugggcu

SEQ ID NO: 310294 - RNA, 23 nt, Human herpesvirus 4 (Epstein-Barr virus)
ucuguggugggcucuguacuugu

SEQ ID NO: 310295 - RNA, 15 nt, Human herpesvirus 4 (Epstein-Barr virus)
ucuuaaccauugaca

SEQ ID NO: 310296 - RNA, 16 nt, Human herpesvirus 4 (Epstein-Barr virus)
ucuuaacccaauuccc

SEQ ID NO: 310297 - RNA, 19 nt, Human herpesvirus 4 (Epstein-Barr virus)
ucuuacaccagaggccaca

SEQ ID NO: 310298 - RNA, 18 nt, Human herpesvirus 4 (Epstein-Barr virus)
ucuuaccccuggcuucca

SEQ ID NO: 310299 - RNA, 17 nt, Human herpesvirus 4 (Epstein-Barr virus)
ucuuacugcccagccua

SEQ ID NO: 310300 - RNA, 20 nt, Human herpesvirus 4 (Epstein-Barr virus)
ucuuagggagguggccacac

SEQ ID NO: 310301 - RNA, 16 nt, Human herpesvirus 4 (Epstein-Barr virus)
ucuuagguaucuggau

SEQ ID NO: 310302 - RNA, 19 nt, Human herpesvirus 4 (Epstein-Barr virus)
ucuuagguaucuggaucua

SEQ ID NO: 310303 - RNA, 23 nt, Human herpesvirus 4 (Epstein-Barr virus)
ucuucaaccuuggcaguguccuc

SEQ ID NO: 310304 - RNA, 13 nt, Human herpesvirus 4 (Epstein-Barr virus)
ucuucaggucuga

SEQ ID NO: 310305 - RNA, 14 nt, Human herpesvirus 4 (Epstein-Barr virus)
ucuucauguccacu

SEQ ID NO: 310306 - RNA, 16 nt, Human herpesvirus 4 (Epstein-Barr virus)
ucuucauguccacuga

SEQ ID NO: 310307 - RNA, 18 nt, Human herpesvirus 4 (Epstein-Barr virus)
ucuuccacaccauccaca

SEQ ID NO: 310308 - RNA, 11 nt, Human herpesvirus 4 (Epstein-Barr virus)
ucuucuacucg

SEQ ID NO: 310309 - RNA, 22 nt, Human herpesvirus 4 (Epstein-Barr virus)
ucuugccguggcgccuggggau

SEQ ID NO: 310310 - RNA, 16 nt, Human herpesvirus 4 (Epstein-Barr virus)
ucuugcgcccaggcac

SEQ ID NO: 310311 - RNA, 17 nt, Human herpesvirus 4 (Epstein-Barr virus)
ucuuguaaaacuuggag

SEQ ID NO: 310312 - RNA, 17 nt, Human herpesvirus 4 (Epstein-Barr virus)
ucuugucggacgaggag

SEQ ID NO: 310313 - RNA, 12 nt, Human herpesvirus 4 (Epstein-Barr virus)
ucuuguugcuag

SEQ ID NO: 310314 - RNA, 13 nt, Human herpesvirus 4 (Epstein-Barr virus)
ucuuuaucuccau

SEQ ID NO: 310315 - RNA, 16 nt, Human herpesvirus 4 (Epstein-Barr virus)
ucuuugcaauuugccu

SEQ ID NO: 310316 - RNA, 17 nt, Human herpesvirus 4 (Epstein-Barr virus)
ucuuugcaauuugccua

SEQ ID NO: 310317 - RNA, 14 nt, Human herpesvirus 4 (Epstein-Barr virus)
ucuuuguggccuuc

SEQ ID NO: 310318 - RNA, 17 nt, Human herpesvirus 4 (Epstein-Barr virus)
ucuuuguggccuuccuc

SEQ ID NO: 310319 - RNA, 13 nt, Human herpesvirus 4 (Epstein-Barr virus)
ucuuuugcucuua

SEQ ID NO: 310320 - RNA, 21 nt, Human herpesvirus 4 (Epstein-Barr virus)
ucuuuuguaaucgcagcucua

SEQ ID NO: 310321 - RNA, 19 nt, Human herpesvirus 4 (Epstein-Barr virus)
ugaaaauguguauucucug

SEQ ID NO: 310322 - RNA, 20 nt, Human herpesvirus 4 (Epstein-Barr virus)
ugaacaucuggcuggggcau

SEQ ID NO: 310323 - RNA, 13 nt, Human herpesvirus 4 (Epstein-Barr virus)
ugaacccaggggu

SEQ ID NO: 310324 - RNA, 17 nt, Human herpesvirus 4 (Epstein-Barr virus)
ugaacuggucaccagcu

SEQ ID NO: 310325 - RNA, 18 nt, Human herpesvirus 4 (Epstein-Barr virus)
ugaagauggccucaaagu

SEQ ID NO: 310326 - RNA, 14 nt, Human herpesvirus 4 (Epstein-Barr virus)
ugaagcaacagguc

SEQ ID NO: 310327 - RNA, 10 nt, Human herpesvirus 4 (Epstein-Barr virus)
ugaagccagg

SEQ ID NO: 310328 - RNA, 12 nt, Human herpesvirus 4 (Epstein-Barr virus)
ugacaggcacaa

SEQ ID NO: 310329 - RNA, 14 nt, Human herpesvirus 4 (Epstein-Barr virus)
ugacaucccaguuc

SEQ ID NO: 310330 - RNA, 20 nt, Human herpesvirus 4 (Epstein-Barr virus)
ugacaucggggacgacaucu

SEQ ID NO: 310331 - RNA, 18 nt, Human herpesvirus 4 (Epstein-Barr virus)
ugacauguccgggugcau

SEQ ID NO: 310332 - RNA, 18 nt, Human herpesvirus 4 (Epstein-Barr virus)
ugacauucacugggacaa

SEQ ID NO: 310333 - RNA, 23 nt, Human herpesvirus 4 (Epstein-Barr virus)
ugacauugcuagucacacccgug

SEQ ID NO: 310334 - RNA, 12 nt, Human herpesvirus 4 (Epstein-Barr virus)
ugacauuucuca

SEQ ID NO: 310335 - RNA, 19 nt, Human herpesvirus 4 (Epstein-Barr virus)
ugaccaguguguacauucc

SEQ ID NO: 310336 - RNA, 21 nt, Human herpesvirus 4 (Epstein-Barr virus)
ugaccaguguguacauuccag

SEQ ID NO: 310337 - RNA, 21 nt, Human herpesvirus 4 (Epstein-Barr virus)
ugaccaucacauggggcauua

SEQ ID NO: 310338 - RNA, 23 nt, Human herpesvirus 4 (Epstein-Barr virus)
ugacccucgcgccccaucuuggc

SEQ ID NO: 310339 - RNA, 17 nt, Human herpesvirus 4 (Epstein-Barr virus)
ugacccucuugcacucc

SEQ ID NO: 310340 - RNA, 21 nt, Human herpesvirus 4 (Epstein-Barr virus)
ugaccuguugucccugagaug

SEQ ID NO: 310341 - RNA, 22 nt, Human herpesvirus 4 (Epstein-Barr virus)
ugaccuugauguacuuuccuag

SEQ ID NO: 310342 - RNA, 20 nt, Human herpesvirus 4 (Epstein-Barr virus)
ugaccuuuuggacauucuuc

SEQ ID NO: 310343 - RNA, 14 nt, Human herpesvirus 4 (Epstein-Barr virus)
ugacgaggggccag

SEQ ID NO: 310344 - RNA, 14 nt, Human herpesvirus 4 (Epstein-Barr virus)
ugacgccaaugcca

SEQ ID NO: 310345 - RNA, 21 nt, Human herpesvirus 4 (Epstein-Barr virus)
ugacgucaacuuuacuuuuau

SEQ ID NO: 310346 - RNA, 14 nt, Human herpesvirus 4 (Epstein-Barr virus)
ugacuacaccaguc

SEQ ID NO: 310347 - RNA, 19 nt, Human herpesvirus 4 (Epstein-Barr virus)
ugacuggugcuuguggugu

SEQ ID NO: 310348 - RNA, 15 nt, Human herpesvirus 4 (Epstein-Barr virus)
ugagaacagucauca

SEQ ID NO: 310349 - RNA, 20 nt, Human herpesvirus 4 (Epstein-Barr virus)
ugagaacuuucuucuacucg

SEQ ID NO: 310350 - RNA, 21 nt, Human herpesvirus 4 (Epstein-Barr virus)
ugagaacuuucuucuacucga

SEQ ID NO: 310351 - RNA, 17 nt, Human herpesvirus 4 (Epstein-Barr virus)
ugagacuggaacuguac

SEQ ID NO: 310352 - RNA, 16 nt, Human herpesvirus 4 (Epstein-Barr virus)
ugagagccuacccaug

SEQ ID NO: 310353 - RNA, 22 nt, Human herpesvirus 4 (Epstein-Barr virus)
ugagaugaacacccccauacau

SEQ ID NO: 310354 - RNA, 12 nt, Human herpesvirus 4 (Epstein-Barr virus)
ugagcaccaaca

SEQ ID NO: 310355 - RNA, 22 nt, Human herpesvirus 4 (Epstein-Barr virus)
ugagcacguguggaagaggaaa

SEQ ID NO: 310356 - RNA, 14 nt, Human herpesvirus 4 (Epstein-Barr virus)
ugagccauuggcau

SEQ ID NO: 310357 - RNA, 21 nt, Human herpesvirus 4 (Epstein-Barr virus)
ugagcccgacgaacuccucca

SEQ ID NO: 310358 - RNA, 17 nt, Human herpesvirus 4 (Epstein-Barr virus)
ugagccgcuuacagcuc

SEQ ID NO: 310359 - RNA, 16 nt, Human herpesvirus 4 (Epstein-Barr virus)
ugagccugagccacac

SEQ ID NO: 310360 - RNA, 19 nt, Human herpesvirus 4 (Epstein-Barr virus)
ugagcgaugccucuacgcc

SEQ ID NO: 310361 - RNA, 15 nt, Human herpesvirus 4 (Epstein-Barr virus)
ugagcuccucuccaa

SEQ ID NO: 310362 - RNA, 19 nt, Human herpesvirus 4 (Epstein-Barr virus)
ugaggaacauggaugugaa

SEQ ID NO: 310363 - RNA, 14 nt, Human herpesvirus 4 (Epstein-Barr virus)
ugaggaacggugau

SEQ ID NO: 310364 - RNA, 23 nt, Human herpesvirus 4 (Epstein-Barr virus)
ugaggcaaaagacuauguucucu

SEQ ID NO: 310365 - RNA, 22 nt, Human herpesvirus 4 (Epstein-Barr virus)
ugagggaguguuccacaguaau

SEQ ID NO: 310366 - RNA, 13 nt, Human herpesvirus 4 (Epstein-Barr virus)
ugagggcaaagac

SEQ ID NO: 310367 - RNA, 14 nt, Human herpesvirus 4 (Epstein-Barr virus)
ugagggcagugaua

SEQ ID NO: 310368 - RNA, 11 nt, Human herpesvirus 4 (Epstein-Barr virus)
ugagggggcca

SEQ ID NO: 310369 - RNA, 15 nt, Human herpesvirus 4 (Epstein-Barr virus)
ugaggugccacagag

SEQ ID NO: 310370 - RNA, 18 nt, Human herpesvirus 4 (Epstein-Barr virus)
ugagguggugcuugugaa

SEQ ID NO: 310371 - RNA, 14 nt, Human herpesvirus 4 (Epstein-Barr virus)
ugagugccaugugu

SEQ ID NO: 310372 - RNA, 14 nt, Human herpesvirus 4 (Epstein-Barr virus)
ugagugucucccca

SEQ ID NO: 310373 - RNA, 15 nt, Human herpesvirus 4 (Epstein-Barr virus)
ugaguucuacaaugc

SEQ ID NO: 310374 - RNA, 15 nt, Human herpesvirus 4 (Epstein-Barr virus)
ugauaagucaugaca

SEQ ID NO: 310375 - RNA, 14 nt, Human herpesvirus 4 (Epstein-Barr virus)
ugauacucaucugu

SEQ ID NO: 310376 - RNA, 21 nt, Human herpesvirus 4 (Epstein-Barr virus)
ugauacucaucugugagacaa

SEQ ID NO: 310377 - RNA, 20 nt, Human herpesvirus 4 (Epstein-Barr virus)
ugauccuguacaaacccaac

SEQ ID NO: 310378 - RNA, 21 nt, Human herpesvirus 4 (Epstein-Barr virus)
ugauggccuggagagcaugca

SEQ ID NO: 310379 - RNA, 13 nt, Human herpesvirus 4 (Epstein-Barr virus)
ugauguacuuucc

SEQ ID NO: 310380 - RNA, 12 nt, Human herpesvirus 4 (Epstein-Barr virus)
ugauguagcuau

SEQ ID NO: 310381 - RNA, 14 nt, Human herpesvirus 4 (Epstein-Barr virus)
ugauguagcuauac

SEQ ID NO: 310382 - RNA, 19 nt, Human herpesvirus 4 (Epstein-Barr virus)
ugauuaggcacuggacaca

SEQ ID NO: 310383 - RNA, 16 nt, Human herpesvirus 4 (Epstein-Barr virus)
ugauucuggccaugaa

SEQ ID NO: 310384 - RNA, 22 nt, Human herpesvirus 4 (Epstein-Barr virus)
ugcaaagggacccacgguggaa

SEQ ID NO: 310385 - RNA, 20 nt, Human herpesvirus 4 (Epstein-Barr virus)
ugcaacaaucuggacucucu

SEQ ID NO: 310386 - RNA, 21 nt, Human herpesvirus 4 (Epstein-Barr virus)
ugcaacagaggauuggcugca

SEQ ID NO: 310387 - RNA, 23 nt, Human herpesvirus 4 (Epstein-Barr virus)
ugcacacauuucagguaccccaa

SEQ ID NO: 310388 - RNA, 14 nt, Human herpesvirus 4 (Epstein-Barr virus)
ugcacaccuuggcg

SEQ ID NO: 310389 - RNA, 21 nt, Human herpesvirus 4 (Epstein-Barr virus)
ugcacagaacaucacugccac

SEQ ID NO: 310390 - RNA, 14 nt, Human herpesvirus 4 (Epstein-Barr virus)
ugcacaggaggccc

SEQ ID NO: 310391 - RNA, 21 nt, Human herpesvirus 4 (Epstein-Barr virus)
ugcacaggcuuggaaacaccc

SEQ ID NO: 310392 - RNA, 22 nt, Human herpesvirus 4 (Epstein-Barr virus)
ugcacaggcuuggaaacaccca

SEQ ID NO: 310393 - RNA, 23 nt, Human herpesvirus 4 (Epstein-Barr virus)
ugcaccaguuucuuuccgcggug

SEQ ID NO: 310394 - RNA, 15 nt, Human herpesvirus 4 (Epstein-Barr virus)
uguggaagaggaaac

SEQ ID NO: 310395 - RNA, 13 nt, Human herpesvirus 4 (Epstein-Barr virus)
uguggauaacauc

SEQ ID NO: 310396 - RNA, 16 nt, Human herpesvirus 4 (Epstein-Barr virus)
uguggccuuccucugc

SEQ ID NO: 310397 - RNA, 15 nt, Human herpesvirus 4 (Epstein-Barr virus)
ugugggggcuguaga

SEQ ID NO: 310398 - RNA, 16 nt, Human herpesvirus 4 (Epstein-Barr virus)
ugugggggcuguagaa

SEQ ID NO: 310399 - RNA, 21 nt, Human herpesvirus 4 (Epstein-Barr virus)
uguguaaccucacuguaauuc

SEQ ID NO: 310400 - RNA, 15 nt, Human herpesvirus 4 (Epstein-Barr virus)
uguguacuuguccuc

SEQ ID NO: 310401 - RNA, 15 nt, Human herpesvirus 4 (Epstein-Barr virus)
uguguccagugccua

SEQ ID NO: 310402 - RNA, 15 nt, Human herpesvirus 4 (Epstein-Barr virus)
uguuaaggcuguuga

SEQ ID NO: 310403 - RNA, 19 nt, Human herpesvirus 4 (Epstein-Barr virus)
uguuaggagacgcccucaa

SEQ ID NO: 310404 - RNA, 18 nt, Human herpesvirus 4 (Epstein-Barr virus)
uguucagggccgugcaug

SEQ ID NO: 310405 - RNA, 19 nt, Human herpesvirus 4 (Epstein-Barr virus)
uguucagggccgugcaugg

SEQ ID NO: 310406 - RNA, 16 nt, Human herpesvirus 4 (Epstein-Barr virus)
uguuccuauaugcucu

SEQ ID NO: 310407 - RNA, 20 nt, Human herpesvirus 4 (Epstein-Barr virus)
uguuccuauaugcucucgca

SEQ ID NO: 310408 - RNA, 22 nt, Human herpesvirus 4 (Epstein-Barr virus)
uguucgugagauugaucugucu

SEQ ID NO: 310409 - RNA, 13 nt, Human herpesvirus 4 (Epstein-Barr virus)
uguugaccucuac

SEQ ID NO: 310410 - RNA, 20 nt, Human herpesvirus 4 (Epstein-Barr virus)
uguugcgagaaaaugagcca

SEQ ID NO: 310411 - RNA, 16 nt, Human herpesvirus 4 (Epstein-Barr virus)
uguuucgugcccucua

SEQ ID NO: 310412 - RNA, 21 nt, Human herpesvirus 4 (Epstein-Barr virus)
uguuucucagagagcauuuca

SEQ ID NO: 310413 - RNA, 17 nt, Human herpesvirus 4 (Epstein-Barr virus)
uguuucuguacaauggg

SEQ ID NO: 310414 - RNA, 18 nt, Human herpesvirus 4 (Epstein-Barr virus)
uguuugcucuauucgcca

SEQ ID NO: 310415 - RNA, 21 nt, Human herpesvirus 4 (Epstein-Barr virus)
uuaaaucucagucccaccaca

SEQ ID NO: 310416 - RNA, 16 nt, Human herpesvirus 4 (Epstein-Barr virus)
uuaaauucaccuaaga

SEQ ID NO: 310417 - RNA, 18 nt, Human herpesvirus 4 (Epstein-Barr virus)
uuaacauccgagaccucc

SEQ ID NO: 310418 - RNA, 15 nt, Human herpesvirus 4 (Epstein-Barr virus)
uuaacuaagcuuaug

SEQ ID NO: 310419 - RNA, 15 nt, Human herpesvirus 4 (Epstein-Barr virus)
uuaacuugacuacaa

SEQ ID NO: 310420 - RNA, 13 nt, Human herpesvirus 4 (Epstein-Barr virus)
uuaagcagcacug

SEQ ID NO: 310421 - RNA, 15 nt, Human herpesvirus 4 (Epstein-Barr virus)
uuaagcagcacugaa

SEQ ID NO: 310422 - RNA, 18 nt, Human herpesvirus 4 (Epstein-Barr virus)
uuaaggaaugaacacuca

SEQ ID NO: 310423 - RNA, 16 nt, Human herpesvirus 4 (Epstein-Barr virus)
uuaauaaacaauuaca

SEQ ID NO: 310424 - RNA, 13 nt, Human herpesvirus 4 (Epstein-Barr virus)
uuaauaaauaucu

SEQ ID NO: 310425 - RNA, 14 nt, Human herpesvirus 4 (Epstein-Barr virus)
uuaauaaauaucuu

SEQ ID NO: 310426 - RNA, 16 nt, Human herpesvirus 4 (Epstein-Barr virus)
uuaauuacaagagaug

SEQ ID NO: 310427 - RNA, 13 nt, Human herpesvirus 4 (Epstein-Barr virus)
uuacaaacacuac

SEQ ID NO: 310428 - RNA, 19 nt, Human herpesvirus 4 (Epstein-Barr virus)
uuacagugguucuccugau

SEQ ID NO: 310429 - RNA, 17 nt, Human herpesvirus 4 (Epstein-Barr virus)
uuacaucugcccggcua

SEQ ID NO: 310430 - RNA, 23 nt, Human herpesvirus 4 (Epstein-Barr virus)
uuaccacacccccacuuuuccaa

SEQ ID NO: 310431 - RNA, 12 nt, Human herpesvirus 4 (Epstein-Barr virus)
uuaccaccucaa

SEQ ID NO: 310432 - RNA, 23 nt, Human herpesvirus 4 (Epstein-Barr virus)
uuaccuuuuugccaaugacccac

SEQ ID NO: 310433 - RNA, 12 nt, Human herpesvirus 4 (Epstein-Barr virus)
uuacggugcugg

SEQ ID NO: 310434 - RNA, 18 nt, Human herpesvirus 4 (Epstein-Barr virus)
uuacugcacagaacauca

SEQ ID NO: 310435 - RNA, 20 nt, Human herpesvirus 4 (Epstein-Barr virus)
uuacuuuuauuucaguucug

SEQ ID NO: 310436 - RNA, 16 nt, Human herpesvirus 4 (Epstein-Barr virus)
uuagacacggaagaca

SEQ ID NO: 310437 - RNA, 13 nt, Human herpesvirus 4 (Epstein-Barr virus)
uuagggaggacac

SEQ ID NO: 310438 - RNA, 14 nt, Human herpesvirus 4 (Epstein-Barr virus)
uuagguaucuggau

SEQ ID NO: 310439 - RNA, 16 nt, Human herpesvirus 4 (Epstein-Barr virus)
uuagucaggagguaca

SEQ ID NO: 310440 - RNA, 19 nt, Human herpesvirus 4 (Epstein-Barr virus)
uuaucaccguaccaugagu

SEQ ID NO: 310441 - RNA, 12 nt, Human herpesvirus 4 (Epstein-Barr virus)
uuauccacacca

SEQ ID NO: 310442 - RNA, 21 nt, Human herpesvirus 4 (Epstein-Barr virus)
uuaugaaaugcagguuugacu

SEQ ID NO: 310443 - RNA, 22 nt, Human herpesvirus 4 (Epstein-Barr virus)
uuauuaaucagaaauuugcacu

SEQ ID NO: 310444 - RNA, 13 nt, Human herpesvirus 4 (Epstein-Barr virus)
uuauucagcaauu

SEQ ID NO: 310445 - RNA, 20 nt, Human herpesvirus 4 (Epstein-Barr virus)
uuauugaugugacuugugau

SEQ ID NO: 310446 - RNA, 16 nt, Human herpesvirus 4 (Epstein-Barr virus)
uuauuggagaugcucu

SEQ ID NO: 310447 - RNA, 20 nt, Human herpesvirus 4 (Epstein-Barr virus)
uucaccuuguuuuagugugg

SEQ ID NO: 310448 - RNA, 19 nt, Human herpesvirus 4 (Epstein-Barr virus)
uucacugggacaacuguca

SEQ ID NO: 310449 - RNA, 22 nt, Human herpesvirus 4 (Epstein-Barr virus)
uucagcaguagcuugggaacac

SEQ ID NO: 310450 - RNA, 16 nt, Human herpesvirus 4 (Epstein-Barr virus)
uucagcaucaauguca

SEQ ID NO: 310451 - RNA, 19 nt, Human herpesvirus 4 (Epstein-Barr virus)
uucagccucacugauggua

SEQ ID NO: 310452 - RNA, 17 nt, Human herpesvirus 4 (Epstein-Barr virus)
uucaggggaaucucugc

SEQ ID NO: 310453 - RNA, 21 nt, Human herpesvirus 4 (Epstein-Barr virus)
uucauaucccuuguuuuacca

SEQ ID NO: 310454 - RNA, 19 nt, Human herpesvirus 4 (Epstein-Barr virus)
uuccaacgcauccaccauc

SEQ ID NO: 310455 - RNA, 14 nt, Human herpesvirus 4 (Epstein-Barr virus)
uuccagacuaugca

SEQ ID NO: 310456 - RNA, 15 nt, Human herpesvirus 4 (Epstein-Barr virus)
uucccacugugccua

SEQ ID NO: 310457 - RNA, 17 nt, Human herpesvirus 4 (Epstein-Barr virus)
uucccgugcuuuuugcc

SEQ ID NO: 310458 - RNA, 21 nt, Human herpesvirus 4 (Epstein-Barr virus)
uucccucauucccccaugaga

SEQ ID NO: 310459 - RNA, 18 nt, Human herpesvirus 4 (Epstein-Barr virus)
uuccgucagccaggguga

SEQ ID NO: 310460 - RNA, 19 nt, Human herpesvirus 4 (Epstein-Barr virus)
uuccuagaaacugugccau

SEQ ID NO: 310461 - RNA, 14 nt, Human herpesvirus 4 (Epstein-Barr virus)
uucgcgaugcuaua

SEQ ID NO: 310462 - RNA, 15 nt, Human herpesvirus 4 (Epstein-Barr virus)
uucgcgaugcuauaa

SEQ ID NO: 310463 - RNA, 16 nt, Human herpesvirus 4 (Epstein-Barr virus)
uucgugcucuucaugu

SEQ ID NO: 310464 - RNA, 15 nt, Human herpesvirus 4 (Epstein-Barr virus)
uucuaccaagacucc

SEQ ID NO: 310465 - RNA, 14 nt, Human herpesvirus 4 (Epstein-Barr virus)
uucuacuaggaaac

SEQ ID NO: 310466 - RNA, 17 nt, Human herpesvirus 4 (Epstein-Barr virus)
ucccaauucacaucuca

SEQ ID NO: 310467 - RNA, 14 nt, Human herpesvirus 4 (Epstein-Barr virus)
ucccaccacaaagg

SEQ ID NO: 310468 - RNA, 21 nt, Human herpesvirus 4 (Epstein-Barr virus)
ucccacggaccccccucugau

SEQ ID NO: 310469 - RNA, 22 nt, Human herpesvirus 4 (Epstein-Barr virus)
ucccacggaccccccucugaug

SEQ ID NO: 310470 - RNA, 11 nt, Human herpesvirus 4 (Epstein-Barr virus)
ucccacugugc

SEQ ID NO: 310471 - RNA, 15 nt, Human herpesvirus 4 (Epstein-Barr virus)
ucccagccccaauuc

SEQ ID NO: 310472 - RNA, 13 nt, Human herpesvirus 4 (Epstein-Barr virus)
ucccaggccuuag

SEQ ID NO: 310473 - RNA, 19 nt, Human herpesvirus 4 (Epstein-Barr virus)
uccccaaugauugaggcaa

SEQ ID NO: 310474 - RNA, 13 nt, Human herpesvirus 4 (Epstein-Barr virus)
uccccagcccagc

SEQ ID NO: 310475 - RNA, 18 nt, Human herpesvirus 4 (Epstein-Barr virus)
uccccagugaucaucucg

SEQ ID NO: 310476 - RNA, 12 nt, Human herpesvirus 4 (Epstein-Barr virus)
ucccccaugaga

SEQ ID NO: 310477 - RNA, 20 nt, Human herpesvirus 4 (Epstein-Barr virus)
uccccugcagaguaauugca

SEQ ID NO: 310478 - RNA, 21 nt, Human herpesvirus 4 (Epstein-Barr virus)
ucccuccaagcggcacagauu

SEQ ID NO: 310479 - RNA, 12 nt, Human herpesvirus 4 (Epstein-Barr virus)
uccgaaagcacu

SEQ ID NO: 310480 - RNA, 23 nt, Human herpesvirus 4 (Epstein-Barr virus)
uccgagaggaugauccuguacaa

SEQ ID NO: 310481 - RNA, 21 nt, Human herpesvirus 4 (Epstein-Barr virus)
uccgcagccgcugaagccagg

SEQ ID NO: 310482 - RNA, 17 nt, Human herpesvirus 4 (Epstein-Barr virus)
uccgccaggaccuggau

SEQ ID NO: 310483 - RNA, 18 nt, Human herpesvirus 4 (Epstein-Barr virus)
uccgcccaggucuugcca

SEQ ID NO: 310484 - RNA, 14 nt, Human herpesvirus 4 (Epstein-Barr virus)
uccggaggggacca

SEQ ID NO: 310485 - RNA, 18 nt, Human herpesvirus 4 (Epstein-Barr virus)
uccggcccacgccauacc

SEQ ID NO: 310486 - RNA, 21 nt, Human herpesvirus 4 (Epstein-Barr virus)
uccggcggcaguggaccucaa

SEQ ID NO: 310487 - RNA, 11 nt, Human herpesvirus 4 (Epstein-Barr virus)
uccggucuugc

SEQ ID NO: 310488 - RNA, 15 nt, Human herpesvirus 4 (Epstein-Barr virus)
uccggucuugcaggg

SEQ ID NO: 310489 - RNA, 15 nt, Human herpesvirus 4 (Epstein-Barr virus)
uccggugccugagac

SEQ ID NO: 310490 - RNA, 18 nt, Human herpesvirus 4 (Epstein-Barr virus)
uccggugccugagacaga

SEQ ID NO: 310491 - RNA, 14 nt, Human herpesvirus 4 (Epstein-Barr virus)
uccguccagccacg

SEQ ID NO: 310492 - RNA, 17 nt, Human herpesvirus 4 (Epstein-Barr virus)
uccguccuuguccagga

SEQ ID NO: 310493 - RNA, 22 nt, Human herpesvirus 4 (Epstein-Barr virus)
uggccagcggggagagggugga

SEQ ID NO: 310494 - RNA, 18 nt, Human herpesvirus 4 (Epstein-Barr virus)
uggccauucgacaggcca

SEQ ID NO: 310495 - RNA, 20 nt, Human herpesvirus 4 (Epstein-Barr virus)
uggcccgucccucuuguccc

SEQ ID NO: 310496 - RNA, 12 nt, Human herpesvirus 4 (Epstein-Barr virus)
uggcccucggug

SEQ ID NO: 310497 - RNA, 17 nt, Human herpesvirus 4 (Epstein-Barr virus)
uggcccugaucugggag

SEQ ID NO: 310498 - RNA, 21 nt, Human herpesvirus 4 (Epstein-Barr virus)
uggcccugcaaacugacacac

SEQ ID NO: 310499 - RNA, 14 nt, Human herpesvirus 4 (Epstein-Barr virus)
uggccggguuugau

SEQ ID NO: 310500 - RNA, 12 nt, Human herpesvirus 4 (Epstein-Barr virus)
uggccucaaagu

SEQ ID NO: 310501 - RNA, 15 nt, Human herpesvirus 4 (Epstein-Barr virus)
uggcgaaucugacau

SEQ ID NO: 310502 - RNA, 18 nt, Human herpesvirus 4 (Epstein-Barr virus)
uggcgauuuuaaucugga

SEQ ID NO: 310503 - RNA, 20 nt, Human herpesvirus 4 (Epstein-Barr virus)
uggcgauuuuaaucuggaug

SEQ ID NO: 310504 - RNA, 20 nt, Human herpesvirus 4 (Epstein-Barr virus)
uggcgucaggagacacggcu

SEQ ID NO: 310505 - RNA, 20 nt, Human herpesvirus 4 (Epstein-Barr virus)
uggcgucgggaaacacagcu

SEQ ID NO: 310506 - RNA, 21 nt, Human herpesvirus 4 (Epstein-Barr virus)
uggcugacggaaaucugcucu

SEQ ID NO: 310507 - RNA, 19 nt, Human herpesvirus 4 (Epstein-Barr virus)
uggcuugcuccaccagcuu

SEQ ID NO: 310508 - RNA, 13 nt, Human herpesvirus 4 (Epstein-Barr virus)
ugggaaaaugggc

SEQ ID NO: 310509 - RNA, 18 nt, Human herpesvirus 4 (Epstein-Barr virus)
ugggaauaacaagggaag

SEQ ID NO: 310510 - RNA, 19 nt, Human herpesvirus 4 (Epstein-Barr virus)
ugggaccggggccuuggca

SEQ ID NO: 310511 - RNA, 16 nt, Human herpesvirus 4 (Epstein-Barr virus)
ugggaccuacaggaca

SEQ ID NO: 310512 - RNA, 16 nt, Human herpesvirus 4 (Epstein-Barr virus)
ugggacugggaggccg

SEQ ID NO: 310513 - RNA, 12 nt, Human herpesvirus 4 (Epstein-Barr virus)
ugggacuugaag

SEQ ID NO: 310514 - RNA, 13 nt, Human herpesvirus 4 (Epstein-Barr virus)
ugggcaugcugua

SEQ ID NO: 310515 - RNA, 13 nt, Human herpesvirus 4 (Epstein-Barr virus)
ugggccaggucac

SEQ ID NO: 310516 - RNA, 20 nt, Human herpesvirus 4 (Epstein-Barr virus)
ugggccucuaaguacagguc

SEQ ID NO: 310517 - RNA, 21 nt, Human herpesvirus 4 (Epstein-Barr virus)
ugggccuuggacucgggguga

SEQ ID NO: 310518 - RNA, 15 nt, Human herpesvirus 4 (Epstein-Barr virus)
ugggcugacacagac

SEQ ID NO: 310519 - RNA, 13 nt, Human herpesvirus 4 (Epstein-Barr virus)
ugggcugugguaa

SEQ ID NO: 310520 - RNA, 13 nt, Human herpesvirus 4 (Epstein-Barr virus)
uggggacaaagag

SEQ ID NO: 310521 - RNA, 18 nt, Human herpesvirus 4 (Epstein-Barr virus)
ugggggaaaccugcgaaa

SEQ ID NO: 310522 - RNA, 15 nt, Human herpesvirus 4 (Epstein-Barr virus)
ugggggacucuucua

SEQ ID NO: 310523 - RNA, 17 nt, Human herpesvirus 4 (Epstein-Barr virus)
ugggggccugugucuuc

SEQ ID NO: 310524 - RNA, 22 nt, Human herpesvirus 4 (Epstein-Barr virus)
ugggggcuguagaaggagguga

SEQ ID NO: 310525 - RNA, 20 nt, Human herpesvirus 4 (Epstein-Barr virus)
uggggggugacgaggaugga

SEQ ID NO: 310526 - RNA, 17 nt, Human herpesvirus 4 (Epstein-Barr virus)
ugggggugggugcaaga

SEQ ID NO: 310527 - RNA, 13 nt, Human herpesvirus 4 (Epstein-Barr virus)
ugggggugguggg

SEQ ID NO: 310528 - RNA, 20 nt, Human herpesvirus 4 (Epstein-Barr virus)
ugggggugucaacaaagaac

SEQ ID NO: 310529 - RNA, 17 nt, Human herpesvirus 4 (Epstein-Barr virus)
ugggguccggucuugca

SEQ ID NO: 310530 - RNA, 18 nt, Human herpesvirus 4 (Epstein-Barr virus)
ugggguccggucuugcag

SEQ ID NO: 310531 - RNA, 13 nt, Human herpesvirus 4 (Epstein-Barr virus)
uggggucucaggc

SEQ ID NO: 310532 - RNA, 18 nt, Human herpesvirus 4 (Epstein-Barr virus)
ugggugaccacugaggga

SEQ ID NO: 310533 - RNA, 16 nt, Human herpesvirus 4 (Epstein-Barr virus)
ugguauccaccuagaa

SEQ ID NO: 310534 - RNA, 14 nt, Human herpesvirus 4 (Epstein-Barr virus)
uggucaagguguca

SEQ ID NO: 310535 - RNA, 20 nt, Human herpesvirus 4 (Epstein-Barr virus)
uggucaccgcgaccaagacu

SEQ ID NO: 310536 - RNA, 19 nt, Human herpesvirus 4 (Epstein-Barr virus)
uggucauggccagcuuuga

SEQ ID NO: 310537 - RNA, 16 nt, Human herpesvirus 4 (Epstein-Barr virus)
uggucguguucccuca

SEQ ID NO: 310538 - RNA, 18 nt, Human herpesvirus 4 (Epstein-Barr virus)
ugguguagacagauccca

SEQ ID NO: 310539 - RNA, 19 nt, Human herpesvirus 4 (Epstein-Barr virus)
uggugucuguaaucucuaa

SEQ ID NO: 310540 - RNA, 17 nt, Human herpesvirus 4 (Epstein-Barr virus)
ugguguugcaguaugua

SEQ ID NO: 310541 - RNA, 19 nt, Human herpesvirus 4 (Epstein-Barr virus)
uguaacaagaacugggaug

SEQ ID NO: 310542 - RNA, 18 nt, Human herpesvirus 4 (Epstein-Barr virus)
uguaacugugguuuccau

SEQ ID NO: 310543 - RNA, 13 nt, Human herpesvirus 4 (Epstein-Barr virus)
uguacaagcuuuu

SEQ ID NO: 310544 - RNA, 20 nt, Human herpesvirus 4 (Epstein-Barr virus)
uguacauaauguaugccaug

SEQ ID NO: 310545 - RNA, 12 nt, Human herpesvirus 4 (Epstein-Barr virus)
uguacauacugc

SEQ ID NO: 310546 - RNA, 17 nt, Human herpesvirus 4 (Epstein-Barr virus)
uguaccugaugagucac

SEQ ID NO: 310547 - RNA, 13 nt, Human herpesvirus 4 (Epstein-Barr virus)
uguacgugccuca

SEQ ID NO: 310548 - RNA, 17 nt, Human herpesvirus 4 (Epstein-Barr virus)
uguacgugccucagaua

SEQ ID NO: 310549 - RNA, 23 nt, Human herpesvirus 4 (Epstein-Barr virus)
uguacugcgaugagggccuucca

SEQ ID NO: 310550 - RNA, 19 nt, Human herpesvirus 4 (Epstein-Barr virus)
uguacuucuucucugcucg

SEQ ID NO: 310551 - RNA, 14 nt, Human herpesvirus 4 (Epstein-Barr virus)
uguagacagauccc

SEQ ID NO: 310552 - RNA, 20 nt, Human herpesvirus 4 (Epstein-Barr virus)
uguaguggccuucucugaug

SEQ ID NO: 310553 - RNA, 17 nt, Human herpesvirus 4 (Epstein-Barr virus)
uguaugccuuggcauga

SEQ ID NO: 310554 - RNA, 14 nt, Human herpesvirus 4 (Epstein-Barr virus)
uguauuaccaugga

SEQ ID NO: 310555 - RNA, 20 nt, Human herpesvirus 4 (Epstein-Barr virus)
uguauugcucucguugccaa

SEQ ID NO: 310556 - RNA, 22 nt, Human herpesvirus 4 (Epstein-Barr virus)
uguauugcucucguugccaaaa

SEQ ID NO: 310557 - RNA, 20 nt, Human herpesvirus 4 (Epstein-Barr virus)
ugucaacaaagaacuuugac

SEQ ID NO: 310558 - RNA, 14 nt, Human herpesvirus 4 (Epstein-Barr virus)
ugucaauaauuuca

SEQ ID NO: 310559 - RNA, 11 nt, Human herpesvirus 4 (Epstein-Barr virus)
ugucacugaga

SEQ ID NO: 310560 - RNA, 21 nt, Human herpesvirus 4 (Epstein-Barr virus)
ugucagaccugaagacuguug

SEQ ID NO: 310561 - RNA, 14 nt, Human herpesvirus 4 (Epstein-Barr virus)
ugucauucuaucaa

SEQ ID NO: 310562 - RNA, 17 nt, Human herpesvirus 4 (Epstein-Barr virus)
ugucauuuagaaaccuu

SEQ ID NO: 310563 - RNA, 16 nt, Human herpesvirus 4 (Epstein-Barr virus)
uucucagagagcauuu

SEQ ID NO: 310564 - RNA, 17 nt, Human herpesvirus 4 (Epstein-Barr virus)
uucucauaauggugccu

SEQ ID NO: 310565 - RNA, 21 nt, Human herpesvirus 4 (Epstein-Barr virus)
uucucguagagaucaggccaa

SEQ ID NO: 310566 - RNA, 15 nt, Human herpesvirus 4 (Epstein-Barr virus)
uucucguccaucucg

SEQ ID NO: 310567 - RNA, 22 nt, Human herpesvirus 4 (Epstein-Barr virus)
uucucgugcaagcagcaccugu

SEQ ID NO: 310568 - RNA, 18 nt, Human herpesvirus 4 (Epstein-Barr virus)
uucucuaacuguguccca

SEQ ID NO: 310569 - RNA, 22 nt, Human herpesvirus 4 (Epstein-Barr virus)
uucugagcaccaacacaaccac

SEQ ID NO: 310570 - RNA, 18 nt, Human herpesvirus 4 (Epstein-Barr virus)
uucugcccccugucucuu

SEQ ID NO: 310571 - RNA, 19 nt, Human herpesvirus 4 (Epstein-Barr virus)
uucugcccccugucucuuu

SEQ ID NO: 310572 - RNA, 16 nt, Human herpesvirus 4 (Epstein-Barr virus)
uucuggcacgacuguu

SEQ ID NO: 310573 - RNA, 10 nt, Human herpesvirus 4 (Epstein-Barr virus)
uucuggccaa

SEQ ID NO: 310574 - RNA, 17 nt, Human herpesvirus 4 (Epstein-Barr virus)
uucuuccaauccgaaag

SEQ ID NO: 310575 - RNA, 21 nt, Human herpesvirus 4 (Epstein-Barr virus)
uucuuccuagccuucuuccua

SEQ ID NO: 310576 - RNA, 18 nt, Human herpesvirus 4 (Epstein-Barr virus)
uucuuuaucuccauccug

SEQ ID NO: 310577 - RNA, 15 nt, Human herpesvirus 4 (Epstein-Barr virus)
uucuuuugcucuuaa

SEQ ID NO: 310578 - RNA, 12 nt, Human herpesvirus 4 (Epstein-Barr virus)
uugaacgugugc

SEQ ID NO: 310579 - RNA, 17 nt, Human herpesvirus 4 (Epstein-Barr virus)
uugacaugagcauggaa

SEQ ID NO: 310580 - RNA, 23 nt, Human herpesvirus 4 (Epstein-Barr virus)
uugacaugagcauggaagacaug

SEQ ID NO: 310581 - RNA, 23 nt, Human herpesvirus 4 (Epstein-Barr virus)
uugaccuugauguacuuuccuag

SEQ ID NO: 310582 - RNA, 20 nt, Human herpesvirus 4 (Epstein-Barr virus)
uugagaaucugggcugggac

SEQ ID NO: 310583 - RNA, 14 nt, Human herpesvirus 4 (Epstein-Barr virus)
uugaggcaaaagac

SEQ ID NO: 310584 - RNA, 13 nt, Human herpesvirus 4 (Epstein-Barr virus)
uugaguaagcaug

SEQ ID NO: 310585 - RNA, 22 nt, Human herpesvirus 4 (Epstein-Barr virus)
uugaucacuacuacaccgagca

SEQ ID NO: 310586 - RNA, 15 nt, Human herpesvirus 4 (Epstein-Barr virus)
uugaugugacuugug

SEQ ID NO: 310587 - RNA, 14 nt, Human herpesvirus 4 (Epstein-Barr virus)
uugccaaccugcuc

SEQ ID NO: 310588 - RNA, 15 nt, Human herpesvirus 4 (Epstein-Barr virus)
uugccaaugacccac

SEQ ID NO: 310589 - RNA, 22 nt, Human herpesvirus 4 (Epstein-Barr virus)
uugccacauguuuucuggacac

SEQ ID NO: 310590 - RNA, 14 nt, Human herpesvirus 4 (Epstein-Barr virus)
uugccuuuuugcca

SEQ ID NO: 310591 - RNA, 19 nt, Human herpesvirus 4 (Epstein-Barr virus)
uugccuuuuugccacaugu

SEQ ID NO: 310592 - RNA, 13 nt, Human herpesvirus 4 (Epstein-Barr virus)
uugcuaauguacc

SEQ ID NO: 310593 - RNA, 17 nt, Human herpesvirus 4 (Epstein-Barr virus)
uugcuaauguaccucau

SEQ ID NO: 310594 - RNA, 18 nt, Human herpesvirus 4 (Epstein-Barr virus)
uugcuccaccagcuucuc

SEQ ID NO: 310595 - RNA, 15 nt, Human herpesvirus 4 (Epstein-Barr virus)
uugcucucguugcca

SEQ ID NO: 310596 - RNA, 18 nt, Human herpesvirus 4 (Epstein-Barr virus)
uuggacacccacccugca

SEQ ID NO: 310597 - RNA, 17 nt, Human herpesvirus 4 (Epstein-Barr virus)
uuggacaucuaguggca

SEQ ID NO: 310598 - RNA, 15 nt, Human herpesvirus 4 (Epstein-Barr virus)
uuggagaaaacgggg

SEQ ID NO: 310599 - RNA, 17 nt, Human herpesvirus 4 (Epstein-Barr virus)
uuggagucgaagcucuu

SEQ ID NO: 310600 - RNA, 14 nt, Human herpesvirus 4 (Epstein-Barr virus)
uuggaguuuuacaa

SEQ ID NO: 310601 - RNA, 20 nt, Human herpesvirus 4 (Epstein-Barr virus)
uuggcauuggcgucaggaga

SEQ ID NO: 310602 - RNA, 16 nt, Human herpesvirus 4 (Epstein-Barr virus)
uuggcgggacuggcac

SEQ ID NO: 310603 - RNA, 14 nt, Human herpesvirus 4 (Epstein-Barr virus)
uuggcuauggucau

SEQ ID NO: 310604 - RNA, 22 nt, Human herpesvirus 4 (Epstein-Barr virus)
uugggcauacccauguugucac

SEQ ID NO: 310605 - RNA, 21 nt, Human herpesvirus 4 (Epstein-Barr virus)
uugguguauuucuggccaucu

SEQ ID NO: 310606 - RNA, 17 nt, Human herpesvirus 4 (Epstein-Barr virus)
uuguaaagcgacggguc

SEQ ID NO: 310607 - RNA, 18 nt, Human herpesvirus 4 (Epstein-Barr virus)
uugucaccauuuucgucc

SEQ ID NO: 310608 - RNA, 10 nt, Human herpesvirus 4 (Epstein-Barr virus)
uuguccagga

SEQ ID NO: 310609 - RNA, 21 nt, Human herpesvirus 4 (Epstein-Barr virus)
uugucuccccucugcagagag

SEQ ID NO: 310610 - RNA, 17 nt, Human herpesvirus 4 (Epstein-Barr virus)
uugucuuccacaccauc

SEQ ID NO: 310611 - RNA, 19 nt, Human herpesvirus 4 (Epstein-Barr virus)
uuguguccuguaugguauu

SEQ ID NO: 310612 - RNA, 21 nt, Human herpesvirus 4 (Epstein-Barr virus)
uuguugcgagaaaaugagcca

SEQ ID NO: 310613 - RNA, 14 nt, Human herpesvirus 4 (Epstein-Barr virus)
uuguuuacaucugc

SEQ ID NO: 310614 - RNA, 15 nt, Human herpesvirus 4 (Epstein-Barr virus)
uuuaagcagcacuga

SEQ ID NO: 310615 - RNA, 18 nt, Human herpesvirus 4 (Epstein-Barr virus)
uuuaaugugggacuggga

SEQ ID NO: 310616 - RNA, 22 nt, Human herpesvirus 4 (Epstein-Barr virus)
uuuaauucucuucuguuugcau

SEQ ID NO: 310617 - RNA, 11 nt, Human herpesvirus 4 (Epstein-Barr virus)
uuuaccaccuc

SEQ ID NO: 310618 - RNA, 16 nt, Human herpesvirus 4 (Epstein-Barr virus)
uuuaccgccaucgcac

SEQ ID NO: 310619 - RNA, 17 nt, Human herpesvirus 4 (Epstein-Barr virus)
uuuacgguuagugugcc

SEQ ID NO: 310620 - RNA, 19 nt, Human herpesvirus 4 (Epstein-Barr virus)
uuuagaaaccuugccuacg

SEQ ID NO: 310621 - RNA, 15 nt, Human herpesvirus 4 (Epstein-Barr virus)
uuuagaaacuaugca

SEQ ID NO: 310622 - RNA, 17 nt, Human herpesvirus 4 (Epstein-Barr virus)
uuuagagacacuaucac

SEQ ID NO: 310623 - RNA, 20 nt, Human herpesvirus 4 (Epstein-Barr virus)
uuuauuaauaaagugcauac

SEQ ID NO: 310624 - RNA, 20 nt, Human herpesvirus 4 (Epstein-Barr virus)
uuucaagagcugaaccagaa

SEQ ID NO: 310625 - RNA, 22 nt, Human herpesvirus 4 (Epstein-Barr virus)
uuucaguucuggugaugcuugu

SEQ ID NO: 310626 - RNA, 19 nt, Human herpesvirus 4 (Epstein-Barr virus)
uuuccuaagaccuaauaaa

SEQ ID NO: 310627 - RNA, 17 nt, Human herpesvirus 4 (Epstein-Barr virus)
uuucucauaauggugcc

SEQ ID NO: 310628 - RNA, 19 nt, Human herpesvirus 4 (Epstein-Barr virus)
uuucucauaauggugccug

SEQ ID NO: 310629 - RNA, 18 nt, Human herpesvirus 4 (Epstein-Barr virus)
uuucugcccccugucucu

SEQ ID NO: 310630 - RNA, 16 nt, Human herpesvirus 4 (Epstein-Barr virus)
uuucuggccaaccugc

SEQ ID NO: 310631 - RNA, 11 nt, Human herpesvirus 4 (Epstein-Barr virus)
uuugaccuguu

SEQ ID NO: 310632 - RNA, 14 nt, Human herpesvirus 4 (Epstein-Barr virus)
uuugauugagauca

SEQ ID NO: 310633 - RNA, 13 nt, Human herpesvirus 4 (Epstein-Barr virus)
uuugcaauauauu

SEQ ID NO: 310634 - RNA, 18 nt, Human herpesvirus 4 (Epstein-Barr virus)
uuugccaaccugcucucu

SEQ ID NO: 310635 - RNA, 12 nt, Human herpesvirus 4 (Epstein-Barr virus)
uuugcugaagau

SEQ ID NO: 310636 - RNA, 11 nt, Human herpesvirus 4 (Epstein-Barr virus)
uuugggaacac

SEQ ID NO: 310637 - RNA, 16 nt, Human herpesvirus 4 (Epstein-Barr virus)
uuuguccagcagggcc

SEQ ID NO: 310638 - RNA, 21 nt, Human herpesvirus 4 (Epstein-Barr virus)
uuuguggccuuccucugccug

SEQ ID NO: 310639 - RNA, 12 nt, Human herpesvirus 4 (Epstein-Barr virus)
uuugugugccuc

SEQ ID NO: 310640 - RNA, 16 nt, Human herpesvirus 4 (Epstein-Barr virus)
uuuuaaucuggaugua

SEQ ID NO: 310641 - RNA, 21 nt, Human herpesvirus 4 (Epstein-Barr virus)
uuuuacagugguucuccugau

SEQ ID NO: 310642 - RNA, 13 nt, Human herpesvirus 4 (Epstein-Barr virus)
uuuuaccccaguc

SEQ ID NO: 310643 - RNA, 13 nt, Human herpesvirus 4 (Epstein-Barr virus)
uuuugugugccuc

SEQ ID NO: 310644 - RNA, 18 nt, Human herpesvirus 4 (Epstein-Barr virus)
uuuugugugccuccucaa

SEQ ID NO: 310645 - RNA, 15 nt, Human herpesvirus 4 (Epstein-Barr virus)
uuuuucggaucccag

SEQ ID NO: 310646 - RNA, 23 nt, Human herpesvirus 4 (Epstein-Barr virus)
uuuuugccaaugacccacuccag

SEQ ID NO: 310647 - RNA, 19 nt, Human herpesvirus 4 (Epstein-Barr virus)
aaaugaggaacggugauua

SEQ ID NO: 310648 - RNA, 11 nt, Human herpesvirus 4 (Epstein-Barr virus)
aaaugaugaau

SEQ ID NO: 310649 - RNA, 23 nt, Human herpesvirus 4 (Epstein-Barr virus)
aaaugcaccuugacuguaaucac

SEQ ID NO: 310650 - RNA, 18 nt, Human herpesvirus 4 (Epstein-Barr virus)
aaaugcgccgucauucca

SEQ ID NO: 310651 - RNA, 16 nt, Human herpesvirus 4 (Epstein-Barr virus)
aaauucuccugccugc

SEQ ID NO: 310652 - RNA, 18 nt, Human herpesvirus 4 (Epstein-Barr virus)
aaauuugcugacauaugu

SEQ ID NO: 310653 - RNA, 20 nt, Human herpesvirus 4 (Epstein-Barr virus)
aaauuuuuauugacuuuaua

SEQ ID NO: 310654 - RNA, 19 nt, Human herpesvirus 4 (Epstein-Barr virus)
aacaagaacugggaugaac

SEQ ID NO: 310655 - RNA, 21 nt, Human herpesvirus 4 (Epstein-Barr virus)
aacaagcuaccgaugauucug

SEQ ID NO: 310656 - RNA, 17 nt, Human herpesvirus 4 (Epstein-Barr virus)
aacaaggagugccucug

SEQ ID NO: 310657 - RNA, 15 nt, Human herpesvirus 4 (Epstein-Barr virus)
aacaaggccaagaag

SEQ ID NO: 310658 - RNA, 18 nt, Human herpesvirus 4 (Epstein-Barr virus)
aacacaaccacggugaca

SEQ ID NO: 310659 - RNA, 21 nt, Human herpesvirus 4 (Epstein-Barr virus)
aacacagacugcgaucuggac

SEQ ID NO: 310660 - RNA, 15 nt, Human herpesvirus 4 (Epstein-Barr virus)
aacacagcucuggca

SEQ ID NO: 310661 - RNA, 20 nt, Human herpesvirus 4 (Epstein-Barr virus)
aacacagcucuggcaguuau

SEQ ID NO: 310662 - RNA, 18 nt, Human herpesvirus 4 (Epstein-Barr virus)
aacacggucuggucacua

SEQ ID NO: 310663 - RNA, 19 nt, Human herpesvirus 4 (Epstein-Barr virus)
aacacggucuggucacuaa

SEQ ID NO: 310664 - RNA, 17 nt, Human herpesvirus 4 (Epstein-Barr virus)
aacacucuuuuuucaac

SEQ ID NO: 310665 - RNA, 21 nt, Human herpesvirus 4 (Epstein-Barr virus)
aacagcauccuuuauaugaaa

SEQ ID NO: 310666 - RNA, 13 nt, Human herpesvirus 4 (Epstein-Barr virus)
aacaggagcagga

SEQ ID NO: 310667 - RNA, 16 nt, Human herpesvirus 4 (Epstein-Barr virus)
aacaggcugcugaaaa

SEQ ID NO: 310668 - RNA, 16 nt, Human herpesvirus 4 (Epstein-Barr virus)
aacaggugggacaaaa

SEQ ID NO: 310669 - RNA, 14 nt, Human herpesvirus 4 (Epstein-Barr virus)
aacaucacugccac

SEQ ID NO: 310670 - RNA, 21 nt, Human herpesvirus 4 (Epstein-Barr virus)
aacaugagaaaauacuucucu

SEQ ID NO: 310671 - RNA, 15 nt, Human herpesvirus 4 (Epstein-Barr virus)
aacaugcucuuugau

SEQ ID NO: 310672 - RNA, 15 nt, Human herpesvirus 4 (Epstein-Barr virus)
aaccacaacugcuau

SEQ ID NO: 310673 - RNA, 16 nt, Human herpesvirus 4 (Epstein-Barr virus)
aaccagcuggucauca

SEQ ID NO: 310674 - RNA, 14 nt, Human herpesvirus 4 (Epstein-Barr virus)
aaccauggacgagg

SEQ ID NO: 310675 - RNA, 14 nt, Human herpesvirus 4 (Epstein-Barr virus)
aacccaacaaugug

SEQ ID NO: 310676 - RNA, 18 nt, Human herpesvirus 4 (Epstein-Barr virus)
aacccaccgcaaccgcug

SEQ ID NO: 310677 - RNA, 14 nt, Human herpesvirus 4 (Epstein-Barr virus)
aacccuguagucac

SEQ ID NO: 310678 - RNA, 14 nt, Human herpesvirus 4 (Epstein-Barr virus)
aaccggugggcucg

SEQ ID NO: 310679 - RNA, 16 nt, Human herpesvirus 4 (Epstein-Barr virus)
aaccuaauuacauggu

SEQ ID NO: 310680 - RNA, 17 nt, Human herpesvirus 4 (Epstein-Barr virus)
aaccuaauuacauggua

SEQ ID NO: 310681 - RNA, 12 nt, Human herpesvirus 4 (Epstein-Barr virus)
aaccuacaugaa

SEQ ID NO: 310682 - RNA, 15 nt, Human herpesvirus 4 (Epstein-Barr virus)
aaccugccucucuua

SEQ ID NO: 310683 - RNA, 14 nt, Human herpesvirus 4 (Epstein-Barr virus)
aacgagcccaaacu

SEQ ID NO: 310684 - RNA, 23 nt, Human herpesvirus 4 (Epstein-Barr virus)
aacgcagucuuagguaucuggau

SEQ ID NO: 310685 - RNA, 21 nt, Human herpesvirus 4 (Epstein-Barr virus)
aacggguggaagcauggggga

SEQ ID NO: 310686 - RNA, 13 nt, Human herpesvirus 4 (Epstein-Barr virus)
aacgugauggugc

SEQ ID NO: 310687 - RNA, 14 nt, Human herpesvirus 4 (Epstein-Barr virus)
aacuaagcuuauga

SEQ ID NO: 310688 - RNA, 17 nt, Human herpesvirus 4 (Epstein-Barr virus)
aacuacccgcaaugaaa

SEQ ID NO: 310689 - RNA, 19 nt, Human herpesvirus 4 (Epstein-Barr virus)
aacucacuaaacauugcac

SEQ ID NO: 310690 - RNA, 15 nt, Human herpesvirus 4 (Epstein-Barr virus)
aacucagccccaucu

SEQ ID NO: 310691 - RNA, 19 nt, Human herpesvirus 4 (Epstein-Barr virus)
aacucagccccaucuucca

SEQ ID NO: 310692 - RNA, 18 nt, Human herpesvirus 4 (Epstein-Barr virus)
aacugagaacagucauca

SEQ ID NO: 310693 - RNA, 17 nt, Human herpesvirus 4 (Epstein-Barr virus)
aacugcuauucugagca

SEQ ID NO: 310694 - RNA, 15 nt, Human herpesvirus 4 (Epstein-Barr virus)
aacuggucaccagcu

SEQ ID NO: 310695 - RNA, 16 nt, Human herpesvirus 4 (Epstein-Barr virus)
aacuggucaccagcuu

SEQ ID NO: 310696 - RNA, 16 nt, Human herpesvirus 4 (Epstein-Barr virus)
aacugguggacucuau

SEQ ID NO: 310697 - RNA, 13 nt, Human herpesvirus 4 (Epstein-Barr virus)
aacugugccaugg

SEQ ID NO: 310698 - RNA, 15 nt, Human herpesvirus 4 (Epstein-Barr virus)
aacugugguuuccau

SEQ ID NO: 310699 - RNA, 18 nt, Human herpesvirus 4 (Epstein-Barr virus)
aacuuccaacgcauccac

SEQ ID NO: 310700 - RNA, 22 nt, Human herpesvirus 4 (Epstein-Barr virus)
aacuuccaacgcauccaccauc

SEQ ID NO: 310701 - RNA, 23 nt, Human herpesvirus 4 (Epstein-Barr virus)
aacuuccaacgcauccaccauca

SEQ ID NO: 310702 - RNA, 16 nt, Human herpesvirus 4 (Epstein-Barr virus)
aacuuggaggcugcua

SEQ ID NO: 310703 - RNA, 14 nt, Human herpesvirus 4 (Epstein-Barr virus)
aacuuuaacauuga

SEQ ID NO: 310704 - RNA, 15 nt, Human herpesvirus 4 (Epstein-Barr virus)
aacuuuaacauugau

SEQ ID NO: 310705 - RNA, 15 nt, Human herpesvirus 4 (Epstein-Barr virus)
aagaagauugaagac

SEQ ID NO: 310706 - RNA, 13 nt, Human herpesvirus 4 (Epstein-Barr virus)
aagacagucacau

SEQ ID NO: 310707 - RNA, 16 nt, Human herpesvirus 4 (Epstein-Barr virus)
aagacagucacauugc

SEQ ID NO: 310708 - RNA, 11 nt, Human herpesvirus 4 (Epstein-Barr virus)
aagaccaggag

SEQ ID NO: 310709 - RNA, 15 nt, Human herpesvirus 4 (Epstein-Barr virus)
aagacgucugguacc

SEQ ID NO: 310710 - RNA, 23 nt, Human herpesvirus 4 (Epstein-Barr virus)
aagagggaaaagagacugcgaaa

SEQ ID NO: 310711 - RNA, 13 nt, Human herpesvirus 4 (Epstein-Barr virus)
aagaguaccccag

SEQ ID NO: 310712 - RNA, 15 nt, Human herpesvirus 4 (Epstein-Barr virus)
aagagucccuccuca

SEQ ID NO: 310713 - RNA, 17 nt, Human herpesvirus 4 (Epstein-Barr virus)
aagagucucgccaucua

SEQ ID NO: 310714 - RNA, 21 nt, Human herpesvirus 4 (Epstein-Barr virus)
aagagucucgccaucuaccca

SEQ ID NO: 310715 - RNA, 23 nt, Human herpesvirus 4 (Epstein-Barr virus)
aagauaaagauggcugccucuca

SEQ ID NO: 310716 - RNA, 21 nt, Human herpesvirus 4 (Epstein-Barr virus)
aagauccuucuggcacgacug

SEQ ID NO: 310717 - RNA, 20 nt, Human herpesvirus 4 (Epstein-Barr virus)
aagauggcgugguccacgag

SEQ ID NO: 310718 - RNA, 16 nt, Human herpesvirus 4 (Epstein-Barr virus)
aagauugucacagcug

SEQ ID NO: 310719 - RNA, 22 nt, Human herpesvirus 4 (Epstein-Barr virus)
aagcaacccccggcucucaggc

SEQ ID NO: 310720 - RNA, 13 nt, Human herpesvirus 4 (Epstein-Barr virus)
aagcagcacugaa

SEQ ID NO: 310721 - RNA, 17 nt, Human herpesvirus 4 (Epstein-Barr virus)
aagcagcuccgcccuca

SEQ ID NO: 310722 - RNA, 23 nt, Human herpesvirus 4 (Epstein-Barr virus)
aagccacucguccgccuacuggu

SEQ ID NO: 310723 - RNA, 14 nt, Human herpesvirus 4 (Epstein-Barr virus)
aagcggcacagauu

SEQ ID NO: 310724 - RNA, 16 nt, Human herpesvirus 4 (Epstein-Barr virus)
aagcgggccugagucc

SEQ ID NO: 310725 - RNA, 19 nt, Human herpesvirus 4 (Epstein-Barr virus)
aagcggucucagacaccaa

SEQ ID NO: 310726 - RNA, 23 nt, Human herpesvirus 4 (Epstein-Barr virus)
aagcguuggaugcaguccuccgc

SEQ ID NO: 310727 - RNA, 17 nt, Human herpesvirus 4 (Epstein-Barr virus)
aagcuccuuugccuugu

SEQ ID NO: 310728 - RNA, 17 nt, Human herpesvirus 4 (Epstein-Barr virus)
aagcugccgcgauguac

SEQ ID NO: 310729 - RNA, 17 nt, Human herpesvirus 4 (Epstein-Barr virus)
aaggaaugaacacucau

SEQ ID NO: 310730 - RNA, 18 nt, Human herpesvirus 4 (Epstein-Barr virus)
aaggacgggggugggcac

SEQ ID NO: 310731 - RNA, 23 nt, Human herpesvirus 4 (Epstein-Barr virus)
aaggcgugggugucagaccugaa

SEQ ID NO: 310732 - RNA, 20 nt, Human herpesvirus 4 (Epstein-Barr virus)
aaggcuggcaaagaucccca

SEQ ID NO: 310733 - RNA, 12 nt, Human herpesvirus 4 (Epstein-Barr virus)
aaggcuugccaa

SEQ ID NO: 310734 - RNA, 13 nt, Human herpesvirus 4 (Epstein-Barr virus)
aaggcuugccaaa

SEQ ID NO: 310735 - RNA, 17 nt, Human herpesvirus 4 (Epstein-Barr virus)
acuuauuggagaugcuc

SEQ ID NO: 310736 - RNA, 23 nt, Human herpesvirus 4 (Epstein-Barr virus)
acuuauuggagaugcucuggcga

SEQ ID NO: 310737 - RNA, 13 nt, Human herpesvirus 4 (Epstein-Barr virus)
acuuccucugcuu

SEQ ID NO: 310738 - RNA, 16 nt, Human herpesvirus 4 (Epstein-Barr virus)
acuucuucucugcucg

SEQ ID NO: 310739 - RNA, 15 nt, Human herpesvirus 4 (Epstein-Barr virus)
acuucuuuugcucuu

SEQ ID NO: 310740 - RNA, 21 nt, Human herpesvirus 4 (Epstein-Barr virus)
acuuggccuuggggguggugg

SEQ ID NO: 310741 - RNA, 11 nt, Human herpesvirus 4 (Epstein-Barr virus)
acuugugaugc

SEQ ID NO: 310742 - RNA, 23 nt, Human herpesvirus 4 (Epstein-Barr virus)
acuuuccuagaaacugugccaug

SEQ ID NO: 310743 - RNA, 15 nt, Human herpesvirus 4 (Epstein-Barr virus)
acuuugagcugggca

SEQ ID NO: 310744 - RNA, 17 nt, Human herpesvirus 4 (Epstein-Barr virus)
acuuuguuuagggacag

SEQ ID NO: 310745 - RNA, 17 nt, Human herpesvirus 4 (Epstein-Barr virus)
agaaaaugagccaugac

SEQ ID NO: 310746 - RNA, 14 nt, Human herpesvirus 4 (Epstein-Barr virus)
agaaaguaaccaca

SEQ ID NO: 310747 - RNA, 13 nt, Human herpesvirus 4 (Epstein-Barr virus)
agaaauccagcuu

SEQ ID NO: 310748 - RNA, 20 nt, Human herpesvirus 4 (Epstein-Barr virus)
agaaaugcgccgucauucca

SEQ ID NO: 310749 - RNA, 19 nt, Human herpesvirus 4 (Epstein-Barr virus)
agaaauugggugaccacug

SEQ ID NO: 310750 - RNA, 12 nt, Human herpesvirus 4 (Epstein-Barr virus)
agaaauuugcac

SEQ ID NO: 310751 - RNA, 13 nt, Human herpesvirus 4 (Epstein-Barr virus)
agaaauuugcacu

SEQ ID NO: 310752 - RNA, 18 nt, Human herpesvirus 4 (Epstein-Barr virus)
agaacacuccacagaugg

SEQ ID NO: 310753 - RNA, 14 nt, Human herpesvirus 4 (Epstein-Barr virus)
agaaccugcugcua

SEQ ID NO: 310754 - RNA, 18 nt, Human herpesvirus 4 (Epstein-Barr virus)
agaacugacgcuccagga

SEQ ID NO: 310755 - RNA, 17 nt, Human herpesvirus 4 (Epstein-Barr virus)
agaagucggccacaggg

SEQ ID NO: 310756 - RNA, 17 nt, Human herpesvirus 4 (Epstein-Barr virus)
agaaguggaaacccuca

SEQ ID NO: 310757 - RNA, 15 nt, Human herpesvirus 4 (Epstein-Barr virus)
agaaguugguggugg

SEQ ID NO: 310758 - RNA, 20 nt, Human herpesvirus 4 (Epstein-Barr virus)
agaauacccugcauggccag

SEQ ID NO: 310759 - RNA, 12 nt, Human herpesvirus 4 (Epstein-Barr virus)
agaaugugguaa

SEQ ID NO: 310760 - RNA, 23 nt, Human herpesvirus 4 (Epstein-Barr virus)
agaauuggggcugggaauggaga

SEQ ID NO: 310761 - RNA, 19 nt, Human herpesvirus 4 (Epstein-Barr virus)
agacacccacggaagcccu

SEQ ID NO: 310762 - RNA, 14 nt, Human herpesvirus 4 (Epstein-Barr virus)
agacaccuggccca

SEQ ID NO: 310763 - RNA, 21 nt, Human herpesvirus 4 (Epstein-Barr virus)
agacacggcucugucaguuau

SEQ ID NO: 310764 - RNA, 13 nt, Human herpesvirus 4 (Epstein-Barr virus)
agacagaaauugg

SEQ ID NO: 310765 - RNA, 22 nt, Human herpesvirus 4 (Epstein-Barr virus)
agacaguacucggcuagccuga

SEQ ID NO: 310766 - RNA, 20 nt, Human herpesvirus 4 (Epstein-Barr virus)
agaccccugggcucucagga

SEQ ID NO: 310767 - RNA, 14 nt, Human herpesvirus 4 (Epstein-Barr virus)
agacccggggcccc

SEQ ID NO: 310768 - RNA, 22 nt, Human herpesvirus 4 (Epstein-Barr virus)
agaccuauguauaaagucaaua

SEQ ID NO: 310769 - RNA, 18 nt, Human herpesvirus 4 (Epstein-Barr virus)
agaccucauccugcucau

SEQ ID NO: 310770 - RNA, 13 nt, Human herpesvirus 4 (Epstein-Barr virus)
agacgagucugac

SEQ ID NO: 310771 - RNA, 15 nt, Human herpesvirus 4 (Epstein-Barr virus)
agacgcgauggcaca

SEQ ID NO: 310772 - RNA, 22 nt, Human herpesvirus 4 (Epstein-Barr virus)
agacuaccggcgagcaugauca

SEQ ID NO: 310773 - RNA, 13 nt, Human herpesvirus 4 (Epstein-Barr virus)
agacuacuaagcu

SEQ ID NO: 310774 - RNA, 15 nt, Human herpesvirus 4 (Epstein-Barr virus)
agacucaauuuccaa

SEQ ID NO: 310775 - RNA, 21 nt, Human herpesvirus 4 (Epstein-Barr virus)
agacuucacagagcagcagcu

SEQ ID NO: 310776 - RNA, 22 nt, Human herpesvirus 4 (Epstein-Barr virus)
agacuuggccuuggggguggug

SEQ ID NO: 310777 - RNA, 12 nt, Human herpesvirus 4 (Epstein-Barr virus)
agagagccacau

SEQ ID NO: 310778 - RNA, 16 nt, Human herpesvirus 4 (Epstein-Barr virus)
agagaucuggggccaa

SEQ ID NO: 310779 - RNA, 19 nt, Human herpesvirus 4 (Epstein-Barr virus)
accuggagacuacuaagcu

SEQ ID NO: 310780 - RNA, 15 nt, Human herpesvirus 4 (Epstein-Barr virus)
accuggcucaggucc

SEQ ID NO: 310781 - RNA, 16 nt, Human herpesvirus 4 (Epstein-Barr virus)
accuggugagcaauca

SEQ ID NO: 310782 - RNA, 18 nt, Human herpesvirus 4 (Epstein-Barr virus)
accugguuaacagacuuc

SEQ ID NO: 310783 - RNA, 17 nt, Human herpesvirus 4 (Epstein-Barr virus)
accugucugauugcacc

SEQ ID NO: 310784 - RNA, 15 nt, Human herpesvirus 4 (Epstein-Barr virus)
accuguguaaccuca

SEQ ID NO: 310785 - RNA, 12 nt, Human herpesvirus 4 (Epstein-Barr virus)
accuuccacgac

SEQ ID NO: 310786 - RNA, 14 nt, Human herpesvirus 4 (Epstein-Barr virus)
accuucuccaucuc

SEQ ID NO: 310787 - RNA, 20 nt, Human herpesvirus 4 (Epstein-Barr virus)
accuugacuguaaucacugg

SEQ ID NO: 310788 - RNA, 21 nt, Human herpesvirus 4 (Epstein-Barr virus)
accuugaggugccacagagca

SEQ ID NO: 310789 - RNA, 17 nt, Human herpesvirus 4 (Epstein-Barr virus)
accuuggcaguguccuc

SEQ ID NO: 310790 - RNA, 15 nt, Human herpesvirus 4 (Epstein-Barr virus)
accuuggcgggucau

SEQ ID NO: 310791 - RNA, 16 nt, Human herpesvirus 4 (Epstein-Barr virus)
accuugggggcaaagc

SEQ ID NO: 310792 - RNA, 16 nt, Human herpesvirus 4 (Epstein-Barr virus)
accuuuuugccaauga

SEQ ID NO: 310793 - RNA, 18 nt, Human herpesvirus 4 (Epstein-Barr virus)
acgaagacccaucugagg

SEQ ID NO: 310794 - RNA, 13 nt, Human herpesvirus 4 (Epstein-Barr virus)
acgagagcaugcc

SEQ ID NO: 310795 - RNA, 16 nt, Human herpesvirus 4 (Epstein-Barr virus)
acgagcccaaacucuc

SEQ ID NO: 310796 - RNA, 16 nt, Human herpesvirus 4 (Epstein-Barr virus)
acgagcgcaucgucuc

SEQ ID NO: 310797 - RNA, 17 nt, Human herpesvirus 4 (Epstein-Barr virus)
acgagcgcaucgucucc

SEQ ID NO: 310798 - RNA, 19 nt, Human herpesvirus 4 (Epstein-Barr virus)
acgagcgcaucgucuccag

SEQ ID NO: 310799 - RNA, 15 nt, Human herpesvirus 4 (Epstein-Barr virus)
acgaggacggggaag

SEQ ID NO: 310800 - RNA, 22 nt, Human herpesvirus 4 (Epstein-Barr virus)
acgaggaggcggaagaccagga

SEQ ID NO: 310801 - RNA, 14 nt, Human herpesvirus 4 (Epstein-Barr virus)
acgaggaucccgca

SEQ ID NO: 310802 - RNA, 17 nt, Human herpesvirus 4 (Epstein-Barr virus)
acgagucugacuacagc

SEQ ID NO: 310803 - RNA, 11 nt, Human herpesvirus 4 (Epstein-Barr virus)
acgaugacucc

SEQ ID NO: 310804 - RNA, 15 nt, Human herpesvirus 4 (Epstein-Barr virus)
acgcagaaugugcag

SEQ ID NO: 310805 - RNA, 13 nt, Human herpesvirus 4 (Epstein-Barr virus)
acgcagaggccau

SEQ ID NO: 310806 - RNA, 14 nt, Human herpesvirus 4 (Epstein-Barr virus)
acgcagaggccauc

SEQ ID NO: 310807 - RNA, 16 nt, Human herpesvirus 4 (Epstein-Barr virus)
acgccaggcucgcuuu

SEQ ID NO: 310808 - RNA, 21 nt, Human herpesvirus 4 (Epstein-Barr virus)
acgccguggcccugagcaugg

SEQ ID NO: 310809 - RNA, 19 nt, Human herpesvirus 4 (Epstein-Barr virus)
acgccuuuuuccuagcuua

SEQ ID NO: 310810 - RNA, 14 nt, Human herpesvirus 4 (Epstein-Barr virus)
acgcgcuaccuccu

SEQ ID NO: 310811 - RNA, 18 nt, Human herpesvirus 4 (Epstein-Barr virus)
acggcaccgucagccaca

SEQ ID NO: 310812 - RNA, 15 nt, Human herpesvirus 4 (Epstein-Barr virus)
acggcaugccuaaug

SEQ ID NO: 310813 - RNA, 23 nt, Human herpesvirus 4 (Epstein-Barr virus)
acggccuagccaucggggcacgu

SEQ ID NO: 310814 - RNA, 22 nt, Human herpesvirus 4 (Epstein-Barr virus)
acggccucggcggggaacguga

SEQ ID NO: 310815 - RNA, 19 nt, Human herpesvirus 4 (Epstein-Barr virus)
acggcucugucaguuauca

SEQ ID NO: 310816 - RNA, 17 nt, Human herpesvirus 4 (Epstein-Barr virus)
acgggaggaaacaggag

SEQ ID NO: 310817 - RNA, 23 nt, Human herpesvirus 4 (Epstein-Barr virus)
acgguguuuuuggcuugcuccac

SEQ ID NO: 310818 - RNA, 16 nt, Human herpesvirus 4 (Epstein-Barr virus)
acguagucguuguuca

SEQ ID NO: 310819 - RNA, 19 nt, Human herpesvirus 4 (Epstein-Barr virus)
acgucaacuuuacuuuuau

SEQ ID NO: 310820 - RNA, 24 nt, Human herpesvirus 4 (Epstein-Barr virus)
acgucccuuuggaggacagcgugg

SEQ ID NO: 310821 - RNA, 18 nt, Human herpesvirus 4 (Epstein-Barr virus)
acgucuuuaccaccucaa

SEQ ID NO: 310822 - RNA, 15 nt, Human herpesvirus 4 (Epstein-Barr virus)
acgugcgugaucaug

SEQ ID NO: 310823 - RNA, 16 nt, Human herpesvirus 4 (Epstein-Barr virus)
acguggguuucugccc

SEQ ID NO: 310824 - RNA, 14 nt, Human herpesvirus 4 (Epstein-Barr virus)
acguuccuggccau

SEQ ID NO: 310825 - RNA, 22 nt, Human herpesvirus 4 (Epstein-Barr virus)
acauauacuggagaugauucau

SEQ ID NO: 310826 - RNA, 17 nt, Human herpesvirus 4 (Epstein-Barr virus)
acaucaauggaacccua

SEQ ID NO: 310827 - RNA, 23 nt, Human herpesvirus 4 (Epstein-Barr virus)
acaucaauggaacccuagccacc

SEQ ID NO: 310828 - RNA, 13 nt, Human herpesvirus 4 (Epstein-Barr virus)
acaucacugccac

SEQ ID NO: 310829 - RNA, 18 nt, Human herpesvirus 4 (Epstein-Barr virus)
acaucuacuuuuaccccc

SEQ ID NO: 310830 - RNA, 21 nt, Human herpesvirus 4 (Epstein-Barr virus)
acaucuggcuggggcauuaac

SEQ ID NO: 310831 - RNA, 15 nt, Human herpesvirus 4 (Epstein-Barr virus)
acaucugguuagcag

SEQ ID NO: 310832 - RNA, 21 nt, Human herpesvirus 4 (Epstein-Barr virus)
acaucugguuagcagguugau

SEQ ID NO: 310833 - RNA, 20 nt, Human herpesvirus 4 (Epstein-Barr virus)
acaugcagacuccagguuau

SEQ ID NO: 310834 - RNA, 14 nt, Human herpesvirus 4 (Epstein-Barr virus)
acaugggccacugc

SEQ ID NO: 310835 - RNA, 18 nt, Human herpesvirus 4 (Epstein-Barr virus)
acaugguagauaaauuaa

SEQ ID NO: 310836 - RNA, 14 nt, Human herpesvirus 4 (Epstein-Barr virus)
acauggugucugua

SEQ ID NO: 310837 - RNA, 21 nt, Human herpesvirus 4 (Epstein-Barr virus)
acauguuuggggaguuagcau

SEQ ID NO: 310838 - RNA, 19 nt, Human herpesvirus 4 (Epstein-Barr virus)
acauguuuucuggacacag

SEQ ID NO: 310839 - RNA, 16 nt, Human herpesvirus 4 (Epstein-Barr virus)
acauuaaagccuccuc

SEQ ID NO: 310840 - RNA, 13 nt, Human herpesvirus 4 (Epstein-Barr virus)
acauuaaccucaa

SEQ ID NO: 310841 - RNA, 19 nt, Human herpesvirus 4 (Epstein-Barr virus)
acauuagcgacauuuaccu

SEQ ID NO: 310842 - RNA, 15 nt, Human herpesvirus 4 (Epstein-Barr virus)
acauugaucacuacu

SEQ ID NO: 310843 - RNA, 21 nt, Human herpesvirus 4 (Epstein-Barr virus)
acauugaugaacuggucacca

SEQ ID NO: 310844 - RNA, 15 nt, Human herpesvirus 4 (Epstein-Barr virus)
acauugcaucgcuca

SEQ ID NO: 310845 - RNA, 16 nt, Human herpesvirus 4 (Epstein-Barr virus)
acauuguccucaccaa

SEQ ID NO: 310846 - RNA, 20 nt, Human herpesvirus 4 (Epstein-Barr virus)
acauuuaccuggugagcaau

SEQ ID NO: 310847 - RNA, 22 nt, Human herpesvirus 4 (Epstein-Barr virus)
acauuuaccuggugagcaauca

SEQ ID NO: 310848 - RNA, 22 nt, Human herpesvirus 4 (Epstein-Barr virus)
acauuucucauaauggugccug

SEQ ID NO: 310849 - RNA, 20 nt, Human herpesvirus 4 (Epstein-Barr virus)
acauuugaggaggcacacaa

SEQ ID NO: 310850 - RNA, 13 nt, Human herpesvirus 4 (Epstein-Barr virus)
acauuuuguucua

SEQ ID NO: 310851 - RNA, 21 nt, Human herpesvirus 4 (Epstein-Barr virus)
accaagggcagggcaauggga

SEQ ID NO: 310852 - RNA, 10 nt, Human herpesvirus 4 (Epstein-Barr virus)
accacacagc

SEQ ID NO: 310853 - RNA, 20 nt, Human herpesvirus 4 (Epstein-Barr virus)
accacuaagguuacugcaca

SEQ ID NO: 310854 - RNA, 20 nt, Human herpesvirus 4 (Epstein-Barr virus)
accacucagacucuccgcuu

SEQ ID NO: 310855 - RNA, 15 nt, Human herpesvirus 4 (Epstein-Barr virus)
accagaagagucaua

SEQ ID NO: 310856 - RNA, 20 nt, Human herpesvirus 4 (Epstein-Barr virus)
accagcuaacaggacauguu

SEQ ID NO: 310857 - RNA, 19 nt, Human herpesvirus 4 (Epstein-Barr virus)
accagggucaacagguggu

SEQ ID NO: 310858 - RNA, 19 nt, Human herpesvirus 4 (Epstein-Barr virus)
accaggucgaccaccucaa

SEQ ID NO: 310859 - RNA, 13 nt, Human herpesvirus 4 (Epstein-Barr virus)
accaggugccuuu

SEQ ID NO: 310860 - RNA, 21 nt, Human herpesvirus 4 (Epstein-Barr virus)
accagucuacgaccuugacca

SEQ ID NO: 310861 - RNA, 13 nt, Human herpesvirus 4 (Epstein-Barr virus)
accagugugccag

SEQ ID NO: 310862 - RNA, 14 nt, Human herpesvirus 4 (Epstein-Barr virus)
accagugugccagu

SEQ ID NO: 310863 - RNA, 16 nt, Human herpesvirus 4 (Epstein-Barr virus)
accauagcaugucaca

SEQ ID NO: 310864 - RNA, 22 nt, Human herpesvirus 4 (Epstein-Barr virus)
accauagcaugucacacauucc

SEQ ID NO: 310865 - RNA, 14 nt, Human herpesvirus 4 (Epstein-Barr virus)
accaucaaugucac

SEQ ID NO: 310866 - RNA, 17 nt, Human herpesvirus 4 (Epstein-Barr virus)
accaucaaugucaccac

SEQ ID NO: 310867 - RNA, 16 nt, Human herpesvirus 4 (Epstein-Barr virus)
accaucccaauucaca

SEQ ID NO: 310868 - RNA, 14 nt, Human herpesvirus 4 (Epstein-Barr virus)
accaugagugccau

SEQ ID NO: 310869 - RNA, 14 nt, Human herpesvirus 4 (Epstein-Barr virus)
accaugccaucucu

SEQ ID NO: 310870 - RNA, 15 nt, Human herpesvirus 4 (Epstein-Barr virus)
accaugccaucucug

SEQ ID NO: 310871 - RNA, 13 nt, Human herpesvirus 4 (Epstein-Barr virus)
acccaaugugcaa

SEQ ID NO: 310872 - RNA, 21 nt, Human herpesvirus 4 (Epstein-Barr virus)
acccaaugugcaaaugugguu

SEQ ID NO: 310873 - RNA, 16 nt, Human herpesvirus 4 (Epstein-Barr virus)
acccaccuaugccaau

SEQ ID NO: 310874 - RNA, 17 nt, Human herpesvirus 4 (Epstein-Barr virus)
aaucuguggugggcucu

SEQ ID NO: 310875 - RNA, 19 nt, Human herpesvirus 4 (Epstein-Barr virus)
aaucuguggugggcucugu

SEQ ID NO: 310876 - RNA, 18 nt, Human herpesvirus 4 (Epstein-Barr virus)
aaugagcggggagauaau

SEQ ID NO: 310877 - RNA, 14 nt, Human herpesvirus 4 (Epstein-Barr virus)
aaugcaccuugacu

SEQ ID NO: 310878 - RNA, 16 nt, Human herpesvirus 4 (Epstein-Barr virus)
aaugcgccgucauucc

SEQ ID NO: 310879 - RNA, 17 nt, Human herpesvirus 4 (Epstein-Barr virus)
aaugcgccgucauucca

SEQ ID NO: 310880 - RNA, 23 nt, Human herpesvirus 4 (Epstein-Barr virus)
aaugggacgucuuguaaaacuug

SEQ ID NO: 310881 - RNA, 17 nt, Human herpesvirus 4 (Epstein-Barr virus)
aaugggagcaaccagcu

SEQ ID NO: 310882 - RNA, 13 nt, Human herpesvirus 4 (Epstein-Barr virus)
aauguacagacua

SEQ ID NO: 310883 - RNA, 22 nt, Human herpesvirus 4 (Epstein-Barr virus)
aauguaccucauagacacaccu

SEQ ID NO: 310884 - RNA, 19 nt, Human herpesvirus 4 (Epstein-Barr virus)
aauguagccccuaggccug

SEQ ID NO: 310885 - RNA, 15 nt, Human herpesvirus 4 (Epstein-Barr virus)
aaugugggacuggga

SEQ ID NO: 310886 - RNA, 14 nt, Human herpesvirus 4 (Epstein-Barr virus)
aauguguauucucu

SEQ ID NO: 310887 - RNA, 14 nt, Human herpesvirus 4 (Epstein-Barr virus)
aauguuacccucau

SEQ ID NO: 310888 - RNA, 22 nt, Human herpesvirus 4 (Epstein-Barr virus)
aauguugucuggucgcuagaug

SEQ ID NO: 310889 - RNA, 20 nt, Human herpesvirus 4 (Epstein-Barr virus)
aauucacaucucagggacaa

SEQ ID NO: 310890 - RNA, 19 nt, Human herpesvirus 4 (Epstein-Barr virus)
aauucucuucuguuugcau

SEQ ID NO: 310891 - RNA, 19 nt, Human herpesvirus 4 (Epstein-Barr virus)
aauuuacaccugacccaua

SEQ ID NO: 310892 - RNA, 22 nt, Human herpesvirus 4 (Epstein-Barr virus)
aauuuagcacgucccaaaccau

SEQ ID NO: 310893 - RNA, 16 nt, Human herpesvirus 4 (Epstein-Barr virus)
acaaaaguacacuagc

SEQ ID NO: 310894 - RNA, 17 nt, Human herpesvirus 4 (Epstein-Barr virus)
acaaacacuacaauaaa

SEQ ID NO: 310895 - RNA, 20 nt, Human herpesvirus 4 (Epstein-Barr virus)
acaaagagguaaaacugcca

SEQ ID NO: 310896 - RNA, 22 nt, Human herpesvirus 4 (Epstein-Barr virus)
acaaagagguaaaacugccaca

SEQ ID NO: 310897 - RNA, 15 nt, Human herpesvirus 4 (Epstein-Barr virus)
acaacggcugugacu

SEQ ID NO: 310898 - RNA, 21 nt, Human herpesvirus 4 (Epstein-Barr virus)
acaacuaccugucugauugca

SEQ ID NO: 310899 - RNA, 11 nt, Human herpesvirus 4 (Epstein-Barr virus)
acaacugcuau

SEQ ID NO: 310900 - RNA, 22 nt, Human herpesvirus 4 (Epstein-Barr virus)
acaacugucacaccagucccaa

SEQ ID NO: 310901 - RNA, 20 nt, Human herpesvirus 4 (Epstein-Barr virus)
acaacuuccaacgcauccac

SEQ ID NO: 310902 - RNA, 14 nt, Human herpesvirus 4 (Epstein-Barr virus)
acaagacagucaca

SEQ ID NO: 310903 - RNA, 19 nt, Human herpesvirus 4 (Epstein-Barr virus)
acaagacagucacauugca

SEQ ID NO: 310904 - RNA, 18 nt, Human herpesvirus 4 (Epstein-Barr virus)
acaagagccggacgaugg

SEQ ID NO: 310905 - RNA, 19 nt, Human herpesvirus 4 (Epstein-Barr virus)
acaaggacaggugccagau

SEQ ID NO: 310906 - RNA, 21 nt, Human herpesvirus 4 (Epstein-Barr virus)
acaaggccagcuaacugccua

SEQ ID NO: 310907 - RNA, 15 nt, Human herpesvirus 4 (Epstein-Barr virus)
acaagggaagaggga

SEQ ID NO: 310908 - RNA, 17 nt, Human herpesvirus 4 (Epstein-Barr virus)
acaagggauaugaaggu

SEQ ID NO: 310909 - RNA, 16 nt, Human herpesvirus 4 (Epstein-Barr virus)
acaagguucggaaauc

SEQ ID NO: 310910 - RNA, 13 nt, Human herpesvirus 4 (Epstein-Barr virus)
acaauaaacccaa

SEQ ID NO: 310911 - RNA, 21 nt, Human herpesvirus 4 (Epstein-Barr virus)
acaauaaacccaaugugcaaa

SEQ ID NO: 310912 - RNA, 12 nt, Human herpesvirus 4 (Epstein-Barr virus)
acaauacaccca

SEQ ID NO: 310913 - RNA, 16 nt, Human herpesvirus 4 (Epstein-Barr virus)
acaauagaaguggaaa

SEQ ID NO: 310914 - RNA, 23 nt, Human herpesvirus 4 (Epstein-Barr virus)
acaauuccccggggacaccugca

SEQ ID NO: 310915 - RNA, 14 nt, Human herpesvirus 4 (Epstein-Barr virus)
acacacaacacaua

SEQ ID NO: 310916 - RNA, 17 nt, Human herpesvirus 4 (Epstein-Barr virus)
acacacauggcacucau

SEQ ID NO: 310917 - RNA, 22 nt, Human herpesvirus 4 (Epstein-Barr virus)
acacauagaauuguuaguuuaa

SEQ ID NO: 310918 - RNA, 20 nt, Human herpesvirus 4 (Epstein-Barr virus)
acaccaacacagacugcgau

SEQ ID NO: 310919 - RNA, 17 nt, Human herpesvirus 4 (Epstein-Barr virus)
acaccaccugcucguga

SEQ ID NO: 310920 - RNA, 17 nt, Human herpesvirus 4 (Epstein-Barr virus)
acaccagacauggugua

SEQ ID NO: 310921 - RNA, 23 nt, Human herpesvirus 4 (Epstein-Barr virus)
acaccaucccaauucacaucuca

SEQ ID NO: 310922 - RNA, 21 nt, Human herpesvirus 4 (Epstein-Barr virus)
acaccauguuucgugcccucu

SEQ ID NO: 310923 - RNA, 17 nt, Human herpesvirus 4 (Epstein-Barr virus)
acacccacccugcacac

SEQ ID NO: 310924 - RNA, 20 nt, Human herpesvirus 4 (Epstein-Barr virus)
cagcuucgcaaguuccucaa

SEQ ID NO: 310925 - RNA, 14 nt, Human herpesvirus 4 (Epstein-Barr virus)
caggacaagacagu

SEQ ID NO: 310926 - RNA, 23 nt, Human herpesvirus 4 (Epstein-Barr virus)
caggacaagacagucacauugca

SEQ ID NO: 310927 - RNA, 14 nt, Human herpesvirus 4 (Epstein-Barr virus)
caggacacgugaca

SEQ ID NO: 310928 - RNA, 14 nt, Human herpesvirus 4 (Epstein-Barr virus)
caggagcaggagca

SEQ ID NO: 310929 - RNA, 15 nt, Human herpesvirus 4 (Epstein-Barr virus)
caggagccccgggcg

SEQ ID NO: 310930 - RNA, 19 nt, Human herpesvirus 4 (Epstein-Barr virus)
caggaggaaaggcuauaug

SEQ ID NO: 310931 - RNA, 17 nt, Human herpesvirus 4 (Epstein-Barr virus)
caggaggggcaggagca

SEQ ID NO: 310932 - RNA, 20 nt, Human herpesvirus 4 (Epstein-Barr virus)
caggaguauggggacaaaga

SEQ ID NO: 310933 - RNA, 23 nt, Human herpesvirus 4 (Epstein-Barr virus)
caggcaccggucucguccaucuu

SEQ ID NO: 310934 - RNA, 21 nt, Human herpesvirus 4 (Epstein-Barr virus)
caggccaaauggagacugcaa

SEQ ID NO: 310935 - RNA, 19 nt, Human herpesvirus 4 (Epstein-Barr virus)
caggccucacgaucuucaa

SEQ ID NO: 310936 - RNA, 13 nt, Human herpesvirus 4 (Epstein-Barr virus)
caggccugucauu

SEQ ID NO: 310937 - RNA, 15 nt, Human herpesvirus 4 (Epstein-Barr virus)
caggcgaaggcggag

SEQ ID NO: 310938 - RNA, 14 nt, Human herpesvirus 4 (Epstein-Barr virus)
caggcgcuguuaug

SEQ ID NO: 310939 - RNA, 21 nt, Human herpesvirus 4 (Epstein-Barr virus)
caggcuacaacaggcugcuga

SEQ ID NO: 310940 - RNA, 16 nt, Human herpesvirus 4 (Epstein-Barr virus)
caggcucggcaccucc

SEQ ID NO: 310941 - RNA, 17 nt, Human herpesvirus 4 (Epstein-Barr virus)
caggcucggcaccuccu

SEQ ID NO: 310942 - RNA, 20 nt, Human herpesvirus 4 (Epstein-Barr virus)
caggcugacguccaccccac

SEQ ID NO: 310943 - RNA, 12 nt, Human herpesvirus 4 (Epstein-Barr virus)
cagggcaauggg

SEQ ID NO: 310944 - RNA, 13 nt, Human herpesvirus 4 (Epstein-Barr virus)
cagggcaauggga

SEQ ID NO: 310945 - RNA, 14 nt, Human herpesvirus 4 (Epstein-Barr virus)
cagggcaaugggac

SEQ ID NO: 310946 - RNA, 16 nt, Human herpesvirus 4 (Epstein-Barr virus)
cagggccaagacauag

SEQ ID NO: 310947 - RNA, 18 nt, Human herpesvirus 4 (Epstein-Barr virus)
cagggcuucguccagggg

SEQ ID NO: 310948 - RNA, 17 nt, Human herpesvirus 4 (Epstein-Barr virus)
cagggguauguggugcc

SEQ ID NO: 310949 - RNA, 19 nt, Human herpesvirus 4 (Epstein-Barr virus)
cagggguauguggugccau

SEQ ID NO: 310950 - RNA, 20 nt, Human herpesvirus 4 (Epstein-Barr virus)
caggggugaugaaaacagag

SEQ ID NO: 310951 - RNA, 12 nt, Human herpesvirus 4 (Epstein-Barr virus)
cagggguggugg

SEQ ID NO: 310952 - RNA, 14 nt, Human herpesvirus 4 (Epstein-Barr virus)
caggggugguggau

SEQ ID NO: 310953 - RNA, 17 nt, Human herpesvirus 4 (Epstein-Barr virus)
cagguaagaagcuacac

SEQ ID NO: 310954 - RNA, 18 nt, Human herpesvirus 4 (Epstein-Barr virus)
caggucgcggaccagggu

SEQ ID NO: 310955 - RNA, 19 nt, Human herpesvirus 4 (Epstein-Barr virus)
caggucgcggaccaggguc

SEQ ID NO: 310956 - RNA, 19 nt, Human herpesvirus 4 (Epstein-Barr virus)
caggugccagaugugccug

SEQ ID NO: 310957 - RNA, 15 nt, Human herpesvirus 4 (Epstein-Barr virus)
cagucacauugcauc

SEQ ID NO: 310958 - RNA, 23 nt, Human herpesvirus 4 (Epstein-Barr virus)
cagucaccuuccagacuaugcau

SEQ ID NO: 310959 - RNA, 21 nt, Human herpesvirus 4 (Epstein-Barr virus)
cagucaugucgagcaugagcu

SEQ ID NO: 310960 - RNA, 17 nt, Human herpesvirus 4 (Epstein-Barr virus)
cagucccaacccaaaac

SEQ ID NO: 310961 - RNA, 15 nt, Human herpesvirus 4 (Epstein-Barr virus)
cagucccaccacaaa

SEQ ID NO: 310962 - RNA, 11 nt, Human herpesvirus 4 (Epstein-Barr virus)
cagucuaucca

SEQ ID NO: 310963 - RNA, 15 nt, Human herpesvirus 4 (Epstein-Barr virus)
cagucuauccaggag

SEQ ID NO: 310964 - RNA, 22 nt, Human herpesvirus 4 (Epstein-Barr virus)
cagucuuagguaucuggaucua

SEQ ID NO: 310965 - RNA, 18 nt, Human herpesvirus 4 (Epstein-Barr virus)
cagucuuugcaauuugcc

SEQ ID NO: 310966 - RNA, 21 nt, Human herpesvirus 4 (Epstein-Barr virus)
cagugacgaagacccaucuga

SEQ ID NO: 310967 - RNA, 14 nt, Human herpesvirus 4 (Epstein-Barr virus)
cagugauaagucau

SEQ ID NO: 310968 - RNA, 20 nt, Human herpesvirus 4 (Epstein-Barr virus)
cagugccuaaucaccguucc

SEQ ID NO: 310969 - RNA, 15 nt, Human herpesvirus 4 (Epstein-Barr virus)
caguggaugcaucgu

SEQ ID NO: 310970 - RNA, 19 nt, Human herpesvirus 4 (Epstein-Barr virus)
caguggauggggucauuua

SEQ ID NO: 310971 - RNA, 20 nt, Human herpesvirus 4 (Epstein-Barr virus)
cagugggguaaaugcaccuu

SEQ ID NO: 310972 - RNA, 21 nt, Human herpesvirus 4 (Epstein-Barr virus)
caguuuacaucugcucggggu

SEQ ID NO: 310973 - RNA, 13 nt, Human herpesvirus 4 (Epstein-Barr virus)
caguuuauugaua

SEQ ID NO: 310974 - RNA, 17 nt, Human herpesvirus 4 (Epstein-Barr virus)
cauaaaauuuuauucua

SEQ ID NO: 310975 - RNA, 17 nt, Human herpesvirus 4 (Epstein-Barr virus)
cauaaauucuccugccu

SEQ ID NO: 310976 - RNA, 20 nt, Human herpesvirus 4 (Epstein-Barr virus)
cauaaccuggagucugcaug

SEQ ID NO: 310977 - RNA, 21 nt, Human herpesvirus 4 (Epstein-Barr virus)
cauacagcagcuggauguaca

SEQ ID NO: 310978 - RNA, 15 nt, Human herpesvirus 4 (Epstein-Barr virus)
cauacggcuuuccag

SEQ ID NO: 310979 - RNA, 17 nt, Human herpesvirus 4 (Epstein-Barr virus)
cauauacuggagaugau

SEQ ID NO: 310980 - RNA, 22 nt, Human herpesvirus 4 (Epstein-Barr virus)
cauaugaugacgccgagaccua

SEQ ID NO: 310981 - RNA, 16 nt, Human herpesvirus 4 (Epstein-Barr virus)
cauauguacaaugaga

SEQ ID NO: 310982 - RNA, 20 nt, Human herpesvirus 4 (Epstein-Barr virus)
cauauucccccacguguucu

SEQ ID NO: 310983 - RNA, 17 nt, Human herpesvirus 4 (Epstein-Barr virus)
caucaacuucagcucca

SEQ ID NO: 310984 - RNA, 13 nt, Human herpesvirus 4 (Epstein-Barr virus)
caccgcaaccgcu

SEQ ID NO: 310985 - RNA, 14 nt, Human herpesvirus 4 (Epstein-Barr virus)
caccgcggcaaaaa

SEQ ID NO: 310986 - RNA, 13 nt, Human herpesvirus 4 (Epstein-Barr virus)
caccgucagccac

SEQ ID NO: 310987 - RNA, 15 nt, Human herpesvirus 4 (Epstein-Barr virus)
caccgucagccacac

SEQ ID NO: 310988 - RNA, 13 nt, Human herpesvirus 4 (Epstein-Barr virus)
caccuaagaaugg

SEQ ID NO: 310989 - RNA, 22 nt, Human herpesvirus 4 (Epstein-Barr virus)
caccuaugccaauccaugccaa

SEQ ID NO: 310990 - RNA, 22 nt, Human herpesvirus 4 (Epstein-Barr virus)
caccucccugauaaugucuuca

SEQ ID NO: 310991 - RNA, 14 nt, Human herpesvirus 4 (Epstein-Barr virus)
caccucgggcucaa

SEQ ID NO: 310992 - RNA, 23 nt, Human herpesvirus 4 (Epstein-Barr virus)
caccugacccauaccaggugccu

SEQ ID NO: 310993 - RNA, 16 nt, Human herpesvirus 4 (Epstein-Barr virus)
caccuggguacccaaa

SEQ ID NO: 310994 - RNA, 21 nt, Human herpesvirus 4 (Epstein-Barr virus)
caccuugacuguaaucacugg

SEQ ID NO: 310995 - RNA, 22 nt, Human herpesvirus 4 (Epstein-Barr virus)
caccuugaggugccacagagca

SEQ ID NO: 310996 - RNA, 16 nt, Human herpesvirus 4 (Epstein-Barr virus)
caccuuuuaauucucu

SEQ ID NO: 310997 - RNA, 22 nt, Human herpesvirus 4 (Epstein-Barr virus)
cacgacuguuccuauaugcucu

SEQ ID NO: 310998 - RNA, 24 nt, Human herpesvirus 4 (Epstein-Barr virus)
cacgagaaaugcgccgucauucca

SEQ ID NO: 310999 - RNA, 12 nt, Human herpesvirus 4 (Epstein-Barr virus)
cacgcaaaguca

SEQ ID NO: 311000 - RNA, 21 nt, Human herpesvirus 4 (Epstein-Barr virus)
cacgcaagggagacguuugag

SEQ ID NO: 311001 - RNA, 20 nt, Human herpesvirus 4 (Epstein-Barr virus)
cacgcggugagggccgucac

SEQ ID NO: 311002 - RNA, 22 nt, Human herpesvirus 4 (Epstein-Barr virus)
cacgcuuggagucgaagcucuu

SEQ ID NO: 311003 - RNA, 19 nt, Human herpesvirus 4 (Epstein-Barr virus)
cacggggccgugcaccugc

SEQ ID NO: 311004 - RNA, 22 nt, Human herpesvirus 4 (Epstein-Barr virus)
cacgguggcuugggcuguggua

SEQ ID NO: 311005 - RNA, 17 nt, Human herpesvirus 4 (Epstein-Barr virus)
cacgucuuuaccaccuc

SEQ ID NO: 311006 - RNA, 17 nt, Human herpesvirus 4 (Epstein-Barr virus)
cacgugggucucauggg

SEQ ID NO: 311007 - RNA, 14 nt, Human herpesvirus 4 (Epstein-Barr virus)
cacuaaacauugca

SEQ ID NO: 311008 - RNA, 12 nt, Human herpesvirus 4 (Epstein-Barr virus)
cacuacaccccu

SEQ ID NO: 311009 - RNA, 21 nt, Human herpesvirus 4 (Epstein-Barr virus)
cacuagaauacccugcauggc

SEQ ID NO: 311010 - RNA, 13 nt, Human herpesvirus 4 (Epstein-Barr virus)
cacuauauucucc

SEQ ID NO: 311011 - RNA, 15 nt, Human herpesvirus 4 (Epstein-Barr virus)
cacuaucacguguaa

SEQ ID NO: 311012 - RNA, 12 nt, Human herpesvirus 4 (Epstein-Barr virus)
cacucagacucu

SEQ ID NO: 311013 - RNA, 18 nt, Human herpesvirus 4 (Epstein-Barr virus)
cacucuggggucucaggc

SEQ ID NO: 311014 - RNA, 19 nt, Human herpesvirus 4 (Epstein-Barr virus)
cacucuggggucucaggcc

SEQ ID NO: 311015 - RNA, 15 nt, Human herpesvirus 4 (Epstein-Barr virus)
cacugaugagucuga

SEQ ID NO: 311016 - RNA, 16 nt, Human herpesvirus 4 (Epstein-Barr virus)
cacugaugagucugac

SEQ ID NO: 311017 - RNA, 23 nt, Human herpesvirus 4 (Epstein-Barr virus)
cacugauuuugggcacacuuaac

SEQ ID NO: 311018 - RNA, 13 nt, Human herpesvirus 4 (Epstein-Barr virus)
cacuggagugggu

SEQ ID NO: 311019 - RNA, 21 nt, Human herpesvirus 4 (Epstein-Barr virus)
cacuggagugggucauuggca

SEQ ID NO: 311020 - RNA, 21 nt, Human herpesvirus 4 (Epstein-Barr virus)
cacuuaacuugacuacaaugu

SEQ ID NO: 311021 - RNA, 14 nt, Human herpesvirus 4 (Epstein-Barr virus)
cagaaaacucugca

SEQ ID NO: 311022 - RNA, 15 nt, Human herpesvirus 4 (Epstein-Barr virus)
cagaaaacucugcau

SEQ ID NO: 311023 - RNA, 13 nt, Human herpesvirus 4 (Epstein-Barr virus)
cagaaauuugcac

SEQ ID NO: 311024 - RNA, 19 nt, Human herpesvirus 4 (Epstein-Barr virus)
cagaagacuccugccugaa

SEQ ID NO: 311025 - RNA, 15 nt, Human herpesvirus 4 (Epstein-Barr virus)
cagaauuagcaucag

SEQ ID NO: 311026 - RNA, 15 nt, Human herpesvirus 4 (Epstein-Barr virus)
cagacaccaccugcu

SEQ ID NO: 311027 - RNA, 23 nt, Human herpesvirus 4 (Epstein-Barr virus)
cagacaccaggcgccgcaggggu

SEQ ID NO: 311028 - RNA, 21 nt, Human herpesvirus 4 (Epstein-Barr virus)
cagacaggagaugauaaugau

SEQ ID NO: 311029 - RNA, 16 nt, Human herpesvirus 4 (Epstein-Barr virus)
cagacaugguguagac

SEQ ID NO: 311030 - RNA, 22 nt, Human herpesvirus 4 (Epstein-Barr virus)
cagacaugguguagacagaucc

SEQ ID NO: 311031 - RNA, 16 nt, Human herpesvirus 4 (Epstein-Barr virus)
cagaccagccccucau

SEQ ID NO: 311032 - RNA, 13 nt, Human herpesvirus 4 (Epstein-Barr virus)
cagacccaacaaa

SEQ ID NO: 311033 - RNA, 15 nt, Human herpesvirus 4 (Epstein-Barr virus)
cagacgcgauggcac

SEQ ID NO: 311034 - RNA, 20 nt, Human herpesvirus 4 (Epstein-Barr virus)
cagacuagcgaggauaaucu

SEQ ID NO: 311035 - RNA, 23 nt, Human herpesvirus 4 (Epstein-Barr virus)
cagacuaugcauacacugaauuu

SEQ ID NO: 311036 - RNA, 18 nt, Human herpesvirus 4 (Epstein-Barr virus)
cagacuccacaccaaaua

SEQ ID NO: 311037 - RNA, 13 nt, Human herpesvirus 4 (Epstein-Barr virus)
cagagagccacau

SEQ ID NO: 311038 - RNA, 23 nt, Human herpesvirus 4 (Epstein-Barr virus)
cagagaggcccacugcaguacua

SEQ ID NO: 311039 - RNA, 22 nt, Human herpesvirus 4 (Epstein-Barr virus)
cagagcggcauccucaaggggc

SEQ ID NO: 311040 - RNA, 13 nt, Human herpesvirus 4 (Epstein-Barr virus)
cagaugugccugg

SEQ ID NO: 311041 - RNA, 20 nt, Human herpesvirus 4 (Epstein-Barr virus)
cagauucagacgagucugac

SEQ ID NO: 311042 - RNA, 15 nt, Human herpesvirus 4 (Epstein-Barr virus)
auuuuagagacacua

SEQ ID NO: 311043 - RNA, 14 nt, Human herpesvirus 4 (Epstein-Barr virus)
auuuuccauuucau

SEQ ID NO: 311044 - RNA, 14 nt, Human herpesvirus 4 (Epstein-Barr virus)
caaaaccacugacc

SEQ ID NO: 311045 - RNA, 15 nt, Human herpesvirus 4 (Epstein-Barr virus)
caaaacuauaccaaa

SEQ ID NO: 311046 - RNA, 15 nt, Human herpesvirus 4 (Epstein-Barr virus)
caaacacuacaauaa

SEQ ID NO: 311047 - RNA, 13 nt, Human herpesvirus 4 (Epstein-Barr virus)
caaacaugguguc

SEQ ID NO: 311048 - RNA, 12 nt, Human herpesvirus 4 (Epstein-Barr virus)
caaaccaugaca

SEQ ID NO: 311049 - RNA, 13 nt, Human herpesvirus 4 (Epstein-Barr virus)
caaaccaugacau

SEQ ID NO: 311050 - RNA, 14 nt, Human herpesvirus 4 (Epstein-Barr virus)
caaagaacuuugac

SEQ ID NO: 311051 - RNA, 17 nt, Human herpesvirus 4 (Epstein-Barr virus)
caaaguccugcacuaua

SEQ ID NO: 311052 - RNA, 22 nt, Human herpesvirus 4 (Epstein-Barr virus)
caacaaagcccgaugcccaguu

SEQ ID NO: 311053 - RNA, 21 nt, Human herpesvirus 4 (Epstein-Barr virus)
caacaacaagguaaguaauuu

SEQ ID NO: 311054 - RNA, 21 nt, Human herpesvirus 4 (Epstein-Barr virus)
caacaagcuaccgaugauucu

SEQ ID NO: 311055 - RNA, 17 nt, Human herpesvirus 4 (Epstein-Barr virus)
caacaaugugaaccuua

SEQ ID NO: 311056 - RNA, 12 nt, Human herpesvirus 4 (Epstein-Barr virus)
caacacaaccac

SEQ ID NO: 311057 - RNA, 18 nt, Human herpesvirus 4 (Epstein-Barr virus)
caacacgaccccaaggaa

SEQ ID NO: 311058 - RNA, 19 nt, Human herpesvirus 4 (Epstein-Barr virus)
caacagacaugcagacucc

SEQ ID NO: 311059 - RNA, 20 nt, Human herpesvirus 4 (Epstein-Barr virus)
caacagcgaccggcagaucc

SEQ ID NO: 311060 - RNA, 14 nt, Human herpesvirus 4 (Epstein-Barr virus)
caacauggggcaau

SEQ ID NO: 311061 - RNA, 15 nt, Human herpesvirus 4 (Epstein-Barr virus)
caacauuaaagccuc

SEQ ID NO: 311062 - RNA, 12 nt, Human herpesvirus 4 (Epstein-Barr virus)
caaccaauguau

SEQ ID NO: 311063 - RNA, 20 nt, Human herpesvirus 4 (Epstein-Barr virus)
caaccacggugacauucacu

SEQ ID NO: 311064 - RNA, 20 nt, Human herpesvirus 4 (Epstein-Barr virus)
caacccccggcucucaggcc

SEQ ID NO: 311065 - RNA, 22 nt, Human herpesvirus 4 (Epstein-Barr virus)
caaccgccgugucagcugugua

SEQ ID NO: 311066 - RNA, 9 nt, Human herpesvirus 4 (Epstein-Barr virus)
caaccugcu

SEQ ID NO: 311067 - RNA, 13 nt, Human herpesvirus 4 (Epstein-Barr virus)
caacguccgugag

SEQ ID NO: 311068 - RNA, 19 nt, Human herpesvirus 4 (Epstein-Barr virus)
caacguccgugagagccua

SEQ ID NO: 311069 - RNA, 20 nt, Human herpesvirus 4 (Epstein-Barr virus)
caacuaagagccucgguaga

SEQ ID NO: 311070 - RNA, 21 nt, Human herpesvirus 4 (Epstein-Barr virus)
caacuaccugucugauugcac

SEQ ID NO: 311071 - RNA, 19 nt, Human herpesvirus 4 (Epstein-Barr virus)
caacugcuauucugagcac

SEQ ID NO: 311072 - RNA, 23 nt, Human herpesvirus 4 (Epstein-Barr virus)
caacugcuauucugagcaccaac

SEQ ID NO: 311073 - RNA, 14 nt, Human herpesvirus 4 (Epstein-Barr virus)
caacuucagcucca

SEQ ID NO: 311074 - RNA, 17 nt, Human herpesvirus 4 (Epstein-Barr virus)
caagaacugggaugaac

SEQ ID NO: 311075 - RNA, 14 nt, Human herpesvirus 4 (Epstein-Barr virus)
caagagcacaaaag

SEQ ID NO: 311076 - RNA, 20 nt, Human herpesvirus 4 (Epstein-Barr virus)
caagaguuuaagcagcacug

SEQ ID NO: 311077 - RNA, 16 nt, Human herpesvirus 4 (Epstein-Barr virus)
caagcagaaaggccau

SEQ ID NO: 311078 - RNA, 16 nt, Human herpesvirus 4 (Epstein-Barr virus)
caagcuccggcugccc

SEQ ID NO: 311079 - RNA, 13 nt, Human herpesvirus 4 (Epstein-Barr virus)
caagcuccuuugc

SEQ ID NO: 311080 - RNA, 22 nt, Human herpesvirus 4 (Epstein-Barr virus)
caagcuccuuugccuugugugc

SEQ ID NO: 311081 - RNA, 19 nt, Human herpesvirus 4 (Epstein-Barr virus)
caagcuuuugaccaagcua

SEQ ID NO: 311082 - RNA, 23 nt, Human herpesvirus 4 (Epstein-Barr virus)
caaggaaacaaaaccacugaccu

SEQ ID NO: 311083 - RNA, 21 nt, Human herpesvirus 4 (Epstein-Barr virus)
caaggacccccgcgucacugu

SEQ ID NO: 311084 - RNA, 18 nt, Human herpesvirus 4 (Epstein-Barr virus)
caaggcccggaugaucuc

SEQ ID NO: 311085 - RNA, 21 nt, Human herpesvirus 4 (Epstein-Barr virus)
caagguaaguaauuuguugcc

SEQ ID NO: 311086 - RNA, 18 nt, Human herpesvirus 4 (Epstein-Barr virus)
caaguggcgguggaacac

SEQ ID NO: 311087 - RNA, 15 nt, Human herpesvirus 4 (Epstein-Barr virus)
caaguguuuccagac

SEQ ID NO: 311088 - RNA, 13 nt, Human herpesvirus 4 (Epstein-Barr virus)
caauagacagaaa

SEQ ID NO: 311089 - RNA, 20 nt, Human herpesvirus 4 (Epstein-Barr virus)
caauauauuuuccauuucau

SEQ ID NO: 311090 - RNA, 14 nt, Human herpesvirus 4 (Epstein-Barr virus)
caauccaugccaau

SEQ ID NO: 311091 - RNA, 16 nt, Human herpesvirus 4 (Epstein-Barr virus)
caauccgaaagcacuu

SEQ ID NO: 311092 - RNA, 14 nt, Human herpesvirus 4 (Epstein-Barr virus)
caaucucggcuguu

SEQ ID NO: 311093 - RNA, 23 nt, Human herpesvirus 4 (Epstein-Barr virus)
caaucucggcuguuuguacuucu

SEQ ID NO: 311094 - RNA, 16 nt, Human herpesvirus 4 (Epstein-Barr virus)
caauguaucccaaaua

SEQ ID NO: 311095 - RNA, 13 nt, Human herpesvirus 4 (Epstein-Barr virus)
caaugucaaggcu

SEQ ID NO: 311096 - RNA, 20 nt, Human herpesvirus 4 (Epstein-Barr virus)
caaugucaaggcucugcaca

SEQ ID NO: 311097 - RNA, 16 nt, Human herpesvirus 4 (Epstein-Barr virus)
caauguuccuucucau

SEQ ID NO: 311098 - RNA, 11 nt, Human herpesvirus 4 (Epstein-Barr virus)
auggccucaaa

SEQ ID NO: 311099 - RNA, 24 nt, Human herpesvirus 4 (Epstein-Barr virus)
augggagcaaccagcuggucauca

SEQ ID NO: 311100 - RNA, 17 nt, Human herpesvirus 4 (Epstein-Barr virus)
augggcaaaacucacag

SEQ ID NO: 311101 - RNA, 19 nt, Human herpesvirus 4 (Epstein-Barr virus)
augggggaaaccugcgaaa

SEQ ID NO: 311102 - RNA, 15 nt, Human herpesvirus 4 (Epstein-Barr virus)
auggguuaccaggca

SEQ ID NO: 311103 - RNA, 17 nt, Human herpesvirus 4 (Epstein-Barr virus)
augguacggaugaucac

SEQ ID NO: 311104 - RNA, 21 nt, Human herpesvirus 4 (Epstein-Barr virus)
augguacggugauaacugaca

SEQ ID NO: 311105 - RNA, 15 nt, Human herpesvirus 4 (Epstein-Barr virus)
augguggcuucuuag

SEQ ID NO: 311106 - RNA, 22 nt, Human herpesvirus 4 (Epstein-Barr virus)
auggugugagacuggaacugua

SEQ ID NO: 311107 - RNA, 15 nt, Human herpesvirus 4 (Epstein-Barr virus)
auguacaacuaccug

SEQ ID NO: 311108 - RNA, 14 nt, Human herpesvirus 4 (Epstein-Barr virus)
auguacaaugagag

SEQ ID NO: 311109 - RNA, 19 nt, Human herpesvirus 4 (Epstein-Barr virus)
auguacauaauguaugcca

SEQ ID NO: 311110 - RNA, 11 nt, Human herpesvirus 4 (Epstein-Barr virus)
auguacccauc

SEQ ID NO: 311111 - RNA, 11 nt, Human herpesvirus 4 (Epstein-Barr virus)
auguagcuaua

SEQ ID NO: 311112 - RNA, 17 nt, Human herpesvirus 4 (Epstein-Barr virus)
auguaugccauggccau

SEQ ID NO: 311113 - RNA, 17 nt, Human herpesvirus 4 (Epstein-Barr virus)
augucaaacaugguguc

SEQ ID NO: 311114 - RNA, 20 nt, Human herpesvirus 4 (Epstein-Barr virus)
augucaaggcucugcacagg

SEQ ID NO: 311115 - RNA, 21 nt, Human herpesvirus 4 (Epstein-Barr virus)
augucaaggcucugcacagga

SEQ ID NO: 311116 - RNA, 23 nt, Human herpesvirus 4 (Epstein-Barr virus)
augucaaggcucugcacaggagg

SEQ ID NO: 311117 - RNA, 12 nt, Human herpesvirus 4 (Epstein-Barr virus)
auguccuguggu

SEQ ID NO: 311118 - RNA, 15 nt, Human herpesvirus 4 (Epstein-Barr virus)
augugcaaauguggu

SEQ ID NO: 311119 - RNA, 14 nt, Human herpesvirus 4 (Epstein-Barr virus)
augugguaacaggu

SEQ ID NO: 311120 - RNA, 18 nt, Human herpesvirus 4 (Epstein-Barr virus)
augugguuuguauggcua

SEQ ID NO: 311121 - RNA, 22 nt, Human herpesvirus 4 (Epstein-Barr virus)
auguuacccucauugugcugaa

SEQ ID NO: 311122 - RNA, 21 nt, Human herpesvirus 4 (Epstein-Barr virus)
auguuauccacaccaucccaa

SEQ ID NO: 311123 - RNA, 23 nt, Human herpesvirus 4 (Epstein-Barr virus)
auguucucgugcaagcagcaccu

SEQ ID NO: 311124 - RNA, 12 nt, Human herpesvirus 4 (Epstein-Barr virus)
auguucucuaac

SEQ ID NO: 311125 - RNA, 21 nt, Human herpesvirus 4 (Epstein-Barr virus)
auguucucuaacuguguccca

SEQ ID NO: 311126 - RNA, 14 nt, Human herpesvirus 4 (Epstein-Barr virus)
auguucugugcagu

SEQ ID NO: 311127 - RNA, 16 nt, Human herpesvirus 4 (Epstein-Barr virus)
auguuucccuccaagc

SEQ ID NO: 311128 - RNA, 17 nt, Human herpesvirus 4 (Epstein-Barr virus)
auguuucuguggcugcc

SEQ ID NO: 311129 - RNA, 17 nt, Human herpesvirus 4 (Epstein-Barr virus)
auguuuggguuauugac

SEQ ID NO: 311130 - RNA, 22 nt, Human herpesvirus 4 (Epstein-Barr virus)
auguuuucuggacacaggacua

SEQ ID NO: 311131 - RNA, 17 nt, Human herpesvirus 4 (Epstein-Barr virus)
auuaagaacaaguacca

SEQ ID NO: 311132 - RNA, 19 nt, Human herpesvirus 4 (Epstein-Barr virus)
auuaagagucccuccucac

SEQ ID NO: 311133 - RNA, 19 nt, Human herpesvirus 4 (Epstein-Barr virus)
auuaaucagaaauuugcac

SEQ ID NO: 311134 - RNA, 16 nt, Human herpesvirus 4 (Epstein-Barr virus)
auuagaagaugaugca

SEQ ID NO: 311135 - RNA, 17 nt, Human herpesvirus 4 (Epstein-Barr virus)
auuaggagcagggccca

SEQ ID NO: 311136 - RNA, 19 nt, Human herpesvirus 4 (Epstein-Barr virus)
auuaggcacuggacacaca

SEQ ID NO: 311137 - RNA, 20 nt, Human herpesvirus 4 (Epstein-Barr virus)
auuauagcucuggcacugcu

SEQ ID NO: 311138 - RNA, 21 nt, Human herpesvirus 4 (Epstein-Barr virus)
auuauagcucuggcacugcua

SEQ ID NO: 311139 - RNA, 16 nt, Human herpesvirus 4 (Epstein-Barr virus)
auuaugguaaggcucu

SEQ ID NO: 311140 - RNA, 13 nt, Human herpesvirus 4 (Epstein-Barr virus)
auuauuuaccaca

SEQ ID NO: 311141 - RNA, 13 nt, Human herpesvirus 4 (Epstein-Barr virus)
auucacaucucag

SEQ ID NO: 311142 - RNA, 22 nt, Human herpesvirus 4 (Epstein-Barr virus)
auucaccuugaggugccacaga

SEQ ID NO: 311143 - RNA, 15 nt, Human herpesvirus 4 (Epstein-Barr virus)
auucacugggacaac

SEQ ID NO: 311144 - RNA, 21 nt, Human herpesvirus 4 (Epstein-Barr virus)
auucacugggacaacugucac

SEQ ID NO: 311145 - RNA, 22 nt, Human herpesvirus 4 (Epstein-Barr virus)
auucacugggacaacugucaca

SEQ ID NO: 311146 - RNA, 21 nt, Human herpesvirus 4 (Epstein-Barr virus)
auuccaccaacacgaccccaa

SEQ ID NO: 311147 - RNA, 16 nt, Human herpesvirus 4 (Epstein-Barr virus)
auuccaggugugcuuc

SEQ ID NO: 311148 - RNA, 14 nt, Human herpesvirus 4 (Epstein-Barr virus)
auucccccaugaga

SEQ ID NO: 311149 - RNA, 15 nt, Human herpesvirus 4 (Epstein-Barr virus)
auuccuguccaugac

SEQ ID NO: 311150 - RNA, 14 nt, Human herpesvirus 4 (Epstein-Barr virus)
auucgacaggccau

SEQ ID NO: 311151 - RNA, 16 nt, Human herpesvirus 4 (Epstein-Barr virus)
auucucguccaucucg

SEQ ID NO: 311152 - RNA, 17 nt, Human herpesvirus 4 (Epstein-Barr virus)
aucaaccuguauaauga

SEQ ID NO: 311153 - RNA, 13 nt, Human herpesvirus 4 (Epstein-Barr virus)
aucacaggacaag

SEQ ID NO: 311154 - RNA, 12 nt, Human herpesvirus 4 (Epstein-Barr virus)
aucacagggaca

SEQ ID NO: 311155 - RNA, 17 nt, Human herpesvirus 4 (Epstein-Barr virus)
aucacagggacaucuac

SEQ ID NO: 311156 - RNA, 16 nt, Human herpesvirus 4 (Epstein-Barr virus)
aucacaucaagcagaa

SEQ ID NO: 311157 - RNA, 15 nt, Human herpesvirus 4 (Epstein-Barr virus)
aucacccauggccag

SEQ ID NO: 311158 - RNA, 17 nt, Human herpesvirus 4 (Epstein-Barr virus)
aucaccuggguacccaa

SEQ ID NO: 311159 - RNA, 18 nt, Human herpesvirus 4 (Epstein-Barr virus)
aucacuggcaaagggcau

SEQ ID NO: 311160 - RNA, 14 nt, Human herpesvirus 4 (Epstein-Barr virus)
aucagaaauuugca

SEQ ID NO: 311161 - RNA, 23 nt, Human herpesvirus 4 (Epstein-Barr virus)
aucagagccccaugcuuacucaa

SEQ ID NO: 311162 - RNA, 20 nt, Human herpesvirus 4 (Epstein-Barr virus)
aucagcaaccuugggggcaa

SEQ ID NO: 311163 - RNA, 13 nt, Human herpesvirus 4 (Epstein-Barr virus)
aucagcaucgcuu

SEQ ID NO: 311164 - RNA, 14 nt, Human herpesvirus 4 (Epstein-Barr virus)
aucauauggugggg

SEQ ID NO: 311165 - RNA, 14 nt, Human herpesvirus 4 (Epstein-Barr virus)
aucaugcgugcugu

SEQ ID NO: 311166 - RNA, 23 nt, Human herpesvirus 4 (Epstein-Barr virus)
aucauggaaaccacucagacucu

SEQ ID NO: 311167 - RNA, 20 nt, Human herpesvirus 4 (Epstein-Barr virus)
aucauggccgacgaggcccu

SEQ ID NO: 311168 - RNA, 23 nt, Human herpesvirus 4 (Epstein-Barr virus)
auccacagccccacucuugccuc

SEQ ID NO: 311169 - RNA, 16 nt, Human herpesvirus 4 (Epstein-Barr virus)
auccaccaucaauguc

SEQ ID NO: 311170 - RNA, 16 nt, Human herpesvirus 4 (Epstein-Barr virus)
aucccauuuuucacua

SEQ ID NO: 311171 - RNA, 20 nt, Human herpesvirus 4 (Epstein-Barr virus)
auccccaguagacaucaugc

SEQ ID NO: 311172 - RNA, 18 nt, Human herpesvirus 4 (Epstein-Barr virus)
aucccggcccucuuccgu

SEQ ID NO: 311173 - RNA, 17 nt, Human herpesvirus 4 (Epstein-Barr virus)
auccgaaagcacuuuga

SEQ ID NO: 311174 - RNA, 18 nt, Human herpesvirus 4 (Epstein-Barr virus)
auccggugccugagacag

SEQ ID NO: 311175 - RNA, 12 nt, Human herpesvirus 4 (Epstein-Barr virus)
auccuguacaaa

SEQ ID NO: 311176 - RNA, 13 nt, Human herpesvirus 4 (Epstein-Barr virus)
auccuucuggcac

SEQ ID NO: 311177 - RNA, 21 nt, Human herpesvirus 4 (Epstein-Barr virus)
auccuuuauaugaaaaugugu

SEQ ID NO: 311178 - RNA, 17 nt, Human herpesvirus 4 (Epstein-Barr virus)
aucgacacacgagccau

SEQ ID NO: 311179 - RNA, 20 nt, Human herpesvirus 4 (Epstein-Barr virus)
aucgacacacgagccauaga

SEQ ID NO: 311180 - RNA, 15 nt, Human herpesvirus 4 (Epstein-Barr virus)
aucuaaugaugucca

SEQ ID NO: 311181 - RNA, 19 nt, Human herpesvirus 4 (Epstein-Barr virus)
aucuacaacaaaacuggug

SEQ ID NO: 311182 - RNA, 18 nt, Human herpesvirus 4 (Epstein-Barr virus)
aucuacccaacagucuuc

SEQ ID NO: 311183 - RNA, 22 nt, Human herpesvirus 4 (Epstein-Barr virus)
aucuacuuauuggagaugcucu

SEQ ID NO: 311184 - RNA, 22 nt, Human herpesvirus 4 (Epstein-Barr virus)
aucucaagggaggagugcugca

SEQ ID NO: 311185 - RNA, 14 nt, Human herpesvirus 4 (Epstein-Barr virus)
aucucagggacaac

SEQ ID NO: 311186 - RNA, 21 nt, Human herpesvirus 4 (Epstein-Barr virus)
aucuccaccuguguaaccuca

SEQ ID NO: 311187 - RNA, 22 nt, Human herpesvirus 4 (Epstein-Barr virus)
aucucugauuauagcucuggca

SEQ ID NO: 311188 - RNA, 23 nt, Human herpesvirus 4 (Epstein-Barr virus)
aucucugauuauagcucuggcac

SEQ ID NO: 311189 - RNA, 21 nt, Human herpesvirus 4 (Epstein-Barr virus)
aucugcucuucaaccuuggca

SEQ ID NO: 311190 - RNA, 23 nt, Human herpesvirus 4 (Epstein-Barr virus)
aucugcuucuggaccgugccauc

SEQ ID NO: 311191 - RNA, 21 nt, Human herpesvirus 4 (Epstein-Barr virus)
aucuggauguauuaccaugga

SEQ ID NO: 311192 - RNA, 14 nt, Human herpesvirus 4 (Epstein-Barr virus)
aucuguacuuuuau

SEQ ID NO: 311193 - RNA, 22 nt, Human herpesvirus 4 (Epstein-Barr virus)
aucugucucuaacaguucacuu

SEQ ID NO: 311194 - RNA, 21 nt, Human herpesvirus 4 (Epstein-Barr virus)
aucuuaccccuggcuuccacu

SEQ ID NO: 311195 - RNA, 20 nt, Human herpesvirus 4 (Epstein-Barr virus)
augaaaccuuuuauucuuga

SEQ ID NO: 311196 - RNA, 15 nt, Human herpesvirus 4 (Epstein-Barr virus)
augaaauggaaaaua

SEQ ID NO: 311197 - RNA, 15 nt, Human herpesvirus 4 (Epstein-Barr virus)
augaacccuggggca

SEQ ID NO: 311198 - RNA, 18 nt, Human herpesvirus 4 (Epstein-Barr virus)
augaacuggucaccagcu

SEQ ID NO: 311199 - RNA, 18 nt, Human herpesvirus 4 (Epstein-Barr virus)
augaaggcuggcaaagau

SEQ ID NO: 311200 - RNA, 15 nt, Human herpesvirus 4 (Epstein-Barr virus)
augacacaggacaac

SEQ ID NO: 311201 - RNA, 15 nt, Human herpesvirus 4 (Epstein-Barr virus)
augagaccaguggca

SEQ ID NO: 311202 - RNA, 16 nt, Human herpesvirus 4 (Epstein-Barr virus)
augagauugccaagau

SEQ ID NO: 311203 - RNA, 18 nt, Human herpesvirus 4 (Epstein-Barr virus)
agguacuaacacgcaaua

SEQ ID NO: 311204 - RNA, 19 nt, Human herpesvirus 4 (Epstein-Barr virus)
agguaucuggaucuacuua

SEQ ID NO: 311205 - RNA, 15 nt, Human herpesvirus 4 (Epstein-Barr virus)
aggucaaaguucuuu

SEQ ID NO: 311206 - RNA, 17 nt, Human herpesvirus 4 (Epstein-Barr virus)
aggugacagcagcagug

SEQ ID NO: 311207 - RNA, 15 nt, Human herpesvirus 4 (Epstein-Barr virus)
aggugccacagagca

SEQ ID NO: 311208 - RNA, 22 nt, Human herpesvirus 4 (Epstein-Barr virus)
aggugccacagagcaucagaug

SEQ ID NO: 311209 - RNA, 20 nt, Human herpesvirus 4 (Epstein-Barr virus)
aggugcucaaggcagucucc

SEQ ID NO: 311210 - RNA, 16 nt, Human herpesvirus 4 (Epstein-Barr virus)
aggugggacaaaaugg

SEQ ID NO: 311211 - RNA, 12 nt, Human herpesvirus 4 (Epstein-Barr virus)
agguguacucuc

SEQ ID NO: 311212 - RNA, 15 nt, Human herpesvirus 4 (Epstein-Barr virus)
agguuacuuucccgu

SEQ ID NO: 311213 - RNA, 22 nt, Human herpesvirus 4 (Epstein-Barr virus)
agguuagcguggacaguuugau

SEQ ID NO: 311214 - RNA, 13 nt, Human herpesvirus 4 (Epstein-Barr virus)
agguuauuuugcc

SEQ ID NO: 311215 - RNA, 22 nt, Human herpesvirus 4 (Epstein-Barr virus)
agguucucuucacuaaggcagu

SEQ ID NO: 311216 - RNA, 14 nt, Human herpesvirus 4 (Epstein-Barr virus)
agguuugacuucau

SEQ ID NO: 311217 - RNA, 16 nt, Human herpesvirus 4 (Epstein-Barr virus)
agguuugacuucauau

SEQ ID NO: 311218 - RNA, 24 nt, Human herpesvirus 4 (Epstein-Barr virus)
agguuugacuucauauguaugccu

SEQ ID NO: 311219 - RNA, 14 nt, Human herpesvirus 4 (Epstein-Barr virus)
aguaaaguguaaca

SEQ ID NO: 311220 - RNA, 14 nt, Human herpesvirus 4 (Epstein-Barr virus)
aguaaccacauaua

SEQ ID NO: 311221 - RNA, 22 nt, Human herpesvirus 4 (Epstein-Barr virus)
aguaagaugcauacgcugagug

SEQ ID NO: 311222 - RNA, 17 nt, Human herpesvirus 4 (Epstein-Barr virus)
aguaaggccgcugccag

SEQ ID NO: 311223 - RNA, 13 nt, Human herpesvirus 4 (Epstein-Barr virus)
aguacacuagcug

SEQ ID NO: 311224 - RNA, 22 nt, Human herpesvirus 4 (Epstein-Barr virus)
aguacacuagcuguuugcucua

SEQ ID NO: 311225 - RNA, 21 nt, Human herpesvirus 4 (Epstein-Barr virus)
aguaccagcccuuuuuccagu

SEQ ID NO: 311226 - RNA, 14 nt, Human herpesvirus 4 (Epstein-Barr virus)
aguagaggacaccc

SEQ ID NO: 311227 - RNA, 21 nt, Human herpesvirus 4 (Epstein-Barr virus)
aguaugaaggcuggcaaagau

SEQ ID NO: 311228 - RNA, 21 nt, Human herpesvirus 4 (Epstein-Barr virus)
agucaaaauucgcgaugcuau

SEQ ID NO: 311229 - RNA, 16 nt, Human herpesvirus 4 (Epstein-Barr virus)
agucauccgaggcuga

SEQ ID NO: 311230 - RNA, 21 nt, Human herpesvirus 4 (Epstein-Barr virus)
agucaugucgagcaugagcuc

SEQ ID NO: 311231 - RNA, 17 nt, Human herpesvirus 4 (Epstein-Barr virus)
agucauuagcggccuga

SEQ ID NO: 311232 - RNA, 21 nt, Human herpesvirus 4 (Epstein-Barr virus)
agucccaacaacuuccaacgc

SEQ ID NO: 311233 - RNA, 21 nt, Human herpesvirus 4 (Epstein-Barr virus)
agucggugggcgguccuccac

SEQ ID NO: 311234 - RNA, 13 nt, Human herpesvirus 4 (Epstein-Barr virus)
agucuauccagga

SEQ ID NO: 311235 - RNA, 18 nt, Human herpesvirus 4 (Epstein-Barr virus)
agucucgccaucuaccca

SEQ ID NO: 311236 - RNA, 20 nt, Human herpesvirus 4 (Epstein-Barr virus)
agucucgccaucuacccaac

SEQ ID NO: 311237 - RNA, 22 nt, Human herpesvirus 4 (Epstein-Barr virus)
agucugacuacucagaugaaga

SEQ ID NO: 311238 - RNA, 18 nt, Human herpesvirus 4 (Epstein-Barr virus)
agucuuugcaauuugccu

SEQ ID NO: 311239 - RNA, 21 nt, Human herpesvirus 4 (Epstein-Barr virus)
agugacgaagacccaucugag

SEQ ID NO: 311240 - RNA, 23 nt, Human herpesvirus 4 (Epstein-Barr virus)
agugacgaagacccaucugaggg

SEQ ID NO: 311241 - RNA, 23 nt, Human herpesvirus 4 (Epstein-Barr virus)
agugagccccacaaacaccagug

SEQ ID NO: 311242 - RNA, 14 nt, Human herpesvirus 4 (Epstein-Barr virus)
agugauaagucaug

SEQ ID NO: 311243 - RNA, 12 nt, Human herpesvirus 4 (Epstein-Barr virus)
agugaucaucuc

SEQ ID NO: 311244 - RNA, 15 nt, Human herpesvirus 4 (Epstein-Barr virus)
agugauuaggagcag

SEQ ID NO: 311245 - RNA, 21 nt, Human herpesvirus 4 (Epstein-Barr virus)
agugcugcagguaaaccuucu

SEQ ID NO: 311246 - RNA, 13 nt, Human herpesvirus 4 (Epstein-Barr virus)
aguggaugcaucg

SEQ ID NO: 311247 - RNA, 18 nt, Human herpesvirus 4 (Epstein-Barr virus)
aguggucaccgguggugg

SEQ ID NO: 311248 - RNA, 20 nt, Human herpesvirus 4 (Epstein-Barr virus)
aguggucuacccggucgcau

SEQ ID NO: 311249 - RNA, 17 nt, Human herpesvirus 4 (Epstein-Barr virus)
agugguucaguggacac

SEQ ID NO: 311250 - RNA, 16 nt, Human herpesvirus 4 (Epstein-Barr virus)
agugugccucuguuau

SEQ ID NO: 311251 - RNA, 17 nt, Human herpesvirus 4 (Epstein-Barr virus)
aguguuuccagacacca

SEQ ID NO: 311252 - RNA, 10 nt, Human herpesvirus 4 (Epstein-Barr virus)
agcaguagcu

SEQ ID NO: 311253 - RNA, 19 nt, Human herpesvirus 4 (Epstein-Barr virus)
agcaugaucaggacccugg

SEQ ID NO: 311254 - RNA, 17 nt, Human herpesvirus 4 (Epstein-Barr virus)
agcauggcggccuggca

SEQ ID NO: 311255 - RNA, 17 nt, Human herpesvirus 4 (Epstein-Barr virus)
agcaugucacacauucc

SEQ ID NO: 311256 - RNA, 12 nt, Human herpesvirus 4 (Epstein-Barr virus)
agcauucuauca

SEQ ID NO: 311257 - RNA, 16 nt, Human herpesvirus 4 (Epstein-Barr virus)
agcauuggcgucggga

SEQ ID NO: 311258 - RNA, 16 nt, Human herpesvirus 4 (Epstein-Barr virus)
agccacacaaucagcc

SEQ ID NO: 311259 - RNA, 18 nt, Human herpesvirus 4 (Epstein-Barr virus)
agccacaggcauugcuaa

SEQ ID NO: 311260 - RNA, 16 nt, Human herpesvirus 4 (Epstein-Barr virus)
agccacauucuggaac

SEQ ID NO: 311261 - RNA, 15 nt, Human herpesvirus 4 (Epstein-Barr virus)
agccaccggccaagg

SEQ ID NO: 311262 - RNA, 19 nt, Human herpesvirus 4 (Epstein-Barr virus)
agccagccggguccgugcg

SEQ ID NO: 311263 - RNA, 22 nt, Human herpesvirus 4 (Epstein-Barr virus)
agccaggcucgcggaagagccc

SEQ ID NO: 311264 - RNA, 21 nt, Human herpesvirus 4 (Epstein-Barr virus)
agccagggugaccuggcucag

SEQ ID NO: 311265 - RNA, 20 nt, Human herpesvirus 4 (Epstein-Barr virus)
agcccaagaagaagcccacc

SEQ ID NO: 311266 - RNA, 16 nt, Human herpesvirus 4 (Epstein-Barr virus)
agcccagcccuccgca

SEQ ID NO: 311267 - RNA, 22 nt, Human herpesvirus 4 (Epstein-Barr virus)
agcccagcccuccgcagccgcu

SEQ ID NO: 311268 - RNA, 16 nt, Human herpesvirus 4 (Epstein-Barr virus)
agccccacucuugccu

SEQ ID NO: 311269 - RNA, 22 nt, Human herpesvirus 4 (Epstein-Barr virus)
agccccaugcuuacucaaucca

SEQ ID NO: 311270 - RNA, 23 nt, Human herpesvirus 4 (Epstein-Barr virus)
agccccaugcuuacucaauccau

SEQ ID NO: 311271 - RNA, 12 nt, Human herpesvirus 4 (Epstein-Barr virus)
agcccuccucag

SEQ ID NO: 311272 - RNA, 20 nt, Human herpesvirus 4 (Epstein-Barr virus)
agccgucgauaccgggucag

SEQ ID NO: 311273 - RNA, 12 nt, Human herpesvirus 4 (Epstein-Barr virus)
agccgugucucc

SEQ ID NO: 311274 - RNA, 22 nt, Human herpesvirus 4 (Epstein-Barr virus)
agccgugucuccugacgccaau

SEQ ID NO: 311275 - RNA, 22 nt, Human herpesvirus 4 (Epstein-Barr virus)
agccuaauuguguauugcucuc

SEQ ID NO: 311276 - RNA, 22 nt, Human herpesvirus 4 (Epstein-Barr virus)
agccuacaaaaguacacuagcu

SEQ ID NO: 311277 - RNA, 16 nt, Human herpesvirus 4 (Epstein-Barr virus)
agccuacucuccacuc

SEQ ID NO: 311278 - RNA, 13 nt, Human herpesvirus 4 (Epstein-Barr virus)
agccugacucuca

SEQ ID NO: 311279 - RNA, 17 nt, Human herpesvirus 4 (Epstein-Barr virus)
agccugagccacaccca

SEQ ID NO: 311280 - RNA, 15 nt, Human herpesvirus 4 (Epstein-Barr virus)
agccugcccauccau

SEQ ID NO: 311281 - RNA, 16 nt, Human herpesvirus 4 (Epstein-Barr virus)
agcgaagaacacucca

SEQ ID NO: 311282 - RNA, 17 nt, Human herpesvirus 4 (Epstein-Barr virus)
agcgacgaggaugaagc

SEQ ID NO: 311283 - RNA, 16 nt, Human herpesvirus 4 (Epstein-Barr virus)
agcgaggauaaucugg

SEQ ID NO: 311284 - RNA, 14 nt, Human herpesvirus 4 (Epstein-Barr virus)
agcgcacccgggga

SEQ ID NO: 311285 - RNA, 21 nt, Human herpesvirus 4 (Epstein-Barr virus)
agcgccuugaucuucuucucc

SEQ ID NO: 311286 - RNA, 14 nt, Human herpesvirus 4 (Epstein-Barr virus)
agcggcuaccuguc

SEQ ID NO: 311287 - RNA, 15 nt, Human herpesvirus 4 (Epstein-Barr virus)
agcgggccugagucc

SEQ ID NO: 311288 - RNA, 18 nt, Human herpesvirus 4 (Epstein-Barr virus)
agcggguggaggagcucc

SEQ ID NO: 311289 - RNA, 15 nt, Human herpesvirus 4 (Epstein-Barr virus)
agcggucucagacac

SEQ ID NO: 311290 - RNA, 13 nt, Human herpesvirus 4 (Epstein-Barr virus)
agcgucacugauu

SEQ ID NO: 311291 - RNA, 14 nt, Human herpesvirus 4 (Epstein-Barr virus)
agcuaacaggacau

SEQ ID NO: 311292 - RNA, 17 nt, Human herpesvirus 4 (Epstein-Barr virus)
agcuaacaggacauguu

SEQ ID NO: 311293 - RNA, 23 nt, Human herpesvirus 4 (Epstein-Barr virus)
agcuacacucuggggucucaggc

SEQ ID NO: 311294 - RNA, 21 nt, Human herpesvirus 4 (Epstein-Barr virus)
agcuaccgaugauucuggcca

SEQ ID NO: 311295 - RNA, 19 nt, Human herpesvirus 4 (Epstein-Barr virus)
agcuauauucaccuugagg

SEQ ID NO: 311296 - RNA, 22 nt, Human herpesvirus 4 (Epstein-Barr virus)
agcuauuugaucuuugacugac

SEQ ID NO: 311297 - RNA, 20 nt, Human herpesvirus 4 (Epstein-Barr virus)
agcucacuuucaguggaugc

SEQ ID NO: 311298 - RNA, 14 nt, Human herpesvirus 4 (Epstein-Barr virus)
agcuccgcccucac

SEQ ID NO: 311299 - RNA, 20 nt, Human herpesvirus 4 (Epstein-Barr virus)
agcucuacaaccccuuccac

SEQ ID NO: 311300 - RNA, 14 nt, Human herpesvirus 4 (Epstein-Barr virus)
agcucuggcacugc

SEQ ID NO: 311301 - RNA, 14 nt, Human herpesvirus 4 (Epstein-Barr virus)
agcucuuggucaag

SEQ ID NO: 311302 - RNA, 20 nt, Human herpesvirus 4 (Epstein-Barr virus)
agcugacggugggcaugaca

SEQ ID NO: 311303 - RNA, 15 nt, Human herpesvirus 4 (Epstein-Barr virus)
agcugagcgugugca

SEQ ID NO: 311304 - RNA, 17 nt, Human herpesvirus 4 (Epstein-Barr virus)
agcuggaugguguugga

SEQ ID NO: 311305 - RNA, 16 nt, Human herpesvirus 4 (Epstein-Barr virus)
agcuguguacgugccu

SEQ ID NO: 311306 - RNA, 17 nt, Human herpesvirus 4 (Epstein-Barr virus)
agcuguguacgugccuc

SEQ ID NO: 311307 - RNA, 18 nt, Human herpesvirus 4 (Epstein-Barr virus)
agcuguuugcucuauucg

SEQ ID NO: 311308 - RNA, 20 nt, Human herpesvirus 4 (Epstein-Barr virus)
agcuucugaggcggcugugg

SEQ ID NO: 311309 - RNA, 22 nt, Human herpesvirus 4 (Epstein-Barr virus)
agcuucugaggcggcuguggcc

SEQ ID NO: 311310 - RNA, 13 nt, Human herpesvirus 4 (Epstein-Barr virus)
agcuugggaacac

SEQ ID NO: 311311 - RNA, 16 nt, Human herpesvirus 4 (Epstein-Barr virus)
agcuugggaacaccgg

SEQ ID NO: 311312 - RNA, 20 nt, Human herpesvirus 4 (Epstein-Barr virus)
agcuuuuggccuucuuccua

SEQ ID NO: 311313 - RNA, 15 nt, Human herpesvirus 4 (Epstein-Barr virus)
aggaaaugaacccag

SEQ ID NO: 311314 - RNA, 23 nt, Human herpesvirus 4 (Epstein-Barr virus)
aggaacuccgcccaggucuugcc

SEQ ID NO: 311315 - RNA, 15 nt, Human herpesvirus 4 (Epstein-Barr virus)
aggaagagacuucac

SEQ ID NO: 311316 - RNA, 16 nt, Human herpesvirus 4 (Epstein-Barr virus)
aggaagaguaccccag

SEQ ID NO: 311317 - RNA, 16 nt, Human herpesvirus 4 (Epstein-Barr virus)
aggaaggcuugccaaa

SEQ ID NO: 311318 - RNA, 23 nt, Human herpesvirus 4 (Epstein-Barr virus)
aggacacccaccaccaggcgguu

SEQ ID NO: 311319 - RNA, 16 nt, Human herpesvirus 4 (Epstein-Barr virus)
aggacacgugacaugu

SEQ ID NO: 311320 - RNA, 13 nt, Human herpesvirus 4 (Epstein-Barr virus)
aggacacugccaa

SEQ ID NO: 311321 - RNA, 16 nt, Human herpesvirus 4 (Epstein-Barr virus)
aggaccugggagggcc

SEQ ID NO: 311322 - RNA, 15 nt, Human herpesvirus 4 (Epstein-Barr virus)
aggaccuggugguga

SEQ ID NO: 311323 - RNA, 17 nt, Human herpesvirus 4 (Epstein-Barr virus)
aggagacuggcaacucc

SEQ ID NO: 311324 - RNA, 20 nt, Human herpesvirus 4 (Epstein-Barr virus)
aggagauggcgccguuugac

SEQ ID NO: 311325 - RNA, 17 nt, Human herpesvirus 4 (Epstein-Barr virus)
aggagcagggcccagug

SEQ ID NO: 311326 - RNA, 20 nt, Human herpesvirus 4 (Epstein-Barr virus)
aggagcagggcccagugcac

SEQ ID NO: 311327 - RNA, 15 nt, Human herpesvirus 4 (Epstein-Barr virus)
aggagccccgggcgg

SEQ ID NO: 311328 - RNA, 19 nt, Human herpesvirus 4 (Epstein-Barr virus)
aggagcguguccccgugga

SEQ ID NO: 311329 - RNA, 18 nt, Human herpesvirus 4 (Epstein-Barr virus)
aggaggaagagacuucac

SEQ ID NO: 311330 - RNA, 20 nt, Human herpesvirus 4 (Epstein-Barr virus)
aggaggggcaggaggggcag

SEQ ID NO: 311331 - RNA, 18 nt, Human herpesvirus 4 (Epstein-Barr virus)
aggaggggggcagugaua

SEQ ID NO: 311332 - RNA, 19 nt, Human herpesvirus 4 (Epstein-Barr virus)
aggaggggggcagugauaa

SEQ ID NO: 311333 - RNA, 12 nt, Human herpesvirus 4 (Epstein-Barr virus)
aggagugcugca

SEQ ID NO: 311334 - RNA, 14 nt, Human herpesvirus 4 (Epstein-Barr virus)
aggaucagggccaa

SEQ ID NO: 311335 - RNA, 18 nt, Human herpesvirus 4 (Epstein-Barr virus)
aggaucagggccaagaca

SEQ ID NO: 311336 - RNA, 15 nt, Human herpesvirus 4 (Epstein-Barr virus)
aggaugaagauccaa

SEQ ID NO: 311337 - RNA, 17 nt, Human herpesvirus 4 (Epstein-Barr virus)
aggaugauccuguacaa

SEQ ID NO: 311338 - RNA, 22 nt, Human herpesvirus 4 (Epstein-Barr virus)
aggcaccggucucguccaucuu

SEQ ID NO: 311339 - RNA, 21 nt, Human herpesvirus 4 (Epstein-Barr virus)
aggcagaggaaggccacaaag

SEQ ID NO: 311340 - RNA, 17 nt, Human herpesvirus 4 (Epstein-Barr virus)
ugaacacucauggugug

SEQ ID NO: 311341 - RNA, 22 nt, Human herpesvirus 4 (Epstein-Barr virus)
ugaacaucuggcuggggcauua

SEQ ID NO: 311342 - RNA, 21 nt, Human herpesvirus 4 (Epstein-Barr virus)
ugaaccagaauaaucucccca

SEQ ID NO: 311343 - RNA, 18 nt, Human herpesvirus 4 (Epstein-Barr virus)
gcacaacggcugugacua

SEQ ID NO: 311344 - RNA, 15 nt, Human herpesvirus 4 (Epstein-Barr virus)
gcacauuuuguucua

SEQ ID NO: 311345 - RNA, 18 nt, Human herpesvirus 4 (Epstein-Barr virus)
gcaccagcuaacaggaca

SEQ ID NO: 311346 - RNA, 16 nt, Human herpesvirus 4 (Epstein-Barr virus)
gcaccauagcauguca

SEQ ID NO: 311347 - RNA, 23 nt, Human herpesvirus 4 (Epstein-Barr virus)
gcaccgcggcaaaaauaugcaau

SEQ ID NO: 311348 - RNA, 15 nt, Human herpesvirus 4 (Epstein-Barr virus)
gcaccggagccacca

SEQ ID NO: 311349 - RNA, 16 nt, Human herpesvirus 4 (Epstein-Barr virus)
gcaccgucagccacac

SEQ ID NO: 311350 - RNA, 11 nt, Human herpesvirus 4 (Epstein-Barr virus)
gcaccucgggc

SEQ ID NO: 311351 - RNA, 20 nt, Human herpesvirus 4 (Epstein-Barr virus)
gcaccuguguccugggcaag

SEQ ID NO: 311352 - RNA, 22 nt, Human herpesvirus 4 (Epstein-Barr virus)
gcacggccgggcuaaucagcuu

SEQ ID NO: 311353 - RNA, 11 nt, Human herpesvirus 4 (Epstein-Barr virus)
gcacucauggu

SEQ ID NO: 311354 - RNA, 20 nt, Human herpesvirus 4 (Epstein-Barr virus)
gcacucgcccacuaaccuua

SEQ ID NO: 311355 - RNA, 14 nt, Human herpesvirus 4 (Epstein-Barr virus)
gcacuuucuuugcu

SEQ ID NO: 311356 - RNA, 13 nt, Human herpesvirus 4 (Epstein-Barr virus)
gcagaaggccaug

SEQ ID NO: 311357 - RNA, 11 nt, Human herpesvirus 4 (Epstein-Barr virus)
uaaauuugcug

SEQ ID NO: 311358 - RNA, 18 nt, Human herpesvirus 4 (Epstein-Barr virus)
uaacaagaacugggauga

SEQ ID NO: 311359 - RNA, 17 nt, Human herpesvirus 4 (Epstein-Barr virus)
uaacaggugggacaaaa

SEQ ID NO: 311360 - RNA, 20 nt, Human herpesvirus 4 (Epstein-Barr virus)
uaacaggugggacaaaaugg

SEQ ID NO: 311361 - RNA, 16 nt, Human herpesvirus 4 (Epstein-Barr virus)
uaacaguucacuuccu

SEQ ID NO: 311362 - RNA, 16 nt, Human herpesvirus 4 (Epstein-Barr virus)
uaaccacaacugcuau

SEQ ID NO: 311363 - RNA, 18 nt, Human herpesvirus 4 (Epstein-Barr virus)
uccaagugcuaugaccau

SEQ ID NO: 311364 - RNA, 11 nt, Human herpesvirus 4 (Epstein-Barr virus)
uccacaccauc

SEQ ID NO: 311365 - RNA, 22 nt, Human herpesvirus 4 (Epstein-Barr virus)
uccaccugccggagggacagua

SEQ ID NO: 311366 - RNA, 19 nt, Human herpesvirus 4 (Epstein-Barr virus)
uccaccuguguaaccucac

SEQ ID NO: 311367 - RNA, 20 nt, Human herpesvirus 4 (Epstein-Barr virus)
uccacggccguagcccaguc

SEQ ID NO: 311368 - RNA, 13 nt, Human herpesvirus 4 (Epstein-Barr virus)
uccacggggacac

SEQ ID NO: 311369 - RNA, 13 nt, Human herpesvirus 4 (Epstein-Barr virus)
uccacucccaguc

SEQ ID NO: 311370 - RNA, 16 nt, Human herpesvirus 4 (Epstein-Barr virus)
uccacucccaguccau

SEQ ID NO: 311371 - RNA, 22 nt, Human herpesvirus 4 (Epstein-Barr virus)
uccagaagucggccacagggga

SEQ ID NO: 311372 - RNA, 16 nt, Human herpesvirus 4 (Epstein-Barr virus)
uccagacgcgauggca

SEQ ID NO: 311373 - RNA, 13 nt, Human herpesvirus 4 (Epstein-Barr virus)
uccagacuaugca

SEQ ID NO: 311374 - RNA, 18 nt, Human herpesvirus 4 (Epstein-Barr virus)
uccagacuaugcauacac

SEQ ID NO: 311375 - RNA, 23 nt, Human herpesvirus 4 (Epstein-Barr virus)
uccagaugcaccgggaugagcug

SEQ ID NO: 311376 - RNA, 15 nt, Human herpesvirus 4 (Epstein-Barr virus)
uccagccaucaugcu

SEQ ID NO: 311377 - RNA, 17 nt, Human herpesvirus 4 (Epstein-Barr virus)
uccaggcuccuggaucu

SEQ ID NO: 311378 - RNA, 14 nt, Human herpesvirus 4 (Epstein-Barr virus)
uccaggggccacac

SEQ ID NO: 311379 - RNA, 21 nt, Human herpesvirus 4 (Epstein-Barr virus)
uccagguguggaaaaucucgc

SEQ ID NO: 311380 - RNA, 13 nt, Human herpesvirus 4 (Epstein-Barr virus)
uccaguggcaugg

SEQ ID NO: 311381 - RNA, 14 nt, Human herpesvirus 4 (Epstein-Barr virus)
uccaucagggccag

SEQ ID NO: 311382 - RNA, 17 nt, Human herpesvirus 4 (Epstein-Barr virus)
uccaucagggccaggcu

SEQ ID NO: 311383 - RNA, 17 nt, Human herpesvirus 4 (Epstein-Barr virus)
uccauccaguggggcuu

SEQ ID NO: 311384 - RNA, 17 nt, Human herpesvirus 4 (Epstein-Barr virus)
uccaucuccaucagggc

SEQ ID NO: 311385 - RNA, 17 nt, Human herpesvirus 4 (Epstein-Barr virus)
uccauguccuguggugu

SEQ ID NO: 311386 - RNA, 15 nt, Human herpesvirus 4 (Epstein-Barr virus)
ucccaacaacuucca

SEQ ID NO: 311387 - RNA, 16 nt, Human herpesvirus 4 (Epstein-Barr virus)
ucccaacaacuuccaa

SEQ ID NO: 311388 - RNA, 14 nt, Human herpesvirus 4 (Epstein-Barr virus)
ucccaacccaaaac

SEQ ID NO: 311389 - RNA, 20 nt, Human herpesvirus 4 (Epstein-Barr virus)
ucccaaguguuuccagacac

SEQ ID NO: 311390 - RNA, 13 nt, Human herpesvirus 4 (Epstein-Barr virus)
ucccaauucacau

SEQ ID NO: 311391 - RNA, 18 nt, Human herpesvirus 4 (Epstein-Barr virus)
ucccaauucacaucucag

SEQ ID NO: 311392 - RNA, 23 nt, Human herpesvirus 4 (Epstein-Barr virus)
ucccacggaccccccucugaugg

SEQ ID NO: 311393 - RNA, 17 nt, Human herpesvirus 4 (Epstein-Barr virus)
ucccacuuuuaccccag

SEQ ID NO: 311394 - RNA, 19 nt, Human herpesvirus 4 (Epstein-Barr virus)
ucccacuuuuaccccaguc

SEQ ID NO: 311395 - RNA, 22 nt, Human herpesvirus 4 (Epstein-Barr virus)
ucccacuuuuaccccaguccca

SEQ ID NO: 311396 - RNA, 14 nt, Human herpesvirus 4 (Epstein-Barr virus)
ucccagccccaauu

SEQ ID NO: 311397 - RNA, 13 nt, Human herpesvirus 4 (Epstein-Barr virus)
ucccaggccucag

SEQ ID NO: 311398 - RNA, 14 nt, Human herpesvirus 4 (Epstein-Barr virus)
ucccagucuaucca

SEQ ID NO: 311399 - RNA, 16 nt, Human herpesvirus 4 (Epstein-Barr virus)
uccccuccuuggagcu

SEQ ID NO: 311400 - RNA, 21 nt, Human herpesvirus 4 (Epstein-Barr virus)
uccccucugcagagagccaca

SEQ ID NO: 311401 - RNA, 22 nt, Human herpesvirus 4 (Epstein-Barr virus)
uccccucugcagagagccacau

SEQ ID NO: 311402 - RNA, 20 nt, Human herpesvirus 4 (Epstein-Barr virus)
ucccucauucccccaugaga

SEQ ID NO: 311403 - RNA, 19 nt, Human herpesvirus 4 (Epstein-Barr virus)
ucccuccaagcggcacaga

SEQ ID NO: 311404 - RNA, 14 nt, Human herpesvirus 4 (Epstein-Barr virus)
ucccugagauguga

SEQ ID NO: 311405 - RNA, 15 nt, Human herpesvirus 4 (Epstein-Barr virus)
uccgaaagcacuuug

SEQ ID NO: 311406 - RNA, 13 nt, Human herpesvirus 4 (Epstein-Barr virus)
uccgcaccacaga

SEQ ID NO: 311407 - RNA, 18 nt, Human herpesvirus 4 (Epstein-Barr virus)
uccgccacccccguccag

SEQ ID NO: 311408 - RNA, 11 nt, Human herpesvirus 4 (Epstein-Barr virus)
uccgcccucac

SEQ ID NO: 311409 - RNA, 14 nt, Human herpesvirus 4 (Epstein-Barr virus)
uccgcgcucaacac

SEQ ID NO: 311410 - RNA, 18 nt, Human herpesvirus 4 (Epstein-Barr virus)
uccgcggugguggcccuc

SEQ ID NO: 311411 - RNA, 14 nt, Human herpesvirus 4 (Epstein-Barr virus)
uccggagaccccaa

SEQ ID NO: 311412 - RNA, 14 nt, Human herpesvirus 4 (Epstein-Barr virus)
uccggucuugcagg

SEQ ID NO: 311413 - RNA, 13 nt, Human herpesvirus 4 (Epstein-Barr virus)
uccguccuugucc

SEQ ID NO: 311414 - RNA, 18 nt, Human herpesvirus 4 (Epstein-Barr virus)
uccguccuuguccaggag

SEQ ID NO: 311415 - RNA, 20 nt, Human herpesvirus 4 (Epstein-Barr virus)
uccgugagagccuacccaug

SEQ ID NO: 311416 - RNA, 18 nt, Human herpesvirus 4 (Epstein-Barr virus)
uccgugcggcuacaucua

SEQ ID NO: 311417 - RNA, 13 nt, Human herpesvirus 4 (Epstein-Barr virus)
uccuagcacaaac

SEQ ID NO: 311418 - RNA, 20 nt, Human herpesvirus 4 (Epstein-Barr virus)
uccuagcacaaaccagucua

SEQ ID NO: 311419 - RNA, 14 nt, Human herpesvirus 4 (Epstein-Barr virus)
uccuaucacaggga

SEQ ID NO: 311420 - RNA, 15 nt, Human herpesvirus 4 (Epstein-Barr virus)
uccucaccacucgaa

SEQ ID NO: 311421 - RNA, 18 nt, Human herpesvirus 4 (Epstein-Barr virus)
uccucagaaaacucugca

SEQ ID NO: 311422 - RNA, 12 nt, Human herpesvirus 4 (Epstein-Barr virus)
uccucagaggag

SEQ ID NO: 311423 - RNA, 23 nt, Human herpesvirus 4 (Epstein-Barr virus)
uccucagucuuugcaauuugccu

SEQ ID NO: 311424 - RNA, 12 nt, Human herpesvirus 4 (Epstein-Barr virus)
uccuccagcagu

SEQ ID NO: 311425 - RNA, 18 nt, Human herpesvirus 4 (Epstein-Barr virus)
uccugacgccaaugccaa

SEQ ID NO: 311426 - RNA, 11 nt, Human herpesvirus 4 (Epstein-Barr virus)
uccuguacaaa

SEQ ID NO: 311427 - RNA, 14 nt, Human herpesvirus 4 (Epstein-Barr virus)
uccuguccaugacc

SEQ ID NO: 311428 - RNA, 15 nt, Human herpesvirus 4 (Epstein-Barr virus)
uccuguccaugacca

SEQ ID NO: 311429 - RNA, 18 nt, Human herpesvirus 4 (Epstein-Barr virus)
uccugugcuucagcagua

SEQ ID NO: 311430 - RNA, 17 nt, Human herpesvirus 4 (Epstein-Barr virus)
uccuuaaauucaccuaa

SEQ ID NO: 311431 - RNA, 17 nt, Human herpesvirus 4 (Epstein-Barr virus)
uccuucucaugcuccua

SEQ ID NO: 311432 - RNA, 14 nt, Human herpesvirus 4 (Epstein-Barr virus)
ucgacaggccauua

SEQ ID NO: 311433 - RNA, 19 nt, Human herpesvirus 4 (Epstein-Barr virus)
ucgacgcuguuuugcagcu

SEQ ID NO: 311434 - RNA, 17 nt, Human herpesvirus 4 (Epstein-Barr virus)
ucgacugucauuuacaa

SEQ ID NO: 311435 - RNA, 15 nt, Human herpesvirus 4 (Epstein-Barr virus)
ucgacuucugaagau

SEQ ID NO: 311436 - RNA, 22 nt, Human herpesvirus 4 (Epstein-Barr virus)
ucgagcaugagcuccucuccaa

SEQ ID NO: 311437 - RNA, 19 nt, Human herpesvirus 4 (Epstein-Barr virus)
ucgcaagcuccuuugccuu

SEQ ID NO: 311438 - RNA, 20 nt, Human herpesvirus 4 (Epstein-Barr virus)
ucgcacucuuguugcuagcc

SEQ ID NO: 311439 - RNA, 13 nt, Human herpesvirus 4 (Epstein-Barr virus)
ucgcagcucuaac

SEQ ID NO: 311440 - RNA, 19 nt, Human herpesvirus 4 (Epstein-Barr virus)
ucgccagccuguuugucca

SEQ ID NO: 311441 - RNA, 23 nt, Human herpesvirus 4 (Epstein-Barr virus)
ucgccccuaucuuaacccaauuc

SEQ ID NO: 311442 - RNA, 16 nt, Human herpesvirus 4 (Epstein-Barr virus)
ucgcggaccaggguca

SEQ ID NO: 311443 - RNA, 21 nt, Human herpesvirus 4 (Epstein-Barr virus)
ucgcggagagggaugggcuug

SEQ ID NO: 311444 - RNA, 19 nt, Human herpesvirus 4 (Epstein-Barr virus)
ucgcguccuuugggaacac

SEQ ID NO: 311445 - RNA, 21 nt, Human herpesvirus 4 (Epstein-Barr virus)
ucgcguccuuugggaacacgg

SEQ ID NO: 311446 - RNA, 21 nt, Human herpesvirus 4 (Epstein-Barr virus)
ucgcugaaucuaguaugaagg

SEQ ID NO: 311447 - RNA, 14 nt, Human herpesvirus 4 (Epstein-Barr virus)
ucggaucccagauu

SEQ ID NO: 311448 - RNA, 22 nt, Human herpesvirus 4 (Epstein-Barr virus)
ucggcaucggguccuagcacaa

SEQ ID NO: 311449 - RNA, 14 nt, Human herpesvirus 4 (Epstein-Barr virus)
ucggccacacagug

SEQ ID NO: 311450 - RNA, 19 nt, Human herpesvirus 4 (Epstein-Barr virus)
ucggccacacagugggcuu

SEQ ID NO: 311451 - RNA, 20 nt, Human herpesvirus 4 (Epstein-Barr virus)
ucggcccugcgcuacuauga

SEQ ID NO: 311452 - RNA, 18 nt, Human herpesvirus 4 (Epstein-Barr virus)
ucggcgcugggacugccu

SEQ ID NO: 311453 - RNA, 15 nt, Human herpesvirus 4 (Epstein-Barr virus)
ucgggaaacacagcu

SEQ ID NO: 311454 - RNA, 12 nt, Human herpesvirus 4 (Epstein-Barr virus)
ucguugccaaaa

SEQ ID NO: 311455 - RNA, 16 nt, Human herpesvirus 4 (Epstein-Barr virus)
ucuaaugauguccagu

SEQ ID NO: 311456 - RNA, 17 nt, Human herpesvirus 4 (Epstein-Barr virus)
ucuacaacaaaacuggu

SEQ ID NO: 311457 - RNA, 12 nt, Human herpesvirus 4 (Epstein-Barr virus)
ucuacaaugcca

SEQ ID NO: 311458 - RNA, 21 nt, Human herpesvirus 4 (Epstein-Barr virus)
ucuacccaacagucuucaggu

SEQ ID NO: 311459 - RNA, 13 nt, Human herpesvirus 4 (Epstein-Barr virus)
ucuacccagagga

SEQ ID NO: 311460 - RNA, 17 nt, Human herpesvirus 4 (Epstein-Barr virus)
ucuacgccccagaugaa

SEQ ID NO: 311461 - RNA, 14 nt, Human herpesvirus 4 (Epstein-Barr virus)
ucuacguguuccac

SEQ ID NO: 311462 - RNA, 17 nt, Human herpesvirus 4 (Epstein-Barr virus)
ucuacugccuuguccac

SEQ ID NO: 311463 - RNA, 22 nt, Human herpesvirus 4 (Epstein-Barr virus)
ucuacuuuuacccccuggccac

SEQ ID NO: 311464 - RNA, 23 nt, Human herpesvirus 4 (Epstein-Barr virus)
ucuaguaugaaggcuggcaaaga

SEQ ID NO: 311465 - RNA, 14 nt, Human herpesvirus 4 (Epstein-Barr virus)
ucuauacggccaca

SEQ ID NO: 311466 - RNA, 15 nt, Human herpesvirus 4 (Epstein-Barr virus)
ucuauacggccacaa

SEQ ID NO: 311467 - RNA, 18 nt, Human herpesvirus 4 (Epstein-Barr virus)
ucuauugguugaucuccu

SEQ ID NO: 311468 - RNA, 19 nt, Human herpesvirus 4 (Epstein-Barr virus)
ucucagacaccaacacaga

SEQ ID NO: 311469 - RNA, 19 nt, Human herpesvirus 4 (Epstein-Barr virus)
ucucaggccucccagucua

SEQ ID NO: 311470 - RNA, 19 nt, Human herpesvirus 4 (Epstein-Barr virus)
ucucagucccaccacaaag

SEQ ID NO: 311471 - RNA, 15 nt, Human herpesvirus 4 (Epstein-Barr virus)
ucucauaauggugcc

SEQ ID NO: 311472 - RNA, 20 nt, Human herpesvirus 4 (Epstein-Barr virus)
ucucaugcuccuauggacac

SEQ ID NO: 311473 - RNA, 14 nt, Human herpesvirus 4 (Epstein-Barr virus)
ucucauucccaagu

SEQ ID NO: 311474 - RNA, 14 nt, Human herpesvirus 4 (Epstein-Barr virus)
ucuccagcaaccaa

SEQ ID NO: 311475 - RNA, 19 nt, Human herpesvirus 4 (Epstein-Barr virus)
ucuccagcggcuaccuguc

SEQ ID NO: 311476 - RNA, 16 nt, Human herpesvirus 4 (Epstein-Barr virus)
ucuccaucagggccag

SEQ ID NO: 311477 - RNA, 11 nt, Human herpesvirus 4 (Epstein-Barr virus)
ucuccauuccc

SEQ ID NO: 311478 - RNA, 14 nt, Human herpesvirus 4 (Epstein-Barr virus)
ucucccccagauca

SEQ ID NO: 311479 - RNA, 13 nt, Human herpesvirus 4 (Epstein-Barr virus)
ucuccccucugca

SEQ ID NO: 311480 - RNA, 18 nt, Human herpesvirus 4 (Epstein-Barr virus)
ucuccgcuuuaagaccaa

SEQ ID NO: 311481 - RNA, 21 nt, Human herpesvirus 4 (Epstein-Barr virus)
ucuccucagucuuugcaauuu

SEQ ID NO: 311482 - RNA, 22 nt, Human herpesvirus 4 (Epstein-Barr virus)
ucuccucagucuuugcaauuug

SEQ ID NO: 311483 - RNA, 13 nt, Human herpesvirus 4 (Epstein-Barr virus)
ucuccugccugcc

SEQ ID NO: 311484 - RNA, 21 nt, Human herpesvirus 4 (Epstein-Barr virus)
ucucgaugauugagaaugcca

SEQ ID NO: 311485 - RNA, 14 nt, Human herpesvirus 4 (Epstein-Barr virus)
ucucggauagggga

SEQ ID NO: 311486 - RNA, 22 nt, Human herpesvirus 4 (Epstein-Barr virus)
ucucgucuguauaccgaugaga

SEQ ID NO: 311487 - RNA, 13 nt, Human herpesvirus 4 (Epstein-Barr virus)
ucucguugccaaa

SEQ ID NO: 311488 - RNA, 14 nt, Human herpesvirus 4 (Epstein-Barr virus)
ucucguugccaaaa

SEQ ID NO: 311489 - RNA, 15 nt, Human herpesvirus 4 (Epstein-Barr virus)
ucucuaaagauuuga

SEQ ID NO: 311490 - RNA, 16 nt, Human herpesvirus 4 (Epstein-Barr virus)
ucucuaucuacaacaa

SEQ ID NO: 311491 - RNA, 17 nt, Human herpesvirus 4 (Epstein-Barr virus)
ucucugauggccuggag

SEQ ID NO: 311492 - RNA, 18 nt, Human herpesvirus 4 (Epstein-Barr virus)
ucucuguuucuguacaau

SEQ ID NO: 311493 - RNA, 21 nt, Human herpesvirus 4 (Epstein-Barr virus)
ucucuguuucuguacaauggg

SEQ ID NO: 311494 - RNA, 16 nt, Human herpesvirus 4 (Epstein-Barr virus)
ucucuucuguuugcau

SEQ ID NO: 311495 - RNA, 17 nt, Human herpesvirus 4 (Epstein-Barr virus)
ucucuuguuucggguag

SEQ ID NO: 311496 - RNA, 20 nt, Human herpesvirus 4 (Epstein-Barr virus)
ucucuuucuggccaaccugc

SEQ ID NO: 311497 - RNA, 22 nt, Human herpesvirus 4 (Epstein-Barr virus)
ucucuuugaagugguugccaug

SEQ ID NO: 311498 - RNA, 16 nt, Human herpesvirus 4 (Epstein-Barr virus)
ucugaagcaacagguc

SEQ ID NO: 311499 - RNA, 17 nt, Human herpesvirus 4 (Epstein-Barr virus)
ucugagcaccaacacaa

SEQ ID NO: 311500 - RNA, 18 nt, Human herpesvirus 4 (Epstein-Barr virus)
ucugagcaccaacacaac

SEQ ID NO: 311501 - RNA, 15 nt, Human herpesvirus 4 (Epstein-Barr virus)
ucugauuauagcucu

SEQ ID NO: 311502 - RNA, 17 nt, Human herpesvirus 4 (Epstein-Barr virus)
ucugauuauagcucugg

SEQ ID NO: 311503 - RNA, 16 nt, Human herpesvirus 4 (Epstein-Barr virus)
ucugcagagagccaca

SEQ ID NO: 311504 - RNA, 12 nt, Human herpesvirus 4 (Epstein-Barr virus)
ucugccucgggu

SEQ ID NO: 311505 - RNA, 22 nt, Human herpesvirus 4 (Epstein-Barr virus)
ucugcuucuggaccgugccauc

SEQ ID NO: 311506 - RNA, 16 nt, Human herpesvirus 4 (Epstein-Barr virus)
ucuggaccgugccauc

SEQ ID NO: 311507 - RNA, 21 nt, Human herpesvirus 4 (Epstein-Barr virus)
ucuggaccgugccauccucuc

SEQ ID NO: 311508 - RNA, 17 nt, Human herpesvirus 4 (Epstein-Barr virus)
ucuggacuuccaugucu

SEQ ID NO: 311509 - RNA, 18 nt, Human herpesvirus 4 (Epstein-Barr virus)
ucuggaggucuucucuga

SEQ ID NO: 311510 - RNA, 20 nt, Human herpesvirus 4 (Epstein-Barr virus)
ucuggcacgccguggcccug

SEQ ID NO: 311511 - RNA, 21 nt, Human herpesvirus 4 (Epstein-Barr virus)
ucuggcgauuuuaaucuggau

SEQ ID NO: 311512 - RNA, 15 nt, Human herpesvirus 4 (Epstein-Barr virus)
ucuggggcuggccug

SEQ ID NO: 311513 - RNA, 16 nt, Human herpesvirus 4 (Epstein-Barr virus)
ucuggggucucaggcc

SEQ ID NO: 311514 - RNA, 23 nt, Human herpesvirus 4 (Epstein-Barr virus)
ucuguauaccgaugagauugcca

SEQ ID NO: 311515 - RNA, 19 nt, Human herpesvirus 4 (Epstein-Barr virus)
ucuguuaaggcuguugaca

SEQ ID NO: 311516 - RNA, 20 nt, Human herpesvirus 4 (Epstein-Barr virus)
ucuuacaccagaggccacaa

SEQ ID NO: 311517 - RNA, 19 nt, Human herpesvirus 4 (Epstein-Barr virus)
ucuuagggagguggccaca

SEQ ID NO: 311518 - RNA, 21 nt, Human herpesvirus 4 (Epstein-Barr virus)
ucuuagguaucuggaucuacu

SEQ ID NO: 311519 - RNA, 22 nt, Human herpesvirus 4 (Epstein-Barr virus)
ucuucaggggaaucucugccaa

SEQ ID NO: 311520 - RNA, 19 nt, Human herpesvirus 4 (Epstein-Barr virus)
ucuucaggucugacaccca

SEQ ID NO: 311521 - RNA, 23 nt, Human herpesvirus 4 (Epstein-Barr virus)
ucuuccaauccgaaagcacuuug

SEQ ID NO: 311522 - RNA, 24 nt, Human herpesvirus 4 (Epstein-Barr virus)
ucuuccaauccgaaagcacuuuga

SEQ ID NO: 311523 - RNA, 15 nt, Human herpesvirus 4 (Epstein-Barr virus)
ucuucuucauagccu

SEQ ID NO: 311524 - RNA, 17 nt, Human herpesvirus 4 (Epstein-Barr virus)
ucuugcacccaccccca

SEQ ID NO: 311525 - RNA, 16 nt, Human herpesvirus 4 (Epstein-Barr virus)
ucuuggcggacaucau

SEQ ID NO: 311526 - RNA, 15 nt, Human herpesvirus 4 (Epstein-Barr virus)
ucuuugcaauuugcc

SEQ ID NO: 311527 - RNA, 15 nt, Human herpesvirus 4 (Epstein-Barr virus)
ucuuugccaaccugc

SEQ ID NO: 311528 - RNA, 16 nt, Human herpesvirus 4 (Epstein-Barr virus)
ucuuugccaaccugcu

SEQ ID NO: 311529 - RNA, 16 nt, Human herpesvirus 4 (Epstein-Barr virus)
ucuuuuagacacggaa

SEQ ID NO: 311530 - RNA, 19 nt, Human herpesvirus 4 (Epstein-Barr virus)
ugaaaacagaggcuggaug

SEQ ID NO: 311531 - RNA, 22 nt, Human herpesvirus 4 (Epstein-Barr virus)
ugaaaaccggcgagacuuggac

SEQ ID NO: 311532 - RNA, 13 nt, Human herpesvirus 4 (Epstein-Barr virus)
ugaaaaugaugaa

SEQ ID NO: 311533 - RNA, 12 nt, Human herpesvirus 4 (Epstein-Barr virus)
ugaacaccacca

SEQ ID NO: 311534 - RNA, 17 nt, Human herpesvirus 4 (Epstein-Barr virus)
gguccaggguccaggag

SEQ ID NO: 311535 - RNA, 21 nt, Human herpesvirus 4 (Epstein-Barr virus)
gguccgugcggcuacaucuac

SEQ ID NO: 311536 - RNA, 22 nt, Human herpesvirus 4 (Epstein-Barr virus)
ggucgaccaccucaacauauuc

SEQ ID NO: 311537 - RNA, 13 nt, Human herpesvirus 4 (Epstein-Barr virus)
ggucugacaccca

SEQ ID NO: 311538 - RNA, 19 nt, Human herpesvirus 4 (Epstein-Barr virus)
ggugacauucacugggaca

SEQ ID NO: 311539 - RNA, 14 nt, Human herpesvirus 4 (Epstein-Barr virus)
ggugccaccaucug

SEQ ID NO: 311540 - RNA, 15 nt, Human herpesvirus 4 (Epstein-Barr virus)
ggugccagaugugcc

SEQ ID NO: 311541 - RNA, 16 nt, Human herpesvirus 4 (Epstein-Barr virus)
ggugccauguggcauc

SEQ ID NO: 311542 - RNA, 14 nt, Human herpesvirus 4 (Epstein-Barr virus)
ggugccugagggag

SEQ ID NO: 311543 - RNA, 13 nt, Human herpesvirus 4 (Epstein-Barr virus)
ggugccuugcucu

SEQ ID NO: 311544 - RNA, 23 nt, Human herpesvirus 4 (Epstein-Barr virus)
ggugccuuuuguacaagcuuuug

SEQ ID NO: 311545 - RNA, 17 nt, Human herpesvirus 4 (Epstein-Barr virus)
ggugcgguuauaacugc

SEQ ID NO: 311546 - RNA, 13 nt, Human herpesvirus 4 (Epstein-Barr virus)
gguggcaguggau

SEQ ID NO: 311547 - RNA, 21 nt, Human herpesvirus 4 (Epstein-Barr virus)
gguggcccucgguggugggcu

SEQ ID NO: 311548 - RNA, 17 nt, Human herpesvirus 4 (Epstein-Barr virus)
gguggcgaaucugacau

SEQ ID NO: 311549 - RNA, 22 nt, Human herpesvirus 4 (Epstein-Barr virus)
gguggcgaaucugacauuucuc

SEQ ID NO: 311550 - RNA, 19 nt, Human herpesvirus 4 (Epstein-Barr virus)
ggugggaagcucagcaguu

SEQ ID NO: 311551 - RNA, 12 nt, Human herpesvirus 4 (Epstein-Barr virus)
ggugggacaaaa

SEQ ID NO: 311552 - RNA, 13 nt, Human herpesvirus 4 (Epstein-Barr virus)
ggugggugcaaga

SEQ ID NO: 311553 - RNA, 20 nt, Human herpesvirus 4 (Epstein-Barr virus)
ggugugagacuggaacugua

SEQ ID NO: 311554 - RNA, 18 nt, Human herpesvirus 4 (Epstein-Barr virus)
gguuaacuuuaacaagac

SEQ ID NO: 311555 - RNA, 19 nt, Human herpesvirus 4 (Epstein-Barr virus)
gguuauuuugccugaagcu

SEQ ID NO: 311556 - RNA, 18 nt, Human herpesvirus 4 (Epstein-Barr virus)
gguugauaaucucaaaga

SEQ ID NO: 311557 - RNA, 17 nt, Human herpesvirus 4 (Epstein-Barr virus)
gguuggccuuuugcacc

SEQ ID NO: 311558 - RNA, 19 nt, Human herpesvirus 4 (Epstein-Barr virus)
gguuucugcccccugucuc

SEQ ID NO: 311559 - RNA, 13 nt, Human herpesvirus 4 (Epstein-Barr virus)
guaaaauuuacac

SEQ ID NO: 311560 - RNA, 18 nt, Human herpesvirus 4 (Epstein-Barr virus)
guaaaucugucucucgcg

SEQ ID NO: 311561 - RNA, 15 nt, Human herpesvirus 4 (Epstein-Barr virus)
guaacauuuaaugug

SEQ ID NO: 311562 - RNA, 20 nt, Human herpesvirus 4 (Epstein-Barr virus)
guaaccacauauacuggaga

SEQ ID NO: 311563 - RNA, 17 nt, Human herpesvirus 4 (Epstein-Barr virus)
guaacugugguuuccau

SEQ ID NO: 311564 - RNA, 23 nt, Human herpesvirus 4 (Epstein-Barr virus)
guaaucacuggcaaagggcaugc

SEQ ID NO: 311565 - RNA, 13 nt, Human herpesvirus 4 (Epstein-Barr virus)
guaaucuguggug

SEQ ID NO: 311566 - RNA, 13 nt, Human herpesvirus 4 (Epstein-Barr virus)
guacaucuccagg

SEQ ID NO: 311567 - RNA, 18 nt, Human herpesvirus 4 (Epstein-Barr virus)
guacccacccccccuccc

SEQ ID NO: 311568 - RNA, 14 nt, Human herpesvirus 4 (Epstein-Barr virus)
guaccccagugacg

SEQ ID NO: 311569 - RNA, 19 nt, Human herpesvirus 4 (Epstein-Barr virus)
guaccuuccuguguucucc

SEQ ID NO: 311570 - RNA, 12 nt, Human herpesvirus 4 (Epstein-Barr virus)
guacgugccuca

SEQ ID NO: 311571 - RNA, 23 nt, Human herpesvirus 4 (Epstein-Barr virus)
guacugcgaugagggccuuccag

SEQ ID NO: 311572 - RNA, 18 nt, Human herpesvirus 4 (Epstein-Barr virus)
guacuucuucucugcucg

SEQ ID NO: 311573 - RNA, 13 nt, Human herpesvirus 4 (Epstein-Barr virus)
guacuuguccuca

SEQ ID NO: 311574 - RNA, 14 nt, Human herpesvirus 4 (Epstein-Barr virus)
guacuuguccucau

SEQ ID NO: 311575 - RNA, 16 nt, Human herpesvirus 4 (Epstein-Barr virus)
guagagaucaggccaa

SEQ ID NO: 311576 - RNA, 14 nt, Human herpesvirus 4 (Epstein-Barr virus)
guagagguggaaca

SEQ ID NO: 311577 - RNA, 19 nt, Human herpesvirus 4 (Epstein-Barr virus)
guagauggcgagacucuug

SEQ ID NO: 311578 - RNA, 16 nt, Human herpesvirus 4 (Epstein-Barr virus)
guagcacugguggugg

SEQ ID NO: 311579 - RNA, 13 nt, Human herpesvirus 4 (Epstein-Barr virus)
guagugcgcguga

SEQ ID NO: 311580 - RNA, 16 nt, Human herpesvirus 4 (Epstein-Barr virus)
guauaaagucaauaaa

SEQ ID NO: 311581 - RNA, 15 nt, Human herpesvirus 4 (Epstein-Barr virus)
guaugccuuggcaug

SEQ ID NO: 311582 - RNA, 12 nt, Human herpesvirus 4 (Epstein-Barr virus)
guauguggugcc

SEQ ID NO: 311583 - RNA, 22 nt, Human herpesvirus 4 (Epstein-Barr virus)
guauugcgcuggccgagccugu

SEQ ID NO: 311584 - RNA, 12 nt, Human herpesvirus 4 (Epstein-Barr virus)
guauugcucucg

SEQ ID NO: 311585 - RNA, 18 nt, Human herpesvirus 4 (Epstein-Barr virus)
gucagaaaaucgcagcag

SEQ ID NO: 311586 - RNA, 16 nt, Human herpesvirus 4 (Epstein-Barr virus)
gucagagagguugcgc

SEQ ID NO: 311587 - RNA, 19 nt, Human herpesvirus 4 (Epstein-Barr virus)
gucaggagguacaugggcc

SEQ ID NO: 311588 - RNA, 19 nt, Human herpesvirus 4 (Epstein-Barr virus)
gucauaucggaugccucac

SEQ ID NO: 311589 - RNA, 17 nt, Human herpesvirus 4 (Epstein-Barr virus)
gucauuuagaaaccuug

SEQ ID NO: 311590 - RNA, 13 nt, Human herpesvirus 4 (Epstein-Barr virus)
gucauuucuucca

SEQ ID NO: 311591 - RNA, 13 nt, Human herpesvirus 4 (Epstein-Barr virus)
guccagaagcaga

SEQ ID NO: 311592 - RNA, 16 nt, Human herpesvirus 4 (Epstein-Barr virus)
guccaggguccaggag

SEQ ID NO: 311593 - RNA, 10 nt, Human herpesvirus 4 (Epstein-Barr virus)
guccaucucg

SEQ ID NO: 311594 - RNA, 19 nt, Human herpesvirus 4 (Epstein-Barr virus)
gucccaaaccaugacauca

SEQ ID NO: 311595 - RNA, 12 nt, Human herpesvirus 4 (Epstein-Barr virus)
gucccugagaug

SEQ ID NO: 311596 - RNA, 21 nt, Human herpesvirus 4 (Epstein-Barr virus)
gucccugaguucuacaaugcc

SEQ ID NO: 311597 - RNA, 18 nt, Human herpesvirus 4 (Epstein-Barr virus)
guccggagaccccaaaaa

SEQ ID NO: 311598 - RNA, 15 nt, Human herpesvirus 4 (Epstein-Barr virus)
guccggucuugcagg

SEQ ID NO: 311599 - RNA, 16 nt, Human herpesvirus 4 (Epstein-Barr virus)
guccggucuugcaggg

SEQ ID NO: 311600 - RNA, 13 nt, Human herpesvirus 4 (Epstein-Barr virus)
guccuagcacaaa

SEQ ID NO: 311601 - RNA, 14 nt, Human herpesvirus 4 (Epstein-Barr virus)
guccuagcacaaac

SEQ ID NO: 311602 - RNA, 13 nt, Human herpesvirus 4 (Epstein-Barr virus)
guccucaccaagg

SEQ ID NO: 311603 - RNA, 17 nt, Human herpesvirus 4 (Epstein-Barr virus)
guccucccaacaugggg

SEQ ID NO: 311604 - RNA, 16 nt, Human herpesvirus 4 (Epstein-Barr virus)
guccucgaaggcuaga

SEQ ID NO: 311605 - RNA, 11 nt, Human herpesvirus 4 (Epstein-Barr virus)
guccuguggug

SEQ ID NO: 311606 - RNA, 16 nt, Human herpesvirus 4 (Epstein-Barr virus)
guccuuguccaggaga

SEQ ID NO: 311607 - RNA, 15 nt, Human herpesvirus 4 (Epstein-Barr virus)
gucgagcaugagcuc

SEQ ID NO: 311608 - RNA, 23 nt, Human herpesvirus 4 (Epstein-Barr virus)
gucggcaucggguccuagcacaa

SEQ ID NO: 311609 - RNA, 18 nt, Human herpesvirus 4 (Epstein-Barr virus)
gucguguucccucaccag

SEQ ID NO: 311610 - RNA, 12 nt, Human herpesvirus 4 (Epstein-Barr virus)
gucuauggcgcg

SEQ ID NO: 311611 - RNA, 17 nt, Human herpesvirus 4 (Epstein-Barr virus)
gucucagacaccaacac

SEQ ID NO: 311612 - RNA, 16 nt, Human herpesvirus 4 (Epstein-Barr virus)
gucucauacaguuugu

SEQ ID NO: 311613 - RNA, 18 nt, Human herpesvirus 4 (Epstein-Barr virus)
gucucuaacaguucacuu

SEQ ID NO: 311614 - RNA, 20 nt, Human herpesvirus 4 (Epstein-Barr virus)
gucucucuuugagggggcca

SEQ ID NO: 311615 - RNA, 21 nt, Human herpesvirus 4 (Epstein-Barr virus)
gucucuuucuggccaaccugc

SEQ ID NO: 311616 - RNA, 17 nt, Human herpesvirus 4 (Epstein-Barr virus)
gucuguaaacuauggag

SEQ ID NO: 311617 - RNA, 14 nt, Human herpesvirus 4 (Epstein-Barr virus)
gucuuguaaaacuu

SEQ ID NO: 311618 - RNA, 17 nt, Human herpesvirus 4 (Epstein-Barr virus)
gucuuugcaauuugccu

SEQ ID NO: 311619 - RNA, 15 nt, Human herpesvirus 4 (Epstein-Barr virus)
gucuuugccaaccug

SEQ ID NO: 311620 - RNA, 20 nt, Human herpesvirus 4 (Epstein-Barr virus)
gucuuugccaaccugcucuc

SEQ ID NO: 311621 - RNA, 19 nt, Human herpesvirus 4 (Epstein-Barr virus)
gugaacuuuaacauugaug

SEQ ID NO: 311622 - RNA, 13 nt, Human herpesvirus 4 (Epstein-Barr virus)
gugaauauggcug

SEQ ID NO: 311623 - RNA, 22 nt, Human herpesvirus 4 (Epstein-Barr virus)
gugacacugaugagucugacua

SEQ ID NO: 311624 - RNA, 15 nt, Human herpesvirus 4 (Epstein-Barr virus)
gugacauguccgggu

SEQ ID NO: 311625 - RNA, 23 nt, Human herpesvirus 4 (Epstein-Barr virus)
gugacauugcuagucacacccgu

SEQ ID NO: 311626 - RNA, 20 nt, Human herpesvirus 4 (Epstein-Barr virus)
gugaccggacgggucucacg

SEQ ID NO: 311627 - RNA, 22 nt, Human herpesvirus 4 (Epstein-Barr virus)
gugacgaggauggaaagggcau

SEQ ID NO: 311628 - RNA, 13 nt, Human herpesvirus 4 (Epstein-Barr virus)
gugacuacaccau

SEQ ID NO: 311629 - RNA, 13 nt, Human herpesvirus 4 (Epstein-Barr virus)
gugagggugccau

SEQ ID NO: 311630 - RNA, 21 nt, Human herpesvirus 4 (Epstein-Barr virus)
gugagucugcuggacuccgag

SEQ ID NO: 311631 - RNA, 11 nt, Human herpesvirus 4 (Epstein-Barr virus)
gugagugacac

SEQ ID NO: 311632 - RNA, 15 nt, Human herpesvirus 4 (Epstein-Barr virus)
gugauguagcuauac

SEQ ID NO: 311633 - RNA, 20 nt, Human herpesvirus 4 (Epstein-Barr virus)
gugauuaggcacuggacaca

SEQ ID NO: 311634 - RNA, 13 nt, Human herpesvirus 4 (Epstein-Barr virus)
gugcacccggcug

SEQ ID NO: 311635 - RNA, 16 nt, Human herpesvirus 4 (Epstein-Barr virus)
gugcauggauauagcu

SEQ ID NO: 311636 - RNA, 22 nt, Human herpesvirus 4 (Epstein-Barr virus)
gugccaaacugcgagggggccu

SEQ ID NO: 311637 - RNA, 12 nt, Human herpesvirus 4 (Epstein-Barr virus)
gugccaccaucu

SEQ ID NO: 311638 - RNA, 16 nt, Human herpesvirus 4 (Epstein-Barr virus)
gugccagaugugccug

SEQ ID NO: 311639 - RNA, 22 nt, Human herpesvirus 4 (Epstein-Barr virus)
gugccagaugugccugggcuau

SEQ ID NO: 311640 - RNA, 14 nt, Human herpesvirus 4 (Epstein-Barr virus)
gugccauguggcau

SEQ ID NO: 311641 - RNA, 16 nt, Human herpesvirus 4 (Epstein-Barr virus)
gugccaugugugucca

SEQ ID NO: 311642 - RNA, 17 nt, Human herpesvirus 4 (Epstein-Barr virus)
gugccucagauagccgg

SEQ ID NO: 311643 - RNA, 14 nt, Human herpesvirus 4 (Epstein-Barr virus)
gugccuugcucuca

SEQ ID NO: 311644 - RNA, 17 nt, Human herpesvirus 4 (Epstein-Barr virus)
gugcgaggaacuggcuc

SEQ ID NO: 311645 - RNA, 18 nt, Human herpesvirus 4 (Epstein-Barr virus)
gugcgcccugcucucgau

SEQ ID NO: 311646 - RNA, 20 nt, Human herpesvirus 4 (Epstein-Barr virus)
guggacacccaccacacagc

SEQ ID NO: 311647 - RNA, 17 nt, Human herpesvirus 4 (Epstein-Barr virus)
guggacaguuugauacu

SEQ ID NO: 311648 - RNA, 15 nt, Human herpesvirus 4 (Epstein-Barr virus)
guggagccguggccu

SEQ ID NO: 311649 - RNA, 12 nt, Human herpesvirus 4 (Epstein-Barr virus)
guggauccucca

SEQ ID NO: 311650 - RNA, 14 nt, Human herpesvirus 4 (Epstein-Barr virus)
guggauugcugaac

SEQ ID NO: 311651 - RNA, 16 nt, Human herpesvirus 4 (Epstein-Barr virus)
guggcaguauuuugca

SEQ ID NO: 311652 - RNA, 21 nt, Human herpesvirus 4 (Epstein-Barr virus)
guggccaccuucuccaucucc

SEQ ID NO: 311653 - RNA, 17 nt, Human herpesvirus 4 (Epstein-Barr virus)
guggcccucgguggugg

SEQ ID NO: 311654 - RNA, 19 nt, Human herpesvirus 4 (Epstein-Barr virus)
guggcggaugacccgccaa

SEQ ID NO: 311655 - RNA, 14 nt, Human herpesvirus 4 (Epstein-Barr virus)
guggcuuccagaga

SEQ ID NO: 311656 - RNA, 12 nt, Human herpesvirus 4 (Epstein-Barr virus)
gugggcugacac

SEQ ID NO: 311657 - RNA, 20 nt, Human herpesvirus 4 (Epstein-Barr virus)
gugggucauuggcaaaaagg

SEQ ID NO: 311658 - RNA, 14 nt, Human herpesvirus 4 (Epstein-Barr virus)
gugguaacaggugg

SEQ ID NO: 311659 - RNA, 17 nt, Human herpesvirus 4 (Epstein-Barr virus)
guggucaccgguggugg

SEQ ID NO: 311660 - RNA, 18 nt, Human herpesvirus 4 (Epstein-Barr virus)
guggucguguucccucac

SEQ ID NO: 311661 - RNA, 20 nt, Human herpesvirus 4 (Epstein-Barr virus)
gugguggcauuaauguccag

SEQ ID NO: 311662 - RNA, 18 nt, Human herpesvirus 4 (Epstein-Barr virus)
guguaacauuuaaugugg

SEQ ID NO: 311663 - RNA, 20 nt, Human herpesvirus 4 (Epstein-Barr virus)
guguauugcucucguugcca

SEQ ID NO: 311664 - RNA, 22 nt, Human herpesvirus 4 (Epstein-Barr virus)
guguauugcucucguugccaaa

SEQ ID NO: 311665 - RNA, 14 nt, Human herpesvirus 4 (Epstein-Barr virus)
guguccagugccua

SEQ ID NO: 311666 - RNA, 17 nt, Human herpesvirus 4 (Epstein-Barr virus)
guguccucuacugccuu

SEQ ID NO: 311667 - RNA, 17 nt, Human herpesvirus 4 (Epstein-Barr virus)
gugugcccgggggugga

SEQ ID NO: 311668 - RNA, 18 nt, Human herpesvirus 4 (Epstein-Barr virus)
gugugcuuuccaccggug

SEQ ID NO: 311669 - RNA, 16 nt, Human herpesvirus 4 (Epstein-Barr virus)
guguguccagugccua

SEQ ID NO: 311670 - RNA, 22 nt, Human herpesvirus 4 (Epstein-Barr virus)
guguucuccgagaggaugaucc

SEQ ID NO: 311671 - RNA, 17 nt, Human herpesvirus 4 (Epstein-Barr virus)
guuacuucuuuugcucu

SEQ ID NO: 311672 - RNA, 18 nt, Human herpesvirus 4 (Epstein-Barr virus)
guuaggagacgcccucaa

SEQ ID NO: 311673 - RNA, 21 nt, Human herpesvirus 4 (Epstein-Barr virus)
guuaguaccuguccauucaca

SEQ ID NO: 311674 - RNA, 14 nt, Human herpesvirus 4 (Epstein-Barr virus)
guuagugugccucu

SEQ ID NO: 311675 - RNA, 14 nt, Human herpesvirus 4 (Epstein-Barr virus)
guuauaacugccag

SEQ ID NO: 311676 - RNA, 19 nt, Human herpesvirus 4 (Epstein-Barr virus)
guuauugaaaccacgccug

SEQ ID NO: 311677 - RNA, 18 nt, Human herpesvirus 4 (Epstein-Barr virus)
guuauuguucuacuccug

SEQ ID NO: 311678 - RNA, 22 nt, Human herpesvirus 4 (Epstein-Barr virus)
guucaguggacacccaccacac

SEQ ID NO: 311679 - RNA, 20 nt, Human herpesvirus 4 (Epstein-Barr virus)
guuccaggugacagcagcag

SEQ ID NO: 311680 - RNA, 14 nt, Human herpesvirus 4 (Epstein-Barr virus)
guucccggacaaua

SEQ ID NO: 311681 - RNA, 15 nt, Human herpesvirus 4 (Epstein-Barr virus)
guucuacaaugccag

SEQ ID NO: 311682 - RNA, 20 nt, Human herpesvirus 4 (Epstein-Barr virus)
guucuacuccuggcauacuu

SEQ ID NO: 311683 - RNA, 16 nt, Human herpesvirus 4 (Epstein-Barr virus)
guucuccugauuugcu

SEQ ID NO: 311684 - RNA, 20 nt, Human herpesvirus 4 (Epstein-Barr virus)
guucucuucacuaaggcagu

SEQ ID NO: 311685 - RNA, 18 nt, Human herpesvirus 4 (Epstein-Barr virus)
guucuuuagggcauccac

SEQ ID NO: 311686 - RNA, 23 nt, Human herpesvirus 4 (Epstein-Barr virus)
guucuuuuguaaucgcagcucua

SEQ ID NO: 311687 - RNA, 22 nt, Human herpesvirus 4 (Epstein-Barr virus)
guugauaaaaugggucagugau

SEQ ID NO: 311688 - RNA, 20 nt, Human herpesvirus 4 (Epstein-Barr virus)
guuggagaaaguaaccacau

SEQ ID NO: 311689 - RNA, 15 nt, Human herpesvirus 4 (Epstein-Barr virus)
guuggccuuuugcac

SEQ ID NO: 311690 - RNA, 21 nt, Human herpesvirus 4 (Epstein-Barr virus)
guuggcgccgaggcaccccaa

SEQ ID NO: 311691 - RNA, 22 nt, Human herpesvirus 4 (Epstein-Barr virus)
guuguacgugcgugaucaugag

SEQ ID NO: 311692 - RNA, 14 nt, Human herpesvirus 4 (Epstein-Barr virus)
guuuaagcagcacu

SEQ ID NO: 311693 - RNA, 14 nt, Human herpesvirus 4 (Epstein-Barr virus)
guuugacuucauau

SEQ ID NO: 311694 - RNA, 14 nt, Human herpesvirus 4 (Epstein-Barr virus)
guuuucuggacaca

SEQ ID NO: 311695 - RNA, 17 nt, Human herpesvirus 4 (Epstein-Barr virus)
uaaaaagcgggccugag

SEQ ID NO: 311696 - RNA, 18 nt, Human herpesvirus 4 (Epstein-Barr virus)
uaaaacaagggauaugaa

SEQ ID NO: 311697 - RNA, 20 nt, Human herpesvirus 4 (Epstein-Barr virus)
uaaaacaagggauaugaagg

SEQ ID NO: 311698 - RNA, 17 nt, Human herpesvirus 4 (Epstein-Barr virus)
uaaacaagcugacagaa

SEQ ID NO: 311699 - RNA, 21 nt, Human herpesvirus 4 (Epstein-Barr virus)
uaaacaagggaaaaagguuua

SEQ ID NO: 311700 - RNA, 17 nt, Human herpesvirus 4 (Epstein-Barr virus)
uaaaccaauagcauguc

SEQ ID NO: 311701 - RNA, 18 nt, Human herpesvirus 4 (Epstein-Barr virus)
uaaacgugauggugcugg

SEQ ID NO: 311702 - RNA, 21 nt, Human herpesvirus 4 (Epstein-Barr virus)
gcugacacagacuuggccuug

SEQ ID NO: 311703 - RNA, 14 nt, Human herpesvirus 4 (Epstein-Barr virus)
gcugagcgugugca

SEQ ID NO: 311704 - RNA, 18 nt, Human herpesvirus 4 (Epstein-Barr virus)
gcugcagagguucaggga

SEQ ID NO: 311705 - RNA, 16 nt, Human herpesvirus 4 (Epstein-Barr virus)
gcugcagguaaaccuu

SEQ ID NO: 311706 - RNA, 15 nt, Human herpesvirus 4 (Epstein-Barr virus)
gcugcgccugagcug

SEQ ID NO: 311707 - RNA, 14 nt, Human herpesvirus 4 (Epstein-Barr virus)
gcugcgguggugcg

SEQ ID NO: 311708 - RNA, 17 nt, Human herpesvirus 4 (Epstein-Barr virus)
gcugcugaggguuggug

SEQ ID NO: 311709 - RNA, 15 nt, Human herpesvirus 4 (Epstein-Barr virus)
gcugcuugugaucau

SEQ ID NO: 311710 - RNA, 20 nt, Human herpesvirus 4 (Epstein-Barr virus)
gcuggacggcaucaugcgug

SEQ ID NO: 311711 - RNA, 18 nt, Human herpesvirus 4 (Epstein-Barr virus)
gcuggacuccgaggacca

SEQ ID NO: 311712 - RNA, 12 nt, Human herpesvirus 4 (Epstein-Barr virus)
gcuggcaaagau

SEQ ID NO: 311713 - RNA, 9 nt, Human herpesvirus 4 (Epstein-Barr virus)
gcuggccau

SEQ ID NO: 311714 - RNA, 21 nt, Human herpesvirus 4 (Epstein-Barr virus)
ggccggggccuccauccagug

SEQ ID NO: 311715 - RNA, 22 nt, Human herpesvirus 4 (Epstein-Barr virus)
ggccucggcggggaacgugaca

SEQ ID NO: 311716 - RNA, 15 nt, Human herpesvirus 4 (Epstein-Barr virus)
ggccuggacuguggu

SEQ ID NO: 311717 - RNA, 12 nt, Human herpesvirus 4 (Epstein-Barr virus)
ggccuggugcca

SEQ ID NO: 311718 - RNA, 13 nt, Human herpesvirus 4 (Epstein-Barr virus)
ggccuucucugau

SEQ ID NO: 311719 - RNA, 23 nt, Human herpesvirus 4 (Epstein-Barr virus)
ggccuuggcuauggucauggcca

SEQ ID NO: 311720 - RNA, 15 nt, Human herpesvirus 4 (Epstein-Barr virus)
ggcgaagauucccaa

SEQ ID NO: 311721 - RNA, 18 nt, Human herpesvirus 4 (Epstein-Barr virus)
ggcgaaucugacauuucu

SEQ ID NO: 311722 - RNA, 22 nt, Human herpesvirus 4 (Epstein-Barr virus)
ggcgcaccuguguccugggcaa

SEQ ID NO: 311723 - RNA, 22 nt, Human herpesvirus 4 (Epstein-Barr virus)
ggcgcccuuauuauugauguga

SEQ ID NO: 311724 - RNA, 20 nt, Human herpesvirus 4 (Epstein-Barr virus)
ggcgcuguuauggccaugau

SEQ ID NO: 311725 - RNA, 19 nt, Human herpesvirus 4 (Epstein-Barr virus)
ggcggaagaccaggagccc

SEQ ID NO: 311726 - RNA, 23 nt, Human herpesvirus 4 (Epstein-Barr virus)
ggcggcaucauguuuuuggcaug

SEQ ID NO: 311727 - RNA, 14 nt, Human herpesvirus 4 (Epstein-Barr virus)
ggcggcuguggccu

SEQ ID NO: 311728 - RNA, 14 nt, Human herpesvirus 4 (Epstein-Barr virus)
ggcgggacuggcac

SEQ ID NO: 311729 - RNA, 17 nt, Human herpesvirus 4 (Epstein-Barr virus)
ggcgggaguggaggcuc

SEQ ID NO: 311730 - RNA, 22 nt, Human herpesvirus 4 (Epstein-Barr virus)
ggcggggaacgugacaggcaca

SEQ ID NO: 311731 - RNA, 13 nt, Human herpesvirus 4 (Epstein-Barr virus)
ggcgucuaugcuu

SEQ ID NO: 311732 - RNA, 20 nt, Human herpesvirus 4 (Epstein-Barr virus)
ggcuacaacaggcugcugaa

SEQ ID NO: 311733 - RNA, 21 nt, Human herpesvirus 4 (Epstein-Barr virus)
ggcuacgcgggccacaggugc

SEQ ID NO: 311734 - RNA, 22 nt, Human herpesvirus 4 (Epstein-Barr virus)
ggcuacggccguggacggcgcu

SEQ ID NO: 311735 - RNA, 20 nt, Human herpesvirus 4 (Epstein-Barr virus)
ggcucugaagcaacaggucc

SEQ ID NO: 311736 - RNA, 15 nt, Human herpesvirus 4 (Epstein-Barr virus)
ggcucugcacaggag

SEQ ID NO: 311737 - RNA, 15 nt, Human herpesvirus 4 (Epstein-Barr virus)
ggcucugucaguuau

SEQ ID NO: 311738 - RNA, 21 nt, Human herpesvirus 4 (Epstein-Barr virus)
ggcugccgaagcagauggcga

SEQ ID NO: 311739 - RNA, 14 nt, Human herpesvirus 4 (Epstein-Barr virus)
ggcuggaugcagcg

SEQ ID NO: 311740 - RNA, 21 nt, Human herpesvirus 4 (Epstein-Barr virus)
ggcuggaugcccucaugcgcc

SEQ ID NO: 311741 - RNA, 16 nt, Human herpesvirus 4 (Epstein-Barr virus)
ggcuggcaaagauccc

SEQ ID NO: 311742 - RNA, 18 nt, Human herpesvirus 4 (Epstein-Barr virus)
ggcuggccgccguggcca

SEQ ID NO: 311743 - RNA, 15 nt, Human herpesvirus 4 (Epstein-Barr virus)
ggcugggaauggaga

SEQ ID NO: 311744 - RNA, 13 nt, Human herpesvirus 4 (Epstein-Barr virus)
ggcuggugccuug

SEQ ID NO: 311745 - RNA, 12 nt, Human herpesvirus 4 (Epstein-Barr virus)
ggcugguggccu

SEQ ID NO: 311746 - RNA, 22 nt, Human herpesvirus 4 (Epstein-Barr virus)
ggcugguggccugggaggugcu

SEQ ID NO: 311747 - RNA, 15 nt, Human herpesvirus 4 (Epstein-Barr virus)
ggcuguggacugggg

SEQ ID NO: 311748 - RNA, 11 nt, Human herpesvirus 4 (Epstein-Barr virus)
ggcuugccaaa

SEQ ID NO: 311749 - RNA, 16 nt, Human herpesvirus 4 (Epstein-Barr virus)
ggcuugggcuguggua

SEQ ID NO: 311750 - RNA, 17 nt, Human herpesvirus 4 (Epstein-Barr virus)
gggaaaauaguuccagg

SEQ ID NO: 311751 - RNA, 16 nt, Human herpesvirus 4 (Epstein-Barr virus)
gggaaccggccccgug

SEQ ID NO: 311752 - RNA, 22 nt, Human herpesvirus 4 (Epstein-Barr virus)
gggacgcagaaugugcagggau

SEQ ID NO: 311753 - RNA, 11 nt, Human herpesvirus 4 (Epstein-Barr virus)
gggacugggag

SEQ ID NO: 311754 - RNA, 13 nt, Human herpesvirus 4 (Epstein-Barr virus)
gggacugggaggc

SEQ ID NO: 311755 - RNA, 15 nt, Human herpesvirus 4 (Epstein-Barr virus)
gggcaaagauuuucu

SEQ ID NO: 311756 - RNA, 20 nt, Human herpesvirus 4 (Epstein-Barr virus)
gggcacgagauggcccaguu

SEQ ID NO: 311757 - RNA, 13 nt, Human herpesvirus 4 (Epstein-Barr virus)
gggcagacaccac

SEQ ID NO: 311758 - RNA, 21 nt, Human herpesvirus 4 (Epstein-Barr virus)
gggcaggagcaggaggggcag

SEQ ID NO: 311759 - RNA, 15 nt, Human herpesvirus 4 (Epstein-Barr virus)
gggcaggaggggcag

SEQ ID NO: 311760 - RNA, 15 nt, Human herpesvirus 4 (Epstein-Barr virus)
gggccacacagccug

SEQ ID NO: 311761 - RNA, 20 nt, Human herpesvirus 4 (Epstein-Barr virus)
gggccagguacaggaccugg

SEQ ID NO: 311762 - RNA, 12 nt, Human herpesvirus 4 (Epstein-Barr virus)
gggccagucucc

SEQ ID NO: 311763 - RNA, 12 nt, Human herpesvirus 4 (Epstein-Barr virus)
gggccaucuccg

SEQ ID NO: 311764 - RNA, 17 nt, Human herpesvirus 4 (Epstein-Barr virus)
gggccgugcaccugcca

SEQ ID NO: 311765 - RNA, 21 nt, Human herpesvirus 4 (Epstein-Barr virus)
gggccguuuggcgucucaggc

SEQ ID NO: 311766 - RNA, 12 nt, Human herpesvirus 4 (Epstein-Barr virus)
gggcgauaccuu

SEQ ID NO: 311767 - RNA, 14 nt, Human herpesvirus 4 (Epstein-Barr virus)
ggggaacgagggga

SEQ ID NO: 311768 - RNA, 13 nt, Human herpesvirus 4 (Epstein-Barr virus)
ggggagguggcug

SEQ ID NO: 311769 - RNA, 13 nt, Human herpesvirus 4 (Epstein-Barr virus)
ggggcaacagacu

SEQ ID NO: 311770 - RNA, 14 nt, Human herpesvirus 4 (Epstein-Barr virus)
ggggcgcggcugga

SEQ ID NO: 311771 - RNA, 14 nt, Human herpesvirus 4 (Epstein-Barr virus)
ggggcggcggugga

SEQ ID NO: 311772 - RNA, 18 nt, Human herpesvirus 4 (Epstein-Barr virus)
gggggcaaagcaggggug

SEQ ID NO: 311773 - RNA, 20 nt, Human herpesvirus 4 (Epstein-Barr virus)
gggguuccccuccccaguga

SEQ ID NO: 311774 - RNA, 20 nt, Human herpesvirus 4 (Epstein-Barr virus)
ggguauguggugccaugugg

SEQ ID NO: 311775 - RNA, 20 nt, Human herpesvirus 4 (Epstein-Barr virus)
gggucucacgagggucugcc

SEQ ID NO: 311776 - RNA, 19 nt, Human herpesvirus 4 (Epstein-Barr virus)
ggguggcauugcgggugga

SEQ ID NO: 311777 - RNA, 18 nt, Human herpesvirus 4 (Epstein-Barr virus)
gggugggcggugaucagg

SEQ ID NO: 311778 - RNA, 17 nt, Human herpesvirus 4 (Epstein-Barr virus)
gggugggggugggugca

SEQ ID NO: 311779 - RNA, 20 nt, Human herpesvirus 4 (Epstein-Barr virus)
ggguggugauguagcuauac

SEQ ID NO: 311780 - RNA, 21 nt, Human herpesvirus 4 (Epstein-Barr virus)
ggguggugggcuccuuagacu

SEQ ID NO: 311781 - RNA, 15 nt, Human herpesvirus 4 (Epstein-Barr virus)
ggguguggagacuag

SEQ ID NO: 311782 - RNA, 19 nt, Human herpesvirus 4 (Epstein-Barr virus)
ggguguggagacuagcuau

SEQ ID NO: 311783 - RNA, 12 nt, Human herpesvirus 4 (Epstein-Barr virus)
gguaacaggugg

SEQ ID NO: 311784 - RNA, 15 nt, Human herpesvirus 4 (Epstein-Barr virus)
gguacaggaccugga

SEQ ID NO: 311785 - RNA, 16 nt, Human herpesvirus 4 (Epstein-Barr virus)
gguacccaaaccaaau

SEQ ID NO: 311786 - RNA, 23 nt, Human herpesvirus 4 (Epstein-Barr virus)
gguaccccaaaacuauaccaaag

SEQ ID NO: 311787 - RNA, 18 nt, Human herpesvirus 4 (Epstein-Barr virus)
gguaccuuccuguguucu

SEQ ID NO: 311788 - RNA, 19 nt, Human herpesvirus 4 (Epstein-Barr virus)
gguagauggcgagacucuu

SEQ ID NO: 311789 - RNA, 16 nt, Human herpesvirus 4 (Epstein-Barr virus)
gguaguggcugggaua

SEQ ID NO: 311790 - RNA, 23 nt, Human herpesvirus 4 (Epstein-Barr virus)
cugcguccagacgcgauggcaca

SEQ ID NO: 311791 - RNA, 23 nt, Human herpesvirus 4 (Epstein-Barr virus)
cugcuauucugagcaccaacaca

SEQ ID NO: 311792 - RNA, 14 nt, Human herpesvirus 4 (Epstein-Barr virus)
cugcuccaccgccu

SEQ ID NO: 311793 - RNA, 18 nt, Human herpesvirus 4 (Epstein-Barr virus)
cugcucuucaaccuuggc

SEQ ID NO: 311794 - RNA, 16 nt, Human herpesvirus 4 (Epstein-Barr virus)
cugcugcugcuuguga

SEQ ID NO: 311795 - RNA, 16 nt, Human herpesvirus 4 (Epstein-Barr virus)
cugcugcuugugauca

SEQ ID NO: 311796 - RNA, 21 nt, Human herpesvirus 4 (Epstein-Barr virus)
cuggaacucgaagcggucuca

SEQ ID NO: 311797 - RNA, 16 nt, Human herpesvirus 4 (Epstein-Barr virus)
cuggacacacauggca

SEQ ID NO: 311798 - RNA, 23 nt, Human herpesvirus 4 (Epstein-Barr virus)
cuggacguggcugcgguggugcg

SEQ ID NO: 311799 - RNA, 18 nt, Human herpesvirus 4 (Epstein-Barr virus)
cuggaggccucaggcaac

SEQ ID NO: 311800 - RNA, 21 nt, Human herpesvirus 4 (Epstein-Barr virus)
cuggaggucuucucugacaaa

SEQ ID NO: 311801 - RNA, 20 nt, Human herpesvirus 4 (Epstein-Barr virus)
cuggagucugcaugucuguu

SEQ ID NO: 311802 - RNA, 14 nt, Human herpesvirus 4 (Epstein-Barr virus)
cuggcacugcuagc

SEQ ID NO: 311803 - RNA, 23 nt, Human herpesvirus 4 (Epstein-Barr virus)
cuggcagcuuuuggccuucuucc

SEQ ID NO: 311804 - RNA, 21 nt, Human herpesvirus 4 (Epstein-Barr virus)
cuggcaguccuugugucucua

SEQ ID NO: 311805 - RNA, 14 nt, Human herpesvirus 4 (Epstein-Barr virus)
cuggccaaccugcc

SEQ ID NO: 311806 - RNA, 17 nt, Human herpesvirus 4 (Epstein-Barr virus)
cuggccaugaaucugac

SEQ ID NO: 311807 - RNA, 19 nt, Human herpesvirus 4 (Epstein-Barr virus)
cuggccggccgcccccuga

SEQ ID NO: 311808 - RNA, 23 nt, Human herpesvirus 4 (Epstein-Barr virus)
cuuuuaccccagucccaacccaa

SEQ ID NO: 311809 - RNA, 16 nt, Human herpesvirus 4 (Epstein-Barr virus)
cuuuugcucuuaacca

SEQ ID NO: 311810 - RNA, 22 nt, Human herpesvirus 4 (Epstein-Barr virus)
gaaaaagguuuagcuauuccac

SEQ ID NO: 311811 - RNA, 19 nt, Human herpesvirus 4 (Epstein-Barr virus)
gaaaaccggcgagacuugg

SEQ ID NO: 311812 - RNA, 23 nt, Human herpesvirus 4 (Epstein-Barr virus)
gaaaagagacugcgaaaauucag

SEQ ID NO: 311813 - RNA, 18 nt, Human herpesvirus 4 (Epstein-Barr virus)
gaaaaggcccuaauucag

SEQ ID NO: 311814 - RNA, 15 nt, Human herpesvirus 4 (Epstein-Barr virus)
gaaaagggcccaggg

SEQ ID NO: 311815 - RNA, 19 nt, Human herpesvirus 4 (Epstein-Barr virus)
gaaaauaaaaagaauguaa

SEQ ID NO: 311816 - RNA, 13 nt, Human herpesvirus 4 (Epstein-Barr virus)
gaaaauacuucuc

SEQ ID NO: 311817 - RNA, 21 nt, Human herpesvirus 4 (Epstein-Barr virus)
gaaaaucgcagcaggguccaa

SEQ ID NO: 311818 - RNA, 13 nt, Human herpesvirus 4 (Epstein-Barr virus)
gaaaaugagccau

SEQ ID NO: 311819 - RNA, 22 nt, Human herpesvirus 4 (Epstein-Barr virus)
gaaacacagcucuggcaguuau

SEQ ID NO: 311820 - RNA, 20 nt, Human herpesvirus 4 (Epstein-Barr virus)
gaaacuaugcaugagccaca

SEQ ID NO: 311821 - RNA, 20 nt, Human herpesvirus 4 (Epstein-Barr virus)
gaaacugugccauggugcca

SEQ ID NO: 311822 - RNA, 16 nt, Human herpesvirus 4 (Epstein-Barr virus)
gaaagagccaugguga

SEQ ID NO: 311823 - RNA, 21 nt, Human herpesvirus 4 (Epstein-Barr virus)
gaaagaugucaaacauggugu

SEQ ID NO: 311824 - RNA, 13 nt, Human herpesvirus 4 (Epstein-Barr virus)
gaaagcacuuuga

SEQ ID NO: 311825 - RNA, 21 nt, Human herpesvirus 4 (Epstein-Barr virus)
gaaaggccauaaucucucgaa

SEQ ID NO: 311826 - RNA, 21 nt, Human herpesvirus 4 (Epstein-Barr virus)
gaaagucuauacggccacaac

SEQ ID NO: 311827 - RNA, 17 nt, Human herpesvirus 4 (Epstein-Barr virus)
gaaaugcagguuugacu

SEQ ID NO: 311828 - RNA, 19 nt, Human herpesvirus 4 (Epstein-Barr virus)
gaaaugcgccgucauucca

SEQ ID NO: 311829 - RNA, 15 nt, Human herpesvirus 4 (Epstein-Barr virus)
gaaauugggugacca

SEQ ID NO: 311830 - RNA, 13 nt, Human herpesvirus 4 (Epstein-Barr virus)
gaaauuugcacuu

SEQ ID NO: 311831 - RNA, 22 nt, Human herpesvirus 4 (Epstein-Barr virus)
gaacacggcaccgucagccaca

SEQ ID NO: 311832 - RNA, 14 nt, Human herpesvirus 4 (Epstein-Barr virus)
gaacagucaucagu

SEQ ID NO: 311833 - RNA, 14 nt, Human herpesvirus 4 (Epstein-Barr virus)
gaacaucacugcca

SEQ ID NO: 311834 - RNA, 15 nt, Human herpesvirus 4 (Epstein-Barr virus)
gaacaucacugccac

SEQ ID NO: 311835 - RNA, 20 nt, Human herpesvirus 4 (Epstein-Barr virus)
gaaccugagccugagccaca

SEQ ID NO: 311836 - RNA, 18 nt, Human herpesvirus 4 (Epstein-Barr virus)
gaacgugacaggcacaac

SEQ ID NO: 311837 - RNA, 17 nt, Human herpesvirus 4 (Epstein-Barr virus)
gaacugacgcuccagga

SEQ ID NO: 311838 - RNA, 23 nt, Human herpesvirus 4 (Epstein-Barr virus)
gaacuguacuaaauuugcugaca

SEQ ID NO: 311839 - RNA, 15 nt, Human herpesvirus 4 (Epstein-Barr virus)
gaacuuuaacauuga

SEQ ID NO: 311840 - RNA, 17 nt, Human herpesvirus 4 (Epstein-Barr virus)
gaacuuuaacauugaug

SEQ ID NO: 311841 - RNA, 12 nt, Human herpesvirus 4 (Epstein-Barr virus)
gaagacauggcc

SEQ ID NO: 311842 - RNA, 17 nt, Human herpesvirus 4 (Epstein-Barr virus)
gaagacccaucugaggg

SEQ ID NO: 311843 - RNA, 20 nt, Human herpesvirus 4 (Epstein-Barr virus)
gaagacuccugccugaauca

SEQ ID NO: 311844 - RNA, 10 nt, Human herpesvirus 4 (Epstein-Barr virus)
gaagccacuc

SEQ ID NO: 311845 - RNA, 17 nt, Human herpesvirus 4 (Epstein-Barr virus)
gaagccugccucauccu

SEQ ID NO: 311846 - RNA, 14 nt, Human herpesvirus 4 (Epstein-Barr virus)
gaagcgaagcagcu

SEQ ID NO: 311847 - RNA, 15 nt, Human herpesvirus 4 (Epstein-Barr virus)
gaagcgaagcagcuc

SEQ ID NO: 311848 - RNA, 18 nt, Human herpesvirus 4 (Epstein-Barr virus)
gaaggaggagacuggcaa

SEQ ID NO: 311849 - RNA, 22 nt, Human herpesvirus 4 (Epstein-Barr virus)
gaaggauccaugcaaguggaug

SEQ ID NO: 311850 - RNA, 12 nt, Human herpesvirus 4 (Epstein-Barr virus)
gaaggcuugcca

SEQ ID NO: 311851 - RNA, 13 nt, Human herpesvirus 4 (Epstein-Barr virus)
gaaggcuugccaa

SEQ ID NO: 311852 - RNA, 14 nt, Human herpesvirus 4 (Epstein-Barr virus)
gaaggcuugccaaa

SEQ ID NO: 311853 - RNA, 15 nt, Human herpesvirus 4 (Epstein-Barr virus)
gaaggcuugccaaaa

SEQ ID NO: 311854 - RNA, 20 nt, Human herpesvirus 4 (Epstein-Barr virus)
gaagugggaccuacaggaca

SEQ ID NO: 311855 - RNA, 15 nt, Human herpesvirus 4 (Epstein-Barr virus)
gaauaacaagggaag

SEQ ID NO: 311856 - RNA, 14 nt, Human herpesvirus 4 (Epstein-Barr virus)
gaauaaucucccca

SEQ ID NO: 311857 - RNA, 21 nt, Human herpesvirus 4 (Epstein-Barr virus)
gaauagcuucugcagaaggcc

SEQ ID NO: 311858 - RNA, 14 nt, Human herpesvirus 4 (Epstein-Barr virus)
gaauaugaugagga

SEQ ID NO: 311859 - RNA, 20 nt, Human herpesvirus 4 (Epstein-Barr virus)
gaaugaacacucauggugug

SEQ ID NO: 311860 - RNA, 15 nt, Human herpesvirus 4 (Epstein-Barr virus)
gaaugaccgugcaug

SEQ ID NO: 311861 - RNA, 19 nt, Human herpesvirus 4 (Epstein-Barr virus)
gaauguagccccuaggccu

SEQ ID NO: 311862 - RNA, 13 nt, Human herpesvirus 4 (Epstein-Barr virus)
gaauuagggccuu

SEQ ID NO: 311863 - RNA, 23 nt, Human herpesvirus 4 (Epstein-Barr virus)
gaauugucacugagaaucuccug

SEQ ID NO: 311864 - RNA, 14 nt, Human herpesvirus 4 (Epstein-Barr virus)
gaauuuagccugau

SEQ ID NO: 311865 - RNA, 18 nt, Human herpesvirus 4 (Epstein-Barr virus)
gaauuuauacccagugag

SEQ ID NO: 311866 - RNA, 12 nt, Human herpesvirus 4 (Epstein-Barr virus)
gacaacagguca

SEQ ID NO: 311867 - RNA, 17 nt, Human herpesvirus 4 (Epstein-Barr virus)
gacaacugucacaccag

SEQ ID NO: 311868 - RNA, 16 nt, Human herpesvirus 4 (Epstein-Barr virus)
gacaagacagucacau

SEQ ID NO: 311869 - RNA, 22 nt, Human herpesvirus 4 (Epstein-Barr virus)
gacaaggaguaccugcgucuca

SEQ ID NO: 311870 - RNA, 21 nt, Human herpesvirus 4 (Epstein-Barr virus)
gacaauuuuagaugagguaga

SEQ ID NO: 311871 - RNA, 20 nt, Human herpesvirus 4 (Epstein-Barr virus)
gacacaccuaaauuuagcac

SEQ ID NO: 311872 - RNA, 21 nt, Human herpesvirus 4 (Epstein-Barr virus)
gacacagugaugaacaccacc

SEQ ID NO: 311873 - RNA, 21 nt, Human herpesvirus 4 (Epstein-Barr virus)
gacagaggugcucaaggcagu

SEQ ID NO: 311874 - RNA, 16 nt, Human herpesvirus 4 (Epstein-Barr virus)
gacagauugucuucca

SEQ ID NO: 311875 - RNA, 17 nt, Human herpesvirus 4 (Epstein-Barr virus)
gacagauugucuuccac

SEQ ID NO: 311876 - RNA, 21 nt, Human herpesvirus 4 (Epstein-Barr virus)
gacaggcacaacggcugugac

SEQ ID NO: 311877 - RNA, 16 nt, Human herpesvirus 4 (Epstein-Barr virus)
gacccaaacucgacuu

SEQ ID NO: 311878 - RNA, 17 nt, Human herpesvirus 4 (Epstein-Barr virus)
gacccaaagggacucaa

SEQ ID NO: 311879 - RNA, 16 nt, Human herpesvirus 4 (Epstein-Barr virus)
gaccccccucugaugg

SEQ ID NO: 311880 - RNA, 16 nt, Human herpesvirus 4 (Epstein-Barr virus)
gacccgagucucugcu

SEQ ID NO: 311881 - RNA, 16 nt, Human herpesvirus 4 (Epstein-Barr virus)
gacccucuugcacucc

SEQ ID NO: 311882 - RNA, 14 nt, Human herpesvirus 4 (Epstein-Barr virus)
gaccucuacacgcu

SEQ ID NO: 311883 - RNA, 13 nt, Human herpesvirus 4 (Epstein-Barr virus)
gaccugccaaaga

SEQ ID NO: 311884 - RNA, 14 nt, Human herpesvirus 4 (Epstein-Barr virus)
gaccuggcucaggu

SEQ ID NO: 311885 - RNA, 20 nt, Human herpesvirus 4 (Epstein-Barr virus)
gaccuuaacauccgagaccu

SEQ ID NO: 311886 - RNA, 20 nt, Human herpesvirus 4 (Epstein-Barr virus)
gaccuugaccacgacuagcg

SEQ ID NO: 311887 - RNA, 11 nt, Human herpesvirus 4 (Epstein-Barr virus)
gacgccaaugc

SEQ ID NO: 311888 - RNA, 12 nt, Human herpesvirus 4 (Epstein-Barr virus)
gacgccaaugcu

SEQ ID NO: 311889 - RNA, 15 nt, Human herpesvirus 4 (Epstein-Barr virus)
gacgcgacauguuuc

SEQ ID NO: 311890 - RNA, 16 nt, Human herpesvirus 4 (Epstein-Barr virus)
gacggcaucaugcgug

SEQ ID NO: 311891 - RNA, 17 nt, Human herpesvirus 4 (Epstein-Barr virus)
gacguggcugcgguggu

SEQ ID NO: 311892 - RNA, 20 nt, Human herpesvirus 4 (Epstein-Barr virus)
gacguggcugcgguggugcg

SEQ ID NO: 311893 - RNA, 20 nt, Human herpesvirus 4 (Epstein-Barr virus)
gacuagcgccccuauaacca

SEQ ID NO: 311894 - RNA, 19 nt, Human herpesvirus 4 (Epstein-Barr virus)
gacuauccaggucuugccg

SEQ ID NO: 311895 - RNA, 18 nt, Human herpesvirus 4 (Epstein-Barr virus)
gacuaugcauacacugaa

SEQ ID NO: 311896 - RNA, 19 nt, Human herpesvirus 4 (Epstein-Barr virus)
gacuauguucucuacggug

SEQ ID NO: 311897 - RNA, 21 nt, Human herpesvirus 4 (Epstein-Barr virus)
gacucaacguggucuccuucu

SEQ ID NO: 311898 - RNA, 17 nt, Human herpesvirus 4 (Epstein-Barr virus)
gacucaauuuccaaaaa

SEQ ID NO: 311899 - RNA, 15 nt, Human herpesvirus 4 (Epstein-Barr virus)
gacuccacaccaaau

SEQ ID NO: 311900 - RNA, 19 nt, Human herpesvirus 4 (Epstein-Barr virus)
gacucccugacgguggugg

SEQ ID NO: 311901 - RNA, 16 nt, Human herpesvirus 4 (Epstein-Barr virus)
gacucuagacagucac

SEQ ID NO: 311902 - RNA, 17 nt, Human herpesvirus 4 (Epstein-Barr virus)
gacucuagacagucacc

SEQ ID NO: 311903 - RNA, 18 nt, Human herpesvirus 4 (Epstein-Barr virus)
gacucugaaaaugaugaa

SEQ ID NO: 311904 - RNA, 20 nt, Human herpesvirus 4 (Epstein-Barr virus)
gacucugaaaaugaugaauu

SEQ ID NO: 311905 - RNA, 22 nt, Human herpesvirus 4 (Epstein-Barr virus)
gacugacacauaaacaugguuu

SEQ ID NO: 311906 - RNA, 16 nt, Human herpesvirus 4 (Epstein-Barr virus)
gacuggcaacuccucu

SEQ ID NO: 311907 - RNA, 12 nt, Human herpesvirus 4 (Epstein-Barr virus)
gacugugguauc

SEQ ID NO: 311908 - RNA, 15 nt, Human herpesvirus 4 (Epstein-Barr virus)
gacuugaggugggcu

SEQ ID NO: 311909 - RNA, 14 nt, Human herpesvirus 4 (Epstein-Barr virus)
gagaaaauacuucu

SEQ ID NO: 311910 - RNA, 19 nt, Human herpesvirus 4 (Epstein-Barr virus)
gagaaaaucugcuucuccc

SEQ ID NO: 311911 - RNA, 18 nt, Human herpesvirus 4 (Epstein-Barr virus)
gagaacagucaucaguaa

SEQ ID NO: 311912 - RNA, 13 nt, Human herpesvirus 4 (Epstein-Barr virus)
gagaacccggcgg

SEQ ID NO: 311913 - RNA, 20 nt, Human herpesvirus 4 (Epstein-Barr virus)
gagaacugacgcuccaggau

SEQ ID NO: 311914 - RNA, 18 nt, Human herpesvirus 4 (Epstein-Barr virus)
gagaaguggggagggcac

SEQ ID NO: 311915 - RNA, 22 nt, Human herpesvirus 4 (Epstein-Barr virus)
gagacacggcucugucaguuau

SEQ ID NO: 311916 - RNA, 22 nt, Human herpesvirus 4 (Epstein-Barr virus)
gagaccaagaccaauacccagg

SEQ ID NO: 311917 - RNA, 22 nt, Human herpesvirus 4 (Epstein-Barr virus)
gagacggugaccugacuggcag

SEQ ID NO: 311918 - RNA, 13 nt, Human herpesvirus 4 (Epstein-Barr virus)
gagacuaaugugg

SEQ ID NO: 311919 - RNA, 14 nt, Human herpesvirus 4 (Epstein-Barr virus)
gagacuacuaagcu

SEQ ID NO: 311920 - RNA, 15 nt, Human herpesvirus 4 (Epstein-Barr virus)
gagacuuggaccaag

SEQ ID NO: 311921 - RNA, 15 nt, Human herpesvirus 4 (Epstein-Barr virus)
gagagcauuucaggc

SEQ ID NO: 311922 - RNA, 21 nt, Human herpesvirus 4 (Epstein-Barr virus)
gagagccacgacauugaucac

SEQ ID NO: 311923 - RNA, 13 nt, Human herpesvirus 4 (Epstein-Barr virus)
gagaggaugaucc

SEQ ID NO: 311924 - RNA, 21 nt, Human herpesvirus 4 (Epstein-Barr virus)
gagaggccucugggguccagg

SEQ ID NO: 311925 - RNA, 14 nt, Human herpesvirus 4 (Epstein-Barr virus)
gagauaauguacag

SEQ ID NO: 311926 - RNA, 23 nt, Human herpesvirus 4 (Epstein-Barr virus)
gagaucagcaaccuugggggcaa

SEQ ID NO: 311927 - RNA, 22 nt, Human herpesvirus 4 (Epstein-Barr virus)
gagaucucagaauugucacuga

SEQ ID NO: 311928 - RNA, 12 nt, Human herpesvirus 4 (Epstein-Barr virus)
gagaucuucuca

SEQ ID NO: 311929 - RNA, 15 nt, Human herpesvirus 4 (Epstein-Barr virus)
gagaugauaaugaug

SEQ ID NO: 311930 - RNA, 11 nt, Human herpesvirus 4 (Epstein-Barr virus)
gagaugcucug

SEQ ID NO: 311931 - RNA, 19 nt, Human herpesvirus 4 (Epstein-Barr virus)
gagauggcgccguuugacu

SEQ ID NO: 311932 - RNA, 18 nt, Human herpesvirus 4 (Epstein-Barr virus)
gagaugggugcauuucac

SEQ ID NO: 311933 - RNA, 14 nt, Human herpesvirus 4 (Epstein-Barr virus)
gagauugccaagau

SEQ ID NO: 311934 - RNA, 12 nt, Human herpesvirus 4 (Epstein-Barr virus)
gagcaaccagcu

SEQ ID NO: 311935 - RNA, 13 nt, Human herpesvirus 4 (Epstein-Barr virus)
gagcagaaggcca

SEQ ID NO: 311936 - RNA, 20 nt, Human herpesvirus 4 (Epstein-Barr virus)
gagcaugagcuccucuccaa

SEQ ID NO: 311937 - RNA, 14 nt, Human herpesvirus 4 (Epstein-Barr virus)
gagcaugaucagga

SEQ ID NO: 311938 - RNA, 15 nt, Human herpesvirus 4 (Epstein-Barr virus)
gagcaugcaggucag

SEQ ID NO: 311939 - RNA, 22 nt, Human herpesvirus 4 (Epstein-Barr virus)
gagccacacccaccuaugccaa

SEQ ID NO: 311940 - RNA, 23 nt, Human herpesvirus 4 (Epstein-Barr virus)
gagccacacccaccuaugccaau

SEQ ID NO: 311941 - RNA, 23 nt, Human herpesvirus 4 (Epstein-Barr virus)
gagccaccacagcacaagugauu

SEQ ID NO: 311942 - RNA, 22 nt, Human herpesvirus 4 (Epstein-Barr virus)
gagcccauucucguccaucucg

SEQ ID NO: 311943 - RNA, 19 nt, Human herpesvirus 4 (Epstein-Barr virus)
gagccccacaaacaccagu

SEQ ID NO: 311944 - RNA, 19 nt, Human herpesvirus 4 (Epstein-Barr virus)
gagcccggccuacgagcgc

SEQ ID NO: 311945 - RNA, 17 nt, Human herpesvirus 4 (Epstein-Barr virus)
gagccuacccaugacca

SEQ ID NO: 311946 - RNA, 18 nt, Human herpesvirus 4 (Epstein-Barr virus)
gagccuacccaugaccaa

SEQ ID NO: 311947 - RNA, 13 nt, Human herpesvirus 4 (Epstein-Barr virus)
gagcggcugugag

SEQ ID NO: 311948 - RNA, 18 nt, Human herpesvirus 4 (Epstein-Barr virus)
gagcggguggaggagcuc

SEQ ID NO: 311949 - RNA, 23 nt, Human herpesvirus 4 (Epstein-Barr virus)
gagcggguggaggagcuccguga

SEQ ID NO: 311950 - RNA, 17 nt, Human herpesvirus 4 (Epstein-Barr virus)
gagcgugugcacccggc

SEQ ID NO: 311951 - RNA, 13 nt, Human herpesvirus 4 (Epstein-Barr virus)
gaggaaggccaca

SEQ ID NO: 311952 - RNA, 16 nt, Human herpesvirus 4 (Epstein-Barr virus)
gaggaaggccacaaag

SEQ ID NO: 311953 - RNA, 16 nt, Human herpesvirus 4 (Epstein-Barr virus)
gaggacuaauguucuc

SEQ ID NO: 311954 - RNA, 11 nt, Human herpesvirus 4 (Epstein-Barr virus)
gaggaggacau

SEQ ID NO: 311955 - RNA, 15 nt, Human herpesvirus 4 (Epstein-Barr virus)
gaggaggcacacaaa

SEQ ID NO: 311956 - RNA, 18 nt, Human herpesvirus 4 (Epstein-Barr virus)
gaggaggcggaagaccag

SEQ ID NO: 311957 - RNA, 18 nt, Human herpesvirus 4 (Epstein-Barr virus)
gaggaggggggcagugau

SEQ ID NO: 311958 - RNA, 17 nt, Human herpesvirus 4 (Epstein-Barr virus)
gaggaugaggcugauga

SEQ ID NO: 311959 - RNA, 16 nt, Human herpesvirus 4 (Epstein-Barr virus)
gaggcauaacgguggu

SEQ ID NO: 311960 - RNA, 14 nt, Human herpesvirus 4 (Epstein-Barr virus)
gaggcccacugcag

SEQ ID NO: 311961 - RNA, 17 nt, Human herpesvirus 4 (Epstein-Barr virus)
gaggcccugcaagccaa

SEQ ID NO: 311962 - RNA, 14 nt, Human herpesvirus 4 (Epstein-Barr virus)
gaggccguguuucu

SEQ ID NO: 311963 - RNA, 23 nt, Human herpesvirus 4 (Epstein-Barr virus)
gaggcuauaacgcagguccuguu

SEQ ID NO: 311964 - RNA, 16 nt, Human herpesvirus 4 (Epstein-Barr virus)
gaggcuggaugcagcg

SEQ ID NO: 311965 - RNA, 15 nt, Human herpesvirus 4 (Epstein-Barr virus)
cgacugucauuuaca

SEQ ID NO: 311966 - RNA, 19 nt, Human herpesvirus 4 (Epstein-Barr virus)
cgagaaaaugagccaugac

SEQ ID NO: 311967 - RNA, 13 nt, Human herpesvirus 4 (Epstein-Barr virus)
cgagaccuaugua

SEQ ID NO: 311968 - RNA, 19 nt, Human herpesvirus 4 (Epstein-Barr virus)
cgagagcaugccaccguga

SEQ ID NO: 311969 - RNA, 20 nt, Human herpesvirus 4 (Epstein-Barr virus)
cgagagcaugccaccgugaa

SEQ ID NO: 311970 - RNA, 22 nt, Human herpesvirus 4 (Epstein-Barr virus)
cgagauguacauaauguaugcc

SEQ ID NO: 311971 - RNA, 13 nt, Human herpesvirus 4 (Epstein-Barr virus)
cgagcaugagcuc

SEQ ID NO: 311972 - RNA, 21 nt, Human herpesvirus 4 (Epstein-Barr virus)
cgagccauuugaggaacaugg

SEQ ID NO: 311973 - RNA, 14 nt, Human herpesvirus 4 (Epstein-Barr virus)
cgagucugacuaca

SEQ ID NO: 311974 - RNA, 16 nt, Human herpesvirus 4 (Epstein-Barr virus)
cgagucugacuacagc

SEQ ID NO: 311975 - RNA, 17 nt, Human herpesvirus 4 (Epstein-Barr virus)
cgauaccuugggcauca

SEQ ID NO: 311976 - RNA, 17 nt, Human herpesvirus 4 (Epstein-Barr virus)
cgaugauugagaaugcc

SEQ ID NO: 311977 - RNA, 19 nt, Human herpesvirus 4 (Epstein-Barr virus)
cgaugauugagaaugccaa

SEQ ID NO: 311978 - RNA, 14 nt, Human herpesvirus 4 (Epstein-Barr virus)
cgcaaguuccucaa

SEQ ID NO: 311979 - RNA, 18 nt, Human herpesvirus 4 (Epstein-Barr virus)
cgcaauauaaaacccuga

SEQ ID NO: 311980 - RNA, 20 nt, Human herpesvirus 4 (Epstein-Barr virus)
cgcaccacgggaggcggugc

SEQ ID NO: 311981 - RNA, 14 nt, Human herpesvirus 4 (Epstein-Barr virus)
cgcacuccuaugca

SEQ ID NO: 311982 - RNA, 18 nt, Human herpesvirus 4 (Epstein-Barr virus)
cgcacuccuaugcauuuc

SEQ ID NO: 311983 - RNA, 18 nt, Human herpesvirus 4 (Epstein-Barr virus)
cgcagccgcugaagccag

SEQ ID NO: 311984 - RNA, 20 nt, Human herpesvirus 4 (Epstein-Barr virus)
cgcagccgucgauaccgggu

SEQ ID NO: 311985 - RNA, 14 nt, Human herpesvirus 4 (Epstein-Barr virus)
cgcagggguggugg

SEQ ID NO: 311986 - RNA, 17 nt, Human herpesvirus 4 (Epstein-Barr virus)
cgcaggggugguggaug

SEQ ID NO: 311987 - RNA, 14 nt, Human herpesvirus 4 (Epstein-Barr virus)
cgcauccaccauca

SEQ ID NO: 311988 - RNA, 16 nt, Human herpesvirus 4 (Epstein-Barr virus)
cgcauccgagaggaug

SEQ ID NO: 311989 - RNA, 21 nt, Human herpesvirus 4 (Epstein-Barr virus)
cgccgcuaguugguccagggu

SEQ ID NO: 311990 - RNA, 16 nt, Human herpesvirus 4 (Epstein-Barr virus)
cgccgguuaacuuuaa

SEQ ID NO: 311991 - RNA, 16 nt, Human herpesvirus 4 (Epstein-Barr virus)
cgccguuugacuguuu

SEQ ID NO: 311992 - RNA, 18 nt, Human herpesvirus 4 (Epstein-Barr virus)
cgccugucauucuaucaa

SEQ ID NO: 311993 - RNA, 19 nt, Human herpesvirus 4 (Epstein-Barr virus)
cgcgaugcuauaaaccaga

SEQ ID NO: 311994 - RNA, 13 nt, Human herpesvirus 4 (Epstein-Barr virus)
cgcgugauuucca

SEQ ID NO: 311995 - RNA, 11 nt, Human herpesvirus 4 (Epstein-Barr virus)
cgcgugcacau

SEQ ID NO: 311996 - RNA, 21 nt, Human herpesvirus 4 (Epstein-Barr virus)
cgcuggccgagccugucgaua

SEQ ID NO: 311997 - RNA, 17 nt, Human herpesvirus 4 (Epstein-Barr virus)
cgcuggcucgccucauc

SEQ ID NO: 311998 - RNA, 21 nt, Human herpesvirus 4 (Epstein-Barr virus)
cgcuguuuugcagcugagucc

SEQ ID NO: 311999 - RNA, 13 nt, Human herpesvirus 4 (Epstein-Barr virus)
cgcuucauucacg

SEQ ID NO: 312000 - RNA, 17 nt, Human herpesvirus 4 (Epstein-Barr virus)
cgcuuugccggcaucca

SEQ ID NO: 312001 - RNA, 12 nt, Human herpesvirus 4 (Epstein-Barr virus)
cggacaauacac

SEQ ID NO: 312002 - RNA, 13 nt, Human herpesvirus 4 (Epstein-Barr virus)
cggaccaggguca

SEQ ID NO: 312003 - RNA, 20 nt, Human herpesvirus 4 (Epstein-Barr virus)
cggagauggaugacaccaug

SEQ ID NO: 312004 - RNA, 17 nt, Human herpesvirus 4 (Epstein-Barr virus)
cggagccaccacagcac

SEQ ID NO: 312005 - RNA, 15 nt, Human herpesvirus 4 (Epstein-Barr virus)
cggaggggaccacua

SEQ ID NO: 312006 - RNA, 20 nt, Human herpesvirus 4 (Epstein-Barr virus)
cggagggucagauuuugcaa

SEQ ID NO: 312007 - RNA, 15 nt, Human herpesvirus 4 (Epstein-Barr virus)
cggauaaacaggggu

SEQ ID NO: 312008 - RNA, 23 nt, Human herpesvirus 4 (Epstein-Barr virus)
cggauaaacagggguauguggug

SEQ ID NO: 312009 - RNA, 22 nt, Human herpesvirus 4 (Epstein-Barr virus)
cggaugagggacguaucugggc

SEQ ID NO: 312010 - RNA, 21 nt, Human herpesvirus 4 (Epstein-Barr virus)
cggcacaccagacauggugua

SEQ ID NO: 312011 - RNA, 20 nt, Human herpesvirus 4 (Epstein-Barr virus)
cggcauccucaaggggcacg

SEQ ID NO: 312012 - RNA, 22 nt, Human herpesvirus 4 (Epstein-Barr virus)
cggcaucggguccuagcacaaa

SEQ ID NO: 312013 - RNA, 23 nt, Human herpesvirus 4 (Epstein-Barr virus)
cggcauucccgugcuuuuugcca

SEQ ID NO: 312014 - RNA, 19 nt, Human herpesvirus 4 (Epstein-Barr virus)
cggccacacagugggcuuc

SEQ ID NO: 312015 - RNA, 15 nt, Human herpesvirus 4 (Epstein-Barr virus)
cggccaugcuaucuu

SEQ ID NO: 312016 - RNA, 14 nt, Human herpesvirus 4 (Epstein-Barr virus)
cggccuccuggcca

SEQ ID NO: 312017 - RNA, 13 nt, Human herpesvirus 4 (Epstein-Barr virus)
cggccucgugcaa

SEQ ID NO: 312018 - RNA, 23 nt, Human herpesvirus 4 (Epstein-Barr virus)
cggcgagacuuggaccaagggca

SEQ ID NO: 312019 - RNA, 14 nt, Human herpesvirus 4 (Epstein-Barr virus)
cggcgccaccugca

SEQ ID NO: 312020 - RNA, 15 nt, Human herpesvirus 4 (Epstein-Barr virus)
cggcgccucuugucg

SEQ ID NO: 312021 - RNA, 13 nt, Human herpesvirus 4 (Epstein-Barr virus)
cggcucucaggcc

SEQ ID NO: 312022 - RNA, 23 nt, Human herpesvirus 4 (Epstein-Barr virus)
cgggauagcaggacggggggcug

SEQ ID NO: 312023 - RNA, 17 nt, Human herpesvirus 4 (Epstein-Barr virus)
cgggcgcaccugugucc

SEQ ID NO: 312024 - RNA, 16 nt, Human herpesvirus 4 (Epstein-Barr virus)
cgggcgccugcuccac

SEQ ID NO: 312025 - RNA, 16 nt, Human herpesvirus 4 (Epstein-Barr virus)
cgggcgcgcuccgucc

SEQ ID NO: 312026 - RNA, 20 nt, Human herpesvirus 4 (Epstein-Barr virus)
cgggcguuggcccauaaaaa

SEQ ID NO: 312027 - RNA, 13 nt, Human herpesvirus 4 (Epstein-Barr virus)
cggggcggcggug

SEQ ID NO: 312028 - RNA, 12 nt, Human herpesvirus 4 (Epstein-Barr virus)
cgggggaucgcu

SEQ ID NO: 312029 - RNA, 19 nt, Human herpesvirus 4 (Epstein-Barr virus)
cgggggcgggaguggaggc

SEQ ID NO: 312030 - RNA, 13 nt, Human herpesvirus 4 (Epstein-Barr virus)
cggggugccaaga

SEQ ID NO: 312031 - RNA, 12 nt, Human herpesvirus 4 (Epstein-Barr virus)
cggguaggggag

SEQ ID NO: 312032 - RNA, 14 nt, Human herpesvirus 4 (Epstein-Barr virus)
cggguccuagcaca

SEQ ID NO: 312033 - RNA, 15 nt, Human herpesvirus 4 (Epstein-Barr virus)
cgguccagaagcaga

SEQ ID NO: 312034 - RNA, 16 nt, Human herpesvirus 4 (Epstein-Barr virus)
cggucucguccaucuu

SEQ ID NO: 312035 - RNA, 20 nt, Human herpesvirus 4 (Epstein-Barr virus)
cggugaccugacuggcagaa

SEQ ID NO: 312036 - RNA, 16 nt, Human herpesvirus 4 (Epstein-Barr virus)
cggugccugagacaga

SEQ ID NO: 312037 - RNA, 19 nt, Human herpesvirus 4 (Epstein-Barr virus)
cgguuagggaggacacugc

SEQ ID NO: 312038 - RNA, 16 nt, Human herpesvirus 4 (Epstein-Barr virus)
cgguuauaacugccag

SEQ ID NO: 312039 - RNA, 14 nt, Human herpesvirus 4 (Epstein-Barr virus)
cgguuucagcauca

SEQ ID NO: 312040 - RNA, 18 nt, Human herpesvirus 4 (Epstein-Barr virus)
cguaaaucccucucgccu

SEQ ID NO: 312041 - RNA, 16 nt, Human herpesvirus 4 (Epstein-Barr virus)
cgucagccacacaauc

SEQ ID NO: 312042 - RNA, 19 nt, Human herpesvirus 4 (Epstein-Barr virus)
cgucagccacacaaucagc

SEQ ID NO: 312043 - RNA, 14 nt, Human herpesvirus 4 (Epstein-Barr virus)
cguccucuaccugg

SEQ ID NO: 312044 - RNA, 20 nt, Human herpesvirus 4 (Epstein-Barr virus)
cguccuguccaagugcuaug

SEQ ID NO: 312045 - RNA, 22 nt, Human herpesvirus 4 (Epstein-Barr virus)
cguccuuguccaggagacacac

SEQ ID NO: 312046 - RNA, 20 nt, Human herpesvirus 4 (Epstein-Barr virus)
cgucuaccucuguuccuucu

SEQ ID NO: 312047 - RNA, 12 nt, Human herpesvirus 4 (Epstein-Barr virus)
cgucuaugcuua

SEQ ID NO: 312048 - RNA, 12 nt, Human herpesvirus 4 (Epstein-Barr virus)
cgugccucagau

SEQ ID NO: 312049 - RNA, 16 nt, Human herpesvirus 4 (Epstein-Barr virus)
cgugcggcuacaucua

SEQ ID NO: 312050 - RNA, 17 nt, Human herpesvirus 4 (Epstein-Barr virus)
cgugcuggaugagguua

SEQ ID NO: 312051 - RNA, 18 nt, Human herpesvirus 4 (Epstein-Barr virus)
cguggcugcgguggugcg

SEQ ID NO: 312052 - RNA, 13 nt, Human herpesvirus 4 (Epstein-Barr virus)
cgugggaaaaugg

SEQ ID NO: 312053 - RNA, 13 nt, Human herpesvirus 4 (Epstein-Barr virus)
ccggaggggacca

SEQ ID NO: 312054 - RNA, 12 nt, Human herpesvirus 4 (Epstein-Barr virus)
ccggaugaucuc

SEQ ID NO: 312055 - RNA, 16 nt, Human herpesvirus 4 (Epstein-Barr virus)
ccggcagaucccgcau

SEQ ID NO: 312056 - RNA, 21 nt, Human herpesvirus 4 (Epstein-Barr virus)
ccggccaucuuuuagacacgg

SEQ ID NO: 312057 - RNA, 20 nt, Human herpesvirus 4 (Epstein-Barr virus)
ccgggggccagucuccgggu

SEQ ID NO: 312058 - RNA, 11 nt, Human herpesvirus 4 (Epstein-Barr virus)
ccggucuugca

SEQ ID NO: 312059 - RNA, 16 nt, Human herpesvirus 4 (Epstein-Barr virus)
ccgguggugggugugg

SEQ ID NO: 312060 - RNA, 19 nt, Human herpesvirus 4 (Epstein-Barr virus)
ccgucagccacacaaucag

SEQ ID NO: 312061 - RNA, 21 nt, Human herpesvirus 4 (Epstein-Barr virus)
ccgucagccagggugaccugg

SEQ ID NO: 312062 - RNA, 21 nt, Human herpesvirus 4 (Epstein-Barr virus)
ccgugaaugcacgccaacagc

SEQ ID NO: 312063 - RNA, 16 nt, Human herpesvirus 4 (Epstein-Barr virus)
ccgugagaacuuucuu

SEQ ID NO: 312064 - RNA, 17 nt, Human herpesvirus 4 (Epstein-Barr virus)
ccgugcggcuacaucua

SEQ ID NO: 312065 - RNA, 16 nt, Human herpesvirus 4 (Epstein-Barr virus)
ccuaaaaaaugcaaca

SEQ ID NO: 312066 - RNA, 16 nt, Human herpesvirus 4 (Epstein-Barr virus)
ccuaaaaccuacauga

SEQ ID NO: 312067 - RNA, 17 nt, Human herpesvirus 4 (Epstein-Barr virus)
ccuaaaaccuacaugaa

SEQ ID NO: 312068 - RNA, 17 nt, Human herpesvirus 4 (Epstein-Barr virus)
ccuaaacgugauggugc

SEQ ID NO: 312069 - RNA, 21 nt, Human herpesvirus 4 (Epstein-Barr virus)
ccuaaugcauccgcaccacag

SEQ ID NO: 312070 - RNA, 11 nt, Human herpesvirus 4 (Epstein-Barr virus)
ccuaauugugu

SEQ ID NO: 312071 - RNA, 17 nt, Human herpesvirus 4 (Epstein-Barr virus)
ccuacaacucagcccca

SEQ ID NO: 312072 - RNA, 22 nt, Human herpesvirus 4 (Epstein-Barr virus)
ccuacaggacaagacagucaca

SEQ ID NO: 312073 - RNA, 16 nt, Human herpesvirus 4 (Epstein-Barr virus)
ccuagaaacugugcca

SEQ ID NO: 312074 - RNA, 16 nt, Human herpesvirus 4 (Epstein-Barr virus)
ccuagaaagagccaug

SEQ ID NO: 312075 - RNA, 22 nt, Human herpesvirus 4 (Epstein-Barr virus)
ccuagaaugugguaacaggugg

SEQ ID NO: 312076 - RNA, 23 nt, Human herpesvirus 4 (Epstein-Barr virus)
ccuaggagagaagggagacacau

SEQ ID NO: 312077 - RNA, 12 nt, Human herpesvirus 4 (Epstein-Barr virus)
ccuauauccuag

SEQ ID NO: 312078 - RNA, 17 nt, Human herpesvirus 4 (Epstein-Barr virus)
ccucagaaaacucugca

SEQ ID NO: 312079 - RNA, 23 nt, Human herpesvirus 4 (Epstein-Barr virus)
ccucagaaaacucugcauggaga

SEQ ID NO: 312080 - RNA, 23 nt, Human herpesvirus 4 (Epstein-Barr virus)
ccucagcccccccugugcuucua

SEQ ID NO: 312081 - RNA, 15 nt, Human herpesvirus 4 (Epstein-Barr virus)
ccucagcgucaggag

SEQ ID NO: 312082 - RNA, 20 nt, Human herpesvirus 4 (Epstein-Barr virus)
ccucaucgucgacgcuguuu

SEQ ID NO: 312083 - RNA, 23 nt, Human herpesvirus 4 (Epstein-Barr virus)
ccuccaccgccgguuaacuuuaa

SEQ ID NO: 312084 - RNA, 19 nt, Human herpesvirus 4 (Epstein-Barr virus)
ccuccacggggacacgcuc

SEQ ID NO: 312085 - RNA, 23 nt, Human herpesvirus 4 (Epstein-Barr virus)
ccuccauccaguggggcuucuga

SEQ ID NO: 312086 - RNA, 20 nt, Human herpesvirus 4 (Epstein-Barr virus)
ccuccccagugaucaucucg

SEQ ID NO: 312087 - RNA, 15 nt, Human herpesvirus 4 (Epstein-Barr virus)
ccucccuaaccgccu

SEQ ID NO: 312088 - RNA, 16 nt, Human herpesvirus 4 (Epstein-Barr virus)
ccuccuaaaaccuaca

SEQ ID NO: 312089 - RNA, 19 nt, Human herpesvirus 4 (Epstein-Barr virus)
ccucgcaaaagauggacuu

SEQ ID NO: 312090 - RNA, 20 nt, Human herpesvirus 4 (Epstein-Barr virus)
ccucgcgccccaucuuggcc

SEQ ID NO: 312091 - RNA, 20 nt, Human herpesvirus 4 (Epstein-Barr virus)
ccucuacgccccagaugaaa

SEQ ID NO: 312092 - RNA, 16 nt, Human herpesvirus 4 (Epstein-Barr virus)
ccucuccagcaaccaa

SEQ ID NO: 312093 - RNA, 19 nt, Human herpesvirus 4 (Epstein-Barr virus)
ccucuguuccuucugcucc

SEQ ID NO: 312094 - RNA, 18 nt, Human herpesvirus 4 (Epstein-Barr virus)
ccugaagcgaagcagcuc

SEQ ID NO: 312095 - RNA, 16 nt, Human herpesvirus 4 (Epstein-Barr virus)
ccugacgccaaugcca

SEQ ID NO: 312096 - RNA, 16 nt, Human herpesvirus 4 (Epstein-Barr virus)
ccugauaaugucuuca

SEQ ID NO: 312097 - RNA, 16 nt, Human herpesvirus 4 (Epstein-Barr virus)
ccugcaaacugacaca

SEQ ID NO: 312098 - RNA, 16 nt, Human herpesvirus 4 (Epstein-Barr virus)
ccugcacagaucugac

SEQ ID NO: 312099 - RNA, 15 nt, Human herpesvirus 4 (Epstein-Barr virus)
ccugcacuauauucu

SEQ ID NO: 312100 - RNA, 15 nt, Human herpesvirus 4 (Epstein-Barr virus)
ccugccaucgggaca

SEQ ID NO: 312101 - RNA, 18 nt, Human herpesvirus 4 (Epstein-Barr virus)
ccugcccucccacuuuua

SEQ ID NO: 312102 - RNA, 22 nt, Human herpesvirus 4 (Epstein-Barr virus)
ccugccggaguuuucuccccca

SEQ ID NO: 312103 - RNA, 21 nt, Human herpesvirus 4 (Epstein-Barr virus)
ccugccucucuuaugccugug

SEQ ID NO: 312104 - RNA, 15 nt, Human herpesvirus 4 (Epstein-Barr virus)
ccugccugcaugcuu

SEQ ID NO: 312105 - RNA, 13 nt, Human herpesvirus 4 (Epstein-Barr virus)
ccugccuggaucu

SEQ ID NO: 312106 - RNA, 15 nt, Human herpesvirus 4 (Epstein-Barr virus)
ccugcgucucauucc

SEQ ID NO: 312107 - RNA, 14 nt, Human herpesvirus 4 (Epstein-Barr virus)
ccuggagacuacua

SEQ ID NO: 312108 - RNA, 15 nt, Human herpesvirus 4 (Epstein-Barr virus)
ccuggagcuggugca

SEQ ID NO: 312109 - RNA, 20 nt, Human herpesvirus 4 (Epstein-Barr virus)
ccuggcauacuuuuugccac

SEQ ID NO: 312110 - RNA, 11 nt, Human herpesvirus 4 (Epstein-Barr virus)
ccuggccaugg

SEQ ID NO: 312111 - RNA, 21 nt, Human herpesvirus 4 (Epstein-Barr virus)
ccuggggaaaauguacccauc

SEQ ID NO: 312112 - RNA, 22 nt, Human herpesvirus 4 (Epstein-Barr virus)
ccuggugagaaguugguggugg

SEQ ID NO: 312113 - RNA, 14 nt, Human herpesvirus 4 (Epstein-Barr virus)
ccugguggugacau

SEQ ID NO: 312114 - RNA, 16 nt, Human herpesvirus 4 (Epstein-Barr virus)
ccuguagucaccugca

SEQ ID NO: 312115 - RNA, 18 nt, Human herpesvirus 4 (Epstein-Barr virus)
ccuguauaaugacuauga

SEQ ID NO: 312116 - RNA, 16 nt, Human herpesvirus 4 (Epstein-Barr virus)
ccugucugauugcacc

SEQ ID NO: 312117 - RNA, 14 nt, Human herpesvirus 4 (Epstein-Barr virus)
caugcaggucaggu

SEQ ID NO: 312118 - RNA, 14 nt, Human herpesvirus 4 (Epstein-Barr virus)
caugccaucucuga

SEQ ID NO: 312119 - RNA, 17 nt, Human herpesvirus 4 (Epstein-Barr virus)
caugcgacggcuuuagc

SEQ ID NO: 312120 - RNA, 17 nt, Human herpesvirus 4 (Epstein-Barr virus)
caugcugaauauugcca

SEQ ID NO: 312121 - RNA, 19 nt, Human herpesvirus 4 (Epstein-Barr virus)
caugcugaauauugccagc

SEQ ID NO: 312122 - RNA, 21 nt, Human herpesvirus 4 (Epstein-Barr virus)
cauggaaaccacucagacucu

SEQ ID NO: 312123 - RNA, 22 nt, Human herpesvirus 4 (Epstein-Barr virus)
cauggaccgaacugauggcaaa

SEQ ID NO: 312124 - RNA, 15 nt, Human herpesvirus 4 (Epstein-Barr virus)
cauggcacucauggu

SEQ ID NO: 312125 - RNA, 14 nt, Human herpesvirus 4 (Epstein-Barr virus)
cauggccggguuug

SEQ ID NO: 312126 - RNA, 14 nt, Human herpesvirus 4 (Epstein-Barr virus)
caugguacggugau

SEQ ID NO: 312127 - RNA, 16 nt, Human herpesvirus 4 (Epstein-Barr virus)
cauggucgaugaacaa

SEQ ID NO: 312128 - RNA, 18 nt, Human herpesvirus 4 (Epstein-Barr virus)
caugguuuaaggaaugaa

SEQ ID NO: 312129 - RNA, 14 nt, Human herpesvirus 4 (Epstein-Barr virus)
cauguccuguggug

SEQ ID NO: 312130 - RNA, 18 nt, Human herpesvirus 4 (Epstein-Barr virus)
caugucgagcaugagcuc

SEQ ID NO: 312131 - RNA, 20 nt, Human herpesvirus 4 (Epstein-Barr virus)
cauguuuggggaguuagcau

SEQ ID NO: 312132 - RNA, 18 nt, Human herpesvirus 4 (Epstein-Barr virus)
cauuaaccucaaccacaa

SEQ ID NO: 312133 - RNA, 18 nt, Human herpesvirus 4 (Epstein-Barr virus)
cauuaacuaagcuuauga

SEQ ID NO: 312134 - RNA, 14 nt, Human herpesvirus 4 (Epstein-Barr virus)
cauuacggugcugg

SEQ ID NO: 312135 - RNA, 14 nt, Human herpesvirus 4 (Epstein-Barr virus)
cauuauugcucucu

SEQ ID NO: 312136 - RNA, 19 nt, Human herpesvirus 4 (Epstein-Barr virus)
cauuauugcucucuaucua

SEQ ID NO: 312137 - RNA, 23 nt, Human herpesvirus 4 (Epstein-Barr virus)
cauucacggggccgugcaccugc

SEQ ID NO: 312138 - RNA, 23 nt, Human herpesvirus 4 (Epstein-Barr virus)
cauucacugggacaacugucaca

SEQ ID NO: 312139 - RNA, 14 nt, Human herpesvirus 4 (Epstein-Barr virus)
cauucagauuucua

SEQ ID NO: 312140 - RNA, 19 nt, Human herpesvirus 4 (Epstein-Barr virus)
cauucccaaguguuuccag

SEQ ID NO: 312141 - RNA, 15 nt, Human herpesvirus 4 (Epstein-Barr virus)
cauucccccaugaga

SEQ ID NO: 312142 - RNA, 17 nt, Human herpesvirus 4 (Epstein-Barr virus)
cauucguacaucuccag

SEQ ID NO: 312143 - RNA, 11 nt, Human herpesvirus 4 (Epstein-Barr virus)
cauugaugaac

SEQ ID NO: 312144 - RNA, 16 nt, Human herpesvirus 4 (Epstein-Barr virus)
cauugcgccgccuaau

SEQ ID NO: 312145 - RNA, 18 nt, Human herpesvirus 4 (Epstein-Barr virus)
cauuuagaaaccuugccu

SEQ ID NO: 312146 - RNA, 18 nt, Human herpesvirus 4 (Epstein-Barr virus)
cauuucucauaauggugc

SEQ ID NO: 312147 - RNA, 14 nt, Human herpesvirus 4 (Epstein-Barr virus)
ccaaaaauuugaua

SEQ ID NO: 312148 - RNA, 17 nt, Human herpesvirus 4 (Epstein-Barr virus)
ccaaaacuauaccaaag

SEQ ID NO: 312149 - RNA, 11 nt, Human herpesvirus 4 (Epstein-Barr virus)
ccaaaccaaau

SEQ ID NO: 312150 - RNA, 19 nt, Human herpesvirus 4 (Epstein-Barr virus)
ccaaauugauugaugaguu

SEQ ID NO: 312151 - RNA, 14 nt, Human herpesvirus 4 (Epstein-Barr virus)
ccaacaacuuccaa

SEQ ID NO: 312152 - RNA, 14 nt, Human herpesvirus 4 (Epstein-Barr virus)
ccaaccugccucuc

SEQ ID NO: 312153 - RNA, 15 nt, Human herpesvirus 4 (Epstein-Barr virus)
ccaaccugcucucuc

SEQ ID NO: 312154 - RNA, 22 nt, Human herpesvirus 4 (Epstein-Barr virus)
ccaacgagggcagacaccaccu

SEQ ID NO: 312155 - RNA, 20 nt, Human herpesvirus 4 (Epstein-Barr virus)
ccaagaagaagcccaccuau

SEQ ID NO: 312156 - RNA, 19 nt, Human herpesvirus 4 (Epstein-Barr virus)
ccaagggcagggcaauggg

SEQ ID NO: 312157 - RNA, 22 nt, Human herpesvirus 4 (Epstein-Barr virus)
ccaaggugguagcguugguaau

SEQ ID NO: 312158 - RNA, 21 nt, Human herpesvirus 4 (Epstein-Barr virus)
ccaaggugugcaugagcacca

SEQ ID NO: 312159 - RNA, 15 nt, Human herpesvirus 4 (Epstein-Barr virus)
ccaagugcaacaauc

SEQ ID NO: 312160 - RNA, 14 nt, Human herpesvirus 4 (Epstein-Barr virus)
ccaauccaugccaa

SEQ ID NO: 312161 - RNA, 15 nt, Human herpesvirus 4 (Epstein-Barr virus)
ccaaugauugaggca

SEQ ID NO: 312162 - RNA, 20 nt, Human herpesvirus 4 (Epstein-Barr virus)
ccaaugccaaagcugaagaa

SEQ ID NO: 312163 - RNA, 15 nt, Human herpesvirus 4 (Epstein-Barr virus)
ccacaaacaccagug

SEQ ID NO: 312164 - RNA, 18 nt, Human herpesvirus 4 (Epstein-Barr virus)
ccacacacaacacauaga

SEQ ID NO: 312165 - RNA, 14 nt, Human herpesvirus 4 (Epstein-Barr virus)
ccacacagccugac

SEQ ID NO: 312166 - RNA, 15 nt, Human herpesvirus 4 (Epstein-Barr virus)
ccacaccauccacag

SEQ ID NO: 312167 - RNA, 17 nt, Human herpesvirus 4 (Epstein-Barr virus)
ccacaguaauguugucu

SEQ ID NO: 312168 - RNA, 22 nt, Human herpesvirus 4 (Epstein-Barr virus)
ccacauuggacacccacccugc

SEQ ID NO: 312169 - RNA, 17 nt, Human herpesvirus 4 (Epstein-Barr virus)
ccaccaggcgguuaggg

SEQ ID NO: 312170 - RNA, 22 nt, Human herpesvirus 4 (Epstein-Barr virus)
ccaccaucaaugucaccacuaa

SEQ ID NO: 312171 - RNA, 20 nt, Human herpesvirus 4 (Epstein-Barr virus)
ccaccgacuccgaugcccac

SEQ ID NO: 312172 - RNA, 21 nt, Human herpesvirus 4 (Epstein-Barr virus)
ccaccuagaaagagccauggu

SEQ ID NO: 312173 - RNA, 14 nt, Human herpesvirus 4 (Epstein-Barr virus)
ccaccuaugccaau

SEQ ID NO: 312174 - RNA, 20 nt, Human herpesvirus 4 (Epstein-Barr virus)
ccaccucccugauaaugucu

SEQ ID NO: 312175 - RNA, 23 nt, Human herpesvirus 4 (Epstein-Barr virus)
ccaccugccggagggacaguacc

SEQ ID NO: 312176 - RNA, 16 nt, Human herpesvirus 4 (Epstein-Barr virus)
ccaccuuugcuaucuu

SEQ ID NO: 312177 - RNA, 23 nt, Human herpesvirus 4 (Epstein-Barr virus)
ccacgacauugaucacuacuaca

SEQ ID NO: 312178 - RNA, 23 nt, Human herpesvirus 4 (Epstein-Barr virus)
ccacgagcggcgugucuuggcca

SEQ ID NO: 312179 - RNA, 18 nt, Human herpesvirus 4 (Epstein-Barr virus)
ccacgcaggauguucacg

SEQ ID NO: 312180 - RNA, 20 nt, Human herpesvirus 4 (Epstein-Barr virus)
ccacgggaggcggugcaagg

SEQ ID NO: 312181 - RNA, 20 nt, Human herpesvirus 4 (Epstein-Barr virus)
ccacgucuuuaccaccucaa

SEQ ID NO: 312182 - RNA, 17 nt, Human herpesvirus 4 (Epstein-Barr virus)
ccacugucacugugcac

SEQ ID NO: 312183 - RNA, 21 nt, Human herpesvirus 4 (Epstein-Barr virus)
ccagacuaugcauacacugaa

SEQ ID NO: 312184 - RNA, 21 nt, Human herpesvirus 4 (Epstein-Barr virus)
ccagagaggcccacugcagua

SEQ ID NO: 312185 - RNA, 19 nt, Human herpesvirus 4 (Epstein-Barr virus)
ccagaggaggccccggccg

SEQ ID NO: 312186 - RNA, 21 nt, Human herpesvirus 4 (Epstein-Barr virus)
ccagccacuuacagcacauuu

SEQ ID NO: 312187 - RNA, 18 nt, Human herpesvirus 4 (Epstein-Barr virus)
ccagcgccuugaucuucu

SEQ ID NO: 312188 - RNA, 14 nt, Human herpesvirus 4 (Epstein-Barr virus)
ccagcgugcccaag

SEQ ID NO: 312189 - RNA, 16 nt, Human herpesvirus 4 (Epstein-Barr virus)
ccagcgugcccaagag

SEQ ID NO: 312190 - RNA, 19 nt, Human herpesvirus 4 (Epstein-Barr virus)
ccagcgugcccaagagggc

SEQ ID NO: 312191 - RNA, 18 nt, Human herpesvirus 4 (Epstein-Barr virus)
ccagcuccgugguccuga

SEQ ID NO: 312192 - RNA, 19 nt, Human herpesvirus 4 (Epstein-Barr virus)
ccaggcagaggaaggccac

SEQ ID NO: 312193 - RNA, 20 nt, Human herpesvirus 4 (Epstein-Barr virus)
ccaggcccgaccugccaaag

SEQ ID NO: 312194 - RNA, 18 nt, Human herpesvirus 4 (Epstein-Barr virus)
ccaggccgccaugcucag

SEQ ID NO: 312195 - RNA, 22 nt, Human herpesvirus 4 (Epstein-Barr virus)
ccaggcgccgcagggguggugg

SEQ ID NO: 312196 - RNA, 13 nt, Human herpesvirus 4 (Epstein-Barr virus)
ccaggggggaccu

SEQ ID NO: 312197 - RNA, 19 nt, Human herpesvirus 4 (Epstein-Barr virus)
ccagggugaccuggcucag

SEQ ID NO: 312198 - RNA, 13 nt, Human herpesvirus 4 (Epstein-Barr virus)
ccaggucuugcca

SEQ ID NO: 312199 - RNA, 22 nt, Human herpesvirus 4 (Epstein-Barr virus)
ccaggugccuuuuguacaagcu

SEQ ID NO: 312200 - RNA, 15 nt, Human herpesvirus 4 (Epstein-Barr virus)
ccagucccaacccaa

SEQ ID NO: 312201 - RNA, 16 nt, Human herpesvirus 4 (Epstein-Barr virus)
ccagucuauccaggag

SEQ ID NO: 312202 - RNA, 15 nt, Human herpesvirus 4 (Epstein-Barr virus)
ccagugaucaucucg

SEQ ID NO: 312203 - RNA, 16 nt, Human herpesvirus 4 (Epstein-Barr virus)
ccaguggacaaggcag

SEQ ID NO: 312204 - RNA, 20 nt, Human herpesvirus 4 (Epstein-Barr virus)
ccaguuccccccagccugag

SEQ ID NO: 312205 - RNA, 15 nt, Human herpesvirus 4 (Epstein-Barr virus)
ccauagcaugucaca

SEQ ID NO: 312206 - RNA, 21 nt, Human herpesvirus 4 (Epstein-Barr virus)
ccauagcaugucacacauucc

SEQ ID NO: 312207 - RNA, 18 nt, Human herpesvirus 4 (Epstein-Barr virus)
ccaucccggagucauuag

SEQ ID NO: 312208 - RNA, 13 nt, Human herpesvirus 4 (Epstein-Barr virus)
ccaucgcaagcuc

SEQ ID NO: 312209 - RNA, 20 nt, Human herpesvirus 4 (Epstein-Barr virus)
ccaucgcaagcuccuuugcc

SEQ ID NO: 312210 - RNA, 21 nt, Human herpesvirus 4 (Epstein-Barr virus)
ccaucuacccaacagucuuca

SEQ ID NO: 312211 - RNA, 19 nt, Human herpesvirus 4 (Epstein-Barr virus)
ccaucugagggcagugaua

SEQ ID NO: 312212 - RNA, 16 nt, Human herpesvirus 4 (Epstein-Barr virus)
ccaugaaucugacucu

SEQ ID NO: 312213 - RNA, 22 nt, Human herpesvirus 4 (Epstein-Barr virus)
ccaugaaucugacucuaacucc

SEQ ID NO: 312214 - RNA, 14 nt, Human herpesvirus 4 (Epstein-Barr virus)
ccaugagugccaug

SEQ ID NO: 312215 - RNA, 14 nt, Human herpesvirus 4 (Epstein-Barr virus)
ccaugcaaguggau

SEQ ID NO: 312216 - RNA, 15 nt, Human herpesvirus 4 (Epstein-Barr virus)
ccaugcccagacuca

SEQ ID NO: 312217 - RNA, 14 nt, Human herpesvirus 4 (Epstein-Barr virus)
ccaugcuuacucaa

SEQ ID NO: 312218 - RNA, 23 nt, Human herpesvirus 4 (Epstein-Barr virus)
ccauggccauucgacaggccauu

SEQ ID NO: 312219 - RNA, 15 nt, Human herpesvirus 4 (Epstein-Barr virus)
ccauguccuguggug

SEQ ID NO: 312220 - RNA, 13 nt, Human herpesvirus 4 (Epstein-Barr virus)
ccaugucuacgac

SEQ ID NO: 312221 - RNA, 23 nt, Human herpesvirus 4 (Epstein-Barr virus)
ccauguguguccagugccuaauc

SEQ ID NO: 312222 - RNA, 18 nt, Human herpesvirus 4 (Epstein-Barr virus)
ccauucucguccaucucg

SEQ ID NO: 312223 - RNA, 18 nt, Human herpesvirus 4 (Epstein-Barr virus)
cccaaagggacucaaugg

SEQ ID NO: 312224 - RNA, 14 nt, Human herpesvirus 4 (Epstein-Barr virus)
cccaacagucuuca

SEQ ID NO: 312225 - RNA, 20 nt, Human herpesvirus 4 (Epstein-Barr virus)
cccaaggaaggcuugccaaa

SEQ ID NO: 312226 - RNA, 21 nt, Human herpesvirus 4 (Epstein-Barr virus)
cccaaggaaggcuugccaaaa

SEQ ID NO: 312227 - RNA, 18 nt, Human herpesvirus 4 (Epstein-Barr virus)
cccaaguguuuccagaca

SEQ ID NO: 312228 - RNA, 22 nt, Human herpesvirus 4 (Epstein-Barr virus)
cccaauucacaucucagggaca

SEQ ID NO: 312229 - RNA, 13 nt, Human herpesvirus 4 (Epstein-Barr virus)
cccaccuaugcca

SEQ ID NO: 312230 - RNA, 19 nt, Human herpesvirus 4 (Epstein-Barr virus)
cccaccuaugccaauccau

SEQ ID NO: 312231 - RNA, 20 nt, Human herpesvirus 4 (Epstein-Barr virus)
cccacuaucacccauggcca

SEQ ID NO: 312232 - RNA, 19 nt, Human herpesvirus 4 (Epstein-Barr virus)
cccacugcaguacuagcau

SEQ ID NO: 312233 - RNA, 21 nt, Human herpesvirus 4 (Epstein-Barr virus)
cccacuuuuaccccaguccca

SEQ ID NO: 312234 - RNA, 22 nt, Human herpesvirus 4 (Epstein-Barr virus)
cccagccacacuggcucucugc

SEQ ID NO: 312235 - RNA, 14 nt, Human herpesvirus 4 (Epstein-Barr virus)
cccagccuacucuc

SEQ ID NO: 312236 - RNA, 15 nt, Human herpesvirus 4 (Epstein-Barr virus)
cccagggguggcagu

SEQ ID NO: 312237 - RNA, 14 nt, Human herpesvirus 4 (Epstein-Barr virus)
cccaggucuugcca

SEQ ID NO: 312238 - RNA, 20 nt, Human herpesvirus 4 (Epstein-Barr virus)
cccaguccauguucgcacuc

SEQ ID NO: 312239 - RNA, 16 nt, Human herpesvirus 4 (Epstein-Barr virus)
cccagugaucaucucg

SEQ ID NO: 312240 - RNA, 14 nt, Human herpesvirus 4 (Epstein-Barr virus)
cccagugcacccag

SEQ ID NO: 312241 - RNA, 19 nt, Human herpesvirus 4 (Epstein-Barr virus)
cccaguggacaaggcagua

SEQ ID NO: 312242 - RNA, 21 nt, Human herpesvirus 4 (Epstein-Barr virus)
cccauaaaaauaagugcaugg

SEQ ID NO: 312243 - RNA, 15 nt, Human herpesvirus 4 (Epstein-Barr virus)
cccaugcuuacucaa

SEQ ID NO: 312244 - RNA, 21 nt, Human herpesvirus 4 (Epstein-Barr virus)
ccccaaaacuauaccaaagcu

SEQ ID NO: 312245 - RNA, 13 nt, Human herpesvirus 4 (Epstein-Barr virus)
ccccaaacauguc

SEQ ID NO: 312246 - RNA, 19 nt, Human herpesvirus 4 (Epstein-Barr virus)
ccccaaggaaggcuugcca

SEQ ID NO: 312247 - RNA, 22 nt, Human herpesvirus 4 (Epstein-Barr virus)
ccccaaggaaggcuugccaaaa

SEQ ID NO: 312248 - RNA, 16 nt, Human herpesvirus 4 (Epstein-Barr virus)
ccccacgggaaaaaga

SEQ ID NO: 312249 - RNA, 23 nt, Human herpesvirus 4 (Epstein-Barr virus)
ccccagcccgccagccaccccag

SEQ ID NO: 312250 - RNA, 13 nt, Human herpesvirus 4 (Epstein-Barr virus)
cccccucugaugg

SEQ ID NO: 312251 - RNA, 16 nt, Human herpesvirus 4 (Epstein-Barr virus)
ccccgaggcugauguc

SEQ ID NO: 312252 - RNA, 17 nt, Human herpesvirus 4 (Epstein-Barr virus)
ccccgcacuaaagaaua

SEQ ID NO: 312253 - RNA, 14 nt, Human herpesvirus 4 (Epstein-Barr virus)
ccccggcaccauag

SEQ ID NO: 312254 - RNA, 15 nt, Human herpesvirus 4 (Epstein-Barr virus)
ccccggucaccccag

SEQ ID NO: 312255 - RNA, 19 nt, Human herpesvirus 4 (Epstein-Barr virus)
ccccuaucuuaacccaauu

SEQ ID NO: 312256 - RNA, 17 nt, Human herpesvirus 4 (Epstein-Barr virus)
cccgcacuaaagaauaa

SEQ ID NO: 312257 - RNA, 18 nt, Human herpesvirus 4 (Epstein-Barr virus)
cccgccaccugacccggu

SEQ ID NO: 312258 - RNA, 15 nt, Human herpesvirus 4 (Epstein-Barr virus)
cccggaccaaugcca

SEQ ID NO: 312259 - RNA, 16 nt, Human herpesvirus 4 (Epstein-Barr virus)
cccggaccaaugccaa

SEQ ID NO: 312260 - RNA, 14 nt, Human herpesvirus 4 (Epstein-Barr virus)
cccggaugaucucg

SEQ ID NO: 312261 - RNA, 14 nt, Human herpesvirus 4 (Epstein-Barr virus)
cccgggccagcauu

SEQ ID NO: 312262 - RNA, 14 nt, Human herpesvirus 4 (Epstein-Barr virus)
cccuaacacucuuu

SEQ ID NO: 312263 - RNA, 16 nt, Human herpesvirus 4 (Epstein-Barr virus)
cccuccaagcggcaca

SEQ ID NO: 312264 - RNA, 11 nt, Human herpesvirus 4 (Epstein-Barr virus)
cccuccucacc

SEQ ID NO: 312265 - RNA, 17 nt, Human herpesvirus 4 (Epstein-Barr virus)
cccucgagccauuugag

SEQ ID NO: 312266 - RNA, 14 nt, Human herpesvirus 5
aagcacuucagaau

SEQ ID NO: 312267 - RNA, 15 nt, Human herpesvirus 5
aagcauaagacggga

SEQ ID NO: 312268 - RNA, 19 nt, Human herpesvirus 5
aagcauaguccaccaggcc

SEQ ID NO: 312269 - RNA, 18 nt, Human herpesvirus 5
aagcauggcuuacauuua

SEQ ID NO: 312270 - RNA, 17 nt, Human herpesvirus 5
aagccagauacuauacg

SEQ ID NO: 312271 - RNA, 18 nt, Human herpesvirus 5
aagccagauacuauacga

SEQ ID NO: 312272 - RNA, 20 nt, Human herpesvirus 5
aagccagcuacagccacgac

SEQ ID NO: 312273 - RNA, 15 nt, Human herpesvirus 5
aagcccauguagguc

SEQ ID NO: 312274 - RNA, 16 nt, Human herpesvirus 5
aagcccuacuuugugu

SEQ ID NO: 312275 - RNA, 17 nt, Human herpesvirus 5
aagcccuuaacauguua

SEQ ID NO: 312276 - RNA, 17 nt, Human herpesvirus 5
aagccgacgucccugau

SEQ ID NO: 312277 - RNA, 20 nt, Human herpesvirus 5
aagccgccagcggaagcuuu

SEQ ID NO: 312278 - RNA, 17 nt, Human herpesvirus 5
aagcgccgucacuuccc

SEQ ID NO: 312279 - RNA, 20 nt, Human herpesvirus 5
aagcguccucgaagucuuca

SEQ ID NO: 312280 - RNA, 20 nt, Human herpesvirus 5
aagcucuuagcgugugacgu

SEQ ID NO: 312281 - RNA, 16 nt, Human herpesvirus 5
aagcuugguacacagc

SEQ ID NO: 312282 - RNA, 23 nt, Human herpesvirus 5
aagcuuuagccaggugaccagca

SEQ ID NO: 312283 - RNA, 15 nt, Human herpesvirus 5
aaggaacaaaauaau

SEQ ID NO: 312284 - RNA, 20 nt, Human herpesvirus 5
aaggagcgacguaccagcug

SEQ ID NO: 312285 - RNA, 22 nt, Human herpesvirus 5
aaggggaaaaggaauagcaaga

SEQ ID NO: 312286 - RNA, 13 nt, Human herpesvirus 5
aagggugugacug

SEQ ID NO: 312287 - RNA, 22 nt, Human herpesvirus 5
aagguacggacucuaacaccca

SEQ ID NO: 312288 - RNA, 16 nt, Human herpesvirus 5
aagguaugugugaaug

SEQ ID NO: 312289 - RNA, 15 nt, Human herpesvirus 5
aaggucaaaaccuca

SEQ ID NO: 312290 - RNA, 14 nt, Human herpesvirus 5
aagguucuccauca

SEQ ID NO: 312291 - RNA, 15 nt, Human herpesvirus 5
aagguuuugugccaa

SEQ ID NO: 312292 - RNA, 15 nt, Human herpesvirus 5
aaguaagcauggcuu

SEQ ID NO: 312293 - RNA, 21 nt, Human herpesvirus 5
aaguaagcauggcuuacauuu

SEQ ID NO: 312294 - RNA, 13 nt, Human herpesvirus 5
aaguacacuggua

SEQ ID NO: 312295 - RNA, 17 nt, Human herpesvirus 5
aaguacggagauguggu

SEQ ID NO: 312296 - RNA, 16 nt, Human herpesvirus 5
aaguacgucuaugaga

SEQ ID NO: 312297 - RNA, 22 nt, Human herpesvirus 5
aaguagcugguggaagaacaga

SEQ ID NO: 312298 - RNA, 23 nt, Human herpesvirus 5
aaguagcuuuuuuuauacaucuc

SEQ ID NO: 312299 - RNA, 17 nt, Human herpesvirus 5
aaguauacauuacuauc

SEQ ID NO: 312300 - RNA, 12 nt, Human herpesvirus 5
aaguaugugcuc

SEQ ID NO: 312301 - RNA, 13 nt, Human herpesvirus 5
aagucaacaugua

SEQ ID NO: 312302 - RNA, 14 nt, Human herpesvirus 5
aagucaacauguag

SEQ ID NO: 312303 - RNA, 22 nt, Human herpesvirus 5
aaguccgucaugcuggcaugca

SEQ ID NO: 312304 - RNA, 14 nt, Human herpesvirus 5
aaguccuccaacuc

SEQ ID NO: 312305 - RNA, 21 nt, Human herpesvirus 5
aagugccugcacgaccugcuc

SEQ ID NO: 312306 - RNA, 22 nt, Human herpesvirus 5
aaguuaaagacauucacacaaa

SEQ ID NO: 312307 - RNA, 15 nt, Human herpesvirus 5
aaguuauccuguuga

SEQ ID NO: 312308 - RNA, 23 nt, Human herpesvirus 5
aaguugcgguaaaaccacgucaa

SEQ ID NO: 312309 - RNA, 14 nt, Human herpesvirus 5
aaguugguggugga

SEQ ID NO: 312310 - RNA, 15 nt, Human herpesvirus 5
aaguuuauggggaaa

SEQ ID NO: 312311 - RNA, 18 nt, Human herpesvirus 5
aauaaaaaaagacacuca

SEQ ID NO: 312312 - RNA, 12 nt, Human herpesvirus 5
aauaaaaaccac

SEQ ID NO: 312313 - RNA, 19 nt, Human herpesvirus 5
aauaaaacgccaugaugac

SEQ ID NO: 312314 - RNA, 20 nt, Human herpesvirus 5
aauaaaacgccaugaugaca

SEQ ID NO: 312315 - RNA, 19 nt, Human herpesvirus 5
aauaaacauacuuguuuca

SEQ ID NO: 312316 - RNA, 20 nt, Human herpesvirus 5
aauaaacuguugauuuuggc

SEQ ID NO: 312317 - RNA, 15 nt, Human herpesvirus 5
aauaaagaaaaccac

SEQ ID NO: 312318 - RNA, 19 nt, Human herpesvirus 5
aauaaagacgucaaugaca

SEQ ID NO: 312319 - RNA, 19 nt, Human herpesvirus 5
aauaaagauaaucugccaa

SEQ ID NO: 312320 - RNA, 16 nt, Human herpesvirus 5
aauaaauacagggaau

SEQ ID NO: 312321 - RNA, 13 nt, Human herpesvirus 5
aauaaaucauggc

SEQ ID NO: 312322 - RNA, 15 nt, Human herpesvirus 5
aauaacaacacauca

SEQ ID NO: 312323 - RNA, 17 nt, Human herpesvirus 5
aauaacaacacaucaac

SEQ ID NO: 312324 - RNA, 13 nt, Human herpesvirus 5
aauaacaccaaaa

SEQ ID NO: 312325 - RNA, 22 nt, Human herpesvirus 5
aauaacaccaaaaauccagaca

SEQ ID NO: 312326 - RNA, 23 nt, Human herpesvirus 5
aauaaccgcggugugcuuuauua

SEQ ID NO: 312327 - RNA, 19 nt, Human herpesvirus 5
aauaacuacgcuacgaccu

SEQ ID NO: 312328 - RNA, 20 nt, Human herpesvirus 5
aauaacuacgcuacgaccug

SEQ ID NO: 312329 - RNA, 15 nt, Human herpesvirus 5
aauaaguaccucuaa

SEQ ID NO: 312330 - RNA, 19 nt, Human herpesvirus 5
aauaauaagccggcagcug

SEQ ID NO: 312331 - RNA, 12 nt, Human herpesvirus 5
aauaauggucaa

SEQ ID NO: 312332 - RNA, 14 nt, Human herpesvirus 5
aauaauggucaaua

SEQ ID NO: 312333 - RNA, 14 nt, Human herpesvirus 5
aauacacaacagcu

SEQ ID NO: 312334 - RNA, 20 nt, Human herpesvirus 5
aauacagauacgcaaugcau

SEQ ID NO: 312335 - RNA, 14 nt, Human herpesvirus 5
aauaccaacguauc

SEQ ID NO: 312336 - RNA, 13 nt, Human herpesvirus 5
aauaccacaacca

SEQ ID NO: 312337 - RNA, 15 nt, Human herpesvirus 5
aauaccacaaccauc

SEQ ID NO: 312338 - RNA, 16 nt, Human herpesvirus 5
aauaccaccgucacgu

SEQ ID NO: 312339 - RNA, 23 nt, Human herpesvirus 5
aauaccgguuguaaucauccuaa

SEQ ID NO: 312340 - RNA, 17 nt, Human herpesvirus 5
aauacugcauccaucac

SEQ ID NO: 312341 - RNA, 18 nt, Human herpesvirus 5
aauacugcauccaucaca

SEQ ID NO: 312342 - RNA, 19 nt, Human herpesvirus 5
aauagaauacugcuaugua

SEQ ID NO: 312343 - RNA, 13 nt, Human herpesvirus 5
aauaguguccugu

SEQ ID NO: 312344 - RNA, 16 nt, Human herpesvirus 5
aauauacuagggaaaa

SEQ ID NO: 312345 - RNA, 16 nt, Human herpesvirus 5
aauauagggacagucc

SEQ ID NO: 312346 - RNA, 12 nt, Human herpesvirus 5
aauauauccaau

SEQ ID NO: 312347 - RNA, 14 nt, Human herpesvirus 5
aauauguaguccgu

SEQ ID NO: 312348 - RNA, 18 nt, Human herpesvirus 5
aaucacuuuuaacagcuc

SEQ ID NO: 312349 - RNA, 18 nt, Human herpesvirus 5
aaucagcagugaguacac

SEQ ID NO: 312350 - RNA, 22 nt, Human herpesvirus 5
aaucauccuaauugguacucua

SEQ ID NO: 312351 - RNA, 13 nt, Human herpesvirus 5
aaucauggcuucc

SEQ ID NO: 312352 - RNA, 18 nt, Human herpesvirus 5
aaucuaggaacacugaaa

SEQ ID NO: 312353 - RNA, 22 nt, Human herpesvirus 5
aaucuaggaacacugaaaacac

SEQ ID NO: 312354 - RNA, 19 nt, Human herpesvirus 5
aaucugacguccagcacca

SEQ ID NO: 312355 - RNA, 20 nt, Human herpesvirus 5
aaucugccaaucgcaccuua

SEQ ID NO: 312356 - RNA, 22 nt, Human herpesvirus 5
aaucugggagguggcugggcuc

SEQ ID NO: 312357 - RNA, 16 nt, Human herpesvirus 5
aaugacaagugcgccu

SEQ ID NO: 312358 - RNA, 23 nt, Human herpesvirus 5
aaugacggugauucuauuacacu

SEQ ID NO: 312359 - RNA, 13 nt, Human herpesvirus 5
aaugcaacacuaa

SEQ ID NO: 312360 - RNA, 14 nt, Human herpesvirus 5
aaugccaccaugaa

SEQ ID NO: 312361 - RNA, 21 nt, Human herpesvirus 5
aaugccaugcggauccagcug

SEQ ID NO: 312362 - RNA, 19 nt, Human herpesvirus 5
aaugccucauccuuaugag

SEQ ID NO: 312363 - RNA, 12 nt, Human herpesvirus 5
aaugcgucugca

SEQ ID NO: 312364 - RNA, 17 nt, Human herpesvirus 5
aaugcugcucagguaca

SEQ ID NO: 312365 - RNA, 20 nt, Human herpesvirus 5
aaugcugcucagguacauua

SEQ ID NO: 312366 - RNA, 14 nt, Human herpesvirus 5
aauggccaacagcc

SEQ ID NO: 312367 - RNA, 22 nt, Human herpesvirus 5
aaugguggaaaccagauacaac

SEQ ID NO: 312368 - RNA, 15 nt, Human herpesvirus 5
aauguauagauacac

SEQ ID NO: 312369 - RNA, 18 nt, Human herpesvirus 5
aaugucccuguaguacua

SEQ ID NO: 312370 - RNA, 17 nt, Human herpesvirus 5
aaugucguaguacaaua

SEQ ID NO: 312371 - RNA, 18 nt, Human herpesvirus 5
aaugucguaguacaauac

SEQ ID NO: 312372 - RNA, 16 nt, Human herpesvirus 5
aauguuacacauuacu

SEQ ID NO: 312373 - RNA, 12 nt, Human herpesvirus 5
aauuauuccagc

SEQ ID NO: 312374 - RNA, 18 nt, Human herpesvirus 5
aauucaauaaaaaccacc

SEQ ID NO: 312375 - RNA, 15 nt, Human herpesvirus 5
aauucacaaaaacac

SEQ ID NO: 312376 - RNA, 14 nt, Human herpesvirus 5
aauucagcaacacu

SEQ ID NO: 312377 - RNA, 23 nt, Human herpesvirus 5
aauuccccucgccuaagacuuug

SEQ ID NO: 312378 - RNA, 22 nt, Human herpesvirus 5
aauugacauacgguaaugccau

SEQ ID NO: 312379 - RNA, 12 nt, Human herpesvirus 5
aauugauuucaa

SEQ ID NO: 312380 - RNA, 23 nt, Human herpesvirus 5
aauugcacgguccggcaccguua

SEQ ID NO: 312381 - RNA, 22 nt, Human herpesvirus 5
acgacaccucccuaacuaucua

SEQ ID NO: 312382 - RNA, 18 nt, Human herpesvirus 5
acgacauccgucagccuc

SEQ ID NO: 312383 - RNA, 21 nt, Human herpesvirus 5
acgacaucuuccgcgagcacc

SEQ ID NO: 312384 - RNA, 15 nt, Human herpesvirus 5
acgaccgcagguuag

SEQ ID NO: 312385 - RNA, 17 nt, Human herpesvirus 5
acgaccuggccuguggu

SEQ ID NO: 312386 - RNA, 13 nt, Human herpesvirus 5
acgacgcaugcau

SEQ ID NO: 312387 - RNA, 22 nt, Human herpesvirus 5
acgacgcaugcauucugguacc

SEQ ID NO: 312388 - RNA, 16 nt, Human herpesvirus 5
acgacgccacacacau

SEQ ID NO: 312389 - RNA, 21 nt, Human herpesvirus 5
acgacgcgccccccaccuacg

SEQ ID NO: 312390 - RNA, 12 nt, Human herpesvirus 5
acgacgcggcgu

SEQ ID NO: 312391 - RNA, 12 nt, Human herpesvirus 5
acgacggcgguu

SEQ ID NO: 312392 - RNA, 17 nt, Human herpesvirus 5
acgacgucaacaucauc

SEQ ID NO: 312393 - RNA, 14 nt, Human herpesvirus 5
acgacuggcucaac

SEQ ID NO: 312394 - RNA, 17 nt, Human herpesvirus 5
acgacuuuucuuuccuc

SEQ ID NO: 312395 - RNA, 20 nt, Human herpesvirus 5
acgagcaucgcaacaacagc

SEQ ID NO: 312396 - RNA, 22 nt, Human herpesvirus 5
acgagcaucgcaacaacagcaa

SEQ ID NO: 312397 - RNA, 20 nt, Human herpesvirus 5
acgagcgcccgucaagcucg

SEQ ID NO: 312398 - RNA, 17 nt, Human herpesvirus 5
acgagcgccguccugca

SEQ ID NO: 312399 - RNA, 14 nt, Human herpesvirus 5
acgagcgcugcgaa

SEQ ID NO: 312400 - RNA, 16 nt, Human herpesvirus 5
acgcaacacguaguga

SEQ ID NO: 312401 - RNA, 17 nt, Human herpesvirus 5
acgcacauauguagcac

SEQ ID NO: 312402 - RNA, 14 nt, Human herpesvirus 5
acgcacgacaugac

SEQ ID NO: 312403 - RNA, 20 nt, Human herpesvirus 5
acgcaggaugcgcguacuca

SEQ ID NO: 312404 - RNA, 21 nt, Human herpesvirus 5
acgcaggaugcgcguacucaa

SEQ ID NO: 312405 - RNA, 22 nt, Human herpesvirus 5
acgccaacuccgugccagcugg

SEQ ID NO: 312406 - RNA, 14 nt, Human herpesvirus 5
acgccacacacauc

SEQ ID NO: 312407 - RNA, 12 nt, Human herpesvirus 5
acgccauaacaa

SEQ ID NO: 312408 - RNA, 16 nt, Human herpesvirus 5
acgccaucuucaucuu

SEQ ID NO: 312409 - RNA, 13 nt, Human herpesvirus 5
acgccaugaugac

SEQ ID NO: 312410 - RNA, 16 nt, Human herpesvirus 5
acgccaugcucaagac

SEQ ID NO: 312411 - RNA, 14 nt, Human herpesvirus 5
acgccgagugggac

SEQ ID NO: 312412 - RNA, 16 nt, Human herpesvirus 5
acgccggcaaccccua

SEQ ID NO: 312413 - RNA, 13 nt, Human herpesvirus 5
acgcgaccagcug

SEQ ID NO: 312414 - RNA, 19 nt, Human herpesvirus 5
acgcgugcgggugcaugac

SEQ ID NO: 312415 - RNA, 14 nt, Human herpesvirus 5
acgcguguucucau

SEQ ID NO: 312416 - RNA, 17 nt, Human herpesvirus 5
acgcucguucaauaauc

SEQ ID NO: 312417 - RNA, 14 nt, Human herpesvirus 5
acgcucucgucagg

SEQ ID NO: 312418 - RNA, 18 nt, Human herpesvirus 5
acgcugcgucgcagucag

SEQ ID NO: 312419 - RNA, 20 nt, Human herpesvirus 5
acgcuucauauuaguauacu

SEQ ID NO: 312420 - RNA, 12 nt, Human herpesvirus 5
acggacaccucu

SEQ ID NO: 312421 - RNA, 12 nt, Human herpesvirus 5
acggaccgugug

SEQ ID NO: 312422 - RNA, 13 nt, Human herpesvirus 5
acggagccguuac

SEQ ID NO: 312423 - RNA, 12 nt, Human herpesvirus 5
acggagugguga

SEQ ID NO: 312424 - RNA, 21 nt, Human herpesvirus 5
acggcaacgauagucaucuca

SEQ ID NO: 312425 - RNA, 19 nt, Human herpesvirus 5
acggcgaaaauacgcaucc

SEQ ID NO: 312426 - RNA, 16 nt, Human herpesvirus 5
acggcgaagucugcua

SEQ ID NO: 312427 - RNA, 13 nt, Human herpesvirus 5
acggcgacaucac

SEQ ID NO: 312428 - RNA, 15 nt, Human herpesvirus 5
acggcgcucuuucag

SEQ ID NO: 312429 - RNA, 19 nt, Human herpesvirus 5
acggcgcucuuucagcgua

SEQ ID NO: 312430 - RNA, 11 nt, Human herpesvirus 5
acggcugcauc

SEQ ID NO: 312431 - RNA, 18 nt, Human herpesvirus 5
acgggacacgguguuucg

SEQ ID NO: 312432 - RNA, 20 nt, Human herpesvirus 5
acgggacuuacaucugcucc

SEQ ID NO: 312433 - RNA, 23 nt, Human herpesvirus 5
acgggcaaagaguccaucugcuu

SEQ ID NO: 312434 - RNA, 19 nt, Human herpesvirus 5
acggggauuuucgaugaua

SEQ ID NO: 312435 - RNA, 18 nt, Human herpesvirus 5
acgggggggaccgggggc

SEQ ID NO: 312436 - RNA, 16 nt, Human herpesvirus 5
acgggugguaccugca

SEQ ID NO: 312437 - RNA, 18 nt, Human herpesvirus 5
acgguacaaaccucuacc

SEQ ID NO: 312438 - RNA, 18 nt, Human herpesvirus 5
acggucauguuucucacg

SEQ ID NO: 312439 - RNA, 14 nt, Human herpesvirus 5
acgguccgggcaca

SEQ ID NO: 312440 - RNA, 13 nt, Human herpesvirus 5
acggugcgcggcg

SEQ ID NO: 312441 - RNA, 14 nt, Human herpesvirus 5
acggugcgcggcga

SEQ ID NO: 312442 - RNA, 19 nt, Human herpesvirus 5
acggugguuuaugaugaaa

SEQ ID NO: 312443 - RNA, 20 nt, Human herpesvirus 5
acggugucgccaccguugac

SEQ ID NO: 312444 - RNA, 16 nt, Human herpesvirus 5
acguaauaucaucugc

SEQ ID NO: 312445 - RNA, 21 nt, Human herpesvirus 5
acguacaagaaccacguuguc

SEQ ID NO: 312446 - RNA, 22 nt, Human herpesvirus 5
acguacuguuuaaccacguugc

SEQ ID NO: 312447 - RNA, 18 nt, Human herpesvirus 5
acguagccgaugcugaug

SEQ ID NO: 312448 - RNA, 21 nt, Human herpesvirus 5
acguaggggaacuacgugggu

SEQ ID NO: 312449 - RNA, 20 nt, Human herpesvirus 5
acguaguuccccuacgugac

SEQ ID NO: 312450 - RNA, 17 nt, Human herpesvirus 5
acguauuugaagccagg

SEQ ID NO: 312451 - RNA, 22 nt, Human herpesvirus 5
acgucaauaaagacgucaauga

SEQ ID NO: 312452 - RNA, 16 nt, Human herpesvirus 5
acgucacucuuggcac

SEQ ID NO: 312453 - RNA, 18 nt, Human herpesvirus 5
acgucaguggugacgcug

SEQ ID NO: 312454 - RNA, 18 nt, Human herpesvirus 5
acgucgauucccaucuca

SEQ ID NO: 312455 - RNA, 17 nt, Human herpesvirus 5
acgucggcgguccucca

SEQ ID NO: 312456 - RNA, 23 nt, Human herpesvirus 5
acgucggcgguccuccagcagca

SEQ ID NO: 312457 - RNA, 16 nt, Human herpesvirus 5
acgucguugaagacac

SEQ ID NO: 312458 - RNA, 16 nt, Human herpesvirus 5
acgucguuuuguucac

SEQ ID NO: 312459 - RNA, 21 nt, Human herpesvirus 5
acgucuacaucucaucaagca

SEQ ID NO: 312460 - RNA, 19 nt, Human herpesvirus 5
acgucucuacggcacuguc

SEQ ID NO: 312461 - RNA, 19 nt, Human herpesvirus 5
acgugaaguuccacagagc

SEQ ID NO: 312462 - RNA, 19 nt, Human herpesvirus 5
acgugaaucgccccucacg

SEQ ID NO: 312463 - RNA, 20 nt, Human herpesvirus 5
acgugagcucccaucuucua

SEQ ID NO: 312464 - RNA, 14 nt, Human herpesvirus 5
acgugcaacgccac

SEQ ID NO: 312465 - RNA, 15 nt, Human herpesvirus 5
acgugcaggauguua

SEQ ID NO: 312466 - RNA, 14 nt, Human herpesvirus 5
acgugcugcugaug

SEQ ID NO: 312467 - RNA, 18 nt, Human herpesvirus 5
acguggacguuacacggg

SEQ ID NO: 312468 - RNA, 19 nt, Human herpesvirus 5
acgugucacgccugugaaa

SEQ ID NO: 312469 - RNA, 19 nt, Human herpesvirus 5
acguuacccugguauccaa

SEQ ID NO: 312470 - RNA, 19 nt, Human herpesvirus 5
acguucgcucgggcacguu

SEQ ID NO: 312471 - RNA, 13 nt, Human herpesvirus 5
acuaaaacauucu

SEQ ID NO: 312472 - RNA, 12 nt, Human herpesvirus 5
acuaacuugacu

SEQ ID NO: 312473 - RNA, 18 nt, Human herpesvirus 5
acuaagucucccgugucu

SEQ ID NO: 312474 - RNA, 23 nt, Human herpesvirus 5
acuaagucucccgugucuucuua

SEQ ID NO: 312475 - RNA, 20 nt, Human herpesvirus 5
acuacaauguauagauacac

SEQ ID NO: 312476 - RNA, 15 nt, Human herpesvirus 5
acuacagcaaugaca

SEQ ID NO: 312477 - RNA, 19 nt, Human herpesvirus 5
acuacaugcuauaagacag

SEQ ID NO: 312478 - RNA, 23 nt, Human herpesvirus 5
acuacaugcuauaagacagccuu

SEQ ID NO: 312479 - RNA, 13 nt, Human herpesvirus 5
acuaccgauaaaa

SEQ ID NO: 312480 - RNA, 17 nt, Human herpesvirus 5
acuaccguuaacuauuc

SEQ ID NO: 312481 - RNA, 19 nt, Human herpesvirus 5
acuaccguuaacuauucca

SEQ ID NO: 312482 - RNA, 23 nt, Human herpesvirus 5
acuacguugggucugcgcugccc

SEQ ID NO: 312483 - RNA, 22 nt, Human herpesvirus 5
acuacuaauacagauacgcaau

SEQ ID NO: 312484 - RNA, 21 nt, Human herpesvirus 5
acuacuucgauucucuauaca

SEQ ID NO: 312485 - RNA, 22 nt, Human herpesvirus 5
acuacuucgauucucuauacac

SEQ ID NO: 312486 - RNA, 14 nt, Human herpesvirus 5
acuagacagauuca

SEQ ID NO: 312487 - RNA, 21 nt, Human herpesvirus 5
acuaguaaaaaaagugcguca

SEQ ID NO: 312488 - RNA, 21 nt, Human herpesvirus 5
acuaguacugagacagccaca

SEQ ID NO: 312489 - RNA, 22 nt, Human herpesvirus 5
acuaguacugagacagccacau

SEQ ID NO: 312490 - RNA, 20 nt, Human herpesvirus 5
acuaucaccaaacaacacca

SEQ ID NO: 312491 - RNA, 22 nt, Human herpesvirus 5
acuaucgacguguuaucacaga

SEQ ID NO: 312492 - RNA, 13 nt, Human herpesvirus 5
acuauguggcucc

SEQ ID NO: 312493 - RNA, 20 nt, Human herpesvirus 5
acuauguguaugaugucuca

SEQ ID NO: 312494 - RNA, 12 nt, Human herpesvirus 5
acucaccaaagc

SEQ ID NO: 312495 - RNA, 15 nt, Human herpesvirus 5
acucaccagacuuuu

SEQ ID NO: 312496 - RNA, 12 nt, Human herpesvirus 5
acucagagccac

SEQ ID NO: 312497 - RNA, 23 nt, Human herpesvirus 5
acucagcuacugggagagccgca

SEQ ID NO: 312498 - RNA, 14 nt, Human herpesvirus 5
acucaguacuuugg

SEQ ID NO: 312499 - RNA, 20 nt, Human herpesvirus 5
acuccacaaccuguggaaua

SEQ ID NO: 312500 - RNA, 14 nt, Human herpesvirus 5
acuccacacgccau

SEQ ID NO: 312501 - RNA, 12 nt, Human herpesvirus 5
acuccaucacac

SEQ ID NO: 312502 - RNA, 20 nt, Human herpesvirus 5
acuccgaauaacaacacauc

SEQ ID NO: 312503 - RNA, 22 nt, Human herpesvirus 5
acuccgaauaacaacacaucaa

SEQ ID NO: 312504 - RNA, 21 nt, Human herpesvirus 5
acuccuuguguuuucaccgac

SEQ ID NO: 312505 - RNA, 15 nt, Human herpesvirus 5
acuccuuuuccagcg

SEQ ID NO: 312506 - RNA, 23 nt, Human herpesvirus 5
acucggcgcuguucuggauguau

SEQ ID NO: 312507 - RNA, 14 nt, Human herpesvirus 5
acucggcugugccu

SEQ ID NO: 312508 - RNA, 15 nt, Human herpesvirus 5
acucggugugcgacg

SEQ ID NO: 312509 - RNA, 14 nt, Human herpesvirus 5
acucuaacacccag

SEQ ID NO: 312510 - RNA, 16 nt, Human herpesvirus 5
acucuaucuacugucu

SEQ ID NO: 312511 - RNA, 11 nt, Human herpesvirus 5
acucuggugcu

SEQ ID NO: 312512 - RNA, 15 nt, Human herpesvirus 5
acucuggugcuaugg

SEQ ID NO: 312513 - RNA, 20 nt, Human herpesvirus 5
acucugugaugaacgacaca

SEQ ID NO: 312514 - RNA, 21 nt, Human herpesvirus 5
acucuguguugcuacagggag

SEQ ID NO: 312515 - RNA, 13 nt, Human herpesvirus 5
acugaaaacacca

SEQ ID NO: 312516 - RNA, 12 nt, Human herpesvirus 5
acugaagggugc

SEQ ID NO: 312517 - RNA, 21 nt, Human herpesvirus 5
acugaauaccucgcagggucg

SEQ ID NO: 312518 - RNA, 12 nt, Human herpesvirus 5
acugacacagcu

SEQ ID NO: 312519 - RNA, 20 nt, Human herpesvirus 5
acugacgugcaggauguuac

SEQ ID NO: 312520 - RNA, 17 nt, Human herpesvirus 5
acugagacuggugguga

SEQ ID NO: 312521 - RNA, 12 nt, Human herpesvirus 5
acugagcacagc

SEQ ID NO: 312522 - RNA, 17 nt, Human herpesvirus 5
acugcaccagcaaccac

SEQ ID NO: 312523 - RNA, 18 nt, Human herpesvirus 5
acugcauccaucacauca

SEQ ID NO: 312524 - RNA, 15 nt, Human herpesvirus 5
acugcgacacgugcu

SEQ ID NO: 312525 - RNA, 20 nt, Human herpesvirus 5
acugcgauaauaacggcgca

SEQ ID NO: 312526 - RNA, 19 nt, Human herpesvirus 5
acugcgugucaaaaaucac

SEQ ID NO: 312527 - RNA, 19 nt, Human herpesvirus 5
acugcugccucgaugcgcc

SEQ ID NO: 312528 - RNA, 11 nt, Human herpesvirus 5
acugcugcuuc

SEQ ID NO: 312529 - RNA, 23 nt, Human herpesvirus 5
acuggaaauucaauaaaaaccac

SEQ ID NO: 312530 - RNA, 19 nt, Human herpesvirus 5
acuggccagaggucucuau

SEQ ID NO: 312531 - RNA, 20 nt, Human herpesvirus 5
acugggccucggcgugcuca

SEQ ID NO: 312532 - RNA, 21 nt, Human herpesvirus 5
acuguaccaucauugcugcua

SEQ ID NO: 312533 - RNA, 15 nt, Human herpesvirus 5
acugucgccacuaug

SEQ ID NO: 312534 - RNA, 23 nt, Human herpesvirus 5
acugucggggcgcagaaacuuuu

SEQ ID NO: 312535 - RNA, 14 nt, Human herpesvirus 5
acuguggugggaga

SEQ ID NO: 312536 - RNA, 18 nt, Human herpesvirus 5
acuguuaaaaaaaccacg

SEQ ID NO: 312537 - RNA, 18 nt, Human herpesvirus 5
acuguuaauaaaacgcca

SEQ ID NO: 312538 - RNA, 17 nt, Human herpesvirus 5
acuguuauggaucccac

SEQ ID NO: 312539 - RNA, 22 nt, Human herpesvirus 5
acuguuccacggccagcgccuu

SEQ ID NO: 312540 - RNA, 12 nt, Human herpesvirus 5
acuuacaucuca

SEQ ID NO: 312541 - RNA, 13 nt, Human herpesvirus 5
acuuacaucucac

SEQ ID NO: 312542 - RNA, 12 nt, Human herpesvirus 5
acuuacaucugc

SEQ ID NO: 312543 - RNA, 18 nt, Human herpesvirus 5
acuuaccaccuccugggu

SEQ ID NO: 312544 - RNA, 19 nt, Human herpesvirus 5
acuuacgucacucuuggca

SEQ ID NO: 312545 - RNA, 13 nt, Human herpesvirus 5
acuuaugugaaua

SEQ ID NO: 312546 - RNA, 14 nt, Human herpesvirus 5
acuucaucaucacc

SEQ ID NO: 312547 - RNA, 21 nt, Human herpesvirus 5
acuucgauucucuauacacau

SEQ ID NO: 312548 - RNA, 23 nt, Human herpesvirus 5
acuucucguacgacgucugcuca

SEQ ID NO: 312549 - RNA, 14 nt, Human herpesvirus 5
acuucugcugucac

SEQ ID NO: 312550 - RNA, 14 nt, Human herpesvirus 5
acuucuucuacuca

SEQ ID NO: 312551 - RNA, 15 nt, Human herpesvirus 5
acuugaguacuuuca

SEQ ID NO: 312552 - RNA, 17 nt, Human herpesvirus 5
acuugaguacuuucaca

SEQ ID NO: 312553 - RNA, 13 nt, Human herpesvirus 5
acuuuaauucuga

SEQ ID NO: 312554 - RNA, 17 nt, Human herpesvirus 5
acuuucgaccacaagcu

SEQ ID NO: 312555 - RNA, 23 nt, Human herpesvirus 5
acuuucuaauugacauacgguaa

SEQ ID NO: 312556 - RNA, 19 nt, Human herpesvirus 5
acuuugauguaguugcaga

SEQ ID NO: 312557 - RNA, 20 nt, Human herpesvirus 5
acuuugauguaguugcagag

SEQ ID NO: 312558 - RNA, 22 nt, Human herpesvirus 5
acuuuggcucuuuccugugcac

SEQ ID NO: 312559 - RNA, 16 nt, Human herpesvirus 5
acuuuguaucauuaca

SEQ ID NO: 312560 - RNA, 15 nt, Human herpesvirus 5
acuuuuuaauggcca

SEQ ID NO: 312561 - RNA, 16 nt, Human herpesvirus 5
acuuuuuuaccuauca

SEQ ID NO: 312562 - RNA, 18 nt, Human herpesvirus 5
acuuuuuuuaaccaauaa

SEQ ID NO: 312563 - RNA, 18 nt, Human herpesvirus 5
acuuuuuuuacuaguauc

SEQ ID NO: 312564 - RNA, 23 nt, Human herpesvirus 5
agaaaagccggcuccaagugcaa

SEQ ID NO: 312565 - RNA, 16 nt, Human herpesvirus 5
agaaacgcuggaaaau

SEQ ID NO: 312566 - RNA, 15 nt, Human herpesvirus 5
agaaagcuaacauuc

SEQ ID NO: 312567 - RNA, 19 nt, Human herpesvirus 5
agaaagggauaguggcucg

SEQ ID NO: 312568 - RNA, 21 nt, Human herpesvirus 5
agaaaugguaugaugaaucau

SEQ ID NO: 312569 - RNA, 11 nt, Human herpesvirus 5
agaacaugugg

SEQ ID NO: 312570 - RNA, 13 nt, Human herpesvirus 5
agaaccugcucaa

SEQ ID NO: 312571 - RNA, 16 nt, Human herpesvirus 5
agaacuaauauugcaa

SEQ ID NO: 312572 - RNA, 17 nt, Human herpesvirus 5
agaagcacccauuacag

SEQ ID NO: 312573 - RNA, 21 nt, Human herpesvirus 5
agaaucagcagugaguacacg

SEQ ID NO: 312574 - RNA, 18 nt, Human herpesvirus 5
agaaucuaggaacacuga

SEQ ID NO: 312575 - RNA, 17 nt, Human herpesvirus 5
agaaugcaacgcuuuca

SEQ ID NO: 312576 - RNA, 20 nt, Human herpesvirus 5
agaaugcaacgcuuucagga

SEQ ID NO: 312577 - RNA, 18 nt, Human herpesvirus 5
agaauguugcgaauucau

SEQ ID NO: 312578 - RNA, 12 nt, Human herpesvirus 5
agacagauucau

SEQ ID NO: 312579 - RNA, 23 nt, Human herpesvirus 5
agacaggacaccgcaacucggug

SEQ ID NO: 312580 - RNA, 17 nt, Human herpesvirus 5
agacaggcuaugggaag

SEQ ID NO: 312581 - RNA, 13 nt, Human herpesvirus 5
agacaucgucaca

SEQ ID NO: 312582 - RNA, 23 nt, Human herpesvirus 5
agacaucgucacaccuaucauaa

SEQ ID NO: 312583 - RNA, 15 nt, Human herpesvirus 5
agacauggacucuug

SEQ ID NO: 312584 - RNA, 23 nt, Human herpesvirus 5
agacauuccccaccuucccucua

SEQ ID NO: 312585 - RNA, 18 nt, Human herpesvirus 5
agacauuuuaucaguuac

SEQ ID NO: 312586 - RNA, 18 nt, Human herpesvirus 5
agaccaagagcaugcugu

SEQ ID NO: 312587 - RNA, 18 nt, Human herpesvirus 5
agaccacgguuugggaaa

SEQ ID NO: 312588 - RNA, 15 nt, Human herpesvirus 5
agaccccaagccaaa

SEQ ID NO: 312589 - RNA, 16 nt, Human herpesvirus 5
agaccgcaacaacagc

SEQ ID NO: 312590 - RNA, 17 nt, Human herpesvirus 5
agaccgcaacaacagca

SEQ ID NO: 312591 - RNA, 18 nt, Human herpesvirus 5
agaccgcaacaacagcag

SEQ ID NO: 312592 - RNA, 12 nt, Human herpesvirus 5
agaccgcugccu

SEQ ID NO: 312593 - RNA, 13 nt, Human herpesvirus 5
agaccuacagcac

SEQ ID NO: 312594 - RNA, 21 nt, Human herpesvirus 5
agacgaugauaccgaaggcga

SEQ ID NO: 312595 - RNA, 20 nt, Human herpesvirus 5
agacgcucacccguucacuc

SEQ ID NO: 312596 - RNA, 12 nt, Human herpesvirus 5
agacgcugcgcu

SEQ ID NO: 312597 - RNA, 14 nt, Human herpesvirus 5
agacgucaaugaca

SEQ ID NO: 312598 - RNA, 21 nt, Human herpesvirus 5
agacuaucuacaacacuaccc

SEQ ID NO: 312599 - RNA, 15 nt, Human herpesvirus 5
agacucacgucacac

SEQ ID NO: 312600 - RNA, 13 nt, Human herpesvirus 5
agacucacuuuau

SEQ ID NO: 312601 - RNA, 22 nt, Human herpesvirus 5
agacugguggugagaguagugg

SEQ ID NO: 312602 - RNA, 13 nt, Human herpesvirus 5
agacugugguggg

SEQ ID NO: 312603 - RNA, 16 nt, Human herpesvirus 5
agacuuaccaccuccu

SEQ ID NO: 312604 - RNA, 21 nt, Human herpesvirus 5
agacuuaccaccuccugggua

SEQ ID NO: 312605 - RNA, 17 nt, Human herpesvirus 5
agacuuucaaugaugaa

SEQ ID NO: 312606 - RNA, 20 nt, Human herpesvirus 5
agacuuugauguaguugcag

SEQ ID NO: 312607 - RNA, 15 nt, Human herpesvirus 5
agacuuuuauaugau

SEQ ID NO: 312608 - RNA, 13 nt, Human herpesvirus 5
agagcaaaaccuu

SEQ ID NO: 312609 - RNA, 14 nt, Human herpesvirus 5
agaggaaaaaccgc

SEQ ID NO: 312610 - RNA, 13 nt, Human herpesvirus 5
agaggacaccuca

SEQ ID NO: 312611 - RNA, 16 nt, Human herpesvirus 5
agagggugaaggcaaa

SEQ ID NO: 312612 - RNA, 21 nt, Human herpesvirus 5
agagguguagcgggcugucac

SEQ ID NO: 312613 - RNA, 22 nt, Human herpesvirus 5
agagguguagcgggcugucaca

SEQ ID NO: 312614 - RNA, 14 nt, Human herpesvirus 5
agaguuacaugcaa

SEQ ID NO: 312615 - RNA, 14 nt, Human herpesvirus 5
caauaaaaaccacc

SEQ ID NO: 312616 - RNA, 15 nt, Human herpesvirus 5
caauaaaaaccaccg

SEQ ID NO: 312617 - RNA, 14 nt, Human herpesvirus 5
caauaaacccaucc

SEQ ID NO: 312618 - RNA, 22 nt, Human herpesvirus 5
caauaaacuuuuuuuaaccaau

SEQ ID NO: 312619 - RNA, 19 nt, Human herpesvirus 5
caauaaagacgucaaugac

SEQ ID NO: 312620 - RNA, 21 nt, Human herpesvirus 5
caauaaagacgucaaugacac

SEQ ID NO: 312621 - RNA, 20 nt, Human herpesvirus 5
caauaaagauaaucugccaa

SEQ ID NO: 312622 - RNA, 21 nt, Human herpesvirus 5
caauaaagauaaucugccaau

SEQ ID NO: 312623 - RNA, 17 nt, Human herpesvirus 5
caauaacccacaccuau

SEQ ID NO: 312624 - RNA, 14 nt, Human herpesvirus 5
caauaaucuccuga

SEQ ID NO: 312625 - RNA, 15 nt, Human herpesvirus 5
caauaaucuccugag

SEQ ID NO: 312626 - RNA, 14 nt, Human herpesvirus 5
caauacaaaaagcu

SEQ ID NO: 312627 - RNA, 12 nt, Human herpesvirus 5
caauacaucaua

SEQ ID NO: 312628 - RNA, 13 nt, Human herpesvirus 5
caauacaucauau

SEQ ID NO: 312629 - RNA, 20 nt, Human herpesvirus 5
caauacugcauccaucacau

SEQ ID NO: 312630 - RNA, 18 nt, Human herpesvirus 5
caauagcagccgacacag

SEQ ID NO: 312631 - RNA, 13 nt, Human herpesvirus 5
caaucauuacuaa

SEQ ID NO: 312632 - RNA, 18 nt, Human herpesvirus 5
caaucgaaguuuuucaug

SEQ ID NO: 312633 - RNA, 21 nt, Human herpesvirus 5
caaucugacguccagcaccac

SEQ ID NO: 312634 - RNA, 12 nt, Human herpesvirus 5
caaugcaacacu

SEQ ID NO: 312635 - RNA, 19 nt, Human herpesvirus 5
caaugccucauccuuauga

SEQ ID NO: 312636 - RNA, 21 nt, Human herpesvirus 5
caaugguggaaaccagauaca

SEQ ID NO: 312637 - RNA, 19 nt, Human herpesvirus 5
caaugucccuguaguacua

SEQ ID NO: 312638 - RNA, 19 nt, Human herpesvirus 5
caauguuacacauuacuac

SEQ ID NO: 312639 - RNA, 14 nt, Human herpesvirus 5
caauuccacgccgc

SEQ ID NO: 312640 - RNA, 23 nt, Human herpesvirus 5
caauugcaugucgcccagaaaga

SEQ ID NO: 312641 - RNA, 20 nt, Human herpesvirus 5
caauugcgggcccugcugac

SEQ ID NO: 312642 - RNA, 14 nt, Human herpesvirus 5
cacaaaaucuucua

SEQ ID NO: 312643 - RNA, 23 nt, Human herpesvirus 5
cacaaccguauauucuacauuca

SEQ ID NO: 312644 - RNA, 13 nt, Human herpesvirus 5
cacaacgacguuu

SEQ ID NO: 312645 - RNA, 16 nt, Human herpesvirus 5
cacaauggaagccaua

SEQ ID NO: 312646 - RNA, 18 nt, Human herpesvirus 5
cacacaccgucagggaac

SEQ ID NO: 312647 - RNA, 18 nt, Human herpesvirus 5
cacacaucugucaccuca

SEQ ID NO: 312648 - RNA, 15 nt, Human herpesvirus 5
cacacgccauaacaa

SEQ ID NO: 312649 - RNA, 20 nt, Human herpesvirus 5
cacacgggggcgcaaacaca

SEQ ID NO: 312650 - RNA, 15 nt, Human herpesvirus 5
cacacguguggaaga

SEQ ID NO: 312651 - RNA, 19 nt, Human herpesvirus 5
cacacguguggaagacaug

SEQ ID NO: 312652 - RNA, 18 nt, Human herpesvirus 5
cacacguuacaucauaca

SEQ ID NO: 312653 - RNA, 17 nt, Human herpesvirus 5
cacacguucgacaugga

SEQ ID NO: 312654 - RNA, 17 nt, Human herpesvirus 5
cacacuuaagaaaaagg

SEQ ID NO: 312655 - RNA, 20 nt, Human herpesvirus 5
cacagaacacacagauuuuc

SEQ ID NO: 312656 - RNA, 13 nt, Human herpesvirus 5
cacagauauccac

SEQ ID NO: 312657 - RNA, 20 nt, Human herpesvirus 5
cacagcuccugaaugagcuc

SEQ ID NO: 312658 - RNA, 16 nt, Human herpesvirus 5
cacaggaaaguaugug

SEQ ID NO: 312659 - RNA, 18 nt, Human herpesvirus 5
cacagggaauaauaauac

SEQ ID NO: 312660 - RNA, 22 nt, Human herpesvirus 5
cacagguagguggccaugauga

SEQ ID NO: 312661 - RNA, 18 nt, Human herpesvirus 5
cacauaaacaaacgggac

SEQ ID NO: 312662 - RNA, 20 nt, Human herpesvirus 5
cacauauagcucguccacac

SEQ ID NO: 312663 - RNA, 21 nt, Human herpesvirus 5
cacauaucgagguacaugucc

SEQ ID NO: 312664 - RNA, 15 nt, Human herpesvirus 5
cacaucaacucuauc

SEQ ID NO: 312665 - RNA, 14 nt, Human herpesvirus 5
cacaugcacaauac

SEQ ID NO: 312666 - RNA, 16 nt, Human herpesvirus 5
cacaugcacaauacga

SEQ ID NO: 312667 - RNA, 17 nt, Human herpesvirus 5
cacauggccaaugcaua

SEQ ID NO: 312668 - RNA, 23 nt, Human herpesvirus 5
cacauugaacgcgguacaugugc

SEQ ID NO: 312669 - RNA, 20 nt, Human herpesvirus 5
caccaccgagacgugcgacc

SEQ ID NO: 312670 - RNA, 18 nt, Human herpesvirus 5
caccaccgguaccacuac

SEQ ID NO: 312671 - RNA, 21 nt, Human herpesvirus 5
caccaccuugucuccccggug

SEQ ID NO: 312672 - RNA, 23 nt, Human herpesvirus 5
caccacggcuugcaaaacuacua

SEQ ID NO: 312673 - RNA, 14 nt, Human herpesvirus 5
caccacgguacaaa

SEQ ID NO: 312674 - RNA, 21 nt, Human herpesvirus 5
caccacgguacaaaccucuac

SEQ ID NO: 312675 - RNA, 15 nt, Human herpesvirus 5
caccacgguuuacca

SEQ ID NO: 312676 - RNA, 20 nt, Human herpesvirus 5
caccacgucgauucccaucu

SEQ ID NO: 312677 - RNA, 18 nt, Human herpesvirus 5
caccagaugcucccggcg

SEQ ID NO: 312678 - RNA, 15 nt, Human herpesvirus 5
caccagcaaccaccg

SEQ ID NO: 312679 - RNA, 23 nt, Human herpesvirus 5
caccagcaaggucaacuacagca

SEQ ID NO: 312680 - RNA, 21 nt, Human herpesvirus 5
caccaggaacacgguggcuuu

SEQ ID NO: 312681 - RNA, 16 nt, Human herpesvirus 5
caccaggugccggcga

SEQ ID NO: 312682 - RNA, 15 nt, Human herpesvirus 5
caccaucaccuggcg

SEQ ID NO: 312683 - RNA, 15 nt, Human herpesvirus 5
caccaucaggugaca

SEQ ID NO: 312684 - RNA, 21 nt, Human herpesvirus 5
caccaucaggugacauccucg

SEQ ID NO: 312685 - RNA, 17 nt, Human herpesvirus 5
caccauccgaagcuaca

SEQ ID NO: 312686 - RNA, 23 nt, Human herpesvirus 5
caccauguucgagaaugccucua

SEQ ID NO: 312687 - RNA, 21 nt, Human herpesvirus 5
caccauuggaaguaacaucau

SEQ ID NO: 312688 - RNA, 23 nt, Human herpesvirus 5
caccauuggaaguaacaucauaa

SEQ ID NO: 312689 - RNA, 21 nt, Human herpesvirus 5
cacccacagagucgccagucc

SEQ ID NO: 312690 - RNA, 16 nt, Human herpesvirus 5
cacccaguagacagac

SEQ ID NO: 312691 - RNA, 15 nt, Human herpesvirus 5
caccgaaagcgcgcu

SEQ ID NO: 312692 - RNA, 13 nt, Human herpesvirus 5
caccgaagccgua

SEQ ID NO: 312693 - RNA, 19 nt, Human herpesvirus 5
caccgcaguugcugccuua

SEQ ID NO: 312694 - RNA, 16 nt, Human herpesvirus 5
caccggagaccgucca

SEQ ID NO: 312695 - RNA, 22 nt, Human herpesvirus 5
caccggcagcacaccugccucg

SEQ ID NO: 312696 - RNA, 19 nt, Human herpesvirus 5
caccgguaccacuacuacc

SEQ ID NO: 312697 - RNA, 13 nt, Human herpesvirus 5
caccguaccugca

SEQ ID NO: 312698 - RNA, 18 nt, Human herpesvirus 5
caccgucgccgucacugc

SEQ ID NO: 312699 - RNA, 21 nt, Human herpesvirus 5
caccgucgccgucacugccac

SEQ ID NO: 312700 - RNA, 23 nt, Human herpesvirus 5
caccgucgcguccgacgcgacgg

SEQ ID NO: 312701 - RNA, 16 nt, Human herpesvirus 5
caccgucgcugugcaa

SEQ ID NO: 312702 - RNA, 19 nt, Human herpesvirus 5
caccuaccaucugauccag

SEQ ID NO: 312703 - RNA, 19 nt, Human herpesvirus 5
caccuacgacccuccuaaa

SEQ ID NO: 312704 - RNA, 17 nt, Human herpesvirus 5
caccucgaugaagccua

SEQ ID NO: 312705 - RNA, 23 nt, Human herpesvirus 5
caccugccucgacaucucgccgu

SEQ ID NO: 312706 - RNA, 21 nt, Human herpesvirus 5
caccugucgucgacaugucgc

SEQ ID NO: 312707 - RNA, 14 nt, Human herpesvirus 5
caccugugguagaa

SEQ ID NO: 312708 - RNA, 22 nt, Human herpesvirus 5
caccuucccucuagagacagac

SEQ ID NO: 312709 - RNA, 19 nt, Human herpesvirus 5
cacgacaaaugcaugcaaa

SEQ ID NO: 312710 - RNA, 13 nt, Human herpesvirus 5
cacgacaucuucc

SEQ ID NO: 312711 - RNA, 23 nt, Human herpesvirus 5
cacgagcaucgcaacaacagcaa

SEQ ID NO: 312712 - RNA, 14 nt, Human herpesvirus 5
cacgagccagacga

SEQ ID NO: 312713 - RNA, 16 nt, Human herpesvirus 5
cacgaguacccauuac

SEQ ID NO: 312714 - RNA, 12 nt, Human herpesvirus 5
cacgagugcccu

SEQ ID NO: 312715 - RNA, 20 nt, Human herpesvirus 5
cacgcagaacgaucccuuua

SEQ ID NO: 312716 - RNA, 22 nt, Human herpesvirus 5
cacgcagcagagccaccaggug

SEQ ID NO: 312717 - RNA, 19 nt, Human herpesvirus 5
cacgcaggugaggcucucg

SEQ ID NO: 312718 - RNA, 13 nt, Human herpesvirus 5
cacgcaucugcaa

SEQ ID NO: 312719 - RNA, 13 nt, Human herpesvirus 5
cacgccgccguga

SEQ ID NO: 312720 - RNA, 17 nt, Human herpesvirus 5
cacgccggcgguuacag

SEQ ID NO: 312721 - RNA, 15 nt, Human herpesvirus 5
cacgccgugcucgcg

SEQ ID NO: 312722 - RNA, 17 nt, Human herpesvirus 5
cacgcgcucuucacaca

SEQ ID NO: 312723 - RNA, 15 nt, Human herpesvirus 5
cacgcguguucucau

SEQ ID NO: 312724 - RNA, 20 nt, Human herpesvirus 5
cacgcguuauacgccgagug

SEQ ID NO: 312725 - RNA, 20 nt, Human herpesvirus 5
cacggaaaagcaguggcagc

SEQ ID NO: 312726 - RNA, 15 nt, Human herpesvirus 5
cacggcaacaugugu

SEQ ID NO: 312727 - RNA, 19 nt, Human herpesvirus 5
cacggccuccgacgagcgu

SEQ ID NO: 312728 - RNA, 16 nt, Human herpesvirus 5
cacggcgaaccgccgu

SEQ ID NO: 312729 - RNA, 19 nt, Human herpesvirus 5
cacggcggcguguguuuua

SEQ ID NO: 312730 - RNA, 22 nt, Human herpesvirus 5
cacggcugcugaucgccgucac

SEQ ID NO: 312731 - RNA, 13 nt, Human herpesvirus 5
cacggggauuuuc

SEQ ID NO: 312732 - RNA, 22 nt, Human herpesvirus 5
cacgguacaaaccucuaccucg

SEQ ID NO: 312733 - RNA, 22 nt, Human herpesvirus 5
cacgguacgauaaaaacaacgu

SEQ ID NO: 312734 - RNA, 19 nt, Human herpesvirus 5
cacggucgggcacucggcu

SEQ ID NO: 312735 - RNA, 23 nt, Human herpesvirus 5
cacggugacguagcagcacgcgg

SEQ ID NO: 312736 - RNA, 15 nt, Human herpesvirus 5
cacggugugauggua

SEQ ID NO: 312737 - RNA, 15 nt, Human herpesvirus 5
cacguacaaauagca

SEQ ID NO: 312738 - RNA, 18 nt, Human herpesvirus 5
cacguacguuuuccaaaa

SEQ ID NO: 312739 - RNA, 20 nt, Human herpesvirus 5
cacguacguuuuccaaaacg

SEQ ID NO: 312740 - RNA, 22 nt, Human herpesvirus 5
cacgucacacgcuaagagcuuu

SEQ ID NO: 312741 - RNA, 23 nt, Human herpesvirus 5
cacgucacacguuacaucauaca

SEQ ID NO: 312742 - RNA, 17 nt, Human herpesvirus 5
cacgucacuacucuggg

SEQ ID NO: 312743 - RNA, 18 nt, Human herpesvirus 5
cacgucacuauuguauac

SEQ ID NO: 312744 - RNA, 15 nt, Human herpesvirus 5
cacguccacccaucc

SEQ ID NO: 312745 - RNA, 14 nt, Human herpesvirus 5
cacgucgaccaggu

SEQ ID NO: 312746 - RNA, 15 nt, Human herpesvirus 5
cacguuacaucauac

SEQ ID NO: 312747 - RNA, 19 nt, Human herpesvirus 5
cacguucuugcguccuuca

SEQ ID NO: 312748 - RNA, 19 nt, Human herpesvirus 5
cacuacagcuugcaauucg

SEQ ID NO: 312749 - RNA, 15 nt, Human herpesvirus 5
cacuacccucaagua

SEQ ID NO: 312750 - RNA, 13 nt, Human herpesvirus 5
cacuacuaccucc

SEQ ID NO: 312751 - RNA, 17 nt, Human herpesvirus 5
cacuaucuucaaccuca

SEQ ID NO: 312752 - RNA, 19 nt, Human herpesvirus 5
cacucgugauggguucugc

SEQ ID NO: 312753 - RNA, 17 nt, Human herpesvirus 5
cacucuuggcacaugcc

SEQ ID NO: 312754 - RNA, 19 nt, Human herpesvirus 5
cacugccaccgacauggag

SEQ ID NO: 312755 - RNA, 18 nt, Human herpesvirus 5
cacugguauaaccaguca

SEQ ID NO: 312756 - RNA, 19 nt, Human herpesvirus 5
cacugguauaaccagucau

SEQ ID NO: 312757 - RNA, 19 nt, Human herpesvirus 5
cacuguuugagcaugacug

SEQ ID NO: 312758 - RNA, 17 nt, Human herpesvirus 5
cacuuuuuuaccuauca

SEQ ID NO: 312759 - RNA, 17 nt, Human herpesvirus 5
cacuuuuuuuacuagua

SEQ ID NO: 312760 - RNA, 18 nt, Human herpesvirus 5
cacuuuuuuuacuaguau

SEQ ID NO: 312761 - RNA, 21 nt, Human herpesvirus 5
cagaaaaaauuauacccacca

SEQ ID NO: 312762 - RNA, 18 nt, Human herpesvirus 5
cagaaaaucuguguguuc

SEQ ID NO: 312763 - RNA, 21 nt, Human herpesvirus 5
cagaaagaggggcaccuguau

SEQ ID NO: 312764 - RNA, 16 nt, Human herpesvirus 5
cagaaagcugcaauca

SEQ ID NO: 312765 - RNA, 17 nt, Human herpesvirus 5
cagaacucucugccacu

SEQ ID NO: 312766 - RNA, 12 nt, Human herpesvirus 5
cagaacuggugc

SEQ ID NO: 312767 - RNA, 22 nt, Human herpesvirus 5
cagaacuggugcuaucaugaca

SEQ ID NO: 312768 - RNA, 19 nt, Human herpesvirus 5
cagaaggaauaauccgugc

SEQ ID NO: 312769 - RNA, 17 nt, Human herpesvirus 5
cagaaguuguugcaacu

SEQ ID NO: 312770 - RNA, 15 nt, Human herpesvirus 5
cagaauugauuucaa

SEQ ID NO: 312771 - RNA, 14 nt, Human herpesvirus 5
cagaccauccucac

SEQ ID NO: 312772 - RNA, 17 nt, Human herpesvirus 5
cagacggcguccaugca

SEQ ID NO: 312773 - RNA, 13 nt, Human herpesvirus 5
cagacgguggugu

SEQ ID NO: 312774 - RNA, 15 nt, Human herpesvirus 5
cagacuuggagacau

SEQ ID NO: 312775 - RNA, 18 nt, Human herpesvirus 5
cagagaccgccgccgcgc

SEQ ID NO: 312776 - RNA, 20 nt, Human herpesvirus 5
cagagaggacgagcguccac

SEQ ID NO: 312777 - RNA, 19 nt, Human herpesvirus 5
cagaggacggaggaacuuu

SEQ ID NO: 312778 - RNA, 16 nt, Human herpesvirus 5
cagagucgccagucca

SEQ ID NO: 312779 - RNA, 18 nt, Human herpesvirus 5
cagauacaacgucaugca

SEQ ID NO: 312780 - RNA, 21 nt, Human herpesvirus 5
cagauacgcguuggccaguau

SEQ ID NO: 312781 - RNA, 23 nt, Human herpesvirus 5
cagauagguaaagcggugggugg

SEQ ID NO: 312782 - RNA, 23 nt, Human herpesvirus 5
cagauauccacaacgacaaauac

SEQ ID NO: 312783 - RNA, 17 nt, Human herpesvirus 5
cagaucacuaucuucaa

SEQ ID NO: 312784 - RNA, 16 nt, Human herpesvirus 5
cagaugcucccggcgc

SEQ ID NO: 312785 - RNA, 20 nt, Human herpesvirus 5
cagauguaaauaaaauguuu

SEQ ID NO: 312786 - RNA, 20 nt, Human herpesvirus 5
cagauuuacagcccggcggu

SEQ ID NO: 312787 - RNA, 18 nt, Human herpesvirus 5
cagauuuguucgggguga

SEQ ID NO: 312788 - RNA, 20 nt, Human herpesvirus 5
cagcaaccaccguuucuaca

SEQ ID NO: 312789 - RNA, 16 nt, Human herpesvirus 5
cagcaauagcagccga

SEQ ID NO: 312790 - RNA, 22 nt, Human herpesvirus 5
cagcaauaucggcguucugcuc

SEQ ID NO: 312791 - RNA, 15 nt, Human herpesvirus 5
cagcacauuguaugc

SEQ ID NO: 312792 - RNA, 15 nt, Human herpesvirus 5
cagcaccaugugcaa

SEQ ID NO: 312793 - RNA, 16 nt, Human herpesvirus 5
cagcaccaugugcaaa

SEQ ID NO: 312794 - RNA, 18 nt, Human herpesvirus 5
cagcacguuaguuacagc

SEQ ID NO: 312795 - RNA, 17 nt, Human herpesvirus 5
cagcagcuggugcauca

SEQ ID NO: 312796 - RNA, 22 nt, Human herpesvirus 5
cagcaggcuuugacggugaugc

SEQ ID NO: 312797 - RNA, 21 nt, Human herpesvirus 5
cagcagggagccagauggcga

SEQ ID NO: 312798 - RNA, 19 nt, Human herpesvirus 5
cagcaguaugacgugcgau

SEQ ID NO: 312799 - RNA, 21 nt, Human herpesvirus 5
cagcaucgauuucuugccaag

SEQ ID NO: 312800 - RNA, 16 nt, Human herpesvirus 5
cagcaugaacaccaga

SEQ ID NO: 312801 - RNA, 18 nt, Human herpesvirus 5
cagccaccgacacagcag

SEQ ID NO: 312802 - RNA, 15 nt, Human herpesvirus 5
cagccgacacagcgg

SEQ ID NO: 312803 - RNA, 18 nt, Human herpesvirus 5
cagccgcgcuugucgcca

SEQ ID NO: 312804 - RNA, 14 nt, Human herpesvirus 5
cagccucuguguuc

SEQ ID NO: 312805 - RNA, 22 nt, Human herpesvirus 5
cagccuucccuuguaagacaga

SEQ ID NO: 312806 - RNA, 17 nt, Human herpesvirus 5
cagcgacgacccacgac

SEQ ID NO: 312807 - RNA, 23 nt, Human herpesvirus 5
cagcgacuucgguuccaucucag

SEQ ID NO: 312808 - RNA, 15 nt, Human herpesvirus 5
cagcgcaccaugaga

SEQ ID NO: 312809 - RNA, 19 nt, Human herpesvirus 5
cagcgccaccauagccacu

SEQ ID NO: 312810 - RNA, 15 nt, Human herpesvirus 5
cagcgccaggcggcu

SEQ ID NO: 312811 - RNA, 23 nt, Human herpesvirus 5
cagcggcguguacagcuaccuca

SEQ ID NO: 312812 - RNA, 21 nt, Human herpesvirus 5
cagcggucguuuuaaccgcag

SEQ ID NO: 312813 - RNA, 17 nt, Human herpesvirus 5
cagcguauuuucuacuc

SEQ ID NO: 312814 - RNA, 21 nt, Human herpesvirus 5
cagcguauuuucuacuccgaa

SEQ ID NO: 312815 - RNA, 15 nt, Human herpesvirus 5
cagcguccacaguuu

SEQ ID NO: 312816 - RNA, 17 nt, Human herpesvirus 5
cagcguccacaguuucc

SEQ ID NO: 312817 - RNA, 19 nt, Human herpesvirus 5
cagcucaugccucuacauc

SEQ ID NO: 312818 - RNA, 18 nt, Human herpesvirus 5
cagcuccugaaugagcuc

SEQ ID NO: 312819 - RNA, 22 nt, Human herpesvirus 5
cagcucguguaucuuaugccag

SEQ ID NO: 312820 - RNA, 22 nt, Human herpesvirus 5
cagcucuuaaaggacgugaugc

SEQ ID NO: 312821 - RNA, 16 nt, Human herpesvirus 5
cagcugcgaucuguga

SEQ ID NO: 312822 - RNA, 19 nt, Human herpesvirus 5
cagcugcuggagcgcggcc

SEQ ID NO: 312823 - RNA, 23 nt, Human herpesvirus 5
cagcuggggaaguacaauaucaa

SEQ ID NO: 312824 - RNA, 14 nt, Human herpesvirus 5
cagcuggugcauca

SEQ ID NO: 312825 - RNA, 23 nt, Human herpesvirus 5
cagcuuaaaggcgcacuugucau

SEQ ID NO: 312826 - RNA, 20 nt, Human herpesvirus 5
cagcuucuuucucaccgugc

SEQ ID NO: 312827 - RNA, 14 nt, Human herpesvirus 5
caggaccacgucca

SEQ ID NO: 312828 - RNA, 18 nt, Human herpesvirus 5
caggacgggauaucccag

SEQ ID NO: 312829 - RNA, 17 nt, Human herpesvirus 5
caggcacgucauugaca

SEQ ID NO: 312830 - RNA, 23 nt, Human herpesvirus 5
caggcauacggcguauacaauca

SEQ ID NO: 312831 - RNA, 20 nt, Human herpesvirus 5
caggcaucaccgugauaacg

SEQ ID NO: 312832 - RNA, 23 nt, Human herpesvirus 5
caggcccggguucgcgauucuca

SEQ ID NO: 312833 - RNA, 14 nt, Human herpesvirus 5
caggccgccgcuca

SEQ ID NO: 312834 - RNA, 17 nt, Human herpesvirus 5
caggcggcugaucugca

SEQ ID NO: 312835 - RNA, 16 nt, Human herpesvirus 5
caggcuguucacgcgg

SEQ ID NO: 312836 - RNA, 22 nt, Human herpesvirus 5
caggcuuugacggugaugcgug

SEQ ID NO: 312837 - RNA, 13 nt, Human herpesvirus 5
cagggacagugcg

SEQ ID NO: 312838 - RNA, 20 nt, Human herpesvirus 5
cagggguacgcuauguguca

SEQ ID NO: 312839 - RNA, 21 nt, Human herpesvirus 5
cagggguacgcuaugugucac

SEQ ID NO: 312840 - RNA, 15 nt, Human herpesvirus 5
caggguaacagccuu

SEQ ID NO: 312841 - RNA, 13 nt, Human herpesvirus 5
cagggugagaaag

SEQ ID NO: 312842 - RNA, 12 nt, Human herpesvirus 5
cagguccagcuu

SEQ ID NO: 312843 - RNA, 14 nt, Human herpesvirus 5
caggugaccagcag

SEQ ID NO: 312844 - RNA, 20 nt, Human herpesvirus 5
caggugcugucgcucggcau

SEQ ID NO: 312845 - RNA, 16 nt, Human herpesvirus 5
cagguggagauucuaa

SEQ ID NO: 312846 - RNA, 22 nt, Human herpesvirus 5
cagguggagauucuaaagccac

SEQ ID NO: 312847 - RNA, 19 nt, Human herpesvirus 5
caggugugcgcgucggcgc

SEQ ID NO: 312848 - RNA, 18 nt, Human herpesvirus 5
caguacaacaguuaucag

SEQ ID NO: 312849 - RNA, 20 nt, Human herpesvirus 5
caguacaacaguuaucagca

SEQ ID NO: 312850 - RNA, 21 nt, Human herpesvirus 5
caguaccgacgacgacagucu

SEQ ID NO: 312851 - RNA, 22 nt, Human herpesvirus 5
caguaccucaacacauugcuga

SEQ ID NO: 312852 - RNA, 12 nt, Human herpesvirus 5
caguagacagac

SEQ ID NO: 312853 - RNA, 17 nt, Human herpesvirus 5
caguauagcaugcauaa

SEQ ID NO: 312854 - RNA, 19 nt, Human herpesvirus 5
caguaugaaagucccgugu

SEQ ID NO: 312855 - RNA, 18 nt, Human herpesvirus 5
caguaugacgugcgaugg

SEQ ID NO: 312856 - RNA, 22 nt, Human herpesvirus 5
cagucagacccacuaccuggag

SEQ ID NO: 312857 - RNA, 23 nt, Human herpesvirus 5
cagucgacgggugguaccugcaa

SEQ ID NO: 312858 - RNA, 13 nt, Human herpesvirus 5
cagucgccgucag

SEQ ID NO: 312859 - RNA, 17 nt, Human herpesvirus 5
cagugagagcucauaca

SEQ ID NO: 312860 - RNA, 16 nt, Human herpesvirus 5
cagugaucuucauuca

SEQ ID NO: 312861 - RNA, 15 nt, Human herpesvirus 5
cagugccagcgggaa

SEQ ID NO: 312862 - RNA, 16 nt, Human herpesvirus 5
caguggaccgucaauu

SEQ ID NO: 312863 - RNA, 22 nt, Human herpesvirus 5
caguguauuggcauauagccaa

SEQ ID NO: 312864 - RNA, 23 nt, Human herpesvirus 5
caguguauuggcauauagccaau

SEQ ID NO: 312865 - RNA, 15 nt, Human herpesvirus 5
caguuaucagcaaua

SEQ ID NO: 312866 - RNA, 16 nt, Human herpesvirus 5
caguuaucagcaauaa

SEQ ID NO: 312867 - RNA, 20 nt, Human herpesvirus 5
caguucacggggagaagaaa

SEQ ID NO: 312868 - RNA, 12 nt, Human herpesvirus 5
caguucuaucaa

SEQ ID NO: 312869 - RNA, 22 nt, Human herpesvirus 5
caguugauaacaaacaaugaca

SEQ ID NO: 312870 - RNA, 19 nt, Human herpesvirus 5
caguuuccacgacgcaugc

SEQ ID NO: 312871 - RNA, 17 nt, Human herpesvirus 5
cauaaaaauaugggaau

SEQ ID NO: 312872 - RNA, 21 nt, Human herpesvirus 5
cauaaaaccaccguaccugca

SEQ ID NO: 312873 - RNA, 18 nt, Human herpesvirus 5
cauaaacuuaugauucug

SEQ ID NO: 312874 - RNA, 23 nt, Human herpesvirus 5
cauaaaggguggcgaggugugag

SEQ ID NO: 312875 - RNA, 13 nt, Human herpesvirus 5
cauaagaagccaa

SEQ ID NO: 312876 - RNA, 18 nt, Human herpesvirus 5
cauaaugacguacauaua

SEQ ID NO: 312877 - RNA, 13 nt, Human herpesvirus 5
cauacaaugugcu

SEQ ID NO: 312878 - RNA, 16 nt, Human herpesvirus 5
cauacagcaacaccau

SEQ ID NO: 312879 - RNA, 12 nt, Human herpesvirus 5
cauacaguacaa

SEQ ID NO: 312880 - RNA, 17 nt, Human herpesvirus 5
cauacauaugcgaugug

SEQ ID NO: 312881 - RNA, 19 nt, Human herpesvirus 5
cauacggcguauacaauca

SEQ ID NO: 312882 - RNA, 19 nt, Human herpesvirus 5
cauacgggacuuacaucug

SEQ ID NO: 312883 - RNA, 20 nt, Human herpesvirus 5
cauacuuaccaccgugacac

SEQ ID NO: 312884 - RNA, 14 nt, Human herpesvirus 5
cauacuucucguac

SEQ ID NO: 312885 - RNA, 13 nt, Human herpesvirus 5
cauagaguuacau

SEQ ID NO: 312886 - RNA, 17 nt, Human herpesvirus 5
cauagaguuacaugcaa

SEQ ID NO: 312887 - RNA, 15 nt, Human herpesvirus 5
cauagccucuacaaa

SEQ ID NO: 312888 - RNA, 19 nt, Human herpesvirus 5
cauagugauuccccgugac

SEQ ID NO: 312889 - RNA, 21 nt, Human herpesvirus 5
cauagugccagcccuauccuc

SEQ ID NO: 312890 - RNA, 14 nt, Human herpesvirus 5
cauauagcucgucc

SEQ ID NO: 312891 - RNA, 22 nt, Human herpesvirus 5
cauauauaaaccguaugcacaa

SEQ ID NO: 312892 - RNA, 16 nt, Human herpesvirus 5
cauaugcgaugugcaa

SEQ ID NO: 312893 - RNA, 22 nt, Human herpesvirus 5
cauauuuguuuucagucagaga

SEQ ID NO: 312894 - RNA, 15 nt, Human herpesvirus 5
caucaacauacagua

SEQ ID NO: 312895 - RNA, 20 nt, Human herpesvirus 5
caucaacauacaguacaaca

SEQ ID NO: 312896 - RNA, 18 nt, Human herpesvirus 5
caucaagcacuaccagcu

SEQ ID NO: 312897 - RNA, 12 nt, Human herpesvirus 5
caucaccaacgu

SEQ ID NO: 312898 - RNA, 19 nt, Human herpesvirus 5
caucaccaccaucagcaaa

SEQ ID NO: 312899 - RNA, 14 nt, Human herpesvirus 5
caucacccaacacu

SEQ ID NO: 312900 - RNA, 17 nt, Human herpesvirus 5
caucacgguacacagau

SEQ ID NO: 312901 - RNA, 13 nt, Human herpesvirus 5
caucagcaaagcu

SEQ ID NO: 312902 - RNA, 16 nt, Human herpesvirus 5
caucagcaaagcucca

SEQ ID NO: 312903 - RNA, 17 nt, Human herpesvirus 5
caucagcgccgugcuca

SEQ ID NO: 312904 - RNA, 14 nt, Human herpesvirus 5
caucauaaaaacca

SEQ ID NO: 312905 - RNA, 15 nt, Human herpesvirus 5
caucaucaacagcag

SEQ ID NO: 312906 - RNA, 16 nt, Human herpesvirus 5
caucaucagcgucaca

SEQ ID NO: 312907 - RNA, 13 nt, Human herpesvirus 5
caucauguucgcu

SEQ ID NO: 312908 - RNA, 18 nt, Human herpesvirus 5
cauccaauuacaccgaug

SEQ ID NO: 312909 - RNA, 18 nt, Human herpesvirus 5
cauccagcuccguucgcg

SEQ ID NO: 312910 - RNA, 22 nt, Human herpesvirus 5
caucccccugcacguccauguc

SEQ ID NO: 312911 - RNA, 20 nt, Human herpesvirus 5
caucccgagcacuccacacg

SEQ ID NO: 312912 - RNA, 13 nt, Human herpesvirus 5
cauccgcuacucc

SEQ ID NO: 312913 - RNA, 13 nt, Human herpesvirus 5
caucgcacacaga

SEQ ID NO: 312914 - RNA, 13 nt, Human herpesvirus 5
caucgcauaugac

SEQ ID NO: 312915 - RNA, 15 nt, Human herpesvirus 5
caucgggucgucuca

SEQ ID NO: 312916 - RNA, 17 nt, Human herpesvirus 5
caucgggucgucucacc

SEQ ID NO: 312917 - RNA, 22 nt, Human herpesvirus 5
caucgguacgaacgcuacuucc

SEQ ID NO: 312918 - RNA, 19 nt, Human herpesvirus 5
caucuaaagacuauacuuu

SEQ ID NO: 312919 - RNA, 13 nt, Human herpesvirus 5
caucuagacucac

SEQ ID NO: 312920 - RNA, 19 nt, Human herpesvirus 5
caucuagacucacuuuauu

SEQ ID NO: 312921 - RNA, 21 nt, Human herpesvirus 5
caucucauuugcuuuuacaaa

SEQ ID NO: 312922 - RNA, 16 nt, Human herpesvirus 5
caucuccgucucuggu

SEQ ID NO: 312923 - RNA, 15 nt, Human herpesvirus 5
caucuguacaaggau

SEQ ID NO: 312924 - RNA, 16 nt, Human herpesvirus 5
caucugucaccucaca

SEQ ID NO: 312925 - RNA, 13 nt, Human herpesvirus 5
caucugucaucua

SEQ ID NO: 312926 - RNA, 23 nt, Human herpesvirus 5
caucuuaugaagcugaacaauaa

SEQ ID NO: 312927 - RNA, 21 nt, Human herpesvirus 5
caucuucuaacgguuacacaa

SEQ ID NO: 312928 - RNA, 14 nt, Human herpesvirus 5
caugaacgucugca

SEQ ID NO: 312929 - RNA, 13 nt, Human herpesvirus 5
caugacaacggga

SEQ ID NO: 312930 - RNA, 15 nt, Human herpesvirus 5
caugacuguuuccaa

SEQ ID NO: 312931 - RNA, 20 nt, Human herpesvirus 5
caugagaauuagagcauuaa

SEQ ID NO: 312932 - RNA, 15 nt, Human herpesvirus 5
caugagauccaaaau

SEQ ID NO: 312933 - RNA, 17 nt, Human herpesvirus 5
caugauuagcaauauua

SEQ ID NO: 312934 - RNA, 20 nt, Human herpesvirus 5
caugcaacuucuucuacuca

SEQ ID NO: 312935 - RNA, 23 nt, Human herpesvirus 5
caugcaacuucuucuacucacaa

SEQ ID NO: 312936 - RNA, 17 nt, Human herpesvirus 5
caugcauaagaagccaa

SEQ ID NO: 312937 - RNA, 16 nt, Human herpesvirus 5
caugccgccaccggug

SEQ ID NO: 312938 - RNA, 20 nt, Human herpesvirus 5
caugccuuccgcgugcucca

SEQ ID NO: 312939 - RNA, 20 nt, Human herpesvirus 5
caugcgcaacagguccagcu

SEQ ID NO: 312940 - RNA, 20 nt, Human herpesvirus 5
caugcgucguaugccgccac

SEQ ID NO: 312941 - RNA, 16 nt, Human herpesvirus 5
caugcuauaagacagc

SEQ ID NO: 312942 - RNA, 13 nt, Human herpesvirus 5
caugcucaagaca

SEQ ID NO: 312943 - RNA, 21 nt, Human herpesvirus 5
caugcugagcaaguacacgcg

SEQ ID NO: 312944 - RNA, 18 nt, Human herpesvirus 5
caugcugggcgacacuca

SEQ ID NO: 312945 - RNA, 24 nt, Human herpesvirus 5
caugcuucuuugguaucuacauca

SEQ ID NO: 312946 - RNA, 19 nt, Human herpesvirus 5
cauggaccugaccugucag

SEQ ID NO: 312947 - RNA, 17 nt, Human herpesvirus 5
cauggagacaguuucca

SEQ ID NO: 312948 - RNA, 20 nt, Human herpesvirus 5
cauggcucccagagcugcua

SEQ ID NO: 312949 - RNA, 15 nt, Human herpesvirus 5
caugggcaugcaaug

SEQ ID NO: 312950 - RNA, 13 nt, Human herpesvirus 5
cauguacguuuau

SEQ ID NO: 312951 - RNA, 22 nt, Human herpesvirus 5
cauguagaagcacccauuacag

SEQ ID NO: 312952 - RNA, 23 nt, Human herpesvirus 5
cauguaggucucgggguccucgu

SEQ ID NO: 312953 - RNA, 15 nt, Human herpesvirus 5
cauguccagccuguu

SEQ ID NO: 312954 - RNA, 18 nt, Human herpesvirus 5
caugucgucucaucacau

SEQ ID NO: 312955 - RNA, 17 nt, Human herpesvirus 5
caugugcagcuggugau

SEQ ID NO: 312956 - RNA, 20 nt, Human herpesvirus 5
cauguuauguuauuauacug

SEQ ID NO: 312957 - RNA, 22 nt, Human herpesvirus 5
cauguuucucacgcgacgcacu

SEQ ID NO: 312958 - RNA, 14 nt, Human herpesvirus 5
cauucaauacauca

SEQ ID NO: 312959 - RNA, 15 nt, Human herpesvirus 5
cauucaauacaucau

SEQ ID NO: 312960 - RNA, 23 nt, Human herpesvirus 5
cauuccgcaacgucuacaucuca

SEQ ID NO: 312961 - RNA, 19 nt, Human herpesvirus 5
cauucugguaccugcuaaa

SEQ ID NO: 312962 - RNA, 22 nt, Human herpesvirus 5
cauucuuuuuauauauacacau

SEQ ID NO: 312963 - RNA, 19 nt, Human herpesvirus 5
agugaguacacgcaggcaa

SEQ ID NO: 312964 - RNA, 16 nt, Human herpesvirus 5
agugcaucuacguggu

SEQ ID NO: 312965 - RNA, 22 nt, Human herpesvirus 5
agugcccauacuuuuacaugaa

SEQ ID NO: 312966 - RNA, 16 nt, Human herpesvirus 5
agugcgccgagcggcc

SEQ ID NO: 312967 - RNA, 16 nt, Human herpesvirus 5
agugcggcgugcugca

SEQ ID NO: 312968 - RNA, 18 nt, Human herpesvirus 5
agugcggucggugucucg

SEQ ID NO: 312969 - RNA, 18 nt, Human herpesvirus 5
aguggacaugguuaucau

SEQ ID NO: 312970 - RNA, 19 nt, Human herpesvirus 5
agugguggcggcagccacg

SEQ ID NO: 312971 - RNA, 14 nt, Human herpesvirus 5
aguuacgaaucuca

SEQ ID NO: 312972 - RNA, 18 nt, Human herpesvirus 5
aguuaucagcaauaaaag

SEQ ID NO: 312973 - RNA, 15 nt, Human herpesvirus 5
aguuauccuguugaa

SEQ ID NO: 312974 - RNA, 23 nt, Human herpesvirus 5
aguucaaaguccgucaugcuggc

SEQ ID NO: 312975 - RNA, 18 nt, Human herpesvirus 5
aguugauacgcuagcaga

SEQ ID NO: 312976 - RNA, 11 nt, Human herpesvirus 5
aguugcguuug

SEQ ID NO: 312977 - RNA, 22 nt, Human herpesvirus 5
auaaaacgugucgcacaaagaa

SEQ ID NO: 312978 - RNA, 15 nt, Human herpesvirus 5
auaaacacgacaucc

SEQ ID NO: 312979 - RNA, 14 nt, Human herpesvirus 5
auaaaccguaugca

SEQ ID NO: 312980 - RNA, 14 nt, Human herpesvirus 5
auaaacgucaacca

SEQ ID NO: 312981 - RNA, 16 nt, Human herpesvirus 5
auaaacuaaaacauuc

SEQ ID NO: 312982 - RNA, 14 nt, Human herpesvirus 5
auaaagaaaaccac

SEQ ID NO: 312983 - RNA, 14 nt, Human herpesvirus 5
auaaagaaugcaac

SEQ ID NO: 312984 - RNA, 18 nt, Human herpesvirus 5
auaaagacgucaaugaca

SEQ ID NO: 312985 - RNA, 19 nt, Human herpesvirus 5
auaaagacgucaaugacac

SEQ ID NO: 312986 - RNA, 16 nt, Human herpesvirus 5
auaaagagauagacau

SEQ ID NO: 312987 - RNA, 18 nt, Human herpesvirus 5
auaaagaugauacauagc

SEQ ID NO: 312988 - RNA, 14 nt, Human herpesvirus 5
auaaaguacacgcc

SEQ ID NO: 312989 - RNA, 14 nt, Human herpesvirus 5
auaaaucaccguga

SEQ ID NO: 312990 - RNA, 15 nt, Human herpesvirus 5
auaaaucuacacuga

SEQ ID NO: 312991 - RNA, 16 nt, Human herpesvirus 5
auaaaugagaccccau

SEQ ID NO: 312992 - RNA, 18 nt, Human herpesvirus 5
auaaauugcucuacugca

SEQ ID NO: 312993 - RNA, 13 nt, Human herpesvirus 5
auaaccuaccugg

SEQ ID NO: 312994 - RNA, 13 nt, Human herpesvirus 5
auaagaaggccau

SEQ ID NO: 312995 - RNA, 16 nt, Human herpesvirus 5
auaaggagcucauguc

SEQ ID NO: 312996 - RNA, 13 nt, Human herpesvirus 5
auaaggaggcaaa

SEQ ID NO: 312997 - RNA, 15 nt, Human herpesvirus 5
auaauaaugauguac

SEQ ID NO: 312998 - RNA, 13 nt, Human herpesvirus 5
auaauacacgugg

SEQ ID NO: 312999 - RNA, 12 nt, Human herpesvirus 5
auaauaccacaa

SEQ ID NO: 313000 - RNA, 20 nt, Human herpesvirus 5
auaauugcuacgucacaaua

SEQ ID NO: 313001 - RNA, 23 nt, Human herpesvirus 5
auaauugcuacgucacaauaaca

SEQ ID NO: 313002 - RNA, 23 nt, Human herpesvirus 5
auacaaacguugagacuaccaca

SEQ ID NO: 313003 - RNA, 18 nt, Human herpesvirus 5
auacaaauaaaaaaagac

SEQ ID NO: 313004 - RNA, 22 nt, Human herpesvirus 5
auacaaaugaggcacaugaugc

SEQ ID NO: 313005 - RNA, 18 nt, Human herpesvirus 5
auacaacgucaugcauuc

SEQ ID NO: 313006 - RNA, 20 nt, Human herpesvirus 5
auacaagcuugguacacagc

SEQ ID NO: 313007 - RNA, 23 nt, Human herpesvirus 5
auacaagcuugguacacagccaa

SEQ ID NO: 313008 - RNA, 15 nt, Human herpesvirus 5
auacaaugacacuaa

SEQ ID NO: 313009 - RNA, 16 nt, Human herpesvirus 5
auacaaugugcugcau

SEQ ID NO: 313010 - RNA, 10 nt, Human herpesvirus 5
auacacccac

SEQ ID NO: 313011 - RNA, 14 nt, Human herpesvirus 5
auacagauacgcaa

SEQ ID NO: 313012 - RNA, 16 nt, Human herpesvirus 5
auacagauacgcaaug

SEQ ID NO: 313013 - RNA, 13 nt, Human herpesvirus 5
auacagggugccg

SEQ ID NO: 313014 - RNA, 18 nt, Human herpesvirus 5
auacaguugauaacaaac

SEQ ID NO: 313015 - RNA, 17 nt, Human herpesvirus 5
auacaucgcauaugacg

SEQ ID NO: 313016 - RNA, 17 nt, Human herpesvirus 5
auacaucuccgucucug

SEQ ID NO: 313017 - RNA, 10 nt, Human herpesvirus 5
auacaugaug

SEQ ID NO: 313018 - RNA, 18 nt, Human herpesvirus 5
auacaugaugaaugucau

SEQ ID NO: 313019 - RNA, 15 nt, Human herpesvirus 5
auaccaucaccuaua

SEQ ID NO: 313020 - RNA, 14 nt, Human herpesvirus 5
auacccuaauaaag

SEQ ID NO: 313021 - RNA, 23 nt, Human herpesvirus 5
auaccgggcgccgggacucuggu

SEQ ID NO: 313022 - RNA, 19 nt, Human herpesvirus 5
auaccguaaacauaaugac

SEQ ID NO: 313023 - RNA, 14 nt, Human herpesvirus 5
auacgacgauguuu

SEQ ID NO: 313024 - RNA, 16 nt, Human herpesvirus 5
auacuaaacucuguga

SEQ ID NO: 313025 - RNA, 17 nt, Human herpesvirus 5
auacuaaacucugugau

SEQ ID NO: 313026 - RNA, 19 nt, Human herpesvirus 5
auacuaguguguuccacuc

SEQ ID NO: 313027 - RNA, 22 nt, Human herpesvirus 5
auacuauguguaugaugucuca

SEQ ID NO: 313028 - RNA, 19 nt, Human herpesvirus 5
auacucgcuaaccacuacc

SEQ ID NO: 313029 - RNA, 20 nt, Human herpesvirus 5
auacucuauauuauacucua

SEQ ID NO: 313030 - RNA, 22 nt, Human herpesvirus 5
auacucuguaauccuacucaau

SEQ ID NO: 313031 - RNA, 17 nt, Human herpesvirus 5
auacugcauccaucaca

SEQ ID NO: 313032 - RNA, 20 nt, Human herpesvirus 5
auacugcauccaucacauca

SEQ ID NO: 313033 - RNA, 21 nt, Human herpesvirus 5
auacugcauccaucacaucac

SEQ ID NO: 313034 - RNA, 23 nt, Human herpesvirus 5
auacuuuguaaucacgcuaugcg

SEQ ID NO: 313035 - RNA, 11 nt, Human herpesvirus 5
auagaccccaa

SEQ ID NO: 313036 - RNA, 16 nt, Human herpesvirus 5
auagaccccaagccaa

SEQ ID NO: 313037 - RNA, 21 nt, Human herpesvirus 5
auagacgacuuuggugacuug

SEQ ID NO: 313038 - RNA, 21 nt, Human herpesvirus 5
auagauacacguggcugcuuu

SEQ ID NO: 313039 - RNA, 18 nt, Human herpesvirus 5
auagcaagaauaaaucac

SEQ ID NO: 313040 - RNA, 18 nt, Human herpesvirus 5
auagcagugacuggguaa

SEQ ID NO: 313041 - RNA, 21 nt, Human herpesvirus 5
auagcaugcauaagaagccaa

SEQ ID NO: 313042 - RNA, 23 nt, Human herpesvirus 5
auagcaugcauaagaagccaagg

SEQ ID NO: 313043 - RNA, 13 nt, Human herpesvirus 5
auagcgcuuauau

SEQ ID NO: 313044 - RNA, 18 nt, Human herpesvirus 5
auauaaaccguaugcaca

SEQ ID NO: 313045 - RNA, 23 nt, Human herpesvirus 5
auauaaacguggguuucggugac

SEQ ID NO: 313046 - RNA, 19 nt, Human herpesvirus 5
auauaaccuuucccugucu

SEQ ID NO: 313047 - RNA, 20 nt, Human herpesvirus 5
auauaauacacgugguuuau

SEQ ID NO: 313048 - RNA, 19 nt, Human herpesvirus 5
auauagccuccggcuguca

SEQ ID NO: 313049 - RNA, 12 nt, Human herpesvirus 5
auauauacaaac

SEQ ID NO: 313050 - RNA, 16 nt, Human herpesvirus 5
auaucaguuacuguua

SEQ ID NO: 313051 - RNA, 13 nt, Human herpesvirus 5
auaucaucugcac

SEQ ID NO: 313052 - RNA, 14 nt, Human herpesvirus 5
auauccaauacggc

SEQ ID NO: 313053 - RNA, 14 nt, Human herpesvirus 5
auauccgcguuauc

SEQ ID NO: 313054 - RNA, 17 nt, Human herpesvirus 5
auaucggcguucugcuc

SEQ ID NO: 313055 - RNA, 12 nt, Human herpesvirus 5
auaucuacagca

SEQ ID NO: 313056 - RNA, 18 nt, Human herpesvirus 5
auaucuacagcagauaca

SEQ ID NO: 313057 - RNA, 19 nt, Human herpesvirus 5
auaucuacgcaauguuaca

SEQ ID NO: 313058 - RNA, 21 nt, Human herpesvirus 5
auaucuccgguuucaaaccca

SEQ ID NO: 313059 - RNA, 18 nt, Human herpesvirus 5
auaugaggaaacugaaua

SEQ ID NO: 313060 - RNA, 23 nt, Human herpesvirus 5
auaugauccuuguacagauguaa

SEQ ID NO: 313061 - RNA, 17 nt, Human herpesvirus 5
auaugcuaauauaucca

SEQ ID NO: 313062 - RNA, 15 nt, Human herpesvirus 5
auaugugcggucaug

SEQ ID NO: 313063 - RNA, 17 nt, Human herpesvirus 5
auauuaugcguguccug

SEQ ID NO: 313064 - RNA, 17 nt, Human herpesvirus 5
auauucaaucauuacua

SEQ ID NO: 313065 - RNA, 17 nt, Human herpesvirus 5
auauugcuucguauaca

SEQ ID NO: 313066 - RNA, 20 nt, Human herpesvirus 5
auauugcuucguauacaaca

SEQ ID NO: 313067 - RNA, 19 nt, Human herpesvirus 5
auauuugaaaauauggcau

SEQ ID NO: 313068 - RNA, 15 nt, Human herpesvirus 5
aucaacagcagcaac

SEQ ID NO: 313069 - RNA, 12 nt, Human herpesvirus 5
aucaacauacag

SEQ ID NO: 313070 - RNA, 14 nt, Human herpesvirus 5
aucaacgucucugu

SEQ ID NO: 313071 - RNA, 21 nt, Human herpesvirus 5
aucaagcuggcacauggccaa

SEQ ID NO: 313072 - RNA, 21 nt, Human herpesvirus 5
aucaauacaaugacacuaacu

SEQ ID NO: 313073 - RNA, 19 nt, Human herpesvirus 5
aucaaugguggaaaccaga

SEQ ID NO: 313074 - RNA, 13 nt, Human herpesvirus 5
aucacacuaagaa

SEQ ID NO: 313075 - RNA, 14 nt, Human herpesvirus 5
aucaccaaacaaca

SEQ ID NO: 313076 - RNA, 14 nt, Human herpesvirus 5
aucacccgccucau

SEQ ID NO: 313077 - RNA, 15 nt, Human herpesvirus 5
aucaccuggcgacgu

SEQ ID NO: 313078 - RNA, 15 nt, Human herpesvirus 5
aucacgaaaggcacc

SEQ ID NO: 313079 - RNA, 20 nt, Human herpesvirus 5
aucagaaagcugcaaucaaa

SEQ ID NO: 313080 - RNA, 15 nt, Human herpesvirus 5
aucauaaagaaugca

SEQ ID NO: 313081 - RNA, 15 nt, Human herpesvirus 5
aucauacauuguuuc

SEQ ID NO: 313082 - RNA, 15 nt, Human herpesvirus 5
aucauauuaugcgug

SEQ ID NO: 313083 - RNA, 14 nt, Human herpesvirus 5
aucaucaacagcag

SEQ ID NO: 313084 - RNA, 22 nt, Human herpesvirus 5
aucauccuaauugguacucuag

SEQ ID NO: 313085 - RNA, 13 nt, Human herpesvirus 5
aucaucugcaccu

SEQ ID NO: 313086 - RNA, 19 nt, Human herpesvirus 5
aucauggagccgcaagugc

SEQ ID NO: 313087 - RNA, 20 nt, Human herpesvirus 5
aucauuuuuauuaucaucug

SEQ ID NO: 313088 - RNA, 19 nt, Human herpesvirus 5
auccacgggccgcgcucca

SEQ ID NO: 313089 - RNA, 18 nt, Human herpesvirus 5
auccacucuuggcacaug

SEQ ID NO: 313090 - RNA, 22 nt, Human herpesvirus 5
auccagacauuuuaucaguuac

SEQ ID NO: 313091 - RNA, 21 nt, Human herpesvirus 5
auccaggacaaaaaguacacu

SEQ ID NO: 313092 - RNA, 23 nt, Human herpesvirus 5
auccaggacaaaaaguacacugg

SEQ ID NO: 313093 - RNA, 16 nt, Human herpesvirus 5
auccagguuauggaua

SEQ ID NO: 313094 - RNA, 16 nt, Human herpesvirus 5
auccaguuucaccaag

SEQ ID NO: 313095 - RNA, 18 nt, Human herpesvirus 5
auccaucacaucacccaa

SEQ ID NO: 313096 - RNA, 19 nt, Human herpesvirus 5
aucccuguaauuauuccag

SEQ ID NO: 313097 - RNA, 18 nt, Human herpesvirus 5
auccggcaacaucucuuc

SEQ ID NO: 313098 - RNA, 22 nt, Human herpesvirus 5
auccguccccacguccacccau

SEQ ID NO: 313099 - RNA, 14 nt, Human herpesvirus 5
auccucacacugac

SEQ ID NO: 313100 - RNA, 21 nt, Human herpesvirus 5
auccucgcccaggcugucaau

SEQ ID NO: 313101 - RNA, 21 nt, Human herpesvirus 5
auccucgggcuuuccggccaa

SEQ ID NO: 313102 - RNA, 18 nt, Human herpesvirus 5
auccucguggaaggcacc

SEQ ID NO: 313103 - RNA, 17 nt, Human herpesvirus 5
auccuuguacagaugua

SEQ ID NO: 313104 - RNA, 23 nt, Human herpesvirus 5
aucgaaguuuuucaugucuuaca

SEQ ID NO: 313105 - RNA, 15 nt, Human herpesvirus 5
aucgacguguuauca

SEQ ID NO: 313106 - RNA, 12 nt, Human herpesvirus 5
aucgauauuuga

SEQ ID NO: 313107 - RNA, 22 nt, Human herpesvirus 5
acaaaaccgucgaaaacaacca

SEQ ID NO: 313108 - RNA, 11 nt, Human herpesvirus 5
acaaacacuac

SEQ ID NO: 313109 - RNA, 22 nt, Human herpesvirus 5
acaaacgccguuauguucagug

SEQ ID NO: 313110 - RNA, 16 nt, Human herpesvirus 5
acaaacguugagacua

SEQ ID NO: 313111 - RNA, 19 nt, Human herpesvirus 5
acaaacguugagacuacca

SEQ ID NO: 313112 - RNA, 21 nt, Human herpesvirus 5
acaaagaagucucucucuaga

SEQ ID NO: 313113 - RNA, 21 nt, Human herpesvirus 5
acaaagcacaauacacaugug

SEQ ID NO: 313114 - RNA, 16 nt, Human herpesvirus 5
acaaauagcagugacu

SEQ ID NO: 313115 - RNA, 23 nt, Human herpesvirus 5
acaaaucacagucuccuucucau

SEQ ID NO: 313116 - RNA, 17 nt, Human herpesvirus 5
acaaaugaggcacauga

SEQ ID NO: 313117 - RNA, 13 nt, Human herpesvirus 5
acaacacuacccu

SEQ ID NO: 313118 - RNA, 18 nt, Human herpesvirus 5
acaacaguuaucagcaau

SEQ ID NO: 313119 - RNA, 13 nt, Human herpesvirus 5
acaacaucccucc

SEQ ID NO: 313120 - RNA, 19 nt, Human herpesvirus 5
acaaccacacagauaucca

SEQ ID NO: 313121 - RNA, 18 nt, Human herpesvirus 5
acaaccacggcgaaccgc

SEQ ID NO: 313122 - RNA, 19 nt, Human herpesvirus 5
acaaccacggcgaaccgcc

SEQ ID NO: 313123 - RNA, 15 nt, Human herpesvirus 5
acaaccgcauccugc

SEQ ID NO: 313124 - RNA, 16 nt, Human herpesvirus 5
acaaccgcauccugcc

SEQ ID NO: 313125 - RNA, 22 nt, Human herpesvirus 5
acaaccguauauucuacauuca

SEQ ID NO: 313126 - RNA, 11 nt, Human herpesvirus 5
acaaccugcug

SEQ ID NO: 313127 - RNA, 17 nt, Human herpesvirus 5
acaaccugcugcacuuc

SEQ ID NO: 313128 - RNA, 15 nt, Human herpesvirus 5
acaacuuaaccacaa

SEQ ID NO: 313129 - RNA, 13 nt, Human herpesvirus 5
acaagaaacacag

SEQ ID NO: 313130 - RNA, 21 nt, Human herpesvirus 5
acaagccgacccccaccagcg

SEQ ID NO: 313131 - RNA, 17 nt, Human herpesvirus 5
acaagcgccgucacuuc

SEQ ID NO: 313132 - RNA, 17 nt, Human herpesvirus 5
acaagcuguggcugcac

SEQ ID NO: 313133 - RNA, 21 nt, Human herpesvirus 5
acaagcuugguacacagccaa

SEQ ID NO: 313134 - RNA, 22 nt, Human herpesvirus 5
acaagugcgccuuuaagcugga

SEQ ID NO: 313135 - RNA, 13 nt, Human herpesvirus 5
acaauacaucaua

SEQ ID NO: 313136 - RNA, 19 nt, Human herpesvirus 5
acaauacgcguaagauaca

SEQ ID NO: 313137 - RNA, 23 nt, Human herpesvirus 5
acaaugacacgucuuacuucagc

SEQ ID NO: 313138 - RNA, 15 nt, Human herpesvirus 5
acaauggaagccaua

SEQ ID NO: 313139 - RNA, 16 nt, Human herpesvirus 5
acaaugugcugcauga

SEQ ID NO: 313140 - RNA, 17 nt, Human herpesvirus 5
acacaaaaucuucuaaa

SEQ ID NO: 313141 - RNA, 21 nt, Human herpesvirus 5
acacaaucccguuggacaaua

SEQ ID NO: 313142 - RNA, 18 nt, Human herpesvirus 5
acacagagacuugugaua

SEQ ID NO: 313143 - RNA, 17 nt, Human herpesvirus 5
acacagcacgcugauaa

SEQ ID NO: 313144 - RNA, 17 nt, Human herpesvirus 5
acacagcuccugaauga

SEQ ID NO: 313145 - RNA, 16 nt, Human herpesvirus 5
acacaggccagcugcc

SEQ ID NO: 313146 - RNA, 21 nt, Human herpesvirus 5
acacauaucgagguacauguc

SEQ ID NO: 313147 - RNA, 22 nt, Human herpesvirus 5
acacaucgcacacagacuuuau

SEQ ID NO: 313148 - RNA, 21 nt, Human herpesvirus 5
acaccaauugcuuuaauacuc

SEQ ID NO: 313149 - RNA, 22 nt, Human herpesvirus 5
acaccacgguuaccuucuugcc

SEQ ID NO: 313150 - RNA, 12 nt, Human herpesvirus 5
acaccaguauug

SEQ ID NO: 313151 - RNA, 21 nt, Human herpesvirus 5
acaccuauaggcuaagcuaua

SEQ ID NO: 313152 - RNA, 12 nt, Human herpesvirus 5
acaccuauggcg

SEQ ID NO: 313153 - RNA, 22 nt, Human herpesvirus 5
acaccucuauguuacaauguca

SEQ ID NO: 313154 - RNA, 19 nt, Human herpesvirus 5
acacgacggggaaaaucac

SEQ ID NO: 313155 - RNA, 13 nt, Human herpesvirus 5
acacgcaacuuuu

SEQ ID NO: 313156 - RNA, 22 nt, Human herpesvirus 5
acacgcacgcugguuaccaggc

SEQ ID NO: 313157 - RNA, 14 nt, Human herpesvirus 5
acacgccauaacaa

SEQ ID NO: 313158 - RNA, 21 nt, Human herpesvirus 5
acacgcgggggaaaaacaaag

SEQ ID NO: 313159 - RNA, 16 nt, Human herpesvirus 5
acacgcuaagagcuuu

SEQ ID NO: 313160 - RNA, 18 nt, Human herpesvirus 5
acacggaacggagcagcc

SEQ ID NO: 313161 - RNA, 22 nt, Human herpesvirus 5
acacggugaaccgaacuaugug

SEQ ID NO: 313162 - RNA, 16 nt, Human herpesvirus 5
acacgguuucuuccca

SEQ ID NO: 313163 - RNA, 21 nt, Human herpesvirus 5
acacgucccccugaucuguca

SEQ ID NO: 313164 - RNA, 17 nt, Human herpesvirus 5
acacuacagcuugcaau

SEQ ID NO: 313165 - RNA, 19 nt, Human herpesvirus 5
acacucuggcccugcugua

SEQ ID NO: 313166 - RNA, 23 nt, Human herpesvirus 5
acacuggaaauucaauaaaaacc

SEQ ID NO: 313167 - RNA, 22 nt, Human herpesvirus 5
acagacgaugaaccuuccccac

SEQ ID NO: 313168 - RNA, 17 nt, Human herpesvirus 5
acagacuuuuauaugau

SEQ ID NO: 313169 - RNA, 20 nt, Human herpesvirus 5
acagaguccgugucagucuc

SEQ ID NO: 313170 - RNA, 17 nt, Human herpesvirus 5
acagagucgccagucca

SEQ ID NO: 313171 - RNA, 18 nt, Human herpesvirus 5
acagauacgcaaugcauc

SEQ ID NO: 313172 - RNA, 22 nt, Human herpesvirus 5
acagauucaucgugcaguaccu

SEQ ID NO: 313173 - RNA, 18 nt, Human herpesvirus 5
acagcaaagacgaugaua

SEQ ID NO: 313174 - RNA, 22 nt, Human herpesvirus 5
acagcacauuagacacacgggg

SEQ ID NO: 313175 - RNA, 14 nt, Human herpesvirus 5
acagccacaucaac

SEQ ID NO: 313176 - RNA, 16 nt, Human herpesvirus 5
acagcguccacaguuu

SEQ ID NO: 313177 - RNA, 23 nt, Human herpesvirus 5
acaggcauacggcguauacaauc

SEQ ID NO: 313178 - RNA, 20 nt, Human herpesvirus 5
acagguagguggccaugaug

SEQ ID NO: 313179 - RNA, 17 nt, Human herpesvirus 5
acaguacaacaguuauc

SEQ ID NO: 313180 - RNA, 17 nt, Human herpesvirus 5
acaguacuacuaccaau

SEQ ID NO: 313181 - RNA, 23 nt, Human herpesvirus 5
acaguacuacuaccaauacugca

SEQ ID NO: 313182 - RNA, 19 nt, Human herpesvirus 5
acaguagcgguaccagacg

SEQ ID NO: 313183 - RNA, 17 nt, Human herpesvirus 5
acaguauagcaugcaua

SEQ ID NO: 313184 - RNA, 23 nt, Human herpesvirus 5
acagucgacgggugguaccugca

SEQ ID NO: 313185 - RNA, 21 nt, Human herpesvirus 5
acagugagagcucauacauau

SEQ ID NO: 313186 - RNA, 15 nt, Human herpesvirus 5
acaguguauuggcau

SEQ ID NO: 313187 - RNA, 23 nt, Human herpesvirus 5
acaguugauaacaaacaaugaca

SEQ ID NO: 313188 - RNA, 18 nt, Human herpesvirus 5
acaguuuacgaguagaaa

SEQ ID NO: 313189 - RNA, 21 nt, Human herpesvirus 5
acaguuuccacgcagcgggaa

SEQ ID NO: 313190 - RNA, 15 nt, Human herpesvirus 5
acaguuuuugagaac

SEQ ID NO: 313191 - RNA, 13 nt, Human herpesvirus 5
acauaaaaccacc

SEQ ID NO: 313192 - RNA, 13 nt, Human herpesvirus 5
acauaaacaaacg

SEQ ID NO: 313193 - RNA, 16 nt, Human herpesvirus 5
acauacgggacuuaca

SEQ ID NO: 313194 - RNA, 19 nt, Human herpesvirus 5
acauauagcucguccacac

SEQ ID NO: 313195 - RNA, 20 nt, Human herpesvirus 5
acauaugcagauacgcagug

SEQ ID NO: 313196 - RNA, 16 nt, Human herpesvirus 5
acauaugcgaugugca

SEQ ID NO: 313197 - RNA, 13 nt, Human herpesvirus 5
acaucaacauaca

SEQ ID NO: 313198 - RNA, 14 nt, Human herpesvirus 5
acaucaacauacag

SEQ ID NO: 313199 - RNA, 23 nt, Human herpesvirus 5
acaucaagcuggcacauggccaa

SEQ ID NO: 313200 - RNA, 13 nt, Human herpesvirus 5
acaucacaguuca

SEQ ID NO: 313201 - RNA, 21 nt, Human herpesvirus 5
acaucacaguucaccaccuug

SEQ ID NO: 313202 - RNA, 18 nt, Human herpesvirus 5
acaucacccaacacugcu

SEQ ID NO: 313203 - RNA, 22 nt, Human herpesvirus 5
acaucgccuauagauagcggca

SEQ ID NO: 313204 - RNA, 18 nt, Human herpesvirus 5
acaucuccgucucugguc

SEQ ID NO: 313205 - RNA, 15 nt, Human herpesvirus 5
acaucugucaccuca

SEQ ID NO: 313206 - RNA, 22 nt, Human herpesvirus 5
acaucuuaugaagcugaacaau

SEQ ID NO: 313207 - RNA, 16 nt, Human herpesvirus 5
acaugaugaaugucau

SEQ ID NO: 313208 - RNA, 16 nt, Human herpesvirus 5
acaugcgcguguacuu

SEQ ID NO: 313209 - RNA, 20 nt, Human herpesvirus 5
acaugcuauaagacagccuu

SEQ ID NO: 313210 - RNA, 15 nt, Human herpesvirus 5
accugcugacuauca

SEQ ID NO: 313211 - RNA, 13 nt, Human herpesvirus 5
accugcugcacuu

SEQ ID NO: 313212 - RNA, 23 nt, Human herpesvirus 5
accuggaccggugguacugcugu

SEQ ID NO: 313213 - RNA, 10 nt, Human herpesvirus 5
accuggguag

SEQ ID NO: 313214 - RNA, 21 nt, Human herpesvirus 5
accugguagacgaaagacaau

SEQ ID NO: 313215 - RNA, 17 nt, Human herpesvirus 5
accugucaccgcugcua

SEQ ID NO: 313216 - RNA, 21 nt, Human herpesvirus 5
accugucagaaggcagugacg

SEQ ID NO: 313217 - RNA, 16 nt, Human herpesvirus 5
accuuugcgcaucccc

SEQ ID NO: 313218 - RNA, 15 nt, Human herpesvirus 5
acgaaaacacauuau

SEQ ID NO: 313219 - RNA, 13 nt, Human herpesvirus 5
acgaaacccgugu

SEQ ID NO: 313220 - RNA, 22 nt, Human herpesvirus 5
acgaaacccguguaaugcguac

SEQ ID NO: 313221 - RNA, 23 nt, Human herpesvirus 5
acgaagaagaacaagacggagga

SEQ ID NO: 313222 - RNA, 16 nt, Human herpesvirus 5
acgacaaacacuaccg

SEQ ID NO: 313223 - RNA, 17 nt, Human herpesvirus 5
acgacaaacacuaccgu

SEQ ID NO: 313224 - RNA, 15 nt, Human herpesvirus 5
acgacaaaugcaugc

SEQ ID NO: 313225 - RNA, 14 nt, Human herpesvirus 5
acgacaacaucccu

SEQ ID NO: 313226 - RNA, 19 nt, Human herpesvirus 5
gucugucuuuuaugaugcu

SEQ ID NO: 313227 - RNA, 12 nt, Human herpesvirus 5
gucuucaugacg

SEQ ID NO: 313228 - RNA, 21 nt, Human herpesvirus 5
gucuuuuuaaggagcucugaa

SEQ ID NO: 313229 - RNA, 22 nt, Human herpesvirus 5
gugaaccgaacuauguggcucc

SEQ ID NO: 313230 - RNA, 15 nt, Human herpesvirus 5
gugaaccgcucauau

SEQ ID NO: 313231 - RNA, 13 nt, Human herpesvirus 5
gugaauucuggca

SEQ ID NO: 313232 - RNA, 17 nt, Human herpesvirus 5
gugaauugguguucuua

SEQ ID NO: 313233 - RNA, 15 nt, Human herpesvirus 5
gugacguggauacua

SEQ ID NO: 313234 - RNA, 11 nt, Human herpesvirus 5
gugacuaugug

SEQ ID NO: 313235 - RNA, 16 nt, Human herpesvirus 5
gugacuuacaucucac

SEQ ID NO: 313236 - RNA, 13 nt, Human herpesvirus 5
gugagcuuugacg

SEQ ID NO: 313237 - RNA, 21 nt, Human herpesvirus 5
gugauaaguaccagacaucca

SEQ ID NO: 313238 - RNA, 19 nt, Human herpesvirus 5
gugaugaacgacacaugca

SEQ ID NO: 313239 - RNA, 15 nt, Human herpesvirus 5
gugaugguacuauau

SEQ ID NO: 313240 - RNA, 21 nt, Human herpesvirus 5
gugauuuaucugccacuuuuc

SEQ ID NO: 313241 - RNA, 17 nt, Human herpesvirus 5
gugcaacgccaccaagg

SEQ ID NO: 313242 - RNA, 16 nt, Human herpesvirus 5
gugcacgcgccaaaau

SEQ ID NO: 313243 - RNA, 21 nt, Human herpesvirus 5
gugcccauacuuuuacaugaa

SEQ ID NO: 313244 - RNA, 12 nt, Human herpesvirus 5
gugccucugaaa

SEQ ID NO: 313245 - RNA, 20 nt, Human herpesvirus 5
gugcgacguucuccaaggga

SEQ ID NO: 313246 - RNA, 15 nt, Human herpesvirus 5
gugcgccuuccaguc

SEQ ID NO: 313247 - RNA, 14 nt, Human herpesvirus 5
gugcgcguccacag

SEQ ID NO: 313248 - RNA, 15 nt, Human herpesvirus 5
gugcguggaccagac

SEQ ID NO: 313249 - RNA, 19 nt, Human herpesvirus 5
gugcucaaguucaguguag

SEQ ID NO: 313250 - RNA, 16 nt, Human herpesvirus 5
gugcugcauguguauu

SEQ ID NO: 313251 - RNA, 14 nt, Human herpesvirus 5
gugcugcucugcac

SEQ ID NO: 313252 - RNA, 23 nt, Human herpesvirus 5
guggaagacauggcgacuuuccg

SEQ ID NO: 313253 - RNA, 23 nt, Human herpesvirus 5
guggacgggucucuuugacacga

SEQ ID NO: 313254 - RNA, 19 nt, Human herpesvirus 5
guggagacggagccguuac

SEQ ID NO: 313255 - RNA, 17 nt, Human herpesvirus 5
guggauggucauauaua

SEQ ID NO: 313256 - RNA, 21 nt, Human herpesvirus 5
guggcaaggcguauguuauca

SEQ ID NO: 313257 - RNA, 21 nt, Human herpesvirus 5
guggcaaguuggccaccaaga

SEQ ID NO: 313258 - RNA, 21 nt, Human herpesvirus 5
guggcaggacuugaguaccaa

SEQ ID NO: 313259 - RNA, 14 nt, Human herpesvirus 5
guggcgagguguga

SEQ ID NO: 313260 - RNA, 21 nt, Human herpesvirus 5
guggcggcgguggagggcgcg

SEQ ID NO: 313261 - RNA, 16 nt, Human herpesvirus 5
guggcguuggcagcaa

SEQ ID NO: 313262 - RNA, 15 nt, Human herpesvirus 5
guggcucuacagugg

SEQ ID NO: 313263 - RNA, 11 nt, Human herpesvirus 5
guggggcugcu

SEQ ID NO: 313264 - RNA, 14 nt, Human herpesvirus 5
gugguacugcugug

SEQ ID NO: 313265 - RNA, 22 nt, Human herpesvirus 5
gugguacugcugugguguugcc

SEQ ID NO: 313266 - RNA, 20 nt, Human herpesvirus 5
guggugggaaugcacguguu

SEQ ID NO: 313267 - RNA, 14 nt, Human herpesvirus 5
guguacuugcucag

SEQ ID NO: 313268 - RNA, 20 nt, Human herpesvirus 5
guguauagaccccaagccaa

SEQ ID NO: 313269 - RNA, 16 nt, Human herpesvirus 5
gugucccugccagucu

SEQ ID NO: 313270 - RNA, 18 nt, Human herpesvirus 5
gugucccugccagucucc

SEQ ID NO: 313271 - RNA, 23 nt, Human herpesvirus 5
guguccgcggcgugaccacguca

SEQ ID NO: 313272 - RNA, 20 nt, Human herpesvirus 5
guguccgcucaacuuucuaa

SEQ ID NO: 313273 - RNA, 14 nt, Human herpesvirus 5
guguccgugaucac

SEQ ID NO: 313274 - RNA, 23 nt, Human herpesvirus 5
gugucuacuacucuguguugcua

SEQ ID NO: 313275 - RNA, 20 nt, Human herpesvirus 5
gugugaauggaaauacauga

SEQ ID NO: 313276 - RNA, 17 nt, Human herpesvirus 5
gugugucuaaugugcug

SEQ ID NO: 313277 - RNA, 13 nt, Human herpesvirus 5
gugugugucuaua

SEQ ID NO: 313278 - RNA, 20 nt, Human herpesvirus 5
guguguuugcgcccccgugu

SEQ ID NO: 313279 - RNA, 18 nt, Human herpesvirus 5
guguugcuaggcgggcug

SEQ ID NO: 313280 - RNA, 18 nt, Human herpesvirus 5
guuaacccccgacgagca

SEQ ID NO: 313281 - RNA, 23 nt, Human herpesvirus 5
guuaauaaaacgccaugaugaca

SEQ ID NO: 313282 - RNA, 15 nt, Human herpesvirus 5
guuaccaguaccacc

SEQ ID NO: 313283 - RNA, 15 nt, Human herpesvirus 5
guuacccugguaucc

SEQ ID NO: 313284 - RNA, 17 nt, Human herpesvirus 5
guuacccugguauccaa

SEQ ID NO: 313285 - RNA, 16 nt, Human herpesvirus 5
guuacuaacacuccuc

SEQ ID NO: 313286 - RNA, 15 nt, Human herpesvirus 5
guuagacauggggca

SEQ ID NO: 313287 - RNA, 15 nt, Human herpesvirus 5
guuagacuagcacag

SEQ ID NO: 313288 - RNA, 14 nt, Human herpesvirus 5
guuagcuuuugccc

SEQ ID NO: 313289 - RNA, 14 nt, Human herpesvirus 5
guuaggaaccagug

SEQ ID NO: 313290 - RNA, 21 nt, Human herpesvirus 5
guuauaacgacgccagugaua

SEQ ID NO: 313291 - RNA, 20 nt, Human herpesvirus 5
guuaucagaaagcugcaauc

SEQ ID NO: 313292 - RNA, 14 nt, Human herpesvirus 5
guuaugaccaagcc

SEQ ID NO: 313293 - RNA, 15 nt, Human herpesvirus 5
guuauucagaaccau

SEQ ID NO: 313294 - RNA, 19 nt, Human herpesvirus 5
guucgaguccugcuguuac

SEQ ID NO: 313295 - RNA, 22 nt, Human herpesvirus 5
guucgcaugucgucucaucaca

SEQ ID NO: 313296 - RNA, 16 nt, Human herpesvirus 5
guucgcuucucacucu

SEQ ID NO: 313297 - RNA, 13 nt, Human herpesvirus 5
guucuccaaggga

SEQ ID NO: 313298 - RNA, 15 nt, Human herpesvirus 5
guucugaaucugcuc

SEQ ID NO: 313299 - RNA, 15 nt, Human herpesvirus 5
guucugcacggcguc

SEQ ID NO: 313300 - RNA, 20 nt, Human herpesvirus 5
guucugcguaagcaccguga

SEQ ID NO: 313301 - RNA, 14 nt, Human herpesvirus 5
guucuuacaguuuu

SEQ ID NO: 313302 - RNA, 18 nt, Human herpesvirus 5
guugagcgccuucugcua

SEQ ID NO: 313303 - RNA, 14 nt, Human herpesvirus 5
guugcacacggccg

SEQ ID NO: 313304 - RNA, 20 nt, Human herpesvirus 5
guugccgcuggacugacaca

SEQ ID NO: 313305 - RNA, 15 nt, Human herpesvirus 5
guugcuauaccucag

SEQ ID NO: 313306 - RNA, 19 nt, Human herpesvirus 5
guuggcuuacugccugccg

SEQ ID NO: 313307 - RNA, 18 nt, Human herpesvirus 5
guugggaccgcagcgugg

SEQ ID NO: 313308 - RNA, 22 nt, Human herpesvirus 5
guuggguauuacggacaccucu

SEQ ID NO: 313309 - RNA, 21 nt, Human herpesvirus 5
guuuccagagaacgcagcgca

SEQ ID NO: 313310 - RNA, 18 nt, Human herpesvirus 5
guuuccucuucuaguacu

SEQ ID NO: 313311 - RNA, 18 nt, Human herpesvirus 5
guuucuggggugggcgcg

SEQ ID NO: 313312 - RNA, 20 nt, Human herpesvirus 5
guuugagcaugacuguuucc

SEQ ID NO: 313313 - RNA, 11 nt, Human herpesvirus 5
guuugcgucuc

SEQ ID NO: 313314 - RNA, 14 nt, Human herpesvirus 5
guuuuacaauguua

SEQ ID NO: 313315 - RNA, 23 nt, Human herpesvirus 5
guuuuauugacgaagaugccgau

SEQ ID NO: 313316 - RNA, 19 nt, Human herpesvirus 5
guuuugauaaccuaccugg

SEQ ID NO: 313317 - RNA, 13 nt, Human herpesvirus 5
guuuuguuuucca

SEQ ID NO: 313318 - RNA, 16 nt, Human herpesvirus 5
uaaaaaccauugagaa

SEQ ID NO: 313319 - RNA, 19 nt, Human herpesvirus 5
uaaaauggucguugcccac

SEQ ID NO: 313320 - RNA, 23 nt, Human herpesvirus 5
uaaaccuguuucggauguuuacc

SEQ ID NO: 313321 - RNA, 12 nt, Human herpesvirus 5
uaaacuggauau

SEQ ID NO: 313322 - RNA, 18 nt, Human herpesvirus 5
uaaacuggauaucuaggu

SEQ ID NO: 313323 - RNA, 11 nt, Human herpesvirus 5
uaaacuuaucc

SEQ ID NO: 313324 - RNA, 16 nt, Human herpesvirus 5
uaaagaaucuaggaac

SEQ ID NO: 313325 - RNA, 20 nt, Human herpesvirus 5
uaaagaaugcaacgcuuuca

SEQ ID NO: 313326 - RNA, 14 nt, Human herpesvirus 5
uaaagacaucguca

SEQ ID NO: 313327 - RNA, 15 nt, Human herpesvirus 5
uaaagacaucgucac

SEQ ID NO: 313328 - RNA, 20 nt, Human herpesvirus 5
uaaagacauucacacaaaau

SEQ ID NO: 313329 - RNA, 15 nt, Human herpesvirus 5
uaaagacgucaauga

SEQ ID NO: 313330 - RNA, 22 nt, Human herpesvirus 5
uaaagacgucaaugacaccuca

SEQ ID NO: 313331 - RNA, 15 nt, Human herpesvirus 5
uaaagacuauacuuu

SEQ ID NO: 313332 - RNA, 16 nt, Human herpesvirus 5
uaaagaugauacauag

SEQ ID NO: 313333 - RNA, 15 nt, Human herpesvirus 5
uaaagauucacuuaa

SEQ ID NO: 313334 - RNA, 16 nt, Human herpesvirus 5
uaaagcgguggguggu

SEQ ID NO: 313335 - RNA, 22 nt, Human herpesvirus 5
uaaaggcgcacuugucauuaaa

SEQ ID NO: 313336 - RNA, 15 nt, Human herpesvirus 5
uaaaguacacgccac

SEQ ID NO: 313337 - RNA, 21 nt, Human herpesvirus 5
uaaaucaccgugaaagugaua

SEQ ID NO: 313338 - RNA, 16 nt, Human herpesvirus 5
uaaauuagugucgaua

SEQ ID NO: 313339 - RNA, 16 nt, Human herpesvirus 5
uaaauuguuauugcca

SEQ ID NO: 313340 - RNA, 14 nt, Human herpesvirus 5
uaacaaacaaugac

SEQ ID NO: 313341 - RNA, 13 nt, Human herpesvirus 5
uacuaguauccac

SEQ ID NO: 313342 - RNA, 16 nt, Human herpesvirus 5
uacuaguguguuccac

SEQ ID NO: 313343 - RNA, 15 nt, Human herpesvirus 5
uacuaucgacguguu

SEQ ID NO: 313344 - RNA, 16 nt, Human herpesvirus 5
uacuaucgacguguua

SEQ ID NO: 313345 - RNA, 15 nt, Human herpesvirus 5
uacuauguguaugau

SEQ ID NO: 313346 - RNA, 23 nt, Human herpesvirus 5
uacucaauaaacgugucacgccu

SEQ ID NO: 313347 - RNA, 24 nt, Human herpesvirus 5
uacucacguugguguuguagcaac

SEQ ID NO: 313348 - RNA, 22 nt, Human herpesvirus 5
uacuccaucaugaaggaucgca

SEQ ID NO: 313349 - RNA, 21 nt, Human herpesvirus 5
uacuccgucuccagacaaagc

SEQ ID NO: 313350 - RNA, 18 nt, Human herpesvirus 5
uacucuauguuauacucu

SEQ ID NO: 313351 - RNA, 15 nt, Human herpesvirus 5
uacucugacugugua

SEQ ID NO: 313352 - RNA, 16 nt, Human herpesvirus 5
uacugcauccaucaca

SEQ ID NO: 313353 - RNA, 19 nt, Human herpesvirus 5
uacugcauccaucacauca

SEQ ID NO: 313354 - RNA, 20 nt, Human herpesvirus 5
uacugcauccaucacaucac

SEQ ID NO: 313355 - RNA, 12 nt, Human herpesvirus 5
uacugcugcuuc

SEQ ID NO: 313356 - RNA, 19 nt, Human herpesvirus 5
uacuucgauucucuauaca

SEQ ID NO: 313357 - RNA, 11 nt, Human herpesvirus 5
uacuugcucag

SEQ ID NO: 313358 - RNA, 18 nt, Human herpesvirus 5
uacuuuauuaggucaggg

SEQ ID NO: 313359 - RNA, 16 nt, Human herpesvirus 5
uacuuuuacaugaaca

SEQ ID NO: 313360 - RNA, 14 nt, Human herpesvirus 5
uagaauacugcuau

SEQ ID NO: 313361 - RNA, 13 nt, Human herpesvirus 5
uagaauacuggaa

SEQ ID NO: 313362 - RNA, 14 nt, Human herpesvirus 5
uagaaugcugcuca

SEQ ID NO: 313363 - RNA, 19 nt, Human herpesvirus 5
uagacgaaagacaaugaaa

SEQ ID NO: 313364 - RNA, 13 nt, Human herpesvirus 5
uagacuagcacag

SEQ ID NO: 313365 - RNA, 15 nt, Human herpesvirus 5
uagacucacuuuauu

SEQ ID NO: 313366 - RNA, 22 nt, Human herpesvirus 5
uagaggcgacaucaagcuggca

SEQ ID NO: 313367 - RNA, 23 nt, Human herpesvirus 5
uagcacgucaguggugacgcuga

SEQ ID NO: 313368 - RNA, 14 nt, Human herpesvirus 5
uagcagaaggaaua

SEQ ID NO: 313369 - RNA, 21 nt, Human herpesvirus 5
uagcaugcauaagaagccaag

SEQ ID NO: 313370 - RNA, 14 nt, Human herpesvirus 5
uagccaccuguugg

SEQ ID NO: 313371 - RNA, 19 nt, Human herpesvirus 5
uagccccacaugcugcuua

SEQ ID NO: 313372 - RNA, 18 nt, Human herpesvirus 5
uagccgaggacuuuauga

SEQ ID NO: 313373 - RNA, 21 nt, Human herpesvirus 5
uagccgaggacuuuaugacgc

SEQ ID NO: 313374 - RNA, 22 nt, Human herpesvirus 5
uagccugucuaacuagccuucc

SEQ ID NO: 313375 - RNA, 18 nt, Human herpesvirus 5
uagcgaucgcaugcuucu

SEQ ID NO: 313376 - RNA, 12 nt, Human herpesvirus 5
uagcuacuuugg

SEQ ID NO: 313377 - RNA, 16 nt, Human herpesvirus 5
uagcuagugcagccuu

SEQ ID NO: 313378 - RNA, 21 nt, Human herpesvirus 5
uagcuuuuuuuauacaucucc

SEQ ID NO: 313379 - RNA, 21 nt, Human herpesvirus 5
uaggaaccgguccagucacau

SEQ ID NO: 313380 - RNA, 18 nt, Human herpesvirus 5
uaggcaccuggacuucaa

SEQ ID NO: 313381 - RNA, 20 nt, Human herpesvirus 5
uaggucagggaugacgggga

SEQ ID NO: 313382 - RNA, 14 nt, Human herpesvirus 5
uaggucuguugcgu

SEQ ID NO: 313383 - RNA, 19 nt, Human herpesvirus 5
uagguguggcgaaagccuc

SEQ ID NO: 313384 - RNA, 17 nt, Human herpesvirus 5
uaguaauaccaccguca

SEQ ID NO: 313385 - RNA, 17 nt, Human herpesvirus 5
uaguaaugcauuaucau

SEQ ID NO: 313386 - RNA, 22 nt, Human herpesvirus 5
uaguaauggaaaguaucgucac

SEQ ID NO: 313387 - RNA, 20 nt, Human herpesvirus 5
uaguacccacauuuugcucu

SEQ ID NO: 313388 - RNA, 16 nt, Human herpesvirus 5
uagucacgucgcuguu

SEQ ID NO: 313389 - RNA, 17 nt, Human herpesvirus 5
uagugacgugucgggaa

SEQ ID NO: 313390 - RNA, 14 nt, Human herpesvirus 5
uagugaugcgcgaa

SEQ ID NO: 313391 - RNA, 22 nt, Human herpesvirus 5
uagugcccauacuuuuacauga

SEQ ID NO: 313392 - RNA, 16 nt, Human herpesvirus 5
uaguuagacaggcuau

SEQ ID NO: 313393 - RNA, 12 nt, Human herpesvirus 5
uaguuguugcag

SEQ ID NO: 313394 - RNA, 13 nt, Human herpesvirus 5
uaguuguugcaga

SEQ ID NO: 313395 - RNA, 17 nt, Human herpesvirus 5
uauaaaccguaugcaca

SEQ ID NO: 313396 - RNA, 18 nt, Human herpesvirus 5
uauaaaccguaugcacaa

SEQ ID NO: 313397 - RNA, 17 nt, Human herpesvirus 5
uauaaagcgguauauuc

SEQ ID NO: 313398 - RNA, 20 nt, Human herpesvirus 5
uauaaauugcucuacugcaa

SEQ ID NO: 313399 - RNA, 15 nt, Human herpesvirus 5
uauaacgccgaucau

SEQ ID NO: 313400 - RNA, 23 nt, Human herpesvirus 5
uauaagcguggauggucauauau

SEQ ID NO: 313401 - RNA, 22 nt, Human herpesvirus 5
uauacagacuuuuauaugaucc

SEQ ID NO: 313402 - RNA, 11 nt, Human herpesvirus 5
uauacaucucc

SEQ ID NO: 313403 - RNA, 15 nt, Human herpesvirus 5
uauaccaucaccuau

SEQ ID NO: 313404 - RNA, 17 nt, Human herpesvirus 5
uauaccaucaccuauaa

SEQ ID NO: 313405 - RNA, 20 nt, Human herpesvirus 5
uauacucuauguuauacucu

SEQ ID NO: 313406 - RNA, 12 nt, Human herpesvirus 5
uauacucuguaa

SEQ ID NO: 313407 - RNA, 13 nt, Human herpesvirus 5
uauacugugaauu

SEQ ID NO: 313408 - RNA, 17 nt, Human herpesvirus 5
uauagaccccaagccaa

SEQ ID NO: 313409 - RNA, 18 nt, Human herpesvirus 5
uauagaccccaagccaaa

SEQ ID NO: 313410 - RNA, 22 nt, Human herpesvirus 5
uauagaccccaagccaaaaaca

SEQ ID NO: 313411 - RNA, 17 nt, Human herpesvirus 5
uauagcaugcauaagaa

SEQ ID NO: 313412 - RNA, 21 nt, Human herpesvirus 5
uauagcaugcauaagaagcca

SEQ ID NO: 313413 - RNA, 13 nt, Human herpesvirus 5
uauagccaauaaa

SEQ ID NO: 313414 - RNA, 17 nt, Human herpesvirus 5
uauaucaguuacuguua

SEQ ID NO: 313415 - RNA, 18 nt, Human herpesvirus 5
uauaucaguuacuguuau

SEQ ID NO: 313416 - RNA, 16 nt, Human herpesvirus 5
uaucaaugaagacuug

SEQ ID NO: 313417 - RNA, 21 nt, Human herpesvirus 5
uaucaccaaacaacaccacgg

SEQ ID NO: 313418 - RNA, 13 nt, Human herpesvirus 5
uaucagcaauaaa

SEQ ID NO: 313419 - RNA, 19 nt, Human herpesvirus 5
uaucagcaauaaaagcacu

SEQ ID NO: 313420 - RNA, 23 nt, Human herpesvirus 5
uaucagcuaccgccgcaacagcg

SEQ ID NO: 313421 - RNA, 16 nt, Human herpesvirus 5
uaucauaaagaaugca

SEQ ID NO: 313422 - RNA, 16 nt, Human herpesvirus 5
uaucauauuaugcgug

SEQ ID NO: 313423 - RNA, 23 nt, Human herpesvirus 5
uaucaucaaucacccacagaguc

SEQ ID NO: 313424 - RNA, 17 nt, Human herpesvirus 5
uaucaucuaaagacuau

SEQ ID NO: 313425 - RNA, 21 nt, Human herpesvirus 5
uaucaugaggcaacucaugau

SEQ ID NO: 313426 - RNA, 18 nt, Human herpesvirus 5
uauccaacuucacuucaa

SEQ ID NO: 313427 - RNA, 20 nt, Human herpesvirus 5
uauccaauacggcugccacu

SEQ ID NO: 313428 - RNA, 22 nt, Human herpesvirus 5
uauccacaacgacaaauacaaa

SEQ ID NO: 313429 - RNA, 15 nt, Human herpesvirus 5
uauccauacuuacca

SEQ ID NO: 313430 - RNA, 19 nt, Human herpesvirus 5
uauccauuggagaacagug

SEQ ID NO: 313431 - RNA, 13 nt, Human herpesvirus 5
uauccgcuuucac

SEQ ID NO: 313432 - RNA, 18 nt, Human herpesvirus 5
uaucgauauuacuggcga

SEQ ID NO: 313433 - RNA, 14 nt, Human herpesvirus 5
uaucggcauacaau

SEQ ID NO: 313434 - RNA, 13 nt, Human herpesvirus 5
uaucgucaccaau

SEQ ID NO: 313435 - RNA, 16 nt, Human herpesvirus 5
uaucuguacugcaaga

SEQ ID NO: 313436 - RNA, 20 nt, Human herpesvirus 5
uaucuguucuuccaccagcu

SEQ ID NO: 313437 - RNA, 17 nt, Human herpesvirus 5
uaucuuaugccaguugc

SEQ ID NO: 313438 - RNA, 15 nt, Human herpesvirus 5
uaucuucaaccucac

SEQ ID NO: 313439 - RNA, 17 nt, Human herpesvirus 5
uaucuuuguagccucaa

SEQ ID NO: 313440 - RNA, 19 nt, Human herpesvirus 5
uaugaagcugaacaauaaa

SEQ ID NO: 313441 - RNA, 13 nt, Human herpesvirus 5
uaugaggcuauau

SEQ ID NO: 313442 - RNA, 18 nt, Human herpesvirus 5
uaugaguuaaaagggcaa

SEQ ID NO: 313443 - RNA, 14 nt, Human herpesvirus 5
uaugauaucuacag

SEQ ID NO: 313444 - RNA, 18 nt, Human herpesvirus 5
uaugcacaaaagguaugu

SEQ ID NO: 313445 - RNA, 21 nt, Human herpesvirus 5
uaugcauaacgucaaccguau

SEQ ID NO: 313446 - RNA, 16 nt, Human herpesvirus 5
uaugcgugaggucugu

SEQ ID NO: 313447 - RNA, 18 nt, Human herpesvirus 5
uauggaaaauauguaguc

SEQ ID NO: 313448 - RNA, 15 nt, Human herpesvirus 5
uauggcgugaaccac

SEQ ID NO: 313449 - RNA, 20 nt, Human herpesvirus 5
uauggcuccgcggacuuuaa

SEQ ID NO: 313450 - RNA, 14 nt, Human herpesvirus 5
uaugggcggugguc

SEQ ID NO: 313451 - RNA, 23 nt, Human herpesvirus 5
uaugggucacggcggcguguguu

SEQ ID NO: 313452 - RNA, 17 nt, Human herpesvirus 5
uauguccaugucuccaa

SEQ ID NO: 313453 - RNA, 17 nt, Human herpesvirus 5
uauuaaugcccauugag

SEQ ID NO: 313454 - RNA, 14 nt, Human herpesvirus 5
uauuacuauaggga

SEQ ID NO: 313455 - RNA, 21 nt, Human herpesvirus 5
uauuagccccacaugcugcuu

SEQ ID NO: 313456 - RNA, 14 nt, Human herpesvirus 5
uauuaguauacuaa

SEQ ID NO: 313457 - RNA, 17 nt, Human herpesvirus 5
uauugaaaucuaccuga

SEQ ID NO: 313458 - RNA, 23 nt, Human herpesvirus 5
uauugagcaggguaaaaaccacg

SEQ ID NO: 313459 - RNA, 14 nt, Human herpesvirus 5
uauugcaauggacu

SEQ ID NO: 313460 - RNA, 13 nt, Human herpesvirus 5
uauuguauacucu

SEQ ID NO: 313461 - RNA, 18 nt, Human herpesvirus 5
uauuguugagaacauaua

SEQ ID NO: 313462 - RNA, 23 nt, Human herpesvirus 5
uauuuucuacuccgaauaacaac

SEQ ID NO: 313463 - RNA, 14 nt, Human herpesvirus 5
ucaaaaugugcaau

SEQ ID NO: 313464 - RNA, 19 nt, Human herpesvirus 5
ucaaagccgacaaccugcu

SEQ ID NO: 313465 - RNA, 22 nt, Human herpesvirus 5
ucaaagccgacaaccugcugca

SEQ ID NO: 313466 - RNA, 21 nt, Human herpesvirus 5
ucaaagcggucucacugugac

SEQ ID NO: 313467 - RNA, 21 nt, Human herpesvirus 5
ucaacacggucauguuucuca

SEQ ID NO: 313468 - RNA, 12 nt, Human herpesvirus 5
ucaacacuacca

SEQ ID NO: 313469 - RNA, 21 nt, Human herpesvirus 5
ucaacaguuuacgaguacaaa

SEQ ID NO: 313470 - RNA, 19 nt, Human herpesvirus 5
ucaaccauuggcaacauca

SEQ ID NO: 313471 - RNA, 16 nt, Human herpesvirus 5
ucaaccugcugacuau

SEQ ID NO: 313472 - RNA, 16 nt, Human herpesvirus 5
ucaacgccugcaccaa

SEQ ID NO: 313473 - RNA, 16 nt, Human herpesvirus 5
ucaacuacagcaauga

SEQ ID NO: 313474 - RNA, 17 nt, Human herpesvirus 5
ucaacuacagcaaugac

SEQ ID NO: 313475 - RNA, 18 nt, Human herpesvirus 5
ucaacuacagcaaugaca

SEQ ID NO: 313476 - RNA, 21 nt, Human herpesvirus 5
ucaaggagaacaccacgguua

SEQ ID NO: 313477 - RNA, 22 nt, Human herpesvirus 5
ucaaggccgccucuucuggccc

SEQ ID NO: 313478 - RNA, 23 nt, Human herpesvirus 5
ucaagggacaaagcagcauucac

SEQ ID NO: 313479 - RNA, 14 nt, Human herpesvirus 5
ucaaguucagugua

SEQ ID NO: 313480 - RNA, 16 nt, Human herpesvirus 5
ucaauaaaaaccaccg

SEQ ID NO: 313481 - RNA, 23 nt, Human herpesvirus 5
ucaauaaacuuuuuuuaaccaau

SEQ ID NO: 313482 - RNA, 21 nt, Human herpesvirus 5
ucaauaaagacgucaaugaca

SEQ ID NO: 313483 - RNA, 17 nt, Human herpesvirus 5
ucaauacaaugacacua

SEQ ID NO: 313484 - RNA, 22 nt, Human herpesvirus 5
ucaaucaugccgguaucgauuc

SEQ ID NO: 313485 - RNA, 14 nt, Human herpesvirus 5
ucaaugaagacuug

SEQ ID NO: 313486 - RNA, 16 nt, Human herpesvirus 5
ucaaugaagacuugga

SEQ ID NO: 313487 - RNA, 20 nt, Human herpesvirus 5
ucaaugucccuguaguacua

SEQ ID NO: 313488 - RNA, 20 nt, Human herpesvirus 5
ucaauugcgggcccugcuga

SEQ ID NO: 313489 - RNA, 18 nt, Human herpesvirus 5
ucacaauggaagccauac

SEQ ID NO: 313490 - RNA, 18 nt, Human herpesvirus 5
ucacacaggccagcugcc

SEQ ID NO: 313491 - RNA, 16 nt, Human herpesvirus 5
ucacacguuacaucau

SEQ ID NO: 313492 - RNA, 14 nt, Human herpesvirus 5
ucacacuuaagaaa

SEQ ID NO: 313493 - RNA, 18 nt, Human herpesvirus 5
ucacagucuccuucucau

SEQ ID NO: 313494 - RNA, 16 nt, Human herpesvirus 5
ucaccaaacaacacca

SEQ ID NO: 313495 - RNA, 18 nt, Human herpesvirus 5
ucaccaaacaacaccacg

SEQ ID NO: 313496 - RNA, 18 nt, Human herpesvirus 5
ucaccaaggcgagccacu

SEQ ID NO: 313497 - RNA, 16 nt, Human herpesvirus 5
ucaccagacuuuuugc

SEQ ID NO: 313498 - RNA, 16 nt, Human herpesvirus 5
ucacccgaguccuggu

SEQ ID NO: 313499 - RNA, 19 nt, Human herpesvirus 5
ucaccguaaucaccaaaga

SEQ ID NO: 313500 - RNA, 22 nt, Human herpesvirus 5
ucaccugugguagaaugcugcu

SEQ ID NO: 313501 - RNA, 21 nt, Human herpesvirus 5
ucacgaggaccauuuccaugu

SEQ ID NO: 313502 - RNA, 23 nt, Human herpesvirus 5
ucacgagugcccuuaccuaucau

SEQ ID NO: 313503 - RNA, 21 nt, Human herpesvirus 5
ucacgaucgcuggugucucug

SEQ ID NO: 313504 - RNA, 20 nt, Human herpesvirus 5
ucacgcguagccuccuccac

SEQ ID NO: 313505 - RNA, 20 nt, Human herpesvirus 5
ucacgcugcacgaccugcac

SEQ ID NO: 313506 - RNA, 20 nt, Human herpesvirus 5
ucacgggaaggcuaguuaga

SEQ ID NO: 313507 - RNA, 14 nt, Human herpesvirus 5
ucacuacucuggga

SEQ ID NO: 313508 - RNA, 16 nt, Human herpesvirus 5
ucacuacucugggaua

SEQ ID NO: 313509 - RNA, 18 nt, Human herpesvirus 5
ucacuaucuucaaccuca

SEQ ID NO: 313510 - RNA, 16 nt, Human herpesvirus 5
ucacugccaccgacau

SEQ ID NO: 313511 - RNA, 20 nt, Human herpesvirus 5
ucacugccaccgacauggag

SEQ ID NO: 313512 - RNA, 15 nt, Human herpesvirus 5
ucacuucaaacauca

SEQ ID NO: 313513 - RNA, 19 nt, Human herpesvirus 5
ucacuucugcugucaccac

SEQ ID NO: 313514 - RNA, 21 nt, Human herpesvirus 5
ucacuugcgcgguuauggcuc

SEQ ID NO: 313515 - RNA, 21 nt, Human herpesvirus 5
ucacuuuuaacagcucaugcc

SEQ ID NO: 313516 - RNA, 21 nt, Human herpesvirus 5
ucagaaagcaccagaacccgu

SEQ ID NO: 313517 - RNA, 14 nt, Human herpesvirus 5
ucagaaccauguac

SEQ ID NO: 313518 - RNA, 22 nt, Human herpesvirus 5
ucagaagacgagcuagauguga

SEQ ID NO: 313519 - RNA, 15 nt, Human herpesvirus 5
ucagaaggcagugac

SEQ ID NO: 313520 - RNA, 13 nt, Human herpesvirus 5
ucagaaucuauaa

SEQ ID NO: 313521 - RNA, 12 nt, Human herpesvirus 5
ucagacacagcc

SEQ ID NO: 313522 - RNA, 17 nt, Human herpesvirus 5
ucagacccacuaccugg

SEQ ID NO: 313523 - RNA, 19 nt, Human herpesvirus 5
ucagaccgcaacaacagca

SEQ ID NO: 313524 - RNA, 21 nt, Human herpesvirus 5
ucagaguaggugauccaguua

SEQ ID NO: 313525 - RNA, 19 nt, Human herpesvirus 5
ucagcaccccgcgucacuu

SEQ ID NO: 313526 - RNA, 20 nt, Human herpesvirus 5
ucagcagcaccucuuuccau

SEQ ID NO: 313527 - RNA, 16 nt, Human herpesvirus 5
ucagcagugaguacac

SEQ ID NO: 313528 - RNA, 15 nt, Human herpesvirus 5
ucagccucuguguuc

SEQ ID NO: 313529 - RNA, 18 nt, Human herpesvirus 5
ucagcguucaaaggaaua

SEQ ID NO: 313530 - RNA, 13 nt, Human herpesvirus 5
ucagcucacuguu

SEQ ID NO: 313531 - RNA, 18 nt, Human herpesvirus 5
ucagcugguggcucaugc

SEQ ID NO: 313532 - RNA, 13 nt, Human herpesvirus 5
ucaggaaucuggg

SEQ ID NO: 313533 - RNA, 15 nt, Human herpesvirus 5
ucaggaaucugggag

SEQ ID NO: 313534 - RNA, 14 nt, Human herpesvirus 5
ucaggauaggugug

SEQ ID NO: 313535 - RNA, 20 nt, Human herpesvirus 5
ucaggcuugucauggucugu

SEQ ID NO: 313536 - RNA, 20 nt, Human herpesvirus 5
ucagguacauuaccuuucau

SEQ ID NO: 313537 - RNA, 14 nt, Human herpesvirus 5
ucaguuacuguuau

SEQ ID NO: 313538 - RNA, 19 nt, Human herpesvirus 5
ucauaaacuuucaggucuc

SEQ ID NO: 313539 - RNA, 19 nt, Human herpesvirus 5
ucauaauauucuauauucu

SEQ ID NO: 313540 - RNA, 13 nt, Human herpesvirus 5
ucauauagaccaa

SEQ ID NO: 313541 - RNA, 19 nt, Human herpesvirus 5
ucauauuaugcguguccug

SEQ ID NO: 313542 - RNA, 12 nt, Human herpesvirus 5
ucaucaacagca

SEQ ID NO: 313543 - RNA, 14 nt, Human herpesvirus 5
ucaucaacagcagc

SEQ ID NO: 313544 - RNA, 19 nt, Human herpesvirus 5
ucaucaagcacuaccagcu

SEQ ID NO: 313545 - RNA, 11 nt, Human herpesvirus 5
ucaucaucacc

SEQ ID NO: 313546 - RNA, 19 nt, Human herpesvirus 5
ucaucgucacgcucaagga

SEQ ID NO: 313547 - RNA, 21 nt, Human herpesvirus 5
ucaucgucacgcucaaggaca

SEQ ID NO: 313548 - RNA, 19 nt, Human herpesvirus 5
ucaucgugcaguaccucaa

SEQ ID NO: 313549 - RNA, 21 nt, Human herpesvirus 5
ucaucugcucccgcugcugcu

SEQ ID NO: 313550 - RNA, 19 nt, Human herpesvirus 5
ucaucuuuauuugcaucau

SEQ ID NO: 313551 - RNA, 21 nt, Human herpesvirus 5
ucaugaacaccuuuuugcugc

SEQ ID NO: 313552 - RNA, 15 nt, Human herpesvirus 5
ucaugaacuucauca

SEQ ID NO: 313553 - RNA, 16 nt, Human herpesvirus 5
ucauggagcuacucac

SEQ ID NO: 313554 - RNA, 19 nt, Human herpesvirus 5
ucauggcuuccgacgugag

SEQ ID NO: 313555 - RNA, 18 nt, Human herpesvirus 5
ucaugguauaaagauuca

SEQ ID NO: 313556 - RNA, 20 nt, Human herpesvirus 5
ucaugguauaaagauucacu

SEQ ID NO: 313557 - RNA, 21 nt, Human herpesvirus 5
ucaugguauaaagauucacuu

SEQ ID NO: 313558 - RNA, 19 nt, Human herpesvirus 5
ucaugugucgauguuccua

SEQ ID NO: 313559 - RNA, 18 nt, Human herpesvirus 5
ucauguucgacggucaga

SEQ ID NO: 313560 - RNA, 11 nt, Human herpesvirus 5
ucauguucucc

SEQ ID NO: 313561 - RNA, 15 nt, Human herpesvirus 5
ucauguuucucacgc

SEQ ID NO: 313562 - RNA, 18 nt, Human herpesvirus 5
ucauucguguugacaggg

SEQ ID NO: 313563 - RNA, 16 nt, Human herpesvirus 5
ucauuuuuauuaucau

SEQ ID NO: 313564 - RNA, 14 nt, Human herpesvirus 5
uccaagggagacau

SEQ ID NO: 313565 - RNA, 12 nt, Human herpesvirus 5
uccaagugcaag

SEQ ID NO: 313566 - RNA, 13 nt, Human herpesvirus 5
uccaauaaaccca

SEQ ID NO: 313567 - RNA, 12 nt, Human herpesvirus 5
uccacaacgaca

SEQ ID NO: 313568 - RNA, 23 nt, Human herpesvirus 5
uccacaacgacaaauacaaacgu

SEQ ID NO: 313569 - RNA, 19 nt, Human herpesvirus 5
uccacacgccgucucguca

SEQ ID NO: 313570 - RNA, 14 nt, Human herpesvirus 5
ugcgguuuccucuu

SEQ ID NO: 313571 - RNA, 21 nt, Human herpesvirus 5
ugcguggaaaauugcaacuua

SEQ ID NO: 313572 - RNA, 17 nt, Human herpesvirus 5
ugcguguuaaacacuac

SEQ ID NO: 313573 - RNA, 22 nt, Human herpesvirus 5
ugcguuacggguacacggggau

SEQ ID NO: 313574 - RNA, 13 nt, Human herpesvirus 5
ugcuaauauaucc

SEQ ID NO: 313575 - RNA, 16 nt, Human herpesvirus 5
ugcuaauuauugccau

SEQ ID NO: 313576 - RNA, 12 nt, Human herpesvirus 5
ugcuacagggag

SEQ ID NO: 313577 - RNA, 14 nt, Human herpesvirus 5
ugcuauaagacagc

SEQ ID NO: 313578 - RNA, 21 nt, Human herpesvirus 5
ugcucaaacccggucagucua

SEQ ID NO: 313579 - RNA, 18 nt, Human herpesvirus 5
ugcucaaaguacuugucg

SEQ ID NO: 313580 - RNA, 19 nt, Human herpesvirus 5
ugcucaaugccaccaugaa

SEQ ID NO: 313581 - RNA, 24 nt, Human herpesvirus 5
ugcucccgcugcugcuguguagac

SEQ ID NO: 313582 - RNA, 13 nt, Human herpesvirus 5
ugcucgagaccga

SEQ ID NO: 313583 - RNA, 22 nt, Human herpesvirus 5
ugcucgagcgagagcacugaca

SEQ ID NO: 313584 - RNA, 20 nt, Human herpesvirus 5
ugcucgauuaccuacgucaa

SEQ ID NO: 313585 - RNA, 20 nt, Human herpesvirus 5
ugcucugggucgccaggugu

SEQ ID NO: 313586 - RNA, 22 nt, Human herpesvirus 5
ugcugagacugagacugguggu

SEQ ID NO: 313587 - RNA, 21 nt, Human herpesvirus 5
ugcugaugccgaucaugugcu

SEQ ID NO: 313588 - RNA, 21 nt, Human herpesvirus 5
ugcugcccauuguuuccucag

SEQ ID NO: 313589 - RNA, 18 nt, Human herpesvirus 5
ugcuggauuacuacugga

SEQ ID NO: 313590 - RNA, 15 nt, Human herpesvirus 5
ugcuggcaugcagac

SEQ ID NO: 313591 - RNA, 22 nt, Human herpesvirus 5
ugcuguauuauauacaaaaaca

SEQ ID NO: 313592 - RNA, 13 nt, Human herpesvirus 5
ugcugugcaccuc

SEQ ID NO: 313593 - RNA, 21 nt, Human herpesvirus 5
ugcuguguaucguguaucuag

SEQ ID NO: 313594 - RNA, 17 nt, Human herpesvirus 5
ugcuguugcacgggcuc

SEQ ID NO: 313595 - RNA, 15 nt, Human herpesvirus 5
ugcuuagcugcacac

SEQ ID NO: 313596 - RNA, 22 nt, Human herpesvirus 5
ugcuuuaacccaaaaccaugcu

SEQ ID NO: 313597 - RNA, 24 nt, Human herpesvirus 5
ugcuuucgcacgcaccugugugau

SEQ ID NO: 313598 - RNA, 13 nt, Human herpesvirus 5
ugcuuugguggau

SEQ ID NO: 313599 - RNA, 21 nt, Human herpesvirus 5
uggaaaucaccugugguagaa

SEQ ID NO: 313600 - RNA, 23 nt, Human herpesvirus 5
uggaacagcucguggaccucacg

SEQ ID NO: 313601 - RNA, 16 nt, Human herpesvirus 5
uggaacgagcgccguc

SEQ ID NO: 313602 - RNA, 21 nt, Human herpesvirus 5
uggaacgagcgccguccugca

SEQ ID NO: 313603 - RNA, 22 nt, Human herpesvirus 5
uggaacggucuuuauauauaca

SEQ ID NO: 313604 - RNA, 15 nt, Human herpesvirus 5
uggaagcggugcuga

SEQ ID NO: 313605 - RNA, 14 nt, Human herpesvirus 5
uggaaguaacauca

SEQ ID NO: 313606 - RNA, 12 nt, Human herpesvirus 5
uggaaguggaag

SEQ ID NO: 313607 - RNA, 16 nt, Human herpesvirus 5
uggaauccaucaucua

SEQ ID NO: 313608 - RNA, 20 nt, Human herpesvirus 5
uggaaucugguacuuaguca

SEQ ID NO: 313609 - RNA, 16 nt, Human herpesvirus 5
uggacaaguacagcgg

SEQ ID NO: 313610 - RNA, 19 nt, Human herpesvirus 5
uggacaauacaucauaugu

SEQ ID NO: 313611 - RNA, 23 nt, Human herpesvirus 5
uggacgacgcgcuggacucuuua

SEQ ID NO: 313612 - RNA, 16 nt, Human herpesvirus 5
uggacgacuggcucaa

SEQ ID NO: 313613 - RNA, 11 nt, Human herpesvirus 5
uggacggggaa

SEQ ID NO: 313614 - RNA, 14 nt, Human herpesvirus 5
uggacgugguuacc

SEQ ID NO: 313615 - RNA, 21 nt, Human herpesvirus 5
uggacugacacagcuccugaa

SEQ ID NO: 313616 - RNA, 12 nt, Human herpesvirus 5
uggacugguaca

SEQ ID NO: 313617 - RNA, 15 nt, Human herpesvirus 5
uggacuucaaugucc

SEQ ID NO: 313618 - RNA, 19 nt, Human herpesvirus 5
uggagaaaacgccggcgga

SEQ ID NO: 313619 - RNA, 21 nt, Human herpesvirus 5
uggagacacaacguuauccac

SEQ ID NO: 313620 - RNA, 13 nt, Human herpesvirus 5
uggagacaguuuc

SEQ ID NO: 313621 - RNA, 22 nt, Human herpesvirus 5
uggagcacacugcuacccugcg

SEQ ID NO: 313622 - RNA, 22 nt, Human herpesvirus 5
uggaggacaguauuuacuucac

SEQ ID NO: 313623 - RNA, 22 nt, Human herpesvirus 5
uggagguggccugcaucuuccc

SEQ ID NO: 313624 - RNA, 18 nt, Human herpesvirus 5
uggauacaguugauaaca

SEQ ID NO: 313625 - RNA, 17 nt, Human herpesvirus 5
uggaugagggcucuuca

SEQ ID NO: 313626 - RNA, 14 nt, Human herpesvirus 5
uggauguauguauc

SEQ ID NO: 313627 - RNA, 15 nt, Human herpesvirus 5
uggauuaguaaugga

SEQ ID NO: 313628 - RNA, 21 nt, Human herpesvirus 5
uggcaaguuggccaccaagaa

SEQ ID NO: 313629 - RNA, 18 nt, Human herpesvirus 5
uggcaggaaagacaacca

SEQ ID NO: 313630 - RNA, 16 nt, Human herpesvirus 5
uggcauauagccaaua

SEQ ID NO: 313631 - RNA, 17 nt, Human herpesvirus 5
uggccagcgccugguac

SEQ ID NO: 313632 - RNA, 19 nt, Human herpesvirus 5
uggcccaaagaccgcugcc

SEQ ID NO: 313633 - RNA, 17 nt, Human herpesvirus 5
uggccgccacaccuguc

SEQ ID NO: 313634 - RNA, 23 nt, Human herpesvirus 5
uggccgugcugggcugggugcau

SEQ ID NO: 313635 - RNA, 16 nt, Human herpesvirus 5
uggccuacggcugcau

SEQ ID NO: 313636 - RNA, 13 nt, Human herpesvirus 5
uggccucagggau

SEQ ID NO: 313637 - RNA, 23 nt, Human herpesvirus 5
uggccuuacagguggagauucua

SEQ ID NO: 313638 - RNA, 17 nt, Human herpesvirus 5
uggcgauagcgcuuaua

SEQ ID NO: 313639 - RNA, 22 nt, Human herpesvirus 5
uggcgauauuggaaaaaucgau

SEQ ID NO: 313640 - RNA, 23 nt, Human herpesvirus 5
uggcgcaaaagcaccaugagccu

SEQ ID NO: 313641 - RNA, 24 nt, Human herpesvirus 5
uggcgcaaaagcaccaugagccuc

SEQ ID NO: 313642 - RNA, 18 nt, Human herpesvirus 5
uggcggccguggccugug

SEQ ID NO: 313643 - RNA, 14 nt, Human herpesvirus 5
uggcuauguacaca

SEQ ID NO: 313644 - RNA, 18 nt, Human herpesvirus 5
uggcuccgcggacuuuaa

SEQ ID NO: 313645 - RNA, 14 nt, Human herpesvirus 5
uggcucgccuuccc

SEQ ID NO: 313646 - RNA, 21 nt, Human herpesvirus 5
uggcugcgcgccuccguccuc

SEQ ID NO: 313647 - RNA, 14 nt, Human herpesvirus 5
uggcugcuguguug

SEQ ID NO: 313648 - RNA, 16 nt, Human herpesvirus 5
ugggaagggugugacu

SEQ ID NO: 313649 - RNA, 21 nt, Human herpesvirus 5
ugggaaugacggugauucuau

SEQ ID NO: 313650 - RNA, 22 nt, Human herpesvirus 5
ugggaaugguaaagacaucguc

SEQ ID NO: 313651 - RNA, 18 nt, Human herpesvirus 5
ugggagucaacacuacca

SEQ ID NO: 313652 - RNA, 22 nt, Human herpesvirus 5
ugggagucaacacuaccaagua

SEQ ID NO: 313653 - RNA, 22 nt, Human herpesvirus 5
ugggcauacgcgauaucuggcg

SEQ ID NO: 313654 - RNA, 12 nt, Human herpesvirus 5
ugggcaugcaau

SEQ ID NO: 313655 - RNA, 15 nt, Human herpesvirus 5
ugggcgaccgucucu

SEQ ID NO: 313656 - RNA, 13 nt, Human herpesvirus 5
ugggcuacuuuga

SEQ ID NO: 313657 - RNA, 16 nt, Human herpesvirus 5
ugggcuaggauaauca

SEQ ID NO: 313658 - RNA, 21 nt, Human herpesvirus 5
ugggcucacgucacuacucug

SEQ ID NO: 313659 - RNA, 21 nt, Human herpesvirus 5
uggggaaguacaauaucaaag

SEQ ID NO: 313660 - RNA, 18 nt, Human herpesvirus 5
uggggcucaaaguucaaa

SEQ ID NO: 313661 - RNA, 17 nt, Human herpesvirus 5
ugggucgggagcacaua

SEQ ID NO: 313662 - RNA, 17 nt, Human herpesvirus 5
uggguggcucaccguca

SEQ ID NO: 313663 - RNA, 20 nt, Human herpesvirus 5
ugguaccugaaaccuaccug

SEQ ID NO: 313664 - RNA, 18 nt, Human herpesvirus 5
ugguagacgaaagacaau

SEQ ID NO: 313665 - RNA, 14 nt, Human herpesvirus 5
uggucaacaccaug

SEQ ID NO: 313666 - RNA, 15 nt, Human herpesvirus 5
uggucgaugcugauc

SEQ ID NO: 313667 - RNA, 11 nt, Human herpesvirus 5
uggucuggccc

SEQ ID NO: 313668 - RNA, 13 nt, Human herpesvirus 5
uggugacugggga

SEQ ID NO: 313669 - RNA, 17 nt, Human herpesvirus 5
uggugacuuacaucuca

SEQ ID NO: 313670 - RNA, 21 nt, Human herpesvirus 5
uggugacuugggcgauucugu

SEQ ID NO: 313671 - RNA, 21 nt, Human herpesvirus 5
ugguggaaaccagauacaacg

SEQ ID NO: 313672 - RNA, 19 nt, Human herpesvirus 5
ugguggccgaacagcagcu

SEQ ID NO: 313673 - RNA, 14 nt, Human herpesvirus 5
uggugugugucuau

SEQ ID NO: 313674 - RNA, 11 nt, Human herpesvirus 5
ugguguuacac

SEQ ID NO: 313675 - RNA, 20 nt, Human herpesvirus 5
ugguuaucauccaggacaaa

SEQ ID NO: 313676 - RNA, 19 nt, Human herpesvirus 5
ugguuuauaagaagacucc

SEQ ID NO: 313677 - RNA, 15 nt, Human herpesvirus 5
ugguuuaugaugaaa

SEQ ID NO: 313678 - RNA, 16 nt, Human herpesvirus 5
ugguuuauuuuuauaa

SEQ ID NO: 313679 - RNA, 21 nt, Human herpesvirus 5
uguaacacuacagcuugcaau

SEQ ID NO: 313680 - RNA, 15 nt, Human herpesvirus 5
uguaaucauccuaau

SEQ ID NO: 313681 - RNA, 23 nt, Human herpesvirus 5
uguacguuuauuuuucagcucac

SEQ ID NO: 313682 - RNA, 12 nt, Human herpesvirus 5
uguacuugcuca

SEQ ID NO: 313683 - RNA, 22 nt, Human herpesvirus 5
uguagcgggcugucacaucaac

SEQ ID NO: 313684 - RNA, 20 nt, Human herpesvirus 5
uguaggagacgagcucuugc

SEQ ID NO: 313685 - RNA, 14 nt, Human herpesvirus 5
uguauaugugaauu

SEQ ID NO: 313686 - RNA, 20 nt, Human herpesvirus 5
uguaucggcauacaaugugc

SEQ ID NO: 313687 - RNA, 17 nt, Human herpesvirus 5
ugucacgcguguucuca

SEQ ID NO: 313688 - RNA, 16 nt, Human herpesvirus 5
ucggccggcugcugca

SEQ ID NO: 313689 - RNA, 23 nt, Human herpesvirus 5
ucggcgugaaugggcacgccgug

SEQ ID NO: 313690 - RNA, 13 nt, Human herpesvirus 5
ucggcguggucaa

SEQ ID NO: 313691 - RNA, 20 nt, Human herpesvirus 5
ucggcuguccuugauguauc

SEQ ID NO: 313692 - RNA, 17 nt, Human herpesvirus 5
ucgggcccuggauacaa

SEQ ID NO: 313693 - RNA, 20 nt, Human herpesvirus 5
ucgguacgaacgcuacuucc

SEQ ID NO: 313694 - RNA, 21 nt, Human herpesvirus 5
ucgguacgaacgcuacuuccc

SEQ ID NO: 313695 - RNA, 19 nt, Human herpesvirus 5
ucgguuugcgucuccauga

SEQ ID NO: 313696 - RNA, 15 nt, Human herpesvirus 5
ucguaagcggcagca

SEQ ID NO: 313697 - RNA, 15 nt, Human herpesvirus 5
ucguaagcugucagc

SEQ ID NO: 313698 - RNA, 23 nt, Human herpesvirus 5
ucgucaaagccgacaaccugcug

SEQ ID NO: 313699 - RNA, 20 nt, Human herpesvirus 5
ucgucaaggcucgcaaagac

SEQ ID NO: 313700 - RNA, 21 nt, Human herpesvirus 5
aaaucuguguguucugugaua

SEQ ID NO: 313701 - RNA, 19 nt, Human herpesvirus 5
aaaugaccguggcagcuuu

SEQ ID NO: 313702 - RNA, 19 nt, Human herpesvirus 5
aaaugcccgccaccaugca

SEQ ID NO: 313703 - RNA, 14 nt, Human herpesvirus 5
ggacgaggcagggu

SEQ ID NO: 313704 - RNA, 14 nt, Human herpesvirus 5
ggacgcgugcucuc

SEQ ID NO: 313705 - RNA, 18 nt, Human herpesvirus 5
ggacgucaaagcucacua

SEQ ID NO: 313706 - RNA, 12 nt, Human herpesvirus 5
ggacgugaugcg

SEQ ID NO: 313707 - RNA, 13 nt, Human herpesvirus 5
ggacuucaauguc

SEQ ID NO: 313708 - RNA, 15 nt, Human herpesvirus 5
ggagaagcgcagcgu

SEQ ID NO: 313709 - RNA, 21 nt, Human herpesvirus 5
ggagacacagucuaccuagau

SEQ ID NO: 313710 - RNA, 13 nt, Human herpesvirus 5
ggagacaguuucc

SEQ ID NO: 313711 - RNA, 18 nt, Human herpesvirus 5
ggagaugcagacgguggu

SEQ ID NO: 313712 - RNA, 17 nt, Human herpesvirus 5
ggagcagccgccagcga

SEQ ID NO: 313713 - RNA, 17 nt, Human herpesvirus 5
ggagcucugaaacacag

SEQ ID NO: 313714 - RNA, 23 nt, Human herpesvirus 5
ggaggaacuuucggccgaaacau

SEQ ID NO: 313715 - RNA, 14 nt, Human herpesvirus 5
ggaggagauggccu

SEQ ID NO: 313716 - RNA, 19 nt, Human herpesvirus 5
ggaggugaccuggcugcuu

SEQ ID NO: 313717 - RNA, 16 nt, Human herpesvirus 5
ggagucaacacuacca

SEQ ID NO: 313718 - RNA, 21 nt, Human herpesvirus 5
ggagucugucgaccgcagcgg

SEQ ID NO: 313719 - RNA, 13 nt, Human herpesvirus 5
ggauacaguugau

SEQ ID NO: 313720 - RNA, 17 nt, Human herpesvirus 5
ggaugauucgcagucac

SEQ ID NO: 313721 - RNA, 13 nt, Human herpesvirus 5
ggauguauaugau

SEQ ID NO: 313722 - RNA, 16 nt, Human herpesvirus 5
ggcaaaagacuuacca

SEQ ID NO: 313723 - RNA, 18 nt, Human herpesvirus 5
ggcaaacugaccaagcua

SEQ ID NO: 313724 - RNA, 23 nt, Human herpesvirus 5
ggcaaagaaaaaaaaaaggaaca

SEQ ID NO: 313725 - RNA, 16 nt, Human herpesvirus 5
ggcaacuaucaccaaa

SEQ ID NO: 313726 - RNA, 18 nt, Human herpesvirus 5
ggcaagccaaaccacaag

SEQ ID NO: 313727 - RNA, 20 nt, Human herpesvirus 5
ggcaaguuggccaccaagaa

SEQ ID NO: 313728 - RNA, 13 nt, Human herpesvirus 5
ggcaccuaucucc

SEQ ID NO: 313729 - RNA, 13 nt, Human herpesvirus 5
ggcacgccgugcu

SEQ ID NO: 313730 - RNA, 20 nt, Human herpesvirus 5
ggcacgucggggcugugucg

SEQ ID NO: 313731 - RNA, 18 nt, Human herpesvirus 5
ggcagagccacguugaga

SEQ ID NO: 313732 - RNA, 21 nt, Human herpesvirus 5
ggcagauaaaucacgucaggu

SEQ ID NO: 313733 - RNA, 15 nt, Human herpesvirus 5
ggcagcaccaugugc

SEQ ID NO: 313734 - RNA, 14 nt, Human herpesvirus 5
ggcauauagccaau

SEQ ID NO: 313735 - RNA, 15 nt, Human herpesvirus 5
guacaugugcaugac

SEQ ID NO: 313736 - RNA, 14 nt, Human herpesvirus 5
guaccgacuggggu

SEQ ID NO: 313737 - RNA, 13 nt, Human herpesvirus 5
guaccgcucuucu

SEQ ID NO: 313738 - RNA, 17 nt, Human herpesvirus 5
guaccuagcuacuuugg

SEQ ID NO: 313739 - RNA, 19 nt, Human herpesvirus 5
guaccuagcuacuuuggaa

SEQ ID NO: 313740 - RNA, 18 nt, Human herpesvirus 5
guaccucaacacauugcu

SEQ ID NO: 313741 - RNA, 21 nt, Human herpesvirus 5
guaccucuaacaacgucacuu

SEQ ID NO: 313742 - RNA, 19 nt, Human herpesvirus 5
guaccugaaaccuaccugg

SEQ ID NO: 313743 - RNA, 23 nt, Human herpesvirus 5
guaccuggacgcggugaacgugc

SEQ ID NO: 313744 - RNA, 23 nt, Human herpesvirus 5
guacgaaaugaccguggcagcuu

SEQ ID NO: 313745 - RNA, 23 nt, Human herpesvirus 5
guacgaaccagcugguaccugaa

SEQ ID NO: 313746 - RNA, 13 nt, Human herpesvirus 5
guacgcgcacgcc

SEQ ID NO: 313747 - RNA, 15 nt, Human herpesvirus 5
guacgcgcacgccaa

SEQ ID NO: 313748 - RNA, 15 nt, Human herpesvirus 5
guacgucuaugagaa

SEQ ID NO: 313749 - RNA, 18 nt, Human herpesvirus 5
guacuaaaaaaguguuua

SEQ ID NO: 313750 - RNA, 14 nt, Human herpesvirus 5
guacuacuaccaau

SEQ ID NO: 313751 - RNA, 18 nt, Human herpesvirus 5
guacugcaagacgcauga

SEQ ID NO: 313752 - RNA, 15 nt, Human herpesvirus 5
guagaacugaguuua

SEQ ID NO: 313753 - RNA, 18 nt, Human herpesvirus 5
guagcacucaacauguua

SEQ ID NO: 313754 - RNA, 19 nt, Human herpesvirus 5
guagcacucaacauguuag

SEQ ID NO: 313755 - RNA, 12 nt, Human herpesvirus 5
guagcacugcgc

SEQ ID NO: 313756 - RNA, 14 nt, Human herpesvirus 5
guagccgaugcuga

SEQ ID NO: 313757 - RNA, 16 nt, Human herpesvirus 5
guagccgaugcugaug

SEQ ID NO: 313758 - RNA, 23 nt, Human herpesvirus 5
guagcuuuuuuuauacaucuccg

SEQ ID NO: 313759 - RNA, 14 nt, Human herpesvirus 5
guaggaguggcgcc

SEQ ID NO: 313760 - RNA, 22 nt, Human herpesvirus 5
guaggucagcgugucugauacc

SEQ ID NO: 313761 - RNA, 14 nt, Human herpesvirus 5
guaguuguugcaga

SEQ ID NO: 313762 - RNA, 17 nt, Human herpesvirus 5
guauacaacaguucuau

SEQ ID NO: 313763 - RNA, 20 nt, Human herpesvirus 5
guauacuaaacucugugaug

SEQ ID NO: 313764 - RNA, 19 nt, Human herpesvirus 5
guauagaccccaagccaaa

SEQ ID NO: 313765 - RNA, 22 nt, Human herpesvirus 5
guauagaccccaagccaaaaac

SEQ ID NO: 313766 - RNA, 20 nt, Human herpesvirus 5
guauauucaguccauuguca

SEQ ID NO: 313767 - RNA, 13 nt, Human herpesvirus 5
guaucgagcggug

SEQ ID NO: 313768 - RNA, 18 nt, Human herpesvirus 5
guaucggcauacaaugug

SEQ ID NO: 313769 - RNA, 14 nt, Human herpesvirus 5
guaucuacucagcu

SEQ ID NO: 313770 - RNA, 19 nt, Human herpesvirus 5
guauucaucgggucgucuc

SEQ ID NO: 313771 - RNA, 22 nt, Human herpesvirus 5
guauucugcguaacgguggaau

SEQ ID NO: 313772 - RNA, 19 nt, Human herpesvirus 5
guauuguugagaacauaua

SEQ ID NO: 313773 - RNA, 11 nt, Human herpesvirus 5
gucaaaacaca

SEQ ID NO: 313774 - RNA, 14 nt, Human herpesvirus 5
gucaacacuaccaa

SEQ ID NO: 313775 - RNA, 17 nt, Human herpesvirus 5
gucaacgcuuuggaaaa

SEQ ID NO: 313776 - RNA, 12 nt, Human herpesvirus 5
gucaacuacagc

SEQ ID NO: 313777 - RNA, 19 nt, Human herpesvirus 5
gucaacuacagcaaugaca

SEQ ID NO: 313778 - RNA, 20 nt, Human herpesvirus 5
gucaaggcucgcaaagacgu

SEQ ID NO: 313779 - RNA, 20 nt, Human herpesvirus 5
gucaauaaagaaaaccacac

SEQ ID NO: 313780 - RNA, 21 nt, Human herpesvirus 5
gucaauaaagacgucaaugac

SEQ ID NO: 313781 - RNA, 21 nt, Human herpesvirus 5
gucaauaacccacaccuauag

SEQ ID NO: 313782 - RNA, 23 nt, Human herpesvirus 5
gucacacagguagguggccauga

SEQ ID NO: 313783 - RNA, 21 nt, Human herpesvirus 5
gucacacgcuaagagcuuuga

SEQ ID NO: 313784 - RNA, 23 nt, Human herpesvirus 5
gucacacgcuaagagcuuugacg

SEQ ID NO: 313785 - RNA, 18 nt, Human herpesvirus 5
gucacacguuacaucaua

SEQ ID NO: 313786 - RNA, 23 nt, Human herpesvirus 5
gucacagagggcguucggacgac

SEQ ID NO: 313787 - RNA, 19 nt, Human herpesvirus 5
gucaccacucccaccacgg

SEQ ID NO: 313788 - RNA, 23 nt, Human herpesvirus 5
gucaccucacaagcgucaaccau

SEQ ID NO: 313789 - RNA, 15 nt, Human herpesvirus 5
gucacggugccaugg

SEQ ID NO: 313790 - RNA, 16 nt, Human herpesvirus 5
gucacgucuacuacgu

SEQ ID NO: 313791 - RNA, 16 nt, Human herpesvirus 5
gucacuacucugggau

SEQ ID NO: 313792 - RNA, 23 nt, Human herpesvirus 5
gucacuauagcgggauuuacuac

SEQ ID NO: 313793 - RNA, 20 nt, Human herpesvirus 5
gucacuauuguauacucuau

SEQ ID NO: 313794 - RNA, 17 nt, Human herpesvirus 5
gucacugccaccgacau

SEQ ID NO: 313795 - RNA, 13 nt, Human herpesvirus 5
gucagacacagcc

SEQ ID NO: 313796 - RNA, 17 nt, Human herpesvirus 5
gucagacccacuaccug

SEQ ID NO: 313797 - RNA, 21 nt, Human herpesvirus 5
gucagcgucgcuccuaccgcc

SEQ ID NO: 313798 - RNA, 14 nt, Human herpesvirus 5
gucagggaacacau

SEQ ID NO: 313799 - RNA, 17 nt, Human herpesvirus 5
gucaugcuggcaugcag

SEQ ID NO: 313800 - RNA, 15 nt, Human herpesvirus 5
guccacaguuuccga

SEQ ID NO: 313801 - RNA, 18 nt, Human herpesvirus 5
guccaccucugcuacugg

SEQ ID NO: 313802 - RNA, 22 nt, Human herpesvirus 5
guccagaucgucuacggcucca

SEQ ID NO: 313803 - RNA, 21 nt, Human herpesvirus 5
guccaucauguucgcuauugu

SEQ ID NO: 313804 - RNA, 19 nt, Human herpesvirus 5
gucccccccguccaggugg

SEQ ID NO: 313805 - RNA, 12 nt, Human herpesvirus 5
guccccuucugu

SEQ ID NO: 313806 - RNA, 16 nt, Human herpesvirus 5
gucccgacauggagac

SEQ ID NO: 313807 - RNA, 20 nt, Human herpesvirus 5
gucccgcgcggaucggacac

SEQ ID NO: 313808 - RNA, 18 nt, Human herpesvirus 5
gucccuacucaccaaagc

SEQ ID NO: 313809 - RNA, 17 nt, Human herpesvirus 5
guccgccuccacuuccg

SEQ ID NO: 313810 - RNA, 18 nt, Human herpesvirus 5
guccgugucagucucuga

SEQ ID NO: 313811 - RNA, 15 nt, Human herpesvirus 5
guccucgcccgguga

SEQ ID NO: 313812 - RNA, 14 nt, Human herpesvirus 5
guccuucaucucuu

SEQ ID NO: 313813 - RNA, 13 nt, Human herpesvirus 5
guccuuguucucg

SEQ ID NO: 313814 - RNA, 17 nt, Human herpesvirus 5
gucgaaaacaaccacac

SEQ ID NO: 313815 - RNA, 22 nt, Human herpesvirus 5
gucgacaugucgcgacacccgg

SEQ ID NO: 313816 - RNA, 13 nt, Human herpesvirus 5
gucgaugcugauc

SEQ ID NO: 313817 - RNA, 19 nt, Human herpesvirus 5
gucgcaggacgggauaucc

SEQ ID NO: 313818 - RNA, 12 nt, Human herpesvirus 5
gucgcaugagau

SEQ ID NO: 313819 - RNA, 19 nt, Human herpesvirus 5
gucgcaugagauccaaaau

SEQ ID NO: 313820 - RNA, 14 nt, Human herpesvirus 5
gucgccaccaccgg

SEQ ID NO: 313821 - RNA, 19 nt, Human herpesvirus 5
gucgccauggcuauguaca

SEQ ID NO: 313822 - RNA, 19 nt, Human herpesvirus 5
gaacggauaucuacgcaau

SEQ ID NO: 313823 - RNA, 17 nt, Human herpesvirus 5
gaacgugacgguugcug

SEQ ID NO: 313824 - RNA, 17 nt, Human herpesvirus 5
gaacgugcgcgaaagcu

SEQ ID NO: 313825 - RNA, 15 nt, Human herpesvirus 5
gaacguucuguaauc

SEQ ID NO: 313826 - RNA, 22 nt, Human herpesvirus 5
gaacuacagcuucuuucucacc

SEQ ID NO: 313827 - RNA, 21 nt, Human herpesvirus 5
gaacucgaccucuuugagcac

SEQ ID NO: 313828 - RNA, 19 nt, Human herpesvirus 5
gaacugaguuuagugcuag

SEQ ID NO: 313829 - RNA, 17 nt, Human herpesvirus 5
gaacuguugcgacaaua

SEQ ID NO: 313830 - RNA, 17 nt, Human herpesvirus 5
gaagaacaagcgguggu

SEQ ID NO: 313831 - RNA, 13 nt, Human herpesvirus 5
gaagaagaacaag

SEQ ID NO: 313832 - RNA, 16 nt, Human herpesvirus 5
gaagaagaagaacaag

SEQ ID NO: 313833 - RNA, 18 nt, Human herpesvirus 5
gaagaccucaccaucuca

SEQ ID NO: 313834 - RNA, 13 nt, Human herpesvirus 5
gaagacggagcuc

SEQ ID NO: 313835 - RNA, 16 nt, Human herpesvirus 5
gaagaggacaccucaa

SEQ ID NO: 313836 - RNA, 16 nt, Human herpesvirus 5
gaagagguugguguga

SEQ ID NO: 313837 - RNA, 20 nt, Human herpesvirus 5
gaagaugccgaugugugacu

SEQ ID NO: 313838 - RNA, 20 nt, Human herpesvirus 5
gaagaugcuauccgcugcga

SEQ ID NO: 313839 - RNA, 23 nt, Human herpesvirus 5
gaagcagcaaugucguaguacaa

SEQ ID NO: 313840 - RNA, 22 nt, Human herpesvirus 5
gaagccaagcguauccugguca

SEQ ID NO: 313841 - RNA, 13 nt, Human herpesvirus 5
gaagcggugcuga

SEQ ID NO: 313842 - RNA, 15 nt, Human herpesvirus 5
gaagcggugcugaug

SEQ ID NO: 313843 - RNA, 20 nt, Human herpesvirus 5
gaagcggugcugauggguga

SEQ ID NO: 313844 - RNA, 19 nt, Human herpesvirus 5
gaagcugaacaauaaacua

SEQ ID NO: 313845 - RNA, 19 nt, Human herpesvirus 5
gaagcuguuuuguuuucca

SEQ ID NO: 313846 - RNA, 14 nt, Human herpesvirus 5
gaaggaacgcacgc

SEQ ID NO: 313847 - RNA, 13 nt, Human herpesvirus 5
gaaggacagugua

SEQ ID NO: 313848 - RNA, 15 nt, Human herpesvirus 5
gaaggacaguguauu

SEQ ID NO: 313849 - RNA, 14 nt, Human herpesvirus 5
gaaggcuacucuau

SEQ ID NO: 313850 - RNA, 23 nt, Human herpesvirus 5
gaagggcuguucgaugugguucu

SEQ ID NO: 313851 - RNA, 13 nt, Human herpesvirus 5
gaagguaaagccc

SEQ ID NO: 313852 - RNA, 17 nt, Human herpesvirus 5
gaaggucaaaaccucag

SEQ ID NO: 313853 - RNA, 13 nt, Human herpesvirus 5
gaagucugcuaca

SEQ ID NO: 313854 - RNA, 21 nt, Human herpesvirus 5
gaaguggaagcggugcugaug

SEQ ID NO: 313855 - RNA, 13 nt, Human herpesvirus 5
gaaguuguugcaa

SEQ ID NO: 313856 - RNA, 17 nt, Human herpesvirus 5
gaaguuguugcaacugu

SEQ ID NO: 313857 - RNA, 16 nt, Human herpesvirus 5
gaauaaaucaccguga

SEQ ID NO: 313858 - RNA, 16 nt, Human herpesvirus 5
gaauaauaauaccaca

SEQ ID NO: 313859 - RNA, 14 nt, Human herpesvirus 5
gaauccaucaucua

SEQ ID NO: 313860 - RNA, 17 nt, Human herpesvirus 5
gaauccgacgacgaguc

SEQ ID NO: 313861 - RNA, 19 nt, Human herpesvirus 5
gaaugcaacgcuuucagga

SEQ ID NO: 313862 - RNA, 13 nt, Human herpesvirus 5
gaaugggacaccc

SEQ ID NO: 313863 - RNA, 16 nt, Human herpesvirus 5
gaaugguaaagacauc

SEQ ID NO: 313864 - RNA, 16 nt, Human herpesvirus 5
gaauucaugcuguaug

SEQ ID NO: 313865 - RNA, 19 nt, Human herpesvirus 5
gaauucuggcaagaguuca

SEQ ID NO: 313866 - RNA, 21 nt, Human herpesvirus 5
gaauucuggcaagaguucaaa

SEQ ID NO: 313867 - RNA, 19 nt, Human herpesvirus 5
gaauugcgaagccagcuac

SEQ ID NO: 313868 - RNA, 18 nt, Human herpesvirus 5
gaauugguguucuuacag

SEQ ID NO: 313869 - RNA, 20 nt, Human herpesvirus 5
gagcgaguggggcaacugcu

SEQ ID NO: 313870 - RNA, 20 nt, Human herpesvirus 5
gagcgccggggagacgacga

SEQ ID NO: 313871 - RNA, 18 nt, Human herpesvirus 5
gagcgggcggcgguggug

SEQ ID NO: 313872 - RNA, 16 nt, Human herpesvirus 5
gagcggguucccacag

SEQ ID NO: 313873 - RNA, 14 nt, Human herpesvirus 5
gagcuaucuguguc

SEQ ID NO: 313874 - RNA, 18 nt, Human herpesvirus 5
gagcucugaaacacagac

SEQ ID NO: 313875 - RNA, 18 nt, Human herpesvirus 5
gagcucuuuucaucuucu

SEQ ID NO: 313876 - RNA, 19 nt, Human herpesvirus 5
gagcugggcgaccgucucu

SEQ ID NO: 313877 - RNA, 14 nt, Human herpesvirus 5
gaggagacacagaa

SEQ ID NO: 313878 - RNA, 21 nt, Human herpesvirus 5
gaggagcucacccggcugcug

SEQ ID NO: 313879 - RNA, 14 nt, Human herpesvirus 5
gaggagggugguga

SEQ ID NO: 313880 - RNA, 20 nt, Human herpesvirus 5
gaggaguccgucauggacga

SEQ ID NO: 313881 - RNA, 13 nt, Human herpesvirus 5
gaggcggcgugga

SEQ ID NO: 313882 - RNA, 13 nt, Human herpesvirus 5
gaggcgguggcug

SEQ ID NO: 313883 - RNA, 22 nt, Human herpesvirus 5
gagggccgccaauuggcggcga

SEQ ID NO: 313884 - RNA, 19 nt, Human herpesvirus 5
gagggcgcgcggcaacucg

SEQ ID NO: 313885 - RNA, 22 nt, Human herpesvirus 5
gagguacgguaccgcugggaug

SEQ ID NO: 313886 - RNA, 17 nt, Human herpesvirus 5
gagguagaagggcuguu

SEQ ID NO: 313887 - RNA, 16 nt, Human herpesvirus 5
gagguauggugaccau

SEQ ID NO: 313888 - RNA, 17 nt, Human herpesvirus 5
gaggugaccuggcugcu

SEQ ID NO: 313889 - RNA, 14 nt, Human herpesvirus 5
gagguuugggagaa

SEQ ID NO: 313890 - RNA, 22 nt, Human herpesvirus 5
gaguacacgcaggcaagccaaa

SEQ ID NO: 313891 - RNA, 18 nt, Human herpesvirus 5
gaguccgucauggacgac

SEQ ID NO: 313892 - RNA, 17 nt, Human herpesvirus 5
gaguccuggucuuucau

SEQ ID NO: 313893 - RNA, 18 nt, Human herpesvirus 5
gagucgcggggacgcgug

SEQ ID NO: 313894 - RNA, 20 nt, Human herpesvirus 5
gagucucuggcgcaaaagca

SEQ ID NO: 313895 - RNA, 14 nt, Human herpesvirus 5
gaguuuucccucag

SEQ ID NO: 313896 - RNA, 14 nt, Human herpesvirus 5
gauaaccuaccugg

SEQ ID NO: 313897 - RNA, 17 nt, Human herpesvirus 5
gauaagacggacuguuu

SEQ ID NO: 313898 - RNA, 20 nt, Human herpesvirus 5
gauaagacggacuguuucau

SEQ ID NO: 313899 - RNA, 12 nt, Human herpesvirus 5
gauaaucugcca

SEQ ID NO: 313900 - RNA, 20 nt, Human herpesvirus 5
gauaauugcacauccucacg

SEQ ID NO: 313901 - RNA, 18 nt, Human herpesvirus 5
gauacaacgucaugcauu

SEQ ID NO: 313902 - RNA, 19 nt, Human herpesvirus 5
gauacaacgucaugcauuc

SEQ ID NO: 313903 - RNA, 19 nt, Human herpesvirus 5
gauacaagcuugguacaca

SEQ ID NO: 313904 - RNA, 23 nt, Human herpesvirus 5
gauaccgggcgccgggacucugg

SEQ ID NO: 313905 - RNA, 18 nt, Human herpesvirus 5
gauacgcugcuuuuggcc

SEQ ID NO: 313906 - RNA, 22 nt, Human herpesvirus 5
gauagacaacuccggucgcuaa

SEQ ID NO: 313907 - RNA, 13 nt, Human herpesvirus 5
gauagacaucaca

SEQ ID NO: 313908 - RNA, 22 nt, Human herpesvirus 5
gauagacgacuuuggugacuug

SEQ ID NO: 313909 - RNA, 14 nt, Human herpesvirus 5
gauagcaagccaga

SEQ ID NO: 313910 - RNA, 20 nt, Human herpesvirus 5
gauagcaagccagauacuau

SEQ ID NO: 313911 - RNA, 19 nt, Human herpesvirus 5
gauauaaagaaucuaggaa

SEQ ID NO: 313912 - RNA, 22 nt, Human herpesvirus 5
gauauaaagcgguauauucaau

SEQ ID NO: 313913 - RNA, 14 nt, Human herpesvirus 5
gauauaggugacag

SEQ ID NO: 313914 - RNA, 23 nt, Human herpesvirus 5
gauauaggugacagacgauauga

SEQ ID NO: 313915 - RNA, 22 nt, Human herpesvirus 5
gauauccacaacgacaaauaca

SEQ ID NO: 313916 - RNA, 14 nt, Human herpesvirus 5
gauaucgauauuac

SEQ ID NO: 313917 - RNA, 15 nt, Human herpesvirus 5
gauaugaggcuauau

SEQ ID NO: 313918 - RNA, 22 nt, Human herpesvirus 5
gaucacguacguuuuccaaaac

SEQ ID NO: 313919 - RNA, 14 nt, Human herpesvirus 5
gaucaguuguucau

SEQ ID NO: 313920 - RNA, 17 nt, Human herpesvirus 5
gauccacgggccgcgcu

SEQ ID NO: 313921 - RNA, 12 nt, Human herpesvirus 5
gauccaguauuc

SEQ ID NO: 313922 - RNA, 17 nt, Human herpesvirus 5
gauccaguuucaccaag

SEQ ID NO: 313923 - RNA, 17 nt, Human herpesvirus 5
gauccugggacaccacg

SEQ ID NO: 313924 - RNA, 12 nt, Human herpesvirus 5
gauccugugguc

SEQ ID NO: 313925 - RNA, 16 nt, Human herpesvirus 5
gaucgccuggagcgag

SEQ ID NO: 313926 - RNA, 16 nt, Human herpesvirus 5
gaucgcuggugucucu

SEQ ID NO: 313927 - RNA, 14 nt, Human herpesvirus 5
gaucgggcggucga

SEQ ID NO: 313928 - RNA, 18 nt, Human herpesvirus 5
gaucuccgagaggaggag

SEQ ID NO: 313929 - RNA, 16 nt, Human herpesvirus 5
gaucuucggcuaccuc

SEQ ID NO: 313930 - RNA, 17 nt, Human herpesvirus 5
gaucuucggcuaccucg

SEQ ID NO: 313931 - RNA, 17 nt, Human herpesvirus 5
gaucuugacgcugcugg

SEQ ID NO: 313932 - RNA, 17 nt, Human herpesvirus 5
gaugaacgacacaugca

SEQ ID NO: 313933 - RNA, 18 nt, Human herpesvirus 5
gaugaauuguuaccagaa

SEQ ID NO: 313934 - RNA, 22 nt, Human herpesvirus 5
gaugaauuguuaccagaacucu

SEQ ID NO: 313935 - RNA, 18 nt, Human herpesvirus 5
gaugagcaauugccucua

SEQ ID NO: 313936 - RNA, 13 nt, Human herpesvirus 5
gaugagcagcaaa

SEQ ID NO: 313937 - RNA, 15 nt, Human herpesvirus 5
gaugagcgugcugcu

SEQ ID NO: 313938 - RNA, 22 nt, Human herpesvirus 5
gaugaggcggcguggacuggga

SEQ ID NO: 313939 - RNA, 11 nt, Human herpesvirus 5
gaugaugcugc

SEQ ID NO: 313940 - RNA, 15 nt, Human herpesvirus 5
gaugaugcugcugag

SEQ ID NO: 313941 - RNA, 17 nt, Human herpesvirus 5
gaugcgcaccuucggcg

SEQ ID NO: 313942 - RNA, 22 nt, Human herpesvirus 5
gaugcucugggucgccaggugu

SEQ ID NO: 313943 - RNA, 14 nt, Human herpesvirus 5
gaugcugcugagac

SEQ ID NO: 313944 - RNA, 15 nt, Human herpesvirus 5
gaugcugcugagacu

SEQ ID NO: 313945 - RNA, 19 nt, Human herpesvirus 5
gauggccuacggcugcauc

SEQ ID NO: 313946 - RNA, 15 nt, Human herpesvirus 5
gaugguacgucucua

SEQ ID NO: 313947 - RNA, 18 nt, Human herpesvirus 5
gauguacccgcugguguu

SEQ ID NO: 313948 - RNA, 18 nt, Human herpesvirus 5
gauguacguaccacggua

SEQ ID NO: 313949 - RNA, 20 nt, Human herpesvirus 5
gaugucugccgcgguacgca

SEQ ID NO: 313950 - RNA, 12 nt, Human herpesvirus 5
gaugugcaaugc

SEQ ID NO: 313951 - RNA, 13 nt, Human herpesvirus 5
gaugugguucugg

SEQ ID NO: 313952 - RNA, 17 nt, Human herpesvirus 5
gauuagcagaaggaaua

SEQ ID NO: 313953 - RNA, 15 nt, Human herpesvirus 5
gauucaggacgagga

SEQ ID NO: 313954 - RNA, 20 nt, Human herpesvirus 5
gauuccccgugacaguauua

SEQ ID NO: 313955 - RNA, 16 nt, Human herpesvirus 5
gauucgccguguguua

SEQ ID NO: 313956 - RNA, 13 nt, Human herpesvirus 5
gauuggcccucca

SEQ ID NO: 313957 - RNA, 23 nt, Human herpesvirus 5
gcaaaaacuuguccuugcgcgcg

SEQ ID NO: 313958 - RNA, 16 nt, Human herpesvirus 5
gcaaacugaccaagcu

SEQ ID NO: 313959 - RNA, 16 nt, Human herpesvirus 5
gcaaagagccauguua

SEQ ID NO: 313960 - RNA, 16 nt, Human herpesvirus 5
gcaaagucaacaugua

SEQ ID NO: 313961 - RNA, 20 nt, Human herpesvirus 5
gcaaauaaagaugauacaua

SEQ ID NO: 313962 - RNA, 11 nt, Human herpesvirus 5
gcaacaacagc

SEQ ID NO: 313963 - RNA, 12 nt, Human herpesvirus 5
gcaacacuuuuu

SEQ ID NO: 313964 - RNA, 15 nt, Human herpesvirus 5
gcaacagcagccacc

SEQ ID NO: 313965 - RNA, 18 nt, Human herpesvirus 5
gcaacuggcguucaccac

SEQ ID NO: 313966 - RNA, 16 nt, Human herpesvirus 5
gcaacuucuaccaucu

SEQ ID NO: 313967 - RNA, 14 nt, Human herpesvirus 5
gcaacuucuucuac

SEQ ID NO: 313968 - RNA, 17 nt, Human herpesvirus 5
gcaacuucuucuacuca

SEQ ID NO: 313969 - RNA, 18 nt, Human herpesvirus 5
gcaacuucuucuacucac

SEQ ID NO: 313970 - RNA, 13 nt, Human herpesvirus 5
gcaagaguucaaa

SEQ ID NO: 313971 - RNA, 13 nt, Human herpesvirus 5
gcaagcagucaaa

SEQ ID NO: 313972 - RNA, 11 nt, Human herpesvirus 5
gcaagccaaac

SEQ ID NO: 313973 - RNA, 22 nt, Human herpesvirus 5
gcaagccaaaccacaaggcaga

SEQ ID NO: 313974 - RNA, 16 nt, Human herpesvirus 5
gcaaguccuccaacuc

SEQ ID NO: 313975 - RNA, 22 nt, Human herpesvirus 5
gcaaucaaaccuguuccuguca

SEQ ID NO: 313976 - RNA, 19 nt, Human herpesvirus 5
gcaaucgcuucaccgucgc

SEQ ID NO: 313977 - RNA, 19 nt, Human herpesvirus 5
gcaaugucguaguacaaua

SEQ ID NO: 313978 - RNA, 19 nt, Human herpesvirus 5
gcacaccuguuggagcaac

SEQ ID NO: 313979 - RNA, 20 nt, Human herpesvirus 5
gcacauaaacaaacgggacc

SEQ ID NO: 313980 - RNA, 19 nt, Human herpesvirus 5
gcacauacgggacuuacau

SEQ ID NO: 313981 - RNA, 15 nt, Human herpesvirus 5
gcacauauguagcac

SEQ ID NO: 313982 - RNA, 17 nt, Human herpesvirus 5
gccgcagaccauccuca

SEQ ID NO: 313983 - RNA, 18 nt, Human herpesvirus 5
gccgcagaccauccucac

SEQ ID NO: 313984 - RNA, 14 nt, Human herpesvirus 5
gccgccaacuccgu

SEQ ID NO: 313985 - RNA, 17 nt, Human herpesvirus 5
gccgccucgcaucauca

SEQ ID NO: 313986 - RNA, 20 nt, Human herpesvirus 5
gccgcgguggucgaugcuga

SEQ ID NO: 313987 - RNA, 20 nt, Human herpesvirus 5
gccgcgucgcaaacgcugcu

SEQ ID NO: 313988 - RNA, 21 nt, Human herpesvirus 5
gccgcucgggaacagacccga

SEQ ID NO: 313989 - RNA, 19 nt, Human herpesvirus 5
gccgcuggacugacacagc

SEQ ID NO: 313990 - RNA, 20 nt, Human herpesvirus 5
gccgcuggacugacacagcu

SEQ ID NO: 313991 - RNA, 15 nt, Human herpesvirus 5
gccggaccgugcacg

SEQ ID NO: 313992 - RNA, 21 nt, Human herpesvirus 5
gccggcccucggggugcgggu

SEQ ID NO: 313993 - RNA, 21 nt, Human herpesvirus 5
gccggcgaacguucuguaauc

SEQ ID NO: 313994 - RNA, 13 nt, Human herpesvirus 5
gccggcugcugca

SEQ ID NO: 313995 - RNA, 16 nt, Human herpesvirus 5
gccgggcgucuucgca

SEQ ID NO: 313996 - RNA, 15 nt, Human herpesvirus 5
gccggguuggcacga

SEQ ID NO: 313997 - RNA, 16 nt, Human herpesvirus 5
gccggugccgaugaga

SEQ ID NO: 313998 - RNA, 14 nt, Human herpesvirus 5
gccgucagucauag

SEQ ID NO: 313999 - RNA, 13 nt, Human herpesvirus 5
gccgucucccucu

SEQ ID NO: 314000 - RNA, 15 nt, Human herpesvirus 5
gccgugacacuuugg

SEQ ID NO: 314001 - RNA, 21 nt, Human herpesvirus 5
gccgugcugggcugggugcau

SEQ ID NO: 314002 - RNA, 22 nt, Human herpesvirus 5
gccguguguuggcuacggcgga

SEQ ID NO: 314003 - RNA, 17 nt, Human herpesvirus 5
gccguguuuuugcucga

SEQ ID NO: 314004 - RNA, 13 nt, Human herpesvirus 5
gccuaagacuuug

SEQ ID NO: 314005 - RNA, 18 nt, Human herpesvirus 5
gccuacgucuucaugacg

SEQ ID NO: 314006 - RNA, 19 nt, Human herpesvirus 5
gccuaggucuguugcguug

SEQ ID NO: 314007 - RNA, 13 nt, Human herpesvirus 5
gccuccacuuccg

SEQ ID NO: 314008 - RNA, 20 nt, Human herpesvirus 5
gccuccagcgccuccuggug

SEQ ID NO: 314009 - RNA, 19 nt, Human herpesvirus 5
gccuccuaguaaugcauua

SEQ ID NO: 314010 - RNA, 23 nt, Human herpesvirus 5
gccuccuccaccacggcugcuga

SEQ ID NO: 314011 - RNA, 13 nt, Human herpesvirus 5
gccuccucgcugg

SEQ ID NO: 314012 - RNA, 17 nt, Human herpesvirus 5
gccucggaucuacucau

SEQ ID NO: 314013 - RNA, 16 nt, Human herpesvirus 5
gccugagcuugguguu

SEQ ID NO: 314014 - RNA, 13 nt, Human herpesvirus 5
gccugcaccaacc

SEQ ID NO: 314015 - RNA, 24 nt, Human herpesvirus 5
gccugcacgccgccgugacugcga

SEQ ID NO: 314016 - RNA, 12 nt, Human herpesvirus 5
gccugcaucuuc

SEQ ID NO: 314017 - RNA, 19 nt, Human herpesvirus 5
gccuggagcgaguggggca

SEQ ID NO: 314018 - RNA, 21 nt, Human herpesvirus 5
gccugggaacgcgcgcacggc

SEQ ID NO: 314019 - RNA, 19 nt, Human herpesvirus 5
gccugucauccacuuggag

SEQ ID NO: 314020 - RNA, 18 nt, Human herpesvirus 5
gccuguggauagauuucu

SEQ ID NO: 314021 - RNA, 16 nt, Human herpesvirus 5
gccuuauguggcugcg

SEQ ID NO: 314022 - RNA, 20 nt, Human herpesvirus 5
gccuucagcgucucauuugu

SEQ ID NO: 314023 - RNA, 18 nt, Human herpesvirus 5
gccuuccccgaugugcag

SEQ ID NO: 314024 - RNA, 19 nt, Human herpesvirus 5
gccuugcgcucccugcucc

SEQ ID NO: 314025 - RNA, 21 nt, Human herpesvirus 5
gccuuucuaggcuacuccgcc

SEQ ID NO: 314026 - RNA, 20 nt, Human herpesvirus 5
gccuuuugaucgccaccgcc

SEQ ID NO: 314027 - RNA, 22 nt, Human herpesvirus 5
gcgaacguucuguaaucuucca

SEQ ID NO: 314028 - RNA, 13 nt, Human herpesvirus 5
gcgaccagcugcu

SEQ ID NO: 314029 - RNA, 17 nt, Human herpesvirus 5
gcgacgucaacggugga

SEQ ID NO: 314030 - RNA, 19 nt, Human herpesvirus 5
gcgacuccuuguguuuuca

SEQ ID NO: 314031 - RNA, 22 nt, Human herpesvirus 5
gcgagaacuaauauugcaaugg

SEQ ID NO: 314032 - RNA, 16 nt, Human herpesvirus 5
gcgagccccaucgggc

SEQ ID NO: 314033 - RNA, 15 nt, Human herpesvirus 5
gcgaggacaaccgca

SEQ ID NO: 314034 - RNA, 18 nt, Human herpesvirus 5
gcgaggcgaaacuggugc

SEQ ID NO: 314035 - RNA, 13 nt, Human herpesvirus 5
gcgaggugucaug

SEQ ID NO: 314036 - RNA, 19 nt, Human herpesvirus 5
gcgauggcccgcuaucgca

SEQ ID NO: 314037 - RNA, 12 nt, Human herpesvirus 5
gcgcacggcguc

SEQ ID NO: 314038 - RNA, 14 nt, Human herpesvirus 5
gcgcaucacccgcc

SEQ ID NO: 314039 - RNA, 15 nt, Human herpesvirus 5
gcgcaucuugccggu

SEQ ID NO: 314040 - RNA, 13 nt, Human herpesvirus 5
gcgcauguucuau

SEQ ID NO: 314041 - RNA, 18 nt, Human herpesvirus 5
gcgccaaguugguggugg

SEQ ID NO: 314042 - RNA, 19 nt, Human herpesvirus 5
gcgccaguacgauccuccg

SEQ ID NO: 314043 - RNA, 14 nt, Human herpesvirus 5
gcgccgccgcucac

SEQ ID NO: 314044 - RNA, 16 nt, Human herpesvirus 5
gcgccggugacccgcc

SEQ ID NO: 314045 - RNA, 16 nt, Human herpesvirus 5
gcgccguaguucuccg

SEQ ID NO: 314046 - RNA, 17 nt, Human herpesvirus 5
gcgccguccggacaccg

SEQ ID NO: 314047 - RNA, 13 nt, Human herpesvirus 5
gcgccgugcucag

SEQ ID NO: 314048 - RNA, 20 nt, Human herpesvirus 5
gcgccgugcucagcggcgug

SEQ ID NO: 314049 - RNA, 14 nt, Human herpesvirus 5
gcgccucucggagc

SEQ ID NO: 314050 - RNA, 13 nt, Human herpesvirus 5
gcgccuucugcua

SEQ ID NO: 314051 - RNA, 13 nt, Human herpesvirus 5
gcgcguacggugg

SEQ ID NO: 314052 - RNA, 14 nt, Human herpesvirus 5
gcgcguacggugga

SEQ ID NO: 314053 - RNA, 22 nt, Human herpesvirus 5
gcggaacgugacgguugcugag

SEQ ID NO: 314054 - RNA, 15 nt, Human herpesvirus 5
gcggacggugcgggu

SEQ ID NO: 314055 - RNA, 18 nt, Human herpesvirus 5
gcggcaccuaccaucuga

SEQ ID NO: 314056 - RNA, 22 nt, Human herpesvirus 5
gcggcacuuuacauaaaaccac

SEQ ID NO: 314057 - RNA, 19 nt, Human herpesvirus 5
gcggcagcggaacucgacc

SEQ ID NO: 314058 - RNA, 15 nt, Human herpesvirus 5
gcggcagcggcgcca

SEQ ID NO: 314059 - RNA, 15 nt, Human herpesvirus 5
gcggcggcgaucgca

SEQ ID NO: 314060 - RNA, 17 nt, Human herpesvirus 5
gcggcgguggugacugg

SEQ ID NO: 314061 - RNA, 22 nt, Human herpesvirus 5
gcggcuaacacgacacuagccg

SEQ ID NO: 314062 - RNA, 14 nt, Human herpesvirus 5
gcggcuaucuguac

SEQ ID NO: 314063 - RNA, 13 nt, Human herpesvirus 5
gcgggcacugggg

SEQ ID NO: 314064 - RNA, 19 nt, Human herpesvirus 5
gcgggcacuggggacggug

SEQ ID NO: 314065 - RNA, 21 nt, Human herpesvirus 5
gcgggggaaaaacaaagaagu

SEQ ID NO: 314066 - RNA, 18 nt, Human herpesvirus 5
gcggguaauaaaaacaau

SEQ ID NO: 314067 - RNA, 21 nt, Human herpesvirus 5
gcgguaaccgggugcugauaa

SEQ ID NO: 314068 - RNA, 14 nt, Human herpesvirus 5
gcgguaacuggcag

SEQ ID NO: 314069 - RNA, 17 nt, Human herpesvirus 5
gcggugaacgugcgcga

SEQ ID NO: 314070 - RNA, 16 nt, Human herpesvirus 5
gcggugcagguucuga

SEQ ID NO: 314071 - RNA, 20 nt, Human herpesvirus 5
gcgguggcgucggugcgaug

SEQ ID NO: 314072 - RNA, 16 nt, Human herpesvirus 5
gcggugggugguaaaa

SEQ ID NO: 314073 - RNA, 15 nt, Human herpesvirus 5
gcgguuuaucaugag

SEQ ID NO: 314074 - RNA, 13 nt, Human herpesvirus 5
gcguaagcaccgu

SEQ ID NO: 314075 - RNA, 13 nt, Human herpesvirus 5
gcguacgguggac

SEQ ID NO: 314076 - RNA, 11 nt, Human herpesvirus 5
gcguauucccc

SEQ ID NO: 314077 - RNA, 21 nt, Human herpesvirus 5
gcgucguguaauccacgacuc

SEQ ID NO: 314078 - RNA, 19 nt, Human herpesvirus 5
gcgucuggauuugucucuc

SEQ ID NO: 314079 - RNA, 22 nt, Human herpesvirus 5
gcgugcaccugcugccgccacu

SEQ ID NO: 314080 - RNA, 16 nt, Human herpesvirus 5
gcgugcucagcuggug

SEQ ID NO: 314081 - RNA, 16 nt, Human herpesvirus 5
gcgugcuccaccaacg

SEQ ID NO: 314082 - RNA, 19 nt, Human herpesvirus 5
gcguggaccagacggcguc

SEQ ID NO: 314083 - RNA, 14 nt, Human herpesvirus 5
gcguggccggcgug

SEQ ID NO: 314084 - RNA, 17 nt, Human herpesvirus 5
gcguggcggccgacggc

SEQ ID NO: 314085 - RNA, 19 nt, Human herpesvirus 5
gcguguacgccaucuucau

SEQ ID NO: 314086 - RNA, 15 nt, Human herpesvirus 5
gcguguuaaacacua

SEQ ID NO: 314087 - RNA, 22 nt, Human herpesvirus 5
gcguuuugauaaccuaccuggu

SEQ ID NO: 314088 - RNA, 14 nt, Human herpesvirus 5
gcuaagagcuuuga

SEQ ID NO: 314089 - RNA, 12 nt, Human herpesvirus 5
gcuaagcuauac

SEQ ID NO: 314090 - RNA, 18 nt, Human herpesvirus 5
gcuaagcuauaccaucac

SEQ ID NO: 314091 - RNA, 20 nt, Human herpesvirus 5
gcuaccucaugacgcacgcc

SEQ ID NO: 314092 - RNA, 17 nt, Human herpesvirus 5
gcuacgaaacuuuucug

SEQ ID NO: 314093 - RNA, 17 nt, Human herpesvirus 5
gcuauccgcugcgacua

SEQ ID NO: 314094 - RNA, 14 nt, Human herpesvirus 5
gcucaaaguucaaa

SEQ ID NO: 314095 - RNA, 17 nt, Human herpesvirus 5
gcucaaugccaccauga

SEQ ID NO: 314096 - RNA, 19 nt, Human herpesvirus 5
gcucaccgcaguugcugcc

SEQ ID NO: 314097 - RNA, 16 nt, Human herpesvirus 5
cgugcuccaccaacgu

SEQ ID NO: 314098 - RNA, 15 nt, Human herpesvirus 5
cgugcugugcuacga

SEQ ID NO: 314099 - RNA, 15 nt, Human herpesvirus 5
cguggacgggucucu

SEQ ID NO: 314100 - RNA, 13 nt, Human herpesvirus 5
cguggacugggac

SEQ ID NO: 314101 - RNA, 18 nt, Human herpesvirus 5
cguggacugggacgagga

SEQ ID NO: 314102 - RNA, 14 nt, Human herpesvirus 5
cguggauacuagua

SEQ ID NO: 314103 - RNA, 15 nt, Human herpesvirus 5
cguggauacuaguaa

SEQ ID NO: 314104 - RNA, 23 nt, Human herpesvirus 5
cguggcucagcuugaugguguag

SEQ ID NO: 314105 - RNA, 18 nt, Human herpesvirus 5
cgugggucgggagcacau

SEQ ID NO: 314106 - RNA, 20 nt, Human herpesvirus 5
cgugguaaauaaaucauggc

SEQ ID NO: 314107 - RNA, 15 nt, Human herpesvirus 5
cguguaauccacgac

SEQ ID NO: 314108 - RNA, 22 nt, Human herpesvirus 5
cguguacgccaucuucaucuuu

SEQ ID NO: 314109 - RNA, 15 nt, Human herpesvirus 5
cguguacuugcucag

SEQ ID NO: 314110 - RNA, 19 nt, Human herpesvirus 5
cgugucacgccugugaaac

SEQ ID NO: 314111 - RNA, 20 nt, Human herpesvirus 5
cguguccagccuucccaugc

SEQ ID NO: 314112 - RNA, 20 nt, Human herpesvirus 5
cguguccccugccaccucag

SEQ ID NO: 314113 - RNA, 19 nt, Human herpesvirus 5
cgugucccugccagucucc

SEQ ID NO: 314114 - RNA, 17 nt, Human herpesvirus 5
cgugucgucuccacgua

SEQ ID NO: 314115 - RNA, 18 nt, Human herpesvirus 5
cgugugcuguugaccugg

SEQ ID NO: 314116 - RNA, 15 nt, Human herpesvirus 5
cgugugugcucucua

SEQ ID NO: 314117 - RNA, 14 nt, Human herpesvirus 5
cguguuaaacacua

SEQ ID NO: 314118 - RNA, 17 nt, Human herpesvirus 5
cguguuucgcgaacugg

SEQ ID NO: 314119 - RNA, 23 nt, Human herpesvirus 5
cguuaacuauuccacuaguacug

SEQ ID NO: 314120 - RNA, 16 nt, Human herpesvirus 5
cguuaauuccagcgau

SEQ ID NO: 314121 - RNA, 21 nt, Human herpesvirus 5
cguuacgccgacgugauccag

SEQ ID NO: 314122 - RNA, 23 nt, Human herpesvirus 5
cguucacuuuuccguuuuacgug

SEQ ID NO: 314123 - RNA, 20 nt, Human herpesvirus 5
cguuguuucuguacggcguu

SEQ ID NO: 314124 - RNA, 12 nt, Human herpesvirus 5
cuaaaaacaccc

SEQ ID NO: 314125 - RNA, 16 nt, Human herpesvirus 5
cuaaauucaugucgcg

SEQ ID NO: 314126 - RNA, 17 nt, Human herpesvirus 5
cuaacaacgucacuucu

SEQ ID NO: 314127 - RNA, 12 nt, Human herpesvirus 5
cuaacacuccuc

SEQ ID NO: 314128 - RNA, 15 nt, Human herpesvirus 5
cuaacgguuacacaa

SEQ ID NO: 314129 - RNA, 22 nt, Human herpesvirus 5
cuaacgucucggcggccuaccc

SEQ ID NO: 314130 - RNA, 11 nt, Human herpesvirus 5
cuaacuaucua

SEQ ID NO: 314131 - RNA, 18 nt, Human herpesvirus 5
cuaagaggauacaucauc

SEQ ID NO: 314132 - RNA, 21 nt, Human herpesvirus 5
cuaauacagauacgcaaugca

SEQ ID NO: 314133 - RNA, 22 nt, Human herpesvirus 5
cuaauaccgguuguaaucaucc

SEQ ID NO: 314134 - RNA, 11 nt, Human herpesvirus 5
cuaaugugcug

SEQ ID NO: 314135 - RNA, 16 nt, Human herpesvirus 5
cuacaacacuacccuc

SEQ ID NO: 314136 - RNA, 22 nt, Human herpesvirus 5
cuacaccaguucguagaucaca

SEQ ID NO: 314137 - RNA, 13 nt, Human herpesvirus 5
cuacagcaaugac

SEQ ID NO: 314138 - RNA, 16 nt, Human herpesvirus 5
cuacagcagauacaug

SEQ ID NO: 314139 - RNA, 15 nt, Human herpesvirus 5
cuacagcgacucuca

SEQ ID NO: 314140 - RNA, 17 nt, Human herpesvirus 5
cuacaucacugacaagu

SEQ ID NO: 314141 - RNA, 19 nt, Human herpesvirus 5
cuacaucaguuuccacgac

SEQ ID NO: 314142 - RNA, 16 nt, Human herpesvirus 5
cuacauucaauacauc

SEQ ID NO: 314143 - RNA, 16 nt, Human herpesvirus 5
cuaccaauacugcauc

SEQ ID NO: 314144 - RNA, 17 nt, Human herpesvirus 5
cuaccgccgcaacagcg

SEQ ID NO: 314145 - RNA, 18 nt, Human herpesvirus 5
cuaccggcgagggugucc

SEQ ID NO: 314146 - RNA, 19 nt, Human herpesvirus 5
cuaccguuaacuauuccac

SEQ ID NO: 314147 - RNA, 21 nt, Human herpesvirus 5
cuaccuagaugcuagcaauaa

SEQ ID NO: 314148 - RNA, 18 nt, Human herpesvirus 5
cuaccuccccuaacguca

SEQ ID NO: 314149 - RNA, 20 nt, Human herpesvirus 5
cuacgcaauguuacacauua

SEQ ID NO: 314150 - RNA, 22 nt, Human herpesvirus 5
cuacgcccuaguggucuuucac

SEQ ID NO: 314151 - RNA, 23 nt, Human herpesvirus 5
cuacggaaccugagaacaugugg

SEQ ID NO: 314152 - RNA, 15 nt, Human herpesvirus 5
cuacgucgacaugaa

SEQ ID NO: 314153 - RNA, 15 nt, Human herpesvirus 5
cuacgucuucaugac

SEQ ID NO: 314154 - RNA, 18 nt, Human herpesvirus 5
cuacuaccaauacugcau

SEQ ID NO: 314155 - RNA, 14 nt, Human herpesvirus 5
cuacuacucugugu

SEQ ID NO: 314156 - RNA, 23 nt, Human herpesvirus 5
cuacuccgaauaacaacacauca

SEQ ID NO: 314157 - RNA, 12 nt, Human herpesvirus 5
cuacucugggau

SEQ ID NO: 314158 - RNA, 20 nt, Human herpesvirus 5
cuacuucgauucucuauaca

SEQ ID NO: 314159 - RNA, 20 nt, Human herpesvirus 5
cuacuuggacuuucuccuuu

SEQ ID NO: 314160 - RNA, 22 nt, Human herpesvirus 5
cuagaaacagcagcgagucuag

SEQ ID NO: 314161 - RNA, 13 nt, Human herpesvirus 5
cuagaaagaccaa

SEQ ID NO: 314162 - RNA, 21 nt, Human herpesvirus 5
cuagacaggguaacagccuuc

SEQ ID NO: 314163 - RNA, 19 nt, Human herpesvirus 5
cuagagacagacgaugaac

SEQ ID NO: 314164 - RNA, 18 nt, Human herpesvirus 5
cuagcgacggcggccaug

SEQ ID NO: 314165 - RNA, 13 nt, Human herpesvirus 5
cuagcuacuuugg

SEQ ID NO: 314166 - RNA, 18 nt, Human herpesvirus 5
cuaggaacacugaaaaca

SEQ ID NO: 314167 - RNA, 21 nt, Human herpesvirus 5
cuaggcuacucugacugugua

SEQ ID NO: 314168 - RNA, 21 nt, Human herpesvirus 5
cuaggucgucuuggaagccga

SEQ ID NO: 314169 - RNA, 12 nt, Human herpesvirus 5
cuaggugcugca

SEQ ID NO: 314170 - RNA, 18 nt, Human herpesvirus 5
cuaggugcugcaugugua

SEQ ID NO: 314171 - RNA, 14 nt, Human herpesvirus 5
cuaguaaugcauua

SEQ ID NO: 314172 - RNA, 20 nt, Human herpesvirus 5
cuaguacugagacagccaca

SEQ ID NO: 314173 - RNA, 11 nt, Human herpesvirus 5
cuaguauccac

SEQ ID NO: 314174 - RNA, 18 nt, Human herpesvirus 5
cuauaaauugcucuacug

SEQ ID NO: 314175 - RNA, 15 nt, Human herpesvirus 5
cuauaagaaggccau

SEQ ID NO: 314176 - RNA, 14 nt, Human herpesvirus 5
cuaucaaugaagac

SEQ ID NO: 314177 - RNA, 20 nt, Human herpesvirus 5
cuaucaccaaacaacaccac

SEQ ID NO: 314178 - RNA, 14 nt, Human herpesvirus 5
cuauccagcagcug

SEQ ID NO: 314179 - RNA, 18 nt, Human herpesvirus 5
cuauccccaaaaaaacac

SEQ ID NO: 314180 - RNA, 21 nt, Human herpesvirus 5
cuauccccaaaaaaacacaca

SEQ ID NO: 314181 - RNA, 15 nt, Human herpesvirus 5
cuaucuguacugcaa

SEQ ID NO: 314182 - RNA, 11 nt, Human herpesvirus 5
cuaugcuggug

SEQ ID NO: 314183 - RNA, 12 nt, Human herpesvirus 5
cuauguggcucc

SEQ ID NO: 314184 - RNA, 21 nt, Human herpesvirus 5
cuauuagccccacaugcugcu

SEQ ID NO: 314185 - RNA, 18 nt, Human herpesvirus 5
cuauuaucaucaaucacc

SEQ ID NO: 314186 - RNA, 17 nt, Human herpesvirus 5
cuauuccuccguguucu

SEQ ID NO: 314187 - RNA, 19 nt, Human herpesvirus 5
cuauugggaagggugugac

SEQ ID NO: 314188 - RNA, 14 nt, Human herpesvirus 5
cuauuguauacucu

SEQ ID NO: 314189 - RNA, 16 nt, Human herpesvirus 5
cuauuguauacucuau

SEQ ID NO: 314190 - RNA, 14 nt, Human herpesvirus 5
cucaaaacaucacc

SEQ ID NO: 314191 - RNA, 18 nt, Human herpesvirus 5
cucaaaggacucgcucac

SEQ ID NO: 314192 - RNA, 17 nt, Human herpesvirus 5
cucaacguccauauaaa

SEQ ID NO: 314193 - RNA, 13 nt, Human herpesvirus 5
cucaaguucagug

SEQ ID NO: 314194 - RNA, 18 nt, Human herpesvirus 5
cucacaauggaagccaua

SEQ ID NO: 314195 - RNA, 13 nt, Human herpesvirus 5
cucacccguucac

SEQ ID NO: 314196 - RNA, 19 nt, Human herpesvirus 5
cucaccuggaccgguggua

SEQ ID NO: 314197 - RNA, 20 nt, Human herpesvirus 5
cucacgcacauauguagcac

SEQ ID NO: 314198 - RNA, 21 nt, Human herpesvirus 5
cucacguugguguuguagcaa

SEQ ID NO: 314199 - RNA, 21 nt, Human herpesvirus 5
cucacuguuugaauaccguaa

SEQ ID NO: 314200 - RNA, 14 nt, Human herpesvirus 5
cucagcuacuggga

SEQ ID NO: 314201 - RNA, 22 nt, Human herpesvirus 5
cucaguacuuugggguggugcg

SEQ ID NO: 314202 - RNA, 19 nt, Human herpesvirus 5
cucagucugccuccuagua

SEQ ID NO: 314203 - RNA, 22 nt, Human herpesvirus 5
cucaucauccccuccuugauca

SEQ ID NO: 314204 - RNA, 16 nt, Human herpesvirus 5
cucaucuuuugcucca

SEQ ID NO: 314205 - RNA, 23 nt, Human herpesvirus 5
cucaugaacaccuuuuugcugca

SEQ ID NO: 314206 - RNA, 20 nt, Human herpesvirus 5
cucauuuauugugucuacua

SEQ ID NO: 314207 - RNA, 16 nt, Human herpesvirus 5
cucauuugcuuuuaca

SEQ ID NO: 314208 - RNA, 19 nt, Human herpesvirus 5
cuccacacgcaucugcaag

SEQ ID NO: 314209 - RNA, 18 nt, Human herpesvirus 5
cuccaucaggaucuggug

SEQ ID NO: 314210 - RNA, 22 nt, Human herpesvirus 5
cuccaucgugugccuaggucug

SEQ ID NO: 314211 - RNA, 18 nt, Human herpesvirus 5
cuccaucuauuggcagaa

SEQ ID NO: 314212 - RNA, 21 nt, Human herpesvirus 5
cuggauacaguugauaacaaa

SEQ ID NO: 314213 - RNA, 20 nt, Human herpesvirus 5
cuggauaucuaggugcugca

SEQ ID NO: 314214 - RNA, 15 nt, Human herpesvirus 5
cuggauguauaugau

SEQ ID NO: 314215 - RNA, 23 nt, Human herpesvirus 5
cuggauuacgaacccgugccacg

SEQ ID NO: 314216 - RNA, 19 nt, Human herpesvirus 5
cuggcaacgugccacguga

SEQ ID NO: 314217 - RNA, 16 nt, Human herpesvirus 5
cuggcaagaguucaaa

SEQ ID NO: 314218 - RNA, 22 nt, Human herpesvirus 5
cuggcacauggccaaugcauau

SEQ ID NO: 314219 - RNA, 22 nt, Human herpesvirus 5
cuggcacguuuuggaaaacgua

SEQ ID NO: 314220 - RNA, 24 nt, Human herpesvirus 5
cuggcaugcagaccaccaugugca

SEQ ID NO: 314221 - RNA, 21 nt, Human herpesvirus 5
cuggcccaaagaccgcugccu

SEQ ID NO: 314222 - RNA, 18 nt, Human herpesvirus 5
cuggcccgaacgcugcuu

SEQ ID NO: 314223 - RNA, 22 nt, Human herpesvirus 5
cuggccgagacggcgugacaca

SEQ ID NO: 314224 - RNA, 16 nt, Human herpesvirus 5
cugggcgaccgucucu

SEQ ID NO: 314225 - RNA, 15 nt, Human herpesvirus 5
cugggcuauaugcau

SEQ ID NO: 314226 - RNA, 10 nt, Human herpesvirus 5
cugggcucac

SEQ ID NO: 314227 - RNA, 14 nt, Human herpesvirus 5
cugggcugagacag

SEQ ID NO: 314228 - RNA, 14 nt, Human herpesvirus 5
cugggcugcaaggu

SEQ ID NO: 314229 - RNA, 23 nt, Human herpesvirus 5
cugggcuggcccucgcagugcau

SEQ ID NO: 314230 - RNA, 13 nt, Human herpesvirus 5
cugguaccugaaa

SEQ ID NO: 314231 - RNA, 14 nt, Human herpesvirus 5
cugguaccugcuaa

SEQ ID NO: 314232 - RNA, 14 nt, Human herpesvirus 5
cugguacuuaguca

SEQ ID NO: 314233 - RNA, 22 nt, Human herpesvirus 5
cuggucaaccugcugacuauca

SEQ ID NO: 314234 - RNA, 14 nt, Human herpesvirus 5
cuggucaacugcgu

SEQ ID NO: 314235 - RNA, 23 nt, Human herpesvirus 5
cuggucaagggucacggugccau

SEQ ID NO: 314236 - RNA, 18 nt, Human herpesvirus 5
cuggucucgugauguggg

SEQ ID NO: 314237 - RNA, 13 nt, Human herpesvirus 5
cuggugaugcugg

SEQ ID NO: 314238 - RNA, 15 nt, Human herpesvirus 5
cugguggcucaugcc

SEQ ID NO: 314239 - RNA, 18 nt, Human herpesvirus 5
cuggugucacuagacaga

SEQ ID NO: 314240 - RNA, 18 nt, Human herpesvirus 5
cuguaaaagcugcaugaa

SEQ ID NO: 314241 - RNA, 15 nt, Human herpesvirus 5
cuguaauuauuccag

SEQ ID NO: 314242 - RNA, 19 nt, Human herpesvirus 5
cuguaccaucauugcugcu

SEQ ID NO: 314243 - RNA, 21 nt, Human herpesvirus 5
cuguaccguuauuucgugcgu

SEQ ID NO: 314244 - RNA, 22 nt, Human herpesvirus 5
cuguagcugugguucaaccuga

SEQ ID NO: 314245 - RNA, 18 nt, Human herpesvirus 5
cuguauccauacuuacca

SEQ ID NO: 314246 - RNA, 19 nt, Human herpesvirus 5
cuguauggaggucacuguc

SEQ ID NO: 314247 - RNA, 16 nt, Human herpesvirus 5
cuguccuaggggguga

SEQ ID NO: 314248 - RNA, 16 nt, Human herpesvirus 5
cugucgucgacauguc

SEQ ID NO: 314249 - RNA, 21 nt, Human herpesvirus 5
cugucguguuccagaccagcg

SEQ ID NO: 314250 - RNA, 14 nt, Human herpesvirus 5
cugugaaacgccaa

SEQ ID NO: 314251 - RNA, 11 nt, Human herpesvirus 5
cugugagcuuu

SEQ ID NO: 314252 - RNA, 15 nt, Human herpesvirus 5
cugugauaacacguc

SEQ ID NO: 314253 - RNA, 21 nt, Human herpesvirus 5
cugugaugaacgacacaugca

SEQ ID NO: 314254 - RNA, 23 nt, Human herpesvirus 5
cuguggcaccgccuccgaacgcu

SEQ ID NO: 314255 - RNA, 20 nt, Human herpesvirus 5
cuguggcugccgcuacugau

SEQ ID NO: 314256 - RNA, 13 nt, Human herpesvirus 5
cugugggcccacu

SEQ ID NO: 314257 - RNA, 20 nt, Human herpesvirus 5
cugugguagaaugcugcuca

SEQ ID NO: 314258 - RNA, 17 nt, Human herpesvirus 5
cuguguggcguguacag

SEQ ID NO: 314259 - RNA, 17 nt, Human herpesvirus 5
cuguguguucugugaua

SEQ ID NO: 314260 - RNA, 16 nt, Human herpesvirus 5
cuguuaaaaaaaccac

SEQ ID NO: 314261 - RNA, 21 nt, Human herpesvirus 5
cuguuaauaaaacgccaugau

SEQ ID NO: 314262 - RNA, 13 nt, Human herpesvirus 5
cuguugcucuccu

SEQ ID NO: 314263 - RNA, 13 nt, Human herpesvirus 5
cuguuuucucaau

SEQ ID NO: 314264 - RNA, 19 nt, Human herpesvirus 5
cuuaacacuagccaucaca

SEQ ID NO: 314265 - RNA, 14 nt, Human herpesvirus 5
cuuaaccacaagaa

SEQ ID NO: 314266 - RNA, 11 nt, Human herpesvirus 5
cuuacaucuca

SEQ ID NO: 314267 - RNA, 16 nt, Human herpesvirus 5
cuuacauuuaucaaua

SEQ ID NO: 314268 - RNA, 22 nt, Human herpesvirus 5
cuuaccuaucaucacacuaaga

SEQ ID NO: 314269 - RNA, 16 nt, Human herpesvirus 5
cuuagcuuucuugacu

SEQ ID NO: 314270 - RNA, 13 nt, Human herpesvirus 5
cuuaucaccauca

SEQ ID NO: 314271 - RNA, 19 nt, Human herpesvirus 5
cuuaugaagcugaacaaua

SEQ ID NO: 314272 - RNA, 13 nt, Human herpesvirus 5
cuuauucuagccc

SEQ ID NO: 314273 - RNA, 14 nt, Human herpesvirus 5
cuucaaaguagcug

SEQ ID NO: 314274 - RNA, 15 nt, Human herpesvirus 5
cuucaaccacgagua

SEQ ID NO: 314275 - RNA, 16 nt, Human herpesvirus 5
cuucaccaucaccugg

SEQ ID NO: 314276 - RNA, 15 nt, Human herpesvirus 5
cuucauaaagcuguu

SEQ ID NO: 314277 - RNA, 17 nt, Human herpesvirus 5
cuucauaaagcuguuga

SEQ ID NO: 314278 - RNA, 23 nt, Human herpesvirus 5
cuucaucgucuugcgauguagca

SEQ ID NO: 314279 - RNA, 13 nt, Human herpesvirus 5
cuuccaguccaua

SEQ ID NO: 314280 - RNA, 21 nt, Human herpesvirus 5
cuuccccacccaguagacaga

SEQ ID NO: 314281 - RNA, 15 nt, Human herpesvirus 5
cuuccgagcuguguu

SEQ ID NO: 314282 - RNA, 15 nt, Human herpesvirus 5
cuucgauucucuaua

SEQ ID NO: 314283 - RNA, 19 nt, Human herpesvirus 5
cuucgccaagaugcugcgg

SEQ ID NO: 314284 - RNA, 22 nt, Human herpesvirus 5
cuucgguuagcggucuguucag

SEQ ID NO: 314285 - RNA, 19 nt, Human herpesvirus 5
cuucuaccuggcuggcgca

SEQ ID NO: 314286 - RNA, 16 nt, Human herpesvirus 5
cuucuaguacuuccca

SEQ ID NO: 314287 - RNA, 18 nt, Human herpesvirus 5
cuucuccaucuauuggca

SEQ ID NO: 314288 - RNA, 18 nt, Human herpesvirus 5
cuucugaagccgucaguc

SEQ ID NO: 314289 - RNA, 14 nt, Human herpesvirus 5
cuucugcugucacc

SEQ ID NO: 314290 - RNA, 17 nt, Human herpesvirus 5
cuucuggagcacacugc

SEQ ID NO: 314291 - RNA, 23 nt, Human herpesvirus 5
cuucuguggaggagacuaccuca

SEQ ID NO: 314292 - RNA, 22 nt, Human herpesvirus 5
cuucuuccucggacaccgggcu

SEQ ID NO: 314293 - RNA, 22 nt, Human herpesvirus 5
cuugacuauuuuuuguaacacu

SEQ ID NO: 314294 - RNA, 16 nt, Human herpesvirus 5
cuugacuguaccauca

SEQ ID NO: 314295 - RNA, 19 nt, Human herpesvirus 5
cuugagacagacacguaga

SEQ ID NO: 314296 - RNA, 17 nt, Human herpesvirus 5
cuugaguacuuucacaa

SEQ ID NO: 314297 - RNA, 21 nt, Human herpesvirus 5
cuugccaagcuuuagccaggu

SEQ ID NO: 314298 - RNA, 14 nt, Human herpesvirus 5
cuugcccacgccgu

SEQ ID NO: 314299 - RNA, 18 nt, Human herpesvirus 5
cuugcccgcaaaagcaga

SEQ ID NO: 314300 - RNA, 21 nt, Human herpesvirus 5
cuugcgcgguuauggcuccgc

SEQ ID NO: 314301 - RNA, 13 nt, Human herpesvirus 5
cuugcguccuuca

SEQ ID NO: 314302 - RNA, 21 nt, Human herpesvirus 5
cuugcuccucuuccaaaucuc

SEQ ID NO: 314303 - RNA, 14 nt, Human herpesvirus 5
cuugcugaugugcc

SEQ ID NO: 314304 - RNA, 12 nt, Human herpesvirus 5
cuugcuguguau

SEQ ID NO: 314305 - RNA, 16 nt, Human herpesvirus 5
cuugcuuaaugaucuc

SEQ ID NO: 314306 - RNA, 21 nt, Human herpesvirus 5
cuuggaaucugguacuuaguc

SEQ ID NO: 314307 - RNA, 18 nt, Human herpesvirus 5
cuuggcagcgggccuguu

SEQ ID NO: 314308 - RNA, 19 nt, Human herpesvirus 5
cuuggccgaccugugcgug

SEQ ID NO: 314309 - RNA, 14 nt, Human herpesvirus 5
cuuggccguggugu

SEQ ID NO: 314310 - RNA, 21 nt, Human herpesvirus 5
cuuggggcauaaaacaccgac

SEQ ID NO: 314311 - RNA, 15 nt, Human herpesvirus 5
cuugucuccccggug

SEQ ID NO: 314312 - RNA, 16 nt, Human herpesvirus 5
cuuguuuuaucuuuaa

SEQ ID NO: 314313 - RNA, 21 nt, Human herpesvirus 5
cuuuaagguacgggucuacca

SEQ ID NO: 314314 - RNA, 16 nt, Human herpesvirus 5
cuuuacauaaaaccac

SEQ ID NO: 314315 - RNA, 21 nt, Human herpesvirus 5
cuuuaccuagcgaucgcaugc

SEQ ID NO: 314316 - RNA, 16 nt, Human herpesvirus 5
cuuuacggugcugcgu

SEQ ID NO: 314317 - RNA, 21 nt, Human herpesvirus 5
cuuuauucagaaagcaccaga

SEQ ID NO: 314318 - RNA, 22 nt, Human herpesvirus 5
cuuuauucagaaagcaccagaa

SEQ ID NO: 314319 - RNA, 23 nt, Human herpesvirus 5
cuuuauucucaucuuuugcucca

SEQ ID NO: 314320 - RNA, 12 nt, Human herpesvirus 5
cuuuauugacua

SEQ ID NO: 314321 - RNA, 12 nt, Human herpesvirus 5
cuuucaagguga

SEQ ID NO: 314322 - RNA, 19 nt, Human herpesvirus 5
cuuucagcguacucauuag

SEQ ID NO: 314323 - RNA, 12 nt, Human herpesvirus 5
cuuuccuuguca

SEQ ID NO: 314324 - RNA, 17 nt, Human herpesvirus 5
cuuucuacgugcggcaa

SEQ ID NO: 314325 - RNA, 14 nt, Human herpesvirus 5
cuuucucagucugc

SEQ ID NO: 314326 - RNA, 20 nt, Human herpesvirus 5
cuuugaacuuugagccccaa

SEQ ID NO: 314327 - RNA, 15 nt, Human herpesvirus 5
ccuaguaauaccacc

SEQ ID NO: 314328 - RNA, 19 nt, Human herpesvirus 5
ccuaguaauaccaccguca

SEQ ID NO: 314329 - RNA, 23 nt, Human herpesvirus 5
ccuagugaugcgcgaacaggccg

SEQ ID NO: 314330 - RNA, 23 nt, Human herpesvirus 5
ccuauagauagcggcacuuuaca

SEQ ID NO: 314331 - RNA, 16 nt, Human herpesvirus 5
ccuauccgcgcggcua

SEQ ID NO: 314332 - RNA, 20 nt, Human herpesvirus 5
ccuaucgacccccguacugc

SEQ ID NO: 314333 - RNA, 24 nt, Human herpesvirus 5
ccuauggcacgucgcugauccgca

SEQ ID NO: 314334 - RNA, 14 nt, Human herpesvirus 5
ccuauggcgccgug

SEQ ID NO: 314335 - RNA, 17 nt, Human herpesvirus 5
ccucaaaaagcaggugg

SEQ ID NO: 314336 - RNA, 16 nt, Human herpesvirus 5
ccucagucaccgaguc

SEQ ID NO: 314337 - RNA, 21 nt, Human herpesvirus 5
ccucagucaccgaguccauca

SEQ ID NO: 314338 - RNA, 12 nt, Human herpesvirus 5
ccuccacuuccg

SEQ ID NO: 314339 - RNA, 19 nt, Human herpesvirus 5
ccuccagcgccuccuggug

SEQ ID NO: 314340 - RNA, 16 nt, Human herpesvirus 5
ccuccgacgacgccga

SEQ ID NO: 314341 - RNA, 23 nt, Human herpesvirus 5
ccuccgacuugaguacuuucaca

SEQ ID NO: 314342 - RNA, 13 nt, Human herpesvirus 5
ccuccggcuguca

SEQ ID NO: 314343 - RNA, 19 nt, Human herpesvirus 5
ccucgccgcuauugcuuag

SEQ ID NO: 314344 - RNA, 13 nt, Human herpesvirus 5
ccucggacaccgg

SEQ ID NO: 314345 - RNA, 15 nt, Human herpesvirus 5
ccucggaucuacuca

SEQ ID NO: 314346 - RNA, 16 nt, Human herpesvirus 5
ccucggaucuacucau

SEQ ID NO: 314347 - RNA, 16 nt, Human herpesvirus 5
ccucguaguugcacac

SEQ ID NO: 314348 - RNA, 20 nt, Human herpesvirus 5
ccucuaacaacgucacuucu

SEQ ID NO: 314349 - RNA, 20 nt, Human herpesvirus 5
ccucuccuccgucgcggcca

SEQ ID NO: 314350 - RNA, 16 nt, Human herpesvirus 5
ccucuuccucagugaa

SEQ ID NO: 314351 - RNA, 12 nt, Human herpesvirus 5
ccucuucuagua

SEQ ID NO: 314352 - RNA, 22 nt, Human herpesvirus 5
ccucuuuccauucuuccguguc

SEQ ID NO: 314353 - RNA, 17 nt, Human herpesvirus 5
ccucuuugagcacaaac

SEQ ID NO: 314354 - RNA, 17 nt, Human herpesvirus 5
ccucuuuuccccgugcc

SEQ ID NO: 314355 - RNA, 15 nt, Human herpesvirus 5
ccugacccgcggcua

SEQ ID NO: 314356 - RNA, 15 nt, Human herpesvirus 5
ccugcacgaccugcu

SEQ ID NO: 314357 - RNA, 17 nt, Human herpesvirus 5
ccugcagaccgaggcgc

SEQ ID NO: 314358 - RNA, 18 nt, Human herpesvirus 5
ccugcgaggaccguacac

SEQ ID NO: 314359 - RNA, 19 nt, Human herpesvirus 5
ccugcgcgauacauugccc

SEQ ID NO: 314360 - RNA, 19 nt, Human herpesvirus 5
ccugcugacuaucaucggu

SEQ ID NO: 314361 - RNA, 11 nt, Human herpesvirus 5
ccugcugcacu

SEQ ID NO: 314362 - RNA, 17 nt, Human herpesvirus 5
ccugcugccgccacugg

SEQ ID NO: 314363 - RNA, 18 nt, Human herpesvirus 5
ccuggagcgaguggggca

SEQ ID NO: 314364 - RNA, 18 nt, Human herpesvirus 5
ccuggguaccgagucgga

SEQ ID NO: 314365 - RNA, 16 nt, Human herpesvirus 5
ccuguaaaaauacaga

SEQ ID NO: 314366 - RNA, 17 nt, Human herpesvirus 5
ccuguaauuauuccagc

SEQ ID NO: 314367 - RNA, 17 nt, Human herpesvirus 5
ccugucauccacuugga

SEQ ID NO: 314368 - RNA, 20 nt, Human herpesvirus 5
ccugugcaccgucaucggca

SEQ ID NO: 314369 - RNA, 18 nt, Human herpesvirus 5
ccuguggcccgaagaugu

SEQ ID NO: 314370 - RNA, 15 nt, Human herpesvirus 5
ccuguuccugcugcu

SEQ ID NO: 314371 - RNA, 14 nt, Human herpesvirus 5
ccuguuccugucaa

SEQ ID NO: 314372 - RNA, 18 nt, Human herpesvirus 5
ccuguugggugagguguu

SEQ ID NO: 314373 - RNA, 18 nt, Human herpesvirus 5
ccuuaugagcgucugcgc

SEQ ID NO: 314374 - RNA, 21 nt, Human herpesvirus 5
ccuucugcuacgcggcgcccg

SEQ ID NO: 314375 - RNA, 18 nt, Human herpesvirus 5
ccuucuggagcacacugc

SEQ ID NO: 314376 - RNA, 22 nt, Human herpesvirus 5
ccuucuguggaggagacuaccu

SEQ ID NO: 314377 - RNA, 13 nt, Human herpesvirus 5
ccuugcgcgcggu

SEQ ID NO: 314378 - RNA, 22 nt, Human herpesvirus 5
ccuugcgcucccugcuccgcaa

SEQ ID NO: 314379 - RNA, 14 nt, Human herpesvirus 5
ccuuguaagacaga

SEQ ID NO: 314380 - RNA, 15 nt, Human herpesvirus 5
ccuuuaagcuggacc

SEQ ID NO: 314381 - RNA, 20 nt, Human herpesvirus 5
ccuuugcgcauccccugacc

SEQ ID NO: 314382 - RNA, 19 nt, Human herpesvirus 5
ccuuuuacuaguauccacg

SEQ ID NO: 314383 - RNA, 14 nt, Human herpesvirus 5
cgaaaacaaccaca

SEQ ID NO: 314384 - RNA, 19 nt, Human herpesvirus 5
cgaaaacuuguuuuacaau

SEQ ID NO: 314385 - RNA, 21 nt, Human herpesvirus 5
cgaaaagaggaaguugcggua

SEQ ID NO: 314386 - RNA, 14 nt, Human herpesvirus 5
cgaaagacaaugaa

SEQ ID NO: 314387 - RNA, 15 nt, Human herpesvirus 5
cgaacgcuacuuccc

SEQ ID NO: 314388 - RNA, 13 nt, Human herpesvirus 5
cgaagaccucacc

SEQ ID NO: 314389 - RNA, 14 nt, Human herpesvirus 5
cgaagaugaaaaac

SEQ ID NO: 314390 - RNA, 15 nt, Human herpesvirus 5
cgaaggcuacucuau

SEQ ID NO: 314391 - RNA, 16 nt, Human herpesvirus 5
cgaauaacaacacauc

SEQ ID NO: 314392 - RNA, 19 nt, Human herpesvirus 5
cgaaucgccggcuugcucc

SEQ ID NO: 314393 - RNA, 17 nt, Human herpesvirus 5
cgaauuaggcaacuauc

SEQ ID NO: 314394 - RNA, 22 nt, Human herpesvirus 5
cgaauugagcaacaaacacaga

SEQ ID NO: 314395 - RNA, 15 nt, Human herpesvirus 5
cgaauuugggcggug

SEQ ID NO: 314396 - RNA, 17 nt, Human herpesvirus 5
cgacaaacacuaccguc

SEQ ID NO: 314397 - RNA, 20 nt, Human herpesvirus 5
cgacagcacguuaguuacag

SEQ ID NO: 314398 - RNA, 19 nt, Human herpesvirus 5
cgacagcucguguaucuua

SEQ ID NO: 314399 - RNA, 20 nt, Human herpesvirus 5
cgacauggagacaguuucca

SEQ ID NO: 314400 - RNA, 19 nt, Human herpesvirus 5
cgacauggcccucaugacg

SEQ ID NO: 314401 - RNA, 22 nt, Human herpesvirus 5
cgacauggcccucaugacgcuc

SEQ ID NO: 314402 - RNA, 12 nt, Human herpesvirus 5
cgacaugucgcg

SEQ ID NO: 314403 - RNA, 17 nt, Human herpesvirus 5
cgaccacaagcucagca

SEQ ID NO: 314404 - RNA, 22 nt, Human herpesvirus 5
cgaccggcggcugcuguugcac

SEQ ID NO: 314405 - RNA, 15 nt, Human herpesvirus 5
cgacgcaucugucau

SEQ ID NO: 314406 - RNA, 18 nt, Human herpesvirus 5
cgacgcaucugucaucua

SEQ ID NO: 314407 - RNA, 18 nt, Human herpesvirus 5
cgacgggugguaccugca

SEQ ID NO: 314408 - RNA, 19 nt, Human herpesvirus 5
cgacguagguuaccgcgug

SEQ ID NO: 314409 - RNA, 12 nt, Human herpesvirus 5
cgacgucgucca

SEQ ID NO: 314410 - RNA, 23 nt, Human herpesvirus 5
cgacuccuuguguuuucaccgac

SEQ ID NO: 314411 - RNA, 22 nt, Human herpesvirus 5
cgacugauuaaccauaucguga

SEQ ID NO: 314412 - RNA, 15 nt, Human herpesvirus 5
cgacugcagcccacc

SEQ ID NO: 314413 - RNA, 17 nt, Human herpesvirus 5
cgacugcgcggccugcu

SEQ ID NO: 314414 - RNA, 13 nt, Human herpesvirus 5
cgagaacuaauau

SEQ ID NO: 314415 - RNA, 14 nt, Human herpesvirus 5
cgagacaacaauga

SEQ ID NO: 314416 - RNA, 22 nt, Human herpesvirus 5
cgagacggcgugacacagcacg

SEQ ID NO: 314417 - RNA, 12 nt, Human herpesvirus 5
cgagacuaucua

SEQ ID NO: 314418 - RNA, 23 nt, Human herpesvirus 5
cgagaggaguggcugcuguguug

SEQ ID NO: 314419 - RNA, 23 nt, Human herpesvirus 5
cgagcacguacaccgcuggagcu

SEQ ID NO: 314420 - RNA, 12 nt, Human herpesvirus 5
cgagcacuccac

SEQ ID NO: 314421 - RNA, 14 nt, Human herpesvirus 5
cgagcacuccacac

SEQ ID NO: 314422 - RNA, 17 nt, Human herpesvirus 5
cgagcgcgaccgccuca

SEQ ID NO: 314423 - RNA, 17 nt, Human herpesvirus 5
cgagcguugcgcucgcg

SEQ ID NO: 314424 - RNA, 19 nt, Human herpesvirus 5
cgagcugcgguauggguca

SEQ ID NO: 314425 - RNA, 19 nt, Human herpesvirus 5
cgagcugggcgaccgucuc

SEQ ID NO: 314426 - RNA, 12 nt, Human herpesvirus 5
cgauacuaauau

SEQ ID NO: 314427 - RNA, 14 nt, Human herpesvirus 5
cgauagucaucuca

SEQ ID NO: 314428 - RNA, 14 nt, Human herpesvirus 5
cgauauaggugaca

SEQ ID NO: 314429 - RNA, 19 nt, Human herpesvirus 5
cgauaugucgcgauagaca

SEQ ID NO: 314430 - RNA, 20 nt, Human herpesvirus 5
cgauauuugaaaauauggca

SEQ ID NO: 314431 - RNA, 23 nt, Human herpesvirus 5
cgauauuugaaaauauggcauau

SEQ ID NO: 314432 - RNA, 23 nt, Human herpesvirus 5
cgaucccucgccgcuauugcuua

SEQ ID NO: 314433 - RNA, 14 nt, Human herpesvirus 5
cgaucgcaugcuuc

SEQ ID NO: 314434 - RNA, 21 nt, Human herpesvirus 5
cgaucgcgcuuuugaccgcga

SEQ ID NO: 314435 - RNA, 15 nt, Human herpesvirus 5
cgaucguaacccagg

SEQ ID NO: 314436 - RNA, 20 nt, Human herpesvirus 5
cgaugccggccucaucugua

SEQ ID NO: 314437 - RNA, 21 nt, Human herpesvirus 5
cgaugccggccucaucuguaa

SEQ ID NO: 314438 - RNA, 21 nt, Human herpesvirus 5
cgaugcgccuccgguggugcg

SEQ ID NO: 314439 - RNA, 18 nt, Human herpesvirus 5
cgaugcuuuccuggacac

SEQ ID NO: 314440 - RNA, 18 nt, Human herpesvirus 5
cgauggcacggucaucua

SEQ ID NO: 314441 - RNA, 14 nt, Human herpesvirus 5
cggccguuaucaag

SEQ ID NO: 314442 - RNA, 12 nt, Human herpesvirus 5
cggccguugccg

SEQ ID NO: 314443 - RNA, 17 nt, Human herpesvirus 5
cggccucggguugccug

SEQ ID NO: 314444 - RNA, 21 nt, Human herpesvirus 5
cggcgcaacuucugucucggc

SEQ ID NO: 314445 - RNA, 15 nt, Human herpesvirus 5
cggcgcgccccggcg

SEQ ID NO: 314446 - RNA, 16 nt, Human herpesvirus 5
cggcgcggucccguga

SEQ ID NO: 314447 - RNA, 14 nt, Human herpesvirus 5
cggcggcgaucgca

SEQ ID NO: 314448 - RNA, 19 nt, Human herpesvirus 5
cggcggcgguccccgucga

SEQ ID NO: 314449 - RNA, 22 nt, Human herpesvirus 5
cggcggcugcuguugcacgggc

SEQ ID NO: 314450 - RNA, 20 nt, Human herpesvirus 5
cggcggcuguucgacagcgg

SEQ ID NO: 314451 - RNA, 21 nt, Human herpesvirus 5
cggcgguggcgucggugcgau

SEQ ID NO: 314452 - RNA, 22 nt, Human herpesvirus 5
cggcgguggcgucggugcgaug

SEQ ID NO: 314453 - RNA, 22 nt, Human herpesvirus 5
cggcgugaccacgucaccgugc

SEQ ID NO: 314454 - RNA, 23 nt, Human herpesvirus 5
cggcgugaccacgucaccgugcc

SEQ ID NO: 314455 - RNA, 16 nt, Human herpesvirus 5
cggcgugcaucugccg

SEQ ID NO: 314456 - RNA, 14 nt, Human herpesvirus 5
cggcguguguuuua

SEQ ID NO: 314457 - RNA, 17 nt, Human herpesvirus 5
cggcguucgcgugcacg

SEQ ID NO: 314458 - RNA, 13 nt, Human herpesvirus 5
cggcguucugcuc

SEQ ID NO: 314459 - RNA, 14 nt, Human herpesvirus 5
cggcguucugcucu

SEQ ID NO: 314460 - RNA, 17 nt, Human herpesvirus 5
cggcucaucaccaacgu

SEQ ID NO: 314461 - RNA, 12 nt, Human herpesvirus 5
cggcugcugcac

SEQ ID NO: 314462 - RNA, 15 nt, Human herpesvirus 5
cgggaaaccacgccg

SEQ ID NO: 314463 - RNA, 16 nt, Human herpesvirus 5
cgggaaaccacgccgg

SEQ ID NO: 314464 - RNA, 19 nt, Human herpesvirus 5
cgggacagcgugccggcga

SEQ ID NO: 314465 - RNA, 19 nt, Human herpesvirus 5
cgggacccacgguggccaa

SEQ ID NO: 314466 - RNA, 20 nt, Human herpesvirus 5
cgggauaucgccguguaaug

SEQ ID NO: 314467 - RNA, 21 nt, Human herpesvirus 5
cgggcuaugcuggugaugcug

SEQ ID NO: 314468 - RNA, 14 nt, Human herpesvirus 5
cgggcugcgcgggu

SEQ ID NO: 314469 - RNA, 13 nt, Human herpesvirus 5
cggggaaaaucac

SEQ ID NO: 314470 - RNA, 21 nt, Human herpesvirus 5
cggggauuuucgaugauacau

SEQ ID NO: 314471 - RNA, 15 nt, Human herpesvirus 5
cggggcugguugcuu

SEQ ID NO: 314472 - RNA, 15 nt, Human herpesvirus 5
cgggguucaccugca

SEQ ID NO: 314473 - RNA, 14 nt, Human herpesvirus 5
cgggugcaugacuc

SEQ ID NO: 314474 - RNA, 15 nt, Human herpesvirus 5
cgggugguaccugca

SEQ ID NO: 314475 - RNA, 22 nt, Human herpesvirus 5
cgguacgcagucacugcguguc

SEQ ID NO: 314476 - RNA, 23 nt, Human herpesvirus 5
cgguagaugagcagcaaaacgac

SEQ ID NO: 314477 - RNA, 19 nt, Human herpesvirus 5
cgguaguggacaugguuau

SEQ ID NO: 314478 - RNA, 15 nt, Human herpesvirus 5
cggucagucuauucu

SEQ ID NO: 314479 - RNA, 15 nt, Human herpesvirus 5
cggucccaucgccca

SEQ ID NO: 314480 - RNA, 18 nt, Human herpesvirus 5
cgguccgcggugucuccu

SEQ ID NO: 314481 - RNA, 17 nt, Human herpesvirus 5
cgguccgggcacaauca

SEQ ID NO: 314482 - RNA, 16 nt, Human herpesvirus 5
cggucuacagacuggg

SEQ ID NO: 314483 - RNA, 12 nt, Human herpesvirus 5
cggucugugauc

SEQ ID NO: 314484 - RNA, 21 nt, Human herpesvirus 5
cggugagacccgcgucccugg

SEQ ID NO: 314485 - RNA, 15 nt, Human herpesvirus 5
cggugcaggccgcgc

SEQ ID NO: 314486 - RNA, 15 nt, Human herpesvirus 5
cggugcagguucuga

SEQ ID NO: 314487 - RNA, 14 nt, Human herpesvirus 5
cggugcugcugcgc

SEQ ID NO: 314488 - RNA, 21 nt, Human herpesvirus 5
cggugcugcugcgcgacacgg

SEQ ID NO: 314489 - RNA, 16 nt, Human herpesvirus 5
cggugcuuuucaucua

SEQ ID NO: 314490 - RNA, 19 nt, Human herpesvirus 5
cgguggcgucggugcgaug

SEQ ID NO: 314491 - RNA, 21 nt, Human herpesvirus 5
cgguggguuucgucgcgccca

SEQ ID NO: 314492 - RNA, 21 nt, Human herpesvirus 5
cgguggucggcugccgccgcu

SEQ ID NO: 314493 - RNA, 21 nt, Human herpesvirus 5
cggugugcgacgccaugcuca

SEQ ID NO: 314494 - RNA, 19 nt, Human herpesvirus 5
auucguaaccagcauuuga

SEQ ID NO: 314495 - RNA, 20 nt, Human herpesvirus 5
auucguaacucuaucuacug

SEQ ID NO: 314496 - RNA, 20 nt, Human herpesvirus 5
auucuaaagccacgcggcgu

SEQ ID NO: 314497 - RNA, 14 nt, Human herpesvirus 5
auucucuauacaca

SEQ ID NO: 314498 - RNA, 16 nt, Human herpesvirus 5
auucucuauacacaua

SEQ ID NO: 314499 - RNA, 12 nt, Human herpesvirus 5
auucugauuuca

SEQ ID NO: 314500 - RNA, 21 nt, Human herpesvirus 5
auucugcguaacgguggaaua

SEQ ID NO: 314501 - RNA, 20 nt, Human herpesvirus 5
auucuggaauccaucaucua

SEQ ID NO: 314502 - RNA, 20 nt, Human herpesvirus 5
auucuggcaagaguucaaag

SEQ ID NO: 314503 - RNA, 16 nt, Human herpesvirus 5
auugagaaagcuaaca

SEQ ID NO: 314504 - RNA, 15 nt, Human herpesvirus 5
auugagcaacaaaca

SEQ ID NO: 314505 - RNA, 22 nt, Human herpesvirus 5
auugagcaggguaaaaaccacg

SEQ ID NO: 314506 - RNA, 19 nt, Human herpesvirus 5
auugauuucaacaaauacc

SEQ ID NO: 314507 - RNA, 23 nt, Human herpesvirus 5
auugcccuucuggagcacacugc

SEQ ID NO: 314508 - RNA, 12 nt, Human herpesvirus 5
auugccucuaca

SEQ ID NO: 314509 - RNA, 16 nt, Human herpesvirus 5
auugcgggcccugcug

SEQ ID NO: 314510 - RNA, 23 nt, Human herpesvirus 5
auugggaaagagcguacagucca

SEQ ID NO: 314511 - RNA, 12 nt, Human herpesvirus 5
auuguauacucu

SEQ ID NO: 314512 - RNA, 21 nt, Human herpesvirus 5
auugugucgaguaucuacuca

SEQ ID NO: 314513 - RNA, 19 nt, Human herpesvirus 5
auuguugagaacauauaua

SEQ ID NO: 314514 - RNA, 23 nt, Human herpesvirus 5
auuuaccguaaagagagucacac

SEQ ID NO: 314515 - RNA, 17 nt, Human herpesvirus 5
auuuacgagguacuguu

SEQ ID NO: 314516 - RNA, 17 nt, Human herpesvirus 5
auuuacgaggucugcau

SEQ ID NO: 314517 - RNA, 18 nt, Human herpesvirus 5
auuuacgaggucugcaug

SEQ ID NO: 314518 - RNA, 19 nt, Human herpesvirus 5
auuuagaaauaaauacagg

SEQ ID NO: 314519 - RNA, 18 nt, Human herpesvirus 5
auuuaucaauacaaugac

SEQ ID NO: 314520 - RNA, 15 nt, Human herpesvirus 5
auuuauggaaaauau

SEQ ID NO: 314521 - RNA, 15 nt, Human herpesvirus 5
auuuccuguguagaa

SEQ ID NO: 314522 - RNA, 19 nt, Human herpesvirus 5
auuucugcguguaccgcua

SEQ ID NO: 314523 - RNA, 14 nt, Human herpesvirus 5
auuuguauuuacuu

SEQ ID NO: 314524 - RNA, 15 nt, Human herpesvirus 5
auuuucaugaaucca

SEQ ID NO: 314525 - RNA, 18 nt, Human herpesvirus 5
auuuucaugaauccacag

SEQ ID NO: 314526 - RNA, 19 nt, Human herpesvirus 5
auuuuccauaaaucuacac

SEQ ID NO: 314527 - RNA, 15 nt, Human herpesvirus 5
auuuucuuugugauu

SEQ ID NO: 314528 - RNA, 12 nt, Human herpesvirus 5
auuuuugcuaau

SEQ ID NO: 314529 - RNA, 17 nt, Human herpesvirus 5
caaaaaaaaaucggugg

SEQ ID NO: 314530 - RNA, 14 nt, Human herpesvirus 5
caaaaaaaaggagg

SEQ ID NO: 314531 - RNA, 15 nt, Human herpesvirus 5
caaaaaagaaaaaga

SEQ ID NO: 314532 - RNA, 12 nt, Human herpesvirus 5
caaaaacaguau

SEQ ID NO: 314533 - RNA, 13 nt, Human herpesvirus 5
caaaaacuguaag

SEQ ID NO: 314534 - RNA, 19 nt, Human herpesvirus 5
caaaaagcgccgugcucuu

SEQ ID NO: 314535 - RNA, 12 nt, Human herpesvirus 5
caaaaauacuga

SEQ ID NO: 314536 - RNA, 20 nt, Human herpesvirus 5
caaaacaacguaucacuuuc

SEQ ID NO: 314537 - RNA, 17 nt, Human herpesvirus 5
caaaacgucaggaaucu

SEQ ID NO: 314538 - RNA, 12 nt, Human herpesvirus 5
caaaauagucac

SEQ ID NO: 314539 - RNA, 10 nt, Human herpesvirus 5
caaacaucua

SEQ ID NO: 314540 - RNA, 21 nt, Human herpesvirus 5
caaacccaccggcggggaaaa

SEQ ID NO: 314541 - RNA, 23 nt, Human herpesvirus 5
caaacccggucagucuauucuca

SEQ ID NO: 314542 - RNA, 13 nt, Human herpesvirus 5
caaacugaccaag

SEQ ID NO: 314543 - RNA, 13 nt, Human herpesvirus 5
caaagagccaugu

SEQ ID NO: 314544 - RNA, 15 nt, Human herpesvirus 5
caaagaugaagacac

SEQ ID NO: 314545 - RNA, 18 nt, Human herpesvirus 5
caaagcggucucacugug

SEQ ID NO: 314546 - RNA, 17 nt, Human herpesvirus 5
caaagcuccauuaugca

SEQ ID NO: 314547 - RNA, 18 nt, Human herpesvirus 5
caaagcuggacagugaga

SEQ ID NO: 314548 - RNA, 16 nt, Human herpesvirus 5
caaaggacucgcucac

SEQ ID NO: 314549 - RNA, 21 nt, Human herpesvirus 5
caaagggagccccaucauggc

SEQ ID NO: 314550 - RNA, 14 nt, Human herpesvirus 5
caaaguacuugucg

SEQ ID NO: 314551 - RNA, 15 nt, Human herpesvirus 5
caaagucaacaugua

SEQ ID NO: 314552 - RNA, 16 nt, Human herpesvirus 5
caaagucaacauguag

SEQ ID NO: 314553 - RNA, 11 nt, Human herpesvirus 5
caaaguucaaa

SEQ ID NO: 314554 - RNA, 17 nt, Human herpesvirus 5
caaauaaagaugauaca

SEQ ID NO: 314555 - RNA, 16 nt, Human herpesvirus 5
caaaugaggcacauga

SEQ ID NO: 314556 - RNA, 13 nt, Human herpesvirus 5
caaaugcaugcaa

SEQ ID NO: 314557 - RNA, 17 nt, Human herpesvirus 5
caaauuuuaucuuggau

SEQ ID NO: 314558 - RNA, 19 nt, Human herpesvirus 5
caaauuuuaucuuggauaa

SEQ ID NO: 314559 - RNA, 16 nt, Human herpesvirus 5
caacaaauaccaacac

SEQ ID NO: 314560 - RNA, 17 nt, Human herpesvirus 5
caacaaauaccaacacu

SEQ ID NO: 314561 - RNA, 11 nt, Human herpesvirus 5
caacaaugacu

SEQ ID NO: 314562 - RNA, 20 nt, Human herpesvirus 5
caacacguaacgucuucuga

SEQ ID NO: 314563 - RNA, 18 nt, Human herpesvirus 5
caacacguagugagcuuu

SEQ ID NO: 314564 - RNA, 21 nt, Human herpesvirus 5
caacacguagugagcuuugac

SEQ ID NO: 314565 - RNA, 21 nt, Human herpesvirus 5
caacacuuuuuuaccuaucac

SEQ ID NO: 314566 - RNA, 14 nt, Human herpesvirus 5
caacagaagcugcg

SEQ ID NO: 314567 - RNA, 14 nt, Human herpesvirus 5
caacagccuguggc

SEQ ID NO: 314568 - RNA, 21 nt, Human herpesvirus 5
caacauacaguacaacaguua

SEQ ID NO: 314569 - RNA, 17 nt, Human herpesvirus 5
caacaugcccagcaucu

SEQ ID NO: 314570 - RNA, 15 nt, Human herpesvirus 5
caaccacgucaagau

SEQ ID NO: 314571 - RNA, 14 nt, Human herpesvirus 5
caaccccgcggcug

SEQ ID NO: 314572 - RNA, 15 nt, Human herpesvirus 5
caacccguaucugag

SEQ ID NO: 314573 - RNA, 20 nt, Human herpesvirus 5
caaccguauauucuacauuc

SEQ ID NO: 314574 - RNA, 22 nt, Human herpesvirus 5
caaccuguggaauacccagcug

SEQ ID NO: 314575 - RNA, 17 nt, Human herpesvirus 5
caacgacaccucccuaa

SEQ ID NO: 314576 - RNA, 13 nt, Human herpesvirus 5
aaaaaaaagagag

SEQ ID NO: 314577 - RNA, 13 nt, Human herpesvirus 5
aaaaaaaggcguu

SEQ ID NO: 314578 - RNA, 14 nt, Human herpesvirus 5
aaaaaauauugaca

SEQ ID NO: 314579 - RNA, 19 nt, Human herpesvirus 5
aaaaacaacacauacuuuc

SEQ ID NO: 314580 - RNA, 19 nt, Human herpesvirus 5
aaaaacacgacgaaagcgu

SEQ ID NO: 314581 - RNA, 14 nt, Human herpesvirus 5
aaaaaccacguaca

SEQ ID NO: 314582 - RNA, 20 nt, Human herpesvirus 5
aaaaacugcgggcacugggg

SEQ ID NO: 314583 - RNA, 15 nt, Human herpesvirus 5
aaaaagaaacccuca

SEQ ID NO: 314584 - RNA, 21 nt, Human herpesvirus 5
aaaaagacgacccguugucau

SEQ ID NO: 314585 - RNA, 14 nt, Human herpesvirus 5
aaaaaguaugugcu

SEQ ID NO: 314586 - RNA, 23 nt, Human herpesvirus 5
aaaacaaagaagucucucucuag

SEQ ID NO: 314587 - RNA, 18 nt, Human herpesvirus 5
aaaacaaccacacagaua

SEQ ID NO: 314588 - RNA, 22 nt, Human herpesvirus 5
aaaacaccauuggaaguaacau

SEQ ID NO: 314589 - RNA, 19 nt, Human herpesvirus 5
aaaacacgcuuucucacca

SEQ ID NO: 314590 - RNA, 23 nt, Human herpesvirus 5
aaaacaugcgguguuuccgaugg

SEQ ID NO: 314591 - RNA, 23 nt, Human herpesvirus 5
aaaaccauugagaaagcuaacau

SEQ ID NO: 314592 - RNA, 18 nt, Human herpesvirus 5
aaaacgaccagaaucagc

SEQ ID NO: 314593 - RNA, 16 nt, Human herpesvirus 5
aaaacuaaaagaccua

SEQ ID NO: 314594 - RNA, 14 nt, Human herpesvirus 5
aaaacuacuaauac

SEQ ID NO: 314595 - RNA, 21 nt, Human herpesvirus 5
aaaagaaacccucaaaacauc

SEQ ID NO: 314596 - RNA, 19 nt, Human herpesvirus 5
aaaagcaguggcagcagga

SEQ ID NO: 314597 - RNA, 14 nt, Human herpesvirus 5
aaaagccuggguac

SEQ ID NO: 314598 - RNA, 18 nt, Human herpesvirus 5
aaaagguaugugugaaug

SEQ ID NO: 314599 - RNA, 15 nt, Human herpesvirus 5
aaaaguagcaccaca

SEQ ID NO: 314600 - RNA, 14 nt, Human herpesvirus 5
aaaaguaugugcuc

SEQ ID NO: 314601 - RNA, 19 nt, Human herpesvirus 5
aaaagucccgugucgucuc

SEQ ID NO: 314602 - RNA, 22 nt, Human herpesvirus 5
aaaauacagaguccgugucagu

SEQ ID NO: 314603 - RNA, 14 nt, Human herpesvirus 5
aaaauauguagucc

SEQ ID NO: 314604 - RNA, 21 nt, Human herpesvirus 5
aaaaucuguguguucugugau

SEQ ID NO: 314605 - RNA, 11 nt, Human herpesvirus 5
aaaaugucgcc

SEQ ID NO: 314606 - RNA, 19 nt, Human herpesvirus 5
aaaaugugcgaauuaggca

SEQ ID NO: 314607 - RNA, 15 nt, Human herpesvirus 5
aaaauuugauuacuc

SEQ ID NO: 314608 - RNA, 18 nt, Human herpesvirus 5
aaacaaaaaaacaugggc

SEQ ID NO: 314609 - RNA, 18 nt, Human herpesvirus 5
aaacaccgacgcuacuuc

SEQ ID NO: 314610 - RNA, 20 nt, Human herpesvirus 5
aaacaccguguggugguugu

SEQ ID NO: 314611 - RNA, 17 nt, Human herpesvirus 5
aaacaccguguucuccc

SEQ ID NO: 314612 - RNA, 18 nt, Human herpesvirus 5
aaacagcguccacaguuu

SEQ ID NO: 314613 - RNA, 22 nt, Human herpesvirus 5
aaacaucaccaccaucagcaaa

SEQ ID NO: 314614 - RNA, 22 nt, Human herpesvirus 5
aaacauuuguugagucaugaca

SEQ ID NO: 314615 - RNA, 19 nt, Human herpesvirus 5
aaaccauugagaaagcuaa

SEQ ID NO: 314616 - RNA, 21 nt, Human herpesvirus 5
aaacccacgaccauuuccgug

SEQ ID NO: 314617 - RNA, 21 nt, Human herpesvirus 5
aaaccgucgaaaacaaccaca

SEQ ID NO: 314618 - RNA, 18 nt, Human herpesvirus 5
aaaccuaccugggcugca

SEQ ID NO: 314619 - RNA, 23 nt, Human herpesvirus 5
aaaccucagucugccuccuagua

SEQ ID NO: 314620 - RNA, 24 nt, Human herpesvirus 5
aaaccugguagacgaaagacaaug

SEQ ID NO: 314621 - RNA, 23 nt, Human herpesvirus 5
aaaccuguauggaggucacuguc

SEQ ID NO: 314622 - RNA, 12 nt, Human herpesvirus 5
aaacgcuggaaa

SEQ ID NO: 314623 - RNA, 20 nt, Human herpesvirus 5
aaacgguacgcagucacugc

SEQ ID NO: 314624 - RNA, 20 nt, Human herpesvirus 5
aaacgucaggaaucugggag

SEQ ID NO: 314625 - RNA, 15 nt, Human herpesvirus 5
aaacgugacuuuauu

SEQ ID NO: 314626 - RNA, 19 nt, Human herpesvirus 5
aaacuaaaacauucuguaa

SEQ ID NO: 314627 - RNA, 15 nt, Human herpesvirus 5
aaacugaccaagcua

SEQ ID NO: 314628 - RNA, 12 nt, Human herpesvirus 5
aaacugggauac

SEQ ID NO: 314629 - RNA, 11 nt, Human herpesvirus 5
aaacuuaugau

SEQ ID NO: 314630 - RNA, 23 nt, Human herpesvirus 5
aaagaaaaaaugguguuacacac

SEQ ID NO: 314631 - RNA, 12 nt, Human herpesvirus 5
aaagaaaccacg

SEQ ID NO: 314632 - RNA, 15 nt, Human herpesvirus 5
aaagaacgugguugu

SEQ ID NO: 314633 - RNA, 17 nt, Human herpesvirus 5
aaagaauggccauguac

SEQ ID NO: 314634 - RNA, 14 nt, Human herpesvirus 5
aaagacaucgucac

SEQ ID NO: 314635 - RNA, 14 nt, Human herpesvirus 5
aaagaccaagagca

SEQ ID NO: 314636 - RNA, 14 nt, Human herpesvirus 5
aaagaccgcugccu

SEQ ID NO: 314637 - RNA, 18 nt, Human herpesvirus 5
aaagaccuaauacuagug

SEQ ID NO: 314638 - RNA, 12 nt, Human herpesvirus 5
aaagacuauacu

SEQ ID NO: 314639 - RNA, 21 nt, Human herpesvirus 5
aaagagagucacacuuaagaa

SEQ ID NO: 314640 - RNA, 16 nt, Human herpesvirus 5
aaagagcguacagucc

SEQ ID NO: 314641 - RNA, 20 nt, Human herpesvirus 5
aaagcacaauacacaugugg

SEQ ID NO: 314642 - RNA, 22 nt, Human herpesvirus 5
aaagccacgcggcguacgucac

SEQ ID NO: 314643 - RNA, 21 nt, Human herpesvirus 5
aaagccggcuccaagugcaag

SEQ ID NO: 314644 - RNA, 15 nt, Human herpesvirus 5
aaagcugcaaucaaa

SEQ ID NO: 314645 - RNA, 18 nt, Human herpesvirus 5
aaaggcaccggcagccca

SEQ ID NO: 314646 - RNA, 20 nt, Human herpesvirus 5
aaaggcuaacucgcguuuau

SEQ ID NO: 314647 - RNA, 16 nt, Human herpesvirus 5
aaagguaugugugaau

SEQ ID NO: 314648 - RNA, 19 nt, Human herpesvirus 5
aaagguggaaaucccucac

SEQ ID NO: 314649 - RNA, 15 nt, Human herpesvirus 5
aaaguacacgccaca

SEQ ID NO: 314650 - RNA, 17 nt, Human herpesvirus 5
aaaguacgucuaugaga

SEQ ID NO: 314651 - RNA, 22 nt, Human herpesvirus 5
aaaguacuugucggcgugaaug

SEQ ID NO: 314652 - RNA, 16 nt, Human herpesvirus 5
aaaguagcaccacaag

SEQ ID NO: 314653 - RNA, 15 nt, Human herpesvirus 5
aaaguagguacuaac

SEQ ID NO: 314654 - RNA, 14 nt, Human herpesvirus 5
aaagucccgugugu

SEQ ID NO: 314655 - RNA, 16 nt, Human herpesvirus 5
aaaguucaaaguccgu

SEQ ID NO: 314656 - RNA, 19 nt, Human herpesvirus 5
aaaguucaaaguccgucau

SEQ ID NO: 314657 - RNA, 17 nt, Human herpesvirus 5
aaauacaugaugaaugu

SEQ ID NO: 314658 - RNA, 21 nt, Human herpesvirus 5
aaauaccgucgacgugguuuu

SEQ ID NO: 314659 - RNA, 19 nt, Human herpesvirus 5
aaauagauagcaagccaga

SEQ ID NO: 314660 - RNA, 19 nt, Human herpesvirus 5
aaauagcagugacugggua

SEQ ID NO: 314661 - RNA, 13 nt, Human herpesvirus 5
aaauauaccaggc

SEQ ID NO: 314662 - RNA, 21 nt, Human herpesvirus 5
aaauauauggaguuuguguaa

SEQ ID NO: 314663 - RNA, 19 nt, Human herpesvirus 5
aaaucacguucgucgugac

SEQ ID NO: 314664 - RNA, 11 nt, Human herpesvirus 5
aaaucuuacca

SEQ ID NO: 314665 - RNA, 18 nt, Human herpesvirus 5
aaaucuuaccacaguuga

SEQ ID NO: 314666 - RNA, 23 nt, Human herpesvirus 5
aaauguuuuuauuuaaaacuggu

SEQ ID NO: 314667 - RNA, 20 nt, Human herpesvirus 5
aaauuauacccaccaacuga

SEQ ID NO: 314668 - RNA, 18 nt, Human herpesvirus 5
aaauucaauaaaaaccac

SEQ ID NO: 314669 - RNA, 15 nt, Human herpesvirus 5
aaauuguuauugcca

SEQ ID NO: 314670 - RNA, 17 nt, Human herpesvirus 5
aaauuguuauugccagu

SEQ ID NO: 314671 - RNA, 23 nt, Human herpesvirus 5
aaauuugauuacuccgugcgguu

SEQ ID NO: 314672 - RNA, 14 nt, Human herpesvirus 5
aacaaacaaugaca

SEQ ID NO: 314673 - RNA, 13 nt, Human herpesvirus 5
aacaaacacagac

SEQ ID NO: 314674 - RNA, 13 nt, Human herpesvirus 5
aacaacacaucaa

SEQ ID NO: 314675 - RNA, 14 nt, Human herpesvirus 5
aacaacacaucaac

SEQ ID NO: 314676 - RNA, 20 nt, Human herpesvirus 5
aacaauaaagcguugauuuc

SEQ ID NO: 314677 - RNA, 22 nt, Human herpesvirus 5
aacaauauugcuucguauacaa

SEQ ID NO: 314678 - RNA, 20 nt, Human herpesvirus 5
aacaccacggcacgacauau

SEQ ID NO: 314679 - RNA, 23 nt, Human herpesvirus 5
aacaccauuggaaguaacaucau

SEQ ID NO: 314680 - RNA, 21 nt, Human herpesvirus 5
aacaccguguucucccgacgu

SEQ ID NO: 314681 - RNA, 22 nt, Human herpesvirus 5
aacacuaaauuguuauugccag

SEQ ID NO: 314682 - RNA, 18 nt, Human herpesvirus 5
aacacuacagcuugcaau

SEQ ID NO: 314683 - RNA, 16 nt, Human herpesvirus 5
aacacugaaaacacca

SEQ ID NO: 314684 - RNA, 11 nt, Human herpesvirus 5
aacagcacauu

SEQ ID NO: 314685 - RNA, 21 nt, Human herpesvirus 5
aacagcagggagccagauggc

SEQ ID NO: 314686 - RNA, 21 nt, Human herpesvirus 5
aacagcggcggcgguggugac

SEQ ID NO: 314687 - RNA, 23 nt, Human herpesvirus 5
aacagcgggucaagacgcugaau

SEQ ID NO: 314688 - RNA, 20 nt, Human herpesvirus 5
aacaggacgcgcuuggacau

SEQ ID NO: 314689 - RNA, 13 nt, Human herpesvirus 5
aacaguacuacua

SEQ ID NO: 314690 - RNA, 17 nt, Human herpesvirus 5
aacaguacuacuaccaa

SEQ ID NO: 314691 - RNA, 18 nt, Human herpesvirus 5
aacaguacuacuaccaau

SEQ ID NO: 314692 - RNA, 19 nt, Human herpesvirus 5
aacaguuaucagcaauaaa

SEQ ID NO: 314693 - RNA, 14 nt, Human herpesvirus 5
aacaguucuaucaa

SEQ ID NO: 314694 - RNA, 18 nt, Human herpesvirus 5
aacaguuuacgaguacaa

SEQ ID NO: 314695 - RNA, 16 nt, Human herpesvirus 5
aacauacaguacaaca

SEQ ID NO: 314696 - RNA, 19 nt, Human herpesvirus 5
aacaucguggcgcacaccu

SEQ ID NO: 314697 - RNA, 20 nt, Human herpesvirus 5
aacauguggaaaucaccugu

SEQ ID NO: 314698 - RNA, 21 nt, Human herpesvirus 5
aacauguggaaaucaccugug

SEQ ID NO: 314699 - RNA, 21 nt, Human herpesvirus 5
aaccaaaaaaccccuaaagcu

SEQ ID NO: 314700 - RNA, 15 nt, Human herpesvirus 5
aaccaauaacauguc

SEQ ID NO: 314701 - RNA, 20 nt, Human herpesvirus 5
aaccacacagauauccacaa

SEQ ID NO: 314702 - RNA, 21 nt, Human herpesvirus 5
aaccaccgugucuccgugacg

SEQ ID NO: 314703 - RNA, 14 nt, Human herpesvirus 5
acaacgacaaauac

SEQ ID NO: 314704 - RNA, 19 nt, Human herpesvirus 5
acaacgguacuucaguaug

SEQ ID NO: 314705 - RNA, 13 nt, Human herpesvirus 5
acaacgucacuuc

SEQ ID NO: 314706 - RNA, 17 nt, Human herpesvirus 5
accauuggcaacaucac

SEQ ID NO: 314707 - RNA, 20 nt, Human herpesvirus 5
accauuuccaugugcagcug

SEQ ID NO: 314708 - RNA, 20 nt, Human herpesvirus 5
acccaacacugcuucuacca

SEQ ID NO: 314709 - RNA, 15 nt, Human herpesvirus 5
acccaccaacugaaa

SEQ ID NO: 314710 - RNA, 14 nt, Human herpesvirus 5
acccacgacggcuc

SEQ ID NO: 314711 - RNA, 13 nt, Human herpesvirus 5
acccacuaccugg

SEQ ID NO: 314712 - RNA, 15 nt, Human herpesvirus 5
acccagggagacuua

SEQ ID NO: 314713 - RNA, 20 nt, Human herpesvirus 5
acccaucccgagcacuccac

SEQ ID NO: 314714 - RNA, 13 nt, Human herpesvirus 5
accccaagccaaa

SEQ ID NO: 314715 - RNA, 16 nt, Human herpesvirus 5
accccaagccaaaaac

SEQ ID NO: 314716 - RNA, 20 nt, Human herpesvirus 5
accccauccuguaaaaauac

SEQ ID NO: 314717 - RNA, 19 nt, Human herpesvirus 5
accccgaacuggagcucaa

SEQ ID NO: 314718 - RNA, 17 nt, Human herpesvirus 5
acccgcgccgguucuca

SEQ ID NO: 314719 - RNA, 18 nt, Human herpesvirus 5
acccggucagucuauucu

SEQ ID NO: 314720 - RNA, 18 nt, Human herpesvirus 5
acccuccuaaaccuggua

SEQ ID NO: 314721 - RNA, 23 nt, Human herpesvirus 5
acccugauaaugggaaacggaca

SEQ ID NO: 314722 - RNA, 20 nt, Human herpesvirus 5
acccugcguccccgcacgac

SEQ ID NO: 314723 - RNA, 17 nt, Human herpesvirus 5
acccuguuccccgugac

SEQ ID NO: 314724 - RNA, 19 nt, Human herpesvirus 5
acccuucccgaccucccac

SEQ ID NO: 314725 - RNA, 17 nt, Human herpesvirus 5
accgacaaggcgcggcg

SEQ ID NO: 314726 - RNA, 18 nt, Human herpesvirus 5
accgacaaggcgcggcga

SEQ ID NO: 314727 - RNA, 12 nt, Human herpesvirus 5
accgacacagca

SEQ ID NO: 314728 - RNA, 14 nt, Human herpesvirus 5
accgacacagcagc

SEQ ID NO: 314729 - RNA, 16 nt, Human herpesvirus 5
accgacuuuuacauga

SEQ ID NO: 314730 - RNA, 14 nt, Human herpesvirus 5
accgagacggagga

SEQ ID NO: 314731 - RNA, 15 nt, Human herpesvirus 5
accgaggagauccag

SEQ ID NO: 314732 - RNA, 21 nt, Human herpesvirus 5
accgauauccaauaaacccau

SEQ ID NO: 314733 - RNA, 15 nt, Human herpesvirus 5
accgaucaccagaag

SEQ ID NO: 314734 - RNA, 14 nt, Human herpesvirus 5
accgcaaaggccac

SEQ ID NO: 314735 - RNA, 15 nt, Human herpesvirus 5
accgcaacaacagca

SEQ ID NO: 314736 - RNA, 17 nt, Human herpesvirus 5
accgcaacaacagcagc

SEQ ID NO: 314737 - RNA, 17 nt, Human herpesvirus 5
accgcaacgugcugcug

SEQ ID NO: 314738 - RNA, 17 nt, Human herpesvirus 5
accgcaguugcugccuu

SEQ ID NO: 314739 - RNA, 13 nt, Human herpesvirus 5
accgcgacggcga

SEQ ID NO: 314740 - RNA, 19 nt, Human herpesvirus 5
accgcuacaacgcgcgccu

SEQ ID NO: 314741 - RNA, 20 nt, Human herpesvirus 5
accggacgcugccucagucu

SEQ ID NO: 314742 - RNA, 20 nt, Human herpesvirus 5
accggcagcacaccugccuc

SEQ ID NO: 314743 - RNA, 17 nt, Human herpesvirus 5
accgguuggagcagcuc

SEQ ID NO: 314744 - RNA, 23 nt, Human herpesvirus 5
accguaaaaaaaaaaacaaagca

SEQ ID NO: 314745 - RNA, 12 nt, Human herpesvirus 5
accguaccugca

SEQ ID NO: 314746 - RNA, 11 nt, Human herpesvirus 5
accgugucucc

SEQ ID NO: 314747 - RNA, 22 nt, Human herpesvirus 5
accgugucuccgugacgguacu

SEQ ID NO: 314748 - RNA, 19 nt, Human herpesvirus 5
accguuaccaguaccaccg

SEQ ID NO: 314749 - RNA, 22 nt, Human herpesvirus 5
accuaaagcccccacgacuguu

SEQ ID NO: 314750 - RNA, 17 nt, Human herpesvirus 5
accuacguccgugagug

SEQ ID NO: 314751 - RNA, 22 nt, Human herpesvirus 5
accuacgugcaacgccaccaag

SEQ ID NO: 314752 - RNA, 22 nt, Human herpesvirus 5
accuagacgaagaggacaccuc

SEQ ID NO: 314753 - RNA, 17 nt, Human herpesvirus 5
accuccccuaacgucac

SEQ ID NO: 314754 - RNA, 16 nt, Human herpesvirus 5
accucgaugaagccua

SEQ ID NO: 314755 - RNA, 22 nt, Human herpesvirus 5
accucguccgccuccacuuccg

SEQ ID NO: 314756 - RNA, 16 nt, Human herpesvirus 5
accucgugcgaggaca

SEQ ID NO: 314757 - RNA, 17 nt, Human herpesvirus 5
accucgugcgaggacaa

SEQ ID NO: 314758 - RNA, 21 nt, Human herpesvirus 5
accucuauguuacaaugucac

SEQ ID NO: 314759 - RNA, 22 nt, Human herpesvirus 5
accucuuuccauucuuccgugu

SEQ ID NO: 314760 - RNA, 16 nt, Human herpesvirus 5
accugagaacaugugg

SEQ ID NO: 314761 - RNA, 24 nt, Human herpesvirus 5
accugcaaaguuauccuguugaau

SEQ ID NO: 314762 - RNA, 18 nt, Human herpesvirus 5
accugcaucacgguggcu

SEQ ID NO: 314763 - RNA, 15 nt, Human herpesvirus 5
accuggacgcgguga

SEQ ID NO: 314764 - RNA, 22 nt, Human herpesvirus 5
accuggacgggggggaccgggg

SEQ ID NO: 314765 - RNA, 17 nt, Human herpesvirus 5
accuguauacugugaau

SEQ ID NO: 314766 - RNA, 18 nt, Human herpesvirus 5
accugucgucgacauguc

SEQ ID NO: 314767 - RNA, 24 nt, Human herpesvirus 5
accugugugaucugggcagcggcu

SEQ ID NO: 314768 - RNA, 19 nt, Human herpesvirus 5
accuucccucuagagacag

SEQ ID NO: 314769 - RNA, 18 nt, Human herpesvirus 5
accuugagcgacagcagc

SEQ ID NO: 314770 - RNA, 13 nt, Human herpesvirus 5
accuuuuugcugc

SEQ ID NO: 314771 - RNA, 15 nt, Human herpesvirus 5
acgaaagacaaugaa

SEQ ID NO: 314772 - RNA, 13 nt, Human herpesvirus 5
acgaaagcguuca

SEQ ID NO: 314773 - RNA, 21 nt, Human herpesvirus 5
acgaaccagcugguaccugaa

SEQ ID NO: 314774 - RNA, 13 nt, Human herpesvirus 5
acgaagaggacac

SEQ ID NO: 314775 - RNA, 21 nt, Human herpesvirus 5
acgaagaugccgaugugugac

SEQ ID NO: 314776 - RNA, 15 nt, Human herpesvirus 5
acgacaaauacaaac

SEQ ID NO: 314777 - RNA, 18 nt, Human herpesvirus 5
acgacacaugcacaauac

SEQ ID NO: 314778 - RNA, 14 nt, Human herpesvirus 5
acgacgacagucuc

SEQ ID NO: 314779 - RNA, 18 nt, Human herpesvirus 5
acgacgccacacacaucu

SEQ ID NO: 314780 - RNA, 13 nt, Human herpesvirus 5
acgacgcugcuug

SEQ ID NO: 314781 - RNA, 15 nt, Human herpesvirus 5
acgacgucugcucaa

SEQ ID NO: 314782 - RNA, 16 nt, Human herpesvirus 5
acgacuggcucaacuu

SEQ ID NO: 314783 - RNA, 18 nt, Human herpesvirus 5
acgagagaaccuaccuac

SEQ ID NO: 314784 - RNA, 13 nt, Human herpesvirus 5
acgagguacuguu

SEQ ID NO: 314785 - RNA, 22 nt, Human herpesvirus 5
acgaguaacaccgucaccacuc

SEQ ID NO: 314786 - RNA, 15 nt, Human herpesvirus 5
acgauagucaucuca

SEQ ID NO: 314787 - RNA, 22 nt, Human herpesvirus 5
acgauauaaagaggcacggugu

SEQ ID NO: 314788 - RNA, 19 nt, Human herpesvirus 5
acgauaugucgcgacaauc

SEQ ID NO: 314789 - RNA, 14 nt, Human herpesvirus 5
acgauccucgggaa

SEQ ID NO: 314790 - RNA, 18 nt, Human herpesvirus 5
acgaugucgaucuccauc

SEQ ID NO: 314791 - RNA, 15 nt, Human herpesvirus 5
acgcaaccacggugg

SEQ ID NO: 314792 - RNA, 15 nt, Human herpesvirus 5
acgcacgacaugaca

SEQ ID NO: 314793 - RNA, 13 nt, Human herpesvirus 5
acgcaucugucau

SEQ ID NO: 314794 - RNA, 20 nt, Human herpesvirus 5
acgcaugauuagcaauauua

SEQ ID NO: 314795 - RNA, 14 nt, Human herpesvirus 5
acgcaugcauucug

SEQ ID NO: 314796 - RNA, 17 nt, Human herpesvirus 5
acgccaacuccgugcca

SEQ ID NO: 314797 - RNA, 12 nt, Human herpesvirus 5
acgccaccaagg

SEQ ID NO: 314798 - RNA, 13 nt, Human herpesvirus 5
acgccacgucgga

SEQ ID NO: 314799 - RNA, 19 nt, Human herpesvirus 5
acgccgaagacgacguggu

SEQ ID NO: 314800 - RNA, 20 nt, Human herpesvirus 5
acgccgucgcuuaucuugca

SEQ ID NO: 314801 - RNA, 15 nt, Human herpesvirus 5
acgccgucucgucac

SEQ ID NO: 314802 - RNA, 21 nt, Human herpesvirus 5
acgccuuaucgugcuaggcaa

SEQ ID NO: 314803 - RNA, 15 nt, Human herpesvirus 5
acgcgcggcggcgga

SEQ ID NO: 314804 - RNA, 23 nt, Human herpesvirus 5
acgcggaccgaucaccagaaggc

SEQ ID NO: 314805 - RNA, 23 nt, Human herpesvirus 5
acgcggagcggaggaggugaccu

SEQ ID NO: 314806 - RNA, 13 nt, Human herpesvirus 5
acgcggcagcggc

SEQ ID NO: 314807 - RNA, 19 nt, Human herpesvirus 5
acgcggcguauccucaagu

SEQ ID NO: 314808 - RNA, 17 nt, Human herpesvirus 5
acgcguggcccuggucu

SEQ ID NO: 314809 - RNA, 14 nt, Human herpesvirus 5
acgcuaagagcuuu

SEQ ID NO: 314810 - RNA, 16 nt, Human herpesvirus 5
acgcugccucagucuc

SEQ ID NO: 314811 - RNA, 10 nt, Human herpesvirus 5
acgcugcuuu

SEQ ID NO: 314812 - RNA, 19 nt, Human herpesvirus 5
acgcugucuugcuuaauga

SEQ ID NO: 314813 - RNA, 20 nt, Human herpesvirus 5
acggaaccugagaacaugug

SEQ ID NO: 314814 - RNA, 21 nt, Human herpesvirus 5
acggaaccugagaacaugugg

SEQ ID NO: 314815 - RNA, 18 nt, Human herpesvirus 5
acggaagccgccaauaca

SEQ ID NO: 314816 - RNA, 16 nt, Human herpesvirus 5
acggacacgacaaaug

SEQ ID NO: 314817 - RNA, 17 nt, Human herpesvirus 5
acggacgcuacuuuccg

SEQ ID NO: 314818 - RNA, 15 nt, Human herpesvirus 5
acggacggcaaggcg

SEQ ID NO: 314819 - RNA, 17 nt, Human herpesvirus 5
acggacggcaaggcgga

SEQ ID NO: 314820 - RNA, 22 nt, Human herpesvirus 5
acggagaaacacccacgggugu

SEQ ID NO: 314821 - RNA, 16 nt, Human herpesvirus 5
acggagggucagggau

SEQ ID NO: 314822 - RNA, 19 nt, Human herpesvirus 5
acggauugcgccaguuguc

SEQ ID NO: 314823 - RNA, 21 nt, Human herpesvirus 5
acggccucugggcugagacag

SEQ ID NO: 314824 - RNA, 17 nt, Human herpesvirus 5
acggcgaagucugcuac

SEQ ID NO: 314825 - RNA, 22 nt, Human herpesvirus 5
acggcgugacaauaaacaacau

SEQ ID NO: 314826 - RNA, 16 nt, Human herpesvirus 5
acggcgugacacagca

SEQ ID NO: 314827 - RNA, 16 nt, Human herpesvirus 5
acgggacacgcugaug

SEQ ID NO: 314828 - RNA, 16 nt, Human herpesvirus 5
acgggacuuacaucug

SEQ ID NO: 314829 - RNA, 19 nt, Human herpesvirus 5
acgggcugcgcggguuuca

SEQ ID NO: 314830 - RNA, 22 nt, Human herpesvirus 5
acgguacgcagucacugcgugu

SEQ ID NO: 314831 - RNA, 13 nt, Human herpesvirus 5
acgguacuuaucg

SEQ ID NO: 314832 - RNA, 19 nt, Human herpesvirus 5
acgguauuuuuucugucgc

SEQ ID NO: 314833 - RNA, 15 nt, Human herpesvirus 5
acggucagacggggu

SEQ ID NO: 314834 - RNA, 18 nt, Human herpesvirus 5
acggugauucuauuacac

SEQ ID NO: 314835 - RNA, 23 nt, Human herpesvirus 5
acggugcugcugcgcgacacggu

SEQ ID NO: 314836 - RNA, 17 nt, Human herpesvirus 5
acggugcuuuucaucua

SEQ ID NO: 314837 - RNA, 12 nt, Human herpesvirus 5
acgguggaauaa

SEQ ID NO: 314838 - RNA, 13 nt, Human herpesvirus 5
acgguggacgggu

SEQ ID NO: 314839 - RNA, 21 nt, Human herpesvirus 5
acgguggcucgauacacugga

SEQ ID NO: 314840 - RNA, 19 nt, Human herpesvirus 5
acggugugaugguacuaua

SEQ ID NO: 314841 - RNA, 19 nt, Human herpesvirus 5
acguaaaguagcuggugga

SEQ ID NO: 314842 - RNA, 19 nt, Human herpesvirus 5
acguagaaaaguaacacac

SEQ ID NO: 314843 - RNA, 17 nt, Human herpesvirus 5
acguagagugguauaca

SEQ ID NO: 314844 - RNA, 22 nt, Human herpesvirus 5
acguaggcaaacugaccaagcu

SEQ ID NO: 314845 - RNA, 18 nt, Human herpesvirus 5
acguaggugaguucaaug

SEQ ID NO: 314846 - RNA, 22 nt, Human herpesvirus 5
acgucaaagcucacuacguguu

SEQ ID NO: 314847 - RNA, 20 nt, Human herpesvirus 5
acgucacacguuacaucaua

SEQ ID NO: 314848 - RNA, 15 nt, Human herpesvirus 5
acgucacuacucugg

SEQ ID NO: 314849 - RNA, 21 nt, Human herpesvirus 5
acgucacuauuguauacucua

SEQ ID NO: 314850 - RNA, 13 nt, Human herpesvirus 5
acgucgacaugaa

SEQ ID NO: 314851 - RNA, 20 nt, Human herpesvirus 5
acgucugcguguguguuucu

SEQ ID NO: 314852 - RNA, 20 nt, Human herpesvirus 5
acgugcaacgccaccaagga

SEQ ID NO: 314853 - RNA, 19 nt, Human herpesvirus 5
acgugcaagacuacaugcu

SEQ ID NO: 314854 - RNA, 19 nt, Human herpesvirus 5
acgugcgccuuccagucca

SEQ ID NO: 314855 - RNA, 10 nt, Human herpesvirus 5
acgugcugcu

SEQ ID NO: 314856 - RNA, 15 nt, Human herpesvirus 5
acguggauacuagua

SEQ ID NO: 314857 - RNA, 17 nt, Human herpesvirus 5
acguggguuucggugac

SEQ ID NO: 314858 - RNA, 21 nt, Human herpesvirus 5
acgugguugucguuaccacaa

SEQ ID NO: 314859 - RNA, 22 nt, Human herpesvirus 5
acgugguuuuuuuaacagugug

SEQ ID NO: 314860 - RNA, 15 nt, Human herpesvirus 5
acguuacaucauaca

SEQ ID NO: 314861 - RNA, 15 nt, Human herpesvirus 5
acguucgacauggac

SEQ ID NO: 314862 - RNA, 14 nt, Human herpesvirus 5
acguucgucgugac

SEQ ID NO: 314863 - RNA, 18 nt, Human herpesvirus 5
acguucuguaaucuucca

SEQ ID NO: 314864 - RNA, 16 nt, Human herpesvirus 5
acguugagacuaccac

SEQ ID NO: 314865 - RNA, 18 nt, Human herpesvirus 5
acguugagacuaccacau

SEQ ID NO: 314866 - RNA, 20 nt, Human herpesvirus 5
acguuguuugugcuguggau

SEQ ID NO: 314867 - RNA, 17 nt, Human herpesvirus 5
acguuucgcgaggacaa

SEQ ID NO: 314868 - RNA, 22 nt, Human herpesvirus 5
acguuucgcgaggacaaggcuc

SEQ ID NO: 314869 - RNA, 14 nt, Human herpesvirus 5
acuaacacuccucu

SEQ ID NO: 314870 - RNA, 17 nt, Human herpesvirus 5
acuaacgucacauugaa

SEQ ID NO: 314871 - RNA, 20 nt, Human herpesvirus 5
acuaauaccgguuguaauca

SEQ ID NO: 314872 - RNA, 19 nt, Human herpesvirus 5
acuaauauccgcguuauca

SEQ ID NO: 314873 - RNA, 16 nt, Human herpesvirus 5
acuaauauugcaaugg

SEQ ID NO: 314874 - RNA, 17 nt, Human herpesvirus 5
acuaauauugcaaugga

SEQ ID NO: 314875 - RNA, 14 nt, Human herpesvirus 5
acuacagcaaugac

SEQ ID NO: 314876 - RNA, 22 nt, Human herpesvirus 5
acuacagcaaugacauggauaa

SEQ ID NO: 314877 - RNA, 18 nt, Human herpesvirus 5
acuacagcuucuuucuca

SEQ ID NO: 314878 - RNA, 20 nt, Human herpesvirus 5
acuacaugcuauaagacagc

SEQ ID NO: 314879 - RNA, 16 nt, Human herpesvirus 5
acuaccacuacgaugc

SEQ ID NO: 314880 - RNA, 19 nt, Human herpesvirus 5
acuacguugggucugcgcu

SEQ ID NO: 314881 - RNA, 19 nt, Human herpesvirus 5
acuagcacagagacaccaa

SEQ ID NO: 314882 - RNA, 16 nt, Human herpesvirus 5
acuaguacugagacag

SEQ ID NO: 314883 - RNA, 16 nt, Human herpesvirus 5
acuaguauccacguca

SEQ ID NO: 314884 - RNA, 17 nt, Human herpesvirus 5
acuauacgacgauguuu

SEQ ID NO: 314885 - RNA, 14 nt, Human herpesvirus 5
acuaucaccaaaca

SEQ ID NO: 314886 - RNA, 18 nt, Human herpesvirus 5
acuaucgacguguuauca

SEQ ID NO: 314887 - RNA, 15 nt, Human herpesvirus 5
acuaucuacaacacu

SEQ ID NO: 314888 - RNA, 15 nt, Human herpesvirus 5
acuaucuacaacuua

SEQ ID NO: 314889 - RNA, 24 nt, Human herpesvirus 5
acuaucuacaacuuaaccacaaga

SEQ ID NO: 314890 - RNA, 16 nt, Human herpesvirus 5
acuaucuucaaccuca

SEQ ID NO: 314891 - RNA, 21 nt, Human herpesvirus 5
acuauguguaugaugucucau

SEQ ID NO: 314892 - RNA, 21 nt, Human herpesvirus 5
acuauuuuuuguaacacuaca

SEQ ID NO: 314893 - RNA, 13 nt, Human herpesvirus 5
acucacaauggaa

SEQ ID NO: 314894 - RNA, 19 nt, Human herpesvirus 5
acucacaauggaagccaua

SEQ ID NO: 314895 - RNA, 23 nt, Human herpesvirus 5
acucaguacuuugggguggugcg

SEQ ID NO: 314896 - RNA, 20 nt, Human herpesvirus 5
acucaucggcauguucggcu

SEQ ID NO: 314897 - RNA, 21 nt, Human herpesvirus 5
acuccgaauaacaacacauca

SEQ ID NO: 314898 - RNA, 14 nt, Human herpesvirus 5
acuccgugccagcu

SEQ ID NO: 314899 - RNA, 18 nt, Human herpesvirus 5
acuccgugcgguucucaa

SEQ ID NO: 314900 - RNA, 13 nt, Human herpesvirus 5
acuccgugcuguu

SEQ ID NO: 314901 - RNA, 22 nt, Human herpesvirus 5
acuccuggaccugcguaccaac

SEQ ID NO: 314902 - RNA, 18 nt, Human herpesvirus 5
acucgcaccggcagcaca

SEQ ID NO: 314903 - RNA, 20 nt, Human herpesvirus 5
acucgcgacgcuucauauua

SEQ ID NO: 314904 - RNA, 13 nt, Human herpesvirus 5
acucgcgucacgu

SEQ ID NO: 314905 - RNA, 17 nt, Human herpesvirus 5
acucgugacgucaauca

SEQ ID NO: 314906 - RNA, 15 nt, Human herpesvirus 5
acucuaacacccagg

SEQ ID NO: 314907 - RNA, 23 nt, Human herpesvirus 5
acucuauauuauacucuauguua

SEQ ID NO: 314908 - RNA, 17 nt, Human herpesvirus 5
acucuaucgcgacagac

SEQ ID NO: 314909 - RNA, 15 nt, Human herpesvirus 5
acucuaucuacuguc

SEQ ID NO: 314910 - RNA, 19 nt, Human herpesvirus 5
acucuauguuauacucugu

SEQ ID NO: 314911 - RNA, 20 nt, Human herpesvirus 5
acucuauguuauacucugua

SEQ ID NO: 314912 - RNA, 13 nt, Human herpesvirus 5
acucucugccacu

SEQ ID NO: 314913 - RNA, 14 nt, Human herpesvirus 5
acucugacugugua

SEQ ID NO: 314914 - RNA, 17 nt, Human herpesvirus 5
acucuggugcuauggcu

SEQ ID NO: 314915 - RNA, 22 nt, Human herpesvirus 5
acugacaagucguuucagccca

SEQ ID NO: 314916 - RNA, 14 nt, Human herpesvirus 5
acugacacagcucc

SEQ ID NO: 314917 - RNA, 12 nt, Human herpesvirus 5
acugaccaagcu

SEQ ID NO: 314918 - RNA, 23 nt, Human herpesvirus 5
acugaguuuagugcuaguugucg

SEQ ID NO: 314919 - RNA, 15 nt, Human herpesvirus 5
acugauuaaccauau

SEQ ID NO: 314920 - RNA, 19 nt, Human herpesvirus 5
acugcauccaucacaucac

SEQ ID NO: 314921 - RNA, 18 nt, Human herpesvirus 5
acugccaccgacauggag

SEQ ID NO: 314922 - RNA, 21 nt, Human herpesvirus 5
acugcuauguaucaucuuuau

SEQ ID NO: 314923 - RNA, 13 nt, Human herpesvirus 5
acugcuucuacca

SEQ ID NO: 314924 - RNA, 20 nt, Human herpesvirus 5
acuggcagagccacguugag

SEQ ID NO: 314925 - RNA, 20 nt, Human herpesvirus 5
acuggcuggaauacguggcg

SEQ ID NO: 314926 - RNA, 12 nt, Human herpesvirus 5
acuggugcuauc

SEQ ID NO: 314927 - RNA, 18 nt, Human herpesvirus 5
acugucagaguaggugau

SEQ ID NO: 314928 - RNA, 23 nt, Human herpesvirus 5
acuguuaauaaaacgccaugaug

SEQ ID NO: 314929 - RNA, 23 nt, Human herpesvirus 5
acuguuucaucgacgccuaccuu

SEQ ID NO: 314930 - RNA, 23 nt, Human herpesvirus 5
acuuaaagcccuuaacauguuau

SEQ ID NO: 314931 - RNA, 17 nt, Human herpesvirus 5
acuuaacgcgcaagugc

SEQ ID NO: 314932 - RNA, 14 nt, Human herpesvirus 5
acuuacaucucacg

SEQ ID NO: 314933 - RNA, 14 nt, Human herpesvirus 5
acuuacaucugcuc

SEQ ID NO: 314934 - RNA, 16 nt, Human herpesvirus 5
acuuaggggcacucuu

SEQ ID NO: 314935 - RNA, 12 nt, Human herpesvirus 5
acuucaaugucc

SEQ ID NO: 314936 - RNA, 21 nt, Human herpesvirus 5
acuucacgugcggcuguguua

SEQ ID NO: 314937 - RNA, 13 nt, Human herpesvirus 5
aaguaccucuaac

SEQ ID NO: 314938 - RNA, 21 nt, Human herpesvirus 5
aaguaccucuaacaacgucac

SEQ ID NO: 314939 - RNA, 14 nt, Human herpesvirus 5
aaguagcaccacaa

SEQ ID NO: 314940 - RNA, 12 nt, Human herpesvirus 5
aaguauacauua

SEQ ID NO: 314941 - RNA, 21 nt, Human herpesvirus 5
aaguaucgacacuaauuuauc

SEQ ID NO: 314942 - RNA, 19 nt, Human herpesvirus 5
agcaggguaaaaaccacgu

SEQ ID NO: 314943 - RNA, 19 nt, Human herpesvirus 5
agcagguggaggacaguau

SEQ ID NO: 314944 - RNA, 18 nt, Human herpesvirus 5
agcaucgcaacaacagca

SEQ ID NO: 314945 - RNA, 21 nt, Human herpesvirus 5
aguacacgcaggcaagccaaa

SEQ ID NO: 314946 - RNA, 22 nt, Human herpesvirus 5
aguacacugguauaaccaguca

SEQ ID NO: 314947 - RNA, 14 nt, Human herpesvirus 5
aguaccagacaucc

SEQ ID NO: 314948 - RNA, 15 nt, Human herpesvirus 5
aguaccagacaucca

SEQ ID NO: 314949 - RNA, 16 nt, Human herpesvirus 5
aguaccagacauccaa

SEQ ID NO: 314950 - RNA, 17 nt, Human herpesvirus 5
aguacccaccgauggca

SEQ ID NO: 314951 - RNA, 21 nt, Human herpesvirus 5
aguacccauuacgugugucau

SEQ ID NO: 314952 - RNA, 18 nt, Human herpesvirus 5
aguaccccacgcauaaaa

SEQ ID NO: 314953 - RNA, 23 nt, Human herpesvirus 5
aguaccucuaacaacgucacuuc

SEQ ID NO: 314954 - RNA, 23 nt, Human herpesvirus 5
aguacuaccguuaacuauuccac

SEQ ID NO: 314955 - RNA, 22 nt, Human herpesvirus 5
aguacugagacagccacaucaa

SEQ ID NO: 314956 - RNA, 18 nt, Human herpesvirus 5
aguagaaaagacagggaa

SEQ ID NO: 314957 - RNA, 16 nt, Human herpesvirus 5
aguagcggguaauaaa

SEQ ID NO: 314958 - RNA, 23 nt, Human herpesvirus 5
aguagcuuuuuuuauacaucucc

SEQ ID NO: 314959 - RNA, 21 nt, Human herpesvirus 5
aguaggcgcgcacccgacggc

SEQ ID NO: 314960 - RNA, 15 nt, Human herpesvirus 5
aguauacuaaacucu

SEQ ID NO: 314961 - RNA, 23 nt, Human herpesvirus 5
aguauacuaaacucugugaugaa

SEQ ID NO: 314962 - RNA, 19 nt, Human herpesvirus 5
aguaucauauuaugcgugu

SEQ ID NO: 314963 - RNA, 23 nt, Human herpesvirus 5
aguaucauauuaugcguguccug

SEQ ID NO: 314964 - RNA, 16 nt, Human herpesvirus 5
aguaucuacucagcua

SEQ ID NO: 314965 - RNA, 11 nt, Human herpesvirus 5
aguaugugcuc

SEQ ID NO: 314966 - RNA, 14 nt, Human herpesvirus 5
agucaacacuacca

SEQ ID NO: 314967 - RNA, 15 nt, Human herpesvirus 5
agucaacacuaccaa

SEQ ID NO: 314968 - RNA, 12 nt, Human herpesvirus 5
agucaacaugua

SEQ ID NO: 314969 - RNA, 13 nt, Human herpesvirus 5
agucaacauguag

SEQ ID NO: 314970 - RNA, 18 nt, Human herpesvirus 5
agucaacauguagaagca

SEQ ID NO: 314971 - RNA, 23 nt, Human herpesvirus 5
agucacacuuaagaaaaaggugg

SEQ ID NO: 314972 - RNA, 18 nt, Human herpesvirus 5
agucaccguaaucaccaa

SEQ ID NO: 314973 - RNA, 21 nt, Human herpesvirus 5
agucaccguaaucaccaaaga

SEQ ID NO: 314974 - RNA, 20 nt, Human herpesvirus 5
agucauagagccaacgagac

SEQ ID NO: 314975 - RNA, 10 nt, Human herpesvirus 5
aguccaccuc

SEQ ID NO: 314976 - RNA, 20 nt, Human herpesvirus 5
aguccauacagcaacaccau

SEQ ID NO: 314977 - RNA, 18 nt, Human herpesvirus 5
aguccauugucaguauuu

SEQ ID NO: 314978 - RNA, 20 nt, Human herpesvirus 5
aguccccccacggaucucgc

SEQ ID NO: 314979 - RNA, 15 nt, Human herpesvirus 5
agucgagacuugcac

SEQ ID NO: 314980 - RNA, 16 nt, Human herpesvirus 5
agucgagacuugcacg

SEQ ID NO: 314981 - RNA, 22 nt, Human herpesvirus 5
agucgcucaucgucacgcucaa

SEQ ID NO: 314982 - RNA, 16 nt, Human herpesvirus 5
agucggcuaacaaagc

SEQ ID NO: 314983 - RNA, 17 nt, Human herpesvirus 5
agucggcuaacaaagcc

SEQ ID NO: 314984 - RNA, 20 nt, Human herpesvirus 5
agucuaccuagaugcuagca

SEQ ID NO: 314985 - RNA, 16 nt, Human herpesvirus 5
agucuaccuccugcag

SEQ ID NO: 314986 - RNA, 15 nt, Human herpesvirus 5
agucuacgaucgcug

SEQ ID NO: 314987 - RNA, 23 nt, Human herpesvirus 5
agucuagacaggguaacagccuu

SEQ ID NO: 314988 - RNA, 22 nt, Human herpesvirus 5
agucuaucccuauggcacgucg

SEQ ID NO: 314989 - RNA, 15 nt, Human herpesvirus 5
agucugcgacggggu

SEQ ID NO: 314990 - RNA, 18 nt, Human herpesvirus 5
agucuguauauucagucc

SEQ ID NO: 314991 - RNA, 20 nt, Human herpesvirus 5
agucuguauauucaguccau

SEQ ID NO: 314992 - RNA, 19 nt, Human herpesvirus 5
agugacguggauacuagua

SEQ ID NO: 314993 - RNA, 17 nt, Human herpesvirus 5
agugagagcucauacau

SEQ ID NO: 314994 - RNA, 12 nt, Human herpesvirus 5
agugagcuuuga

SEQ ID NO: 314995 - RNA, 13 nt, Human herpesvirus 5
agugagcuuugac

SEQ ID NO: 314996 - RNA, 14 nt, Human herpesvirus 5
agugauacguuguu

SEQ ID NO: 314997 - RNA, 23 nt, Human herpesvirus 5
agugauuccccgugacaguauua

SEQ ID NO: 314998 - RNA, 14 nt, Human herpesvirus 5
agugcaucuacgug

SEQ ID NO: 314999 - RNA, 19 nt, Human herpesvirus 5
agugccugcacgaccugcu

SEQ ID NO: 315000 - RNA, 20 nt, Human herpesvirus 5
agugccugcacgaccugcuc

SEQ ID NO: 315001 - RNA, 20 nt, Human herpesvirus 5
aguggacaugguuaucaucc

SEQ ID NO: 315002 - RNA, 19 nt, Human herpesvirus 5
aguggucaauaauggucaa

SEQ ID NO: 315003 - RNA, 24 nt, Human herpesvirus 5
agugucucuaaacgccaccugcaa

SEQ ID NO: 315004 - RNA, 16 nt, Human herpesvirus 5
aguuacacucgcucua

SEQ ID NO: 315005 - RNA, 15 nt, Human herpesvirus 5
aguuaucagcaauaa

SEQ ID NO: 315006 - RNA, 14 nt, Human herpesvirus 5
aguucaaaguccgu

SEQ ID NO: 315007 - RNA, 19 nt, Human herpesvirus 5
aguucaccguauggcugcg

SEQ ID NO: 315008 - RNA, 19 nt, Human herpesvirus 5
aguugauacgcuagcagaa

SEQ ID NO: 315009 - RNA, 20 nt, Human herpesvirus 5
aguugcaaaagaagcugccc

SEQ ID NO: 315010 - RNA, 19 nt, Human herpesvirus 5
aguugcaccucgaccuccg

SEQ ID NO: 315011 - RNA, 23 nt, Human herpesvirus 5
aguuggacuacgaagauaucgau

SEQ ID NO: 315012 - RNA, 15 nt, Human herpesvirus 5
aguuggccaccaaga

SEQ ID NO: 315013 - RNA, 21 nt, Human herpesvirus 5
aguuggguggcucaccgucag

SEQ ID NO: 315014 - RNA, 12 nt, Human herpesvirus 5
aguuguugcaga

SEQ ID NO: 315015 - RNA, 12 nt, Human herpesvirus 5
aguuuagugcua

SEQ ID NO: 315016 - RNA, 14 nt, Human herpesvirus 5
aguuuaugagaaaa

SEQ ID NO: 315017 - RNA, 15 nt, Human herpesvirus 5
aguuugguaguugau

SEQ ID NO: 315018 - RNA, 19 nt, Human herpesvirus 5
auaaaacgccaugaugaca

SEQ ID NO: 315019 - RNA, 13 nt, Human herpesvirus 5
auaaaagcacuuc

SEQ ID NO: 315020 - RNA, 14 nt, Human herpesvirus 5
auaaaagcacuuca

SEQ ID NO: 315021 - RNA, 16 nt, Human herpesvirus 5
auaaaauuugauuacu

SEQ ID NO: 315022 - RNA, 20 nt, Human herpesvirus 5
auaaagacgucaaugacacc

SEQ ID NO: 315023 - RNA, 17 nt, Human herpesvirus 5
auaaagauaaucugcca

SEQ ID NO: 315024 - RNA, 19 nt, Human herpesvirus 5
auaaagaugauacauagca

SEQ ID NO: 315025 - RNA, 12 nt, Human herpesvirus 5
auaaagauucac

SEQ ID NO: 315026 - RNA, 16 nt, Human herpesvirus 5
auaaagauucacuuaa

SEQ ID NO: 315027 - RNA, 14 nt, Human herpesvirus 5
auaaaggcucucug

SEQ ID NO: 315028 - RNA, 15 nt, Human herpesvirus 5
auaaaucaccgugaa

SEQ ID NO: 315029 - RNA, 21 nt, Human herpesvirus 5
auaaauuuugaaucgauguca

SEQ ID NO: 315030 - RNA, 16 nt, Human herpesvirus 5
auaacaaacaaugaca

SEQ ID NO: 315031 - RNA, 18 nt, Human herpesvirus 5
auaacaaacaaugacacu

SEQ ID NO: 315032 - RNA, 13 nt, Human herpesvirus 5
auaacaacacauc

SEQ ID NO: 315033 - RNA, 17 nt, Human herpesvirus 5
auaaccgcaaaggccac

SEQ ID NO: 315034 - RNA, 17 nt, Human herpesvirus 5
auaacgacgccagugau

SEQ ID NO: 315035 - RNA, 16 nt, Human herpesvirus 5
auaagaagccaagggg

SEQ ID NO: 315036 - RNA, 14 nt, Human herpesvirus 5
auaaguaccucuaa

SEQ ID NO: 315037 - RNA, 15 nt, Human herpesvirus 5
auaauaauaccacaa

SEQ ID NO: 315038 - RNA, 17 nt, Human herpesvirus 5
auaauacacgugguuua

SEQ ID NO: 315039 - RNA, 21 nt, Human herpesvirus 5
auaaucugccaaucgcaccuu

SEQ ID NO: 315040 - RNA, 16 nt, Human herpesvirus 5
auaauggucaauaacc

SEQ ID NO: 315041 - RNA, 18 nt, Human herpesvirus 5
auaauugcacauccucac

SEQ ID NO: 315042 - RNA, 19 nt, Human herpesvirus 5
auaauugcacauccucacg

SEQ ID NO: 315043 - RNA, 18 nt, Human herpesvirus 5
auacaaaaacaugcacau

SEQ ID NO: 315044 - RNA, 22 nt, Human herpesvirus 5
auacaagcuugguacacagcca

SEQ ID NO: 315045 - RNA, 23 nt, Human herpesvirus 5
auacaaggagcgacguaccagcu

SEQ ID NO: 315046 - RNA, 21 nt, Human herpesvirus 5
auacacccacguugcuagguc

SEQ ID NO: 315047 - RNA, 9 nt, Human herpesvirus 5
auacacguu

SEQ ID NO: 315048 - RNA, 13 nt, Human herpesvirus 5
auacaguacaaca

SEQ ID NO: 315049 - RNA, 19 nt, Human herpesvirus 5
auacauaugcgaugugcaa

SEQ ID NO: 315050 - RNA, 13 nt, Human herpesvirus 5
auaccaucaccua

SEQ ID NO: 315051 - RNA, 16 nt, Human herpesvirus 5
auacccgucacugcac

SEQ ID NO: 315052 - RNA, 15 nt, Human herpesvirus 5
auacccuaauaaagc

SEQ ID NO: 315053 - RNA, 13 nt, Human herpesvirus 5
auacgcaguguug

SEQ ID NO: 315054 - RNA, 15 nt, Human herpesvirus 5
auacgcaguguuguu

SEQ ID NO: 315055 - RNA, 20 nt, Human herpesvirus 5
auacgcuagcagaagacuuu

SEQ ID NO: 315056 - RNA, 18 nt, Human herpesvirus 5
auacgggagucuaccucc

SEQ ID NO: 315057 - RNA, 21 nt, Human herpesvirus 5
auacgugauuauacaacaggu

SEQ ID NO: 315058 - RNA, 21 nt, Human herpesvirus 5
auacuagggaaaacauaagaa

SEQ ID NO: 315059 - RNA, 17 nt, Human herpesvirus 5
ugacagcauacggggag

SEQ ID NO: 315060 - RNA, 20 nt, Human herpesvirus 5
ugacaguauuaacguguggu

SEQ ID NO: 315061 - RNA, 21 nt, Human herpesvirus 5
ugacaguauuaacguguggug

SEQ ID NO: 315062 - RNA, 13 nt, Human herpesvirus 5
ugaccaugggcua

SEQ ID NO: 315063 - RNA, 14 nt, Human herpesvirus 5
ugacccguggugag

SEQ ID NO: 315064 - RNA, 16 nt, Human herpesvirus 5
ugaccggcccuagaaa

SEQ ID NO: 315065 - RNA, 21 nt, Human herpesvirus 5
ugaccuggcugcuuaaugaca

SEQ ID NO: 315066 - RNA, 14 nt, Human herpesvirus 5
ugaccuugcugaug

SEQ ID NO: 315067 - RNA, 13 nt, Human herpesvirus 5
ccugccaccucag

SEQ ID NO: 315068 - RNA, 15 nt, Human herpesvirus 5
ccugccaccucagug

SEQ ID NO: 315069 - RNA, 14 nt, Human herpesvirus 5
ccugcguaccaaca

SEQ ID NO: 315070 - RNA, 15 nt, Human herpesvirus 5
ccugcugacgcuguu

SEQ ID NO: 315071 - RNA, 14 nt, Human herpesvirus 5
ccugcugacuauca

SEQ ID NO: 315072 - RNA, 14 nt, Human herpesvirus 5
ccugcugccgccac

SEQ ID NO: 315073 - RNA, 13 nt, Human herpesvirus 5
ccugcugcuacgc

SEQ ID NO: 315074 - RNA, 13 nt, Human herpesvirus 5
ccugcugcucgaa

SEQ ID NO: 315075 - RNA, 18 nt, Human herpesvirus 5
ccuggcccgaacgcugcu

SEQ ID NO: 315076 - RNA, 23 nt, Human herpesvirus 5
ccugguauccaacuucacuucaa

SEQ ID NO: 315077 - RNA, 19 nt, Human herpesvirus 5
ccuggugcaaaugcagcga

SEQ ID NO: 315078 - RNA, 13 nt, Human herpesvirus 5
ccugguugcugcc

SEQ ID NO: 315079 - RNA, 18 nt, Human herpesvirus 5
ccuguaaauaaaaagcug

SEQ ID NO: 315080 - RNA, 18 nt, Human herpesvirus 5
ccuguaauuauuccagcu

SEQ ID NO: 315081 - RNA, 19 nt, Human herpesvirus 5
ccugucagaaggcagugac

SEQ ID NO: 315082 - RNA, 15 nt, Human herpesvirus 5
ccugugcuuuugcuu

SEQ ID NO: 315083 - RNA, 13 nt, Human herpesvirus 5
ccuguggcaccgc

SEQ ID NO: 315084 - RNA, 19 nt, Human herpesvirus 5
ccugugguagaaugcugcu

SEQ ID NO: 315085 - RNA, 17 nt, Human herpesvirus 5
ccuguugaauaacacca

SEQ ID NO: 315086 - RNA, 21 nt, Human herpesvirus 5
ccuucuguauccauacuuacc

SEQ ID NO: 315087 - RNA, 22 nt, Human herpesvirus 5
ccuucuguauccauacuuacca

SEQ ID NO: 315088 - RNA, 20 nt, Human herpesvirus 5
ccuucuuccucggacaccgg

SEQ ID NO: 315089 - RNA, 14 nt, Human herpesvirus 5
ccuuguaccaacug

SEQ ID NO: 315090 - RNA, 17 nt, Human herpesvirus 5
ccuuuacggugcugcgu

SEQ ID NO: 315091 - RNA, 24 nt, Human herpesvirus 5
ccuuuauccgcuuucacaccgauu

SEQ ID NO: 315092 - RNA, 17 nt, Human herpesvirus 5
ccuuucuaggcuacucc

SEQ ID NO: 315093 - RNA, 19 nt, Human herpesvirus 5
ccuuucugaccuugcugau

SEQ ID NO: 315094 - RNA, 14 nt, Human herpesvirus 5
cgaaacguauccau

SEQ ID NO: 315095 - RNA, 13 nt, Human herpesvirus 5
cgaacaggugucu

SEQ ID NO: 315096 - RNA, 14 nt, Human herpesvirus 5
cgaacgcuacuucc

SEQ ID NO: 315097 - RNA, 14 nt, Human herpesvirus 5
cgaacguccucgga

SEQ ID NO: 315098 - RNA, 17 nt, Human herpesvirus 5
cgaagaccucaccaucu

SEQ ID NO: 315099 - RNA, 19 nt, Human herpesvirus 5
cgaagaccucaccaucuca

SEQ ID NO: 315100 - RNA, 13 nt, Human herpesvirus 5
cgaaguguugacc

SEQ ID NO: 315101 - RNA, 16 nt, Human herpesvirus 5
cgaaguuuuucauguc

SEQ ID NO: 315102 - RNA, 18 nt, Human herpesvirus 5
cgaaguuuuucaugucuu

SEQ ID NO: 315103 - RNA, 17 nt, Human herpesvirus 5
cgaauaacaacacauca

SEQ ID NO: 315104 - RNA, 16 nt, Human herpesvirus 5
cgaauggaucaucugu

SEQ ID NO: 315105 - RNA, 17 nt, Human herpesvirus 5
cgaauucccacuacacu

SEQ ID NO: 315106 - RNA, 14 nt, Human herpesvirus 5
cgacaacaucccuc

SEQ ID NO: 315107 - RNA, 13 nt, Human herpesvirus 5
cgacaaccugcug

SEQ ID NO: 315108 - RNA, 21 nt, Human herpesvirus 5
cgacacacguucgacauggac

SEQ ID NO: 315109 - RNA, 12 nt, Human herpesvirus 5
cgacacaugcac

SEQ ID NO: 315110 - RNA, 16 nt, Human herpesvirus 5
cgacauggagcccacg

SEQ ID NO: 315111 - RNA, 18 nt, Human herpesvirus 5
cgacauggcccucaugac

SEQ ID NO: 315112 - RNA, 19 nt, Human herpesvirus 5
cgaccaccguuaccaguac

SEQ ID NO: 315113 - RNA, 15 nt, Human herpesvirus 5
cgacccccaccagcg

SEQ ID NO: 315114 - RNA, 15 nt, Human herpesvirus 5
cgacgaaggacggga

SEQ ID NO: 315115 - RNA, 15 nt, Human herpesvirus 5
cgacgagcgcugcga

SEQ ID NO: 315116 - RNA, 14 nt, Human herpesvirus 5
cgacgcaugcauuc

SEQ ID NO: 315117 - RNA, 20 nt, Human herpesvirus 5
cgacgcaugcauucugguac

SEQ ID NO: 315118 - RNA, 12 nt, Human herpesvirus 5
cgacgccgucua

SEQ ID NO: 315119 - RNA, 16 nt, Human herpesvirus 5
cgacgcgcgaccgcga

SEQ ID NO: 315120 - RNA, 12 nt, Human herpesvirus 5
cgacggacgcga

SEQ ID NO: 315121 - RNA, 13 nt, Human herpesvirus 5
cgacguaccagcu

SEQ ID NO: 315122 - RNA, 14 nt, Human herpesvirus 5
cgacguaccagcug

SEQ ID NO: 315123 - RNA, 17 nt, Human herpesvirus 5
cgacguaccagcugucc

SEQ ID NO: 315124 - RNA, 13 nt, Human herpesvirus 5
cgacgucugcuca

SEQ ID NO: 315125 - RNA, 18 nt, Human herpesvirus 5
cgacucgagcgguucgua

SEQ ID NO: 315126 - RNA, 20 nt, Human herpesvirus 5
cgacugccuaacuguagcac

SEQ ID NO: 315127 - RNA, 19 nt, Human herpesvirus 5
cgacugcguggggugcugg

SEQ ID NO: 315128 - RNA, 19 nt, Human herpesvirus 5
cgagaacuaauauugcaau

SEQ ID NO: 315129 - RNA, 18 nt, Human herpesvirus 5
cgagacggcgugacacag

SEQ ID NO: 315130 - RNA, 23 nt, Human herpesvirus 5
cgagagcacugacagggguggca

SEQ ID NO: 315131 - RNA, 16 nt, Human herpesvirus 5
cgagcgcgaacgccgc

SEQ ID NO: 315132 - RNA, 18 nt, Human herpesvirus 5
cgagcgcgaacgccgcgc

SEQ ID NO: 315133 - RNA, 18 nt, Human herpesvirus 5
cgagcgcggcacgccguu

SEQ ID NO: 315134 - RNA, 17 nt, Human herpesvirus 5
cgagcggcggacuuggc

SEQ ID NO: 315135 - RNA, 20 nt, Human herpesvirus 5
cgagcugggcgaccgucucu

SEQ ID NO: 315136 - RNA, 17 nt, Human herpesvirus 5
cgaggagccaaacugcg

SEQ ID NO: 315137 - RNA, 19 nt, Human herpesvirus 5
cgaggcgcuggacgccauc

SEQ ID NO: 315138 - RNA, 16 nt, Human herpesvirus 5
cgaggcuuugauguag

SEQ ID NO: 315139 - RNA, 20 nt, Human herpesvirus 5
cgagggggcuuuccaaagcc

SEQ ID NO: 315140 - RNA, 20 nt, Human herpesvirus 5
cgaguagaaaagacagggaa

SEQ ID NO: 315141 - RNA, 15 nt, Human herpesvirus 5
cgaguccugcuguua

SEQ ID NO: 315142 - RNA, 17 nt, Human herpesvirus 5
cgagugcggucgguguc

SEQ ID NO: 315143 - RNA, 14 nt, Human herpesvirus 5
cgauaauugcuacg

SEQ ID NO: 315144 - RNA, 14 nt, Human herpesvirus 5
cgauacacgggggu

SEQ ID NO: 315145 - RNA, 17 nt, Human herpesvirus 5
cgauacgccggugcugc

SEQ ID NO: 315146 - RNA, 22 nt, Human herpesvirus 5
cgauagagauggcgauauugga

SEQ ID NO: 315147 - RNA, 22 nt, Human herpesvirus 5
cgauagucgacgauaugucgcg

SEQ ID NO: 315148 - RNA, 20 nt, Human herpesvirus 5
cgauauuggaaaaaucgaua

SEQ ID NO: 315149 - RNA, 23 nt, Human herpesvirus 5
cgaucaucuguccuaggggguga

SEQ ID NO: 315150 - RNA, 22 nt, Human herpesvirus 5
cgaucccuuuauccgcuuucac

SEQ ID NO: 315151 - RNA, 18 nt, Human herpesvirus 5
cgaucgcuggaaagacaa

SEQ ID NO: 315152 - RNA, 18 nt, Human herpesvirus 5
cgaucguaacccaggcgc

SEQ ID NO: 315153 - RNA, 21 nt, Human herpesvirus 5
cgaucugugauccgugcgcuc

SEQ ID NO: 315154 - RNA, 14 nt, Human herpesvirus 5
cgaugaaccuuccc

SEQ ID NO: 315155 - RNA, 17 nt, Human herpesvirus 5
cgaugaaccuuccccac

SEQ ID NO: 315156 - RNA, 22 nt, Human herpesvirus 5
cgaugacgaugucgaucuccau

SEQ ID NO: 315157 - RNA, 11 nt, Human herpesvirus 5
cgaugaugaua

SEQ ID NO: 315158 - RNA, 21 nt, Human herpesvirus 5
cgauggggucguggcucagcu

SEQ ID NO: 315159 - RNA, 20 nt, Human herpesvirus 5
cgauguuuuuugaaucauac

SEQ ID NO: 315160 - RNA, 21 nt, Human herpesvirus 5
cgauguuuuuugaaucauaca

SEQ ID NO: 315161 - RNA, 13 nt, Human herpesvirus 5
cgauucucuauac

SEQ ID NO: 315162 - RNA, 15 nt, Human herpesvirus 5
cgcaaaggccacgug

SEQ ID NO: 315163 - RNA, 13 nt, Human herpesvirus 5
cgcaacaacagca

SEQ ID NO: 315164 - RNA, 23 nt, Human herpesvirus 5
cgcaacacguagugagcuuugac

SEQ ID NO: 315165 - RNA, 15 nt, Human herpesvirus 5
cgcaaccacggugga

SEQ ID NO: 315166 - RNA, 17 nt, Human herpesvirus 5
cgcaacuucuaccaucu

SEQ ID NO: 315167 - RNA, 16 nt, Human herpesvirus 5
cgcaauagaauacugc

SEQ ID NO: 315168 - RNA, 22 nt, Human herpesvirus 5
cgcaauagaauacugcuaugua

SEQ ID NO: 315169 - RNA, 22 nt, Human herpesvirus 5
cgcacaucuauuuuugcuaauu

SEQ ID NO: 315170 - RNA, 14 nt, Human herpesvirus 5
cgcacgagacgcga

SEQ ID NO: 315171 - RNA, 19 nt, Human herpesvirus 5
cgcacuuuuuuuacuagua

SEQ ID NO: 315172 - RNA, 15 nt, Human herpesvirus 5
cgcagaaacuuuucc

SEQ ID NO: 315173 - RNA, 22 nt, Human herpesvirus 5
cgcagaaagaggggcaccugua

SEQ ID NO: 315174 - RNA, 17 nt, Human herpesvirus 5
cgcagaagaauguugcg

SEQ ID NO: 315175 - RNA, 22 nt, Human herpesvirus 5
cgcagacgucggcgguccucca

SEQ ID NO: 315176 - RNA, 21 nt, Human herpesvirus 5
cgcagcagagccaccaggugc

SEQ ID NO: 315177 - RNA, 17 nt, Human herpesvirus 5
cgcagcgcaccaugaga

SEQ ID NO: 315178 - RNA, 13 nt, Human herpesvirus 5
cgcaggagcugcu

SEQ ID NO: 315179 - RNA, 19 nt, Human herpesvirus 5
cgcaggccgccgccgcuca

SEQ ID NO: 315180 - RNA, 15 nt, Human herpesvirus 5
cgcaguuacaccaca

SEQ ID NO: 315181 - RNA, 18 nt, Human herpesvirus 5
cgcaucacccgccucaug

SEQ ID NO: 315182 - RNA, 16 nt, Human herpesvirus 5
cgcaucuugccggugc

SEQ ID NO: 315183 - RNA, 20 nt, Human herpesvirus 5
cgcaugucgucucaucacau

SEQ ID NO: 315184 - RNA, 19 nt, Human herpesvirus 5
cgcauguguugaauagugu

SEQ ID NO: 315185 - RNA, 22 nt, Human herpesvirus 5
cgcauguguugaauaguguccu

SEQ ID NO: 315186 - RNA, 19 nt, Human herpesvirus 5
cgccaacuaccgugccacc

SEQ ID NO: 315187 - RNA, 14 nt, Human herpesvirus 5
cgccaccgccgcca

SEQ ID NO: 315188 - RNA, 21 nt, Human herpesvirus 5
cgccaucuagacucacuuuau

SEQ ID NO: 315189 - RNA, 15 nt, Human herpesvirus 5
cgccaucuucaucuu

SEQ ID NO: 315190 - RNA, 13 nt, Human herpesvirus 5
cgccaugaugaca

SEQ ID NO: 315191 - RNA, 22 nt, Human herpesvirus 5
cgcccgacaaguucgaucucau

SEQ ID NO: 315192 - RNA, 15 nt, Human herpesvirus 5
cgcccgagcaggugc

SEQ ID NO: 315193 - RNA, 19 nt, Human herpesvirus 5
cgcccuaguggucuuucac

SEQ ID NO: 315194 - RNA, 17 nt, Human herpesvirus 5
cgccgauagaggcgaca

SEQ ID NO: 315195 - RNA, 17 nt, Human herpesvirus 5
cgccgccaccacccgac

SEQ ID NO: 315196 - RNA, 16 nt, Human herpesvirus 5
cgccgcccgacgccga

SEQ ID NO: 315197 - RNA, 15 nt, Human herpesvirus 5
cgccgccgacucgcu

SEQ ID NO: 315198 - RNA, 13 nt, Human herpesvirus 5
cgccgccgucacc

SEQ ID NO: 315199 - RNA, 16 nt, Human herpesvirus 5
cgccgcggcaccagag

SEQ ID NO: 315200 - RNA, 20 nt, Human herpesvirus 5
cgccggcaugucccuacuca

SEQ ID NO: 315201 - RNA, 15 nt, Human herpesvirus 5
cgccggcgggcggcu

SEQ ID NO: 315202 - RNA, 16 nt, Human herpesvirus 5
cgccgugacacuuugg

SEQ ID NO: 315203 - RNA, 15 nt, Human herpesvirus 5
cgccgugggcggcga

SEQ ID NO: 315204 - RNA, 21 nt, Human herpesvirus 5
cgccguggugcugggucagug

SEQ ID NO: 315205 - RNA, 18 nt, Human herpesvirus 5
cgccguguguuaccgccg

SEQ ID NO: 315206 - RNA, 19 nt, Human herpesvirus 5
cgccguugcggccgccgcu

SEQ ID NO: 315207 - RNA, 15 nt, Human herpesvirus 5
cgccuccgguggugc

SEQ ID NO: 315208 - RNA, 15 nt, Human herpesvirus 5
cgccugcgacggcgg

SEQ ID NO: 315209 - RNA, 21 nt, Human herpesvirus 5
cgccuuaucgugcuaggcaag

SEQ ID NO: 315210 - RNA, 13 nt, Human herpesvirus 5
cgccuucugcuac

SEQ ID NO: 315211 - RNA, 14 nt, Human herpesvirus 5
cgcgacgcuucaua

SEQ ID NO: 315212 - RNA, 13 nt, Human herpesvirus 5
cgcgaguugcaaa

SEQ ID NO: 315213 - RNA, 12 nt, Human herpesvirus 5
cgcgauucucac

SEQ ID NO: 315214 - RNA, 19 nt, Human herpesvirus 5
cgcgccacaacgccguccg

SEQ ID NO: 315215 - RNA, 15 nt, Human herpesvirus 5
cgcgcccacuggagu

SEQ ID NO: 315216 - RNA, 21 nt, Human herpesvirus 5
cgcgccucucggagccgccga

SEQ ID NO: 315217 - RNA, 12 nt, Human herpesvirus 5
cgcgcgaccgcg

SEQ ID NO: 315218 - RNA, 13 nt, Human herpesvirus 5
cgcgcgcccgcgc

SEQ ID NO: 315219 - RNA, 19 nt, Human herpesvirus 5
cgcgcucuguaccguuauu

SEQ ID NO: 315220 - RNA, 21 nt, Human herpesvirus 5
cgcgcugguuuggcuggguua

SEQ ID NO: 315221 - RNA, 15 nt, Human herpesvirus 5
cgcggaaacgacgga

SEQ ID NO: 315222 - RNA, 18 nt, Human herpesvirus 5
cgcggcgugaccacguca

SEQ ID NO: 315223 - RNA, 13 nt, Human herpesvirus 5
cgcgguacaugug

SEQ ID NO: 315224 - RNA, 18 nt, Human herpesvirus 5
cgcgguggucgaugcuga

SEQ ID NO: 315225 - RNA, 19 nt, Human herpesvirus 5
cgcgguggucgaugcugau

SEQ ID NO: 315226 - RNA, 21 nt, Human herpesvirus 5
cgcguaacgugucuucuucgc

SEQ ID NO: 315227 - RNA, 17 nt, Human herpesvirus 5
cgcgugcacgcgcugcu

SEQ ID NO: 315228 - RNA, 15 nt, Human herpesvirus 5
cgcgugccugggaac

SEQ ID NO: 315229 - RNA, 22 nt, Human herpesvirus 5
cgcuaacugauaacgauauguc

SEQ ID NO: 315230 - RNA, 23 nt, Human herpesvirus 5
cgcuagucaauaaagaaaaccac

SEQ ID NO: 315231 - RNA, 13 nt, Human herpesvirus 5
cgcuauacaccaa

SEQ ID NO: 315232 - RNA, 17 nt, Human herpesvirus 5
cgcuauacaccaaggcu

SEQ ID NO: 315233 - RNA, 15 nt, Human herpesvirus 5
cgcuauggcggccau

SEQ ID NO: 315234 - RNA, 23 nt, Human herpesvirus 5
cgcucgacguuucgcgaggacaa

SEQ ID NO: 315235 - RNA, 20 nt, Human herpesvirus 5
cgcucucgucaggcuuguca

SEQ ID NO: 315236 - RNA, 16 nt, Human herpesvirus 5
cgcucugacgccgcgc

SEQ ID NO: 315237 - RNA, 15 nt, Human herpesvirus 5
cgcucugccggcugc

SEQ ID NO: 315238 - RNA, 21 nt, Human herpesvirus 5
cgcugacaacccacucuugca

SEQ ID NO: 315239 - RNA, 20 nt, Human herpesvirus 5
cgcugacguugaugcggcgc

SEQ ID NO: 315240 - RNA, 18 nt, Human herpesvirus 5
cgcugauaacgacguggu

SEQ ID NO: 315241 - RNA, 19 nt, Human herpesvirus 5
cgcugcccgggggugacaa

SEQ ID NO: 315242 - RNA, 13 nt, Human herpesvirus 5
cgcugcugcucuc

SEQ ID NO: 315243 - RNA, 20 nt, Human herpesvirus 5
cgcugcuuuggagcacggga

SEQ ID NO: 315244 - RNA, 15 nt, Human herpesvirus 5
cgcuggacugacaca

SEQ ID NO: 315245 - RNA, 16 nt, Human herpesvirus 5
cgcuggacugacacag

SEQ ID NO: 315246 - RNA, 14 nt, Human herpesvirus 5
cgcuggcucggcgc

SEQ ID NO: 315247 - RNA, 13 nt, Human herpesvirus 5
cgcuguacauucu

SEQ ID NO: 315248 - RNA, 19 nt, Human herpesvirus 5
cgcuuagccaccaccugga

SEQ ID NO: 315249 - RNA, 17 nt, Human herpesvirus 5
cggaaguuccgacgcga

SEQ ID NO: 315250 - RNA, 22 nt, Human herpesvirus 5
cggagcagagggucguuguccu

SEQ ID NO: 315251 - RNA, 20 nt, Human herpesvirus 5
cggagcggaggaggugaccu

SEQ ID NO: 315252 - RNA, 12 nt, Human herpesvirus 5
cggauaucuacg

SEQ ID NO: 315253 - RNA, 22 nt, Human herpesvirus 5
cggaucaauugcgggcccugcu

SEQ ID NO: 315254 - RNA, 22 nt, Human herpesvirus 5
cggaugagcgugcugcucugca

SEQ ID NO: 315255 - RNA, 23 nt, Human herpesvirus 5
cggauugcggcuucucuuucuca

SEQ ID NO: 315256 - RNA, 14 nt, Human herpesvirus 5
cggcaacagaagcu

SEQ ID NO: 315257 - RNA, 20 nt, Human herpesvirus 5
cggcaacgauagucaucuca

SEQ ID NO: 315258 - RNA, 22 nt, Human herpesvirus 5
cggcacgccguugccacgagca

SEQ ID NO: 315259 - RNA, 18 nt, Human herpesvirus 5
cggcacuuuacauaaaac

SEQ ID NO: 315260 - RNA, 16 nt, Human herpesvirus 5
cggcagcugcuuucuu

SEQ ID NO: 315261 - RNA, 19 nt, Human herpesvirus 5
cggcagucuuuuccgugac

SEQ ID NO: 315262 - RNA, 21 nt, Human herpesvirus 5
cggcgacaucacggucacuuc

SEQ ID NO: 315263 - RNA, 12 nt, Human herpesvirus 5
cggcgccguccg

SEQ ID NO: 315264 - RNA, 20 nt, Human herpesvirus 5
cggcgugaaugggcacgccg

SEQ ID NO: 315265 - RNA, 15 nt, Human herpesvirus 5
cggcucaccacgcag

SEQ ID NO: 315266 - RNA, 23 nt, Human herpesvirus 5
cggcuccgccgucggugcgccca

SEQ ID NO: 315267 - RNA, 21 nt, Human herpesvirus 5
cggcugcugcaccacagcgcc

SEQ ID NO: 315268 - RNA, 15 nt, Human herpesvirus 5
cggcugcuguugcac

SEQ ID NO: 315269 - RNA, 24 nt, Human herpesvirus 5
cggcuuugugccgagaccgucgcc

SEQ ID NO: 315270 - RNA, 23 nt, Human herpesvirus 5
cgggaaacauguccccaucauca

SEQ ID NO: 315271 - RNA, 16 nt, Human herpesvirus 5
cgggcaauugcauguc

SEQ ID NO: 315272 - RNA, 14 nt, Human herpesvirus 5
cgggcagacaucuu

SEQ ID NO: 315273 - RNA, 23 nt, Human herpesvirus 5
cgggcagcccaaguucagcagca

SEQ ID NO: 315274 - RNA, 13 nt, Human herpesvirus 5
cgggcccugcuga

SEQ ID NO: 315275 - RNA, 19 nt, Human herpesvirus 5
cgggcuccaugcugacgua

SEQ ID NO: 315276 - RNA, 15 nt, Human herpesvirus 5
cgggcucggugaccu

SEQ ID NO: 315277 - RNA, 15 nt, Human herpesvirus 5
cggggaggagacaca

SEQ ID NO: 315278 - RNA, 18 nt, Human herpesvirus 5
cggggaggagacacagaa

SEQ ID NO: 315279 - RNA, 15 nt, Human herpesvirus 5
cgggguuaaacugga

SEQ ID NO: 315280 - RNA, 21 nt, Human herpesvirus 5
cgggucucuuugacacgagcg

SEQ ID NO: 315281 - RNA, 21 nt, Human herpesvirus 5
cgggugcaccgcggcaccuac

SEQ ID NO: 315282 - RNA, 15 nt, Human herpesvirus 5
cgggugguguugcgc

SEQ ID NO: 315283 - RNA, 13 nt, Human herpesvirus 5
cggguguacaaaa

SEQ ID NO: 315284 - RNA, 14 nt, Human herpesvirus 5
cgguaaaaccacgu

SEQ ID NO: 315285 - RNA, 13 nt, Human herpesvirus 5
cgguaacuggcag

SEQ ID NO: 315286 - RNA, 14 nt, Human herpesvirus 5
cgguaauuugauac

SEQ ID NO: 315287 - RNA, 13 nt, Human herpesvirus 5
cgguacacguccc

SEQ ID NO: 315288 - RNA, 14 nt, Human herpesvirus 5
cgguaccacuacua

SEQ ID NO: 315289 - RNA, 19 nt, Human herpesvirus 5
cggucccgugauggagaaa

SEQ ID NO: 315290 - RNA, 17 nt, Human herpesvirus 5
cggucgcaggacgggau

SEQ ID NO: 315291 - RNA, 20 nt, Human herpesvirus 5
cggucugugaucugcacgua

SEQ ID NO: 315292 - RNA, 19 nt, Human herpesvirus 5
cggugaaccgaacuaugug

SEQ ID NO: 315293 - RNA, 14 nt, Human herpesvirus 5
cggugagacgaggc

SEQ ID NO: 315294 - RNA, 18 nt, Human herpesvirus 5
cggugaugcgagugguga

SEQ ID NO: 315295 - RNA, 22 nt, Human herpesvirus 5
cggugcguggaccagacggcgu

SEQ ID NO: 315296 - RNA, 23 nt, Human herpesvirus 5
cgguggaaacgaguguaccaucu

SEQ ID NO: 315297 - RNA, 16 nt, Human herpesvirus 5
cggugguacugcugug

SEQ ID NO: 315298 - RNA, 11 nt, Human herpesvirus 5
cggugugcgac

SEQ ID NO: 315299 - RNA, 20 nt, Human herpesvirus 5
cgguguuuuucgucccgcuu

SEQ ID NO: 315300 - RNA, 14 nt, Human herpesvirus 5
cgguuaauguaucc

SEQ ID NO: 315301 - RNA, 16 nt, Human herpesvirus 5
cgguuaccuucuugcc

SEQ ID NO: 315302 - RNA, 17 nt, Human herpesvirus 5
cgguuaccuucuugccc

SEQ ID NO: 315303 - RNA, 18 nt, Human herpesvirus 5
cgguuaccuucuugccca

SEQ ID NO: 315304 - RNA, 12 nt, Human herpesvirus 5
cgguucucacgg

SEQ ID NO: 315305 - RNA, 16 nt, Human herpesvirus 5
cgguugcggccccgua

SEQ ID NO: 315306 - RNA, 13 nt, Human herpesvirus 5
cguaaacuuaucc

SEQ ID NO: 315307 - RNA, 23 nt, Human herpesvirus 5
cguaaagagagucacacuuaaga

SEQ ID NO: 315308 - RNA, 20 nt, Human herpesvirus 5
cguaaccacgucgaccaggu

SEQ ID NO: 315309 - RNA, 15 nt, Human herpesvirus 5
cguaacgucuucuga

SEQ ID NO: 315310 - RNA, 22 nt, Human herpesvirus 5
cguaacucuaucuacugucucc

SEQ ID NO: 315311 - RNA, 15 nt, Human herpesvirus 5
cguaauaucaucugc

SEQ ID NO: 315312 - RNA, 19 nt, Human herpesvirus 5
cguaccuagcuacuuugga

SEQ ID NO: 315313 - RNA, 18 nt, Human herpesvirus 5
cguacgguucaucgucua

SEQ ID NO: 315314 - RNA, 20 nt, Human herpesvirus 5
cguacgucaccgcgcuauua

SEQ ID NO: 315315 - RNA, 20 nt, Human herpesvirus 5
cguacucgucguguccguga

SEQ ID NO: 315316 - RNA, 16 nt, Human herpesvirus 5
cguacuguccuuuguc

SEQ ID NO: 315317 - RNA, 14 nt, Human herpesvirus 5
cguagccaccuguu

SEQ ID NO: 315318 - RNA, 15 nt, Human herpesvirus 5
cguagccgaugcuga

SEQ ID NO: 315319 - RNA, 18 nt, Human herpesvirus 5
cguaggcagcgucucuug

SEQ ID NO: 315320 - RNA, 16 nt, Human herpesvirus 5
cgucaaaaauaacguc

SEQ ID NO: 315321 - RNA, 19 nt, Human herpesvirus 5
cgucaaaaauaacgucauu

SEQ ID NO: 315322 - RNA, 15 nt, Human herpesvirus 5
cgucaaccauuggca

SEQ ID NO: 315323 - RNA, 16 nt, Human herpesvirus 5
cgucacgcucaaggac

SEQ ID NO: 315324 - RNA, 10 nt, Human herpesvirus 5
cgucacuucc

SEQ ID NO: 315325 - RNA, 14 nt, Human herpesvirus 5
cguccagcaccacg

SEQ ID NO: 315326 - RNA, 16 nt, Human herpesvirus 5
cguccaugucgcugcg

SEQ ID NO: 315327 - RNA, 17 nt, Human herpesvirus 5
cgucccuggggcugcug

SEQ ID NO: 315328 - RNA, 20 nt, Human herpesvirus 5
cgucgcaucaucaacagcag

SEQ ID NO: 315329 - RNA, 19 nt, Human herpesvirus 5
cgucgugggcuacuuugac

SEQ ID NO: 315330 - RNA, 11 nt, Human herpesvirus 5
cgucuccauga

SEQ ID NO: 315331 - RNA, 15 nt, Human herpesvirus 5
cgucugcauguucau

SEQ ID NO: 315332 - RNA, 16 nt, Human herpesvirus 5
cgucugcgccuuuugc

SEQ ID NO: 315333 - RNA, 23 nt, Human herpesvirus 5
cgucuggagguggccugcaucuu

SEQ ID NO: 315334 - RNA, 13 nt, Human herpesvirus 5
cgucuucaugacg

SEQ ID NO: 315335 - RNA, 22 nt, Human herpesvirus 5
cgucuucugaagccgucaguca

SEQ ID NO: 315336 - RNA, 18 nt, Human herpesvirus 5
cgugaaugggcacgccgu

SEQ ID NO: 315337 - RNA, 12 nt, Human herpesvirus 5
cgugacauccaa

SEQ ID NO: 315338 - RNA, 17 nt, Human herpesvirus 5
cgugacgguacuuaucg

SEQ ID NO: 315339 - RNA, 15 nt, Human herpesvirus 5
cgugagcucccaucu

SEQ ID NO: 315340 - RNA, 19 nt, Human herpesvirus 5
cgugagcucccaucuucua

SEQ ID NO: 315341 - RNA, 19 nt, Human herpesvirus 5
cgugcaacggcgacgcggu

SEQ ID NO: 315342 - RNA, 15 nt, Human herpesvirus 5
cgugcaguaccucaa

SEQ ID NO: 315343 - RNA, 17 nt, Human herpesvirus 5
cgugccaggcuguucac

SEQ ID NO: 315344 - RNA, 16 nt, Human herpesvirus 5
cgugcccagccccgua

SEQ ID NO: 315345 - RNA, 20 nt, Human herpesvirus 5
cgugcccguuuucacagcag

SEQ ID NO: 315346 - RNA, 21 nt, Human herpesvirus 5
cgugccuuguuuuaucuuuaa

SEQ ID NO: 315347 - RNA, 14 nt, Human herpesvirus 5
cgugcgggugcaug

SEQ ID NO: 315348 - RNA, 21 nt, Human herpesvirus 5
cgugcucgggcguguggguga

SEQ ID NO: 315349 - RNA, 16 nt, Human herpesvirus 5
cgugcucgugcccauc

SEQ ID NO: 315350 - RNA, 16 nt, Human herpesvirus 5
cgugcuuggacuggua

SEQ ID NO: 315351 - RNA, 22 nt, Human herpesvirus 5
cgugcuuuuggugcgccacgua

SEQ ID NO: 315352 - RNA, 14 nt, Human herpesvirus 5
cguggaaaauugca

SEQ ID NO: 315353 - RNA, 14 nt, Human herpesvirus 5
cguggaaggcaccg

SEQ ID NO: 315354 - RNA, 13 nt, Human herpesvirus 5
cguggauggucau

SEQ ID NO: 315355 - RNA, 17 nt, Human herpesvirus 5
cguggauggucauauau

SEQ ID NO: 315356 - RNA, 19 nt, Human herpesvirus 5
cguggcuuucuccgacgug

SEQ ID NO: 315357 - RNA, 16 nt, Human herpesvirus 5
cguggguuggucacug

SEQ ID NO: 315358 - RNA, 16 nt, Human herpesvirus 5
cguggucacgucggcu

SEQ ID NO: 315359 - RNA, 16 nt, Human herpesvirus 5
cgugucagucucugaa

SEQ ID NO: 315360 - RNA, 12 nt, Human herpesvirus 5
cguguccgcccc

SEQ ID NO: 315361 - RNA, 15 nt, Human herpesvirus 5
cguguccgugaucac

SEQ ID NO: 315362 - RNA, 12 nt, Human herpesvirus 5
cgugugugcucu

SEQ ID NO: 315363 - RNA, 17 nt, Human herpesvirus 5
cguguguguuucuuaac

SEQ ID NO: 315364 - RNA, 17 nt, Human herpesvirus 5
cguguucucccgacguc

SEQ ID NO: 315365 - RNA, 19 nt, Human herpesvirus 5
cguguuucaaacagcacau

SEQ ID NO: 315366 - RNA, 20 nt, Human herpesvirus 5
cguuaacuauuccacuagua

SEQ ID NO: 315367 - RNA, 16 nt, Human herpesvirus 5
cguuaccgccucuguc

SEQ ID NO: 315368 - RNA, 15 nt, Human herpesvirus 5
cguuaucgaugcugc

SEQ ID NO: 315369 - RNA, 15 nt, Human herpesvirus 5
cguucaauaaucucc

SEQ ID NO: 315370 - RNA, 18 nt, Human herpesvirus 5
cguucaggauuaacguag

SEQ ID NO: 315371 - RNA, 19 nt, Human herpesvirus 5
cguuccguggagucgucuc

SEQ ID NO: 315372 - RNA, 17 nt, Human herpesvirus 5
cguucgaaggcuacucu

SEQ ID NO: 315373 - RNA, 12 nt, Human herpesvirus 5
cguucgacaugg

SEQ ID NO: 315374 - RNA, 17 nt, Human herpesvirus 5
cguuggugaauguuacc

SEQ ID NO: 315375 - RNA, 22 nt, Human herpesvirus 5
cguuguaauauaaggagcucau

SEQ ID NO: 315376 - RNA, 18 nt, Human herpesvirus 5
cguuguacgcauuacaca

SEQ ID NO: 315377 - RNA, 23 nt, Human herpesvirus 5
cguuuauuuuucagcucacuguu

SEQ ID NO: 315378 - RNA, 18 nt, Human herpesvirus 5
cguuucuaucaccuaauc

SEQ ID NO: 315379 - RNA, 21 nt, Human herpesvirus 5
cguuucugauagccauguucc

SEQ ID NO: 315380 - RNA, 20 nt, Human herpesvirus 5
cguuugacucgcgugccaau

SEQ ID NO: 315381 - RNA, 20 nt, Human herpesvirus 5
cguuuuacuggcgacuuuuu

SEQ ID NO: 315382 - RNA, 19 nt, Human herpesvirus 5
cuaaaacguaaaaagaaug

SEQ ID NO: 315383 - RNA, 19 nt, Human herpesvirus 5
cuaaaguuacgaaucucau

SEQ ID NO: 315384 - RNA, 19 nt, Human herpesvirus 5
cuaaauuguuauugccagu

SEQ ID NO: 315385 - RNA, 14 nt, Human herpesvirus 5
cuaacgucacuuca

SEQ ID NO: 315386 - RNA, 23 nt, Human herpesvirus 5
cuaacugauaacgauaugucgcg

SEQ ID NO: 315387 - RNA, 13 nt, Human herpesvirus 5
cuaacuguagcac

SEQ ID NO: 315388 - RNA, 15 nt, Human herpesvirus 5
cuaacuguagcacga

SEQ ID NO: 315389 - RNA, 14 nt, Human herpesvirus 5
cuaagagcuuugac

SEQ ID NO: 315390 - RNA, 18 nt, Human herpesvirus 5
cuaauaaagcacaccgcg

SEQ ID NO: 315391 - RNA, 16 nt, Human herpesvirus 5
cuaauuauugccauaa

SEQ ID NO: 315392 - RNA, 16 nt, Human herpesvirus 5
cuaauugguacucuag

SEQ ID NO: 315393 - RNA, 13 nt, Human herpesvirus 5
cuacaaaggaaaa

SEQ ID NO: 315394 - RNA, 20 nt, Human herpesvirus 5
cuacacgccuugcaccuggg

SEQ ID NO: 315395 - RNA, 15 nt, Human herpesvirus 5
cuacacugaacuuga

SEQ ID NO: 315396 - RNA, 21 nt, Human herpesvirus 5
cuacagaauugauuucaacaa

SEQ ID NO: 315397 - RNA, 16 nt, Human herpesvirus 5
cuacagcaaugacaug

SEQ ID NO: 315398 - RNA, 18 nt, Human herpesvirus 5
cuacagcaaugacaugga

SEQ ID NO: 315399 - RNA, 19 nt, Human herpesvirus 5
cuacagcaaugacauggau

SEQ ID NO: 315400 - RNA, 16 nt, Human herpesvirus 5
cuacaucacugacaag

SEQ ID NO: 315401 - RNA, 18 nt, Human herpesvirus 5
cuacaucucaucaagcac

SEQ ID NO: 315402 - RNA, 22 nt, Human herpesvirus 5
cuacaugcuauaagacagccuu

SEQ ID NO: 315403 - RNA, 23 nt, Human herpesvirus 5
cuacaugcuauaagacagccuua

SEQ ID NO: 315404 - RNA, 13 nt, Human herpesvirus 5
cuacauucaauac

SEQ ID NO: 315405 - RNA, 21 nt, Human herpesvirus 5
cuacauucgccgcaaugggcu

SEQ ID NO: 315406 - RNA, 15 nt, Human herpesvirus 5
cuaccaauacugcau

SEQ ID NO: 315407 - RNA, 17 nt, Human herpesvirus 5
cuaccucggccuuuuca

SEQ ID NO: 315408 - RNA, 21 nt, Human herpesvirus 5
cuaccugcgcgauacauugcc

SEQ ID NO: 315409 - RNA, 21 nt, Human herpesvirus 5
cuacgaucgcuggaaagacaa

SEQ ID NO: 315410 - RNA, 14 nt, Human herpesvirus 5
cuacgcgaccagcu

SEQ ID NO: 315411 - RNA, 12 nt, Human herpesvirus 5
cuacgguggugu

SEQ ID NO: 315412 - RNA, 21 nt, Human herpesvirus 5
cuacucacaauggaagccaua

SEQ ID NO: 315413 - RNA, 15 nt, Human herpesvirus 5
cuacucacguuggug

SEQ ID NO: 315414 - RNA, 20 nt, Human herpesvirus 5
cuacuccgaauaacaacaca

SEQ ID NO: 315415 - RNA, 21 nt, Human herpesvirus 5
cuacucgcacaaccuguggug

SEQ ID NO: 315416 - RNA, 20 nt, Human herpesvirus 5
cuacucugacuguguagauc

SEQ ID NO: 315417 - RNA, 20 nt, Human herpesvirus 5
cuagacaggguaacagccuu

SEQ ID NO: 315418 - RNA, 21 nt, Human herpesvirus 5
cuagaugcuagcaauaauccc

SEQ ID NO: 315419 - RNA, 18 nt, Human herpesvirus 5
cuagcacagagacaccaa

SEQ ID NO: 315420 - RNA, 19 nt, Human herpesvirus 5
cuagcacagagacaccaau

SEQ ID NO: 315421 - RNA, 15 nt, Human herpesvirus 5
cuagcuacuuuggaa

SEQ ID NO: 315422 - RNA, 22 nt, Human herpesvirus 5
cuaggcuacucugacuguguag

SEQ ID NO: 315423 - RNA, 21 nt, Human herpesvirus 5
cuaguacugagacagccacau

SEQ ID NO: 315424 - RNA, 21 nt, Human herpesvirus 5
cuagucaauaaagaaaaccac

SEQ ID NO: 315425 - RNA, 20 nt, Human herpesvirus 5
cuaguuagauuuccugugua

SEQ ID NO: 315426 - RNA, 19 nt, Human herpesvirus 5
cuauaaauguucucugaaa

SEQ ID NO: 315427 - RNA, 12 nt, Human herpesvirus 5
cuauaagacagc

SEQ ID NO: 315428 - RNA, 15 nt, Human herpesvirus 5
cuauaagacagccuu

SEQ ID NO: 315429 - RNA, 13 nt, Human herpesvirus 5
cuauacacauaug

SEQ ID NO: 315430 - RNA, 15 nt, Human herpesvirus 5
cuauacaccaaggcu

SEQ ID NO: 315431 - RNA, 16 nt, Human herpesvirus 5
cuauaccaucaccuau

SEQ ID NO: 315432 - RNA, 13 nt, Human herpesvirus 5
cuauagacucuau

SEQ ID NO: 315433 - RNA, 17 nt, Human herpesvirus 5
cuauagcgggauuuacu

SEQ ID NO: 315434 - RNA, 19 nt, Human herpesvirus 5
cuauaugcgugaggucugu

SEQ ID NO: 315435 - RNA, 20 nt, Human herpesvirus 5
cuauauuaucuuuuaccaac

SEQ ID NO: 315436 - RNA, 19 nt, Human herpesvirus 5
cuaucauaaagaaugcaac

SEQ ID NO: 315437 - RNA, 16 nt, Human herpesvirus 5
cuaucaugacaccgac

SEQ ID NO: 315438 - RNA, 21 nt, Human herpesvirus 5
cuaucgacccccguacugccu

SEQ ID NO: 315439 - RNA, 15 nt, Human herpesvirus 5
cuaucgcgacagaca

SEQ ID NO: 315440 - RNA, 21 nt, Human herpesvirus 5
cuaucuucaaccucacguuaa

SEQ ID NO: 315441 - RNA, 13 nt, Human herpesvirus 5
cuaugauccugug

SEQ ID NO: 315442 - RNA, 19 nt, Human herpesvirus 5
cuauguuauacucuguaau

SEQ ID NO: 315443 - RNA, 22 nt, Human herpesvirus 5
cuauuggcagaagcauagcgau

SEQ ID NO: 315444 - RNA, 20 nt, Human herpesvirus 5
cuauuguguguacgacagcc

SEQ ID NO: 315445 - RNA, 14 nt, Human herpesvirus 5
cuauuuuggcacga

SEQ ID NO: 315446 - RNA, 18 nt, Human herpesvirus 5
cucaacgacuuucuggag

SEQ ID NO: 315447 - RNA, 19 nt, Human herpesvirus 5
cucaaggagaacaccacgg

SEQ ID NO: 315448 - RNA, 18 nt, Human herpesvirus 5
cucaaguacggagaugug

SEQ ID NO: 315449 - RNA, 23 nt, Human herpesvirus 5
cucaauaaacgugucacgccugu

SEQ ID NO: 315450 - RNA, 19 nt, Human herpesvirus 5
cucaaucugcucgaccgcu

SEQ ID NO: 315451 - RNA, 12 nt, Human herpesvirus 5
cucacaauggaa

SEQ ID NO: 315452 - RNA, 17 nt, Human herpesvirus 5
cucacaauggaagccau

SEQ ID NO: 315453 - RNA, 22 nt, Human herpesvirus 5
cucaccagaaugcuaguuugua

SEQ ID NO: 315454 - RNA, 15 nt, Human herpesvirus 5
cucacgagugcccuu

SEQ ID NO: 315455 - RNA, 16 nt, Human herpesvirus 5
cucacgagugcccuua

SEQ ID NO: 315456 - RNA, 17 nt, Human herpesvirus 5
cucacgcacauauguag

SEQ ID NO: 315457 - RNA, 23 nt, Human herpesvirus 5
cucacgcacauauguagcacuca

SEQ ID NO: 315458 - RNA, 22 nt, Human herpesvirus 5
cucacgucaguguuguccccua

SEQ ID NO: 315459 - RNA, 23 nt, Human herpesvirus 5
cucacgucaguguuguccccuau

SEQ ID NO: 315460 - RNA, 22 nt, Human herpesvirus 5
cucacuguuugaauaccguaaa

SEQ ID NO: 315461 - RNA, 22 nt, Human herpesvirus 5
cucacuuuccucgccaccacua

SEQ ID NO: 315462 - RNA, 14 nt, Human herpesvirus 5
cucagggcugggau

SEQ ID NO: 315463 - RNA, 13 nt, Human herpesvirus 5
cucaguacuuugg

SEQ ID NO: 315464 - RNA, 12 nt, Human herpesvirus 5
cucagucugcaa

SEQ ID NO: 315465 - RNA, 20 nt, Human herpesvirus 5
cucagugaauucuggcaaga

SEQ ID NO: 315466 - RNA, 12 nt, Human herpesvirus 5
cucaucuagaaa

SEQ ID NO: 315467 - RNA, 19 nt, Human herpesvirus 5
cucauuugcuuuuacaaac

SEQ ID NO: 315468 - RNA, 13 nt, Human herpesvirus 5
cuccacggccucc

SEQ ID NO: 315469 - RNA, 11 nt, Human herpesvirus 5
cuccaucacac

SEQ ID NO: 315470 - RNA, 21 nt, Human herpesvirus 5
cuccaucgugugccuaggucu

SEQ ID NO: 315471 - RNA, 14 nt, Human herpesvirus 5
cucccaucuucuaa

SEQ ID NO: 315472 - RNA, 21 nt, Human herpesvirus 5
cucccaugagaauuagagcau

SEQ ID NO: 315473 - RNA, 16 nt, Human herpesvirus 5
cuccccggugugucua

SEQ ID NO: 315474 - RNA, 20 nt, Human herpesvirus 5
cucccggcgcucugacagcc

SEQ ID NO: 315475 - RNA, 21 nt, Human herpesvirus 5
cuccgaauaacaacacaucaa

SEQ ID NO: 315476 - RNA, 19 nt, Human herpesvirus 5
cuccgccggcaugucccua

SEQ ID NO: 315477 - RNA, 14 nt, Human herpesvirus 5
cuccguguucuuaa

SEQ ID NO: 315478 - RNA, 19 nt, Human herpesvirus 5
cuccuacgacaacaucccu

SEQ ID NO: 315479 - RNA, 17 nt, Human herpesvirus 5
cuccuaguaaugcauua

SEQ ID NO: 315480 - RNA, 16 nt, Human herpesvirus 5
cucgaagcaacaauac

SEQ ID NO: 315481 - RNA, 14 nt, Human herpesvirus 5
cucgaugaagccua

SEQ ID NO: 315482 - RNA, 18 nt, Human herpesvirus 5
cucgaugaagccuaucaa

SEQ ID NO: 315483 - RNA, 23 nt, Human herpesvirus 5
cucgaugcgccuccgguggugcg

SEQ ID NO: 315484 - RNA, 21 nt, Human herpesvirus 5
cucgcccggugagggacccuc

SEQ ID NO: 315485 - RNA, 21 nt, Human herpesvirus 5
cucgccgccgcgccacacgcu

SEQ ID NO: 315486 - RNA, 19 nt, Human herpesvirus 5
cucgcgcccgcagacacca

SEQ ID NO: 315487 - RNA, 20 nt, Human herpesvirus 5
cucgcgucuuagacgcgcgg

SEQ ID NO: 315488 - RNA, 16 nt, Human herpesvirus 5
cucgcuaaccacuacc

SEQ ID NO: 315489 - RNA, 13 nt, Human herpesvirus 5
cucggaccgugac

SEQ ID NO: 315490 - RNA, 20 nt, Human herpesvirus 5
cucggaucuacucaucggca

SEQ ID NO: 315491 - RNA, 16 nt, Human herpesvirus 5
cucggcggccacggcg

SEQ ID NO: 315492 - RNA, 13 nt, Human herpesvirus 5
cucggcgugcuca

SEQ ID NO: 315493 - RNA, 21 nt, Human herpesvirus 5
cucgggaggacucagagccac

SEQ ID NO: 315494 - RNA, 19 nt, Human herpesvirus 5
cucguacgacgucugcuca

SEQ ID NO: 315495 - RNA, 23 nt, Human herpesvirus 5
cucguccacacgccgucucguca

SEQ ID NO: 315496 - RNA, 17 nt, Human herpesvirus 5
cucgucgccuuccagcu

SEQ ID NO: 315497 - RNA, 19 nt, Human herpesvirus 5
cucgugcgugucgcugggc

SEQ ID NO: 315498 - RNA, 22 nt, Human herpesvirus 5
cucgugucgacuccgcuggauc

SEQ ID NO: 315499 - RNA, 19 nt, Human herpesvirus 5
cucguguuuuuuauucaac

SEQ ID NO: 315500 - RNA, 13 nt, Human herpesvirus 5
cucuaaaaacacc

SEQ ID NO: 315501 - RNA, 18 nt, Human herpesvirus 5
cucuaaacgccaccugca

SEQ ID NO: 315502 - RNA, 18 nt, Human herpesvirus 5
cucuagugcccauacuuu

SEQ ID NO: 315503 - RNA, 12 nt, Human herpesvirus 5
cucuauguuaca

SEQ ID NO: 315504 - RNA, 20 nt, Human herpesvirus 5
cucuauguuacaaugucacu

SEQ ID NO: 315505 - RNA, 16 nt, Human herpesvirus 5
cucuauguuauacucu

SEQ ID NO: 315506 - RNA, 15 nt, Human herpesvirus 5
cucugacuguguaga

SEQ ID NO: 315507 - RNA, 15 nt, Human herpesvirus 5
cucugcgccgucucu

SEQ ID NO: 315508 - RNA, 13 nt, Human herpesvirus 5
cucugcguugcca

SEQ ID NO: 315509 - RNA, 14 nt, Human herpesvirus 5
cucuggaugguacg

SEQ ID NO: 315510 - RNA, 18 nt, Human herpesvirus 5
cucuggcccugcuguaca

SEQ ID NO: 315511 - RNA, 13 nt, Human herpesvirus 5
cucuggugcuaug

SEQ ID NO: 315512 - RNA, 23 nt, Human herpesvirus 5
cucugugaugaacgacacaugca

SEQ ID NO: 315513 - RNA, 22 nt, Human herpesvirus 5
cucuuagcgugugacguggaua

SEQ ID NO: 315514 - RNA, 15 nt, Human herpesvirus 5
cucuuccucagugaa

SEQ ID NO: 315515 - RNA, 12 nt, Human herpesvirus 5
cucuucuggccc

SEQ ID NO: 315516 - RNA, 15 nt, Human herpesvirus 5
cucuuggcacgggga

SEQ ID NO: 315517 - RNA, 15 nt, Human herpesvirus 5
cucuuuucuauguaa

SEQ ID NO: 315518 - RNA, 13 nt, Human herpesvirus 5
cugaaaacaccau

SEQ ID NO: 315519 - RNA, 11 nt, Human herpesvirus 5
cugaaacacag

SEQ ID NO: 315520 - RNA, 15 nt, Human herpesvirus 5
cugaaaccuaccugg

SEQ ID NO: 315521 - RNA, 16 nt, Human herpesvirus 5
cugaaaccuaccuggg

SEQ ID NO: 315522 - RNA, 13 nt, Human herpesvirus 5
cugaaguaagcau

SEQ ID NO: 315523 - RNA, 17 nt, Human herpesvirus 5
cugaauuauccuugacu

SEQ ID NO: 315524 - RNA, 15 nt, Human herpesvirus 5
cugacaauggacuga

SEQ ID NO: 315525 - RNA, 16 nt, Human herpesvirus 5
cugagaacauguggaa

SEQ ID NO: 315526 - RNA, 15 nt, Human herpesvirus 5
cugagacacuugaau

SEQ ID NO: 315527 - RNA, 17 nt, Human herpesvirus 5
cugagacagccacauca

SEQ ID NO: 315528 - RNA, 13 nt, Human herpesvirus 5
cugagacugagac

SEQ ID NO: 315529 - RNA, 19 nt, Human herpesvirus 5
cugagcgccgacuggaucc

SEQ ID NO: 315530 - RNA, 12 nt, Human herpesvirus 5
cugaggggaaag

SEQ ID NO: 315531 - RNA, 15 nt, Human herpesvirus 5
cugaucugucaucac

SEQ ID NO: 315532 - RNA, 15 nt, Human herpesvirus 5
cugauucgccgugug

SEQ ID NO: 315533 - RNA, 14 nt, Human herpesvirus 5
cugcaaagucaaca

SEQ ID NO: 315534 - RNA, 22 nt, Human herpesvirus 5
cugcaagacgcaugauuagcaa

SEQ ID NO: 315535 - RNA, 14 nt, Human herpesvirus 5
cugcaaggccucua

SEQ ID NO: 315536 - RNA, 14 nt, Human herpesvirus 5
cugcaauccgguaa

SEQ ID NO: 315537 - RNA, 17 nt, Human herpesvirus 5
cugcaccaaccgacgua

SEQ ID NO: 315538 - RNA, 23 nt, Human herpesvirus 5
cugcaccaaccgacguacgaaau

SEQ ID NO: 315539 - RNA, 23 nt, Human herpesvirus 5
cugcaccacggccuuauguggcu

SEQ ID NO: 315540 - RNA, 20 nt, Human herpesvirus 5
cugcaccucgaugaagccua

SEQ ID NO: 315541 - RNA, 15 nt, Human herpesvirus 5
cugcacgaccugcuc

SEQ ID NO: 315542 - RNA, 22 nt, Human herpesvirus 5
cugcacgccgccgugacugcga

SEQ ID NO: 315543 - RNA, 21 nt, Human herpesvirus 5
cugcagccggugcgcgaccgc

SEQ ID NO: 315544 - RNA, 21 nt, Human herpesvirus 5
cugcauagaguuacaugcaac

SEQ ID NO: 315545 - RNA, 16 nt, Human herpesvirus 5
cugcauguuggugccc

SEQ ID NO: 315546 - RNA, 17 nt, Human herpesvirus 5
cugccaaucgcaccuua

SEQ ID NO: 315547 - RNA, 17 nt, Human herpesvirus 5
cugccaccgacauggag

SEQ ID NO: 315548 - RNA, 14 nt, Human herpesvirus 5
cugccuccuaguaa

SEQ ID NO: 315549 - RNA, 14 nt, Human herpesvirus 5
cugccucgacaucu

SEQ ID NO: 315550 - RNA, 18 nt, Human herpesvirus 5
cugccuuacggcgaccgu

SEQ ID NO: 315551 - RNA, 13 nt, Human herpesvirus 5
cugcgccgucucu

SEQ ID NO: 315552 - RNA, 22 nt, Human herpesvirus 5
cugcgcgucaccgaugccggcc

SEQ ID NO: 315553 - RNA, 17 nt, Human herpesvirus 5
cugcgcuacgucuacua

SEQ ID NO: 315554 - RNA, 19 nt, Human herpesvirus 5
cugcguguguguuucuuaa

SEQ ID NO: 315555 - RNA, 17 nt, Human herpesvirus 5
cugcguucuguggugcg

SEQ ID NO: 315556 - RNA, 21 nt, Human herpesvirus 5
cugcucaaacccggucagucu

SEQ ID NO: 315557 - RNA, 12 nt, Human herpesvirus 5
cugcucagguac

SEQ ID NO: 315558 - RNA, 21 nt, Human herpesvirus 5
cugcucauggaggucuaucac

SEQ ID NO: 315559 - RNA, 13 nt, Human herpesvirus 5
cugcucgaccgcu

SEQ ID NO: 315560 - RNA, 20 nt, Human herpesvirus 5
cugcugcucggcguggucaa

SEQ ID NO: 315561 - RNA, 16 nt, Human herpesvirus 5
cugcuguugcacgggc

SEQ ID NO: 315562 - RNA, 18 nt, Human herpesvirus 5
cuggaaauucaauaaaaa

SEQ ID NO: 315563 - RNA, 22 nt, Human herpesvirus 5
cuggaaauucaauaaaaaccac

SEQ ID NO: 315564 - RNA, 20 nt, Human herpesvirus 5
cuggacacucuggcccugcu

SEQ ID NO: 315565 - RNA, 21 nt, Human herpesvirus 5
cuggacgcggugaacgugcgc

SEQ ID NO: 315566 - RNA, 22 nt, Human herpesvirus 5
cuggacgguacaguuuaugaua

SEQ ID NO: 315567 - RNA, 13 nt, Human herpesvirus 5
cuggacugacaca

SEQ ID NO: 315568 - RNA, 15 nt, Human herpesvirus 5
cuggagcacacugcu

SEQ ID NO: 315569 - RNA, 18 nt, Human herpesvirus 5
cuggauacaguugauaac

SEQ ID NO: 315570 - RNA, 18 nt, Human herpesvirus 5
cuggcaacgugccacgug

SEQ ID NO: 315571 - RNA, 15 nt, Human herpesvirus 5
cuggcccugcuguac

SEQ ID NO: 315572 - RNA, 16 nt, Human herpesvirus 5
cuggccgagacggcgu

SEQ ID NO: 315573 - RNA, 16 nt, Human herpesvirus 5
cuggcggcggguagcc

SEQ ID NO: 315574 - RNA, 15 nt, Human herpesvirus 5
cuggcguucaccacg

SEQ ID NO: 315575 - RNA, 18 nt, Human herpesvirus 5
cuggcguucaccacgccg

SEQ ID NO: 315576 - RNA, 18 nt, Human herpesvirus 5
cuggcugguguugccgca

SEQ ID NO: 315577 - RNA, 23 nt, Human herpesvirus 5
cugggacaccacgguuuaccaca

SEQ ID NO: 315578 - RNA, 15 nt, Human herpesvirus 5
cugggcgaccgucuc

SEQ ID NO: 315579 - RNA, 13 nt, Human herpesvirus 5
cugggcugcaagg

SEQ ID NO: 315580 - RNA, 21 nt, Human herpesvirus 5
cugggcuggcccucgcagugc

SEQ ID NO: 315581 - RNA, 21 nt, Human herpesvirus 5
cuggggacggugaugaugcug

SEQ ID NO: 315582 - RNA, 17 nt, Human herpesvirus 5
cuggggcaccuaucucc

SEQ ID NO: 315583 - RNA, 22 nt, Human herpesvirus 5
cuggggcugcugcugcacgggc

SEQ ID NO: 315584 - RNA, 21 nt, Human herpesvirus 5
cuggggucaaaagccugggua

SEQ ID NO: 315585 - RNA, 15 nt, Human herpesvirus 5
cuggucccaauguuc

SEQ ID NO: 315586 - RNA, 22 nt, Human herpesvirus 5
cuggucuggcccaaagaccgcu

SEQ ID NO: 315587 - RNA, 19 nt, Human herpesvirus 5
cugguuccuagugaugcgc

SEQ ID NO: 315588 - RNA, 17 nt, Human herpesvirus 5
cugguucugauuuugau

SEQ ID NO: 315589 - RNA, 12 nt, Human herpesvirus 5
cugguugcugcc

SEQ ID NO: 315590 - RNA, 15 nt, Human herpesvirus 5
cuguaauccuacuca

SEQ ID NO: 315591 - RNA, 17 nt, Human herpesvirus 5
cuguaauuauuccagcu

SEQ ID NO: 315592 - RNA, 13 nt, Human herpesvirus 5
cuguacaaucuca

SEQ ID NO: 315593 - RNA, 16 nt, Human herpesvirus 5
cuguaccguccagggg

SEQ ID NO: 315594 - RNA, 18 nt, Human herpesvirus 5
cuguagcuauuguguuua

SEQ ID NO: 315595 - RNA, 14 nt, Human herpesvirus 5
cuguagcugugguu

SEQ ID NO: 315596 - RNA, 22 nt, Human herpesvirus 5
cuguauauucaguccauuguca

SEQ ID NO: 315597 - RNA, 20 nt, Human herpesvirus 5
cugucaucacgguacacaga

SEQ ID NO: 315598 - RNA, 16 nt, Human herpesvirus 5
cugucauccacuugga

SEQ ID NO: 315599 - RNA, 19 nt, Human herpesvirus 5
cugucgccgacuaaauuca

SEQ ID NO: 315600 - RNA, 12 nt, Human herpesvirus 5
cugucgugguga

SEQ ID NO: 315601 - RNA, 23 nt, Human herpesvirus 5
cugucuaacuagccuucccguga

SEQ ID NO: 315602 - RNA, 16 nt, Human herpesvirus 5
cugucuugcuuaauga

SEQ ID NO: 315603 - RNA, 20 nt, Human herpesvirus 5
cugugaauugcgaagccagc

SEQ ID NO: 315604 - RNA, 22 nt, Human herpesvirus 5
cugugagcuuuuuuccccauaa

SEQ ID NO: 315605 - RNA, 11 nt, Human herpesvirus 5
cugugauaaca

SEQ ID NO: 315606 - RNA, 18 nt, Human herpesvirus 5
cugugaugaacgacacau

SEQ ID NO: 315607 - RNA, 16 nt, Human herpesvirus 5
cugugcuggccgccgc

SEQ ID NO: 315608 - RNA, 14 nt, Human herpesvirus 5
cuguggauguugag

SEQ ID NO: 315609 - RNA, 13 nt, Human herpesvirus 5
cuguggcugcaca

SEQ ID NO: 315610 - RNA, 15 nt, Human herpesvirus 5
cuguguagacugcca

SEQ ID NO: 315611 - RNA, 15 nt, Human herpesvirus 5
cuguguauaguuugu

SEQ ID NO: 315612 - RNA, 13 nt, Human herpesvirus 5
cuguguaucgugu

SEQ ID NO: 315613 - RNA, 21 nt, Human herpesvirus 5
cugugucggguguggcugucu

SEQ ID NO: 315614 - RNA, 21 nt, Human herpesvirus 5
cugugugucgcaaauaucgca

SEQ ID NO: 315615 - RNA, 22 nt, Human herpesvirus 5
cuguguucccaacacguccccc

SEQ ID NO: 315616 - RNA, 21 nt, Human herpesvirus 5
cuguuaaaaaaaccacgucga

SEQ ID NO: 315617 - RNA, 23 nt, Human herpesvirus 5
cuguucguguccggaccccauac

SEQ ID NO: 315618 - RNA, 17 nt, Human herpesvirus 5
cuguugagcucggacac

SEQ ID NO: 315619 - RNA, 14 nt, Human herpesvirus 5
cuguugauuuuggc

SEQ ID NO: 315620 - RNA, 16 nt, Human herpesvirus 5
cuguuguuaguuuggu

SEQ ID NO: 315621 - RNA, 22 nt, Human herpesvirus 5
cuguuucaucgacgccuaccuu

SEQ ID NO: 315622 - RNA, 18 nt, Human herpesvirus 5
cuuaaaggcgcacuuguc

SEQ ID NO: 315623 - RNA, 17 nt, Human herpesvirus 5
cuuaacaacguguccag

SEQ ID NO: 315624 - RNA, 13 nt, Human herpesvirus 5
cuuaaugaucucc

SEQ ID NO: 315625 - RNA, 23 nt, Human herpesvirus 5
cuuacagcuuuugagucuagaca

SEQ ID NO: 315626 - RNA, 10 nt, Human herpesvirus 5
cuuacaucuc

SEQ ID NO: 315627 - RNA, 20 nt, Human herpesvirus 5
cuuacuucagcagcaccucu

SEQ ID NO: 315628 - RNA, 17 nt, Human herpesvirus 5
cuuaggggcacucuugc

SEQ ID NO: 315629 - RNA, 16 nt, Human herpesvirus 5
cuuauaaggaggcaaa

SEQ ID NO: 315630 - RNA, 11 nt, Human herpesvirus 5
cuuauaucguu

SEQ ID NO: 315631 - RNA, 18 nt, Human herpesvirus 5
cuuaucaccaucagguga

SEQ ID NO: 315632 - RNA, 15 nt, Human herpesvirus 5
cuuaugauucugcac

SEQ ID NO: 315633 - RNA, 16 nt, Human herpesvirus 5
cuuaugauucugcaca

SEQ ID NO: 315634 - RNA, 17 nt, Human herpesvirus 5
cuucaaccucacguuaa

SEQ ID NO: 315635 - RNA, 12 nt, Human herpesvirus 5
cuucagaaucua

SEQ ID NO: 315636 - RNA, 14 nt, Human herpesvirus 5
cuucagaaucuaua

SEQ ID NO: 315637 - RNA, 21 nt, Human herpesvirus 5
cuucaucaucaccacccgaga

SEQ ID NO: 315638 - RNA, 20 nt, Human herpesvirus 5
cuuccccacccaguagacag

SEQ ID NO: 315639 - RNA, 22 nt, Human herpesvirus 5
cuuccccgaugugcagggacag

SEQ ID NO: 315640 - RNA, 17 nt, Human herpesvirus 5
cuucccucuagagacag

SEQ ID NO: 315641 - RNA, 18 nt, Human herpesvirus 5
cuucccucuagagacaga

SEQ ID NO: 315642 - RNA, 17 nt, Human herpesvirus 5
cuucccuuguaagacag

SEQ ID NO: 315643 - RNA, 18 nt, Human herpesvirus 5
cuucccuuguaagacaga

SEQ ID NO: 315644 - RNA, 14 nt, Human herpesvirus 5
cuuccgcgagcacc

SEQ ID NO: 315645 - RNA, 16 nt, Human herpesvirus 5
cuucgagggcucgugc

SEQ ID NO: 315646 - RNA, 21 nt, Human herpesvirus 5
cuucgauucucuauacacaua

SEQ ID NO: 315647 - RNA, 14 nt, Human herpesvirus 5
cuucgcgcucugua

SEQ ID NO: 315648 - RNA, 19 nt, Human herpesvirus 5
cuucggccggcugcugcac

SEQ ID NO: 315649 - RNA, 18 nt, Human herpesvirus 5
cuucggcucaucaccaac

SEQ ID NO: 315650 - RNA, 15 nt, Human herpesvirus 5
cuucggucucgggcu

SEQ ID NO: 315651 - RNA, 14 nt, Human herpesvirus 5
cuucuaccaucucc

SEQ ID NO: 315652 - RNA, 22 nt, Human herpesvirus 5
cuucuaguacuucccaugcaac

SEQ ID NO: 315653 - RNA, 15 nt, Human herpesvirus 5
cuucuccccgacucc

SEQ ID NO: 315654 - RNA, 17 nt, Human herpesvirus 5
cuucuccccgacuccgc

SEQ ID NO: 315655 - RNA, 22 nt, Human herpesvirus 5
cuucucguacgacgucugcuca

SEQ ID NO: 315656 - RNA, 21 nt, Human herpesvirus 5
cuucugcacuuucgaccacaa

SEQ ID NO: 315657 - RNA, 12 nt, Human herpesvirus 5
cuucugcuguca

SEQ ID NO: 315658 - RNA, 21 nt, Human herpesvirus 5
cuugacgacguuguggcugcu

SEQ ID NO: 315659 - RNA, 23 nt, Human herpesvirus 5
cuugacgacguuguggcugcuau

SEQ ID NO: 315660 - RNA, 23 nt, Human herpesvirus 5
cuugacuauuuuuuguaacacua

SEQ ID NO: 315661 - RNA, 23 nt, Human herpesvirus 5
cuugagcacaaaaauacugacaa

SEQ ID NO: 315662 - RNA, 12 nt, Human herpesvirus 5
cuugauggugua

SEQ ID NO: 315663 - RNA, 19 nt, Human herpesvirus 5
cuugccaagcuuuagccag

SEQ ID NO: 315664 - RNA, 13 nt, Human herpesvirus 5
cuugcuguguauc

SEQ ID NO: 315665 - RNA, 19 nt, Human herpesvirus 5
cuuggaaucugguacuuag

SEQ ID NO: 315666 - RNA, 20 nt, Human herpesvirus 5
cuuggcggucgggucugucu

SEQ ID NO: 315667 - RNA, 21 nt, Human herpesvirus 5
cuugucgccaugcuucauguc

SEQ ID NO: 315668 - RNA, 21 nt, Human herpesvirus 5
cuugucggcgugaaugggcac

SEQ ID NO: 315669 - RNA, 18 nt, Human herpesvirus 5
cuuguucucgaccacgua

SEQ ID NO: 315670 - RNA, 12 nt, Human herpesvirus 5
cuuguuuuacaa

SEQ ID NO: 315671 - RNA, 17 nt, Human herpesvirus 5
cuuuaacccaaaaccau

SEQ ID NO: 315672 - RNA, 15 nt, Human herpesvirus 5
cuuuauauauacaaa

SEQ ID NO: 315673 - RNA, 21 nt, Human herpesvirus 5
cuuuauuuacgagguacuguu

SEQ ID NO: 315674 - RNA, 16 nt, Human herpesvirus 5
cuuuccucgccaccac

SEQ ID NO: 315675 - RNA, 18 nt, Human herpesvirus 5
cuuucgcacgcaccugug

SEQ ID NO: 315676 - RNA, 15 nt, Human herpesvirus 5
cuuucucagucugca

SEQ ID NO: 315677 - RNA, 12 nt, Human herpesvirus 5
cuuucugcuuaa

SEQ ID NO: 315678 - RNA, 21 nt, Human herpesvirus 5
cuuugacguauuugaagccag

SEQ ID NO: 315679 - RNA, 16 nt, Human herpesvirus 5
cuuugccggcucuccu

SEQ ID NO: 315680 - RNA, 18 nt, Human herpesvirus 5
cuuugguaucugguacua

SEQ ID NO: 315681 - RNA, 16 nt, Human herpesvirus 5
cuuugguggauaacaa

SEQ ID NO: 315682 - RNA, 21 nt, Human herpesvirus 5
cuuuguaaucacgcuaugcga

SEQ ID NO: 315683 - RNA, 22 nt, Human herpesvirus 5
cuuuguaaucacgcuaugcgau

SEQ ID NO: 315684 - RNA, 15 nt, Human herpesvirus 5
cuuuguaucauuaca

SEQ ID NO: 315685 - RNA, 23 nt, Human herpesvirus 5
cuuugucccccgcacccuaaaac

SEQ ID NO: 315686 - RNA, 18 nt, Human herpesvirus 5
cuuuguggggcugcucaa

SEQ ID NO: 315687 - RNA, 12 nt, Human herpesvirus 5
cuuuuacaugaa

SEQ ID NO: 315688 - RNA, 14 nt, Human herpesvirus 5
cuuuuacaugaaca

SEQ ID NO: 315689 - RNA, 13 nt, Human herpesvirus 5
cuuuuaccaacgu

SEQ ID NO: 315690 - RNA, 16 nt, Human herpesvirus 5
cuuuuacuaguaucca

SEQ ID NO: 315691 - RNA, 20 nt, Human herpesvirus 5
cuuuucagaccgcaacaaca

SEQ ID NO: 315692 - RNA, 20 nt, Human herpesvirus 5
cuuuucauacaaaccccgug

SEQ ID NO: 315693 - RNA, 15 nt, Human herpesvirus 5
cuuuucaugcucaua

SEQ ID NO: 315694 - RNA, 23 nt, Human herpesvirus 5
cuuuucuuauaaggaggcaaaua

SEQ ID NO: 315695 - RNA, 19 nt, Human herpesvirus 5
cuuuugcgaauccuaaucg

SEQ ID NO: 315696 - RNA, 17 nt, Human herpesvirus 5
cuuuuggugugugucua

SEQ ID NO: 315697 - RNA, 15 nt, Human herpesvirus 5
cuuuuuauucuuggu

SEQ ID NO: 315698 - RNA, 22 nt, Human herpesvirus 5
cuuuuuuauguccaugucucca

SEQ ID NO: 315699 - RNA, 14 nt, Human herpesvirus 5
gaaaaaaugguguu

SEQ ID NO: 315700 - RNA, 24 nt, Human herpesvirus 5
gaaaaacaaagaagucucucucua

SEQ ID NO: 315701 - RNA, 12 nt, Human herpesvirus 5
gaaaaacuugaa

SEQ ID NO: 315702 - RNA, 17 nt, Human herpesvirus 5
gaaaaagaaacccucaa

SEQ ID NO: 315703 - RNA, 15 nt, Human herpesvirus 5
gaaaaaggguuucaa

SEQ ID NO: 315704 - RNA, 23 nt, Human herpesvirus 5
gaaaacaccauuggaaguaacau

SEQ ID NO: 315705 - RNA, 15 nt, Human herpesvirus 5
gaaaacauaagaaua

SEQ ID NO: 315706 - RNA, 15 nt, Human herpesvirus 5
gaaaacgucaucucg

SEQ ID NO: 315707 - RNA, 22 nt, Human herpesvirus 5
gaaaagccggcuccaagugcaa

SEQ ID NO: 315708 - RNA, 15 nt, Human herpesvirus 5
gaaaauauggcauau

SEQ ID NO: 315709 - RNA, 16 nt, Human herpesvirus 5
gaaacaccgucuuuca

SEQ ID NO: 315710 - RNA, 15 nt, Human herpesvirus 5
gaaacauguccccau

SEQ ID NO: 315711 - RNA, 19 nt, Human herpesvirus 5
gaaaccagauacaacguca

SEQ ID NO: 315712 - RNA, 22 nt, Human herpesvirus 5
gaaacccgcgccgguucucacg

SEQ ID NO: 315713 - RNA, 15 nt, Human herpesvirus 5
gaaacccguguaaug

SEQ ID NO: 315714 - RNA, 21 nt, Human herpesvirus 5
gaaaccguacuaagucucccg

SEQ ID NO: 315715 - RNA, 21 nt, Human herpesvirus 5
gaaacgcuuuaagcugcucau

SEQ ID NO: 315716 - RNA, 16 nt, Human herpesvirus 5
gaaacgugagucuccg

SEQ ID NO: 315717 - RNA, 20 nt, Human herpesvirus 5
gaaagaggggcaccuguaua

SEQ ID NO: 315718 - RNA, 12 nt, Human herpesvirus 5
gaaagcuaacau

SEQ ID NO: 315719 - RNA, 15 nt, Human herpesvirus 5
gaaagcuaacauucc

SEQ ID NO: 315720 - RNA, 16 nt, Human herpesvirus 5
gaaagcuaacauuccc

SEQ ID NO: 315721 - RNA, 12 nt, Human herpesvirus 5
gaaagcugcaau

SEQ ID NO: 315722 - RNA, 14 nt, Human herpesvirus 5
gaaauaaauacagg

SEQ ID NO: 315723 - RNA, 18 nt, Human herpesvirus 5
gaaauaaauacagggaau

SEQ ID NO: 315724 - RNA, 20 nt, Human herpesvirus 5
gaaauacaugaugaauguca

SEQ ID NO: 315725 - RNA, 13 nt, Human herpesvirus 5
gaaauacaugcua

SEQ ID NO: 315726 - RNA, 16 nt, Human herpesvirus 5
gaaauccgagagguag

SEQ ID NO: 315727 - RNA, 22 nt, Human herpesvirus 5
gaaauguugacccagggcugcu

SEQ ID NO: 315728 - RNA, 14 nt, Human herpesvirus 5
gaaauuaugaacuu

SEQ ID NO: 315729 - RNA, 18 nt, Human herpesvirus 5
gaaauucaauaaaaacca

SEQ ID NO: 315730 - RNA, 13 nt, Human herpesvirus 5
gaacaauaaacua

SEQ ID NO: 315731 - RNA, 17 nt, Human herpesvirus 5
gaacacacagauuuucu

SEQ ID NO: 315732 - RNA, 18 nt, Human herpesvirus 5
gaaccacguugucuaucc

SEQ ID NO: 315733 - RNA, 20 nt, Human herpesvirus 5
gaaccagcugguaccugaaa

SEQ ID NO: 315734 - RNA, 11 nt, Human herpesvirus 5
gaaccaugauc

SEQ ID NO: 315735 - RNA, 21 nt, Human herpesvirus 5
gaaccgcucauauagaccaaa

SEQ ID NO: 315736 - RNA, 15 nt, Human herpesvirus 5
gaaccuacgugcaac

SEQ ID NO: 315737 - RNA, 22 nt, Human herpesvirus 5
gaaccuacgugcaacgccacca

SEQ ID NO: 315738 - RNA, 13 nt, Human herpesvirus 5
gaaccugcucaaa

SEQ ID NO: 315739 - RNA, 18 nt, Human herpesvirus 5
gaacgacacaugcacaau

SEQ ID NO: 315740 - RNA, 13 nt, Human herpesvirus 5
gaacgcuacuucc

SEQ ID NO: 315741 - RNA, 14 nt, Human herpesvirus 5
gaacgcuacuuccc

SEQ ID NO: 315742 - RNA, 20 nt, Human herpesvirus 5
gaacguucuguaaucuucca

SEQ ID NO: 315743 - RNA, 14 nt, Human herpesvirus 5
gaacuaauauugca

SEQ ID NO: 315744 - RNA, 17 nt, Human herpesvirus 5
gaacugugaugucuauc

SEQ ID NO: 315745 - RNA, 23 nt, Human herpesvirus 5
gaagaaauagauagcaagccaga

SEQ ID NO: 315746 - RNA, 14 nt, Human herpesvirus 5
gaagaagaacaaga

SEQ ID NO: 315747 - RNA, 13 nt, Human herpesvirus 5
gaagacaccugga

SEQ ID NO: 315748 - RNA, 17 nt, Human herpesvirus 5
gaagaccucaccaucuc

SEQ ID NO: 315749 - RNA, 18 nt, Human herpesvirus 5
gaagauacucgauggggu

SEQ ID NO: 315750 - RNA, 20 nt, Human herpesvirus 5
gaagcacccauuacaguaac

SEQ ID NO: 315751 - RNA, 21 nt, Human herpesvirus 5
gaagccaggcgcgcucucgau

SEQ ID NO: 315752 - RNA, 21 nt, Human herpesvirus 5
gaagccauaaaaauaugggaa

SEQ ID NO: 315753 - RNA, 20 nt, Human herpesvirus 5
gaagccuggggcaccuaucu

SEQ ID NO: 315754 - RNA, 17 nt, Human herpesvirus 5
gaaggaacgcacgcugg

SEQ ID NO: 315755 - RNA, 18 nt, Human herpesvirus 5
gaagguaacuucaguggg

SEQ ID NO: 315756 - RNA, 16 nt, Human herpesvirus 5
gaaggucaaaaccuca

SEQ ID NO: 315757 - RNA, 22 nt, Human herpesvirus 5
gaagguuuugugccaacaauga

SEQ ID NO: 315758 - RNA, 14 nt, Human herpesvirus 5
gaaguauacauuac

SEQ ID NO: 315759 - RNA, 21 nt, Human herpesvirus 5
gaagugccgcgccgccuggag

SEQ ID NO: 315760 - RNA, 17 nt, Human herpesvirus 5
gaauaacaacacaucaa

SEQ ID NO: 315761 - RNA, 14 nt, Human herpesvirus 5
gaauaauccgugcg

SEQ ID NO: 315762 - RNA, 13 nt, Human herpesvirus 5
gaaucaugugguc

SEQ ID NO: 315763 - RNA, 14 nt, Human herpesvirus 5
gaaucgaugucaag

SEQ ID NO: 315764 - RNA, 16 nt, Human herpesvirus 5
gaaucuaggaacacug

SEQ ID NO: 315765 - RNA, 18 nt, Human herpesvirus 5
gaaucugguacuuaguca

SEQ ID NO: 315766 - RNA, 16 nt, Human herpesvirus 5
gaaugacguuaucaua

SEQ ID NO: 315767 - RNA, 13 nt, Human herpesvirus 5
gaauggccaugua

SEQ ID NO: 315768 - RNA, 17 nt, Human herpesvirus 5
gaaugggacacccgugg

SEQ ID NO: 315769 - RNA, 16 nt, Human herpesvirus 5
gaauugcgaagccagc

SEQ ID NO: 315770 - RNA, 21 nt, Human herpesvirus 5
gacaacggcuggaaauggacu

SEQ ID NO: 315771 - RNA, 19 nt, Human herpesvirus 5
gacaacuuugacgugcuca

SEQ ID NO: 315772 - RNA, 18 nt, Human herpesvirus 5
gacaagcuguggcugcac

SEQ ID NO: 315773 - RNA, 22 nt, Human herpesvirus 5
gacaagguggugaacugugaug

SEQ ID NO: 315774 - RNA, 17 nt, Human herpesvirus 5
gacaaguucgaucucau

SEQ ID NO: 315775 - RNA, 21 nt, Human herpesvirus 5
gacaauacaucauauguacaa

SEQ ID NO: 315776 - RNA, 12 nt, Human herpesvirus 5
gacaauggacug

SEQ ID NO: 315777 - RNA, 15 nt, Human herpesvirus 5
gacacagcacgcuga

SEQ ID NO: 315778 - RNA, 15 nt, Human herpesvirus 5
gacacagcagcacca

SEQ ID NO: 315779 - RNA, 18 nt, Human herpesvirus 5
gacacaugcacaauacga

SEQ ID NO: 315780 - RNA, 19 nt, Human herpesvirus 5
gacacauuucggaagccau

SEQ ID NO: 315781 - RNA, 23 nt, Human herpesvirus 5
gacaccucuauguuacaauguca

SEQ ID NO: 315782 - RNA, 14 nt, Human herpesvirus 5
gacacgguguuucg

SEQ ID NO: 315783 - RNA, 22 nt, Human herpesvirus 5
gacacucuggcccugcuguaca

SEQ ID NO: 315784 - RNA, 14 nt, Human herpesvirus 5
gacagacgauauga

SEQ ID NO: 315785 - RNA, 18 nt, Human herpesvirus 5
gacagacgauaugaggcu

SEQ ID NO: 315786 - RNA, 23 nt, Human herpesvirus 5
gacagacgauaugaggcuauauc

SEQ ID NO: 315787 - RNA, 16 nt, Human herpesvirus 5
gacagccacaucaaca

SEQ ID NO: 315788 - RNA, 23 nt, Human herpesvirus 5
gacagcgcgacgagcgcugcgaa

SEQ ID NO: 315789 - RNA, 22 nt, Human herpesvirus 5
gacagggaaagguuauauaaaa

SEQ ID NO: 315790 - RNA, 16 nt, Human herpesvirus 5
gacaggguaacagccu

SEQ ID NO: 315791 - RNA, 20 nt, Human herpesvirus 5
gacaguauuaacguguggug

SEQ ID NO: 315792 - RNA, 16 nt, Human herpesvirus 5
gacagugagagcucau

SEQ ID NO: 315793 - RNA, 15 nt, Human herpesvirus 5
gacauccaauuacac

SEQ ID NO: 315794 - RNA, 20 nt, Human herpesvirus 5
gacaucuuaugaagcugaac

SEQ ID NO: 315795 - RNA, 14 nt, Human herpesvirus 5
gacauggacauaaa

SEQ ID NO: 315796 - RNA, 18 nt, Human herpesvirus 5
gacauggagacaguuucc

SEQ ID NO: 315797 - RNA, 11 nt, Human herpesvirus 5
gacauggagcc

SEQ ID NO: 315798 - RNA, 20 nt, Human herpesvirus 5
gacauggagcccacgccgau

SEQ ID NO: 315799 - RNA, 18 nt, Human herpesvirus 5
gacauggcccucaugacg

SEQ ID NO: 315800 - RNA, 16 nt, Human herpesvirus 5
gaccaaagacuguggu

SEQ ID NO: 315801 - RNA, 17 nt, Human herpesvirus 5
gaccaaagacuguggug

SEQ ID NO: 315802 - RNA, 12 nt, Human herpesvirus 5
gaccaagagcau

SEQ ID NO: 315803 - RNA, 16 nt, Human herpesvirus 5
gaccacgucaccgugc

SEQ ID NO: 315804 - RNA, 12 nt, Human herpesvirus 5
gaccagcacucg

SEQ ID NO: 315805 - RNA, 18 nt, Human herpesvirus 5
gaccagcgccaccauagc

SEQ ID NO: 315806 - RNA, 20 nt, Human herpesvirus 5
gaccagcgccaccauagcca

SEQ ID NO: 315807 - RNA, 22 nt, Human herpesvirus 5
gaccauggucggugacaucacc

SEQ ID NO: 315808 - RNA, 24 nt, Human herpesvirus 5
gaccauuaacaauuccacgccgcu

SEQ ID NO: 315809 - RNA, 14 nt, Human herpesvirus 5
gacccacuaccugg

SEQ ID NO: 315810 - RNA, 13 nt, Human herpesvirus 5
gacccagggucag

SEQ ID NO: 315811 - RNA, 14 nt, Human herpesvirus 5
gacccaucgcacca

SEQ ID NO: 315812 - RNA, 19 nt, Human herpesvirus 5
gacccuccccccaucccgc

SEQ ID NO: 315813 - RNA, 17 nt, Human herpesvirus 5
gacccuccuaaaccugg

SEQ ID NO: 315814 - RNA, 19 nt, Human herpesvirus 5
gacccuccuaaaccuggua

SEQ ID NO: 315815 - RNA, 20 nt, Human herpesvirus 5
gacccuuugauguaguacau

SEQ ID NO: 315816 - RNA, 21 nt, Human herpesvirus 5
gaccgcaacgugcugcugaug

SEQ ID NO: 315817 - RNA, 18 nt, Human herpesvirus 5
gaccggcggcugcuguug

SEQ ID NO: 315818 - RNA, 18 nt, Human herpesvirus 5
gaccggugguacugcugu

SEQ ID NO: 315819 - RNA, 16 nt, Human herpesvirus 5
gaccuaguuagauuuc

SEQ ID NO: 315820 - RNA, 17 nt, Human herpesvirus 5
gaccucuuugagcacaa

SEQ ID NO: 315821 - RNA, 19 nt, Human herpesvirus 5
gaccuugcugaugugccag

SEQ ID NO: 315822 - RNA, 16 nt, Human herpesvirus 5
gacgaaacguauccau

SEQ ID NO: 315823 - RNA, 16 nt, Human herpesvirus 5
gacgaaagacaaugaa

SEQ ID NO: 315824 - RNA, 19 nt, Human herpesvirus 5
gacgaagugccgcgccgcc

SEQ ID NO: 315825 - RNA, 22 nt, Human herpesvirus 5
gacgacgguuuccacgccaccg

SEQ ID NO: 315826 - RNA, 14 nt, Human herpesvirus 5
gacgagcaggcucg

SEQ ID NO: 315827 - RNA, 14 nt, Human herpesvirus 5
gacgagcuggacaa

SEQ ID NO: 315828 - RNA, 18 nt, Human herpesvirus 5
gacgccggguuggcacga

SEQ ID NO: 315829 - RNA, 20 nt, Human herpesvirus 5
gacggagccguuaccgccuc

SEQ ID NO: 315830 - RNA, 17 nt, Human herpesvirus 5
gacggcaaggcggagga

SEQ ID NO: 315831 - RNA, 14 nt, Human herpesvirus 5
gacggcgacaucac

SEQ ID NO: 315832 - RNA, 15 nt, Human herpesvirus 5
gacggcgacaucacg

SEQ ID NO: 315833 - RNA, 17 nt, Human herpesvirus 5
gacggcgugacacagca

SEQ ID NO: 315834 - RNA, 17 nt, Human herpesvirus 5
gacggcguuuuggcgcc

SEQ ID NO: 315835 - RNA, 15 nt, Human herpesvirus 5
gacggugaugaugcu

SEQ ID NO: 315836 - RNA, 12 nt, Human herpesvirus 5
gacggugaugcg

SEQ ID NO: 315837 - RNA, 18 nt, Human herpesvirus 5
gacggugguuuccgcgcc

SEQ ID NO: 315838 - RNA, 15 nt, Human herpesvirus 5
gacgguuuccacgcc

SEQ ID NO: 315839 - RNA, 13 nt, Human herpesvirus 5
gacgucaaugaca

SEQ ID NO: 315840 - RNA, 19 nt, Human herpesvirus 5
gacgucccuuuuacuagua

SEQ ID NO: 315841 - RNA, 15 nt, Human herpesvirus 5
gacgugacgguguuu

SEQ ID NO: 315842 - RNA, 13 nt, Human herpesvirus 5
gacgugauccagg

SEQ ID NO: 315843 - RNA, 22 nt, Human herpesvirus 5
gacgugcgauuuggaccuggag

SEQ ID NO: 315844 - RNA, 16 nt, Human herpesvirus 5
gacguggauacuagua

SEQ ID NO: 315845 - RNA, 13 nt, Human herpesvirus 5
gacguuacacggg

SEQ ID NO: 315846 - RNA, 18 nt, Human herpesvirus 5
gacguuucgcgaggacaa

SEQ ID NO: 315847 - RNA, 15 nt, Human herpesvirus 5
gacucaccagacuuu

SEQ ID NO: 315848 - RNA, 16 nt, Human herpesvirus 5
gacucaccagacuuuu

SEQ ID NO: 315849 - RNA, 13 nt, Human herpesvirus 5
gacucuggugcua

SEQ ID NO: 315850 - RNA, 15 nt, Human herpesvirus 5
gacugagacuggugg

SEQ ID NO: 315851 - RNA, 13 nt, Human herpesvirus 5
gacugauuaacca

SEQ ID NO: 315852 - RNA, 14 nt, Human herpesvirus 5
gacuggcuacauca

SEQ ID NO: 315853 - RNA, 13 nt, Human herpesvirus 5
gacuuacaucuca

SEQ ID NO: 315854 - RNA, 18 nt, Human herpesvirus 5
gacuuccaggugcgcaac

SEQ ID NO: 315855 - RNA, 22 nt, Human herpesvirus 5
gacuugaguaccaagugccgcc

SEQ ID NO: 315856 - RNA, 14 nt, Human herpesvirus 5
gagaaagcuaacau

SEQ ID NO: 315857 - RNA, 18 nt, Human herpesvirus 5
gagaagguuuugugccaa

SEQ ID NO: 315858 - RNA, 14 nt, Human herpesvirus 5
gagacaacaaugac

SEQ ID NO: 315859 - RNA, 23 nt, Human herpesvirus 5
gagacaagguggugaacugugau

SEQ ID NO: 315860 - RNA, 22 nt, Human herpesvirus 5
gagacagccacaucaacauaca

SEQ ID NO: 315861 - RNA, 15 nt, Human herpesvirus 5
gagacggcuccgccg

SEQ ID NO: 315862 - RNA, 16 nt, Human herpesvirus 5
gagacuaccucaguca

SEQ ID NO: 315863 - RNA, 14 nt, Human herpesvirus 5
gagacuggugguga

SEQ ID NO: 315864 - RNA, 20 nt, Human herpesvirus 5
gagacuuagaaucucuugcg

SEQ ID NO: 315865 - RNA, 16 nt, Human herpesvirus 5
gagacuugcacgcugu

SEQ ID NO: 315866 - RNA, 21 nt, Human herpesvirus 5
gagagacauggacucuuguac

SEQ ID NO: 315867 - RNA, 16 nt, Human herpesvirus 5
gagagccgcacagacc

SEQ ID NO: 315868 - RNA, 16 nt, Human herpesvirus 5
gagauaauggggauga

SEQ ID NO: 315869 - RNA, 19 nt, Human herpesvirus 5
gagauacgauucuggcgcu

SEQ ID NO: 315870 - RNA, 18 nt, Human herpesvirus 5
gagaugcgggguggugcu

SEQ ID NO: 315871 - RNA, 13 nt, Human herpesvirus 5
gagcaauugccuc

SEQ ID NO: 315872 - RNA, 21 nt, Human herpesvirus 5
gagcacacugcuacccugcgc

SEQ ID NO: 315873 - RNA, 15 nt, Human herpesvirus 5
gagcaccucaaaaag

SEQ ID NO: 315874 - RNA, 18 nt, Human herpesvirus 5
gagcacgggacacggugu

SEQ ID NO: 315875 - RNA, 19 nt, Human herpesvirus 5
gagcagcaaaacgaccaga

SEQ ID NO: 315876 - RNA, 16 nt, Human herpesvirus 5
gagcaggucucgcgca

SEQ ID NO: 315877 - RNA, 18 nt, Human herpesvirus 5
gagcaucgcaacaacagc

SEQ ID NO: 315878 - RNA, 19 nt, Human herpesvirus 5
gagcaucgcaacaacagca

SEQ ID NO: 315879 - RNA, 22 nt, Human herpesvirus 5
gagcaugugcuugacuguacca

SEQ ID NO: 315880 - RNA, 14 nt, Human herpesvirus 5
gagccaaacugcga

SEQ ID NO: 315881 - RNA, 20 nt, Human herpesvirus 5
gagccgccgacgcuggcgcu

SEQ ID NO: 315882 - RNA, 15 nt, Human herpesvirus 5
gagcgccuucugcua

SEQ ID NO: 315883 - RNA, 18 nt, Human herpesvirus 5
gaggaacccugcggcgcc

SEQ ID NO: 315884 - RNA, 15 nt, Human herpesvirus 5
gaggaagcgggggug

SEQ ID NO: 315885 - RNA, 21 nt, Human herpesvirus 5
gaggaaguugcgguaaaacca

SEQ ID NO: 315886 - RNA, 21 nt, Human herpesvirus 5
gcacggcaucaugcugggcga

SEQ ID NO: 315887 - RNA, 23 nt, Human herpesvirus 5
gcacggcgcggucccgugaugga

SEQ ID NO: 315888 - RNA, 16 nt, Human herpesvirus 5
gcacgucaguggugac

SEQ ID NO: 315889 - RNA, 18 nt, Human herpesvirus 5
gcacgucggggcuguguc

SEQ ID NO: 315890 - RNA, 16 nt, Human herpesvirus 5
gcacuccacacgccau

SEQ ID NO: 315891 - RNA, 13 nt, Human herpesvirus 5
gcacuuccuguac

SEQ ID NO: 315892 - RNA, 18 nt, Human herpesvirus 5
gcacuuuacauaaaacca

SEQ ID NO: 315893 - RNA, 21 nt, Human herpesvirus 5
gcacuuuacauaaaaccaccg

SEQ ID NO: 315894 - RNA, 19 nt, Human herpesvirus 5
gcacuuucgaccacaagcu

SEQ ID NO: 315895 - RNA, 20 nt, Human herpesvirus 5
gcacuuucgaccacaagcuc

SEQ ID NO: 315896 - RNA, 23 nt, Human herpesvirus 5
gcacuuuuuuuacuaguauccac

SEQ ID NO: 315897 - RNA, 23 nt, Human herpesvirus 5
gcagaaaagccggcuccaagugc

SEQ ID NO: 315898 - RNA, 20 nt, Human herpesvirus 5
gcagaaaaucuguguguucu

SEQ ID NO: 315899 - RNA, 20 nt, Human herpesvirus 5
gcagaaacgagauaaugggg

SEQ ID NO: 315900 - RNA, 19 nt, Human herpesvirus 5
gcagaacccgguugcggcc

SEQ ID NO: 315901 - RNA, 19 nt, Human herpesvirus 5
gcagaccaccaugugcaug

SEQ ID NO: 315902 - RNA, 21 nt, Human herpesvirus 5
gcagaccaccaugugcauggg

SEQ ID NO: 315903 - RNA, 12 nt, Human herpesvirus 5
gcagacgguggu

SEQ ID NO: 315904 - RNA, 16 nt, Human herpesvirus 5
gcagagccaccaggug

SEQ ID NO: 315905 - RNA, 14 nt, Human herpesvirus 5
gcagagggcgcgcc

SEQ ID NO: 315906 - RNA, 20 nt, Human herpesvirus 5
gcagcaccaugccggagcua

SEQ ID NO: 315907 - RNA, 18 nt, Human herpesvirus 5
gcagcaccaugugcaaaa

SEQ ID NO: 315908 - RNA, 12 nt, Human herpesvirus 5
gcagcaccucuu

SEQ ID NO: 315909 - RNA, 15 nt, Human herpesvirus 5
gcagcagcuggugca

SEQ ID NO: 315910 - RNA, 16 nt, Human herpesvirus 5
gcagccgacacagcgg

SEQ ID NO: 315911 - RNA, 16 nt, Human herpesvirus 5
gcagccguuuccagag

SEQ ID NO: 315912 - RNA, 17 nt, Human herpesvirus 5
gcagcugcaccacggcc

SEQ ID NO: 315913 - RNA, 20 nt, Human herpesvirus 5
gcagcugcuuucuuuuugca

SEQ ID NO: 315914 - RNA, 24 nt, Human herpesvirus 5
gcaggcccggguucgcgauucuca

SEQ ID NO: 315915 - RNA, 18 nt, Human herpesvirus 5
gcaggcuuugacggugau

SEQ ID NO: 315916 - RNA, 21 nt, Human herpesvirus 5
gcagggucgaaaucuuaccac

SEQ ID NO: 315917 - RNA, 18 nt, Human herpesvirus 5
gcagguggaggacaguau

SEQ ID NO: 315918 - RNA, 15 nt, Human herpesvirus 5
gcaggugugcgcguc

SEQ ID NO: 315919 - RNA, 20 nt, Human herpesvirus 5
gcaguaugacgugcgauggu

SEQ ID NO: 315920 - RNA, 21 nt, Human herpesvirus 5
gcaguauuucuagagcacuga

SEQ ID NO: 315921 - RNA, 13 nt, Human herpesvirus 5
gcagugggcccac

SEQ ID NO: 315922 - RNA, 14 nt, Human herpesvirus 5
gcauaagaagccaa

SEQ ID NO: 315923 - RNA, 21 nt, Human herpesvirus 5
gcauaagaagccaagggggug

SEQ ID NO: 315924 - RNA, 22 nt, Human herpesvirus 5
gcauaagacgggacggcugccu

SEQ ID NO: 315925 - RNA, 20 nt, Human herpesvirus 5
gcauacggcguauacaauca

SEQ ID NO: 315926 - RNA, 17 nt, Human herpesvirus 5
gcauagaguuacaugca

SEQ ID NO: 315927 - RNA, 18 nt, Human herpesvirus 5
gcauagcgaucuggugua

SEQ ID NO: 315928 - RNA, 19 nt, Human herpesvirus 5
gcaucaacgacgagaugaa

SEQ ID NO: 315929 - RNA, 15 nt, Human herpesvirus 5
gcaucaucaacagca

SEQ ID NO: 315930 - RNA, 18 nt, Human herpesvirus 5
gcaucaucaacagcagca

SEQ ID NO: 315931 - RNA, 22 nt, Human herpesvirus 5
gcauccucgggcuuuccggcca

SEQ ID NO: 315932 - RNA, 18 nt, Human herpesvirus 5
gcaucgauuucuugccaa

SEQ ID NO: 315933 - RNA, 20 nt, Human herpesvirus 5
gcaucgccgacguaggcaaa

SEQ ID NO: 315934 - RNA, 13 nt, Human herpesvirus 5
gcaucggcagaaa

SEQ ID NO: 315935 - RNA, 18 nt, Human herpesvirus 5
gcaucugccgaaacaccg

SEQ ID NO: 315936 - RNA, 19 nt, Human herpesvirus 5
gcaucugucaucuaccuac

SEQ ID NO: 315937 - RNA, 17 nt, Human herpesvirus 5
gcaugaaaucacuguga

SEQ ID NO: 315938 - RNA, 14 nt, Human herpesvirus 5
gcaugacuguuucc

SEQ ID NO: 315939 - RNA, 18 nt, Human herpesvirus 5
gcaugauuagcaauauua

SEQ ID NO: 315940 - RNA, 18 nt, Human herpesvirus 5
gcaugcauaagaagccaa

SEQ ID NO: 315941 - RNA, 22 nt, Human herpesvirus 5
gcaugucccuacucaccaaagc

SEQ ID NO: 315942 - RNA, 18 nt, Human herpesvirus 5
gcaugucgucucaucaca

SEQ ID NO: 315943 - RNA, 18 nt, Human herpesvirus 5
gcaugugcuugacuguac

SEQ ID NO: 315944 - RNA, 23 nt, Human herpesvirus 5
gcauuacugggacgcgugcucuc

SEQ ID NO: 315945 - RNA, 16 nt, Human herpesvirus 5
gccaaaaacaguauag

SEQ ID NO: 315946 - RNA, 18 nt, Human herpesvirus 5
gccaaaaucugacgcugu

SEQ ID NO: 315947 - RNA, 16 nt, Human herpesvirus 5
gccaacgagacuaucu

SEQ ID NO: 315948 - RNA, 21 nt, Human herpesvirus 5
gccaacuccgugcuguuggac

SEQ ID NO: 315949 - RNA, 18 nt, Human herpesvirus 5
gccaagaugcugcgggcc

SEQ ID NO: 315950 - RNA, 11 nt, Human herpesvirus 5
gccaagccaug

SEQ ID NO: 315951 - RNA, 19 nt, Human herpesvirus 5
gccaauuuuuucgcugcca

SEQ ID NO: 315952 - RNA, 12 nt, Human herpesvirus 5
gccacacgcgcu

SEQ ID NO: 315953 - RNA, 22 nt, Human herpesvirus 5
gccacacggugugaugguacua

SEQ ID NO: 315954 - RNA, 16 nt, Human herpesvirus 5
gccacaucaacauaca

SEQ ID NO: 315955 - RNA, 17 nt, Human herpesvirus 5
gccaccaagaaacaccg

SEQ ID NO: 315956 - RNA, 15 nt, Human herpesvirus 5
gccaccaugaacuga

SEQ ID NO: 315957 - RNA, 17 nt, Human herpesvirus 5
gccaccgacacagcagc

SEQ ID NO: 315958 - RNA, 16 nt, Human herpesvirus 5
gccacggugcuuuuca

SEQ ID NO: 315959 - RNA, 17 nt, Human herpesvirus 5
gccacggugcuuuucau

SEQ ID NO: 315960 - RNA, 22 nt, Human herpesvirus 5
gccacgguuugaccacacucgu

SEQ ID NO: 315961 - RNA, 19 nt, Human herpesvirus 5
gccacguagccgaugcuga

SEQ ID NO: 315962 - RNA, 22 nt, Human herpesvirus 5
gccagcgaacaccaucucgcgg

SEQ ID NO: 315963 - RNA, 18 nt, Human herpesvirus 5
gccaggugaccagcagua

SEQ ID NO: 315964 - RNA, 22 nt, Human herpesvirus 5
gccaguacagcgccgacgugcu

SEQ ID NO: 315965 - RNA, 19 nt, Human herpesvirus 5
gccaguugcuguugcucua

SEQ ID NO: 315966 - RNA, 19 nt, Human herpesvirus 5
gccauaaaaauaugggaau

SEQ ID NO: 315967 - RNA, 20 nt, Human herpesvirus 5
gccaucuagacucacuuuau

SEQ ID NO: 315968 - RNA, 13 nt, Human herpesvirus 5
gccaucuucaucu

SEQ ID NO: 315969 - RNA, 18 nt, Human herpesvirus 5
gccaucuucaucuuucag

SEQ ID NO: 315970 - RNA, 14 nt, Human herpesvirus 5
gccaugcucaagac

SEQ ID NO: 315971 - RNA, 23 nt, Human herpesvirus 5
gcccacgguccgggcacaaucaa

SEQ ID NO: 315972 - RNA, 17 nt, Human herpesvirus 5
gcccagcaucuccucgc

SEQ ID NO: 315973 - RNA, 18 nt, Human herpesvirus 5
gcccaucgucugcauguu

SEQ ID NO: 315974 - RNA, 23 nt, Human herpesvirus 5
gcccaucgucugcauguucauca

SEQ ID NO: 315975 - RNA, 21 nt, Human herpesvirus 5
gccccacucgcucgcuugugu

SEQ ID NO: 315976 - RNA, 20 nt, Human herpesvirus 5
gcccgacaaguucgaucuca

SEQ ID NO: 315977 - RNA, 16 nt, Human herpesvirus 5
gcccgcacacuggcug

SEQ ID NO: 315978 - RNA, 13 nt, Human herpesvirus 5
gcccgccggccac

SEQ ID NO: 315979 - RNA, 11 nt, Human herpesvirus 5
gcccucgccgg

SEQ ID NO: 315980 - RNA, 22 nt, Human herpesvirus 5
gcccuucaacggcaccaccgag

SEQ ID NO: 315981 - RNA, 18 nt, Human herpesvirus 5
gcccuucuggagcacacu

SEQ ID NO: 315982 - RNA, 22 nt, Human herpesvirus 5
gcccuucuggagcacacugcua

SEQ ID NO: 315983 - RNA, 19 nt, Human herpesvirus 5
gccgacgaagaagaacaag

SEQ ID NO: 315984 - RNA, 11 nt, Human herpesvirus 5
gccgacgaggc

SEQ ID NO: 315985 - RNA, 20 nt, Human herpesvirus 5
gccgacggucaccaucgugc

SEQ ID NO: 315986 - RNA, 17 nt, Human herpesvirus 5
gccgagacgcugcgcua

SEQ ID NO: 315987 - RNA, 23 nt, Human herpesvirus 5
gccgagacgcugcgcuacgucua

SEQ ID NO: 315988 - RNA, 14 nt, Human herpesvirus 5
gccgagacggcgug

SEQ ID NO: 315989 - RNA, 15 nt, Human herpesvirus 5
gccgagacggcguga

SEQ ID NO: 315990 - RNA, 21 nt, Human herpesvirus 5
gccgagacggcgugacacagc

SEQ ID NO: 315991 - RNA, 22 nt, Human herpesvirus 5
gccgagacggcgugacacagca

SEQ ID NO: 315992 - RNA, 17 nt, Human herpesvirus 5
gccgauagagauggcga

SEQ ID NO: 315993 - RNA, 14 nt, Human herpesvirus 5
gccgaucaugugcu

SEQ ID NO: 315994 - RNA, 18 nt, Human herpesvirus 5
gccgaucaugugcuuaag

SEQ ID NO: 315995 - RNA, 21 nt, Human herpesvirus 5
gccgcaacuucuaccaucucc

SEQ ID NO: 315996 - RNA, 23 nt, Human herpesvirus 5
gccgcagaccauccucacacuga

SEQ ID NO: 315997 - RNA, 18 nt, Human herpesvirus 5
gccgcagccguuggugga

SEQ ID NO: 315998 - RNA, 14 nt, Human herpesvirus 5
gccgccaacgccga

SEQ ID NO: 315999 - RNA, 16 nt, Human herpesvirus 5
gccgccacaccuguca

SEQ ID NO: 316000 - RNA, 13 nt, Human herpesvirus 5
gccgccaccggug

SEQ ID NO: 316001 - RNA, 15 nt, Human herpesvirus 5
gccgcccgacgccga

SEQ ID NO: 316002 - RNA, 15 nt, Human herpesvirus 5
gccgccgcgccacac

SEQ ID NO: 316003 - RNA, 14 nt, Human herpesvirus 5
gccgccgcucauaa

SEQ ID NO: 316004 - RNA, 14 nt, Human herpesvirus 5
gccgccgugacugc

SEQ ID NO: 316005 - RNA, 21 nt, Human herpesvirus 5
gccgccuucgaaacggugcga

SEQ ID NO: 316006 - RNA, 13 nt, Human herpesvirus 5
gccgcuggacuga

SEQ ID NO: 316007 - RNA, 17 nt, Human herpesvirus 5
gccgcuggacugacaca

SEQ ID NO: 316008 - RNA, 18 nt, Human herpesvirus 5
gccggcuccaagugcaag

SEQ ID NO: 316009 - RNA, 13 nt, Human herpesvirus 5
gccgucacuuccc

SEQ ID NO: 316010 - RNA, 22 nt, Human herpesvirus 5
gccguccaugucgcugcgcaga

SEQ ID NO: 316011 - RNA, 22 nt, Human herpesvirus 5
gccgucgaccgacgucgcacac

SEQ ID NO: 316012 - RNA, 18 nt, Human herpesvirus 5
gccgucgcgccuuccucc

SEQ ID NO: 316013 - RNA, 12 nt, Human herpesvirus 5
gccuaagacuuu

SEQ ID NO: 316014 - RNA, 23 nt, Human herpesvirus 5
gccuauagauagcggcacuuuac

SEQ ID NO: 316015 - RNA, 13 nt, Human herpesvirus 5
gccuaucaaugaa

SEQ ID NO: 316016 - RNA, 17 nt, Human herpesvirus 5
gccucaagaauccgucc

SEQ ID NO: 316017 - RNA, 22 nt, Human herpesvirus 5
gccucauccuuaugagcgucug

SEQ ID NO: 316018 - RNA, 18 nt, Human herpesvirus 5
gccucauuuguauuuacu

SEQ ID NO: 316019 - RNA, 19 nt, Human herpesvirus 5
gccucauuuguauuuacuu

SEQ ID NO: 316020 - RNA, 23 nt, Human herpesvirus 5
gccucauuuguauuuacuuuaaa

SEQ ID NO: 316021 - RNA, 14 nt, Human herpesvirus 5
gccuccgcggcccg

SEQ ID NO: 316022 - RNA, 15 nt, Human herpesvirus 5
gccuccgguggugcg

SEQ ID NO: 316023 - RNA, 16 nt, Human herpesvirus 5
gccugcacgaccugcu

SEQ ID NO: 316024 - RNA, 17 nt, Human herpesvirus 5
gccugcacgaccugcuc

SEQ ID NO: 316025 - RNA, 18 nt, Human herpesvirus 5
gccugcacugccaggugc

SEQ ID NO: 316026 - RNA, 19 nt, Human herpesvirus 5
gccugguacuugacacugc

SEQ ID NO: 316027 - RNA, 18 nt, Human herpesvirus 5
gccuguuuucguguacua

SEQ ID NO: 316028 - RNA, 15 nt, Human herpesvirus 5
gccuucagcgucuca

SEQ ID NO: 316029 - RNA, 17 nt, Human herpesvirus 5
gccuucggccagcguga

SEQ ID NO: 316030 - RNA, 22 nt, Human herpesvirus 5
gccuugcgcucccugcuccgca

SEQ ID NO: 316031 - RNA, 13 nt, Human herpesvirus 5
gccuugcugugua

SEQ ID NO: 316032 - RNA, 14 nt, Human herpesvirus 5
gccuugcuguguau

SEQ ID NO: 316033 - RNA, 22 nt, Human herpesvirus 5
gcgaagaugcuauccgcugcga

SEQ ID NO: 316034 - RNA, 22 nt, Human herpesvirus 5
gcgaagcccguucuuccgaguc

SEQ ID NO: 316035 - RNA, 19 nt, Human herpesvirus 5
gcgaauuaggcaacuauca

SEQ ID NO: 316036 - RNA, 22 nt, Human herpesvirus 5
gcgacaaucgccgacaagccgg

SEQ ID NO: 316037 - RNA, 20 nt, Human herpesvirus 5
gcgacaucaagcuggcacau

SEQ ID NO: 316038 - RNA, 20 nt, Human herpesvirus 5
gcgacguucuccaagggaga

SEQ ID NO: 316039 - RNA, 19 nt, Human herpesvirus 5
gcgacuacggcguuuuuca

SEQ ID NO: 316040 - RNA, 17 nt, Human herpesvirus 5
gcgagccccaucgggcc

SEQ ID NO: 316041 - RNA, 13 nt, Human herpesvirus 5
gcgagcugggcga

SEQ ID NO: 316042 - RNA, 14 nt, Human herpesvirus 5
gcgaggcuuugaug

SEQ ID NO: 316043 - RNA, 20 nt, Human herpesvirus 5
gcgauagucgacgauauguc

SEQ ID NO: 316044 - RNA, 12 nt, Human herpesvirus 5
gcgauguagcag

SEQ ID NO: 316045 - RNA, 15 nt, Human herpesvirus 5
gcgauguagcagaaa

SEQ ID NO: 316046 - RNA, 13 nt, Human herpesvirus 5
gcgaugugcaaug

SEQ ID NO: 316047 - RNA, 12 nt, Human herpesvirus 5
gcgcacuuguca

SEQ ID NO: 316048 - RNA, 23 nt, Human herpesvirus 5
gcgcacuugucauuaaacaggcu

SEQ ID NO: 316049 - RNA, 15 nt, Human herpesvirus 5
gcgcagauggacaac

SEQ ID NO: 316050 - RNA, 13 nt, Human herpesvirus 5
gcgcaucuugccg

SEQ ID NO: 316051 - RNA, 21 nt, Human herpesvirus 5
gcgccaacggcauagugccag

SEQ ID NO: 316052 - RNA, 15 nt, Human herpesvirus 5
gcgccaagccaugca

SEQ ID NO: 316053 - RNA, 18 nt, Human herpesvirus 5
gcgccaccauagccacua

SEQ ID NO: 316054 - RNA, 18 nt, Human herpesvirus 5
gcgcccgcgccucacgcu

SEQ ID NO: 316055 - RNA, 14 nt, Human herpesvirus 5
gcgccgacuggauc

SEQ ID NO: 316056 - RNA, 19 nt, Human herpesvirus 5
gcgccgccucgcaucauca

SEQ ID NO: 316057 - RNA, 14 nt, Human herpesvirus 5
gcgccgcggcacca

SEQ ID NO: 316058 - RNA, 13 nt, Human herpesvirus 5
gcgccgguucuca

SEQ ID NO: 316059 - RNA, 15 nt, Human herpesvirus 5
gcgccgucacuuccc

SEQ ID NO: 316060 - RNA, 14 nt, Human herpesvirus 5
gcgcgacacggugg

SEQ ID NO: 316061 - RNA, 22 nt, Human herpesvirus 5
gcgcgacguagaauacuggaag

SEQ ID NO: 316062 - RNA, 18 nt, Human herpesvirus 5
gcgcgcacccgacggcgg

SEQ ID NO: 316063 - RNA, 17 nt, Human herpesvirus 5
gcgcgcgucuggacgcg

SEQ ID NO: 316064 - RNA, 17 nt, Human herpesvirus 5
gcgcgcuccacgucuuc

SEQ ID NO: 316065 - RNA, 16 nt, Human herpesvirus 5
gcgcguccacagcgug

SEQ ID NO: 316066 - RNA, 19 nt, Human herpesvirus 5
gcgcugacagcauacgggg

SEQ ID NO: 316067 - RNA, 16 nt, Human herpesvirus 5
gcgcuguacauucugc

SEQ ID NO: 316068 - RNA, 19 nt, Human herpesvirus 5
gcgcuugcccgcaaaagca

SEQ ID NO: 316069 - RNA, 13 nt, Human herpesvirus 5
gcggagcguucaa

SEQ ID NO: 316070 - RNA, 18 nt, Human herpesvirus 5
gcggaugagcgugcugcu

SEQ ID NO: 316071 - RNA, 22 nt, Human herpesvirus 5
gcggcaaaagacuuaccaccuc

SEQ ID NO: 316072 - RNA, 17 nt, Human herpesvirus 5
gcggcacgaucaucugu

SEQ ID NO: 316073 - RNA, 21 nt, Human herpesvirus 5
gcggcacuuuacauaaaacca

SEQ ID NO: 316074 - RNA, 21 nt, Human herpesvirus 5
gcggccauggagcugcacuca

SEQ ID NO: 316075 - RNA, 13 nt, Human herpesvirus 5
gcggcccaugagg

SEQ ID NO: 316076 - RNA, 14 nt, Human herpesvirus 5
gcggcccaugaggu

SEQ ID NO: 316077 - RNA, 18 nt, Human herpesvirus 5
gcggccgugguggccgug

SEQ ID NO: 316078 - RNA, 16 nt, Human herpesvirus 5
gcggcgacuggcgaga

SEQ ID NO: 316079 - RNA, 13 nt, Human herpesvirus 5
gcggcggcacucg

SEQ ID NO: 316080 - RNA, 14 nt, Human herpesvirus 5
gcggcggcgguggu

SEQ ID NO: 316081 - RNA, 12 nt, Human herpesvirus 5
gcggcgguggag

SEQ ID NO: 316082 - RNA, 15 nt, Human herpesvirus 5
gcggcgguggccguc

SEQ ID NO: 316083 - RNA, 13 nt, Human herpesvirus 5
gcggcggugguga

SEQ ID NO: 316084 - RNA, 16 nt, Human herpesvirus 5
gcggcgugcgcacgcc

SEQ ID NO: 316085 - RNA, 15 nt, Human herpesvirus 5
gcggcuagagcgcga

SEQ ID NO: 316086 - RNA, 23 nt, Human herpesvirus 5
gcggcuguauuauuagacgccgg

SEQ ID NO: 316087 - RNA, 16 nt, Human herpesvirus 5
gcgggguucaccugca

SEQ ID NO: 316088 - RNA, 19 nt, Human herpesvirus 5
gcgguaugggucacggcgg

SEQ ID NO: 316089 - RNA, 21 nt, Human herpesvirus 5
gcgguccuagcacgucagugg

SEQ ID NO: 316090 - RNA, 16 nt, Human herpesvirus 5
gcgguggugacugggg

SEQ ID NO: 316091 - RNA, 19 nt, Human herpesvirus 5
gcgguguuuccgauggugg

SEQ ID NO: 316092 - RNA, 19 nt, Human herpesvirus 5
gcguacacguugggaagac

SEQ ID NO: 316093 - RNA, 16 nt, Human herpesvirus 5
gcguagccaccuguug

SEQ ID NO: 316094 - RNA, 15 nt, Human herpesvirus 5
gcguaggacgacgug

SEQ ID NO: 316095 - RNA, 15 nt, Human herpesvirus 5
gcgucaaagcucuua

SEQ ID NO: 316096 - RNA, 17 nt, Human herpesvirus 5
gcgucagaagacgagcu

SEQ ID NO: 316097 - RNA, 14 nt, Human herpesvirus 5
gcguccgacgccgg

SEQ ID NO: 316098 - RNA, 17 nt, Human herpesvirus 5
gcguccuuucaagguga

SEQ ID NO: 316099 - RNA, 19 nt, Human herpesvirus 5
gcguccuuucaaggugauu

SEQ ID NO: 316100 - RNA, 22 nt, Human herpesvirus 5
gcgucgccaguaccgacgacga

SEQ ID NO: 316101 - RNA, 19 nt, Human herpesvirus 5
gcgucgccugcgacggcgg

SEQ ID NO: 316102 - RNA, 20 nt, Human herpesvirus 5
gcgucgucaaggacggcgug

SEQ ID NO: 316103 - RNA, 19 nt, Human herpesvirus 5
gcgugacacagcacgcuga

SEQ ID NO: 316104 - RNA, 22 nt, Human herpesvirus 5
gcgugcuguuuuccguguugcc

SEQ ID NO: 316105 - RNA, 15 nt, Human herpesvirus 5
gcguggcuguagcua

SEQ ID NO: 316106 - RNA, 21 nt, Human herpesvirus 5
gcguguacagcuaccucauga

SEQ ID NO: 316107 - RNA, 15 nt, Human herpesvirus 5
gcguguccugguuuu

SEQ ID NO: 316108 - RNA, 19 nt, Human herpesvirus 5
gcguguggaggacggggug

SEQ ID NO: 316109 - RNA, 23 nt, Human herpesvirus 5
gcguuuugauaaccuaccuggug

SEQ ID NO: 316110 - RNA, 17 nt, Human herpesvirus 5
gcuaauauauccaauac

SEQ ID NO: 316111 - RNA, 19 nt, Human herpesvirus 5
gcuaccucguaguugcaca

SEQ ID NO: 316112 - RNA, 21 nt, Human herpesvirus 5
gcuacgaccuggccuguggug

SEQ ID NO: 316113 - RNA, 23 nt, Human herpesvirus 5
gcuacgguggcgcgacggugaug

SEQ ID NO: 316114 - RNA, 13 nt, Human herpesvirus 5
gcuacgucuacua

SEQ ID NO: 316115 - RNA, 20 nt, Human herpesvirus 5
gcuacuuuccgauccuugga

SEQ ID NO: 316116 - RNA, 13 nt, Human herpesvirus 5
gcuagcaauaauc

SEQ ID NO: 316117 - RNA, 16 nt, Human herpesvirus 5
gcuauaagaaggccau

SEQ ID NO: 316118 - RNA, 19 nt, Human herpesvirus 5
gcuauaccaucaccuauaa

SEQ ID NO: 316119 - RNA, 13 nt, Human herpesvirus 5
gcuauaugcaucg

SEQ ID NO: 316120 - RNA, 15 nt, Human herpesvirus 5
gcuauguacacaucc

SEQ ID NO: 316121 - RNA, 14 nt, Human herpesvirus 5
gcucaaacaccgcu

SEQ ID NO: 316122 - RNA, 20 nt, Human herpesvirus 5
gcucaaugccaccaugaacu

SEQ ID NO: 316123 - RNA, 19 nt, Human herpesvirus 5
gcucacagucuaucccuau

SEQ ID NO: 316124 - RNA, 23 nt, Human herpesvirus 5
gcucacguugaugaaaacgaggu

SEQ ID NO: 316125 - RNA, 18 nt, Human herpesvirus 5
gcucagcuugauggugua

SEQ ID NO: 316126 - RNA, 22 nt, Human herpesvirus 5
gcucaucgucacgcucaaggac

SEQ ID NO: 316127 - RNA, 13 nt, Human herpesvirus 5
gcuccaagugcaa

SEQ ID NO: 316128 - RNA, 15 nt, Human herpesvirus 5
gcuccaagugcaagc

SEQ ID NO: 316129 - RNA, 12 nt, Human herpesvirus 5
gcuccaccaacg

SEQ ID NO: 316130 - RNA, 14 nt, Human herpesvirus 5
gcuccagaagauac

SEQ ID NO: 316131 - RNA, 19 nt, Human herpesvirus 5
gcucccagagcugcuagga

SEQ ID NO: 316132 - RNA, 14 nt, Human herpesvirus 5
gcuccgcaagcgcc

SEQ ID NO: 316133 - RNA, 21 nt, Human herpesvirus 5
gcuccucuuccaaaucuccgc

SEQ ID NO: 316134 - RNA, 16 nt, Human herpesvirus 5
gcuccuuagucgagac

SEQ ID NO: 316135 - RNA, 22 nt, Human herpesvirus 5
gcucgacguuucgcgaggacaa

SEQ ID NO: 316136 - RNA, 13 nt, Human herpesvirus 5
gcucgcucgcgcc

SEQ ID NO: 316137 - RNA, 13 nt, Human herpesvirus 5
gcucggugaccuc

SEQ ID NO: 316138 - RNA, 15 nt, Human herpesvirus 5
gcucguguaucuuau

SEQ ID NO: 316139 - RNA, 12 nt, Human herpesvirus 5
gcucuacgcgug

SEQ ID NO: 316140 - RNA, 19 nt, Human herpesvirus 5
gcucugggucgccaggugu

SEQ ID NO: 316141 - RNA, 19 nt, Human herpesvirus 5
gcugacagcccaaggggaa

SEQ ID NO: 316142 - RNA, 18 nt, Human herpesvirus 5
gcugacagucgacgggug

SEQ ID NO: 316143 - RNA, 22 nt, Human herpesvirus 5
gcugauaauaaaggcucucugu

SEQ ID NO: 316144 - RNA, 16 nt, Human herpesvirus 5
gcugauacuaucgggg

SEQ ID NO: 316145 - RNA, 13 nt, Human herpesvirus 5
gcugcaaggccuc

SEQ ID NO: 316146 - RNA, 15 nt, Human herpesvirus 5
gcugccgcuacugau

SEQ ID NO: 316147 - RNA, 20 nt, Human herpesvirus 5
gcugccgcuacugaucgccu

SEQ ID NO: 316148 - RNA, 20 nt, Human herpesvirus 5
gcugcgcaauaugacgcuga

SEQ ID NO: 316149 - RNA, 20 nt, Human herpesvirus 5
gcugcgcccguuggugaaug

SEQ ID NO: 316150 - RNA, 15 nt, Human herpesvirus 5
gcugcgcgacacggu

SEQ ID NO: 316151 - RNA, 18 nt, Human herpesvirus 5
gcugcgcgacacgguggc

SEQ ID NO: 316152 - RNA, 19 nt, Human herpesvirus 5
gcugcgcuacgucuacuau

SEQ ID NO: 316153 - RNA, 20 nt, Human herpesvirus 5
gcugcgguuuccucuucuag

SEQ ID NO: 316154 - RNA, 13 nt, Human herpesvirus 5
gcugcgugcuccg

SEQ ID NO: 316155 - RNA, 19 nt, Human herpesvirus 5
gcugcuauaagaaggccau

SEQ ID NO: 316156 - RNA, 18 nt, Human herpesvirus 5
gcugcucggcguggucaa

SEQ ID NO: 316157 - RNA, 19 nt, Human herpesvirus 5
gcugcucggcguggucaac

SEQ ID NO: 316158 - RNA, 18 nt, Human herpesvirus 5
gcugcugagacugagacu

SEQ ID NO: 316159 - RNA, 16 nt, Human herpesvirus 5
gcugcugcugcacggg

SEQ ID NO: 316160 - RNA, 16 nt, Human herpesvirus 5
gcugcuguugcacggg

SEQ ID NO: 316161 - RNA, 16 nt, Human herpesvirus 5
gcugcuuucgcacgca

SEQ ID NO: 316162 - RNA, 22 nt, Human herpesvirus 5
gcugcuuucgcacgcaccugug

SEQ ID NO: 316163 - RNA, 20 nt, Human herpesvirus 5
gcuggaaauaccaacguauc

SEQ ID NO: 316164 - RNA, 15 nt, Human herpesvirus 5
gcuggaaauggacuu

SEQ ID NO: 316165 - RNA, 14 nt, Human herpesvirus 5
gcuggacugacaca

SEQ ID NO: 316166 - RNA, 18 nt, Human herpesvirus 5
gcuggaggcccuggugga

SEQ ID NO: 316167 - RNA, 20 nt, Human herpesvirus 5
gcuggcaacgugccacguga

SEQ ID NO: 316168 - RNA, 23 nt, Human herpesvirus 5
gcuggccgagacggcgugacaca

SEQ ID NO: 316169 - RNA, 14 nt, Human herpesvirus 5
gcugggaguggugg

SEQ ID NO: 316170 - RNA, 23 nt, Human herpesvirus 5
gcugggcucacgucacuacucug

SEQ ID NO: 316171 - RNA, 21 nt, Human herpesvirus 5
gcuggggaaguacaauaucaa

SEQ ID NO: 316172 - RNA, 22 nt, Human herpesvirus 5
gcugguaccugaaaccuaccug

SEQ ID NO: 316173 - RNA, 18 nt, Human herpesvirus 5
gcugugggcccacugcgg

SEQ ID NO: 316174 - RNA, 16 nt, Human herpesvirus 5
gcuguuacgauuucaa

SEQ ID NO: 316175 - RNA, 14 nt, Human herpesvirus 5
gcuguucacgcgga

SEQ ID NO: 316176 - RNA, 17 nt, Human herpesvirus 5
gcuguugaccuggguag

SEQ ID NO: 316177 - RNA, 17 nt, Human herpesvirus 5
gcuuccauaaacgcuuu

SEQ ID NO: 316178 - RNA, 12 nt, Human herpesvirus 5
gcuucuaccacc

SEQ ID NO: 316179 - RNA, 13 nt, Human herpesvirus 5
gcuucugguagcu

SEQ ID NO: 316180 - RNA, 17 nt, Human herpesvirus 5
gcuugcaaaacuacuaa

SEQ ID NO: 316181 - RNA, 20 nt, Human herpesvirus 5
gcuuggcuacacgacgggga

SEQ ID NO: 316182 - RNA, 22 nt, Human herpesvirus 5
gcuuggcuacacgacggggaaa

SEQ ID NO: 316183 - RNA, 21 nt, Human herpesvirus 5
gcuuggggcucaaaguucaaa

SEQ ID NO: 316184 - RNA, 19 nt, Human herpesvirus 5
gcuuuauccgacucgcugu

SEQ ID NO: 316185 - RNA, 12 nt, Human herpesvirus 5
gcuuuccuggac

SEQ ID NO: 316186 - RNA, 21 nt, Human herpesvirus 5
gcuuuggucgccugcacugcc

SEQ ID NO: 316187 - RNA, 16 nt, Human herpesvirus 5
gcuuuucuacuccauc

SEQ ID NO: 316188 - RNA, 21 nt, Human herpesvirus 5
gcuuuucuacuccaucaugaa

SEQ ID NO: 316189 - RNA, 19 nt, Human herpesvirus 5
gcuuuuuuuauacaucucc

SEQ ID NO: 316190 - RNA, 17 nt, Human herpesvirus 5
ggaaaauuauaacggaa

SEQ ID NO: 316191 - RNA, 19 nt, Human herpesvirus 5
ggaaaccgagacggaggaa

SEQ ID NO: 316192 - RNA, 14 nt, Human herpesvirus 5
ggaaauacaugaug

SEQ ID NO: 316193 - RNA, 17 nt, Human herpesvirus 5
ggaaauacaugaugaau

SEQ ID NO: 316194 - RNA, 21 nt, Human herpesvirus 5
ggaaauucaauaaaaaccacc

SEQ ID NO: 316195 - RNA, 17 nt, Human herpesvirus 5
ggaacggguguacaaaa

SEQ ID NO: 316196 - RNA, 22 nt, Human herpesvirus 5
ggaacguuacccugguauccaa

SEQ ID NO: 316197 - RNA, 21 nt, Human herpesvirus 5
ggaagccggucgucugcgacu

SEQ ID NO: 316198 - RNA, 14 nt, Human herpesvirus 5
ggaagcggugcuga

SEQ ID NO: 316199 - RNA, 22 nt, Human herpesvirus 5
ggaagcuuuggucgccugcacu

SEQ ID NO: 316200 - RNA, 20 nt, Human herpesvirus 5
ggaaguuccgacgcgagcga

SEQ ID NO: 316201 - RNA, 17 nt, Human herpesvirus 5
ggaauccgcguuccaau

SEQ ID NO: 316202 - RNA, 21 nt, Human herpesvirus 5
ggaaugguaaagacaucguca

SEQ ID NO: 316203 - RNA, 22 nt, Human herpesvirus 5
ggaaugguaaagacaucgucac

SEQ ID NO: 316204 - RNA, 18 nt, Human herpesvirus 5
ggacaaaaaguacacugg

SEQ ID NO: 316205 - RNA, 15 nt, Human herpesvirus 5
ggacaaguacagcgg

SEQ ID NO: 316206 - RNA, 21 nt, Human herpesvirus 5
ggacagagcagccguuuccag

SEQ ID NO: 316207 - RNA, 19 nt, Human herpesvirus 5
ggacaguguauuggcauau

SEQ ID NO: 316208 - RNA, 16 nt, Human herpesvirus 5
ggacauggacucgcca

SEQ ID NO: 316209 - RNA, 18 nt, Human herpesvirus 5
ggaccaaagacuguggug

SEQ ID NO: 316210 - RNA, 20 nt, Human herpesvirus 5
ggacccguacugcgacggca

SEQ ID NO: 316211 - RNA, 20 nt, Human herpesvirus 5
ggaccgcaacgugcugcuga

SEQ ID NO: 316212 - RNA, 19 nt, Human herpesvirus 5
ggacgcugccucagucucu

SEQ ID NO: 316213 - RNA, 17 nt, Human herpesvirus 5
ggacgcuguguggcgug

SEQ ID NO: 316214 - RNA, 12 nt, Human herpesvirus 5
ggacuguguucg

SEQ ID NO: 316215 - RNA, 16 nt, Human herpesvirus 5
ggacuuacaucugcuc

SEQ ID NO: 316216 - RNA, 14 nt, Human herpesvirus 5
ggagacacagucua

SEQ ID NO: 316217 - RNA, 15 nt, Human herpesvirus 5
ggagacaguuuccac

SEQ ID NO: 316218 - RNA, 11 nt, Human herpesvirus 5
ggagauccagu

SEQ ID NO: 316219 - RNA, 18 nt, Human herpesvirus 5
ggagauccaguuacacuc

SEQ ID NO: 316220 - RNA, 17 nt, Human herpesvirus 5
ggagccccaucauggcc

SEQ ID NO: 316221 - RNA, 17 nt, Human herpesvirus 5
ggagcccgcacacuggc

SEQ ID NO: 316222 - RNA, 19 nt, Human herpesvirus 5
ggagcccgcacacuggcug

SEQ ID NO: 316223 - RNA, 21 nt, Human herpesvirus 5
ggagcuaauagauuaaugugu

SEQ ID NO: 316224 - RNA, 19 nt, Human herpesvirus 5
ggagcuacgcgaccagcug

SEQ ID NO: 316225 - RNA, 15 nt, Human herpesvirus 5
ggaggacggcgacga

SEQ ID NO: 316226 - RNA, 14 nt, Human herpesvirus 5
ggaggacucagagc

SEQ ID NO: 316227 - RNA, 21 nt, Human herpesvirus 5
ggaggccgagacgcugcgcua

SEQ ID NO: 316228 - RNA, 18 nt, Human herpesvirus 5
ggaguggcugcuguguug

SEQ ID NO: 316229 - RNA, 16 nt, Human herpesvirus 5
ggaguggucaauaaug

SEQ ID NO: 316230 - RNA, 21 nt, Human herpesvirus 5
ggaguuggccucgauccaucc

SEQ ID NO: 316231 - RNA, 22 nt, Human herpesvirus 5
ggauacgggcuaugcuggugau

SEQ ID NO: 316232 - RNA, 15 nt, Human herpesvirus 5
ggauaugaaggucaa

SEQ ID NO: 316233 - RNA, 19 nt, Human herpesvirus 5
ggauaugaggaaacugaau

SEQ ID NO: 316234 - RNA, 22 nt, Human herpesvirus 5
ggauccaaggccuccagcgccu

SEQ ID NO: 316235 - RNA, 20 nt, Human herpesvirus 5
gaggacaaccgcauccugcc

SEQ ID NO: 316236 - RNA, 18 nt, Human herpesvirus 5
gaggacauggacucgcca

SEQ ID NO: 316237 - RNA, 18 nt, Human herpesvirus 5
gaggagacuaccucaguc

SEQ ID NO: 316238 - RNA, 17 nt, Human herpesvirus 5
gaggccacccacccggu

SEQ ID NO: 316239 - RNA, 19 nt, Human herpesvirus 5
gaggccgagacgcugcgcu

SEQ ID NO: 316240 - RNA, 20 nt, Human herpesvirus 5
gaggcuaacgcgcugcugcu

SEQ ID NO: 316241 - RNA, 19 nt, Human herpesvirus 5
gagggaagcacgaucuccu

SEQ ID NO: 316242 - RNA, 22 nt, Human herpesvirus 5
gaggguggugacuuacaucuca

SEQ ID NO: 316243 - RNA, 21 nt, Human herpesvirus 5
gagguggagcuaauagauuaa

SEQ ID NO: 316244 - RNA, 21 nt, Human herpesvirus 5
gagguuucgggccgacgucaa

SEQ ID NO: 316245 - RNA, 19 nt, Human herpesvirus 5
gaguagaaaagacagggaa

SEQ ID NO: 316246 - RNA, 16 nt, Human herpesvirus 5
gaguaggugauccagu

SEQ ID NO: 316247 - RNA, 13 nt, Human herpesvirus 5
gagucacacuuaa

SEQ ID NO: 316248 - RNA, 21 nt, Human herpesvirus 5
gagucaccguaaucaccaaag

SEQ ID NO: 316249 - RNA, 21 nt, Human herpesvirus 5
gagugaagagggugaaggcaa

SEQ ID NO: 316250 - RNA, 18 nt, Human herpesvirus 5
gaguugcucgauuaccua

SEQ ID NO: 316251 - RNA, 18 nt, Human herpesvirus 5
gauaacaaacaaugacac

SEQ ID NO: 316252 - RNA, 24 nt, Human herpesvirus 5
gauaacaauauugcuucguauaca

SEQ ID NO: 316253 - RNA, 18 nt, Human herpesvirus 5
gauaaccgcaaaggccac

SEQ ID NO: 316254 - RNA, 15 nt, Human herpesvirus 5
gauaacggucaagaa

SEQ ID NO: 316255 - RNA, 21 nt, Human herpesvirus 5
gauaauaacggcgcagcacca

SEQ ID NO: 316256 - RNA, 18 nt, Human herpesvirus 5
gauaauugcacauccuca

SEQ ID NO: 316257 - RNA, 23 nt, Human herpesvirus 5
gauacagggugccgccacgguuu

SEQ ID NO: 316258 - RNA, 20 nt, Human herpesvirus 5
gauacaguugauaacaaaca

SEQ ID NO: 316259 - RNA, 23 nt, Human herpesvirus 5
gauacaguugauaacaaacaaug

SEQ ID NO: 316260 - RNA, 14 nt, Human herpesvirus 5
gauacgcugcuuuu

SEQ ID NO: 316261 - RNA, 17 nt, Human herpesvirus 5
gauagagauggcgauau

SEQ ID NO: 316262 - RNA, 21 nt, Human herpesvirus 5
gauauaaagcgguauauucaa

SEQ ID NO: 316263 - RNA, 23 nt, Human herpesvirus 5
gauaucuacgcaauguuacacau

SEQ ID NO: 316264 - RNA, 23 nt, Human herpesvirus 5
gauaugucgcgauagacaacucc

SEQ ID NO: 316265 - RNA, 22 nt, Human herpesvirus 5
gaucacgcgcucuucacacacu

SEQ ID NO: 316266 - RNA, 19 nt, Human herpesvirus 5
gaucacuaucuucaaccuc

SEQ ID NO: 316267 - RNA, 12 nt, Human herpesvirus 5
gauccaguuuca

SEQ ID NO: 316268 - RNA, 16 nt, Human herpesvirus 5
gauccggcaacaucuc

SEQ ID NO: 316269 - RNA, 19 nt, Human herpesvirus 5
gauccuccggcgcugagaa

SEQ ID NO: 316270 - RNA, 22 nt, Human herpesvirus 5
gaucgcggccuucagcgucuca

SEQ ID NO: 316271 - RNA, 13 nt, Human herpesvirus 5
gaucggacaucau

SEQ ID NO: 316272 - RNA, 18 nt, Human herpesvirus 5
gaucguucccgucccucu

SEQ ID NO: 316273 - RNA, 14 nt, Human herpesvirus 5
gaucuauacauuga

SEQ ID NO: 316274 - RNA, 22 nt, Human herpesvirus 5
gaucugcgaguggaauuucccu

SEQ ID NO: 316275 - RNA, 21 nt, Human herpesvirus 5
gaucugugauccgugcgcuca

SEQ ID NO: 316276 - RNA, 15 nt, Human herpesvirus 5
gaugaaacauaugca

SEQ ID NO: 316277 - RNA, 22 nt, Human herpesvirus 5
gaugaacguggugaggggcgug

SEQ ID NO: 316278 - RNA, 18 nt, Human herpesvirus 5
gaugaagauggccaucac

SEQ ID NO: 316279 - RNA, 14 nt, Human herpesvirus 5
gaugaagccuauca

SEQ ID NO: 316280 - RNA, 15 nt, Human herpesvirus 5
gaugaagccuaucaa

SEQ ID NO: 316281 - RNA, 17 nt, Human herpesvirus 5
gaugaaugucaucauca

SEQ ID NO: 316282 - RNA, 20 nt, Human herpesvirus 5
gaugaauuccucuauugcca

SEQ ID NO: 316283 - RNA, 14 nt, Human herpesvirus 5
gaugaauuguuacc

SEQ ID NO: 316284 - RNA, 15 nt, Human herpesvirus 5
gaugaauuguuacca

SEQ ID NO: 316285 - RNA, 23 nt, Human herpesvirus 5
gaugaggcggcguggacugggac

SEQ ID NO: 316286 - RNA, 22 nt, Human herpesvirus 5
gaugaugcugcugagacugaga

SEQ ID NO: 316287 - RNA, 23 nt, Human herpesvirus 5
gaugaugcugcugagacugagac

SEQ ID NO: 316288 - RNA, 15 nt, Human herpesvirus 5
gaugccaucacggga

SEQ ID NO: 316289 - RNA, 18 nt, Human herpesvirus 5
gaugccgaugugugacua

SEQ ID NO: 316290 - RNA, 20 nt, Human herpesvirus 5
gaugcgccuccgguggugcg

SEQ ID NO: 316291 - RNA, 13 nt, Human herpesvirus 5
gaugcuagcaaua

SEQ ID NO: 316292 - RNA, 15 nt, Human herpesvirus 5
gaugcuauccgcugc

SEQ ID NO: 316293 - RNA, 17 nt, Human herpesvirus 5
gaugcuauccgcugcga

SEQ ID NO: 316294 - RNA, 13 nt, Human herpesvirus 5
gaugcugaucacg

SEQ ID NO: 316295 - RNA, 17 nt, Human herpesvirus 5
gaugcuuuccuggacac

SEQ ID NO: 316296 - RNA, 18 nt, Human herpesvirus 5
gaugguacuauaugcgug

SEQ ID NO: 316297 - RNA, 20 nt, Human herpesvirus 5
gaugugcagggacagugcgc

SEQ ID NO: 316298 - RNA, 23 nt, Human herpesvirus 5
gauguuggacgaaacguauccau

SEQ ID NO: 316299 - RNA, 21 nt, Human herpesvirus 5
gauuauuaccgaguaccgcau

SEQ ID NO: 316300 - RNA, 16 nt, Human herpesvirus 5
gauucagaucuaccau

SEQ ID NO: 316301 - RNA, 21 nt, Human herpesvirus 5
gauuccccgugacaguauuaa

SEQ ID NO: 316302 - RNA, 13 nt, Human herpesvirus 5
gauucucuauaca

SEQ ID NO: 316303 - RNA, 12 nt, Human herpesvirus 5
gauucugcacag

SEQ ID NO: 316304 - RNA, 22 nt, Human herpesvirus 5
gauugcaugaaaucacugugaa

SEQ ID NO: 316305 - RNA, 17 nt, Human herpesvirus 5
gauugcugacgcuggaa

SEQ ID NO: 316306 - RNA, 22 nt, Human herpesvirus 5
gauuuaccguaaagagagucac

SEQ ID NO: 316307 - RNA, 19 nt, Human herpesvirus 5
gauuucugcguguaccgcu

SEQ ID NO: 316308 - RNA, 14 nt, Human herpesvirus 5
gcaaacgcugcuug

SEQ ID NO: 316309 - RNA, 12 nt, Human herpesvirus 5
gcaaagagccau

SEQ ID NO: 316310 - RNA, 17 nt, Human herpesvirus 5
gcaaagaguccaucugc

SEQ ID NO: 316311 - RNA, 11 nt, Human herpesvirus 5
gcaaaggccac

SEQ ID NO: 316312 - RNA, 12 nt, Human herpesvirus 5
gcaacaacagca

SEQ ID NO: 316313 - RNA, 14 nt, Human herpesvirus 5
gcaacaacagcagc

SEQ ID NO: 316314 - RNA, 15 nt, Human herpesvirus 5
gcaacaacagcagca

SEQ ID NO: 316315 - RNA, 16 nt, Human herpesvirus 5
gcaacaacagcagcaa

SEQ ID NO: 316316 - RNA, 21 nt, Human herpesvirus 5
gcaacacguagugagcuuuga

SEQ ID NO: 316317 - RNA, 21 nt, Human herpesvirus 5
gcaacacuuuuuuaccuauca

SEQ ID NO: 316318 - RNA, 15 nt, Human herpesvirus 5
gcaacgacaccuccc

SEQ ID NO: 316319 - RNA, 22 nt, Human herpesvirus 5
gcaacgacaccucccuaacuau

SEQ ID NO: 316320 - RNA, 18 nt, Human herpesvirus 5
gcaacgauagucaucuca

SEQ ID NO: 316321 - RNA, 14 nt, Human herpesvirus 5
gcaacgccaccaag

SEQ ID NO: 316322 - RNA, 16 nt, Human herpesvirus 5
gcaacgccaccaagga

SEQ ID NO: 316323 - RNA, 13 nt, Human herpesvirus 5
gcaacgugcugcu

SEQ ID NO: 316324 - RNA, 17 nt, Human herpesvirus 5
gcaacuaucaccaaaca

SEQ ID NO: 316325 - RNA, 18 nt, Human herpesvirus 5
gcaacuaucaccaaacaa

SEQ ID NO: 316326 - RNA, 19 nt, Human herpesvirus 5
gcaacugcaccagcaacca

SEQ ID NO: 316327 - RNA, 12 nt, Human herpesvirus 5
gcaacugcugcc

SEQ ID NO: 316328 - RNA, 19 nt, Human herpesvirus 5
gcaacuucuaccaucuccg

SEQ ID NO: 316329 - RNA, 17 nt, Human herpesvirus 5
gcaagaugcucgggaua

SEQ ID NO: 316330 - RNA, 17 nt, Human herpesvirus 5
gcaagugccugcacgac

SEQ ID NO: 316331 - RNA, 19 nt, Human herpesvirus 5
gcaagugccugcacgaccu

SEQ ID NO: 316332 - RNA, 22 nt, Human herpesvirus 5
gcaauagcagccgacacagcgg

SEQ ID NO: 316333 - RNA, 20 nt, Human herpesvirus 5
gcaauaucggcguucugcuc

SEQ ID NO: 316334 - RNA, 18 nt, Human herpesvirus 5
gcaaucaaugcgucugca

SEQ ID NO: 316335 - RNA, 20 nt, Human herpesvirus 5
gcaaugauauuuuacaggua

SEQ ID NO: 316336 - RNA, 16 nt, Human herpesvirus 5
gcaaugcaacacuaaa

SEQ ID NO: 316337 - RNA, 20 nt, Human herpesvirus 5
gcaauugccucuacacuugg

SEQ ID NO: 316338 - RNA, 15 nt, Human herpesvirus 5
gcacaauacacaugu

SEQ ID NO: 316339 - RNA, 21 nt, Human herpesvirus 5
gcacaauacgauaauugcuac

SEQ ID NO: 316340 - RNA, 10 nt, Human herpesvirus 5
gcacacagac

SEQ ID NO: 316341 - RNA, 15 nt, Human herpesvirus 5
gcacacagacuuuau

SEQ ID NO: 316342 - RNA, 17 nt, Human herpesvirus 5
gcaccacggcuugcaaa

SEQ ID NO: 316343 - RNA, 18 nt, Human herpesvirus 5
gcaccacggcuugcaaaa

SEQ ID NO: 316344 - RNA, 23 nt, Human herpesvirus 5
gcaccacgucgauucccaucuca

SEQ ID NO: 316345 - RNA, 21 nt, Human herpesvirus 5
gcaccucgaugaagccuauca

SEQ ID NO: 316346 - RNA, 20 nt, Human herpesvirus 5
gcaccucuauuguguguacg

SEQ ID NO: 316347 - RNA, 16 nt, Human herpesvirus 5
gcaccugugugaucug

SEQ ID NO: 316348 - RNA, 16 nt, Human herpesvirus 5
gcacgacgcggcguug

SEQ ID NO: 316349 - RNA, 16 nt, Human herpesvirus 5
gcacgcacgacaugac

SEQ ID NO: 316350 - RNA, 16 nt, Human herpesvirus 5
gcacgcgcuagccuuu

SEQ ID NO: 316351 - RNA, 13 nt, Human herpesvirus 5
auagcaagccaga

SEQ ID NO: 316352 - RNA, 15 nt, Human herpesvirus 5
auagcggcacuuuac

SEQ ID NO: 316353 - RNA, 14 nt, Human herpesvirus 5
auagucaucucauu

SEQ ID NO: 316354 - RNA, 18 nt, Human herpesvirus 5
auagugacgugucgggaa

SEQ ID NO: 316355 - RNA, 19 nt, Human herpesvirus 5
auagugcgccaagccaugc

SEQ ID NO: 316356 - RNA, 14 nt, Human herpesvirus 5
auauacacacggag

SEQ ID NO: 316357 - RNA, 20 nt, Human herpesvirus 5
auauaccaggcaucaccgug

SEQ ID NO: 316358 - RNA, 23 nt, Human herpesvirus 5
auauacgggguuaaacuggauau

SEQ ID NO: 316359 - RNA, 23 nt, Human herpesvirus 5
auauacgugauuauacaacaggu

SEQ ID NO: 316360 - RNA, 21 nt, Human herpesvirus 5
auauacuuauauccgccagga

SEQ ID NO: 316361 - RNA, 13 nt, Human herpesvirus 5
auauaggugacag

SEQ ID NO: 316362 - RNA, 18 nt, Human herpesvirus 5
auauauaaaccguaugca

SEQ ID NO: 316363 - RNA, 22 nt, Human herpesvirus 5
auauccacaacgacaaauacaa

SEQ ID NO: 316364 - RNA, 16 nt, Human herpesvirus 5
auauccgcguuaucag

SEQ ID NO: 316365 - RNA, 20 nt, Human herpesvirus 5
auaucuacgcaauguuacac

SEQ ID NO: 316366 - RNA, 22 nt, Human herpesvirus 5
auaucuccgguuucaaacccac

SEQ ID NO: 316367 - RNA, 19 nt, Human herpesvirus 5
auaugauccuuguacagau

SEQ ID NO: 316368 - RNA, 16 nt, Human herpesvirus 5
auaugcaucggaaaau

SEQ ID NO: 316369 - RNA, 20 nt, Human herpesvirus 5
auaugugcggucaugugucg

SEQ ID NO: 316370 - RNA, 16 nt, Human herpesvirus 5
auauucaaucauuacu

SEQ ID NO: 316371 - RNA, 22 nt, Human herpesvirus 5
auauucuacauucaauacauca

SEQ ID NO: 316372 - RNA, 17 nt, Human herpesvirus 5
auauucuauauucugca

SEQ ID NO: 316373 - RNA, 21 nt, Human herpesvirus 5
auauucugcauagaguuacau

SEQ ID NO: 316374 - RNA, 13 nt, Human herpesvirus 5
auauuuuacaggu

SEQ ID NO: 316375 - RNA, 23 nt, Human herpesvirus 5
auauuuuacagguauuccgaaac

SEQ ID NO: 316376 - RNA, 19 nt, Human herpesvirus 5
aucaaaccuguuccuguca

SEQ ID NO: 316377 - RNA, 23 nt, Human herpesvirus 5
aucaaaccuguuccugucaaugu

SEQ ID NO: 316378 - RNA, 19 nt, Human herpesvirus 5
aucaacgacgccacacaca

SEQ ID NO: 316379 - RNA, 20 nt, Human herpesvirus 5
aucaaggacuguuuucucaa

SEQ ID NO: 316380 - RNA, 15 nt, Human herpesvirus 5
aucaauacaaugaca

SEQ ID NO: 316381 - RNA, 14 nt, Human herpesvirus 5
aucaccaucaggug

SEQ ID NO: 316382 - RNA, 16 nt, Human herpesvirus 5
aucacgguacacagau

SEQ ID NO: 316383 - RNA, 16 nt, Human herpesvirus 5
aucacguuguccuugu

SEQ ID NO: 316384 - RNA, 16 nt, Human herpesvirus 5
aucagaaagcugcaau

SEQ ID NO: 316385 - RNA, 21 nt, Human herpesvirus 5
aucagacuuucgacgugcgcc

SEQ ID NO: 316386 - RNA, 16 nt, Human herpesvirus 5
aucagcgccgugcuca

SEQ ID NO: 316387 - RNA, 22 nt, Human herpesvirus 5
aucauacauuguuucuuauuaa

SEQ ID NO: 316388 - RNA, 13 nt, Human herpesvirus 5
aucaucaacagca

SEQ ID NO: 316389 - RNA, 15 nt, Human herpesvirus 5
aucaucaacagcagc

SEQ ID NO: 316390 - RNA, 16 nt, Human herpesvirus 5
aucaucacacuaagaa

SEQ ID NO: 316391 - RNA, 19 nt, Human herpesvirus 5
aucaucuguuuuugcugca

SEQ ID NO: 316392 - RNA, 14 nt, Human herpesvirus 5
aucaugugccucau

SEQ ID NO: 316393 - RNA, 18 nt, Human herpesvirus 5
aucauuacuaaacaaaaa

SEQ ID NO: 316394 - RNA, 17 nt, Human herpesvirus 5
auccaaucgacugccua

SEQ ID NO: 316395 - RNA, 13 nt, Human herpesvirus 5
auccaauuacacc

SEQ ID NO: 316396 - RNA, 16 nt, Human herpesvirus 5
auccacaacgacaaau

SEQ ID NO: 316397 - RNA, 11 nt, Human herpesvirus 5
auccaguauuc

SEQ ID NO: 316398 - RNA, 12 nt, Human herpesvirus 5
auccauacuuac

SEQ ID NO: 316399 - RNA, 13 nt, Human herpesvirus 5
auccauacuuacc

SEQ ID NO: 316400 - RNA, 19 nt, Human herpesvirus 5
aucccacgucacuauugua

SEQ ID NO: 316401 - RNA, 16 nt, Human herpesvirus 5
auccccucgccacgac

SEQ ID NO: 316402 - RNA, 15 nt, Human herpesvirus 5
aucccguuacaaaga

SEQ ID NO: 316403 - RNA, 19 nt, Human herpesvirus 5
auccgagggggcuuuccaa

SEQ ID NO: 316404 - RNA, 12 nt, Human herpesvirus 5
auccucgggaau

SEQ ID NO: 316405 - RNA, 14 nt, Human herpesvirus 5
auccugggacacca

SEQ ID NO: 316406 - RNA, 14 nt, Human herpesvirus 5
auccuguaaaaaua

SEQ ID NO: 316407 - RNA, 17 nt, Human herpesvirus 5
auccuguugaauaacac

SEQ ID NO: 316408 - RNA, 17 nt, Human herpesvirus 5
aucgacacuaauuuauc

SEQ ID NO: 316409 - RNA, 22 nt, Human herpesvirus 5
aucgacgucucaucuugagaca

SEQ ID NO: 316410 - RNA, 21 nt, Human herpesvirus 5
aucgacugccuaacuguagca

SEQ ID NO: 316411 - RNA, 17 nt, Human herpesvirus 5
aucgcauaagaacggag

SEQ ID NO: 316412 - RNA, 21 nt, Human herpesvirus 5
aucgccgauagagauggcgau

SEQ ID NO: 316413 - RNA, 17 nt, Human herpesvirus 5
aucgcuggaaagacaau

SEQ ID NO: 316414 - RNA, 21 nt, Human herpesvirus 5
aucguagucccaggacacauu

SEQ ID NO: 316415 - RNA, 17 nt, Human herpesvirus 5
aucgucgccacacgugu

SEQ ID NO: 316416 - RNA, 22 nt, Human herpesvirus 5
aucguguuucggcggcuguucg

SEQ ID NO: 316417 - RNA, 22 nt, Human herpesvirus 5
aucguuuacgggggauggcgau

SEQ ID NO: 316418 - RNA, 14 nt, Human herpesvirus 5
aucuacaacacuac

SEQ ID NO: 316419 - RNA, 17 nt, Human herpesvirus 5
aucuacaacacuacccu

SEQ ID NO: 316420 - RNA, 14 nt, Human herpesvirus 5
aucuacaacuuaac

SEQ ID NO: 316421 - RNA, 18 nt, Human herpesvirus 5
aucuacaacuuaaccaca

SEQ ID NO: 316422 - RNA, 23 nt, Human herpesvirus 5
aucuacaacuuaaccacaagaaa

SEQ ID NO: 316423 - RNA, 17 nt, Human herpesvirus 5
aucuacaucaguuucca

SEQ ID NO: 316424 - RNA, 19 nt, Human herpesvirus 5
aucuaccagcccagggauc

SEQ ID NO: 316425 - RNA, 13 nt, Human herpesvirus 5
aucuauacauuga

SEQ ID NO: 316426 - RNA, 22 nt, Human herpesvirus 5
aucucaucaagcacuaccagcu

SEQ ID NO: 316427 - RNA, 15 nt, Human herpesvirus 5
aucuccgacagcgcg

SEQ ID NO: 316428 - RNA, 18 nt, Human herpesvirus 5
aucucggcauaguggugu

SEQ ID NO: 316429 - RNA, 21 nt, Human herpesvirus 5
aucugcccuauccgcgcggcu

SEQ ID NO: 316430 - RNA, 22 nt, Human herpesvirus 5
aucugcccuuuacggugcugcg

SEQ ID NO: 316431 - RNA, 18 nt, Human herpesvirus 5
aucugccucuuccucgug

SEQ ID NO: 316432 - RNA, 20 nt, Human herpesvirus 5
aucugguacuaucggcucaa

SEQ ID NO: 316433 - RNA, 13 nt, Human herpesvirus 5
aucuguacugcaa

SEQ ID NO: 316434 - RNA, 14 nt, Human herpesvirus 5
aucuguacugcaag

SEQ ID NO: 316435 - RNA, 20 nt, Human herpesvirus 5
aucugugauccgugcgcuca

SEQ ID NO: 316436 - RNA, 19 nt, Human herpesvirus 5
aucuuaugaagcugaacaa

SEQ ID NO: 316437 - RNA, 20 nt, Human herpesvirus 5
aucuuaugaagcugaacaau

SEQ ID NO: 316438 - RNA, 15 nt, Human herpesvirus 5
aucuucggcuaccuc

SEQ ID NO: 316439 - RNA, 17 nt, Human herpesvirus 5
augaaacauaugcagau

SEQ ID NO: 316440 - RNA, 16 nt, Human herpesvirus 5
augaaccaagucuugc

SEQ ID NO: 316441 - RNA, 12 nt, Human herpesvirus 5
augaaccuuccc

SEQ ID NO: 316442 - RNA, 22 nt, Human herpesvirus 5
augaacgacacaugcacaauac

SEQ ID NO: 316443 - RNA, 23 nt, Human herpesvirus 5
augaaggaucgcaauagaauacu

SEQ ID NO: 316444 - RNA, 22 nt, Human herpesvirus 5
augaaucuuccccucugcugcu

SEQ ID NO: 316445 - RNA, 18 nt, Human herpesvirus 5
augaauuguuaccagaac

SEQ ID NO: 316446 - RNA, 15 nt, Human herpesvirus 5
augacacuaacuuga

SEQ ID NO: 316447 - RNA, 15 nt, Human herpesvirus 5
augaccgcaaugaua

SEQ ID NO: 316448 - RNA, 17 nt, Human herpesvirus 5
augaccgcaaugauauu

SEQ ID NO: 316449 - RNA, 15 nt, Human herpesvirus 5
augaccggacgugcu

SEQ ID NO: 316450 - RNA, 17 nt, Human herpesvirus 5
augacggcccccuccuu

SEQ ID NO: 316451 - RNA, 15 nt, Human herpesvirus 5
augacguacauauac

SEQ ID NO: 316452 - RNA, 16 nt, Human herpesvirus 5
augacucguugggauu

SEQ ID NO: 316453 - RNA, 21 nt, Human herpesvirus 5
augagaacacgcgugacacau

SEQ ID NO: 316454 - RNA, 16 nt, Human herpesvirus 5
augauaacgucauuca

SEQ ID NO: 316455 - RNA, 17 nt, Human herpesvirus 5
augauaucuacagcaga

SEQ ID NO: 316456 - RNA, 17 nt, Human herpesvirus 5
augauauuuuacaggua

SEQ ID NO: 316457 - RNA, 13 nt, Human herpesvirus 5
augaugacgguga

SEQ ID NO: 316458 - RNA, 18 nt, Human herpesvirus 5
gggcugcuccaacuuugu

SEQ ID NO: 316459 - RNA, 13 nt, Human herpesvirus 5
ggggcucaaaguu

SEQ ID NO: 316460 - RNA, 23 nt, Human herpesvirus 5
ggggugaaaaguagcaccacaag

SEQ ID NO: 316461 - RNA, 11 nt, Human herpesvirus 5
gggguggugcg

SEQ ID NO: 316462 - RNA, 17 nt, Human herpesvirus 5
ggguaacgcuggcucac

SEQ ID NO: 316463 - RNA, 14 nt, Human herpesvirus 5
gggucaugggcgac

SEQ ID NO: 316464 - RNA, 23 nt, Human herpesvirus 5
gggucccauuucggggcacgugc

SEQ ID NO: 316465 - RNA, 13 nt, Human herpesvirus 5
gggucuaccaaaa

SEQ ID NO: 316466 - RNA, 21 nt, Human herpesvirus 5
gggucugucuuuuaugaugcu

SEQ ID NO: 316467 - RNA, 18 nt, Human herpesvirus 5
gggugacggcgacaucac

SEQ ID NO: 316468 - RNA, 23 nt, Human herpesvirus 5
ggguguauagaccccaagccaaa

SEQ ID NO: 316469 - RNA, 15 nt, Human herpesvirus 5
ggguuaagaggucac

SEQ ID NO: 316470 - RNA, 21 nt, Human herpesvirus 5
ggguuacgagaaacugggaua

SEQ ID NO: 316471 - RNA, 15 nt, Human herpesvirus 5
gguaaagacaucguc

SEQ ID NO: 316472 - RNA, 12 nt, Human herpesvirus 5
gguaacuggcag

SEQ ID NO: 316473 - RNA, 20 nt, Human herpesvirus 5
gguaaugcguguccagauac

SEQ ID NO: 316474 - RNA, 16 nt, Human herpesvirus 5
gguacgcuauguguca

SEQ ID NO: 316475 - RNA, 17 nt, Human herpesvirus 5
gguacgggucuaccaaa

SEQ ID NO: 316476 - RNA, 20 nt, Human herpesvirus 5
gguacgguaccgcugggaug

SEQ ID NO: 316477 - RNA, 21 nt, Human herpesvirus 5
gguaguugauacgcuagcaga

SEQ ID NO: 316478 - RNA, 20 nt, Human herpesvirus 5
ggucaacaaacagcucuuaa

SEQ ID NO: 316479 - RNA, 15 nt, Human herpesvirus 5
ggucacggugccaug

SEQ ID NO: 316480 - RNA, 22 nt, Human herpesvirus 5
ggucauauauaaaccguaugca

SEQ ID NO: 316481 - RNA, 16 nt, Human herpesvirus 5
ggucauguuucucacg

SEQ ID NO: 316482 - RNA, 13 nt, Human herpesvirus 5
ggucgacugcgug

SEQ ID NO: 316483 - RNA, 16 nt, Human herpesvirus 5
ggucgcaggacgggau

SEQ ID NO: 316484 - RNA, 15 nt, Human herpesvirus 5
ggucggugacaucac

SEQ ID NO: 316485 - RNA, 13 nt, Human herpesvirus 5
ggucggugucucg

SEQ ID NO: 316486 - RNA, 18 nt, Human herpesvirus 5
ggucuuccugcugcgcau

SEQ ID NO: 316487 - RNA, 19 nt, Human herpesvirus 5
ggugaaaaguagcaccaca

SEQ ID NO: 316488 - RNA, 16 nt, Human herpesvirus 5
ggugacugagcacagc

SEQ ID NO: 316489 - RNA, 22 nt, Human herpesvirus 5
ggugauuaccguucgcuuccau

SEQ ID NO: 316490 - RNA, 21 nt, Human herpesvirus 5
ggugcgacguucuccaaggga

SEQ ID NO: 316491 - RNA, 18 nt, Human herpesvirus 5
ggugcgcggcgacaagcu

SEQ ID NO: 316492 - RNA, 17 nt, Human herpesvirus 5
ggugcggcguucgcgug

SEQ ID NO: 316493 - RNA, 15 nt, Human herpesvirus 5
gguggaaccgugccg

SEQ ID NO: 316494 - RNA, 18 nt, Human herpesvirus 5
gguggcgucggugcgaug

SEQ ID NO: 316495 - RNA, 19 nt, Human herpesvirus 5
gguggcucgauacacugga

SEQ ID NO: 316496 - RNA, 12 nt, Human herpesvirus 5
ggugguaccugc

SEQ ID NO: 316497 - RNA, 13 nt, Human herpesvirus 5
ggugguccacucc

SEQ ID NO: 316498 - RNA, 21 nt, Human herpesvirus 5
gguguacgugcgguaacuggc

SEQ ID NO: 316499 - RNA, 17 nt, Human herpesvirus 5
ggugugaugguacuaua

SEQ ID NO: 316500 - RNA, 11 nt, Human herpesvirus 5
ggugugucuau

SEQ ID NO: 316501 - RNA, 13 nt, Human herpesvirus 5
ggugugugucuau

SEQ ID NO: 316502 - RNA, 19 nt, Human herpesvirus 5
gguguugugcgugaugauu

SEQ ID NO: 316503 - RNA, 16 nt, Human herpesvirus 5
uaaccgggugcugaua

SEQ ID NO: 316504 - RNA, 22 nt, Human herpesvirus 5
uaacguagguuuucgaaauaac

SEQ ID NO: 316505 - RNA, 20 nt, Human herpesvirus 5
uaacgucauucguguugaca

SEQ ID NO: 316506 - RNA, 15 nt, Human herpesvirus 5
uaacuauuccacuag

SEQ ID NO: 316507 - RNA, 18 nt, Human herpesvirus 5
uaacucuaucuacugucu

SEQ ID NO: 316508 - RNA, 19 nt, Human herpesvirus 5
uaagaaaaagguggaaauc

SEQ ID NO: 316509 - RNA, 14 nt, Human herpesvirus 5
uaagacagccuuac

SEQ ID NO: 316510 - RNA, 15 nt, Human herpesvirus 5
uaagacagccuuaca

SEQ ID NO: 316511 - RNA, 23 nt, Human herpesvirus 5
uaagauauaaagaaucuaggaac

SEQ ID NO: 316512 - RNA, 15 nt, Human herpesvirus 5
uaagcaccgugauag

SEQ ID NO: 316513 - RNA, 13 nt, Human herpesvirus 5
uaagcauagucca

SEQ ID NO: 316514 - RNA, 17 nt, Human herpesvirus 5
uaagcuauaccaucacc

SEQ ID NO: 316515 - RNA, 22 nt, Human herpesvirus 5
uaagcugucagccucucacggu

SEQ ID NO: 316516 - RNA, 18 nt, Human herpesvirus 5
uaaggaaaacgugacuuu

SEQ ID NO: 316517 - RNA, 12 nt, Human herpesvirus 5
uaaggagcaaaa

SEQ ID NO: 316518 - RNA, 17 nt, Human herpesvirus 5
uaaggagcaaaaccggg

SEQ ID NO: 316519 - RNA, 23 nt, Human herpesvirus 5
uaaguaccagacauccaauuaca

SEQ ID NO: 316520 - RNA, 17 nt, Human herpesvirus 5
uaauaacggcgcagcac

SEQ ID NO: 316521 - RNA, 17 nt, Human herpesvirus 5
uaauaacuacgcuacga

SEQ ID NO: 316522 - RNA, 14 nt, Human herpesvirus 5
uaauauugcaaugg

SEQ ID NO: 316523 - RNA, 12 nt, Human herpesvirus 5
uaauccuacuca

SEQ ID NO: 316524 - RNA, 13 nt, Human herpesvirus 5
uaauccuacucaa

SEQ ID NO: 316525 - RNA, 21 nt, Human herpesvirus 5
uaaucuccugagacacuugaa

SEQ ID NO: 316526 - RNA, 12 nt, Human herpesvirus 5
uaaugauguacg

SEQ ID NO: 316527 - RNA, 16 nt, Human herpesvirus 5
uaauggccaacagccu

SEQ ID NO: 316528 - RNA, 20 nt, Human herpesvirus 5
uaauggggaugaugaaccaa

SEQ ID NO: 316529 - RNA, 14 nt, Human herpesvirus 5
uaauguauccuggg

SEQ ID NO: 316530 - RNA, 10 nt, Human herpesvirus 5
uaaugugcug

SEQ ID NO: 316531 - RNA, 19 nt, Human herpesvirus 5
uaauuuaacaagucacuau

SEQ ID NO: 316532 - RNA, 15 nt, Human herpesvirus 5
uacaacaguuaucag

SEQ ID NO: 316533 - RNA, 21 nt, Human herpesvirus 5
uacaacguagggcgguauugu

SEQ ID NO: 316534 - RNA, 15 nt, Human herpesvirus 5
uacaacgucaugcau

SEQ ID NO: 316535 - RNA, 17 nt, Human herpesvirus 5
uacaacgucaugcauuc

SEQ ID NO: 316536 - RNA, 22 nt, Human herpesvirus 5
uacaaggagcgacguaccagcu

SEQ ID NO: 316537 - RNA, 13 nt, Human herpesvirus 5
uacaaguaugugg

SEQ ID NO: 316538 - RNA, 16 nt, Human herpesvirus 5
uacaauaaacuguuga

SEQ ID NO: 316539 - RNA, 17 nt, Human herpesvirus 5
uacaaugacacuaacuu

SEQ ID NO: 316540 - RNA, 21 nt, Human herpesvirus 5
uacacgcacgcugguuaccag

SEQ ID NO: 316541 - RNA, 18 nt, Human herpesvirus 5
uacacugguauaaccagu

SEQ ID NO: 316542 - RNA, 20 nt, Human herpesvirus 5
uacacugguauaaccaguca

SEQ ID NO: 316543 - RNA, 15 nt, Human herpesvirus 5
uacagcacguacaaa

SEQ ID NO: 316544 - RNA, 14 nt, Human herpesvirus 5
uacagcuaccucau

SEQ ID NO: 316545 - RNA, 22 nt, Human herpesvirus 5
uacagguauuccgaaaccugua

SEQ ID NO: 316546 - RNA, 14 nt, Human herpesvirus 5
uacauauacgugau

SEQ ID NO: 316547 - RNA, 14 nt, Human herpesvirus 5
uacaugaacaaaaa

SEQ ID NO: 316548 - RNA, 22 nt, Human herpesvirus 5
uacaugaugaaugucaucauca

SEQ ID NO: 316549 - RNA, 18 nt, Human herpesvirus 5
uacaugcuauaagacagc

SEQ ID NO: 316550 - RNA, 22 nt, Human herpesvirus 5
uacaugggggggaacaucgucc

SEQ ID NO: 316551 - RNA, 14 nt, Human herpesvirus 5
uacaugugcaugac

SEQ ID NO: 316552 - RNA, 13 nt, Human herpesvirus 5
uacauucaauaca

SEQ ID NO: 316553 - RNA, 22 nt, Human herpesvirus 5
uaccacauuuuuugacagauga

SEQ ID NO: 316554 - RNA, 15 nt, Human herpesvirus 5
uaccaccacgaccau

SEQ ID NO: 316555 - RNA, 13 nt, Human herpesvirus 5
uaccaucaccuau

SEQ ID NO: 316556 - RNA, 16 nt, Human herpesvirus 5
uaccaucuccgucgac

SEQ ID NO: 316557 - RNA, 14 nt, Human herpesvirus 5
uacccacauuuugc

SEQ ID NO: 316558 - RNA, 15 nt, Human herpesvirus 5
uacccaccgauggca

SEQ ID NO: 316559 - RNA, 22 nt, Human herpesvirus 5
uacccagcuggggaaguacaau

SEQ ID NO: 316560 - RNA, 19 nt, Human herpesvirus 5
uacccugguauccaacuuc

SEQ ID NO: 316561 - RNA, 14 nt, Human herpesvirus 5
uaccguaaacauaa

SEQ ID NO: 316562 - RNA, 22 nt, Human herpesvirus 5
uaccgucgcccucgguaauuug

SEQ ID NO: 316563 - RNA, 19 nt, Human herpesvirus 5
uaugaaagucccgugugug

SEQ ID NO: 316564 - RNA, 19 nt, Human herpesvirus 5
uaugaaggucaaaaccuca

SEQ ID NO: 316565 - RNA, 20 nt, Human herpesvirus 5
uaugagaaaagggacagaaa

SEQ ID NO: 316566 - RNA, 22 nt, Human herpesvirus 5
uaugagaaaagggacagaaaag

SEQ ID NO: 316567 - RNA, 14 nt, Human herpesvirus 5
uaugaggaaacuga

SEQ ID NO: 316568 - RNA, 20 nt, Human herpesvirus 5
uaugaggaucaggaguuuau

SEQ ID NO: 316569 - RNA, 22 nt, Human herpesvirus 5
uaugaguaccccacgcauaaaa

SEQ ID NO: 316570 - RNA, 20 nt, Human herpesvirus 5
uaugauuuccuccgugucga

SEQ ID NO: 316571 - RNA, 16 nt, Human herpesvirus 5
uauggaggucacuguc

SEQ ID NO: 316572 - RNA, 14 nt, Human herpesvirus 5
uauggcauauugaa

SEQ ID NO: 316573 - RNA, 14 nt, Human herpesvirus 5
uauguaguaucaua

SEQ ID NO: 316574 - RNA, 16 nt, Human herpesvirus 5
uauguccaugucucca

SEQ ID NO: 316575 - RNA, 16 nt, Human herpesvirus 5
uauguccuccgcacuu

SEQ ID NO: 316576 - RNA, 13 nt, Human herpesvirus 5
uauguuauacucu

SEQ ID NO: 316577 - RNA, 19 nt, Human herpesvirus 5
uauuauacugaaaaacuug

SEQ ID NO: 316578 - RNA, 13 nt, Human herpesvirus 5
uauuauauacaaa

SEQ ID NO: 316579 - RNA, 21 nt, Human herpesvirus 5
uauucaucgggucgucucacc

SEQ ID NO: 316580 - RNA, 17 nt, Human herpesvirus 5
uauuccacuaguacuga

SEQ ID NO: 316581 - RNA, 17 nt, Human herpesvirus 5
uauuccgaaaccuguau

SEQ ID NO: 316582 - RNA, 21 nt, Human herpesvirus 5
uauucguaaccagcauuugag

SEQ ID NO: 316583 - RNA, 23 nt, Human herpesvirus 5
uauugacacagagacuugugaua

SEQ ID NO: 316584 - RNA, 19 nt, Human herpesvirus 5
uauuguugagaacauauau

SEQ ID NO: 316585 - RNA, 14 nt, Human herpesvirus 5
uauuuaaaacuggu

SEQ ID NO: 316586 - RNA, 21 nt, Human herpesvirus 5
uauuugaaaauauggcauauu

SEQ ID NO: 316587 - RNA, 16 nt, Human herpesvirus 5
uauuugcaucaugugc

SEQ ID NO: 316588 - RNA, 22 nt, Human herpesvirus 5
uauuuuuaucgggaaugggcua

SEQ ID NO: 316589 - RNA, 18 nt, Human herpesvirus 5
uauuuuuucauaguugcu

SEQ ID NO: 316590 - RNA, 16 nt, Human herpesvirus 5
ucaaaaaucacuuuua

SEQ ID NO: 316591 - RNA, 18 nt, Human herpesvirus 5
ucaaacccggucagucua

SEQ ID NO: 316592 - RNA, 19 nt, Human herpesvirus 5
ucaaaccuguuccugucaa

SEQ ID NO: 316593 - RNA, 16 nt, Human herpesvirus 5
ucaaagggagccccau

SEQ ID NO: 316594 - RNA, 12 nt, Human herpesvirus 5
ucaaaguucaaa

SEQ ID NO: 316595 - RNA, 13 nt, Human herpesvirus 5
ucaaaguucaaag

SEQ ID NO: 316596 - RNA, 16 nt, Human herpesvirus 5
ucaacauacaguacaa

SEQ ID NO: 316597 - RNA, 17 nt, Human herpesvirus 5
ucaacauacaguacaac

SEQ ID NO: 316598 - RNA, 22 nt, Human herpesvirus 5
ucaaccacccgccggaacgcug

SEQ ID NO: 316599 - RNA, 17 nt, Human herpesvirus 5
ucaaccacgucaagauc

SEQ ID NO: 316600 - RNA, 21 nt, Human herpesvirus 5
ucaacgacgccacacacaucu

SEQ ID NO: 316601 - RNA, 19 nt, Human herpesvirus 5
ucaacuacagcaaugacau

SEQ ID NO: 316602 - RNA, 17 nt, Human herpesvirus 5
ucaagacagacacgguc

SEQ ID NO: 316603 - RNA, 21 nt, Human herpesvirus 5
ucaaggccacuauggcgugaa

SEQ ID NO: 316604 - RNA, 16 nt, Human herpesvirus 5
ucaaggcucgcaaaga

SEQ ID NO: 316605 - RNA, 15 nt, Human herpesvirus 5
ucaauaaaaaccacc

SEQ ID NO: 316606 - RNA, 18 nt, Human herpesvirus 5
ucaauaaagaaaaccaca

SEQ ID NO: 316607 - RNA, 23 nt, Human herpesvirus 5
ucaauaaagaaaaccacacuguu

SEQ ID NO: 316608 - RNA, 16 nt, Human herpesvirus 5
ucaauaaagacgucaa

SEQ ID NO: 316609 - RNA, 15 nt, Human herpesvirus 5
ucaauaaucuccuga

SEQ ID NO: 316610 - RNA, 19 nt, Human herpesvirus 5
ucaauaaucuccugagaca

SEQ ID NO: 316611 - RNA, 12 nt, Human herpesvirus 5
ucaauacaauga

SEQ ID NO: 316612 - RNA, 14 nt, Human herpesvirus 5
ucaauacaaugaca

SEQ ID NO: 316613 - RNA, 14 nt, Human herpesvirus 5
ucaaucauuacuaa

SEQ ID NO: 316614 - RNA, 16 nt, Human herpesvirus 5
ucaaugccaccaugaa

SEQ ID NO: 316615 - RNA, 20 nt, Human herpesvirus 5
ucaaugguggaaaccagaua

SEQ ID NO: 316616 - RNA, 20 nt, Human herpesvirus 5
ucauaguugcuauaccucag

SEQ ID NO: 316617 - RNA, 15 nt, Human herpesvirus 5
ucaucaaucacccac

SEQ ID NO: 316618 - RNA, 18 nt, Human herpesvirus 5
ucaucaucacgcaaagca

SEQ ID NO: 316619 - RNA, 15 nt, Human herpesvirus 5
ucaucgacgccuacc

SEQ ID NO: 316620 - RNA, 14 nt, Human herpesvirus 5
ucaucggcauguuc

SEQ ID NO: 316621 - RNA, 17 nt, Human herpesvirus 5
ucaucuauauauacauc

SEQ ID NO: 316622 - RNA, 20 nt, Human herpesvirus 5
ucaucucgccgacgugguga

SEQ ID NO: 316623 - RNA, 13 nt, Human herpesvirus 5
ucaucugcaccuc

SEQ ID NO: 316624 - RNA, 18 nt, Human herpesvirus 5
ucaucuguuuuugcugca

SEQ ID NO: 316625 - RNA, 22 nt, Human herpesvirus 5
ucaucuuuauuugcaucaugug

SEQ ID NO: 316626 - RNA, 20 nt, Human herpesvirus 5
ucaugaacuucaucaucacc

SEQ ID NO: 316627 - RNA, 19 nt, Human herpesvirus 5
ucaugcauucagaaaacgg

SEQ ID NO: 316628 - RNA, 12 nt, Human herpesvirus 5
ucaugccgccac

SEQ ID NO: 316629 - RNA, 16 nt, Human herpesvirus 5
ucaugcgucggcauua

SEQ ID NO: 316630 - RNA, 18 nt, Human herpesvirus 5
ucauggagccgcaagugc

SEQ ID NO: 316631 - RNA, 19 nt, Human herpesvirus 5
ucauggagccgcaagugcu

SEQ ID NO: 316632 - RNA, 14 nt, Human herpesvirus 5
ucaugguggucuac

SEQ ID NO: 316633 - RNA, 23 nt, Human herpesvirus 5
ucaugguggucuacaagcgcaac

SEQ ID NO: 316634 - RNA, 20 nt, Human herpesvirus 5
ucauuacagacgccuauaaa

SEQ ID NO: 316635 - RNA, 14 nt, Human herpesvirus 5
ucauuaugauuucc

SEQ ID NO: 316636 - RNA, 15 nt, Human herpesvirus 5
ucauucguguugaca

SEQ ID NO: 316637 - RNA, 19 nt, Human herpesvirus 5
ucauuuguauuuacuuuaa

SEQ ID NO: 316638 - RNA, 22 nt, Human herpesvirus 5
uccaaaagugauuuuugggcau

SEQ ID NO: 316639 - RNA, 23 nt, Human herpesvirus 5
uccaaaccguaacgugguaaaua

SEQ ID NO: 316640 - RNA, 20 nt, Human herpesvirus 5
uccaacaccacgagcaugaa

SEQ ID NO: 316641 - RNA, 15 nt, Human herpesvirus 5
uccaaccucgccguc

SEQ ID NO: 316642 - RNA, 22 nt, Human herpesvirus 5
uccaacuucacuucaaacauca

SEQ ID NO: 316643 - RNA, 23 nt, Human herpesvirus 5
uccaacuucacuucaaacaucag

SEQ ID NO: 316644 - RNA, 23 nt, Human herpesvirus 5
uccaacuuuguggggcugcucaa

SEQ ID NO: 316645 - RNA, 19 nt, Human herpesvirus 5
uccacaacgacaaauacaa

SEQ ID NO: 316646 - RNA, 20 nt, Human herpesvirus 5
uccacaacgacaaauacaaa

SEQ ID NO: 316647 - RNA, 23 nt, Human herpesvirus 5
uccacacgccauaacaaaccacg

SEQ ID NO: 316648 - RNA, 17 nt, Human herpesvirus 5
uccaccacggcugcuga

SEQ ID NO: 316649 - RNA, 11 nt, Human herpesvirus 5
uccaccccuuu

SEQ ID NO: 316650 - RNA, 14 nt, Human herpesvirus 5
uccacuaguacuga

SEQ ID NO: 316651 - RNA, 14 nt, Human herpesvirus 5
uccacuccaucaca

SEQ ID NO: 316652 - RNA, 16 nt, Human herpesvirus 5
uccagcuuaccgccac

SEQ ID NO: 316653 - RNA, 13 nt, Human herpesvirus 5
uccaggugcgcaa

SEQ ID NO: 316654 - RNA, 24 nt, Human herpesvirus 5
uccaguauucaucgggucgucuca

SEQ ID NO: 316655 - RNA, 20 nt, Human herpesvirus 5
uccauacuuaccaccgugac

SEQ ID NO: 316656 - RNA, 17 nt, Human herpesvirus 5
uccaucaucuacguguc

SEQ ID NO: 316657 - RNA, 13 nt, Human herpesvirus 5
uccaugugcagcu

SEQ ID NO: 316658 - RNA, 18 nt, Human herpesvirus 5
uccauuggagaacagugc

SEQ ID NO: 316659 - RNA, 10 nt, Human herpesvirus 5
ucccaccacg

SEQ ID NO: 316660 - RNA, 15 nt, Human herpesvirus 5
ucccaucucaacguc

SEQ ID NO: 316661 - RNA, 17 nt, Human herpesvirus 5
uccccgugacaguauua

SEQ ID NO: 316662 - RNA, 16 nt, Human herpesvirus 5
uccccgugacgugcaa

SEQ ID NO: 316663 - RNA, 16 nt, Human herpesvirus 5
uccccuaacgucacuu

SEQ ID NO: 316664 - RNA, 19 nt, Human herpesvirus 5
uccccuaacgucacuucaa

SEQ ID NO: 316665 - RNA, 13 nt, Human herpesvirus 5
uccccuacgugac

SEQ ID NO: 316666 - RNA, 14 nt, Human herpesvirus 5
ucgucgacgucauc

SEQ ID NO: 316667 - RNA, 19 nt, Human herpesvirus 5
ucgucgugggcuacuuuga

SEQ ID NO: 316668 - RNA, 16 nt, Human herpesvirus 5
ucgucguguccgugau

SEQ ID NO: 316669 - RNA, 14 nt, Human herpesvirus 5
ucgucucaucacau

SEQ ID NO: 316670 - RNA, 14 nt, Human herpesvirus 5
ucgucucaucauca

SEQ ID NO: 316671 - RNA, 15 nt, Human herpesvirus 5
ucgucuuugucauac

SEQ ID NO: 316672 - RNA, 13 nt, Human herpesvirus 5
ucgugaaccauga

SEQ ID NO: 316673 - RNA, 20 nt, Human herpesvirus 5
ucgugcgaggacaaccgcau

SEQ ID NO: 316674 - RNA, 14 nt, Human herpesvirus 5
ucgugucgcugcgu

SEQ ID NO: 316675 - RNA, 17 nt, Human herpesvirus 5
ucgugucgcugcgucca

SEQ ID NO: 316676 - RNA, 22 nt, Human herpesvirus 5
ucgugugcuguugaccugggua

SEQ ID NO: 316677 - RNA, 15 nt, Human herpesvirus 5
ucguucacccaguua

SEQ ID NO: 316678 - RNA, 12 nt, Human herpesvirus 5
ucuaaagccacg

SEQ ID NO: 316679 - RNA, 19 nt, Human herpesvirus 5
ucuaaauaauaaaaacaca

SEQ ID NO: 316680 - RNA, 18 nt, Human herpesvirus 5
ucuaacaacgucacuucu

SEQ ID NO: 316681 - RNA, 16 nt, Human herpesvirus 5
ucuacaacuuaaccac

SEQ ID NO: 316682 - RNA, 17 nt, Human herpesvirus 5
ucuacauucaauacauc

SEQ ID NO: 316683 - RNA, 18 nt, Human herpesvirus 5
ucuaccagcccagggauc

SEQ ID NO: 316684 - RNA, 14 nt, Human herpesvirus 5
ucuaccugauuucu

SEQ ID NO: 316685 - RNA, 22 nt, Human herpesvirus 5
ucuacugcaacugcaccagcaa

SEQ ID NO: 316686 - RNA, 17 nt, Human herpesvirus 5
ucuagacucacuuuauu

SEQ ID NO: 316687 - RNA, 17 nt, Human herpesvirus 5
ucuagcuggcggccucu

SEQ ID NO: 316688 - RNA, 20 nt, Human herpesvirus 5
ucuauccccaaaaaaacaca

SEQ ID NO: 316689 - RNA, 14 nt, Human herpesvirus 5
ucuauguuacaaug

SEQ ID NO: 316690 - RNA, 14 nt, Human herpesvirus 5
ucuauguuauacuc

SEQ ID NO: 316691 - RNA, 16 nt, Human herpesvirus 5
ucuauguuauacucug

SEQ ID NO: 316692 - RNA, 23 nt, Human herpesvirus 5
ucucaacacguaacgucuucuga

SEQ ID NO: 316693 - RNA, 11 nt, Human herpesvirus 5
ucucacuguga

SEQ ID NO: 316694 - RNA, 18 nt, Human herpesvirus 5
ucucauaauaaagcuuuc

SEQ ID NO: 316695 - RNA, 20 nt, Human herpesvirus 5
ucucaugaacaccuuuuugc

SEQ ID NO: 316696 - RNA, 20 nt, Human herpesvirus 5
ucucauuuauugugucuacu

SEQ ID NO: 316697 - RNA, 20 nt, Human herpesvirus 5
ucuccggguuuuuuuuucac

SEQ ID NO: 316698 - RNA, 19 nt, Human herpesvirus 5
ucuccuccgucgcggccag

SEQ ID NO: 316699 - RNA, 17 nt, Human herpesvirus 5
ucuccugagacacuuga

SEQ ID NO: 316700 - RNA, 15 nt, Human herpesvirus 5
ucucgcguucgugau

SEQ ID NO: 316701 - RNA, 18 nt, Human herpesvirus 5
ucucggugcguggaccag

SEQ ID NO: 316702 - RNA, 19 nt, Human herpesvirus 5
ucucuaaacgccaccugca

SEQ ID NO: 316703 - RNA, 15 nt, Human herpesvirus 5
ucucuggaugguacg

SEQ ID NO: 316704 - RNA, 16 nt, Human herpesvirus 5
ucucugucuucuccgg

SEQ ID NO: 316705 - RNA, 19 nt, Human herpesvirus 5
ucugaagccgucagucaua

SEQ ID NO: 316706 - RNA, 18 nt, Human herpesvirus 5
ucugauccaguugcaccu

SEQ ID NO: 316707 - RNA, 15 nt, Human herpesvirus 5
ucugcacgcucuguc

SEQ ID NO: 316708 - RNA, 23 nt, Human herpesvirus 5
ucugccggcugcggcggcacucg

SEQ ID NO: 316709 - RNA, 22 nt, Human herpesvirus 5
ucugccuccuaguaaugcauua

SEQ ID NO: 316710 - RNA, 14 nt, Human herpesvirus 5
ucugcgccgucucu

SEQ ID NO: 316711 - RNA, 22 nt, Human herpesvirus 5
ucugcgucggagcucuuuucau

SEQ ID NO: 316712 - RNA, 11 nt, Human herpesvirus 5
ucugcuacugg

SEQ ID NO: 316713 - RNA, 17 nt, Human herpesvirus 5
ucuggauguauaugauu

SEQ ID NO: 316714 - RNA, 17 nt, Human herpesvirus 5
ucuggcaagaguucaaa

SEQ ID NO: 316715 - RNA, 15 nt, Human herpesvirus 5
ucuggcccugcugua

SEQ ID NO: 316716 - RNA, 18 nt, Human herpesvirus 5
ucugggauauaaauuggg

SEQ ID NO: 316717 - RNA, 12 nt, Human herpesvirus 5
ucuguacugcaa

SEQ ID NO: 316718 - RNA, 15 nt, Human herpesvirus 5
ucuguacugcaagac

SEQ ID NO: 316719 - RNA, 12 nt, Human herpesvirus 5
ucugucaucacg

SEQ ID NO: 316720 - RNA, 23 nt, Human herpesvirus 5
ucugugaugaacgacacaugcac

SEQ ID NO: 316721 - RNA, 20 nt, Human herpesvirus 5
ucuuagcgugugacguggau

SEQ ID NO: 316722 - RNA, 14 nt, Human herpesvirus 5
ucuuaucaccauca

SEQ ID NO: 316723 - RNA, 14 nt, Human herpesvirus 5
ucuuccaccagcua

SEQ ID NO: 316724 - RNA, 21 nt, Human herpesvirus 5
ucuucgacgucgcugccguag

SEQ ID NO: 316725 - RNA, 20 nt, Human herpesvirus 5
ucuucgccaagaugcugcgg

SEQ ID NO: 316726 - RNA, 12 nt, Human herpesvirus 5
ucuucgucguca

SEQ ID NO: 316727 - RNA, 18 nt, Human herpesvirus 5
ucuucuaacgguuacaca

SEQ ID NO: 316728 - RNA, 19 nt, Human herpesvirus 5
ucuugccaagcuuuagcca

SEQ ID NO: 316729 - RNA, 16 nt, Human herpesvirus 5
ucuugcccacgccguc

SEQ ID NO: 316730 - RNA, 15 nt, Human herpesvirus 5
ucuuggccguggugu

SEQ ID NO: 316731 - RNA, 15 nt, Human herpesvirus 5
ucuuuauuugcauca

SEQ ID NO: 316732 - RNA, 21 nt, Human herpesvirus 5
ucuuugccggcucuccuccuc

SEQ ID NO: 316733 - RNA, 20 nt, Human herpesvirus 5
ucuuugcuuaucugccucuu

SEQ ID NO: 316734 - RNA, 14 nt, Human herpesvirus 5
ucuuuuaugaugcu

SEQ ID NO: 316735 - RNA, 21 nt, Human herpesvirus 5
ucuuuuucuucacgccccuga

SEQ ID NO: 316736 - RNA, 15 nt, Human herpesvirus 5
ugaaaaacaucuuaa

SEQ ID NO: 316737 - RNA, 19 nt, Human herpesvirus 5
ugaaaaacaucuuaagaaa

SEQ ID NO: 316738 - RNA, 14 nt, Human herpesvirus 5
ugaaaacaccauug

SEQ ID NO: 316739 - RNA, 15 nt, Human herpesvirus 5
ugaaaacgucaucuc

SEQ ID NO: 316740 - RNA, 17 nt, Human herpesvirus 5
ugaaaaguagcaccaca

SEQ ID NO: 316741 - RNA, 18 nt, Human herpesvirus 5
ugaaaaguagcaccacaa

SEQ ID NO: 316742 - RNA, 16 nt, Human herpesvirus 5
ugaaaauauggcauau

SEQ ID NO: 316743 - RNA, 15 nt, Human herpesvirus 5
ugaaacauaugcaga

SEQ ID NO: 316744 - RNA, 14 nt, Human herpesvirus 5
ugaaaccuaccugg

SEQ ID NO: 316745 - RNA, 17 nt, Human herpesvirus 5
ugaaaucacugugaaac

SEQ ID NO: 316746 - RNA, 20 nt, Human herpesvirus 5
ugaacgcgguacaugugcau

SEQ ID NO: 316747 - RNA, 12 nt, Human herpesvirus 5
ugaacgucugca

SEQ ID NO: 316748 - RNA, 16 nt, Human herpesvirus 5
ugaacuucaucaucac

SEQ ID NO: 316749 - RNA, 17 nt, Human herpesvirus 5
ugaagaaauagauagca

SEQ ID NO: 316750 - RNA, 14 nt, Human herpesvirus 5
ugaagcugaacaau

SEQ ID NO: 316751 - RNA, 17 nt, Human herpesvirus 5
ugaagcugaacaauaaa

SEQ ID NO: 316752 - RNA, 11 nt, Human herpesvirus 5
ugaaggcaaag

SEQ ID NO: 316753 - RNA, 20 nt, Human herpesvirus 5
ugaaggguguugugcgugau

SEQ ID NO: 316754 - RNA, 15 nt, Human herpesvirus 5
ugaauaacaccaaaa

SEQ ID NO: 316755 - RNA, 19 nt, Human herpesvirus 5
ugaauauagggacaguccc

SEQ ID NO: 316756 - RNA, 16 nt, Human herpesvirus 5
ugaauggaaauacaug

SEQ ID NO: 316757 - RNA, 21 nt, Human herpesvirus 5
ugaauggaaauacaugaugaa

SEQ ID NO: 316758 - RNA, 13 nt, Human herpesvirus 5
ugaaugucaucau

SEQ ID NO: 316759 - RNA, 17 nt, Human herpesvirus 5
ugaauuccucuauugcc

SEQ ID NO: 316760 - RNA, 22 nt, Human herpesvirus 5
ugaauucuggcaagaguucaaa

SEQ ID NO: 316761 - RNA, 13 nt, Human herpesvirus 5
ugaauugcacggu

SEQ ID NO: 316762 - RNA, 17 nt, Human herpesvirus 5
ugaauugcgaagccagc

SEQ ID NO: 316763 - RNA, 18 nt, Human herpesvirus 5
ugacaacggcuggaaaug

SEQ ID NO: 316764 - RNA, 14 nt, Human herpesvirus 5
ugacaauguggugu

SEQ ID NO: 316765 - RNA, 20 nt, Human herpesvirus 5
ugacacagagacuugugaua

SEQ ID NO: 316766 - RNA, 21 nt, Human herpesvirus 5
ugacacagagacuugugauau

SEQ ID NO: 316767 - RNA, 10 nt, Human herpesvirus 5
ugacacagca

SEQ ID NO: 316768 - RNA, 13 nt, Human herpesvirus 5
ugacacggcgguu

SEQ ID NO: 316769 - RNA, 15 nt, Human herpesvirus 5
ugacacucgaagcaa

SEQ ID NO: 316770 - RNA, 19 nt, Human herpesvirus 5
ugacaguucacggggagaa

SEQ ID NO: 316771 - RNA, 17 nt, Human herpesvirus 5
ugacaucaccgccuccc

SEQ ID NO: 316772 - RNA, 18 nt, Human herpesvirus 5
ugacauggauaacgacag

SEQ ID NO: 316773 - RNA, 15 nt, Human herpesvirus 5
ugaccagcaguauga

SEQ ID NO: 316774 - RNA, 14 nt, Human herpesvirus 5
ugaccggaggcuaa

SEQ ID NO: 316775 - RNA, 22 nt, Human herpesvirus 5
ugaccggcccuagaaagaccaa

SEQ ID NO: 316776 - RNA, 16 nt, Human herpesvirus 5
ugaccguuguggggau

SEQ ID NO: 316777 - RNA, 20 nt, Human herpesvirus 5
ugacgcacuuuuuuuacuag

SEQ ID NO: 316778 - RNA, 23 nt, Human herpesvirus 5
ugacgcacuuuuuuuacuaguau

SEQ ID NO: 316779 - RNA, 12 nt, Human herpesvirus 5
ugacgcugcuuu

SEQ ID NO: 316780 - RNA, 13 nt, Human herpesvirus 5
ugacgcuguacaa

SEQ ID NO: 316781 - RNA, 19 nt, Human herpesvirus 5
ugacgcuguuagugguggc

SEQ ID NO: 316782 - RNA, 13 nt, Human herpesvirus 5
ugacggugaugcg

SEQ ID NO: 316783 - RNA, 16 nt, Human herpesvirus 5
ugacgguuggacuccu

SEQ ID NO: 316784 - RNA, 22 nt, Human herpesvirus 5
ugacguacauauacgugauuau

SEQ ID NO: 316785 - RNA, 21 nt, Human herpesvirus 5
ugacgucccuuuuacuaguau

SEQ ID NO: 316786 - RNA, 22 nt, Human herpesvirus 5
ugacgugacucuugacguuuau

SEQ ID NO: 316787 - RNA, 23 nt, Human herpesvirus 5
ugacgugcaagacuacaugcuau

SEQ ID NO: 316788 - RNA, 18 nt, Human herpesvirus 5
ugacguggauacuaguaa

SEQ ID NO: 316789 - RNA, 20 nt, Human herpesvirus 5
ugacguggguuggucacuga

SEQ ID NO: 316790 - RNA, 14 nt, Human herpesvirus 5
ugacguuaucauaa

SEQ ID NO: 316791 - RNA, 18 nt, Human herpesvirus 5
ugacuagcgaaguacaca

SEQ ID NO: 316792 - RNA, 13 nt, Human herpesvirus 5
ugacuuacaucuc

SEQ ID NO: 316793 - RNA, 19 nt, Human herpesvirus 5
ugagaaagcuaacauuccc

SEQ ID NO: 316794 - RNA, 15 nt, Human herpesvirus 5
ugagaacauguggaa

SEQ ID NO: 316795 - RNA, 22 nt, Human herpesvirus 5
ugagaagcacggagacugcggu

SEQ ID NO: 316796 - RNA, 15 nt, Human herpesvirus 5
ugagacacuugaaua

SEQ ID NO: 316797 - RNA, 14 nt, Human herpesvirus 5
ugagacgucgauau

SEQ ID NO: 316798 - RNA, 19 nt, Human herpesvirus 5
ugagaguggugggaaugca

SEQ ID NO: 316799 - RNA, 23 nt, Human herpesvirus 5
ugagcaauugccucuacacuugg

SEQ ID NO: 316800 - RNA, 21 nt, Human herpesvirus 5
ugagcaggguaaaaaccacgu

SEQ ID NO: 316801 - RNA, 21 nt, Human herpesvirus 5
ugagccugaaguaagcauggc

SEQ ID NO: 316802 - RNA, 16 nt, Human herpesvirus 5
ugaggaggguggugac

SEQ ID NO: 316803 - RNA, 21 nt, Human herpesvirus 5
ugaggcggcguggacugggac

SEQ ID NO: 316804 - RNA, 21 nt, Human herpesvirus 5
ugaguaccccacgcauaaaau

SEQ ID NO: 316805 - RNA, 16 nt, Human herpesvirus 5
ugauaacaaacaauga

SEQ ID NO: 316806 - RNA, 17 nt, Human herpesvirus 5
ugauaacaaacaaugac

SEQ ID NO: 316807 - RNA, 18 nt, Human herpesvirus 5
ugauaacaaacaaugaca

SEQ ID NO: 316808 - RNA, 22 nt, Human herpesvirus 5
ugauaacaaacaaugacacucg

SEQ ID NO: 316809 - RNA, 16 nt, Human herpesvirus 5
ugauacgcuagcagaa

SEQ ID NO: 316810 - RNA, 21 nt, Human herpesvirus 5
ugaucacggacacgacgagua

SEQ ID NO: 316811 - RNA, 22 nt, Human herpesvirus 5
ugaucacguacguuuuccaaaa

SEQ ID NO: 316812 - RNA, 13 nt, Human herpesvirus 5
ugaucugucauca

SEQ ID NO: 316813 - RNA, 18 nt, Human herpesvirus 5
ugaugaacgacacaugca

SEQ ID NO: 316814 - RNA, 12 nt, Human herpesvirus 5
ugaugacgguga

SEQ ID NO: 316815 - RNA, 16 nt, Human herpesvirus 5
ugaugggcgucgccag

SEQ ID NO: 316816 - RNA, 22 nt, Human herpesvirus 5
ugaugugcuuuuuaucagggag

SEQ ID NO: 316817 - RNA, 18 nt, Human herpesvirus 5
ugauuuacgaggucugca

SEQ ID NO: 316818 - RNA, 21 nt, Human herpesvirus 5
ugauuuacgaggucugcaugu

SEQ ID NO: 316819 - RNA, 20 nt, Human herpesvirus 5
ugauuucaacaaauaccaac

SEQ ID NO: 316820 - RNA, 13 nt, Human herpesvirus 5
ugauuuugauggu

SEQ ID NO: 316821 - RNA, 17 nt, Human herpesvirus 5
ugcaaagucaacaugua

SEQ ID NO: 316822 - RNA, 18 nt, Human herpesvirus 5
ugcaaagucaacauguag

SEQ ID NO: 316823 - RNA, 17 nt, Human herpesvirus 5
ugcaacgccuggcguga

SEQ ID NO: 316824 - RNA, 22 nt, Human herpesvirus 5
ugcaacgcgcccgacagcugca

SEQ ID NO: 316825 - RNA, 16 nt, Human herpesvirus 5
ugcaacggcaucaugu

SEQ ID NO: 316826 - RNA, 17 nt, Human herpesvirus 5
ugcaacugcaccagcaa

SEQ ID NO: 316827 - RNA, 23 nt, Human herpesvirus 5
ugcaacugcaccagcaaccaccg

SEQ ID NO: 316828 - RNA, 20 nt, Human herpesvirus 5
ugcaacuucuucuacucaca

SEQ ID NO: 316829 - RNA, 19 nt, Human herpesvirus 5
ugcaagacuacaugcuaua

SEQ ID NO: 316830 - RNA, 14 nt, Human herpesvirus 5
ugcaauacagaagg

SEQ ID NO: 316831 - RNA, 16 nt, Human herpesvirus 5
ugcaaugcaacacuaa

SEQ ID NO: 316832 - RNA, 15 nt, Human herpesvirus 5
ugcacaccuauggcg

SEQ ID NO: 316833 - RNA, 17 nt, Human herpesvirus 5
ugcaccgcggcaccuac

SEQ ID NO: 316834 - RNA, 14 nt, Human herpesvirus 5
ugcacgacaucuuc

SEQ ID NO: 316835 - RNA, 14 nt, Human herpesvirus 5
ugcacgcgcugcuu

SEQ ID NO: 316836 - RNA, 18 nt, Human herpesvirus 5
ugcagaaguuguugcaac

SEQ ID NO: 316837 - RNA, 20 nt, Human herpesvirus 5
ugcagaaguuguugcaacug

SEQ ID NO: 316838 - RNA, 14 nt, Human herpesvirus 5
ugcagacgguggug

SEQ ID NO: 316839 - RNA, 16 nt, Human herpesvirus 5
ugcagcccaccgcccu

SEQ ID NO: 316840 - RNA, 16 nt, Human herpesvirus 5
ugcagcgacgaucccu

SEQ ID NO: 316841 - RNA, 17 nt, Human herpesvirus 5
ugcagcgacgaucccuc

SEQ ID NO: 316842 - RNA, 14 nt, Human herpesvirus 5
ugcagcuggugauc

SEQ ID NO: 316843 - RNA, 16 nt, Human herpesvirus 5
ugcauaagaagccaag

SEQ ID NO: 316844 - RNA, 18 nt, Human herpesvirus 5
ugcauagaguuacaugca

SEQ ID NO: 316845 - RNA, 19 nt, Human herpesvirus 5
ugcauagaguuacaugcaa

SEQ ID NO: 316846 - RNA, 23 nt, Human herpesvirus 5
ugcauaucgaucuauacauugaa

SEQ ID NO: 316847 - RNA, 18 nt, Human herpesvirus 5
ugcaucgccauccgagcc

SEQ ID NO: 316848 - RNA, 19 nt, Human herpesvirus 5
ugcaucugccgaaacaccg

SEQ ID NO: 316849 - RNA, 19 nt, Human herpesvirus 5
ugcaugacucguugggauu

SEQ ID NO: 316850 - RNA, 21 nt, Human herpesvirus 5
ugcaugagaacacgcgugaca

SEQ ID NO: 316851 - RNA, 14 nt, Human herpesvirus 5
ugcauguucaucac

SEQ ID NO: 316852 - RNA, 22 nt, Human herpesvirus 5
ugcauuaucaucuaaagacuau

SEQ ID NO: 316853 - RNA, 14 nt, Human herpesvirus 5
ugccaacaaugacu

SEQ ID NO: 316854 - RNA, 19 nt, Human herpesvirus 5
ugccaauuuuuucgcugcc

SEQ ID NO: 316855 - RNA, 20 nt, Human herpesvirus 5
ugccaauuuuuucgcugcca

SEQ ID NO: 316856 - RNA, 15 nt, Human herpesvirus 5
ugccauggaccugac

SEQ ID NO: 316857 - RNA, 17 nt, Human herpesvirus 5
ugccauggaccugaccu

SEQ ID NO: 316858 - RNA, 21 nt, Human herpesvirus 5
ugcccauacuuuuacaugaac

SEQ ID NO: 316859 - RNA, 21 nt, Human herpesvirus 5
ugcccaucgucugcauguuca

SEQ ID NO: 316860 - RNA, 21 nt, Human herpesvirus 5
ugccccccgggauccaagaga

SEQ ID NO: 316861 - RNA, 16 nt, Human herpesvirus 5
ugccgaagaccucacc

SEQ ID NO: 316862 - RNA, 14 nt, Human herpesvirus 5
ugccgagcugccuu

SEQ ID NO: 316863 - RNA, 14 nt, Human herpesvirus 5
ugccgcagcugcug

SEQ ID NO: 316864 - RNA, 24 nt, Human herpesvirus 5
ugccggucuacagacugggcgacg

SEQ ID NO: 316865 - RNA, 16 nt, Human herpesvirus 5
ugccuacgucuucaug

SEQ ID NO: 316866 - RNA, 16 nt, Human herpesvirus 5
ugccucgacaucucgc

SEQ ID NO: 316867 - RNA, 14 nt, Human herpesvirus 5
ugccucuacuugga

SEQ ID NO: 316868 - RNA, 15 nt, Human herpesvirus 5
ugccugggcacgcgc

SEQ ID NO: 316869 - RNA, 17 nt, Human herpesvirus 5
ugccuuccgcgugcucc

SEQ ID NO: 316870 - RNA, 18 nt, Human herpesvirus 5
ugcgaacgucaccggaga

SEQ ID NO: 316871 - RNA, 20 nt, Human herpesvirus 5
ugcgaacgucaccggagacc

SEQ ID NO: 316872 - RNA, 21 nt, Human herpesvirus 5
ugcgaagccagcuacagccac

SEQ ID NO: 316873 - RNA, 15 nt, Human herpesvirus 5
ugcgaaguguugacc

SEQ ID NO: 316874 - RNA, 16 nt, Human herpesvirus 5
ugcgacacgugcuuuu

SEQ ID NO: 316875 - RNA, 19 nt, Human herpesvirus 5
ugcgacggcggguggagau

SEQ ID NO: 316876 - RNA, 13 nt, Human herpesvirus 5
ugcgaugugcaau

SEQ ID NO: 316877 - RNA, 13 nt, Human herpesvirus 5
ugcgcaucuugcc

SEQ ID NO: 316878 - RNA, 19 nt, Human herpesvirus 5
ugcgcccccgugugucuaa

SEQ ID NO: 316879 - RNA, 13 nt, Human herpesvirus 5
ugcgccuuccagu

SEQ ID NO: 316880 - RNA, 23 nt, Human herpesvirus 5
ugcgccuuuaagcuggaccuguu

SEQ ID NO: 316881 - RNA, 18 nt, Human herpesvirus 5
ugcgcgaauggcuggugu

SEQ ID NO: 316882 - RNA, 21 nt, Human herpesvirus 5
ugcgcgucgaccuugagcgac

SEQ ID NO: 316883 - RNA, 13 nt, Human herpesvirus 5
ugcgcuacgucua

SEQ ID NO: 316884 - RNA, 16 nt, Human herpesvirus 5
ugcgcuacgucuacua

SEQ ID NO: 316885 - RNA, 16 nt, Human herpesvirus 5
ugcggauccagcugcu

SEQ ID NO: 316886 - RNA, 14 nt, Human herpesvirus 5
ugcggcgcagacgu

SEQ ID NO: 316887 - RNA, 20 nt, Human herpesvirus 5
ugcggcgcguagaaggcaac

SEQ ID NO: 316888 - RNA, 20 nt, Human herpesvirus 5
ugcggcguucgcgugcacgc

SEQ ID NO: 316889 - RNA, 15 nt, Human herpesvirus 5
ugcgggguggugcuc

SEQ ID NO: 316890 - RNA, 19 nt, Human herpesvirus 5
ugcgguaaaaccacgucaa

SEQ ID NO: 316891 - RNA, 20 nt, Human herpesvirus 5
ugcgguuaacccuagcaacg

SEQ ID NO: 316892 - RNA, 22 nt, Human herpesvirus 5
ugcgucaagacgggccugguau

SEQ ID NO: 316893 - RNA, 12 nt, Human herpesvirus 5
ugcgugaugauu

SEQ ID NO: 316894 - RNA, 14 nt, Human herpesvirus 5
ugcguguaccgcua

SEQ ID NO: 316895 - RNA, 15 nt, Human herpesvirus 5
ugcguguguguuucu

SEQ ID NO: 316896 - RNA, 17 nt, Human herpesvirus 5
ugcuauaagaaggccau

SEQ ID NO: 316897 - RNA, 17 nt, Human herpesvirus 5
ugcuauaagacagccuu

SEQ ID NO: 316898 - RNA, 23 nt, Human herpesvirus 5
ugcucagcggcguguacagcuac

SEQ ID NO: 316899 - RNA, 16 nt, Human herpesvirus 5
ugcucaggccacccgc

SEQ ID NO: 316900 - RNA, 14 nt, Human herpesvirus 5
ugcucagguacauu

SEQ ID NO: 316901 - RNA, 16 nt, Human herpesvirus 5
ugcucagguacauuac

SEQ ID NO: 316902 - RNA, 14 nt, Human herpesvirus 5
ugcucgauuaccua

SEQ ID NO: 316903 - RNA, 17 nt, Human herpesvirus 5
ugcugagacugagacug

SEQ ID NO: 316904 - RNA, 14 nt, Human herpesvirus 5
ugcugcacgggcuc

SEQ ID NO: 316905 - RNA, 11 nt, Human herpesvirus 5
ugcugcacuuc

SEQ ID NO: 316906 - RNA, 22 nt, Human herpesvirus 5
ugcugcggcggcgcgaccuucc

SEQ ID NO: 316907 - RNA, 19 nt, Human herpesvirus 5
ugcugcucggcguggucaa

SEQ ID NO: 316908 - RNA, 15 nt, Human herpesvirus 5
ugcugcugcacgggc

SEQ ID NO: 316909 - RNA, 21 nt, Human herpesvirus 5
ugcugcuguguagacugccau

SEQ ID NO: 316910 - RNA, 14 nt, Human herpesvirus 5
ugcugugggcccac

SEQ ID NO: 316911 - RNA, 15 nt, Human herpesvirus 5
ugcuguugcacgggc

SEQ ID NO: 316912 - RNA, 18 nt, Human herpesvirus 5
ugcuuaauaaacauacuu

SEQ ID NO: 316913 - RNA, 14 nt, Human herpesvirus 5
ugcuucguauacaa

SEQ ID NO: 316914 - RNA, 17 nt, Human herpesvirus 5
ugcuucguauacaacag

SEQ ID NO: 316915 - RNA, 20 nt, Human herpesvirus 5
ugcuuuaacccaaaaccaug

SEQ ID NO: 316916 - RNA, 14 nt, Human herpesvirus 5
ugcuuucuuuuugc

SEQ ID NO: 316917 - RNA, 19 nt, Human herpesvirus 5
ugcuuuuacaaacguggag

SEQ ID NO: 316918 - RNA, 20 nt, Human herpesvirus 5
ugcuuuuggugcgccacgua

SEQ ID NO: 316919 - RNA, 17 nt, Human herpesvirus 5
uggaaaacguacgugau

SEQ ID NO: 316920 - RNA, 19 nt, Human herpesvirus 5
uggaaaauauaccaggcau

SEQ ID NO: 316921 - RNA, 16 nt, Human herpesvirus 5
uggaaaccagauacaa

SEQ ID NO: 316922 - RNA, 13 nt, Human herpesvirus 5
uggaaaucccuca

SEQ ID NO: 316923 - RNA, 24 nt, Human herpesvirus 5
uggaaauucaauaaaaaccaccgu

SEQ ID NO: 316924 - RNA, 17 nt, Human herpesvirus 5
uggaagcugcugguggu

SEQ ID NO: 316925 - RNA, 15 nt, Human herpesvirus 5
uggaaguaacaucau

SEQ ID NO: 316926 - RNA, 20 nt, Human herpesvirus 5
uggaaguaacaucauaaaaa

SEQ ID NO: 316927 - RNA, 14 nt, Human herpesvirus 5
uggaauccaucauc

SEQ ID NO: 316928 - RNA, 14 nt, Human herpesvirus 5
uggaaucggguggu

SEQ ID NO: 316929 - RNA, 16 nt, Human herpesvirus 5
uggacaauacaucaua

SEQ ID NO: 316930 - RNA, 20 nt, Human herpesvirus 5
uggacacucuggcccugcug

SEQ ID NO: 316931 - RNA, 22 nt, Human herpesvirus 5
uggacaugcgcguguacuugcu

SEQ ID NO: 316932 - RNA, 11 nt, Human herpesvirus 5
uggacaugguu

SEQ ID NO: 316933 - RNA, 22 nt, Human herpesvirus 5
uggaccaaagacugugguggga

SEQ ID NO: 316934 - RNA, 16 nt, Human herpesvirus 5
uggaccagacggcguc

SEQ ID NO: 316935 - RNA, 15 nt, Human herpesvirus 5
uggacgccaucaugg

SEQ ID NO: 316936 - RNA, 23 nt, Human herpesvirus 5
uggacucuuguacauagugauuc

SEQ ID NO: 316937 - RNA, 17 nt, Human herpesvirus 5
uggacugacacagcucc

SEQ ID NO: 316938 - RNA, 15 nt, Human herpesvirus 5
uggagacacaacguu

SEQ ID NO: 316939 - RNA, 22 nt, Human herpesvirus 5
uguacgugcgguaacuggcaga

SEQ ID NO: 316940 - RNA, 20 nt, Human herpesvirus 5
uguacuggucuuuuggugga

SEQ ID NO: 316941 - RNA, 20 nt, Human herpesvirus 5
uguagacugccauucuuacu

SEQ ID NO: 316942 - RNA, 19 nt, Human herpesvirus 5
uguagcgccgacggugaga

SEQ ID NO: 316943 - RNA, 24 nt, Human herpesvirus 5
uguaguacuaccguuaacuauucc

SEQ ID NO: 316944 - RNA, 16 nt, Human herpesvirus 5
uguaguaucauauuau

SEQ ID NO: 316945 - RNA, 20 nt, Human herpesvirus 5
uguauagaccccaagccaaa

SEQ ID NO: 316946 - RNA, 22 nt, Human herpesvirus 5
uguauagaccccaagccaaaaa

SEQ ID NO: 316947 - RNA, 12 nt, Human herpesvirus 5
uguauagauaca

SEQ ID NO: 316948 - RNA, 15 nt, Human herpesvirus 5
uguauauauauauca

SEQ ID NO: 316949 - RNA, 15 nt, Human herpesvirus 5
uguaucguguaucua

SEQ ID NO: 316950 - RNA, 23 nt, Human herpesvirus 5
uguauuauauacaaaaacaugca

SEQ ID NO: 316951 - RNA, 18 nt, Human herpesvirus 5
uguauuggcauauagcca

SEQ ID NO: 316952 - RNA, 14 nt, Human herpesvirus 5
ugucaaucaugccg

SEQ ID NO: 316953 - RNA, 12 nt, Human herpesvirus 5
ugucaccucaca

SEQ ID NO: 316954 - RNA, 23 nt, Human herpesvirus 5
ugucagucucugaaggacagugu

SEQ ID NO: 316955 - RNA, 16 nt, Human herpesvirus 5
ugucauggggagaaaa

SEQ ID NO: 316956 - RNA, 19 nt, Human herpesvirus 5
uguccaaggguaucaugcu

SEQ ID NO: 316957 - RNA, 22 nt, Human herpesvirus 5
uguccauagugcgccaagccau

SEQ ID NO: 316958 - RNA, 18 nt, Human herpesvirus 5
uguccccugccaccucag

SEQ ID NO: 316959 - RNA, 12 nt, Human herpesvirus 5
ugucccuacuca

SEQ ID NO: 316960 - RNA, 20 nt, Human herpesvirus 5
ugucccuuaucccguuacaa

SEQ ID NO: 316961 - RNA, 16 nt, Human herpesvirus 5
uguccuccgcacuucg

SEQ ID NO: 316962 - RNA, 12 nt, Human herpesvirus 5
ugucgcacaaag

SEQ ID NO: 316963 - RNA, 17 nt, Human herpesvirus 5
ugucgcgacacccgggu

SEQ ID NO: 316964 - RNA, 16 nt, Human herpesvirus 5
ugucgcgauagacaac

SEQ ID NO: 316965 - RNA, 22 nt, Human herpesvirus 5
ugucgcgauagacaacuccggu

SEQ ID NO: 316966 - RNA, 14 nt, Human herpesvirus 5
ugucuaaugugcug

SEQ ID NO: 316967 - RNA, 21 nt, Human herpesvirus 5
ugucucuaaacgccaccugca

SEQ ID NO: 316968 - RNA, 18 nt, Human herpesvirus 5
uuugguuucguuuucaaa

SEQ ID NO: 316969 - RNA, 12 nt, Human herpesvirus 5
uuuuacuaguau

SEQ ID NO: 316970 - RNA, 21 nt, Human herpesvirus 5
uuuuacuaguauccacgucac

SEQ ID NO: 316971 - RNA, 14 nt, Human herpesvirus 5
uuuuauuaucaucu

SEQ ID NO: 316972 - RNA, 22 nt, Human herpesvirus 5
uuuuauugauaucgacgucuca

SEQ ID NO: 316973 - RNA, 16 nt, Human herpesvirus 5
uuuucagcucacuguu

SEQ ID NO: 316974 - RNA, 23 nt, Human herpesvirus 5
uuuucugcguguuuuauaaaaga

SEQ ID NO: 316975 - RNA, 18 nt, Human herpesvirus 5
uuuugcucuaaaaacacc

SEQ ID NO: 316976 - RNA, 19 nt, Human herpesvirus 5
uuuuguuaacaaccuauga

SEQ ID NO: 316977 - RNA, 15 nt, Human herpesvirus 5
uuuuguuaguauucu

SEQ ID NO: 316978 - RNA, 20 nt, Human herpesvirus 5
uuuuuacuaguauccacguc

SEQ ID NO: 316979 - RNA, 20 nt, Human herpesvirus 5
uuuuucaugucuuacaaauc

SEQ ID NO: 316980 - RNA, 21 nt, Human herpesvirus 5
uuuuucggccgcggaggugcu

SEQ ID NO: 316981 - RNA, 14 nt, Human herpesvirus 5
uuuuucgucccgcu

SEQ ID NO: 316982 - RNA, 18 nt, Human herpesvirus 5
uuuuugucaggacuggaa

SEQ ID NO: 316983 - RNA, 12 nt, Human herpesvirus 5
aaaaaaacaugg

SEQ ID NO: 316984 - RNA, 11 nt, Human herpesvirus 5
aaaaaaaccac

SEQ ID NO: 316985 - RNA, 20 nt, Human herpesvirus 5
aaaaacaguauagcaugcau

SEQ ID NO: 316986 - RNA, 22 nt, Human herpesvirus 5
aaaaacugcgggcacuggggac

SEQ ID NO: 316987 - RNA, 12 nt, Human herpesvirus 5
aaaaauacugac

SEQ ID NO: 316988 - RNA, 14 nt, Human herpesvirus 5
aaaaauauguagua

SEQ ID NO: 316989 - RNA, 13 nt, Human herpesvirus 5
aaaacaaccacac

SEQ ID NO: 316990 - RNA, 12 nt, Human herpesvirus 5
aaaacacauuau

SEQ ID NO: 316991 - RNA, 17 nt, Human herpesvirus 5
aaaaccaccguaccugc

SEQ ID NO: 316992 - RNA, 18 nt, Human herpesvirus 5
aaaaccaccguaccugca

SEQ ID NO: 316993 - RNA, 10 nt, Human herpesvirus 5
aaaaccaugc

SEQ ID NO: 316994 - RNA, 13 nt, Human herpesvirus 5
aaaacgucaucuc

SEQ ID NO: 316995 - RNA, 13 nt, Human herpesvirus 5
aaaagaagcugcc

SEQ ID NO: 316996 - RNA, 18 nt, Human herpesvirus 5
aaaagcgccgugcucuug

SEQ ID NO: 316997 - RNA, 13 nt, Human herpesvirus 5
aaaagguaugugu

SEQ ID NO: 316998 - RNA, 21 nt, Human herpesvirus 5
aaaagucccgugucgucucca

SEQ ID NO: 316999 - RNA, 21 nt, Human herpesvirus 5
aaaagucuguauauucagucc

SEQ ID NO: 317000 - RNA, 14 nt, Human herpesvirus 5
aaaauauugacaca

SEQ ID NO: 317001 - RNA, 22 nt, Human herpesvirus 5
aaaaugcuguauuauauacaaa

SEQ ID NO: 317002 - RNA, 14 nt, Human herpesvirus 5
aaaauugcaacuua

SEQ ID NO: 317003 - RNA, 23 nt, Human herpesvirus 5
aaaauuucguaaacgacgucguc

SEQ ID NO: 317004 - RNA, 18 nt, Human herpesvirus 5
aaacaaagcacaauacac

SEQ ID NO: 317005 - RNA, 12 nt, Human herpesvirus 5
aaacaacaccac

SEQ ID NO: 317006 - RNA, 16 nt, Human herpesvirus 5
aaacaguuuuugcaga

SEQ ID NO: 317007 - RNA, 13 nt, Human herpesvirus 5
aaacauaugcaga

SEQ ID NO: 317008 - RNA, 19 nt, Human herpesvirus 5
aaacauuuguugagucaug

SEQ ID NO: 317009 - RNA, 18 nt, Human herpesvirus 5
aaaccacgcgucagggcg

SEQ ID NO: 317010 - RNA, 12 nt, Human herpesvirus 5
aaacccguguaa

SEQ ID NO: 317011 - RNA, 22 nt, Human herpesvirus 5
aaaccgucgaaaacaaccacac

SEQ ID NO: 317012 - RNA, 23 nt, Human herpesvirus 5
aaaccgucgaaaacaaccacaca

SEQ ID NO: 317013 - RNA, 15 nt, Human herpesvirus 5
aaaccuaccugggcu

SEQ ID NO: 317014 - RNA, 16 nt, Human herpesvirus 5
aaaccuaccugggcug

SEQ ID NO: 317015 - RNA, 16 nt, Human herpesvirus 5
aaaccuguuccuguca

SEQ ID NO: 317016 - RNA, 14 nt, Human herpesvirus 5
aaacgccaccugca

SEQ ID NO: 317017 - RNA, 12 nt, Human herpesvirus 5
aaacgcugcuug

SEQ ID NO: 317018 - RNA, 22 nt, Human herpesvirus 5
aaacgggaccaucgugcucauc

SEQ ID NO: 317019 - RNA, 17 nt, Human herpesvirus 5
aaacgucaggaaucugg

SEQ ID NO: 317020 - RNA, 21 nt, Human herpesvirus 5
aaacguugagacuaccacaug

SEQ ID NO: 317021 - RNA, 18 nt, Human herpesvirus 5
aaacuaaaacauucugua

SEQ ID NO: 317022 - RNA, 21 nt, Human herpesvirus 5
aaacuacuaauacagauacgc

SEQ ID NO: 317023 - RNA, 20 nt, Human herpesvirus 5
aaacuagcauucuggugaga

SEQ ID NO: 317024 - RNA, 18 nt, Human herpesvirus 5
aaacuuguuuuacaaugu

SEQ ID NO: 317025 - RNA, 13 nt, Human herpesvirus 5
aaagaaacccuca

SEQ ID NO: 317026 - RNA, 24 nt, Human herpesvirus 5
aaagaaacccucaaaacaucacca

SEQ ID NO: 317027 - RNA, 15 nt, Human herpesvirus 5
aaagaccgcugccuc

SEQ ID NO: 317028 - RNA, 16 nt, Human herpesvirus 5
aaagacuuaccaccuc

SEQ ID NO: 317029 - RNA, 18 nt, Human herpesvirus 5
aaagagauagacaucaca

SEQ ID NO: 317030 - RNA, 16 nt, Human herpesvirus 5
aaagaguccaucugcu

SEQ ID NO: 317031 - RNA, 21 nt, Human herpesvirus 5
aaagcaccaugagccucaggu

SEQ ID NO: 317032 - RNA, 16 nt, Human herpesvirus 5
aaagccaccguuuuca

SEQ ID NO: 317033 - RNA, 17 nt, Human herpesvirus 5
aaagccgacaaccugcu

SEQ ID NO: 317034 - RNA, 20 nt, Human herpesvirus 5
aaagccgacaaccugcugca

SEQ ID NO: 317035 - RNA, 22 nt, Human herpesvirus 5
aaagccggcuccaagugcaagc

SEQ ID NO: 317036 - RNA, 20 nt, Human herpesvirus 5
aaagcgggaccuuacaguuu

SEQ ID NO: 317037 - RNA, 13 nt, Human herpesvirus 5
aaagcuaacauuc

SEQ ID NO: 317038 - RNA, 18 nt, Human herpesvirus 5
aaagcucuuagcguguga

SEQ ID NO: 317039 - RNA, 14 nt, Human herpesvirus 5
aaagcugcaaucaa

SEQ ID NO: 317040 - RNA, 22 nt, Human herpesvirus 5
aaagcuucggccggcugcugca

SEQ ID NO: 317041 - RNA, 18 nt, Human herpesvirus 5
aaaggcgcacuugucauu

SEQ ID NO: 317042 - RNA, 21 nt, Human herpesvirus 5
aaaguacacugguauaaccag

SEQ ID NO: 317043 - RNA, 15 nt, Human herpesvirus 5
aaaguagcaccacaa

SEQ ID NO: 317044 - RNA, 22 nt, Human herpesvirus 5
aaaguaucgacacuaauuuauc

SEQ ID NO: 317045 - RNA, 13 nt, Human herpesvirus 5
aaaguaugugcuc

SEQ ID NO: 317046 - RNA, 14 nt, Human herpesvirus 5
aaagucaacaugua

SEQ ID NO: 317047 - RNA, 19 nt, Human herpesvirus 5
aaagucuacgaucgcugga

SEQ ID NO: 317048 - RNA, 20 nt, Human herpesvirus 5
aaagucuggguuuccagaua

SEQ ID NO: 317049 - RNA, 18 nt, Human herpesvirus 5
aaagugcgucaaagcucu

SEQ ID NO: 317050 - RNA, 17 nt, Human herpesvirus 5
aaauacacaacagcugu

SEQ ID NO: 317051 - RNA, 14 nt, Human herpesvirus 5
aaauacaugaugaa

SEQ ID NO: 317052 - RNA, 22 nt, Human herpesvirus 5
aaauauauggaguuuguguaau

SEQ ID NO: 317053 - RNA, 22 nt, Human herpesvirus 5
aaauaugggaauuccccugccu

SEQ ID NO: 317054 - RNA, 15 nt, Human herpesvirus 5
aaauauguaguccgu

SEQ ID NO: 317055 - RNA, 15 nt, Human herpesvirus 5
aaaucuacacugaac

SEQ ID NO: 317056 - RNA, 15 nt, Human herpesvirus 5
acauggagacaguuu

SEQ ID NO: 317057 - RNA, 16 nt, Human herpesvirus 5
acauggagacaguuuc

SEQ ID NO: 317058 - RNA, 18 nt, Human herpesvirus 5
acauggagacaguuucca

SEQ ID NO: 317059 - RNA, 16 nt, Human herpesvirus 5
acaugggcaugcaaug

SEQ ID NO: 317060 - RNA, 22 nt, Human herpesvirus 5
acauguagaagcacccauuaca

SEQ ID NO: 317061 - RNA, 23 nt, Human herpesvirus 5
acauguagaagcacccauuacag

SEQ ID NO: 317062 - RNA, 14 nt, Human herpesvirus 5
acauuaccuuucau

SEQ ID NO: 317063 - RNA, 22 nt, Human herpesvirus 5
acauuacuaucgacguguuauc

SEQ ID NO: 317064 - RNA, 22 nt, Human herpesvirus 5
acauuauucuuggaugcuaauu

SEQ ID NO: 317065 - RNA, 16 nt, Human herpesvirus 5
acauucaauacaucau

SEQ ID NO: 317066 - RNA, 17 nt, Human herpesvirus 5
acauuccccaccuuccc

SEQ ID NO: 317067 - RNA, 20 nt, Human herpesvirus 5
acauuccccugggaauucau

SEQ ID NO: 317068 - RNA, 19 nt, Human herpesvirus 5
aaauucaauaaaaaccacc

SEQ ID NO: 317069 - RNA, 15 nt, Human herpesvirus 5
aaauugcaacuuaac

SEQ ID NO: 317070 - RNA, 16 nt, Human herpesvirus 5
aacaaauauauggagu

SEQ ID NO: 317071 - RNA, 12 nt, Human herpesvirus 5
aacaacagcagc

SEQ ID NO: 317072 - RNA, 23 nt, Human herpesvirus 5
aacaaccuaugauauaaagcggu

SEQ ID NO: 317073 - RNA, 20 nt, Human herpesvirus 5
aacaacggcuggaggacuuu

SEQ ID NO: 317074 - RNA, 13 nt, Human herpesvirus 5
aacaacgucacuu

SEQ ID NO: 317075 - RNA, 16 nt, Human herpesvirus 5
aacaaggcuauaucaa

SEQ ID NO: 317076 - RNA, 20 nt, Human herpesvirus 5
aacaauaccgauaccaucuu

SEQ ID NO: 317077 - RNA, 21 nt, Human herpesvirus 5
aacaauauugcuucguauaca

SEQ ID NO: 317078 - RNA, 22 nt, Human herpesvirus 5
aacaaugacuaacccugggcua

SEQ ID NO: 317079 - RNA, 22 nt, Human herpesvirus 5
aacacaacauaacgacaguguc

SEQ ID NO: 317080 - RNA, 22 nt, Human herpesvirus 5
aacacaucaacgacgccacaca

SEQ ID NO: 317081 - RNA, 17 nt, Human herpesvirus 5
aacacaucgcacacaga

SEQ ID NO: 317082 - RNA, 20 nt, Human herpesvirus 5
aacacauugcugauuacaau

SEQ ID NO: 317083 - RNA, 22 nt, Human herpesvirus 5
aacacauugcugauuacaauga

SEQ ID NO: 317084 - RNA, 13 nt, Human herpesvirus 5
aacaccauuggaa

SEQ ID NO: 317085 - RNA, 21 nt, Human herpesvirus 5
aacaccggucugugaucugca

SEQ ID NO: 317086 - RNA, 13 nt, Human herpesvirus 5
aacaccgucacgu

SEQ ID NO: 317087 - RNA, 17 nt, Human herpesvirus 5
aacaccuuuuugcugca

SEQ ID NO: 317088 - RNA, 13 nt, Human herpesvirus 5
aacacgcaacacg

SEQ ID NO: 317089 - RNA, 22 nt, Human herpesvirus 5
aacacgcgggggaaaaacaaag

SEQ ID NO: 317090 - RNA, 23 nt, Human herpesvirus 5
aacacgcgggggaaaaacaaaga

SEQ ID NO: 317091 - RNA, 19 nt, Human herpesvirus 5
aacacgcgugacacauagc

SEQ ID NO: 317092 - RNA, 17 nt, Human herpesvirus 5
aacacgguggcuuucug

SEQ ID NO: 317093 - RNA, 21 nt, Human herpesvirus 5
aacacguaacgucuucugaag

SEQ ID NO: 317094 - RNA, 19 nt, Human herpesvirus 5
aacacguagugagcuuuga

SEQ ID NO: 317095 - RNA, 12 nt, Human herpesvirus 5
aacacuacagcu

SEQ ID NO: 317096 - RNA, 16 nt, Human herpesvirus 5
aacacuaccgucgcca

SEQ ID NO: 317097 - RNA, 16 nt, Human herpesvirus 5
aacacuccucuccccg

SEQ ID NO: 317098 - RNA, 21 nt, Human herpesvirus 5
aacacugaaaacaccauugga

SEQ ID NO: 317099 - RNA, 13 nt, Human herpesvirus 5
aacacugcuucua

SEQ ID NO: 317100 - RNA, 22 nt, Human herpesvirus 5
aacacuuucucuggaugguacg

SEQ ID NO: 317101 - RNA, 13 nt, Human herpesvirus 5
aacagcagccacc

SEQ ID NO: 317102 - RNA, 14 nt, Human herpesvirus 5
aacagccuguggca

SEQ ID NO: 317103 - RNA, 12 nt, Human herpesvirus 5
aacagugugguu

SEQ ID NO: 317104 - RNA, 15 nt, Human herpesvirus 5
aacaguuaucagcaa

SEQ ID NO: 317105 - RNA, 21 nt, Human herpesvirus 5
aacaguuuacgaguacaaaac

SEQ ID NO: 317106 - RNA, 14 nt, Human herpesvirus 5
aacauacaguacaa

SEQ ID NO: 317107 - RNA, 17 nt, Human herpesvirus 5
aacaucauaaaaaccau

SEQ ID NO: 317108 - RNA, 22 nt, Human herpesvirus 5
aacaucauaaaaaccauugaga

SEQ ID NO: 317109 - RNA, 16 nt, Human herpesvirus 5
aacaugcccagcaucu

SEQ ID NO: 317110 - RNA, 17 nt, Human herpesvirus 5
aacaugggcaugcaaug

SEQ ID NO: 317111 - RNA, 23 nt, Human herpesvirus 5
aacauguagaagcacccauuaca

SEQ ID NO: 317112 - RNA, 21 nt, Human herpesvirus 5
aacauuuguugagucaugaca

SEQ ID NO: 317113 - RNA, 20 nt, Human herpesvirus 5
aacauuuuauuuacaucugu

SEQ ID NO: 317114 - RNA, 15 nt, Human herpesvirus 5
aaccaaaaaaccccu

SEQ ID NO: 317115 - RNA, 18 nt, Human herpesvirus 5
aaccaaaacgucaggaau

SEQ ID NO: 317116 - RNA, 16 nt, Human herpesvirus 5
aaccaauaacaugucu

SEQ ID NO: 317117 - RNA, 19 nt, Human herpesvirus 5
aaccacacagauauccaca

SEQ ID NO: 317118 - RNA, 15 nt, Human herpesvirus 5
aaccaccgugucucc

SEQ ID NO: 317119 - RNA, 18 nt, Human herpesvirus 5
aaccaccguuucuacaaa

SEQ ID NO: 317120 - RNA, 15 nt, Human herpesvirus 5
aaccacgaguaacac

SEQ ID NO: 317121 - RNA, 19 nt, Human herpesvirus 5
aaccacguacaagaaccac

SEQ ID NO: 317122 - RNA, 18 nt, Human herpesvirus 5
aaccacgucgaccaggug

SEQ ID NO: 317123 - RNA, 19 nt, Human herpesvirus 5
aaccaugcuacgccgggga

SEQ ID NO: 317124 - RNA, 13 nt, Human herpesvirus 5
aacccaaaaccau

SEQ ID NO: 317125 - RNA, 21 nt, Human herpesvirus 5
aacccaaguagcggcgcgccc

SEQ ID NO: 317126 - RNA, 20 nt, Human herpesvirus 5
aacccacguccacucagaca

SEQ ID NO: 317127 - RNA, 16 nt, Human herpesvirus 5
aacccggucagucuau

SEQ ID NO: 317128 - RNA, 15 nt, Human herpesvirus 5
aaccgagacggagga

SEQ ID NO: 317129 - RNA, 14 nt, Human herpesvirus 5
aaccguauauucua

SEQ ID NO: 317130 - RNA, 20 nt, Human herpesvirus 5
aaccguauauucuacauuca

SEQ ID NO: 317131 - RNA, 19 nt, Human herpesvirus 5
aaccuacguccgugaguga

SEQ ID NO: 317132 - RNA, 20 nt, Human herpesvirus 5
aaccucuaccucguccgccu

SEQ ID NO: 317133 - RNA, 12 nt, Human herpesvirus 5
aaccuuccccac

SEQ ID NO: 317134 - RNA, 15 nt, Human herpesvirus 5
aacgagugugccucg

SEQ ID NO: 317135 - RNA, 19 nt, Human herpesvirus 5
aacgcgaccaccguuacca

SEQ ID NO: 317136 - RNA, 17 nt, Human herpesvirus 5
aacgcgguacaugugca

SEQ ID NO: 317137 - RNA, 19 nt, Human herpesvirus 5
aacgcucgugagcaacagu

SEQ ID NO: 317138 - RNA, 20 nt, Human herpesvirus 5
aacggaagaagaagaacaag

SEQ ID NO: 317139 - RNA, 19 nt, Human herpesvirus 5
aacggccgccgcagccacg

SEQ ID NO: 317140 - RNA, 14 nt, Human herpesvirus 5
aacgucacauugaa

SEQ ID NO: 317141 - RNA, 21 nt, Human herpesvirus 5
aacgucacuucugcugucacc

SEQ ID NO: 317142 - RNA, 19 nt, Human herpesvirus 5
aacgucaucucgccgacgu

SEQ ID NO: 317143 - RNA, 14 nt, Human herpesvirus 5
aacgucaugcauuc

SEQ ID NO: 317144 - RNA, 12 nt, Human herpesvirus 5
aacgugcugcug

SEQ ID NO: 317145 - RNA, 14 nt, Human herpesvirus 5
aacguguggugaga

SEQ ID NO: 317146 - RNA, 19 nt, Human herpesvirus 5
aacguucuguaaucuucca

SEQ ID NO: 317147 - RNA, 21 nt, Human herpesvirus 5
aacuacaauguauagauacac

SEQ ID NO: 317148 - RNA, 21 nt, Human herpesvirus 5
aacuacgcuacgaccuggccu

SEQ ID NO: 317149 - RNA, 12 nt, Human herpesvirus 5
aacucacuguuu

SEQ ID NO: 317150 - RNA, 16 nt, Human herpesvirus 5
aacuccgugccagcug

SEQ ID NO: 317151 - RNA, 16 nt, Human herpesvirus 5
aacugaaauacaugcu

SEQ ID NO: 317152 - RNA, 15 nt, Human herpesvirus 5
aacugaccaagcuag

SEQ ID NO: 317153 - RNA, 14 nt, Human herpesvirus 5
aacugcaccagcaa

SEQ ID NO: 317154 - RNA, 12 nt, Human herpesvirus 5
aacugcugccuc

SEQ ID NO: 317155 - RNA, 11 nt, Human herpesvirus 5
aacuguagcac

SEQ ID NO: 317156 - RNA, 18 nt, Human herpesvirus 5
aacugugaugucuaucuc

SEQ ID NO: 317157 - RNA, 23 nt, Human herpesvirus 5
aacuuaaccacaagaaacgcugg

SEQ ID NO: 317158 - RNA, 16 nt, Human herpesvirus 5
aacuucuaccaucucc

SEQ ID NO: 317159 - RNA, 21 nt, Human herpesvirus 5
aacuugaagaaauagauagca

SEQ ID NO: 317160 - RNA, 23 nt, Human herpesvirus 5
aacuuuguggggcugcucaacuu

SEQ ID NO: 317161 - RNA, 17 nt, Human herpesvirus 5
aagaaaauuacuacgua

SEQ ID NO: 317162 - RNA, 22 nt, Human herpesvirus 5
aagaauccguccccacguccac

SEQ ID NO: 317163 - RNA, 17 nt, Human herpesvirus 5
aagaaucuaggaacacu

SEQ ID NO: 317164 - RNA, 20 nt, Human herpesvirus 5
aagaauguugcgaauucaua

SEQ ID NO: 317165 - RNA, 21 nt, Human herpesvirus 5
aagacaucgucacaccuauca

SEQ ID NO: 317166 - RNA, 21 nt, Human herpesvirus 5
aagacgcaugauuagcaauau

SEQ ID NO: 317167 - RNA, 22 nt, Human herpesvirus 5
aagacgggacggcugccucuca

SEQ ID NO: 317168 - RNA, 23 nt, Human herpesvirus 5
aagacgggacggcugccucucau

SEQ ID NO: 317169 - RNA, 16 nt, Human herpesvirus 5
aagacgucaaugacac

SEQ ID NO: 317170 - RNA, 23 nt, Human herpesvirus 5
aagacuauacuuuuucaugguau

SEQ ID NO: 317171 - RNA, 20 nt, Human herpesvirus 5
aagagagucacacuuaagaa

SEQ ID NO: 317172 - RNA, 11 nt, Human herpesvirus 5
aagagcuuuga

SEQ ID NO: 317173 - RNA, 18 nt, Human herpesvirus 5
aagaggggcaccuguaua

SEQ ID NO: 317174 - RNA, 20 nt, Human herpesvirus 5
aagaugccgaugugugacua

SEQ ID NO: 317175 - RNA, 13 nt, Human herpesvirus 5
aagauucacuuaa

SEQ ID NO: 317176 - RNA, 17 nt, Human herpesvirus 5
aagcaccguggggucau

SEQ ID NO: 317177 - RNA, 18 nt, Human herpesvirus 5
aauugcgggcccugcuga

SEQ ID NO: 317178 - RNA, 24 nt, Human herpesvirus 5
aauugcucuacugcaacugcacca

SEQ ID NO: 317179 - RNA, 17 nt, Human herpesvirus 5
aauugcuuuaauacucg

SEQ ID NO: 317180 - RNA, 14 nt, Human herpesvirus 5
aauuggagacacaa

SEQ ID NO: 317181 - RNA, 14 nt, Human herpesvirus 5
aauuguuauugcca

SEQ ID NO: 317182 - RNA, 18 nt, Human herpesvirus 5
aauuuguaaaaaggcaau

SEQ ID NO: 317183 - RNA, 12 nt, Human herpesvirus 5
aauuuguaaaua

SEQ ID NO: 317184 - RNA, 19 nt, Human herpesvirus 5
acaaaaagcucccaugaga

SEQ ID NO: 317185 - RNA, 13 nt, Human herpesvirus 5
acaaaaauacuga

SEQ ID NO: 317186 - RNA, 13 nt, Human herpesvirus 5
aucgaugcuguug

SEQ ID NO: 317187 - RNA, 14 nt, Human herpesvirus 5
aucgcaacaacagc

SEQ ID NO: 317188 - RNA, 15 nt, Human herpesvirus 5
aucgcaacaacagca

SEQ ID NO: 317189 - RNA, 17 nt, Human herpesvirus 5
aucgcaacaacagcaac

SEQ ID NO: 317190 - RNA, 19 nt, Human herpesvirus 5
aucgcacacagacuuuaua

SEQ ID NO: 317191 - RNA, 15 nt, Human herpesvirus 5
aucgcagccacgcgc

SEQ ID NO: 317192 - RNA, 17 nt, Human herpesvirus 5
aucgccccucacgucag

SEQ ID NO: 317193 - RNA, 16 nt, Human herpesvirus 5
aucgcgacagacaucc

SEQ ID NO: 317194 - RNA, 22 nt, Human herpesvirus 5
aucgcguccgaccgggaaacca

SEQ ID NO: 317195 - RNA, 23 nt, Human herpesvirus 5
aucgcgucuuucgccgccacgcu

SEQ ID NO: 317196 - RNA, 16 nt, Human herpesvirus 5
aucgcuggaaagacaa

SEQ ID NO: 317197 - RNA, 20 nt, Human herpesvirus 5
aucggccgcggugcgcugca

SEQ ID NO: 317198 - RNA, 22 nt, Human herpesvirus 5
aucgggauaucgccguguaaug

SEQ ID NO: 317199 - RNA, 18 nt, Human herpesvirus 5
aucgggcccgccacugcc

SEQ ID NO: 317200 - RNA, 17 nt, Human herpesvirus 5
aucgucacaccuaucau

SEQ ID NO: 317201 - RNA, 15 nt, Human herpesvirus 5
aucgucuacgucguu

SEQ ID NO: 317202 - RNA, 18 nt, Human herpesvirus 5
aucgugaaccaugaucuu

SEQ ID NO: 317203 - RNA, 18 nt, Human herpesvirus 5
aucguguaucuagaucac

SEQ ID NO: 317204 - RNA, 16 nt, Human herpesvirus 5
aucuacaacacuaccc

SEQ ID NO: 317205 - RNA, 20 nt, Human herpesvirus 5
aucuacaacacuacccucaa

SEQ ID NO: 317206 - RNA, 23 nt, Human herpesvirus 5
aucuacaacacuacccucaagua

SEQ ID NO: 317207 - RNA, 12 nt, Human herpesvirus 5
aucuacagcaga

SEQ ID NO: 317208 - RNA, 16 nt, Human herpesvirus 5
aucuaccuaccuugua

SEQ ID NO: 317209 - RNA, 17 nt, Human herpesvirus 5
aucuaggaacacugaaa

SEQ ID NO: 317210 - RNA, 17 nt, Human herpesvirus 5
aucuaggugcugcaugu

SEQ ID NO: 317211 - RNA, 12 nt, Human herpesvirus 5
aucucaucaagc

SEQ ID NO: 317212 - RNA, 15 nt, Human herpesvirus 5
aucucaucaagcacu

SEQ ID NO: 317213 - RNA, 14 nt, Human herpesvirus 5
aucuccgguuucaa

SEQ ID NO: 317214 - RNA, 19 nt, Human herpesvirus 5
aucuccugagacacuugaa

SEQ ID NO: 317215 - RNA, 13 nt, Human herpesvirus 5
aucugcaccucga

SEQ ID NO: 317216 - RNA, 19 nt, Human herpesvirus 5
aucuguacugcaagacgca

SEQ ID NO: 317217 - RNA, 10 nt, Human herpesvirus 5
aucugucacc

SEQ ID NO: 317218 - RNA, 13 nt, Human herpesvirus 5
aucugucaccuca

SEQ ID NO: 317219 - RNA, 14 nt, Human herpesvirus 5
aucugucaccucac

SEQ ID NO: 317220 - RNA, 13 nt, Human herpesvirus 5
aucugucaucacg

SEQ ID NO: 317221 - RNA, 16 nt, Human herpesvirus 5
aucuguuuuugcugca

SEQ ID NO: 317222 - RNA, 21 nt, Human herpesvirus 5
aucuuaccggggaccucguug

SEQ ID NO: 317223 - RNA, 21 nt, Human herpesvirus 5
aucuuaugaagcugaacaaua

SEQ ID NO: 317224 - RNA, 11 nt, Human herpesvirus 5
aucuuuuggag

SEQ ID NO: 317225 - RNA, 15 nt, Human herpesvirus 5
augaacaaauucagc

SEQ ID NO: 317226 - RNA, 12 nt, Human herpesvirus 5
augaacaagguu

SEQ ID NO: 317227 - RNA, 16 nt, Human herpesvirus 5
augaacgacacaugca

SEQ ID NO: 317228 - RNA, 21 nt, Human herpesvirus 5
augaacgacacaugcacaaua

SEQ ID NO: 317229 - RNA, 14 nt, Human herpesvirus 5
augaagccuaucaa

SEQ ID NO: 317230 - RNA, 16 nt, Human herpesvirus 5
augaagcugaacaaua

SEQ ID NO: 317231 - RNA, 14 nt, Human herpesvirus 5
augacuguuuccaa

SEQ ID NO: 317232 - RNA, 17 nt, Human herpesvirus 5
augaggaaacugaauac

SEQ ID NO: 317233 - RNA, 14 nt, Human herpesvirus 5
augaggcaacucau

SEQ ID NO: 317234 - RNA, 18 nt, Human herpesvirus 5
augauauuuuacagguau

SEQ ID NO: 317235 - RNA, 21 nt, Human herpesvirus 5
augaucauggagccgcaagug

SEQ ID NO: 317236 - RNA, 15 nt, Human herpesvirus 5
augaugaaucaugug

SEQ ID NO: 317237 - RNA, 12 nt, Human herpesvirus 5
augaugagcacg

SEQ ID NO: 317238 - RNA, 12 nt, Human herpesvirus 5
augauugucugc

SEQ ID NO: 317239 - RNA, 14 nt, Human herpesvirus 5
augcaacgcuuuca

SEQ ID NO: 317240 - RNA, 19 nt, Human herpesvirus 5
augcaacuucuucuacuca

SEQ ID NO: 317241 - RNA, 14 nt, Human herpesvirus 5
augcaaugcaacac

SEQ ID NO: 317242 - RNA, 16 nt, Human herpesvirus 5
augcauuaucaucuaa

SEQ ID NO: 317243 - RNA, 21 nt, Human herpesvirus 5
augcauucugguaccugcuaa

SEQ ID NO: 317244 - RNA, 14 nt, Human herpesvirus 5
augccaccaugaac

SEQ ID NO: 317245 - RNA, 19 nt, Human herpesvirus 5
augccacgcgucgacccca

SEQ ID NO: 317246 - RNA, 19 nt, Human herpesvirus 5
augccaguugcuguugcuc

SEQ ID NO: 317247 - RNA, 21 nt, Human herpesvirus 5
augccaguugcuguugcucua

SEQ ID NO: 317248 - RNA, 19 nt, Human herpesvirus 5
augccgguaucgauuccag

SEQ ID NO: 317249 - RNA, 15 nt, Human herpesvirus 5
augcgaugugcaaug

SEQ ID NO: 317250 - RNA, 19 nt, Human herpesvirus 5
augcgucguaugccgccac

SEQ ID NO: 317251 - RNA, 18 nt, Human herpesvirus 5
augcguguuaaacacuac

SEQ ID NO: 317252 - RNA, 19 nt, Human herpesvirus 5
augcuaagaugaacgggug

SEQ ID NO: 317253 - RNA, 15 nt, Human herpesvirus 5
augcuagcaauaauc

SEQ ID NO: 317254 - RNA, 20 nt, Human herpesvirus 5
augcugcucagguacauuac

SEQ ID NO: 317255 - RNA, 20 nt, Human herpesvirus 5
augcuguaugggcaggcgua

SEQ ID NO: 317256 - RNA, 21 nt, Human herpesvirus 5
auggaacggauaucuacgcaa

SEQ ID NO: 317257 - RNA, 21 nt, Human herpesvirus 5
auggacauaaaaaagagacac

SEQ ID NO: 317258 - RNA, 13 nt, Human herpesvirus 5
auggacucuugua

SEQ ID NO: 317259 - RNA, 14 nt, Human herpesvirus 5
auggacugucugca

SEQ ID NO: 317260 - RNA, 22 nt, Human herpesvirus 5
auggagcccacgccgaugcucc

SEQ ID NO: 317261 - RNA, 18 nt, Human herpesvirus 5
auggaucacgcgcucuuc

SEQ ID NO: 317262 - RNA, 16 nt, Human herpesvirus 5
auggccuacggcugca

SEQ ID NO: 317263 - RNA, 19 nt, Human herpesvirus 5
augguauaaagauucacuu

SEQ ID NO: 317264 - RNA, 15 nt, Human herpesvirus 5
augguccgucaugac

SEQ ID NO: 317265 - RNA, 19 nt, Human herpesvirus 5
auguacccgcugguguugc

SEQ ID NO: 317266 - RNA, 20 nt, Human herpesvirus 5
auguagcacucaacauguua

SEQ ID NO: 317267 - RNA, 16 nt, Human herpesvirus 5
auguauagauacacgu

SEQ ID NO: 317268 - RNA, 20 nt, Human herpesvirus 5
auguaucgcauaaagggugg

SEQ ID NO: 317269 - RNA, 15 nt, Human herpesvirus 5
auguccaugucucca

SEQ ID NO: 317270 - RNA, 18 nt, Human herpesvirus 5
auguccgcucguguucca

SEQ ID NO: 317271 - RNA, 14 nt, Human herpesvirus 5
augucgaucuccau

SEQ ID NO: 317272 - RNA, 16 nt, Human herpesvirus 5
augucgucucaucaca

SEQ ID NO: 317273 - RNA, 18 nt, Human herpesvirus 5
auguggacgauacuaaua

SEQ ID NO: 317274 - RNA, 24 nt, Human herpesvirus 5
auguguauggcccugauggcgaga

SEQ ID NO: 317275 - RNA, 13 nt, Human herpesvirus 5
augugugacuaaa

SEQ ID NO: 317276 - RNA, 16 nt, Human herpesvirus 5
auguuacaaaacaacg

SEQ ID NO: 317277 - RNA, 16 nt, Human herpesvirus 5
auguuacacauuacua

SEQ ID NO: 317278 - RNA, 20 nt, Human herpesvirus 5
auguuacacauuacuacaca

SEQ ID NO: 317279 - RNA, 16 nt, Human herpesvirus 5
auguuauguuauuaua

SEQ ID NO: 317280 - RNA, 19 nt, Human herpesvirus 5
auguucucugaaaccccau

SEQ ID NO: 317281 - RNA, 23 nt, Human herpesvirus 5
auguucuucgggaaucauggggu

SEQ ID NO: 317282 - RNA, 20 nt, Human herpesvirus 5
auguuuuuugaaucauacau

SEQ ID NO: 317283 - RNA, 16 nt, Human herpesvirus 5
auuaauuuaacaaguc

SEQ ID NO: 317284 - RNA, 22 nt, Human herpesvirus 5
auuaauuuaacaagucacuaua

SEQ ID NO: 317285 - RNA, 18 nt, Human herpesvirus 5
auuacacagguguuguua

SEQ ID NO: 317286 - RNA, 20 nt, Human herpesvirus 5
auuacgcccgacgugauuua

SEQ ID NO: 317287 - RNA, 15 nt, Human herpesvirus 5
auuacggacaccucu

SEQ ID NO: 317288 - RNA, 13 nt, Human herpesvirus 5
auuacuacguaac

SEQ ID NO: 317289 - RNA, 22 nt, Human herpesvirus 5
auuacuaucgacguguuaucac

SEQ ID NO: 317290 - RNA, 21 nt, Human herpesvirus 5
auuagccccacaugcugcuua

SEQ ID NO: 317291 - RNA, 16 nt, Human herpesvirus 5
auuauacccaccaacu

SEQ ID NO: 317292 - RNA, 15 nt, Human herpesvirus 5
auuaucaucuaaaga

SEQ ID NO: 317293 - RNA, 16 nt, Human herpesvirus 5
auucaauaaaaaccac

SEQ ID NO: 317294 - RNA, 17 nt, Human herpesvirus 5
auucaauaaaaaccacc

SEQ ID NO: 317295 - RNA, 18 nt, Human herpesvirus 5
auucacaaaaacaccaau

SEQ ID NO: 317296 - RNA, 18 nt, Human herpesvirus 5
auucaggggaaguauaca

SEQ ID NO: 317297 - RNA, 16 nt, Human herpesvirus 5
auucaucgugcaguac

SEQ ID NO: 317298 - RNA, 20 nt, Human herpesvirus 5
auucaucgugcaguaccuca

SEQ ID NO: 317299 - RNA, 16 nt, Human herpesvirus 5
auuccgaaaccuguau

SEQ ID NO: 317300 - RNA, 15 nt, Human herpesvirus 5
auuccucuauugcca

SEQ ID NO: 317301 - RNA, 21 nt, Human herpesvirus 5
auucgauacgcugcuuuuggc

SEQ ID NO: 317302 - RNA, 14 nt, Human herpesvirus 5
auucguaaccagca

SEQ ID NO: 317303 - RNA, 13 nt, Human herpesvirus 5
agcuugauggugu

SEQ ID NO: 317304 - RNA, 17 nt, Human herpesvirus 5
agcuuggcguuuauuuc

SEQ ID NO: 317305 - RNA, 12 nt, Human herpesvirus 5
agcuuuagccag

SEQ ID NO: 317306 - RNA, 16 nt, Human herpesvirus 5
agcuuucgcgcagcgc

SEQ ID NO: 317307 - RNA, 23 nt, Human herpesvirus 5
agcuuuggucgccugcacugcca

SEQ ID NO: 317308 - RNA, 20 nt, Human herpesvirus 5
agcuuuuuuuauacaucucc

SEQ ID NO: 317309 - RNA, 15 nt, Human herpesvirus 5
aggaaagacaaccaa

SEQ ID NO: 317310 - RNA, 14 nt, Human herpesvirus 5
aggaacacugaaaa

SEQ ID NO: 317311 - RNA, 14 nt, Human herpesvirus 5
aggaagcggcggua

SEQ ID NO: 317312 - RNA, 17 nt, Human herpesvirus 5
aggacaguguauuggca

SEQ ID NO: 317313 - RNA, 23 nt, Human herpesvirus 5
aggacggacggagggucagggau

SEQ ID NO: 317314 - RNA, 21 nt, Human herpesvirus 5
aggacgggaugcacagcgucu

SEQ ID NO: 317315 - RNA, 19 nt, Human herpesvirus 5
aggacgucaaccacgucaa

SEQ ID NO: 317316 - RNA, 13 nt, Human herpesvirus 5
aggacgugaugcg

SEQ ID NO: 317317 - RNA, 15 nt, Human herpesvirus 5
aggagacuaccucag

SEQ ID NO: 317318 - RNA, 18 nt, Human herpesvirus 5
aggagugucagacacagc

SEQ ID NO: 317319 - RNA, 23 nt, Human herpesvirus 5
aggaucgcaauagaauacugcua

SEQ ID NO: 317320 - RNA, 23 nt, Human herpesvirus 5
aggaucgugggugguagaacuga

SEQ ID NO: 317321 - RNA, 16 nt, Human herpesvirus 5
aggaugcgcguacuca

SEQ ID NO: 317322 - RNA, 18 nt, Human herpesvirus 5
aggcaaacugaccaagcu

SEQ ID NO: 317323 - RNA, 19 nt, Human herpesvirus 5
aggcaaauauacuagggaa

SEQ ID NO: 317324 - RNA, 18 nt, Human herpesvirus 5
aggcacaugaugcaaaua

SEQ ID NO: 317325 - RNA, 17 nt, Human herpesvirus 5
aggcacuguuugagcau

SEQ ID NO: 317326 - RNA, 22 nt, Human herpesvirus 5
aggccacgcggcguauccucaa

SEQ ID NO: 317327 - RNA, 13 nt, Human herpesvirus 5
aggccagcugcca

SEQ ID NO: 317328 - RNA, 22 nt, Human herpesvirus 5
aggcggaaaaagaagcgugcua

SEQ ID NO: 317329 - RNA, 21 nt, Human herpesvirus 5
aggcggacauugggcuguggu

SEQ ID NO: 317330 - RNA, 18 nt, Human herpesvirus 5
aggcggcguggacuggga

SEQ ID NO: 317331 - RNA, 17 nt, Human herpesvirus 5
aggcuacgguggcgcga

SEQ ID NO: 317332 - RNA, 16 nt, Human herpesvirus 5
agggaauuuguaaaaa

SEQ ID NO: 317333 - RNA, 22 nt, Human herpesvirus 5
agggacagugcgccaacggcau

SEQ ID NO: 317334 - RNA, 18 nt, Human herpesvirus 5
agggagacuuagaaucuc

SEQ ID NO: 317335 - RNA, 16 nt, Human herpesvirus 5
agggcaucaugguggu

SEQ ID NO: 317336 - RNA, 20 nt, Human herpesvirus 5
agggcgacgguguuuuuaua

SEQ ID NO: 317337 - RNA, 14 nt, Human herpesvirus 5
aggguaaaaaccac

SEQ ID NO: 317338 - RNA, 15 nt, Human herpesvirus 5
aggguaaaaaccacg

SEQ ID NO: 317339 - RNA, 16 nt, Human herpesvirus 5
aggguggugacuuaca

SEQ ID NO: 317340 - RNA, 20 nt, Human herpesvirus 5
aggguggugacuuacaucuc

SEQ ID NO: 317341 - RNA, 21 nt, Human herpesvirus 5
aggguggugacuuacaucuca

SEQ ID NO: 317342 - RNA, 20 nt, Human herpesvirus 5
aggguguugugcgugaugau

SEQ ID NO: 317343 - RNA, 13 nt, Human herpesvirus 5
agguacgggucua

SEQ ID NO: 317344 - RNA, 20 nt, Human herpesvirus 5
agguauuccgaaaccuguau

SEQ ID NO: 317345 - RNA, 13 nt, Human herpesvirus 5
aggucacaggugc

SEQ ID NO: 317346 - RNA, 18 nt, Human herpesvirus 5
aggucgcccaggcucacg

SEQ ID NO: 317347 - RNA, 18 nt, Human herpesvirus 5
aggucggucgaugacgau

SEQ ID NO: 317348 - RNA, 20 nt, Human herpesvirus 5
aggucgucuuggaagccgau

SEQ ID NO: 317349 - RNA, 14 nt, Human herpesvirus 5
aggugaguucaaug

SEQ ID NO: 317350 - RNA, 18 nt, Human herpesvirus 5
aggugaguucaaugugcu

SEQ ID NO: 317351 - RNA, 21 nt, Human herpesvirus 5
aggugcuggcggccguggccu

SEQ ID NO: 317352 - RNA, 17 nt, Human herpesvirus 5
agguggaaaucccucac

SEQ ID NO: 317353 - RNA, 21 nt, Human herpesvirus 5
agguuuugcucuaaaaacacc

SEQ ID NO: 317354 - RNA, 22 nt, Human herpesvirus 5
aguaacaucauaaaaaccauug

SEQ ID NO: 317355 - RNA, 22 nt, Human herpesvirus 5
aguaacgcagggagacacaguc

SEQ ID NO: 317356 - RNA, 12 nt, Human herpesvirus 5
aguaaugcauua

SEQ ID NO: 317357 - RNA, 20 nt, Human herpesvirus 5
aguaaugcauuaucaucuaa

SEQ ID NO: 317358 - RNA, 16 nt, Human herpesvirus 5
aguaauggaaaguauc

SEQ ID NO: 317359 - RNA, 16 nt, Human herpesvirus 5
aguacaacaguuauca

SEQ ID NO: 317360 - RNA, 13 nt, Human herpesvirus 5
aguacaauacaaa

SEQ ID NO: 317361 - RNA, 22 nt, Human herpesvirus 5
aguacuaccguuaacuauucca

SEQ ID NO: 317362 - RNA, 17 nt, Human herpesvirus 5
aguacuacuaccaauac

SEQ ID NO: 317363 - RNA, 19 nt, Human herpesvirus 5
aguacugagacagccacau

SEQ ID NO: 317364 - RNA, 14 nt, Human herpesvirus 5
aguauccacgucac

SEQ ID NO: 317365 - RNA, 16 nt, Human herpesvirus 5
aguauucuauugcgau

SEQ ID NO: 317366 - RNA, 12 nt, Human herpesvirus 5
agucaacacuac

SEQ ID NO: 317367 - RNA, 16 nt, Human herpesvirus 5
agucaacacuaccaag

SEQ ID NO: 317368 - RNA, 22 nt, Human herpesvirus 5
agucaacacuaccaaguacccc

SEQ ID NO: 317369 - RNA, 15 nt, Human herpesvirus 5
agucaacauguagaa

SEQ ID NO: 317370 - RNA, 20 nt, Human herpesvirus 5
agucaauaaagaaaaccaca

SEQ ID NO: 317371 - RNA, 21 nt, Human herpesvirus 5
agucacugcgugucaaaaauc

SEQ ID NO: 317372 - RNA, 17 nt, Human herpesvirus 5
agucagacccacuaccu

SEQ ID NO: 317373 - RNA, 19 nt, Human herpesvirus 5
agucagacccacuaccugg

SEQ ID NO: 317374 - RNA, 23 nt, Human herpesvirus 5
agucaucucauuugcuuuuacaa

SEQ ID NO: 317375 - RNA, 19 nt, Human herpesvirus 5
aguccaacaucgugguauc

SEQ ID NO: 317376 - RNA, 16 nt, Human herpesvirus 5
aguccaccucugcuac

SEQ ID NO: 317377 - RNA, 23 nt, Human herpesvirus 5
aguccguaccgcuuggggcucaa

SEQ ID NO: 317378 - RNA, 14 nt, Human herpesvirus 5
aguccgucauggac

SEQ ID NO: 317379 - RNA, 14 nt, Human herpesvirus 5
aguccugcuguuac

SEQ ID NO: 317380 - RNA, 21 nt, Human herpesvirus 5
agucgacgggugguaccugca

SEQ ID NO: 317381 - RNA, 23 nt, Human herpesvirus 5
agucgccgacgaagaagaacaag

SEQ ID NO: 317382 - RNA, 21 nt, Human herpesvirus 5
agucgcucaucgucacgcuca

SEQ ID NO: 317383 - RNA, 22 nt, Human herpesvirus 5
agucgucguaguuguugcagaa

SEQ ID NO: 317384 - RNA, 18 nt, Human herpesvirus 5
agucuaucccuauggcac

SEQ ID NO: 317385 - RNA, 15 nt, Human herpesvirus 5
agucuauucucaaca

SEQ ID NO: 317386 - RNA, 16 nt, Human herpesvirus 5
agucugaaacggggug

SEQ ID NO: 317387 - RNA, 19 nt, Human herpesvirus 5
agucugcaacaugcggcug

SEQ ID NO: 317388 - RNA, 13 nt, Human herpesvirus 5
agugacgugaauc

SEQ ID NO: 317389 - RNA, 16 nt, Human herpesvirus 5
agugacguggauacua

SEQ ID NO: 317390 - RNA, 17 nt, Human herpesvirus 5
agugacguggauacuag

SEQ ID NO: 317391 - RNA, 21 nt, Human herpesvirus 5
agugacguggauacuaguaaa

SEQ ID NO: 317392 - RNA, 13 nt, Human herpesvirus 5
agauaaucugcca

SEQ ID NO: 317393 - RNA, 19 nt, Human herpesvirus 5
agauagacaucacaguuca

SEQ ID NO: 317394 - RNA, 22 nt, Human herpesvirus 5
agauagucccacaggggaucua

SEQ ID NO: 317395 - RNA, 19 nt, Human herpesvirus 5
agauauaaagaaucuagga

SEQ ID NO: 317396 - RNA, 17 nt, Human herpesvirus 5
agauauccgaugaugau

SEQ ID NO: 317397 - RNA, 13 nt, Human herpesvirus 5
agauccaguauuc

SEQ ID NO: 317398 - RNA, 17 nt, Human herpesvirus 5
agauccaguuucaccaa

SEQ ID NO: 317399 - RNA, 21 nt, Human herpesvirus 5
agaucccggccuugcugugua

SEQ ID NO: 317400 - RNA, 23 nt, Human herpesvirus 5
agaucccggccuugcuguguauc

SEQ ID NO: 317401 - RNA, 13 nt, Human herpesvirus 5
agaucguacccac

SEQ ID NO: 317402 - RNA, 23 nt, Human herpesvirus 5
agaucgugccgcgaggugucaug

SEQ ID NO: 317403 - RNA, 17 nt, Human herpesvirus 5
agaugaagacacccugc

SEQ ID NO: 317404 - RNA, 15 nt, Human herpesvirus 5
agaugagcagcaaaa

SEQ ID NO: 317405 - RNA, 21 nt, Human herpesvirus 5
agaugauacauagcaguauuc

SEQ ID NO: 317406 - RNA, 11 nt, Human herpesvirus 5
agaugauggug

SEQ ID NO: 317407 - RNA, 18 nt, Human herpesvirus 5
agaugcagacgguggugu

SEQ ID NO: 317408 - RNA, 14 nt, Human herpesvirus 5
agaugcuagcaaua

SEQ ID NO: 317409 - RNA, 20 nt, Human herpesvirus 5
agauucaucgugcaguaccu

SEQ ID NO: 317410 - RNA, 14 nt, Human herpesvirus 5
agauuuccugugua

SEQ ID NO: 317411 - RNA, 21 nt, Human herpesvirus 5
agcaaaacgaccagaaucagc

SEQ ID NO: 317412 - RNA, 19 nt, Human herpesvirus 5
agcaacaauaccgauacca

SEQ ID NO: 317413 - RNA, 22 nt, Human herpesvirus 5
agcaaccaccguuucuacaaaa

SEQ ID NO: 317414 - RNA, 14 nt, Human herpesvirus 5
agcaacuggcaaaa

SEQ ID NO: 317415 - RNA, 22 nt, Human herpesvirus 5
agcaagaauaaaucaccgugaa

SEQ ID NO: 317416 - RNA, 17 nt, Human herpesvirus 5
agcaaggucaacuacag

SEQ ID NO: 317417 - RNA, 21 nt, Human herpesvirus 5
agcaaucugacguccagcacc

SEQ ID NO: 317418 - RNA, 19 nt, Human herpesvirus 5
agcaaugucguaguacaau

SEQ ID NO: 317419 - RNA, 20 nt, Human herpesvirus 5
agcacaaaaauacugacaau

SEQ ID NO: 317420 - RNA, 23 nt, Human herpesvirus 5
agcacaaaaauacugacaaugga

SEQ ID NO: 317421 - RNA, 16 nt, Human herpesvirus 5
agcacagagacaccaa

SEQ ID NO: 317422 - RNA, 22 nt, Human herpesvirus 5
agcaccacgucgauucccaucu

SEQ ID NO: 317423 - RNA, 18 nt, Human herpesvirus 5
agcacccgucaugguaca

SEQ ID NO: 317424 - RNA, 20 nt, Human herpesvirus 5
agcaccggcgccugcugcuc

SEQ ID NO: 317425 - RNA, 14 nt, Human herpesvirus 5
agcacgggcugcug

SEQ ID NO: 317426 - RNA, 12 nt, Human herpesvirus 5
agcacugcgcaa

SEQ ID NO: 317427 - RNA, 19 nt, Human herpesvirus 5
agcacuucagaaucuauaa

SEQ ID NO: 317428 - RNA, 14 nt, Human herpesvirus 5
agcagaaaaccgcc

SEQ ID NO: 317429 - RNA, 21 nt, Human herpesvirus 5
agcagaaggaauaauccgugc

SEQ ID NO: 317430 - RNA, 12 nt, Human herpesvirus 5
agcagcaauguc

SEQ ID NO: 317431 - RNA, 22 nt, Human herpesvirus 5
agcagcaaugucguaguacaau

SEQ ID NO: 317432 - RNA, 21 nt, Human herpesvirus 5
agcagccgcgcuugucgccau

SEQ ID NO: 317433 - RNA, 15 nt, Human herpesvirus 5
agcaggguaaaaacc

SEQ ID NO: 317434 - RNA, 13 nt, Human herpesvirus 5
agcaguauucuau

SEQ ID NO: 317435 - RNA, 23 nt, Human herpesvirus 5
agcauacggggaggagacacaga

SEQ ID NO: 317436 - RNA, 14 nt, Human herpesvirus 5
agcaucgcaacaac

SEQ ID NO: 317437 - RNA, 14 nt, Human herpesvirus 5
agcaugacuguuuc

SEQ ID NO: 317438 - RNA, 16 nt, Human herpesvirus 5
agcauucaccuccagc

SEQ ID NO: 317439 - RNA, 19 nt, Human herpesvirus 5
agccaaaggugaccuuauu

SEQ ID NO: 317440 - RNA, 20 nt, Human herpesvirus 5
agccaacgagacuaucuaca

SEQ ID NO: 317441 - RNA, 13 nt, Human herpesvirus 5
agccacaucaaca

SEQ ID NO: 317442 - RNA, 16 nt, Human herpesvirus 5
agccaccgacacagca

SEQ ID NO: 317443 - RNA, 19 nt, Human herpesvirus 5
agccaccgacacagcagca

SEQ ID NO: 317444 - RNA, 24 nt, Human herpesvirus 5
agccacgagcaucgcaacaacagc

SEQ ID NO: 317445 - RNA, 19 nt, Human herpesvirus 5
agccacgaguacccauuac

SEQ ID NO: 317446 - RNA, 17 nt, Human herpesvirus 5
agccacguugagauuca

SEQ ID NO: 317447 - RNA, 18 nt, Human herpesvirus 5
agccacucggccauaaga

SEQ ID NO: 317448 - RNA, 14 nt, Human herpesvirus 5
agccauacuucucg

SEQ ID NO: 317449 - RNA, 22 nt, Human herpesvirus 5
agccccagagcgauauguuuca

SEQ ID NO: 317450 - RNA, 15 nt, Human herpesvirus 5
agcccuauccuccau

SEQ ID NO: 317451 - RNA, 22 nt, Human herpesvirus 5
agccgacaaccugcugcacuuc

SEQ ID NO: 317452 - RNA, 12 nt, Human herpesvirus 5
agccgaugcuga

SEQ ID NO: 317453 - RNA, 14 nt, Human herpesvirus 5
agccgaugcugaug

SEQ ID NO: 317454 - RNA, 18 nt, Human herpesvirus 5
agccgccgacgcuggcgc

SEQ ID NO: 317455 - RNA, 15 nt, Human herpesvirus 5
agccggaaaaaccgc

SEQ ID NO: 317456 - RNA, 19 nt, Human herpesvirus 5
agccggcccguuguguaug

SEQ ID NO: 317457 - RNA, 15 nt, Human herpesvirus 5
agccgucagucauag

SEQ ID NO: 317458 - RNA, 23 nt, Human herpesvirus 5
agccgugggaaugguaaagacau

SEQ ID NO: 317459 - RNA, 21 nt, Human herpesvirus 5
agccguguuuagucgcggcga

SEQ ID NO: 317460 - RNA, 14 nt, Human herpesvirus 5
agccuaucaaugaa

SEQ ID NO: 317461 - RNA, 15 nt, Human herpesvirus 5
agccuaucaaugaag

SEQ ID NO: 317462 - RNA, 18 nt, Human herpesvirus 5
agccucaagaauccgucc

SEQ ID NO: 317463 - RNA, 23 nt, Human herpesvirus 5
agccucaagaauccguccccacg

SEQ ID NO: 317464 - RNA, 22 nt, Human herpesvirus 5
agccucuacaaacuagcauucu

SEQ ID NO: 317465 - RNA, 16 nt, Human herpesvirus 5
agccucuguguuccca

SEQ ID NO: 317466 - RNA, 16 nt, Human herpesvirus 5
agccuggggcaccuau

SEQ ID NO: 317467 - RNA, 19 nt, Human herpesvirus 5
agccuuaggaacagggaag

SEQ ID NO: 317468 - RNA, 12 nt, Human herpesvirus 5
agcgacagcagc

SEQ ID NO: 317469 - RNA, 18 nt, Human herpesvirus 5
agcgacgaucccucgccg

SEQ ID NO: 317470 - RNA, 11 nt, Human herpesvirus 5
agcgacggcgg

SEQ ID NO: 317471 - RNA, 12 nt, Human herpesvirus 5
agcgacucucaa

SEQ ID NO: 317472 - RNA, 15 nt, Human herpesvirus 5
agcgagaacuaauau

SEQ ID NO: 317473 - RNA, 21 nt, Human herpesvirus 5
agcgagaacuaauauugcaau

SEQ ID NO: 317474 - RNA, 17 nt, Human herpesvirus 5
agcgcccgaagccgcgc

SEQ ID NO: 317475 - RNA, 15 nt, Human herpesvirus 5
agcgcgaccgccuca

SEQ ID NO: 317476 - RNA, 21 nt, Human herpesvirus 5
agcgcggcacgccguugccac

SEQ ID NO: 317477 - RNA, 23 nt, Human herpesvirus 5
agcgcgugucccugccagucucc

SEQ ID NO: 317478 - RNA, 13 nt, Human herpesvirus 5
agcgcuacgugcg

SEQ ID NO: 317479 - RNA, 18 nt, Human herpesvirus 5
agcggaggaggugaccug

SEQ ID NO: 317480 - RNA, 21 nt, Human herpesvirus 5
agcggcacuuuacauaaaacc

SEQ ID NO: 317481 - RNA, 23 nt, Human herpesvirus 5
agcggcacuuuacauaaaaccac

SEQ ID NO: 317482 - RNA, 17 nt, Human herpesvirus 5
agcggcggcggugguga

SEQ ID NO: 317483 - RNA, 15 nt, Human herpesvirus 5
agcggggguuguaca

SEQ ID NO: 317484 - RNA, 19 nt, Human herpesvirus 5
agcgggguaugcguguuca

SEQ ID NO: 317485 - RNA, 22 nt, Human herpesvirus 5
agcgguauauucaaucauuacu

SEQ ID NO: 317486 - RNA, 12 nt, Human herpesvirus 5
agcggugcugau

SEQ ID NO: 317487 - RNA, 19 nt, Human herpesvirus 5
agcguccacacaccgcuuu

SEQ ID NO: 317488 - RNA, 13 nt, Human herpesvirus 5
agcgucggcgagc

SEQ ID NO: 317489 - RNA, 19 nt, Human herpesvirus 5
agcgucgucguccgugcca

SEQ ID NO: 317490 - RNA, 21 nt, Human herpesvirus 5
agcguuggcggcgauggucau

SEQ ID NO: 317491 - RNA, 13 nt, Human herpesvirus 5
agcguuguacaug

SEQ ID NO: 317492 - RNA, 13 nt, Human herpesvirus 5
agcuacagccacg

SEQ ID NO: 317493 - RNA, 15 nt, Human herpesvirus 5
agcuacagccacgac

SEQ ID NO: 317494 - RNA, 19 nt, Human herpesvirus 5
agcuaccgccgcaacagcg

SEQ ID NO: 317495 - RNA, 16 nt, Human herpesvirus 5
agcuacgcgaccagcu

SEQ ID NO: 317496 - RNA, 16 nt, Human herpesvirus 5
agcuacuuuacguguu

SEQ ID NO: 317497 - RNA, 13 nt, Human herpesvirus 5
agcuagugcagcc

SEQ ID NO: 317498 - RNA, 11 nt, Human herpesvirus 5
agcucacuguu

SEQ ID NO: 317499 - RNA, 12 nt, Human herpesvirus 5
agcucacuguuu

SEQ ID NO: 317500 - RNA, 14 nt, Human herpesvirus 5
agcucccaucuucu

SEQ ID NO: 317501 - RNA, 20 nt, Human herpesvirus 5
agcucuugcgaggcuuugau

SEQ ID NO: 317502 - RNA, 18 nt, Human herpesvirus 5
agcugcacaccaguauug

SEQ ID NO: 317503 - RNA, 22 nt, Human herpesvirus 5
agcugcucauggaggucuauca

SEQ ID NO: 317504 - RNA, 14 nt, Human herpesvirus 5
agcuggacagugag

SEQ ID NO: 317505 - RNA, 18 nt, Human herpesvirus 5
agcugggcgaccgucucu

SEQ ID NO: 317506 - RNA, 17 nt, Human herpesvirus 5
agcuggggaaguacaau

SEQ ID NO: 317507 - RNA, 15 nt, Human herpesvirus 5
agcugguaccugaaa

SEQ ID NO: 317508 - RNA, 20 nt, Human herpesvirus 5
agcuucucucuggucuuccc

SEQ ID NO: 317509 - RNA, 21 nt, Human herpesvirus 5
acauugaacgcgguacaugug

SEQ ID NO: 317510 - RNA, 22 nt, Human herpesvirus 5
acauugaacgcgguacaugugc

SEQ ID NO: 317511 - RNA, 20 nt, Human herpesvirus 5
acauuuaucaauacaaugac

SEQ ID NO: 317512 - RNA, 14 nt, Human herpesvirus 5
accaaaaauccaga

SEQ ID NO: 317513 - RNA, 14 nt, Human herpesvirus 5
accaaacaacacca

SEQ ID NO: 317514 - RNA, 13 nt, Human herpesvirus 5
accaaagacugug

SEQ ID NO: 317515 - RNA, 15 nt, Human herpesvirus 5
accaacguuaccucc

SEQ ID NO: 317516 - RNA, 15 nt, Human herpesvirus 5
accaaggcgagccac

SEQ ID NO: 317517 - RNA, 17 nt, Human herpesvirus 5
accaagugccgccgucg

SEQ ID NO: 317518 - RNA, 20 nt, Human herpesvirus 5
accaauaaagauaaucugcc

SEQ ID NO: 317519 - RNA, 13 nt, Human herpesvirus 5
accaauaacaugu

SEQ ID NO: 317520 - RNA, 14 nt, Human herpesvirus 5
accaauaacauguc

SEQ ID NO: 317521 - RNA, 15 nt, Human herpesvirus 5
accaauaacaugucu

SEQ ID NO: 317522 - RNA, 21 nt, Human herpesvirus 5
accaauacugcauccaucaca

SEQ ID NO: 317523 - RNA, 20 nt, Human herpesvirus 5
accacaacggccgccgacgu

SEQ ID NO: 317524 - RNA, 18 nt, Human herpesvirus 5
accacauuuuuugacaga

SEQ ID NO: 317525 - RNA, 16 nt, Human herpesvirus 5
accaccgguaccacua

SEQ ID NO: 317526 - RNA, 15 nt, Human herpesvirus 5
accaccguaccugca

SEQ ID NO: 317527 - RNA, 23 nt, Human herpesvirus 5
accaccgucgccgucacugccac

SEQ ID NO: 317528 - RNA, 16 nt, Human herpesvirus 5
accaccguuaccagua

SEQ ID NO: 317529 - RNA, 21 nt, Human herpesvirus 5
accacgcguccuuucaaggug

SEQ ID NO: 317530 - RNA, 22 nt, Human herpesvirus 5
accacggacacgacaaaugcau

SEQ ID NO: 317531 - RNA, 13 nt, Human herpesvirus 5
accacggccuuau

SEQ ID NO: 317532 - RNA, 16 nt, Human herpesvirus 5
accacgucaccgugcc

SEQ ID NO: 317533 - RNA, 16 nt, Human herpesvirus 5
accacgucgaccaggu

SEQ ID NO: 317534 - RNA, 21 nt, Human herpesvirus 5
accacgucgauucccaucuca

SEQ ID NO: 317535 - RNA, 13 nt, Human herpesvirus 5
accacuacuaccu

SEQ ID NO: 317536 - RNA, 20 nt, Human herpesvirus 5
accagacuuggagacaugga

SEQ ID NO: 317537 - RNA, 18 nt, Human herpesvirus 5
accagacuuuuugcuuua

SEQ ID NO: 317538 - RNA, 17 nt, Human herpesvirus 5
accagauacaacgucau

SEQ ID NO: 317539 - RNA, 23 nt, Human herpesvirus 5
accagauacaacgucaugcauuc

SEQ ID NO: 317540 - RNA, 19 nt, Human herpesvirus 5
accagcaaggucaacuaca

SEQ ID NO: 317541 - RNA, 22 nt, Human herpesvirus 5
accagcaguaugacgugcgaug

SEQ ID NO: 317542 - RNA, 15 nt, Human herpesvirus 5
accagcccagggauc

SEQ ID NO: 317543 - RNA, 20 nt, Human herpesvirus 5
accagcguauuuucuacucc

SEQ ID NO: 317544 - RNA, 18 nt, Human herpesvirus 5
accaggaacacgguggcu

SEQ ID NO: 317545 - RNA, 20 nt, Human herpesvirus 5
accaggaacacgguggcuuu

SEQ ID NO: 317546 - RNA, 12 nt, Human herpesvirus 5
accaguaccacc

SEQ ID NO: 317547 - RNA, 20 nt, Human herpesvirus 5
accauaucgugaaccaugau

SEQ ID NO: 317548 - RNA, 20 nt, Human herpesvirus 5
accauccucaccccgcgcga

SEQ ID NO: 317549 - RNA, 14 nt, Human herpesvirus 5
accaucucgcggaa

SEQ ID NO: 317550 - RNA, 21 nt, Human herpesvirus 5
accauggucggugacaucacc

SEQ ID NO: 317551 - RNA, 19 nt, Human herpesvirus 5
accauuggaaguaacauca

SEQ ID NO: 317552 - RNA, 16 nt, Human herpesvirus 5
accauuggcaacauca

SEQ ID NO: 317553 - RNA, 14 nt, Human herpesvirus 5
accauuucuuggau

SEQ ID NO: 317554 - RNA, 22 nt, Human herpesvirus 5
acccacagagucgccaguccau

SEQ ID NO: 317555 - RNA, 21 nt, Human herpesvirus 5
acccacgguggccaacaagcg

SEQ ID NO: 317556 - RNA, 23 nt, Human herpesvirus 5
acccacguaguuccccuacguga

SEQ ID NO: 317557 - RNA, 20 nt, Human herpesvirus 5
acccagcuggggaaguacaa

SEQ ID NO: 317558 - RNA, 21 nt, Human herpesvirus 5
acccagcuggggaaguacaau

SEQ ID NO: 317559 - RNA, 21 nt, Human herpesvirus 5
acccaucccgagcacuccaca

SEQ ID NO: 317560 - RNA, 15 nt, Human herpesvirus 5
acccauuacaguaac

SEQ ID NO: 317561 - RNA, 13 nt, Human herpesvirus 5
accccaccuaccu

SEQ ID NO: 317562 - RNA, 15 nt, Human herpesvirus 5
acccccguacugccu

SEQ ID NO: 317563 - RNA, 19 nt, Human herpesvirus 5
accccuggacgguacaguu

SEQ ID NO: 317564 - RNA, 16 nt, Human herpesvirus 5
acccgauacagucagc

SEQ ID NO: 317565 - RNA, 14 nt, Human herpesvirus 5
acccgcaccagacu

SEQ ID NO: 317566 - RNA, 19 nt, Human herpesvirus 5
acccgcgccgguucucacg

SEQ ID NO: 317567 - RNA, 14 nt, Human herpesvirus 5
acccgcugguguug

SEQ ID NO: 317568 - RNA, 16 nt, Human herpesvirus 5
acccgguugcggcccc

SEQ ID NO: 317569 - RNA, 15 nt, Human herpesvirus 5
acccgucaugguaca

SEQ ID NO: 317570 - RNA, 22 nt, Human herpesvirus 5
acccgucgccauuuccccucau

SEQ ID NO: 317571 - RNA, 23 nt, Human herpesvirus 5
acccgugucgccgccgucaccac

SEQ ID NO: 317572 - RNA, 22 nt, Human herpesvirus 5
acccucgguaguggacaugguu

SEQ ID NO: 317573 - RNA, 22 nt, Human herpesvirus 5
acccugcgcucugcguugccac

SEQ ID NO: 317574 - RNA, 17 nt, Human herpesvirus 5
acccugcggagcguuca

SEQ ID NO: 317575 - RNA, 14 nt, Human herpesvirus 5
acccugguauccaa

SEQ ID NO: 317576 - RNA, 18 nt, Human herpesvirus 5
acccuucccgaccuccca

SEQ ID NO: 317577 - RNA, 12 nt, Human herpesvirus 5
accgacauggag

SEQ ID NO: 317578 - RNA, 14 nt, Human herpesvirus 5
accgaccagcacuc

SEQ ID NO: 317579 - RNA, 15 nt, Human herpesvirus 5
accgagacgugcgac

SEQ ID NO: 317580 - RNA, 14 nt, Human herpesvirus 5
accgcaacaacagc

SEQ ID NO: 317581 - RNA, 16 nt, Human herpesvirus 5
accgcaacgugcugcu

SEQ ID NO: 317582 - RNA, 20 nt, Human herpesvirus 5
accgcaacgugcugcugaug

SEQ ID NO: 317583 - RNA, 18 nt, Human herpesvirus 5
accgcagguuagcggcga

SEQ ID NO: 317584 - RNA, 15 nt, Human herpesvirus 5
accgcaguugcugcc

SEQ ID NO: 317585 - RNA, 15 nt, Human herpesvirus 5
accgccgcaacagcg

SEQ ID NO: 317586 - RNA, 19 nt, Human herpesvirus 5
accgggaacuuaugugaau

SEQ ID NO: 317587 - RNA, 15 nt, Human herpesvirus 5
accguaaucaccaaa

SEQ ID NO: 317588 - RNA, 20 nt, Human herpesvirus 5
accgucgaaaacaaccacac

SEQ ID NO: 317589 - RNA, 20 nt, Human herpesvirus 5
accgucgccgucacugccac

SEQ ID NO: 317590 - RNA, 15 nt, Human herpesvirus 5
accgucuccaccaca

SEQ ID NO: 317591 - RNA, 14 nt, Human herpesvirus 5
accgugcucgugcc

SEQ ID NO: 317592 - RNA, 21 nt, Human herpesvirus 5
accgugggucgggagcacaua

SEQ ID NO: 317593 - RNA, 23 nt, Human herpesvirus 5
accuaauacuaguguguuccacu

SEQ ID NO: 317594 - RNA, 19 nt, Human herpesvirus 5
accuacgacccuccuaaac

SEQ ID NO: 317595 - RNA, 20 nt, Human herpesvirus 5
accuauaggcuaagcuauac

SEQ ID NO: 317596 - RNA, 12 nt, Human herpesvirus 5
accucaccaucu

SEQ ID NO: 317597 - RNA, 14 nt, Human herpesvirus 5
accucaccaucuca

SEQ ID NO: 317598 - RNA, 18 nt, Human herpesvirus 5
accucaguggaccgucaa

SEQ ID NO: 317599 - RNA, 21 nt, Human herpesvirus 5
accuccccuaacgucacuuca

SEQ ID NO: 317600 - RNA, 17 nt, Human herpesvirus 5
accuccuccucccucgc

SEQ ID NO: 317601 - RNA, 17 nt, Human herpesvirus 5
accucgaugaagccuau

SEQ ID NO: 317602 - RNA, 12 nt, Human herpesvirus 5
accugaaaccua

SEQ ID NO: 317603 - RNA, 15 nt, Human herpesvirus 5
accugaaaccuaccu

SEQ ID NO: 317604 - RNA, 15 nt, Human herpesvirus 5
accugagaacaugug

SEQ ID NO: 317605 - RNA, 16 nt, Human herpesvirus 5
accugcacgacaucuu

SEQ ID NO: 317606 - RNA, 15 nt, Human herpesvirus 5
accugcaucacggug

SEQ ID NO: 317607 - RNA, 17 nt, Human herpesvirus 5
accugccucgacaucuc

SEQ ID NO: 317608 - RNA, 19 nt, Human herpesvirus 5
accugccucgacaucucgc

SEQ ID NO: 317609 - RNA, 20 nt, Human herpesvirus 5
accugccucgacaucucgcc

SEQ ID NO: 317610 - RNA, 14 nt, Human herpesvirus 5
ugucagacacagcc

SEQ ID NO: 317611 - RNA, 16 nt, Human herpesvirus 5
ugucaucuaccuaccu

SEQ ID NO: 317612 - RNA, 21 nt, Human herpesvirus 5
ugucaucuaccuaccuuguac

SEQ ID NO: 317613 - RNA, 22 nt, Human herpesvirus 5
uguccagauacgcguuggccag

SEQ ID NO: 317614 - RNA, 16 nt, Human herpesvirus 5
uguccgaggaacuguu

SEQ ID NO: 317615 - RNA, 16 nt, Human herpesvirus 5
uguccgcgggcaauug

SEQ ID NO: 317616 - RNA, 17 nt, Human herpesvirus 5
uguccgcucguguucca

SEQ ID NO: 317617 - RNA, 15 nt, Human herpesvirus 5
uguccuaggggguga

SEQ ID NO: 317618 - RNA, 14 nt, Human herpesvirus 5
ugucgcaaauaucg

SEQ ID NO: 317619 - RNA, 20 nt, Human herpesvirus 5
ugucgccgccgucaccaccg

SEQ ID NO: 317620 - RNA, 13 nt, Human herpesvirus 5
ugucgcuauacac

SEQ ID NO: 317621 - RNA, 14 nt, Human herpesvirus 5
ugucggcgugaaug

SEQ ID NO: 317622 - RNA, 19 nt, Human herpesvirus 5
ugucggcgugaaugggcac

SEQ ID NO: 317623 - RNA, 19 nt, Human herpesvirus 5
ugucuauaaaggccgugcc

SEQ ID NO: 317624 - RNA, 13 nt, Human herpesvirus 5
ugucucuguguag

SEQ ID NO: 317625 - RNA, 20 nt, Human herpesvirus 5
ugucugugcgccguggugcu

SEQ ID NO: 317626 - RNA, 16 nt, Human herpesvirus 5
ugugacguggauacua

SEQ ID NO: 317627 - RNA, 22 nt, Human herpesvirus 5
ugugaugaacgacacaugcaca

SEQ ID NO: 317628 - RNA, 21 nt, Human herpesvirus 5
ugugcacgcacgacaugacac

SEQ ID NO: 317629 - RNA, 21 nt, Human herpesvirus 5
ugugcgacgccaugcucaaga

SEQ ID NO: 317630 - RNA, 17 nt, Human herpesvirus 5
uguggaaaucaccugug

SEQ ID NO: 317631 - RNA, 21 nt, Human herpesvirus 5
uguggaggagacuaccucagu

SEQ ID NO: 317632 - RNA, 23 nt, Human herpesvirus 5
uguggauagauuucugcguguac

SEQ ID NO: 317633 - RNA, 23 nt, Human herpesvirus 5
uguggcaaguuggccaccaagaa

SEQ ID NO: 317634 - RNA, 19 nt, Human herpesvirus 5
ugugggggugcgggugguc

SEQ ID NO: 317635 - RNA, 21 nt, Human herpesvirus 5
uguguaaugcguacuucaugc

SEQ ID NO: 317636 - RNA, 18 nt, Human herpesvirus 5
uguguauggcccugaugg

SEQ ID NO: 317637 - RNA, 16 nt, Human herpesvirus 5
uguguccgcccgagca

SEQ ID NO: 317638 - RNA, 19 nt, Human herpesvirus 5
uguguggcguguacagggu

SEQ ID NO: 317639 - RNA, 19 nt, Human herpesvirus 5
uguguuccacuccaucaca

SEQ ID NO: 317640 - RNA, 12 nt, Human herpesvirus 5
uguguugcuaca

SEQ ID NO: 317641 - RNA, 18 nt, Human herpesvirus 5
uguguugcuacagggagu

SEQ ID NO: 317642 - RNA, 13 nt, Human herpesvirus 5
uguuagacuagca

SEQ ID NO: 317643 - RNA, 14 nt, Human herpesvirus 5
uguuagacuagcac

SEQ ID NO: 317644 - RNA, 18 nt, Human herpesvirus 5
uguuaucaucauggagcu

SEQ ID NO: 317645 - RNA, 22 nt, Human herpesvirus 5
uguucuaugccgucuucacuac

SEQ ID NO: 317646 - RNA, 22 nt, Human herpesvirus 5
uguugacccagggcugcuccaa

SEQ ID NO: 317647 - RNA, 22 nt, Human herpesvirus 5
uguugccgcuggacugacacag

SEQ ID NO: 317648 - RNA, 12 nt, Human herpesvirus 5
uguugcucuccu

SEQ ID NO: 317649 - RNA, 22 nt, Human herpesvirus 5
uguuguagcaacuggcaaaaag

SEQ ID NO: 317650 - RNA, 20 nt, Human herpesvirus 5
uguuguuagacuagcacaga

SEQ ID NO: 317651 - RNA, 16 nt, Human herpesvirus 5
uguuucuuaacuauuc

SEQ ID NO: 317652 - RNA, 19 nt, Human herpesvirus 5
uguuucuuauuaauuuaac

SEQ ID NO: 317653 - RNA, 19 nt, Human herpesvirus 5
uguuugcgcccccgugugu

SEQ ID NO: 317654 - RNA, 19 nt, Human herpesvirus 5
uguuuugcaccaugcagac

SEQ ID NO: 317655 - RNA, 11 nt, Human herpesvirus 5
uuaaaacuggu

SEQ ID NO: 317656 - RNA, 20 nt, Human herpesvirus 5
uuaaacccacgaccauuucc

SEQ ID NO: 317657 - RNA, 21 nt, Human herpesvirus 5
uuaaacgucguuguguucuua

SEQ ID NO: 317658 - RNA, 22 nt, Human herpesvirus 5
uuaaacgucguuguguucuuac

SEQ ID NO: 317659 - RNA, 17 nt, Human herpesvirus 5
uuaaaguaaauacaaau

SEQ ID NO: 317660 - RNA, 12 nt, Human herpesvirus 5
uuaacaaccuau

SEQ ID NO: 317661 - RNA, 19 nt, Human herpesvirus 5
uuaacaacguguccagcua

SEQ ID NO: 317662 - RNA, 14 nt, Human herpesvirus 5
uuaacaagucacua

SEQ ID NO: 317663 - RNA, 17 nt, Human herpesvirus 5
uuaacaagucacuauag

SEQ ID NO: 317664 - RNA, 16 nt, Human herpesvirus 5
uuaacccaaaaccaug

SEQ ID NO: 317665 - RNA, 15 nt, Human herpesvirus 5
uuaacgcgcaagugc

SEQ ID NO: 317666 - RNA, 15 nt, Human herpesvirus 5
uuaagcagaaacgag

SEQ ID NO: 317667 - RNA, 21 nt, Human herpesvirus 5
uuaaggagcucugaaacacag

SEQ ID NO: 317668 - RNA, 22 nt, Human herpesvirus 5
uuaaggagcucugaaacacaga

SEQ ID NO: 317669 - RNA, 22 nt, Human herpesvirus 5
uuaagguacgggucuaccaaaa

SEQ ID NO: 317670 - RNA, 16 nt, Human herpesvirus 5
uuacaaaucacagucu

SEQ ID NO: 317671 - RNA, 12 nt, Human herpesvirus 5
uuacacauuacu

SEQ ID NO: 317672 - RNA, 15 nt, Human herpesvirus 5
uuacauaaaaccacc

SEQ ID NO: 317673 - RNA, 16 nt, Human herpesvirus 5
uuacauaaaaccaccg

SEQ ID NO: 317674 - RNA, 12 nt, Human herpesvirus 5
uuacaugaacaa

SEQ ID NO: 317675 - RNA, 12 nt, Human herpesvirus 5
uuaccaguacca

SEQ ID NO: 317676 - RNA, 15 nt, Human herpesvirus 5
uuacccccguguauc

SEQ ID NO: 317677 - RNA, 24 nt, Human herpesvirus 5
uuaccguaaagagagucacacuua

SEQ ID NO: 317678 - RNA, 22 nt, Human herpesvirus 5
uuaccuagcgaucgcaugcuuc

SEQ ID NO: 317679 - RNA, 18 nt, Human herpesvirus 5
uuaccuaucaucacacua

SEQ ID NO: 317680 - RNA, 17 nt, Human herpesvirus 5
uuacgaaauucgugggu

SEQ ID NO: 317681 - RNA, 19 nt, Human herpesvirus 5
uuacuacuucgauucucua

SEQ ID NO: 317682 - RNA, 19 nt, Human herpesvirus 5
uuacuccgugcgguucuca

SEQ ID NO: 317683 - RNA, 20 nt, Human herpesvirus 5
uuacuccgugcgguucucaa

SEQ ID NO: 317684 - RNA, 16 nt, Human herpesvirus 5
uuacuguuauggaucc

SEQ ID NO: 317685 - RNA, 14 nt, Human herpesvirus 5
uuagaaucucuugc

SEQ ID NO: 317686 - RNA, 14 nt, Human herpesvirus 5
uuagacacacgggg

SEQ ID NO: 317687 - RNA, 17 nt, Human herpesvirus 5
uuagcgugugacgugga

SEQ ID NO: 317688 - RNA, 20 nt, Human herpesvirus 5
uuauaacgacgccagugaua

SEQ ID NO: 317689 - RNA, 15 nt, Human herpesvirus 5
uuauacaacaggugu

SEQ ID NO: 317690 - RNA, 12 nt, Human herpesvirus 5
uuauacaucucc

SEQ ID NO: 317691 - RNA, 21 nt, Human herpesvirus 5
uuauacucuauguuauacucu

SEQ ID NO: 317692 - RNA, 21 nt, Human herpesvirus 5
uuauacucuguaauccuacuc

SEQ ID NO: 317693 - RNA, 17 nt, Human herpesvirus 5
uuaucagaaagcugcaa

SEQ ID NO: 317694 - RNA, 20 nt, Human herpesvirus 5
uuaucagaaagcugcaauca

SEQ ID NO: 317695 - RNA, 13 nt, Human herpesvirus 5
uuaucagcaauaa

SEQ ID NO: 317696 - RNA, 18 nt, Human herpesvirus 5
uuaucccguuacaaagaa

SEQ ID NO: 317697 - RNA, 14 nt, Human herpesvirus 5
uuaucgaugcugca

SEQ ID NO: 317698 - RNA, 16 nt, Human herpesvirus 5
uuaucugccucuuccu

SEQ ID NO: 317699 - RNA, 18 nt, Human herpesvirus 5
uuauguccaugucuccaa

SEQ ID NO: 317700 - RNA, 17 nt, Human herpesvirus 5
uuauguuacaaaacaac

SEQ ID NO: 317701 - RNA, 17 nt, Human herpesvirus 5
uuauuaccgaguaccgc

SEQ ID NO: 317702 - RNA, 22 nt, Human herpesvirus 5
uuauugagcaggguaaaaacca

SEQ ID NO: 317703 - RNA, 15 nt, Human herpesvirus 5
uucaaacagcacauu

SEQ ID NO: 317704 - RNA, 14 nt, Human herpesvirus 5
uucaauaaaaacca

SEQ ID NO: 317705 - RNA, 15 nt, Human herpesvirus 5
uucaauaaaaaccac

SEQ ID NO: 317706 - RNA, 20 nt, Human herpesvirus 5
uucaauaaucuccugagaca

SEQ ID NO: 317707 - RNA, 13 nt, Human herpesvirus 5
uucaaucauuacu

SEQ ID NO: 317708 - RNA, 16 nt, Human herpesvirus 5
uucaaucauuacuaaa

SEQ ID NO: 317709 - RNA, 15 nt, Human herpesvirus 5
uucacaaaaacacca

SEQ ID NO: 317710 - RNA, 17 nt, Human herpesvirus 5
uucacaaccguauauuc

SEQ ID NO: 317711 - RNA, 16 nt, Human herpesvirus 5
uucacacaaaaucuuc

SEQ ID NO: 317712 - RNA, 18 nt, Human herpesvirus 5
uucacgcguagccuccuc

SEQ ID NO: 317713 - RNA, 20 nt, Human herpesvirus 5
uucacgcugcuauaagaagg

SEQ ID NO: 317714 - RNA, 17 nt, Human herpesvirus 5
uucacgugcggcugugu

SEQ ID NO: 317715 - RNA, 14 nt, Human herpesvirus 5
uucagaaccaugua

SEQ ID NO: 317716 - RNA, 20 nt, Human herpesvirus 5
uucagaaucuauaaauugcu

SEQ ID NO: 317717 - RNA, 22 nt, Human herpesvirus 5
uucagaccgcaacaacagcagc

SEQ ID NO: 317718 - RNA, 19 nt, Human herpesvirus 5
uucagcguaugguuaugac

SEQ ID NO: 317719 - RNA, 22 nt, Human herpesvirus 5
uucagcguaugguuaugaccaa

SEQ ID NO: 317720 - RNA, 15 nt, Human herpesvirus 5
uucaguccauuguca

SEQ ID NO: 317721 - RNA, 18 nt, Human herpesvirus 5
uucaguugcgaacgucac

SEQ ID NO: 317722 - RNA, 21 nt, Human herpesvirus 5
uuccaagccgcagcgcggaaa

SEQ ID NO: 317723 - RNA, 23 nt, Human herpesvirus 5
uuccagaccagcgccaccauagc

SEQ ID NO: 317724 - RNA, 21 nt, Human herpesvirus 5
ugacgaagaugccgaugugug

SEQ ID NO: 317725 - RNA, 15 nt, Human herpesvirus 5
ugacgacgacgcugc

SEQ ID NO: 317726 - RNA, 16 nt, Human herpesvirus 5
ugacgacgacgcugcu

SEQ ID NO: 317727 - RNA, 15 nt, Human herpesvirus 5
ugacgcugucuugcu

SEQ ID NO: 317728 - RNA, 19 nt, Human herpesvirus 5
ugacggauaaacacgacau

SEQ ID NO: 317729 - RNA, 20 nt, Human herpesvirus 5
ugacggcgcucuuucagcgu

SEQ ID NO: 317730 - RNA, 15 nt, Human herpesvirus 5
ugacgguacuuaucg

SEQ ID NO: 317731 - RNA, 19 nt, Human herpesvirus 5
ugacguauuugaagccagg

SEQ ID NO: 317732 - RNA, 18 nt, Human herpesvirus 5
ugacgucccuuuuacuag

SEQ ID NO: 317733 - RNA, 13 nt, Human herpesvirus 5
ugacgugcgaugg

SEQ ID NO: 317734 - RNA, 23 nt, Human herpesvirus 5
ugacuacgaugaagacgcgacuc

SEQ ID NO: 317735 - RNA, 14 nt, Human herpesvirus 5
ugacuuacaucuca

SEQ ID NO: 317736 - RNA, 12 nt, Human herpesvirus 5
ugagaacauaua

SEQ ID NO: 317737 - RNA, 13 nt, Human herpesvirus 5
ugagacagccaca

SEQ ID NO: 317738 - RNA, 16 nt, Human herpesvirus 5
ugagacugguggugag

SEQ ID NO: 317739 - RNA, 20 nt, Human herpesvirus 5
ugagcaggguaaaaaccacg

SEQ ID NO: 317740 - RNA, 15 nt, Human herpesvirus 5
ugagcgacagcagca

SEQ ID NO: 317741 - RNA, 15 nt, Human herpesvirus 5
ugagcgagaacuaau

SEQ ID NO: 317742 - RNA, 16 nt, Human herpesvirus 5
ugagcuguuucgacgu

SEQ ID NO: 317743 - RNA, 14 nt, Human herpesvirus 5
ugaggaggguggug

SEQ ID NO: 317744 - RNA, 21 nt, Human herpesvirus 5
ugaggaggguggugacuuaca

SEQ ID NO: 317745 - RNA, 22 nt, Human herpesvirus 5
ugaggaggguggugacuuacau

SEQ ID NO: 317746 - RNA, 18 nt, Human herpesvirus 5
ugaggcacaugaugcaaa

SEQ ID NO: 317747 - RNA, 19 nt, Human herpesvirus 5
ugaggcucucggaucugcg

SEQ ID NO: 317748 - RNA, 23 nt, Human herpesvirus 5
ugaguacacgcaggcaagccaaa

SEQ ID NO: 317749 - RNA, 16 nt, Human herpesvirus 5
ugauaaaauccagguu

SEQ ID NO: 317750 - RNA, 15 nt, Human herpesvirus 5
ugauaaccuaccugg

SEQ ID NO: 317751 - RNA, 17 nt, Human herpesvirus 5
ugauacaacguggcgau

SEQ ID NO: 317752 - RNA, 21 nt, Human herpesvirus 5
ugauacagggcgaaaggcacc

SEQ ID NO: 317753 - RNA, 16 nt, Human herpesvirus 5
ugauacauagcaguau

SEQ ID NO: 317754 - RNA, 17 nt, Human herpesvirus 5
ugauacccuaauaaagc

SEQ ID NO: 317755 - RNA, 17 nt, Human herpesvirus 5
ugauauuuuacagguau

SEQ ID NO: 317756 - RNA, 21 nt, Human herpesvirus 5
ugaucauggagccgcaagugc

SEQ ID NO: 317757 - RNA, 22 nt, Human herpesvirus 5
ugaucauggagccgcaagugcu

SEQ ID NO: 317758 - RNA, 17 nt, Human herpesvirus 5
ugauccaguugcaccuc

SEQ ID NO: 317759 - RNA, 15 nt, Human herpesvirus 5
ugaugaaugucauca

SEQ ID NO: 317760 - RNA, 17 nt, Human herpesvirus 5
ugaugaaugucaucauc

SEQ ID NO: 317761 - RNA, 17 nt, Human herpesvirus 5
ugaugacaauguggugu

SEQ ID NO: 317762 - RNA, 22 nt, Human herpesvirus 5
ugaugacggugaggaggguggu

SEQ ID NO: 317763 - RNA, 21 nt, Human herpesvirus 5
ugaugugggggugcggguggu

SEQ ID NO: 317764 - RNA, 14 nt, Human herpesvirus 5
ugauuauacaacag

SEQ ID NO: 317765 - RNA, 22 nt, Human herpesvirus 5
ugauucuggaauccaucaucua

SEQ ID NO: 317766 - RNA, 23 nt, Human herpesvirus 5
ugauucuggaauccaucaucuac

SEQ ID NO: 317767 - RNA, 13 nt, Human herpesvirus 5
ugauugcaugaaa

SEQ ID NO: 317768 - RNA, 17 nt, Human herpesvirus 5
ugauuucaacaaauacc

SEQ ID NO: 317769 - RNA, 17 nt, Human herpesvirus 5
ugcaaaagaagcugccc

SEQ ID NO: 317770 - RNA, 15 nt, Human herpesvirus 5
ugcaaaguuauccug

SEQ ID NO: 317771 - RNA, 20 nt, Human herpesvirus 5
ugcaacuuaacgcgcaagug

SEQ ID NO: 317772 - RNA, 14 nt, Human herpesvirus 5
ugcaacuucuucua

SEQ ID NO: 317773 - RNA, 23 nt, Human herpesvirus 5
ugcaagacgcaugauuagcaaua

SEQ ID NO: 317774 - RNA, 22 nt, Human herpesvirus 5
ugcaaggccucuaucugcgcca

SEQ ID NO: 317775 - RNA, 18 nt, Human herpesvirus 5
ugcacaaaagguaugugu

SEQ ID NO: 317776 - RNA, 19 nt, Human herpesvirus 5
ugcacaaaagguaugugug

SEQ ID NO: 317777 - RNA, 20 nt, Human herpesvirus 5
ugcacaauacgauaauugcu

SEQ ID NO: 317778 - RNA, 22 nt, Human herpesvirus 5
ugcacaauacgauaauugcuac

SEQ ID NO: 317779 - RNA, 14 nt, Human herpesvirus 5
ugcacgcgccaaaa

SEQ ID NO: 317780 - RNA, 15 nt, Human herpesvirus 5
ugcacguccaugucg

SEQ ID NO: 317781 - RNA, 21 nt, Human herpesvirus 5
ugcagaggacggaggaacuuu

SEQ ID NO: 317782 - RNA, 15 nt, Human herpesvirus 5
ugcagauacgcagug

SEQ ID NO: 317783 - RNA, 15 nt, Human herpesvirus 5
ugcagcgcuacgugc

SEQ ID NO: 317784 - RNA, 13 nt, Human herpesvirus 5
ugcagcuggugau

SEQ ID NO: 317785 - RNA, 21 nt, Human herpesvirus 5
ugcauauuuguuuucagucag

SEQ ID NO: 317786 - RNA, 15 nt, Human herpesvirus 5
ugcauccaucacauc

SEQ ID NO: 317787 - RNA, 17 nt, Human herpesvirus 5
ugcaugucgcccagaaa

SEQ ID NO: 317788 - RNA, 22 nt, Human herpesvirus 5
ugcauguuggugccccaggaug

SEQ ID NO: 317789 - RNA, 15 nt, Human herpesvirus 5
ugccagucgcacuaa

SEQ ID NO: 317790 - RNA, 12 nt, Human herpesvirus 5
ugcccacgccgu

SEQ ID NO: 317791 - RNA, 24 nt, Human herpesvirus 5
ugcccaucgucugcauguucauca

SEQ ID NO: 317792 - RNA, 18 nt, Human herpesvirus 5
ugcccauuccgcaacguc

SEQ ID NO: 317793 - RNA, 23 nt, Human herpesvirus 5
ugcccauugagcgagaacuaaua

SEQ ID NO: 317794 - RNA, 23 nt, Human herpesvirus 5
ugccccacucgcucgcuugugua

SEQ ID NO: 317795 - RNA, 22 nt, Human herpesvirus 5
ugcccgaagaggacgaagugac

SEQ ID NO: 317796 - RNA, 19 nt, Human herpesvirus 5
ugcccgucggcugccuguu

SEQ ID NO: 317797 - RNA, 19 nt, Human herpesvirus 5
ugcccuuuacggugcugcg

SEQ ID NO: 317798 - RNA, 22 nt, Human herpesvirus 5
ugccgaaacaccgugugguggu

SEQ ID NO: 317799 - RNA, 22 nt, Human herpesvirus 5
ugccgaagaccucaccaucuca

SEQ ID NO: 317800 - RNA, 23 nt, Human herpesvirus 5
ugccgagacgacgguaacaaccg

SEQ ID NO: 317801 - RNA, 22 nt, Human herpesvirus 5
ugccgcacgagacgcgacuccu

SEQ ID NO: 317802 - RNA, 15 nt, Human herpesvirus 5
ugccggagcuacgcg

SEQ ID NO: 317803 - RNA, 20 nt, Human herpesvirus 5
ugccggucuacagacugggc

SEQ ID NO: 317804 - RNA, 18 nt, Human herpesvirus 5
ugccugcacgaccugcuc

SEQ ID NO: 317805 - RNA, 20 nt, Human herpesvirus 5
ugccuggacgccugggcgcg

SEQ ID NO: 317806 - RNA, 23 nt, Human herpesvirus 5
ugcgaagccagcuacagccacga

SEQ ID NO: 317807 - RNA, 20 nt, Human herpesvirus 5
ugcgaauuaggcaacuauca

SEQ ID NO: 317808 - RNA, 19 nt, Human herpesvirus 5
ugcgacgccaugcucaaga

SEQ ID NO: 317809 - RNA, 22 nt, Human herpesvirus 5
ugcgaggacaaccgcauccugc

SEQ ID NO: 317810 - RNA, 17 nt, Human herpesvirus 5
ugcgaggcuuugaugua

SEQ ID NO: 317811 - RNA, 14 nt, Human herpesvirus 5
ugcgaugugcaaug

SEQ ID NO: 317812 - RNA, 18 nt, Human herpesvirus 5
ugcgcaccuucggcggua

SEQ ID NO: 317813 - RNA, 19 nt, Human herpesvirus 5
ugcgcauguucuaugccgu

SEQ ID NO: 317814 - RNA, 15 nt, Human herpesvirus 5
ugcgccaacggcaua

SEQ ID NO: 317815 - RNA, 20 nt, Human herpesvirus 5
ugcgccgcagcggcuuugug

SEQ ID NO: 317816 - RNA, 13 nt, Human herpesvirus 5
ugcgccgccagcg

SEQ ID NO: 317817 - RNA, 17 nt, Human herpesvirus 5
ugcgccuuccaguccau

SEQ ID NO: 317818 - RNA, 17 nt, Human herpesvirus 5
ugcgcgauacauugccc

SEQ ID NO: 317819 - RNA, 18 nt, Human herpesvirus 5
ugcgcgccacaacgccgu

SEQ ID NO: 317820 - RNA, 21 nt, Human herpesvirus 5
ugcgcgucaucggcaccaucg

SEQ ID NO: 317821 - RNA, 18 nt, Human herpesvirus 5
ugcgcguguacuugcuca

SEQ ID NO: 317822 - RNA, 21 nt, Human herpesvirus 5
ugcgcucuugggcgacaugca

SEQ ID NO: 317823 - RNA, 22 nt, Human herpesvirus 5
ugcgcucuugggcgacaugcac

SEQ ID NO: 317824 - RNA, 20 nt, Human herpesvirus 5
ugcggccgccgcucacaguc

SEQ ID NO: 317825 - RNA, 21 nt, Human herpesvirus 5
ugcggcgacugauuaaccaua

SEQ ID NO: 317826 - RNA, 14 nt, Human herpesvirus 5
ugcggcgugcugca

SEQ ID NO: 317827 - RNA, 19 nt, Human herpesvirus 5
ugcggcuucucuuucucac

SEQ ID NO: 317828 - RNA, 21 nt, Human herpesvirus 5
ugcgguaacuggcagagccac

SEQ ID NO: 317829 - RNA, 17 nt, Human herpesvirus 5
ugcggucgcuucuugcg

SEQ ID NO: 317830 - RNA, 16 nt, Human herpesvirus 5
ugcggucggugucucg

SEQ ID NO: 317831 - RNA, 13 nt, Human herpesvirus 5
uucccaaaagaag

SEQ ID NO: 317832 - RNA, 18 nt, Human herpesvirus 5
uucccaucucaacgucaa

SEQ ID NO: 317833 - RNA, 20 nt, Human herpesvirus 5
uuccccgagaggguggguua

SEQ ID NO: 317834 - RNA, 18 nt, Human herpesvirus 5
uucccucuagagacagac

SEQ ID NO: 317835 - RNA, 14 nt, Human herpesvirus 5
uucccuuguaagac

SEQ ID NO: 317836 - RNA, 18 nt, Human herpesvirus 5
uucccuuguaagacagaa

SEQ ID NO: 317837 - RNA, 23 nt, Human herpesvirus 5
uuccgcaacgucuacaucucauc

SEQ ID NO: 317838 - RNA, 20 nt, Human herpesvirus 5
uuccgugauagccacgacgc

SEQ ID NO: 317839 - RNA, 20 nt, Human herpesvirus 5
uuccucagugaauucuggca

SEQ ID NO: 317840 - RNA, 18 nt, Human herpesvirus 5
uuccucuucuaguacuuc

SEQ ID NO: 317841 - RNA, 12 nt, Human herpesvirus 5
uuccuguguaga

SEQ ID NO: 317842 - RNA, 18 nt, Human herpesvirus 5
uucgaccacaagcucagc

SEQ ID NO: 317843 - RNA, 22 nt, Human herpesvirus 5
uucgagaaugccucuacuugga

SEQ ID NO: 317844 - RNA, 21 nt, Human herpesvirus 5
uucgcaugucgucucaucaca

SEQ ID NO: 317845 - RNA, 16 nt, Human herpesvirus 5
uucgccaagaugcugc

SEQ ID NO: 317846 - RNA, 17 nt, Human herpesvirus 5
uucgccgcaaugggcuu

SEQ ID NO: 317847 - RNA, 19 nt, Human herpesvirus 5
uucggcucccgcacacaga

SEQ ID NO: 317848 - RNA, 15 nt, Human herpesvirus 5
uucggggucuuuauu

SEQ ID NO: 317849 - RNA, 20 nt, Human herpesvirus 5
uucgucugacgcugcuccua

SEQ ID NO: 317850 - RNA, 11 nt, Human herpesvirus 5
uucuacauuca

SEQ ID NO: 317851 - RNA, 16 nt, Human herpesvirus 5
uucuacuccaucauga

SEQ ID NO: 317852 - RNA, 15 nt, Human herpesvirus 5
uucuaguacuuccca

SEQ ID NO: 317853 - RNA, 11 nt, Human herpesvirus 5
uucuauauucu

SEQ ID NO: 317854 - RNA, 17 nt, Human herpesvirus 5
uucuaucguaacaaaua

SEQ ID NO: 317855 - RNA, 14 nt, Human herpesvirus 5
uucuccaagggaga

SEQ ID NO: 317856 - RNA, 23 nt, Human herpesvirus 5
uucuccugccgagacgacgguaa

SEQ ID NO: 317857 - RNA, 14 nt, Human herpesvirus 5
uucucuggauggua

SEQ ID NO: 317858 - RNA, 17 nt, Human herpesvirus 5
uucugcguguaccgcua

SEQ ID NO: 317859 - RNA, 16 nt, Human herpesvirus 5
uucugcugucaccacc

SEQ ID NO: 317860 - RNA, 18 nt, Human herpesvirus 5
uucuggaacaagaaacac

SEQ ID NO: 317861 - RNA, 15 nt, Human herpesvirus 5
uucuguaaucuucca

SEQ ID NO: 317862 - RNA, 20 nt, Human herpesvirus 5
uucuguguaacugauaucgc

SEQ ID NO: 317863 - RNA, 12 nt, Human herpesvirus 5
uucuuacuccgu

SEQ ID NO: 317864 - RNA, 21 nt, Human herpesvirus 5
uucuugccaagcuuuagccag

SEQ ID NO: 317865 - RNA, 13 nt, Human herpesvirus 5
uucuugcccacgc

SEQ ID NO: 317866 - RNA, 16 nt, Human herpesvirus 5
uucuuugguaucuaca

SEQ ID NO: 317867 - RNA, 13 nt, Human herpesvirus 5
uucuuuuugcaaa

SEQ ID NO: 317868 - RNA, 14 nt, Human herpesvirus 5
uugaaaauauggca

SEQ ID NO: 317869 - RNA, 15 nt, Human herpesvirus 5
uugaaaauauggcau

SEQ ID NO: 317870 - RNA, 13 nt, Human herpesvirus 5
uugaaucauacau

SEQ ID NO: 317871 - RNA, 22 nt, Human herpesvirus 5
uugaccggcccuagaaagacca

SEQ ID NO: 317872 - RNA, 12 nt, Human herpesvirus 5
uugagacuacca

SEQ ID NO: 317873 - RNA, 13 nt, Human herpesvirus 5
uugagacuaccac

SEQ ID NO: 317874 - RNA, 15 nt, Human herpesvirus 5
uugagacuaccacau

SEQ ID NO: 317875 - RNA, 20 nt, Human herpesvirus 5
uugagcaggguaaaaaccac

SEQ ID NO: 317876 - RNA, 13 nt, Human herpesvirus 5
uugauuucucaag

SEQ ID NO: 317877 - RNA, 15 nt, Human herpesvirus 5
uugcaaaacuacuaa

SEQ ID NO: 317878 - RNA, 13 nt, Human herpesvirus 5
uugcgaacgucac

SEQ ID NO: 317879 - RNA, 17 nt, Human herpesvirus 5
uugcgaagccagcuaca

SEQ ID NO: 317880 - RNA, 17 nt, Human herpesvirus 5
uugcgacaauacgcgua

SEQ ID NO: 317881 - RNA, 16 nt, Human herpesvirus 5
uugcgcauccccugac

SEQ ID NO: 317882 - RNA, 20 nt, Human herpesvirus 5
uugcgcauccccugacccuc

SEQ ID NO: 317883 - RNA, 19 nt, Human herpesvirus 5
uugcgcaugguagccgugu

SEQ ID NO: 317884 - RNA, 14 nt, Human herpesvirus 5
uugcucuacugcaa

SEQ ID NO: 317885 - RNA, 22 nt, Human herpesvirus 5
uugcuugcccggcgucacacgg

SEQ ID NO: 317886 - RNA, 20 nt, Human herpesvirus 5
uuggaaguaacaucauaaaa

SEQ ID NO: 317887 - RNA, 18 nt, Human herpesvirus 5
uuggagacacaacguuau

SEQ ID NO: 317888 - RNA, 21 nt, Human herpesvirus 5
uuggagacacaacguuaucca

SEQ ID NO: 317889 - RNA, 17 nt, Human herpesvirus 5
uuggcaacaucaccaac

SEQ ID NO: 317890 - RNA, 20 nt, Human herpesvirus 5
uuggccuguggauagauuuc

SEQ ID NO: 317891 - RNA, 21 nt, Human herpesvirus 5
uugggaauauuggcggggaua

SEQ ID NO: 317892 - RNA, 15 nt, Human herpesvirus 5
uugguacacagccaa

SEQ ID NO: 317893 - RNA, 16 nt, Human herpesvirus 5
uugguaucugguacua

SEQ ID NO: 317894 - RNA, 14 nt, Human herpesvirus 5
uuggugugugucua

SEQ ID NO: 317895 - RNA, 23 nt, Human herpesvirus 5
uuguacauggguagccaucgcau

SEQ ID NO: 317896 - RNA, 17 nt, Human herpesvirus 5
uuguacgaguacacguu

SEQ ID NO: 317897 - RNA, 13 nt, Human herpesvirus 5
uuguauacucuau

SEQ ID NO: 317898 - RNA, 22 nt, Human herpesvirus 5
uuguauacucuauauuauacuc

SEQ ID NO: 317899 - RNA, 21 nt, Human herpesvirus 5
uugucaguauuuuugugcuca

SEQ ID NO: 317900 - RNA, 16 nt, Human herpesvirus 5
uugucauggucuguaa

SEQ ID NO: 317901 - RNA, 16 nt, Human herpesvirus 5
uugucauuaaacaggc

SEQ ID NO: 317902 - RNA, 13 nt, Human herpesvirus 5
uuguccuucuccc

SEQ ID NO: 317903 - RNA, 24 nt, Human herpesvirus 5
uugucgccaugcuucaugucgucc

SEQ ID NO: 317904 - RNA, 20 nt, Human herpesvirus 5
uugucuccccggugugucua

SEQ ID NO: 317905 - RNA, 17 nt, Human herpesvirus 5
uuguggggcugcucaac

SEQ ID NO: 317906 - RNA, 15 nt, Human herpesvirus 5
uugugguggcuggga

SEQ ID NO: 317907 - RNA, 14 nt, Human herpesvirus 5
uuguguguacgaca

SEQ ID NO: 317908 - RNA, 18 nt, Human herpesvirus 5
uuguguucuuacuccguc

SEQ ID NO: 317909 - RNA, 15 nt, Human herpesvirus 5
uuuaaggagcucuga

SEQ ID NO: 317910 - RNA, 21 nt, Human herpesvirus 5
uuuaagguacgggucuaccaa

SEQ ID NO: 317911 - RNA, 17 nt, Human herpesvirus 5
uuuacaauaaagagaua

SEQ ID NO: 317912 - RNA, 16 nt, Human herpesvirus 5
uuuacauaaaaccacc

SEQ ID NO: 317913 - RNA, 18 nt, Human herpesvirus 5
uuuacuaguauccacguc

SEQ ID NO: 317914 - RNA, 20 nt, Human herpesvirus 5
uuuacuaguauccacgucac

SEQ ID NO: 317915 - RNA, 11 nt, Human herpesvirus 5
uuuauaugauc

SEQ ID NO: 317916 - RNA, 12 nt, Human herpesvirus 5
uuuaugagaaaa

SEQ ID NO: 317917 - RNA, 18 nt, Human herpesvirus 5
uuuauuuuucagcucacu

SEQ ID NO: 317918 - RNA, 18 nt, Human herpesvirus 5
uuucaacaaauaccaaca

SEQ ID NO: 317919 - RNA, 16 nt, Human herpesvirus 5
uuucaccauucucguc

SEQ ID NO: 317920 - RNA, 17 nt, Human herpesvirus 5
uuucagagaugccguag

SEQ ID NO: 317921 - RNA, 16 nt, Human herpesvirus 5
uuucauaaauucugac

SEQ ID NO: 317922 - RNA, 19 nt, Human herpesvirus 5
uuucauaguugcuauaccu

SEQ ID NO: 317923 - RNA, 13 nt, Human herpesvirus 5
uuucaugcucaua

SEQ ID NO: 317924 - RNA, 15 nt, Human herpesvirus 5
uuuccaaaagugauu

SEQ ID NO: 317925 - RNA, 16 nt, Human herpesvirus 5
uuucgaaauaaccuac

SEQ ID NO: 317926 - RNA, 15 nt, Human herpesvirus 5
uuucgaccacaagcu

SEQ ID NO: 317927 - RNA, 21 nt, Human herpesvirus 5
uuucgcggcgagguggucaac

SEQ ID NO: 317928 - RNA, 18 nt, Human herpesvirus 5
uuucggauguuuacccuu

SEQ ID NO: 317929 - RNA, 16 nt, Human herpesvirus 5
uuucuacgugcggcaa

SEQ ID NO: 317930 - RNA, 12 nt, Human herpesvirus 5
uuucuacuccau

SEQ ID NO: 317931 - RNA, 12 nt, Human herpesvirus 5
uuucucaccagc

SEQ ID NO: 317932 - RNA, 14 nt, Human herpesvirus 5
uuucuccgugugua

SEQ ID NO: 317933 - RNA, 13 nt, Human herpesvirus 5
uuucugcuuaaag

SEQ ID NO: 317934 - RNA, 15 nt, Human herpesvirus 5
uuugacguauuugaa

SEQ ID NO: 317935 - RNA, 13 nt, Human herpesvirus 5
uuugagcacaaac

SEQ ID NO: 317936 - RNA, 15 nt, Human herpesvirus 5
uuugccggcucuccu

SEQ ID NO: 317937 - RNA, 13 nt, Human herpesvirus 5
uuuggaccuggag

SEQ ID NO: 317938 - RNA, 13 nt, Human herpesvirus 5
uuugggucuuuuc

SEQ ID NO: 317939 - RNA, 19 nt, Human herpesvirus 5
uuuggucgccugcacugcc

SEQ ID NO: 317940 - RNA, 21 nt, Human herpesvirus 5
uuugugcacgcacgacaugac

SEQ ID NO: 317941 - RNA, 17 nt, Human herpesvirus 5
uuuguggggcugcucaa

SEQ ID NO: 317942 - RNA, 21 nt, Human herpesvirus 5
uuuuauaaaagagcgucucga

SEQ ID NO: 317943 - RNA, 14 nt, Human herpesvirus 5
uuuuauacaucucc

SEQ ID NO: 317944 - RNA, 16 nt, Human herpesvirus 5
uuuucaugaauccaca

SEQ ID NO: 317945 - RNA, 17 nt, Human herpesvirus 5
uuuucaugguauaaaga

SEQ ID NO: 317946 - RNA, 16 nt, Human herpesvirus 5
uuuucaugucuuacaa

SEQ ID NO: 317947 - RNA, 19 nt, Human herpesvirus 5
uuuuccaaaacgugccagg

SEQ ID NO: 317948 - RNA, 13 nt, Human herpesvirus 5
uuuuccauuucgc

SEQ ID NO: 317949 - RNA, 14 nt, Human herpesvirus 5
uuuucgaugauaca

SEQ ID NO: 317950 - RNA, 22 nt, Human herpesvirus 5
uuuuggauguauguaucgcaua

SEQ ID NO: 317951 - RNA, 13 nt, Human herpesvirus 5
uuuuucgcugcca

SEQ ID NO: 317952 - RNA, 18 nt, Human herpesvirus 5
uuuuuguuaacaaccuau

SEQ ID NO: 317953 - RNA, 23 nt, Human herpesvirus 5
uaccuagagaggcuggcgguaug

SEQ ID NO: 317954 - RNA, 18 nt, Human herpesvirus 5
uaccucuaacaacgucac

SEQ ID NO: 317955 - RNA, 13 nt, Human herpesvirus 5
uaccuucuugccc

SEQ ID NO: 317956 - RNA, 13 nt, Human herpesvirus 5
uaccuuguaccaa

SEQ ID NO: 317957 - RNA, 21 nt, Human herpesvirus 5
uacgacccuccuaaaccuggu

SEQ ID NO: 317958 - RNA, 13 nt, Human herpesvirus 5
uacgagguacugu

SEQ ID NO: 317959 - RNA, 20 nt, Human herpesvirus 5
uacgauaauugcuacgucac

SEQ ID NO: 317960 - RNA, 22 nt, Human herpesvirus 5
uacgauaauugcuacgucacaa

SEQ ID NO: 317961 - RNA, 19 nt, Human herpesvirus 5
uacgauuucaaaaugugca

SEQ ID NO: 317962 - RNA, 21 nt, Human herpesvirus 5
uacgcgcuaaaggugcaugac

SEQ ID NO: 317963 - RNA, 19 nt, Human herpesvirus 5
uacggcuccacacgcaucu

SEQ ID NO: 317964 - RNA, 14 nt, Human herpesvirus 5
uacgggucuaccaa

SEQ ID NO: 317965 - RNA, 13 nt, Human herpesvirus 5
uacggugcugcgu

SEQ ID NO: 317966 - RNA, 14 nt, Human herpesvirus 5
uacgucgacaugaa

SEQ ID NO: 317967 - RNA, 15 nt, Human herpesvirus 5
uacgucgacaugaac

SEQ ID NO: 317968 - RNA, 19 nt, Human herpesvirus 5
uacuaccgcgcccacugga

SEQ ID NO: 317969 - RNA, 20 nt, Human herpesvirus 5
uacuaccgcgcccacuggag

SEQ ID NO: 317970 - RNA, 20 nt, Human herpesvirus 5
uacuaccguuaacuauucca

SEQ ID NO: 317971 - RNA, 13 nt, Human herpesvirus 5
uacuacuaccaau

SEQ ID NO: 317972 - RNA, 20 nt, Human herpesvirus 5
uacuagggaaaacauaagaa

SEQ ID NO: 317973 - RNA, 17 nt, Human herpesvirus 5
uccaccucugcuacugg

SEQ ID NO: 317974 - RNA, 23 nt, Human herpesvirus 5
uccacgccaccgccgccaccacc

SEQ ID NO: 317975 - RNA, 21 nt, Human herpesvirus 5
uccagaccagcgccaccauag

SEQ ID NO: 317976 - RNA, 13 nt, Human herpesvirus 5
uccagcaccacgu

SEQ ID NO: 317977 - RNA, 16 nt, Human herpesvirus 5
uccagccuucccaugc

SEQ ID NO: 317978 - RNA, 11 nt, Human herpesvirus 5
uccagcugcuu

SEQ ID NO: 317979 - RNA, 20 nt, Human herpesvirus 5
uccaggacaaaaaguacacu

SEQ ID NO: 317980 - RNA, 17 nt, Human herpesvirus 5
uccaguuucaccaaggc

SEQ ID NO: 317981 - RNA, 20 nt, Human herpesvirus 5
uccauagugcgccaagccau

SEQ ID NO: 317982 - RNA, 14 nt, Human herpesvirus 5
uccaucacaucacc

SEQ ID NO: 317983 - RNA, 17 nt, Human herpesvirus 5
uccaucgacgauccucg

SEQ ID NO: 317984 - RNA, 14 nt, Human herpesvirus 5
uccaucgcagccac

SEQ ID NO: 317985 - RNA, 11 nt, Human herpesvirus 5
ucccaccacgg

SEQ ID NO: 317986 - RNA, 23 nt, Human herpesvirus 5
ucccaccacgguuuccucgguca

SEQ ID NO: 317987 - RNA, 22 nt, Human herpesvirus 5
ucccaccccccgggccaccagc

SEQ ID NO: 317988 - RNA, 21 nt, Human herpesvirus 5
ucccacuacacuauguucgug

SEQ ID NO: 317989 - RNA, 23 nt, Human herpesvirus 5
ucccagaggaagcccauguaggu

SEQ ID NO: 317990 - RNA, 18 nt, Human herpesvirus 5
ucccccccguccaggugg

SEQ ID NO: 317991 - RNA, 22 nt, Human herpesvirus 5
ucccccugcacguccaugucgc

SEQ ID NO: 317992 - RNA, 17 nt, Human herpesvirus 5
uccccgaauuugggcgg

SEQ ID NO: 317993 - RNA, 12 nt, Human herpesvirus 5
uccccuaacguc

SEQ ID NO: 317994 - RNA, 20 nt, Human herpesvirus 5
ucccgacauggagacaguuu

SEQ ID NO: 317995 - RNA, 21 nt, Human herpesvirus 5
ucccgcuuuucuacuccauca

SEQ ID NO: 317996 - RNA, 13 nt, Human herpesvirus 5
ucccuaacuaucu

SEQ ID NO: 317997 - RNA, 17 nt, Human herpesvirus 5
ucccuacuaccgucgug

SEQ ID NO: 317998 - RNA, 22 nt, Human herpesvirus 5
ucccuguaauuauuccagcuuu

SEQ ID NO: 317999 - RNA, 14 nt, Human herpesvirus 5
ucccuuuuacuagu

SEQ ID NO: 318000 - RNA, 19 nt, Human herpesvirus 5
ucccuuuuacuaguaucca

SEQ ID NO: 318001 - RNA, 14 nt, Human herpesvirus 5
uccgaaaccuguau

SEQ ID NO: 318002 - RNA, 19 nt, Human herpesvirus 5
uccgaaauacgcguuuuga

SEQ ID NO: 318003 - RNA, 23 nt, Human herpesvirus 5
uccgaccgggaaaccacgccggc

SEQ ID NO: 318004 - RNA, 19 nt, Human herpesvirus 5
uccgacuugaguacuuuca

SEQ ID NO: 318005 - RNA, 13 nt, Human herpesvirus 5
uccgaugaugaua

SEQ ID NO: 318006 - RNA, 17 nt, Human herpesvirus 5
uccgauguacguaccac

SEQ ID NO: 318007 - RNA, 18 nt, Human herpesvirus 5
uccgauguacguaccacg

SEQ ID NO: 318008 - RNA, 18 nt, Human herpesvirus 5
uccgcccuugguggagac

SEQ ID NO: 318009 - RNA, 24 nt, Human herpesvirus 5
uccggcgcugagaaccuacgugca

SEQ ID NO: 318010 - RNA, 23 nt, Human herpesvirus 5
uccggcugacgcggacgaggaac

SEQ ID NO: 318011 - RNA, 12 nt, Human herpesvirus 5
uccgguggugcg

SEQ ID NO: 318012 - RNA, 15 nt, Human herpesvirus 5
uccgucaugcuggca

SEQ ID NO: 318013 - RNA, 15 nt, Human herpesvirus 5
uccgucguuaucuuc

SEQ ID NO: 318014 - RNA, 16 nt, Human herpesvirus 5
uccgucuccagacaaa

SEQ ID NO: 318015 - RNA, 17 nt, Human herpesvirus 5
uccgugauagccacgac

SEQ ID NO: 318016 - RNA, 22 nt, Human herpesvirus 5
uccuacacgccuugcaccuggg

SEQ ID NO: 318017 - RNA, 16 nt, Human herpesvirus 5
uccuaguaaugcauua

SEQ ID NO: 318018 - RNA, 23 nt, Human herpesvirus 5
uccuauugggaagggugugacug

SEQ ID NO: 318019 - RNA, 18 nt, Human herpesvirus 5
uccucagugaauucuggc

SEQ ID NO: 318020 - RNA, 19 nt, Human herpesvirus 5
uccucagugaauucuggca

SEQ ID NO: 318021 - RNA, 14 nt, Human herpesvirus 5
uccucccgguauuc

SEQ ID NO: 318022 - RNA, 21 nt, Human herpesvirus 5
uccuccgcacuucggucucgg

SEQ ID NO: 318023 - RNA, 23 nt, Human herpesvirus 5
uccucgggaggacucagagccac

SEQ ID NO: 318024 - RNA, 16 nt, Human herpesvirus 5
uccucguaaacuuaug

SEQ ID NO: 318025 - RNA, 15 nt, Human herpesvirus 5
uccucguggaaggca

SEQ ID NO: 318026 - RNA, 19 nt, Human herpesvirus 5
uccucgugugcuguugacc

SEQ ID NO: 318027 - RNA, 23 nt, Human herpesvirus 5
uccucgugugcuguugaccuggg

SEQ ID NO: 318028 - RNA, 18 nt, Human herpesvirus 5
uccucguguggcaaguug

SEQ ID NO: 318029 - RNA, 15 nt, Human herpesvirus 5
uccugagacacuuga

SEQ ID NO: 318030 - RNA, 20 nt, Human herpesvirus 5
uccugcuguuacgacaucac

SEQ ID NO: 318031 - RNA, 18 nt, Human herpesvirus 5
uccuggccaccauguugu

SEQ ID NO: 318032 - RNA, 16 nt, Human herpesvirus 5
uccuggguaccgaguc

SEQ ID NO: 318033 - RNA, 19 nt, Human herpesvirus 5
uccuggucuuucaugauga

SEQ ID NO: 318034 - RNA, 16 nt, Human herpesvirus 5
uccuguuggcuuacug

SEQ ID NO: 318035 - RNA, 18 nt, Human herpesvirus 5
uccuuccuauuuuguuac

SEQ ID NO: 318036 - RNA, 15 nt, Human herpesvirus 5
uccuucucaucaaug

SEQ ID NO: 318037 - RNA, 20 nt, Human herpesvirus 5
uccuuguucucgaccacgua

SEQ ID NO: 318038 - RNA, 11 nt, Human herpesvirus 5
uccuuuuccag

SEQ ID NO: 318039 - RNA, 14 nt, Human herpesvirus 5
ucgaaaacaaccac

SEQ ID NO: 318040 - RNA, 16 nt, Human herpesvirus 5
ucgaaaacaaccacac

SEQ ID NO: 318041 - RNA, 12 nt, Human herpesvirus 5
ucgaaagccacc

SEQ ID NO: 318042 - RNA, 19 nt, Human herpesvirus 5
ucgaaagccaccguuuuca

SEQ ID NO: 318043 - RNA, 18 nt, Human herpesvirus 5
ucgaccucuuugagcaca

SEQ ID NO: 318044 - RNA, 17 nt, Human herpesvirus 5
ucgacgugcgccaguuc

SEQ ID NO: 318045 - RNA, 14 nt, Human herpesvirus 5
ucgacguguuauca

SEQ ID NO: 318046 - RNA, 20 nt, Human herpesvirus 5
ucgacugcguggggugcugg

SEQ ID NO: 318047 - RNA, 20 nt, Human herpesvirus 5
ucgagaccgaagacgccguc

SEQ ID NO: 318048 - RNA, 19 nt, Human herpesvirus 5
ucgagacuugcacgcuguc

SEQ ID NO: 318049 - RNA, 19 nt, Human herpesvirus 5
ucgagaggguaacuaugua

SEQ ID NO: 318050 - RNA, 20 nt, Human herpesvirus 5
ucgauccucucucacgcguc

SEQ ID NO: 318051 - RNA, 17 nt, Human herpesvirus 5
ucgaugaagccuaucaa

SEQ ID NO: 318052 - RNA, 23 nt, Human herpesvirus 5
ucgaugacgaugucgaucuccau

SEQ ID NO: 318053 - RNA, 14 nt, Human herpesvirus 5
ucgaugcugaucac

SEQ ID NO: 318054 - RNA, 15 nt, Human herpesvirus 5
ucgaugcugaucacg

SEQ ID NO: 318055 - RNA, 14 nt, Human herpesvirus 5
ucgaugcuguuguc

SEQ ID NO: 318056 - RNA, 23 nt, Human herpesvirus 5
ucgauguuggacgaaacguaucc

SEQ ID NO: 318057 - RNA, 21 nt, Human herpesvirus 5
ucgauucccaucucaacguca

SEQ ID NO: 318058 - RNA, 14 nt, Human herpesvirus 5
ucgcaacaacagca

SEQ ID NO: 318059 - RNA, 17 nt, Human herpesvirus 5
ucgcaacaacagcaaca

SEQ ID NO: 318060 - RNA, 18 nt, Human herpesvirus 5
ucgcacacagacuuuaua

SEQ ID NO: 318061 - RNA, 11 nt, Human herpesvirus 5
ucgccaccacc

SEQ ID NO: 318062 - RNA, 17 nt, Human herpesvirus 5
ucgccaguccauggucu

SEQ ID NO: 318063 - RNA, 14 nt, Human herpesvirus 5
ucgccgcugauacu

SEQ ID NO: 318064 - RNA, 22 nt, Human herpesvirus 5
ucgccggcuugcuccucuucca

SEQ ID NO: 318065 - RNA, 13 nt, Human herpesvirus 5
ucgcguguggucu

SEQ ID NO: 318066 - RNA, 15 nt, Human herpesvirus 5
ucgcuauacaccaag

SEQ ID NO: 318067 - RNA, 13 nt, Human herpesvirus 5
ucgcucgcugcau

SEQ ID NO: 318068 - RNA, 22 nt, Human herpesvirus 5
ucgcucggaacgacgacucagg

SEQ ID NO: 318069 - RNA, 18 nt, Human herpesvirus 5
ucgcucucgucgcucuau

SEQ ID NO: 318070 - RNA, 18 nt, Human herpesvirus 5
ucgcuuagccaccaccug

SEQ ID NO: 318071 - RNA, 21 nt, Human herpesvirus 5
ucggauacagggugccgccac

SEQ ID NO: 318072 - RNA, 15 nt, Human herpesvirus 5
ucggccgaccccguc

SEQ ID NO: 318073 - RNA, 16 nt, Human herpesvirus 5
ucggccgcgucgcaaa

SEQ ID NO: 318074 - RNA, 13 nt, Human herpesvirus 5
ucgucaaucuugc

SEQ ID NO: 318075 - RNA, 16 nt, Human herpesvirus 5
ucgucacgcucaagga

SEQ ID NO: 318076 - RNA, 20 nt, Human herpesvirus 5
ucgucguaguuguugcagaa

SEQ ID NO: 318077 - RNA, 15 nt, Human herpesvirus 5
ucgucugugucucac

SEQ ID NO: 318078 - RNA, 19 nt, Human herpesvirus 5
ucgugauggguucugcggu

SEQ ID NO: 318079 - RNA, 16 nt, Human herpesvirus 5
ucgugggcuacuuuga

SEQ ID NO: 318080 - RNA, 16 nt, Human herpesvirus 5
ucguguaauccacgac

SEQ ID NO: 318081 - RNA, 15 nt, Human herpesvirus 5
ucguguaucuuaugc

SEQ ID NO: 318082 - RNA, 17 nt, Human herpesvirus 5
ucguguugacagggcuu

SEQ ID NO: 318083 - RNA, 23 nt, Human herpesvirus 5
ucguuauaagcguggauggucau

SEQ ID NO: 318084 - RNA, 22 nt, Human herpesvirus 5
ucguuguguucuuacuccgucu

SEQ ID NO: 318085 - RNA, 17 nt, Human herpesvirus 5
ucuaaacgccaccugca

SEQ ID NO: 318086 - RNA, 18 nt, Human herpesvirus 5
ucuaaacgccaccugcaa

SEQ ID NO: 318087 - RNA, 17 nt, Human herpesvirus 5
ucuaacaacgucacuuc

SEQ ID NO: 318088 - RNA, 15 nt, Human herpesvirus 5
ucuacagacugggcg

SEQ ID NO: 318089 - RNA, 20 nt, Human herpesvirus 5
ucuaccuagaugcuagcaau

SEQ ID NO: 318090 - RNA, 22 nt, Human herpesvirus 5
ucuacgcuccuacgacaacauc

SEQ ID NO: 318091 - RNA, 13 nt, Human herpesvirus 5
ucuacuacucugu

SEQ ID NO: 318092 - RNA, 13 nt, Human herpesvirus 5
ucuacuccaucau

SEQ ID NO: 318093 - RNA, 21 nt, Human herpesvirus 5
ucuacuccgaauaacaacaca

SEQ ID NO: 318094 - RNA, 15 nt, Human herpesvirus 5
ucuacugcaacugca

SEQ ID NO: 318095 - RNA, 21 nt, Human herpesvirus 5
ucuagacaggguaacagccuu

SEQ ID NO: 318096 - RNA, 13 nt, Human herpesvirus 5
ucuagagacagac

SEQ ID NO: 318097 - RNA, 22 nt, Human herpesvirus 5
ucuaggaacacugaaaacacca

SEQ ID NO: 318098 - RNA, 19 nt, Human herpesvirus 5
ucuaguacuucccaugcaa

SEQ ID NO: 318099 - RNA, 21 nt, Human herpesvirus 5
ucuaguacuucccaugcaacu

SEQ ID NO: 318100 - RNA, 19 nt, Human herpesvirus 5
ucuagugcccauacuuuua

SEQ ID NO: 318101 - RNA, 23 nt, Human herpesvirus 5
ucuauaggcgguacuuacgucac

SEQ ID NO: 318102 - RNA, 10 nt, Human herpesvirus 5
ucuauauucu

SEQ ID NO: 318103 - RNA, 16 nt, Human herpesvirus 5
ucuaucaaugguggaa

SEQ ID NO: 318104 - RNA, 23 nt, Human herpesvirus 5
ucuauccgaguccaccucugcua

SEQ ID NO: 318105 - RNA, 17 nt, Human herpesvirus 5
ucuauggcccaggguac

SEQ ID NO: 318106 - RNA, 11 nt, Human herpesvirus 5
ucucaccgugc

SEQ ID NO: 318107 - RNA, 14 nt, Human herpesvirus 5
ucucacgguuaaag

SEQ ID NO: 318108 - RNA, 15 nt, Human herpesvirus 5
ucucacguacaggca

SEQ ID NO: 318109 - RNA, 18 nt, Human herpesvirus 5
ucucauuugcuuuuacaa

SEQ ID NO: 318110 - RNA, 20 nt, Human herpesvirus 5
ucuccaagggagacaucgaa

SEQ ID NO: 318111 - RNA, 11 nt, Human herpesvirus 5
ucuccaccaca

SEQ ID NO: 318112 - RNA, 14 nt, Human herpesvirus 5
ucucgagugguuca

SEQ ID NO: 318113 - RNA, 20 nt, Human herpesvirus 5
ucucguacgacgucugcuca

SEQ ID NO: 318114 - RNA, 22 nt, Human herpesvirus 5
ucucguacgacgucugcucaaa

SEQ ID NO: 318115 - RNA, 15 nt, Human herpesvirus 5
ucucuauacacauau

SEQ ID NO: 318116 - RNA, 20 nt, Human herpesvirus 5
ucucucgacguuucugauag

SEQ ID NO: 318117 - RNA, 21 nt, Human herpesvirus 5
ucucucgguaaugcgugucca

SEQ ID NO: 318118 - RNA, 16 nt, Human herpesvirus 5
ucucuuaguggucgcu

SEQ ID NO: 318119 - RNA, 15 nt, Human herpesvirus 5
ucugacgcuguacaa

SEQ ID NO: 318120 - RNA, 19 nt, Human herpesvirus 5
ucugacgcugucuugcuua

SEQ ID NO: 318121 - RNA, 22 nt, Human herpesvirus 5
ucugacgguuggacuccugugu

SEQ ID NO: 318122 - RNA, 18 nt, Human herpesvirus 5
ucugacguccagcaccac

SEQ ID NO: 318123 - RNA, 18 nt, Human herpesvirus 5
ucugauagccauguucca

SEQ ID NO: 318124 - RNA, 19 nt, Human herpesvirus 5
ucugauagccauguuccau

SEQ ID NO: 318125 - RNA, 21 nt, Human herpesvirus 5
ucugcauagaguuacaugcaa

SEQ ID NO: 318126 - RNA, 12 nt, Human herpesvirus 5
ucugcauguugg

SEQ ID NO: 318127 - RNA, 13 nt, Human herpesvirus 5
ucugcauguuggu

SEQ ID NO: 318128 - RNA, 13 nt, Human herpesvirus 5
ucugccacuaccg

SEQ ID NO: 318129 - RNA, 22 nt, Human herpesvirus 5
ucugccacuaccgauaaaacua

SEQ ID NO: 318130 - RNA, 17 nt, Human herpesvirus 5
ucugcguguguguuucu

SEQ ID NO: 318131 - RNA, 14 nt, Human herpesvirus 5
ucugcguguuuuau

SEQ ID NO: 318132 - RNA, 18 nt, Human herpesvirus 5
ucugcguucuguggugcg

SEQ ID NO: 318133 - RNA, 10 nt, Human herpesvirus 5
ucugcuuaaa

SEQ ID NO: 318134 - RNA, 21 nt, Human herpesvirus 5
ucugcuuuuuugucuccugug

SEQ ID NO: 318135 - RNA, 18 nt, Human herpesvirus 5
ucuggaacaagaaacaca

SEQ ID NO: 318136 - RNA, 17 nt, Human herpesvirus 5
ucugguaccugcuaaag

SEQ ID NO: 318137 - RNA, 12 nt, Human herpesvirus 5
ucugguacuuag

SEQ ID NO: 318138 - RNA, 13 nt, Human herpesvirus 5
ucugguacuuagu

SEQ ID NO: 318139 - RNA, 15 nt, Human herpesvirus 5
ucuggucucgugaug

SEQ ID NO: 318140 - RNA, 22 nt, Human herpesvirus 5
ucuguauccauacuuaccaccg

SEQ ID NO: 318141 - RNA, 15 nt, Human herpesvirus 5
ucugugaugaacgac

SEQ ID NO: 318142 - RNA, 20 nt, Human herpesvirus 5
ucuguggaggagacuaccuc

SEQ ID NO: 318143 - RNA, 15 nt, Human herpesvirus 5
ucuguuuuugcugca

SEQ ID NO: 318144 - RNA, 19 nt, Human herpesvirus 5
ucuuaaaggacgugaugcg

SEQ ID NO: 318145 - RNA, 14 nt, Human herpesvirus 5
ucuuaacuauuccu

SEQ ID NO: 318146 - RNA, 14 nt, Human herpesvirus 5
ucuuccucagugaa

SEQ ID NO: 318147 - RNA, 14 nt, Human herpesvirus 5
ucuuccugcugcgc

SEQ ID NO: 318148 - RNA, 11 nt, Human herpesvirus 5
ucuucuacuca

SEQ ID NO: 318149 - RNA, 15 nt, Human herpesvirus 5
ucuucuaguacuucc

SEQ ID NO: 318150 - RNA, 22 nt, Human herpesvirus 5
ucuucugaagccgucagucaua

SEQ ID NO: 318151 - RNA, 23 nt, Human herpesvirus 5
ucuucugaagccgucagucauag

SEQ ID NO: 318152 - RNA, 22 nt, Human herpesvirus 5
ucuugacgacguuguggcugcu

SEQ ID NO: 318153 - RNA, 15 nt, Human herpesvirus 5
ucuugccaagcuuua

SEQ ID NO: 318154 - RNA, 12 nt, Human herpesvirus 5
ucuuucaugaug

SEQ ID NO: 318155 - RNA, 21 nt, Human herpesvirus 5
ugaaacccgcgccgguucuca

SEQ ID NO: 318156 - RNA, 17 nt, Human herpesvirus 5
ugaaacgccaacuccgu

SEQ ID NO: 318157 - RNA, 22 nt, Human herpesvirus 5
ugaaagcuuucuacgugcggca

SEQ ID NO: 318158 - RNA, 19 nt, Human herpesvirus 5
ugaacaccuuuuugcugca

SEQ ID NO: 318159 - RNA, 13 nt, Human herpesvirus 5
ugaaccaugaucu

SEQ ID NO: 318160 - RNA, 11 nt, Human herpesvirus 5
ugaaccuuccc

SEQ ID NO: 318161 - RNA, 14 nt, Human herpesvirus 5
ugaaccuuccccac

SEQ ID NO: 318162 - RNA, 17 nt, Human herpesvirus 5
ugaaccuuguaaugcuu

SEQ ID NO: 318163 - RNA, 20 nt, Human herpesvirus 5
ugaacgacacaugcacaaua

SEQ ID NO: 318164 - RNA, 16 nt, Human herpesvirus 5
ugaacgcgguacaugu

SEQ ID NO: 318165 - RNA, 17 nt, Human herpesvirus 5
ugaacgcgguacaugug

SEQ ID NO: 318166 - RNA, 18 nt, Human herpesvirus 5
ugaacgcgguacaugugc

SEQ ID NO: 318167 - RNA, 22 nt, Human herpesvirus 5
ugaacguggugaggggcgugug

SEQ ID NO: 318168 - RNA, 15 nt, Human herpesvirus 5
ugaacuugagcacaa

SEQ ID NO: 318169 - RNA, 15 nt, Human herpesvirus 5
ugaagacacccugcg

SEQ ID NO: 318170 - RNA, 13 nt, Human herpesvirus 5
ugaagccuaucaa

SEQ ID NO: 318171 - RNA, 15 nt, Human herpesvirus 5
ugaaggacaguguau

SEQ ID NO: 318172 - RNA, 14 nt, Human herpesvirus 5
ugaauaacaccaaa

SEQ ID NO: 318173 - RNA, 19 nt, Human herpesvirus 5
ugaauaacaccaaaaaucc

SEQ ID NO: 318174 - RNA, 23 nt, Human herpesvirus 5
ugaauaacaccaaaaauccagac

SEQ ID NO: 318175 - RNA, 15 nt, Human herpesvirus 5
ugaaucaugugguca

SEQ ID NO: 318176 - RNA, 19 nt, Human herpesvirus 5
ugaaucgccccucacguca

SEQ ID NO: 318177 - RNA, 11 nt, Human herpesvirus 5
ugacaccucaa

SEQ ID NO: 318178 - RNA, 18 nt, Human herpesvirus 5
ugacacuaacuugacuau

SEQ ID NO: 318179 - RNA, 20 nt, Human herpesvirus 5
caacgacgccacacacaucu

SEQ ID NO: 318180 - RNA, 17 nt, Human herpesvirus 5
caacggcauagugccag

SEQ ID NO: 318181 - RNA, 20 nt, Human herpesvirus 5
caacggcuggaaauggacuu

SEQ ID NO: 318182 - RNA, 12 nt, Human herpesvirus 5
caacgucacuuc

SEQ ID NO: 318183 - RNA, 13 nt, Human herpesvirus 5
caacgucacuucu

SEQ ID NO: 318184 - RNA, 14 nt, Human herpesvirus 5
caacgugcugcuga

SEQ ID NO: 318185 - RNA, 17 nt, Human herpesvirus 5
caacuacagcaaugaca

SEQ ID NO: 318186 - RNA, 14 nt, Human herpesvirus 5
caacuaucaccaaa

SEQ ID NO: 318187 - RNA, 12 nt, Human herpesvirus 5
caacucagggaa

SEQ ID NO: 318188 - RNA, 15 nt, Human herpesvirus 5
caacuccgugcuguu

SEQ ID NO: 318189 - RNA, 15 nt, Human herpesvirus 5
caacugaaauacaug

SEQ ID NO: 318190 - RNA, 14 nt, Human herpesvirus 5
caacugcugccucg

SEQ ID NO: 318191 - RNA, 17 nt, Human herpesvirus 5
caacuuaaccacaagaa

SEQ ID NO: 318192 - RNA, 15 nt, Human herpesvirus 5
caacuucacuucaaa

SEQ ID NO: 318193 - RNA, 14 nt, Human herpesvirus 5
caacuucuaccauc

SEQ ID NO: 318194 - RNA, 15 nt, Human herpesvirus 5
caacuucuaccaucu

SEQ ID NO: 318195 - RNA, 16 nt, Human herpesvirus 5
caacuucuucuacuca

SEQ ID NO: 318196 - RNA, 17 nt, Human herpesvirus 5
caacuuugacgugcuca

SEQ ID NO: 318197 - RNA, 19 nt, Human herpesvirus 5
caacuuuguggggcugcuc

SEQ ID NO: 318198 - RNA, 23 nt, Human herpesvirus 5
caagaauccguccccacguccac

SEQ ID NO: 318199 - RNA, 15 nt, Human herpesvirus 5
caagcacuaccagcu

SEQ ID NO: 318200 - RNA, 12 nt, Human herpesvirus 5
caagcaugccac

SEQ ID NO: 318201 - RNA, 14 nt, Human herpesvirus 5
caagcgcaacaucg

SEQ ID NO: 318202 - RNA, 16 nt, Human herpesvirus 5
caagcuguggcugcac

SEQ ID NO: 318203 - RNA, 20 nt, Human herpesvirus 5
caagggucacggugccaugg

SEQ ID NO: 318204 - RNA, 17 nt, Human herpesvirus 5
caagguacggacucuaa

SEQ ID NO: 318205 - RNA, 17 nt, Human herpesvirus 5
caagguagucaacauaa

SEQ ID NO: 318206 - RNA, 22 nt, Human herpesvirus 5
caaggucaacuacagcaaugac

SEQ ID NO: 318207 - RNA, 15 nt, Human herpesvirus 5
caaggucguucuccu

SEQ ID NO: 318208 - RNA, 12 nt, Human herpesvirus 5
caaggugcugca

SEQ ID NO: 318209 - RNA, 18 nt, Human herpesvirus 5
caagguucuccaucagga

SEQ ID NO: 318210 - RNA, 19 nt, Human herpesvirus 5
caaguacggagauguggug

SEQ ID NO: 318211 - RNA, 21 nt, Human herpesvirus 5
caagucguuucagcccaagac

SEQ ID NO: 318212 - RNA, 17 nt, Human herpesvirus 5
caagugcaagcgccgcg

SEQ ID NO: 318213 - RNA, 14 nt, Human herpesvirus 5
caaguugguggugg

SEQ ID NO: 318214 - RNA, 22 nt, Human herpesvirus 5
caaguuggugguggaaugcggu

SEQ ID NO: 318215 - RNA, 14 nt, Human herpesvirus 5
gucgcccagaaaga

SEQ ID NO: 318216 - RNA, 13 nt, Human herpesvirus 5
gucgccgauguga

SEQ ID NO: 318217 - RNA, 14 nt, Human herpesvirus 5
gucgcgcacccggc

SEQ ID NO: 318218 - RNA, 18 nt, Human herpesvirus 5
gucggagccccugcgcgc

SEQ ID NO: 318219 - RNA, 17 nt, Human herpesvirus 5
gucggccugggcugcug

SEQ ID NO: 318220 - RNA, 22 nt, Human herpesvirus 5
gucggcgugaaugggcacgccg

SEQ ID NO: 318221 - RNA, 19 nt, Human herpesvirus 5
gucgucaugaacuucauca

SEQ ID NO: 318222 - RNA, 15 nt, Human herpesvirus 5
gucgucgacaugucg

SEQ ID NO: 318223 - RNA, 16 nt, Human herpesvirus 5
gucgugagcagcgugc

SEQ ID NO: 318224 - RNA, 14 nt, Human herpesvirus 5
gucguggugacuga

SEQ ID NO: 318225 - RNA, 15 nt, Human herpesvirus 5
gucguguccgugauc

SEQ ID NO: 318226 - RNA, 22 nt, Human herpesvirus 5
gucguuguguucuuacuccguc

SEQ ID NO: 318227 - RNA, 15 nt, Human herpesvirus 5
gucuacgaccaaagc

SEQ ID NO: 318228 - RNA, 22 nt, Human herpesvirus 5
gucuagacaggguaacagccuu

SEQ ID NO: 318229 - RNA, 15 nt, Human herpesvirus 5
gucuaucacgggcuc

SEQ ID NO: 318230 - RNA, 22 nt, Human herpesvirus 5
gucucacccgaguccuggucuu

SEQ ID NO: 318231 - RNA, 12 nt, Human herpesvirus 5
gucucacuguga

SEQ ID NO: 318232 - RNA, 16 nt, Human herpesvirus 5
gucuccaagucuggug

SEQ ID NO: 318233 - RNA, 13 nt, Human herpesvirus 5
gucuccaccacag

SEQ ID NO: 318234 - RNA, 13 nt, Human herpesvirus 5
gucucccucugcu

SEQ ID NO: 318235 - RNA, 12 nt, Human herpesvirus 5
gucucuggucuc

SEQ ID NO: 318236 - RNA, 18 nt, Human herpesvirus 5
gucugacaguucacgggg

SEQ ID NO: 318237 - RNA, 17 nt, Human herpesvirus 5
gucugacgcugcuccua

SEQ ID NO: 318238 - RNA, 21 nt, Human herpesvirus 5
gucugccgcgguacgcacguc

SEQ ID NO: 318239 - RNA, 20 nt, Human herpesvirus 5
gucugcguguguguuucuua

SEQ ID NO: 318240 - RNA, 12 nt, Human herpesvirus 5
gucugggugcug

SEQ ID NO: 318241 - RNA, 12 nt, Human herpesvirus 5
uaacaacacauc

SEQ ID NO: 318242 - RNA, 11 nt, Human herpesvirus 5
uaacaaccuau

SEQ ID NO: 318243 - RNA, 18 nt, Human herpesvirus 5
uaacaaccuaugauauaa

SEQ ID NO: 318244 - RNA, 14 nt, Human herpesvirus 5
uaacaagucacuau

SEQ ID NO: 318245 - RNA, 14 nt, Human herpesvirus 5
uaacaauauugcuu

SEQ ID NO: 318246 - RNA, 18 nt, Human herpesvirus 5
uaacaauuuuucuuuuuc

SEQ ID NO: 318247 - RNA, 16 nt, Human herpesvirus 5
uaacaccgucaccacu

SEQ ID NO: 318248 - RNA, 12 nt, Human herpesvirus 5
uaacacuacagc

SEQ ID NO: 318249 - RNA, 17 nt, Human herpesvirus 5
uaacacuagccaucaca

SEQ ID NO: 318250 - RNA, 14 nt, Human herpesvirus 5
uaacacuccucucc

SEQ ID NO: 318251 - RNA, 13 nt, Human herpesvirus 5
uaacagccuuccc

SEQ ID NO: 318252 - RNA, 18 nt, Human herpesvirus 5
uaacagccuucccuugua

SEQ ID NO: 318253 - RNA, 15 nt, Human herpesvirus 5
uaacagugugguuuu

SEQ ID NO: 318254 - RNA, 21 nt, Human herpesvirus 5
uaacaucauaaaaaccauuga

SEQ ID NO: 318255 - RNA, 18 nt, Human herpesvirus 5
uaacauuccccugggaau

SEQ ID NO: 318256 - RNA, 22 nt, Human herpesvirus 5
uaaccguguccgcucaacuuuc

SEQ ID NO: 318257 - RNA, 12 nt, Human herpesvirus 5
uaaccuaccugg

SEQ ID NO: 318258 - RNA, 15 nt, Human herpesvirus 5
uaaccuacguccgug

SEQ ID NO: 318259 - RNA, 16 nt, Human herpesvirus 5
uaacgacgccagugau

SEQ ID NO: 318260 - RNA, 15 nt, Human herpesvirus 5
uaacgccacggugcu

SEQ ID NO: 318261 - RNA, 15 nt, Human herpesvirus 5
uaacgcgcugcugcu

SEQ ID NO: 318262 - RNA, 14 nt, Human herpesvirus 5
uaacguguggugag

SEQ ID NO: 318263 - RNA, 18 nt, Human herpesvirus 5
uaacguuaggaaccagug

SEQ ID NO: 318264 - RNA, 19 nt, Human herpesvirus 5
uaagacagccuuacagcuu

SEQ ID NO: 318265 - RNA, 18 nt, Human herpesvirus 5
uaagaggauacaucauca

SEQ ID NO: 318266 - RNA, 14 nt, Human herpesvirus 5
uaagcaccgugaua

SEQ ID NO: 318267 - RNA, 22 nt, Human herpesvirus 5
uaagcguccucgaagucuucau

SEQ ID NO: 318268 - RNA, 19 nt, Human herpesvirus 5
uaagcugucagccucucac

SEQ ID NO: 318269 - RNA, 21 nt, Human herpesvirus 5
uaaggucccgcuuuucuacuc

SEQ ID NO: 318270 - RNA, 11 nt, Human herpesvirus 5
uaagguuuaca

SEQ ID NO: 318271 - RNA, 13 nt, Human herpesvirus 5
uaaguaccucuaa

SEQ ID NO: 318272 - RNA, 13 nt, Human herpesvirus 5
uaaguccaacauc

SEQ ID NO: 318273 - RNA, 14 nt, Human herpesvirus 5
uaagugacguggau

SEQ ID NO: 318274 - RNA, 20 nt, Human herpesvirus 5
uaauaaaacgccaugaugac

SEQ ID NO: 318275 - RNA, 21 nt, Human herpesvirus 5
uaauaagccggcagcugcuuu

SEQ ID NO: 318276 - RNA, 20 nt, Human herpesvirus 5
uaauacagauacgcaaugca

SEQ ID NO: 318277 - RNA, 16 nt, Human herpesvirus 5
uaauauacacacggag

SEQ ID NO: 318278 - RNA, 18 nt, Human herpesvirus 5
uaauauauccaauacggc

SEQ ID NO: 318279 - RNA, 21 nt, Human herpesvirus 5
uaauauguggucgcguguggu

SEQ ID NO: 318280 - RNA, 14 nt, Human herpesvirus 5
uaaucaccaaagau

SEQ ID NO: 318281 - RNA, 20 nt, Human herpesvirus 5
uaaucccuguaauuauucca

SEQ ID NO: 318282 - RNA, 15 nt, Human herpesvirus 5
uaaucuccugagaca

SEQ ID NO: 318283 - RNA, 18 nt, Human herpesvirus 5
uaauggaaaguaucguca

SEQ ID NO: 318284 - RNA, 13 nt, Human herpesvirus 5
uaauguaccaaga

SEQ ID NO: 318285 - RNA, 22 nt, Human herpesvirus 5
uaauuauugccauaauucucau

SEQ ID NO: 318286 - RNA, 18 nt, Human herpesvirus 5
uaauuuaacaagucacua

SEQ ID NO: 318287 - RNA, 13 nt, Human herpesvirus 5
uacaaaccucuac

SEQ ID NO: 318288 - RNA, 19 nt, Human herpesvirus 5
uacaaaugaggcacaugau

SEQ ID NO: 318289 - RNA, 22 nt, Human herpesvirus 5
uacaaaugaggcacaugaugca

SEQ ID NO: 318290 - RNA, 16 nt, Human herpesvirus 5
uacaacacuacccuca

SEQ ID NO: 318291 - RNA, 21 nt, Human herpesvirus 5
uacaacaguuaucagcaauaa

SEQ ID NO: 318292 - RNA, 14 nt, Human herpesvirus 5
uacaagaaccacgu

SEQ ID NO: 318293 - RNA, 14 nt, Human herpesvirus 5
uacaaugugcugca

SEQ ID NO: 318294 - RNA, 15 nt, Human herpesvirus 5
uacaaugugcugcau

SEQ ID NO: 318295 - RNA, 18 nt, Human herpesvirus 5
uacaaugugcugcaugag

SEQ ID NO: 318296 - RNA, 13 nt, Human herpesvirus 5
uacacaacagcug

SEQ ID NO: 318297 - RNA, 14 nt, Human herpesvirus 5
uacacaacagcugu

SEQ ID NO: 318298 - RNA, 14 nt, Human herpesvirus 5
uacacauuacuaca

SEQ ID NO: 318299 - RNA, 20 nt, Human herpesvirus 5
uacaccaguucguagaucac

SEQ ID NO: 318300 - RNA, 22 nt, Human herpesvirus 5
uacaccaguucguagaucacac

SEQ ID NO: 318301 - RNA, 19 nt, Human herpesvirus 5
uacagauccaguuucacca

SEQ ID NO: 318302 - RNA, 20 nt, Human herpesvirus 5
uacagauccaguuucaccaa

SEQ ID NO: 318303 - RNA, 13 nt, Human herpesvirus 5
uacagcaaugaca

SEQ ID NO: 318304 - RNA, 15 nt, Human herpesvirus 5
uacagcccggcggug

SEQ ID NO: 318305 - RNA, 15 nt, Human herpesvirus 5
uacagcgacucucaa

SEQ ID NO: 318306 - RNA, 17 nt, Human herpesvirus 5
uacagcuucuuucucac

SEQ ID NO: 318307 - RNA, 23 nt, Human herpesvirus 5
uacagguauuccgaaaccuguau

SEQ ID NO: 318308 - RNA, 14 nt, Human herpesvirus 5
uacaguacaacagu

SEQ ID NO: 318309 - RNA, 22 nt, Human herpesvirus 5
uacagucccgagaaaacggcug

SEQ ID NO: 318310 - RNA, 23 nt, Human herpesvirus 5
uacaguugauaacaaacaaugac

SEQ ID NO: 318311 - RNA, 14 nt, Human herpesvirus 5
uacauaaaaccacc

SEQ ID NO: 318312 - RNA, 22 nt, Human herpesvirus 5
uacauaaaaccaccguaccugc

SEQ ID NO: 318313 - RNA, 16 nt, Human herpesvirus 5
uacauauacgugauua

SEQ ID NO: 318314 - RNA, 20 nt, Human herpesvirus 5
uacauaugcgaugugcaaug

SEQ ID NO: 318315 - RNA, 20 nt, Human herpesvirus 5
uacaugaugaaugucaucau

SEQ ID NO: 318316 - RNA, 23 nt, Human herpesvirus 5
uacaugaugaaugucaucaucac

SEQ ID NO: 318317 - RNA, 24 nt, Human herpesvirus 5
uacaugggggggaacaucguccag

SEQ ID NO: 318318 - RNA, 21 nt, Human herpesvirus 5
uacauucgccgcaaugggcuu

SEQ ID NO: 318319 - RNA, 22 nt, Human herpesvirus 5
uacauuuaucaauacaaugaca

SEQ ID NO: 318320 - RNA, 16 nt, Human herpesvirus 5
uaccaacgcuuccugc

SEQ ID NO: 318321 - RNA, 13 nt, Human herpesvirus 5
uaccaauacugca

SEQ ID NO: 318322 - RNA, 22 nt, Human herpesvirus 5
uaccaauacugcauccaucaca

SEQ ID NO: 318323 - RNA, 21 nt, Human herpesvirus 5
uaccacaaccaucgguacgaa

SEQ ID NO: 318324 - RNA, 17 nt, Human herpesvirus 5
uaccaucauugcugcua

SEQ ID NO: 318325 - RNA, 23 nt, Human herpesvirus 5
uaccaucauugcugcuacggaau

SEQ ID NO: 318326 - RNA, 20 nt, Human herpesvirus 5
uaccauccuuuucaugcuca

SEQ ID NO: 318327 - RNA, 14 nt, Human herpesvirus 5
uaccaucuccgucg

SEQ ID NO: 318328 - RNA, 16 nt, Human herpesvirus 5
uaccaucugauccagu

SEQ ID NO: 318329 - RNA, 13 nt, Human herpesvirus 5
uacccccguguau

SEQ ID NO: 318330 - RNA, 23 nt, Human herpesvirus 5
uaccccuaucgcguguguucuau

SEQ ID NO: 318331 - RNA, 20 nt, Human herpesvirus 5
uacccugguauccaacuuca

SEQ ID NO: 318332 - RNA, 17 nt, Human herpesvirus 5
uaccgccccaccgccgu

SEQ ID NO: 318333 - RNA, 16 nt, Human herpesvirus 5
uaccuacggaccgcag

SEQ ID NO: 318334 - RNA, 15 nt, Human herpesvirus 5
ggcaugcugucgggu

SEQ ID NO: 318335 - RNA, 17 nt, Human herpesvirus 5
ggcauuccgcacaacug

SEQ ID NO: 318336 - RNA, 18 nt, Human herpesvirus 5
ggccaacagccuguggca

SEQ ID NO: 318337 - RNA, 24 nt, Human herpesvirus 5
ggcccgagcgguugccgugacgca

SEQ ID NO: 318338 - RNA, 17 nt, Human herpesvirus 5
ggcccugcuguacaaca

SEQ ID NO: 318339 - RNA, 20 nt, Human herpesvirus 5
ggccgagacggcgugacaca

SEQ ID NO: 318340 - RNA, 15 nt, Human herpesvirus 5
ggccgcaacuucuac

SEQ ID NO: 318341 - RNA, 14 nt, Human herpesvirus 5
ggccggcugcugca

SEQ ID NO: 318342 - RNA, 16 nt, Human herpesvirus 5
ggccucugggcugaga

SEQ ID NO: 318343 - RNA, 19 nt, Human herpesvirus 5
ggccuguggauagauuucu

SEQ ID NO: 318344 - RNA, 18 nt, Human herpesvirus 5
ggcgacugacgccggcau

SEQ ID NO: 318345 - RNA, 23 nt, Human herpesvirus 5
ggcgacuuuuucugcaaagucaa

SEQ ID NO: 318346 - RNA, 13 nt, Human herpesvirus 5
ggcgauaugggcu

SEQ ID NO: 318347 - RNA, 23 nt, Human herpesvirus 5
ggcgccgcgguggucgaugcuga

SEQ ID NO: 318348 - RNA, 19 nt, Human herpesvirus 5
ggcgccgucagagcaucaa

SEQ ID NO: 318349 - RNA, 20 nt, Human herpesvirus 5
ggcgcguagaaggcaaccag

SEQ ID NO: 318350 - RNA, 16 nt, Human herpesvirus 5
ggcggacggaggaguc

SEQ ID NO: 318351 - RNA, 17 nt, Human herpesvirus 5
ggcggccauggagcugc

SEQ ID NO: 318352 - RNA, 16 nt, Human herpesvirus 5
ggcggcuuauguuucu

SEQ ID NO: 318353 - RNA, 18 nt, Human herpesvirus 5
ggcgguauuguugagaac

SEQ ID NO: 318354 - RNA, 18 nt, Human herpesvirus 5
ggcgguggugacugggga

SEQ ID NO: 318355 - RNA, 20 nt, Human herpesvirus 5
ggcgucgucgacgcaucugu

SEQ ID NO: 318356 - RNA, 14 nt, Human herpesvirus 5
ggcguggacuggga

SEQ ID NO: 318357 - RNA, 14 nt, Human herpesvirus 5
ggcguugucuuucu

SEQ ID NO: 318358 - RNA, 14 nt, Human herpesvirus 5
ggcuaccaugcgca

SEQ ID NO: 318359 - RNA, 20 nt, Human herpesvirus 5
ggcuaccaugcgcaacaggu

SEQ ID NO: 318360 - RNA, 14 nt, Human herpesvirus 5
ggcuacgguggugu

SEQ ID NO: 318361 - RNA, 12 nt, Human herpesvirus 5
ggcuauaugcau

SEQ ID NO: 318362 - RNA, 20 nt, Human herpesvirus 5
ggcucaccacgcagcaggcu

SEQ ID NO: 318363 - RNA, 17 nt, Human herpesvirus 5
ggcucacgucacuacuc

SEQ ID NO: 318364 - RNA, 19 nt, Human herpesvirus 5
ggcucacgucacuacucug

SEQ ID NO: 318365 - RNA, 13 nt, Human herpesvirus 5
ggcucagcuugau

SEQ ID NO: 318366 - RNA, 18 nt, Human herpesvirus 5
ggcucccagagcugcuag

SEQ ID NO: 318367 - RNA, 21 nt, Human herpesvirus 5
ggcucgccuuccccgaugugc

SEQ ID NO: 318368 - RNA, 19 nt, Human herpesvirus 5
ggcucgucgugggcuacuu

SEQ ID NO: 318369 - RNA, 20 nt, Human herpesvirus 5
ggcucucggaucugcggcuc

SEQ ID NO: 318370 - RNA, 12 nt, Human herpesvirus 5
ggcugaucugca

SEQ ID NO: 318371 - RNA, 11 nt, Human herpesvirus 5
ggcugcucaac

SEQ ID NO: 318372 - RNA, 19 nt, Human herpesvirus 5
ggcuggaauacguggcggu

SEQ ID NO: 318373 - RNA, 16 nt, Human herpesvirus 5
ggcuggaggacuuuuu

SEQ ID NO: 318374 - RNA, 20 nt, Human herpesvirus 5
ggcuuuccggccaacaugcc

SEQ ID NO: 318375 - RNA, 17 nt, Human herpesvirus 5
gggaaaacauaagaaua

SEQ ID NO: 318376 - RNA, 20 nt, Human herpesvirus 5
gggaaaaggaauagcaagaa

SEQ ID NO: 318377 - RNA, 21 nt, Human herpesvirus 5
gggaaguacaauaucaaagaa

SEQ ID NO: 318378 - RNA, 23 nt, Human herpesvirus 5
gggacucuggugcuauggcugcu

SEQ ID NO: 318379 - RNA, 18 nt, Human herpesvirus 5
gggagucaacacuaccaa

SEQ ID NO: 318380 - RNA, 21 nt, Human herpesvirus 5
gggaucuaccagcccagggau

SEQ ID NO: 318381 - RNA, 17 nt, Human herpesvirus 5
gggauggggagacguga

SEQ ID NO: 318382 - RNA, 18 nt, Human herpesvirus 5
gggauuuucgaugauaca

SEQ ID NO: 318383 - RNA, 20 nt, Human herpesvirus 5
gggcaaucaaugcgucugca

SEQ ID NO: 318384 - RNA, 16 nt, Human herpesvirus 5
gggcaccuguauacug

SEQ ID NO: 318385 - RNA, 16 nt, Human herpesvirus 5
gggccaccagccgcga

SEQ ID NO: 318386 - RNA, 13 nt, Human herpesvirus 5
gggcccugcugac

SEQ ID NO: 318387 - RNA, 20 nt, Human herpesvirus 5
gggccgccaauuggcggcga

SEQ ID NO: 318388 - RNA, 14 nt, Human herpesvirus 5
gggccuacaccagu

SEQ ID NO: 318389 - RNA, 16 nt, Human herpesvirus 5
gggcgacagcacguua

SEQ ID NO: 318390 - RNA, 20 nt, Human herpesvirus 5
gggcgcgccggcgccagugg

SEQ ID NO: 318391 - RNA, 22 nt, Human herpesvirus 5
gggggcgcaaacacacacaaaa

SEQ ID NO: 318392 - RNA, 19 nt, Human herpesvirus 5
ggggucaaaagccugggua

SEQ ID NO: 318393 - RNA, 22 nt, Human herpesvirus 5
gggguuuuuugcguauuccccc

SEQ ID NO: 318394 - RNA, 16 nt, Human herpesvirus 5
gggugguagaacugag

SEQ ID NO: 318395 - RNA, 17 nt, Human herpesvirus 5
ggguguccuacaaagga

SEQ ID NO: 318396 - RNA, 23 nt, Human herpesvirus 5
gguaaaaccacgucaauaaagac

SEQ ID NO: 318397 - RNA, 16 nt, Human herpesvirus 5
gguaaaggaacaaccc

SEQ ID NO: 318398 - RNA, 15 nt, Human herpesvirus 5
gguacaaaccucuac

SEQ ID NO: 318399 - RNA, 12 nt, Human herpesvirus 5
gguacaugugca

SEQ ID NO: 318400 - RNA, 20 nt, Human herpesvirus 5
gguaccugaaaccuaccugg

SEQ ID NO: 318401 - RNA, 14 nt, Human herpesvirus 5
gguacuuacgucac

SEQ ID NO: 318402 - RNA, 23 nt, Human herpesvirus 5
gguacuuagucaguuuuuuucca

SEQ ID NO: 318403 - RNA, 15 nt, Human herpesvirus 5
gguacuucaguauga

SEQ ID NO: 318404 - RNA, 13 nt, Human herpesvirus 5
gguagaagagcac

SEQ ID NO: 318405 - RNA, 14 nt, Human herpesvirus 5
gguagaaugcugcu

SEQ ID NO: 318406 - RNA, 17 nt, Human herpesvirus 5
gguagaugagcagcaaa

SEQ ID NO: 318407 - RNA, 18 nt, Human herpesvirus 5
gguagaugagcagcaaaa

SEQ ID NO: 318408 - RNA, 19 nt, Human herpesvirus 5
gguagaugagcagcaaaac

SEQ ID NO: 318409 - RNA, 14 nt, Human herpesvirus 5
gguauaaagauuca

SEQ ID NO: 318410 - RNA, 20 nt, Human herpesvirus 5
gguauauucaaucauuacua

SEQ ID NO: 318411 - RNA, 16 nt, Human herpesvirus 5
gguccgcggugucucc

SEQ ID NO: 318412 - RNA, 14 nt, Human herpesvirus 5
gguccggcaccguu

SEQ ID NO: 318413 - RNA, 14 nt, Human herpesvirus 5
ggucggcgugucca

SEQ ID NO: 318414 - RNA, 22 nt, Human herpesvirus 5
ggucggugucucgucggugaga

SEQ ID NO: 318415 - RNA, 17 nt, Human herpesvirus 5
ggucguagugcggcgug

SEQ ID NO: 318416 - RNA, 18 nt, Human herpesvirus 5
ggucguggcucagcuuga

SEQ ID NO: 318417 - RNA, 22 nt, Human herpesvirus 5
ggucuccauggccgaguaccgc

SEQ ID NO: 318418 - RNA, 12 nt, Human herpesvirus 5
ggucugcgcugc

SEQ ID NO: 318419 - RNA, 13 nt, Human herpesvirus 5
ggugacuaugugu

SEQ ID NO: 318420 - RNA, 17 nt, Human herpesvirus 5
ggugauuuauucuugcu

SEQ ID NO: 318421 - RNA, 21 nt, Human herpesvirus 5
ggugcaugacucguugggauu

SEQ ID NO: 318422 - RNA, 13 nt, Human herpesvirus 5
gguggaaaccaga

SEQ ID NO: 318423 - RNA, 14 nt, Human herpesvirus 5
gguggaagaacaga

SEQ ID NO: 318424 - RNA, 16 nt, Human herpesvirus 5
gguggccaacaccggg

SEQ ID NO: 318425 - RNA, 20 nt, Human herpesvirus 5
ggugguacugcugugguguu

SEQ ID NO: 318426 - RNA, 15 nt, Human herpesvirus 5
gguggugacugggga

SEQ ID NO: 318427 - RNA, 16 nt, Human herpesvirus 5
gguguccuacaaagga

SEQ ID NO: 318428 - RNA, 15 nt, Human herpesvirus 5
gguguuagacauggg

SEQ ID NO: 318429 - RNA, 16 nt, Human herpesvirus 5
gguuaccccucgcugg

SEQ ID NO: 318430 - RNA, 19 nt, Human herpesvirus 5
gguuaccggucacuggacu

SEQ ID NO: 318431 - RNA, 13 nt, Human herpesvirus 5
gguucccacagga

SEQ ID NO: 318432 - RNA, 17 nt, Human herpesvirus 5
gguuggacuccugugua

SEQ ID NO: 318433 - RNA, 18 nt, Human herpesvirus 5
gguuguuccggcggcgug

SEQ ID NO: 318434 - RNA, 14 nt, Human herpesvirus 5
gguuugcgucucca

SEQ ID NO: 318435 - RNA, 19 nt, Human herpesvirus 5
guaaaaaaaaaaacaaagc

SEQ ID NO: 318436 - RNA, 22 nt, Human herpesvirus 5
guaaaagggacgucaaagcuca

SEQ ID NO: 318437 - RNA, 12 nt, Human herpesvirus 5
guaaacuuaucc

SEQ ID NO: 318438 - RNA, 16 nt, Human herpesvirus 5
guaacacacggccagc

SEQ ID NO: 318439 - RNA, 21 nt, Human herpesvirus 5
guaaccagcauuugaguauac

SEQ ID NO: 318440 - RNA, 16 nt, Human herpesvirus 5
guaacugauaucgcca

SEQ ID NO: 318441 - RNA, 20 nt, Human herpesvirus 5
guaagcauggcuuacauuua

SEQ ID NO: 318442 - RNA, 18 nt, Human herpesvirus 5
guaaggagcaaaaccggg

SEQ ID NO: 318443 - RNA, 13 nt, Human herpesvirus 5
guaaucacgcuau

SEQ ID NO: 318444 - RNA, 19 nt, Human herpesvirus 5
guaaugcuuauucuagccc

SEQ ID NO: 318445 - RNA, 14 nt, Human herpesvirus 5
guaauggaaaguau

SEQ ID NO: 318446 - RNA, 22 nt, Human herpesvirus 5
guacaacaguuaucagcaauaa

SEQ ID NO: 318447 - RNA, 13 nt, Human herpesvirus 5
guacacagccaag

SEQ ID NO: 318448 - RNA, 19 nt, Human herpesvirus 5
guacacgcaggcaagccaa

SEQ ID NO: 318449 - RNA, 19 nt, Human herpesvirus 5
gaauuguuaccagaacucu

SEQ ID NO: 318450 - RNA, 18 nt, Human herpesvirus 5
gacaaaaaguacacuggu

SEQ ID NO: 318451 - RNA, 19 nt, Human herpesvirus 5
gacaacaaugacacgucuu

SEQ ID NO: 318452 - RNA, 14 nt, Human herpesvirus 5
gacaaccggagcag

SEQ ID NO: 318453 - RNA, 15 nt, Human herpesvirus 5
gacaaccugcugcac

SEQ ID NO: 318454 - RNA, 22 nt, Human herpesvirus 5
gacaacggccgccgcagccacg

SEQ ID NO: 318455 - RNA, 20 nt, Human herpesvirus 5
gacaacggcuggaaauggac

SEQ ID NO: 318456 - RNA, 16 nt, Human herpesvirus 5
gacaaguucgaucuca

SEQ ID NO: 318457 - RNA, 16 nt, Human herpesvirus 5
gacacagagacuugug

SEQ ID NO: 318458 - RNA, 12 nt, Human herpesvirus 5
gacacagcagca

SEQ ID NO: 318459 - RNA, 15 nt, Human herpesvirus 5
gacacagcuccugaa

SEQ ID NO: 318460 - RNA, 21 nt, Human herpesvirus 5
gacacagcuccugaaugagcu

SEQ ID NO: 318461 - RNA, 13 nt, Human herpesvirus 5
gacacaugcacaa

SEQ ID NO: 318462 - RNA, 15 nt, Human herpesvirus 5
gacacaugcacaaua

SEQ ID NO: 318463 - RNA, 21 nt, Human herpesvirus 5
gacacauuucggaagccaugc

SEQ ID NO: 318464 - RNA, 13 nt, Human herpesvirus 5
gacacuaauuuau

SEQ ID NO: 318465 - RNA, 19 nt, Human herpesvirus 5
gacacuaggcguccgcgcc

SEQ ID NO: 318466 - RNA, 17 nt, Human herpesvirus 5
gacacucaguacuuugg

SEQ ID NO: 318467 - RNA, 19 nt, Human herpesvirus 5
gacacucgaagcaacaaua

SEQ ID NO: 318468 - RNA, 18 nt, Human herpesvirus 5
gacacuuuaggcggcgca

SEQ ID NO: 318469 - RNA, 17 nt, Human herpesvirus 5
gacacuuuggcucuuuc

SEQ ID NO: 318470 - RNA, 20 nt, Human herpesvirus 5
gacagacgauaugaggcuau

SEQ ID NO: 318471 - RNA, 18 nt, Human herpesvirus 5
gacagcacguuaguuaca

SEQ ID NO: 318472 - RNA, 17 nt, Human herpesvirus 5
gacagcgcgacgagcgc

SEQ ID NO: 318473 - RNA, 19 nt, Human herpesvirus 5
gacagcgcuggccgaucca

SEQ ID NO: 318474 - RNA, 13 nt, Human herpesvirus 5
gacagcuaccgag

SEQ ID NO: 318475 - RNA, 16 nt, Human herpesvirus 5
gacaggcggccagcuu

SEQ ID NO: 318476 - RNA, 19 nt, Human herpesvirus 5
gacaggcucgucgugggcu

SEQ ID NO: 318477 - RNA, 21 nt, Human herpesvirus 5
gacaguauuaacgugugguga

SEQ ID NO: 318478 - RNA, 23 nt, Human herpesvirus 5
gacaguguauuggcauauagcca

SEQ ID NO: 318479 - RNA, 12 nt, Human herpesvirus 5
gacaguuuccac

SEQ ID NO: 318480 - RNA, 23 nt, Human herpesvirus 5
gacaucgcucgcuuuggagcgcg

SEQ ID NO: 318481 - RNA, 12 nt, Human herpesvirus 5
gacaucucgccg

SEQ ID NO: 318482 - RNA, 17 nt, Human herpesvirus 5
gacauggagcccacgcc

SEQ ID NO: 318483 - RNA, 17 nt, Human herpesvirus 5
gacaugucgcgacaccc

SEQ ID NO: 318484 - RNA, 21 nt, Human herpesvirus 5
gaccaccguuaccaguaccac

SEQ ID NO: 318485 - RNA, 23 nt, Human herpesvirus 5
gaccagcaguaugacgugcgaug

SEQ ID NO: 318486 - RNA, 14 nt, Human herpesvirus 5
gaccagcgccacca

SEQ ID NO: 318487 - RNA, 17 nt, Human herpesvirus 5
gaccauggucggugaca

SEQ ID NO: 318488 - RNA, 19 nt, Human herpesvirus 5
gacccagggcugcuccaac

SEQ ID NO: 318489 - RNA, 15 nt, Human herpesvirus 5
gaccccaagccaaaa

SEQ ID NO: 318490 - RNA, 21 nt, Human herpesvirus 5
gaccccaagccaaaaacagua

SEQ ID NO: 318491 - RNA, 19 nt, Human herpesvirus 5
gaccccgcuacagcaaaga

SEQ ID NO: 318492 - RNA, 17 nt, Human herpesvirus 5
gaccgcaacgugcugcu

SEQ ID NO: 318493 - RNA, 15 nt, Human herpesvirus 5
gaccggcggcugcug

SEQ ID NO: 318494 - RNA, 14 nt, Human herpesvirus 5
gaccguacacgcac

SEQ ID NO: 318495 - RNA, 22 nt, Human herpesvirus 5
gaccucacguugaacuaccacu

SEQ ID NO: 318496 - RNA, 16 nt, Human herpesvirus 5
gaccucuuugagcaca

SEQ ID NO: 318497 - RNA, 22 nt, Human herpesvirus 5
gacgaaacguauccauuggaga

SEQ ID NO: 318498 - RNA, 14 nt, Human herpesvirus 5
gacgaagaggacac

SEQ ID NO: 318499 - RNA, 23 nt, Human herpesvirus 5
gacgaccuacgggacacgcugau

SEQ ID NO: 318500 - RNA, 15 nt, Human herpesvirus 5
gacgacucagggcug

SEQ ID NO: 318501 - RNA, 15 nt, Human herpesvirus 5
gacgacuggcucaac

SEQ ID NO: 318502 - RNA, 17 nt, Human herpesvirus 5
gacgagcguugcgcucg

SEQ ID NO: 318503 - RNA, 18 nt, Human herpesvirus 5
gacgagggucugcgcgac

SEQ ID NO: 318504 - RNA, 16 nt, Human herpesvirus 5
gacgaucccucgccgc

SEQ ID NO: 318505 - RNA, 16 nt, Human herpesvirus 5
gacgaugaaccuuccc

SEQ ID NO: 318506 - RNA, 19 nt, Human herpesvirus 5
gacgauuuuaugcgccgcc

SEQ ID NO: 318507 - RNA, 21 nt, Human herpesvirus 5
gacgcacuuuuuuuacuagua

SEQ ID NO: 318508 - RNA, 21 nt, Human herpesvirus 5
gacgccaaguacgguauucgu

SEQ ID NO: 318509 - RNA, 17 nt, Human herpesvirus 5
gacgccgaggacgccgu

SEQ ID NO: 318510 - RNA, 17 nt, Human herpesvirus 5
gacgccgucuaacaggu

SEQ ID NO: 318511 - RNA, 19 nt, Human herpesvirus 5
gacgccgucuaacagguau

SEQ ID NO: 318512 - RNA, 18 nt, Human herpesvirus 5
gacgcucggccuugcgcu

SEQ ID NO: 318513 - RNA, 22 nt, Human herpesvirus 5
gacgcucguccucucugucuuc

SEQ ID NO: 318514 - RNA, 21 nt, Human herpesvirus 5
gacgcuguugagcucggacac

SEQ ID NO: 318515 - RNA, 14 nt, Human herpesvirus 5
gacggauaucuccg

SEQ ID NO: 318516 - RNA, 22 nt, Human herpesvirus 5
gacggcaacgauagucaucuca

SEQ ID NO: 318517 - RNA, 19 nt, Human herpesvirus 5
gacggcccccuaccugcgc

SEQ ID NO: 318518 - RNA, 21 nt, Human herpesvirus 5
gacggcguguuggacgcugug

SEQ ID NO: 318519 - RNA, 14 nt, Human herpesvirus 5
gacgguacuuaucg

SEQ ID NO: 318520 - RNA, 15 nt, Human herpesvirus 5
gacggugacuaugug

SEQ ID NO: 318521 - RNA, 17 nt, Human herpesvirus 5
gacgguuuccacgccac

SEQ ID NO: 318522 - RNA, 21 nt, Human herpesvirus 5
gacguacauauacgugauuau

SEQ ID NO: 318523 - RNA, 23 nt, Human herpesvirus 5
gacguaggcaaacugaccaagcu

SEQ ID NO: 318524 - RNA, 17 nt, Human herpesvirus 5
gacgucaaagcucacua

SEQ ID NO: 318525 - RNA, 14 nt, Human herpesvirus 5
gacgucaacaucau

SEQ ID NO: 318526 - RNA, 21 nt, Human herpesvirus 5
gacgugagcucccaucuucua

SEQ ID NO: 318527 - RNA, 20 nt, Human herpesvirus 5
gacgugcaagacuacaugcu

SEQ ID NO: 318528 - RNA, 16 nt, Human herpesvirus 5
gacgugcgaccuggac

SEQ ID NO: 318529 - RNA, 20 nt, Human herpesvirus 5
gacguuaucgaugcugcaag

SEQ ID NO: 318530 - RNA, 12 nt, Human herpesvirus 5
gacuaacccugg

SEQ ID NO: 318531 - RNA, 20 nt, Human herpesvirus 5
gacuaacccugggcuauaug

SEQ ID NO: 318532 - RNA, 20 nt, Human herpesvirus 5
gacuacaugcuauaagacag

SEQ ID NO: 318533 - RNA, 21 nt, Human herpesvirus 5
gacucgcugucgagacggcuc

SEQ ID NO: 318534 - RNA, 18 nt, Human herpesvirus 5
gacugaauauacagacuu

SEQ ID NO: 318535 - RNA, 13 nt, Human herpesvirus 5
gacugacacagcu

SEQ ID NO: 318536 - RNA, 20 nt, Human herpesvirus 5
gacuggcgucguguaaucca

SEQ ID NO: 318537 - RNA, 19 nt, Human herpesvirus 5
gacuguucgucgagcaccc

SEQ ID NO: 318538 - RNA, 16 nt, Human herpesvirus 5
gagaaaagggacagaa

SEQ ID NO: 318539 - RNA, 16 nt, Human herpesvirus 5
gagaacaauaaagcgu

SEQ ID NO: 318540 - RNA, 21 nt, Human herpesvirus 5
gagaacuuuguagugcgcgcc

SEQ ID NO: 318541 - RNA, 14 nt, Human herpesvirus 5
gagaauuagagcau

SEQ ID NO: 318542 - RNA, 16 nt, Human herpesvirus 5
gagaauuagagcauua

SEQ ID NO: 318543 - RNA, 18 nt, Human herpesvirus 5
gagaauuagagcauuaag

SEQ ID NO: 318544 - RNA, 17 nt, Human herpesvirus 5
gagacacagucuaccua

SEQ ID NO: 318545 - RNA, 18 nt, Human herpesvirus 5
gagacauggacucuugua

SEQ ID NO: 318546 - RNA, 18 nt, Human herpesvirus 5
gagaccacgguuugggaa

SEQ ID NO: 318547 - RNA, 20 nt, Human herpesvirus 5
gagaccgucgccaccaugca

SEQ ID NO: 318548 - RNA, 16 nt, Human herpesvirus 5
gagacgucgauaucaa

SEQ ID NO: 318549 - RNA, 23 nt, Human herpesvirus 5
gagacuaucuacaacacuacccu

SEQ ID NO: 318550 - RNA, 11 nt, Human herpesvirus 5
gagagaaccua

SEQ ID NO: 318551 - RNA, 17 nt, Human herpesvirus 5
gagagauuaaacauuug

SEQ ID NO: 318552 - RNA, 17 nt, Human herpesvirus 5
gagagggaagcccuaaa

SEQ ID NO: 318553 - RNA, 14 nt, Human herpesvirus 5
gagauggcgauauu

SEQ ID NO: 318554 - RNA, 15 nt, Human herpesvirus 5
gagauucuaaagcca

SEQ ID NO: 318555 - RNA, 19 nt, Human herpesvirus 5
gagcacaaaaauacugaca

SEQ ID NO: 318556 - RNA, 17 nt, Human herpesvirus 5
gagcaggguaaaaacca

SEQ ID NO: 318557 - RNA, 18 nt, Human herpesvirus 5
gagcaggguaaaaaccac

SEQ ID NO: 318558 - RNA, 15 nt, Human herpesvirus 5
gagcaggucucgcgc

SEQ ID NO: 318559 - RNA, 18 nt, Human herpesvirus 5
gagcaugacuguuuccaa

SEQ ID NO: 318560 - RNA, 15 nt, Human herpesvirus 5
gagccacucggccau

SEQ ID NO: 318561 - RNA, 12 nt, Human herpesvirus 5
gagccauguuau

SEQ ID NO: 318562 - RNA, 20 nt, Human herpesvirus 5
gagccugaaguaagcauggc

SEQ ID NO: 318563 - RNA, 20 nt, Human herpesvirus 5
gcacaucuauuuuugcuaau

SEQ ID NO: 318564 - RNA, 21 nt, Human herpesvirus 5
gcaccacaagcgccgucacuu

SEQ ID NO: 318565 - RNA, 13 nt, Human herpesvirus 5
gcaccaugugcaa

SEQ ID NO: 318566 - RNA, 14 nt, Human herpesvirus 5
gcaccaugugcaaa

SEQ ID NO: 318567 - RNA, 15 nt, Human herpesvirus 5
gcaccaugugcaaaa

SEQ ID NO: 318568 - RNA, 14 nt, Human herpesvirus 5
gcacccggcugcac

SEQ ID NO: 318569 - RNA, 15 nt, Human herpesvirus 5
gcacccgucauggua

SEQ ID NO: 318570 - RNA, 20 nt, Human herpesvirus 5
gcaccgguuggagcagcucu

SEQ ID NO: 318571 - RNA, 20 nt, Human herpesvirus 5
gcaccuacgacccuccuaaa

SEQ ID NO: 318572 - RNA, 13 nt, Human herpesvirus 5
gcaccuaucuccg

SEQ ID NO: 318573 - RNA, 18 nt, Human herpesvirus 5
gcaccucgaugaagccua

SEQ ID NO: 318574 - RNA, 16 nt, Human herpesvirus 5
gcaccuggguggaacg

SEQ ID NO: 318575 - RNA, 18 nt, Human herpesvirus 5
gcaccuggguggaacgag

SEQ ID NO: 318576 - RNA, 15 nt, Human herpesvirus 5
gcaccuguauacugu

SEQ ID NO: 318577 - RNA, 14 nt, Human herpesvirus 5
gcacgacaucuucc

SEQ ID NO: 318578 - RNA, 14 nt, Human herpesvirus 5
gcacgacuggccag

SEQ ID NO: 318579 - RNA, 22 nt, Human herpesvirus 5
gcacggaaaagcaguggcagca

SEQ ID NO: 318580 - RNA, 22 nt, Human herpesvirus 5
gcacggaccgcaacgugcugcu

SEQ ID NO: 318581 - RNA, 18 nt, Human herpesvirus 5
gcacggccuguggugcga

SEQ ID NO: 318582 - RNA, 18 nt, Human herpesvirus 5
gcacgggcucgggugacg

SEQ ID NO: 318583 - RNA, 13 nt, Human herpesvirus 5
gcacgggcugcug

SEQ ID NO: 318584 - RNA, 19 nt, Human herpesvirus 5
gcacgucgcugauccgcag

SEQ ID NO: 318585 - RNA, 14 nt, Human herpesvirus 5
gcacgugcucuuuu

SEQ ID NO: 318586 - RNA, 16 nt, Human herpesvirus 5
gcacguuuuggaaaac

SEQ ID NO: 318587 - RNA, 12 nt, Human herpesvirus 5
gcacucuugcuc

SEQ ID NO: 318588 - RNA, 21 nt, Human herpesvirus 5
gcacucuugcucguuguaaua

SEQ ID NO: 318589 - RNA, 17 nt, Human herpesvirus 5
gcacuuccuguacacau

SEQ ID NO: 318590 - RNA, 20 nt, Human herpesvirus 5
gcacuuuacauaaaaccacc

SEQ ID NO: 318591 - RNA, 21 nt, Human herpesvirus 5
gcacuuucgaccacaagcuca

SEQ ID NO: 318592 - RNA, 17 nt, Human herpesvirus 5
gcagaagaauguugcga

SEQ ID NO: 318593 - RNA, 19 nt, Human herpesvirus 5
gcagaaguuguugcaacug

SEQ ID NO: 318594 - RNA, 19 nt, Human herpesvirus 5
gcagacaucuuaugaagcu

SEQ ID NO: 318595 - RNA, 17 nt, Human herpesvirus 5
gcagaccaccaugugca

SEQ ID NO: 318596 - RNA, 22 nt, Human herpesvirus 5
gcagaccgugggucgggagcac

SEQ ID NO: 318597 - RNA, 14 nt, Human herpesvirus 5
gcagaccuacagca

SEQ ID NO: 318598 - RNA, 21 nt, Human herpesvirus 5
gcagagccacguugagauuca

SEQ ID NO: 318599 - RNA, 12 nt, Human herpesvirus 5
gcagcacauugu

SEQ ID NO: 318600 - RNA, 22 nt, Human herpesvirus 5
gcagcacgcggcucacguagca

SEQ ID NO: 318601 - RNA, 16 nt, Human herpesvirus 5
gcagcaucuggcgcgg

SEQ ID NO: 318602 - RNA, 19 nt, Human herpesvirus 5
gcagccuccucgcugggau

SEQ ID NO: 318603 - RNA, 19 nt, Human herpesvirus 5
gcagcgacuucgguuccau

SEQ ID NO: 318604 - RNA, 18 nt, Human herpesvirus 5
gcagcgccccucuuaaca

SEQ ID NO: 318605 - RNA, 22 nt, Human herpesvirus 5
gcagcggucgcaggacgggaua

SEQ ID NO: 318606 - RNA, 14 nt, Human herpesvirus 5
gcagcucuuuucca

SEQ ID NO: 318607 - RNA, 16 nt, Human herpesvirus 5
gcaggccgcgcaggcc

SEQ ID NO: 318608 - RNA, 19 nt, Human herpesvirus 5
gcaggcuuugacggugaug

SEQ ID NO: 318609 - RNA, 15 nt, Human herpesvirus 5
gcaggguaaaaacca

SEQ ID NO: 318610 - RNA, 17 nt, Human herpesvirus 5
gcaggguaaaaaccacg

SEQ ID NO: 318611 - RNA, 19 nt, Human herpesvirus 5
gcaggucucgcgcaucgcc

SEQ ID NO: 318612 - RNA, 18 nt, Human herpesvirus 5
gcaguaugacgugcgaug

SEQ ID NO: 318613 - RNA, 23 nt, Human herpesvirus 5
gcagucagacccacuaccuggag

SEQ ID NO: 318614 - RNA, 13 nt, Human herpesvirus 5
gcaguuacaccac

SEQ ID NO: 318615 - RNA, 15 nt, Human herpesvirus 5
gcauaagaagccaag

SEQ ID NO: 318616 - RNA, 13 nt, Human herpesvirus 5
gcauagugguguu

SEQ ID NO: 318617 - RNA, 12 nt, Human herpesvirus 5
gcauauagccaa

SEQ ID NO: 318618 - RNA, 15 nt, Human herpesvirus 5
gcauauagccaauaa

SEQ ID NO: 318619 - RNA, 16 nt, Human herpesvirus 5
gcaucaucaacagcag

SEQ ID NO: 318620 - RNA, 19 nt, Human herpesvirus 5
gcaucaucaacagcagcaa

SEQ ID NO: 318621 - RNA, 21 nt, Human herpesvirus 5
gcaucauguuccuacacgccu

SEQ ID NO: 318622 - RNA, 12 nt, Human herpesvirus 5
gcauccaucaca

SEQ ID NO: 318623 - RNA, 15 nt, Human herpesvirus 5
gcauccaucacauca

SEQ ID NO: 318624 - RNA, 16 nt, Human herpesvirus 5
gcauccaucacaucac

SEQ ID NO: 318625 - RNA, 17 nt, Human herpesvirus 5
gcauccaucacaucacc

SEQ ID NO: 318626 - RNA, 17 nt, Human herpesvirus 5
gcaucuucgagugccag

SEQ ID NO: 318627 - RNA, 20 nt, Human herpesvirus 5
gcaucuucgccaagaugcug

SEQ ID NO: 318628 - RNA, 16 nt, Human herpesvirus 5
gcaugacuguuuccaa

SEQ ID NO: 318629 - RNA, 22 nt, Human herpesvirus 5
gcaugggcgacaccgccucggu

SEQ ID NO: 318630 - RNA, 20 nt, Human herpesvirus 5
gcauucucuacgaacgguau

SEQ ID NO: 318631 - RNA, 19 nt, Human herpesvirus 5
gccaaaaacaguauagcau

SEQ ID NO: 318632 - RNA, 14 nt, Human herpesvirus 5
gccaacaaugacua

SEQ ID NO: 318633 - RNA, 17 nt, Human herpesvirus 5
gccaacgagacuaucua

SEQ ID NO: 318634 - RNA, 19 nt, Human herpesvirus 5
gccaacggaguuacucgca

SEQ ID NO: 318635 - RNA, 15 nt, Human herpesvirus 5
gccaagaugcugcgg

SEQ ID NO: 318636 - RNA, 16 nt, Human herpesvirus 5
gccaaucgcaccuuau

SEQ ID NO: 318637 - RNA, 23 nt, Human herpesvirus 5
gccacacacaucugucaccucac

SEQ ID NO: 318638 - RNA, 15 nt, Human herpesvirus 5
gccacaggcggcgca

SEQ ID NO: 318639 - RNA, 17 nt, Human herpesvirus 5
gccaccaccgguaccac

SEQ ID NO: 318640 - RNA, 16 nt, Human herpesvirus 5
gccaccaggugccggc

SEQ ID NO: 318641 - RNA, 16 nt, Human herpesvirus 5
gccaccauagccacua

SEQ ID NO: 318642 - RNA, 14 nt, Human herpesvirus 5
gccacccacccggu

SEQ ID NO: 318643 - RNA, 15 nt, Human herpesvirus 5
gccaccgacacagca

SEQ ID NO: 318644 - RNA, 14 nt, Human herpesvirus 5
gccaccugcaaagu

SEQ ID NO: 318645 - RNA, 14 nt, Human herpesvirus 5
gccacgacgucucc

SEQ ID NO: 318646 - RNA, 21 nt, Human herpesvirus 5
gccacggugcuuuucaucuau

SEQ ID NO: 318647 - RNA, 20 nt, Human herpesvirus 5
gccacguagccgaugcugau

SEQ ID NO: 318648 - RNA, 21 nt, Human herpesvirus 5
gccacguaggugaguucaaug

SEQ ID NO: 318649 - RNA, 16 nt, Human herpesvirus 5
gccagauacuauacga

SEQ ID NO: 318650 - RNA, 16 nt, Human herpesvirus 5
gccagcugccaccagg

SEQ ID NO: 318651 - RNA, 19 nt, Human herpesvirus 5
gccaggacccguacugcga

SEQ ID NO: 318652 - RNA, 16 nt, Human herpesvirus 5
gccagucgcacuaaua

SEQ ID NO: 318653 - RNA, 14 nt, Human herpesvirus 5
gccauggaccugac

SEQ ID NO: 318654 - RNA, 19 nt, Human herpesvirus 5
gccauggagcugcacucac

SEQ ID NO: 318655 - RNA, 13 nt, Human herpesvirus 5
gccauuccuuuau

SEQ ID NO: 318656 - RNA, 15 nt, Human herpesvirus 5
gccauuuuuccaaaa

SEQ ID NO: 318657 - RNA, 14 nt, Human herpesvirus 5
gcccaaacaucuaa

SEQ ID NO: 318658 - RNA, 19 nt, Human herpesvirus 5
gcccacaguagcgguacca

SEQ ID NO: 318659 - RNA, 19 nt, Human herpesvirus 5
gcccauugagcgagaacua

SEQ ID NO: 318660 - RNA, 19 nt, Human herpesvirus 5
gccccaagcgguacggacu

SEQ ID NO: 318661 - RNA, 15 nt, Human herpesvirus 5
gccccacaugcugcu

SEQ ID NO: 318662 - RNA, 15 nt, Human herpesvirus 5
gccccggcuucauua

SEQ ID NO: 318663 - RNA, 18 nt, Human herpesvirus 5
gcccgaccacgacacggu

SEQ ID NO: 318664 - RNA, 21 nt, Human herpesvirus 5
gcccgaccacgacacggugcu

SEQ ID NO: 318665 - RNA, 16 nt, Human herpesvirus 5
gcccguucuuccgagu

SEQ ID NO: 318666 - RNA, 15 nt, Human herpesvirus 5
gcccuggucuggccc

SEQ ID NO: 318667 - RNA, 23 nt, Human herpesvirus 5
gcccuucuggagcacacugcuac

SEQ ID NO: 318668 - RNA, 18 nt, Human herpesvirus 5
gcccuuuacggugcugcg

SEQ ID NO: 318669 - RNA, 14 nt, Human herpesvirus 5
gccgaagaccucac

SEQ ID NO: 318670 - RNA, 14 nt, Human herpesvirus 5
gccgacaaccugcu

SEQ ID NO: 318671 - RNA, 19 nt, Human herpesvirus 5
gccgacgcgcgcccgcgcc

SEQ ID NO: 318672 - RNA, 17 nt, Human herpesvirus 5
gccgagaccgucgccac

SEQ ID NO: 318673 - RNA, 13 nt, Human herpesvirus 5
gccgagacggcgu

SEQ ID NO: 318674 - RNA, 18 nt, Human herpesvirus 5
gccgaggcuacugcugcu

SEQ ID NO: 318675 - RNA, 13 nt, Human herpesvirus 5
gccgcaagugcuc

SEQ ID NO: 318676 - RNA, 16 nt, Human herpesvirus 5
gccgcaagugcucgac

SEQ ID NO: 318677 - RNA, 15 nt, Human herpesvirus 5
gccgcacaccuguug

SEQ ID NO: 318678 - RNA, 15 nt, Human herpesvirus 5
gcucacgucacuacu

SEQ ID NO: 318679 - RNA, 17 nt, Human herpesvirus 5
gcucacgucacuacucu

SEQ ID NO: 318680 - RNA, 23 nt, Human herpesvirus 5
gcucacuguuugaauaccguaaa

SEQ ID NO: 318681 - RNA, 18 nt, Human herpesvirus 5
gcucacuuuccucgccac

SEQ ID NO: 318682 - RNA, 23 nt, Human herpesvirus 5
gcucauggaggucuaucacgggc

SEQ ID NO: 318683 - RNA, 15 nt, Human herpesvirus 5
gcuccacgcuauaca

SEQ ID NO: 318684 - RNA, 21 nt, Human herpesvirus 5
gcuccaggcggagaugaggac

SEQ ID NO: 318685 - RNA, 17 nt, Human herpesvirus 5
gcucccagagcugcuag

SEQ ID NO: 318686 - RNA, 13 nt, Human herpesvirus 5
gcuccucuuccaa

SEQ ID NO: 318687 - RNA, 17 nt, Human herpesvirus 5
gcucgcucugacgccgc

SEQ ID NO: 318688 - RNA, 19 nt, Human herpesvirus 5
gcucggaccgugacggugg

SEQ ID NO: 318689 - RNA, 19 nt, Human herpesvirus 5
gcucggcggccacggcguc

SEQ ID NO: 318690 - RNA, 23 nt, Human herpesvirus 5
gcucgggugacggcgacaucacg

SEQ ID NO: 318691 - RNA, 22 nt, Human herpesvirus 5
gcucgucgugggcuacuuugac

SEQ ID NO: 318692 - RNA, 14 nt, Human herpesvirus 5
gcucuaaaaacacc

SEQ ID NO: 318693 - RNA, 19 nt, Human herpesvirus 5
gcucucccggauccaaggg

SEQ ID NO: 318694 - RNA, 18 nt, Human herpesvirus 5
gcucucgcggcccuucaa

SEQ ID NO: 318695 - RNA, 17 nt, Human herpesvirus 5
gcugacuucuacggagu

SEQ ID NO: 318696 - RNA, 23 nt, Human herpesvirus 5
gcugagcguguggaggacggggu

SEQ ID NO: 318697 - RNA, 16 nt, Human herpesvirus 5
gcugaucgccgucacu

SEQ ID NO: 318698 - RNA, 21 nt, Human herpesvirus 5
gcugcacguggccuggcccga

SEQ ID NO: 318699 - RNA, 17 nt, Human herpesvirus 5
gcugcacucacgcggcc

SEQ ID NO: 318700 - RNA, 14 nt, Human herpesvirus 5
gcugccaccagggc

SEQ ID NO: 318701 - RNA, 18 nt, Human herpesvirus 5
gcugcggcggcacucgcu

SEQ ID NO: 318702 - RNA, 14 nt, Human herpesvirus 5
gcugcuucauccag

SEQ ID NO: 318703 - RNA, 13 nt, Human herpesvirus 5
gcuggaaagacaa

SEQ ID NO: 318704 - RNA, 14 nt, Human herpesvirus 5
gcuggaaguggaag

SEQ ID NO: 318705 - RNA, 19 nt, Human herpesvirus 5
gcuggacagugagagcuca

SEQ ID NO: 318706 - RNA, 22 nt, Human herpesvirus 5
gcuggacugacacagcuccuga

SEQ ID NO: 318707 - RNA, 15 nt, Human herpesvirus 5
gcuggagcuaucugu

SEQ ID NO: 318708 - RNA, 19 nt, Human herpesvirus 5
gcuggauuacuacuggaua

SEQ ID NO: 318709 - RNA, 15 nt, Human herpesvirus 5
gcuggcacauggcca

SEQ ID NO: 318710 - RNA, 22 nt, Human herpesvirus 5
gcuggcccucgcagugcaucua

SEQ ID NO: 318711 - RNA, 16 nt, Human herpesvirus 5
gcugggauccgccgcc

SEQ ID NO: 318712 - RNA, 15 nt, Human herpesvirus 5
gcugggcgacacuca

SEQ ID NO: 318713 - RNA, 22 nt, Human herpesvirus 5
gcugggcuacaagugcagcgac

SEQ ID NO: 318714 - RNA, 15 nt, Human herpesvirus 5
gcuggggaaguacaa

SEQ ID NO: 318715 - RNA, 12 nt, Human herpesvirus 5
gcuggugucucu

SEQ ID NO: 318716 - RNA, 15 nt, Human herpesvirus 5
gcugugcaacgcgug

SEQ ID NO: 318717 - RNA, 15 nt, Human herpesvirus 5
gcuguggcugcacac

SEQ ID NO: 318718 - RNA, 20 nt, Human herpesvirus 5
gcuguggcugccgcuacuga

SEQ ID NO: 318719 - RNA, 21 nt, Human herpesvirus 5
gcuguggcugccgcuacugau

SEQ ID NO: 318720 - RNA, 15 nt, Human herpesvirus 5
gcuguucuggaugua

SEQ ID NO: 318721 - RNA, 18 nt, Human herpesvirus 5
gcuguuguugacgcugcu

SEQ ID NO: 318722 - RNA, 13 nt, Human herpesvirus 5
gcuuaagcagaaa

SEQ ID NO: 318723 - RNA, 23 nt, Human herpesvirus 5
gcuuagacauuccccaccuuccc

SEQ ID NO: 318724 - RNA, 21 nt, Human herpesvirus 5
gcuucaacgccugcaccaacc

SEQ ID NO: 318725 - RNA, 18 nt, Human herpesvirus 5
gcuucggccggcugcugc

SEQ ID NO: 318726 - RNA, 18 nt, Human herpesvirus 5
gcuucguaagcugucagc

SEQ ID NO: 318727 - RNA, 22 nt, Human herpesvirus 5
gcuucucuuucucaccuggacc

SEQ ID NO: 318728 - RNA, 23 nt, Human herpesvirus 5
gcuuuaacccaaaaccaugcuac

SEQ ID NO: 318729 - RNA, 15 nt, Human herpesvirus 5
gcuuuaagcugcuca

SEQ ID NO: 318730 - RNA, 13 nt, Human herpesvirus 5
gcuuuccuggaca

SEQ ID NO: 318731 - RNA, 14 nt, Human herpesvirus 5
gcuuucucaucuca

SEQ ID NO: 318732 - RNA, 23 nt, Human herpesvirus 5
gcuuuucagaccgcaacaacagc

SEQ ID NO: 318733 - RNA, 19 nt, Human herpesvirus 5
gcuuuucccggcccugugc

SEQ ID NO: 318734 - RNA, 18 nt, Human herpesvirus 5
gcuuuugagucuagacag

SEQ ID NO: 318735 - RNA, 15 nt, Human herpesvirus 5
gcuuuuuuuauacau

SEQ ID NO: 318736 - RNA, 14 nt, Human herpesvirus 5
ggaaaaacaaagaa

SEQ ID NO: 318737 - RNA, 22 nt, Human herpesvirus 5
ggaaacagcguccacaguuucc

SEQ ID NO: 318738 - RNA, 14 nt, Human herpesvirus 5
ggaaacggacacua

SEQ ID NO: 318739 - RNA, 20 nt, Human herpesvirus 5
ggaaagacaauaaacaguac

SEQ ID NO: 318740 - RNA, 15 nt, Human herpesvirus 5
ggaaaggaauacaaa

SEQ ID NO: 318741 - RNA, 17 nt, Human herpesvirus 5
ggaaauuaugaacuuac

SEQ ID NO: 318742 - RNA, 19 nt, Human herpesvirus 5
ggaacacugaaaacaccau

SEQ ID NO: 318743 - RNA, 22 nt, Human herpesvirus 5
ggaaccaccguagcacugcgca

SEQ ID NO: 318744 - RNA, 14 nt, Human herpesvirus 5
ggaacgccgugugg

SEQ ID NO: 318745 - RNA, 21 nt, Human herpesvirus 5
ggaacgcuguuacgauuucaa

SEQ ID NO: 318746 - RNA, 19 nt, Human herpesvirus 5
ggaaguacaauaucaaaga

SEQ ID NO: 318747 - RNA, 18 nt, Human herpesvirus 5
ggaauauuggcggggaua

SEQ ID NO: 318748 - RNA, 16 nt, Human herpesvirus 5
ggaaugggcuaggaua

SEQ ID NO: 318749 - RNA, 20 nt, Human herpesvirus 5
ggaaugggcuaggauaauca

SEQ ID NO: 318750 - RNA, 15 nt, Human herpesvirus 5
ggaaugucagaugac

SEQ ID NO: 318751 - RNA, 21 nt, Human herpesvirus 5
ggacaaccgcauccugcccac

SEQ ID NO: 318752 - RNA, 20 nt, Human herpesvirus 5
ggacaacuuugacgugcuca

SEQ ID NO: 318753 - RNA, 22 nt, Human herpesvirus 5
ggacaaguauuuaugacggaca

SEQ ID NO: 318754 - RNA, 12 nt, Human herpesvirus 5
ggacaguguauu

SEQ ID NO: 318755 - RNA, 20 nt, Human herpesvirus 5
ggacaugguuaucauccagg

SEQ ID NO: 318756 - RNA, 20 nt, Human herpesvirus 5
ggacauugggcugugguuca

SEQ ID NO: 318757 - RNA, 13 nt, Human herpesvirus 5
ggacccacggugg

SEQ ID NO: 318758 - RNA, 22 nt, Human herpesvirus 5
ggacgaacaggugucuaagaga

SEQ ID NO: 318759 - RNA, 16 nt, Human herpesvirus 5
cugaagccgucaguca

SEQ ID NO: 318760 - RNA, 13 nt, Human herpesvirus 5
cugaauauacaga

SEQ ID NO: 318761 - RNA, 20 nt, Human herpesvirus 5
cugaccuugcugaugugcca

SEQ ID NO: 318762 - RNA, 15 nt, Human herpesvirus 5
cugacgcugcuccua

SEQ ID NO: 318763 - RNA, 15 nt, Human herpesvirus 5
cugacuguguagauc

SEQ ID NO: 318764 - RNA, 16 nt, Human herpesvirus 5
cugagacuggugguga

SEQ ID NO: 318765 - RNA, 18 nt, Human herpesvirus 5
cugagacugguggugaga

SEQ ID NO: 318766 - RNA, 22 nt, Human herpesvirus 5
cugaugccgaucaugugcuuaa

SEQ ID NO: 318767 - RNA, 23 nt, Human herpesvirus 5
cugauggccgacgaggccggcgg

SEQ ID NO: 318768 - RNA, 18 nt, Human herpesvirus 5
cugcaaagucaacaugua

SEQ ID NO: 318769 - RNA, 14 nt, Human herpesvirus 5
cugcaacggccguu

SEQ ID NO: 318770 - RNA, 18 nt, Human herpesvirus 5
cugcaauacagaagggaa

SEQ ID NO: 318771 - RNA, 15 nt, Human herpesvirus 5
cugcaccacggccuu

SEQ ID NO: 318772 - RNA, 13 nt, Human herpesvirus 5
cugcacgacaucu

SEQ ID NO: 318773 - RNA, 14 nt, Human herpesvirus 5
cugcacgacaucuu

SEQ ID NO: 318774 - RNA, 14 nt, Human herpesvirus 5
cugcacgaccugcu

SEQ ID NO: 318775 - RNA, 20 nt, Human herpesvirus 5
cugcacgaccugcuccagua

SEQ ID NO: 318776 - RNA, 13 nt, Human herpesvirus 5
cugcacggcauca

SEQ ID NO: 318777 - RNA, 21 nt, Human herpesvirus 5
cugcacuuucgaccacaagcu

SEQ ID NO: 318778 - RNA, 22 nt, Human herpesvirus 5
cugcacuuucgaccacaagcuc

SEQ ID NO: 318779 - RNA, 16 nt, Human herpesvirus 5
cugcagguacggcccg

SEQ ID NO: 318780 - RNA, 16 nt, Human herpesvirus 5
cugcauccaucacauc

SEQ ID NO: 318781 - RNA, 17 nt, Human herpesvirus 5
cugcauccaucacauca

SEQ ID NO: 318782 - RNA, 22 nt, Human herpesvirus 5
cugcauccaucacaucacccaa

SEQ ID NO: 318783 - RNA, 15 nt, Human herpesvirus 5
cugcauguuggugcc

SEQ ID NO: 318784 - RNA, 23 nt, Human herpesvirus 5
cugccaccucaguggaccgucaa

SEQ ID NO: 318785 - RNA, 19 nt, Human herpesvirus 5
cugcccguucuccccgugg

SEQ ID NO: 318786 - RNA, 19 nt, Human herpesvirus 5
cugccgaagaccucaccau

SEQ ID NO: 318787 - RNA, 23 nt, Human herpesvirus 5
cugccucagucucucggugcgug

SEQ ID NO: 318788 - RNA, 12 nt, Human herpesvirus 5
cugcgacuccug

SEQ ID NO: 318789 - RNA, 17 nt, Human herpesvirus 5
cugcgcaggccgccgcu

SEQ ID NO: 318790 - RNA, 15 nt, Human herpesvirus 5
cugcgcccguuggug

SEQ ID NO: 318791 - RNA, 23 nt, Human herpesvirus 5
cugcggcggcuugggcagcagcg

SEQ ID NO: 318792 - RNA, 22 nt, Human herpesvirus 5
cugcggcugaagccguacaaga

SEQ ID NO: 318793 - RNA, 18 nt, Human herpesvirus 5
cugcguaagcaccgugau

SEQ ID NO: 318794 - RNA, 18 nt, Human herpesvirus 5
cugcguucuguggugcgu

SEQ ID NO: 318795 - RNA, 13 nt, Human herpesvirus 5
cugcguugccacg

SEQ ID NO: 318796 - RNA, 17 nt, Human herpesvirus 5
cugcuaaaguagguacu

SEQ ID NO: 318797 - RNA, 18 nt, Human herpesvirus 5
cugcuacagucccgagaa

SEQ ID NO: 318798 - RNA, 20 nt, Human herpesvirus 5
cugcucaaacccggucaguc

SEQ ID NO: 318799 - RNA, 21 nt, Human herpesvirus 5
cugcucaaugccaccaugaac

SEQ ID NO: 318800 - RNA, 16 nt, Human herpesvirus 5
cugcugacgcuguuga

SEQ ID NO: 318801 - RNA, 13 nt, Human herpesvirus 5
cugcugcacgggc

SEQ ID NO: 318802 - RNA, 15 nt, Human herpesvirus 5
cugcugcuguguaga

SEQ ID NO: 318803 - RNA, 17 nt, Human herpesvirus 5
cugcuguuacgacauca

SEQ ID NO: 318804 - RNA, 12 nt, Human herpesvirus 5
cuggaaaauaua

SEQ ID NO: 318805 - RNA, 17 nt, Human herpesvirus 5
cuggaacaagaaacaca

SEQ ID NO: 318806 - RNA, 18 nt, Human herpesvirus 5
cuggaacaagaaacacag

SEQ ID NO: 318807 - RNA, 16 nt, Human herpesvirus 5
cuggaauccaucaucu

SEQ ID NO: 318808 - RNA, 23 nt, Human herpesvirus 5
cuggacgacgugauuuguugccc

SEQ ID NO: 318809 - RNA, 14 nt, Human herpesvirus 5
cuggacugacacag

SEQ ID NO: 318810 - RNA, 22 nt, Human herpesvirus 5
cuggagagacuuucaaugauga

SEQ ID NO: 318811 - RNA, 18 nt, Human herpesvirus 5
cuggagcuaucugugucc

SEQ ID NO: 318812 - RNA, 13 nt, Human herpesvirus 5
cuuugacggugau

SEQ ID NO: 318813 - RNA, 23 nt, Human herpesvirus 5
cuuugacgucccuuuuacuagua

SEQ ID NO: 318814 - RNA, 14 nt, Human herpesvirus 5
cuuugacgugcuca

SEQ ID NO: 318815 - RNA, 12 nt, Human herpesvirus 5
cuuugagcacaa

SEQ ID NO: 318816 - RNA, 13 nt, Human herpesvirus 5
cuuugagcacaaa

SEQ ID NO: 318817 - RNA, 17 nt, Human herpesvirus 5
cuuuggcuacgguggug

SEQ ID NO: 318818 - RNA, 18 nt, Human herpesvirus 5
cuuuggcuacgguggugu

SEQ ID NO: 318819 - RNA, 15 nt, Human herpesvirus 5
cuuugggguggugcg

SEQ ID NO: 318820 - RNA, 13 nt, Human herpesvirus 5
cuuuuaacagcuc

SEQ ID NO: 318821 - RNA, 19 nt, Human herpesvirus 5
cuuuuaacagcucaugccu

SEQ ID NO: 318822 - RNA, 17 nt, Human herpesvirus 5
cuuuuacaugaacaaaa

SEQ ID NO: 318823 - RNA, 14 nt, Human herpesvirus 5
cuuuuacuaguauc

SEQ ID NO: 318824 - RNA, 17 nt, Human herpesvirus 5
cuuuuacuaguauccac

SEQ ID NO: 318825 - RNA, 23 nt, Human herpesvirus 5
cuuuucagaccgcaacaacagca

SEQ ID NO: 318826 - RNA, 21 nt, Human herpesvirus 5
cuuuucauacaaaccccgugu

SEQ ID NO: 318827 - RNA, 11 nt, Human herpesvirus 5
cuuuucaucua

SEQ ID NO: 318828 - RNA, 16 nt, Human herpesvirus 5
cuuuugagucuagaca

SEQ ID NO: 318829 - RNA, 18 nt, Human herpesvirus 5
cuuuugcgaauccuaauc

SEQ ID NO: 318830 - RNA, 23 nt, Human herpesvirus 5
cuuuugcucucuuaguggucgcu

SEQ ID NO: 318831 - RNA, 19 nt, Human herpesvirus 5
cuuuuuaaggagcucugaa

SEQ ID NO: 318832 - RNA, 20 nt, Human herpesvirus 5
cuuuuucuucacgccccuga

SEQ ID NO: 318833 - RNA, 19 nt, Human herpesvirus 5
cuuuuuuuaaccaauaaca

SEQ ID NO: 318834 - RNA, 19 nt, Human herpesvirus 5
cuuuuuuuacuaguaucca

SEQ ID NO: 318835 - RNA, 20 nt, Human herpesvirus 5
cuuuuuuuacuaguauccac

SEQ ID NO: 318836 - RNA, 17 nt, Human herpesvirus 5
gaaaaaaugguguuaca

SEQ ID NO: 318837 - RNA, 21 nt, Human herpesvirus 5
gaaaaagguggaaaucccuca

SEQ ID NO: 318838 - RNA, 14 nt, Human herpesvirus 5
gaaaacaaccacac

SEQ ID NO: 318839 - RNA, 14 nt, Human herpesvirus 5
gaaaaccgccgcuu

SEQ ID NO: 318840 - RNA, 16 nt, Human herpesvirus 5
gaaaacgggauaugaa

SEQ ID NO: 318841 - RNA, 19 nt, Human herpesvirus 5
gaaaagcaguggcagcagg

SEQ ID NO: 318842 - RNA, 23 nt, Human herpesvirus 5
gaaaaguaacacacggccagcuc

SEQ ID NO: 318843 - RNA, 23 nt, Human herpesvirus 5
gaaaaguuuauggggaaaaagac

SEQ ID NO: 318844 - RNA, 17 nt, Human herpesvirus 5
gaaaaucuguguguucu

SEQ ID NO: 318845 - RNA, 15 nt, Human herpesvirus 5
gaaaauuacuacgua

SEQ ID NO: 318846 - RNA, 20 nt, Human herpesvirus 5
gaaacagcguccacaguuuc

SEQ ID NO: 318847 - RNA, 21 nt, Human herpesvirus 5
gaaacagcguccacaguuucc

SEQ ID NO: 318848 - RNA, 23 nt, Human herpesvirus 5
gaaacagcguccacaguuuccga

SEQ ID NO: 318849 - RNA, 15 nt, Human herpesvirus 5
gaaacauaugcagau

SEQ ID NO: 318850 - RNA, 18 nt, Human herpesvirus 5
gaaaccacgcgucagggc

SEQ ID NO: 318851 - RNA, 13 nt, Human herpesvirus 5
gaaaccuaccugg

SEQ ID NO: 318852 - RNA, 19 nt, Human herpesvirus 5
gaaaccuaccugggcugca

SEQ ID NO: 318853 - RNA, 20 nt, Human herpesvirus 5
gaaacgcuggaaaauauacc

SEQ ID NO: 318854 - RNA, 16 nt, Human herpesvirus 5
gaaagacaauaaacag

SEQ ID NO: 318855 - RNA, 16 nt, Human herpesvirus 5
gaaagagaaaccccca

SEQ ID NO: 318856 - RNA, 13 nt, Human herpesvirus 5
gaaagcaccagaa

SEQ ID NO: 318857 - RNA, 15 nt, Human herpesvirus 5
gaaagcguucagugu

SEQ ID NO: 318858 - RNA, 19 nt, Human herpesvirus 5
gaaaguacggugucgccac

SEQ ID NO: 318859 - RNA, 12 nt, Human herpesvirus 5
gaaauacaugau

SEQ ID NO: 318860 - RNA, 13 nt, Human herpesvirus 5
gaaaucccucacc

SEQ ID NO: 318861 - RNA, 17 nt, Human herpesvirus 5
gaaauguugacccaggg

SEQ ID NO: 318862 - RNA, 22 nt, Human herpesvirus 5
gaacaauaaacuaaaacauucu

SEQ ID NO: 318863 - RNA, 22 nt, Human herpesvirus 5
gaacacggcgugacaauaaaca

SEQ ID NO: 318864 - RNA, 18 nt, Human herpesvirus 5
gaacacugaaaacaccau

SEQ ID NO: 318865 - RNA, 20 nt, Human herpesvirus 5
gaacagacccgauacaguca

SEQ ID NO: 318866 - RNA, 22 nt, Human herpesvirus 5
gaacagacccgauacagucagc

SEQ ID NO: 318867 - RNA, 18 nt, Human herpesvirus 5
gaacagcagcucuuccaa

SEQ ID NO: 318868 - RNA, 17 nt, Human herpesvirus 5
gaacagggaagacuguc

SEQ ID NO: 318869 - RNA, 21 nt, Human herpesvirus 5
gaacccuucccgaccucccac

SEQ ID NO: 318870 - RNA, 12 nt, Human herpesvirus 5
gaaccgcacgga

SEQ ID NO: 318871 - RNA, 17 nt, Human herpesvirus 5
gaacgacacaugcacaa

SEQ ID NO: 318872 - RNA, 15 nt, Human herpesvirus 5
gaacgagucgcucau

SEQ ID NO: 318873 - RNA, 16 nt, Human herpesvirus 5
gaacgagugugccucg

SEQ ID NO: 318874 - RNA, 13 nt, Human herpesvirus 5
gaacgcuguuacg

SEQ ID NO: 318875 - RNA, 13 nt, Human herpesvirus 5
gaacggaagaaga

SEQ ID NO: 318876 - RNA, 21 nt, Human herpesvirus 5
gaacggaagaagaagaacaag

SEQ ID NO: 318877 - RNA, 15 nt, Human herpesvirus 5
gaacggaguggugag

SEQ ID NO: 318878 - RNA, 12 nt, Human herpesvirus 5
cggugugucuau

SEQ ID NO: 318879 - RNA, 15 nt, Human herpesvirus 5
cgguguuagacaugg

SEQ ID NO: 318880 - RNA, 13 nt, Human herpesvirus 5
cgguguuggccac

SEQ ID NO: 318881 - RNA, 14 nt, Human herpesvirus 5
cgguuccaucggca

SEQ ID NO: 318882 - RNA, 11 nt, Human herpesvirus 5
cgguucucacg

SEQ ID NO: 318883 - RNA, 15 nt, Human herpesvirus 5
cgguugcggcuuggu

SEQ ID NO: 318884 - RNA, 17 nt, Human herpesvirus 5
cgguuuaucaugaggca

SEQ ID NO: 318885 - RNA, 15 nt, Human herpesvirus 5
cgguuucguuuauug

SEQ ID NO: 318886 - RNA, 17 nt, Human herpesvirus 5
cguaaagagagucacac

SEQ ID NO: 318887 - RNA, 21 nt, Human herpesvirus 5
cguaaagagagucacacuuaa

SEQ ID NO: 318888 - RNA, 15 nt, Human herpesvirus 5
cguaagcaccgugau

SEQ ID NO: 318889 - RNA, 11 nt, Human herpesvirus 5
cguaccugcau

SEQ ID NO: 318890 - RNA, 17 nt, Human herpesvirus 5
cguaggugaguucaaug

SEQ ID NO: 318891 - RNA, 19 nt, Human herpesvirus 5
cguagugcggcgugcugca

SEQ ID NO: 318892 - RNA, 10 nt, Human herpesvirus 5
cguauauucu

SEQ ID NO: 318893 - RNA, 21 nt, Human herpesvirus 5
cgucaaccauuggcaacauca

SEQ ID NO: 318894 - RNA, 23 nt, Human herpesvirus 5
cgucaauaaagacgucaaugaca

SEQ ID NO: 318895 - RNA, 16 nt, Human herpesvirus 5
cgucacaauugacgug

SEQ ID NO: 318896 - RNA, 19 nt, Human herpesvirus 5
cgucaccacucccaccacg

SEQ ID NO: 318897 - RNA, 14 nt, Human herpesvirus 5
cgucaccacuuuga

SEQ ID NO: 318898 - RNA, 13 nt, Human herpesvirus 5
cgucacuaaggac

SEQ ID NO: 318899 - RNA, 15 nt, Human herpesvirus 5
cgucacuacucuggg

SEQ ID NO: 318900 - RNA, 19 nt, Human herpesvirus 5
cgucacuauuguauacucu

SEQ ID NO: 318901 - RNA, 22 nt, Human herpesvirus 5
cgucacucuuggcacggggaau

SEQ ID NO: 318902 - RNA, 17 nt, Human herpesvirus 5
cgucacugccaccgaca

SEQ ID NO: 318903 - RNA, 22 nt, Human herpesvirus 5
cgucacugccaccgacauggag

SEQ ID NO: 318904 - RNA, 22 nt, Human herpesvirus 5
cgucagccucgggugcaccgcg

SEQ ID NO: 318905 - RNA, 18 nt, Human herpesvirus 5
cgucaucucgccgacgug

SEQ ID NO: 318906 - RNA, 20 nt, Human herpesvirus 5
cgucaucucgccgacguggu

SEQ ID NO: 318907 - RNA, 12 nt, Human herpesvirus 5
cgucaugcauuc

SEQ ID NO: 318908 - RNA, 15 nt, Human herpesvirus 5
cguccacaguuuccg

SEQ ID NO: 318909 - RNA, 11 nt, Human herpesvirus 5
cguccaggugg

SEQ ID NO: 318910 - RNA, 18 nt, Human herpesvirus 5
cgucccuuuuacuaguau

SEQ ID NO: 318911 - RNA, 23 nt, Human herpesvirus 5
cguccgacgccggguuggcacga

SEQ ID NO: 318912 - RNA, 18 nt, Human herpesvirus 5
cguccgcuggaaauacca

SEQ ID NO: 318913 - RNA, 19 nt, Human herpesvirus 5
cguccgggcucggugaccu

SEQ ID NO: 318914 - RNA, 20 nt, Human herpesvirus 5
cguccgggcuuuccuuguca

SEQ ID NO: 318915 - RNA, 22 nt, Human herpesvirus 5
cgucgaccuugagcgacagcag

SEQ ID NO: 318916 - RNA, 14 nt, Human herpesvirus 5
cgucgagcggcgug

SEQ ID NO: 318917 - RNA, 13 nt, Human herpesvirus 5
cgucgaucuugac

SEQ ID NO: 318918 - RNA, 17 nt, Human herpesvirus 5
cgucgcacaccuugaaa

SEQ ID NO: 318919 - RNA, 14 nt, Human herpesvirus 5
cgucgccaccaccg

SEQ ID NO: 318920 - RNA, 15 nt, Human herpesvirus 5
cgucgccaccaugca

SEQ ID NO: 318921 - RNA, 13 nt, Human herpesvirus 5
cgucgcgaucucc

SEQ ID NO: 318922 - RNA, 18 nt, Human herpesvirus 5
cgucgugggcuacuuuga

SEQ ID NO: 318923 - RNA, 21 nt, Human herpesvirus 5
cgucguuuuguucaccgucgc

SEQ ID NO: 318924 - RNA, 13 nt, Human herpesvirus 5
cgucucgucacac

SEQ ID NO: 318925 - RNA, 15 nt, Human herpesvirus 5
cgucuggacgcgcgg

SEQ ID NO: 318926 - RNA, 17 nt, Human herpesvirus 5
cgucuggacgcgcggcu

SEQ ID NO: 318927 - RNA, 14 nt, Human herpesvirus 5
cgucuuugucauac

SEQ ID NO: 318928 - RNA, 19 nt, Human herpesvirus 5
cgugacaauaaacaacaua

SEQ ID NO: 318929 - RNA, 12 nt, Human herpesvirus 5
cgugacacagca

SEQ ID NO: 318930 - RNA, 13 nt, Human herpesvirus 5
cgugacacuuugg

SEQ ID NO: 318931 - RNA, 12 nt, Human herpesvirus 5
cgugacgguguu

SEQ ID NO: 318932 - RNA, 12 nt, Human herpesvirus 5
cgugacuuuauu

SEQ ID NO: 318933 - RNA, 20 nt, Human herpesvirus 5
cgugccaucaaucgcguccg

SEQ ID NO: 318934 - RNA, 14 nt, Human herpesvirus 5
cgugccugagcuug

SEQ ID NO: 318935 - RNA, 18 nt, Human herpesvirus 5
cgugcgauuuggaccugg

SEQ ID NO: 318936 - RNA, 14 nt, Human herpesvirus 5
cgugcgcacgccgc

SEQ ID NO: 318937 - RNA, 16 nt, Human herpesvirus 5
cgugcgcacgccgcgc

SEQ ID NO: 318938 - RNA, 21 nt, Human herpesvirus 5
cucccacgaagacccguucac

SEQ ID NO: 318939 - RNA, 21 nt, Human herpesvirus 5
cucccaggaccacguccagau

SEQ ID NO: 318940 - RNA, 18 nt, Human herpesvirus 5
cucccgguauucggaaac

SEQ ID NO: 318941 - RNA, 17 nt, Human herpesvirus 5
cucccuaacuaucuaca

SEQ ID NO: 318942 - RNA, 18 nt, Human herpesvirus 5
cuccgaacgcucgugagc

SEQ ID NO: 318943 - RNA, 22 nt, Human herpesvirus 5
cuccgaauaacaacacaucaac

SEQ ID NO: 318944 - RNA, 18 nt, Human herpesvirus 5
cuccgcggucagguccag

SEQ ID NO: 318945 - RNA, 15 nt, Human herpesvirus 5
cuccgucacgccucu

SEQ ID NO: 318946 - RNA, 15 nt, Human herpesvirus 5
cuccguguucuuaau

SEQ ID NO: 318947 - RNA, 16 nt, Human herpesvirus 5
cuccuaaaccugguag

SEQ ID NO: 318948 - RNA, 16 nt, Human herpesvirus 5
cuccuaguaaugcauu

SEQ ID NO: 318949 - RNA, 15 nt, Human herpesvirus 5
cuccucugccugggc

SEQ ID NO: 318950 - RNA, 19 nt, Human herpesvirus 5
cuccugaucgaucgaugcu

SEQ ID NO: 318951 - RNA, 20 nt, Human herpesvirus 5
cuccuuagucgagacuugca

SEQ ID NO: 318952 - RNA, 24 nt, Human herpesvirus 5
cucgaccggcggcugcuguugcac

SEQ ID NO: 318953 - RNA, 15 nt, Human herpesvirus 5
cucgcacggccugug

SEQ ID NO: 318954 - RNA, 21 nt, Human herpesvirus 5
cucgccaccacuaccaccacg

SEQ ID NO: 318955 - RNA, 18 nt, Human herpesvirus 5
cucgcccaggcugucaau

SEQ ID NO: 318956 - RNA, 15 nt, Human herpesvirus 5
cucgccgacguggug

SEQ ID NO: 318957 - RNA, 14 nt, Human herpesvirus 5
cucgcgcccgcaga

SEQ ID NO: 318958 - RNA, 16 nt, Human herpesvirus 5
cucgcucgcgcccgcu

SEQ ID NO: 318959 - RNA, 21 nt, Human herpesvirus 5
cucgcugccgcagcugcugga

SEQ ID NO: 318960 - RNA, 18 nt, Human herpesvirus 5
cucggagccgccgacgcu

SEQ ID NO: 318961 - RNA, 14 nt, Human herpesvirus 5
cucggaucuacuca

SEQ ID NO: 318962 - RNA, 15 nt, Human herpesvirus 5
cucggccuugcgcuc

SEQ ID NO: 318963 - RNA, 18 nt, Human herpesvirus 5
cucggccuuuucauacaa

SEQ ID NO: 318964 - RNA, 13 nt, Human herpesvirus 5
cucggcgugguca

SEQ ID NO: 318965 - RNA, 14 nt, Human herpesvirus 5
cucggcguggucaa

SEQ ID NO: 318966 - RNA, 17 nt, Human herpesvirus 5
cucgggccgaaccccgu

SEQ ID NO: 318967 - RNA, 22 nt, Human herpesvirus 5
cucgggugacggcgacaucacg

SEQ ID NO: 318968 - RNA, 16 nt, Human herpesvirus 5
cucgggugcaccgcgg

SEQ ID NO: 318969 - RNA, 11 nt, Human herpesvirus 5
cucggugaccu

SEQ ID NO: 318970 - RNA, 17 nt, Human herpesvirus 5
cucgguuucgcuguagc

SEQ ID NO: 318971 - RNA, 20 nt, Human herpesvirus 5
cucgucggugagacgaggcc

SEQ ID NO: 318972 - RNA, 13 nt, Human herpesvirus 5
cucgucgugggcu

SEQ ID NO: 318973 - RNA, 16 nt, Human herpesvirus 5
cucgucguguccguga

SEQ ID NO: 318974 - RNA, 15 nt, Human herpesvirus 5
cucgucugugucuca

SEQ ID NO: 318975 - RNA, 18 nt, Human herpesvirus 5
cucguguaucuuaugcca

SEQ ID NO: 318976 - RNA, 21 nt, Human herpesvirus 5
cucguguaucuuaugccaguu

SEQ ID NO: 318977 - RNA, 14 nt, Human herpesvirus 5
cucguucccagcgc

SEQ ID NO: 318978 - RNA, 20 nt, Human herpesvirus 5
cucguuguacgcauuacaca

SEQ ID NO: 318979 - RNA, 20 nt, Human herpesvirus 5
cucuaacaacgucacuucug

SEQ ID NO: 318980 - RNA, 14 nt, Human herpesvirus 5
cucuacggcacugu

SEQ ID NO: 318981 - RNA, 23 nt, Human herpesvirus 5
cucuagugcccauacuuuuacau

SEQ ID NO: 318982 - RNA, 16 nt, Human herpesvirus 5
cucuauaaaacuugcc

SEQ ID NO: 318983 - RNA, 14 nt, Human herpesvirus 5
cucucauguucuau

SEQ ID NO: 318984 - RNA, 20 nt, Human herpesvirus 5
cucuccacccagccccguca

SEQ ID NO: 318985 - RNA, 14 nt, Human herpesvirus 5
cucuccaguccaua

SEQ ID NO: 318986 - RNA, 19 nt, Human herpesvirus 5
cucucgagugcggucggug

SEQ ID NO: 318987 - RNA, 22 nt, Human herpesvirus 5
cucucuuuuuuuucuacaccgu

SEQ ID NO: 318988 - RNA, 16 nt, Human herpesvirus 5
cucugcuucuuuucug

SEQ ID NO: 318989 - RNA, 17 nt, Human herpesvirus 5
cucuguaauccuacuca

SEQ ID NO: 318990 - RNA, 15 nt, Human herpesvirus 5
cucuguguugcuaca

SEQ ID NO: 318991 - RNA, 17 nt, Human herpesvirus 5
cucuuaaaggacgugau

SEQ ID NO: 318992 - RNA, 13 nt, Human herpesvirus 5
cucuugcgcccuc

SEQ ID NO: 318993 - RNA, 15 nt, Human herpesvirus 5
cucuuggcacaugcc

SEQ ID NO: 318994 - RNA, 20 nt, Human herpesvirus 5
cucuuggcgccgcggugguc

SEQ ID NO: 318995 - RNA, 15 nt, Human herpesvirus 5
cucuuuccugugcac

SEQ ID NO: 318996 - RNA, 15 nt, Human herpesvirus 5
cucuuuuccccgugc

SEQ ID NO: 318997 - RNA, 15 nt, Human herpesvirus 5
cugaagccguacaag

SEQ ID NO: 318998 - RNA, 12 nt, Human herpesvirus 5
cauuuccgugcg

SEQ ID NO: 318999 - RNA, 15 nt, Human herpesvirus 5
cauuuccgugcgauu

SEQ ID NO: 319000 - RNA, 20 nt, Human herpesvirus 5
cauuucggggcacgugcuga

SEQ ID NO: 319001 - RNA, 13 nt, Human herpesvirus 5
ccaaaaaaacaca

SEQ ID NO: 319002 - RNA, 23 nt, Human herpesvirus 5
ccaaaacgucaggaaucugggag

SEQ ID NO: 319003 - RNA, 22 nt, Human herpesvirus 5
ccaaaagugauuuuugggcaua

SEQ ID NO: 319004 - RNA, 18 nt, Human herpesvirus 5
ccaaacccguuacaagua

SEQ ID NO: 319005 - RNA, 21 nt, Human herpesvirus 5
ccaaacgcgugcgggugcaug

SEQ ID NO: 319006 - RNA, 12 nt, Human herpesvirus 5
ccaaagaccgcu

SEQ ID NO: 319007 - RNA, 21 nt, Human herpesvirus 5
ccaaagaugaagacacccugc

SEQ ID NO: 319008 - RNA, 22 nt, Human herpesvirus 5
ccaaagaugaagacacccugcg

SEQ ID NO: 319009 - RNA, 16 nt, Human herpesvirus 5
ccaaagccgccgccga

SEQ ID NO: 319010 - RNA, 12 nt, Human herpesvirus 5
ccaacacguccc

SEQ ID NO: 319011 - RNA, 15 nt, Human herpesvirus 5
ccaacacugcuucua

SEQ ID NO: 319012 - RNA, 19 nt, Human herpesvirus 5
ccaacaugcccagcaucuc

SEQ ID NO: 319013 - RNA, 22 nt, Human herpesvirus 5
ccaacccagggagacuuagaau

SEQ ID NO: 319014 - RNA, 13 nt, Human herpesvirus 5
ccaaccucgccgu

SEQ ID NO: 319015 - RNA, 17 nt, Human herpesvirus 5
ccaacuccgugccagcu

SEQ ID NO: 319016 - RNA, 22 nt, Human herpesvirus 5
ccaagcuuuagccaggugacca

SEQ ID NO: 319017 - RNA, 14 nt, Human herpesvirus 5
ccaauaacaugucu

SEQ ID NO: 319018 - RNA, 20 nt, Human herpesvirus 5
ccaauacagcacguacaaau

SEQ ID NO: 319019 - RNA, 22 nt, Human herpesvirus 5
ccaauacugcauccaucacauc

SEQ ID NO: 319020 - RNA, 19 nt, Human herpesvirus 5
ccaauuuuuucgcugccaa

SEQ ID NO: 319021 - RNA, 16 nt, Human herpesvirus 5
ccacacacaucuguca

SEQ ID NO: 319022 - RNA, 16 nt, Human herpesvirus 5
ccacacagauauccac

SEQ ID NO: 319023 - RNA, 14 nt, Human herpesvirus 5
ccacaggcgccgca

SEQ ID NO: 319024 - RNA, 20 nt, Human herpesvirus 5
ccacaguagcgguaccagac

SEQ ID NO: 319025 - RNA, 14 nt, Human herpesvirus 5
ccacaucaacauac

SEQ ID NO: 319026 - RNA, 14 nt, Human herpesvirus 5
ccaccaugaacuga

SEQ ID NO: 319027 - RNA, 22 nt, Human herpesvirus 5
ccacccacgacggcuccaagaa

SEQ ID NO: 319028 - RNA, 18 nt, Human herpesvirus 5
ccacccgccggaacgcug

SEQ ID NO: 319029 - RNA, 14 nt, Human herpesvirus 5
ccaccgacgcgcga

SEQ ID NO: 319030 - RNA, 23 nt, Human herpesvirus 5
ccaccgccgcuuucucaucucag

SEQ ID NO: 319031 - RNA, 23 nt, Human herpesvirus 5
ccacgcucgcucugacgccgcgc

SEQ ID NO: 319032 - RNA, 21 nt, Human herpesvirus 5
ccacgcugacaacccacucuu

SEQ ID NO: 319033 - RNA, 18 nt, Human herpesvirus 5
ccacguagccgaugcuga

SEQ ID NO: 319034 - RNA, 21 nt, Human herpesvirus 5
ccacgucacuauuguauacuc

SEQ ID NO: 319035 - RNA, 21 nt, Human herpesvirus 5
ccacuacagaauugauuucaa

SEQ ID NO: 319036 - RNA, 24 nt, Human herpesvirus 5
ccacuacagaauugauuucaacaa

SEQ ID NO: 319037 - RNA, 13 nt, Human herpesvirus 5
ccacuaguacuga

SEQ ID NO: 319038 - RNA, 15 nt, Human herpesvirus 5
ccacuauggcgugaa

SEQ ID NO: 319039 - RNA, 14 nt, Human herpesvirus 5
ccacuccaucacac

SEQ ID NO: 319040 - RNA, 22 nt, Human herpesvirus 5
ccacuuccgugauagccacgac

SEQ ID NO: 319041 - RNA, 22 nt, Human herpesvirus 5
ccagaagauacucgaugggguc

SEQ ID NO: 319042 - RNA, 21 nt, Human herpesvirus 5
ccagacauccaauuacaccga

SEQ ID NO: 319043 - RNA, 21 nt, Human herpesvirus 5
ccagauacaacgucaugcauu

SEQ ID NO: 319044 - RNA, 14 nt, Human herpesvirus 5
ccagauacuauacg

SEQ ID NO: 319045 - RNA, 19 nt, Human herpesvirus 5
ccagcagcagcuggugcau

SEQ ID NO: 319046 - RNA, 19 nt, Human herpesvirus 5
ccagccccgucaaaacaca

SEQ ID NO: 319047 - RNA, 19 nt, Human herpesvirus 5
ccagcuggggaaguacaau

SEQ ID NO: 319048 - RNA, 23 nt, Human herpesvirus 5
ccaggacaaaaaguacacuggua

SEQ ID NO: 319049 - RNA, 15 nt, Human herpesvirus 5
ccaggcucacguuga

SEQ ID NO: 319050 - RNA, 13 nt, Human herpesvirus 5
ccaggcuguucac

SEQ ID NO: 319051 - RNA, 23 nt, Human herpesvirus 5
ccagggaggagggguuaagaggu

SEQ ID NO: 319052 - RNA, 18 nt, Human herpesvirus 5
ccaggugccggcgacuga

SEQ ID NO: 319053 - RNA, 15 nt, Human herpesvirus 5
ccauaagcuguguac

SEQ ID NO: 319054 - RNA, 13 nt, Human herpesvirus 5
ccauacuuaccac

SEQ ID NO: 319055 - RNA, 15 nt, Human herpesvirus 5
ccauacuuaccaccg

SEQ ID NO: 319056 - RNA, 17 nt, Human herpesvirus 5
ccauacuuuuacaugaa

SEQ ID NO: 319057 - RNA, 21 nt, Human herpesvirus 5
ccauacuuuuacaugaacaaa

SEQ ID NO: 319058 - RNA, 19 nt, Human herpesvirus 5
ccauaucgugaaccaugau

SEQ ID NO: 319059 - RNA, 18 nt, Human herpesvirus 5
ccaucaccuauaacauga

SEQ ID NO: 319060 - RNA, 16 nt, Human herpesvirus 5
ccaucaguacggcuuu

SEQ ID NO: 319061 - RNA, 15 nt, Human herpesvirus 5
ccaucauugcugcua

SEQ ID NO: 319062 - RNA, 19 nt, Human herpesvirus 5
ccaucuagacucacuuuau

SEQ ID NO: 319063 - RNA, 19 nt, Human herpesvirus 5
ccaucuucuaacgguuaca

SEQ ID NO: 319064 - RNA, 21 nt, Human herpesvirus 5
ccaugcaacuucuucuacuca

SEQ ID NO: 319065 - RNA, 22 nt, Human herpesvirus 5
ccaugccuuccgcgugcuccac

SEQ ID NO: 319066 - RNA, 15 nt, Human herpesvirus 5
ccaugcuucaugucg

SEQ ID NO: 319067 - RNA, 20 nt, Human herpesvirus 5
ccauggaggccaacaucuuc

SEQ ID NO: 319068 - RNA, 20 nt, Human herpesvirus 5
ccauucuuuuuauauauaca

SEQ ID NO: 319069 - RNA, 15 nt, Human herpesvirus 5
ccauuggcaacauca

SEQ ID NO: 319070 - RNA, 18 nt, Human herpesvirus 5
ccauuuccaugugcagcu

SEQ ID NO: 319071 - RNA, 22 nt, Human herpesvirus 5
cccaaaaaaacacacaccguca

SEQ ID NO: 319072 - RNA, 11 nt, Human herpesvirus 5
cccaagccaaa

SEQ ID NO: 319073 - RNA, 21 nt, Human herpesvirus 5
cccaaggaucgcgagccccau

SEQ ID NO: 319074 - RNA, 23 nt, Human herpesvirus 5
cccaccgccgcuuucucaucuca

SEQ ID NO: 319075 - RNA, 15 nt, Human herpesvirus 5
cccacgaccauuucc

SEQ ID NO: 319076 - RNA, 12 nt, Human herpesvirus 5
cccacuaccugg

SEQ ID NO: 319077 - RNA, 21 nt, Human herpesvirus 5
cccauccuguaaaaauacaga

SEQ ID NO: 319078 - RNA, 17 nt, Human herpesvirus 5
cccaucgucugcauguu

SEQ ID NO: 319079 - RNA, 23 nt, Human herpesvirus 5
ccccaacccagggagacuuagaa

SEQ ID NO: 319080 - RNA, 22 nt, Human herpesvirus 5
ccccaagcgguacggacuacau

SEQ ID NO: 319081 - RNA, 16 nt, Human herpesvirus 5
ccccaauuacucggug

SEQ ID NO: 319082 - RNA, 16 nt, Human herpesvirus 5
ccccaucauggcccaa

SEQ ID NO: 319083 - RNA, 17 nt, Human herpesvirus 5
cccccgucaacacgguc

SEQ ID NO: 319084 - RNA, 21 nt, Human herpesvirus 5
ccccguggacgacuggcucaa

SEQ ID NO: 319085 - RNA, 14 nt, Human herpesvirus 5
ccccgugugaugug

SEQ ID NO: 319086 - RNA, 20 nt, Human herpesvirus 5
cccgacaaguucgaucucau

SEQ ID NO: 319087 - RNA, 23 nt, Human herpesvirus 5
cccgacgacgguuuccacgccac

SEQ ID NO: 319088 - RNA, 14 nt, Human herpesvirus 5
cccgagacggcggc

SEQ ID NO: 319089 - RNA, 14 nt, Human herpesvirus 5
cccgagcacguaca

SEQ ID NO: 319090 - RNA, 19 nt, Human herpesvirus 5
cccgcacgacgaccccgcu

SEQ ID NO: 319091 - RNA, 14 nt, Human herpesvirus 5
cccgccguugcggc

SEQ ID NO: 319092 - RNA, 15 nt, Human herpesvirus 5
cccggauaauugucc

SEQ ID NO: 319093 - RNA, 20 nt, Human herpesvirus 5
cccggggcauccgcuacucc

SEQ ID NO: 319094 - RNA, 19 nt, Human herpesvirus 5
cccgguauucggaaacagc

SEQ ID NO: 319095 - RNA, 19 nt, Human herpesvirus 5
cccgucaaaacacacgcga

SEQ ID NO: 319096 - RNA, 20 nt, Human herpesvirus 5
cccgugugucuaaugugcug

SEQ ID NO: 319097 - RNA, 20 nt, Human herpesvirus 5
cccuaacuaucuacaacuua

SEQ ID NO: 319098 - RNA, 16 nt, Human herpesvirus 5
cccuaauaaagcacac

SEQ ID NO: 319099 - RNA, 23 nt, Human herpesvirus 5
cccuaccugcgcgauacauugcc

SEQ ID NO: 319100 - RNA, 17 nt, Human herpesvirus 5
cccuauggcacgucgcu

SEQ ID NO: 319101 - RNA, 20 nt, Human herpesvirus 5
cccucucgcgcccgcagaca

SEQ ID NO: 319102 - RNA, 19 nt, Human herpesvirus 5
cccugaguucacgcgcgga

SEQ ID NO: 319103 - RNA, 16 nt, Human herpesvirus 5
cccuguaguacuaccg

SEQ ID NO: 319104 - RNA, 20 nt, Human herpesvirus 5
cccuucuggagcacacugcu

SEQ ID NO: 319105 - RNA, 19 nt, Human herpesvirus 5
ccgaaaguagcguguuuga

SEQ ID NO: 319106 - RNA, 18 nt, Human herpesvirus 5
ccgaagacgacgugguuu

SEQ ID NO: 319107 - RNA, 19 nt, Human herpesvirus 5
ccgaagguuagcgccgcgg

SEQ ID NO: 319108 - RNA, 17 nt, Human herpesvirus 5
ccgacaaccugcugcac

SEQ ID NO: 319109 - RNA, 20 nt, Human herpesvirus 5
ccgacauggagacaguuucc

SEQ ID NO: 319110 - RNA, 15 nt, Human herpesvirus 5
ccgacgagacaacaa

SEQ ID NO: 319111 - RNA, 20 nt, Human herpesvirus 5
ccgacgcuggcgcugcggcu

SEQ ID NO: 319112 - RNA, 21 nt, Human herpesvirus 5
ccgacgugagcucccaucuuc

SEQ ID NO: 319113 - RNA, 22 nt, Human herpesvirus 5
ccgagaaagggauaguggcucg

SEQ ID NO: 319114 - RNA, 19 nt, Human herpesvirus 5
ccgagacggcgugacacag

SEQ ID NO: 319115 - RNA, 16 nt, Human herpesvirus 5
ccgaggcuacugcugc

SEQ ID NO: 319116 - RNA, 22 nt, Human herpesvirus 5
ccgaguccaccucugcuacugg

SEQ ID NO: 319117 - RNA, 13 nt, Human herpesvirus 5
ccgauacacgggg

SEQ ID NO: 319118 - RNA, 13 nt, Human herpesvirus 5
ccgaucaccagaa

SEQ ID NO: 319119 - RNA, 14 nt, Human herpesvirus 5
ccgaugcuccgcga

SEQ ID NO: 319120 - RNA, 15 nt, Human herpesvirus 5
ccgcaacaacagcag

SEQ ID NO: 319121 - RNA, 15 nt, Human herpesvirus 5
ccgcaagcgccgcca

SEQ ID NO: 319122 - RNA, 20 nt, Human herpesvirus 5
ccgcacgcgcuagccuuucu

SEQ ID NO: 319123 - RNA, 16 nt, Human herpesvirus 5
ccgcagcaccggcuca

SEQ ID NO: 319124 - RNA, 23 nt, Human herpesvirus 5
ccgcagcgaguugcugugcaccu

SEQ ID NO: 319125 - RNA, 15 nt, Human herpesvirus 5
ccgcaguuacaccac

SEQ ID NO: 319126 - RNA, 12 nt, Human herpesvirus 5
ccgccgcggcgu

SEQ ID NO: 319127 - RNA, 23 nt, Human herpesvirus 5
ccgccucggaucuacucaucggc

SEQ ID NO: 319128 - RNA, 12 nt, Human herpesvirus 5
ccgcgaggccac

SEQ ID NO: 319129 - RNA, 12 nt, Human herpesvirus 5
ccgcggaggugc

SEQ ID NO: 319130 - RNA, 15 nt, Human herpesvirus 5
ccgcuacugucagug

SEQ ID NO: 319131 - RNA, 21 nt, Human herpesvirus 5
ccgcugcacggcaucaugcug

SEQ ID NO: 319132 - RNA, 16 nt, Human herpesvirus 5
ccgcuguggcugccgc

SEQ ID NO: 319133 - RNA, 20 nt, Human herpesvirus 5
ccgcuuaacaacguguccag

SEQ ID NO: 319134 - RNA, 23 nt, Human herpesvirus 5
ccgcuuggggcucaaaguucaaa

SEQ ID NO: 319135 - RNA, 19 nt, Human herpesvirus 5
ccgcuuuggcuacgguggu

SEQ ID NO: 319136 - RNA, 14 nt, Human herpesvirus 5
ccggaccgugcacg

SEQ ID NO: 319137 - RNA, 20 nt, Human herpesvirus 5
ccggacgcgccacgcucgcu

SEQ ID NO: 319138 - RNA, 18 nt, Human herpesvirus 5
ccggagcccgcacacugg

SEQ ID NO: 319139 - RNA, 16 nt, Human herpesvirus 5
ccggccuugcugugua

SEQ ID NO: 319140 - RNA, 21 nt, Human herpesvirus 5
ccggcgcgccacguaggugag

SEQ ID NO: 319141 - RNA, 14 nt, Human herpesvirus 5
ccggcgcgguguua

SEQ ID NO: 319142 - RNA, 16 nt, Human herpesvirus 5
ccggcgcugagaaccu

SEQ ID NO: 319143 - RNA, 15 nt, Human herpesvirus 5
ccggcguugccgcca

SEQ ID NO: 319144 - RNA, 13 nt, Human herpesvirus 5
ccggcugcugcac

SEQ ID NO: 319145 - RNA, 14 nt, Human herpesvirus 5
ccggcugcugcacc

SEQ ID NO: 319146 - RNA, 20 nt, Human herpesvirus 5
ccgggacucuggugcuaugg

SEQ ID NO: 319147 - RNA, 18 nt, Human herpesvirus 5
ccgggccaccagccgcga

SEQ ID NO: 319148 - RNA, 19 nt, Human herpesvirus 5
ccggggacuuuaacggucu

SEQ ID NO: 319149 - RNA, 18 nt, Human herpesvirus 5
ccgggucgccuaagggga

SEQ ID NO: 319150 - RNA, 20 nt, Human herpesvirus 5
ccgguaaaggaacaacccgu

SEQ ID NO: 319151 - RNA, 20 nt, Human herpesvirus 5
ccggucagucuauucucaac

SEQ ID NO: 319152 - RNA, 14 nt, Human herpesvirus 5
ccggugugucuauu

SEQ ID NO: 319153 - RNA, 18 nt, Human herpesvirus 5
ccguacacgcacgcuggu

SEQ ID NO: 319154 - RNA, 18 nt, Human herpesvirus 5
ccgucagggaacacaucg

SEQ ID NO: 319155 - RNA, 15 nt, Human herpesvirus 5
ccgucaggugcuccg

SEQ ID NO: 319156 - RNA, 21 nt, Human herpesvirus 5
ccgucaucggcacgugcucuu

SEQ ID NO: 319157 - RNA, 20 nt, Human herpesvirus 5
ccguccucgucgccuuccag

SEQ ID NO: 319158 - RNA, 20 nt, Human herpesvirus 5
ccgucgcgcgcgcagggaau

SEQ ID NO: 319159 - RNA, 17 nt, Human herpesvirus 5
ccgucgcuuaucuugca

SEQ ID NO: 319160 - RNA, 14 nt, Human herpesvirus 5
ccgugacaguauua

SEQ ID NO: 319161 - RNA, 16 nt, Human herpesvirus 5
ccgugagugacgcggu

SEQ ID NO: 319162 - RNA, 16 nt, Human herpesvirus 5
ccgugauagccacgac

SEQ ID NO: 319163 - RNA, 15 nt, Human herpesvirus 5
ccgugcucgugccca

SEQ ID NO: 319164 - RNA, 16 nt, Human herpesvirus 5
ccgugggucccggcgc

SEQ ID NO: 319165 - RNA, 22 nt, Human herpesvirus 5
ccgugggucccggcgcgguguu

SEQ ID NO: 319166 - RNA, 14 nt, Human herpesvirus 5
ccgugucgcgcacc

SEQ ID NO: 319167 - RNA, 11 nt, Human herpesvirus 5
ccgugucuccg

SEQ ID NO: 319168 - RNA, 18 nt, Human herpesvirus 5
ccguucgaaggcuacucu

SEQ ID NO: 319169 - RNA, 12 nt, Human herpesvirus 5
ccguuguguaug

SEQ ID NO: 319170 - RNA, 15 nt, Human herpesvirus 5
ccuaagacgucgcga

SEQ ID NO: 319171 - RNA, 16 nt, Human herpesvirus 5
ccuacacgccuugcac

SEQ ID NO: 319172 - RNA, 16 nt, Human herpesvirus 5
ccuaccugggcugcaa

SEQ ID NO: 319173 - RNA, 11 nt, Human herpesvirus 5
ccuaccuggug

SEQ ID NO: 319174 - RNA, 14 nt, Human herpesvirus 5
ccuacgacaacauc

SEQ ID NO: 319175 - RNA, 14 nt, Human herpesvirus 5
ccuacucaccaaag

SEQ ID NO: 319176 - RNA, 21 nt, Human herpesvirus 5
ccuagacgaagaggacaccuc

SEQ ID NO: 319177 - RNA, 17 nt, Human herpesvirus 5
ccuagaugcuagcaaua

SEQ ID NO: 319178 - RNA, 20 nt, Human herpesvirus 5
ccuagcgaucgcaugcuucu

SEQ ID NO: 319179 - RNA, 12 nt, Human herpesvirus 5
ccuagcuacuuu

SEQ ID NO: 319180 - RNA, 14 nt, Human herpesvirus 5
ccuagggggugacu

SEQ ID NO: 319181 - RNA, 18 nt, Human herpesvirus 5
cgauggcccgcuaucgca

SEQ ID NO: 319182 - RNA, 22 nt, Human herpesvirus 5
cgauguuucggaguaccgagua

SEQ ID NO: 319183 - RNA, 17 nt, Human herpesvirus 5
cgauucccacaacauau

SEQ ID NO: 319184 - RNA, 14 nt, Human herpesvirus 5
cgauucccaucuca

SEQ ID NO: 319185 - RNA, 23 nt, Human herpesvirus 5
cgauucucacgaucgcugguguc

SEQ ID NO: 319186 - RNA, 14 nt, Human herpesvirus 5
cgauucucuauaca

SEQ ID NO: 319187 - RNA, 15 nt, Human herpesvirus 5
cgauuucuugccaag

SEQ ID NO: 319188 - RNA, 22 nt, Human herpesvirus 5
cgauuucuuuuuguccaccgac

SEQ ID NO: 319189 - RNA, 15 nt, Human herpesvirus 5
cgcaacgucuacauc

SEQ ID NO: 319190 - RNA, 19 nt, Human herpesvirus 5
cgcaacgucuacaucucau

SEQ ID NO: 319191 - RNA, 21 nt, Human herpesvirus 5
cgcaacugauucgccgugugu

SEQ ID NO: 319192 - RNA, 19 nt, Human herpesvirus 5
cgcaacuucuaccaucucc

SEQ ID NO: 319193 - RNA, 20 nt, Human herpesvirus 5
cgcacaacugguuccugcag

SEQ ID NO: 319194 - RNA, 11 nt, Human herpesvirus 5
cgcacacagac

SEQ ID NO: 319195 - RNA, 23 nt, Human herpesvirus 5
cgcacgagacgcgacuccugcag

SEQ ID NO: 319196 - RNA, 23 nt, Human herpesvirus 5
cgcacuuuuuuuacuaguaucca

SEQ ID NO: 319197 - RNA, 23 nt, Human herpesvirus 5
cgcagaaagaggggcaccuguau

SEQ ID NO: 319198 - RNA, 16 nt, Human herpesvirus 5
cgcaggccgccgcuca

SEQ ID NO: 319199 - RNA, 22 nt, Human herpesvirus 5
cgcagguuagcggcgagucacc

SEQ ID NO: 319200 - RNA, 15 nt, Human herpesvirus 5
cgcagugggcccacg

SEQ ID NO: 319201 - RNA, 13 nt, Human herpesvirus 5
cgcaguguuguua

SEQ ID NO: 319202 - RNA, 14 nt, Human herpesvirus 5
cgcauaaagggugg

SEQ ID NO: 319203 - RNA, 19 nt, Human herpesvirus 5
cgcaugucgucucaucaca

SEQ ID NO: 319204 - RNA, 12 nt, Human herpesvirus 5
cgcauuacacag

SEQ ID NO: 319205 - RNA, 15 nt, Human herpesvirus 5
cgccacaacgccguc

SEQ ID NO: 319206 - RNA, 14 nt, Human herpesvirus 5
cgccacacacaucu

SEQ ID NO: 319207 - RNA, 19 nt, Human herpesvirus 5
cgccaccaccgguaccacu

SEQ ID NO: 319208 - RNA, 16 nt, Human herpesvirus 5
cgccaccauagccacu

SEQ ID NO: 319209 - RNA, 15 nt, Human herpesvirus 5
cgccaccaugcaucc

SEQ ID NO: 319210 - RNA, 17 nt, Human herpesvirus 5
cgccacgacaaacacua

SEQ ID NO: 319211 - RNA, 20 nt, Human herpesvirus 5
cgccacuuuguaucauuaca

SEQ ID NO: 319212 - RNA, 13 nt, Human herpesvirus 5
cgccagcggccug

SEQ ID NO: 319213 - RNA, 14 nt, Human herpesvirus 5
cgccaguggaugcg

SEQ ID NO: 319214 - RNA, 15 nt, Human herpesvirus 5
cgcccgagacggcgg

SEQ ID NO: 319215 - RNA, 22 nt, Human herpesvirus 5
cgcccgggaucgcgguuuauuu

SEQ ID NO: 319216 - RNA, 12 nt, Human herpesvirus 5
cgcccucucggu

SEQ ID NO: 319217 - RNA, 16 nt, Human herpesvirus 5
cgccgacgugauccag

SEQ ID NO: 319218 - RNA, 23 nt, Human herpesvirus 5
cgccgacuggauccgcuuccuca

SEQ ID NO: 319219 - RNA, 18 nt, Human herpesvirus 5
cgccgauagagauggcga

SEQ ID NO: 319220 - RNA, 15 nt, Human herpesvirus 5
cgccgauagaggcga

SEQ ID NO: 319221 - RNA, 11 nt, Human herpesvirus 5
cgccgcagacc

SEQ ID NO: 319222 - RNA, 15 nt, Human herpesvirus 5
cgccgccagcgcggu

SEQ ID NO: 319223 - RNA, 15 nt, Human herpesvirus 5
cgccgcccucccuca

SEQ ID NO: 319224 - RNA, 22 nt, Human herpesvirus 5
cgccgcucauaaugccgucacc

SEQ ID NO: 319225 - RNA, 16 nt, Human herpesvirus 5
cgccgcuguggcugcc

SEQ ID NO: 319226 - RNA, 16 nt, Human herpesvirus 5
cgccggcgguuacaga

SEQ ID NO: 319227 - RNA, 17 nt, Human herpesvirus 5
cgccggggagacgacga

SEQ ID NO: 319228 - RNA, 14 nt, Human herpesvirus 5
cgccgguucucacg

SEQ ID NO: 319229 - RNA, 16 nt, Human herpesvirus 5
cgccgugacguccgcu

SEQ ID NO: 319230 - RNA, 14 nt, Human herpesvirus 5
cgccuccgguggug

SEQ ID NO: 319231 - RNA, 15 nt, Human herpesvirus 5
cgccucuucuggccc

SEQ ID NO: 319232 - RNA, 16 nt, Human herpesvirus 5
cgccugcgacggcggg

SEQ ID NO: 319233 - RNA, 13 nt, Human herpesvirus 5
cgcgaacgccgcg

SEQ ID NO: 319234 - RNA, 19 nt, Human herpesvirus 5
cgcgaccaccguuaccagu

SEQ ID NO: 319235 - RNA, 23 nt, Human herpesvirus 5
cgcgaccagcugcuggacgacgu

SEQ ID NO: 319236 - RNA, 20 nt, Human herpesvirus 5
cgcgacguguugcgggaccu

SEQ ID NO: 319237 - RNA, 19 nt, Human herpesvirus 5
cgcgagccccaucgggccc

SEQ ID NO: 319238 - RNA, 17 nt, Human herpesvirus 5
cgcgauagugguguuua

SEQ ID NO: 319239 - RNA, 23 nt, Human herpesvirus 5
cgcgcccucuucuuugccggcuc

SEQ ID NO: 319240 - RNA, 15 nt, Human herpesvirus 5
cgcgccgggcggcuu

SEQ ID NO: 319241 - RNA, 20 nt, Human herpesvirus 5
cgcgccgguucucacggugg

SEQ ID NO: 319242 - RNA, 18 nt, Human herpesvirus 5
cgcgccuuccuccucugc

SEQ ID NO: 319243 - RNA, 14 nt, Human herpesvirus 5
cgcgcgagcgugcg

SEQ ID NO: 319244 - RNA, 18 nt, Human herpesvirus 5
cgcgcuccaggcggagau

SEQ ID NO: 319245 - RNA, 23 nt, Human herpesvirus 5
cgcgcuucuggucgguuuuuuca

SEQ ID NO: 319246 - RNA, 18 nt, Human herpesvirus 5
cgcgcuuugcgccgccgc

SEQ ID NO: 319247 - RNA, 23 nt, Human herpesvirus 5
cgcggagguuugucuggcggcuu

SEQ ID NO: 319248 - RNA, 16 nt, Human herpesvirus 5
cgcggcaacucgagau

SEQ ID NO: 319249 - RNA, 20 nt, Human herpesvirus 5
cgcggcacgccguugccacg

SEQ ID NO: 319250 - RNA, 14 nt, Human herpesvirus 5
cgcggcagcggcgc

SEQ ID NO: 319251 - RNA, 18 nt, Human herpesvirus 5
cgcggcccccacggcggc

SEQ ID NO: 319252 - RNA, 16 nt, Human herpesvirus 5
cgcggcgaggugguca

SEQ ID NO: 319253 - RNA, 17 nt, Human herpesvirus 5
cgcggcgagguggucaa

SEQ ID NO: 319254 - RNA, 16 nt, Human herpesvirus 5
cgcgguacaugugcau

SEQ ID NO: 319255 - RNA, 18 nt, Human herpesvirus 5
cgcggucugcgugaugcc

SEQ ID NO: 319256 - RNA, 16 nt, Human herpesvirus 5
cgcguaagaaaccgcg

SEQ ID NO: 319257 - RNA, 15 nt, Human herpesvirus 5
cgcguaggacgacgu

SEQ ID NO: 319258 - RNA, 14 nt, Human herpesvirus 5
cgcguggcuguagc

SEQ ID NO: 319259 - RNA, 15 nt, Human herpesvirus 5
cgcuaaaggugcaug

SEQ ID NO: 319260 - RNA, 20 nt, Human herpesvirus 5
cgcuagcagaagacuuugau

SEQ ID NO: 319261 - RNA, 19 nt, Human herpesvirus 5
cgcucaagccgcggugcag

SEQ ID NO: 319262 - RNA, 15 nt, Human herpesvirus 5
cgcucacccguucac

SEQ ID NO: 319263 - RNA, 16 nt, Human herpesvirus 5
cgcucccugcuccgca

SEQ ID NO: 319264 - RNA, 19 nt, Human herpesvirus 5
cgcucgcuuuggagcgcga

SEQ ID NO: 319265 - RNA, 18 nt, Human herpesvirus 5
cgcugacaacccacucuu

SEQ ID NO: 319266 - RNA, 19 nt, Human herpesvirus 5
cgcugacagcauacgggga

SEQ ID NO: 319267 - RNA, 17 nt, Human herpesvirus 5
cgcugcacggcaucaug

SEQ ID NO: 319268 - RNA, 16 nt, Human herpesvirus 5
cgcugcuucaccgaua

SEQ ID NO: 319269 - RNA, 18 nt, Human herpesvirus 5
cgcuggacugacacagcu

SEQ ID NO: 319270 - RNA, 18 nt, Human herpesvirus 5
cgcuuagacauuccccac

SEQ ID NO: 319271 - RNA, 13 nt, Human herpesvirus 5
cgcuuaucuugca

SEQ ID NO: 319272 - RNA, 16 nt, Human herpesvirus 5
cgcuuuucuacuccau

SEQ ID NO: 319273 - RNA, 14 nt, Human herpesvirus 5
cggaaaaaccgcgc

SEQ ID NO: 319274 - RNA, 20 nt, Human herpesvirus 5
cggaccgcagcaccggcuca

SEQ ID NO: 319275 - RNA, 13 nt, Human herpesvirus 5
cggacguagaaaa

SEQ ID NO: 319276 - RNA, 13 nt, Human herpesvirus 5
cggagaccgucca

SEQ ID NO: 319277 - RNA, 18 nt, Human herpesvirus 5
cggagcagccgccagcga

SEQ ID NO: 319278 - RNA, 15 nt, Human herpesvirus 5
cggaggaggugaccu

SEQ ID NO: 319279 - RNA, 17 nt, Human herpesvirus 5
cggaguaagaacacaac

SEQ ID NO: 319280 - RNA, 23 nt, Human herpesvirus 5
cggauaggcaccuggacuucaau

SEQ ID NO: 319281 - RNA, 16 nt, Human herpesvirus 5
cggauuggguaggggu

SEQ ID NO: 319282 - RNA, 16 nt, Human herpesvirus 5
cggcaacgauagucau

SEQ ID NO: 319283 - RNA, 20 nt, Human herpesvirus 5
cggcaccaucggacucgcca

SEQ ID NO: 319284 - RNA, 20 nt, Human herpesvirus 5
cggcacccggcugcacgugg

SEQ ID NO: 319285 - RNA, 19 nt, Human herpesvirus 5
cggcacgccguugccacga

SEQ ID NO: 319286 - RNA, 21 nt, Human herpesvirus 5
cggcacuuuacauaaaaccac

SEQ ID NO: 319287 - RNA, 23 nt, Human herpesvirus 5
cggcacuuuacauaaaaccaccg

SEQ ID NO: 319288 - RNA, 19 nt, Human herpesvirus 5
cggcagcggaacucgaccu

SEQ ID NO: 319289 - RNA, 21 nt, Human herpesvirus 5
cggcauacaaugugcugcaug

SEQ ID NO: 319290 - RNA, 13 nt, Human herpesvirus 5
cggcauccucggg

SEQ ID NO: 319291 - RNA, 22 nt, Human herpesvirus 5
cggcauccucgggcuuuccggc

SEQ ID NO: 319292 - RNA, 17 nt, Human herpesvirus 5
cggcaugucccuacuca

SEQ ID NO: 319293 - RNA, 20 nt, Human herpesvirus 5
cggccauggaggccaacauc

SEQ ID NO: 319294 - RNA, 18 nt, Human herpesvirus 5
cggccgcaacuucuacca

SEQ ID NO: 319295 - RNA, 13 nt, Human herpesvirus 5
cggccggcugcug

SEQ ID NO: 319296 - RNA, 19 nt, Human herpesvirus 5
aaccagaucacuaucuuca

SEQ ID NO: 319297 - RNA, 20 nt, Human herpesvirus 5
aaccagugcgucgcuguuga

SEQ ID NO: 319298 - RNA, 17 nt, Human herpesvirus 5
aaccauuggcaacauca

SEQ ID NO: 319299 - RNA, 19 nt, Human herpesvirus 5
aaccauuggcaacaucacc

SEQ ID NO: 319300 - RNA, 17 nt, Human herpesvirus 5
aacccacgaccauuucc

SEQ ID NO: 319301 - RNA, 21 nt, Human herpesvirus 5
aacccauccccucgccacgac

SEQ ID NO: 319302 - RNA, 16 nt, Human herpesvirus 5
aaccccguguccgccc

SEQ ID NO: 319303 - RNA, 15 nt, Human herpesvirus 5
aaccgcaaaggccac

SEQ ID NO: 319304 - RNA, 23 nt, Human herpesvirus 5
aaccgguuuauucguaacucuau

SEQ ID NO: 319305 - RNA, 20 nt, Human herpesvirus 5
aaccguaugcacaaaaggua

SEQ ID NO: 319306 - RNA, 14 nt, Human herpesvirus 5
aaccgugguccgcu

SEQ ID NO: 319307 - RNA, 15 nt, Human herpesvirus 5
aaccuaccuacuuca

SEQ ID NO: 319308 - RNA, 20 nt, Human herpesvirus 5
aaccuacguccgugagugac

SEQ ID NO: 319309 - RNA, 17 nt, Human herpesvirus 5
aaccugagaacaugugg

SEQ ID NO: 319310 - RNA, 23 nt, Human herpesvirus 5
aaccugcugcacuucgcgcucug

SEQ ID NO: 319311 - RNA, 21 nt, Human herpesvirus 5
aaccuguauggaggucacugu

SEQ ID NO: 319312 - RNA, 17 nt, Human herpesvirus 5
aaccuuccccacccagu

SEQ ID NO: 319313 - RNA, 14 nt, Human herpesvirus 5
aaccuuguaaugcu

SEQ ID NO: 319314 - RNA, 23 nt, Human herpesvirus 5
aacgacaccucccuaacuaucua

SEQ ID NO: 319315 - RNA, 20 nt, Human herpesvirus 5
aacgauaaccguguccgcuc

SEQ ID NO: 319316 - RNA, 16 nt, Human herpesvirus 5
aacgauagucaucuca

SEQ ID NO: 319317 - RNA, 14 nt, Human herpesvirus 5
aacgccaccaagga

SEQ ID NO: 319318 - RNA, 16 nt, Human herpesvirus 5
aacgcgcaagugccug

SEQ ID NO: 319319 - RNA, 16 nt, Human herpesvirus 5
aacgcgguacaugugc

SEQ ID NO: 319320 - RNA, 23 nt, Human herpesvirus 5
aacgcguggcccuggucuggccc

SEQ ID NO: 319321 - RNA, 22 nt, Human herpesvirus 5
aacgcucucgucaggcuuguca

SEQ ID NO: 319322 - RNA, 20 nt, Human herpesvirus 5
aacgcuuuaagcugcucaug

SEQ ID NO: 319323 - RNA, 18 nt, Human herpesvirus 5
aacguaauaucaucugca

SEQ ID NO: 319324 - RNA, 14 nt, Human herpesvirus 5
aacgucacuucaac

SEQ ID NO: 319325 - RNA, 18 nt, Human herpesvirus 5
aacgugacgguugcugag

SEQ ID NO: 319326 - RNA, 20 nt, Human herpesvirus 5
aacgugcgccuuccagucca

SEQ ID NO: 319327 - RNA, 19 nt, Human herpesvirus 5
aacguugagacuaccacau

SEQ ID NO: 319328 - RNA, 21 nt, Human herpesvirus 5
aacguuucuaucaccuaaucu

SEQ ID NO: 319329 - RNA, 15 nt, Human herpesvirus 5
aacuaauauugcaau

SEQ ID NO: 319330 - RNA, 20 nt, Human herpesvirus 5
aacuaauauugcaauggacu

SEQ ID NO: 319331 - RNA, 20 nt, Human herpesvirus 5
aacuacaauguauagauaca

SEQ ID NO: 319332 - RNA, 21 nt, Human herpesvirus 5
aacuaccgugccaccugcgag

SEQ ID NO: 319333 - RNA, 11 nt, Human herpesvirus 5
aacuacguggg

SEQ ID NO: 319334 - RNA, 21 nt, Human herpesvirus 5
aacuacguggguaagugacgu

SEQ ID NO: 319335 - RNA, 22 nt, Human herpesvirus 5
aacuagacaaaaaauauugaca

SEQ ID NO: 319336 - RNA, 18 nt, Human herpesvirus 5
aacuagcauucuggugag

SEQ ID NO: 319337 - RNA, 22 nt, Human herpesvirus 5
aacuaucaccaaacaacaccac

SEQ ID NO: 319338 - RNA, 12 nt, Human herpesvirus 5
aacuauuccacu

SEQ ID NO: 319339 - RNA, 19 nt, Human herpesvirus 5
aacugcaccagcaaccacc

SEQ ID NO: 319340 - RNA, 17 nt, Human herpesvirus 5
aacugcguggacggcga

SEQ ID NO: 319341 - RNA, 22 nt, Human herpesvirus 5
aacuggaaagagagacauggac

SEQ ID NO: 319342 - RNA, 22 nt, Human herpesvirus 5
aacuggcaaaaagcgccgugcu

SEQ ID NO: 319343 - RNA, 17 nt, Human herpesvirus 5
aacuguugcgacaauac

SEQ ID NO: 319344 - RNA, 14 nt, Human herpesvirus 5
aacuuaugugaaua

SEQ ID NO: 319345 - RNA, 11 nt, Human herpesvirus 5
aacuucugucu

SEQ ID NO: 319346 - RNA, 17 nt, Human herpesvirus 5
aacuucuuggugaucuu

SEQ ID NO: 319347 - RNA, 19 nt, Human herpesvirus 5
aacuugccggguaccuaaa

SEQ ID NO: 319348 - RNA, 18 nt, Human herpesvirus 5
aacuuucggguugaucua

SEQ ID NO: 319349 - RNA, 16 nt, Human herpesvirus 5
aacuuugacgugcuca

SEQ ID NO: 319350 - RNA, 23 nt, Human herpesvirus 5
aagaaacccucaaaacaucacca

SEQ ID NO: 319351 - RNA, 11 nt, Human herpesvirus 5
aagaaggccau

SEQ ID NO: 319352 - RNA, 21 nt, Human herpesvirus 5
aagaauccguccccacgucca

SEQ ID NO: 319353 - RNA, 21 nt, Human herpesvirus 5
aagaaucuaggaacacugaaa

SEQ ID NO: 319354 - RNA, 20 nt, Human herpesvirus 5
aagacaaccaaaacgucagg

SEQ ID NO: 319355 - RNA, 20 nt, Human herpesvirus 5
aagacagggaaagguuauau

SEQ ID NO: 319356 - RNA, 20 nt, Human herpesvirus 5
aagacaucgucacaccuauc

SEQ ID NO: 319357 - RNA, 21 nt, Human herpesvirus 5
aagaccugacgccguucuuga

SEQ ID NO: 319358 - RNA, 21 nt, Human herpesvirus 5
aagacggcuauccagcagcug

SEQ ID NO: 319359 - RNA, 15 nt, Human herpesvirus 5
aagacgucaaugaca

SEQ ID NO: 319360 - RNA, 14 nt, Human herpesvirus 5
aagacuuaccaccu

SEQ ID NO: 319361 - RNA, 20 nt, Human herpesvirus 5
aagacuuugauguaguugca

SEQ ID NO: 319362 - RNA, 22 nt, Human herpesvirus 5
aagacuuugauguaguugcaga

SEQ ID NO: 319363 - RNA, 22 nt, Human herpesvirus 5
aagagauagacaucacaguuca

SEQ ID NO: 319364 - RNA, 16 nt, Human herpesvirus 5
aagagcguacagucca

SEQ ID NO: 319365 - RNA, 12 nt, Human herpesvirus 5
aagagcuuugac

SEQ ID NO: 319366 - RNA, 14 nt, Human herpesvirus 5
aagaggacaccuca

SEQ ID NO: 319367 - RNA, 21 nt, Human herpesvirus 5
aagauugggggggaacgugug

SEQ ID NO: 319368 - RNA, 22 nt, Human herpesvirus 5
aagauugggggggaacgugugu

SEQ ID NO: 319369 - RNA, 15 nt, Human herpesvirus 5
aagcacuaccagcug

SEQ ID NO: 319370 - RNA, 11 nt, Human herpesvirus 5
aagcacuucag

SEQ ID NO: 319371 - RNA, 17 nt, Human herpesvirus 5
aagcacuucagaaucua

SEQ ID NO: 319372 - RNA, 13 nt, Human herpesvirus 5
aagccagauacua

SEQ ID NO: 319373 - RNA, 17 nt, Human herpesvirus 5
aagcccccacgacuguu

SEQ ID NO: 319374 - RNA, 18 nt, Human herpesvirus 5
aagcccuuaacauguuau

SEQ ID NO: 319375 - RNA, 17 nt, Human herpesvirus 5
aagccgacaaccugcug

SEQ ID NO: 319376 - RNA, 15 nt, Human herpesvirus 5
aagccgccaauacag

SEQ ID NO: 319377 - RNA, 14 nt, Human herpesvirus 5
aagccguacaagac

SEQ ID NO: 319378 - RNA, 12 nt, Human herpesvirus 5
aagccuggguac

SEQ ID NO: 319379 - RNA, 14 nt, Human herpesvirus 5
aagcgccgucacuu

SEQ ID NO: 319380 - RNA, 22 nt, Human herpesvirus 5
aagcgcuaccucggccuuuuca

SEQ ID NO: 319381 - RNA, 13 nt, Human herpesvirus 5
aagcgcuuucuga

SEQ ID NO: 319382 - RNA, 13 nt, Human herpesvirus 5
aagcguucagugu

SEQ ID NO: 319383 - RNA, 11 nt, Human herpesvirus 5
aagcucgccaa

SEQ ID NO: 319384 - RNA, 13 nt, Human herpesvirus 5
aagcugcaaucaa

SEQ ID NO: 319385 - RNA, 14 nt, Human herpesvirus 5
aagcugcaaucaaa

SEQ ID NO: 319386 - RNA, 21 nt, Human herpesvirus 5
aagcuggacagugagagcuca

SEQ ID NO: 319387 - RNA, 17 nt, Human herpesvirus 5
aagcugucagccucuca

SEQ ID NO: 319388 - RNA, 13 nt, Human herpesvirus 5
aaggaaaaaacac

SEQ ID NO: 319389 - RNA, 15 nt, Human herpesvirus 5
aaggaaaacgugacu

SEQ ID NO: 319390 - RNA, 14 nt, Human herpesvirus 5
aaggacgugaugcg

SEQ ID NO: 319391 - RNA, 15 nt, Human herpesvirus 5
aaggagcaaaaccgg

SEQ ID NO: 319392 - RNA, 21 nt, Human herpesvirus 5
aaggaggacauggacucgcca

SEQ ID NO: 319393 - RNA, 16 nt, Human herpesvirus 5
aaggaucauguagaaa

SEQ ID NO: 319394 - RNA, 13 nt, Human herpesvirus 5
aaggauuuugccg

SEQ ID NO: 319395 - RNA, 17 nt, Human herpesvirus 5
aaggccgugccgccgcg

SEQ ID NO: 319396 - RNA, 19 nt, Human herpesvirus 5
aaggccucuaucugcgcca

SEQ ID NO: 319397 - RNA, 16 nt, Human herpesvirus 5
aaggcggccguccuuc

SEQ ID NO: 319398 - RNA, 17 nt, Human herpesvirus 5
aaggcucagcguucaaa

SEQ ID NO: 319399 - RNA, 15 nt, Human herpesvirus 5
aagggacgucaaagc

SEQ ID NO: 319400 - RNA, 22 nt, Human herpesvirus 5
aaggguguugugcgugaugauu

SEQ ID NO: 319401 - RNA, 18 nt, Human herpesvirus 5
aagguacgggucuaccaa

SEQ ID NO: 319402 - RNA, 17 nt, Human herpesvirus 5
aagguacuuuaccuagc

SEQ ID NO: 319403 - RNA, 15 nt, Human herpesvirus 5
aaggucaacuacagc

SEQ ID NO: 319404 - RNA, 21 nt, Human herpesvirus 5
aaggucaacuacagcaaugac

SEQ ID NO: 319405 - RNA, 18 nt, Human herpesvirus 5
aagguggugaacugugau

SEQ ID NO: 319406 - RNA, 20 nt, Human herpesvirus 5
aagguguggcggcagcggaa

SEQ ID NO: 319407 - RNA, 15 nt, Human herpesvirus 5
aagucucuuucucug

SEQ ID NO: 319408 - RNA, 21 nt, Human herpesvirus 5
aagucuguauauucaguccau

SEQ ID NO: 319409 - RNA, 22 nt, Human herpesvirus 5
aagucuguauauucaguccauu

SEQ ID NO: 319410 - RNA, 16 nt, Human herpesvirus 5
aagucuugccgugacg

SEQ ID NO: 319411 - RNA, 14 nt, Human herpesvirus 5
aagugacguggaua

SEQ ID NO: 319412 - RNA, 20 nt, Human herpesvirus 5
aagugccugcacgaccugcu

SEQ ID NO: 319413 - RNA, 14 nt, Human herpesvirus 5
aagugcgucaaagc

SEQ ID NO: 319414 - RNA, 16 nt, Human herpesvirus 5
aagugcucgacuuuac

SEQ ID NO: 319415 - RNA, 11 nt, Human herpesvirus 5
aaguguugacc

SEQ ID NO: 319416 - RNA, 22 nt, Human herpesvirus 5
aaguucaucucggcauaguggu

SEQ ID NO: 319417 - RNA, 23 nt, Human herpesvirus 5
aaguugggucccagcgagcugcg

SEQ ID NO: 319418 - RNA, 15 nt, Human herpesvirus 5
aauaaaaacacagag

SEQ ID NO: 319419 - RNA, 14 nt, Human herpesvirus 5
aauaaaaaccaccg

SEQ ID NO: 319420 - RNA, 16 nt, Human herpesvirus 5
aauaaaagcacuucag

SEQ ID NO: 319421 - RNA, 12 nt, Human herpesvirus 5
aauaaacaguac

SEQ ID NO: 319422 - RNA, 22 nt, Human herpesvirus 5
aauaaacaguacggacaaguau

SEQ ID NO: 319423 - RNA, 19 nt, Human herpesvirus 5
aauaaacuaaaacauucug

SEQ ID NO: 319424 - RNA, 18 nt, Human herpesvirus 5
aauaaagacgucaaugac

SEQ ID NO: 319425 - RNA, 16 nt, Human herpesvirus 5
aauaaagaugauacau

SEQ ID NO: 319426 - RNA, 22 nt, Human herpesvirus 5
aauaaagcguugauuucucaag

SEQ ID NO: 319427 - RNA, 19 nt, Human herpesvirus 5
aauaaagcuuucuuucuca

SEQ ID NO: 319428 - RNA, 12 nt, Human herpesvirus 5
aauaaaguacac

SEQ ID NO: 319429 - RNA, 13 nt, Human herpesvirus 5
aauaaaguacacg

SEQ ID NO: 319430 - RNA, 16 nt, Human herpesvirus 5
aauaaaguacacgcca

SEQ ID NO: 319431 - RNA, 23 nt, Human herpesvirus 5
aauaaaugagaccccauccugua

SEQ ID NO: 319432 - RNA, 16 nt, Human herpesvirus 5
aauaacaacacaucaa

SEQ ID NO: 319433 - RNA, 11 nt, Human herpesvirus 5
aauaacauguc

SEQ ID NO: 319434 - RNA, 12 nt, Human herpesvirus 5
aauaacaugucu

SEQ ID NO: 319435 - RNA, 15 nt, Human herpesvirus 5
aauaacccacaccua

SEQ ID NO: 319436 - RNA, 18 nt, Human herpesvirus 5
aauaacggcgcagcacca

SEQ ID NO: 319437 - RNA, 16 nt, Human herpesvirus 5
aauaauaauaccacaa

SEQ ID NO: 319438 - RNA, 20 nt, Human herpesvirus 5
aauaaucccuguaauuauuc

SEQ ID NO: 319439 - RNA, 13 nt, Human herpesvirus 5
aauaaucuccuga

SEQ ID NO: 319440 - RNA, 21 nt, Human herpesvirus 5
aauacaaacguugagacuacc

SEQ ID NO: 319441 - RNA, 20 nt, Human herpesvirus 5
aauacaaaugaggcacauga

SEQ ID NO: 319442 - RNA, 22 nt, Human herpesvirus 5
aauacaccgagccauuccuuua

SEQ ID NO: 319443 - RNA, 16 nt, Human herpesvirus 5
aauacagauacgcaau

SEQ ID NO: 319444 - RNA, 14 nt, Human herpesvirus 5
aauacaugaugaau

SEQ ID NO: 319445 - RNA, 20 nt, Human herpesvirus 5
aauacaugaugaaugucauc

SEQ ID NO: 319446 - RNA, 16 nt, Human herpesvirus 5
aauaccguaaacauaa

SEQ ID NO: 319447 - RNA, 22 nt, Human herpesvirus 5
aauacuaguguguuccacucca

SEQ ID NO: 319448 - RNA, 13 nt, Human herpesvirus 5
aauacugcaucca

SEQ ID NO: 319449 - RNA, 21 nt, Human herpesvirus 5
aauacugcauccaucacauca

SEQ ID NO: 319450 - RNA, 22 nt, Human herpesvirus 5
aauacugcauccaucacaucac

SEQ ID NO: 319451 - RNA, 17 nt, Human herpesvirus 5
aauacugcuauguauca

SEQ ID NO: 319452 - RNA, 14 nt, Human herpesvirus 5
aauacuuaggggca

SEQ ID NO: 319453 - RNA, 13 nt, Human herpesvirus 5
aauagacacaccg

SEQ ID NO: 319454 - RNA, 13 nt, Human herpesvirus 5
aauagauagcaag

SEQ ID NO: 319455 - RNA, 18 nt, Human herpesvirus 5
aauauagcgucucucuua

SEQ ID NO: 319456 - RNA, 22 nt, Human herpesvirus 5
aauauauauagacacacaccaa

SEQ ID NO: 319457 - RNA, 22 nt, Human herpesvirus 5
aauauauggaguuuguguaaug

SEQ ID NO: 319458 - RNA, 16 nt, Human herpesvirus 5
aauaucaucugcaccu

SEQ ID NO: 319459 - RNA, 15 nt, Human herpesvirus 5
aauauguaguccgua

SEQ ID NO: 319460 - RNA, 14 nt, Human herpesvirus 5
aaucaagccuguua

SEQ ID NO: 319461 - RNA, 22 nt, Human herpesvirus 5
aaucacagucuccuucucauca

SEQ ID NO: 319462 - RNA, 19 nt, Human herpesvirus 5
aaucacuuuuaacagcuca

SEQ ID NO: 319463 - RNA, 17 nt, Human herpesvirus 5
aaucagcagugaguaca

SEQ ID NO: 319464 - RNA, 15 nt, Human herpesvirus 5
aaucauaauauucua

SEQ ID NO: 319465 - RNA, 15 nt, Human herpesvirus 5
aaucauacauuguuu

SEQ ID NO: 319466 - RNA, 14 nt, Human herpesvirus 5
aaucaugccgguau

SEQ ID NO: 319467 - RNA, 13 nt, Human herpesvirus 5
aauccaucaucua

SEQ ID NO: 319468 - RNA, 16 nt, Human herpesvirus 5
aauccaucaucuacgu

SEQ ID NO: 319469 - RNA, 20 nt, Human herpesvirus 5
aaucccuguaauuauuccag

SEQ ID NO: 319470 - RNA, 17 nt, Human herpesvirus 5
aauccggcugacgcgga

SEQ ID NO: 319471 - RNA, 23 nt, Human herpesvirus 5
aaucugggagguggcugggcuca

SEQ ID NO: 319472 - RNA, 19 nt, Human herpesvirus 5
aaucugucguacuguccuu

SEQ ID NO: 319473 - RNA, 22 nt, Human herpesvirus 5
aaucuguguguucugugauaac

SEQ ID NO: 319474 - RNA, 23 nt, Human herpesvirus 5
aaucuucuaaaacgguacgggcc

SEQ ID NO: 319475 - RNA, 14 nt, Human herpesvirus 5
aaugaaccuuguaa

SEQ ID NO: 319476 - RNA, 12 nt, Human herpesvirus 5
aaugacaccuca

SEQ ID NO: 319477 - RNA, 12 nt, Human herpesvirus 5
aaugacauggau

SEQ ID NO: 319478 - RNA, 20 nt, Human herpesvirus 5
aaugacuaacccugggcuau

SEQ ID NO: 319479 - RNA, 23 nt, Human herpesvirus 5
aaugauugcaugaaaucacugug

SEQ ID NO: 319480 - RNA, 19 nt, Human herpesvirus 5
aaugcagcgaauugagcaa

SEQ ID NO: 319481 - RNA, 16 nt, Human herpesvirus 5
aaugcgcaucuugccg

SEQ ID NO: 319482 - RNA, 18 nt, Human herpesvirus 5
aaugggaaacggacacua

SEQ ID NO: 319483 - RNA, 17 nt, Human herpesvirus 5
aaugguaugaugaauca

SEQ ID NO: 319484 - RNA, 12 nt, Human herpesvirus 5
aaugguguuaca

SEQ ID NO: 319485 - RNA, 14 nt, Human herpesvirus 5
aauguauagauaca

SEQ ID NO: 319486 - RNA, 15 nt, Human herpesvirus 5
aaugucaucaucacg

SEQ ID NO: 319487 - RNA, 20 nt, Human herpesvirus 5
aauguuuuuauuuaaaacug

SEQ ID NO: 319488 - RNA, 17 nt, Human herpesvirus 5
aauuagugucgauacuu

SEQ ID NO: 319489 - RNA, 16 nt, Human herpesvirus 5
aauucaauaaaaacca

SEQ ID NO: 319490 - RNA, 17 nt, Human herpesvirus 5
aauucaauaaaaaccac

SEQ ID NO: 319491 - RNA, 19 nt, Human herpesvirus 5
aauucacaaaaacaccaau

SEQ ID NO: 319492 - RNA, 16 nt, Human herpesvirus 5
aauuccacucgcagau

SEQ ID NO: 319493 - RNA, 22 nt, Human herpesvirus 5
aauuccccugccuacgucuuca

SEQ ID NO: 319494 - RNA, 20 nt, Human herpesvirus 5
aauucuggcaagaguucaaa

SEQ ID NO: 319495 - RNA, 16 nt, Human herpesvirus 5
aauugagcaacaaaca

SEQ ID NO: 319496 - RNA, 19 nt, Human herpesvirus 5
aauugcaacuuaacgcgca

SEQ ID NO: 319497 - RNA, 20 nt, Human herpesvirus 5
aauugcgggcccugcugacg

SEQ ID NO: 319498 - RNA, 20 nt, Human herpesvirus 5
aauugcuacgucacaauaac

SEQ ID NO: 319499 - RNA, 21 nt, Human herpesvirus 5
aauuggcaggaaagacaacca

SEQ ID NO: 319500 - RNA, 19 nt, Human herpesvirus 5
aauugguacucuagugccc

SEQ ID NO: 319501 - RNA, 19 nt, Human herpesvirus 5
aauuuaacaagucacuaua

SEQ ID NO: 319502 - RNA, 16 nt, Human herpesvirus 5
aauuuuuucgcugcca

SEQ ID NO: 319503 - RNA, 13 nt, Human herpesvirus 5
acaaacaaugaca

SEQ ID NO: 319504 - RNA, 14 nt, Human herpesvirus 5
acaaacaaugacac

SEQ ID NO: 319505 - RNA, 12 nt, Human herpesvirus 5
acaaaccucuac

SEQ ID NO: 319506 - RNA, 22 nt, Human herpesvirus 5
acaaacguugagacuaccacau

SEQ ID NO: 319507 - RNA, 20 nt, Human herpesvirus 5
acaaacugcgacacgugcuu

SEQ ID NO: 319508 - RNA, 18 nt, Human herpesvirus 5
acaaagcacaauacacau

SEQ ID NO: 319509 - RNA, 15 nt, Human herpesvirus 5
acaaauagcagugac

SEQ ID NO: 319510 - RNA, 15 nt, Human herpesvirus 5
acaaaugcaugcaaa

SEQ ID NO: 319511 - RNA, 22 nt, Human herpesvirus 5
acaaaugcaugcaaacuucuca

SEQ ID NO: 319512 - RNA, 12 nt, Human herpesvirus 5
acaacacaucaa

SEQ ID NO: 319513 - RNA, 12 nt, Human herpesvirus 5
acaacacuaccc

SEQ ID NO: 319514 - RNA, 14 nt, Human herpesvirus 5
acaacagcagcaac

SEQ ID NO: 319515 - RNA, 21 nt, Human herpesvirus 5
acaacaguuaucagcaauaaa

SEQ ID NO: 319516 - RNA, 22 nt, Human herpesvirus 5
acaaccacacagauauccacaa

SEQ ID NO: 319517 - RNA, 14 nt, Human herpesvirus 5
acaaccugcugcac

SEQ ID NO: 319518 - RNA, 13 nt, Human herpesvirus 5
acaaccuguggaa

SEQ ID NO: 319519 - RNA, 14 nt, Human herpesvirus 5
acaacugguuccug

SEQ ID NO: 319520 - RNA, 17 nt, Human herpesvirus 5
acaacuuaaccacaaga

SEQ ID NO: 319521 - RNA, 19 nt, Human herpesvirus 5
acaagcgccgucacuuccc

SEQ ID NO: 319522 - RNA, 23 nt, Human herpesvirus 5
acaaggagcgacguaccagcugu

SEQ ID NO: 319523 - RNA, 14 nt, Human herpesvirus 5
acaagucacuauag

SEQ ID NO: 319524 - RNA, 15 nt, Human herpesvirus 5
acaaguucgaucuca

SEQ ID NO: 319525 - RNA, 15 nt, Human herpesvirus 5
acaauacacaugugg

SEQ ID NO: 319526 - RNA, 12 nt, Human herpesvirus 5
acaauacaucau

SEQ ID NO: 319527 - RNA, 13 nt, Human herpesvirus 5
acaauauugcuuc

SEQ ID NO: 319528 - RNA, 14 nt, Human herpesvirus 5
acaauggaagccau

SEQ ID NO: 319529 - RNA, 16 nt, Human herpesvirus 5
acaauggaagccauac

SEQ ID NO: 319530 - RNA, 17 nt, Human herpesvirus 5
acaauguauagauacac

SEQ ID NO: 319531 - RNA, 19 nt, Human herpesvirus 5
acaauguauagauacacgu

SEQ ID NO: 319532 - RNA, 20 nt, Human herpesvirus 5
acacacguucgacauggaca

SEQ ID NO: 319533 - RNA, 14 nt, Human herpesvirus 5
acacagauauccac

SEQ ID NO: 319534 - RNA, 17 nt, Human herpesvirus 5
acacaggccagcugcca

SEQ ID NO: 319535 - RNA, 17 nt, Human herpesvirus 5
acacaucugucaccuca

SEQ ID NO: 319536 - RNA, 18 nt, Human herpesvirus 5
acacaucugucaccucac

SEQ ID NO: 319537 - RNA, 17 nt, Human herpesvirus 5
acacauuauucuuggau

SEQ ID NO: 319538 - RNA, 21 nt, Human herpesvirus 5
acaccaucucgcggaagauac

SEQ ID NO: 319539 - RNA, 14 nt, Human herpesvirus 5
acaccgucaccacu

SEQ ID NO: 319540 - RNA, 15 nt, Human herpesvirus 5
acaccgugugguggu

SEQ ID NO: 319541 - RNA, 17 nt, Human herpesvirus 5
acaccucccuaacuauc

SEQ ID NO: 319542 - RNA, 19 nt, Human herpesvirus 5
acaccuguuggagcaacgg

SEQ ID NO: 319543 - RNA, 18 nt, Human herpesvirus 5
acacgccgucucgucaca

SEQ ID NO: 319544 - RNA, 16 nt, Human herpesvirus 5
acacguagugagcuuu

SEQ ID NO: 319545 - RNA, 17 nt, Human herpesvirus 5
acacguucgacauggac

SEQ ID NO: 319546 - RNA, 16 nt, Human herpesvirus 5
acacucaguacuuugg

SEQ ID NO: 319547 - RNA, 20 nt, Human herpesvirus 5
acacucgugacgucaaucaa

SEQ ID NO: 319548 - RNA, 13 nt, Human herpesvirus 5
acacugaaaacac

SEQ ID NO: 319549 - RNA, 22 nt, Human herpesvirus 5
acacugguauaaccagucaugc

SEQ ID NO: 319550 - RNA, 13 nt, Human herpesvirus 5
acacuuggugcuc

SEQ ID NO: 319551 - RNA, 17 nt, Human herpesvirus 5
acagaaugaaccuugua

SEQ ID NO: 319552 - RNA, 16 nt, Human herpesvirus 5
acagagucgccagucc

SEQ ID NO: 319553 - RNA, 14 nt, Human herpesvirus 5
acagauauccacaa

SEQ ID NO: 319554 - RNA, 19 nt, Human herpesvirus 5
acagcaaagacgaugauac

SEQ ID NO: 319555 - RNA, 15 nt, Human herpesvirus 5
acagcagauacaugc

SEQ ID NO: 319556 - RNA, 17 nt, Human herpesvirus 5
acagcaugaacaccaga

SEQ ID NO: 319557 - RNA, 18 nt, Human herpesvirus 5
acagcaugaacaccagau

SEQ ID NO: 319558 - RNA, 13 nt, Human herpesvirus 5
acagccacaucaa

SEQ ID NO: 319559 - RNA, 19 nt, Human herpesvirus 5
acagccacaucaacauaca

SEQ ID NO: 319560 - RNA, 23 nt, Human herpesvirus 5
acagcccaaggggaaaaggaaua

SEQ ID NO: 319561 - RNA, 14 nt, Human herpesvirus 5
acagccuuacagcu

SEQ ID NO: 319562 - RNA, 22 nt, Human herpesvirus 5
acagccuucccuuguaagacag

SEQ ID NO: 319563 - RNA, 14 nt, Human herpesvirus 5
acagcgacucucaa

SEQ ID NO: 319564 - RNA, 19 nt, Human herpesvirus 5
acagcggcggcggugguga

SEQ ID NO: 319565 - RNA, 18 nt, Human herpesvirus 5
acagcggcucgccgcaga

SEQ ID NO: 319566 - RNA, 17 nt, Human herpesvirus 5
acagcguccacaguuuc

SEQ ID NO: 319567 - RNA, 20 nt, Human herpesvirus 5
acagcguccacaguuuccga

SEQ ID NO: 319568 - RNA, 14 nt, Human herpesvirus 5
acagcuaccucaug

SEQ ID NO: 319569 - RNA, 22 nt, Human herpesvirus 5
acagcucaugccucuacaucac

SEQ ID NO: 319570 - RNA, 21 nt, Human herpesvirus 5
acagcuccugaaugagcucuu

SEQ ID NO: 319571 - RNA, 23 nt, Human herpesvirus 5
acagcucguguaucuuaugccag

SEQ ID NO: 319572 - RNA, 22 nt, Human herpesvirus 5
acaggcauacggcguauacaau

SEQ ID NO: 319573 - RNA, 14 nt, Human herpesvirus 5
acagggaaugggaa

SEQ ID NO: 319574 - RNA, 15 nt, Human herpesvirus 5
acaggguaacagccu

SEQ ID NO: 319575 - RNA, 22 nt, Human herpesvirus 5
acagucgacgggugguaccugc

SEQ ID NO: 319576 - RNA, 15 nt, Human herpesvirus 5
acagucuaucccuau

SEQ ID NO: 319577 - RNA, 15 nt, Human herpesvirus 5
acaguuaucagcaau

SEQ ID NO: 319578 - RNA, 18 nt, Human herpesvirus 5
acaguuaucagcaauaaa

SEQ ID NO: 319579 - RNA, 12 nt, Human herpesvirus 5
acaguugauaac

SEQ ID NO: 319580 - RNA, 12 nt, Human herpesvirus 5
acauaaaaccac

SEQ ID NO: 319581 - RNA, 14 nt, Human herpesvirus 5
acauaaaaccaccg

SEQ ID NO: 319582 - RNA, 15 nt, Human herpesvirus 5
acauacgcaggggcu

SEQ ID NO: 319583 - RNA, 17 nt, Human herpesvirus 5
acauacgggacuuacau

SEQ ID NO: 319584 - RNA, 21 nt, Human herpesvirus 5
acauagcccgcuucaacgccu

SEQ ID NO: 319585 - RNA, 17 nt, Human herpesvirus 5
acauaugcgaugugcaa

SEQ ID NO: 319586 - RNA, 23 nt, Human herpesvirus 5
acauauggacuggagagacuuuc

SEQ ID NO: 319587 - RNA, 12 nt, Human herpesvirus 5
acauauguagca

SEQ ID NO: 319588 - RNA, 17 nt, Human herpesvirus 5
acauauguagcacucaa

SEQ ID NO: 319589 - RNA, 19 nt, Human herpesvirus 5
acauauguuuugacugcaa

SEQ ID NO: 319590 - RNA, 24 nt, Human herpesvirus 5
acaucaacgacgccacacacaucu

SEQ ID NO: 319591 - RNA, 14 nt, Human herpesvirus 5
acaucacaguucac

SEQ ID NO: 319592 - RNA, 20 nt, Human herpesvirus 5
acaucaccaacguuaccucc

SEQ ID NO: 319593 - RNA, 13 nt, Human herpesvirus 5
acaucaguuucca

SEQ ID NO: 319594 - RNA, 16 nt, Human herpesvirus 5
acaucauaaaaaccau

SEQ ID NO: 319595 - RNA, 12 nt, Human herpesvirus 5
acaucgucacac

SEQ ID NO: 319596 - RNA, 18 nt, Human herpesvirus 5
acaucgucacaccuauca

SEQ ID NO: 319597 - RNA, 21 nt, Human herpesvirus 5
acaucuguacaaggaucauau

SEQ ID NO: 319598 - RNA, 16 nt, Human herpesvirus 5
acaucugucaccucac

SEQ ID NO: 319599 - RNA, 22 nt, Human herpesvirus 5
acaugaugaaugucaucaucac

SEQ ID NO: 319600 - RNA, 24 nt, Human herpesvirus 5
acaugcaacaguacuacuaccaau

SEQ ID NO: 319601 - RNA, 19 nt, Human herpesvirus 5
acaugcccuguaagauaua

SEQ ID NO: 319602 - RNA, 20 nt, Human herpesvirus 5
acaugcccuguaagauauaa

SEQ ID NO: 319603 - RNA, 19 nt, Human herpesvirus 5
acaugcuauaagacagccu

SEQ ID NO: 319604 - RNA, 20 nt, Human herpesvirus 5
acaugggggggaacaucguc

SEQ ID NO: 319605 - RNA, 17 nt, Human herpesvirus 5
acaugguuaucauccag

SEQ ID NO: 319606 - RNA, 19 nt, Human herpesvirus 5
acauuaaaaaaaaaacaac

SEQ ID NO: 319607 - RNA, 17 nt, Human herpesvirus 5
acauuagacacacgggg

SEQ ID NO: 319608 - RNA, 14 nt, Human herpesvirus 5
acauucaauacauc

SEQ ID NO: 319609 - RNA, 21 nt, Human herpesvirus 5
accaaaccguccuuuuaucau

SEQ ID NO: 319610 - RNA, 14 nt, Human herpesvirus 5
accaagcaugccac

SEQ ID NO: 319611 - RNA, 16 nt, Human herpesvirus 5
accaaggcgagccacu

SEQ ID NO: 319612 - RNA, 17 nt, Human herpesvirus 5
accaaggcgagccacuc

SEQ ID NO: 319613 - RNA, 23 nt, Human herpesvirus 5
accaauacugcauccaucacauc

SEQ ID NO: 319614 - RNA, 22 nt, Human herpesvirus 5
accacacucgugacgucaauca

SEQ ID NO: 319615 - RNA, 22 nt, Human herpesvirus 5
accacccuguuccccgugacgu

SEQ ID NO: 319616 - RNA, 22 nt, Human herpesvirus 5
accaccgucgccgucacugcca

SEQ ID NO: 319617 - RNA, 20 nt, Human herpesvirus 5
accacggcuugcaaaacuac

SEQ ID NO: 319618 - RNA, 20 nt, Human herpesvirus 5
accacgguacaaaccucuac

SEQ ID NO: 319619 - RNA, 14 nt, Human herpesvirus 5
accacgucaauaaa

SEQ ID NO: 319620 - RNA, 19 nt, Human herpesvirus 5
accacgucgauucccaucu

SEQ ID NO: 319621 - RNA, 14 nt, Human herpesvirus 5
accacuacuaccuc

SEQ ID NO: 319622 - RNA, 21 nt, Human herpesvirus 5
accagcgccaccauagccacu

SEQ ID NO: 319623 - RNA, 23 nt, Human herpesvirus 5
accagcgccaccauagccacuac

SEQ ID NO: 319624 - RNA, 22 nt, Human herpesvirus 5
accagcugggccuacaccaguu

SEQ ID NO: 319625 - RNA, 11 nt, Human herpesvirus 5
accagcugucc

SEQ ID NO: 319626 - RNA, 21 nt, Human herpesvirus 5
accaggcucugcgccgucucu

SEQ ID NO: 319627 - RNA, 22 nt, Human herpesvirus 5
accaggcucugcgccgucucuu

SEQ ID NO: 319628 - RNA, 16 nt, Human herpesvirus 5
accaucagcaaagcuc

SEQ ID NO: 319629 - RNA, 20 nt, Human herpesvirus 5
accauccucacacugacgga

SEQ ID NO: 319630 - RNA, 20 nt, Human herpesvirus 5
accaugcagaccuacagcac

SEQ ID NO: 319631 - RNA, 20 nt, Human herpesvirus 5
accauggucggugacaucac

SEQ ID NO: 319632 - RNA, 20 nt, Human herpesvirus 5
agcaugcauaagaagccaag

SEQ ID NO: 319633 - RNA, 16 nt, Human herpesvirus 5
agccagcuacagccac

SEQ ID NO: 319634 - RNA, 22 nt, Human herpesvirus 5
agcccaagaccauuaacaauuc

SEQ ID NO: 319635 - RNA, 21 nt, Human herpesvirus 5
agccccaagcgguacggacua

SEQ ID NO: 319636 - RNA, 17 nt, Human herpesvirus 5
agccccgucaaaacaca

SEQ ID NO: 319637 - RNA, 16 nt, Human herpesvirus 5
agccgacaaccugcug

SEQ ID NO: 319638 - RNA, 17 nt, Human herpesvirus 5
agccgugggaaugguaa

SEQ ID NO: 319639 - RNA, 17 nt, Human herpesvirus 5
agccuaucaaugaagac

SEQ ID NO: 319640 - RNA, 15 nt, Human herpesvirus 5
agccucuacaaacua

SEQ ID NO: 319641 - RNA, 13 nt, Human herpesvirus 5
agccucuguguuc

SEQ ID NO: 319642 - RNA, 15 nt, Human herpesvirus 5
agccuucccuuguaa

SEQ ID NO: 319643 - RNA, 21 nt, Human herpesvirus 5
agccuucccuuguaagacaga

SEQ ID NO: 319644 - RNA, 16 nt, Human herpesvirus 5
agcgaauugagcaaca

SEQ ID NO: 319645 - RNA, 12 nt, Human herpesvirus 5
agcgagaacuaa

SEQ ID NO: 319646 - RNA, 13 nt, Human herpesvirus 5
agcgaguggggca

SEQ ID NO: 319647 - RNA, 20 nt, Human herpesvirus 5
agcgaguugcugugcaccuc

SEQ ID NO: 319648 - RNA, 16 nt, Human herpesvirus 5
agcgccgcgacggggu

SEQ ID NO: 319649 - RNA, 14 nt, Human herpesvirus 5
agcgccgucacuuc

SEQ ID NO: 319650 - RNA, 17 nt, Human herpesvirus 5
agcggaggaggugaccu

SEQ ID NO: 319651 - RNA, 16 nt, Human herpesvirus 5
agcggccgcagugggc

SEQ ID NO: 319652 - RNA, 23 nt, Human herpesvirus 5
agcggcggcgguggugacugggg

SEQ ID NO: 319653 - RNA, 15 nt, Human herpesvirus 5
agcgguaccagacgc

SEQ ID NO: 319654 - RNA, 19 nt, Human herpesvirus 5
agcggucuguucaggugga

SEQ ID NO: 319655 - RNA, 13 nt, Human herpesvirus 5
agcggugcugaug

SEQ ID NO: 319656 - RNA, 21 nt, Human herpesvirus 5
agcguauuuucuacuccgaau

SEQ ID NO: 319657 - RNA, 12 nt, Human herpesvirus 5
agcgucuggcca

SEQ ID NO: 319658 - RNA, 18 nt, Human herpesvirus 5
agcguggauggucauaua

SEQ ID NO: 319659 - RNA, 19 nt, Human herpesvirus 5
agcuaauagauuaaugugu

SEQ ID NO: 319660 - RNA, 14 nt, Human herpesvirus 5
agcucacuacgugu

SEQ ID NO: 319661 - RNA, 15 nt, Human herpesvirus 5
agcucaugccucuac

SEQ ID NO: 319662 - RNA, 20 nt, Human herpesvirus 5
agcucaugccucuacaucac

SEQ ID NO: 319663 - RNA, 14 nt, Human herpesvirus 5
agcucaugucgaga

SEQ ID NO: 319664 - RNA, 13 nt, Human herpesvirus 5
agcuccaaaacga

SEQ ID NO: 319665 - RNA, 19 nt, Human herpesvirus 5
agcuccguucgcgcagcgc

SEQ ID NO: 319666 - RNA, 18 nt, Human herpesvirus 5
agcucguuucgccggcgc

SEQ ID NO: 319667 - RNA, 14 nt, Human herpesvirus 5
agcucugucggcgc

SEQ ID NO: 319668 - RNA, 15 nt, Human herpesvirus 5
agcucuuagcgugug

SEQ ID NO: 319669 - RNA, 17 nt, Human herpesvirus 5
agcucuugcgaggcuuu

SEQ ID NO: 319670 - RNA, 23 nt, Human herpesvirus 5
agcucuugcgaggcuuugaugua

SEQ ID NO: 319671 - RNA, 19 nt, Human herpesvirus 5
agcucuuuuccagcgugcg

SEQ ID NO: 319672 - RNA, 13 nt, Human herpesvirus 5
agcugaacaauaa

SEQ ID NO: 319673 - RNA, 18 nt, Human herpesvirus 5
agcugcgcaggccgccgc

SEQ ID NO: 319674 - RNA, 12 nt, Human herpesvirus 5
agcuggcuuuca

SEQ ID NO: 319675 - RNA, 18 nt, Human herpesvirus 5
agcuugguguuuuuucuc

SEQ ID NO: 319676 - RNA, 18 nt, Human herpesvirus 5
aggaaaacggaaugucag

SEQ ID NO: 319677 - RNA, 22 nt, Human herpesvirus 5
aggaagcggcgguagaaacguc

SEQ ID NO: 319678 - RNA, 13 nt, Human herpesvirus 5
aggaaucugggag

SEQ ID NO: 319679 - RNA, 19 nt, Human herpesvirus 5
aggacgacgacuacuauua

SEQ ID NO: 319680 - RNA, 18 nt, Human herpesvirus 5
aggacucgcucacgucgu

SEQ ID NO: 319681 - RNA, 17 nt, Human herpesvirus 5
aggacuggaagugucac

SEQ ID NO: 319682 - RNA, 15 nt, Human herpesvirus 5
aggagacaccgucgc

SEQ ID NO: 319683 - RNA, 21 nt, Human herpesvirus 5
aggagcucacccggcugcugg

SEQ ID NO: 319684 - RNA, 18 nt, Human herpesvirus 5
aggagguauggugaccau

SEQ ID NO: 319685 - RNA, 20 nt, Human herpesvirus 5
aggcacauacgggacuuaca

SEQ ID NO: 319686 - RNA, 14 nt, Human herpesvirus 5
aggcacgucauuga

SEQ ID NO: 319687 - RNA, 20 nt, Human herpesvirus 5
aggcauacggcguauacaau

SEQ ID NO: 319688 - RNA, 14 nt, Human herpesvirus 5
aggccacgugcaac

SEQ ID NO: 319689 - RNA, 14 nt, Human herpesvirus 5
aggccagcugccac

SEQ ID NO: 319690 - RNA, 23 nt, Human herpesvirus 5
aggcccggguucgcgauucucac

SEQ ID NO: 319691 - RNA, 22 nt, Human herpesvirus 5
aggcgccgcaaacaucuaccuc

SEQ ID NO: 319692 - RNA, 16 nt, Human herpesvirus 5
aggcgcguaaaacucc

SEQ ID NO: 319693 - RNA, 16 nt, Human herpesvirus 5
aggcgcuguacauucu

SEQ ID NO: 319694 - RNA, 17 nt, Human herpesvirus 5
aggcggcggcgaucgca

SEQ ID NO: 319695 - RNA, 16 nt, Human herpesvirus 5
aggcggcugaucugca

SEQ ID NO: 319696 - RNA, 16 nt, Human herpesvirus 5
aggcucgucgugggcu

SEQ ID NO: 319697 - RNA, 23 nt, Human herpesvirus 5
aggcucgucgugggcuacuuuga

SEQ ID NO: 319698 - RNA, 18 nt, Human herpesvirus 5
aggcucugcgccgucucu

SEQ ID NO: 319699 - RNA, 17 nt, Human herpesvirus 5
aggcugaacgagugugc

SEQ ID NO: 319700 - RNA, 22 nt, Human herpesvirus 5
aggcuuaacacuagccaucaca

SEQ ID NO: 319701 - RNA, 13 nt, Human herpesvirus 5
aggcuugucaugg

SEQ ID NO: 319702 - RNA, 14 nt, Human herpesvirus 5
agggacaaagcagc

SEQ ID NO: 319703 - RNA, 22 nt, Human herpesvirus 5
agggagccccaucauggcccaa

SEQ ID NO: 319704 - RNA, 19 nt, Human herpesvirus 5
agggcagaacuggugcuau

SEQ ID NO: 319705 - RNA, 13 nt, Human herpesvirus 5
agggcuccgucug

SEQ ID NO: 319706 - RNA, 23 nt, Human herpesvirus 5
agggcuguucgaugugguucugg

SEQ ID NO: 319707 - RNA, 21 nt, Human herpesvirus 5
aggggaaaaggaauagcaaga

SEQ ID NO: 319708 - RNA, 22 nt, Human herpesvirus 5
aggggcaccuguauacugugaa

SEQ ID NO: 319709 - RNA, 21 nt, Human herpesvirus 5
aggggcguguguuugacauuu

SEQ ID NO: 319710 - RNA, 20 nt, Human herpesvirus 5
agggggcuuuccaaagccga

SEQ ID NO: 319711 - RNA, 22 nt, Human herpesvirus 5
aggguaacagccuucccuugua

SEQ ID NO: 319712 - RNA, 17 nt, Human herpesvirus 5
agggucacggugccaug

SEQ ID NO: 319713 - RNA, 17 nt, Human herpesvirus 5
aggguggugacuuacau

SEQ ID NO: 319714 - RNA, 20 nt, Human herpesvirus 5
agguaaagcccguggcccag

SEQ ID NO: 319715 - RNA, 21 nt, Human herpesvirus 5
agguacaugucccgcauauuu

SEQ ID NO: 319716 - RNA, 20 nt, Human herpesvirus 5
agguacgaaccagcugguac

SEQ ID NO: 319717 - RNA, 19 nt, Human herpesvirus 5
agguagguggccaugauga

SEQ ID NO: 319718 - RNA, 14 nt, Human herpesvirus 5
agguaugugugaau

SEQ ID NO: 319719 - RNA, 19 nt, Human herpesvirus 5
aggucagcgugucugauac

SEQ ID NO: 319720 - RNA, 23 nt, Human herpesvirus 5
agguccuuuggguccagccagca

SEQ ID NO: 319721 - RNA, 22 nt, Human herpesvirus 5
aggucgcgccgccgcagcaucc

SEQ ID NO: 319722 - RNA, 23 nt, Human herpesvirus 5
aggucguagugcggcgugcugca

SEQ ID NO: 319723 - RNA, 14 nt, Human herpesvirus 5
aggucguggaggca

SEQ ID NO: 319724 - RNA, 18 nt, Human herpesvirus 5
aggugaacgagucgcuca

SEQ ID NO: 319725 - RNA, 14 nt, Human herpesvirus 5
aggugauccaguua

SEQ ID NO: 319726 - RNA, 18 nt, Human herpesvirus 5
aggugcugcauguguauu

SEQ ID NO: 319727 - RNA, 13 nt, Human herpesvirus 5
agguggccaugau

SEQ ID NO: 319728 - RNA, 19 nt, Human herpesvirus 5
agguggccugcaucuuccc

SEQ ID NO: 319729 - RNA, 23 nt, Human herpesvirus 5
aggugucauguucgacggucaga

SEQ ID NO: 319730 - RNA, 17 nt, Human herpesvirus 5
agguguggcgaaagccu

SEQ ID NO: 319731 - RNA, 21 nt, Human herpesvirus 5
aguaaaagggacgucaaagcu

SEQ ID NO: 319732 - RNA, 18 nt, Human herpesvirus 5
aguaacaccgucaccacu

SEQ ID NO: 319733 - RNA, 19 nt, Human herpesvirus 5
aguaacaccgucaccacuc

SEQ ID NO: 319734 - RNA, 17 nt, Human herpesvirus 5
aguaauaccaccgucac

SEQ ID NO: 319735 - RNA, 12 nt, Human herpesvirus 5
aguaaucaaauu

SEQ ID NO: 319736 - RNA, 15 nt, Human herpesvirus 5
aguaaugcauuauca

SEQ ID NO: 319737 - RNA, 21 nt, Human herpesvirus 5
aguaauggaaaguaucgucac

SEQ ID NO: 319738 - RNA, 13 nt, Human herpesvirus 5
aguaauguauacu

SEQ ID NO: 319739 - RNA, 19 nt, Human herpesvirus 5
aguacaaaacaggaaagga

SEQ ID NO: 319740 - RNA, 17 nt, Human herpesvirus 5
aguacaacaguuaucag

SEQ ID NO: 319741 - RNA, 21 nt, Human herpesvirus 5
aguacaacaguuaucagcaau

SEQ ID NO: 319742 - RNA, 20 nt, Human herpesvirus 5
aguacacgcaggcaagccaa

SEQ ID NO: 319743 - RNA, 23 nt, Human herpesvirus 5
auacuaguaaaaaaagugcguca

SEQ ID NO: 319744 - RNA, 17 nt, Human herpesvirus 5
auacugaaaaacuugaa

SEQ ID NO: 319745 - RNA, 13 nt, Human herpesvirus 5
auacuuaccaccg

SEQ ID NO: 319746 - RNA, 15 nt, Human herpesvirus 5
auagaauacugcuau

SEQ ID NO: 319747 - RNA, 20 nt, Human herpesvirus 5
auagaccccaagccaaaaac

SEQ ID NO: 319748 - RNA, 16 nt, Human herpesvirus 5
auagaguuacaugcaa

SEQ ID NO: 319749 - RNA, 17 nt, Human herpesvirus 5
auagauagcaagccaga

SEQ ID NO: 319750 - RNA, 12 nt, Human herpesvirus 5
auagcaagaaua

SEQ ID NO: 319751 - RNA, 22 nt, Human herpesvirus 5
accauugagaaagcuaacauuc

SEQ ID NO: 319752 - RNA, 22 nt, Human herpesvirus 5
acggagcucccacguuuacgcg

SEQ ID NO: 319753 - RNA, 17 nt, Human herpesvirus 5
acuucagcagcaccucu

SEQ ID NO: 319754 - RNA, 13 nt, Human herpesvirus 5
acuucccaugcaa

SEQ ID NO: 319755 - RNA, 18 nt, Human herpesvirus 5
acuucuaccaucuccguc

SEQ ID NO: 319756 - RNA, 23 nt, Human herpesvirus 5
acuucuacggaguuuucccucag

SEQ ID NO: 319757 - RNA, 22 nt, Human herpesvirus 5
acuucucguacgacgucugcuc

SEQ ID NO: 319758 - RNA, 15 nt, Human herpesvirus 5
acuucuucuacucac

SEQ ID NO: 319759 - RNA, 23 nt, Human herpesvirus 5
acuucuucuacucacaauggaag

SEQ ID NO: 319760 - RNA, 23 nt, Human herpesvirus 5
acuucuuggugaucuucaccauc

SEQ ID NO: 319761 - RNA, 23 nt, Human herpesvirus 5
acuuggaaucugguacuuaguca

SEQ ID NO: 319762 - RNA, 19 nt, Human herpesvirus 5
acuuggccgaccugugcgu

SEQ ID NO: 319763 - RNA, 17 nt, Human herpesvirus 5
acuuuacauaaaaccac

SEQ ID NO: 319764 - RNA, 18 nt, Human herpesvirus 5
acuuuacauaaaaccacc

SEQ ID NO: 319765 - RNA, 14 nt, Human herpesvirus 5
acuuuggugacuug

SEQ ID NO: 319766 - RNA, 19 nt, Human herpesvirus 5
acuuuuaacagcucaugcc

SEQ ID NO: 319767 - RNA, 16 nt, Human herpesvirus 5
acuuuuuuuaaccaau

SEQ ID NO: 319768 - RNA, 22 nt, Human herpesvirus 5
acuuuuuuuacuaguauccacg

SEQ ID NO: 319769 - RNA, 19 nt, Human herpesvirus 5
agaaaaaaaaaaaacacgc

SEQ ID NO: 319770 - RNA, 24 nt, Human herpesvirus 5
agaaaaaaugguguuacacacucc

SEQ ID NO: 319771 - RNA, 15 nt, Human herpesvirus 5
agaaaaccacacugu

SEQ ID NO: 319772 - RNA, 17 nt, Human herpesvirus 5
agaaaauuacuacguaa

SEQ ID NO: 319773 - RNA, 13 nt, Human herpesvirus 5
agaaacaccgucu

SEQ ID NO: 319774 - RNA, 21 nt, Human herpesvirus 5
agaaacagcagcgagucuaga

SEQ ID NO: 319775 - RNA, 12 nt, Human herpesvirus 5
agaaacccucaa

SEQ ID NO: 319776 - RNA, 15 nt, Human herpesvirus 5
agaaacgcuggaaaa

SEQ ID NO: 319777 - RNA, 15 nt, Human herpesvirus 5
agaaacgugagucuc

SEQ ID NO: 319778 - RNA, 17 nt, Human herpesvirus 5
agaaagaacgugguugu

SEQ ID NO: 319779 - RNA, 13 nt, Human herpesvirus 5
agaacauauauaa

SEQ ID NO: 319780 - RNA, 15 nt, Human herpesvirus 5
agaacggagugguga

SEQ ID NO: 319781 - RNA, 15 nt, Human herpesvirus 5
agaacuaauauugca

SEQ ID NO: 319782 - RNA, 17 nt, Human herpesvirus 5
agaacucucugccacua

SEQ ID NO: 319783 - RNA, 11 nt, Human herpesvirus 5
agaacugaguu

SEQ ID NO: 319784 - RNA, 15 nt, Human herpesvirus 5
agaacuuugcugcua

SEQ ID NO: 319785 - RNA, 15 nt, Human herpesvirus 5
agaagauacucgaug

SEQ ID NO: 319786 - RNA, 19 nt, Human herpesvirus 5
agaagcacccauuacagua

SEQ ID NO: 319787 - RNA, 14 nt, Human herpesvirus 5
agaaggccaugucc

SEQ ID NO: 319788 - RNA, 18 nt, Human herpesvirus 5
agaagguuuugugccaac

SEQ ID NO: 319789 - RNA, 14 nt, Human herpesvirus 5
agaauaggaagaaa

SEQ ID NO: 319790 - RNA, 23 nt, Human herpesvirus 5
agaaucaccgucgagaaaacuaa

SEQ ID NO: 319791 - RNA, 13 nt, Human herpesvirus 5
agaaucagcagug

SEQ ID NO: 319792 - RNA, 15 nt, Human herpesvirus 5
agaaugaaccuugua

SEQ ID NO: 319793 - RNA, 15 nt, Human herpesvirus 5
agaauggaccgucga

SEQ ID NO: 319794 - RNA, 21 nt, Human herpesvirus 5
agaauggccauguacguuuau

SEQ ID NO: 319795 - RNA, 13 nt, Human herpesvirus 5
agacaacaaugac

SEQ ID NO: 319796 - RNA, 22 nt, Human herpesvirus 5
agacaagguggugaacugugau

SEQ ID NO: 319797 - RNA, 15 nt, Human herpesvirus 5
agacaauaaacagua

SEQ ID NO: 319798 - RNA, 12 nt, Human herpesvirus 5
agacagccacau

SEQ ID NO: 319799 - RNA, 15 nt, Human herpesvirus 5
agacagccacaucaa

SEQ ID NO: 319800 - RNA, 16 nt, Human herpesvirus 5
agacagccacaucaac

SEQ ID NO: 319801 - RNA, 15 nt, Human herpesvirus 5
agacaggacaccgca

SEQ ID NO: 319802 - RNA, 13 nt, Human herpesvirus 5
agacaucacaguu

SEQ ID NO: 319803 - RNA, 15 nt, Human herpesvirus 5
agacauccaauuaca

SEQ ID NO: 319804 - RNA, 19 nt, Human herpesvirus 5
agacauccaauuacaccga

SEQ ID NO: 319805 - RNA, 17 nt, Human herpesvirus 5
agacaucuuaugaagcu

SEQ ID NO: 319806 - RNA, 22 nt, Human herpesvirus 5
agacaucuuaugaagcugaaca

SEQ ID NO: 319807 - RNA, 13 nt, Human herpesvirus 5
agacauuccccac

SEQ ID NO: 319808 - RNA, 22 nt, Human herpesvirus 5
agaccaagagcaugcugugggc

SEQ ID NO: 319809 - RNA, 15 nt, Human herpesvirus 5
agacccacuaccugg

SEQ ID NO: 319810 - RNA, 16 nt, Human herpesvirus 5
agacccgcgucccugg

SEQ ID NO: 319811 - RNA, 16 nt, Human herpesvirus 5
agaccucaccaucuca

SEQ ID NO: 319812 - RNA, 19 nt, Human herpesvirus 5
agacggcuauccagcagcu

SEQ ID NO: 319813 - RNA, 20 nt, Human herpesvirus 5
agacgucggcgguccuccag

SEQ ID NO: 319814 - RNA, 12 nt, Human herpesvirus 5
agacuaccacau

SEQ ID NO: 319815 - RNA, 14 nt, Human herpesvirus 5
agacuaucuacaac

SEQ ID NO: 319816 - RNA, 14 nt, Human herpesvirus 5
agacucacuuuauu

SEQ ID NO: 319817 - RNA, 19 nt, Human herpesvirus 5
agacugcgguuaacccuag

SEQ ID NO: 319818 - RNA, 14 nt, Human herpesvirus 5
agacugugguggga

SEQ ID NO: 319819 - RNA, 19 nt, Human herpesvirus 5
agagaaccuaccuacuuca

SEQ ID NO: 319820 - RNA, 19 nt, Human herpesvirus 5
agagacaccaauugcuuua

SEQ ID NO: 319821 - RNA, 15 nt, Human herpesvirus 5
agagacuugugauau

SEQ ID NO: 319822 - RNA, 20 nt, Human herpesvirus 5
agagcaaaaccuuacagcuu

SEQ ID NO: 319823 - RNA, 20 nt, Human herpesvirus 5
agagccacguugagauucag

SEQ ID NO: 319824 - RNA, 21 nt, Human herpesvirus 5
agagccgcguggcuguagcua

SEQ ID NO: 319825 - RNA, 21 nt, Human herpesvirus 5
agaggaguggcugcuguguug

SEQ ID NO: 319826 - RNA, 15 nt, Human herpesvirus 5
agagucgccagucca

SEQ ID NO: 319827 - RNA, 17 nt, Human herpesvirus 5
agaguuguggcaaagag

SEQ ID NO: 319828 - RNA, 21 nt, Human herpesvirus 5
agauaaaauuugauuacuccg

SEQ ID NO: 319829 - RNA, 21 nt, Human herpesvirus 5
agauacauguucauaaacucu

SEQ ID NO: 319830 - RNA, 21 nt, Human herpesvirus 5
agauacgcaguguuguuaucc

SEQ ID NO: 319831 - RNA, 21 nt, Human herpesvirus 5
agauacucgauggggucgugg

SEQ ID NO: 319832 - RNA, 22 nt, Human herpesvirus 5
agauagagaaaccgcauguguu

SEQ ID NO: 319833 - RNA, 21 nt, Human herpesvirus 5
agauagguaaagcggugggug

SEQ ID NO: 319834 - RNA, 21 nt, Human herpesvirus 5
agaucgucuacggcuccacac

SEQ ID NO: 319835 - RNA, 16 nt, Human herpesvirus 5
agaugaacaagguucu

SEQ ID NO: 319836 - RNA, 17 nt, Human herpesvirus 5
agaugcagacgguggug

SEQ ID NO: 319837 - RNA, 16 nt, Human herpesvirus 5
agaugccgauguguga

SEQ ID NO: 319838 - RNA, 19 nt, Human herpesvirus 5
agaugccgaugugugacua

SEQ ID NO: 319839 - RNA, 15 nt, Human herpesvirus 5
agaugcuagcaauaa

SEQ ID NO: 319840 - RNA, 19 nt, Human herpesvirus 5
agaugggggagaugacacg

SEQ ID NO: 319841 - RNA, 12 nt, Human herpesvirus 5
agaugugguggg

SEQ ID NO: 319842 - RNA, 22 nt, Human herpesvirus 5
agauguggugggagucaacacu

SEQ ID NO: 319843 - RNA, 18 nt, Human herpesvirus 5
agauucgcgggaucguca

SEQ ID NO: 319844 - RNA, 15 nt, Human herpesvirus 5
agcaacaacagucgc

SEQ ID NO: 319845 - RNA, 20 nt, Human herpesvirus 5
agcaaccaccguuucuacaa

SEQ ID NO: 319846 - RNA, 18 nt, Human herpesvirus 5
agcaagaguugcaacgcg

SEQ ID NO: 319847 - RNA, 14 nt, Human herpesvirus 5
agcaagcagucaaa

SEQ ID NO: 319848 - RNA, 17 nt, Human herpesvirus 5
agcaagccagauacuau

SEQ ID NO: 319849 - RNA, 18 nt, Human herpesvirus 5
agcaagccagauacuaua

SEQ ID NO: 319850 - RNA, 18 nt, Human herpesvirus 5
agcaauaaaagcacuuca

SEQ ID NO: 319851 - RNA, 12 nt, Human herpesvirus 5
agcacaccugcc

SEQ ID NO: 319852 - RNA, 15 nt, Human herpesvirus 5
agcacagagacacca

SEQ ID NO: 319853 - RNA, 14 nt, Human herpesvirus 5
agcaccaugugcaa

SEQ ID NO: 319854 - RNA, 15 nt, Human herpesvirus 5
agcaccaugugcaaa

SEQ ID NO: 319855 - RNA, 12 nt, Human herpesvirus 5
agcaccgugaua

SEQ ID NO: 319856 - RNA, 14 nt, Human herpesvirus 5
agcacgaucuccuc

SEQ ID NO: 319857 - RNA, 16 nt, Human herpesvirus 5
agcacgucagugguga

SEQ ID NO: 319858 - RNA, 16 nt, Human herpesvirus 5
agcacuucagaaucua

SEQ ID NO: 319859 - RNA, 12 nt, Human herpesvirus 5
agcagagccacc

SEQ ID NO: 319860 - RNA, 19 nt, Human herpesvirus 5
agcagagggucguuguccu

SEQ ID NO: 319861 - RNA, 15 nt, Human herpesvirus 5
agcagcaacagcagc

SEQ ID NO: 319862 - RNA, 23 nt, Human herpesvirus 5
agcagccgcgcuugucgccaugc

SEQ ID NO: 319863 - RNA, 14 nt, Human herpesvirus 5
agcagcucuuccaa

SEQ ID NO: 319864 - RNA, 15 nt, Human herpesvirus 5
agcagcuggugcauc

SEQ ID NO: 319865 - RNA, 22 nt, Human herpesvirus 5
agcaggcuuugacggugaugcg

SEQ ID NO: 319866 - RNA, 17 nt, Human herpesvirus 5
agcaggguaaaaaccac

SEQ ID NO: 319867 - RNA, 13 nt, Human herpesvirus 5
augauuagcaaua

SEQ ID NO: 319868 - RNA, 17 nt, Human herpesvirus 5
augcaacgcuuucagga

SEQ ID NO: 319869 - RNA, 18 nt, Human herpesvirus 5
augcacagcgucuggcca

SEQ ID NO: 319870 - RNA, 17 nt, Human herpesvirus 5
augcauaagaagccaag

SEQ ID NO: 319871 - RNA, 16 nt, Human herpesvirus 5
augcauaucgaucuau

SEQ ID NO: 319872 - RNA, 12 nt, Human herpesvirus 5
augcaugucgcg

SEQ ID NO: 319873 - RNA, 19 nt, Human herpesvirus 5
augcauucugguaccugcu

SEQ ID NO: 319874 - RNA, 18 nt, Human herpesvirus 5
augccaccaugaacugac

SEQ ID NO: 319875 - RNA, 23 nt, Human herpesvirus 5
augccagaguagauuuucaugaa

SEQ ID NO: 319876 - RNA, 18 nt, Human herpesvirus 5
augccgaucaugugcuua

SEQ ID NO: 319877 - RNA, 17 nt, Human herpesvirus 5
augccucauccuuauga

SEQ ID NO: 319878 - RNA, 14 nt, Human herpesvirus 5
augcgaugugcaau

SEQ ID NO: 319879 - RNA, 15 nt, Human herpesvirus 5
augcgcaucuugccg

SEQ ID NO: 319880 - RNA, 18 nt, Human herpesvirus 5
augcggcacccggcugca

SEQ ID NO: 319881 - RNA, 13 nt, Human herpesvirus 5
augcguacuucau

SEQ ID NO: 319882 - RNA, 12 nt, Human herpesvirus 5
augcguguucag

SEQ ID NO: 319883 - RNA, 18 nt, Human herpesvirus 5
augcuaauuauugccaua

SEQ ID NO: 319884 - RNA, 21 nt, Human herpesvirus 5
augcuucuuugguaucuacau

SEQ ID NO: 319885 - RNA, 20 nt, Human herpesvirus 5
auggacugaauauacagacu

SEQ ID NO: 319886 - RNA, 16 nt, Human herpesvirus 5
auggaguuuguguaau

SEQ ID NO: 319887 - RNA, 17 nt, Human herpesvirus 5
auggaguuuguguaaug

SEQ ID NO: 319888 - RNA, 14 nt, Human herpesvirus 5
auggauaacgacag

SEQ ID NO: 319889 - RNA, 24 nt, Human herpesvirus 5
auggaucaucuguuuuugcugcaa

SEQ ID NO: 319890 - RNA, 20 nt, Human herpesvirus 5
auggcacggucaucuacgug

SEQ ID NO: 319891 - RNA, 15 nt, Human herpesvirus 5
auggcccucaugacg

SEQ ID NO: 319892 - RNA, 23 nt, Human herpesvirus 5
auggcguccgggcucggugaccu

SEQ ID NO: 319893 - RNA, 18 nt, Human herpesvirus 5
augggaagaaaccguguu

SEQ ID NO: 319894 - RNA, 20 nt, Human herpesvirus 5
auggguagccaucgcauucc

SEQ ID NO: 319895 - RNA, 13 nt, Human herpesvirus 5
auggucauauaua

SEQ ID NO: 319896 - RNA, 19 nt, Human herpesvirus 5
augguguuacacacuccuu

SEQ ID NO: 319897 - RNA, 13 nt, Human herpesvirus 5
auguaaacgugug

SEQ ID NO: 319898 - RNA, 16 nt, Human herpesvirus 5
auguaguaucauauua

SEQ ID NO: 319899 - RNA, 14 nt, Human herpesvirus 5
augucaucaucacg

SEQ ID NO: 319900 - RNA, 19 nt, Human herpesvirus 5
augucccuacucaccaaag

SEQ ID NO: 319901 - RNA, 18 nt, Human herpesvirus 5
auguccggccgucgcaag

SEQ ID NO: 319902 - RNA, 17 nt, Human herpesvirus 5
augucgcccagaaagaa

SEQ ID NO: 319903 - RNA, 19 nt, Human herpesvirus 5
augucgcgauagacaacuc

SEQ ID NO: 319904 - RNA, 16 nt, Human herpesvirus 5
augucguaguacaaua

SEQ ID NO: 319905 - RNA, 18 nt, Human herpesvirus 5
augucguaguacaauaca

SEQ ID NO: 319906 - RNA, 20 nt, Human herpesvirus 5
augucuccaagucuggugcg

SEQ ID NO: 319907 - RNA, 17 nt, Human herpesvirus 5
augucuuacaaaucaca

SEQ ID NO: 319908 - RNA, 17 nt, Human herpesvirus 5
augugcggucauguguc

SEQ ID NO: 319909 - RNA, 15 nt, Human herpesvirus 5
auguggacgauacua

SEQ ID NO: 319910 - RNA, 12 nt, Human herpesvirus 5
augugguucugg

SEQ ID NO: 319911 - RNA, 23 nt, Human herpesvirus 5
augugugaauggaaauacaugau

SEQ ID NO: 319912 - RNA, 22 nt, Human herpesvirus 5
auguuauaacgacgccagugau

SEQ ID NO: 319913 - RNA, 16 nt, Human herpesvirus 5
auguuauuauacugaa

SEQ ID NO: 319914 - RNA, 11 nt, Human herpesvirus 5
auguuggugcc

SEQ ID NO: 319915 - RNA, 19 nt, Human herpesvirus 5
auguuuuuugaaucauaca

SEQ ID NO: 319916 - RNA, 14 nt, Human herpesvirus 5
auuacaguaacgca

SEQ ID NO: 319917 - RNA, 19 nt, Human herpesvirus 5
auuacugggacgcgugcuc

SEQ ID NO: 319918 - RNA, 15 nt, Human herpesvirus 5
auuaggcaacuauca

SEQ ID NO: 319919 - RNA, 22 nt, Human herpesvirus 5
auuaggcaacuaucaccaaaca

SEQ ID NO: 319920 - RNA, 18 nt, Human herpesvirus 5
auucaauaaaaaccaccg

SEQ ID NO: 319921 - RNA, 16 nt, Human herpesvirus 5
auucaaucauuacuaa

SEQ ID NO: 319922 - RNA, 21 nt, Human herpesvirus 5
auucagaaaacgggauaugaa

SEQ ID NO: 319923 - RNA, 17 nt, Human herpesvirus 5
auucccaucucaacguc

SEQ ID NO: 319924 - RNA, 19 nt, Human herpesvirus 5
auuccccgugacaguauua

SEQ ID NO: 319925 - RNA, 17 nt, Human herpesvirus 5
auuccccugccuacguc

SEQ ID NO: 319926 - RNA, 12 nt, Human herpesvirus 5
auuccgcacaac

SEQ ID NO: 319927 - RNA, 22 nt, Human herpesvirus 5
auucgucugacgcugcuccuau

SEQ ID NO: 319928 - RNA, 19 nt, Human herpesvirus 5
auucuacauucaauacauc

SEQ ID NO: 319929 - RNA, 16 nt, Human herpesvirus 5
auucuauuacacucua

SEQ ID NO: 319930 - RNA, 15 nt, Human herpesvirus 5
auucucuauacacau

SEQ ID NO: 319931 - RNA, 15 nt, Human herpesvirus 5
auucuggaauccauc

SEQ ID NO: 319932 - RNA, 14 nt, Human herpesvirus 5
auucuggcaagagu

SEQ ID NO: 319933 - RNA, 19 nt, Human herpesvirus 5
auucuuuuuauauauacac

SEQ ID NO: 319934 - RNA, 23 nt, Human herpesvirus 5
auugacacagagacuugugauau

SEQ ID NO: 319935 - RNA, 21 nt, Human herpesvirus 5
auugagcaggguaaaaaccac

SEQ ID NO: 319936 - RNA, 18 nt, Human herpesvirus 5
auugagcgagaacuaaua

SEQ ID NO: 319937 - RNA, 23 nt, Human herpesvirus 5
auugauuucaacaaauaccaaca

SEQ ID NO: 319938 - RNA, 19 nt, Human herpesvirus 5
auugccagucgcacuaaua

SEQ ID NO: 319939 - RNA, 14 nt, Human herpesvirus 5
auugcucuacugca

SEQ ID NO: 319940 - RNA, 20 nt, Human herpesvirus 5
auuggcauauagccaauaaa

SEQ ID NO: 319941 - RNA, 13 nt, Human herpesvirus 5
auuguuaccagaa

SEQ ID NO: 319942 - RNA, 13 nt, Human herpesvirus 5
auuuaacaaguca

SEQ ID NO: 319943 - RNA, 19 nt, Human herpesvirus 5
auuuaucaauacaaugaca

SEQ ID NO: 319944 - RNA, 14 nt, Human herpesvirus 5
auuuauucuugcua

SEQ ID NO: 319945 - RNA, 18 nt, Human herpesvirus 5
auuucggaagccaugccu

SEQ ID NO: 319946 - RNA, 22 nt, Human herpesvirus 5
auuucuguucguaaacuuaucc

SEQ ID NO: 319947 - RNA, 19 nt, Human herpesvirus 5
auuuguaaaaaggcaauua

SEQ ID NO: 319948 - RNA, 16 nt, Human herpesvirus 5
auuuguuaugauguca

SEQ ID NO: 319949 - RNA, 20 nt, Human herpesvirus 5
auuuuccucguaaacuuaug

SEQ ID NO: 319950 - RNA, 12 nt, Human herpesvirus 5
auuuucuacucc

SEQ ID NO: 319951 - RNA, 19 nt, Human herpesvirus 5
auuuuuccaaaagugauuu

SEQ ID NO: 319952 - RNA, 18 nt, Human herpesvirus 5
auuuuuuguaacacuaca

SEQ ID NO: 319953 - RNA, 20 nt, Human herpesvirus 5
auuuuuuguaacacuacagc

SEQ ID NO: 319954 - RNA, 13 nt, Human herpesvirus 5
caaaaacuugucc

SEQ ID NO: 319955 - RNA, 22 nt, Human herpesvirus 5
caaaacaucaccaccaucagca

SEQ ID NO: 319956 - RNA, 15 nt, Human herpesvirus 5
caaaacgaccagaau

SEQ ID NO: 319957 - RNA, 15 nt, Human herpesvirus 5
caaaacuacuaauac

SEQ ID NO: 319958 - RNA, 16 nt, Human herpesvirus 5
caaacaacaccacggc

SEQ ID NO: 319959 - RNA, 13 nt, Human herpesvirus 5
caaacaaugacac

SEQ ID NO: 319960 - RNA, 22 nt, Human herpesvirus 5
caaacacuaccgucgccaccac

SEQ ID NO: 319961 - RNA, 20 nt, Human herpesvirus 5
caaacagcacauuagacaca

SEQ ID NO: 319962 - RNA, 19 nt, Human herpesvirus 5
caaaccggacgcugccuca

SEQ ID NO: 319963 - RNA, 17 nt, Human herpesvirus 5
caaaccuguuccuguca

SEQ ID NO: 319964 - RNA, 14 nt, Human herpesvirus 5
caaacgcugcuugg

SEQ ID NO: 319965 - RNA, 22 nt, Human herpesvirus 5
caaacgggaccaucgugcucau

SEQ ID NO: 319966 - RNA, 15 nt, Human herpesvirus 5
caaacugaccaagcu

SEQ ID NO: 319967 - RNA, 20 nt, Human herpesvirus 5
caaacugcgacacgugcuuu

SEQ ID NO: 319968 - RNA, 21 nt, Human herpesvirus 5
caaacuucucauuuauugugu

SEQ ID NO: 319969 - RNA, 14 nt, Human herpesvirus 5
caaagaacgaaaac

SEQ ID NO: 319970 - RNA, 17 nt, Human herpesvirus 5
caaagaacgaaaacaca

SEQ ID NO: 319971 - RNA, 17 nt, Human herpesvirus 5
caaagcacaauacacau

SEQ ID NO: 319972 - RNA, 20 nt, Human herpesvirus 5
caaagcggucucacugugac

SEQ ID NO: 319973 - RNA, 16 nt, Human herpesvirus 5
caaagcuggacaguga

SEQ ID NO: 319974 - RNA, 23 nt, Human herpesvirus 5
caaagcuggacagugagagcuca

SEQ ID NO: 319975 - RNA, 14 nt, Human herpesvirus 5
caaagucaacaugu

SEQ ID NO: 319976 - RNA, 23 nt, Human herpesvirus 5
caaaguccgucaugcuggcaugc

SEQ ID NO: 319977 - RNA, 18 nt, Human herpesvirus 5
caaaguuauccuguugaa

SEQ ID NO: 319978 - RNA, 18 nt, Human herpesvirus 5
caaauaccaacacuauau

SEQ ID NO: 319979 - RNA, 14 nt, Human herpesvirus 5
caaauauauggagu

SEQ ID NO: 319980 - RNA, 13 nt, Human herpesvirus 5
caaaucacagucu

SEQ ID NO: 319981 - RNA, 11 nt, Human herpesvirus 5
caaaugcagcg

SEQ ID NO: 319982 - RNA, 15 nt, Human herpesvirus 5
caacacuaccaagua

SEQ ID NO: 319983 - RNA, 19 nt, Human herpesvirus 5
caacacuuuuuuaccuauc

SEQ ID NO: 319984 - RNA, 14 nt, Human herpesvirus 5
caacagcaacaaca

SEQ ID NO: 319985 - RNA, 10 nt, Human herpesvirus 5
caacagcagc

SEQ ID NO: 319986 - RNA, 14 nt, Human herpesvirus 5
caacagcagcaaca

SEQ ID NO: 319987 - RNA, 21 nt, Human herpesvirus 5
caacaguacuacuaccaauac

SEQ ID NO: 319988 - RNA, 15 nt, Human herpesvirus 5
caacaguucuaucaa

SEQ ID NO: 319989 - RNA, 18 nt, Human herpesvirus 5
caacauagcguaaauccc

SEQ ID NO: 319990 - RNA, 22 nt, Human herpesvirus 5
caacaucaccaacguuaccucc

SEQ ID NO: 319991 - RNA, 23 nt, Human herpesvirus 5
caacaucaucagcgccgugcuca

SEQ ID NO: 319992 - RNA, 15 nt, Human herpesvirus 5
caacaucuucugcac

SEQ ID NO: 319993 - RNA, 20 nt, Human herpesvirus 5
caacaugcccagcaucuccu

SEQ ID NO: 319994 - RNA, 21 nt, Human herpesvirus 5
caacauguagaagcacccauu

SEQ ID NO: 319995 - RNA, 17 nt, Human herpesvirus 5
caaccacgucggggcug

SEQ ID NO: 319996 - RNA, 18 nt, Human herpesvirus 5
caaccauuggcaacauca

SEQ ID NO: 319997 - RNA, 20 nt, Human herpesvirus 5
caaccauuggcaacaucacc

SEQ ID NO: 319998 - RNA, 17 nt, Human herpesvirus 5
caaccgcauccugccca

SEQ ID NO: 319999 - RNA, 14 nt, Human herpesvirus 5
caaccguauauucu

SEQ ID NO: 320000 - RNA, 19 nt, Human herpesvirus 5
caaccguauauucuacauu

SEQ ID NO: 320001 - RNA, 22 nt, Human herpesvirus 5
caaccguauauucuacauucaa

SEQ ID NO: 320002 - RNA, 13 nt, Human herpesvirus 5
caaccugcugcac

SEQ ID NO: 320003 - RNA, 22 nt, Human herpesvirus 5
caacgagacuaucuacaacacu

SEQ ID NO: 320004 - RNA, 13 nt, Human herpesvirus 5
caacgcuuuggaa

SEQ ID NO: 320005 - RNA, 18 nt, Human herpesvirus 5
caacggcuggaaauggac

SEQ ID NO: 320006 - RNA, 18 nt, Human herpesvirus 5
caacggcuggaggacuuu

SEQ ID NO: 320007 - RNA, 19 nt, Human herpesvirus 5
caacggcuggaggacuuuu

SEQ ID NO: 320008 - RNA, 15 nt, Human herpesvirus 5
caacgucaugcauuc

SEQ ID NO: 320009 - RNA, 15 nt, Human herpesvirus 5
caacgucuacaucuc

SEQ ID NO: 320010 - RNA, 21 nt, Human herpesvirus 5
caacgucuacaucucaucaag

SEQ ID NO: 320011 - RNA, 11 nt, Human herpesvirus 5
caacuaucacc

SEQ ID NO: 320012 - RNA, 16 nt, Human herpesvirus 5
caacuaucaccaaaca

SEQ ID NO: 320013 - RNA, 16 nt, Human herpesvirus 5
caacuccgugccagcu

SEQ ID NO: 320014 - RNA, 17 nt, Human herpesvirus 5
caacuccgugccagcug

SEQ ID NO: 320015 - RNA, 13 nt, Human herpesvirus 5
caacuggcaaaaa

SEQ ID NO: 320016 - RNA, 16 nt, Human herpesvirus 5
caacuuaaccacaaga

SEQ ID NO: 320017 - RNA, 20 nt, Human herpesvirus 5
caacuuaacgcgcaagugcc

SEQ ID NO: 320018 - RNA, 17 nt, Human herpesvirus 5
caacuucuaccaucucc

SEQ ID NO: 320019 - RNA, 22 nt, Human herpesvirus 5
caacuuuguggggcugcucaac

SEQ ID NO: 320020 - RNA, 12 nt, Human herpesvirus 5
caagaaacaccg

SEQ ID NO: 320021 - RNA, 20 nt, Human herpesvirus 5
caagaauaaaucaccgugaa

SEQ ID NO: 320022 - RNA, 20 nt, Human herpesvirus 5
caagagaagaaacccgggug

SEQ ID NO: 320023 - RNA, 13 nt, Human herpesvirus 5
caagcacuaccag

SEQ ID NO: 320024 - RNA, 16 nt, Human herpesvirus 5
caagccagauacuaua

SEQ ID NO: 320025 - RNA, 16 nt, Human herpesvirus 5
caagcgccgucacuuc

SEQ ID NO: 320026 - RNA, 17 nt, Human herpesvirus 5
caagcgccgucacuucc

SEQ ID NO: 320027 - RNA, 20 nt, Human herpesvirus 5
caagcgguacggacuacaua

SEQ ID NO: 320028 - RNA, 13 nt, Human herpesvirus 5
caagcuugguaca

SEQ ID NO: 320029 - RNA, 15 nt, Human herpesvirus 5
caaggacaucgagga

SEQ ID NO: 320030 - RNA, 22 nt, Human herpesvirus 5
caaggcuagacgaaauucacaa

SEQ ID NO: 320031 - RNA, 19 nt, Human herpesvirus 5
caagggggugggccuauag

SEQ ID NO: 320032 - RNA, 19 nt, Human herpesvirus 5
caagggucacggugccaug

SEQ ID NO: 320033 - RNA, 16 nt, Human herpesvirus 5
caaggucaacuacagc

SEQ ID NO: 320034 - RNA, 22 nt, Human herpesvirus 5
caaggugauuauuaaaccgccc

SEQ ID NO: 320035 - RNA, 22 nt, Human herpesvirus 5
caaguaccuuaacaugaugaag

SEQ ID NO: 320036 - RNA, 12 nt, Human herpesvirus 5
caagucacuaua

SEQ ID NO: 320037 - RNA, 14 nt, Human herpesvirus 5
caaguucgaucuca

SEQ ID NO: 320038 - RNA, 15 nt, Human herpesvirus 5
caaguucgaucucau

SEQ ID NO: 320039 - RNA, 18 nt, Human herpesvirus 5
caauaaaagcacuucaga

SEQ ID NO: 320040 - RNA, 22 nt, Human herpesvirus 5
caauaaaagcacuucagaaucu

SEQ ID NO: 320041 - RNA, 22 nt, Human herpesvirus 5
caauaaacuaaaacauucugua

SEQ ID NO: 320042 - RNA, 22 nt, Human herpesvirus 5
caauaaagaaaaccacacuguu

SEQ ID NO: 320043 - RNA, 22 nt, Human herpesvirus 5
caauaaagagauagacaucaca

SEQ ID NO: 320044 - RNA, 22 nt, Human herpesvirus 5
caauaaagcguugauuucucaa

SEQ ID NO: 320045 - RNA, 12 nt, Human herpesvirus 5
caauaacauguc

SEQ ID NO: 320046 - RNA, 13 nt, Human herpesvirus 5
caauaacaugucu

SEQ ID NO: 320047 - RNA, 14 nt, Human herpesvirus 5
caauaacaugucuc

SEQ ID NO: 320048 - RNA, 15 nt, Human herpesvirus 5
caauaaguaccucua

SEQ ID NO: 320049 - RNA, 12 nt, Human herpesvirus 5
caauacaaugac

SEQ ID NO: 320050 - RNA, 13 nt, Human herpesvirus 5
caauacaaugaca

SEQ ID NO: 320051 - RNA, 17 nt, Human herpesvirus 5
caauacugcauccauca

SEQ ID NO: 320052 - RNA, 19 nt, Human herpesvirus 5
caauacugcauccaucaca

SEQ ID NO: 320053 - RNA, 22 nt, Human herpesvirus 5
caauacugcauccaucacauca

SEQ ID NO: 320054 - RNA, 15 nt, Human herpesvirus 5
caauagaauacugcu

SEQ ID NO: 320055 - RNA, 18 nt, Human herpesvirus 5
caauagaauacugcuaug

SEQ ID NO: 320056 - RNA, 23 nt, Human herpesvirus 5
caauauauauagacacacaccaa

SEQ ID NO: 320057 - RNA, 20 nt, Human herpesvirus 5
caaucgacugccuaacugua

SEQ ID NO: 320058 - RNA, 21 nt, Human herpesvirus 5
caaucgacugccuaacuguag

SEQ ID NO: 320059 - RNA, 14 nt, Human herpesvirus 5
caaucucacgguua

SEQ ID NO: 320060 - RNA, 15 nt, Human herpesvirus 5
caaugcgucugcaac

SEQ ID NO: 320061 - RNA, 16 nt, Human herpesvirus 5
caaugucguaguacaa

SEQ ID NO: 320062 - RNA, 18 nt, Human herpesvirus 5
caauugccucuacacuug

SEQ ID NO: 320063 - RNA, 14 nt, Human herpesvirus 5
cacaaaaacaccaa

SEQ ID NO: 320064 - RNA, 22 nt, Human herpesvirus 5
cacaaacugcgacacgugcuuu

SEQ ID NO: 320065 - RNA, 21 nt, Human herpesvirus 5
cacaacggccgccgacgucgc

SEQ ID NO: 320066 - RNA, 14 nt, Human herpesvirus 5
cacaagcgcccgaa

SEQ ID NO: 320067 - RNA, 19 nt, Human herpesvirus 5
cacaagcgccgucacuucc

SEQ ID NO: 320068 - RNA, 19 nt, Human herpesvirus 5
cacaauacgauaauugcua

SEQ ID NO: 320069 - RNA, 22 nt, Human herpesvirus 5
cacaauggaagccauacuucuc

SEQ ID NO: 320070 - RNA, 14 nt, Human herpesvirus 5
cacacagacuuuau

SEQ ID NO: 320071 - RNA, 16 nt, Human herpesvirus 5
cacacagauauccaca

SEQ ID NO: 320072 - RNA, 19 nt, Human herpesvirus 5
cacacagauuuucugcgug

SEQ ID NO: 320073 - RNA, 19 nt, Human herpesvirus 5
cacacaucugucaccucac

SEQ ID NO: 320074 - RNA, 16 nt, Human herpesvirus 5
cacaccugccucgaca

SEQ ID NO: 320075 - RNA, 20 nt, Human herpesvirus 5
cacacgcuaagagcuuugac

SEQ ID NO: 320076 - RNA, 17 nt, Human herpesvirus 5
cacacggagaaacaccc

SEQ ID NO: 320077 - RNA, 23 nt, Human herpesvirus 5
cacacgguccgugggagacgcgg

SEQ ID NO: 320078 - RNA, 18 nt, Human herpesvirus 5
cacacguucgacauggac

SEQ ID NO: 320079 - RNA, 20 nt, Human herpesvirus 5
cacacguucgacauggacau

SEQ ID NO: 320080 - RNA, 21 nt, Human herpesvirus 5
cacacugacggauaaacacga

SEQ ID NO: 320081 - RNA, 23 nt, Human herpesvirus 5
cacacuggcuggaauacguggcg

SEQ ID NO: 320082 - RNA, 19 nt, Human herpesvirus 5
cacagaagaaaaaaacaca

SEQ ID NO: 320083 - RNA, 13 nt, Human herpesvirus 5
cacagacuuuaua

SEQ ID NO: 320084 - RNA, 16 nt, Human herpesvirus 5
cacagagacaccaauu

SEQ ID NO: 320085 - RNA, 23 nt, Human herpesvirus 5
cacagguagguggccaugaugac

SEQ ID NO: 320086 - RNA, 19 nt, Human herpesvirus 5
cacagucuccuucucauca

SEQ ID NO: 320087 - RNA, 19 nt, Human herpesvirus 5
cacauacgggacuuacauc

SEQ ID NO: 320088 - RNA, 21 nt, Human herpesvirus 5
cacauacgggacuuacaucug

SEQ ID NO: 320089 - RNA, 20 nt, Human herpesvirus 5
cacaucaacauacaguacaa

SEQ ID NO: 320090 - RNA, 21 nt, Human herpesvirus 5
cacaucgcacacagacuuuau

SEQ ID NO: 320091 - RNA, 15 nt, Human herpesvirus 5
cacaucugucaccuc

SEQ ID NO: 320092 - RNA, 21 nt, Human herpesvirus 5
cacaugcccuguaagauauaa

SEQ ID NO: 320093 - RNA, 12 nt, Human herpesvirus 5
cacauuacuaca

SEQ ID NO: 320094 - RNA, 22 nt, Human herpesvirus 5
cacauugaacgcgguacaugug

SEQ ID NO: 320095 - RNA, 15 nt, Human herpesvirus 5
caccaaaaauccaga

SEQ ID NO: 320096 - RNA, 16 nt, Human herpesvirus 5
caccaaaaauccagac

SEQ ID NO: 320097 - RNA, 15 nt, Human herpesvirus 5
caccaaacaacacca

SEQ ID NO: 320098 - RNA, 13 nt, Human herpesvirus 5
caccaaccgacgu

SEQ ID NO: 320099 - RNA, 14 nt, Human herpesvirus 5
caccaacugaaaua

SEQ ID NO: 320100 - RNA, 15 nt, Human herpesvirus 5
caccaauaggggagu

SEQ ID NO: 320101 - RNA, 16 nt, Human herpesvirus 5
caccacgguacaaacc

SEQ ID NO: 320102 - RNA, 19 nt, Human herpesvirus 5
caccaguucguagaucaca

SEQ ID NO: 320103 - RNA, 18 nt, Human herpesvirus 5
caccaugcagaccuacag

SEQ ID NO: 320104 - RNA, 15 nt, Human herpesvirus 5
caccaugcaucccac

SEQ ID NO: 320105 - RNA, 19 nt, Human herpesvirus 5
caccaugcaucccaccacg

SEQ ID NO: 320106 - RNA, 12 nt, Human herpesvirus 5
cacccacgggug

SEQ ID NO: 320107 - RNA, 15 nt, Human herpesvirus 5
cacccaguagacaga

SEQ ID NO: 320108 - RNA, 16 nt, Human herpesvirus 5
cacccgggggugaaaa

SEQ ID NO: 320109 - RNA, 16 nt, Human herpesvirus 5
cacccgucaugguaca

SEQ ID NO: 320110 - RNA, 22 nt, Human herpesvirus 5
cacccugaguuccgucagcaca

SEQ ID NO: 320111 - RNA, 13 nt, Human herpesvirus 5
caccgacacagca

SEQ ID NO: 320112 - RNA, 15 nt, Human herpesvirus 5
caccgacgacgacga

SEQ ID NO: 320113 - RNA, 16 nt, Human herpesvirus 5
caccgacgugcuuaau

SEQ ID NO: 320114 - RNA, 22 nt, Human herpesvirus 5
caccgacgugcuuaaucaguca

SEQ ID NO: 320115 - RNA, 20 nt, Human herpesvirus 5
caccgagggcagaacuggug

SEQ ID NO: 320116 - RNA, 15 nt, Human herpesvirus 5
caccgauauccaaua

SEQ ID NO: 320117 - RNA, 18 nt, Human herpesvirus 5
caccgcggcaccuaccau

SEQ ID NO: 320118 - RNA, 20 nt, Human herpesvirus 5
caccgcuggagcuaucugug

SEQ ID NO: 320119 - RNA, 22 nt, Human herpesvirus 5
caccggccuccgacgacgccga

SEQ ID NO: 320120 - RNA, 18 nt, Human herpesvirus 5
caccgguaccacuacuac

SEQ ID NO: 320121 - RNA, 14 nt, Human herpesvirus 5
caccgugaaaguga

SEQ ID NO: 320122 - RNA, 13 nt, Human herpesvirus 5
caccuaccaucug

SEQ ID NO: 320123 - RNA, 10 nt, Human herpesvirus 5
caccuaccug

SEQ ID NO: 320124 - RNA, 17 nt, Human herpesvirus 5
caccuguauacugugaa

SEQ ID NO: 320125 - RNA, 14 nt, Human herpesvirus 5
caccuuuaagguac

SEQ ID NO: 320126 - RNA, 14 nt, Human herpesvirus 5
cacgaaaggcaccg

SEQ ID NO: 320127 - RNA, 13 nt, Human herpesvirus 5
cacgacaaacacu

SEQ ID NO: 320128 - RNA, 14 nt, Human herpesvirus 5
cacgaccacuaauc

SEQ ID NO: 320129 - RNA, 14 nt, Human herpesvirus 5
cacgacgcaugcau

SEQ ID NO: 320130 - RNA, 21 nt, Human herpesvirus 5
cacgacggcuccaagaaaaac

SEQ ID NO: 320131 - RNA, 14 nt, Human herpesvirus 5
cacgcacauaugua

SEQ ID NO: 320132 - RNA, 15 nt, Human herpesvirus 5
cacgcaccuguguga

SEQ ID NO: 320133 - RNA, 16 nt, Human herpesvirus 5
cacgcaggcaagccaa

SEQ ID NO: 320134 - RNA, 13 nt, Human herpesvirus 5
cacgccauaacaa

SEQ ID NO: 320135 - RNA, 23 nt, Human herpesvirus 5
cacgccccugaguucacgcgcgg

SEQ ID NO: 320136 - RNA, 11 nt, Human herpesvirus 5
cacgccggcgg

SEQ ID NO: 320137 - RNA, 14 nt, Human herpesvirus 5
cacgccugugaaac

SEQ ID NO: 320138 - RNA, 14 nt, Human herpesvirus 5
cacgcgcgacuugg

SEQ ID NO: 320139 - RNA, 20 nt, Human herpesvirus 5
cacgcugguuaccaggcuua

SEQ ID NO: 320140 - RNA, 22 nt, Human herpesvirus 5
cacgcuuaaagcucguguuguc

SEQ ID NO: 320141 - RNA, 19 nt, Human herpesvirus 5
cacggaccgcaacgugcug

SEQ ID NO: 320142 - RNA, 21 nt, Human herpesvirus 5
cacggaccgcaacgugcugcu

SEQ ID NO: 320143 - RNA, 15 nt, Human herpesvirus 5
cacggagaaacaccc

SEQ ID NO: 320144 - RNA, 15 nt, Human herpesvirus 5
cacggccagcuccac

SEQ ID NO: 320145 - RNA, 19 nt, Human herpesvirus 5
cacggcgaaccgccgucgc

SEQ ID NO: 320146 - RNA, 19 nt, Human herpesvirus 5
cacggcuaagaggauacau

SEQ ID NO: 320147 - RNA, 16 nt, Human herpesvirus 5
cacggcuaccaugcgc

SEQ ID NO: 320148 - RNA, 21 nt, Human herpesvirus 5
cacggggauuuucgaugauac

SEQ ID NO: 320149 - RNA, 19 nt, Human herpesvirus 5
cacggucauguuucucacg

SEQ ID NO: 320150 - RNA, 19 nt, Human herpesvirus 5
cacgguggccaacaagcgg

SEQ ID NO: 320151 - RNA, 18 nt, Human herpesvirus 5
cacguagccgaugcugau

SEQ ID NO: 320152 - RNA, 24 nt, Human herpesvirus 5
cacgucacacguuacaucauacaa

SEQ ID NO: 320153 - RNA, 16 nt, Human herpesvirus 5
cacguccagaucgucu

SEQ ID NO: 320154 - RNA, 15 nt, Human herpesvirus 5
cacgucgaccaggug

SEQ ID NO: 320155 - RNA, 22 nt, Human herpesvirus 5
cacgucgccguccaugucgcug

SEQ ID NO: 320156 - RNA, 19 nt, Human herpesvirus 5
cacgucggcucgaagaggu

SEQ ID NO: 320157 - RNA, 21 nt, Human herpesvirus 5
cacgucuagcaggcccaggcc

SEQ ID NO: 320158 - RNA, 17 nt, Human herpesvirus 5
cacguuacaucauacaa

SEQ ID NO: 320159 - RNA, 15 nt, Human herpesvirus 5
cacguugagauucag

SEQ ID NO: 320160 - RNA, 22 nt, Human herpesvirus 5
cacuaauaccgguuguaaucau

SEQ ID NO: 320161 - RNA, 12 nt, Human herpesvirus 5
cacuacagcuug

SEQ ID NO: 320162 - RNA, 12 nt, Human herpesvirus 5
cacuaccagcug

SEQ ID NO: 320163 - RNA, 16 nt, Human herpesvirus 5
cacuacccucaaguac

SEQ ID NO: 320164 - RNA, 23 nt, Human herpesvirus 5
cacuauagcgggauuuacuacuu

SEQ ID NO: 320165 - RNA, 13 nt, Human herpesvirus 5
cacuaucuucaac

SEQ ID NO: 320166 - RNA, 15 nt, Human herpesvirus 5
cacucaguacuuugg

SEQ ID NO: 320167 - RNA, 23 nt, Human herpesvirus 5
cacuccacacgccauaacaaacc

SEQ ID NO: 320168 - RNA, 18 nt, Human herpesvirus 5
cacucuggcccugcugua

SEQ ID NO: 320169 - RNA, 14 nt, Human herpesvirus 5
cacugaaaacacca

SEQ ID NO: 320170 - RNA, 19 nt, Human herpesvirus 5
cacugaacuugagcacaaa

SEQ ID NO: 320171 - RNA, 22 nt, Human herpesvirus 5
cacugcacuuccuguacacauc

SEQ ID NO: 320172 - RNA, 14 nt, Human herpesvirus 5
cacugguauaacca

SEQ ID NO: 320173 - RNA, 18 nt, Human herpesvirus 5
cacuguuaaaaaaaccac

SEQ ID NO: 320174 - RNA, 14 nt, Human herpesvirus 5
cacuucaaacauca

SEQ ID NO: 320175 - RNA, 21 nt, Human herpesvirus 5
cacuucaaccacgaguaacac

SEQ ID NO: 320176 - RNA, 21 nt, Human herpesvirus 5
cacuugcgcgguuauggcucc

SEQ ID NO: 320177 - RNA, 17 nt, Human herpesvirus 5
cacuuuacauaaaacca

SEQ ID NO: 320178 - RNA, 20 nt, Human herpesvirus 5
cacuuuacauaaaaccaccg

SEQ ID NO: 320179 - RNA, 15 nt, Human herpesvirus 5
cacuuucgaccacaa

SEQ ID NO: 320180 - RNA, 19 nt, Human herpesvirus 5
cagaaagaggggcaccugu

SEQ ID NO: 320181 - RNA, 20 nt, Human herpesvirus 5
cagaaagaggggcaccugua

SEQ ID NO: 320182 - RNA, 15 nt, Human herpesvirus 5
cagaaagcaccagaa

SEQ ID NO: 320183 - RNA, 13 nt, Human herpesvirus 5
cagaaagcugcaa

SEQ ID NO: 320184 - RNA, 14 nt, Human herpesvirus 5
cagaaagcugcaau

SEQ ID NO: 320185 - RNA, 17 nt, Human herpesvirus 5
cagaaagcugcaaucaa

SEQ ID NO: 320186 - RNA, 16 nt, Human herpesvirus 5
cagaacuggugcuauc

SEQ ID NO: 320187 - RNA, 13 nt, Human herpesvirus 5
cagaagacuuuga

SEQ ID NO: 320188 - RNA, 21 nt, Human herpesvirus 5
cagaagggaauuuguaaaaag

SEQ ID NO: 320189 - RNA, 22 nt, Human herpesvirus 5
cagaaucagcagugaguacacg

SEQ ID NO: 320190 - RNA, 20 nt, Human herpesvirus 5
cagaaucuauaaauugcucu

SEQ ID NO: 320191 - RNA, 18 nt, Human herpesvirus 5
cagaaugaaccuuguaau

SEQ ID NO: 320192 - RNA, 20 nt, Human herpesvirus 5
cagacaggcggccagcuuca

SEQ ID NO: 320193 - RNA, 21 nt, Human herpesvirus 5
cagacaucuuaugaagcugaa

SEQ ID NO: 320194 - RNA, 14 nt, Human herpesvirus 5
cagacccacuaccu

SEQ ID NO: 320195 - RNA, 17 nt, Human herpesvirus 5
cagacccacuaccugga

SEQ ID NO: 320196 - RNA, 19 nt, Human herpesvirus 5
cagaccgcaacaacagcag

SEQ ID NO: 320197 - RNA, 15 nt, Human herpesvirus 5
cagacgucggcgguc

SEQ ID NO: 320198 - RNA, 15 nt, Human herpesvirus 5
cagacucacgucaca

SEQ ID NO: 320199 - RNA, 18 nt, Human herpesvirus 5
cagacuuucgacgugcgc

SEQ ID NO: 320200 - RNA, 23 nt, Human herpesvirus 5
cagagacaccaauugcuuuaaua

SEQ ID NO: 320201 - RNA, 22 nt, Human herpesvirus 5
cagagccaccaggugccggcga

SEQ ID NO: 320202 - RNA, 20 nt, Human herpesvirus 5
cagagccacguugagauuca

SEQ ID NO: 320203 - RNA, 21 nt, Human herpesvirus 5
cagagccacguugagauucag

SEQ ID NO: 320204 - RNA, 23 nt, Human herpesvirus 5
cagaggacccugauaaugggaaa

SEQ ID NO: 320205 - RNA, 20 nt, Human herpesvirus 5
cagaggacggaggaacuuuc

SEQ ID NO: 320206 - RNA, 13 nt, Human herpesvirus 5
cagaguaggugau

SEQ ID NO: 320207 - RNA, 18 nt, Human herpesvirus 5
cagagucggcuguccuug

SEQ ID NO: 320208 - RNA, 20 nt, Human herpesvirus 5
cagauacaacgucaugcauu

SEQ ID NO: 320209 - RNA, 14 nt, Human herpesvirus 5
cagauacgcagugu

SEQ ID NO: 320210 - RNA, 13 nt, Human herpesvirus 5
cagauauccacaa

SEQ ID NO: 320211 - RNA, 16 nt, Human herpesvirus 5
cagaucacuaucuuca

SEQ ID NO: 320212 - RNA, 22 nt, Human herpesvirus 5
cagaucgugccgcgagguguca

SEQ ID NO: 320213 - RNA, 20 nt, Human herpesvirus 5
cagaugacgagcgccggcga

SEQ ID NO: 320214 - RNA, 15 nt, Human herpesvirus 5
cagaugcucccggcg

SEQ ID NO: 320215 - RNA, 13 nt, Human herpesvirus 5
cagcaacaccaua

SEQ ID NO: 320216 - RNA, 19 nt, Human herpesvirus 5
cagcaaugucguaguacaa

SEQ ID NO: 320217 - RNA, 14 nt, Human herpesvirus 5
cagcacaccugccu

SEQ ID NO: 320218 - RNA, 23 nt, Human herpesvirus 5
cagcacaccugccucgacaucuc

SEQ ID NO: 320219 - RNA, 23 nt, Human herpesvirus 5
cagcaggcuuugacggugaugcg

SEQ ID NO: 320220 - RNA, 18 nt, Human herpesvirus 5
cagcaguaugacgugcga

SEQ ID NO: 320221 - RNA, 20 nt, Human herpesvirus 5
cagcaguaugacgugcgaug

SEQ ID NO: 320222 - RNA, 20 nt, Human herpesvirus 5
cagcaucgauuucuugccaa

SEQ ID NO: 320223 - RNA, 17 nt, Human herpesvirus 5
cagcaugaacaccagau

SEQ ID NO: 320224 - RNA, 17 nt, Human herpesvirus 5
cagcauucaccuccagc

SEQ ID NO: 320225 - RNA, 22 nt, Human herpesvirus 5
cagcgacuucgguuccaucuca

SEQ ID NO: 320226 - RNA, 23 nt, Human herpesvirus 5
cagcgagcgcacccacucgucgc

SEQ ID NO: 320227 - RNA, 19 nt, Human herpesvirus 5
cagcgccgccgcucauaau

SEQ ID NO: 320228 - RNA, 14 nt, Human herpesvirus 5
cagcgccgugcuca

SEQ ID NO: 320229 - RNA, 19 nt, Human herpesvirus 5
cagcggaaaaugccgccgc

SEQ ID NO: 320230 - RNA, 12 nt, Human herpesvirus 5
cagcggaggugg

SEQ ID NO: 320231 - RNA, 18 nt, Human herpesvirus 5
cagcggcggcggugguga

SEQ ID NO: 320232 - RNA, 21 nt, Human herpesvirus 5
cagcggcugcgcgcucgucuc

SEQ ID NO: 320233 - RNA, 15 nt, Human herpesvirus 5
cagcggggguggugg

SEQ ID NO: 320234 - RNA, 21 nt, Human herpesvirus 5
cagcguagucuggcagcguua

SEQ ID NO: 320235 - RNA, 18 nt, Human herpesvirus 5
cagcguccacaguuuccg

SEQ ID NO: 320236 - RNA, 13 nt, Human herpesvirus 5
cagcgucuggcca

SEQ ID NO: 320237 - RNA, 18 nt, Human herpesvirus 5
cagcuccacgcuauacau

SEQ ID NO: 320238 - RNA, 22 nt, Human herpesvirus 5
cagcuggggaaguacaauauca

SEQ ID NO: 320239 - RNA, 23 nt, Human herpesvirus 5
cagcuguuggauucugauuucag

SEQ ID NO: 320240 - RNA, 20 nt, Human herpesvirus 5
cagcuuaccgccaccgucgc

SEQ ID NO: 320241 - RNA, 21 nt, Human herpesvirus 5
cagcuucuuucucaccgugcu

SEQ ID NO: 320242 - RNA, 20 nt, Human herpesvirus 5
caggacuggaagugucacgc

SEQ ID NO: 320243 - RNA, 21 nt, Human herpesvirus 5
caggauguuacgcgagucaga

SEQ ID NO: 320244 - RNA, 17 nt, Human herpesvirus 5
caggcaagccaaaccac

SEQ ID NO: 320245 - RNA, 20 nt, Human herpesvirus 5
caggcauacggcguauacaa

SEQ ID NO: 320246 - RNA, 15 nt, Human herpesvirus 5
caggccgacucgcgg

SEQ ID NO: 320247 - RNA, 17 nt, Human herpesvirus 5
caggccgccgccgcuca

SEQ ID NO: 320248 - RNA, 21 nt, Human herpesvirus 5
caggcucgcguguuuugucug

SEQ ID NO: 320249 - RNA, 23 nt, Human herpesvirus 5
caggcucgcguguuuugucugag

SEQ ID NO: 320250 - RNA, 18 nt, Human herpesvirus 5
caggcucugcgccgucuc

SEQ ID NO: 320251 - RNA, 19 nt, Human herpesvirus 5
caggcucugcgccgucucu

SEQ ID NO: 320252 - RNA, 21 nt, Human herpesvirus 5
cagggaauaauaauaccacaa

SEQ ID NO: 320253 - RNA, 22 nt, Human herpesvirus 5
cagggaauuuugaaaaccgcgc

SEQ ID NO: 320254 - RNA, 22 nt, Human herpesvirus 5
cagggagacacagucuaccuag

SEQ ID NO: 320255 - RNA, 16 nt, Human herpesvirus 5
cagggcgcgccggcgc

SEQ ID NO: 320256 - RNA, 12 nt, Human herpesvirus 5
caggggaucuau

SEQ ID NO: 320257 - RNA, 17 nt, Human herpesvirus 5
caggggcuggacguggu

SEQ ID NO: 320258 - RNA, 18 nt, Human herpesvirus 5
cagggguacgcuaugugu

SEQ ID NO: 320259 - RNA, 15 nt, Human herpesvirus 5
caggguaaaaaccac

SEQ ID NO: 320260 - RNA, 17 nt, Human herpesvirus 5
caggguaaaaaccacgu

SEQ ID NO: 320261 - RNA, 22 nt, Human herpesvirus 5
cagguguuguuagacuagcaca

SEQ ID NO: 320262 - RNA, 22 nt, Human herpesvirus 5
caguacaacaguuaucagcaau

SEQ ID NO: 320263 - RNA, 16 nt, Human herpesvirus 5
caguacggacaaguau

SEQ ID NO: 320264 - RNA, 22 nt, Human herpesvirus 5
caguauaaaauggucguugccc

SEQ ID NO: 320265 - RNA, 17 nt, Human herpesvirus 5
caguaugacgugcgaug

SEQ ID NO: 320266 - RNA, 20 nt, Human herpesvirus 5
cagucagacccacuaccugg

SEQ ID NO: 320267 - RNA, 21 nt, Human herpesvirus 5
caguccauacagcaacaccau

SEQ ID NO: 320268 - RNA, 22 nt, Human herpesvirus 5
caguccauacagcaacaccaua

SEQ ID NO: 320269 - RNA, 21 nt, Human herpesvirus 5
caguccauauguugucaggac

SEQ ID NO: 320270 - RNA, 20 nt, Human herpesvirus 5
cagucccgagaaaacggcug

SEQ ID NO: 320271 - RNA, 12 nt, Human herpesvirus 5
caguccgcuccg

SEQ ID NO: 320272 - RNA, 22 nt, Human herpesvirus 5
cagucgacgggugguaccugca

SEQ ID NO: 320273 - RNA, 22 nt, Human herpesvirus 5
cagucuccgcaguuacaccaca

SEQ ID NO: 320274 - RNA, 23 nt, Human herpesvirus 5
cagugacgugaaucgccccucac

SEQ ID NO: 320275 - RNA, 14 nt, Human herpesvirus 5
cagugagagcucau

SEQ ID NO: 320276 - RNA, 16 nt, Human herpesvirus 5
caguguauuggcauau

SEQ ID NO: 320277 - RNA, 20 nt, Human herpesvirus 5
caguguccggcaagaugcuc

SEQ ID NO: 320278 - RNA, 17 nt, Human herpesvirus 5
caguucguagaucacac

SEQ ID NO: 320279 - RNA, 15 nt, Human herpesvirus 5
caguugcaccucgac

SEQ ID NO: 320280 - RNA, 15 nt, Human herpesvirus 5
cauaaaaaagagaca

SEQ ID NO: 320281 - RNA, 12 nt, Human herpesvirus 5
cauaaaaccacc

SEQ ID NO: 320282 - RNA, 23 nt, Human herpesvirus 5
cauaaacuguaccguccaggggu

SEQ ID NO: 320283 - RNA, 17 nt, Human herpesvirus 5
cauaaacuuaugauucu

SEQ ID NO: 320284 - RNA, 15 nt, Human herpesvirus 5
cauaaagaaugcaac

SEQ ID NO: 320285 - RNA, 14 nt, Human herpesvirus 5
cauaagaagccaag

SEQ ID NO: 320286 - RNA, 20 nt, Human herpesvirus 5
cauaagaauaggaagaaacc

SEQ ID NO: 320287 - RNA, 20 nt, Human herpesvirus 5
cauaagacgggacggcugcc

SEQ ID NO: 320288 - RNA, 16 nt, Human herpesvirus 5
cauaauaaagcuuucu

SEQ ID NO: 320289 - RNA, 23 nt, Human herpesvirus 5
cauaaugacguacauauacguga

SEQ ID NO: 320290 - RNA, 20 nt, Human herpesvirus 5
cauaaugccgucaccgucgc

SEQ ID NO: 320291 - RNA, 16 nt, Human herpesvirus 5
cauacgggacuuacau

SEQ ID NO: 320292 - RNA, 20 nt, Human herpesvirus 5
cauacggggaggagacacag

SEQ ID NO: 320293 - RNA, 21 nt, Human herpesvirus 5
cauacggggaggagacacaga

SEQ ID NO: 320294 - RNA, 18 nt, Human herpesvirus 5
cauacuuaccaccgugac

SEQ ID NO: 320295 - RNA, 16 nt, Human herpesvirus 5
cauagaguuacaugca

SEQ ID NO: 320296 - RNA, 16 nt, Human herpesvirus 5
cauagcaguauucuau

SEQ ID NO: 320297 - RNA, 23 nt, Human herpesvirus 5
cauagccucuacaaacuagcauu

SEQ ID NO: 320298 - RNA, 13 nt, Human herpesvirus 5
cauauagccaaua

SEQ ID NO: 320299 - RNA, 22 nt, Human herpesvirus 5
cauaucgggcccuggauacaag

SEQ ID NO: 320300 - RNA, 14 nt, Human herpesvirus 5
cauauuaguauacu

SEQ ID NO: 320301 - RNA, 21 nt, Human herpesvirus 5
caucaacgacgccacacacau

SEQ ID NO: 320302 - RNA, 14 nt, Human herpesvirus 5
caucacauuaggau

SEQ ID NO: 320303 - RNA, 23 nt, Human herpesvirus 5
caucaccaacguuaccuccgacu

SEQ ID NO: 320304 - RNA, 19 nt, Human herpesvirus 5
caucacccaacacugcuuc

SEQ ID NO: 320305 - RNA, 15 nt, Human herpesvirus 5
caucauaaaaaccau

SEQ ID NO: 320306 - RNA, 14 nt, Human herpesvirus 5
cauccaauuacacc

SEQ ID NO: 320307 - RNA, 13 nt, Human herpesvirus 5
cauccaucacauc

SEQ ID NO: 320308 - RNA, 15 nt, Human herpesvirus 5
cauccaucacaucac

SEQ ID NO: 320309 - RNA, 16 nt, Human herpesvirus 5
cauccaucacaucacc

SEQ ID NO: 320310 - RNA, 22 nt, Human herpesvirus 5
cauccaucacaucacccaacac

SEQ ID NO: 320311 - RNA, 16 nt, Human herpesvirus 5
cauccuaauugguacu

SEQ ID NO: 320312 - RNA, 17 nt, Human herpesvirus 5
caucgcaccaucguggu

SEQ ID NO: 320313 - RNA, 19 nt, Human herpesvirus 5
caucgggcccgccacugcc

SEQ ID NO: 320314 - RNA, 22 nt, Human herpesvirus 5
caucgguugccucuggguguug

SEQ ID NO: 320315 - RNA, 20 nt, Human herpesvirus 5
caucgucacaccuaucauaa

SEQ ID NO: 320316 - RNA, 17 nt, Human herpesvirus 5
caucgugaaaagguacu

SEQ ID NO: 320317 - RNA, 19 nt, Human herpesvirus 5
caucuacgugucugggcca

SEQ ID NO: 320318 - RNA, 18 nt, Human herpesvirus 5
caucuagacucacuuuau

SEQ ID NO: 320319 - RNA, 17 nt, Human herpesvirus 5
caucugccgaaacaccg

SEQ ID NO: 320320 - RNA, 20 nt, Human herpesvirus 5
caucuggcgcagauggacaa

SEQ ID NO: 320321 - RNA, 14 nt, Human herpesvirus 5
caucugucaccuca

SEQ ID NO: 320322 - RNA, 20 nt, Human herpesvirus 5
caucuguuuuugcugcaacg

SEQ ID NO: 320323 - RNA, 16 nt, Human herpesvirus 5
caugagauccaaaauc

SEQ ID NO: 320324 - RNA, 17 nt, Human herpesvirus 5
caugaugaaugucauca

SEQ ID NO: 320325 - RNA, 21 nt, Human herpesvirus 5
caugaugaaugucaucaucac

SEQ ID NO: 320326 - RNA, 13 nt, Human herpesvirus 5
caugcacauaaac

SEQ ID NO: 320327 - RNA, 17 nt, Human herpesvirus 5
caugcagaccuacagca

SEQ ID NO: 320328 - RNA, 18 nt, Human herpesvirus 5
caugcauaagaagccaag

SEQ ID NO: 320329 - RNA, 12 nt, Human herpesvirus 5
caugccucuaca

SEQ ID NO: 320330 - RNA, 23 nt, Human herpesvirus 5
caugcgugucuacggauugcuga

SEQ ID NO: 320331 - RNA, 18 nt, Human herpesvirus 5
caugcuauaagacagccu

SEQ ID NO: 320332 - RNA, 14 nt, Human herpesvirus 5
cauggagacaguuu

SEQ ID NO: 320333 - RNA, 17 nt, Human herpesvirus 5
cauggaggccaacaucu

SEQ ID NO: 320334 - RNA, 15 nt, Human herpesvirus 5
cauggcuauguacac

SEQ ID NO: 320335 - RNA, 15 nt, Human herpesvirus 5
caugguggucuacaa

SEQ ID NO: 320336 - RNA, 13 nt, Human herpesvirus 5
caugucgucucau

SEQ ID NO: 320337 - RNA, 19 nt, Human herpesvirus 5
caugucuuacaaaucacag

SEQ ID NO: 320338 - RNA, 17 nt, Human herpesvirus 5
caugugcuuaagcagaa

SEQ ID NO: 320339 - RNA, 18 nt, Human herpesvirus 5
caugugcuuaagcagaaa

SEQ ID NO: 320340 - RNA, 15 nt, Human herpesvirus 5
cauguggaaaucacc

SEQ ID NO: 320341 - RNA, 18 nt, Human herpesvirus 5
cauguuauguuauuauac

SEQ ID NO: 320342 - RNA, 18 nt, Human herpesvirus 5
cauguucuaugccgucuu

SEQ ID NO: 320343 - RNA, 13 nt, Human herpesvirus 5
cauguuucucacg

SEQ ID NO: 320344 - RNA, 14 nt, Human herpesvirus 5
cauuaccuuucauc

SEQ ID NO: 320345 - RNA, 15 nt, Human herpesvirus 5
cauuacuaaacaaaa

SEQ ID NO: 320346 - RNA, 22 nt, Human herpesvirus 5
cauuacugggacgcgugcucuc

SEQ ID NO: 320347 - RNA, 17 nt, Human herpesvirus 5
cauucaauacaucauau

SEQ ID NO: 320348 - RNA, 16 nt, Human herpesvirus 5
cauuccccaccuuccc

SEQ ID NO: 320349 - RNA, 15 nt, Human herpesvirus 5
cauuccgcaacgucu

SEQ ID NO: 320350 - RNA, 20 nt, Human herpesvirus 5
cauucucgucugugucucac

SEQ ID NO: 320351 - RNA, 18 nt, Human herpesvirus 5
cauucugguaccugcuaa

SEQ ID NO: 320352 - RNA, 21 nt, Human herpesvirus 5
cauugagaaagcuaacauucc

SEQ ID NO: 320353 - RNA, 19 nt, Human herpesvirus 5
cauugcccuucuggagcac

SEQ ID NO: 320354 - RNA, 20 nt, Human herpesvirus 5
cauuuaucaauacaaugaca

SEQ ID NO: 320355 - RNA, 15 nt, Human herpesvirus 5
cauuugcuuuuacaa

SEQ ID NO: 320356 - RNA, 16 nt, Human herpesvirus 5
ccaaaaauccagacau

SEQ ID NO: 320357 - RNA, 21 nt, Human herpesvirus 5
ccaaaaucugacgcuguacaa

SEQ ID NO: 320358 - RNA, 13 nt, Human herpesvirus 5
ccaacaagcggga

SEQ ID NO: 320359 - RNA, 18 nt, Human herpesvirus 5
ccaacgagacuaucuaca

SEQ ID NO: 320360 - RNA, 19 nt, Human herpesvirus 5
ccaacugaaauacaugcua

SEQ ID NO: 320361 - RNA, 23 nt, Human herpesvirus 5
ccaacuucacuucaaacaucagc

SEQ ID NO: 320362 - RNA, 20 nt, Human herpesvirus 5
ccaaggaucgcgagccccau

SEQ ID NO: 320363 - RNA, 21 nt, Human herpesvirus 5
ccaaggcuagacgaaauucac

SEQ ID NO: 320364 - RNA, 20 nt, Human herpesvirus 5
ccaagugucucuaaacgcca

SEQ ID NO: 320365 - RNA, 13 nt, Human herpesvirus 5
ccaaguucagcag

SEQ ID NO: 320366 - RNA, 13 nt, Human herpesvirus 5
ccaauaacauguc

SEQ ID NO: 320367 - RNA, 15 nt, Human herpesvirus 5
ccaauacugcaucca

SEQ ID NO: 320368 - RNA, 20 nt, Human herpesvirus 5
ccaauacugcauccaucaca

SEQ ID NO: 320369 - RNA, 22 nt, Human herpesvirus 5
ccacaacauaugucaacaugaa

SEQ ID NO: 320370 - RNA, 21 nt, Human herpesvirus 5
ccacaagcgccgucacuuccc

SEQ ID NO: 320371 - RNA, 14 nt, Human herpesvirus 5
ccacaccuauaggc

SEQ ID NO: 320372 - RNA, 13 nt, Human herpesvirus 5
ccacaccugucac

SEQ ID NO: 320373 - RNA, 18 nt, Human herpesvirus 5
ccacacucgugacgucaa

SEQ ID NO: 320374 - RNA, 18 nt, Human herpesvirus 5
ccacagcgugacuuugag

SEQ ID NO: 320375 - RNA, 20 nt, Human herpesvirus 5
ccacagggagggaacguuac

SEQ ID NO: 320376 - RNA, 15 nt, Human herpesvirus 5
ccacauuuugcucuc

SEQ ID NO: 320377 - RNA, 21 nt, Human herpesvirus 5
ccaccaacugaaauacaugcu

SEQ ID NO: 320378 - RNA, 18 nt, Human herpesvirus 5
ccaccaagaaacaccggu

SEQ ID NO: 320379 - RNA, 17 nt, Human herpesvirus 5
ccaccacccgacugcag

SEQ ID NO: 320380 - RNA, 16 nt, Human herpesvirus 5
ccacccgagacuucuc

SEQ ID NO: 320381 - RNA, 21 nt, Human herpesvirus 5
ccacccugaguuccgucagca

SEQ ID NO: 320382 - RNA, 16 nt, Human herpesvirus 5
ccaccgagacgugcga

SEQ ID NO: 320383 - RNA, 14 nt, Human herpesvirus 5
ccaccguaccugca

SEQ ID NO: 320384 - RNA, 22 nt, Human herpesvirus 5
ccaccgucgccgucacugccac

SEQ ID NO: 320385 - RNA, 14 nt, Human herpesvirus 5
ccacgacacggugc

SEQ ID NO: 320386 - RNA, 19 nt, Human herpesvirus 5
ccacgaccaagugucucua

SEQ ID NO: 320387 - RNA, 19 nt, Human herpesvirus 5
ccacgacgcagaaagaggg

SEQ ID NO: 320388 - RNA, 16 nt, Human herpesvirus 5
ccacgagugacgacga

SEQ ID NO: 320389 - RNA, 23 nt, Human herpesvirus 5
ccacgagugacgacgacgcugcu

SEQ ID NO: 320390 - RNA, 20 nt, Human herpesvirus 5
ccacggaaguuccgacgcga

SEQ ID NO: 320391 - RNA, 20 nt, Human herpesvirus 5
ccacgguuugaccacacucg

SEQ ID NO: 320392 - RNA, 18 nt, Human herpesvirus 5
ccacgucaccgugcccca

SEQ ID NO: 320393 - RNA, 21 nt, Human herpesvirus 5
ccacgucgauucccaucucaa

SEQ ID NO: 320394 - RNA, 13 nt, Human herpesvirus 5
ccacuacuaccuc

SEQ ID NO: 320395 - RNA, 22 nt, Human herpesvirus 5
ccagacauccaauuacaccgau

SEQ ID NO: 320396 - RNA, 18 nt, Human herpesvirus 5
ccagagcgauauguuuca

SEQ ID NO: 320397 - RNA, 17 nt, Human herpesvirus 5
ccagaggcccgccgaga

SEQ ID NO: 320398 - RNA, 16 nt, Human herpesvirus 5
ccagaucacuaucuuc

SEQ ID NO: 320399 - RNA, 22 nt, Human herpesvirus 5
ccagcaaggucaacuacagcaa

SEQ ID NO: 320400 - RNA, 22 nt, Human herpesvirus 5
ccagccuguuuaaugacaagug

SEQ ID NO: 320401 - RNA, 17 nt, Human herpesvirus 5
ccagcuacagccacgac

SEQ ID NO: 320402 - RNA, 18 nt, Human herpesvirus 5
ccagcugccaccagggcg

SEQ ID NO: 320403 - RNA, 22 nt, Human herpesvirus 5
ccaggaggaaaaaaaaacuaga

SEQ ID NO: 320404 - RNA, 20 nt, Human herpesvirus 5
ccaggauuucaccgccgcua

SEQ ID NO: 320405 - RNA, 15 nt, Human herpesvirus 5
ccaguagacagacag

SEQ ID NO: 320406 - RNA, 17 nt, Human herpesvirus 5
ccaguucguagaucaca

SEQ ID NO: 320407 - RNA, 18 nt, Human herpesvirus 5
ccaguucguagaucacac

SEQ ID NO: 320408 - RNA, 17 nt, Human herpesvirus 5
ccauaaaucuacacuga

SEQ ID NO: 320409 - RNA, 16 nt, Human herpesvirus 5
ccauacuuuuacauga

SEQ ID NO: 320410 - RNA, 16 nt, Human herpesvirus 5
ccauauaaacgugggu

SEQ ID NO: 320411 - RNA, 15 nt, Human herpesvirus 5
ccaucaggugacauc

SEQ ID NO: 320412 - RNA, 22 nt, Human herpesvirus 5
ccaucgguacgaacgcuacuuc

SEQ ID NO: 320413 - RNA, 18 nt, Human herpesvirus 5
ccaucgucugcauguuca

SEQ ID NO: 320414 - RNA, 13 nt, Human herpesvirus 5
ccaucuucaucuu

SEQ ID NO: 320415 - RNA, 16 nt, Human herpesvirus 5
ccaucuucaucuuuca

SEQ ID NO: 320416 - RNA, 21 nt, Human herpesvirus 5
ccaugagucgccgacggucac

SEQ ID NO: 320417 - RNA, 15 nt, Human herpesvirus 5
ccaugcaacuucuuc

SEQ ID NO: 320418 - RNA, 23 nt, Human herpesvirus 5
ccaugcaacuucuucuacucaca

SEQ ID NO: 320419 - RNA, 21 nt, Human herpesvirus 5
ccauggaggccaacaucuucu

SEQ ID NO: 320420 - RNA, 23 nt, Human herpesvirus 5
ccaugggcuacguaggccuccuc

SEQ ID NO: 320421 - RNA, 12 nt, Human herpesvirus 5
ccaugugcagcu

SEQ ID NO: 320422 - RNA, 22 nt, Human herpesvirus 5
ccauugagaaagcuaacauucc

SEQ ID NO: 320423 - RNA, 19 nt, Human herpesvirus 5
ccauuggaaguaacaucau

SEQ ID NO: 320424 - RNA, 16 nt, Human herpesvirus 5
ccauuggcaacaucac

SEQ ID NO: 320425 - RNA, 18 nt, Human herpesvirus 5
cccaaguucagcagcauc

SEQ ID NO: 320426 - RNA, 22 nt, Human herpesvirus 5
cccaauuacucggugugcgacg

SEQ ID NO: 320427 - RNA, 23 nt, Human herpesvirus 5
cccacgacuguucgucgagcacc

SEQ ID NO: 320428 - RNA, 23 nt, Human herpesvirus 5
cccacgccgucgcuuaucuugca

SEQ ID NO: 320429 - RNA, 22 nt, Human herpesvirus 5
cccacgguccgggcacaaucaa

SEQ ID NO: 320430 - RNA, 16 nt, Human herpesvirus 5
cccacguccacccauc

SEQ ID NO: 320431 - RNA, 16 nt, Human herpesvirus 5
cccacuggaguugcuc

SEQ ID NO: 320432 - RNA, 20 nt, Human herpesvirus 5
cccagagcgauauguuucaa

SEQ ID NO: 320433 - RNA, 21 nt, Human herpesvirus 5
cccagcuggggaaguacaaua

SEQ ID NO: 320434 - RNA, 21 nt, Human herpesvirus 5
cccaggaugaagccaagcgua

SEQ ID NO: 320435 - RNA, 17 nt, Human herpesvirus 5
cccauaagcuguguacu

SEQ ID NO: 320436 - RNA, 19 nt, Human herpesvirus 5
cccauacuuuuacaugaac

SEQ ID NO: 320437 - RNA, 15 nt, Human herpesvirus 5
ccccaauuacucggu

SEQ ID NO: 320438 - RNA, 22 nt, Human herpesvirus 5
ccccacagcaugaacaccagau

SEQ ID NO: 320439 - RNA, 11 nt, Human herpesvirus 5
ccccaccuacg

SEQ ID NO: 320440 - RNA, 21 nt, Human herpesvirus 5
ccccaccuacgagcaggccau

SEQ ID NO: 320441 - RNA, 21 nt, Human herpesvirus 5
cccccgcugagcguuggcggc

SEQ ID NO: 320442 - RNA, 18 nt, Human herpesvirus 5
ccccgaauuugggcggug

SEQ ID NO: 320443 - RNA, 17 nt, Human herpesvirus 5
ccccgcuacagcaaaga

SEQ ID NO: 320444 - RNA, 20 nt, Human herpesvirus 5
ccccguugaaaacacgcuuu

SEQ ID NO: 320445 - RNA, 14 nt, Human herpesvirus 5
ccccuaguaauacc

SEQ ID NO: 320446 - RNA, 21 nt, Human herpesvirus 5
ccccuaucgcguguguucuau

SEQ ID NO: 320447 - RNA, 12 nt, Human herpesvirus 5
ccccuccuugau

SEQ ID NO: 320448 - RNA, 15 nt, Human herpesvirus 5
ccccugggaauucau

SEQ ID NO: 320449 - RNA, 19 nt, Human herpesvirus 5
cccgacacgucacuauccg

SEQ ID NO: 320450 - RNA, 13 nt, Human herpesvirus 5
cccgaccacgaca

SEQ ID NO: 320451 - RNA, 20 nt, Human herpesvirus 5
cccgagacggcggcauccuc

SEQ ID NO: 320452 - RNA, 23 nt, Human herpesvirus 5
cccgaggucuuuugcacgcgcga

SEQ ID NO: 320453 - RNA, 14 nt, Human herpesvirus 5
cccgcacacuggcu

SEQ ID NO: 320454 - RNA, 17 nt, Human herpesvirus 5
cccgcgacgugguuuca

SEQ ID NO: 320455 - RNA, 20 nt, Human herpesvirus 5
cccgcuucaacgccugcacc

SEQ ID NO: 320456 - RNA, 14 nt, Human herpesvirus 5
cccgucaugguaca

SEQ ID NO: 320457 - RNA, 23 nt, Human herpesvirus 5
cccgucggcugccuguuccugcu

SEQ ID NO: 320458 - RNA, 18 nt, Human herpesvirus 5
ggaucugcgaguggaauu

SEQ ID NO: 320459 - RNA, 20 nt, Human herpesvirus 5
ggauguauguaucgcauaaa

SEQ ID NO: 320460 - RNA, 19 nt, Human herpesvirus 5
ggcaacgauagucaucuca

SEQ ID NO: 320461 - RNA, 18 nt, Human herpesvirus 5
ggcaacucgagauggugu

SEQ ID NO: 320462 - RNA, 22 nt, Human herpesvirus 5
ggcaauugcaugucgcccagaa

SEQ ID NO: 320463 - RNA, 21 nt, Human herpesvirus 5
ggcacacgguccgugggagac

SEQ ID NO: 320464 - RNA, 17 nt, Human herpesvirus 5
ggcacauggccaaugca

SEQ ID NO: 320465 - RNA, 20 nt, Human herpesvirus 5
ggcacauggccaaugcauau

SEQ ID NO: 320466 - RNA, 16 nt, Human herpesvirus 5
ggcaccuaccaucuga

SEQ ID NO: 320467 - RNA, 19 nt, Human herpesvirus 5
ggcacggaccgcaacgugc

SEQ ID NO: 320468 - RNA, 19 nt, Human herpesvirus 5
ggcacugucguguuccaga

SEQ ID NO: 320469 - RNA, 22 nt, Human herpesvirus 5
ggcacuuuacauaaaaccaccg

SEQ ID NO: 320470 - RNA, 20 nt, Human herpesvirus 5
ggcagcacaccugccucgac

SEQ ID NO: 320471 - RNA, 16 nt, Human herpesvirus 5
ggcagcaccaugugca

SEQ ID NO: 320472 - RNA, 15 nt, Human herpesvirus 5
ggcauauagccaaua

SEQ ID NO: 320473 - RNA, 13 nt, Human herpesvirus 5
ggcauauugaaaa

SEQ ID NO: 320474 - RNA, 11 nt, Human herpesvirus 5
ggcaugcaaug

SEQ ID NO: 320475 - RNA, 14 nt, Human herpesvirus 5
ggcaugcaaugcaa

SEQ ID NO: 320476 - RNA, 22 nt, Human herpesvirus 5
ggcaugucccuacucaccaaag

SEQ ID NO: 320477 - RNA, 21 nt, Human herpesvirus 5
ggccaccaugcugagcaagua

SEQ ID NO: 320478 - RNA, 21 nt, Human herpesvirus 5
ggccaguauaaaauggucguu

SEQ ID NO: 320479 - RNA, 19 nt, Human herpesvirus 5
ggccauggagcugcacuca

SEQ ID NO: 320480 - RNA, 15 nt, Human herpesvirus 5
ggcccuggauacaag

SEQ ID NO: 320481 - RNA, 20 nt, Human herpesvirus 5
ggccgaccccgucacugucg

SEQ ID NO: 320482 - RNA, 12 nt, Human herpesvirus 5
ggccgacggcag

SEQ ID NO: 320483 - RNA, 22 nt, Human herpesvirus 5
ggccgcaacuucuaccaucucc

SEQ ID NO: 320484 - RNA, 13 nt, Human herpesvirus 5
ggccgcccaaaca

SEQ ID NO: 320485 - RNA, 18 nt, Human herpesvirus 5
ggccggacggcagcguca

SEQ ID NO: 320486 - RNA, 20 nt, Human herpesvirus 5
ggccggacggcagcgucaca

SEQ ID NO: 320487 - RNA, 18 nt, Human herpesvirus 5
ggccgucuccaccaauca

SEQ ID NO: 320488 - RNA, 20 nt, Human herpesvirus 5
ggcgacacucaguacuuugg

SEQ ID NO: 320489 - RNA, 13 nt, Human herpesvirus 5
ggcgaccgucucu

SEQ ID NO: 320490 - RNA, 12 nt, Human herpesvirus 5
ggcgagccacuc

SEQ ID NO: 320491 - RNA, 22 nt, Human herpesvirus 5
ggcgagcgaagguagaggaguc

SEQ ID NO: 320492 - RNA, 20 nt, Human herpesvirus 5
ggcgauagacgacuuuggug

SEQ ID NO: 320493 - RNA, 15 nt, Human herpesvirus 5
ggcgauagcgcuuau

SEQ ID NO: 320494 - RNA, 15 nt, Human herpesvirus 5
ggcgauauuggaaaa

SEQ ID NO: 320495 - RNA, 14 nt, Human herpesvirus 5
ggcgauucugugug

SEQ ID NO: 320496 - RNA, 14 nt, Human herpesvirus 5
ggcgcacuugucau

SEQ ID NO: 320497 - RNA, 19 nt, Human herpesvirus 5
ggcgcgaccuucccucucc

SEQ ID NO: 320498 - RNA, 15 nt, Human herpesvirus 5
ggcgcgggugguguu

SEQ ID NO: 320499 - RNA, 20 nt, Human herpesvirus 5
ggcggccgacggcagcgugc

SEQ ID NO: 320500 - RNA, 24 nt, Human herpesvirus 5
ggcgguggccgucuuggguagcuu

SEQ ID NO: 320501 - RNA, 21 nt, Human herpesvirus 5
ggcgguggcgucggugcgaug

SEQ ID NO: 320502 - RNA, 14 nt, Human herpesvirus 5
ggcgguggcugcgc

SEQ ID NO: 320503 - RNA, 10 nt, Human herpesvirus 5
ggcguaacaa

SEQ ID NO: 320504 - RNA, 22 nt, Human herpesvirus 5
ggcguagucggcuaacaaagcc

SEQ ID NO: 320505 - RNA, 15 nt, Human herpesvirus 5
ggcgucaccacuuug

SEQ ID NO: 320506 - RNA, 15 nt, Human herpesvirus 5
ggcgucggagaguau

SEQ ID NO: 320507 - RNA, 13 nt, Human herpesvirus 5
ggcgucuuccucc

SEQ ID NO: 320508 - RNA, 14 nt, Human herpesvirus 5
ggcgugaaugggca

SEQ ID NO: 320509 - RNA, 23 nt, Human herpesvirus 5
ggcuagagcgcgaguugcaaaag

SEQ ID NO: 320510 - RNA, 12 nt, Human herpesvirus 5
ggcuaucuguac

SEQ ID NO: 320511 - RNA, 17 nt, Human herpesvirus 5
ggcucaaacaccgcugc

SEQ ID NO: 320512 - RNA, 16 nt, Human herpesvirus 5
ggcucaaaguucaaag

SEQ ID NO: 320513 - RNA, 14 nt, Human herpesvirus 5
ggcucguguggcag

SEQ ID NO: 320514 - RNA, 13 nt, Human herpesvirus 5
ggcucuccuccuc

SEQ ID NO: 320515 - RNA, 21 nt, Human herpesvirus 5
ggcugcacacggagcacgggc

SEQ ID NO: 320516 - RNA, 13 nt, Human herpesvirus 5
ggcugcacguggc

SEQ ID NO: 320517 - RNA, 20 nt, Human herpesvirus 5
ggcugcgcccguuggugaau

SEQ ID NO: 320518 - RNA, 18 nt, Human herpesvirus 5
ggcuggcccucgcagugc

SEQ ID NO: 320519 - RNA, 15 nt, Human herpesvirus 5
ggcuucccucucuuu

SEQ ID NO: 320520 - RNA, 18 nt, Human herpesvirus 5
ggcuuugacggugaugcg

SEQ ID NO: 320521 - RNA, 19 nt, Human herpesvirus 5
ggcuuuuuugucccggggg

SEQ ID NO: 320522 - RNA, 13 nt, Human herpesvirus 5
gggaaaacauaag

SEQ ID NO: 320523 - RNA, 24 nt, Human herpesvirus 5
gggaacagacccgauacagucagc

SEQ ID NO: 320524 - RNA, 11 nt, Human herpesvirus 5
gggaagggugu

SEQ ID NO: 320525 - RNA, 19 nt, Human herpesvirus 5
gggaaguauacauuacuau

SEQ ID NO: 320526 - RNA, 24 nt, Human herpesvirus 5
gggaaugccagaguagauuuucau

SEQ ID NO: 320527 - RNA, 21 nt, Human herpesvirus 5
gggaauuccccugccuacguc

SEQ ID NO: 320528 - RNA, 18 nt, Human herpesvirus 5
gggauccgccgccauugc

SEQ ID NO: 320529 - RNA, 12 nt, Human herpesvirus 5
gggcacaaucaa

SEQ ID NO: 320530 - RNA, 13 nt, Human herpesvirus 5
gguuucgcuguag

SEQ ID NO: 320531 - RNA, 17 nt, Human herpesvirus 5
gguuuucggacagagca

SEQ ID NO: 320532 - RNA, 22 nt, Human herpesvirus 5
guaaaaaaagugcgucaaagcu

SEQ ID NO: 320533 - RNA, 13 nt, Human herpesvirus 5
guaaagcccgugg

SEQ ID NO: 320534 - RNA, 15 nt, Human herpesvirus 5
guaaaguagcuggug

SEQ ID NO: 320535 - RNA, 20 nt, Human herpesvirus 5
guaacaccgucaccacuccc

SEQ ID NO: 320536 - RNA, 13 nt, Human herpesvirus 5
guaacacuacagc

SEQ ID NO: 320537 - RNA, 14 nt, Human herpesvirus 5
guaacucacuguuu

SEQ ID NO: 320538 - RNA, 17 nt, Human herpesvirus 5
guaacucuaucuacugu

SEQ ID NO: 320539 - RNA, 14 nt, Human herpesvirus 5
guaauaucaucugc

SEQ ID NO: 320540 - RNA, 14 nt, Human herpesvirus 5
guaaucaccaaaga

SEQ ID NO: 320541 - RNA, 18 nt, Human herpesvirus 5
guaaugcgcaucuugccg

SEQ ID NO: 320542 - RNA, 15 nt, Human herpesvirus 5
guaaugcguacuuca

SEQ ID NO: 320543 - RNA, 12 nt, Human herpesvirus 5
guaauuauucca

SEQ ID NO: 320544 - RNA, 19 nt, Human herpesvirus 5
guacaaaacggacgggaaa

SEQ ID NO: 320545 - RNA, 21 nt, Human herpesvirus 5
guacacgcaggcaagccaaac

SEQ ID NO: 320546 - RNA, 17 nt, Human herpesvirus 5
guacacggggauuuucg

SEQ ID NO: 320547 - RNA, 23 nt, Human herpesvirus 5
guacagauccaguuucaccaagg

SEQ ID NO: 320548 - RNA, 22 nt, Human herpesvirus 5
guacauuaccuuucaucgugaa

SEQ ID NO: 320549 - RNA, 24 nt, Human herpesvirus 5
guaccccuggacgguacaguuuau

SEQ ID NO: 320550 - RNA, 22 nt, Human herpesvirus 5
guaccguccagggguacgcuau

SEQ ID NO: 320551 - RNA, 15 nt, Human herpesvirus 5
guaccuaaagccccc

SEQ ID NO: 320552 - RNA, 16 nt, Human herpesvirus 5
guaccuaaagccccca

SEQ ID NO: 320553 - RNA, 18 nt, Human herpesvirus 5
guacgaacgcuacuuccc

SEQ ID NO: 320554 - RNA, 17 nt, Human herpesvirus 5
guacgcagucacugcgu

SEQ ID NO: 320555 - RNA, 17 nt, Human herpesvirus 5
guacggacucuaacacc

SEQ ID NO: 320556 - RNA, 15 nt, Human herpesvirus 5
guacgggucuaccaa

SEQ ID NO: 320557 - RNA, 22 nt, Human herpesvirus 5
guacgucugcguguguguuucu

SEQ ID NO: 320558 - RNA, 21 nt, Human herpesvirus 5
guacuaccguuaacuauucca

SEQ ID NO: 320559 - RNA, 21 nt, Human herpesvirus 5
guacugagacagccacaucaa

SEQ ID NO: 320560 - RNA, 15 nt, Human herpesvirus 5
guacuucccaugcaa

SEQ ID NO: 320561 - RNA, 24 nt, Human herpesvirus 5
guagaucccggccuugcuguguau

SEQ ID NO: 320562 - RNA, 16 nt, Human herpesvirus 5
guagaugagcagcaaa

SEQ ID NO: 320563 - RNA, 13 nt, Human herpesvirus 5
guagcuagugcuc

SEQ ID NO: 320564 - RNA, 16 nt, Human herpesvirus 5
guaggugaguucaaug

SEQ ID NO: 320565 - RNA, 22 nt, Human herpesvirus 5
guaguaggcuacgguggcgcga

SEQ ID NO: 320566 - RNA, 18 nt, Human herpesvirus 5
guagugcggcgugcugca

SEQ ID NO: 320567 - RNA, 19 nt, Human herpesvirus 5
guauacuaaacucugugau

SEQ ID NO: 320568 - RNA, 18 nt, Human herpesvirus 5
guaucaguggcgcuuaua

SEQ ID NO: 320569 - RNA, 18 nt, Human herpesvirus 5
guauccauacuuaccacc

SEQ ID NO: 320570 - RNA, 20 nt, Human herpesvirus 5
guaucgacacuaauuuaucc

SEQ ID NO: 320571 - RNA, 16 nt, Human herpesvirus 5
guaucgcuuagugaau

SEQ ID NO: 320572 - RNA, 17 nt, Human herpesvirus 5
guaugaaagucccgugu

SEQ ID NO: 320573 - RNA, 20 nt, Human herpesvirus 5
guaugaugaaucaugugguc

SEQ ID NO: 320574 - RNA, 18 nt, Human herpesvirus 5
guaugccgauacacgggg

SEQ ID NO: 320575 - RNA, 16 nt, Human herpesvirus 5
guauggaggucacugu

SEQ ID NO: 320576 - RNA, 21 nt, Human herpesvirus 5
guaugugugaauggaaauaca

SEQ ID NO: 320577 - RNA, 14 nt, Human herpesvirus 5
guauuaacgugugg

SEQ ID NO: 320578 - RNA, 14 nt, Human herpesvirus 5
guauuauauacaaa

SEQ ID NO: 320579 - RNA, 16 nt, Human herpesvirus 5
guauuccgaaaccugu

SEQ ID NO: 320580 - RNA, 18 nt, Human herpesvirus 5
guauuccgaaaccuguau

SEQ ID NO: 320581 - RNA, 14 nt, Human herpesvirus 5
guauuggcauauag

SEQ ID NO: 320582 - RNA, 19 nt, Human herpesvirus 5
guauuggcauauagccaau

SEQ ID NO: 320583 - RNA, 18 nt, Human herpesvirus 5
guauuucuagagcacuga

SEQ ID NO: 320584 - RNA, 21 nt, Human herpesvirus 5
guauuuuugugcucaaguuca

SEQ ID NO: 320585 - RNA, 17 nt, Human herpesvirus 5
gucaaagccgacaaccu

SEQ ID NO: 320586 - RNA, 15 nt, Human herpesvirus 5
gucaacacuaccaag

SEQ ID NO: 320587 - RNA, 12 nt, Human herpesvirus 5
gucaacauguag

SEQ ID NO: 320588 - RNA, 22 nt, Human herpesvirus 5
gucaaccauuggcaacaucacc

SEQ ID NO: 320589 - RNA, 20 nt, Human herpesvirus 5
gucaaccugcugacuaucau

SEQ ID NO: 320590 - RNA, 22 nt, Human herpesvirus 5
gucaacgguggaauucgcuggg

SEQ ID NO: 320591 - RNA, 22 nt, Human herpesvirus 5
gucaaggcucgcaaagacgugc

SEQ ID NO: 320592 - RNA, 21 nt, Human herpesvirus 5
gucaagggucacggugccaug

SEQ ID NO: 320593 - RNA, 18 nt, Human herpesvirus 5
gucaauaaguaccucuaa

SEQ ID NO: 320594 - RNA, 22 nt, Human herpesvirus 5
gucaauaauggucaauaaccca

SEQ ID NO: 320595 - RNA, 15 nt, Human herpesvirus 5
gucacaccuaucaua

SEQ ID NO: 320596 - RNA, 22 nt, Human herpesvirus 5
gucacuauccgaugguuucauu

SEQ ID NO: 320597 - RNA, 21 nt, Human herpesvirus 5
gucacugccaccgacauggag

SEQ ID NO: 320598 - RNA, 19 nt, Human herpesvirus 5
gucagcgaacgacgcagug

SEQ ID NO: 320599 - RNA, 14 nt, Human herpesvirus 5
gucagcgugucuga

SEQ ID NO: 320600 - RNA, 13 nt, Human herpesvirus 5
gucagucagaagu

SEQ ID NO: 320601 - RNA, 13 nt, Human herpesvirus 5
gucagucuauucu

SEQ ID NO: 320602 - RNA, 13 nt, Human herpesvirus 5
gucauagagccaa

SEQ ID NO: 320603 - RNA, 14 nt, Human herpesvirus 5
gucauucguguuga

SEQ ID NO: 320604 - RNA, 15 nt, Human herpesvirus 5
guccaccucugcuac

SEQ ID NO: 320605 - RNA, 10 nt, Human herpesvirus 5
guccaggugg

SEQ ID NO: 320606 - RNA, 21 nt, Human herpesvirus 5
guccauagugcgccaagccau

SEQ ID NO: 320607 - RNA, 23 nt, Human herpesvirus 5
guccauauguugucaggacgugc

SEQ ID NO: 320608 - RNA, 13 nt, Human herpesvirus 5
gucccgcuuuucu

SEQ ID NO: 320609 - RNA, 16 nt, Human herpesvirus 5
gucccuuuuacuagua

SEQ ID NO: 320610 - RNA, 19 nt, Human herpesvirus 5
guccgacggcguuuuggcg

SEQ ID NO: 320611 - RNA, 15 nt, Human herpesvirus 5
guccgcggugucucc

SEQ ID NO: 320612 - RNA, 13 nt, Human herpesvirus 5
guccuacaaagga

SEQ ID NO: 320613 - RNA, 21 nt, Human herpesvirus 5
guccuccagcagcagcuggug

SEQ ID NO: 320614 - RNA, 18 nt, Human herpesvirus 5
gucgaaccaaccaaaaaa

SEQ ID NO: 320615 - RNA, 14 nt, Human herpesvirus 5
gucgacgacgccgu

SEQ ID NO: 320616 - RNA, 20 nt, Human herpesvirus 5
gucgacgggugguaccugca

SEQ ID NO: 320617 - RNA, 14 nt, Human herpesvirus 5
gucgaucagguacu

SEQ ID NO: 320618 - RNA, 11 nt, Human herpesvirus 5
gucgaugcuga

SEQ ID NO: 320619 - RNA, 16 nt, Human herpesvirus 5
gucgauucccaucuca

SEQ ID NO: 320620 - RNA, 18 nt, Human herpesvirus 5
gucgccaguccauggucu

SEQ ID NO: 320621 - RNA, 12 nt, Human herpesvirus 5
gucgcgaucucc

SEQ ID NO: 320622 - RNA, 18 nt, Human herpesvirus 5
gucgcucuuggagcgcga

SEQ ID NO: 320623 - RNA, 20 nt, Human herpesvirus 5
gucgcuguuuuuguucacaa

SEQ ID NO: 320624 - RNA, 13 nt, Human herpesvirus 5
gucgcuuagccac

SEQ ID NO: 320625 - RNA, 15 nt, Human herpesvirus 5
gucgcuuaucuugca

SEQ ID NO: 320626 - RNA, 15 nt, Human herpesvirus 5
gucggggcugugucg

SEQ ID NO: 320627 - RNA, 12 nt, Human herpesvirus 5
gucggugcgaug

SEQ ID NO: 320628 - RNA, 15 nt, Human herpesvirus 5
gucguaguuguugca

SEQ ID NO: 320629 - RNA, 23 nt, Human herpesvirus 5
gucguccgguaaaggaacaaccc

SEQ ID NO: 320630 - RNA, 20 nt, Human herpesvirus 5
gucgucgacgcaucugucau

SEQ ID NO: 320631 - RNA, 19 nt, Human herpesvirus 5
gucguggcucagcuugaug

SEQ ID NO: 320632 - RNA, 16 nt, Human herpesvirus 5
gucgugugugcucucu

SEQ ID NO: 320633 - RNA, 13 nt, Human herpesvirus 5
gucuaaugugcug

SEQ ID NO: 320634 - RNA, 19 nt, Human herpesvirus 5
gucuaucgucgccacacgu

SEQ ID NO: 320635 - RNA, 19 nt, Human herpesvirus 5
gucuauuaucaucaaucac

SEQ ID NO: 320636 - RNA, 20 nt, Human herpesvirus 5
gucuauuaucaucaaucacc

SEQ ID NO: 320637 - RNA, 16 nt, Human herpesvirus 5
gucucgucgacgucau

SEQ ID NO: 320638 - RNA, 15 nt, Human herpesvirus 5
gucucuaccaacgcu

SEQ ID NO: 320639 - RNA, 17 nt, Human herpesvirus 5
gucucuacggcacuguc

SEQ ID NO: 320640 - RNA, 23 nt, Human herpesvirus 5
gucucuguuuuuuuuuguuaaca

SEQ ID NO: 320641 - RNA, 22 nt, Human herpesvirus 5
gucugccuccuaguaaugcauu

SEQ ID NO: 320642 - RNA, 14 nt, Human herpesvirus 5
gucugcgacuccug

SEQ ID NO: 320643 - RNA, 12 nt, Human herpesvirus 5
gucugcuugcug

SEQ ID NO: 320644 - RNA, 21 nt, Human herpesvirus 5
gucuggcuugggucgacuguu

SEQ ID NO: 320645 - RNA, 18 nt, Human herpesvirus 5
gucugugaucugcacgua

SEQ ID NO: 320646 - RNA, 12 nt, Human herpesvirus 5
gucuuucacauc

SEQ ID NO: 320647 - RNA, 11 nt, Human herpesvirus 5
cccgugggugu

SEQ ID NO: 320648 - RNA, 16 nt, Human herpesvirus 5
cccuaaagcucgccaa

SEQ ID NO: 320649 - RNA, 15 nt, Human herpesvirus 5
cccuaguaauaccac

SEQ ID NO: 320650 - RNA, 14 nt, Human herpesvirus 5
cccucauauacggu

SEQ ID NO: 320651 - RNA, 18 nt, Human herpesvirus 5
cccucuucuuugccggcu

SEQ ID NO: 320652 - RNA, 21 nt, Human herpesvirus 5
cccugccuacgucuucaugac

SEQ ID NO: 320653 - RNA, 22 nt, Human herpesvirus 5
cccuggggcugcugcugcacgg

SEQ ID NO: 320654 - RNA, 22 nt, Human herpesvirus 5
cccuuaccuaucaucacacuaa

SEQ ID NO: 320655 - RNA, 14 nt, Human herpesvirus 5
cccuuguaagacag

SEQ ID NO: 320656 - RNA, 14 nt, Human herpesvirus 5
cccuuuuacuagua

SEQ ID NO: 320657 - RNA, 13 nt, Human herpesvirus 5
ccgaaaccuguau

SEQ ID NO: 320658 - RNA, 12 nt, Human herpesvirus 5
ccgaacgcugcu

SEQ ID NO: 320659 - RNA, 18 nt, Human herpesvirus 5
ccgaagccuggggcaccu

SEQ ID NO: 320660 - RNA, 15 nt, Human herpesvirus 5
ccgaauaacaacaca

SEQ ID NO: 320661 - RNA, 13 nt, Human herpesvirus 5
ccgacaaccugcu

SEQ ID NO: 320662 - RNA, 14 nt, Human herpesvirus 5
ccgacaaccugcug

SEQ ID NO: 320663 - RNA, 19 nt, Human herpesvirus 5
ccgacaaccugcugcacuu

SEQ ID NO: 320664 - RNA, 20 nt, Human herpesvirus 5
ccgacgagacaacaaugaca

SEQ ID NO: 320665 - RNA, 17 nt, Human herpesvirus 5
ccgacgcgcgaccgcga

SEQ ID NO: 320666 - RNA, 20 nt, Human herpesvirus 5
ccgagacgugcgaccuggac

SEQ ID NO: 320667 - RNA, 20 nt, Human herpesvirus 5
ccgagcacuccacacgccau

SEQ ID NO: 320668 - RNA, 19 nt, Human herpesvirus 5
ccgagcccccgucgcccga

SEQ ID NO: 320669 - RNA, 18 nt, Human herpesvirus 5
ccgagcugaaggacacgg

SEQ ID NO: 320670 - RNA, 13 nt, Human herpesvirus 5
ccgagcuguguuu

SEQ ID NO: 320671 - RNA, 14 nt, Human herpesvirus 5
ccgagcuugugcuu

SEQ ID NO: 320672 - RNA, 17 nt, Human herpesvirus 5
ccgaggcacgucggggc

SEQ ID NO: 320673 - RNA, 18 nt, Human herpesvirus 5
ccgaguccuggucuuuca

SEQ ID NO: 320674 - RNA, 14 nt, Human herpesvirus 5
ccgaucaugugcuu

SEQ ID NO: 320675 - RNA, 14 nt, Human herpesvirus 5
ccgaugguccguca

SEQ ID NO: 320676 - RNA, 22 nt, Human herpesvirus 5
ccgauguggaacuguugcgaca

SEQ ID NO: 320677 - RNA, 15 nt, Human herpesvirus 5
ccgcaacgugcugcu

SEQ ID NO: 320678 - RNA, 17 nt, Human herpesvirus 5
ccgcaacgugcugcuga

SEQ ID NO: 320679 - RNA, 13 nt, Human herpesvirus 5
ccgcaaugggcuu

SEQ ID NO: 320680 - RNA, 21 nt, Human herpesvirus 5
ccgcagcgaguugcugugcac

SEQ ID NO: 320681 - RNA, 16 nt, Human herpesvirus 5
ccgcaguuacaccaca

SEQ ID NO: 320682 - RNA, 22 nt, Human herpesvirus 5
ccgccaacagcaccgccggcua

SEQ ID NO: 320683 - RNA, 22 nt, Human herpesvirus 5
ccgcccgacaaguucgaucuca

SEQ ID NO: 320684 - RNA, 12 nt, Human herpesvirus 5
ccgccgcuuucu

SEQ ID NO: 320685 - RNA, 18 nt, Human herpesvirus 5
ccgccucggaucuacuca

SEQ ID NO: 320686 - RNA, 20 nt, Human herpesvirus 5
ccgcgacaacggccgccgca

SEQ ID NO: 320687 - RNA, 13 nt, Human herpesvirus 5
ccgcggaaacgac

SEQ ID NO: 320688 - RNA, 21 nt, Human herpesvirus 5
ccgcgguggucgaugcugauc

SEQ ID NO: 320689 - RNA, 12 nt, Human herpesvirus 5
ccgcguuaucag

SEQ ID NO: 320690 - RNA, 19 nt, Human herpesvirus 5
ccgcuaccgucgcuacauu

SEQ ID NO: 320691 - RNA, 21 nt, Human herpesvirus 5
ccggagcuacgcgaccagcug

SEQ ID NO: 320692 - RNA, 15 nt, Human herpesvirus 5
ccggauggagucgga

SEQ ID NO: 320693 - RNA, 22 nt, Human herpesvirus 5
ccggccgcggugccggcggcua

SEQ ID NO: 320694 - RNA, 13 nt, Human herpesvirus 5
ccggcggagacga

SEQ ID NO: 320695 - RNA, 16 nt, Human herpesvirus 5
ccggcggccguugccg

SEQ ID NO: 320696 - RNA, 13 nt, Human herpesvirus 5
ccggcggcugcug

SEQ ID NO: 320697 - RNA, 20 nt, Human herpesvirus 5
ccgggcgccgggacucuggu

SEQ ID NO: 320698 - RNA, 18 nt, Human herpesvirus 5
ccgggggugacaaggaag

SEQ ID NO: 320699 - RNA, 17 nt, Human herpesvirus 5
ccgggugcgcgacacgg

SEQ ID NO: 320700 - RNA, 20 nt, Human herpesvirus 5
ccgguauucggaaacagcgu

SEQ ID NO: 320701 - RNA, 16 nt, Human herpesvirus 5
ccggugcgcgaccgca

SEQ ID NO: 320702 - RNA, 18 nt, Human herpesvirus 5
ccguaaagagagucacac

SEQ ID NO: 320703 - RNA, 19 nt, Human herpesvirus 5
ccguauauucuacauucaa

SEQ ID NO: 320704 - RNA, 13 nt, Human herpesvirus 5
ccgucaaaacaca

SEQ ID NO: 320705 - RNA, 22 nt, Human herpesvirus 5
ccgucacuaaggaccgacacgg

SEQ ID NO: 320706 - RNA, 21 nt, Human herpesvirus 5
ccgucacugccaccgacaugg

SEQ ID NO: 320707 - RNA, 19 nt, Human herpesvirus 5
ccgucaugaccgcaaugau

SEQ ID NO: 320708 - RNA, 16 nt, Human herpesvirus 5
ccguccccacguccac

SEQ ID NO: 320709 - RNA, 19 nt, Human herpesvirus 5
ccgucccguuacgccggag

SEQ ID NO: 320710 - RNA, 21 nt, Human herpesvirus 5
ccguccggcgcaacuucuguc

SEQ ID NO: 320711 - RNA, 12 nt, Human herpesvirus 5
ccgucgccgcga

SEQ ID NO: 320712 - RNA, 22 nt, Human herpesvirus 5
ccgucggaaacccgacgagaca

SEQ ID NO: 320713 - RNA, 14 nt, Human herpesvirus 5
ccgucuccaccaca

SEQ ID NO: 320714 - RNA, 15 nt, Human herpesvirus 5
ccgucuccaccacag

SEQ ID NO: 320715 - RNA, 19 nt, Human herpesvirus 5
ccgugacacuuuggcucuu

SEQ ID NO: 320716 - RNA, 13 nt, Human herpesvirus 5
ccgugauagccac

SEQ ID NO: 320717 - RNA, 19 nt, Human herpesvirus 5
ccgugccccacucgcucgc

SEQ ID NO: 320718 - RNA, 22 nt, Human herpesvirus 5
ccgugcgguucucaaaaacugu

SEQ ID NO: 320719 - RNA, 16 nt, Human herpesvirus 5
ccguuaacuauuccac

SEQ ID NO: 320720 - RNA, 18 nt, Human herpesvirus 5
ccguuaccaguaccaccg

SEQ ID NO: 320721 - RNA, 17 nt, Human herpesvirus 5
ccguuguggggauuuuu

SEQ ID NO: 320722 - RNA, 14 nt, Human herpesvirus 5
ccuaacgucacuuc

SEQ ID NO: 320723 - RNA, 17 nt, Human herpesvirus 5
ccuacagcgacucucaa

SEQ ID NO: 320724 - RNA, 15 nt, Human herpesvirus 5
ccuacgacaacaucc

SEQ ID NO: 320725 - RNA, 15 nt, Human herpesvirus 5
ccuagcacgucagug

SEQ ID NO: 320726 - RNA, 18 nt, Human herpesvirus 5
ccuagcgaucgcaugcuu

SEQ ID NO: 320727 - RNA, 15 nt, Human herpesvirus 5
ccuaguaaugcauua

SEQ ID NO: 320728 - RNA, 15 nt, Human herpesvirus 5
ccuauagacucuaua

SEQ ID NO: 320729 - RNA, 18 nt, Human herpesvirus 5
ccuauagacucuauaggc

SEQ ID NO: 320730 - RNA, 14 nt, Human herpesvirus 5
ccuaucaaugaaga

SEQ ID NO: 320731 - RNA, 13 nt, Human herpesvirus 5
ccuaucaucacac

SEQ ID NO: 320732 - RNA, 18 nt, Human herpesvirus 5
ccuaucuccgacagcgcg

SEQ ID NO: 320733 - RNA, 17 nt, Human herpesvirus 5
ccuauugggaagggugu

SEQ ID NO: 320734 - RNA, 17 nt, Human herpesvirus 5
ccucaaaacaucaccac

SEQ ID NO: 320735 - RNA, 22 nt, Human herpesvirus 5
ccucaaaacaucaccaccauca

SEQ ID NO: 320736 - RNA, 13 nt, Human herpesvirus 5
ccucaccaucuca

SEQ ID NO: 320737 - RNA, 21 nt, Human herpesvirus 5
ccucacgagugcccuuaccua

SEQ ID NO: 320738 - RNA, 21 nt, Human herpesvirus 5
ccucagcgugcucagcuggug

SEQ ID NO: 320739 - RNA, 18 nt, Human herpesvirus 5
ccucagggaugaugauaa

SEQ ID NO: 320740 - RNA, 20 nt, Human herpesvirus 5
ccucagucugccuccuagua

SEQ ID NO: 320741 - RNA, 19 nt, Human herpesvirus 5
ccucauguguauggcccug

SEQ ID NO: 320742 - RNA, 23 nt, Human herpesvirus 5
ccucccuaacuaucuacaacuua

SEQ ID NO: 320743 - RNA, 14 nt, Human herpesvirus 5
ccucccuccgcggc

SEQ ID NO: 320744 - RNA, 15 nt, Human herpesvirus 5
ccuccgacccgaaga
